United States Patent Application Publication US 2022/0267394 A1 - sequence listing, part 3

SEQ ID NO: 17232 - protein, 33 aa, Artificial Sequence
  GFR-binding peptide
  MOD_RES (33), (33): Xaa is C or S
  MOD_RES (11), (12), (13), (14), (15): Xaa is A or G
  MOD_RES (16), (17), (18), (19): Xaa is A or G or is absent
NHQLFSMEGIXXXXXXXXXMIQMTINSEETPVX

SEQ ID NO: 17233 - protein, 41 aa, Artificial Sequence
  GFR-binding peptide
  MOD_RES (2), (39): Xaa is C or S
KXALHDELTVQVEKFIPKKRVIEVKAVKVSRLQVQTPRXQV

SEQ ID NO: 17234 - protein, 34 aa, Artificial Sequence
  GFR-binding peptide
  MOD_RES (33), (33): Xaa is C or S
  MOD_RES (11), (12), (13), (14), (15): Xaa is A or G
  MOD_RES (16), (17), (18), (19): Xaa is A or G or is absent
SHEELVQVEKXXXXXXXXXVKAMKVSRQGTPVXE

SEQ ID NO: 17235 - protein, 36 aa, Artificial Sequence
  GFR-binding peptide
  MOD_RES (2), (36): Xaa is C or S
  MOD_RES (14), (15), (16), (17), (18): Xaa is A or G
  MOD_RES (19), (20), (21), (22): Xaa is A or G or is absent
EXQSHEELSMEGLXXXXXXXXXMIQMTINSQGTPVX

SEQ ID NO: 17236 - protein, 36 aa, Artificial Sequence
  GFR-binding peptide
  MOD_RES (13), (14), (15), (16), (17): Xaa is A or G
  MOD_RES (18), (19), (20), (21): Xaa is A or G or is absent
ELHEELRSMEGIXXXXXXXXXMIQVTINSHHVRSPQ

SEQ ID NO: 17237 - protein, 40 aa, Artificial Sequence
  GFR-binding peptide
  MOD_RES (36), (36): Xaa is C or S
LHDELTVTAKKFIPKKRVIEIKRVQVPRLQVQTPRXQVNR

SEQ ID NO: 17238 - protein, 40 aa, Artificial Sequence
  GFR-binding peptide
  MOD_RES (2), (36): Xaa is C or S
EXQSHEELVTAKKHQGQHPKIRIKRMQVPRQGTPVXELGE

SEQ ID NO: 17239 - protein, 42 aa, Artificial Sequence
  GFR-binding peptide
  MOD_RES (1), (3), (40): Xaa is C or S
XKXALHDELTSMEGIFIPKKRVIEMIQVTINSLQVQTPRXQV

SEQ ID NO: 17240 - protein, 40 aa, Artificial Sequence
  GFR-binding peptide
  MOD_RES (2), (4): Xaa is C or S
EXKXALHDELTSMEGLFIPKKRVIEMIQVTINSLQVQTPR

SEQ ID NO: 17241 - protein, 39 aa, Artificial Sequence
  GFR-binding peptide
  MOD_RES (34), (34): Xaa is C or S
  MOD_RES (12), (13), (14), (15), (16): Xaa is A or G
  MOD_RES (17), (18), (19), (20): Xaa is A or G or is absent
KNHQLFVQVEKXXXXXXXXXVKAMKVSREETPVXELGED

SEQ ID NO: 17242 - protein, 37 aa, Artificial Sequence
  GFR-binding peptide
  MOD_RES (1), (35): Xaa is C or S
  MOD_RES (13), (14), (15), (16), (17): Xaa is A or G
  MOD_RES (18), (19), (20), (21): Xaa is A or G or is absent
XKNHQLFVQVEKXXXXXXXXXVKAMKVSREETPVXEL

SEQ ID NO: 17243 - protein, 39 aa, Artificial Sequence
  GFR-binding peptide
  MOD_RES (37), (37): Xaa is C or S
  MOD_RES (13), (14), (15), (16), (17): Xaa is A or G
  MOD_RES (18), (19), (20), (21): Xaa is A or G or is absent
ELHEELRSMEGIXXXXXXXXXMIQVTINSHHVRSPQXKV

SEQ ID NO: 17244 - protein, 34 aa, Artificial Sequence
  GFR-binding peptide
  MOD_RES (1), (1): Xaa is C or S
  MOD_RES (13), (14), (15), (16), (17): Xaa is A or G
  MOD_RES (18), (19), (20), (21): Xaa is A or G or is absent
XQSHEELVQVEKXXXXXXXXXVKAMKVSRQGTPV

SEQ ID NO: 17245 - protein, 39 aa, Artificial Sequence
  GFR-binding peptide
  MOD_RES (1), (35): Xaa is C or S
XQSHEELVTAKKHQGQHPKIRIKRMQVPRQGTPVXELGE

SEQ ID NO: 17246 - protein, 39 aa, Artificial Sequence
  GFR-binding peptide
  MOD_RES (36), (36): Xaa is C or S
LHDELTVQVEKFIPKKRVIEVKAVKVSRLQVQTPRXQVN

SEQ ID NO: 17247 - protein, 34 aa, Artificial Sequence
  GFR-binding peptide
  MOD_RES (33), (33): Xaa is C or S
  MOD_RES (11), (12), (13), (14), (15): Xaa is A or G
  MOD_RES (16), (17), (18), (19): Xaa is A or G or is absent
SHEELSMEGIXXXXXXXXXMIQMTINSQGTPVXE

SEQ ID NO: 17248 - protein, 37 aa, Artificial Sequence
  GFR-binding peptide
  MOD_RES (2), (36): Xaa is C or S
EXKNHQLFVQVEKHQGQHPKIRVKAMKVSREETPVXE

SEQ ID NO: 17249 - protein, 42 aa, Artificial Sequence
  GFR-binding peptide
  MOD_RES (1), (3), (40): Xaa is C or S
  MOD_RES (16), (17), (18), (19), (20): Xaa is A or G
  MOD_RES (21), (22), (23), (24): Xaa is A or G or is absent
XAXELHEELRSMEGLXXXXXXXXXMIQVTINSHHVRSPQXKV

SEQ ID NO: 17250 - protein, 39 aa, Artificial Sequence
  GFR-binding peptide
  MOD_RES (1), (3), (37): Xaa is C or S
  MOD_RES (15), (16), (17), (18), (19): Xaa is A or G
  MOD_RES (20), (21), (22), (23): Xaa is A or G or is absent
XEXQSHEELSMEGIXXXXXXXXXMIQMTINSQGTPVXEL

SEQ ID NO: 17251 - protein, 37 aa, Artificial Sequence
  GFR-binding peptide
  MOD_RES (2), (36): Xaa is C or S
  MOD_RES (14), (15), (16), (17), (18): Xaa is A or G
  MOD_RES (19), (20), (21), (22): Xaa is A or G or is absent
EXKNHQLFVQVEKXXXXXXXXXVKAMKVSREETPVXE

SEQ ID NO: 17252 - protein, 35 aa, Artificial Sequence
  GFR-binding peptide
  MOD_RES (33), (33): Xaa is C or S
SHEELSMEGIHQGQHPKIRMIQMTINSQGTPVXEL

SEQ ID NO: 17253 - protein, 35 aa, Artificial Sequence
  GFR-binding peptide
  MOD_RES (33), (33): Xaa is C or S
  MOD_RES (11), (12), (13), (14), (15): Xaa is A or G
  MOD_RES (16), (17), (18), (19): Xaa is A or G or is absent
SHEELSMEGLXXXXXXXXXMIQMTINSQGTPVXEL

SEQ ID NO: 17254 - protein, 37 aa, Artificial Sequence
  GFR-binding peptide
  MOD_RES (1), (3), (37): Xaa is C or S
XEXKNHQLFSMEGLHQGQHPKIRMIQMTINSEETPVX

SEQ ID NO: 17255 - protein, 39 aa, Artificial Sequence
  GFR-binding peptide
  MOD_RES (33), (33): Xaa is C or S
  MOD_RES (11), (12), (13), (14), (15): Xaa is A or G
  MOD_RES (16), (17), (18), (19): Xaa is A or G or is absent
SHEELVQVEKXXXXXXXXXVKAMKVSRQGTPVXELGEDN

SEQ ID NO: 17256 - protein, 40 aa, Artificial Sequence
  GFR-binding peptide
  MOD_RES (34), (34): Xaa is C or S
  MOD_RES (12), (13), (14), (15), (16): Xaa is A or G
  MOD_RES (17), (18), (19), (20): Xaa is A or G or is absent
KNHQLFVQVEKXXXXXXXXXVKAMKVSREETPVXELGEDN

SEQ ID NO: 17257 - protein, 34 aa, Artificial Sequence
  GFR-binding peptide
LHDELTSMEGIFIPKKRVIEMIQVTINSLQVQTP

SEQ ID NO: 17258 - protein, 37 aa, Artificial Sequence
  GFR-binding peptide
  MOD_RES (1), (35): Xaa is C or S
  MOD_RES (13), (14), (15), (16), (17): Xaa is A or G
  MOD_RES (18), (19), (20), (21): Xaa is A or G or is absent
XQSHEELSMEGIXXXXXXXXXMIQMTINSQGTPVXEL

SEQ ID NO: 17259 - protein, 39 aa, Artificial Sequence
  GFR-binding peptide
  MOD_RES (37), (37): Xaa is C or S
ALHDELTVTAKKFIPKKRVIEIKRVQVPRLQVQTPRXQV

SEQ ID NO: 17260 - protein, 40 aa, Artificial Sequence
  GFR-binding peptide
  MOD_RES (37), (37): Xaa is C or S
ELHEELRVTAKKLKPKKRVYEIKRVQVPRHHVRSPQXKVS

SEQ ID NO: 17261 - protein, 34 aa, Artificial Sequence
  GFR-binding peptide
  MOD_RES (34), (34): Xaa is C or S
  MOD_RES (12), (13), (14), (15), (16): Xaa is A or G
  MOD_RES (17), (18), (19), (20): Xaa is A or G or is absent
QSHEELVTAKKXXXXXXXXXIKRMQVPRQGTPVX

SEQ ID NO: 17262 - protein, 39 aa, Artificial Sequence
  GFR-binding peptide
  MOD_RES (2), (39): Xaa is C or S
  MOD_RES (15), (16), (17), (18), (19): Xaa is A or G
  MOD_RES (20), (21), (22), (23): Xaa is A or G or is absent
KXALHDELTSMEGLXXXXXXXXXMIQVTINSLQVQTPRX

SEQ ID NO: 17263 - protein, 40 aa, Artificial Sequence
  GFR-binding peptide
  MOD_RES (37), (37): Xaa is C or S
ELHEELRSMEGLLKPKKRVYEMIQVTINSHHVRSPQXKVS

SEQ ID NO: 17264 - protein, 37 aa, Artificial Sequence
  GFR-binding peptide
  MOD_RES (1), (3): Xaa is C or S
  MOD_RES (16), (17), (18), (19), (20): Xaa is A or G
  MOD_RES (21), (22), (23), (24): Xaa is A or G or is absent
XKXALHDELTSMEGLXXXXXXXXXMIQVTINSLQVQT

SEQ ID NO: 17265 - protein, 35 aa, Artificial Sequence
  GFR-binding peptide
  MOD_RES (2), (2): Xaa is C or S
EXQSHEELSMEGIHQGQHPKIRMIQMTINSQGTPV

SEQ ID NO: 17266 - protein, 40 aa, Artificial Sequence
  GFR-binding peptide
  MOD_RES (1), (38): Xaa is C or S
  MOD_RES (14), (15), (16), (17), (18): Xaa is A or G
  MOD_RES (19), (20), (21), (22): Xaa is A or G or is absent
XALHDELTSMEGLXXXXXXXXXMIQVTINSLQVQTPRXQV

SEQ ID NO: 17267 - protein, 34 aa, Artificial Sequence
  GFR-binding peptide
  MOD_RES (13), (14), (15), (16), (17): Xaa is A or G
  MOD_RES (18), (19), (20), (21): Xaa is A or G or is absent
ELHEELRVTAKKXXXXXXXXXIKRVQVPRHHVRS

SEQ ID NO: 17268 - protein, 39 aa, Artificial Sequence
  GFR-binding peptide
  MOD_RES (1), (3), (37): Xaa is C or S
  MOD_RES (15), (16), (17), (18), (19): Xaa is A or G
  MOD_RES (20), (21), (22), (23): Xaa is A or G or is absent
XEXKNHQLFVQVEKXXXXXXXXXVKAMKVSREETPVXEL

SEQ ID NO: 17269 - protein, 43 aa, Artificial Sequence
  GFR-binding peptide
  MOD_RES (2), (4), (41): Xaa is C or S
  MOD_RES (17), (18), (19), (20), (21): Xaa is A or G
  MOD_RES (22), (23), (24), (25): Xaa is A or G or is absent
AXAXELHEELRSMEGLXXXXXXXXXMIQVTINSHHVRSPQXKV

SEQ ID NO: 17270 - protein, 41 aa, Artificial Sequence
  GFR-binding peptide
  MOD_RES (1), (3), (37): Xaa is C or S
  MOD_RES (15), (16), (17), (18), (19): Xaa is A or G
  MOD_RES (20), (21), (22), (23): Xaa is A or G or is absent
XEXQSHEELSMEGLXXXXXXXXXMIQMTINSQGTPVXELGE

SEQ ID NO: 17271 - protein, 32 aa, Artificial Sequence
  GFR-binding peptide
NHQLFSMEGIHQGQHPKIRMIQMTINSEETPV

SEQ ID NO: 17272 - protein, 35 aa, Artificial Sequence
  GFR-binding peptide
  MOD_RES (35), (35): Xaa is C or S
  MOD_RES (11), (12), (13), (14), (15): Xaa is A or G
  MOD_RES (16), (17), (18), (19): Xaa is A or G or is absent
HDELTVQVEKXXXXXXXXXVKAVKVSRLQVQTPRX

SEQ ID NO: 17273 - protein, 38 aa, Artificial Sequence
  GFR-binding peptide
  MOD_RES (2), (4): Xaa is C or S
AXAXELHEELRSMEGILKPKKRVYEMIQVTINSHHVRS

SEQ ID NO: 17274 - protein, 35 aa, Artificial Sequence
  GFR-binding peptide
  MOD_RES (34), (34): Xaa is C or S
  MOD_RES (12), (13), (14), (15), (16): Xaa is A or G
  MOD_RES (17), (18), (19), (20): Xaa is A or G or is absent
KNHQLFSMEGLXXXXXXXXXMIQMTINSEETPVXE

SEQ ID NO: 17275 - protein, 37 aa, Artificial Sequence
  GFR-binding peptide
  MOD_RES (1), (3), (37): Xaa is C or S
  MOD_RES (15), (16), (17), (18), (19): Xaa is A or G
  MOD_RES (20), (21), (22), (23): Xaa is A or G or is absent
XEXQSHEELVQVEKXXXXXXXXXVKAMKVSRQGTPVX

SEQ ID NO: 17276 - protein, 42 aa, Artificial Sequence
  GFR-binding peptide
  MOD_RES (2), (4), (38): Xaa is C or S
RXEXQSHEELVTAKKHQGQHPKIRIKRMQVPRQGTPVXELGE

SEQ ID NO: 17277 - protein, 41 aa, Artificial Sequence
  GFR-binding peptide
  MOD_RES (1), (3), (40): Xaa is C or S
  MOD_RES (16), (17), (18), (19), (20): Xaa is A or G
  MOD_RES (21), (22), (23), (24): Xaa is A or G or is absent
XKXALHDELTVQVEKXXXXXXXXXVKAVKVSRLQVQTPRXQ

SEQ ID NO: 17278 - protein, 38 aa, Artificial Sequence
  GFR-binding peptide
  MOD_RES (2), (2): Xaa is C or S
  MOD_RES (15), (16), (17), (18), (19): Xaa is A or G
  MOD_RES (20), (21), (22), (23): Xaa is A or G or is absent
AXELHEELRSMEGIXXXXXXXXXMIQVTINSHHVRSPQ

SEQ ID NO: 17279 - protein, 38 aa, Artificial Sequence
  GFR-binding peptide
  MOD_RES (33), (33): Xaa is C or S
SHEELSMEGLHQGQHPKIRMIQMTINSQGTPVXELGED

SEQ ID NO: 17280 - protein, 36 aa, Artificial Sequence
  GFR-binding peptide
  MOD_RES (35), (35): Xaa is C or S
  MOD_RES (11), (12), (13), (14), (15): Xaa is A or G
  MOD_RES (16), (17), (18), (19): Xaa is A or G or is absent
HDELTSMEGIXXXXXXXXXMIQVTINSLQVQTPRXQ

SEQ ID NO: 17281 - protein, 33 aa, Artificial Sequence
  GFR-binding peptide
  MOD_RES (33), (33): Xaa is C or S
NHQLFSMEGLHQGQHPKIRMIQMTINSEETPVX

SEQ ID NO: 17282 - protein, 39 aa, Artificial Sequence
  GFR-binding peptide
  MOD_RES (36), (36): Xaa is C or S
LHEELRSMEGILKPKKRVYEMIQVTINSHHVRSPQXKVS

SEQ ID NO: 17283 - protein, 39 aa, Artificial Sequence
  GFR-binding peptide
  MOD_RES (1), (38): Xaa is C or S
  MOD_RES (14), (15), (16), (17), (18): Xaa is A or G
  MOD_RES (19), (20), (21), (22): Xaa is A or G or is absent
XALHDELTSMEGIXXXXXXXXXMIQVTINSLQVQTPRXQ

SEQ ID NO: 17284 - protein, 41 aa, Artificial Sequence
  GFR-binding peptide
  MOD_RES (2), (4), (38): Xaa is C or S
RXEXQSHEELVTAKKHQGQHPKIRIKRMQVPRQGTPVXELG

SEQ ID NO: 17285 - protein, 33 aa, Artificial Sequence
  GFR-binding peptide
  MOD_RES (12), (13), (14), (15), (16): Xaa is A or G
  MOD_RES (17), (18), (19), (20): Xaa is A or G or is absent
LHDELTVQVEKXXXXXXXXXVKAVKVSRLQVQT

SEQ ID NO: 17286 - protein, 38 aa, Artificial Sequence
  GFR-binding peptide
  MOD_RES (33), (33): Xaa is C or S
SHEELVTAKKHQGQHPKIRIKRMQVPRQGTPVXELGED

SEQ ID NO: 17287 - protein, 43 aa, Artificial Sequence
  GFR-binding peptide
  MOD_RES (1), (3), (37): Xaa is C or S
  MOD_RES (15), (16), (17), (18), (19): Xaa is A or G
  MOD_RES (20), (21), (22), (23): Xaa is A or G or is absent
XEXQSHEELSMEGLXXXXXXXXXMIQMTINSQGTPVXELGEDN

SEQ ID NO: 17288 - protein, 41 aa, Artificial Sequence
  GFR-binding peptide
  MOD_RES (1), (3), (40): Xaa is C or S
  MOD_RES (16), (17), (18), (19), (20): Xaa is A or G
  MOD_RES (21), (22), (23), (24): Xaa is A or G or is absent
XKXALHDELTVTAKKXXXXXXXXXIKRVQVPRLQVQTPRXQ

SEQ ID NO: 17289 - protein, 39 aa, Artificial Sequence
  GFR-binding peptide
  MOD_RES (1), (38): Xaa is C or S
XALHDELTSMEGIFIPKKRVIEMIQVTINSLQVQTPRXQ

SEQ ID NO: 17290 - protein, 39 aa, Artificial Sequence
  GFR-binding peptide
  MOD_RES (2), (39): Xaa is C or S
KXALHDELTVTAKKFIPKKRVIEIKRVQVPRLQVQTPRX

SEQ ID NO: 17291 - protein, 39 aa, Artificial Sequence
  GFR-binding peptide
  MOD_RES (34), (34): Xaa is C or S
  MOD_RES (12), (13), (14), (15), (16): Xaa is A or G
  MOD_RES (17), (18), (19), (20): Xaa is A or G or is absent
QSHEELVQVEKXXXXXXXXXVKAMKVSRQGTPVXELGED

SEQ ID NO: 17292 - protein, 39 aa, Artificial Sequence
  GFR-binding peptide
  MOD_RES (36), (36): Xaa is C or S
LHEELRVTAKKLKPKKRVYEIKRVQVPRHHVRSPQXKVS

SEQ ID NO: 17293 - protein, 38 aa, Artificial Sequence
  GFR-binding peptide
  MOD_RES (1), (3): Xaa is C or S
  MOD_RES (16), (17), (18), (19), (20): Xaa is A or G
  MOD_RES (21), (22), (23), (24): Xaa is A or G or is absent
XAXELHEELRVQVEKXXXXXXXXXVKAVKVSRHHVRSP

SEQ ID NO: 17294 - protein, 35 aa, Artificial Sequence
  GFR-binding peptide
  MOD_RES (2), (2): Xaa is C or S
  MOD_RES (14), (15), (16), (17), (18): Xaa is A or G
  MOD_RES (19), (20), (21), (22): Xaa is A or G or is absent
EXQSHEELSMEGIXXXXXXXXXMIQMTINSQGTPV

SEQ ID NO: 17295 - protein, 40 aa, Artificial Sequence
  GFR-binding peptide
  MOD_RES (2), (36): Xaa is C or S
  MOD_RES (14), (15), (16), (17), (18): Xaa is A or G
  MOD_RES (19), (20), (21), (22): Xaa is A or G or is absent
EXQSHEELVTAKKXXXXXXXXXIKRMQVPRQGTPVXELGE

SEQ ID NO: 17296 - protein, 42 aa, Artificial Sequence
  GFR-binding peptide
  MOD_RES (2), (4), (38): Xaa is C or S
RXEXQSHEELVQVEKHQGQHPKIRVKAMKVSRQGTPVXELGE

SEQ ID NO: 17297 - protein, 41 aa, Artificial Sequence
  GFR-binding peptide
  MOD_RES (1), (3), (37): Xaa is C or S
  MOD_RES (15), (16), (17), (18), (19): Xaa is A or G
  MOD_RES (20), (21), (22), (23): Xaa is A or G or is absent
XEXKNHQLFVTAKKXXXXXXXXXIKRMQVPREETPVXELGE

SEQ ID NO: 17298 - protein, 42 aa, Artificial Sequence
  GFR-binding peptide
  MOD_RES (2), (39): Xaa is C or S
AXELHEELRSMEGILKPKKRVYEMIQVTINSHHVRSPQXKVS

SEQ ID NO: 17299 - protein, 43 aa, Artificial Sequence
  GFR-binding peptide
  MOD_RES (1), (3), (37): Xaa is C or S
XEXKNHQLFVQVEKHQGQHPKIRVKAMKVSREETPVXELGEDN

SEQ ID NO: 17300 - protein, 35 aa, Artificial Sequence
  GFR-binding peptide
  MOD_RES (1), (1): Xaa is C or S
  MOD_RES (14), (15), (16), (17), (18): Xaa is A or G
  MOD_RES (19), (20), (21), (22): Xaa is A or G or is absent
XELHEELRSMEGIXXXXXXXXXMIQVTINSHHVRS

SEQ ID NO: 17301 - protein, 40 aa, Artificial Sequence
  GFR-binding peptide
  MOD_RES (36), (36): Xaa is C or S
LHEELRVQVEKLKPKKRVYEVKAVKVSRHHVRSPQXKVSS

SEQ ID NO: 17302 - protein, 34 aa, Artificial Sequence
  GFR-binding peptide
LHEELRVTAKKLKPKKRVYEIKRVQVPRHHVRSP

SEQ ID NO: 17303 - protein, 39 aa, Artificial Sequence
  GFR-binding peptide
  MOD_RES (2), (4), (38): Xaa is C or S
  MOD_RES (16), (17), (18), (19), (20): Xaa is A or G
  MOD_RES (21), (22), (23), (24): Xaa is A or G or is absent
RXEXQSHEELSMEGIXXXXXXXXXMIQMTINSQGTPVXE

SEQ ID NO: 17304 - protein, 38 aa, Artificial Sequence
  GFR-binding peptide
  MOD_RES (36), (36): Xaa is C or S
LHEELRSMEGLLKPKKRVYEMIQVTINSHHVRSPQXKV

SEQ ID NO: 17305 - protein, 34 aa, Artificial Sequence
  GFR-binding peptide
  MOD_RES (34), (34): Xaa is C or S
KNHQLFSMEGIHQGQHPKIRMIQMTINSEETPVX

SEQ ID NO: 17306 - protein, 40 aa, Artificial Sequence
  GFR-binding peptide
  MOD_RES (37), (37): Xaa is C or S
  MOD_RES (13), (14), (15), (16), (17): Xaa is A or G
  MOD_RES (18), (19), (20), (21): Xaa is A or G or is absent
ALHDELTSMEGLXXXXXXXXXMIQVTINSLQVQTPRXQVN

SEQ ID NO: 17307 - protein, 34 aa, Artificial Sequence
  GFR-binding peptide
LHEELRSMEGILKPKKRVYEMIQVTINSHHVRSP

SEQ ID NO: 17308 - protein, 33 aa, Artificial Sequence
  GFR-binding peptide
  MOD_RES (12), (13), (14), (15), (16): Xaa is A or G
  MOD_RES (17), (18), (19), (20): Xaa is A or G or is absent
LHEELRVQVEKXXXXXXXXXVKAVKVSRHHVRS

SEQ ID NO: 17309 - protein, 38 aa, Artificial Sequence
  GFR-binding peptide
  MOD_RES (34), (34): Xaa is C or S
  MOD_RES (12), (13), (14), (15), (16): Xaa is A or G
  MOD_RES (17), (18), (19), (20): Xaa is A or G or is absent
KNHQLFSMEGIXXXXXXXXXMIQMTINSEETPVXELGE

SEQ ID NO: 17310 - protein, 33 aa, Artificial Sequence
  GFR-binding peptide
  MOD_RES (12), (13), (14), (15), (16): Xaa is A or G
  MOD_RES (17), (18), (19), (20): Xaa is A or G or is absent
KNHQLFVTAKKXXXXXXXXXIKRMQVPREETPV

SEQ ID NO: 17311 - protein, 39 aa, Artificial Sequence
  GFR-binding peptide
  MOD_RES (36), (36): Xaa is C or S
  MOD_RES (12), (13), (14), (15), (16): Xaa is A or G
  MOD_RES (17), (18), (19), (20): Xaa is A or G or is absent
LHDELTSMEGLXXXXXXXXXMIQVTINSLQVQTPRXQVN

SEQ ID NO: 17312 - protein, 41 aa, Artificial Sequence
  GFR-binding peptide
  MOD_RES (2), (4), (38): Xaa is C or S
  MOD_RES (16), (17), (18), (19), (20): Xaa is A or G
  MOD_RES (21), (22), (23), (24): Xaa is A or G or is absent
RXEXQSHEELSMEGIXXXXXXXXXMIQMTINSQGTPVXELG

SEQ ID NO: 17313 - protein, 42 aa, Artificial Sequence
  GFR-binding peptide
  MOD_RES (2), (36): Xaa is C or S
EXQSHEELSMEGLHQGQHPKIRMIQMTINSQGTPVXELGEDN

SEQ ID NO: 17314 - protein, 37 aa, Artificial Sequence
  GFR-binding peptide
  MOD_RES (1), (35): Xaa is C or S
XQSHEELSMEGLHQGQHPKIRMIQMTINSQGTPVXEL

SEQ ID NO: 17315 - protein, 35 aa, Artificial Sequence
  GFR-binding peptide
  MOD_RES (1), (35): Xaa is C or S
XKNHQLFSMEGIHQGQHPKIRMIQMTINSEETPVX

SEQ ID NO: 17316 - protein, 38 aa, Artificial Sequence
  GFR-binding peptide
  MOD_RES (35), (35): Xaa is C or S
HDELTSMEGLFIPKKRVIEMIQVTINSLQVQTPRXQVN

SEQ ID NO: 17317 - protein, 35 aa, Artificial Sequence
  GFR-binding peptide
  MOD_RES (34), (34): Xaa is C or S
QSHEELVQVEKHQGQHPKIRVKAMKVSRQGTPVXE

SEQ ID NO: 17318 - protein, 34 aa, Artificial Sequence
  GFR-binding peptide
  MOD_RES (33), (33): Xaa is C or S
NHQLFSMEGIHQGQHPKIRMIQMTINSEETPVXE

SEQ ID NO: 17319 - protein, 37 aa, Artificial Sequence
  GFR-binding peptide
  MOD_RES (35), (35): Xaa is C or S
  MOD_RES (11), (12), (13), (14), (15): Xaa is A or G
  MOD_RES (16), (17), (18), (19): Xaa is A or G or is absent
HDELTSMEGIXXXXXXXXXMIQVTINSLQVQTPRXQV

SEQ ID NO: 17320 - protein, 37 aa, Artificial Sequence
  GFR-binding peptide
  MOD_RES (36), (36): Xaa is C or S
  MOD_RES (12), (13), (14), (15), (16): Xaa is A or G
  MOD_RES (17), (18), (19), (20): Xaa is A or G or is absent
LHEELRSMEGLXXXXXXXXXMIQVTINSHHVRSPQXK

SEQ ID NO: 17321 - protein, 36 aa, Artificial Sequence
  GFR-binding peptide
  MOD_RES (1), (35): Xaa is C or S
XQSHEELVTAKKHQGQHPKIRIKRMQVPRQGTPVXE

SEQ ID NO: 17322 - protein, 41 aa, Artificial Sequence
  GFR-binding peptide
  MOD_RES (1), (35): Xaa is C or S
XQSHEELSMEGLHQGQHPKIRMIQMTINSQGTPVXELGEDN

SEQ ID NO: 17323 - protein, 42 aa, Artificial Sequence
  GFR-binding peptide
  MOD_RES (1), (3), (37): Xaa is C or S
XEXKNHQLFVQVEKHQGQHPKIRVKAMKVSREETPVXELGED

SEQ ID NO: 17324 - protein, 38 aa, Artificial Sequence
  GFR-binding peptide
  MOD_RES (2), (36): Xaa is C or S
EXQSHEELVTAKKHQGQHPKIRIKRMQVPRQGTPVXEL

SEQ ID NO: 17325 - protein, 33 aa, Artificial Sequence
  GFR-binding peptide
  MOD_RES (12), (13), (14), (15), (16): Xaa is A or G
  MOD_RES (17), (18), (19), (20): Xaa is A or G or is absent
KNHQLFSMEGIXXXXXXXXXMIQMTINSEETPV

SEQ ID NO: 17326 - protein, 37 aa, Artificial Sequence
  GFR-binding peptide
  MOD_RES (33), (33): Xaa is C or S
NHQLFVTAKKHQGQHPKIRIKRMQVPREETPVXELGE

SEQ ID NO: 17327 - protein, 35 aa, Artificial Sequence
  GFR-binding peptide
  MOD_RES (1), (35): Xaa is C or S
  MOD_RES (13), (14), (15), (16), (17): Xaa is A or G
  MOD_RES (18), (19), (20), (21): Xaa is A or G or is absent
XQSHEELVTAKKXXXXXXXXXIKRMQVPRQGTPVX

SEQ ID NO: 17328 - protein, 39 aa, Artificial Sequence
  GFR-binding peptide
  MOD_RES (33), (33): Xaa is C or S
NHQLFSMEGIHQGQHPKIRMIQMTINSEETPVXELGEDN

SEQ ID NO: 17329 - protein, 38 aa, Artificial Sequence
  GFR-binding peptide
  MOD_RES (33), (33): Xaa is C or S
  MOD_RES (11), (12), (13), (14), (15): Xaa is A or G
  MOD_RES (16), (17), (18), (19): Xaa is A or G or is absent
NHQLFSMEGLXXXXXXXXXMIQMTINSEETPVXELGED

SEQ ID NO: 17330 - protein, 35 aa, Artificial Sequence
  GFR-binding peptide
  MOD_RES (33), (33): Xaa is C or S
NHQLFVTAKKHQGQHPKIRIKRMQVPREETPVXEL

SEQ ID NO: 17331 - protein, 37 aa, Artificial Sequence
  GFR-binding peptide
  MOD_RES (33), (33): Xaa is C or S
  MOD_RES (11), (12), (13), (14), (15): Xaa is A or G
  MOD_RES (16), (17), (18), (19): Xaa is A or G or is absent
SHEELSMEGLXXXXXXXXXMIQMTINSQGTPVXELGE

SEQ ID NO: 17332 - protein, 35 aa, Artificial Sequence
  GFR-binding peptide
  MOD_RES (1), (1): Xaa is C or S
XALHDELTVTAKKFIPKKRVIEIKRVQVPRLQVQT

SEQ ID NO: 17333 - protein, 42 aa, Artificial Sequence
  GFR-binding peptide
  MOD_RES (2), (36): Xaa is C or S
  MOD_RES (14), (15), (16), (17), (18): Xaa is A or G
  MOD_RES (19), (20), (21), (22): Xaa is A or G or is absent
EXQSHEELSMEGIXXXXXXXXXMIQMTINSQGTPVXELGEDN

SEQ ID NO: 17334 - protein, 42 aa, Artificial Sequence
  GFR-binding peptide
  MOD_RES (1), (3), (37): Xaa is C or S
  MOD_RES (15), (16), (17), (18), (19): Xaa is A or G
  MOD_RES (20), (21), (22), (23): Xaa is A or G or is absent
XEXQSHEELVTAKKXXXXXXXXXIKRMQVPRQGTPVXELGED

SEQ ID NO: 17335 - protein, 37 aa, Artificial Sequence
  GFR-binding peptide
  MOD_RES (2), (2): Xaa is C or S
  MOD_RES (15), (16), (17), (18), (19): Xaa is A or G
  MOD_RES (20), (21), (22), (23): Xaa is A or G or is absent
KXALHDELTSMEGIXXXXXXXXXMIQVTINSLQVQTP

SEQ ID NO: 17336 - protein, 33 aa, Artificial Sequence
  GFR-binding peptide
  MOD_RES (11), (12), (13), (14), (15): Xaa is A or G
  MOD_RES (16), (17), (18), (19): Xaa is A or G or is absent
HEELRSMEGIXXXXXXXXXMIQVTINSHHVRSP

SEQ ID NO: 17337 - protein, 33 aa, Artificial Sequence
  GFR-binding peptide
  MOD_RES (11), (12), (13), (14), (15): Xaa is A or G
  MOD_RES (16), (17), (18), (19): Xaa is A or G or is absent
HDELTVTAKKXXXXXXXXXIKRVQVPRLQVQTP

SEQ ID NO: 17338 - protein, 43 aa, Artificial Sequence
  GFR-binding peptide
  MOD_RES (2), (4), (41): Xaa is C or S
  MOD_RES (17), (18), (19), (20), (21): Xaa is A or G
  MOD_RES (22), (23), (24), (25): Xaa is A or G or is absent
EXKXALHDELTSMEGIXXXXXXXXXMIQVTINSLQVQTPRXQV

SEQ ID NO: 17339 - protein, 40 aa, Artificial Sequence
  GFR-binding peptide
  MOD_RES (1), (35): Xaa is C or S
XKNHQLFSMEGIHQGQHPKIRMIQMTINSEETPVXELGED

SEQ ID NO: 17340 - protein, 40 aa, Artificial Sequence
  GFR-binding peptide
  MOD_RES (2), (4): Xaa is C or S
EXKXALHDELTVQVEKFIPKKRVIEVKAVKVSRLQVQTPR

SEQ ID NO: 17341 - protein, 37 aa, Artificial Sequence
  GFR-binding peptide
  MOD_RES (2), (2): Xaa is C or S
KXALHDELTSMEGIFIPKKRVIEMIQVTINSLQVQTP

SEQ ID NO: 17342 - protein, 38 aa, Artificial Sequence
  GFR-binding peptide
  MOD_RES (37), (37): Xaa is C or S
ELHEELRSMEGLLKPKKRVYEMIQVTINSHHVRSPQXK

SEQ ID NO: 17343 - protein, 38 aa, Artificial Sequence
  GFR-binding peptide
  MOD_RES (34), (34): Xaa is C or S
  MOD_RES (12), (13), (14), (15), (16): Xaa is A or G
  MOD_RES (17), (18), (19), (20): Xaa is A or G or is absent
KNHQLFVTAKKXXXXXXXXXIKRMQVPREETPVXELGE

SEQ ID NO: 17344 - protein, 33 aa, Artificial Sequence
  GFR-binding peptide
  MOD_RES (33), (33): Xaa is C or S
SHEELSMEGIHQGQHPKIRMIQMTINSQGTPVX

SEQ ID NO: 17345 - protein, 35 aa, Artificial Sequence
  GFR-binding peptide
  MOD_RES (2), (2): Xaa is C or S
EXKNHQLFVTAKKHQGQHPKIRIKRMQVPREETPV

SEQ ID NO: 17346 - protein, 41 aa, Artificial Sequence
  GFR-binding peptide
  MOD_RES (1), (35): Xaa is C or S
  MOD_RES (13), (14), (15), (16), (17): Xaa is A or G
  MOD_RES (18), (19), (20), (21): Xaa is A or G or is absent
XKNHQLFSMEGLXXXXXXXXXMIQMTINSEETPVXELGEDN

SEQ ID NO: 17347 - protein, 39 aa, Artificial Sequence
  GFR-binding peptide
  MOD_RES (35), (35): Xaa is C or S
HEELRSMEGLLKPKKRVYEMIQVTINSHHVRSPQXKVSS

SEQ ID NO: 17348 - protein, 42 aa, Artificial Sequence
  GFR-binding peptide
  MOD_RES (2), (39): Xaa is C or S
  MOD_RES (15), (16), (17), (18), (19): Xaa is A or G
  MOD_RES (20), (21), (22), (23): Xaa is A or G or is absent
AXELHEELRVQVEKXXXXXXXXXVKAVKVSRHHVRSPQXKVS

SEQ ID NO: 17349 - protein, 37 aa, Artificial Sequence
  GFR-binding peptide
  MOD_RES (2), (2): Xaa is C or S
  MOD_RES (15), (16), (17), (18), (19): Xaa is A or G
  MOD_RES (20), (21), (22), (23): Xaa is A or G or is absent
AXELHEELRSMEGLXXXXXXXXXMIQVTINSHHVRSP

SEQ ID NO: 17350 - protein, 42 aa, Artificial Sequence
  GFR-binding peptide
  MOD_RES (2), (39): Xaa is C or S
KXALHDELTSMEGLFIPKKRVIEMIQVTINSLQVQTPRXQVN

SEQ ID NO: 17351 - protein, 42 aa, Artificial Sequence
  GFR-binding peptide
  MOD_RES (2), (39): Xaa is C or S
KXALHDELTVTAKKFIPKKRVIEIKRVQVPRLQVQTPRXQVN

SEQ ID NO: 17352 - protein, 38 aa, Artificial Sequence
  GFR-binding peptide
  MOD_RES (34), (34): Xaa is C or S
KNHQLFSMEGLHQGQHPKIRMIQMTINSEETPVXELGE

SEQ ID NO: 17353 - protein, 42 aa, Artificial Sequence
  GFR-binding peptide
  MOD_RES (2), (39): Xaa is C or S
  MOD_RES (15), (16), (17), (18), (19): Xaa is A or G
  MOD_RES (20), (21), (22), (23): Xaa is A or G or is absent
KXALHDELTSMEGLXXXXXXXXXMIQVTINSLQVQTPRXQVN

SEQ ID NO: 17354 - protein, 37 aa, Artificial Sequence
  GFR-binding peptide
  MOD_RES (33), (33): Xaa is C or S
  MOD_RES (11), (12), (13), (14), (15): Xaa is A or G
  MOD_RES (16), (17), (18), (19): Xaa is A or G or is absent
NHQLFSMEGIXXXXXXXXXMIQMTINSEETPVXELGE

SEQ ID NO: 17355 - protein, 41 aa, Artificial Sequence
  GFR-binding peptide
  MOD_RES (1), (35): Xaa is C or S
XKNHQLFSMEGIHQGQHPKIRMIQMTINSEETPVXELGEDN

SEQ ID NO: 17356 - protein, 41 aa, Artificial Sequence
  GFR-binding peptide
  MOD_RES (2), (4), (41): Xaa is C or S
  MOD_RES (17), (18), (19), (20), (21): Xaa is A or G
  MOD_RES (22), (23), (24), (25): Xaa is A or G or is absent
EXKXALHDELTSMEGIXXXXXXXXXMIQVTINSLQVQTPRX

SEQ ID NO: 17357 - protein, 39 aa, Artificial Sequence
  GFR-binding peptide
  MOD_RES (1), (3): Xaa is C or S
XKXALHDELTVQVEKFIPKKRVIEVKAVKVSRLQVQTPR

SEQ ID NO: 17358 - protein, 34 aa, Artificial Sequence
  GFR-binding peptide
  MOD_RES (33), (33): Xaa is C or S
SHEELSMEGLHQGQHPKIRMIQMTINSQGTPVXE

SEQ ID NO: 17359 - protein, 39 aa, Artificial Sequence
  GFR-binding peptide
  MOD_RES (37), (37): Xaa is C or S
  MOD_RES (13), (14), (15), (16), (17): Xaa is A or G
  MOD_RES (18), (19), (20), (21): Xaa is A or G or is absent
ALHDELTSMEGIXXXXXXXXXMIQVTINSLQVQTPRXQV

SEQ ID NO: 17360 - protein, 42 aa, Artificial Sequence
  GFR-binding peptide
  MOD_RES (2), (4), (41): Xaa is C or S
  MOD_RES (17), (18), (19), (20), (21): Xaa is A or G
  MOD_RES (22), (23), (24), (25): Xaa is A or G or is absent
EXKXALHDELTSMEGIXXXXXXXXXMIQVTINSLQVQTPRXQ

SEQ ID NO: 17361 - protein, 38 aa, Artificial Sequence
  GFR-binding peptide
  MOD_RES (1), (38): Xaa is C or S
XALHDELTSMEGIFIPKKRVIEMIQVTINSLQVQTPRX

SEQ ID NO: 17362 - protein, 40 aa, Artificial Sequence
  GFR-binding peptide
  MOD_RES (36), (36): Xaa is C or S
  MOD_RES (12), (13), (14), (15), (16): Xaa is A or G
  MOD_RES (17), (18), (19), (20): Xaa is A or G or is absent
LHEELRSMEGLXXXXXXXXXMIQVTINSHHVRSPQXKVSS

SEQ ID NO: 17363 - protein, 42 aa, Artificial Sequence
  GFR-binding peptide
  MOD_RES (1), (38): Xaa is C or S
  MOD_RES (14), (15), (16), (17), (18): Xaa is A or G
  MOD_RES (19), (20), (21), (22): Xaa is A or G or is absent
XELHEELRSMEGLXXXXXXXXXMIQVTINSHHVRSPQXKVSS

SEQ ID NO: 17364 - protein, 39 aa, Artificial Sequence
  GFR-binding peptide
  MOD_RES (1), (3), (37): Xaa is C or S
XEXQSHEELVQVEKHQGQHPKIRVKAMKVSRQGTPVXEL

SEQ ID NO: 17365 - protein, 41 aa, Artificial Sequence
  GFR-binding peptide
  MOD_RES (37), (37): Xaa is C or S
  MOD_RES (13), (14), (15), (16), (17): Xaa is A or G
  MOD_RES (18), (19), (20), (21): Xaa is A or G or is absent
ALHDELTVTAKKXXXXXXXXXIKRVQVPRLQVQTPRXQVNR

SEQ ID NO: 17366 - protein, 35 aa, Artificial Sequence
  GFR-binding peptide
  MOD_RES (1), (35): Xaa is C or S
  MOD_RES (13), (14), (15), (16), (17): Xaa is A or G
  MOD_RES (18), (19), (20), (21): Xaa is A or G or is absent
XKNHQLFSMEGLXXXXXXXXXMIQMTINSEETPVX

SEQ ID NO: 17367 - protein, 34 aa, Artificial Sequence
  GFR-binding peptide
  MOD_RES (34), (34): Xaa is C or S
  MOD_RES (12), (13), (14), (15), (16): Xaa is A or G
  MOD_RES (17), (18), (19), (20): Xaa is A or G or is absent
KNHQLFVQVEKXXXXXXXXXVKAMKVSREETPVX

SEQ ID NO: 17368 - protein, 37 aa, Artificial Sequence
  GFR-binding peptide
  MOD_RES (37), (37): Xaa is C or S
  MOD_RES (13), (14), (15), (16), (17): Xaa is A or G
  MOD_RES (18), (19), (20), (21): Xaa is A or G or is absent
ALHDELTVTAKKXXXXXXXXXIKRVQVPRLQVQTPRX

SEQ ID NO: 17369 - protein, 36 aa, Artificial Sequence
  GFR-binding peptide
ALHDELTSMEGIFIPKKRVIEMIQVTINSLQVQTPR

SEQ ID NO: 17370 - protein, 41 aa, Artificial Sequence
  GFR-binding peptide
  MOD_RES (2), (4), (41): Xaa is C or S
  MOD_RES (17), (18), (19), (20), (21): Xaa is A or G
  MOD_RES (22), (23), (24), (25): Xaa is A or G or is absent
AXAXELHEELRSMEGIXXXXXXXXXMIQVTINSHHVRSPQX

SEQ ID NO: 17371 - protein, 35 aa, Artificial Sequence
  GFR-binding peptide
  MOD_RES (1), (1): Xaa is C or S
XALHDELTVQVEKFIPKKRVIEVKAVKVSRLQVQT

SEQ ID NO: 17372 - protein, 36 aa, Artificial Sequence
  GFR-binding peptide
  MOD_RES (1), (1): Xaa is C or S
  MOD_RES (14), (15), (16), (17), (18): Xaa is A or G
  MOD_RES (19), (20), (21), (22): Xaa is A or G or is absent
XELHEELRSMEGLXXXXXXXXXMIQVTINSHHVRSP

SEQ ID NO: 17373 - protein, 44 aa, Artificial Sequence
  GFR-binding peptide
  MOD_RES (1), (3), (40): Xaa is C or S
XAXELHEELRSMEGLLKPKKRVYEMIQVTINSHHVRSPQXKVSS

SEQ ID NO: 17374 - protein, 44 aa, Artificial Sequence
  GFR-binding peptide
  MOD_RES (2), (4), (38): Xaa is C or S
  MOD_RES (16), (17), (18), (19), (20): Xaa is A or G
  MOD_RES (21), (22), (23), (24): Xaa is A or G or is absent
RXEXKNHQLFVQVEKXXXXXXXXXVKAMKVSREETPVXELGEDN

SEQ ID NO: 17375 - protein, 40 aa, Artificial Sequence
  GFR-binding peptide
  MOD_RES (2), (4), (38): Xaa is C or S
  MOD_RES (16), (17), (18), (19), (20): Xaa is A or G
  MOD_RES (21), (22), (23), (24): Xaa is A or G or is absent
RXEXKNHQLFVQVEKXXXXXXXXXVKAMKVSREETPVXEL

SEQ ID NO: 17376 - protein, 42 aa, Artificial Sequence
  GFR-binding peptide
  MOD_RES (2), (36): Xaa is C or S
EXQSHEELVQVEKHQGQHPKIRVKAMKVSRQGTPVXELGEDN

SEQ ID NO: 17377 - protein, 34 aa, Artificial Sequence
  GFR-binding peptide
HDELTVTAKKFIPKKRVIEIKRVQVPRLQVQTPR

SEQ ID NO: 17378 - protein, 39 aa, Artificial Sequence
  GFR-binding peptide
  MOD_RES (1), (3), (37): Xaa is C or S
XEXQSHEELSMEGLHQGQHPKIRMIQMTINSQGTPVXEL

SEQ ID NO: 17379 - protein, 34 aa, Artificial Sequence
  GFR-binding peptide
  MOD_RES (1), (1): Xaa is C or S
XKNHQLFSMEGIHQGQHPKIRMIQMTINSEETPV

SEQ ID NO: 17380 - protein, 34 aa, Artificial Sequence
  GFR-binding peptide
HDELTSMEGIFIPKKRVIEMIQVTINSLQVQTPR

SEQ ID NO: 17381 - protein, 36 aa, Artificial Sequence
  GFR-binding peptide
  MOD_RES (1), (35): Xaa is C or S
XQSHEELVQVEKHQGQHPKIRVKAMKVSRQGTPVXE

SEQ ID NO: 17382 - protein, 38 aa, Artificial Sequence
  GFR-binding peptide
  MOD_RES (1), (3), (37): Xaa is C or S
XEXKNHQLFSMEGIHQGQHPKIRMIQMTINSEETPVXE

SEQ ID NO: 17383 - protein, 34 aa, Artificial Sequence
  GFR-binding peptide
ALHDELTVTAKKFIPKKRVIEIKRVQVPRLQVQT

SEQ ID NO: 17384 - protein, 39 aa, Artificial Sequence
  GFR-binding peptide
  MOD_RES (2), (36): Xaa is C or S
EXQSHEELVQVEKHQGQHPKIRVKAMKVSRQGTPVXELG

SEQ ID NO: 17385 - protein, 36 aa, Artificial Sequence
  GFR-binding peptide
  MOD_RES (35), (35): Xaa is C or S
  MOD_RES (11), (12), (13), (14), (15): Xaa is A or G
  MOD_RES (16), (17), (18), (19): Xaa is A or G or is absent
HEELRVQVEKXXXXXXXXXVKAVKVSRHHVRSPQXK

SEQ ID NO: 17386 - protein, 39 aa, Artificial Sequence
  GFR-binding peptide
  MOD_RES (33), (33): Xaa is C or S
  MOD_RES (11), (12), (13), (14), (15): Xaa is A or G
  MOD_RES (16), (17), (18), (19): Xaa is A or G or is absent
SHEELSMEGLXXXXXXXXXMIQMTINSQGTPVXELGEDN

SEQ ID NO: 17387 - protein, 38 aa, Artificial Sequence
  GFR-binding peptide
  MOD_RES (1), (35): Xaa is C or S
  MOD_RES (13), (14), (15), (16), (17): Xaa is A or G
  MOD_RES (18), (19), (20), (21): Xaa is A or G or is absent
XQSHEELSMEGIXXXXXXXXXMIQMTINSQGTPVXELG

SEQ ID NO: 17388 - protein, 41 aa, Artificial Sequence
  GFR-binding peptide
  MOD_RES (1), (38): Xaa is C or S
  MOD_RES (14), (15), (16), (17), (18): Xaa is A or G
  MOD_RES (19), (20), (21), (22): Xaa is A or G or is absent
XELHEELRVTAKKXXXXXXXXXIKRVQVPRHHVRSPQXKVS

SEQ ID NO: 17389 - protein, 35 aa, Artificial Sequence
  GFR-binding peptide
  MOD_RES (33), (33): Xaa is C or S
  MOD_RES (11), (12), (13), (14), (15): Xaa is A or G
  MOD_RES (16), (17), (18), (19): Xaa is A or G or is absent
NHQLFSMEGIXXXXXXXXXMIQMTINSEETPVXEL

SEQ ID NO: 17390 - protein, 43 aa, Artificial Sequence
  GFR-binding peptide
  MOD_RES (2), (4), (38): Xaa is C or S
RXEXKNHQLFVQVEKHQGQHPKIRVKAMKVSREETPVXELGED

SEQ ID NO: 17391 - protein, 40 aa, Artificial Sequence
  GFR-binding peptide
  MOD_RES (1), (3), (40): Xaa is C or S
XKXALHDELTVTAKKFIPKKRVIEIKRVQVPRLQVQTPRX

SEQ ID NO: 17392 - protein, 40 aa, Artificial Sequence
  GFR-binding peptide
  MOD_RES (1), (38): Xaa is C or S
XALHDELTSMEGLFIPKKRVIEMIQVTINSLQVQTPRXQV

SEQ ID NO: 17393 - protein, 33 aa, Artificial Sequence
  GFR-binding peptide
KNHQLFVTAKKHQGQHPKIRIKRMQVPREETPV

SEQ ID NO: 17394 - protein, 39 aa, Artificial Sequence
  GFR-binding peptide
  MOD_RES (36), (36): Xaa is C or S
  MOD_RES (12), (13), (14), (15), (16): Xaa is A or G
  MOD_RES (17), (18), (19), (20): Xaa is A or G or is absent
LHDELTVQVEKXXXXXXXXXVKAVKVSRLQVQTPRXQVN

SEQ ID NO: 17395 - protein, 36 aa, Artificial Sequence
  GFR-binding peptide
  MOD_RES (2), (2): Xaa is C or S
KXALHDELTVQVEKFIPKKRVIEVKAVKVSRLQVQT

SEQ ID NO: 17396 - protein, 38 aa, Artificial Sequence
  GFR-binding peptide
  MOD_RES (36), (36): Xaa is C or S
  MOD_RES (12), (13), (14), (15), (16): Xaa is A or G
  MOD_RES (17), (18), (19), (20): Xaa is A or G or is absent
LHEELRSMEGIXXXXXXXXXMIQVTINSHHVRSPQXKV

SEQ ID NO: 17397 - protein, 40 aa, Artificial Sequence
  GFR-binding peptide
  MOD_RES (1), (3), (37): Xaa is C or S
XEXQSHEELVTAKKHQGQHPKIRIKRMQVPRQGTPVXELG

SEQ ID NO: 17398 - protein, 40 aa, Artificial Sequence
  GFR-binding peptide
  MOD_RES (2), (36): Xaa is C or S
EXQSHEELVQVEKHQGQHPKIRVKAMKVSRQGTPVXELGE

SEQ ID NO: 17399 - protein, 36 aa, Artificial Sequence
  GFR-binding peptide
  MOD_RES (1), (3): Xaa is C or S
  MOD_RES (15), (16), (17), (18), (19): Xaa is A or G
  MOD_RES (20), (21), (22), (23): Xaa is A or G or is absent
XEXKNHQLFSMEGLXXXXXXXXXMIQMTINSEETPV

SEQ ID NO: 17400 - protein, 36 aa, Artificial Sequence
  GFR-binding peptide
  MOD_RES (34), (34): Xaa is C or S
  MOD_RES (12), (13), (14), (15), (16): Xaa is A or G
  MOD_RES (17), (18), (19), (20): Xaa is A or G or is absent
KNHQLFSMEGLXXXXXXXXXMIQMTINSEETPVXEL

SEQ ID NO: 17401 - protein, 39 aa, Artificial Sequence
  GFR-binding peptide
  MOD_RES (33), (33): Xaa is C or S
NHQLFVTAKKHQGQHPKIRIKRMQVPREETPVXELGEDN

SEQ ID NO: 17402 - protein, 33 aa, Artificial Sequence
  GFR-binding peptide
  MOD_RES (11), (12), (13), (14), (15): Xaa is A or G
  MOD_RES (16), (17), (18), (19): Xaa is A or G or is absent
HEELRVQVEKXXXXXXXXXVKAVKVSRHHVRSP

SEQ ID NO: 17403 - protein, 38 aa, Artificial Sequence
  GFR-binding peptide
  MOD_RES (1), (38): Xaa is C or S
XELHEELRVQVEKLKPKKRVYEVKAVKVSRHHVRSPQX

SEQ ID NO: 17404 - protein, 41 aa, Artificial Sequence
  GFR-binding peptide
  MOD_RES (37), (37): Xaa is C or S
ELHEELRSMEGLLKPKKRVYEMIQVTINSHHVRSPQXKVSS

SEQ ID NO: 17405 - protein, 37 aa, Artificial Sequence
  GFR-binding peptide
  MOD_RES (2), (36): Xaa is C or S
EXKNHQLFSMEGLHQGQHPKIRMIQMTINSEETPVXE

SEQ ID NO: 17406 - protein, 38 aa, Artificial Sequence
  GFR-binding peptide
  MOD_RES (36), (36): Xaa is C or S
  MOD_RES (12), (13), (14), (15), (16): Xaa is A or G
  MOD_RES (17), (18), (19), (20): Xaa is A or G or is absent
LHEELRVTAKKXXXXXXXXXIKRVQVPRHHVRSPQXKV

SEQ ID NO: 17407 - protein, 39 aa, Artificial Sequence
  GFR-binding peptide
  MOD_RES (33), (33): Xaa is C or S
NHQLFVQVEKHQGQHPKIRVKAMKVSREETPVXELGEDN

SEQ ID NO: 17408 - protein, 39 aa, Artificial Sequence
  GFR-binding peptide
  MOD_RES (1), (3): Xaa is C or S
XAXELHEELRSMEGILKPKKRVYEMIQVTINSHHVRSPQ

SEQ ID NO: 17409 - protein, 36 aa, Artificial Sequence
  GFR-binding peptide
  MOD_RES (34), (34): Xaa is C or S
KNHQLFSMEGIHQGQHPKIRMIQMTINSEETPVXEL

SEQ ID NO: 17410 - protein, 37 aa, Artificial Sequence
  GFR-binding peptide
  MOD_RES (37), (37): Xaa is C or S
  MOD_RES (13), (14), (15), (16), (17): Xaa is A or G
  MOD_RES (18), (19), (20), (21): Xaa is A or G or is absent
ELHEELRVTAKKXXXXXXXXXIKRVQVPRHHVRSPQX

SEQ ID NO: 17411 - protein, 38 aa, Artificial Sequence
  GFR-binding peptide
  MOD_RES (33), (33): Xaa is C or S
SHEELVQVEKHQGQHPKIRVKAMKVSRQGTPVXELGED

SEQ ID NO: 17412 - protein, 40 aa, Artificial Sequence
  GFR-binding peptide
  MOD_RES (2), (4), (38): Xaa is C or S
  MOD_RES (16), (17), (18), (19), (20): Xaa is A or G
  MOD_RES (21), (22), (23), (24): Xaa is A or G or is absent
RXEXQSHEELSMEGIXXXXXXXXXMIQMTINSQGTPVXEL

SEQ ID NO: 17413 - protein, 33 aa, Artificial Sequence
  GFR-binding peptide
  MOD_RES (11), (12), (13), (14), (15): Xaa is A or G
  MOD_RES (16), (17), (18), (19): Xaa is A or G or is absent
HEELRVTAKKXXXXXXXXXIKRVQVPRHHVRSP

SEQ ID NO: 17414 - protein, 43 aa, Artificial Sequence
  GFR-binding peptide
  MOD_RES (1), (3), (40): Xaa is C or S
  MOD_RES (16), (17), (18), (19), (20): Xaa is A or G
  MOD_RES (21), (22), (23), (24): Xaa is A or G or is absent
XAXELHEELRSMEGIXXXXXXXXXMIQVTINSHHVRSPQXKVS

SEQ ID NO: 17415 - protein, 37 aa, Artificial Sequence
  GFR-binding peptide
  MOD_RES (2), (2): Xaa is C or S
AXELHEELRVTAKKLKPKKRVYEIKRVQVPRHHVRSP

SEQ ID NO: 17416 - protein, 38 aa, Artificial Sequence
  GFR-binding peptide
  MOD_RES (2), (36): Xaa is C or S
  MOD_RES (14), (15), (16), (17), (18): Xaa is A or G
  MOD_RES (19), (20), (21), (22): Xaa is A or G or is absent
EXKNHQLFVQVEKXXXXXXXXXVKAMKVSREETPVXEL

SEQ ID NO: 17417 - protein, 36 aa, Artificial Sequence
  GFR-binding peptide
  MOD_RES (13), (14), (15), (16), (17): Xaa is A or G
  MOD_RES (18), (19), (20), (21): Xaa is A or G or is absent
ALHDELTVQVEKXXXXXXXXXVKAVKVSRLQVQTPR

SEQ ID NO: 17418 - protein, 38 aa, Artificial Sequence
  GFR-binding peptide
  MOD_RES (1), (3), (37): Xaa is C or S
  MOD_RES (15), (16), (17), (18), (19): Xaa is A or G
  MOD_RES (20), (21), (22), (23): Xaa is A or G or is absent
XEXQSHEELVTAKKXXXXXXXXXIKRMQVPRQGTPVXE

SEQ ID NO: 17419 - protein, 36 aa, Artificial Sequence
  GFR-binding peptide
  MOD_RES (2), (2): Xaa is C or S
  MOD_RES (15), (16), (17), (18), (19): Xaa is A or G
  MOD_RES (20), (21), (22), (23): Xaa is A or G or is absent
KXALHDELTVQVEKXXXXXXXXXVKAVKVSRLQVQT

SEQ ID NO: 17420 - protein, 43 aa, Artificial Sequence
  GFR-binding peptide
  MOD_RES (2), (4), (41): Xaa is C or S
AXAXELHEELRSMEGILKPKKRVYEMIQVTINSHHVRSPQXKV

SEQ ID NO: 17421 - protein, 37 aa, Artificial Sequence
  GFR-binding peptide
  MOD_RES (2), (2): Xaa is C or S
AXELHEELRSMEGLLKPKKRVYEMIQVTINSHHVRSP

SEQ ID NO: 17422 - protein, 40 aa, Artificial Sequence
  GFR-binding peptide
  MOD_RES (2), (4): Xaa is C or S
AXAXELHEELRVQVEKLKPKKRVYEVKAVKVSRHHVRSPQ

SEQ ID NO: 17423 - protein, 40 aa, Artificial Sequence
  GFR-binding peptide
  MOD_RES (1), (38): Xaa is C or S
XELHEELRSMEGILKPKKRVYEMIQVTINSHHVRSPQXKV

SEQ ID NO: 17424 - protein, 38 aa, Artificial Sequence
  GFR-binding peptide
  MOD_RES (2), (4), (38): Xaa is C or S
  MOD_RES (16), (17), (18), (19), (20): Xaa is A or G
  MOD_RES (21), (22), (23), (24): Xaa is A or G or is absent
RXEXQSHEELSMEGIXXXXXXXXXMIQMTINSQGTPVX

SEQ ID NO: 17425 - protein, 38 aa, Artificial Sequence
  GFR-binding peptide
  MOD_RES (33), (33): Xaa is C or S
  MOD_RES (11), (12), (13), (14), (15): Xaa is A or G
  MOD_RES (16), (17), (18), (19): Xaa is A or G or is absent
SHEELSMEGIXXXXXXXXXMIQMTINSQGTPVXELGED

SEQ ID NO: 17426 - protein, 40 aa, Artificial Sequence
  GFR-binding peptide
  MOD_RES (1), (3), (37): Xaa is C or S
  MOD_RES (15), (16), (17), (18), (19): Xaa is A or G
  MOD_RES (20), (21), (22), (23): Xaa is A or G or is absent
XEXKNHQLFVTAKKXXXXXXXXXIKRMQVPREETPVXELG

SEQ ID NO: 17427 - protein, 43 aa, Artificial Sequence
  GFR-binding peptide
  MOD_RES (2), (4), (38): Xaa is C or S
  MOD_RES (16), (17), (18), (19), (20): Xaa is A or G
  MOD_RES (21), (22), (23), (24): Xaa is A or G or is absent
RXEXKNHQLFVTAKKXXXXXXXXXIKRMQVPREETPVXELGED

SEQ ID NO: 17428 - protein, 35 aa, Artificial Sequence
  GFR-binding peptide
  MOD_RES (1), (1): Xaa is C or S
  MOD_RES (14), (15), (16), (17), (18): Xaa is A or G
  MOD_RES (19), (20), (21), (22): Xaa is A or G or is absent
XALHDELTSMEGLXXXXXXXXXMIQVTINSLQVQT

SEQ ID NO: 17429 - protein, 39 aa, Artificial Sequence
  GFR-binding peptide
  MOD_RES (35), (35): Xaa is C or S
HDELTSMEGLFIPKKRVIEMIQVTINSLQVQTPRXQVNR

SEQ ID NO: 17430 - protein, 41 aa, Artificial Sequence
  GFR-binding peptide
  MOD_RES (2), (36): Xaa is C or S
EXQSHEELSMEGIHQGQHPKIRMIQMTINSQGTPVXELGED

SEQ ID NO: 17431 - protein, 38 aa, Artificial Sequence
  GFR-binding peptide
  MOD_RES (33), (33): Xaa is C or S
NHQLFSMEGLHQGQHPKIRMIQMTINSEETPVXELGED

SEQ ID NO: 17432 - protein, 40 aa, Artificial Sequence
  GFR-binding peptide
  MOD_RES (36), (36): Xaa is C or S
  MOD_RES (12), (13), (14), (15), (16): Xaa is A or G
  MOD_RES (17), (18), (19), (20): Xaa is A or G or is absent
LHEELRVTAKKXXXXXXXXXIKRVQVPRHHVRSPQXKVSS

SEQ ID NO: 17433 - protein, 40 aa, Artificial Sequence
  GFR-binding peptide
  MOD_RES (1), (3), (40): Xaa is C or S
  MOD_RES (16), (17), (18), (19), (20): Xaa is A or G
  MOD_RES (21), (22), (23), (24): Xaa is A or G or is absent
XAXELHEELRSMEGIXXXXXXXXXMIQVTINSHHVRSPQX

SEQ ID NO: 17434 - protein, 35 aa, Artificial Sequence
  GFR-binding peptide
  MOD_RES (33), (33): Xaa is C or S
NHQLFSMEGLHQGQHPKIRMIQMTINSEETPVXEL

SEQ ID NO: 17435 - protein, 39 aa, Artificial Sequence
  GFR-binding peptide
  MOD_RES (1), (35): Xaa is C or S
XKNHQLFVTAKKHQGQHPKIRIKRMQVPREETPVXELGE

SEQ ID NO: 17436 - protein, 41 aa, Artificial Sequence
  GFR-binding peptide
  MOD_RES (1), (3), (37): Xaa is C or S
XEXQSHEELVTAKKHQGQHPKIRIKRMQVPRQGTPVXELGE

SEQ ID NO: 17437 - protein, 37 aa, Artificial Sequence
  GFR-binding peptide
  MOD_RES (37), (37): Xaa is C or S
ALHDELTSMEGIFIPKKRVIEMIQVTINSLQVQTPRX

SEQ ID NO: 17438 - protein, 42 aa, Artificial Sequence
  GFR-binding peptide
  MOD_RES (1), (3), (37): Xaa is C or S
XEXKNHQLFSMEGLHQGQHPKIRMIQMTINSEETPVXELGED

SEQ ID NO: 17439 - protein, 38 aa, Artificial Sequence
  GFR-binding peptide
  MOD_RES (35), (35): Xaa is C or S
HEELRSMEGLLKPKKRVYEMIQVTINSHHVRSPQXKVS

SEQ ID NO: 17440 - protein, 38 aa, Artificial Sequence
  GFR-binding peptide
  MOD_RES (1), (3): Xaa is C or S
XKXALHDELTVQVEKFIPKKRVIEVKAVKVSRLQVQTP

SEQ ID NO: 17441 - protein, 39 aa, Artificial Sequence
  GFR-binding peptide
  MOD_RES (33), (33): Xaa is C or S
  MOD_RES (11), (12), (13), (14), (15): Xaa is A or G
  MOD_RES (16), (17), (18), (19): Xaa is A or G or is absent
NHQLFSMEGIXXXXXXXXXMIQMTINSEETPVXELGEDN

SEQ ID NO: 17442 - protein, 41 aa, Artificial Sequence
  GFR-binding peptide
  MOD_RES (2), (39): Xaa is C or S
KXALHDELTSMEGLFIPKKRVIEMIQVTINSLQVQTPRXQV

SEQ ID NO: 17443 - protein, 41 aa, Artificial Sequence
  GFR-binding peptide
  MOD_RES (1), (3), (37): Xaa is C or S
XEXQSHEELSMEGLHQGQHPKIRMIQMTINSQGTPVXELGE

SEQ ID NO: 17444 - protein, 40 aa, Artificial Sequence
  GFR-binding peptide
  MOD_RES (2), (4): Xaa is C or S
AXAXELHEELRSMEGILKPKKRVYEMIQVTINSHHVRSPQ

SEQ ID NO: 17445 - protein, 37 aa, Artificial Sequence
  GFR-binding peptide
  MOD_RES (1), (1): Xaa is C or S
XELHEELRSMEGLLKPKKRVYEMIQVTINSHHVRSPQ

SEQ ID NO: 17446 - protein, 40 aa, Artificial Sequence
  GFR-binding peptide
  MOD_RES (1), (35): Xaa is C or S
XKNHQLFVTAKKHQGQHPKIRIKRMQVPREETPVXELGED

SEQ ID NO: 17447 - protein, 39 aa, Artificial Sequence
  GFR-binding peptide
  MOD_RES (37), (37): Xaa is C or S
  MOD_RES (13), (14), (15), (16), (17): Xaa is A or G
  MOD_RES (18), (19), (20), (21): Xaa is A or G or is absent
ALHDELTVTAKKXXXXXXXXXIKRVQVPRLQVQTPRXQV

SEQ ID NO: 17448 - protein, 36 aa, Artificial Sequence
  GFR-binding peptide
  MOD_RES (36), (36): Xaa is C or S
  MOD_RES (12), (13), (14), (15), (16): Xaa is A or G
  MOD_RES (17), (18), (19), (20): Xaa is A or G or is absent
LHDELTSMEGLXXXXXXXXXMIQVTINSLQVQTPRX

SEQ ID NO: 17449 - protein, 38 aa, Artificial Sequence
  GFR-binding peptide
  MOD_RES (1), (3), (37): Xaa is C or S
XEXQSHEELVQVEKHQGQHPKIRVKAMKVSRQGTPVXE

SEQ ID NO: 17450 - protein, 32 aa, Artificial Sequence
  GFR-binding peptide
  MOD_RES (11), (12), (13), (14), (15): Xaa is A or G
  MOD_RES (16), (17), (18), (19): Xaa is A or G or is absent
HDELTSMEGIXXXXXXXXXMIQVTINSLQVQT

SEQ ID NO: 17451 - protein, 41 aa, Artificial Sequence
  GFR-binding peptide
  MOD_RES (2), (4), (38): Xaa is C or S
RXEXQSHEELSMEGIHQGQHPKIRMIQMTINSQGTPVXELG

SEQ ID NO: 17452 - protein, 42 aa, Artificial Sequence
  GFR-binding peptide
  MOD_RES (1), (3), (40): Xaa is C or S
XAXELHEELRSMEGILKPKKRVYEMIQVTINSHHVRSPQXKV

SEQ ID NO: 17453 - protein, 37 aa, Artificial Sequence
  GFR-binding peptide
  MOD_RES (1), (35): Xaa is C or S
XKNHQLFSMEGIHQGQHPKIRMIQMTINSEETPVXEL

SEQ ID NO: 17454 - protein, 39 aa, Artificial Sequence
  GFR-binding peptide
  MOD_RES (35), (35): Xaa is C or S
  MOD_RES (11), (12), (13), (14), (15): Xaa is A or G
  MOD_RES (16), (17), (18), (19): Xaa is A or G or is absent
HEELRSMEGLXXXXXXXXXMIQVTINSHHVRSPQXKVSS

SEQ ID NO: 17455 - protein, 41 aa, Artificial Sequence
  GFR-binding peptide
  MOD_RES (37), (37): Xaa is C or S
  MOD_RES (13), (14), (15), (16), (17): Xaa is A or G
  MOD_RES (18), (19), (20), (21): Xaa is A or G or is absent
ELHEELRVTAKKXXXXXXXXXIKRVQVPRHHVRSPQXKVSS

SEQ ID NO: 17456 - protein, 37 aa, Artificial Sequence
  GFR-binding peptide
  MOD_RES (1), (3), (37): Xaa is C or S
XEXQSHEELVQVEKHQGQHPKIRVKAMKVSRQGTPVX

SEQ ID NO: 17457 - protein, 39 aa, Artificial Sequence
  GFR-binding peptide
  MOD_RES (36), (36): Xaa is C or S
LHDELTSMEGLFIPKKRVIEMIQVTINSLQVQTPRXQVN

SEQ ID NO: 17458 - protein, 45 aa, Artificial Sequence
  GFR-binding peptide
  MOD_RES (2), (4), (41): Xaa is C or S
  MOD_RES (17), (18), (19), (20), (21): Xaa is A or G
  MOD_RES (22), (23), (24), (25): Xaa is A or G or is absent
EXKXALHDELTVTAKKXXXXXXXXXIKRVQVPRLQVQTPRXQVNR

SEQ ID NO: 17459 - protein, 38 aa, Artificial Sequence
  GFR-binding peptide
  MOD_RES (2), (4): Xaa is C or S
  MOD_RES (17), (18), (19), (20), (21): Xaa is A or G
  MOD_RES (22), (23), (24), (25): Xaa is A or G or is absent
EXKXALHDELTVQVEKXXXXXXXXXVKAVKVSRLQVQT

SEQ ID NO: 17460 - protein, 42 aa, Artificial Sequence
  GFR-binding peptide
  MOD_RES (2), (4), (41): Xaa is C or S
AXAXELHEELRSMEGLLKPKKRVYEMIQVTINSHHVRSPQXK

SEQ ID NO: 17461 - protein, 44 aa, Artificial Sequence
  GFR-binding peptide
  MOD_RES (2), (4), (38): Xaa is C or S
  MOD_RES (16), (17), (18), (19), (20): Xaa is A or G
  MOD_RES (21), (22), (23), (24): Xaa is A or G or is absent
RXEXQSHEELSMEGIXXXXXXXXXMIQMTINSQGTPVXELGEDN

SEQ ID NO: 17462 - protein, 35 aa, Artificial Sequence
  GFR-binding peptide
  MOD_RES (33), (33): Xaa is C or S
NHQLFSMEGIHQGQHPKIRMIQMTINSEETPVXEL

SEQ ID NO: 17463 - protein, 38 aa, Artificial Sequence
  GFR-binding peptide
  MOD_RES (2), (2): Xaa is C or S
AXELHEELRVQVEKLKPKKRVYEVKAVKVSRHHVRSPQ

SEQ ID NO: 17464 - protein, 42 aa, Artificial Sequence
  GFR-binding peptide
  MOD_RES (2), (39): Xaa is C or S
  MOD_RES (15), (16), (17), (18), (19): Xaa is A or G
  MOD_RES (20), (21), (22), (23): Xaa is A or G or is absent
AXELHEELRSMEGLXXXXXXXXXMIQVTINSHHVRSPQXKVS

SEQ ID NO: 17465 - protein, 42 aa, Artificial Sequence
  GFR-binding peptide
  MOD_RES (2), (36): Xaa is C or S
EXKNHQLFVQVEKHQGQHPKIRVKAMKVSREETPVXELGEDN

SEQ ID NO: 17466 - protein, 37 aa, Artificial Sequence
  GFR-binding peptide
  MOD_RES (1), (35): Xaa is C or S
  MOD_RES (13), (14), (15), (16), (17): Xaa is A or G
  MOD_RES (18), (19), (20), (21): Xaa is A or G or is absent
XKNHQLFSMEGIXXXXXXXXXMIQMTINSEETPVXEL

SEQ ID NO: 17467 - protein, 37 aa, Artificial Sequence
  GFR-binding peptide
  MOD_RES (1), (1): Xaa is C or S
XALHDELTSMEGLFIPKKRVIEMIQVTINSLQVQTPR

SEQ ID NO: 17468 - protein, 37 aa, Artificial Sequence
  GFR-binding peptide
  MOD_RES (1), (35): Xaa is C or S
  MOD_RES (13), (14), (15), (16), (17): Xaa is A or G
  MOD_RES (18), (19), (20), (21): Xaa is A or G or is absent
XKNHQLFSMEGLXXXXXXXXXMIQMTINSEETPVXEL

SEQ ID NO: 17469 - protein, 33 aa, Artificial Sequence
  GFR-binding peptide
  MOD_RES (33), (33): Xaa is C or S
NHQLFSMEGIHQGQHPKIRMIQMTINSEETPVX

SEQ ID NO: 17470 - protein, 38 aa, Artificial Sequence
  GFR-binding peptide
  MOD_RES (1), (3): Xaa is C or S
XAXELHEELRVTAKKLKPKKRVYEIKRVQVPRHHVRSP

SEQ ID NO: 17471 - protein, 38 aa, Artificial Sequence
  GFR-binding peptide
  MOD_RES (33), (33): Xaa is C or S
SHEELSMEGIHQGQHPKIRMIQMTINSQGTPVXELGED

SEQ ID NO: 17472 - protein, 39 aa, Artificial Sequence
  GFR-binding peptide
  MOD_RES (1), (38): Xaa is C or S
  MOD_RES (14), (15), (16), (17), (18): Xaa is A or G
  MOD_RES (19), (20), (21), (22): Xaa is A or G or is absent
XELHEELRVTAKKXXXXXXXXXIKRVQVPRHHVRSPQXK

SEQ ID NO: 17473 - protein, 40 aa, Artificial Sequence
  GFR-binding peptide
  MOD_RES (1), (35): Xaa is C or S
XQSHEELVQVEKHQGQHPKIRVKAMKVSRQGTPVXELGED

SEQ ID NO: 17474 - protein, 39 aa, Artificial Sequence
  GFR-binding peptide
  MOD_RES (1), (35): Xaa is C or S
  MOD_RES (13), (14), (15), (16), (17): Xaa is A or G
  MOD_RES (18), (19), (20), (21): Xaa is A or G or is absent
XKNHQLFVQVEKXXXXXXXXXVKAMKVSREETPVXELGE

SEQ ID NO: 17475 - protein, 42 aa, Artificial Sequence
  GFR-binding peptide
  MOD_RES (1), (3), (37): Xaa is C or S
  MOD_RES (15), (16), (17), (18), (19): Xaa is A or G
  MOD_RES (20), (21), (22), (23): Xaa is A or G or is absent
XEXQSHEELVQVEKXXXXXXXXXVKAMKVSRQGTPVXELGED

SEQ ID NO: 17476 - protein, 39 aa, Artificial Sequence
  GFR-binding peptide
  MOD_RES (2), (4): Xaa is C or S
EXKXALHDELTVQVEKFIPKKRVIEVKAVKVSRLQVQTP

SEQ ID NO: 17477 - protein, 33 aa, Artificial Sequence
  GFR-binding peptide
HEELRVQVEKLKPKKRVYEVKAVKVSRHHVRSP

SEQ ID NO: 17478 - protein, 39 aa, Artificial Sequence
  GFR-binding peptide
  MOD_RES (2), (39): Xaa is C or S
AXELHEELRSMEGILKPKKRVYEMIQVTINSHHVRSPQX

SEQ ID NO: 17479 - protein, 37 aa, Artificial Sequence
  GFR-binding peptide
  MOD_RES (1), (35): Xaa is C or S
XKNHQLFSMEGLHQGQHPKIRMIQMTINSEETPVXEL

SEQ ID NO: 17480 - protein, 43 aa, Artificial Sequence
  GFR-binding peptide
  MOD_RES (2), (4), (41): Xaa is C or S
EXKXALHDELTSMEGLFIPKKRVIEMIQVTINSLQVQTPRXQV

SEQ ID NO: 17481 - protein, 37 aa, Artificial Sequence
  GFR-binding peptide
  MOD_RES (1), (1): Xaa is C or S
  MOD_RES (14), (15), (16), (17), (18): Xaa is A or G
  MOD_RES (19), (20), (21), (22): Xaa is A or G or is absent
XALHDELTVQVEKXXXXXXXXXVKAVKVSRLQVQTPR

SEQ ID NO: 17482 - protein, 33 aa, Artificial Sequence
  GFR-binding peptide
  MOD_RES (12), (13), (14), (15), (16): Xaa is A or G
  MOD_RES (17), (18), (19), (20): Xaa is A or G or is absent
LHEELRSMEGIXXXXXXXXXMIQVTINSHHVRS

SEQ ID NO: 17483 - protein, 37 aa, Artificial Sequence
  GFR-binding peptide
  MOD_RES (33), (33): Xaa is C or S
  MOD_RES (11), (12), (13), (14), (15): Xaa is A or G
  MOD_RES (16), (17), (18), (19): Xaa is A or G or is absent
SHEELVQVEKXXXXXXXXXVKAMKVSRQGTPVXELGE

SEQ ID NO: 17484 - protein, 39 aa, Artificial Sequence
  GFR-binding peptide
  MOD_RES (1), (35): Xaa is C or S
XKNHQLFVQVEKHQGQHPKIRVKAMKVSREETPVXELGE

SEQ ID NO: 17485 - protein, 38 aa, Artificial Sequence
  GFR-binding peptide
  MOD_RES (2), (4), (38): Xaa is C or S
RXEXKNHQLFSMEGIHQGQHPKIRMIQMTINSEETPVX

SEQ ID NO: 17486 - protein, 39 aa, Artificial Sequence
  GFR-binding peptide
  MOD_RES (36), (36): Xaa is C or S
LHEELRSMEGLLKPKKRVYEMIQVTINSHHVRSPQXKVS

SEQ ID NO: 17487 - protein, 39 aa, Artificial Sequence
  GFR-binding peptide
  MOD_RES (1), (38): Xaa is C or S
  MOD_RES (14), (15), (16), (17), (18): Xaa is A or G
  MOD_RES (19), (20), (21), (22): Xaa is A or G or is absent
XELHEELRSMEGIXXXXXXXXXMIQVTINSHHVRSPQXK

SEQ ID NO: 17488 - protein, 37 aa, Artificial Sequence
  GFR-binding peptide
  MOD_RES (1), (35): Xaa is C or S
  MOD_RES (13), (14), (15), (16), (17): Xaa is A or G
  MOD_RES (18), (19), (20), (21): Xaa is A or G or is absent
XQSHEELVTAKKXXXXXXXXXIKRMQVPRQGTPVXEL

SEQ ID NO: 17489 - protein, 38 aa, Artificial Sequence
  GFR-binding peptide
  MOD_RES (1), (3), (37): Xaa is C or S
XEXKNHQLFVQVEKHQGQHPKIRVKAMKVSREETPVXE

SEQ ID NO: 17490 - protein, 38 aa, Artificial Sequence
  GFR-binding peptide
  MOD_RES (2), (2): Xaa is C or S
KXALHDELTSMEGLFIPKKRVIEMIQVTINSLQVQTPR

SEQ ID NO: 17491 - protein, 36 aa, Artificial Sequence
  GFR-binding peptide
  MOD_RES (2), (36): Xaa is C or S
EXQSHEELSMEGLHQGQHPKIRMIQMTINSQGTPVX

SEQ ID NO: 17492 - protein, 39 aa, Artificial Sequence
  GFR-binding peptide
  MOD_RES (2), (36): Xaa is C or S
EXKNHQLFVQVEKHQGQHPKIRVKAMKVSREETPVXELG

SEQ ID NO: 17493 - protein, 37 aa, Artificial Sequence
  GFR-binding peptide
  MOD_RES (2), (36): Xaa is C or S
EXQSHEELSMEGLHQGQHPKIRMIQMTINSQGTPVXE

SEQ ID NO: 17494 - protein, 38 aa, Artificial Sequence
  GFR-binding peptide
  MOD_RES (2), (4): Xaa is C or S
AXAXELHEELRVTAKKLKPKKRVYEIKRVQVPRHHVRS

SEQ ID NO: 17495 - protein, 40 aa, Artificial Sequence
  GFR-binding peptide
  MOD_RES (1), (38): Xaa is C or S
XELHEELRSMEGLLKPKKRVYEMIQVTINSHHVRSPQXKV

SEQ ID NO: 17496 - protein, 42 aa, Artificial Sequence
  GFR-binding peptide
  MOD_RES (1), (3), (37): Xaa is C or S
XEXQSHEELSMEGLHQGQHPKIRMIQMTINSQGTPVXELGED

SEQ ID NO: 17497 - protein, 37 aa, Artificial Sequence
  GFR-binding peptide
  MOD_RES (1), (3), (37): Xaa is C or S
XEXQSHEELSMEGIHQGQHPKIRMIQMTINSQGTPVX

SEQ ID NO: 17498 - protein, 39 aa, Artificial Sequence
  GFR-binding peptide
  MOD_RES (34), (34): Xaa is C or S
KNHQLFVTAKKHQGQHPKIRIKRMQVPREETPVXELGED

SEQ ID NO: 17499 - protein, 41 aa, Artificial Sequence
  GFR-binding peptide
  MOD_RES (2), (36): Xaa is C or S
  MOD_RES (14), (15), (16), (17), (18): Xaa is A or G
  MOD_RES (19), (20), (21), (22): Xaa is A or G or is absent
EXQSHEELVTAKKXXXXXXXXXIKRMQVPRQGTPVXELGED

SEQ ID NO: 17500 - protein, 41 aa, Artificial Sequence
  GFR-binding peptide
  MOD_RES (2), (39): Xaa is C or S
AXELHEELRSMEGLLKPKKRVYEMIQVTINSHHVRSPQXKV

SEQ ID NO: 17501 - protein, 39 aa, Artificial Sequence
  GFR-binding peptide
  MOD_RES (1), (3), (37): Xaa is C or S
  MOD_RES (15), (16), (17), (18), (19): Xaa is A or G
  MOD_RES (20), (21), (22), (23): Xaa is A or G or is absent
XEXKNHQLFSMEGLXXXXXXXXXMIQMTINSEETPVXEL

SEQ ID NO: 17502 - protein, 42 aa, Artificial Sequence
  GFR-binding peptide
  MOD_RES (1), (38): Xaa is C or S
  MOD_RES (14), (15), (16), (17), (18): Xaa is A or G
  MOD_RES (19), (20), (21), (22): Xaa is A or G or is absent
XELHEELRSMEGIXXXXXXXXXMIQVTINSHHVRSPQXKVSS

SEQ ID NO: 17503 - protein, 39 aa, Artificial Sequence
  GFR-binding peptide
  MOD_RES (1), (3): Xaa is C or S
XKXALHDELTSMEGIFIPKKRVIEMIQVTINSLQVQTPR

SEQ ID NO: 17504 - protein, 43 aa, Artificial Sequence
  GFR-binding peptide
  MOD_RES (1), (3), (40): Xaa is C or S
XKXALHDELTSMEGIFIPKKRVIEMIQVTINSLQVQTPRXQVN

SEQ ID NO: 17505 - protein, 33 aa, Artificial Sequence
  GFR-binding peptide
QSHEELVQVEKHQGQHPKIRVKAMKVSRQGTPV

SEQ ID NO: 17506 - protein, 39 aa, Artificial Sequence
  GFR-binding peptide
  MOD_RES (34), (34): Xaa is C or S
  MOD_RES (12), (13), (14), (15), (16): Xaa is A or G
  MOD_RES (17), (18), (19), (20): Xaa is A or G or is absent
KNHQLFSMEGLXXXXXXXXXMIQMTINSEETPVXELGED

SEQ ID NO: 17507 - protein, 44 aa, Artificial Sequence
  GFR-binding peptide
  MOD_RES (1), (3), (40): Xaa is C or S
XKXALHDELTSMEGIFIPKKRVIEMIQVTINSLQVQTPRXQVNR

SEQ ID NO: 17508 - protein, 44 aa, Artificial Sequence
  GFR-binding peptide
  MOD_RES (1), (3), (40): Xaa is C or S
XKXALHDELTSMEGLFIPKKRVIEMIQVTINSLQVQTPRXQVNR

SEQ ID NO: 17509 - protein, 38 aa, Artificial Sequence
  GFR-binding peptide
  MOD_RES (2), (4): Xaa is C or S
EXKXALHDELTSMEGLFIPKKRVIEMIQVTINSLQVQT

SEQ ID NO: 17510 - protein, 38 aa, Artificial Sequence
  GFR-binding peptide
  MOD_RES (34), (34): Xaa is C or S
  MOD_RES (12), (13), (14), (15), (16): Xaa is A or G
  MOD_RES (17), (18), (19), (20): Xaa is A or G or is absent
QSHEELVTAKKXXXXXXXXXIKRMQVPRQGTPVXELGE

SEQ ID NO: 17511 - protein, 35 aa, Artificial Sequence
  GFR-binding peptide
  MOD_RES (34), (34): Xaa is C or S
  MOD_RES (12), (13), (14), (15), (16): Xaa is A or G
  MOD_RES (17), (18), (19), (20): Xaa is A or G or is absent
KNHQLFSMEGIXXXXXXXXXMIQMTINSEETPVXE

SEQ ID NO: 17512 - protein, 32 aa, Artificial Sequence
  GFR-binding peptide
  MOD_RES (11), (12), (13), (14), (15): Xaa is A or G
  MOD_RES (16), (17), (18), (19): Xaa is A or G or is absent
SHEELVTAKKXXXXXXXXXIKRMQVPRQGTPV

SEQ ID NO: 17513 - protein, 40 aa, Artificial Sequence
  GFR-binding peptide
  MOD_RES (1), (35): Xaa is C or S
  MOD_RES (13), (14), (15), (16), (17): Xaa is A or G
  MOD_RES (18), (19), (20), (21): Xaa is A or G or is absent
XKNHQLFVTAKKXXXXXXXXXIKRMQVPREETPVXELGED

SEQ ID NO: 17514 - protein, 33 aa, Artificial Sequence
  GFR-binding peptide
QSHEELSMEGIHQGQHPKIRMIQMTINSQGTPV

SEQ ID NO: 17515 - protein, 35 aa, Artificial Sequence
  GFR-binding peptide
  MOD_RES (1), (35): Xaa is C or S
XKNHQLFVTAKKHQGQHPKIRIKRMQVPREETPVX

SEQ ID NO: 17516 - protein, 40 aa, Artificial Sequence
  GFR-binding peptide
  MOD_RES (1), (35): Xaa is C or S
  MOD_RES (13), (14), (15), (16), (17): Xaa is A or G
  MOD_RES (18), (19), (20), (21): Xaa is A or G or is absent
XQSHEELVQVEKXXXXXXXXXVKAMKVSRQGTPVXELGED

SEQ ID NO: 17517 - protein, 39 aa, Artificial Sequence
  GFR-binding peptide
  MOD_RES (2), (4): Xaa is C or S
AXAXELHEELRSMEGILKPKKRVYEMIQVTINSHHVRSP

SEQ ID NO: 17518 - protein, 43 aa, Artificial Sequence
  GFR-binding peptide
  MOD_RES (2), (39): Xaa is C or S
  MOD_RES (15), (16), (17), (18), (19): Xaa is A or G
  MOD_RES (20), (21), (22), (23): Xaa is A or G or is absent
AXELHEELRVTAKKXXXXXXXXXIKRVQVPRHHVRSPQXKVSS

SEQ ID NO: 17519 - protein, 37 aa, Artificial Sequence
  GFR-binding peptide
  MOD_RES (2), (36): Xaa is C or S
EXQSHEELSMEGIHQGQHPKIRMIQMTINSQGTPVXE

SEQ ID NO: 17520 - protein, 36 aa, Artificial Sequence
  GFR-binding peptide
  MOD_RES (36), (36): Xaa is C or S
  MOD_RES (12), (13), (14), (15), (16): Xaa is A or G
  MOD_RES (17), (18), (19), (20): Xaa is A or G or is absent
LHEELRSMEGLXXXXXXXXXMIQVTINSHHVRSPQX

SEQ ID NO: 17521 - protein, 33 aa, Artificial Sequence
  GFR-binding peptide
  MOD_RES (33), (33): Xaa is C or S
  MOD_RES (11), (12), (13), (14), (15): Xaa is A or G
  MOD_RES (16), (17), (18), (19): Xaa is A or G or is absent
NHQLFVTAKKXXXXXXXXXIKRMQVPREETPVX

SEQ ID NO: 17522 - protein, 34 aa, Artificial Sequence
  GFR-binding peptide
  MOD_RES (34), (34): Xaa is C or S
QSHEELSMEGIHQGQHPKIRMIQMTINSQGTPVX

SEQ ID NO: 17523 - protein, 33 aa, Artificial Sequence
  GFR-binding peptide
  MOD_RES (11), (12), (13), (14), (15): Xaa is A or G
  MOD_RES (16), (17), (18), (19): Xaa is A or G or is absent
HDELTVQVEKXXXXXXXXXVKAVKVSRLQVQTP

SEQ ID NO: 17524 - protein, 37 aa, Artificial Sequence
  GFR-binding peptide
  MOD_RES (37), (37): Xaa is C or S
  MOD_RES (13), (14), (15), (16), (17): Xaa is A or G
  MOD_RES (18), (19), (20), (21): Xaa is A or G or is absent
ELHEELRSMEGLXXXXXXXXXMIQVTINSHHVRSPQX

SEQ ID NO: 17525 - protein, 37 aa, Artificial Sequence
  GFR-binding peptide
  MOD_RES (33), (33): Xaa is C or S
SHEELVTAKKHQGQHPKIRIKRMQVPRQGTPVXELGE

SEQ ID NO: 17526 - protein, 40 aa, Artificial Sequence
  GFR-binding peptide
  MOD_RES (2), (4), (38): Xaa is C or S
  MOD_RES (16), (17), (18), (19), (20): Xaa is A or G
  MOD_RES (21), (22), (23), (24): Xaa is A or G or is absent
RXEXKNHQLFVTAKKXXXXXXXXXIKRMQVPREETPVXEL

SEQ ID NO: 17527 - protein, 38 aa, Artificial Sequence
  GFR-binding peptide
  MOD_RES (2), (4): Xaa is C or S
EXKXALHDELTSMEGIFIPKKRVIEMIQVTINSLQVQT

SEQ ID NO: 17528 - protein, 37 aa, Artificial Sequence
  GFR-binding peptide
  MOD_RES (37), (37): Xaa is C or S
ELHEELRVQVEKLKPKKRVYEVKAVKVSRHHVRSPQX

SEQ ID NO: 17529 - protein, 37 aa, Artificial Sequence
  GFR-binding peptide
  MOD_RES (1), (3): Xaa is C or S
  MOD_RES (16), (17), (18), (19), (20): Xaa is A or G
  MOD_RES (21), (22), (23), (24): Xaa is A or G or is absent
XAXELHEELRSMEGLXXXXXXXXXMIQVTINSHHVRS

SEQ ID NO: 17530 - protein, 45 aa, Artificial Sequence
  GFR-binding peptide
  MOD_RES (2), (4), (41): Xaa is C or S
  MOD_RES (17), (18), (19), (20), (21): Xaa is A or G
  MOD_RES (22), (23), (24), (25): Xaa is A or G or is absent
AXAXELHEELRSMEGIXXXXXXXXXMIQVTINSHHVRSPQXKVSS

SEQ ID NO: 17531 - protein, 38 aa, Artificial Sequence
  GFR-binding peptide
  MOD_RES (1), (3), (37): Xaa is C or S
XEXQSHEELSMEGIHQGQHPKIRMIQMTINSQGTPVXE

SEQ ID NO: 17532 - protein, 39 aa, Artificial Sequence
  GFR-binding peptide
  MOD_RES (37), (37): Xaa is C or S
ELHEELRSMEGILKPKKRVYEMIQVTINSHHVRSPQXKV

SEQ ID NO: 17533 - protein, 42 aa, Artificial Sequence
  GFR-binding peptide
  MOD_RES (2), (39): Xaa is C or S
  MOD_RES (15), (16), (17), (18), (19): Xaa is A or G
  MOD_RES (20), (21), (22), (23): Xaa is A or G or is absent
KXALHDELTVTAKKXXXXXXXXXIKRVQVPRLQVQTPRXQVN

SEQ ID NO: 17534 - protein, 45 aa, Artificial Sequence
  GFR-binding peptide
  MOD_RES (2), (4), (41): Xaa is C or S
  MOD_RES (17), (18), (19), (20), (21): Xaa is A or G
  MOD_RES (22), (23), (24), (25): Xaa is A or G or is absent
AXAXELHEELRSMEGLXXXXXXXXXMIQVTINSHHVRSPQXKVSS

SEQ ID NO: 17535 - protein, 36 aa, Artificial Sequence
  GFR-binding peptide
  MOD_RES (33), (33): Xaa is C or S
NHQLFVQVEKHQGQHPKIRVKAMKVSREETPVXELG

SEQ ID NO: 17536 - protein, 39 aa, Artificial Sequence
  GFR-binding peptide
  MOD_RES (1), (35): Xaa is C or S
XQSHEELSMEGLHQGQHPKIRMIQMTINSQGTPVXELGE

SEQ ID NO: 17537 - protein, 37 aa, Artificial Sequence
  GFR-binding peptide
  MOD_RES (36), (36): Xaa is C or S
LHDELTVTAKKFIPKKRVIEIKRVQVPRLQVQTPRXQ

SEQ ID NO: 17538 - protein, 37 aa, Artificial Sequence
  GFR-binding peptide
  MOD_RES (1), (1): Xaa is C or S
XALHDELTVTAKKFIPKKRVIEIKRVQVPRLQVQTPR

SEQ ID NO: 17539 - protein, 35 aa, Artificial Sequence
  GFR-binding peptide
  MOD_RES (2), (2): Xaa is C or S
  MOD_RES (14), (15), (16), (17), (18): Xaa is A or G
  MOD_RES (19), (20), (21), (22): Xaa is A or G or is absent
EXKNHQLFSMEGLXXXXXXXXXMIQMTINSEETPV

SEQ ID NO: 17540 - protein, 37 aa, Artificial Sequence
  GFR-binding peptide
  MOD_RES (1), (3), (37): Xaa is C or S
XEXKNHQLFVQVEKHQGQHPKIRVKAMKVSREETPVX

SEQ ID NO: 17541 - protein, 34 aa, Artificial Sequence
  GFR-binding peptide
  MOD_RES (12), (13), (14), (15), (16): Xaa is A or G
  MOD_RES (17), (18), (19), (20): Xaa is A or G or is absent
LHEELRSMEGIXXXXXXXXXMIQVTINSHHVRSP

SEQ ID NO: 17542 - protein, 39 aa, Artificial Sequence
  GFR-binding peptide
  MOD_RES (33), (33): Xaa is C or S
NHQLFSMEGLHQGQHPKIRMIQMTINSEETPVXELGEDN

SEQ ID NO: 17543 - protein, 36 aa, Artificial Sequence
  GFR-binding peptide
  MOD_RES (2), (36): Xaa is C or S
EXQSHEELSMEGIHQGQHPKIRMIQMTINSQGTPVX

SEQ ID NO: 17544 - protein, 41 aa, Artificial Sequence
  GFR-binding peptide
  MOD_RES (1), (35): Xaa is C or S
XKNHQLFSMEGLHQGQHPKIRMIQMTINSEETPVXELGEDN

SEQ ID NO: 17545 - protein, 36 aa, Artificial Sequence
  GFR-binding peptide
  MOD_RES (33), (33): Xaa is C or S
NHQLFVTAKKHQGQHPKIRIKRMQVPREETPVXELG

SEQ ID NO: 17546 - protein, 41 aa, Artificial Sequence
  GFR-binding peptide
  MOD_RES (1), (35): Xaa is C or S
  MOD_RES (13), (14), (15), (16), (17): Xaa is A or G
  MOD_RES (18), (19), (20), (21): Xaa is A or G or is absent
XQSHEELSMEGIXXXXXXXXXMIQMTINSQGTPVXELGEDN

SEQ ID NO: 17547 - protein, 35 aa, Artificial Sequence
  GFR-binding peptide
  MOD_RES (2), (2): Xaa is C or S
  MOD_RES (14), (15), (16), (17), (18): Xaa is A or G
  MOD_RES (19), (20), (21), (22): Xaa is A or G or is absent
EXQSHEELVQVEKXXXXXXXXXVKAMKVSRQGTPV

SEQ ID NO: 17548 - protein, 36 aa, Artificial Sequence
  GFR-binding peptide
  MOD_RES (33), (33): Xaa is C or S
  MOD_RES (11), (12), (13), (14), (15): Xaa is A or G
  MOD_RES (16), (17), (18), (19): Xaa is A or G or is absent
NHQLFSMEGLXXXXXXXXXMIQMTINSEETPVXELG

SEQ ID NO: 17549 - protein, 42 aa, Artificial Sequence
  GFR-binding peptide
  MOD_RES (2), (39): Xaa is C or S
  MOD_RES (15), (16), (17), (18), (19): Xaa is A or G
  MOD_RES (20), (21), (22), (23): Xaa is A or G or is absent
AXELHEELRSMEGIXXXXXXXXXMIQVTINSHHVRSPQXKVS

SEQ ID NO: 17550 - protein, 41 aa, Artificial Sequence
  GFR-binding peptide
  MOD_RES (37), (37): Xaa is C or S
  MOD_RES (13), (14), (15), (16), (17): Xaa is A or G
  MOD_RES (18), (19), (20), (21): Xaa is A or G or is absent
ELHEELRSMEGIXXXXXXXXXMIQVTINSHHVRSPQXKVSS

SEQ ID NO: 17551 - protein, 39 aa, Artificial Sequence
  GFR-binding peptide
  MOD_RES (33), (33): Xaa is C or S
SHEELSMEGLHQGQHPKIRMIQMTINSQGTPVXELGEDN

SEQ ID NO: 17552 - protein, 40 aa, Artificial Sequence
  GFR-binding peptide
  MOD_RES (2), (39): Xaa is C or S
  MOD_RES (15), (16), (17), (18), (19): Xaa is A or G
  MOD_RES (20), (21), (22), (23): Xaa is A or G or is absent
AXELHEELRSMEGIXXXXXXXXXMIQVTINSHHVRSPQXK

SEQ ID NO: 17553 - protein, 43 aa, Artificial Sequence
  GFR-binding peptide
  MOD_RES (2), (39): Xaa is C or S
AXELHEELRVTAKKLKPKKRVYEIKRVQVPRHHVRSPQXKVSS

SEQ ID NO: 17554 - protein, 37 aa, Artificial Sequence
  GFR-binding peptide
  MOD_RES (34), (34): Xaa is C or S
KNHQLFVTAKKHQGQHPKIRIKRMQVPREETPVXELG

SEQ ID NO: 17555 - protein, 37 aa, Artificial Sequence
  GFR-binding peptide
  MOD_RES (1), (3), (37): Xaa is C or S
XEXQSHEELVTAKKHQGQHPKIRIKRMQVPRQGTPVX

SEQ ID NO: 17556 - protein, 38 aa, Artificial Sequence
  GFR-binding peptide
  MOD_RES (2), (2): Xaa is C or S
KXALHDELTSMEGIFIPKKRVIEMIQVTINSLQVQTPR

SEQ ID NO: 17557 - protein, 41 aa, Artificial Sequence
  GFR-binding peptide
  MOD_RES (2), (4), (41): Xaa is C or S
AXAXELHEELRSMEGILKPKKRVYEMIQVTINSHHVRSPQX

SEQ ID NO: 17558 - protein, 41 aa, Artificial Sequence
  GFR-binding peptide
  MOD_RES (37), (37): Xaa is C or S
ALHDELTVTAKKFIPKKRVIEIKRVQVPRLQVQTPRXQVNR

SEQ ID NO: 17559 - protein, 37 aa, Artificial Sequence
  GFR-binding peptide
  MOD_RES (2), (4): Xaa is C or S
RXEXKNHQLFSMEGLHQGQHPKIRMIQMTINSEETPV

SEQ ID NO: 17560 - protein, 39 aa, Artificial Sequence
  GFR-binding peptide
  MOD_RES (2), (4): Xaa is C or S
AXAXELHEELRSMEGLLKPKKRVYEMIQVTINSHHVRSP

SEQ ID NO: 17561 - protein, 35 aa, Artificial Sequence
  GFR-binding peptide
  MOD_RES (1), (35): Xaa is C or S
  MOD_RES (13), (14), (15), (16), (17): Xaa is A or G
  MOD_RES (18), (19), (20), (21): Xaa is A or G or is absent
XQSHEELVQVEKXXXXXXXXXVKAMKVSRQGTPVX

SEQ ID NO: 17562 - protein, 44 aa, Artificial Sequence
  GFR-binding peptide
  MOD_RES (2), (4), (38): Xaa is C or S
RXEXQSHEELVTAKKHQGQHPKIRIKRMQVPRQGTPVXELGEDN

SEQ ID NO: 17563 - protein, 41 aa, Artificial Sequence
  GFR-binding peptide
  MOD_RES (2), (4), (38): Xaa is C or S
RXEXKNHQLFSMEGLHQGQHPKIRMIQMTINSEETPVXELG

SEQ ID NO: 17564 - protein, 39 aa, Artificial Sequence
  GFR-binding peptide
  MOD_RES (2), (4), (38): Xaa is C or S
  MOD_RES (16), (17), (18), (19), (20): Xaa is A or G
  MOD_RES (21), (22), (23), (24): Xaa is A or G or is absent
RXEXKNHQLFVTAKKXXXXXXXXXIKRMQVPREETPVXE

SEQ ID NO: 17565 - protein, 36 aa, Artificial Sequence
  GFR-binding peptide
  MOD_RES (2), (2): Xaa is C or S
  MOD_RES (15), (16), (17), (18), (19): Xaa is A or G
  MOD_RES (20), (21), (22), (23): Xaa is A or G or is absent
AXELHEELRVQVEKXXXXXXXXXVKAVKVSRHHVRS

SEQ ID NO: 17566 - protein, 41 aa, Artificial Sequence
  GFR-binding peptide
  MOD_RES (2), (39): Xaa is C or S
  MOD_RES (15), (16), (17), (18), (19): Xaa is A or G
  MOD_RES (20), (21), (22), (23): Xaa is A or G or is absent
AXELHEELRSMEGLXXXXXXXXXMIQVTINSHHVRSPQXKV

SEQ ID NO: 17567 - protein, 38 aa, Artificial Sequence
  GFR-binding peptide
  MOD_RES (2), (36): Xaa is C or S
  MOD_RES (14), (15), (16), (17), (18): Xaa is A or G
  MOD_RES (19), (20), (21), (22): Xaa is A or G or is absent
EXQSHEELSMEGLXXXXXXXXXMIQMTINSQGTPVXEL

SEQ ID NO: 17568 - protein, 35 aa, Artificial Sequence
  GFR-binding peptide
  MOD_RES (1), (35): Xaa is C or S
XQSHEELVQVEKHQGQHPKIRVKAMKVSRQGTPVX

SEQ ID NO: 17569 - protein, 37 aa, Artificial Sequence
  GFR-binding peptide
  MOD_RES (1), (1): Xaa is C or S
XELHEELRVTAKKLKPKKRVYEIKRVQVPRHHVRSPQ

SEQ ID NO: 17570 - protein, 45 aa, Artificial Sequence
  GFR-binding peptide
  MOD_RES (2), (4), (41): Xaa is C or S
EXKXALHDELTVTAKKFIPKKRVIEIKRVQVPRLQVQTPRXQVNR

SEQ ID NO: 17571 - protein, 44 aa, Artificial Sequence
  GFR-binding peptide
  MOD_RES (1), (3), (40): Xaa is C or S
  MOD_RES (16), (17), (18), (19), (20): Xaa is A or G
  MOD_RES (21), (22), (23), (24): Xaa is A or G or is absent
XAXELHEELRSMEGLXXXXXXXXXMIQVTINSHHVRSPQXKVSS

SEQ ID NO: 17572 - protein, 40 aa, Artificial Sequence
  GFR-binding peptide
  MOD_RES (1), (38): Xaa is C or S
  MOD_RES (14), (15), (16), (17), (18): Xaa is A or G
  MOD_RES (19), (20), (21), (22): Xaa is A or G or is absent
XALHDELTVTAKKXXXXXXXXXIKRVQVPRLQVQTPRXQV

SEQ ID NO: 17573 - protein, 40 aa, Artificial Sequence
  GFR-binding peptide
  MOD_RES (1), (3), (40): Xaa is C or S
XAXELHEELRVTAKKLKPKKRVYEIKRVQVPRHHVRSPQX

SEQ ID NO: 17574 - protein, 37 aa, Artificial Sequence
  GFR-binding peptide
  MOD_RES (35), (35): Xaa is C or S
  MOD_RES (11), (12), (13), (14), (15): Xaa is A or G
  MOD_RES (16), (17), (18), (19): Xaa is A or G or is absent
HEELRSMEGIXXXXXXXXXMIQVTINSHHVRSPQXKV

SEQ ID NO: 17575 - protein, 36 aa, Artificial Sequence
  GFR-binding peptide
  MOD_RES (34), (34): Xaa is C or S
  MOD_RES (12), (13), (14), (15), (16): Xaa is A or G
  MOD_RES (17), (18), (19), (20): Xaa is A or G or is absent
KNHQLFVTAKKXXXXXXXXXIKRMQVPREETPVXEL

SEQ ID NO: 17576 - protein, 33 aa, Artificial Sequence
  GFR-binding peptide
  MOD_RES (33), (33): Xaa is C or S
  MOD_RES (11), (12), (13), (14), (15): Xaa is A or G
  MOD_RES (16), (17), (18), (19): Xaa is A or G or is absent
SHEELVQVEKXXXXXXXXXVKAMKVSRQGTPVX

SEQ ID NO: 17577 - protein, 45 aa, Artificial Sequence
  GFR-binding peptide
  MOD_RES (2), (4), (41): Xaa is C or S
  MOD_RES (17), (18), (19), (20), (21): Xaa is A or G
  MOD_RES (22), (23), (24), (25): Xaa is A or G or is absent
AXAXELHEELRVTAKKXXXXXXXXXIKRVQVPRHHVRSPQXKVSS

SEQ ID NO: 17578 - protein, 44 aa, Artificial Sequence
  GFR-binding peptide
  MOD_RES (1), (3), (40): Xaa is C or S
  MOD_RES (16), (17), (18), (19), (20): Xaa is A or G
  MOD_RES (21), (22), (23), (24): Xaa is A or G or is absent
XAXELHEELRSMEGIXXXXXXXXXMIQVTINSHHVRSPQXKVSS

SEQ ID NO: 17579 - protein, 37 aa, Artificial Sequence
  GFR-binding peptide
  MOD_RES (34), (34): Xaa is C or S
  MOD_RES (12), (13), (14), (15), (16): Xaa is A or G
  MOD_RES (17), (18), (19), (20): Xaa is A or G or is absent
KNHQLFSMEGLXXXXXXXXXMIQMTINSEETPVXELG

SEQ ID NO: 17580 - protein, 38 aa, Artificial Sequence
  GFR-binding peptide
  MOD_RES (2), (4), (38): Xaa is C or S
RXEXQSHEELSMEGLHQGQHPKIRMIQMTINSQGTPVX

SEQ ID NO: 17581 - protein, 38 aa, Artificial Sequence
  GFR-binding peptide
  MOD_RES (2), (2): Xaa is C or S
  MOD_RES (15), (16), (17), (18), (19): Xaa is A or G
  MOD_RES (20), (21), (22), (23): Xaa is A or G or is absent
KXALHDELTVTAKKXXXXXXXXXIKRVQVPRLQVQTPR

SEQ ID NO: 17582 - protein, 37 aa, Artificial Sequence
  GFR-binding peptide
  MOD_RES (36), (36): Xaa is C or S
  MOD_RES (12), (13), (14), (15), (16): Xaa is A or G
  MOD_RES (17), (18), (19), (20): Xaa is A or G or is absent
LHEELRVTAKKXXXXXXXXXIKRVQVPRHHVRSPQXK

SEQ ID NO: 17583 - protein, 39 aa, Artificial Sequence
  GFR-binding peptide
  MOD_RES (1), (3): Xaa is C or S
XKXALHDELTSMEGLFIPKKRVIEMIQVTINSLQVQTPR

SEQ ID NO: 17584 - protein, 38 aa, Artificial Sequence
  GFR-binding peptide
  MOD_RES (37), (37): Xaa is C or S
  MOD_RES (13), (14), (15), (16), (17): Xaa is A or G
  MOD_RES (18), (19), (20), (21): Xaa is A or G or is absent
ELHEELRVQVEKXXXXXXXXXVKAVKVSRHHVRSPQXK

SEQ ID NO: 17585 - protein, 38 aa, Artificial Sequence
  GFR-binding peptide
  MOD_RES (35), (35): Xaa is C or S
HDELTVQVEKFIPKKRVIEVKAVKVSRLQVQTPRXQVN

SEQ ID NO: 17586 - protein, 43 aa, Artificial Sequence
  GFR-binding peptide
  MOD_RES (1), (3), (37): Xaa is C or S
XEXKNHQLFSMEGIHQGQHPKIRMIQMTINSEETPVXELGEDN

SEQ ID NO: 17587 - protein, 38 aa, Artificial Sequence
  GFR-binding peptide
  MOD_RES (1), (35): Xaa is C or S
  MOD_RES (13), (14), (15), (16), (17): Xaa is A or G
  MOD_RES (18), (19), (20), (21): Xaa is A or G or is absent
XQSHEELSMEGLXXXXXXXXXMIQMTINSQGTPVXELG

SEQ ID NO: 17588 - protein, 37 aa, Artificial Sequence
  GFR-binding peptide
  MOD_RES (33), (33): Xaa is C or S
NHQLFSMEGLHQGQHPKIRMIQMTINSEETPVXELGE

SEQ ID NO: 17589 - protein, 40 aa, Artificial Sequence
  GFR-binding peptide
  MOD_RES (2), (4), (38): Xaa is C or S
RXEXKNHQLFVQVEKHQGQHPKIRVKAMKVSREETPVXEL

SEQ ID NO: 17590 - protein, 38 aa, Artificial Sequence
  GFR-binding peptide
  MOD_RES (2), (2): Xaa is C or S
  MOD_RES (15), (16), (17), (18), (19): Xaa is A or G
  MOD_RES (20), (21), (22), (23): Xaa is A or G or is absent
KXALHDELTSMEGLXXXXXXXXXMIQVTINSLQVQTPR

SEQ ID NO: 17591 - protein, 35 aa, Artificial Sequence
  GFR-binding peptide
  MOD_RES (1), (1): Xaa is C or S
  MOD_RES (14), (15), (16), (17), (18): Xaa is A or G
  MOD_RES (19), (20), (21), (22): Xaa is A or G or is absent
XALHDELTSMEGIXXXXXXXXXMIQVTINSLQVQT

SEQ ID NO: 17592 - protein, 41 aa, Artificial Sequence
  GFR-binding peptide
  MOD_RES (1), (38): Xaa is C or S
  MOD_RES (14), (15), (16), (17), (18): Xaa is A or G
  MOD_RES (19), (20), (21), (22): Xaa is A or G or is absent
XELHEELRVQVEKXXXXXXXXXVKAVKVSRHHVRSPQXKVS

SEQ ID NO: 17593 - protein, 36 aa, Artificial Sequence
  GFR-binding peptide
  MOD_RES (1), (1): Xaa is C or S
XALHDELTVQVEKFIPKKRVIEVKAVKVSRLQVQTP

SEQ ID NO: 17594 - protein, 40 aa, Artificial Sequence
  GFR-binding peptide
  MOD_RES (2), (36): Xaa is C or S
  MOD_RES (14), (15), (16), (17), (18): Xaa is A or G
  MOD_RES (19), (20), (21), (22): Xaa is A or G or is absent
EXKNHQLFVQVEKXXXXXXXXXVKAMKVSREETPVXELGE

SEQ ID NO: 17595 - protein, 39 aa, Artificial Sequence
  GFR-binding peptide
  MOD_RES (2), (4): Xaa is C or S
AXAXELHEELRVTAKKLKPKKRVYEIKRVQVPRHHVRSP

SEQ ID NO: 17596 - protein, 35 aa, Artificial Sequence
  GFR-binding peptide
  MOD_RES (1), (1): Xaa is C or S
XELHEELRVQVEKLKPKKRVYEVKAVKVSRHHVRS

SEQ ID NO: 17597 - protein, 41 aa, Artificial Sequence
  GFR-binding peptide
  MOD_RES (37), (37): Xaa is C or S
ALHDELTSMEGLFIPKKRVIEMIQVTINSLQVQTPRXQVNR

SEQ ID NO: 17598 - protein, 42 aa, Artificial Sequence
  GFR-binding peptide
  MOD_RES (2), (4), (38): Xaa is C or S
RXEXKNHQLFVQVEKHQGQHPKIRVKAMKVSREETPVXELGE

SEQ ID NO: 17599 - protein, 39 aa, Artificial Sequence
  GFR-binding peptide
  MOD_RES (1), (38): Xaa is C or S
XALHDELTVQVEKFIPKKRVIEVKAVKVSRLQVQTPRXQ

SEQ ID NO: 17600 - protein, 38 aa, Artificial Sequence
  GFR-binding peptide
  MOD_RES (1), (35): Xaa is C or S
XQSHEELSMEGLHQGQHPKIRMIQMTINSQGTPVXELG

SEQ ID NO: 17601 - protein, 36 aa, Artificial Sequence
  GFR-binding peptide
  MOD_RES (2), (2): Xaa is C or S
  MOD_RES (15), (16), (17), (18), (19): Xaa is A or G
  MOD_RES (20), (21), (22), (23): Xaa is A or G or is absent
KXALHDELTSMEGLXXXXXXXXXMIQVTINSLQVQT

SEQ ID NO: 17602 - protein, 36 aa, Artificial Sequence
  GFR-binding peptide
  MOD_RES (2), (2): Xaa is C or S
KXALHDELTSMEGIFIPKKRVIEMIQVTINSLQVQT

SEQ ID NO: 17603 - protein, 32 aa, Artificial Sequence
  GFR-binding peptide
  MOD_RES (11), (12), (13), (14), (15): Xaa is A or G
  MOD_RES (16), (17), (18), (19): Xaa is A or G or is absent
HDELTSMEGLXXXXXXXXXMIQVTINSLQVQT

SEQ ID NO: 17604 - protein, 39 aa, Artificial Sequence
  GFR-binding peptide
  MOD_RES (2), (39): Xaa is C or S
  MOD_RES (15), (16), (17), (18), (19): Xaa is A or G
  MOD_RES (20), (21), (22), (23): Xaa is A or G or is absent
AXELHEELRSMEGIXXXXXXXXXMIQVTINSHHVRSPQX

SEQ ID NO: 17605 - protein, 43 aa, Artificial Sequence
  GFR-binding peptide
  MOD_RES (1), (3), (37): Xaa is C or S
XEXKNHQLFVTAKKHQGQHPKIRIKRMQVPREETPVXELGEDN

SEQ ID NO: 17606 - protein, 38 aa, Artificial Sequence
  GFR-binding peptide
  MOD_RES (35), (35): Xaa is C or S
HEELRSMEGILKPKKRVYEMIQVTINSHHVRSPQXKVS

SEQ ID NO: 17607 - protein, 40 aa, Artificial Sequence
  GFR-binding peptide
  MOD_RES (36), (36): Xaa is C or S
  MOD_RES (12), (13), (14), (15), (16): Xaa is A or G
  MOD_RES (17), (18), (19), (20): Xaa is A or G or is absent
LHDELTSMEGLXXXXXXXXXMIQVTINSLQVQTPRXQVNR

SEQ ID NO: 17608 - protein, 32 aa, Artificial Sequence
  GFR-binding peptide
HEELRSMEGILKPKKRVYEMIQVTINSHHVRS

SEQ ID NO: 17609 - protein, 40 aa, Artificial Sequence
  GFR-binding peptide
  MOD_RES (2), (36): Xaa is C or S
  MOD_RES (14), (15), (16), (17), (18): Xaa is A or G
  MOD_RES (19), (20), (21), (22): Xaa is A or G or is absent
EXQSHEELSMEGIXXXXXXXXXMIQMTINSQGTPVXELGE

SEQ ID NO: 17610 - protein, 39 aa, Artificial Sequence
  GFR-binding peptide
  MOD_RES (33), (33): Xaa is C or S
SHEELSMEGIHQGQHPKIRMIQMTINSQGTPVXELGEDN

SEQ ID NO: 17611 - protein, 42 aa, Artificial Sequence
  GFR-binding peptide
  MOD_RES (2), (4), (38): Xaa is C or S
  MOD_RES (16), (17), (18), (19), (20): Xaa is A or G
  MOD_RES (21), (22), (23), (24): Xaa is A or G or is absent
RXEXKNHQLFSMEGIXXXXXXXXXMIQMTINSEETPVXELGE

SEQ ID NO: 17612 - protein, 37 aa, Artificial Sequence
  GFR-binding peptide
  MOD_RES (2), (36): Xaa is C or S
EXQSHEELVTAKKHQGQHPKIRIKRMQVPRQGTPVXE

SEQ ID NO: 17613 - protein, 37 aa, Artificial Sequence
  GFR-binding peptide
  MOD_RES (36), (36): Xaa is C or S
  MOD_RES (12), (13), (14), (15), (16): Xaa is A or G
  MOD_RES (17), (18), (19), (20): Xaa is A or G or is absent
LHDELTVQVEKXXXXXXXXXVKAVKVSRLQVQTPRXQ

SEQ ID NO: 17614 - protein, 36 aa, Artificial Sequence
  GFR-binding peptide
  MOD_RES (33), (33): Xaa is C or S
  MOD_RES (11), (12), (13), (14), (15): Xaa is A or G
  MOD_RES (16), (17), (18), (19): Xaa is A or G or is absent
NHQLFVQVEKXXXXXXXXXVKAMKVSREETPVXELG

SEQ ID NO: 17615 - protein, 40 aa, Artificial Sequence
  GFR-binding peptide
  MOD_RES (36), (36): Xaa is C or S
  MOD_RES (12), (13), (14), (15), (16): Xaa is A or G
  MOD_RES (17), (18), (19), (20): Xaa is A or G or is absent
LHEELRVQVEKXXXXXXXXXVKAVKVSRHHVRSPQXKVSS

SEQ ID NO: 17616 - protein, 37 aa, Artificial Sequence
  GFR-binding peptide
  MOD_RES (33), (33): Xaa is C or S
NHQLFSMEGIHQGQHPKIRMIQMTINSEETPVXELGE

SEQ ID NO: 17617 - protein, 40 aa, Artificial Sequence
  GFR-binding peptide
  MOD_RES (37), (37): Xaa is C or S
  MOD_RES (13), (14), (15), (16), (17): Xaa is A or G
  MOD_RES (18), (19), (20), (21): Xaa is A or G or is absent
ALHDELTVTAKKXXXXXXXXXIKRVQVPRLQVQTPRXQVN

SEQ ID NO: 17618 - protein, 36 aa, Artificial Sequence
  GFR-binding peptide
  MOD_RES (1), (1): Xaa is C or S
  MOD_RES (14), (15), (16), (17), (18): Xaa is A or G
  MOD_RES (19), (20), (21), (22): Xaa is A or G or is absent
XELHEELRSMEGIXXXXXXXXXMIQVTINSHHVRSP

SEQ ID NO: 17619 - protein, 41 aa, Artificial Sequence
  GFR-binding peptide
  MOD_RES (1), (3), (40): Xaa is C or S
XKXALHDELTVQVEKFIPKKRVIEVKAVKVSRLQVQTPRXQ

SEQ ID NO: 17620 - protein, 39 aa, Artificial Sequence
  GFR-binding peptide
  MOD_RES (1), (38): Xaa is C or S
  MOD_RES (14), (15), (16), (17), (18): Xaa is A or G
  MOD_RES (19), (20), (21), (22): Xaa is A or G or is absent
XALHDELTSMEGLXXXXXXXXXMIQVTINSLQVQTPRXQ

SEQ ID NO: 17621 - protein, 38 aa, Artificial Sequence
  GFR-binding peptide
  MOD_RES (2), (36): Xaa is C or S
  MOD_RES (14), (15), (16), (17), (18): Xaa is A or G
  MOD_RES (19), (20), (21), (22): Xaa is A or G or is absent
EXKNHQLFSMEGLXXXXXXXXXMIQMTINSEETPVXEL

SEQ ID NO: 17622 - protein, 41 aa, Artificial Sequence
  GFR-binding peptide
  MOD_RES (1), (35): Xaa is C or S
XQSHEELSMEGIHQGQHPKIRMIQMTINSQGTPVXELGEDN

SEQ ID NO: 17623 - protein, 38 aa, Artificial Sequence
  GFR-binding peptide
  MOD_RES (2), (4): Xaa is C or S
EXKXALHDELTVQVEKFIPKKRVIEVKAVKVSRLQVQT

SEQ ID NO: 17624 - protein, 41 aa, Artificial Sequence
  GFR-binding peptide
  MOD_RES (2), (36): Xaa is C or S
  MOD_RES (14), (15), (16), (17), (18): Xaa is A or G
  MOD_RES (19), (20), (21), (22): Xaa is A or G or is absent
EXQSHEELSMEGIXXXXXXXXXMIQMTINSQGTPVXELGED

SEQ ID NO: 17625 - protein, 39 aa, Artificial Sequence
  GFR-binding peptide
  MOD_RES (1), (35): Xaa is C or S
  MOD_RES (13), (14), (15), (16), (17): Xaa is A or G
  MOD_RES (18), (19), (20), (21): Xaa is A or G or is absent
XQSHEELSMEGIXXXXXXXXXMIQMTINSQGTPVXELGE

SEQ ID NO: 17626 - protein, 37 aa, Artificial Sequence
  GFR-binding peptide
  MOD_RES (35), (35): Xaa is C or S
  MOD_RES (11), (12), (13), (14), (15): Xaa is A or G
  MOD_RES (16), (17), (18), (19): Xaa is A or G or is absent
HEELRSMEGLXXXXXXXXXMIQVTINSHHVRSPQXKV

SEQ ID NO: 17627 - protein, 43 aa, Artificial Sequence
  GFR-binding peptide
  MOD_RES (2), (39): Xaa is C or S
  MOD_RES (15), (16), (17), (18), (19): Xaa is A or G
  MOD_RES (20), (21), (22), (23): Xaa is A or G or is absent
KXALHDELTVQVEKXXXXXXXXXVKAVKVSRLQVQTPRXQVNR

SEQ ID NO: 17628 - protein, 37 aa, Artificial Sequence
  GFR-binding peptide
  MOD_RES (1), (3): Xaa is C or S
XKXALHDELTSMEGIFIPKKRVIEMIQVTINSLQVQT

SEQ ID NO: 17629 - protein, 37 aa, Artificial Sequence
  GFR-binding peptide
  MOD_RES (33), (33): Xaa is C or S
SHEELSMEGIHQGQHPKIRMIQMTINSQGTPVXELGE

SEQ ID NO: 17630 - protein, 40 aa, Artificial Sequence
  GFR-binding peptide
  MOD_RES (2), (4), (38): Xaa is C or S
RXEXQSHEELSMEGLHQGQHPKIRMIQMTINSQGTPVXEL

SEQ ID NO: 17631 - protein, 34 aa, Artificial Sequence
  GFR-binding peptide
  MOD_RES (13), (14), (15), (16), (17): Xaa is A or G
  MOD_RES (18), (19), (20), (21): Xaa is A or G or is absent
ALHDELTSMEGLXXXXXXXXXMIQVTINSLQVQT

SEQ ID NO: 17632 - protein, 39 aa, Artificial Sequence
  GFR-binding peptide
  MOD_RES (2), (36): Xaa is C or S
EXQSHEELSMEGLHQGQHPKIRMIQMTINSQGTPVXELG

SEQ ID NO: 17633 - protein, 38 aa, Artificial Sequence
  GFR-binding peptide
  MOD_RES (2), (2): Xaa is C or S
  MOD_RES (15), (16), (17), (18), (19): Xaa is A or G
  MOD_RES (20), (21), (22), (23): Xaa is A or G or is absent
AXELHEELRVQVEKXXXXXXXXXVKAVKVSRHHVRSPQ

SEQ ID NO: 17634 - protein, 41 aa, Artificial Sequence
  GFR-binding peptide
  MOD_RES (1), (35): Xaa is C or S
XQSHEELVTAKKHQGQHPKIRIKRMQVPRQGTPVXELGEDN

SEQ ID NO: 17635 - protein, 41 aa, Artificial Sequence
  GFR-binding peptide
  MOD_RES (2), (4), (41): Xaa is C or S
  MOD_RES (17), (18), (19), (20), (21): Xaa is A or G
  MOD_RES (22), (23), (24), (25): Xaa is A or G or is absent
AXAXELHEELRVQVEKXXXXXXXXXVKAVKVSRHHVRSPQX

SEQ ID NO: 17636 - protein, 43 aa, Artificial Sequence
  GFR-binding peptide
  MOD_RES (2), (4), (38): Xaa is C or S
RXEXKNHQLFSMEGLHQGQHPKIRMIQMTINSEETPVXELGED

SEQ ID NO: 17637 - protein, 36 aa, Artificial Sequence
  GFR-binding peptide
  MOD_RES (2), (2): Xaa is C or S
KXALHDELTSMEGLFIPKKRVIEMIQVTINSLQVQT

SEQ ID NO: 17638 - protein, 43 aa, Artificial Sequence
  GFR-binding peptide
  MOD_RES (2), (4), (38): Xaa is C or S
RXEXKNHQLFSMEGIHQGQHPKIRMIQMTINSEETPVXELGED

SEQ ID NO: 17639 - protein, 36 aa, Artificial Sequence
  GFR-binding peptide
  MOD_RES (34), (34): Xaa is C or S
KNHQLFVQVEKHQGQHPKIRVKAMKVSREETPVXEL

SEQ ID NO: 17640 - protein, 33 aa, Artificial Sequence
  GFR-binding peptide
  MOD_RES (33), (33): Xaa is C or S
SHEELVQVEKHQGQHPKIRVKAMKVSRQGTPVX

SEQ ID NO: 17641 - protein, 39 aa, Artificial Sequence
  GFR-binding peptide
  MOD_RES (36), (36): Xaa is C or S
  MOD_RES (12), (13), (14), (15), (16): Xaa is A or G
  MOD_RES (17), (18), (19), (20): Xaa is A or G or is absent
LHEELRSMEGLXXXXXXXXXMIQVTINSHHVRSPQXKVS

SEQ ID NO: 17642 - protein, 39 aa, Artificial Sequence
  GFR-binding peptide
  MOD_RES (1), (3): Xaa is C or S
  MOD_RES (16), (17), (18), (19), (20): Xaa is A or G
  MOD_RES (21), (22), (23), (24): Xaa is A or G or is absent
XAXELHEELRSMEGIXXXXXXXXXMIQVTINSHHVRSPQ

SEQ ID NO: 17643 - protein, 32 aa, Artificial Sequence
  GFR-binding peptide
HDELTSMEGLFIPKKRVIEMIQVTINSLQVQT

SEQ ID NO: 17644 - protein, 45 aa, Artificial Sequence
  GFR-binding peptide
  MOD_RES (2), (4), (41): Xaa is C or S
  MOD_RES (17), (18), (19), (20), (21): Xaa is A or G
  MOD_RES (22), (23), (24), (25): Xaa is A or G or is absent
AXAXELHEELRVQVEKXXXXXXXXXVKAVKVSRHHVRSPQXKVSS

SEQ ID NO: 17645 - protein, 41 aa, Artificial Sequence
  GFR-binding peptide
  MOD_RES (1), (3), (40): Xaa is C or S
  MOD_RES (16), (17), (18), (19), (20): Xaa is A or G
  MOD_RES (21), (22), (23), (24): Xaa is A or G or is absent
XAXELHEELRSMEGIXXXXXXXXXMIQVTINSHHVRSPQXK

SEQ ID NO: 17646 - protein, 35 aa, Artificial Sequence
  GFR-binding peptide
  MOD_RES (13), (14), (15), (16), (17): Xaa is A or G
  MOD_RES (18), (19), (20), (21): Xaa is A or G or is absent
ALHDELTSMEGLXXXXXXXXXMIQVTINSLQVQTP

SEQ ID NO: 17647 - protein, 38 aa, Artificial Sequence
  GFR-binding peptide
  MOD_RES (37), (37): Xaa is C or S
ELHEELRSMEGILKPKKRVYEMIQVTINSHHVRSPQXK

SEQ ID NO: 17648 - protein, 39 aa, Artificial Sequence
  GFR-binding peptide
  MOD_RES (2), (36): Xaa is C or S
  MOD_RES (14), (15), (16), (17), (18): Xaa is A or G
  MOD_RES (19), (20), (21), (22): Xaa is A or G or is absent
EXQSHEELSMEGIXXXXXXXXXMIQMTINSQGTPVXELG

SEQ ID NO: 17649 - protein, 39 aa, Artificial Sequence
  GFR-binding peptide
  MOD_RES (1), (35): Xaa is C or S
XQSHEELSMEGIHQGQHPKIRMIQMTINSQGTPVXELGE

SEQ ID NO: 17650 - protein, 33 aa, Artificial Sequence
  GFR-binding peptide
  MOD_RES (33), (33): Xaa is C or S
SHEELVTAKKHQGQHPKIRIKRMQVPRQGTPVX

SEQ ID NO: 17651 - protein, 33 aa, Artificial Sequence
  GFR-binding peptide
  MOD_RES (33), (33): Xaa is C or S
  MOD_RES (11), (12), (13), (14), (15): Xaa is A or G
  MOD_RES (16), (17), (18), (19): Xaa is A or G or is absent
SHEELSMEGLXXXXXXXXXMIQMTINSQGTPVX

SEQ ID NO: 17652 - protein, 41 aa, Artificial Sequence
  GFR-binding peptide
  MOD_RES (1), (35): Xaa is C or S
  MOD_RES (13), (14), (15), (16), (17): Xaa is A or G
  MOD_RES (18), (19), (20), (21): Xaa is A or G or is absent
XQSHEELVTAKKXXXXXXXXXIKRMQVPRQGTPVXELGEDN

SEQ ID NO: 17653 - protein, 32 aa, Artificial Sequence
  GFR-binding peptide
  MOD_RES (11), (12), (13), (14), (15): Xaa is A or G
  MOD_RES (16), (17), (18), (19): Xaa is A or G or is absent
NHQLFSMEGIXXXXXXXXXMIQMTINSEETPV

SEQ ID NO: 17654 - protein, 43 aa, Artificial Sequence
  GFR-binding peptide
  MOD_RES (2), (4), (41): Xaa is C or S
  MOD_RES (17), (18), (19), (20), (21): Xaa is A or G
  MOD_RES (22), (23), (24), (25): Xaa is A or G or is absent
EXKXALHDELTVQVEKXXXXXXXXXVKAVKVSRLQVQTPRXQV

SEQ ID NO: 17655 - protein, 42 aa, Artificial Sequence
  GFR-binding peptide
  MOD_RES (2), (4), (38): Xaa is C or S
  MOD_RES (16), (17), (18), (19), (20): Xaa is A or G
  MOD_RES (21), (22), (23), (24): Xaa is A or G or is absent
RXEXKNHQLFVTAKKXXXXXXXXXIKRMQVPREETPVXELGE

SEQ ID NO: 17656 - protein, 39 aa, Artificial Sequence
  GFR-binding peptide
  MOD_RES (35), (35): Xaa is C or S
  MOD_RES (11), (12), (13), (14), (15): Xaa is A or G
  MOD_RES (16), (17), (18), (19): Xaa is A or G or is absent
HEELRSMEGIXXXXXXXXXMIQVTINSHHVRSPQXKVSS

SEQ ID NO: 17657 - protein, 37 aa, Artificial Sequence
  GFR-binding peptide
  MOD_RES (1), (3): Xaa is C or S
XKXALHDELTSMEGLFIPKKRVIEMIQVTINSLQVQT

SEQ ID NO: 17658 - protein, 35 aa, Artificial Sequence
  GFR-binding peptide
  MOD_RES (2), (2): Xaa is C or S
EXQSHEELVTAKKHQGQHPKIRIKRMQVPRQGTPV

SEQ ID NO: 17659 - protein, 36 aa, Artificial Sequence
  GFR-binding peptide
  MOD_RES (2), (2): Xaa is C or S
  MOD_RES (15), (16), (17), (18), (19): Xaa is A or G
  MOD_RES (20), (21), (22), (23): Xaa is A or G or is absent
KXALHDELTVTAKKXXXXXXXXXIKRVQVPRLQVQT

SEQ ID NO: 17660 - protein, 35 aa, Artificial Sequence
  GFR-binding peptide
  MOD_RES (35), (35): Xaa is C or S
  MOD_RES (11), (12), (13), (14), (15): Xaa is A or G
  MOD_RES (16), (17), (18), (19): Xaa is A or G or is absent
HDELTSMEGLXXXXXXXXXMIQVTINSLQVQTPRX

SEQ ID NO: 17661 - protein, 42 aa, Artificial Sequence
  GFR-binding peptide
  MOD_RES (2), (4), (38): Xaa is C or S
  MOD_RES (16), (17), (18), (19), (20): Xaa is A or G
  MOD_RES (21), (22), (23), (24): Xaa is A or G or is absent
RXEXKNHQLFVQVEKXXXXXXXXXVKAMKVSREETPVXELGE

SEQ ID NO: 17662 - protein, 35 aa, Artificial Sequence
  GFR-binding peptide
  MOD_RES (35), (35): Xaa is C or S
  MOD_RES (11), (12), (13), (14), (15): Xaa is A or G
  MOD_RES (16), (17), (18), (19): Xaa is A or G or is absent
HDELTSMEGIXXXXXXXXXMIQVTINSLQVQTPRX

SEQ ID NO: 17663 - protein, 32 aa, Artificial Sequence
  GFR-binding peptide
NHQLFVQVEKHQGQHPKIRVKAMKVSREETPV

SEQ ID NO: 17664 - protein, 38 aa, Artificial Sequence
  GFR-binding peptide
  MOD_RES (1), (35): Xaa is C or S
  MOD_RES (13), (14), (15), (16), (17): Xaa is A or G
  MOD_RES (18), (19), (20), (21): Xaa is A or G or is absent
XQSHEELVQVEKXXXXXXXXXVKAMKVSRQGTPVXELG

SEQ ID NO: 17665 - protein, 38 aa, Artificial Sequence
  GFR-binding peptide
  MOD_RES (1), (3), (37): Xaa is C or S
XEXKNHQLFSMEGLHQGQHPKIRMIQMTINSEETPVXE

SEQ ID NO: 17666 - protein, 41 aa, Artificial Sequence
  GFR-binding peptide
  MOD_RES (2), (4), (41): Xaa is C or S
EXKXALHDELTVQVEKFIPKKRVIEVKAVKVSRLQVQTPRX

SEQ ID NO: 17667 - protein, 42 aa, Artificial Sequence
  GFR-binding peptide
  MOD_RES (1), (3), (37): Xaa is C or S
XEXQSHEELVQVEKHQGQHPKIRVKAMKVSRQGTPVXELGED

SEQ ID NO: 17668 - protein, 32 aa, Artificial Sequence
  GFR-binding peptide
  MOD_RES (11), (12), (13), (14), (15): Xaa is A or G
  MOD_RES (16), (17), (18), (19): Xaa is A or G or is absent
HDELTVTAKKXXXXXXXXXIKRVQVPRLQVQT

SEQ ID NO: 17669 - protein, 33 aa, Artificial Sequence
  GFR-binding peptide
LHEELRVTAKKLKPKKRVYEIKRVQVPRHHVRS

SEQ ID NO: 17670 - protein, 42 aa, Artificial Sequence
  GFR-binding peptide
  MOD_RES (2), (4), (41): Xaa is C or S
AXAXELHEELRVTAKKLKPKKRVYEIKRVQVPRHHVRSPQXK

SEQ ID NO: 17671 - protein, 45 aa, Artificial Sequence
  GFR-binding peptide
  MOD_RES (2), (4), (41): Xaa is C or S
  MOD_RES (17), (18), (19), (20), (21): Xaa is A or G
  MOD_RES (22), (23), (24), (25): Xaa is A or G or is absent
EXKXALHDELTSMEGLXXXXXXXXXMIQVTINSLQVQTPRXQVNR

SEQ ID NO: 17672 - protein, 32 aa, Artificial Sequence
  GFR-binding peptide
HEELRSMEGLLKPKKRVYEMIQVTINSHHVRS

SEQ ID NO: 17673 - protein, 39 aa, Artificial Sequence
  GFR-binding peptide
  MOD_RES (34), (34): Xaa is C or S
KNHQLFVQVEKHQGQHPKIRVKAMKVSREETPVXELGED

SEQ ID NO: 17674 - protein, 39 aa, Artificial Sequence
  GFR-binding peptide
  MOD_RES (37), (37): Xaa is C or S
  MOD_RES (13), (14), (15), (16), (17): Xaa is A or G
  MOD_RES (18), (19), (20), (21): Xaa is A or G or is absent
ELHEELRVQVEKXXXXXXXXXVKAVKVSRHHVRSPQXKV

SEQ ID NO: 17675 - protein, 32 aa, Artificial Sequence
  GFR-binding peptide
HDELTSMEGIFIPKKRVIEMIQVTINSLQVQT

SEQ ID NO: 17676 - protein, 37 aa, Artificial Sequence
  GFR-binding peptide
  MOD_RES (37), (37): Xaa is C or S
  MOD_RES (13), (14), (15), (16), (17): Xaa is A or G
  MOD_RES (18), (19), (20), (21): Xaa is A or G or is absent
ALHDELTSMEGIXXXXXXXXXMIQVTINSLQVQTPRX

SEQ ID NO: 17677 - protein, 35 aa, Artificial Sequence
  GFR-binding peptide
LHDELTSMEGLFIPKKRVIEMIQVTINSLQVQTPR

SEQ ID NO: 17678 - protein, 36 aa, Artificial Sequence
  GFR-binding peptide
ALHDELTVTAKKFIPKKRVIEIKRVQVPRLQVQTPR

SEQ ID NO: 17679 - protein, 36 aa, Artificial Sequence
  GFR-binding peptide
  MOD_RES (34), (34): Xaa is C or S
QSHEELSMEGLHQGQHPKIRMIQMTINSQGTPVXEL

SEQ ID NO: 17680 - protein, 40 aa, Artificial Sequence
  GFR-binding peptide
  MOD_RES (2), (39): Xaa is C or S
  MOD_RES (15), (16), (17), (18), (19): Xaa is A or G
  MOD_RES (20), (21), (22), (23): Xaa is A or G or is absent
AXELHEELRVQVEKXXXXXXXXXVKAVKVSRHHVRSPQXK

SEQ ID NO: 17681 - protein, 37 aa, Artificial Sequence
  GFR-binding peptide
  MOD_RES (2), (4): Xaa is C or S
  MOD_RES (16), (17), (18), (19), (20): Xaa is A or G
  MOD_RES (21), (22), (23), (24): Xaa is A or G or is absent
RXEXQSHEELVQVEKXXXXXXXXXVKAMKVSRQGTPV

SEQ ID NO: 17682 - protein, 41 aa, Artificial Sequence
  GFR-binding peptide
  MOD_RES (2), (4), (41): Xaa is C or S
  MOD_RES (17), (18), (19), (20), (21): Xaa is A or G
  MOD_RES (22), (23), (24), (25): Xaa is A or G or is absent
AXAXELHEELRSMEGLXXXXXXXXXMIQVTINSHHVRSPQX

SEQ ID NO: 17683 - protein, 43 aa, Artificial Sequence
  GFR-binding peptide
  MOD_RES (2), (4), (38): Xaa is C or S
  MOD_RES (16), (17), (18), (19), (20): Xaa is A or G
  MOD_RES (21), (22), (23), (24): Xaa is A or G or is absent
RXEXKNHQLFSMEGIXXXXXXXXXMIQMTINSEETPVXELGED

SEQ ID NO: 17684 - protein, 40 aa, Artificial Sequence
  GFR-binding peptide
  MOD_RES (2), (39): Xaa is C or S
KXALHDELTSMEGIFIPKKRVIEMIQVTINSLQVQTPRXQ

SEQ ID NO: 17685 - protein, 32 aa, Artificial Sequence
  GFR-binding peptide
  MOD_RES (11), (12), (13), (14), (15): Xaa is A or G
  MOD_RES (16), (17), (18), (19): Xaa is A or G or is absent
NHQLFSMEGLXXXXXXXXXMIQMTINSEETPV

SEQ ID NO: 17686 - protein, 35 aa, Artificial Sequence
  GFR-binding peptide
  MOD_RES (13), (14), (15), (16), (17): Xaa is A or G
  MOD_RES (18), (19), (20), (21): Xaa is A or G or is absent
ELHEELRSMEGIXXXXXXXXXMIQVTINSHHVRSP

SEQ ID NO: 17687 - protein, 37 aa, Artificial Sequence
  GFR-binding peptide
  MOD_RES (2), (4): Xaa is C or S
RXEXQSHEELSMEGIHQGQHPKIRMIQMTINSQGTPV

SEQ ID NO: 17688 - protein, 34 aa, Artificial Sequence
  GFR-binding peptide
  MOD_RES (34), (34): Xaa is C or S
QSHEELVQVEKHQGQHPKIRVKAMKVSRQGTPVX

SEQ ID NO: 17689 - protein, 39 aa, Artificial Sequence
  GFR-binding peptide
  MOD_RES (2), (4): Xaa is C or S
AXAXELHEELRVQVEKLKPKKRVYEVKAVKVSRHHVRSP

SEQ ID NO: 17690 - protein, 38 aa, Artificial Sequence
  GFR-binding peptide
  MOD_RES (1), (3): Xaa is C or S
  MOD_RES (16), (17), (18), (19), (20): Xaa is A or G
  MOD_RES (21), (22), (23), (24): Xaa is A or G or is absent
XKXALHDELTSMEGLXXXXXXXXXMIQVTINSLQVQTP

SEQ ID NO: 17691 - protein, 38 aa, Artificial Sequence
  GFR-binding peptide
  MOD_RES (2), (4): Xaa is C or S
EXKXALHDELTVTAKKFIPKKRVIEIKRVQVPRLQVQT

SEQ ID NO: 17692 - protein, 34 aa, Artificial Sequence
  GFR-binding peptide
  MOD_RES (12), (13), (14), (15), (16): Xaa is A or G
  MOD_RES (17), (18), (19), (20): Xaa is A or G or is absent
LHEELRVQVEKXXXXXXXXXVKAVKVSRHHVRSP

SEQ ID NO: 17693 - protein, 37 aa, Artificial Sequence
  GFR-binding peptide
  MOD_RES (2), (36): Xaa is C or S
  MOD_RES (14), (15), (16), (17), (18): Xaa is A or G
  MOD_RES (19), (20), (21), (22): Xaa is A or G or is absent
EXKNHQLFSMEGLXXXXXXXXXMIQMTINSEETPVXE

SEQ ID NO: 17694 - protein, 43 aa, Artificial Sequence
  GFR-binding peptide
  MOD_RES (2), (39): Xaa is C or S
  MOD_RES (15), (16), (17), (18), (19): Xaa is A or G
  MOD_RES (20), (21), (22), (23): Xaa is A or G or is absent
AXELHEELRSMEGLXXXXXXXXXMIQVTINSHHVRSPQXKVSS

SEQ ID NO: 17695 - protein, 33 aa, Artificial Sequence
  GFR-binding peptide
  MOD_RES (33), (33): Xaa is C or S
NHQLFVTAKKHQGQHPKIRIKRMQVPREETPVX

SEQ ID NO: 17696 - protein, 42 aa, Artificial Sequence
  GFR-binding peptide
  MOD_RES (2), (4), (41): Xaa is C or S
  MOD_RES (17), (18), (19), (20), (21): Xaa is A or G
  MOD_RES (22), (23), (24), (25): Xaa is A or G or is absent
EXKXALHDELTSMEGLXXXXXXXXXMIQVTINSLQVQTPRXQ

SEQ ID NO: 17697 - protein, 41 aa, Artificial Sequence
  GFR-binding peptide
  MOD_RES (2), (4), (38): Xaa is C or S
RXEXQSHEELVQVEKHQGQHPKIRVKAMKVSRQGTPVXELG

SEQ ID NO: 17698 - protein, 39 aa, Artificial Sequence
  GFR-binding peptide
  MOD_RES (2), (36): Xaa is C or S
  MOD_RES (14), (15), (16), (17), (18): Xaa is A or G
  MOD_RES (19), (20), (21), (22): Xaa is A or G or is absent
EXQSHEELSMEGLXXXXXXXXXMIQMTINSQGTPVXELG

SEQ ID NO: 17699 - protein, 38 aa, Artificial Sequence
  GFR-binding peptide
  MOD_RES (2), (4): Xaa is C or S
  MOD_RES (17), (18), (19), (20), (21): Xaa is A or G
  MOD_RES (22), (23), (24), (25): Xaa is A or G or is absent
EXKXALHDELTSMEGIXXXXXXXXXMIQVTINSLQVQT

SEQ ID NO: 17700 - protein, 41 aa, Artificial Sequence
  GFR-binding peptide
  MOD_RES (1), (35): Xaa is C or S
XKNHQLFVQVEKHQGQHPKIRVKAMKVSREETPVXELGEDN

SEQ ID NO: 17701 - protein, 41 aa, Artificial Sequence
  GFR-binding peptide
  MOD_RES (1), (35): Xaa is C or S
  MOD_RES (13), (14), (15), (16), (17): Xaa is A or G
  MOD_RES (18), (19), (20), (21): Xaa is A or G or is absent
XKNHQLFVQVEKXXXXXXXXXVKAMKVSREETPVXELGEDN

SEQ ID NO: 17702 - protein, 39 aa, Artificial Sequence
  GFR-binding peptide
  MOD_RES (2), (4): Xaa is C or S
EXKXALHDELTSMEGIFIPKKRVIEMIQVTINSLQVQTP

SEQ ID NO: 17703 - protein, 39 aa, Artificial Sequence
  GFR-binding peptide
  MOD_RES (2), (4), (38): Xaa is C or S
  MOD_RES (16), (17), (18), (19), (20): Xaa is A or G
  MOD_RES (21), (22), (23), (24): Xaa is A or G or is absent
RXEXQSHEELSMEGLXXXXXXXXXMIQMTINSQGTPVXE

SEQ ID NO: 17704 - protein, 40 aa, Artificial Sequence
  GFR-binding peptide
  MOD_RES (2), (4): Xaa is C or S
  MOD_RES (17), (18), (19), (20), (21): Xaa is A or G
  MOD_RES (22), (23), (24), (25): Xaa is A or G or is absent
AXAXELHEELRVQVEKXXXXXXXXXVKAVKVSRHHVRSPQ

SEQ ID NO: 17705 - protein, 34 aa, Artificial Sequence
  GFR-binding peptide
  MOD_RES (1), (1): Xaa is C or S
  MOD_RES (13), (14), (15), (16), (17): Xaa is A or G
  MOD_RES (18), (19), (20), (21): Xaa is A or G or is absent
XKNHQLFVTAKKXXXXXXXXXIKRMQVPREETPV

SEQ ID NO: 17706 - protein, 37 aa, Artificial Sequence
  GFR-binding peptide
  MOD_RES (36), (36): Xaa is C or S
  MOD_RES (12), (13), (14), (15), (16): Xaa is A or G
  MOD_RES (17), (18), (19), (20): Xaa is A or G or is absent
LHDELTVTAKKXXXXXXXXXIKRVQVPRLQVQTPRXQ

SEQ ID NO: 17707 - protein, 40 aa, Artificial Sequence
  GFR-binding peptide
  MOD_RES (1), (3), (37): Xaa is C or S
XEXQSHEELVQVEKHQGQHPKIRVKAMKVSRQGTPVXELG

SEQ ID NO: 17708 - protein, 39 aa, Artificial Sequence
  GFR-binding peptide
  MOD_RES (1), (3), (37): Xaa is C or S
  MOD_RES (15), (16), (17), (18), (19): Xaa is A or G
  MOD_RES (20), (21), (22), (23): Xaa is A or G or is absent
XEXKNHQLFSMEGIXXXXXXXXXMIQMTINSEETPVXEL

SEQ ID NO: 17709 - protein, 38 aa, Artificial Sequence
  GFR-binding peptide
  MOD_RES (2), (2): Xaa is C or S
KXALHDELTVTAKKFIPKKRVIEIKRVQVPRLQVQTPR

SEQ ID NO: 17710 - protein, 42 aa, Artificial Sequence
  GFR-binding peptide
  MOD_RES (2), (39): Xaa is C or S
  MOD_RES (15), (16), (17), (18), (19): Xaa is A or G
  MOD_RES (20), (21), (22), (23): Xaa is A or G or is absent
AXELHEELRVTAKKXXXXXXXXXIKRVQVPRHHVRSPQXKVS

SEQ ID NO: 17711 - protein, 37 aa, Artificial Sequence
  GFR-binding peptide
  MOD_RES (36), (36): Xaa is C or S
  MOD_RES (12), (13), (14), (15), (16): Xaa is A or G
  MOD_RES (17), (18), (19), (20): Xaa is A or G or is absent
LHDELTSMEGIXXXXXXXXXMIQVTINSLQVQTPRXQ

SEQ ID NO: 17712 - protein, 32 aa, Artificial Sequence
  GFR-binding peptide
  MOD_RES (11), (12), (13), (14), (15): Xaa is A or G
  MOD_RES (16), (17), (18), (19): Xaa is A or G or is absent
SHEELVQVEKXXXXXXXXXVKAMKVSRQGTPV

SEQ ID NO: 17713 - protein, 32 aa, Artificial Sequence
  GFR-binding peptide
  MOD_RES (11), (12), (13), (14), (15): Xaa is A or G
  MOD_RES (16), (17), (18), (19): Xaa is A or G or is absent
NHQLFVTAKKXXXXXXXXXIKRMQVPREETPV

SEQ ID NO: 17714 - protein, 35 aa, Artificial Sequence
  GFR-binding peptide
  MOD_RES (12), (13), (14), (15), (16): Xaa is A or G
  MOD_RES (17), (18), (19), (20): Xaa is A or G or is absent
LHEELRSMEGLXXXXXXXXXMIQVTINSHHVRSPQ

SEQ ID NO: 17715 - protein, 36 aa, Artificial Sequence
  GFR-binding peptide
  MOD_RES (33), (33): Xaa is C or S
  MOD_RES (11), (12), (13), (14), (15): Xaa is A or G
  MOD_RES (16), (17), (18), (19): Xaa is A or G or is absent
NHQLFSMEGIXXXXXXXXXMIQMTINSEETPVXELG

SEQ ID NO: 17716 - protein, 35 aa, Artificial Sequence
  GFR-binding peptide
  MOD_RES (34), (34): Xaa is C or S
QSHEELSMEGLHQGQHPKIRMIQMTINSQGTPVXE

SEQ ID NO: 17717 - protein, 41 aa, Artificial Sequence
  GFR-binding peptide
  MOD_RES (1), (3), (37): Xaa is C or S
XEXQSHEELVQVEKHQGQHPKIRVKAMKVSRQGTPVXELGE

SEQ ID NO: 17718 - protein, 36 aa, Artificial Sequence
  GFR-binding peptide
  MOD_RES (34), (34): Xaa is C or S
  MOD_RES (12), (13), (14), (15), (16): Xaa is A or G
  MOD_RES (17), (18), (19), (20): Xaa is A or G or is absent
QSHEELVQVEKXXXXXXXXXVKAMKVSRQGTPVXEL

SEQ ID NO: 17719 - protein, 36 aa, Artificial Sequence
  GFR-binding peptide
  MOD_RES (36), (36): Xaa is C or S
LHDELTSMEGLFIPKKRVIEMIQVTINSLQVQTPRX

SEQ ID NO: 17720 - protein, 41 aa, Artificial Sequence
  GFR-binding peptide
  MOD_RES (2), (36): Xaa is C or S
  MOD_RES (14), (15), (16), (17), (18): Xaa is A or G
  MOD_RES (19), (20), (21), (22): Xaa is A or G or is absent
EXQSHEELSMEGLXXXXXXXXXMIQMTINSQGTPVXELGED

SEQ ID NO: 17721 - protein, 34 aa, Artificial Sequence
  GFR-binding peptide
  MOD_RES (11), (12), (13), (14), (15): Xaa is A or G
  MOD_RES (16), (17), (18), (19): Xaa is A or G or is absent
HEELRVQVEKXXXXXXXXXVKAVKVSRHHVRSPQ

SEQ ID NO: 17722 - protein, 38 aa, Artificial Sequence
  GFR-binding peptide
  MOD_RES (2), (4): Xaa is C or S
AXAXELHEELRSMEGLLKPKKRVYEMIQVTINSHHVRS

SEQ ID NO: 17723 - protein, 41 aa, Artificial Sequence
  GFR-binding peptide
  MOD_RES (1), (38): Xaa is C or S
  MOD_RES (14), (15), (16), (17), (18): Xaa is A or G
  MOD_RES (19), (20), (21), (22): Xaa is A or G or is absent
XALHDELTVQVEKXXXXXXXXXVKAVKVSRLQVQTPRXQVN

SEQ ID NO: 17724 - protein, 38 aa, Artificial Sequence
  GFR-binding peptide
  MOD_RES (1), (38): Xaa is C or S
  MOD_RES (14), (15), (16), (17), (18): Xaa is A or G
  MOD_RES (19), (20), (21), (22): Xaa is A or G or is absent
XALHDELTSMEGIXXXXXXXXXMIQVTINSLQVQTPRX

SEQ ID NO: 17725 - protein, 38 aa, Artificial Sequence
  GFR-binding peptide
  MOD_RES (35), (35): Xaa is C or S
HEELRVQVEKLKPKKRVYEVKAVKVSRHHVRSPQXKVS

SEQ ID NO: 17726 - protein, 35 aa, Artificial Sequence
  GFR-binding peptide
  MOD_RES (34), (34): Xaa is C or S
  MOD_RES (12), (13), (14), (15), (16): Xaa is A or G
  MOD_RES (17), (18), (19), (20): Xaa is A or G or is absent
QSHEELVTAKKXXXXXXXXXIKRMQVPRQGTPVXE

SEQ ID NO: 17727 - protein, 33 aa, Artificial Sequence
  GFR-binding peptide
  MOD_RES (33), (33): Xaa is C or S
  MOD_RES (11), (12), (13), (14), (15): Xaa is A or G
  MOD_RES (16), (17), (18), (19): Xaa is A or G or is absent
SHEELVTAKKXXXXXXXXXIKRMQVPRQGTPVX

SEQ ID NO: 17728 - protein, 39 aa, Artificial Sequence
  GFR-binding peptide
  MOD_RES (2), (39): Xaa is C or S
  MOD_RES (15), (16), (17), (18), (19): Xaa is A or G
  MOD_RES (20), (21), (22), (23): Xaa is A or G or is absent
AXELHEELRSMEGLXXXXXXXXXMIQVTINSHHVRSPQX

SEQ ID NO: 17729 - protein, 35 aa, Artificial Sequence
  GFR-binding peptide
  MOD_RES (35), (35): Xaa is C or S
HEELRVQVEKLKPKKRVYEVKAVKVSRHHVRSPQX

SEQ ID NO: 17730 - protein, 37 aa, Artificial Sequence
  GFR-binding peptide
  MOD_RES (2), (4): Xaa is C or S
  MOD_RES (16), (17), (18), (19), (20): Xaa is A or G
  MOD_RES (21), (22), (23), (24): Xaa is A or G or is absent
RXEXQSHEELVTAKKXXXXXXXXXIKRMQVPRQGTPV

SEQ ID NO: 17731 - protein, 33 aa, Artificial Sequence
  GFR-binding peptide
LHEELRSMEGILKPKKRVYEMIQVTINSHHVRS

SEQ ID NO: 17732 - protein, 43 aa, Artificial Sequence
  GFR-binding peptide
  MOD_RES (1), (3), (40): Xaa is C or S
  MOD_RES (16), (17), (18), (19), (20): Xaa is A or G
  MOD_RES (21), (22), (23), (24): Xaa is A or G or is absent
XKXALHDELTSMEGLXXXXXXXXXMIQVTINSLQVQTPRXQVN

SEQ ID NO: 17733 - protein, 39 aa, Artificial Sequence
  GFR-binding peptide
  MOD_RES (1), (35): Xaa is C or S
  MOD_RES (13), (14), (15), (16), (17): Xaa is A or G
  MOD_RES (18), (19), (20), (21): Xaa is A or G or is absent
XQSHEELSMEGLXXXXXXXXXMIQMTINSQGTPVXELGE

SEQ ID NO: 17734 - protein, 41 aa, Artificial Sequence
  GFR-binding peptide
  MOD_RES (37), (37): Xaa is C or S
  MOD_RES (13), (14), (15), (16), (17): Xaa is A or G
  MOD_RES (18), (19), (20), (21): Xaa is A or G or is absent
ALHDELTVQVEKXXXXXXXXXVKAVKVSRLQVQTPRXQVNR

SEQ ID NO: 17735 - protein, 44 aa, Artificial Sequence
  GFR-binding peptide
  MOD_RES (2), (4), (38): Xaa is C or S
  MOD_RES (16), (17), (18), (19), (20): Xaa is A or G
  MOD_RES (21), (22), (23), (24): Xaa is A or G or is absent
RXEXKNHQLFSMEGLXXXXXXXXXMIQMTINSEETPVXELGEDN

SEQ ID NO: 17736 - protein, 36 aa, Artificial Sequence
  GFR-binding peptide
  MOD_RES (2), (36): Xaa is C or S
EXKNHQLFVQVEKHQGQHPKIRVKAMKVSREETPVX

SEQ ID NO: 17737 - protein, 35 aa, Artificial Sequence
  GFR-binding peptide
ALHDELTVQVEKFIPKKRVIEVKAVKVSRLQVQTP

SEQ ID NO: 17738 - protein, 38 aa, Artificial Sequence
  GFR-binding peptide
  MOD_RES (1), (3), (37): Xaa is C or S
  MOD_RES (15), (16), (17), (18), (19): Xaa is A or G
  MOD_RES (20), (21), (22), (23): Xaa is A or G or is absent
XEXQSHEELVQVEKXXXXXXXXXVKAMKVSRQGTPVXE

SEQ ID NO: 17739 - protein, 36 aa, Artificial Sequence
  GFR-binding peptide
  MOD_RES (1), (1): Xaa is C or S
  MOD_RES (14), (15), (16), (17), (18): Xaa is A or G
  MOD_RES (19), (20), (21), (22): Xaa is A or G or is absent
XALHDELTSMEGLXXXXXXXXXMIQVTINSLQVQTP

SEQ ID NO: 17740 - protein, 35 aa, Artificial Sequence
  GFR-binding peptide
  MOD_RES (34), (34): Xaa is C or S
  MOD_RES (12), (13), (14), (15), (16): Xaa is A or G
  MOD_RES (17), (18), (19), (20): Xaa is A or G or is absent
QSHEELSMEGIXXXXXXXXXMIQMTINSQGTPVXE

SEQ ID NO: 17741 - protein, 36 aa, Artificial Sequence
  GFR-binding peptide
  MOD_RES (2), (2): Xaa is C or S
AXELHEELRVQVEKLKPKKRVYEVKAVKVSRHHVRS

SEQ ID NO: 17742 - protein, 42 aa, Artificial Sequence
  GFR-binding peptide
  MOD_RES (1), (3), (40): Xaa is C or S
XAXELHEELRVQVEKLKPKKRVYEVKAVKVSRHHVRSPQXKV

SEQ ID NO: 17743 - protein, 38 aa, Artificial Sequence
  GFR-binding peptide
  MOD_RES (2), (36): Xaa is C or S
  MOD_RES (14), (15), (16), (17), (18): Xaa is A or G
  MOD_RES (19), (20), (21), (22): Xaa is A or G or is absent
EXQSHEELVTAKKXXXXXXXXXIKRMQVPRQGTPVXEL

SEQ ID NO: 17744 - protein, 36 aa, Artificial Sequence
  GFR-binding peptide
  MOD_RES (1), (1): Xaa is C or S
  MOD_RES (14), (15), (16), (17), (18): Xaa is A or G
  MOD_RES (19), (20), (21), (22): Xaa is A or G or is absent
XELHEELRVTAKKXXXXXXXXXIKRVQVPRHHVRSP

SEQ ID NO: 17745 - protein, 37 aa, Artificial Sequence
  GFR-binding peptide
  MOD_RES (34), (34): Xaa is C or S
  MOD_RES (12), (13), (14), (15), (16): Xaa is A or G
  MOD_RES (17), (18), (19), (20): Xaa is A or G or is absent
QSHEELVTAKKXXXXXXXXXIKRMQVPRQGTPVXELG

SEQ ID NO: 17746 - protein, 34 aa, Artificial Sequence
  GFR-binding peptide
ALHDELTVQVEKFIPKKRVIEVKAVKVSRLQVQT

SEQ ID NO: 17747 - protein, 38 aa, Artificial Sequence
  GFR-binding peptide
  MOD_RES (1), (35): Xaa is C or S
XQSHEELVQVEKHQGQHPKIRVKAMKVSRQGTPVXELG

SEQ ID NO: 17748 - protein, 44 aa, Artificial Sequence
  GFR-binding peptide
  MOD_RES (2), (4), (41): Xaa is C or S
EXKXALHDELTVTAKKFIPKKRVIEIKRVQVPRLQVQTPRXQVN

SEQ ID NO: 17749 - protein, 33 aa, Artificial Sequence
  GFR-binding peptide
  MOD_RES (33), (33): Xaa is C or S
  MOD_RES (11), (12), (13), (14), (15): Xaa is A or G
  MOD_RES (16), (17), (18), (19): Xaa is A or G or is absent
NHQLFVQVEKXXXXXXXXXVKAMKVSREETPVX

SEQ ID NO: 17750 - protein, 39 aa, Artificial Sequence
  GFR-binding peptide
  MOD_RES (35), (35): Xaa is C or S
  MOD_RES (11), (12), (13), (14), (15): Xaa is A or G
  MOD_RES (16), (17), (18), (19): Xaa is A or G or is absent
HEELRVQVEKXXXXXXXXXVKAVKVSRHHVRSPQXKVSS

SEQ ID NO: 17751 - protein, 42 aa, Artificial Sequence
  GFR-binding peptide
  MOD_RES (1), (3), (40): Xaa is C or S
XAXELHEELRVTAKKLKPKKRVYEIKRVQVPRHHVRSPQXKV

SEQ ID NO: 17752 - protein, 36 aa, Artificial Sequence
  GFR-binding peptide
  MOD_RES (34), (34): Xaa is C or S
  MOD_RES (12), (13), (14), (15), (16): Xaa is A or G
  MOD_RES (17), (18), (19), (20): Xaa is A or G or is absent
QSHEELSMEGIXXXXXXXXXMIQMTINSQGTPVXEL

SEQ ID NO: 17753 - protein, 43 aa, Artificial Sequence
  GFR-binding peptide
  MOD_RES (2), (4), (41): Xaa is C or S
  MOD_RES (17), (18), (19), (20), (21): Xaa is A or G
  MOD_RES (22), (23), (24), (25): Xaa is A or G or is absent
EXKXALHDELTSMEGLXXXXXXXXXMIQVTINSLQVQTPRXQV

SEQ ID NO: 17754 - protein, 42 aa, Artificial Sequence
  GFR-binding peptide
  MOD_RES (1), (3), (37): Xaa is C or S
XEXQSHEELVTAKKHQGQHPKIRIKRMQVPRQGTPVXELGED

SEQ ID NO: 17755 - protein, 37 aa, Artificial Sequence
  GFR-binding peptide
  MOD_RES (1), (3), (37): Xaa is C or S
XEXQSHEELSMEGLHQGQHPKIRMIQMTINSQGTPVX

SEQ ID NO: 17756 - protein, 41 aa, Artificial Sequence
  GFR-binding peptide
  MOD_RES (37), (37): Xaa is C or S
ELHEELRVTAKKLKPKKRVYEIKRVQVPRHHVRSPQXKVSS

SEQ ID NO: 17757 - protein, 38 aa, Artificial Sequence
  GFR-binding peptide
  MOD_RES (1), (3): Xaa is C or S
XKXALHDELTSMEGIFIPKKRVIEMIQVTINSLQVQTP

SEQ ID NO: 17758 - protein, 36 aa, Artificial Sequence
  GFR-binding peptide
  MOD_RES (33), (33): Xaa is C or S
SHEELVQVEKHQGQHPKIRVKAMKVSRQGTPVXELG

SEQ ID NO: 17759 - protein, 37 aa, Artificial Sequence
  GFR-binding peptide
  MOD_RES (36), (36): Xaa is C or S
LHDELTVQVEKFIPKKRVIEVKAVKVSRLQVQTPRXQ

SEQ ID NO: 17760 - protein, 41 aa, Artificial Sequence
  GFR-binding peptide
  MOD_RES (37), (37): Xaa is C or S
  MOD_RES (13), (14), (15), (16), (17): Xaa is A or G
  MOD_RES (18), (19), (20), (21): Xaa is A or G or is absent
ALHDELTSMEGLXXXXXXXXXMIQVTINSLQVQTPRXQVNR

SEQ ID NO: 17761 - protein, 39 aa, Artificial Sequence
  GFR-binding peptide
  MOD_RES (1), (3): Xaa is C or S
  MOD_RES (16), (17), (18), (19), (20): Xaa is A or G
  MOD_RES (21), (22), (23), (24): Xaa is A or G or is absent
XAXELHEELRVQVEKXXXXXXXXXVKAVKVSRHHVRSPQ

SEQ ID NO: 17762 - protein, 43 aa, Artificial Sequence
  GFR-binding peptide
  MOD_RES (1), (3), (40): Xaa is C or S
XKXALHDELTVQVEKFIPKKRVIEVKAVKVSRLQVQTPRXQVN

SEQ ID NO: 17763 - protein, 36 aa, Artificial Sequence
  GFR-binding peptide
  MOD_RES (33), (33): Xaa is C or S
NHQLFSMEGIHQGQHPKIRMIQMTINSEETPVXELG

SEQ ID NO: 17764 - protein, 41 aa, Artificial Sequence
  GFR-binding peptide
  MOD_RES (1), (3), (40): Xaa is C or S
  MOD_RES (16), (17), (18), (19), (20): Xaa is A or G
  MOD_RES (21), (22), (23), (24): Xaa is A or G or is absent
XAXELHEELRVQVEKXXXXXXXXXVKAVKVSRHHVRSPQXK

SEQ ID NO: 17765 - protein, 36 aa, Artificial Sequence
  GFR-binding peptide
  MOD_RES (34), (34): Xaa is C or S
  MOD_RES (12), (13), (14), (15), (16): Xaa is A or G
  MOD_RES (17), (18), (19), (20): Xaa is A or G or is absent
QSHEELVTAKKXXXXXXXXXIKRMQVPRQGTPVXEL

SEQ ID NO: 17766 - protein, 35 aa, Artificial Sequence
  GFR-binding peptide
  MOD_RES (2), (2): Xaa is C or S
  MOD_RES (14), (15), (16), (17), (18): Xaa is A or G
  MOD_RES (19), (20), (21), (22): Xaa is A or G or is absent
EXKNHQLFVTAKKXXXXXXXXXIKRMQVPREETPV

SEQ ID NO: 17767 - protein, 36 aa, Artificial Sequence
  GFR-binding peptide
  MOD_RES (2), (36): Xaa is C or S
  MOD_RES (14), (15), (16), (17), (18): Xaa is A or G
  MOD_RES (19), (20), (21), (22): Xaa is A or G or is absent
EXQSHEELSMEGIXXXXXXXXXMIQMTINSQGTPVX

SEQ ID NO: 17768 - protein, 39 aa, Artificial Sequence
  GFR-binding peptide
  MOD_RES (37), (37): Xaa is C or S
ALHDELTSMEGIFIPKKRVIEMIQVTINSLQVQTPRXQV

SEQ ID NO: 17769 - protein, 41 aa, Artificial Sequence
  GFR-binding peptide
  MOD_RES (2), (36): Xaa is C or S
EXKNHQLFVQVEKHQGQHPKIRVKAMKVSREETPVXELGED

SEQ ID NO: 17770 - protein, 38 aa, Artificial Sequence
  GFR-binding peptide
  MOD_RES (37), (37): Xaa is C or S
  MOD_RES (13), (14), (15), (16), (17): Xaa is A or G
  MOD_RES (18), (19), (20), (21): Xaa is A or G or is absent
ALHDELTVTAKKXXXXXXXXXIKRVQVPRLQVQTPRXQ

SEQ ID NO: 17771 - protein, 36 aa, Artificial Sequence
  GFR-binding peptide
  MOD_RES (33), (33): Xaa is C or S
SHEELVTAKKHQGQHPKIRIKRMQVPRQGTPVXELG

SEQ ID NO: 17772 - protein, 36 aa, Artificial Sequence
  GFR-binding peptide
  MOD_RES (33), (33): Xaa is C or S
  MOD_RES (11), (12), (13), (14), (15): Xaa is A or G
  MOD_RES (16), (17), (18), (19): Xaa is A or G or is absent
SHEELSMEGLXXXXXXXXXMIQMTINSQGTPVXELG

SEQ ID NO: 17773 - protein, 35 aa, Artificial Sequence
  GFR-binding peptide
  MOD_RES (1), (35): Xaa is C or S
  MOD_RES (13), (14), (15), (16), (17): Xaa is A or G
  MOD_RES (18), (19), (20), (21): Xaa is A or G or is absent
XKNHQLFVTAKKXXXXXXXXXIKRMQVPREETPVX

SEQ ID NO: 17774 - protein, 40 aa, Artificial Sequence
  GFR-binding peptide
  MOD_RES (1), (38): Xaa is C or S
  MOD_RES (14), (15), (16), (17), (18): Xaa is A or G
  MOD_RES (19), (20), (21), (22): Xaa is A or G or is absent
XELHEELRVQVEKXXXXXXXXXVKAVKVSRHHVRSPQXKV

SEQ ID NO: 17775 - protein, 43 aa, Artificial Sequence
  GFR-binding peptide
  MOD_RES (1), (3), (40): Xaa is C or S
  MOD_RES (16), (17), (18), (19), (20): Xaa is A or G
  MOD_RES (21), (22), (23), (24): Xaa is A or G or is absent
XAXELHEELRSMEGLXXXXXXXXXMIQVTINSHHVRSPQXKVS

SEQ ID NO: 17776 - protein, 38 aa, Artificial Sequence
  GFR-binding peptide
  MOD_RES (1), (3), (37): Xaa is C or S
XEXQSHEELVTAKKHQGQHPKIRIKRMQVPRQGTPVXE

SEQ ID NO: 17777 - protein, 34 aa, Artificial Sequence
  GFR-binding peptide
  MOD_RES (13), (14), (15), (16), (17): Xaa is A or G
  MOD_RES (18), (19), (20), (21): Xaa is A or G or is absent
ELHEELRSMEGIXXXXXXXXXMIQVTINSHHVRS

SEQ ID NO: 17778 - protein, 34 aa, Artificial Sequence
  GFR-binding peptide
  MOD_RES (1), (1): Xaa is C or S
XKNHQLFVTAKKHQGQHPKIRIKRMQVPREETPV

SEQ ID NO: 17779 - protein, 37 aa, Artificial Sequence
  GFR-binding peptide
  MOD_RES (36), (36): Xaa is C or S
LHEELRVTAKKLKPKKRVYEIKRVQVPRHHVRSPQXK

SEQ ID NO: 17780 - protein, 39 aa, Artificial Sequence
  GFR-binding peptide
  MOD_RES (1), (38): Xaa is C or S
XELHEELRVQVEKLKPKKRVYEVKAVKVSRHHVRSPQXK

SEQ ID NO: 17781 - protein, 36 aa, Artificial Sequence
  GFR-binding peptide
ELHEELRSMEGILKPKKRVYEMIQVTINSHHVRSPQ

SEQ ID NO: 17782 - protein, 35 aa, Artificial Sequence
  GFR-binding peptide
  MOD_RES (1), (1): Xaa is C or S
  MOD_RES (14), (15), (16), (17), (18): Xaa is A or G
  MOD_RES (19), (20), (21), (22): Xaa is A or G or is absent
XALHDELTVTAKKXXXXXXXXXIKRVQVPRLQVQT

SEQ ID NO: 17783 - protein, 44 aa, Artificial Sequence
  GFR-binding peptide
  MOD_RES (2), (4), (41): Xaa is C or S
EXKXALHDELTSMEGLFIPKKRVIEMIQVTINSLQVQTPRXQVN

SEQ ID NO: 17784 - protein, 36 aa, Artificial Sequence
  GFR-binding peptide
  MOD_RES (33), (33): Xaa is C or S
SHEELSMEGIHQGQHPKIRMIQMTINSQGTPVXELG

SEQ ID NO: 17785 - protein, 40 aa, Artificial Sequence
  GFR-binding peptide
  MOD_RES (2), (4), (38): Xaa is C or S
RXEXKNHQLFVTAKKHQGQHPKIRIKRMQVPREETPVXEL

SEQ ID NO: 17786 - protein, 43 aa, Artificial Sequence
  GFR-binding peptide
  MOD_RES (1), (3), (37): Xaa is C or S
  MOD_RES (15), (16), (17), (18), (19): Xaa is A or G
  MOD_RES (20), (21), (22), (23): Xaa is A or G or is absent
XEXKNHQLFVQVEKXXXXXXXXXVKAMKVSREETPVXELGEDN

SEQ ID NO: 17787 - protein, 38 aa, Artificial Sequence
  GFR-binding peptide
  MOD_RES (2), (36): Xaa is C or S
EXQSHEELSMEGLHQGQHPKIRMIQMTINSQGTPVXEL

SEQ ID NO: 17788 - protein, 37 aa, Artificial Sequence
  GFR-binding peptide
  MOD_RES (36), (36): Xaa is C or S
LHEELRSMEGILKPKKRVYEMIQVTINSHHVRSPQXK

SEQ ID NO: 17789 - protein, 37 aa, Artificial Sequence
  GFR-binding peptide
  MOD_RES (2), (2): Xaa is C or S
KXALHDELTVQVEKFIPKKRVIEVKAVKVSRLQVQTP

SEQ ID NO: 17790 - protein, 34 aa, Artificial Sequence
  GFR-binding peptide
  MOD_RES (12), (13), (14), (15), (16): Xaa is A or G
  MOD_RES (17), (18), (19), (20): Xaa is A or G or is absent
LHDELTSMEGLXXXXXXXXXMIQVTINSLQVQTP

SEQ ID NO: 17791 - protein, 44 aa, Artificial Sequence
  GFR-binding peptide
  MOD_RES (2), (4), (38): Xaa is C or S
RXEXQSHEELVQVEKHQGQHPKIRVKAMKVSRQGTPVXELGEDN

SEQ ID NO: 17792 - protein, 39 aa, Artificial Sequence
  GFR-binding peptide
  MOD_RES (1), (3), (37): Xaa is C or S
  MOD_RES (15), (16), (17), (18), (19): Xaa is A or G
  MOD_RES (20), (21), (22), (23): Xaa is A or G or is absent
XEXKNHQLFVTAKKXXXXXXXXXIKRMQVPREETPVXEL

SEQ ID NO: 17793 - protein, 36 aa, Artificial Sequence
  GFR-binding peptide
  MOD_RES (36), (36): Xaa is C or S
LHEELRSMEGLLKPKKRVYEMIQVTINSHHVRSPQX

SEQ ID NO: 17794 - protein, 35 aa, Artificial Sequence
  GFR-binding peptide
  MOD_RES (35), (35): Xaa is C or S
HEELRSMEGLLKPKKRVYEMIQVTINSHHVRSPQX

SEQ ID NO: 17795 - protein, 35 aa, Artificial Sequence
  GFR-binding peptide
  MOD_RES (2), (2): Xaa is C or S
  MOD_RES (14), (15), (16), (17), (18): Xaa is A or G
  MOD_RES (19), (20), (21), (22): Xaa is A or G or is absent
EXKNHQLFSMEGIXXXXXXXXXMIQMTINSEETPV

SEQ ID NO: 17796 - protein, 36 aa, Artificial Sequence
  GFR-binding peptide
  MOD_RES (33), (33): Xaa is C or S
  MOD_RES (11), (12), (13), (14), (15): Xaa is A or G
  MOD_RES (16), (17), (18), (19): Xaa is A or G or is absent
SHEELSMEGIXXXXXXXXXMIQMTINSQGTPVXELG

SEQ ID NO: 17797 - protein, 40 aa, Artificial Sequence
  GFR-binding peptide
  MOD_RES (34), (34): Xaa is C or S
  MOD_RES (12), (13), (14), (15), (16): Xaa is A or G
  MOD_RES (17), (18), (19), (20): Xaa is A or G or is absent
KNHQLFSMEGIXXXXXXXXXMIQMTINSEETPVXELGEDN

SEQ ID NO: 17798 - protein, 42 aa, Artificial Sequence
  GFR-binding peptide
  MOD_RES (2), (36): Xaa is C or S
  MOD_RES (14), (15), (16), (17), (18): Xaa is A or G
  MOD_RES (19), (20), (21), (22): Xaa is A or G or is absent
EXQSHEELSMEGLXXXXXXXXXMIQMTINSQGTPVXELGEDN

SEQ ID NO: 17799 - protein, 37 aa, Artificial Sequence
  GFR-binding peptide
  MOD_RES (1), (1): Xaa is C or S
XALHDELTSMEGIFIPKKRVIEMIQVTINSLQVQTPR

SEQ ID NO: 17800 - protein, 43 aa, Artificial Sequence
  GFR-binding peptide
  MOD_RES (2), (4), (41): Xaa is C or S
AXAXELHEELRSMEGLLKPKKRVYEMIQVTINSHHVRSPQXKV

SEQ ID NO: 17801 - protein, 41 aa, Artificial Sequence
  GFR-binding peptide
  MOD_RES (1), (3), (40): Xaa is C or S
XKXALHDELTVTAKKFIPKKRVIEIKRVQVPRLQVQTPRXQ

SEQ ID NO: 17802 - protein, 34 aa, Artificial Sequence
  GFR-binding peptide
ALHDELTSMEGLFIPKKRVIEMIQVTINSLQVQT

SEQ ID NO: 17803 - protein, 37 aa, Artificial Sequence
  GFR-binding peptide
  MOD_RES (34), (34): Xaa is C or S
KNHQLFVQVEKHQGQHPKIRVKAMKVSREETPVXELG

SEQ ID NO: 17804 - protein, 37 aa, Artificial Sequence
  GFR-binding peptide
  MOD_RES (1), (35): Xaa is C or S
XQSHEELVTAKKHQGQHPKIRIKRMQVPRQGTPVXEL

SEQ ID NO: 17805 - protein, 37 aa, Artificial Sequence
  GFR-binding peptide
  MOD_RES (2), (4): Xaa is C or S
RXEXQSHEELVQVEKHQGQHPKIRVKAMKVSRQGTPV

SEQ ID NO: 17806 - protein, 40 aa, Artificial Sequence
  GFR-binding peptide
  MOD_RES (1), (38): Xaa is C or S
  MOD_RES (14), (15), (16), (17), (18): Xaa is A or G
  MOD_RES (19), (20), (21), (22): Xaa is A or G or is absent
XALHDELTSMEGIXXXXXXXXXMIQVTINSLQVQTPRXQV

SEQ ID NO: 17807 - protein, 42 aa, Artificial Sequence
  GFR-binding peptide
  MOD_RES (1), (3), (37): Xaa is C or S
XEXQSHEELSMEGIHQGQHPKIRMIQMTINSQGTPVXELGED

SEQ ID NO: 17808 - protein, 34 aa, Artificial Sequence
  GFR-binding peptide
LHEELRVQVEKLKPKKRVYEVKAVKVSRHHVRSP

SEQ ID NO: 17809 - protein, 39 aa, Artificial Sequence
  GFR-binding peptide
  MOD_RES (1), (3): Xaa is C or S
XAXELHEELRSMEGLLKPKKRVYEMIQVTINSHHVRSPQ

SEQ ID NO: 17810 - protein, 35 aa, Artificial Sequence
  GFR-binding peptide
  MOD_RES (35), (35): Xaa is C or S
HEELRSMEGILKPKKRVYEMIQVTINSHHVRSPQX

SEQ ID NO: 17811 - protein, 36 aa, Artificial Sequence
  GFR-binding peptide
  MOD_RES (33), (33): Xaa is C or S
NHQLFSMEGLHQGQHPKIRMIQMTINSEETPVXELG

SEQ ID NO: 17812 - protein, 34 aa, Artificial Sequence
  GFR-binding peptide
  MOD_RES (11), (12), (13), (14), (15): Xaa is A or G
  MOD_RES (16), (17), (18), (19): Xaa is A or G or is absent
HEELRSMEGIXXXXXXXXXMIQVTINSHHVRSPQ

SEQ ID NO: 17813 - protein, 38 aa, Artificial Sequence
  GFR-binding peptide
  MOD_RES (2), (4), (38): Xaa is C or S
RXEXKNHQLFVTAKKHQGQHPKIRIKRMQVPREETPVX

SEQ ID NO: 17814 - protein, 38 aa, Artificial Sequence
  GFR-binding peptide
  MOD_RES (2), (36): Xaa is C or S
  MOD_RES (14), (15), (16), (17), (18): Xaa is A or G
  MOD_RES (19), (20), (21), (22): Xaa is A or G or is absent
EXQSHEELSMEGIXXXXXXXXXMIQMTINSQGTPVXEL

SEQ ID NO: 17815 - protein, 43 aa, Artificial Sequence
  GFR-binding peptide
  MOD_RES (2), (4), (41): Xaa is C or S
AXAXELHEELRVTAKKLKPKKRVYEIKRVQVPRHHVRSPQXKV

SEQ ID NO: 17816 - protein, 42 aa, Artificial Sequence
  GFR-binding peptide
  MOD_RES (2), (4), (41): Xaa is C or S
  MOD_RES (17), (18), (19), (20), (21): Xaa is A or G
  MOD_RES (22), (23), (24), (25): Xaa is A or G or is absent
EXKXALHDELTVTAKKXXXXXXXXXIKRVQVPRLQVQTPRXQ

SEQ ID NO: 17817 - protein, 38 aa, Artificial Sequence
  GFR-binding peptide
  MOD_RES (36), (36): Xaa is C or S
LHDELTSMEGLFIPKKRVIEMIQVTINSLQVQTPRXQV

SEQ ID NO: 17818 - protein, 40 aa, Artificial Sequence
  GFR-binding peptide
  MOD_RES (2), (4), (38): Xaa is C or S
  MOD_RES (16), (17), (18), (19), (20): Xaa is A or G
  MOD_RES (21), (22), (23), (24): Xaa is A or G or is absent
RXEXQSHEELSMEGLXXXXXXXXXMIQMTINSQGTPVXEL

SEQ ID NO: 17819 - protein, 35 aa, Artificial Sequence
  GFR-binding peptide
LHEELRSMEGLLKPKKRVYEMIQVTINSHHVRSPQ

SEQ ID NO: 17820 - protein, 42 aa, Artificial Sequence
  GFR-binding peptide
  MOD_RES (2), (39): Xaa is C or S
AXELHEELRSMEGLLKPKKRVYEMIQVTINSHHVRSPQXKVS

SEQ ID NO: 17821 - protein, 42 aa, Artificial Sequence
  GFR-binding peptide
  MOD_RES (1), (38): Xaa is C or S
  MOD_RES (14), (15), (16), (17), (18): Xaa is A or G
  MOD_RES (19), (20), (21), (22): Xaa is A or G or is absent
XELHEELRVTAKKXXXXXXXXXIKRVQVPRHHVRSPQXKVSS

SEQ ID NO: 17822 - protein, 39 aa, Artificial Sequence
  GFR-binding peptide
  MOD_RES (2), (39): Xaa is C or S
AXELHEELRVTAKKLKPKKRVYEIKRVQVPRHHVRSPQX

SEQ ID NO: 17823 - protein, 38 aa, Artificial Sequence
  GFR-binding peptide
  MOD_RES (1), (38): Xaa is C or S
  MOD_RES (14), (15), (16), (17), (18): Xaa is A or G
  MOD_RES (19), (20), (21), (22): Xaa is A or G or is absent
XELHEELRVQVEKXXXXXXXXXVKAVKVSRHHVRSPQX

SEQ ID NO: 17824 - protein, 43 aa, Artificial Sequence
  GFR-binding peptide
  MOD_RES (1), (3), (37): Xaa is C or S
  MOD_RES (15), (16), (17), (18), (19): Xaa is A or G
  MOD_RES (20), (21), (22), (23): Xaa is A or G or is absent
XEXKNHQLFSMEGLXXXXXXXXXMIQMTINSEETPVXELGEDN

SEQ ID NO: 17825 - protein, 41 aa, Artificial Sequence
  GFR-binding peptide
  MOD_RES (2), (4), (41): Xaa is C or S
EXKXALHDELTSMEGIFIPKKRVIEMIQVTINSLQVQTPRX

SEQ ID NO: 17826 - protein, 44 aa, Artificial Sequence
  GFR-binding peptide
  MOD_RES (2), (4), (41): Xaa is C or S
  MOD_RES (17), (18), (19), (20), (21): Xaa is A or G
  MOD_RES (22), (23), (24), (25): Xaa is A or G or is absent
EXKXALHDELTSMEGIXXXXXXXXXMIQVTINSLQVQTPRXQVN

SEQ ID NO: 17827 - protein, 40 aa, Artificial Sequence
  GFR-binding peptide
  MOD_RES (2), (36): Xaa is C or S
  MOD_RES (14), (15), (16), (17), (18): Xaa is A or G
  MOD_RES (19), (20), (21), (22): Xaa is A or G or is absent
EXQSHEELSMEGLXXXXXXXXXMIQMTINSQGTPVXELGE

SEQ ID NO: 17828 - protein, 39 aa, Artificial Sequence
  GFR-binding peptide
  MOD_RES (2), (39): Xaa is C or S
AXELHEELRSMEGLLKPKKRVYEMIQVTINSHHVRSPQX

SEQ ID NO: 17829 - protein, 38 aa, Artificial Sequence
  GFR-binding peptide
  MOD_RES (1), (38): Xaa is C or S
  MOD_RES (14), (15), (16), (17), (18): Xaa is A or G
  MOD_RES (19), (20), (21), (22): Xaa is A or G or is absent
XALHDELTVTAKKXXXXXXXXXIKRVQVPRLQVQTPRX

SEQ ID NO: 17830 - protein, 42 aa, Artificial Sequence
  GFR-binding peptide
  MOD_RES (2), (39): Xaa is C or S
AXELHEELRVTAKKLKPKKRVYEIKRVQVPRHHVRSPQXKVS

SEQ ID NO: 17831 - protein, 41 aa, Artificial Sequence
  GFR-binding peptide
  MOD_RES (2), (4), (38): Xaa is C or S
  MOD_RES (16), (17), (18), (19), (20): Xaa is A or G
  MOD_RES (21), (22), (23), (24): Xaa is A or G or is absent
RXEXKNHQLFSMEGLXXXXXXXXXMIQMTINSEETPVXELG

SEQ ID NO: 17832 - protein, 42 aa, Artificial Sequence
  GFR-binding peptide
  MOD_RES (2), (4), (38): Xaa is C or S
RXEXKNHQLFSMEGIHQGQHPKIRMIQMTINSEETPVXELGE

SEQ ID NO: 17833 - protein, 38 aa, Artificial Sequence
  GFR-binding peptide
  MOD_RES (2), (4), (38): Xaa is C or S
  MOD_RES (16), (17), (18), (19), (20): Xaa is A or G
  MOD_RES (21), (22), (23), (24): Xaa is A or G or is absent
RXEXQSHEELSMEGLXXXXXXXXXMIQMTINSQGTPVX

SEQ ID NO: 17834 - protein, 37 aa, Artificial Sequence
  GFR-binding peptide
  MOD_RES (1), (1): Xaa is C or S
XELHEELRSMEGILKPKKRVYEMIQVTINSHHVRSPQ

SEQ ID NO: 17835 - protein, 36 aa, Artificial Sequence
  GFR-binding peptide
  MOD_RES (33), (33): Xaa is C or S
SHEELSMEGLHQGQHPKIRMIQMTINSQGTPVXELG

SEQ ID NO: 17836 - protein, 39 aa, Artificial Sequence
  GFR-binding peptide
  MOD_RES (34), (34): Xaa is C or S
  MOD_RES (12), (13), (14), (15), (16): Xaa is A or G
  MOD_RES (17), (18), (19), (20): Xaa is A or G or is absent
QSHEELVTAKKXXXXXXXXXIKRMQVPRQGTPVXELGED

SEQ ID NO: 17837 - protein, 39 aa, Artificial Sequence
  GFR-binding peptide
  MOD_RES (2), (4), (38): Xaa is C or S
RXEXKNHQLFVTAKKHQGQHPKIRIKRMQVPREETPVXE

SEQ ID NO: 17838 - protein, 41 aa, Artificial Sequence
  GFR-binding peptide
  MOD_RES (1), (3), (40): Xaa is C or S
XAXELHEELRSMEGLLKPKKRVYEMIQVTINSHHVRSPQXK

SEQ ID NO: 17839 - protein, 34 aa, Artificial Sequence
  GFR-binding peptide
  MOD_RES (11), (12), (13), (14), (15): Xaa is A or G
  MOD_RES (16), (17), (18), (19): Xaa is A or G or is absent
HEELRSMEGLXXXXXXXXXMIQVTINSHHVRSPQ

SEQ ID NO: 17840 - protein, 37 aa, Artificial Sequence
  GFR-binding peptide
  MOD_RES (2), (36): Xaa is C or S
  MOD_RES (14), (15), (16), (17), (18): Xaa is A or G
  MOD_RES (19), (20), (21), (22): Xaa is A or G or is absent
EXQSHEELVTAKKXXXXXXXXXIKRMQVPRQGTPVXE

SEQ ID NO: 17841 - protein, 44 aa, Artificial Sequence
  GFR-binding peptide
  MOD_RES (2), (4), (38): Xaa is C or S
  MOD_RES (16), (17), (18), (19), (20): Xaa is A or G
  MOD_RES (21), (22), (23), (24): Xaa is A or G or is absent
RXEXQSHEELVTAKKXXXXXXXXXIKRMQVPRQGTPVXELGEDN

SEQ ID NO: 17842 - protein, 40 aa, Artificial Sequence
  GFR-binding peptide
  MOD_RES (1), (3), (40): Xaa is C or S
  MOD_RES (16), (17), (18), (19), (20): Xaa is A or G
  MOD_RES (21), (22), (23), (24): Xaa is A or G or is absent
XAXELHEELRSMEGLXXXXXXXXXMIQVTINSHHVRSPQX

SEQ ID NO: 17843 - protein, 40 aa, Artificial Sequence
  GFR-binding peptide
  MOD_RES (37), (37): Xaa is C or S
ALHDELTVTAKKFIPKKRVIEIKRVQVPRLQVQTPRXQVN

SEQ ID NO: 17844 - protein, 39 aa, Artificial Sequence
  GFR-binding peptide
  MOD_RES (34), (34): Xaa is C or S
  MOD_RES (12), (13), (14), (15), (16): Xaa is A or G
  MOD_RES (17), (18), (19), (20): Xaa is A or G or is absent
QSHEELSMEGIXXXXXXXXXMIQMTINSQGTPVXELGED

SEQ ID NO: 17845 - protein, 37 aa, Artificial Sequence
  GFR-binding peptide
  MOD_RES (2), (4): Xaa is C or S
  MOD_RES (16), (17), (18), (19), (20): Xaa is A or G
  MOD_RES (21), (22), (23), (24): Xaa is A or G or is absent
RXEXKNHQLFSMEGLXXXXXXXXXMIQMTINSEETPV

SEQ ID NO: 17846 - protein, 34 aa, Artificial Sequence
  GFR-binding peptide
  MOD_RES (13), (14), (15), (16), (17): Xaa is A or G
  MOD_RES (18), (19), (20), (21): Xaa is A or G or is absent
ALHDELTVQVEKXXXXXXXXXVKAVKVSRLQVQT

SEQ ID NO: 17847 - protein, 36 aa, Artificial Sequence
  GFR-binding peptide
  MOD_RES (13), (14), (15), (16), (17): Xaa is A or G
  MOD_RES (18), (19), (20), (21): Xaa is A or G or is absent
ALHDELTVTAKKXXXXXXXXXIKRVQVPRLQVQTPR

SEQ ID NO: 17848 - protein, 34 aa, Artificial Sequence
  GFR-binding peptide
  MOD_RES (34), (34): Xaa is C or S
  MOD_RES (12), (13), (14), (15), (16): Xaa is A or G
  MOD_RES (17), (18), (19), (20): Xaa is A or G or is absent
KNHQLFSMEGIXXXXXXXXXMIQMTINSEETPVX

SEQ ID NO: 17849 - protein, 40 aa, Artificial Sequence
  GFR-binding peptide
  MOD_RES (1), (3), (40): Xaa is C or S
  MOD_RES (16), (17), (18), (19), (20): Xaa is A or G
  MOD_RES (21), (22), (23), (24): Xaa is A or G or is absent
XKXALHDELTVQVEKXXXXXXXXXVKAVKVSRLQVQTPRX

SEQ ID NO: 17850 - protein, 38 aa, Artificial Sequence
  GFR-binding peptide
  MOD_RES (34), (34): Xaa is C or S
KNHQLFSMEGIHQGQHPKIRMIQMTINSEETPVXELGE

SEQ ID NO: 17851 - protein, 37 aa, Artificial Sequence
  GFR-binding peptide
  MOD_RES (34), (34): Xaa is C or S
QSHEELSMEGLHQGQHPKIRMIQMTINSQGTPVXELG

SEQ ID NO: 17852 - protein, 35 aa, Artificial Sequence
  GFR-binding peptide
ALHDELTSMEGLFIPKKRVIEMIQVTINSLQVQTP

SEQ ID NO: 17853 - protein, 36 aa, Artificial Sequence
  GFR-binding peptide
  MOD_RES (13), (14), (15), (16), (17): Xaa is A or G
  MOD_RES (18), (19), (20), (21): Xaa is A or G or is absent
ALHDELTSMEGLXXXXXXXXXMIQVTINSLQVQTPR

SEQ ID NO: 17854 - protein, 32 aa, Artificial Sequence
  GFR-binding peptide
HDELTVTAKKFIPKKRVIEIKRVQVPRLQVQT

SEQ ID NO: 17855 - protein, 38 aa, Artificial Sequence
  GFR-binding peptide
  MOD_RES (1), (3): Xaa is C or S
  MOD_RES (16), (17), (18), (19), (20): Xaa is A or G
  MOD_RES (21), (22), (23), (24): Xaa is A or G or is absent
XAXELHEELRSMEGLXXXXXXXXXMIQVTINSHHVRSP

SEQ ID NO: 17856 - protein, 40 aa, Artificial Sequence
  GFR-binding peptide
  MOD_RES (34), (34): Xaa is C or S
QSHEELSMEGLHQGQHPKIRMIQMTINSQGTPVXELGEDN

SEQ ID NO: 17857 - protein, 41 aa, Artificial Sequence
  GFR-binding peptide
  MOD_RES (1), (3), (40): Xaa is C or S
  MOD_RES (16), (17), (18), (19), (20): Xaa is A or G
  MOD_RES (21), (22), (23), (24): Xaa is A or G or is absent
XKXALHDELTSMEGLXXXXXXXXXMIQVTINSLQVQTPRXQ

SEQ ID NO: 17858 - protein, 39 aa, Artificial Sequence
  GFR-binding peptide
  MOD_RES (36), (36): Xaa is C or S
  MOD_RES (12), (13), (14), (15), (16): Xaa is A or G
  MOD_RES (17), (18), (19), (20): Xaa is A or G or is absent
LHDELTSMEGIXXXXXXXXXMIQVTINSLQVQTPRXQVN

SEQ ID NO: 17859 - protein, 41 aa, Artificial Sequence
  GFR-binding peptide
  MOD_RES (1), (3), (37): Xaa is C or S
XEXKNHQLFVTAKKHQGQHPKIRIKRMQVPREETPVXELGE

SEQ ID NO: 17860 - protein, 36 aa, Artificial Sequence
  GFR-binding peptide
  MOD_RES (2), (36): Xaa is C or S
  MOD_RES (14), (15), (16), (17), (18): Xaa is A or G
  MOD_RES (19), (20), (21), (22): Xaa is A or G or is absent
EXKNHQLFVTAKKXXXXXXXXXIKRMQVPREETPVX

SEQ ID NO: 17861 - protein, 35 aa, Artificial Sequence
  GFR-binding peptide
  MOD_RES (1), (35): Xaa is C or S
XQSHEELSMEGLHQGQHPKIRMIQMTINSQGTPVX

SEQ ID NO: 17862 - protein, 32 aa, Artificial Sequence
  GFR-binding peptide
SHEELVQVEKHQGQHPKIRVKAMKVSRQGTPV

SEQ ID NO: 17863 - protein, 42 aa, Artificial Sequence
  GFR-binding peptide
  MOD_RES (1), (38): Xaa is C or S
XALHDELTVTAKKFIPKKRVIEIKRVQVPRLQVQTPRXQVNR

SEQ ID NO: 17864 - protein, 36 aa, Artificial Sequence
  GFR-binding peptide
  MOD_RES (34), (34): Xaa is C or S
KNHQLFSMEGLHQGQHPKIRMIQMTINSEETPVXEL

SEQ ID NO: 17865 - protein, 35 aa, Artificial Sequence
  GFR-binding peptide
  MOD_RES (34), (34): Xaa is C or S
QSHEELSMEGIHQGQHPKIRMIQMTINSQGTPVXE

SEQ ID NO: 17866 - protein, 33 aa, Artificial Sequence
  GFR-binding peptide
  MOD_RES (12), (13), (14), (15), (16): Xaa is A or G
  MOD_RES (17), (18), (19), (20): Xaa is A or G or is absent
LHEELRVTAKKXXXXXXXXXIKRVQVPRHHVRS

SEQ ID NO: 17867 - protein, 35 aa, Artificial Sequence
  GFR-binding peptide
  MOD_RES (33), (33): Xaa is C or S
  MOD_RES (11), (12), (13), (14), (15): Xaa is A or G
  MOD_RES (16), (17), (18), (19): Xaa is A or G or is absent
NHQLFSMEGLXXXXXXXXXMIQMTINSEETPVXEL

SEQ ID NO: 17868 - protein, 40 aa, Artificial Sequence
  GFR-binding peptide
  MOD_RES (1), (3), (40): Xaa is C or S
  MOD_RES (16), (17), (18), (19), (20): Xaa is A or G
  MOD_RES (21), (22), (23), (24): Xaa is A or G or is absent
XKXALHDELTVTAKKXXXXXXXXXIKRVQVPRLQVQTPRX

SEQ ID NO: 17869 - protein, 37 aa, Artificial Sequence
  GFR-binding peptide
  MOD_RES (1), (3): Xaa is C or S
XAXELHEELRVQVEKLKPKKRVYEVKAVKVSRHHVRS

SEQ ID NO: 17870 - protein, 37 aa, Artificial Sequence
  GFR-binding peptide
  MOD_RES (33), (33): Xaa is C or S
  MOD_RES (11), (12), (13), (14), (15): Xaa is A or G
  MOD_RES (16), (17), (18), (19): Xaa is A or G or is absent
SHEELSMEGIXXXXXXXXXMIQMTINSQGTPVXELGE

SEQ ID NO: 17871 - protein, 43 aa, Artificial Sequence
  GFR-binding peptide
  MOD_RES (2), (4), (38): Xaa is C or S
RXEXQSHEELVTAKKHQGQHPKIRIKRMQVPRQGTPVXELGED

SEQ ID NO: 17872 - protein, 38 aa, Artificial Sequence
  GFR-binding peptide
  MOD_RES (33), (33): Xaa is C or S
  MOD_RES (11), (12), (13), (14), (15): Xaa is A or G
  MOD_RES (16), (17), (18), (19): Xaa is A or G or is absent
SHEELSMEGLXXXXXXXXXMIQMTINSQGTPVXELGED

SEQ ID NO: 17873 - protein, 33 aa, Artificial Sequence
  GFR-binding peptide
LHDELTSMEGLFIPKKRVIEMIQVTINSLQVQT

SEQ ID NO: 17874 - protein, 42 aa, Artificial Sequence
  GFR-binding peptide
  MOD_RES (1), (38): Xaa is C or S
XELHEELRSMEGILKPKKRVYEMIQVTINSHHVRSPQXKVSS

SEQ ID NO: 17875 - protein, 40 aa, Artificial Sequence
  GFR-binding peptide
  MOD_RES (36), (36): Xaa is C or S
LHEELRVTAKKLKPKKRVYEIKRVQVPRHHVRSPQXKVSS

SEQ ID NO: 17876 - protein, 38 aa, Artificial Sequence
  GFR-binding peptide
  MOD_RES (2), (4), (38): Xaa is C or S
  MOD_RES (16), (17), (18), (19), (20): Xaa is A or G
  MOD_RES (21), (22), (23), (24): Xaa is A or G or is absent
RXEXKNHQLFVTAKKXXXXXXXXXIKRMQVPREETPVX

SEQ ID NO: 17877 - protein, 35 aa, Artificial Sequence
  GFR-binding peptide
ELHEELRVTAKKLKPKKRVYEIKRVQVPRHHVRSP

SEQ ID NO: 17878 - protein, 36 aa, Artificial Sequence
  GFR-binding peptide
  MOD_RES (35), (35): Xaa is C or S
HDELTVQVEKFIPKKRVIEVKAVKVSRLQVQTPRXQ

SEQ ID NO: 17879 - protein, 38 aa, Artificial Sequence
  GFR-binding peptide
  MOD_RES (2), (4), (38): Xaa is C or S
  MOD_RES (16), (17), (18), (19), (20): Xaa is A or G
  MOD_RES (21), (22), (23), (24): Xaa is A or G or is absent
RXEXKNHQLFVQVEKXXXXXXXXXVKAMKVSREETPVX

SEQ ID NO: 17880 - protein, 41 aa, Artificial Sequence
  GFR-binding peptide
  MOD_RES (1), (38): Xaa is C or S
XELHEELRSMEGLLKPKKRVYEMIQVTINSHHVRSPQXKVS

SEQ ID NO: 17881 - protein, 33 aa, Artificial Sequence
  GFR-binding peptide
  MOD_RES (33), (33): Xaa is C or S
  MOD_RES (11), (12), (13), (14), (15): Xaa is A or G
  MOD_RES (16), (17), (18), (19): Xaa is A or G or is absent
NHQLFSMEGLXXXXXXXXXMIQMTINSEETPVX

SEQ ID NO: 17882 - protein, 35 aa, Artificial Sequence
  GFR-binding peptide
LHDELTSMEGIFIPKKRVIEMIQVTINSLQVQTPR

SEQ ID NO: 17883 - protein, 38 aa, Artificial Sequence
  GFR-binding peptide
  MOD_RES (1), (35): Xaa is C or S
  MOD_RES (13), (14), (15), (16), (17): Xaa is A or G
  MOD_RES (18), (19), (20), (21): Xaa is A or G or is absent
XKNHQLFSMEGLXXXXXXXXXMIQMTINSEETPVXELG

SEQ ID NO: 17884 - protein, 39 aa, Artificial Sequence
  GFR-binding peptide
  MOD_RES (1), (3), (37): Xaa is C or S
XEXQSHEELSMEGIHQGQHPKIRMIQMTINSQGTPVXEL

SEQ ID NO: 17885 - protein, 33 aa, Artificial Sequence
  GFR-binding peptide
HEELRSMEGILKPKKRVYEMIQVTINSHHVRSP

SEQ ID NO: 17886 - protein, 37 aa, Artificial Sequence
  GFR-binding peptide
  MOD_RES (1), (3): Xaa is C or S
XAXELHEELRVTAKKLKPKKRVYEIKRVQVPRHHVRS

SEQ ID NO: 17887 - protein, 34 aa, Artificial Sequence
  GFR-binding peptide
  MOD_RES (33), (33): Xaa is C or S
  MOD_RES (11), (12), (13), (14), (15): Xaa is A or G
  MOD_RES (16), (17), (18), (19): Xaa is A or G or is absent
NHQLFSMEGIXXXXXXXXXMIQMTINSEETPVXE

SEQ ID NO: 17888 - protein, 39 aa, Artificial Sequence
  GFR-binding peptide
  MOD_RES (2), (39): Xaa is C or S
  MOD_RES (15), (16), (17), (18), (19): Xaa is A or G
  MOD_RES (20), (21), (22), (23): Xaa is A or G or is absent
KXALHDELTVQVEKXXXXXXXXXVKAVKVSRLQVQTPRX

SEQ ID NO: 17889 - protein, 37 aa, Artificial Sequence
  GFR-binding peptide
  MOD_RES (2), (2): Xaa is C or S
  MOD_RES (15), (16), (17), (18), (19): Xaa is A or G
  MOD_RES (20), (21), (22), (23): Xaa is A or G or is absent
KXALHDELTVQVEKXXXXXXXXXVKAVKVSRLQVQTP

SEQ ID NO: 17890 - protein, 39 aa, Artificial Sequence
  GFR-binding peptide
  MOD_RES (1), (38): Xaa is C or S
XELHEELRVTAKKLKPKKRVYEIKRVQVPRHHVRSPQXK

SEQ ID NO: 17891 - protein, 38 aa, Artificial Sequence
  GFR-binding peptide
  MOD_RES (2), (36): Xaa is C or S
EXKNHQLFSMEGLHQGQHPKIRMIQMTINSEETPVXEL

SEQ ID NO: 17892 - protein, 36 aa, Artificial Sequence
  GFR-binding peptide
  MOD_RES (1), (3): Xaa is C or S
XEXKNHQLFSMEGIHQGQHPKIRMIQMTINSEETPV

SEQ ID NO: 17893 - protein, 37 aa, Artificial Sequence
  GFR-binding peptide
  MOD_RES (1), (3): Xaa is C or S
XKXALHDELTVQVEKFIPKKRVIEVKAVKVSRLQVQT

SEQ ID NO: 17894 - protein, 43 aa, Artificial Sequence
  GFR-binding peptide
  MOD_RES (2), (4), (38): Xaa is C or S
RXEXQSHEELVQVEKHQGQHPKIRVKAMKVSRQGTPVXELGED

SEQ ID NO: 17895 - protein, 37 aa, Artificial Sequence
  GFR-binding peptide
  MOD_RES (37), (37): Xaa is C or S
ELHEELRSMEGILKPKKRVYEMIQVTINSHHVRSPQX

SEQ ID NO: 17896 - protein, 33 aa, Artificial Sequence
  GFR-binding peptide
  MOD_RES (12), (13), (14), (15), (16): Xaa is A or G
  MOD_RES (17), (18), (19), (20): Xaa is A or G or is absent
KNHQLFVQVEKXXXXXXXXXVKAMKVSREETPV

SEQ ID NO: 17897 - protein, 37 aa, Artificial Sequence
  GFR-binding peptide
  MOD_RES (1), (3), (37): Xaa is C or S
  MOD_RES (15), (16), (17), (18), (19): Xaa is A or G
  MOD_RES (20), (21), (22), (23): Xaa is A or G or is absent
XEXKNHQLFSMEGLXXXXXXXXXMIQMTINSEETPVX

SEQ ID NO: 17898 - protein, 42 aa, Artificial Sequence
  GFR-binding peptide
  MOD_RES (1), (38): Xaa is C or S
  MOD_RES (14), (15), (16), (17), (18): Xaa is A or G
  MOD_RES (19), (20), (21), (22): Xaa is A or G or is absent
XALHDELTVTAKKXXXXXXXXXIKRVQVPRLQVQTPRXQVNR

SEQ ID NO: 17899 - protein, 43 aa, Artificial Sequence
  GFR-binding peptide
  MOD_RES (1), (3), (37): Xaa is C or S
XEXQSHEELSMEGLHQGQHPKIRMIQMTINSQGTPVXELGEDN

SEQ ID NO: 17900 - protein, 39 aa, Artificial Sequence
  GFR-binding peptide
  MOD_RES (33), (33): Xaa is C or S
  MOD_RES (11), (12), (13), (14), (15): Xaa is A or G
  MOD_RES (16), (17), (18), (19): Xaa is A or G or is absent
NHQLFVQVEKXXXXXXXXXVKAMKVSREETPVXELGEDN

SEQ ID NO: 17901 - protein, 38 aa, Artificial Sequence
  GFR-binding peptide
  MOD_RES (1), (38): Xaa is C or S
XALHDELTVQVEKFIPKKRVIEVKAVKVSRLQVQTPRX

SEQ ID NO: 17902 - protein, 35 aa, Artificial Sequence
  GFR-binding peptide
ALHDELTVTAKKFIPKKRVIEIKRVQVPRLQVQTP

SEQ ID NO: 17903 - protein, 37 aa, Artificial Sequence
  GFR-binding peptide
  MOD_RES (2), (4): Xaa is C or S
  MOD_RES (16), (17), (18), (19), (20): Xaa is A or G
  MOD_RES (21), (22), (23), (24): Xaa is A or G or is absent
RXEXQSHEELSMEGLXXXXXXXXXMIQMTINSQGTPV

SEQ ID NO: 17904 - protein, 32 aa, Artificial Sequence
  GFR-binding peptide
  MOD_RES (11), (12), (13), (14), (15): Xaa is A or G
  MOD_RES (16), (17), (18), (19): Xaa is A or G or is absent
NHQLFVQVEKXXXXXXXXXVKAMKVSREETPV

SEQ ID NO: 17905 - protein, 43 aa, Artificial Sequence
  GFR-binding peptide
  MOD_RES (2), (39): Xaa is C or S
KXALHDELTSMEGIFIPKKRVIEMIQVTINSLQVQTPRXQVNR

SEQ ID NO: 17906 - protein, 38 aa, Artificial Sequence
  GFR-binding peptide
  MOD_RES (36), (36): Xaa is C or S
LHDELTVQVEKFIPKKRVIEVKAVKVSRLQVQTPRXQV

SEQ ID NO: 17907 - protein, 42 aa, Artificial Sequence
  GFR-binding peptide
  MOD_RES (1), (38): Xaa is C or S
  MOD_RES (14), (15), (16), (17), (18): Xaa is A or G
  MOD_RES (19), (20), (21), (22): Xaa is A or G or is absent
XALHDELTSMEGLXXXXXXXXXMIQVTINSLQVQTPRXQVNR

SEQ ID NO: 17908 - protein, 34 aa, Artificial Sequence
  GFR-binding peptide
LHDELTSMEGLFIPKKRVIEMIQVTINSLQVQTP

SEQ ID NO: 17909 - protein, 38 aa, Artificial Sequence
  GFR-binding peptide
  MOD_RES (37), (37): Xaa is C or S
  MOD_RES (13), (14), (15), (16), (17): Xaa is A or G
  MOD_RES (18), (19), (20), (21): Xaa is A or G or is absent
ELHEELRSMEGIXXXXXXXXXMIQVTINSHHVRSPQXK

SEQ ID NO: 17910 - protein, 35 aa, Artificial Sequence
  GFR-binding peptide
  MOD_RES (1), (35): Xaa is C or S
  MOD_RES (13), (14), (15), (16), (17): Xaa is A or G
  MOD_RES (18), (19), (20), (21): Xaa is A or G or is absent
XQSHEELSMEGIXXXXXXXXXMIQMTINSQGTPVX

SEQ ID NO: 17911 - protein, 44 aa, Artificial Sequence
  GFR-binding peptide
  MOD_RES (2), (4), (41): Xaa is C or S
  MOD_RES (17), (18), (19), (20), (21): Xaa is A or G
  MOD_RES (22), (23), (24), (25): Xaa is A or G or is absent
EXKXALHDELTVQVEKXXXXXXXXXVKAVKVSRLQVQTPRXQVN

SEQ ID NO: 17912 - protein, 39 aa, Artificial Sequence
  GFR-binding peptide
  MOD_RES (35), (35): Xaa is C or S
  MOD_RES (11), (12), (13), (14), (15): Xaa is A or G
  MOD_RES (16), (17), (18), (19): Xaa is A or G or is absent
HDELTVQVEKXXXXXXXXXVKAVKVSRLQVQTPRXQVNR

SEQ ID NO: 17913 - protein, 40 aa, Artificial Sequence
  GFR-binding peptide
  MOD_RES (34), (34): Xaa is C or S
  MOD_RES (12), (13), (14), (15), (16): Xaa is A or G
  MOD_RES (17), (18), (19), (20): Xaa is A or G or is absent
KNHQLFVTAKKXXXXXXXXXIKRMQVPREETPVXELGEDN

SEQ ID NO: 17914 - protein, 34 aa, Artificial Sequence
  GFR-binding peptide
  MOD_RES (12), (13), (14), (15), (16): Xaa is A or G
  MOD_RES (17), (18), (19), (20): Xaa is A or G or is absent
LHEELRVTAKKXXXXXXXXXIKRVQVPRHHVRSP

SEQ ID NO: 17915 - protein, 39 aa, Artificial Sequence
  GFR-binding peptide
  MOD_RES (33), (33): Xaa is C or S
SHEELVQVEKHQGQHPKIRVKAMKVSRQGTPVXELGEDN

SEQ ID NO: 17916 - protein, 42 aa, Artificial Sequence
  GFR-binding peptide
  MOD_RES (2), (39): Xaa is C or S
  MOD_RES (15), (16), (17), (18), (19): Xaa is A or G
  MOD_RES (20), (21), (22), (23): Xaa is A or G or is absent
KXALHDELTVQVEKXXXXXXXXXVKAVKVSRLQVQTPRXQVN

SEQ ID NO: 17917 - protein, 33 aa, Artificial Sequence
  GFR-binding peptide
  MOD_RES (33), (33): Xaa is C or S
SHEELSMEGLHQGQHPKIRMIQMTINSQGTPVX

SEQ ID NO: 17918 - protein, 44 aa, Artificial Sequence
  GFR-binding peptide
  MOD_RES (1), (3), (40): Xaa is C or S
XAXELHEELRVQVEKLKPKKRVYEVKAVKVSRHHVRSPQXKVSS

SEQ ID NO: 17919 - protein, 32 aa, Artificial Sequence
  GFR-binding peptide
  MOD_RES (11), (12), (13), (14), (15): Xaa is A or G
  MOD_RES (16), (17), (18), (19): Xaa is A or G or is absent
HEELRSMEGLXXXXXXXXXMIQVTINSHHVRS

SEQ ID NO: 17920 - protein, 40 aa, Artificial Sequence
  GFR-binding peptide
  MOD_RES (2), (36): Xaa is C or S
EXKNHQLFVTAKKHQGQHPKIRIKRMQVPREETPVXELGE

SEQ ID NO: 17921 - protein, 39 aa, Artificial Sequence
  GFR-binding peptide
  MOD_RES (1), (3), (37): Xaa is C or S
XEXKNHQLFVTAKKHQGQHPKIRIKRMQVPREETPVXEL

SEQ ID NO: 17922 - protein, 37 aa, Artificial Sequence
  GFR-binding peptide
  MOD_RES (2), (2): Xaa is C or S
  MOD_RES (15), (16), (17), (18), (19): Xaa is A or G
  MOD_RES (20), (21), (22), (23): Xaa is A or G or is absent
AXELHEELRVTAKKXXXXXXXXXIKRVQVPRHHVRSP

SEQ ID NO: 17923 - protein, 33 aa, Artificial Sequence
  GFR-binding peptide
  MOD_RES (12), (13), (14), (15), (16): Xaa is A or G
  MOD_RES (17), (18), (19), (20): Xaa is A or G or is absent
QSHEELSMEGLXXXXXXXXXMIQMTINSQGTPV

SEQ ID NO: 17924 - protein, 37 aa, Artificial Sequence
  GFR-binding peptide
  MOD_RES (33), (33): Xaa is C or S
  MOD_RES (11), (12), (13), (14), (15): Xaa is A or G
  MOD_RES (16), (17), (18), (19): Xaa is A or G or is absent
NHQLFSMEGLXXXXXXXXXMIQMTINSEETPVXELGE

SEQ ID NO: 17925 - protein, 41 aa, Artificial Sequence
  GFR-binding peptide
  MOD_RES (2), (4), (41): Xaa is C or S
  MOD_RES (17), (18), (19), (20), (21): Xaa is A or G
  MOD_RES (22), (23), (24), (25): Xaa is A or G or is absent
EXKXALHDELTVQVEKXXXXXXXXXVKAVKVSRLQVQTPRX

SEQ ID NO: 17926 - protein, 38 aa, Artificial Sequence
  GFR-binding peptide
  MOD_RES (2), (2): Xaa is C or S
  MOD_RES (15), (16), (17), (18), (19): Xaa is A or G
  MOD_RES (20), (21), (22), (23): Xaa is A or G or is absent
KXALHDELTVQVEKXXXXXXXXXVKAVKVSRLQVQTPR

SEQ ID NO: 17927 - protein, 38 aa, Artificial Sequence
  GFR-binding peptide
  MOD_RES (1), (3): Xaa is C or S
  MOD_RES (16), (17), (18), (19), (20): Xaa is A or G
  MOD_RES (21), (22), (23), (24): Xaa is A or G or is absent
XKXALHDELTVQVEKXXXXXXXXXVKAVKVSRLQVQTP

SEQ ID NO: 17928 - protein, 33 aa, Artificial Sequence
  GFR-binding peptide
LHEELRVQVEKLKPKKRVYEVKAVKVSRHHVRS

SEQ ID NO: 17929 - protein, 41 aa, Artificial Sequence
  GFR-binding peptide
  MOD_RES (1), (38): Xaa is C or S
  MOD_RES (14), (15), (16), (17), (18): Xaa is A or G
  MOD_RES (19), (20), (21), (22): Xaa is A or G or is absent
XALHDELTVTAKKXXXXXXXXXIKRVQVPRLQVQTPRXQVN

SEQ ID NO: 17930 - protein, 37 aa, Artificial Sequence
  GFR-binding peptide
  MOD_RES (34), (34): Xaa is C or S
  MOD_RES (12), (13), (14), (15), (16): Xaa is A or G
  MOD_RES (17), (18), (19), (20): Xaa is A or G or is absent
KNHQLFVTAKKXXXXXXXXXIKRMQVPREETPVXELG

SEQ ID NO: 17931 - protein, 40 aa, Artificial Sequence
  GFR-binding peptide
  MOD_RES (2), (36): Xaa is C or S
EXKNHQLFSMEGLHQGQHPKIRMIQMTINSEETPVXELGE

SEQ ID NO: 17932 - protein, 36 aa, Artificial Sequence
  GFR-binding peptide
  MOD_RES (1), (1): Xaa is C or S
XELHEELRVQVEKLKPKKRVYEVKAVKVSRHHVRSP

SEQ ID NO: 17933 - protein, 40 aa, Artificial Sequence
  GFR-binding peptide
  MOD_RES (37), (37): Xaa is C or S
  MOD_RES (13), (14), (15), (16), (17): Xaa is A or G
  MOD_RES (18), (19), (20), (21): Xaa is A or G or is absent
ELHEELRSMEGIXXXXXXXXXMIQVTINSHHVRSPQXKVS

SEQ ID NO: 17934 - protein, 39 aa, Artificial Sequence
  GFR-binding peptide
  MOD_RES (1), (3), (37): Xaa is C or S
XEXKNHQLFVQVEKHQGQHPKIRVKAMKVSREETPVXEL

SEQ ID NO: 17935 - protein, 39 aa, Artificial Sequence
  GFR-binding peptide
  MOD_RES (2), (4), (38): Xaa is C or S
RXEXQSHEELSMEGLHQGQHPKIRMIQMTINSQGTPVXE

SEQ ID NO: 17936 - protein, 38 aa, Artificial Sequence
  GFR-binding peptide
  MOD_RES (33), (33): Xaa is C or S
NHQLFVTAKKHQGQHPKIRIKRMQVPREETPVXELGED

SEQ ID NO: 17937 - protein, 39 aa, Artificial Sequence
  GFR-binding peptide
  MOD_RES (37), (37): Xaa is C or S
  MOD_RES (13), (14), (15), (16), (17): Xaa is A or G
  MOD_RES (18), (19), (20), (21): Xaa is A or G or is absent
ELHEELRSMEGLXXXXXXXXXMIQVTINSHHVRSPQXKV

SEQ ID NO: 17938 - protein, 43 aa, Artificial Sequence
  GFR-binding peptide
  MOD_RES (2), (4), (38): Xaa is C or S
  MOD_RES (16), (17), (18), (19), (20): Xaa is A or G
  MOD_RES (21), (22), (23), (24): Xaa is A or G or is absent
RXEXQSHEELSMEGIXXXXXXXXXMIQMTINSQGTPVXELGED

SEQ ID NO: 17939 - protein, 41 aa, Artificial Sequence
  GFR-binding peptide
  MOD_RES (2), (36): Xaa is C or S
EXQSHEELVTAKKHQGQHPKIRIKRMQVPRQGTPVXELGED

SEQ ID NO: 17940 - protein, 34 aa, Artificial Sequence
  GFR-binding peptide
  MOD_RES (11), (12), (13), (14), (15): Xaa is A or G
  MOD_RES (16), (17), (18), (19): Xaa is A or G or is absent
HEELRVTAKKXXXXXXXXXIKRVQVPRHHVRSPQ

SEQ ID NO: 17941 - protein, 41 aa, Artificial Sequence
  GFR-binding peptide
  MOD_RES (2), (4), (41): Xaa is C or S
  MOD_RES (17), (18), (19), (20), (21): Xaa is A or G
  MOD_RES (22), (23), (24), (25): Xaa is A or G or is absent
AXAXELHEELRVTAKKXXXXXXXXXIKRVQVPRHHVRSPQX

SEQ ID NO: 17942 - protein, 36 aa, Artificial Sequence
  GFR-binding peptide
  MOD_RES (1), (3): Xaa is C or S
XEXQSHEELVQVEKHQGQHPKIRVKAMKVSRQGTPV

SEQ ID NO: 17943 - protein, 40 aa, Artificial Sequence
  GFR-binding peptide
  MOD_RES (2), (39): Xaa is C or S
  MOD_RES (15), (16), (17), (18), (19): Xaa is A or G
  MOD_RES (20), (21), (22), (23): Xaa is A or G or is absent
KXALHDELTSMEGIXXXXXXXXXMIQVTINSLQVQTPRXQ

SEQ ID NO: 17944 - protein, 40 aa, Artificial Sequence
  GFR-binding peptide
  MOD_RES (1), (38): Xaa is C or S
  MOD_RES (14), (15), (16), (17), (18): Xaa is A or G
  MOD_RES (19), (20), (21), (22): Xaa is A or G or is absent
XELHEELRVTAKKXXXXXXXXXIKRVQVPRHHVRSPQXKV

SEQ ID NO: 17945 - protein, 39 aa, Artificial Sequence
  GFR-binding peptide
  MOD_RES (36), (36): Xaa is C or S
  MOD_RES (12), (13), (14), (15), (16): Xaa is A or G
  MOD_RES (17), (18), (19), (20): Xaa is A or G or is absent
LHEELRVTAKKXXXXXXXXXIKRVQVPRHHVRSPQXKVS

SEQ ID NO: 17946 - protein, 32 aa, Artificial Sequence
  GFR-binding peptide
  MOD_RES (11), (12), (13), (14), (15): Xaa is A or G
  MOD_RES (16), (17), (18), (19): Xaa is A or G or is absent
HDELTVQVEKXXXXXXXXXVKAVKVSRLQVQT

SEQ ID NO: 17947 - protein, 37 aa, Artificial Sequence
  GFR-binding peptide
  MOD_RES (36), (36): Xaa is C or S
LHDELTSMEGIFIPKKRVIEMIQVTINSLQVQTPRXQ

SEQ ID NO: 17948 - protein, 40 aa, Artificial Sequence
  GFR-binding peptide
  MOD_RES (37), (37): Xaa is C or S
  MOD_RES (13), (14), (15), (16), (17): Xaa is A or G
  MOD_RES (18), (19), (20), (21): Xaa is A or G or is absent
ALHDELTVQVEKXXXXXXXXXVKAVKVSRLQVQTPRXQVN

SEQ ID NO: 17949 - protein, 40 aa, Artificial Sequence
  GFR-binding peptide
  MOD_RES (1), (3), (37): Xaa is C or S
  MOD_RES (15), (16), (17), (18), (19): Xaa is A or G
  MOD_RES (20), (21), (22), (23): Xaa is A or G or is absent
XEXQSHEELVQVEKXXXXXXXXXVKAMKVSRQGTPVXELG

SEQ ID NO: 17950 - protein, 38 aa, Artificial Sequence
  GFR-binding peptide
  MOD_RES (37), (37): Xaa is C or S
ALHDELTSMEGLFIPKKRVIEMIQVTINSLQVQTPRXQ

SEQ ID NO: 17951 - protein, 42 aa, Artificial Sequence
  GFR-binding peptide
  MOD_RES (2), (39): Xaa is C or S
KXALHDELTVQVEKFIPKKRVIEVKAVKVSRLQVQTPRXQVN

SEQ ID NO: 17952 - protein, 40 aa, Artificial Sequence
  GFR-binding peptide
  MOD_RES (2), (36): Xaa is C or S
EXKNHQLFVQVEKHQGQHPKIRVKAMKVSREETPVXELGE

SEQ ID NO: 17953 - protein, 36 aa, Artificial Sequence
  GFR-binding peptide
  MOD_RES (1), (1): Xaa is C or S
XELHEELRSMEGLLKPKKRVYEMIQVTINSHHVRSP

SEQ ID NO: 17954 - protein, 42 aa, Artificial Sequence
  GFR-binding peptide
  MOD_RES (2), (4), (41): Xaa is C or S
EXKXALHDELTVQVEKFIPKKRVIEVKAVKVSRLQVQTPRXQ

SEQ ID NO: 17955 - protein, 40 aa, Artificial Sequence
  GFR-binding peptide
  MOD_RES (1), (35): Xaa is C or S
  MOD_RES (13), (14), (15), (16), (17): Xaa is A or G
  MOD_RES (18), (19), (20), (21): Xaa is A or G or is absent
XQSHEELSMEGIXXXXXXXXXMIQMTINSQGTPVXELGED

SEQ ID NO: 17956 - protein, 34 aa, Artificial Sequence
  GFR-binding peptide
  MOD_RES (34), (34): Xaa is C or S
QSHEELVTAKKHQGQHPKIRIKRMQVPRQGTPVX

SEQ ID NO: 17957 - protein, 39 aa, Artificial Sequence
  GFR-binding peptide
  MOD_RES (2), (4): Xaa is C or S
  MOD_RES (17), (18), (19), (20), (21): Xaa is A or G
  MOD_RES (22), (23), (24), (25): Xaa is A or G or is absent
AXAXELHEELRVTAKKXXXXXXXXXIKRVQVPRHHVRSP

SEQ ID NO: 17958 - protein, 36 aa, Artificial Sequence
  GFR-binding peptide
  MOD_RES (13), (14), (15), (16), (17): Xaa is A or G
  MOD_RES (18), (19), (20), (21): Xaa is A or G or is absent
ELHEELRSMEGLXXXXXXXXXMIQVTINSHHVRSPQ

SEQ ID NO: 17959 - protein, 39 aa, Artificial Sequence
  GFR-binding peptide
  MOD_RES (1), (35): Xaa is C or S
  MOD_RES (13), (14), (15), (16), (17): Xaa is A or G
  MOD_RES (18), (19), (20), (21): Xaa is A or G or is absent
XKNHQLFSMEGLXXXXXXXXXMIQMTINSEETPVXELGE

SEQ ID NO: 17960 - protein, 44 aa, Artificial Sequence
  GFR-binding peptide
  MOD_RES (1), (3), (40): Xaa is C or S
  MOD_RES (16), (17), (18), (19), (20): Xaa is A or G
  MOD_RES (21), (22), (23), (24): Xaa is A or G or is absent
XKXALHDELTSMEGIXXXXXXXXXMIQVTINSLQVQTPRXQVNR

SEQ ID NO: 17961 - protein, 44 aa, Artificial Sequence
  GFR-binding peptide
  MOD_RES (1), (3), (40): Xaa is C or S
XAXELHEELRVTAKKLKPKKRVYEIKRVQVPRHHVRSPQXKVSS

SEQ ID NO: 17962 - protein, 38 aa, Artificial Sequence
  GFR-binding peptide
  MOD_RES (2), (4): Xaa is C or S
  MOD_RES (17), (18), (19), (20), (21): Xaa is A or G
  MOD_RES (22), (23), (24), (25): Xaa is A or G or is absent
EXKXALHDELTVTAKKXXXXXXXXXIKRVQVPRLQVQT

SEQ ID NO: 17963 - protein, 37 aa, Artificial Sequence
  GFR-binding peptide
  MOD_RES (34), (34): Xaa is C or S
  MOD_RES (12), (13), (14), (15), (16): Xaa is A or G
  MOD_RES (17), (18), (19), (20): Xaa is A or G or is absent
QSHEELSMEGIXXXXXXXXXMIQMTINSQGTPVXELG

SEQ ID NO: 17964 - protein, 38 aa, Artificial Sequence
  GFR-binding peptide
  MOD_RES (1), (3): Xaa is C or S
  MOD_RES (16), (17), (18), (19), (20): Xaa is A or G
  MOD_RES (21), (22), (23), (24): Xaa is A or G or is absent
XKXALHDELTVTAKKXXXXXXXXXIKRVQVPRLQVQTP

SEQ ID NO: 17965 - protein, 41 aa, Artificial Sequence
  GFR-binding peptide
  MOD_RES (37), (37): Xaa is C or S
ELHEELRSMEGILKPKKRVYEMIQVTINSHHVRSPQXKVSS

SEQ ID NO: 17966 - protein, 34 aa, Artificial Sequence
  GFR-binding peptide
  MOD_RES (33), (33): Xaa is C or S
NHQLFSMEGLHQGQHPKIRMIQMTINSEETPVXE

SEQ ID NO: 17967 - protein, 37 aa, Artificial Sequence
  GFR-binding peptide
  MOD_RES (36), (36): Xaa is C or S
  MOD_RES (12), (13), (14), (15), (16): Xaa is A or G
  MOD_RES (17), (18), (19), (20): Xaa is A or G or is absent
LHEELRSMEGIXXXXXXXXXMIQVTINSHHVRSPQXK

SEQ ID NO: 17968 - protein, 39 aa, Artificial Sequence
  GFR-binding peptide
  MOD_RES (35), (35): Xaa is C or S
HEELRVTAKKLKPKKRVYEIKRVQVPRHHVRSPQXKVSS

SEQ ID NO: 17969 - protein, 42 aa, Artificial Sequence
  GFR-binding peptide
  MOD_RES (1), (38): Xaa is C or S
XALHDELTSMEGLFIPKKRVIEMIQVTINSLQVQTPRXQVNR

SEQ ID NO: 17970 - protein, 36 aa, Artificial Sequence
  GFR-binding peptide
  MOD_RES (1), (3): Xaa is C or S
  MOD_RES (15), (16), (17), (18), (19): Xaa is A or G
  MOD_RES (20), (21), (22), (23): Xaa is A or G or is absent
XEXKNHQLFVTAKKXXXXXXXXXIKRMQVPREETPV

SEQ ID NO: 17971 - protein, 35 aa, Artificial Sequence
  GFR-binding peptide
  MOD_RES (2), (2): Xaa is C or S
EXKNHQLFSMEGIHQGQHPKIRMIQMTINSEETPV

SEQ ID NO: 17972 - protein, 36 aa, Artificial Sequence
  GFR-binding peptide
  MOD_RES (34), (34): Xaa is C or S
  MOD_RES (12), (13), (14), (15), (16): Xaa is A or G
  MOD_RES (17), (18), (19), (20): Xaa is A or G or is absent
KNHQLFSMEGIXXXXXXXXXMIQMTINSEETPVXEL

SEQ ID NO: 17973 - protein, 38 aa, Artificial Sequence
  GFR-binding peptide
  MOD_RES (35), (35): Xaa is C or S
HDELTVTAKKFIPKKRVIEIKRVQVPRLQVQTPRXQVN

SEQ ID NO: 17974 - protein, 38 aa, Artificial Sequence
  GFR-binding peptide
  MOD_RES (34), (34): Xaa is C or S
  MOD_RES (12), (13), (14), (15), (16): Xaa is A or G
  MOD_RES (17), (18), (19), (20): Xaa is A or G or is absent
QSHEELVQVEKXXXXXXXXXVKAMKVSRQGTPVXELGE

SEQ ID NO: 17975 - protein, 39 aa, Artificial Sequence
  GFR-binding peptide
  MOD_RES (1), (38): Xaa is C or S
XELHEELRSMEGLLKPKKRVYEMIQVTINSHHVRSPQXK

SEQ ID NO: 17976 - protein, 43 aa, Artificial Sequence
  GFR-binding peptide
  MOD_RES (1), (3), (40): Xaa is C or S
XKXALHDELTVTAKKFIPKKRVIEIKRVQVPRLQVQTPRXQVN

SEQ ID NO: 17977 - protein, 43 aa, Artificial Sequence
  GFR-binding peptide
  MOD_RES (1), (3), (40): Xaa is C or S
XAXELHEELRVTAKKLKPKKRVYEIKRVQVPRHHVRSPQXKVS

SEQ ID NO: 17978 - protein, 41 aa, Artificial Sequence
  GFR-binding peptide
  MOD_RES (1), (3), (40): Xaa is C or S
  MOD_RES (16), (17), (18), (19), (20): Xaa is A or G
  MOD_RES (21), (22), (23), (24): Xaa is A or G or is absent
XAXELHEELRVTAKKXXXXXXXXXIKRVQVPRHHVRSPQXK

SEQ ID NO: 17979 - protein, 34 aa, Artificial Sequence
  GFR-binding peptide
  MOD_RES (1), (1): Xaa is C or S
XQSHEELVTAKKHQGQHPKIRIKRMQVPRQGTPV

SEQ ID NO: 17980 - protein, 41 aa, Artificial Sequence
  GFR-binding peptide
  MOD_RES (2), (36): Xaa is C or S
  MOD_RES (14), (15), (16), (17), (18): Xaa is A or G
  MOD_RES (19), (20), (21), (22): Xaa is A or G or is absent
EXKNHQLFVQVEKXXXXXXXXXVKAMKVSREETPVXELGED

SEQ ID NO: 17981 - protein, 37 aa, Artificial Sequence
  GFR-binding peptide
  MOD_RES (35), (35): Xaa is C or S
  MOD_RES (11), (12), (13), (14), (15): Xaa is A or G
  MOD_RES (16), (17), (18), (19): Xaa is A or G or is absent
HEELRVQVEKXXXXXXXXXVKAVKVSRHHVRSPQXKV

SEQ ID NO: 17982 - protein, 36 aa, Artificial Sequence
  GFR-binding peptide
  MOD_RES (1), (35): Xaa is C or S
XKNHQLFSMEGIHQGQHPKIRMIQMTINSEETPVXE

SEQ ID NO: 17983 - protein, 41 aa, Artificial Sequence
  GFR-binding peptide
  MOD_RES (1), (38): Xaa is C or S
XALHDELTVTAKKFIPKKRVIEIKRVQVPRLQVQTPRXQVN

SEQ ID NO: 17984 - protein, 43 aa, Artificial Sequence
  GFR-binding peptide
  MOD_RES (1), (3), (37): Xaa is C or S
  MOD_RES (15), (16), (17), (18), (19): Xaa is A or G
  MOD_RES (20), (21), (22), (23): Xaa is A or G or is absent
XEXQSHEELSMEGIXXXXXXXXXMIQMTINSQGTPVXELGEDN

SEQ ID NO: 17985 - protein, 41 aa, Artificial Sequence
  GFR-binding peptide
  MOD_RES (1), (3), (37): Xaa is C or S
XEXKNHQLFVQVEKHQGQHPKIRVKAMKVSREETPVXELGE

SEQ ID NO: 17986 - protein, 36 aa, Artificial Sequence
  GFR-binding peptide
  MOD_RES (35), (35): Xaa is C or S
HEELRVQVEKLKPKKRVYEVKAVKVSRHHVRSPQXK

SEQ ID NO: 17987 - protein, 39 aa, Artificial Sequence
  GFR-binding peptide
  MOD_RES (34), (34): Xaa is C or S
QSHEELVTAKKHQGQHPKIRIKRMQVPRQGTPVXELGED

SEQ ID NO: 17988 - protein, 39 aa, Artificial Sequence
  GFR-binding peptide
  MOD_RES (34), (34): Xaa is C or S
KNHQLFSMEGLHQGQHPKIRMIQMTINSEETPVXELGED

SEQ ID NO: 17989 - protein, 37 aa, Artificial Sequence
  GFR-binding peptide
  MOD_RES (35), (35): Xaa is C or S
  MOD_RES (11), (12), (13), (14), (15): Xaa is A or G
  MOD_RES (16), (17), (18), (19): Xaa is A or G or is absent
HEELRVTAKKXXXXXXXXXIKRVQVPRHHVRSPQXKV

SEQ ID NO: 17990 - protein, 39 aa, Artificial Sequence
  GFR-binding peptide
  MOD_RES (2), (39): Xaa is C or S
  MOD_RES (15), (16), (17), (18), (19): Xaa is A or G
  MOD_RES (20), (21), (22), (23): Xaa is A or G or is absent
AXELHEELRVTAKKXXXXXXXXXIKRVQVPRHHVRSPQX

SEQ ID NO: 17991 - protein, 40 aa, Artificial Sequence
  GFR-binding peptide
  MOD_RES (1), (35): Xaa is C or S
  MOD_RES (13), (14), (15), (16), (17): Xaa is A or G
  MOD_RES (18), (19), (20), (21): Xaa is A or G or is absent
XKNHQLFVQVEKXXXXXXXXXVKAMKVSREETPVXELGED

SEQ ID NO: 17992 - protein, 39 aa, Artificial Sequence
  GFR-binding peptide
  MOD_RES (36), (36): Xaa is C or S
LHEELRVQVEKLKPKKRVYEVKAVKVSRHHVRSPQXKVS

SEQ ID NO: 17993 - protein, 43 aa, Artificial Sequence
  GFR-binding peptide
  MOD_RES (2), (4), (41): Xaa is C or S
  MOD_RES (17), (18), (19), (20), (21): Xaa is A or G
  MOD_RES (22), (23), (24), (25): Xaa is A or G or is absent
EXKXALHDELTVTAKKXXXXXXXXXIKRVQVPRLQVQTPRXQV

SEQ ID NO: 17994 - protein, 37 aa, Artificial Sequence
  GFR-binding peptide
  MOD_RES (36), (36): Xaa is C or S
LHEELRSMEGLLKPKKRVYEMIQVTINSHHVRSPQXK

SEQ ID NO: 17995 - protein, 41 aa, Artificial Sequence
  GFR-binding peptide
  MOD_RES (1), (35): Xaa is C or S
XQSHEELVQVEKHQGQHPKIRVKAMKVSRQGTPVXELGEDN

SEQ ID NO: 17996 - protein, 41 aa, Artificial Sequence
  GFR-binding peptide
  MOD_RES (2), (36): Xaa is C or S
EXQSHEELSMEGLHQGQHPKIRMIQMTINSQGTPVXELGED

SEQ ID NO: 17997 - protein, 44 aa, Artificial Sequence
  GFR-binding peptide
  MOD_RES (1), (3), (40): Xaa is C or S
XKXALHDELTVQVEKFIPKKRVIEVKAVKVSRLQVQTPRXQVNR

SEQ ID NO: 17998 - protein, 42 aa, Artificial Sequence
  GFR-binding peptide
  MOD_RES (1), (38): Xaa is C or S
  MOD_RES (14), (15), (16), (17), (18): Xaa is A or G
  MOD_RES (19), (20), (21), (22): Xaa is A or G or is absent
XALHDELTVQVEKXXXXXXXXXVKAVKVSRLQVQTPRXQVNR

SEQ ID NO: 17999 - protein, 38 aa, Artificial Sequence
  GFR-binding peptide
  MOD_RES (36), (36): Xaa is C or S
LHEELRSMEGILKPKKRVYEMIQVTINSHHVRSPQXKV

SEQ ID NO: 18000 - protein, 38 aa, Artificial Sequence
  GFR-binding peptide
  MOD_RES (2), (4): Xaa is C or S
  MOD_RES (17), (18), (19), (20), (21): Xaa is A or G
  MOD_RES (22), (23), (24), (25): Xaa is A or G or is absent
AXAXELHEELRVTAKKXXXXXXXXXIKRVQVPRHHVRS

SEQ ID NO: 18001 - protein, 40 aa, Artificial Sequence
  GFR-binding peptide
  MOD_RES (1), (38): Xaa is C or S
  MOD_RES (14), (15), (16), (17), (18): Xaa is A or G
  MOD_RES (19), (20), (21), (22): Xaa is A or G or is absent
XELHEELRSMEGLXXXXXXXXXMIQVTINSHHVRSPQXKV

SEQ ID NO: 18002 - protein, 34 aa, Artificial Sequence
  GFR-binding peptide
ELHEELRSMEGILKPKKRVYEMIQVTINSHHVRS

SEQ ID NO: 18003 - protein, 35 aa, Artificial Sequence
  GFR-binding peptide
  MOD_RES (34), (34): Xaa is C or S
  MOD_RES (12), (13), (14), (15), (16): Xaa is A or G
  MOD_RES (17), (18), (19), (20): Xaa is A or G or is absent
QSHEELVQVEKXXXXXXXXXVKAMKVSRQGTPVXE

SEQ ID NO: 18004 - protein, 37 aa, Artificial Sequence
  GFR-binding peptide
  MOD_RES (2), (4): Xaa is C or S
RXEXKNHQLFVTAKKHQGQHPKIRIKRMQVPREETPV

SEQ ID NO: 18005 - protein, 37 aa, Artificial Sequence
  GFR-binding peptide
  MOD_RES (2), (4): Xaa is C or S
  MOD_RES (16), (17), (18), (19), (20): Xaa is A or G
  MOD_RES (21), (22), (23), (24): Xaa is A or G or is absent
RXEXKNHQLFVQVEKXXXXXXXXXVKAMKVSREETPV

SEQ ID NO: 18006 - protein, 35 aa, Artificial Sequence
  GFR-binding peptide
  MOD_RES (35), (35): Xaa is C or S
  MOD_RES (11), (12), (13), (14), (15): Xaa is A or G
  MOD_RES (16), (17), (18), (19): Xaa is A or G or is absent
HEELRVTAKKXXXXXXXXXIKRVQVPRHHVRSPQX

SEQ ID NO: 18007 - protein, 36 aa, Artificial Sequence
  GFR-binding peptide
  MOD_RES (2), (2): Xaa is C or S
  MOD_RES (15), (16), (17), (18), (19): Xaa is A or G
  MOD_RES (20), (21), (22), (23): Xaa is A or G or is absent
KXALHDELTSMEGIXXXXXXXXXMIQVTINSLQVQT

SEQ ID NO: 18008 - protein, 38 aa, Artificial Sequence
  GFR-binding peptide
  MOD_RES (36), (36): Xaa is C or S
  MOD_RES (12), (13), (14), (15), (16): Xaa is A or G
  MOD_RES (17), (18), (19), (20): Xaa is A or G or is absent
LHEELRVQVEKXXXXXXXXXVKAVKVSRHHVRSPQXKV

SEQ ID NO: 18009 - protein, 41 aa, Artificial Sequence
  GFR-binding peptide
  MOD_RES (1), (3), (40): Xaa is C or S
XAXELHEELRVQVEKLKPKKRVYEVKAVKVSRHHVRSPQXK

SEQ ID NO: 18010 - protein, 34 aa, Artificial Sequence
  GFR-binding peptide
  MOD_RES (12), (13), (14), (15), (16): Xaa is A or G
  MOD_RES (17), (18), (19), (20): Xaa is A or G or is absent
LHDELTVTAKKXXXXXXXXXIKRVQVPRLQVQTP

SEQ ID NO: 18011 - protein, 35 aa, Artificial Sequence
  GFR-binding peptide
  MOD_RES (35), (35): Xaa is C or S
  MOD_RES (11), (12), (13), (14), (15): Xaa is A or G
  MOD_RES (16), (17), (18), (19): Xaa is A or G or is absent
HEELRVQVEKXXXXXXXXXVKAVKVSRHHVRSPQX

SEQ ID NO: 18012 - protein, 38 aa, Artificial Sequence
  GFR-binding peptide
  MOD_RES (1), (38): Xaa is C or S
XALHDELTVTAKKFIPKKRVIEIKRVQVPRLQVQTPRX

SEQ ID NO: 18013 - protein, 38 aa, Artificial Sequence
  GFR-binding peptide
  MOD_RES (1), (35): Xaa is C or S
XKNHQLFSMEGIHQGQHPKIRMIQMTINSEETPVXELG

SEQ ID NO: 18014 - protein, 33 aa, Artificial Sequence
  GFR-binding peptide
HDELTVQVEKFIPKKRVIEVKAVKVSRLQVQTP

SEQ ID NO: 18015 - protein, 42 aa, Artificial Sequence
  GFR-binding peptide
  MOD_RES (1), (3), (40): Xaa is C or S
  MOD_RES (16), (17), (18), (19), (20): Xaa is A or G
  MOD_RES (21), (22), (23), (24): Xaa is A or G or is absent
XKXALHDELTVTAKKXXXXXXXXXIKRVQVPRLQVQTPRXQV

SEQ ID NO: 18016 - protein, 41 aa, Artificial Sequence
  GFR-binding peptide
  MOD_RES (2), (4), (41): Xaa is C or S
AXAXELHEELRVQVEKLKPKKRVYEVKAVKVSRHHVRSPQX

SEQ ID NO: 18017 - protein, 41 aa, Artificial Sequence
  GFR-binding peptide
  MOD_RES (1), (38): Xaa is C or S
XELHEELRVQVEKLKPKKRVYEVKAVKVSRHHVRSPQXKVS

SEQ ID NO: 18018 - protein, 38 aa, Artificial Sequence
  GFR-binding peptide
  MOD_RES (1), (38): Xaa is C or S
  MOD_RES (14), (15), (16), (17), (18): Xaa is A or G
  MOD_RES (19), (20), (21), (22): Xaa is A or G or is absent
XALHDELTVQVEKXXXXXXXXXVKAVKVSRLQVQTPRX

SEQ ID NO: 18019 - protein, 42 aa, Artificial Sequence
  GFR-binding peptide
  MOD_RES (2), (39): Xaa is C or S
AXELHEELRVQVEKLKPKKRVYEVKAVKVSRHHVRSPQXKVS

SEQ ID NO: 18020 - protein, 36 aa, Artificial Sequence
  GFR-binding peptide
  MOD_RES (33), (33): Xaa is C or S
  MOD_RES (11), (12), (13), (14), (15): Xaa is A or G
  MOD_RES (16), (17), (18), (19): Xaa is A or G or is absent
NHQLFVTAKKXXXXXXXXXIKRMQVPREETPVXELG

SEQ ID NO: 18021 - protein, 40 aa, Artificial Sequence
  GFR-binding peptide
  MOD_RES (2), (4): Xaa is C or S
EXKXALHDELTSMEGIFIPKKRVIEMIQVTINSLQVQTPR

SEQ ID NO: 18022 - protein, 39 aa, Artificial Sequence
  GFR-binding peptide
  MOD_RES (2), (4), (38): Xaa is C or S
  MOD_RES (16), (17), (18), (19), (20): Xaa is A or G
  MOD_RES (21), (22), (23), (24): Xaa is A or G or is absent
RXEXKNHQLFSMEGIXXXXXXXXXMIQMTINSEETPVXE

SEQ ID NO: 18023 - protein, 42 aa, Artificial Sequence
  GFR-binding peptide
  MOD_RES (2), (4), (41): Xaa is C or S
  MOD_RES (17), (18), (19), (20), (21): Xaa is A or G
  MOD_RES (22), (23), (24), (25): Xaa is A or G or is absent
AXAXELHEELRSMEGLXXXXXXXXXMIQVTINSHHVRSPQXK

SEQ ID NO: 18024 - protein, 45 aa, Artificial Sequence
  GFR-binding peptide
  MOD_RES (2), (4), (41): Xaa is C or S
AXAXELHEELRSMEGLLKPKKRVYEMIQVTINSHHVRSPQXKVSS

SEQ ID NO: 18025 - protein, 34 aa, Artificial Sequence
  GFR-binding peptide
  MOD_RES (1), (1): Xaa is C or S
XQSHEELVQVEKHQGQHPKIRVKAMKVSRQGTPV

SEQ ID NO: 18026 - protein, 41 aa, Artificial Sequence
  GFR-binding peptide
  MOD_RES (2), (4), (38): Xaa is C or S
  MOD_RES (16), (17), (18), (19), (20): Xaa is A or G
  MOD_RES (21), (22), (23), (24): Xaa is A or G or is absent
RXEXKNHQLFVQVEKXXXXXXXXXVKAMKVSREETPVXELG

SEQ ID NO: 18027 - protein, 35 aa, Artificial Sequence
  GFR-binding peptide
  MOD_RES (2), (2): Xaa is C or S
EXQSHEELSMEGLHQGQHPKIRMIQMTINSQGTPV

SEQ ID NO: 18028 - protein, 38 aa, Artificial Sequence
  GFR-binding peptide
  MOD_RES (2), (36): Xaa is C or S
EXQSHEELSMEGIHQGQHPKIRMIQMTINSQGTPVXEL

SEQ ID NO: 18029 - protein, 38 aa, Artificial Sequence
  GFR-binding peptide
  MOD_RES (2), (4), (38): Xaa is C or S
RXEXKNHQLFVQVEKHQGQHPKIRVKAMKVSREETPVX

SEQ ID NO: 18030 - protein, 37 aa, Artificial Sequence
  GFR-binding peptide
  MOD_RES (2), (2): Xaa is C or S
AXELHEELRVQVEKLKPKKRVYEVKAVKVSRHHVRSP

SEQ ID NO: 18031 - protein, 35 aa, Artificial Sequence
  GFR-binding peptide
  MOD_RES (1), (1): Xaa is C or S
  MOD_RES (14), (15), (16), (17), (18): Xaa is A or G
  MOD_RES (19), (20), (21), (22): Xaa is A or G or is absent
XELHEELRVQVEKXXXXXXXXXVKAVKVSRHHVRS

SEQ ID NO: 18032 - protein, 40 aa, Artificial Sequence
  GFR-binding peptide
  MOD_RES (2), (4): Xaa is C or S
  MOD_RES (17), (18), (19), (20), (21): Xaa is A or G
  MOD_RES (22), (23), (24), (25): Xaa is A or G or is absent
AXAXELHEELRSMEGIXXXXXXXXXMIQVTINSHHVRSPQ

SEQ ID NO: 18033 - protein, 35 aa, Artificial Sequence
  GFR-binding peptide
  MOD_RES (35), (35): Xaa is C or S
HDELTSMEGLFIPKKRVIEMIQVTINSLQVQTPRX

SEQ ID NO: 18034 - protein, 40 aa, Artificial Sequence
  GFR-binding peptide
  MOD_RES (1), (3), (37): Xaa is C or S
XEXKNHQLFSMEGLHQGQHPKIRMIQMTINSEETPVXELG

SEQ ID NO: 18035 - protein, 38 aa, Artificial Sequence
  GFR-binding peptide
  MOD_RES (2), (36): Xaa is C or S
EXKNHQLFVQVEKHQGQHPKIRVKAMKVSREETPVXEL

SEQ ID NO: 18036 - protein, 39 aa, Artificial Sequence
  GFR-binding peptide
  MOD_RES (34), (34): Xaa is C or S
QSHEELSMEGLHQGQHPKIRMIQMTINSQGTPVXELGED

SEQ ID NO: 18037 - protein, 43 aa, Artificial Sequence
  GFR-binding peptide
  MOD_RES (1), (3), (37): Xaa is C or S
  MOD_RES (15), (16), (17), (18), (19): Xaa is A or G
  MOD_RES (20), (21), (22), (23): Xaa is A or G or is absent
XEXKNHQLFVTAKKXXXXXXXXXIKRMQVPREETPVXELGEDN

SEQ ID NO: 18038 - protein, 37 aa, Artificial Sequence
  GFR-binding peptide
  MOD_RES (1), (3): Xaa is C or S
XKXALHDELTVTAKKFIPKKRVIEIKRVQVPRLQVQT

SEQ ID NO: 18039 - protein, 33 aa, Artificial Sequence
  GFR-binding peptide
  MOD_RES (33), (33): Xaa is C or S
  MOD_RES (11), (12), (13), (14), (15): Xaa is A or G
  MOD_RES (16), (17), (18), (19): Xaa is A or G or is absent
SHEELSMEGIXXXXXXXXXMIQMTINSQGTPVX

SEQ ID NO: 18040 - protein, 33 aa, Artificial Sequence
  GFR-binding peptide
HDELTSMEGLFIPKKRVIEMIQVTINSLQVQTP

SEQ ID NO: 18041 - protein, 39 aa, Artificial Sequence
  GFR-binding peptide
  MOD_RES (37), (37): Xaa is C or S
  MOD_RES (13), (14), (15), (16), (17): Xaa is A or G
  MOD_RES (18), (19), (20), (21): Xaa is A or G or is absent
ALHDELTVQVEKXXXXXXXXXVKAVKVSRLQVQTPRXQV

SEQ ID NO: 18042 - protein, 38 aa, Artificial Sequence
  GFR-binding peptide
  MOD_RES (36), (36): Xaa is C or S
  MOD_RES (12), (13), (14), (15), (16): Xaa is A or G
  MOD_RES (17), (18), (19), (20): Xaa is A or G or is absent
LHDELTSMEGLXXXXXXXXXMIQVTINSLQVQTPRXQV

SEQ ID NO: 18043 - protein, 39 aa, Artificial Sequence
  GFR-binding peptide
  MOD_RES (2), (4), (38): Xaa is C or S
RXEXKNHQLFVQVEKHQGQHPKIRVKAMKVSREETPVXE

SEQ ID NO: 18044 - protein, 40 aa, Artificial Sequence
  GFR-binding peptide
  MOD_RES (2), (39): Xaa is C or S
AXELHEELRSMEGILKPKKRVYEMIQVTINSHHVRSPQXK

SEQ ID NO: 18045 - protein, 36 aa, Artificial Sequence
  GFR-binding peptide
  MOD_RES (1), (3): Xaa is C or S
XEXQSHEELVTAKKHQGQHPKIRIKRMQVPRQGTPV

SEQ ID NO: 18046 - protein, 37 aa, Artificial Sequence
  GFR-binding peptide
  MOD_RES (33), (33): Xaa is C or S
SHEELSMEGLHQGQHPKIRMIQMTINSQGTPVXELGE

SEQ ID NO: 18047 - protein, 35 aa, Artificial Sequence
  GFR-binding peptide
ELHEELRSMEGLLKPKKRVYEMIQVTINSHHVRSP

SEQ ID NO: 18048 - protein, 38 aa, Artificial Sequence
  GFR-binding peptide
  MOD_RES (35), (35): Xaa is C or S
  MOD_RES (11), (12), (13), (14), (15): Xaa is A or G
  MOD_RES (16), (17), (18), (19): Xaa is A or G or is absent
HDELTVQVEKXXXXXXXXXVKAVKVSRLQVQTPRXQVN

SEQ ID NO: 18049 - protein, 38 aa, Artificial Sequence
  GFR-binding peptide
  MOD_RES (37), (37): Xaa is C or S
ALHDELTVTAKKFIPKKRVIEIKRVQVPRLQVQTPRXQ

SEQ ID NO: 18050 - protein, 36 aa, Artificial Sequence
  GFR-binding peptide
  MOD_RES (35), (35): Xaa is C or S
  MOD_RES (11), (12), (13), (14), (15): Xaa is A or G
  MOD_RES (16), (17), (18), (19): Xaa is A or G or is absent
HDELTSMEGLXXXXXXXXXMIQVTINSLQVQTPRXQ

SEQ ID NO: 18051 - protein, 39 aa, Artificial Sequence
  GFR-binding peptide
  MOD_RES (37), (37): Xaa is C or S
  MOD_RES (13), (14), (15), (16), (17): Xaa is A or G
  MOD_RES (18), (19), (20), (21): Xaa is A or G or is absent
ELHEELRVTAKKXXXXXXXXXIKRVQVPRHHVRSPQXKV

SEQ ID NO: 18052 - protein, 39 aa, Artificial Sequence
  GFR-binding peptide
  MOD_RES (1), (35): Xaa is C or S
  MOD_RES (13), (14), (15), (16), (17): Xaa is A or G
  MOD_RES (18), (19), (20), (21): Xaa is A or G or is absent
XQSHEELVTAKKXXXXXXXXXIKRMQVPRQGTPVXELGE

SEQ ID NO: 18053 - protein, 44 aa, Artificial Sequence
  GFR-binding peptide
  MOD_RES (2), (4), (38): Xaa is C or S
  MOD_RES (16), (17), (18), (19), (20): Xaa is A or G
  MOD_RES (21), (22), (23), (24): Xaa is A or G or is absent
RXEXQSHEELVQVEKXXXXXXXXXVKAMKVSRQGTPVXELGEDN

SEQ ID NO: 18054 - protein, 42 aa, Artificial Sequence
  GFR-binding peptide
  MOD_RES (2), (36): Xaa is C or S
  MOD_RES (14), (15), (16), (17), (18): Xaa is A or G
  MOD_RES (19), (20), (21), (22): Xaa is A or G or is absent
EXQSHEELVQVEKXXXXXXXXXVKAMKVSRQGTPVXELGEDN

SEQ ID NO: 18055 - protein, 39 aa, Artificial Sequence
  GFR-binding peptide
  MOD_RES (1), (38): Xaa is C or S
  MOD_RES (14), (15), (16), (17), (18): Xaa is A or G
  MOD_RES (19), (20), (21), (22): Xaa is A or G or is absent
XALHDELTVTAKKXXXXXXXXXIKRVQVPRLQVQTPRXQ

SEQ ID NO: 18056 - protein, 32 aa, Artificial Sequence
  GFR-binding peptide
SHEELVTAKKHQGQHPKIRIKRMQVPRQGTPV

SEQ ID NO: 18057 - protein, 44 aa, Artificial Sequence
  GFR-binding peptide
  MOD_RES (2), (4), (41): Xaa is C or S
AXAXELHEELRVTAKKLKPKKRVYEIKRVQVPRHHVRSPQXKVS

SEQ ID NO: 18058 - protein, 36 aa, Artificial Sequence
  GFR-binding peptide
  MOD_RES (1), (35): Xaa is C or S
  MOD_RES (13), (14), (15), (16), (17): Xaa is A or G
  MOD_RES (18), (19), (20), (21): Xaa is A or G or is absent
XKNHQLFSMEGLXXXXXXXXXMIQMTINSEETPVXE

SEQ ID NO: 18059 - protein, 33 aa, Artificial Sequence
  GFR-binding peptide
  MOD_RES (12), (13), (14), (15), (16): Xaa is A or G
  MOD_RES (17), (18), (19), (20): Xaa is A or G or is absent
LHDELTVTAKKXXXXXXXXXIKRVQVPRLQVQT

SEQ ID NO: 18060 - protein, 38 aa, Artificial Sequence
  GFR-binding peptide
  MOD_RES (1), (3), (37): Xaa is C or S
  MOD_RES (15), (16), (17), (18), (19): Xaa is A or G
  MOD_RES (20), (21), (22), (23): Xaa is A or G or is absent
XEXKNHQLFSMEGLXXXXXXXXXMIQMTINSEETPVXE

SEQ ID NO: 18061 - protein, 36 aa, Artificial Sequence
  GFR-binding peptide
  MOD_RES (13), (14), (15), (16), (17): Xaa is A or G
  MOD_RES (18), (19), (20), (21): Xaa is A or G or is absent
ELHEELRVTAKKXXXXXXXXXIKRVQVPRHHVRSPQ

SEQ ID NO: 18062 - protein, 33 aa, Artificial Sequence
  GFR-binding peptide
  MOD_RES (11), (12), (13), (14), (15): Xaa is A or G
  MOD_RES (16), (17), (18), (19): Xaa is A or G or is absent
HDELTSMEGLXXXXXXXXXMIQVTINSLQVQTP

SEQ ID NO: 18063 - protein, 38 aa, Artificial Sequence
  GFR-binding peptide
  MOD_RES (1), (38): Xaa is C or S
XALHDELTSMEGLFIPKKRVIEMIQVTINSLQVQTPRX

SEQ ID NO: 18064 - protein, 42 aa, Artificial Sequence
  GFR-binding peptide
  MOD_RES (1), (3), (40): Xaa is C or S
XKXALHDELTSMEGLFIPKKRVIEMIQVTINSLQVQTPRXQV

SEQ ID NO: 18065 - protein, 40 aa, Artificial Sequence
  GFR-binding peptide
  MOD_RES (1), (35): Xaa is C or S
XKNHQLFSMEGLHQGQHPKIRMIQMTINSEETPVXELGED

SEQ ID NO: 18066 - protein, 37 aa, Artificial Sequence
  GFR-binding peptide
  MOD_RES (2), (36): Xaa is C or S
  MOD_RES (14), (15), (16), (17), (18): Xaa is A or G
  MOD_RES (19), (20), (21), (22): Xaa is A or G or is absent
EXQSHEELVQVEKXXXXXXXXXVKAMKVSRQGTPVXE

SEQ ID NO: 18067 - protein, 36 aa, Artificial Sequence
  GFR-binding peptide
  MOD_RES (2), (2): Xaa is C or S
KXALHDELTVTAKKFIPKKRVIEIKRVQVPRLQVQT

SEQ ID NO: 18068 - protein, 42 aa, Artificial Sequence
  GFR-binding peptide
  MOD_RES (2), (4), (41): Xaa is C or S
  MOD_RES (17), (18), (19), (20), (21): Xaa is A or G
  MOD_RES (22), (23), (24), (25): Xaa is A or G or is absent
AXAXELHEELRVTAKKXXXXXXXXXIKRVQVPRHHVRSPQXK

SEQ ID NO: 18069 - protein, 38 aa, Artificial Sequence
  GFR-binding peptide
  MOD_RES (35), (35): Xaa is C or S
  MOD_RES (11), (12), (13), (14), (15): Xaa is A or G
  MOD_RES (16), (17), (18), (19): Xaa is A or G or is absent
HDELTVTAKKXXXXXXXXXIKRVQVPRLQVQTPRXQVN

SEQ ID NO: 18070 - protein, 37 aa, Artificial Sequence
  GFR-binding peptide
  MOD_RES (1), (35): Xaa is C or S
XKNHQLFVQVEKHQGQHPKIRVKAMKVSREETPVXEL

SEQ ID NO: 18071 - protein, 40 aa, Artificial Sequence
  GFR-binding peptide
  MOD_RES (2), (4), (38): Xaa is C or S
  MOD_RES (16), (17), (18), (19), (20): Xaa is A or G
  MOD_RES (21), (22), (23), (24): Xaa is A or G or is absent
RXEXQSHEELVQVEKXXXXXXXXXVKAMKVSRQGTPVXEL

SEQ ID NO: 18072 - protein, 37 aa, Artificial Sequence
  GFR-binding peptide
  MOD_RES (33), (33): Xaa is C or S
  MOD_RES (11), (12), (13), (14), (15): Xaa is A or G
  MOD_RES (16), (17), (18), (19): Xaa is A or G or is absent
NHQLFVQVEKXXXXXXXXXVKAMKVSREETPVXELGE

SEQ ID NO: 18073 - protein, 35 aa, Artificial Sequence
  GFR-binding peptide
  MOD_RES (34), (34): Xaa is C or S
KNHQLFSMEGIHQGQHPKIRMIQMTINSEETPVXE

SEQ ID NO: 18074 - protein, 41 aa, Artificial Sequence
  GFR-binding peptide
  MOD_RES (1), (38): Xaa is C or S
XALHDELTVQVEKFIPKKRVIEVKAVKVSRLQVQTPRXQVN

SEQ ID NO: 18075 - protein, 43 aa, Artificial Sequence
  GFR-binding peptide
  MOD_RES (2), (4), (41): Xaa is C or S
EXKXALHDELTVTAKKFIPKKRVIEIKRVQVPRLQVQTPRXQV

SEQ ID NO: 18076 - protein, 39 aa, Artificial Sequence
  GFR-binding peptide
  MOD_RES (33), (33): Xaa is C or S
  MOD_RES (11), (12), (13), (14), (15): Xaa is A or G
  MOD_RES (16), (17), (18), (19): Xaa is A or G or is absent
NHQLFVTAKKXXXXXXXXXIKRMQVPREETPVXELGEDN

SEQ ID NO: 18077 - protein, 40 aa, Artificial Sequence
  GFR-binding peptide
  MOD_RES (1), (3), (37): Xaa is C or S
XEXKNHQLFVQVEKHQGQHPKIRVKAMKVSREETPVXELG

SEQ ID NO: 18078 - protein, 39 aa, Artificial Sequence
  GFR-binding peptide
  MOD_RES (1), (35): Xaa is C or S
  MOD_RES (13), (14), (15), (16), (17): Xaa is A or G
  MOD_RES (18), (19), (20), (21): Xaa is A or G or is absent
XQSHEELVQVEKXXXXXXXXXVKAMKVSRQGTPVXELGE

SEQ ID NO: 18079 - protein, 43 aa, Artificial Sequence
  GFR-binding peptide
  MOD_RES (2), (4), (38): Xaa is C or S
  MOD_RES (16), (17), (18), (19), (20): Xaa is A or G
  MOD_RES (21), (22), (23), (24): Xaa is A or G or is absent
RXEXKNHQLFSMEGLXXXXXXXXXMIQMTINSEETPVXELGED

SEQ ID NO: 18080 - protein, 37 aa, Artificial Sequence
  GFR-binding peptide
  MOD_RES (2), (4): Xaa is C or S
RXEXQSHEELSMEGLHQGQHPKIRMIQMTINSQGTPV

SEQ ID NO: 18081 - protein, 35 aa, Artificial Sequence
  GFR-binding peptide
  MOD_RES (1), (35): Xaa is C or S
XQSHEELVTAKKHQGQHPKIRIKRMQVPRQGTPVX

SEQ ID NO: 18082 - protein, 38 aa, Artificial Sequence
  GFR-binding peptide
  MOD_RES (2), (2): Xaa is C or S
KXALHDELTVQVEKFIPKKRVIEVKAVKVSRLQVQTPR

SEQ ID NO: 18083 - protein, 40 aa, Artificial Sequence
  GFR-binding peptide
  MOD_RES (2), (39): Xaa is C or S
  MOD_RES (15), (16), (17), (18), (19): Xaa is A or G
  MOD_RES (20), (21), (22), (23): Xaa is A or G or is absent
KXALHDELTSMEGLXXXXXXXXXMIQVTINSLQVQTPRXQ

SEQ ID NO: 18084 - protein, 39 aa, Artificial Sequence
  GFR-binding peptide
  MOD_RES (33), (33): Xaa is C or S
  MOD_RES (11), (12), (13), (14), (15): Xaa is A or G
  MOD_RES (16), (17), (18), (19): Xaa is A or G or is absent
SHEELSMEGIXXXXXXXXXMIQMTINSQGTPVXELGEDN

SEQ ID NO: 18085 - protein, 40 aa, Artificial Sequence
  GFR-binding peptide
  MOD_RES (2), (4): Xaa is C or S
  MOD_RES (17), (18), (19), (20), (21): Xaa is A or G
  MOD_RES (22), (23), (24), (25): Xaa is A or G or is absent
EXKXALHDELTSMEGIXXXXXXXXXMIQVTINSLQVQTPR

SEQ ID NO: 18086 - protein, 38 aa, Artificial Sequence
  GFR-binding peptide
  MOD_RES (1), (3): Xaa is C or S
XAXELHEELRSMEGLLKPKKRVYEMIQVTINSHHVRSP

SEQ ID NO: 18087 - protein, 39 aa, Artificial Sequence
  GFR-binding peptide
  MOD_RES (34), (34): Xaa is C or S
  MOD_RES (12), (13), (14), (15), (16): Xaa is A or G
  MOD_RES (17), (18), (19), (20): Xaa is A or G or is absent
KNHQLFVTAKKXXXXXXXXXIKRMQVPREETPVXELGED

SEQ ID NO: 18088 - protein, 42 aa, Artificial Sequence
  GFR-binding peptide
  MOD_RES (1), (3), (37): Xaa is C or S
  MOD_RES (15), (16), (17), (18), (19): Xaa is A or G
  MOD_RES (20), (21), (22), (23): Xaa is A or G or is absent
XEXQSHEELSMEGLXXXXXXXXXMIQMTINSQGTPVXELGED

SEQ ID NO: 18089 - protein, 34 aa, Artificial Sequence
  GFR-binding peptide
  MOD_RES (33), (33): Xaa is C or S
NHQLFVQVEKHQGQHPKIRVKAMKVSREETPVXE

SEQ ID NO: 18090 - protein, 38 aa, Artificial Sequence
  GFR-binding peptide
  MOD_RES (1), (3): Xaa is C or S
  MOD_RES (16), (17), (18), (19), (20): Xaa is A or G
  MOD_RES (21), (22), (23), (24): Xaa is A or G or is absent
XKXALHDELTSMEGIXXXXXXXXXMIQVTINSLQVQTP

SEQ ID NO: 18091 - protein, 35 aa, Artificial Sequence
  GFR-binding peptide
  MOD_RES (2), (2): Xaa is C or S
  MOD_RES (14), (15), (16), (17), (18): Xaa is A or G
  MOD_RES (19), (20), (21), (22): Xaa is A or G or is absent
EXQSHEELVTAKKXXXXXXXXXIKRMQVPRQGTPV

SEQ ID NO: 18092 - protein, 36 aa, Artificial Sequence
  GFR-binding peptide
ELHEELRVTAKKLKPKKRVYEIKRVQVPRHHVRSPQ

SEQ ID NO: 18093 - protein, 36 aa, Artificial Sequence
  GFR-binding peptide
  MOD_RES (1), (1): Xaa is C or S
XELHEELRVTAKKLKPKKRVYEIKRVQVPRHHVRSP

SEQ ID NO: 18094 - protein, 38 aa, Artificial Sequence
  GFR-binding peptide
  MOD_RES (1), (35): Xaa is C or S
  MOD_RES (13), (14), (15), (16), (17): Xaa is A or G
  MOD_RES (18), (19), (20), (21): Xaa is A or G or is absent
XKNHQLFVTAKKXXXXXXXXXIKRMQVPREETPVXELG

SEQ ID NO: 18095 - protein, 33 aa, Artificial Sequence
  GFR-binding peptide
HEELRVTAKKLKPKKRVYEIKRVQVPRHHVRSP

SEQ ID NO: 18096 - protein, 39 aa, Artificial Sequence
  GFR-binding peptide
  MOD_RES (34), (34): Xaa is C or S
  MOD_RES (12), (13), (14), (15), (16): Xaa is A or G
  MOD_RES (17), (18), (19), (20): Xaa is A or G or is absent
KNHQLFSMEGIXXXXXXXXXMIQMTINSEETPVXELGED

SEQ ID NO: 18097 - protein, 35 aa, Artificial Sequence
  GFR-binding peptide
  MOD_RES (33), (33): Xaa is C or S
SHEELVQVEKHQGQHPKIRVKAMKVSRQGTPVXEL

SEQ ID NO: 18098 - protein, 32 aa, Artificial Sequence
  GFR-binding peptide
  MOD_RES (11), (12), (13), (14), (15): Xaa is A or G
  MOD_RES (16), (17), (18), (19): Xaa is A or G or is absent
SHEELSMEGIXXXXXXXXXMIQMTINSQGTPV

SEQ ID NO: 18099 - protein, 36 aa, Artificial Sequence
  GFR-binding peptide
  MOD_RES (35), (35): Xaa is C or S
HDELTVTAKKFIPKKRVIEIKRVQVPRLQVQTPRXQ

SEQ ID NO: 18100 - protein, 34 aa, Artificial Sequence
  GFR-binding peptide
  MOD_RES (34), (34): Xaa is C or S
KNHQLFVTAKKHQGQHPKIRIKRMQVPREETPVX

SEQ ID NO: 18101 - protein, 35 aa, Artificial Sequence
  GFR-binding peptide
  MOD_RES (1), (1): Xaa is C or S
  MOD_RES (14), (15), (16), (17), (18): Xaa is A or G
  MOD_RES (19), (20), (21), (22): Xaa is A or G or is absent
XELHEELRVTAKKXXXXXXXXXIKRVQVPRHHVRS

SEQ ID NO: 18102 - protein, 36 aa, Artificial Sequence
  GFR-binding peptide
ALHDELTSMEGLFIPKKRVIEMIQVTINSLQVQTPR

SEQ ID NO: 18103 - protein, 44 aa, Artificial Sequence
  GFR-binding peptide
  MOD_RES (2), (4), (41): Xaa is C or S
EXKXALHDELTVQVEKFIPKKRVIEVKAVKVSRLQVQTPRXQVN

SEQ ID NO: 18104 - protein, 37 aa, Artificial Sequence
  GFR-binding peptide
  MOD_RES (33), (33): Xaa is C or S
  MOD_RES (11), (12), (13), (14), (15): Xaa is A or G
  MOD_RES (16), (17), (18), (19): Xaa is A or G or is absent
SHEELVTAKKXXXXXXXXXIKRMQVPRQGTPVXELGE

SEQ ID NO: 18105 - protein, 43 aa, Artificial Sequence
  GFR-binding peptide
  MOD_RES (2), (39): Xaa is C or S
  MOD_RES (15), (16), (17), (18), (19): Xaa is A or G
  MOD_RES (20), (21), (22), (23): Xaa is A or G or is absent
KXALHDELTSMEGIXXXXXXXXXMIQVTINSLQVQTPRXQVNR

SEQ ID NO: 18106 - protein, 36 aa, Artificial Sequence
  GFR-binding peptide
  MOD_RES (1), (35): Xaa is C or S
  MOD_RES (13), (14), (15), (16), (17): Xaa is A or G
  MOD_RES (18), (19), (20), (21): Xaa is A or G or is absent
XQSHEELVQVEKXXXXXXXXXVKAMKVSRQGTPVXE

SEQ ID NO: 18107 - protein, 44 aa, Artificial Sequence
  GFR-binding peptide
  MOD_RES (2), (4), (41): Xaa is C or S
AXAXELHEELRSMEGLLKPKKRVYEMIQVTINSHHVRSPQXKVS

SEQ ID NO: 18108 - protein, 40 aa, Artificial Sequence
  GFR-binding peptide
  MOD_RES (37), (37): Xaa is C or S
ALHDELTVQVEKFIPKKRVIEVKAVKVSRLQVQTPRXQVN

SEQ ID NO: 18109 - protein, 37 aa, Artificial Sequence
  GFR-binding peptide
  MOD_RES (1), (35): Xaa is C or S
  MOD_RES (13), (14), (15), (16), (17): Xaa is A or G
  MOD_RES (18), (19), (20), (21): Xaa is A or G or is absent
XQSHEELSMEGLXXXXXXXXXMIQMTINSQGTPVXEL

SEQ ID NO: 18110 - protein, 38 aa, Artificial Sequence
  GFR-binding peptide
  MOD_RES (36), (36): Xaa is C or S
  MOD_RES (12), (13), (14), (15), (16): Xaa is A or G
  MOD_RES (17), (18), (19), (20): Xaa is A or G or is absent
LHDELTVQVEKXXXXXXXXXVKAVKVSRLQVQTPRXQV

SEQ ID NO: 18111 - protein, 38 aa, Artificial Sequence
  GFR-binding peptide
  MOD_RES (1), (3), (37): Xaa is C or S
XEXQSHEELSMEGLHQGQHPKIRMIQMTINSQGTPVXE

SEQ ID NO: 18112 - protein, 36 aa, Artificial Sequence
  GFR-binding peptide
  MOD_RES (1), (3): Xaa is C or S
  MOD_RES (15), (16), (17), (18), (19): Xaa is A or G
  MOD_RES (20), (21), (22), (23): Xaa is A or G or is absent
XEXKNHQLFVQVEKXXXXXXXXXVKAMKVSREETPV

SEQ ID NO: 18113 - protein, 41 aa, Artificial Sequence
  GFR-binding peptide
  MOD_RES (2), (39): Xaa is C or S
AXELHEELRVTAKKLKPKKRVYEIKRVQVPRHHVRSPQXKV

SEQ ID NO: 18114 - protein, 39 aa, Artificial Sequence
  GFR-binding peptide
  MOD_RES (1), (38): Xaa is C or S
XALHDELTVTAKKFIPKKRVIEIKRVQVPRLQVQTPRXQ

SEQ ID NO: 18115 - protein, 36 aa, Artificial Sequence
  GFR-binding peptide
  MOD_RES (35), (35): Xaa is C or S
  MOD_RES (11), (12), (13), (14), (15): Xaa is A or G
  MOD_RES (16), (17), (18), (19): Xaa is A or G or is absent
HEELRSMEGIXXXXXXXXXMIQVTINSHHVRSPQXK

SEQ ID NO: 18116 - protein, 41 aa, Artificial Sequence
  GFR-binding peptide
  MOD_RES (2), (4), (41): Xaa is C or S
AXAXELHEELRSMEGLLKPKKRVYEMIQVTINSHHVRSPQX

SEQ ID NO: 18117 - protein, 44 aa, Artificial Sequence
  GFR-binding peptide
  MOD_RES (1), (3), (40): Xaa is C or S
  MOD_RES (16), (17), (18), (19), (20): Xaa is A or G
  MOD_RES (21), (22), (23), (24): Xaa is A or G or is absent
XAXELHEELRVTAKKXXXXXXXXXIKRVQVPRHHVRSPQXKVSS

SEQ ID NO: 18118 - protein, 39 aa, Artificial Sequence
  GFR-binding peptide
  MOD_RES (2), (36): Xaa is C or S
  MOD_RES (14), (15), (16), (17), (18): Xaa is A or G
  MOD_RES (19), (20), (21), (22): Xaa is A or G or is absent
EXQSHEELVTAKKXXXXXXXXXIKRMQVPRQGTPVXELG

SEQ ID NO: 18119 - protein, 38 aa, Artificial Sequence
  GFR-binding peptide
  MOD_RES (33), (33): Xaa is C or S
NHQLFVQVEKHQGQHPKIRVKAMKVSREETPVXELGED

SEQ ID NO: 18120 - protein, 39 aa, Artificial Sequence
  GFR-binding peptide
  MOD_RES (33), (33): Xaa is C or S
SHEELVTAKKHQGQHPKIRIKRMQVPRQGTPVXELGEDN

SEQ ID NO: 18121 - protein, 43 aa, Artificial Sequence
  GFR-binding peptide
  MOD_RES (2), (4), (41): Xaa is C or S
AXAXELHEELRVQVEKLKPKKRVYEVKAVKVSRHHVRSPQXKV

SEQ ID NO: 18122 - protein, 38 aa, Artificial Sequence
  GFR-binding peptide
  MOD_RES (2), (4), (38): Xaa is C or S
  MOD_RES (16), (17), (18), (19), (20): Xaa is A or G
  MOD_RES (21), (22), (23), (24): Xaa is A or G or is absent
RXEXKNHQLFSMEGIXXXXXXXXXMIQMTINSEETPVX

SEQ ID NO: 18123 - protein, 34 aa, Artificial Sequence
  GFR-binding peptide
  MOD_RES (33), (33): Xaa is C or S
SHEELVTAKKHQGQHPKIRIKRMQVPRQGTPVXE

SEQ ID NO: 18124 - protein, 44 aa, Artificial Sequence
  GFR-binding peptide
  MOD_RES (2), (4), (41): Xaa is C or S
  MOD_RES (17), (18), (19), (20), (21): Xaa is A or G
  MOD_RES (22), (23), (24), (25): Xaa is A or G or is absent
AXAXELHEELRSMEGIXXXXXXXXXMIQVTINSHHVRSPQXKVS

SEQ ID NO: 18125 - protein, 45 aa, Artificial Sequence
  GFR-binding peptide
  MOD_RES (2), (4), (41): Xaa is C or S
AXAXELHEELRVQVEKLKPKKRVYEVKAVKVSRHHVRSPQXKVSS

SEQ ID NO: 18126 - protein, 35 aa, Artificial Sequence
  GFR-binding peptide
  MOD_RES (33), (33): Xaa is C or S
  MOD_RES (11), (12), (13), (14), (15): Xaa is A or G
  MOD_RES (16), (17), (18), (19): Xaa is A or G or is absent
SHEELVTAKKXXXXXXXXXIKRMQVPRQGTPVXEL

SEQ ID NO: 18127 - protein, 37 aa, Artificial Sequence
  GFR-binding peptide
  MOD_RES (1), (3): Xaa is C or S
XAXELHEELRSMEGILKPKKRVYEMIQVTINSHHVRS

SEQ ID NO: 18128 - protein, 40 aa, Artificial Sequence
  GFR-binding peptide
  MOD_RES (2), (4), (38): Xaa is C or S
  MOD_RES (16), (17), (18), (19), (20): Xaa is A or G
  MOD_RES (21), (22), (23), (24): Xaa is A or G or is absent
RXEXKNHQLFSMEGIXXXXXXXXXMIQMTINSEETPVXEL

SEQ ID NO: 18129 - protein, 36 aa, Artificial Sequence
  GFR-binding peptide
  MOD_RES (1), (1): Xaa is C or S
  MOD_RES (14), (15), (16), (17), (18): Xaa is A or G
  MOD_RES (19), (20), (21), (22): Xaa is A or G or is absent
XALHDELTVTAKKXXXXXXXXXIKRVQVPRLQVQTP

SEQ ID NO: 18130 - protein, 44 aa, Artificial Sequence
  GFR-binding peptide
  MOD_RES (2), (4), (38): Xaa is C or S
  MOD_RES (16), (17), (18), (19), (20): Xaa is A or G
  MOD_RES (21), (22), (23), (24): Xaa is A or G or is absent
RXEXKNHQLFSMEGIXXXXXXXXXMIQMTINSEETPVXELGEDN

SEQ ID NO: 18131 - protein, 40 aa, Artificial Sequence
  GFR-binding peptide
  MOD_RES (2), (39): Xaa is C or S
KXALHDELTVTAKKFIPKKRVIEIKRVQVPRLQVQTPRXQ

SEQ ID NO: 18132 - protein, 36 aa, Artificial Sequence
  GFR-binding peptide
  MOD_RES (2), (36): Xaa is C or S
  MOD_RES (14), (15), (16), (17), (18): Xaa is A or G
  MOD_RES (19), (20), (21), (22): Xaa is A or G or is absent
EXKNHQLFVQVEKXXXXXXXXXVKAMKVSREETPVX

SEQ ID NO: 18133 - protein, 40 aa, Artificial Sequence
  GFR-binding peptide
  MOD_RES (34), (34): Xaa is C or S
KNHQLFSMEGLHQGQHPKIRMIQMTINSEETPVXELGEDN

SEQ ID NO: 18134 - protein, 37 aa, Artificial Sequence
  GFR-binding peptide
  MOD_RES (33), (33): Xaa is C or S
SHEELVQVEKHQGQHPKIRVKAMKVSRQGTPVXELGE

SEQ ID NO: 18135 - protein, 40 aa, Artificial Sequence
  GFR-binding peptide
  MOD_RES (2), (36): Xaa is C or S
EXQSHEELSMEGIHQGQHPKIRMIQMTINSQGTPVXELGE

SEQ ID NO: 18136 - protein, 41 aa, Artificial Sequence
  GFR-binding peptide
  MOD_RES (2), (36): Xaa is C or S
EXQSHEELVQVEKHQGQHPKIRVKAMKVSRQGTPVXELGED

SEQ ID NO: 18137 - protein, 41 aa, Artificial Sequence
  GFR-binding peptide
  MOD_RES (1), (38): Xaa is C or S
XALHDELTSMEGLFIPKKRVIEMIQVTINSLQVQTPRXQVN

SEQ ID NO: 18138 - protein, 43 aa, Artificial Sequence
  GFR-binding peptide
  MOD_RES (1), (3), (40): Xaa is C or S
  MOD_RES (16), (17), (18), (19), (20): Xaa is A or G
  MOD_RES (21), (22), (23), (24): Xaa is A or G or is absent
XKXALHDELTSMEGIXXXXXXXXXMIQVTINSLQVQTPRXQVN

SEQ ID NO: 18139 - protein, 41 aa, Artificial Sequence
  GFR-binding peptide
  MOD_RES (1), (38): Xaa is C or S
  MOD_RES (14), (15), (16), (17), (18): Xaa is A or G
  MOD_RES (19), (20), (21), (22): Xaa is A or G or is absent
XALHDELTSMEGLXXXXXXXXXMIQVTINSLQVQTPRXQVN

SEQ ID NO: 18140 - protein, 43 aa, Artificial Sequence
  GFR-binding peptide
  MOD_RES (2), (4), (38): Xaa is C or S
  MOD_RES (16), (17), (18), (19), (20): Xaa is A or G
  MOD_RES (21), (22), (23), (24): Xaa is A or G or is absent
RXEXQSHEELVQVEKXXXXXXXXXVKAMKVSRQGTPVXELGED

SEQ ID NO: 18141 - protein, 32 aa, Artificial Sequence
  GFR-binding peptide
SHEELSMEGLHQGQHPKIRMIQMTINSQGTPV

SEQ ID NO: 18142 - protein, 36 aa, Artificial Sequence
  GFR-binding peptide
  MOD_RES (36), (36): Xaa is C or S
  MOD_RES (12), (13), (14), (15), (16): Xaa is A or G
  MOD_RES (17), (18), (19), (20): Xaa is A or G or is absent
LHDELTVQVEKXXXXXXXXXVKAVKVSRLQVQTPRX

SEQ ID NO: 18143 - protein, 33 aa, Artificial Sequence
  GFR-binding peptide
  MOD_RES (11), (12), (13), (14), (15): Xaa is A or G
  MOD_RES (16), (17), (18), (19): Xaa is A or G or is absent
HEELRSMEGLXXXXXXXXXMIQVTINSHHVRSP

SEQ ID NO: 18144 - protein, 38 aa, Artificial Sequence
  GFR-binding peptide
  MOD_RES (34), (34): Xaa is C or S
  MOD_RES (12), (13), (14), (15), (16): Xaa is A or G
  MOD_RES (17), (18), (19), (20): Xaa is A or G or is absent
KNHQLFVQVEKXXXXXXXXXVKAMKVSREETPVXELGE

SEQ ID NO: 18145 - protein, 44 aa, Artificial Sequence
  GFR-binding peptide
  MOD_RES (2), (4), (38): Xaa is C or S
RXEXKNHQLFSMEGIHQGQHPKIRMIQMTINSEETPVXELGEDN

SEQ ID NO: 18146 - protein, 36 aa, Artificial Sequence
  GFR-binding peptide
  MOD_RES (1), (1): Xaa is C or S
XALHDELTSMEGLFIPKKRVIEMIQVTINSLQVQTP

SEQ ID NO: 18147 - protein, 40 aa, Artificial Sequence
  GFR-binding peptide
  MOD_RES (1), (35): Xaa is C or S
  MOD_RES (13), (14), (15), (16), (17): Xaa is A or G
  MOD_RES (18), (19), (20), (21): Xaa is A or G or is absent
XKNHQLFSMEGIXXXXXXXXXMIQMTINSEETPVXELGED

SEQ ID NO: 18148 - protein, 42 aa, Artificial Sequence
  GFR-binding peptide
  MOD_RES (2), (36): Xaa is C or S
EXQSHEELSMEGIHQGQHPKIRMIQMTINSQGTPVXELGEDN

SEQ ID NO: 18149 - protein, 40 aa, Artificial Sequence
  GFR-binding peptide
  MOD_RES (36), (36): Xaa is C or S
  MOD_RES (12), (13), (14), (15), (16): Xaa is A or G
  MOD_RES (17), (18), (19), (20): Xaa is A or G or is absent
LHDELTVQVEKXXXXXXXXXVKAVKVSRLQVQTPRXQVNR

SEQ ID NO: 18150 - protein, 39 aa, Artificial Sequence
  GFR-binding peptide
  MOD_RES (1), (3): Xaa is C or S
  MOD_RES (16), (17), (18), (19), (20): Xaa is A or G
  MOD_RES (21), (22), (23), (24): Xaa is A or G or is absent
XKXALHDELTSMEGLXXXXXXXXXMIQVTINSLQVQTPR

SEQ ID NO: 18151 - protein, 38 aa, Artificial Sequence
  GFR-binding peptide
  MOD_RES (1), (3): Xaa is C or S
XKXALHDELTSMEGLFIPKKRVIEMIQVTINSLQVQTP

SEQ ID NO: 18152 - protein, 39 aa, Artificial Sequence
  GFR-binding peptide
  MOD_RES (1), (3), (37): Xaa is C or S
  MOD_RES (15), (16), (17), (18), (19): Xaa is A or G
  MOD_RES (20), (21), (22), (23): Xaa is A or G or is absent
XEXQSHEELVTAKKXXXXXXXXXIKRMQVPRQGTPVXEL

SEQ ID NO: 18153 - protein, 43 aa, Artificial Sequence
  GFR-binding peptide
  MOD_RES (2), (4), (38): Xaa is C or S
  MOD_RES (16), (17), (18), (19), (20): Xaa is A or G
  MOD_RES (21), (22), (23), (24): Xaa is A or G or is absent
RXEXQSHEELVTAKKXXXXXXXXXIKRMQVPRQGTPVXELGED

SEQ ID NO: 18154 - protein, 40 aa, Artificial Sequence
  GFR-binding peptide
  MOD_RES (1), (3), (40): Xaa is C or S
  MOD_RES (16), (17), (18), (19), (20): Xaa is A or G
  MOD_RES (21), (22), (23), (24): Xaa is A or G or is absent
XKXALHDELTSMEGIXXXXXXXXXMIQVTINSLQVQTPRX

SEQ ID NO: 18155 - protein, 44 aa, Artificial Sequence
  GFR-binding peptide
  MOD_RES (1), (3), (40): Xaa is C or S
  MOD_RES (16), (17), (18), (19), (20): Xaa is A or G
  MOD_RES (21), (22), (23), (24): Xaa is A or G or is absent
XAXELHEELRVQVEKXXXXXXXXXVKAVKVSRHHVRSPQXKVSS

SEQ ID NO: 18156 - protein, 38 aa, Artificial Sequence
  GFR-binding peptide
  MOD_RES (33), (33): Xaa is C or S
  MOD_RES (11), (12), (13), (14), (15): Xaa is A or G
  MOD_RES (16), (17), (18), (19): Xaa is A or G or is absent
SHEELVQVEKXXXXXXXXXVKAMKVSRQGTPVXELGED

SEQ ID NO: 18157 - protein, 36 aa, Artificial Sequence
  GFR-binding peptide
  MOD_RES (1), (35): Xaa is C or S
  MOD_RES (13), (14), (15), (16), (17): Xaa is A or G
  MOD_RES (18), (19), (20), (21): Xaa is A or G or is absent
XKNHQLFVTAKKXXXXXXXXXIKRMQVPREETPVXE

SEQ ID NO: 18158 - protein, 40 aa, Artificial Sequence
  GFR-binding peptide
  MOD_RES (1), (3), (37): Xaa is C or S
XEXQSHEELSMEGIHQGQHPKIRMIQMTINSQGTPVXELG

SEQ ID NO: 18159 - protein, 33 aa, Artificial Sequence
  GFR-binding peptide
  MOD_RES (12), (13), (14), (15), (16): Xaa is A or G
  MOD_RES (17), (18), (19), (20): Xaa is A or G or is absent
LHDELTSMEGLXXXXXXXXXMIQVTINSLQVQT

SEQ ID NO: 18160 - protein, 43 aa, Artificial Sequence
  GFR-binding peptide
  MOD_RES (2), (4), (38): Xaa is C or S
RXEXQSHEELSMEGIHQGQHPKIRMIQMTINSQGTPVXELGED

SEQ ID NO: 18161 - protein, 40 aa, Artificial Sequence
  GFR-binding peptide
  MOD_RES (34), (34): Xaa is C or S
  MOD_RES (12), (13), (14), (15), (16): Xaa is A or G
  MOD_RES (17), (18), (19), (20): Xaa is A or G or is absent
QSHEELVTAKKXXXXXXXXXIKRMQVPRQGTPVXELGEDN

SEQ ID NO: 18162 - protein, 37 aa, Artificial Sequence
  GFR-binding peptide
  MOD_RES (36), (36): Xaa is C or S
LHEELRVQVEKLKPKKRVYEVKAVKVSRHHVRSPQXK

SEQ ID NO: 18163 - protein, 40 aa, Artificial Sequence
  GFR-binding peptide
  MOD_RES (34), (34): Xaa is C or S
  MOD_RES (12), (13), (14), (15), (16): Xaa is A or G
  MOD_RES (17), (18), (19), (20): Xaa is A or G or is absent
QSHEELSMEGIXXXXXXXXXMIQMTINSQGTPVXELGEDN

SEQ ID NO: 18164 - protein, 37 aa, Artificial Sequence
  GFR-binding peptide
  MOD_RES (2), (36): Xaa is C or S
  MOD_RES (14), (15), (16), (17), (18): Xaa is A or G
  MOD_RES (19), (20), (21), (22): Xaa is A or G or is absent
EXKNHQLFSMEGIXXXXXXXXXMIQMTINSEETPVXE

SEQ ID NO: 18165 - protein, 41 aa, Artificial Sequence
  GFR-binding peptide
  MOD_RES (1), (35): Xaa is C or S
  MOD_RES (13), (14), (15), (16), (17): Xaa is A or G
  MOD_RES (18), (19), (20), (21): Xaa is A or G or is absent
XQSHEELSMEGLXXXXXXXXXMIQMTINSQGTPVXELGEDN

SEQ ID NO: 18166 - protein, 43 aa, Artificial Sequence
  GFR-binding peptide
  MOD_RES (1), (3), (40): Xaa is C or S
XAXELHEELRVQVEKLKPKKRVYEVKAVKVSRHHVRSPQXKVS

SEQ ID NO: 18167 - protein, 38 aa, Artificial Sequence
  GFR-binding peptide
  MOD_RES (35), (35): Xaa is C or S
HDELTSMEGIFIPKKRVIEMIQVTINSLQVQTPRXQVN

SEQ ID NO: 18168 - protein, 37 aa, Artificial Sequence
  GFR-binding peptide
  MOD_RES (1), (1): Xaa is C or S
  MOD_RES (14), (15), (16), (17), (18): Xaa is A or G
  MOD_RES (19), (20), (21), (22): Xaa is A or G or is absent
XALHDELTVTAKKXXXXXXXXXIKRVQVPRLQVQTPR

SEQ ID NO: 18169 - protein, 36 aa, Artificial Sequence
  GFR-binding peptide
  MOD_RES (1), (35): Xaa is C or S
  MOD_RES (13), (14), (15), (16), (17): Xaa is A or G
  MOD_RES (18), (19), (20), (21): Xaa is A or G or is absent
XQSHEELVTAKKXXXXXXXXXIKRMQVPRQGTPVXE

SEQ ID NO: 18170 - protein, 36 aa, Artificial Sequence
  GFR-binding peptide
  MOD_RES (2), (36): Xaa is C or S
  MOD_RES (14), (15), (16), (17), (18): Xaa is A or G
  MOD_RES (19), (20), (21), (22): Xaa is A or G or is absent
EXKNHQLFSMEGLXXXXXXXXXMIQMTINSEETPVX

SEQ ID NO: 18171 - protein, 35 aa, Artificial Sequence
  GFR-binding peptide
  MOD_RES (1), (1): Xaa is C or S
XELHEELRSMEGLLKPKKRVYEMIQVTINSHHVRS

SEQ ID NO: 18172 - protein, 40 aa, Artificial Sequence
  GFR-binding peptide
  MOD_RES (2), (4), (38): Xaa is C or S
RXEXKNHQLFSMEGIHQGQHPKIRMIQMTINSEETPVXEL

SEQ ID NO: 18173 - protein, 41 aa, Artificial Sequence
  GFR-binding peptide
  MOD_RES (1), (3), (37): Xaa is C or S
XEXQSHEELSMEGIHQGQHPKIRMIQMTINSQGTPVXELGE

SEQ ID NO: 18174 - protein, 38 aa, Artificial Sequence
  GFR-binding peptide
  MOD_RES (2), (4): Xaa is C or S
  MOD_RES (17), (18), (19), (20), (21): Xaa is A or G
  MOD_RES (22), (23), (24), (25): Xaa is A or G or is absent
EXKXALHDELTSMEGLXXXXXXXXXMIQVTINSLQVQT

SEQ ID NO: 18175 - protein, 39 aa, Artificial Sequence
  GFR-binding peptide
  MOD_RES (35), (35): Xaa is C or S
HDELTSMEGIFIPKKRVIEMIQVTINSLQVQTPRXQVNR

SEQ ID NO: 18176 - protein, 40 aa, Artificial Sequence
  GFR-binding peptide
  MOD_RES (2), (39): Xaa is C or S
KXALHDELTSMEGLFIPKKRVIEMIQVTINSLQVQTPRXQ

SEQ ID NO: 18177 - protein, 38 aa, Artificial Sequence
  GFR-binding peptide
  MOD_RES (2), (2): Xaa is C or S
AXELHEELRSMEGILKPKKRVYEMIQVTINSHHVRSPQ

SEQ ID NO: 18178 - protein, 38 aa, Artificial Sequence
  GFR-binding peptide
  MOD_RES (1), (3), (37): Xaa is C or S
  MOD_RES (15), (16), (17), (18), (19): Xaa is A or G
  MOD_RES (20), (21), (22), (23): Xaa is A or G or is absent
XEXQSHEELSMEGIXXXXXXXXXMIQMTINSQGTPVXE

SEQ ID NO: 18179 - protein, 39 aa, Artificial Sequence
  GFR-binding peptide
  MOD_RES (1), (38): Xaa is C or S
  MOD_RES (14), (15), (16), (17), (18): Xaa is A or G
  MOD_RES (19), (20), (21), (22): Xaa is A or G or is absent
XALHDELTVQVEKXXXXXXXXXVKAVKVSRLQVQTPRXQ

SEQ ID NO: 18180 - protein, 39 aa, Artificial Sequence
  GFR-binding peptide
  MOD_RES (2), (4), (38): Xaa is C or S
RXEXKNHQLFSMEGIHQGQHPKIRMIQMTINSEETPVXE

SEQ ID NO: 18181 - protein, 35 aa, Artificial Sequence
  GFR-binding peptide
  MOD_RES (1), (35): Xaa is C or S
  MOD_RES (13), (14), (15), (16), (17): Xaa is A or G
  MOD_RES (18), (19), (20), (21): Xaa is A or G or is absent
XKNHQLFSMEGIXXXXXXXXXMIQMTINSEETPVX

SEQ ID NO: 18182 - protein, 40 aa, Artificial Sequence
  GFR-binding peptide
  MOD_RES (37), (37): Xaa is C or S
ELHEELRVQVEKLKPKKRVYEVKAVKVSRHHVRSPQXKVS

SEQ ID NO: 18183 - protein, 39 aa, Artificial Sequence
  GFR-binding peptide
  MOD_RES (35), (35): Xaa is C or S
HEELRSMEGILKPKKRVYEMIQVTINSHHVRSPQXKVSS

SEQ ID NO: 18184 - protein, 42 aa, Artificial Sequence
  GFR-binding peptide
  MOD_RES (1), (3), (37): Xaa is C or S
XEXKNHQLFSMEGIHQGQHPKIRMIQMTINSEETPVXELGED

SEQ ID NO: 18185 - protein, 39 aa, Artificial Sequence
  GFR-binding peptide
  MOD_RES (35), (35): Xaa is C or S
HDELTVTAKKFIPKKRVIEIKRVQVPRLQVQTPRXQVNR

SEQ ID NO: 18186 - protein, 40 aa, Artificial Sequence
  GFR-binding peptide
  MOD_RES (36), (36): Xaa is C or S
LHEELRSMEGLLKPKKRVYEMIQVTINSHHVRSPQXKVSS

SEQ ID NO: 18187 - protein, 40 aa, Artificial Sequence
  GFR-binding peptide
  MOD_RES (1), (3), (40): Xaa is C or S
XKXALHDELTSMEGLFIPKKRVIEMIQVTINSLQVQTPRX

SEQ ID NO: 18188 - protein, 38 aa, Artificial Sequence
  GFR-binding peptide
  MOD_RES (1), (38): Xaa is C or S
  MOD_RES (14), (15), (16), (17), (18): Xaa is A or G
  MOD_RES (19), (20), (21), (22): Xaa is A or G or is absent
XALHDELTSMEGLXXXXXXXXXMIQVTINSLQVQTPRX

SEQ ID NO: 18189 - protein, 41 aa, Artificial Sequence
  GFR-binding peptide
  MOD_RES (2), (4), (41): Xaa is C or S
EXKXALHDELTSMEGLFIPKKRVIEMIQVTINSLQVQTPRX

SEQ ID NO: 18190 - protein, 37 aa, Artificial Sequence
  GFR-binding peptide
  MOD_RES (1), (3), (37): Xaa is C or S
  MOD_RES (15), (16), (17), (18), (19): Xaa is A or G
  MOD_RES (20), (21), (22), (23): Xaa is A or G or is absent
XEXQSHEELSMEGIXXXXXXXXXMIQMTINSQGTPVX

SEQ ID NO: 18191 - protein, 42 aa, Artificial Sequence
  GFR-binding peptide
  MOD_RES (2), (4), (38): Xaa is C or S
  MOD_RES (16), (17), (18), (19), (20): Xaa is A or G
  MOD_RES (21), (22), (23), (24): Xaa is A or G or is absent
RXEXQSHEELSMEGLXXXXXXXXXMIQMTINSQGTPVXELGE

SEQ ID NO: 18192 - protein, 37 aa, Artificial Sequence
  GFR-binding peptide
  MOD_RES (37), (37): Xaa is C or S
ALHDELTSMEGLFIPKKRVIEMIQVTINSLQVQTPRX

SEQ ID NO: 18193 - protein, 33 aa, Artificial Sequence
  GFR-binding peptide
  MOD_RES (12), (13), (14), (15), (16): Xaa is A or G
  MOD_RES (17), (18), (19), (20): Xaa is A or G or is absent
KNHQLFSMEGLXXXXXXXXXMIQMTINSEETPV

SEQ ID NO: 18194 - protein, 42 aa, Artificial Sequence
  GFR-binding peptide
  MOD_RES (2), (36): Xaa is C or S
EXKNHQLFVTAKKHQGQHPKIRIKRMQVPREETPVXELGEDN

SEQ ID NO: 18195 - protein, 39 aa, Artificial Sequence
  GFR-binding peptide
  MOD_RES (2), (4): Xaa is C or S
  MOD_RES (17), (18), (19), (20), (21): Xaa is A or G
  MOD_RES (22), (23), (24), (25): Xaa is A or G or is absent
AXAXELHEELRSMEGLXXXXXXXXXMIQVTINSHHVRSP

SEQ ID NO: 18196 - protein, 36 aa, Artificial Sequence
  GFR-binding peptide
  MOD_RES (2), (2): Xaa is C or S
AXELHEELRSMEGILKPKKRVYEMIQVTINSHHVRS

SEQ ID NO: 18197 - protein, 33 aa, Artificial Sequence
  GFR-binding peptide
  MOD_RES (12), (13), (14), (15), (16): Xaa is A or G
  MOD_RES (17), (18), (19), (20): Xaa is A or G or is absent
LHEELRSMEGLXXXXXXXXXMIQVTINSHHVRS

SEQ ID NO: 18198 - protein, 42 aa, Artificial Sequence
  GFR-binding peptide
  MOD_RES (2), (4), (41): Xaa is C or S
EXKXALHDELTVTAKKFIPKKRVIEIKRVQVPRLQVQTPRXQ

SEQ ID NO: 18199 - protein, 37 aa, Artificial Sequence
  GFR-binding peptide
  MOD_RES (34), (34): Xaa is C or S
  MOD_RES (12), (13), (14), (15), (16): Xaa is A or G
  MOD_RES (17), (18), (19), (20): Xaa is A or G or is absent
KNHQLFSMEGIXXXXXXXXXMIQMTINSEETPVXELG

SEQ ID NO: 18200 - protein, 42 aa, Artificial Sequence
  GFR-binding peptide
  MOD_RES (2), (4), (41): Xaa is C or S
AXAXELHEELRVQVEKLKPKKRVYEVKAVKVSRHHVRSPQXK

SEQ ID NO: 18201 - protein, 44 aa, Artificial Sequence
  GFR-binding peptide
  MOD_RES (2), (4), (41): Xaa is C or S
  MOD_RES (17), (18), (19), (20), (21): Xaa is A or G
  MOD_RES (22), (23), (24), (25): Xaa is A or G or is absent
EXKXALHDELTVTAKKXXXXXXXXXIKRVQVPRLQVQTPRXQVN

SEQ ID NO: 18202 - protein, 38 aa, Artificial Sequence
  GFR-binding peptide
  MOD_RES (37), (37): Xaa is C or S
  MOD_RES (13), (14), (15), (16), (17): Xaa is A or G
  MOD_RES (18), (19), (20), (21): Xaa is A or G or is absent
ALHDELTSMEGLXXXXXXXXXMIQVTINSLQVQTPRXQ

SEQ ID NO: 18203 - protein, 41 aa, Artificial Sequence
  GFR-binding peptide
  MOD_RES (2), (4), (41): Xaa is C or S
EXKXALHDELTVTAKKFIPKKRVIEIKRVQVPRLQVQTPRX

SEQ ID NO: 18204 - protein, 41 aa, Artificial Sequence
  GFR-binding peptide
  MOD_RES (1), (3), (40): Xaa is C or S
XKXALHDELTSMEGIFIPKKRVIEMIQVTINSLQVQTPRXQ

SEQ ID NO: 18205 - protein, 39 aa, Artificial Sequence
  GFR-binding peptide
  MOD_RES (1), (38): Xaa is C or S
  MOD_RES (14), (15), (16), (17), (18): Xaa is A or G
  MOD_RES (19), (20), (21), (22): Xaa is A or G or is absent
XELHEELRVQVEKXXXXXXXXXVKAVKVSRHHVRSPQXK

SEQ ID NO: 18206 - protein, 34 aa, Artificial Sequence
  GFR-binding peptide
  MOD_RES (1), (1): Xaa is C or S
XKNHQLFSMEGLHQGQHPKIRMIQMTINSEETPV

SEQ ID NO: 18207 - protein, 39 aa, Artificial Sequence
  GFR-binding peptide
  MOD_RES (35), (35): Xaa is C or S
HDELTVQVEKFIPKKRVIEVKAVKVSRLQVQTPRXQVNR

SEQ ID NO: 18208 - protein, 33 aa, Artificial Sequence
  GFR-binding peptide
KNHQLFSMEGIHQGQHPKIRMIQMTINSEETPV

SEQ ID NO: 18209 - protein, 42 aa, Artificial Sequence
  GFR-binding peptide
  MOD_RES (1), (3), (37): Xaa is C or S
  MOD_RES (15), (16), (17), (18), (19): Xaa is A or G
  MOD_RES (20), (21), (22), (23): Xaa is A or G or is absent
XEXQSHEELSMEGIXXXXXXXXXMIQMTINSQGTPVXELGED

SEQ ID NO: 18210 - protein, 39 aa, Artificial Sequence
  GFR-binding peptide
  MOD_RES (2), (4): Xaa is C or S
EXKXALHDELTSMEGLFIPKKRVIEMIQVTINSLQVQTP

SEQ ID NO: 18211 - protein, 34 aa, Artificial Sequence
  GFR-binding peptide
HDELTVQVEKFIPKKRVIEVKAVKVSRLQVQTPR

SEQ ID NO: 18212 - protein, 38 aa, Artificial Sequence
  GFR-binding peptide
  MOD_RES (33), (33): Xaa is C or S
  MOD_RES (11), (12), (13), (14), (15): Xaa is A or G
  MOD_RES (16), (17), (18), (19): Xaa is A or G or is absent
NHQLFSMEGIXXXXXXXXXMIQMTINSEETPVXELGED

SEQ ID NO: 18213 - protein, 42 aa, Artificial Sequence
  GFR-binding peptide
  MOD_RES (2), (4), (41): Xaa is C or S
  MOD_RES (17), (18), (19), (20), (21): Xaa is A or G
  MOD_RES (22), (23), (24), (25): Xaa is A or G or is absent
EXKXALHDELTVQVEKXXXXXXXXXVKAVKVSRLQVQTPRXQ

SEQ ID NO: 18214 - protein, 44 aa, Artificial Sequence
  GFR-binding peptide
  MOD_RES (1), (3), (40): Xaa is C or S
XKXALHDELTVTAKKFIPKKRVIEIKRVQVPRLQVQTPRXQVNR

SEQ ID NO: 18215 - protein, 40 aa, Artificial Sequence
  GFR-binding peptide
  MOD_RES (1), (3), (40): Xaa is C or S
XAXELHEELRVQVEKLKPKKRVYEVKAVKVSRHHVRSPQX

SEQ ID NO: 18216 - protein, 34 aa, Artificial Sequence
  GFR-binding peptide
  MOD_RES (34), (34): Xaa is C or S
KNHQLFSMEGLHQGQHPKIRMIQMTINSEETPVX

SEQ ID NO: 18217 - protein, 36 aa, Artificial Sequence
  GFR-binding peptide
  MOD_RES (1), (3): Xaa is C or S
XEXQSHEELSMEGLHQGQHPKIRMIQMTINSQGTPV

SEQ ID NO: 18218 - protein, 38 aa, Artificial Sequence
  GFR-binding peptide
  MOD_RES (1), (38): Xaa is C or S
XELHEELRSMEGILKPKKRVYEMIQVTINSHHVRSPQX

SEQ ID NO: 18219 - protein, 38 aa, Artificial Sequence
  GFR-binding peptide
  MOD_RES (1), (35): Xaa is C or S
XQSHEELSMEGIHQGQHPKIRMIQMTINSQGTPVXELG

SEQ ID NO: 18220 - protein, 38 aa, Artificial Sequence
  GFR-binding peptide
  MOD_RES (37), (37): Xaa is C or S
ELHEELRVQVEKLKPKKRVYEVKAVKVSRHHVRSPQXK

SEQ ID NO: 18221 - protein, 40 aa, Artificial Sequence
  GFR-binding peptide
  MOD_RES (1), (3), (37): Xaa is C or S
  MOD_RES (15), (16), (17), (18), (19): Xaa is A or G
  MOD_RES (20), (21), (22), (23): Xaa is A or G or is absent
XEXKNHQLFSMEGIXXXXXXXXXMIQMTINSEETPVXELG

SEQ ID NO: 18222 - protein, 39 aa, Artificial Sequence
  GFR-binding peptide
  MOD_RES (2), (39): Xaa is C or S
KXALHDELTVQVEKFIPKKRVIEVKAVKVSRLQVQTPRX

SEQ ID NO: 18223 - protein, 37 aa, Artificial Sequence
  GFR-binding peptide
  MOD_RES (34), (34): Xaa is C or S
QSHEELVQVEKHQGQHPKIRVKAMKVSRQGTPVXELG

SEQ ID NO: 18224 - protein, 34 aa, Artificial Sequence
  GFR-binding peptide
  MOD_RES (33), (33): Xaa is C or S
SHEELSMEGIHQGQHPKIRMIQMTINSQGTPVXE

SEQ ID NO: 18225 - protein, 42 aa, Artificial Sequence
  GFR-binding peptide
  MOD_RES (2), (4), (38): Xaa is C or S
RXEXKNHQLFVTAKKHQGQHPKIRIKRMQVPREETPVXELGE

SEQ ID NO: 18226 - protein, 39 aa, Artificial Sequence
  GFR-binding peptide
  MOD_RES (2), (4): Xaa is C or S
EXKXALHDELTVTAKKFIPKKRVIEIKRVQVPRLQVQTP

SEQ ID NO: 18227 - protein, 36 aa, Artificial Sequence
  GFR-binding peptide
  MOD_RES (35), (35): Xaa is C or S
  MOD_RES (11), (12), (13), (14), (15): Xaa is A or G
  MOD_RES (16), (17), (18), (19): Xaa is A or G or is absent
HEELRVTAKKXXXXXXXXXIKRVQVPRHHVRSPQXK

SEQ ID NO: 18228 - protein, 40 aa, Artificial Sequence
  GFR-binding peptide
  MOD_RES (1), (35): Xaa is C or S
XQSHEELSMEGLHQGQHPKIRMIQMTINSQGTPVXELGED

SEQ ID NO: 18229 - protein, 40 aa, Artificial Sequence
  GFR-binding peptide
  MOD_RES (36), (36): Xaa is C or S
  MOD_RES (12), (13), (14), (15), (16): Xaa is A or G
  MOD_RES (17), (18), (19), (20): Xaa is A or G or is absent
LHEELRSMEGIXXXXXXXXXMIQVTINSHHVRSPQXKVSS

SEQ ID NO: 18230 - protein, 39 aa, Artificial Sequence
  GFR-binding peptide
  MOD_RES (33), (33): Xaa is C or S
  MOD_RES (11), (12), (13), (14), (15): Xaa is A or G
  MOD_RES (16), (17), (18), (19): Xaa is A or G or is absent
NHQLFSMEGLXXXXXXXXXMIQMTINSEETPVXELGEDN

SEQ ID NO: 18231 - protein, 41 aa, Artificial Sequence
  GFR-binding peptide
  MOD_RES (1), (3), (40): Xaa is C or S
XAXELHEELRSMEGILKPKKRVYEMIQVTINSHHVRSPQXK

SEQ ID NO: 18232 - protein, 37 aa, Artificial Sequence
  GFR-binding peptide
  MOD_RES (1), (35): Xaa is C or S
XQSHEELSMEGIHQGQHPKIRMIQMTINSQGTPVXEL

SEQ ID NO: 18233 - protein, 35 aa, Artificial Sequence
  GFR-binding peptide
  MOD_RES (1), (35): Xaa is C or S
XKNHQLFSMEGLHQGQHPKIRMIQMTINSEETPVX

SEQ ID NO: 18234 - protein, 35 aa, Artificial Sequence
  GFR-binding peptide
  MOD_RES (33), (33): Xaa is C or S
SHEELSMEGLHQGQHPKIRMIQMTINSQGTPVXEL

SEQ ID NO: 18235 - protein, 35 aa, Artificial Sequence
  GFR-binding peptide
  MOD_RES (33), (33): Xaa is C or S
  MOD_RES (11), (12), (13), (14), (15): Xaa is A or G
  MOD_RES (16), (17), (18), (19): Xaa is A or G or is absent
SHEELSMEGIXXXXXXXXXMIQMTINSQGTPVXEL

SEQ ID NO: 18236 - protein, 39 aa, Artificial Sequence
  GFR-binding peptide
  MOD_RES (2), (36): Xaa is C or S
EXQSHEELSMEGIHQGQHPKIRMIQMTINSQGTPVXELG

SEQ ID NO: 18237 - protein, 34 aa, Artificial Sequence
  GFR-binding peptide
  MOD_RES (1), (1): Xaa is C or S
  MOD_RES (13), (14), (15), (16), (17): Xaa is A or G
  MOD_RES (18), (19), (20), (21): Xaa is A or G or is absent
XKNHQLFSMEGIXXXXXXXXXMIQMTINSEETPV

SEQ ID NO: 18238 - protein, 41 aa, Artificial Sequence
  GFR-binding peptide
  MOD_RES (1), (35): Xaa is C or S
  MOD_RES (13), (14), (15), (16), (17): Xaa is A or G
  MOD_RES (18), (19), (20), (21): Xaa is A or G or is absent
XKNHQLFSMEGIXXXXXXXXXMIQMTINSEETPVXELGEDN

SEQ ID NO: 18239 - protein, 37 aa, Artificial Sequence
  GFR-binding peptide
  MOD_RES (2), (36): Xaa is C or S
  MOD_RES (14), (15), (16), (17), (18): Xaa is A or G
  MOD_RES (19), (20), (21), (22): Xaa is A or G or is absent
EXQSHEELSMEGLXXXXXXXXXMIQMTINSQGTPVXE

SEQ ID NO: 18240 - protein, 38 aa, Artificial Sequence
  GFR-binding peptide
  MOD_RES (1), (3), (37): Xaa is C or S
XEXKNHQLFVTAKKHQGQHPKIRIKRMQVPREETPVXE

SEQ ID NO: 18241 - protein, 43 aa, Artificial Sequence
  GFR-binding peptide
  MOD_RES (2), (39): Xaa is C or S
  MOD_RES (15), (16), (17), (18), (19): Xaa is A or G
  MOD_RES (20), (21), (22), (23): Xaa is A or G or is absent
AXELHEELRSMEGIXXXXXXXXXMIQVTINSHHVRSPQXKVSS

SEQ ID NO: 18242 - protein, 38 aa, Artificial Sequence
  GFR-binding peptide
  MOD_RES (33), (33): Xaa is C or S
NHQLFSMEGIHQGQHPKIRMIQMTINSEETPVXELGED

SEQ ID NO: 18243 - protein, 42 aa, Artificial Sequence
  GFR-binding peptide
  MOD_RES (1), (3), (40): Xaa is C or S
  MOD_RES (16), (17), (18), (19), (20): Xaa is A or G
  MOD_RES (21), (22), (23), (24): Xaa is A or G or is absent
XKXALHDELTVQVEKXXXXXXXXXVKAVKVSRLQVQTPRXQV

SEQ ID NO: 18244 - protein, 42 aa, Artificial Sequence
  GFR-binding peptide
  MOD_RES (1), (38): Xaa is C or S
XALHDELTVQVEKFIPKKRVIEVKAVKVSRLQVQTPRXQVNR

SEQ ID NO: 18245 - protein, 45 aa, Artificial Sequence
  GFR-binding peptide
  MOD_RES (2), (4), (41): Xaa is C or S
  MOD_RES (17), (18), (19), (20), (21): Xaa is A or G
  MOD_RES (22), (23), (24), (25): Xaa is A or G or is absent
EXKXALHDELTSMEGIXXXXXXXXXMIQVTINSLQVQTPRXQVNR

SEQ ID NO: 18246 - protein, 37 aa, Artificial Sequence
  GFR-binding peptide
  MOD_RES (1), (1): Xaa is C or S
  MOD_RES (14), (15), (16), (17), (18): Xaa is A or G
  MOD_RES (19), (20), (21), (22): Xaa is A or G or is absent
XELHEELRSMEGIXXXXXXXXXMIQVTINSHHVRSPQ

SEQ ID NO: 18247 - protein, 41 aa, Artificial Sequence
  GFR-binding peptide
  MOD_RES (2), (36): Xaa is C or S
  MOD_RES (14), (15), (16), (17), (18): Xaa is A or G
  MOD_RES (19), (20), (21), (22): Xaa is A or G or is absent
EXKNHQLFSMEGLXXXXXXXXXMIQMTINSEETPVXELGED

SEQ ID NO: 18248 - protein, 42 aa, Artificial Sequence
  GFR-binding peptide
  MOD_RES (2), (4), (38): Xaa is C or S
RXEXKNHQLFSMEGLHQGQHPKIRMIQMTINSEETPVXELGE

SEQ ID NO: 18249 - protein, 41 aa, Artificial Sequence
  GFR-binding peptide
  MOD_RES (1), (3), (37): Xaa is C or S
  MOD_RES (15), (16), (17), (18), (19): Xaa is A or G
  MOD_RES (20), (21), (22), (23): Xaa is A or G or is absent
XEXKNHQLFSMEGIXXXXXXXXXMIQMTINSEETPVXELGE

SEQ ID NO: 18250 - protein, 41 aa, Artificial Sequence
  GFR-binding peptide
  MOD_RES (2), (39): Xaa is C or S
  MOD_RES (15), (16), (17), (18), (19): Xaa is A or G
  MOD_RES (20), (21), (22), (23): Xaa is A or G or is absent
KXALHDELTVTAKKXXXXXXXXXIKRVQVPRLQVQTPRXQV

SEQ ID NO: 18251 - protein, 39 aa, Artificial Sequence
  GFR-binding peptide
  MOD_RES (37), (37): Xaa is C or S
ELHEELRSMEGLLKPKKRVYEMIQVTINSHHVRSPQXKV

SEQ ID NO: 18252 - protein, 35 aa, Artificial Sequence
  GFR-binding peptide
  MOD_RES (13), (14), (15), (16), (17): Xaa is A or G
  MOD_RES (18), (19), (20), (21): Xaa is A or G or is absent
ELHEELRVTAKKXXXXXXXXXIKRVQVPRHHVRSP

SEQ ID NO: 18253 - protein, 41 aa, Artificial Sequence
  GFR-binding peptide
  MOD_RES (2), (4), (38): Xaa is C or S
  MOD_RES (16), (17), (18), (19), (20): Xaa is A or G
  MOD_RES (21), (22), (23), (24): Xaa is A or G or is absent
RXEXKNHQLFSMEGIXXXXXXXXXMIQMTINSEETPVXELG

SEQ ID NO: 18254 - protein, 39 aa, Artificial Sequence
  GFR-binding peptide
  MOD_RES (1), (35): Xaa is C or S
  MOD_RES (13), (14), (15), (16), (17): Xaa is A or G
  MOD_RES (18), (19), (20), (21): Xaa is A or G or is absent
XKNHQLFVTAKKXXXXXXXXXIKRMQVPREETPVXELGE

SEQ ID NO: 18255 - protein, 38 aa, Artificial Sequence
  GFR-binding peptide
  MOD_RES (2), (4): Xaa is C or S
AXAXELHEELRVQVEKLKPKKRVYEVKAVKVSRHHVRS

SEQ ID NO: 18256 - protein, 36 aa, Artificial Sequence
  GFR-binding peptide
  MOD_RES (34), (34): Xaa is C or S
KNHQLFVTAKKHQGQHPKIRIKRMQVPREETPVXEL

SEQ ID NO: 18257 - protein, 34 aa, Artificial Sequence
  GFR-binding peptide
HDELTSMEGLFIPKKRVIEMIQVTINSLQVQTPR

SEQ ID NO: 18258 - protein, 42 aa, Artificial Sequence
  GFR-binding peptide
  MOD_RES (2), (36): Xaa is C or S
  MOD_RES (14), (15), (16), (17), (18): Xaa is A or G
  MOD_RES (19), (20), (21), (22): Xaa is A or G or is absent
EXQSHEELVTAKKXXXXXXXXXIKRMQVPRQGTPVXELGEDN

SEQ ID NO: 18259 - protein, 36 aa, Artificial Sequence
  GFR-binding peptide
  MOD_RES (2), (36): Xaa is C or S
EXQSHEELVTAKKHQGQHPKIRIKRMQVPRQGTPVX

SEQ ID NO: 18260 - protein, 40 aa, Artificial Sequence
  GFR-binding peptide
  MOD_RES (37), (37): Xaa is C or S
ALHDELTSMEGIFIPKKRVIEMIQVTINSLQVQTPRXQVN

SEQ ID NO: 18261 - protein, 42 aa, Artificial Sequence
  GFR-binding peptide
  MOD_RES (2), (4), (41): Xaa is C or S
EXKXALHDELTSMEGLFIPKKRVIEMIQVTINSLQVQTPRXQ

SEQ ID NO: 18262 - protein, 35 aa, Artificial Sequence
  GFR-binding peptide
  MOD_RES (1), (1): Xaa is C or S
XALHDELTSMEGIFIPKKRVIEMIQVTINSLQVQT

SEQ ID NO: 18263 - protein, 38 aa, Artificial Sequence
  GFR-binding peptide
  MOD_RES (34), (34): Xaa is C or S
KNHQLFVTAKKHQGQHPKIRIKRMQVPREETPVXELGE

SEQ ID NO: 18264 - protein, 41 aa, Artificial Sequence
  GFR-binding peptide
  MOD_RES (2), (39): Xaa is C or S
KXALHDELTVTAKKFIPKKRVIEIKRVQVPRLQVQTPRXQV

SEQ ID NO: 18265 - protein, 35 aa, Artificial Sequence
  GFR-binding peptide
  MOD_RES (2), (2): Xaa is C or S
EXQSHEELVQVEKHQGQHPKIRVKAMKVSRQGTPV

SEQ ID NO: 18266 - protein, 39 aa, Artificial Sequence
  GFR-binding peptide
  MOD_RES (2), (4): Xaa is C or S
  MOD_RES (17), (18), (19), (20), (21): Xaa is A or G
  MOD_RES (22), (23), (24), (25): Xaa is A or G or is absent
EXKXALHDELTVQVEKXXXXXXXXXVKAVKVSRLQVQTP

SEQ ID NO: 18267 - protein, 44 aa, Artificial Sequence
  GFR-binding peptide
  MOD_RES (2), (4), (41): Xaa is C or S
  MOD_RES (17), (18), (19), (20), (21): Xaa is A or G
  MOD_RES (22), (23), (24), (25): Xaa is A or G or is absent
EXKXALHDELTSMEGLXXXXXXXXXMIQVTINSLQVQTPRXQVN

SEQ ID NO: 18268 - protein, 34 aa, Artificial Sequence
  GFR-binding peptide
LHDELTVTAKKFIPKKRVIEIKRVQVPRLQVQTP

SEQ ID NO: 18269 - protein, 37 aa, Artificial Sequence
  GFR-binding peptide
  MOD_RES (33), (33): Xaa is C or S
  MOD_RES (11), (12), (13), (14), (15): Xaa is A or G
  MOD_RES (16), (17), (18), (19): Xaa is A or G or is absent
NHQLFVTAKKXXXXXXXXXIKRMQVPREETPVXELGE

SEQ ID NO: 18270 - protein, 39 aa, Artificial Sequence
  GFR-binding peptide
  MOD_RES (2), (4), (38): Xaa is C or S
  MOD_RES (16), (17), (18), (19), (20): Xaa is A or G
  MOD_RES (21), (22), (23), (24): Xaa is A or G or is absent
RXEXKNHQLFVQVEKXXXXXXXXXVKAMKVSREETPVXE

SEQ ID NO: 18271 - protein, 40 aa, Artificial Sequence
  GFR-binding peptide
  MOD_RES (34), (34): Xaa is C or S
KNHQLFVQVEKHQGQHPKIRVKAMKVSREETPVXELGEDN

SEQ ID NO: 18272 - protein, 37 aa, Artificial Sequence
  GFR-binding peptide
  MOD_RES (2), (4): Xaa is C or S
  MOD_RES (16), (17), (18), (19), (20): Xaa is A or G
  MOD_RES (21), (22), (23), (24): Xaa is A or G or is absent
RXEXKNHQLFSMEGIXXXXXXXXXMIQMTINSEETPV

SEQ ID NO: 18273 - protein, 35 aa, Artificial Sequence
  GFR-binding peptide
  MOD_RES (34), (34): Xaa is C or S
KNHQLFVTAKKHQGQHPKIRIKRMQVPREETPVXE

SEQ ID NO: 18274 - protein, 41 aa, Artificial Sequence
  GFR-binding peptide
  MOD_RES (2), (39): Xaa is C or S
  MOD_RES (15), (16), (17), (18), (19): Xaa is A or G
  MOD_RES (20), (21), (22), (23): Xaa is A or G or is absent
KXALHDELTSMEGLXXXXXXXXXMIQVTINSLQVQTPRXQV

SEQ ID NO: 18275 - protein, 38 aa, Artificial Sequence
  GFR-binding peptide
  MOD_RES (1), (35): Xaa is C or S
XKNHQLFVQVEKHQGQHPKIRVKAMKVSREETPVXELG

SEQ ID NO: 18276 - protein, 38 aa, Artificial Sequence
  GFR-binding peptide
  MOD_RES (35), (35): Xaa is C or S
  MOD_RES (11), (12), (13), (14), (15): Xaa is A or G
  MOD_RES (16), (17), (18), (19): Xaa is A or G or is absent
HEELRSMEGIXXXXXXXXXMIQVTINSHHVRSPQXKVS

SEQ ID NO: 18277 - protein, 38 aa, Artificial Sequence
  GFR-binding peptide
  MOD_RES (2), (4): Xaa is C or S
  MOD_RES (17), (18), (19), (20), (21): Xaa is A or G
  MOD_RES (22), (23), (24), (25): Xaa is A or G or is absent
AXAXELHEELRVQVEKXXXXXXXXXVKAVKVSRHHVRS

SEQ ID NO: 18278 - protein, 35 aa, Artificial Sequence
  GFR-binding peptide
  MOD_RES (35), (35): Xaa is C or S
HDELTVQVEKFIPKKRVIEVKAVKVSRLQVQTPRX

SEQ ID NO: 18279 - protein, 37 aa, Artificial Sequence
  GFR-binding peptide
  MOD_RES (2), (2): Xaa is C or S
  MOD_RES (15), (16), (17), (18), (19): Xaa is A or G
  MOD_RES (20), (21), (22), (23): Xaa is A or G or is absent
AXELHEELRSMEGIXXXXXXXXXMIQVTINSHHVRSP

SEQ ID NO: 18280 - protein, 39 aa, Artificial Sequence
  GFR-binding peptide
  MOD_RES (33), (33): Xaa is C or S
  MOD_RES (11), (12), (13), (14), (15): Xaa is A or G
  MOD_RES (16), (17), (18), (19): Xaa is A or G or is absent
SHEELVTAKKXXXXXXXXXIKRMQVPRQGTPVXELGEDN

SEQ ID NO: 18281 - protein, 36 aa, Artificial Sequence
  GFR-binding peptide
  MOD_RES (2), (36): Xaa is C or S
EXQSHEELVQVEKHQGQHPKIRVKAMKVSRQGTPVX

SEQ ID NO: 18282 - protein, 35 aa, Artificial Sequence
  GFR-binding peptide
  MOD_RES (34), (34): Xaa is C or S
QSHEELVTAKKHQGQHPKIRIKRMQVPRQGTPVXE

SEQ ID NO: 18283 - protein, 38 aa, Artificial Sequence
  GFR-binding peptide
  MOD_RES (34), (34): Xaa is C or S
  MOD_RES (12), (13), (14), (15), (16): Xaa is A or G
  MOD_RES (17), (18), (19), (20): Xaa is A or G or is absent
KNHQLFSMEGLXXXXXXXXXMIQMTINSEETPVXELGE

SEQ ID NO: 18284 - protein, 36 aa, Artificial Sequence
  GFR-binding peptide
  MOD_RES (2), (2): Xaa is C or S
AXELHEELRSMEGLLKPKKRVYEMIQVTINSHHVRS

SEQ ID NO: 18285 - protein, 41 aa, Artificial Sequence
  GFR-binding peptide
  MOD_RES (37), (37): Xaa is C or S
  MOD_RES (13), (14), (15), (16), (17): Xaa is A or G
  MOD_RES (18), (19), (20), (21): Xaa is A or G or is absent
ELHEELRSMEGLXXXXXXXXXMIQVTINSHHVRSPQXKVSS

SEQ ID NO: 18286 - protein, 39 aa, Artificial Sequence
  GFR-binding peptide
  MOD_RES (37), (37): Xaa is C or S
  MOD_RES (13), (14), (15), (16), (17): Xaa is A or G
  MOD_RES (18), (19), (20), (21): Xaa is A or G or is absent
ALHDELTSMEGLXXXXXXXXXMIQVTINSLQVQTPRXQV

SEQ ID NO: 18287 - protein, 41 aa, Artificial Sequence
  GFR-binding peptide
  MOD_RES (2), (4), (38): Xaa is C or S
RXEXQSHEELSMEGLHQGQHPKIRMIQMTINSQGTPVXELG

SEQ ID NO: 18288 - protein, 38 aa, Artificial Sequence
  GFR-binding peptide
  MOD_RES (36), (36): Xaa is C or S
  MOD_RES (12), (13), (14), (15), (16): Xaa is A or G
  MOD_RES (17), (18), (19), (20): Xaa is A or G or is absent
LHEELRSMEGLXXXXXXXXXMIQVTINSHHVRSPQXKV

SEQ ID NO: 18289 - protein, 38 aa, Artificial Sequence
  GFR-binding peptide
  MOD_RES (37), (37): Xaa is C or S
  MOD_RES (13), (14), (15), (16), (17): Xaa is A or G
  MOD_RES (18), (19), (20), (21): Xaa is A or G or is absent
ALHDELTSMEGIXXXXXXXXXMIQVTINSLQVQTPRXQ

SEQ ID NO: 18290 - protein, 35 aa, Artificial Sequence
  GFR-binding peptide
  MOD_RES (33), (33): Xaa is C or S
SHEELVTAKKHQGQHPKIRIKRMQVPRQGTPVXEL

SEQ ID NO: 18291 - protein, 41 aa, Artificial Sequence
  GFR-binding peptide
  MOD_RES (37), (37): Xaa is C or S
ALHDELTSMEGIFIPKKRVIEMIQVTINSLQVQTPRXQVNR

SEQ ID NO: 18292 - protein, 38 aa, Artificial Sequence
  GFR-binding peptide
  MOD_RES (1), (3): Xaa is C or S
XKXALHDELTVTAKKFIPKKRVIEIKRVQVPRLQVQTP

SEQ ID NO: 18293 - protein, 35 aa, Artificial Sequence
  GFR-binding peptide
  MOD_RES (34), (34): Xaa is C or S
  MOD_RES (12), (13), (14), (15), (16): Xaa is A or G
  MOD_RES (17), (18), (19), (20): Xaa is A or G or is absent
QSHEELSMEGLXXXXXXXXXMIQMTINSQGTPVXE

SEQ ID NO: 18294 - protein, 32 aa, Artificial Sequence
  GFR-binding peptide
  MOD_RES (11), (12), (13), (14), (15): Xaa is A or G
  MOD_RES (16), (17), (18), (19): Xaa is A or G or is absent
HEELRVTAKKXXXXXXXXXIKRVQVPRHHVRS

SEQ ID NO: 18295 - protein, 36 aa, Artificial Sequence
  GFR-binding peptide
  MOD_RES (36), (36): Xaa is C or S
LHDELTVQVEKFIPKKRVIEVKAVKVSRLQVQTPRX

SEQ ID NO: 18296 - protein, 36 aa, Artificial Sequence
  GFR-binding peptide
  MOD_RES (2), (2): Xaa is C or S
  MOD_RES (15), (16), (17), (18), (19): Xaa is A or G
  MOD_RES (20), (21), (22), (23): Xaa is A or G or is absent
AXELHEELRSMEGIXXXXXXXXXMIQVTINSHHVRS

SEQ ID NO: 18297 - protein, 44 aa, Artificial Sequence
  GFR-binding peptide
  MOD_RES (2), (4), (41): Xaa is C or S
  MOD_RES (17), (18), (19), (20), (21): Xaa is A or G
  MOD_RES (22), (23), (24), (25): Xaa is A or G or is absent
AXAXELHEELRVTAKKXXXXXXXXXIKRVQVPRHHVRSPQXKVS

SEQ ID NO: 18298 - protein, 44 aa, Artificial Sequence
  GFR-binding peptide
  MOD_RES (2), (4), (38): Xaa is C or S
  MOD_RES (16), (17), (18), (19), (20): Xaa is A or G
  MOD_RES (21), (22), (23), (24): Xaa is A or G or is absent
RXEXQSHEELSMEGLXXXXXXXXXMIQMTINSQGTPVXELGEDN

SEQ ID NO: 18299 - protein, 39 aa, Artificial Sequence
  GFR-binding peptide
  MOD_RES (2), (4), (38): Xaa is C or S
  MOD_RES (16), (17), (18), (19), (20): Xaa is A or G
  MOD_RES (21), (22), (23), (24): Xaa is A or G or is absent
RXEXQSHEELVTAKKXXXXXXXXXIKRMQVPRQGTPVXE

SEQ ID NO: 18300 - protein, 42 aa, Artificial Sequence
  GFR-binding peptide
  MOD_RES (1), (3), (40): Xaa is C or S
XAXELHEELRSMEGLLKPKKRVYEMIQVTINSHHVRSPQXKV

SEQ ID NO: 18301 - protein, 39 aa, Artificial Sequence
  GFR-binding peptide
  MOD_RES (36), (36): Xaa is C or S
  MOD_RES (12), (13), (14), (15), (16): Xaa is A or G
  MOD_RES (17), (18), (19), (20): Xaa is A or G or is absent
LHDELTVTAKKXXXXXXXXXIKRVQVPRLQVQTPRXQVN

SEQ ID NO: 18302 - protein, 34 aa, Artificial Sequence
  GFR-binding peptide
  MOD_RES (33), (33): Xaa is C or S
  MOD_RES (11), (12), (13), (14), (15): Xaa is A or G
  MOD_RES (16), (17), (18), (19): Xaa is A or G or is absent
NHQLFVQVEKXXXXXXXXXVKAMKVSREETPVXE

SEQ ID NO: 18303 - protein, 35 aa, Artificial Sequence
  GFR-binding peptide
  MOD_RES (12), (13), (14), (15), (16): Xaa is A or G
  MOD_RES (17), (18), (19), (20): Xaa is A or G or is absent
LHEELRVQVEKXXXXXXXXXVKAVKVSRHHVRSPQ

SEQ ID NO: 18304 - protein, 43 aa, Artificial Sequence
  GFR-binding peptide
  MOD_RES (2), (4), (41): Xaa is C or S
  MOD_RES (17), (18), (19), (20), (21): Xaa is A or G
  MOD_RES (22), (23), (24), (25): Xaa is A or G or is absent
AXAXELHEELRVTAKKXXXXXXXXXIKRVQVPRHHVRSPQXKV

SEQ ID NO: 18305 - protein, 40 aa, Artificial Sequence
  GFR-binding peptide
  MOD_RES (2), (36): Xaa is C or S
  MOD_RES (14), (15), (16), (17), (18): Xaa is A or G
  MOD_RES (19), (20), (21), (22): Xaa is A or G or is absent
EXKNHQLFSMEGIXXXXXXXXXMIQMTINSEETPVXELGE

SEQ ID NO: 18306 - protein, 36 aa, Artificial Sequence
  GFR-binding peptide
  MOD_RES (35), (35): Xaa is C or S
HDELTSMEGIFIPKKRVIEMIQVTINSLQVQTPRXQ

SEQ ID NO: 18307 - protein, 40 aa, Artificial Sequence
  GFR-binding peptide
  MOD_RES (2), (36): Xaa is C or S
  MOD_RES (14), (15), (16), (17), (18): Xaa is A or G
  MOD_RES (19), (20), (21), (22): Xaa is A or G or is absent
EXKNHQLFVTAKKXXXXXXXXXIKRMQVPREETPVXELGE

SEQ ID NO: 18308 - protein, 35 aa, Artificial Sequence
  GFR-binding peptide
  MOD_RES (2), (2): Xaa is C or S
  MOD_RES (14), (15), (16), (17), (18): Xaa is A or G
  MOD_RES (19), (20), (21), (22): Xaa is A or G or is absent
EXKNHQLFVQVEKXXXXXXXXXVKAMKVSREETPV

SEQ ID NO: 18309 - protein, 40 aa, Artificial Sequence
  GFR-binding peptide
  MOD_RES (2), (36): Xaa is C or S
  MOD_RES (14), (15), (16), (17), (18): Xaa is A or G
  MOD_RES (19), (20), (21), (22): Xaa is A or G or is absent
EXQSHEELVQVEKXXXXXXXXXVKAMKVSRQGTPVXELGE

SEQ ID NO: 18310 - protein, 39 aa, Artificial Sequence
  GFR-binding peptide
  MOD_RES (1), (3): Xaa is C or S
  MOD_RES (16), (17), (18), (19), (20): Xaa is A or G
  MOD_RES (21), (22), (23), (24): Xaa is A or G or is absent
XKXALHDELTVQVEKXXXXXXXXXVKAVKVSRLQVQTPR

SEQ ID NO: 18311 - protein, 41 aa, Artificial Sequence
  GFR-binding peptide
  MOD_RES (37), (37): Xaa is C or S
ELHEELRVQVEKLKPKKRVYEVKAVKVSRHHVRSPQXKVSS

SEQ ID NO: 18312 - protein, 36 aa, Artificial Sequence
  GFR-binding peptide
  MOD_RES (13), (14), (15), (16), (17): Xaa is A or G
  MOD_RES (18), (19), (20), (21): Xaa is A or G or is absent
ELHEELRVQVEKXXXXXXXXXVKAVKVSRHHVRSPQ

SEQ ID NO: 18313 - protein, 36 aa, Artificial Sequence
  GFR-binding peptide
  MOD_RES (1), (35): Xaa is C or S
  MOD_RES (13), (14), (15), (16), (17): Xaa is A or G
  MOD_RES (18), (19), (20), (21): Xaa is A or G or is absent
XKNHQLFVQVEKXXXXXXXXXVKAMKVSREETPVXE

SEQ ID NO: 18314 - protein, 39 aa, Artificial Sequence
  GFR-binding peptide
  MOD_RES (34), (34): Xaa is C or S
QSHEELVQVEKHQGQHPKIRVKAMKVSRQGTPVXELGED

SEQ ID NO: 18315 - protein, 38 aa, Artificial Sequence
  GFR-binding peptide
  MOD_RES (2), (4), (38): Xaa is C or S
RXEXKNHQLFSMEGLHQGQHPKIRMIQMTINSEETPVX

SEQ ID NO: 18316 - protein, 34 aa, Artificial Sequence
  GFR-binding peptide
  MOD_RES (34), (34): Xaa is C or S
  MOD_RES (12), (13), (14), (15), (16): Xaa is A or G
  MOD_RES (17), (18), (19), (20): Xaa is A or G or is absent
KNHQLFVTAKKXXXXXXXXXIKRMQVPREETPVX

SEQ ID NO: 18317 - protein, 35 aa, Artificial Sequence
  GFR-binding peptide
  MOD_RES (12), (13), (14), (15), (16): Xaa is A or G
  MOD_RES (17), (18), (19), (20): Xaa is A or G or is absent
LHDELTVQVEKXXXXXXXXXVKAVKVSRLQVQTPR

SEQ ID NO: 18318 - protein, 40 aa, Artificial Sequence
  GFR-binding peptide
  MOD_RES (2), (39): Xaa is C or S
  MOD_RES (15), (16), (17), (18), (19): Xaa is A or G
  MOD_RES (20), (21), (22), (23): Xaa is A or G or is absent
AXELHEELRSMEGLXXXXXXXXXMIQVTINSHHVRSPQXK

SEQ ID NO: 18319 - protein, 44 aa, Artificial Sequence
  GFR-binding peptide
  MOD_RES (2), (4), (38): Xaa is C or S
RXEXKNHQLFVQVEKHQGQHPKIRVKAMKVSREETPVXELGEDN

SEQ ID NO: 18320 - protein, 36 aa, Artificial Sequence
  GFR-binding peptide
  MOD_RES (36), (36): Xaa is C or S
LHEELRVTAKKLKPKKRVYEIKRVQVPRHHVRSPQX

SEQ ID NO: 18321 - protein, 39 aa, Artificial Sequence
  GFR-binding peptide
  MOD_RES (1), (3): Xaa is C or S
  MOD_RES (16), (17), (18), (19), (20): Xaa is A or G
  MOD_RES (21), (22), (23), (24): Xaa is A or G or is absent
XKXALHDELTVTAKKXXXXXXXXXIKRVQVPRLQVQTPR

SEQ ID NO: 18322 - protein, 42 aa, Artificial Sequence
  GFR-binding peptide
  MOD_RES (2), (4), (38): Xaa is C or S
RXEXQSHEELSMEGLHQGQHPKIRMIQMTINSQGTPVXELGE

SEQ ID NO: 18323 - protein, 39 aa, Artificial Sequence
  GFR-binding peptide
  MOD_RES (2), (36): Xaa is C or S
EXKNHQLFSMEGLHQGQHPKIRMIQMTINSEETPVXELG

SEQ ID NO: 18324 - protein, 43 aa, Artificial Sequence
  GFR-binding peptide
  MOD_RES (2), (4), (41): Xaa is C or S
EXKXALHDELTSMEGIFIPKKRVIEMIQVTINSLQVQTPRXQV

SEQ ID NO: 18325 - protein, 36 aa, Artificial Sequence
  GFR-binding peptide
  MOD_RES (1), (35): Xaa is C or S
XQSHEELSMEGIHQGQHPKIRMIQMTINSQGTPVXE

SEQ ID NO: 18326 - protein, 42 aa, Artificial Sequence
  GFR-binding peptide
  MOD_RES (2), (4), (38): Xaa is C or S
RXEXQSHEELSMEGIHQGQHPKIRMIQMTINSQGTPVXELGE

SEQ ID NO: 18327 - protein, 41 aa, Artificial Sequence
  GFR-binding peptide
  MOD_RES (1), (38): Xaa is C or S
  MOD_RES (14), (15), (16), (17), (18): Xaa is A or G
  MOD_RES (19), (20), (21), (22): Xaa is A or G or is absent
XELHEELRSMEGIXXXXXXXXXMIQVTINSHHVRSPQXKVS

SEQ ID NO: 18328 - protein, 43 aa, Artificial Sequence
  GFR-binding peptide
  MOD_RES (1), (3), (40): Xaa is C or S
  MOD_RES (16), (17), (18), (19), (20): Xaa is A or G
  MOD_RES (21), (22), (23), (24): Xaa is A or G or is absent
XKXALHDELTVTAKKXXXXXXXXXIKRVQVPRLQVQTPRXQVN

SEQ ID NO: 18329 - protein, 34 aa, Artificial Sequence
  GFR-binding peptide
  MOD_RES (33), (33): Xaa is C or S
  MOD_RES (11), (12), (13), (14), (15): Xaa is A or G
  MOD_RES (16), (17), (18), (19): Xaa is A or G or is absent
SHEELSMEGLXXXXXXXXXMIQMTINSQGTPVXE

SEQ ID NO: 18330 - protein, 40 aa, Artificial Sequence
  GFR-binding peptide
  MOD_RES (2), (36): Xaa is C or S
  MOD_RES (14), (15), (16), (17), (18): Xaa is A or G
  MOD_RES (19), (20), (21), (22): Xaa is A or G or is absent
EXKNHQLFSMEGLXXXXXXXXXMIQMTINSEETPVXELGE

SEQ ID NO: 18331 - protein, 44 aa, Artificial Sequence
  GFR-binding peptide
  MOD_RES (2), (4), (38): Xaa is C or S
RXEXKNHQLFVTAKKHQGQHPKIRIKRMQVPREETPVXELGEDN

SEQ ID NO: 18332 - protein, 39 aa, Artificial Sequence
  GFR-binding peptide
  MOD_RES (2), (39): Xaa is C or S
  MOD_RES (15), (16), (17), (18), (19): Xaa is A or G
  MOD_RES (20), (21), (22), (23): Xaa is A or G or is absent
KXALHDELTVTAKKXXXXXXXXXIKRVQVPRLQVQTPRX

SEQ ID NO: 18333 - protein, 37 aa, Artificial Sequence
  GFR-binding peptide
  MOD_RES (2), (2): Xaa is C or S
KXALHDELTSMEGLFIPKKRVIEMIQVTINSLQVQTP

SEQ ID NO: 18334 - protein, 36 aa, Artificial Sequence
  GFR-binding peptide
  MOD_RES (1), (1): Xaa is C or S
  MOD_RES (14), (15), (16), (17), (18): Xaa is A or G
  MOD_RES (19), (20), (21), (22): Xaa is A or G or is absent
XELHEELRVQVEKXXXXXXXXXVKAVKVSRHHVRSP

SEQ ID NO: 18335 - protein, 38 aa, Artificial Sequence
  GFR-binding peptide
  MOD_RES (2), (36): Xaa is C or S
  MOD_RES (14), (15), (16), (17), (18): Xaa is A or G
  MOD_RES (19), (20), (21), (22): Xaa is A or G or is absent
EXQSHEELVQVEKXXXXXXXXXVKAMKVSRQGTPVXEL

SEQ ID NO: 18336 - protein, 43 aa, Artificial Sequence
  GFR-binding peptide
  MOD_RES (1), (3), (40): Xaa is C or S
  MOD_RES (16), (17), (18), (19), (20): Xaa is A or G
  MOD_RES (21), (22), (23), (24): Xaa is A or G or is absent
XKXALHDELTVQVEKXXXXXXXXXVKAVKVSRLQVQTPRXQVN

SEQ ID NO: 18337 - protein, 38 aa, Artificial Sequence
  GFR-binding peptide
  MOD_RES (1), (35): Xaa is C or S
  MOD_RES (13), (14), (15), (16), (17): Xaa is A or G
  MOD_RES (18), (19), (20), (21): Xaa is A or G or is absent
XKNHQLFVQVEKXXXXXXXXXVKAMKVSREETPVXELG

SEQ ID NO: 18338 - protein, 38 aa, Artificial Sequence
  GFR-binding peptide
  MOD_RES (2), (36): Xaa is C or S
  MOD_RES (14), (15), (16), (17), (18): Xaa is A or G
  MOD_RES (19), (20), (21), (22): Xaa is A or G or is absent
EXKNHQLFSMEGIXXXXXXXXXMIQMTINSEETPVXEL

SEQ ID NO: 18339 - protein, 34 aa, Artificial Sequence
  GFR-binding peptide
  MOD_RES (33), (33): Xaa is C or S
SHEELVQVEKHQGQHPKIRVKAMKVSRQGTPVXE

SEQ ID NO: 18340 - protein, 39 aa, Artificial Sequence
  GFR-binding peptide
  MOD_RES (2), (39): Xaa is C or S
KXALHDELTSMEGLFIPKKRVIEMIQVTINSLQVQTPRX

SEQ ID NO: 18341 - protein, 38 aa, Artificial Sequence
  GFR-binding peptide
  MOD_RES (35), (35): Xaa is C or S
  MOD_RES (11), (12), (13), (14), (15): Xaa is A or G
  MOD_RES (16), (17), (18), (19): Xaa is A or G or is absent
HDELTSMEGLXXXXXXXXXMIQVTINSLQVQTPRXQVN

SEQ ID NO: 18342 - protein, 38 aa, Artificial Sequence
  GFR-binding peptide
  MOD_RES (1), (3): Xaa is C or S
XAXELHEELRVQVEKLKPKKRVYEVKAVKVSRHHVRSP

SEQ ID NO: 18343 - protein, 36 aa, Artificial Sequence
  GFR-binding peptide
  MOD_RES (35), (35): Xaa is C or S
  MOD_RES (11), (12), (13), (14), (15): Xaa is A or G
  MOD_RES (16), (17), (18), (19): Xaa is A or G or is absent
HDELTVTAKKXXXXXXXXXIKRVQVPRLQVQTPRXQ

SEQ ID NO: 18344 - protein, 34 aa, Artificial Sequence
  GFR-binding peptide
  MOD_RES (13), (14), (15), (16), (17): Xaa is A or G
  MOD_RES (18), (19), (20), (21): Xaa is A or G or is absent
ALHDELTSMEGIXXXXXXXXXMIQVTINSLQVQT

SEQ ID NO: 18345 - protein, 42 aa, Artificial Sequence
  GFR-binding peptide
  MOD_RES (1), (3), (37): Xaa is C or S
  MOD_RES (15), (16), (17), (18), (19): Xaa is A or G
  MOD_RES (20), (21), (22), (23): Xaa is A or G or is absent
XEXKNHQLFVQVEKXXXXXXXXXVKAMKVSREETPVXELGED

SEQ ID NO: 18346 - protein, 38 aa, Artificial Sequence
  GFR-binding peptide
  MOD_RES (34), (34): Xaa is C or S
QSHEELVQVEKHQGQHPKIRVKAMKVSRQGTPVXELGE

SEQ ID NO: 18347 - protein, 35 aa, Artificial Sequence
  GFR-binding peptide
LHDELTVTAKKFIPKKRVIEIKRVQVPRLQVQTPR

SEQ ID NO: 18348 - protein, 37 aa, Artificial Sequence
  GFR-binding peptide
  MOD_RES (1), (1): Xaa is C or S
XELHEELRVQVEKLKPKKRVYEVKAVKVSRHHVRSPQ

SEQ ID NO: 18349 - protein, 40 aa, Artificial Sequence
  GFR-binding peptide
  MOD_RES (2), (39): Xaa is C or S
  MOD_RES (15), (16), (17), (18), (19): Xaa is A or G
  MOD_RES (20), (21), (22), (23): Xaa is A or G or is absent
KXALHDELTVTAKKXXXXXXXXXIKRVQVPRLQVQTPRXQ

SEQ ID NO: 18350 - protein, 42 aa, Artificial Sequence
  GFR-binding peptide
  MOD_RES (1), (3), (40): Xaa is C or S
  MOD_RES (16), (17), (18), (19), (20): Xaa is A or G
  MOD_RES (21), (22), (23), (24): Xaa is A or G or is absent
XAXELHEELRVTAKKXXXXXXXXXIKRVQVPRHHVRSPQXKV

SEQ ID NO: 18351 - protein, 44 aa, Artificial Sequence
  GFR-binding peptide
  MOD_RES (1), (3), (40): Xaa is C or S
  MOD_RES (16), (17), (18), (19), (20): Xaa is A or G
  MOD_RES (21), (22), (23), (24): Xaa is A or G or is absent
XKXALHDELTVTAKKXXXXXXXXXIKRVQVPRLQVQTPRXQVNR

SEQ ID NO: 18352 - protein, 41 aa, Artificial Sequence
  GFR-binding peptide
  MOD_RES (1), (38): Xaa is C or S
  MOD_RES (14), (15), (16), (17), (18): Xaa is A or G
  MOD_RES (19), (20), (21), (22): Xaa is A or G or is absent
XELHEELRSMEGLXXXXXXXXXMIQVTINSHHVRSPQXKVS

SEQ ID NO: 18353 - protein, 37 aa, Artificial Sequence
  GFR-binding peptide
  MOD_RES (1), (3): Xaa is C or S
  MOD_RES (16), (17), (18), (19), (20): Xaa is A or G
  MOD_RES (21), (22), (23), (24): Xaa is A or G or is absent
XAXELHEELRSMEGIXXXXXXXXXMIQVTINSHHVRS

SEQ ID NO: 18354 - protein, 38 aa, Artificial Sequence
  GFR-binding peptide
  MOD_RES (33), (33): Xaa is C or S
  MOD_RES (11), (12), (13), (14), (15): Xaa is A or G
  MOD_RES (16), (17), (18), (19): Xaa is A or G or is absent
SHEELVTAKKXXXXXXXXXIKRMQVPRQGTPVXELGED

SEQ ID NO: 18355 - protein, 43 aa, Artificial Sequence
  GFR-binding peptide
  MOD_RES (1), (3), (40): Xaa is C or S
XKXALHDELTSMEGLFIPKKRVIEMIQVTINSLQVQTPRXQVN

SEQ ID NO: 18356 - protein, 39 aa, Artificial Sequence
  GFR-binding peptide
  MOD_RES (2), (4), (38): Xaa is C or S
  MOD_RES (16), (17), (18), (19), (20): Xaa is A or G
  MOD_RES (21), (22), (23), (24): Xaa is A or G or is absent
RXEXQSHEELVQVEKXXXXXXXXXVKAMKVSRQGTPVXE

SEQ ID NO: 18357 - protein, 35 aa, Artificial Sequence
  GFR-binding peptide
  MOD_RES (33), (33): Xaa is C or S
  MOD_RES (11), (12), (13), (14), (15): Xaa is A or G
  MOD_RES (16), (17), (18), (19): Xaa is A or G or is absent
SHEELVQVEKXXXXXXXXXVKAMKVSRQGTPVXEL

SEQ ID NO: 18358 - protein, 37 aa, Artificial Sequence
  GFR-binding peptide
  MOD_RES (1), (3), (37): Xaa is C or S
  MOD_RES (15), (16), (17), (18), (19): Xaa is A or G
  MOD_RES (20), (21), (22), (23): Xaa is A or G or is absent
XEXKNHQLFSMEGIXXXXXXXXXMIQMTINSEETPVX

SEQ ID NO: 18359 - protein, 34 aa, Artificial Sequence
  GFR-binding peptide
  MOD_RES (34), (34): Xaa is C or S
KNHQLFVQVEKHQGQHPKIRVKAMKVSREETPVX

SEQ ID NO: 18360 - protein, 39 aa, Artificial Sequence
  GFR-binding peptide
  MOD_RES (37), (37): Xaa is C or S
ELHEELRVTAKKLKPKKRVYEIKRVQVPRHHVRSPQXKV

SEQ ID NO: 18361 - protein, 40 aa, Artificial Sequence
  GFR-binding peptide
  MOD_RES (1), (38): Xaa is C or S
XELHEELRVQVEKLKPKKRVYEVKAVKVSRHHVRSPQXKV

SEQ ID NO: 18362 - protein, 37 aa, Artificial Sequence
  GFR-binding peptide
  MOD_RES (35), (35): Xaa is C or S
  MOD_RES (11), (12), (13), (14), (15): Xaa is A or G
  MOD_RES (16), (17), (18), (19): Xaa is A or G or is absent
HDELTSMEGLXXXXXXXXXMIQVTINSLQVQTPRXQV

SEQ ID NO: 18363 - protein, 35 aa, Artificial Sequence
  GFR-binding peptide
  MOD_RES (34), (34): Xaa is C or S
KNHQLFSMEGLHQGQHPKIRMIQMTINSEETPVXE

SEQ ID NO: 18364 - protein, 38 aa, Artificial Sequence
  GFR-binding peptide
  MOD_RES (35), (35): Xaa is C or S
  MOD_RES (11), (12), (13), (14), (15): Xaa is A or G
  MOD_RES (16), (17), (18), (19): Xaa is A or G or is absent
HDELTSMEGIXXXXXXXXXMIQVTINSLQVQTPRXQVN

SEQ ID NO: 18365 - protein, 42 aa, Artificial Sequence
  GFR-binding peptide
  MOD_RES (1), (3), (40): Xaa is C or S
  MOD_RES (16), (17), (18), (19), (20): Xaa is A or G
  MOD_RES (21), (22), (23), (24): Xaa is A or G or is absent
XAXELHEELRVQVEKXXXXXXXXXVKAVKVSRHHVRSPQXKV

SEQ ID NO: 18366 - protein, 37 aa, Artificial Sequence
  GFR-binding peptide
  MOD_RES (1), (1): Xaa is C or S
XALHDELTVQVEKFIPKKRVIEVKAVKVSRLQVQTPR

SEQ ID NO: 18367 - protein, 36 aa, Artificial Sequence
  GFR-binding peptide
  MOD_RES (2), (36): Xaa is C or S
EXKNHQLFVTAKKHQGQHPKIRIKRMQVPREETPVX

SEQ ID NO: 18368 - protein, 39 aa, Artificial Sequence
  GFR-binding peptide
  MOD_RES (2), (39): Xaa is C or S
  MOD_RES (15), (16), (17), (18), (19): Xaa is A or G
  MOD_RES (20), (21), (22), (23): Xaa is A or G or is absent
AXELHEELRVQVEKXXXXXXXXXVKAVKVSRHHVRSPQX

SEQ ID NO: 18369 - protein, 35 aa, Artificial Sequence
  GFR-binding peptide
  MOD_RES (34), (34): Xaa is C or S
  MOD_RES (12), (13), (14), (15), (16): Xaa is A or G
  MOD_RES (17), (18), (19), (20): Xaa is A or G or is absent
KNHQLFVQVEKXXXXXXXXXVKAMKVSREETPVXE

SEQ ID NO: 18370 - protein, 39 aa, Artificial Sequence
  GFR-binding peptide
  MOD_RES (36), (36): Xaa is C or S
  MOD_RES (12), (13), (14), (15), (16): Xaa is A or G
  MOD_RES (17), (18), (19), (20): Xaa is A or G or is absent
LHEELRSMEGIXXXXXXXXXMIQVTINSHHVRSPQXKVS

SEQ ID NO: 18371 - protein, 40 aa, Artificial Sequence
  GFR-binding peptide
  MOD_RES (2), (4): Xaa is C or S
AXAXELHEELRSMEGLLKPKKRVYEMIQVTINSHHVRSPQ

SEQ ID NO: 18372 - protein, 40 aa, Artificial Sequence
  GFR-binding peptide
  MOD_RES (1), (38): Xaa is C or S
XELHEELRVTAKKLKPKKRVYEIKRVQVPRHHVRSPQXKV

SEQ ID NO: 18373 - protein, 36 aa, Artificial Sequence
  GFR-binding peptide
  MOD_RES (35), (35): Xaa is C or S
HEELRVTAKKLKPKKRVYEIKRVQVPRHHVRSPQXK

SEQ ID NO: 18374 - protein, 35 aa, Artificial Sequence
  GFR-binding peptide
LHEELRSMEGILKPKKRVYEMIQVTINSHHVRSPQ

SEQ ID NO: 18375 - protein, 39 aa, Artificial Sequence
  GFR-binding peptide
  MOD_RES (34), (34): Xaa is C or S
QSHEELSMEGIHQGQHPKIRMIQMTINSQGTPVXELGED

SEQ ID NO: 18376 - protein, 38 aa, Artificial Sequence
  GFR-binding peptide
  MOD_RES (2), (4): Xaa is C or S
  MOD_RES (17), (18), (19), (20), (21): Xaa is A or G
  MOD_RES (22), (23), (24), (25): Xaa is A or G or is absent
AXAXELHEELRSMEGLXXXXXXXXXMIQVTINSHHVRS

SEQ ID NO: 18377 - protein, 43 aa, Artificial Sequence
  GFR-binding peptide
  MOD_RES (1), (3), (37): Xaa is C or S
XEXQSHEELVTAKKHQGQHPKIRIKRMQVPRQGTPVXELGEDN

SEQ ID NO: 18378 - protein, 40 aa, Artificial Sequence
  GFR-binding peptide
  MOD_RES (1), (3), (40): Xaa is C or S
XAXELHEELRSMEGLLKPKKRVYEMIQVTINSHHVRSPQX

SEQ ID NO: 18379 - protein, 40 aa, Artificial Sequence
  GFR-binding peptide
  MOD_RES (1), (3), (40): Xaa is C or S
XAXELHEELRSMEGILKPKKRVYEMIQVTINSHHVRSPQX

SEQ ID NO: 18380 - protein, 44 aa, Artificial Sequence
  GFR-binding peptide
  MOD_RES (2), (4), (38): Xaa is C or S
  MOD_RES (16), (17), (18), (19), (20): Xaa is A or G
  MOD_RES (21), (22), (23), (24): Xaa is A or G or is absent
RXEXKNHQLFVTAKKXXXXXXXXXIKRMQVPREETPVXELGEDN

SEQ ID NO: 18381 - protein, 37 aa, Artificial Sequence
  GFR-binding peptide
  MOD_RES (1), (3), (37): Xaa is C or S
XEXKNHQLFSMEGIHQGQHPKIRMIQMTINSEETPVX

SEQ ID NO: 18382 - protein, 37 aa, Artificial Sequence
  GFR-binding peptide
  MOD_RES (37), (37): Xaa is C or S
ALHDELTVTAKKFIPKKRVIEIKRVQVPRLQVQTPRX

SEQ ID NO: 18383 - protein, 33 aa, Artificial Sequence
  GFR-binding peptide
HDELTVTAKKFIPKKRVIEIKRVQVPRLQVQTP

SEQ ID NO: 18384 - protein, 33 aa, Artificial Sequence
  GFR-binding peptide
HDELTSMEGIFIPKKRVIEMIQVTINSLQVQTP

SEQ ID NO: 18385 - protein, 36 aa, Artificial Sequence
  GFR-binding peptide
  MOD_RES (36), (36): Xaa is C or S
LHDELTSMEGIFIPKKRVIEMIQVTINSLQVQTPRX

SEQ ID NO: 18386 - protein, 37 aa, Artificial Sequence
  GFR-binding peptide
  MOD_RES (2), (36): Xaa is C or S
EXKNHQLFSMEGIHQGQHPKIRMIQMTINSEETPVXE

SEQ ID NO: 18387 - protein, 34 aa, Artificial Sequence
  GFR-binding peptide
  MOD_RES (13), (14), (15), (16), (17): Xaa is A or G
  MOD_RES (18), (19), (20), (21): Xaa is A or G or is absent
ELHEELRVQVEKXXXXXXXXXVKAVKVSRHHVRS

SEQ ID NO: 18388 - protein, 33 aa, Artificial Sequence
  GFR-binding peptide
LHDELTVQVEKFIPKKRVIEVKAVKVSRLQVQT

SEQ ID NO: 18389 - protein, 34 aa, Artificial Sequence
  GFR-binding peptide
LHEELRSMEGLLKPKKRVYEMIQVTINSHHVRSP

SEQ ID NO: 18390 - protein, 44 aa, Artificial Sequence
  GFR-binding peptide
  MOD_RES (2), (4), (41): Xaa is C or S
AXAXELHEELRVQVEKLKPKKRVYEVKAVKVSRHHVRSPQXKVS

SEQ ID NO: 18391 - protein, 40 aa, Artificial Sequence
  GFR-binding peptide
  MOD_RES (37), (37): Xaa is C or S
ELHEELRSMEGILKPKKRVYEMIQVTINSHHVRSPQXKVS

SEQ ID NO: 18392 - protein, 35 aa, Artificial Sequence
  GFR-binding peptide
  MOD_RES (13), (14), (15), (16), (17): Xaa is A or G
  MOD_RES (18), (19), (20), (21): Xaa is A or G or is absent
ALHDELTSMEGIXXXXXXXXXMIQVTINSLQVQTP

SEQ ID NO: 18393 - protein, 34 aa, Artificial Sequence
  GFR-binding peptide
  MOD_RES (1), (1): Xaa is C or S
XQSHEELSMEGLHQGQHPKIRMIQMTINSQGTPV

SEQ ID NO: 18394 - protein, 43 aa, Artificial Sequence
  GFR-binding peptide
  MOD_RES (1), (3), (40): Xaa is C or S
  MOD_RES (16), (17), (18), (19), (20): Xaa is A or G
  MOD_RES (21), (22), (23), (24): Xaa is A or G or is absent
XAXELHEELRVQVEKXXXXXXXXXVKAVKVSRHHVRSPQXKVS

SEQ ID NO: 18395 - protein, 41 aa, Artificial Sequence
  GFR-binding peptide
  MOD_RES (1), (3), (37): Xaa is C or S
  MOD_RES (15), (16), (17), (18), (19): Xaa is A or G
  MOD_RES (20), (21), (22), (23): Xaa is A or G or is absent
XEXKNHQLFVQVEKXXXXXXXXXVKAMKVSREETPVXELGE

SEQ ID NO: 18396 - protein, 34 aa, Artificial Sequence
  GFR-binding peptide
  MOD_RES (1), (1): Xaa is C or S
XQSHEELSMEGIHQGQHPKIRMIQMTINSQGTPV

SEQ ID NO: 18397 - protein, 36 aa, Artificial Sequence
  GFR-binding peptide
  MOD_RES (35), (35): Xaa is C or S
HEELRSMEGILKPKKRVYEMIQVTINSHHVRSPQXK

SEQ ID NO: 18398 - protein, 37 aa, Artificial Sequence
  GFR-binding peptide
  MOD_RES (2), (4): Xaa is C or S
RXEXKNHQLFSMEGIHQGQHPKIRMIQMTINSEETPV

SEQ ID NO: 18399 - protein, 40 aa, Artificial Sequence
  GFR-binding peptide
  MOD_RES (34), (34): Xaa is C or S
KNHQLFVTAKKHQGQHPKIRIKRMQVPREETPVXELGEDN

SEQ ID NO: 18400 - protein, 35 aa, Artificial Sequence
  GFR-binding peptide
ELHEELRVQVEKLKPKKRVYEVKAVKVSRHHVRSP

SEQ ID NO: 18401 - protein, 39 aa, Artificial Sequence
  GFR-binding peptide
  MOD_RES (35), (35): Xaa is C or S
HEELRVQVEKLKPKKRVYEVKAVKVSRHHVRSPQXKVSS

SEQ ID NO: 18402 - protein, 42 aa, Artificial Sequence
  GFR-binding peptide
  MOD_RES (1), (3), (40): Xaa is C or S
XKXALHDELTVTAKKFIPKKRVIEIKRVQVPRLQVQTPRXQV

SEQ ID NO: 18403 - protein, 37 aa, Artificial Sequence
  GFR-binding peptide
  MOD_RES (2), (2): Xaa is C or S
  MOD_RES (15), (16), (17), (18), (19): Xaa is A or G
  MOD_RES (20), (21), (22), (23): Xaa is A or G or is absent
AXELHEELRVQVEKXXXXXXXXXVKAVKVSRHHVRSP

SEQ ID NO: 18404 - protein, 36 aa, Artificial Sequence
  GFR-binding peptide
ALHDELTVQVEKFIPKKRVIEVKAVKVSRLQVQTPR

SEQ ID NO: 18405 - protein, 37 aa, Artificial Sequence
  GFR-binding peptide
  MOD_RES (1), (1): Xaa is C or S
  MOD_RES (14), (15), (16), (17), (18): Xaa is A or G
  MOD_RES (19), (20), (21), (22): Xaa is A or G or is absent
XALHDELTSMEGIXXXXXXXXXMIQVTINSLQVQTPR

SEQ ID NO: 18406 - protein, 34 aa, Artificial Sequence
  GFR-binding peptide
  MOD_RES (1), (1): Xaa is C or S
  MOD_RES (13), (14), (15), (16), (17): Xaa is A or G
  MOD_RES (18), (19), (20), (21): Xaa is A or G or is absent
XQSHEELSMEGLXXXXXXXXXMIQMTINSQGTPV

SEQ ID NO: 18407 - protein, 34 aa, Artificial Sequence
  GFR-binding peptide
  MOD_RES (12), (13), (14), (15), (16): Xaa is A or G
  MOD_RES (17), (18), (19), (20): Xaa is A or G or is absent
LHDELTSMEGIXXXXXXXXXMIQVTINSLQVQTP

SEQ ID NO: 18408 - protein, 35 aa, Artificial Sequence
  GFR-binding peptide
  MOD_RES (33), (33): Xaa is C or S
  MOD_RES (11), (12), (13), (14), (15): Xaa is A or G
  MOD_RES (16), (17), (18), (19): Xaa is A or G or is absent
NHQLFVTAKKXXXXXXXXXIKRMQVPREETPVXEL

SEQ ID NO: 18409 - protein, 40 aa, Artificial Sequence
  GFR-binding peptide
  MOD_RES (2), (39): Xaa is C or S
AXELHEELRSMEGLLKPKKRVYEMIQVTINSHHVRSPQXK

SEQ ID NO: 18410 - protein, 34 aa, Artificial Sequence
  GFR-binding peptide
  MOD_RES (13), (14), (15), (16), (17): Xaa is A or G
  MOD_RES (18), (19), (20), (21): Xaa is A or G or is absent
ALHDELTVTAKKXXXXXXXXXIKRVQVPRLQVQT

SEQ ID NO: 18411 - protein, 38 aa, Artificial Sequence
  GFR-binding peptide
  MOD_RES (36), (36): Xaa is C or S
  MOD_RES (12), (13), (14), (15), (16): Xaa is A or G
  MOD_RES (17), (18), (19), (20): Xaa is A or G or is absent
LHDELTVTAKKXXXXXXXXXIKRVQVPRLQVQTPRXQV

SEQ ID NO: 18412 - protein, 38 aa, Artificial Sequence
  GFR-binding peptide
  MOD_RES (36), (36): Xaa is C or S
LHEELRVTAKKLKPKKRVYEIKRVQVPRHHVRSPQXKV

SEQ ID NO: 18413 - protein, 40 aa, Artificial Sequence
  GFR-binding peptide
  MOD_RES (2), (4): Xaa is C or S
  MOD_RES (17), (18), (19), (20), (21): Xaa is A or G
  MOD_RES (22), (23), (24), (25): Xaa is A or G or is absent
EXKXALHDELTVTAKKXXXXXXXXXIKRVQVPRLQVQTPR

SEQ ID NO: 18414 - protein, 44 aa, Artificial Sequence
  GFR-binding peptide
  MOD_RES (1), (3), (40): Xaa is C or S
  MOD_RES (16), (17), (18), (19), (20): Xaa is A or G
  MOD_RES (21), (22), (23), (24): Xaa is A or G or is absent
XKXALHDELTVQVEKXXXXXXXXXVKAVKVSRLQVQTPRXQVNR

SEQ ID NO: 18415 - protein, 38 aa, Artificial Sequence
  GFR-binding peptide
  MOD_RES (2), (4), (38): Xaa is C or S
RXEXQSHEELSMEGIHQGQHPKIRMIQMTINSQGTPVX

SEQ ID NO: 18416 - protein, 43 aa, Artificial Sequence
  GFR-binding peptide
  MOD_RES (1), (3), (40): Xaa is C or S
XAXELHEELRSMEGILKPKKRVYEMIQVTINSHHVRSPQXKVS

SEQ ID NO: 18417 - protein, 40 aa, Artificial Sequence
  GFR-binding peptide
  MOD_RES (2), (39): Xaa is C or S
AXELHEELRVTAKKLKPKKRVYEIKRVQVPRHHVRSPQXK

SEQ ID NO: 18418 - protein, 43 aa, Artificial Sequence
  GFR-binding peptide
  MOD_RES (1), (3), (40): Xaa is C or S
XAXELHEELRSMEGLLKPKKRVYEMIQVTINSHHVRSPQXKVS

SEQ ID NO: 18419 - protein, 34 aa, Artificial Sequence
  GFR-binding peptide
  MOD_RES (1), (1): Xaa is C or S
  MOD_RES (13), (14), (15), (16), (17): Xaa is A or G
  MOD_RES (18), (19), (20), (21): Xaa is A or G or is absent
XQSHEELSMEGIXXXXXXXXXMIQMTINSQGTPV

SEQ ID NO: 18420 - protein, 39 aa, Artificial Sequence
  GFR-binding peptide
  MOD_RES (2), (36): Xaa is C or S
EXKNHQLFSMEGIHQGQHPKIRMIQMTINSEETPVXELG

SEQ ID NO: 18421 - protein, 37 aa, Artificial Sequence
  GFR-binding peptide
  MOD_RES (1), (3), (37): Xaa is C or S
  MOD_RES (15), (16), (17), (18), (19): Xaa is A or G
  MOD_RES (20), (21), (22), (23): Xaa is A or G or is absent
XEXQSHEELVTAKKXXXXXXXXXIKRMQVPRQGTPVX

SEQ ID NO: 18422 - protein, 43 aa, Artificial Sequence
  GFR-binding peptide
  MOD_RES (2), (4), (41): Xaa is C or S
EXKXALHDELTVQVEKFIPKKRVIEVKAVKVSRLQVQTPRXQV

SEQ ID NO: 18423 - protein, 38 aa, Artificial Sequence
  GFR-binding peptide
  MOD_RES (33), (33): Xaa is C or S
  MOD_RES (11), (12), (13), (14), (15): Xaa is A or G
  MOD_RES (16), (17), (18), (19): Xaa is A or G or is absent
NHQLFVTAKKXXXXXXXXXIKRMQVPREETPVXELGED

SEQ ID NO: 18424 - protein, 40 aa, Artificial Sequence
  GFR-binding peptide
  MOD_RES (34), (34): Xaa is C or S
  MOD_RES (12), (13), (14), (15), (16): Xaa is A or G
  MOD_RES (17), (18), (19), (20): Xaa is A or G or is absent
KNHQLFSMEGLXXXXXXXXXMIQMTINSEETPVXELGEDN

SEQ ID NO: 18425 - protein, 40 aa, Artificial Sequence
  GFR-binding peptide
  MOD_RES (1), (3), (37): Xaa is C or S
  MOD_RES (15), (16), (17), (18), (19): Xaa is A or G
  MOD_RES (20), (21), (22), (23): Xaa is A or G or is absent
XEXQSHEELSMEGLXXXXXXXXXMIQMTINSQGTPVXELG

SEQ ID NO: 18426 - protein, 41 aa, Artificial Sequence
  GFR-binding peptide
  MOD_RES (1), (3), (37): Xaa is C or S
  MOD_RES (15), (16), (17), (18), (19): Xaa is A or G
  MOD_RES (20), (21), (22), (23): Xaa is A or G or is absent
XEXQSHEELVQVEKXXXXXXXXXVKAMKVSRQGTPVXELGE

SEQ ID NO: 18427 - protein, 41 aa, Artificial Sequence
  GFR-binding peptide
  MOD_RES (2), (4), (38): Xaa is C or S
RXEXKNHQLFVTAKKHQGQHPKIRIKRMQVPREETPVXELG

SEQ ID NO: 18428 - protein, 38 aa, Artificial Sequence
  GFR-binding peptide
  MOD_RES (1), (3), (37): Xaa is C or S
  MOD_RES (15), (16), (17), (18), (19): Xaa is A or G
  MOD_RES (20), (21), (22), (23): Xaa is A or G or is absent
XEXKNHQLFVQVEKXXXXXXXXXVKAMKVSREETPVXE

SEQ ID NO: 18429 - protein, 35 aa, Artificial Sequence
  GFR-binding peptide
  MOD_RES (35), (35): Xaa is C or S
  MOD_RES (11), (12), (13), (14), (15): Xaa is A or G
  MOD_RES (16), (17), (18), (19): Xaa is A or G or is absent
HEELRSMEGIXXXXXXXXXMIQVTINSHHVRSPQX

SEQ ID NO: 18430 - protein, 37 aa, Artificial Sequence
  GFR-binding peptide
  MOD_RES (2), (2): Xaa is C or S
  MOD_RES (15), (16), (17), (18), (19): Xaa is A or G
  MOD_RES (20), (21), (22), (23): Xaa is A or G or is absent
KXALHDELTVTAKKXXXXXXXXXIKRVQVPRLQVQTP

SEQ ID NO: 18431 - protein, 36 aa, Artificial Sequence
  GFR-binding peptide
  MOD_RES (2), (36): Xaa is C or S
EXKNHQLFSMEGLHQGQHPKIRMIQMTINSEETPVX

SEQ ID NO: 18432 - protein, 36 aa, Artificial Sequence
  GFR-binding peptide
  MOD_RES (34), (34): Xaa is C or S
QSHEELVQVEKHQGQHPKIRVKAMKVSRQGTPVXEL

SEQ ID NO: 18433 - protein, 39 aa, Artificial Sequence
  GFR-binding peptide
  MOD_RES (2), (36): Xaa is C or S
EXKNHQLFVTAKKHQGQHPKIRIKRMQVPREETPVXELG

SEQ ID NO: 18434 - protein, 37 aa, Artificial Sequence
  GFR-binding peptide
  MOD_RES (37), (37): Xaa is C or S
  MOD_RES (13), (14), (15), (16), (17): Xaa is A or G
  MOD_RES (18), (19), (20), (21): Xaa is A or G or is absent
ALHDELTSMEGLXXXXXXXXXMIQVTINSLQVQTPRX

SEQ ID NO: 18435 - protein, 35 aa, Artificial Sequence
  GFR-binding peptide
  MOD_RES (33), (33): Xaa is C or S
  MOD_RES (11), (12), (13), (14), (15): Xaa is A or G
  MOD_RES (16), (17), (18), (19): Xaa is A or G or is absent
NHQLFVQVEKXXXXXXXXXVKAMKVSREETPVXEL

SEQ ID NO: 18436 - protein, 37 aa, Artificial Sequence
  GFR-binding peptide
  MOD_RES (35), (35): Xaa is C or S
HDELTVQVEKFIPKKRVIEVKAVKVSRLQVQTPRXQV

SEQ ID NO: 18437 - protein, 33 aa, Artificial Sequence
  GFR-binding peptide
  MOD_RES (12), (13), (14), (15), (16): Xaa is A or G
  MOD_RES (17), (18), (19), (20): Xaa is A or G or is absent
LHDELTSMEGIXXXXXXXXXMIQVTINSLQVQT

SEQ ID NO: 18438 - protein, 40 aa, Artificial Sequence
  GFR-binding peptide
  MOD_RES (37), (37): Xaa is C or S
  MOD_RES (13), (14), (15), (16), (17): Xaa is A or G
  MOD_RES (18), (19), (20), (21): Xaa is A or G or is absent
ALHDELTSMEGIXXXXXXXXXMIQVTINSLQVQTPRXQVN

SEQ ID NO: 18439 - protein, 40 aa, Artificial Sequence
  GFR-binding peptide
  MOD_RES (2), (4), (38): Xaa is C or S
RXEXQSHEELVTAKKHQGQHPKIRIKRMQVPRQGTPVXEL

SEQ ID NO: 18440 - protein, 41 aa, Artificial Sequence
  GFR-binding peptide
  MOD_RES (1), (3), (37): Xaa is C or S
XEXKNHQLFSMEGLHQGQHPKIRMIQMTINSEETPVXELGE

SEQ ID NO: 18441 - protein, 40 aa, Artificial Sequence
  GFR-binding peptide
  MOD_RES (1), (3), (40): Xaa is C or S
  MOD_RES (16), (17), (18), (19), (20): Xaa is A or G
  MOD_RES (21), (22), (23), (24): Xaa is A or G or is absent
XAXELHEELRVQVEKXXXXXXXXXVKAVKVSRHHVRSPQX

SEQ ID NO: 18442 - protein, 40 aa, Artificial Sequence
  GFR-binding peptide
  MOD_RES (37), (37): Xaa is C or S
  MOD_RES (13), (14), (15), (16), (17): Xaa is A or G
  MOD_RES (18), (19), (20), (21): Xaa is A or G or is absent
ELHEELRVQVEKXXXXXXXXXVKAVKVSRHHVRSPQXKVS

SEQ ID NO: 18443 - protein, 38 aa, Artificial Sequence
  GFR-binding peptide
  MOD_RES (2), (36): Xaa is C or S
  MOD_RES (14), (15), (16), (17), (18): Xaa is A or G
  MOD_RES (19), (20), (21), (22): Xaa is A or G or is absent
EXKNHQLFVTAKKXXXXXXXXXIKRMQVPREETPVXEL

SEQ ID NO: 18444 - protein, 38 aa, Artificial Sequence
  GFR-binding peptide
  MOD_RES (1), (38): Xaa is C or S
  MOD_RES (14), (15), (16), (17), (18): Xaa is A or G
  MOD_RES (19), (20), (21), (22): Xaa is A or G or is absent
XELHEELRVTAKKXXXXXXXXXIKRVQVPRHHVRSPQX

SEQ ID NO: 18445 - protein, 36 aa, Artificial Sequence
  GFR-binding peptide
  MOD_RES (1), (35): Xaa is C or S
XKNHQLFVQVEKHQGQHPKIRVKAMKVSREETPVXE

SEQ ID NO: 18446 - protein, 35 aa, Artificial Sequence
  GFR-binding peptide
  MOD_RES (13), (14), (15), (16), (17): Xaa is A or G
  MOD_RES (18), (19), (20), (21): Xaa is A or G or is absent
ELHEELRVQVEKXXXXXXXXXVKAVKVSRHHVRSP

SEQ ID NO: 18447 - protein, 37 aa, Artificial Sequence
  GFR-binding peptide
  MOD_RES (37), (37): Xaa is C or S
  MOD_RES (13), (14), (15), (16), (17): Xaa is A or G
  MOD_RES (18), (19), (20), (21): Xaa is A or G or is absent
ALHDELTVQVEKXXXXXXXXXVKAVKVSRLQVQTPRX

SEQ ID NO: 18448 - protein, 40 aa, Artificial Sequence
  GFR-binding peptide
  MOD_RES (1), (3), (40): Xaa is C or S
XKXALHDELTVQVEKFIPKKRVIEVKAVKVSRLQVQTPRX

SEQ ID NO: 18449 - protein, 40 aa, Artificial Sequence
  GFR-binding peptide
  MOD_RES (36), (36): Xaa is C or S
LHEELRSMEGILKPKKRVYEMIQVTINSHHVRSPQXKVSS

SEQ ID NO: 18450 - protein, 37 aa, Artificial Sequence
  GFR-binding peptide
  MOD_RES (34), (34): Xaa is C or S
QSHEELVTAKKHQGQHPKIRIKRMQVPRQGTPVXELG

SEQ ID NO: 18451 - protein, 40 aa, Artificial Sequence
  GFR-binding peptide
  MOD_RES (34), (34): Xaa is C or S
QSHEELVTAKKHQGQHPKIRIKRMQVPRQGTPVXELGEDN

SEQ ID NO: 18452 - protein, 37 aa, Artificial Sequence
  GFR-binding peptide
  MOD_RES (1), (3), (37): Xaa is C or S
XEXKNHQLFVTAKKHQGQHPKIRIKRMQVPREETPVX

SEQ ID NO: 18453 - protein, 42 aa, Artificial Sequence
  GFR-binding peptide
  MOD_RES (2), (4), (38): Xaa is C or S
  MOD_RES (16), (17), (18), (19), (20): Xaa is A or G
  MOD_RES (21), (22), (23), (24): Xaa is A or G or is absent
RXEXKNHQLFSMEGLXXXXXXXXXMIQMTINSEETPVXELGE

SEQ ID NO: 18454 - protein, 34 aa, Artificial Sequence
  GFR-binding peptide
  MOD_RES (33), (33): Xaa is C or S
NHQLFVTAKKHQGQHPKIRIKRMQVPREETPVXE

SEQ ID NO: 18455 - protein, 35 aa, Artificial Sequence
  GFR-binding peptide
  MOD_RES (35), (35): Xaa is C or S
  MOD_RES (11), (12), (13), (14), (15): Xaa is A or G
  MOD_RES (16), (17), (18), (19): Xaa is A or G or is absent
HEELRSMEGLXXXXXXXXXMIQVTINSHHVRSPQX

SEQ ID NO: 18456 - protein, 38 aa, Artificial Sequence
  GFR-binding peptide
  MOD_RES (1), (38): Xaa is C or S
  MOD_RES (14), (15), (16), (17), (18): Xaa is A or G
  MOD_RES (19), (20), (21), (22): Xaa is A or G or is absent
XELHEELRSMEGLXXXXXXXXXMIQVTINSHHVRSPQX

SEQ ID NO: 18457 - protein, 42 aa, Artificial Sequence
  GFR-binding peptide
  MOD_RES (2), (4), (41): Xaa is C or S
AXAXELHEELRSMEGILKPKKRVYEMIQVTINSHHVRSPQXK

SEQ ID NO: 18458 - protein, 34 aa, Artificial Sequence
  GFR-binding peptide
LHDELTVQVEKFIPKKRVIEVKAVKVSRLQVQTP

SEQ ID NO: 18459 - protein, 41 aa, Artificial Sequence
  GFR-binding peptide
  MOD_RES (2), (4), (41): Xaa is C or S
AXAXELHEELRVTAKKLKPKKRVYEIKRVQVPRHHVRSPQX

SEQ ID NO: 18460 - protein, 34 aa, Artificial Sequence
  GFR-binding peptide
  MOD_RES (34), (34): Xaa is C or S
  MOD_RES (12), (13), (14), (15), (16): Xaa is A or G
  MOD_RES (17), (18), (19), (20): Xaa is A or G or is absent
QSHEELSMEGIXXXXXXXXXMIQMTINSQGTPVX

SEQ ID NO: 18461 - protein, 37 aa, Artificial Sequence
  GFR-binding peptide
  MOD_RES (1), (3), (37): Xaa is C or S
  MOD_RES (15), (16), (17), (18), (19): Xaa is A or G
  MOD_RES (20), (21), (22), (23): Xaa is A or G or is absent
XEXKNHQLFVTAKKXXXXXXXXXIKRMQVPREETPVX

SEQ ID NO: 18462 - protein, 40 aa, Artificial Sequence
  GFR-binding peptide
  MOD_RES (2), (4), (38): Xaa is C or S
RXEXQSHEELSMEGIHQGQHPKIRMIQMTINSQGTPVXEL

SEQ ID NO: 18463 - protein, 41 aa, Artificial Sequence
  GFR-binding peptide
  MOD_RES (2), (39): Xaa is C or S
  MOD_RES (15), (16), (17), (18), (19): Xaa is A or G
  MOD_RES (20), (21), (22), (23): Xaa is A or G or is absent
AXELHEELRSMEGIXXXXXXXXXMIQVTINSHHVRSPQXKV

SEQ ID NO: 18464 - protein, 42 aa, Artificial Sequence
  GFR-binding peptide
  MOD_RES (1), (3), (40): Xaa is C or S
  MOD_RES (16), (17), (18), (19), (20): Xaa is A or G
  MOD_RES (21), (22), (23), (24): Xaa is A or G or is absent
XKXALHDELTSMEGIXXXXXXXXXMIQVTINSLQVQTPRXQV

SEQ ID NO: 18465 - protein, 42 aa, Artificial Sequence
  GFR-binding peptide
  MOD_RES (1), (3), (40): Xaa is C or S
  MOD_RES (16), (17), (18), (19), (20): Xaa is A or G
  MOD_RES (21), (22), (23), (24): Xaa is A or G or is absent
XKXALHDELTSMEGLXXXXXXXXXMIQVTINSLQVQTPRXQV

SEQ ID NO: 18466 - protein, 40 aa, Artificial Sequence
  GFR-binding peptide
  MOD_RES (1), (35): Xaa is C or S
  MOD_RES (13), (14), (15), (16), (17): Xaa is A or G
  MOD_RES (18), (19), (20), (21): Xaa is A or G or is absent
XKNHQLFSMEGLXXXXXXXXXMIQMTINSEETPVXELGED

SEQ ID NO: 18467 - protein, 41 aa, Artificial Sequence
  GFR-binding peptide
  MOD_RES (2), (4), (38): Xaa is C or S
RXEXKNHQLFSMEGIHQGQHPKIRMIQMTINSEETPVXELG

SEQ ID NO: 18468 - protein, 38 aa, Artificial Sequence
  GFR-binding peptide
  MOD_RES (2), (4): Xaa is C or S
  MOD_RES (17), (18), (19), (20), (21): Xaa is A or G
  MOD_RES (22), (23), (24), (25): Xaa is A or G or is absent
AXAXELHEELRSMEGIXXXXXXXXXMIQVTINSHHVRS

SEQ ID NO: 18469 - protein, 38 aa, Artificial Sequence
  GFR-binding peptide
  MOD_RES (37), (37): Xaa is C or S
ELHEELRVTAKKLKPKKRVYEIKRVQVPRHHVRSPQXK

SEQ ID NO: 18470 - protein, 41 aa, Artificial Sequence
  GFR-binding peptide
  MOD_RES (1), (3), (40): Xaa is C or S
  MOD_RES (16), (17), (18), (19), (20): Xaa is A or G
  MOD_RES (21), (22), (23), (24): Xaa is A or G or is absent
XAXELHEELRSMEGLXXXXXXXXXMIQVTINSHHVRSPQXK

SEQ ID NO: 18471 - protein, 39 aa, Artificial Sequence
  GFR-binding peptide
  MOD_RES (1), (3): Xaa is C or S
  MOD_RES (16), (17), (18), (19), (20): Xaa is A or G
  MOD_RES (21), (22), (23), (24): Xaa is A or G or is absent
XAXELHEELRSMEGLXXXXXXXXXMIQVTINSHHVRSPQ

SEQ ID NO: 18472 - protein, 41 aa, Artificial Sequence
  GFR-binding peptide
  MOD_RES (1), (3), (37): Xaa is C or S
  MOD_RES (15), (16), (17), (18), (19): Xaa is A or G
  MOD_RES (20), (21), (22), (23): Xaa is A or G or is absent
XEXKNHQLFSMEGLXXXXXXXXXMIQMTINSEETPVXELGE

SEQ ID NO: 18473 - protein, 33 aa, Artificial Sequence
  GFR-binding peptide
  MOD_RES (12), (13), (14), (15), (16): Xaa is A or G
  MOD_RES (17), (18), (19), (20): Xaa is A or G or is absent
QSHEELVQVEKXXXXXXXXXVKAMKVSRQGTPV

SEQ ID NO: 18474 - protein, 42 aa, Artificial Sequence
  GFR-binding peptide
  MOD_RES (2), (36): Xaa is C or S
EXKNHQLFSMEGIHQGQHPKIRMIQMTINSEETPVXELGEDN

SEQ ID NO: 18475 - protein, 40 aa, Artificial Sequence
  GFR-binding peptide
  MOD_RES (34), (34): Xaa is C or S
  MOD_RES (12), (13), (14), (15), (16): Xaa is A or G
  MOD_RES (17), (18), (19), (20): Xaa is A or G or is absent
QSHEELSMEGLXXXXXXXXXMIQMTINSQGTPVXELGEDN

SEQ ID NO: 18476 - protein, 37 aa, Artificial Sequence
  GFR-binding peptide
  MOD_RES (1), (3): Xaa is C or S
  MOD_RES (16), (17), (18), (19), (20): Xaa is A or G
  MOD_RES (21), (22), (23), (24): Xaa is A or G or is absent
XKXALHDELTVTAKKXXXXXXXXXIKRVQVPRLQVQT

SEQ ID NO: 18477 - protein, 40 aa, Artificial Sequence
  GFR-binding peptide
  MOD_RES (1), (38): Xaa is C or S
XALHDELTSMEGIFIPKKRVIEMIQVTINSLQVQTPRXQV

SEQ ID NO: 18478 - protein, 44 aa, Artificial Sequence
  GFR-binding peptide
  MOD_RES (2), (4), (38): Xaa is C or S
RXEXQSHEELSMEGLHQGQHPKIRMIQMTINSQGTPVXELGEDN

SEQ ID NO: 18479 - protein, 42 aa, Artificial Sequence
  GFR-binding peptide
  MOD_RES (1), (38): Xaa is C or S
  MOD_RES (14), (15), (16), (17), (18): Xaa is A or G
  MOD_RES (19), (20), (21), (22): Xaa is A or G or is absent
XELHEELRVQVEKXXXXXXXXXVKAVKVSRHHVRSPQXKVSS

SEQ ID NO: 18480 - protein, 39 aa, Artificial Sequence
  GFR-binding peptide
  MOD_RES (2), (39): Xaa is C or S
AXELHEELRVQVEKLKPKKRVYEVKAVKVSRHHVRSPQX

SEQ ID NO: 18481 - protein, 37 aa, Artificial Sequence
  GFR-binding peptide
  MOD_RES (34), (34): Xaa is C or S
  MOD_RES (12), (13), (14), (15), (16): Xaa is A or G
  MOD_RES (17), (18), (19), (20): Xaa is A or G or is absent
QSHEELSMEGLXXXXXXXXXMIQMTINSQGTPVXELG

SEQ ID NO: 18482 - protein, 39 aa, Artificial Sequence
  GFR-binding peptide
  MOD_RES (1), (38): Xaa is C or S
  MOD_RES (14), (15), (16), (17), (18): Xaa is A or G
  MOD_RES (19), (20), (21), (22): Xaa is A or G or is absent
XELHEELRSMEGLXXXXXXXXXMIQVTINSHHVRSPQXK

SEQ ID NO: 18483 - protein, 33 aa, Artificial Sequence
  GFR-binding peptide
LHEELRSMEGLLKPKKRVYEMIQVTINSHHVRS

SEQ ID NO: 18484 - protein, 40 aa, Artificial Sequence
  GFR-binding peptide
  MOD_RES (36), (36): Xaa is C or S
LHDELTSMEGIFIPKKRVIEMIQVTINSLQVQTPRXQVNR

SEQ ID NO: 18485 - protein, 36 aa, Artificial Sequence
  GFR-binding peptide
  MOD_RES (1), (1): Xaa is C or S
XALHDELTSMEGIFIPKKRVIEMIQVTINSLQVQTP

SEQ ID NO: 18486 - protein, 43 aa, Artificial Sequence
  GFR-binding peptide
  MOD_RES (2), (4), (38): Xaa is C or S
RXEXQSHEELSMEGLHQGQHPKIRMIQMTINSQGTPVXELGED

SEQ ID NO: 18487 - protein, 43 aa, Artificial Sequence
  GFR-binding peptide
  MOD_RES (1), (3), (37): Xaa is C or S
XEXQSHEELVQVEKHQGQHPKIRVKAMKVSRQGTPVXELGEDN

SEQ ID NO: 18488 - protein, 42 aa, Artificial Sequence
  GFR-binding peptide
  MOD_RES (1), (3), (40): Xaa is C or S
  MOD_RES (16), (17), (18), (19), (20): Xaa is A or G
  MOD_RES (21), (22), (23), (24): Xaa is A or G or is absent
XAXELHEELRSMEGIXXXXXXXXXMIQVTINSHHVRSPQXKV

SEQ ID NO: 18489 - protein, 40 aa, Artificial Sequence
  GFR-binding peptide
  MOD_RES (1), (35): Xaa is C or S
  MOD_RES (13), (14), (15), (16), (17): Xaa is A or G
  MOD_RES (18), (19), (20), (21): Xaa is A or G or is absent
XQSHEELVTAKKXXXXXXXXXIKRMQVPRQGTPVXELGED

SEQ ID NO: 18490 - protein, 37 aa, Artificial Sequence
  GFR-binding peptide
  MOD_RES (2), (2): Xaa is C or S
KXALHDELTVTAKKFIPKKRVIEIKRVQVPRLQVQTP

SEQ ID NO: 18491 - protein, 38 aa, Artificial Sequence
  GFR-binding peptide
  MOD_RES (35), (35): Xaa is C or S
  MOD_RES (11), (12), (13), (14), (15): Xaa is A or G
  MOD_RES (16), (17), (18), (19): Xaa is A or G or is absent
HEELRVTAKKXXXXXXXXXIKRVQVPRHHVRSPQXKVS

SEQ ID NO: 18492 - protein, 37 aa, Artificial Sequence
  GFR-binding peptide
  MOD_RES (34), (34): Xaa is C or S
  MOD_RES (12), (13), (14), (15), (16): Xaa is A or G
  MOD_RES (17), (18), (19), (20): Xaa is A or G or is absent
KNHQLFVQVEKXXXXXXXXXVKAMKVSREETPVXELG

SEQ ID NO: 18493 - protein, 43 aa, Artificial Sequence
  GFR-binding peptide
  MOD_RES (2), (39): Xaa is C or S
  MOD_RES (15), (16), (17), (18), (19): Xaa is A or G
  MOD_RES (20), (21), (22), (23): Xaa is A or G or is absent
KXALHDELTVTAKKXXXXXXXXXIKRVQVPRLQVQTPRXQVNR

SEQ ID NO: 18494 - protein, 37 aa, Artificial Sequence
  GFR-binding peptide
  MOD_RES (1), (3): Xaa is C or S
  MOD_RES (16), (17), (18), (19), (20): Xaa is A or G
  MOD_RES (21), (22), (23), (24): Xaa is A or G or is absent
XAXELHEELRVQVEKXXXXXXXXXVKAVKVSRHHVRS

SEQ ID NO: 18495 - protein, 37 aa, Artificial Sequence
  GFR-binding peptide
  MOD_RES (1), (3): Xaa is C or S
  MOD_RES (16), (17), (18), (19), (20): Xaa is A or G
  MOD_RES (21), (22), (23), (24): Xaa is A or G or is absent
XAXELHEELRVTAKKXXXXXXXXXIKRVQVPRHHVRS

SEQ ID NO: 18496 - protein, 32 aa, Artificial Sequence
  GFR-binding peptide
  MOD_RES (11), (12), (13), (14), (15): Xaa is A or G
  MOD_RES (16), (17), (18), (19): Xaa is A or G or is absent
HEELRSMEGIXXXXXXXXXMIQVTINSHHVRS

SEQ ID NO: 18497 - protein, 41 aa, Artificial Sequence
  GFR-binding peptide
  MOD_RES (37), (37): Xaa is C or S
  MOD_RES (13), (14), (15), (16), (17): Xaa is A or G
  MOD_RES (18), (19), (20), (21): Xaa is A or G or is absent
ALHDELTSMEGIXXXXXXXXXMIQVTINSLQVQTPRXQVNR

SEQ ID NO: 18498 - protein, 37 aa, Artificial Sequence
  GFR-binding peptide
  MOD_RES (1), (3): Xaa is C or S
  MOD_RES (16), (17), (18), (19), (20): Xaa is A or G
  MOD_RES (21), (22), (23), (24): Xaa is A or G or is absent
XKXALHDELTSMEGIXXXXXXXXXMIQVTINSLQVQT

SEQ ID NO: 18499 - protein, 33 aa, Artificial Sequence
  GFR-binding peptide
QSHEELSMEGLHQGQHPKIRMIQMTINSQGTPV

SEQ ID NO: 18500 - protein, 38 aa, Artificial Sequence
  GFR-binding peptide
  MOD_RES (36), (36): Xaa is C or S
LHDELTVTAKKFIPKKRVIEIKRVQVPRLQVQTPRXQV

SEQ ID NO: 18501 - protein, 36 aa, Artificial Sequence
  GFR-binding peptide
  MOD_RES (1), (3): Xaa is C or S
  MOD_RES (15), (16), (17), (18), (19): Xaa is A or G
  MOD_RES (20), (21), (22), (23): Xaa is A or G or is absent
XEXQSHEELSMEGIXXXXXXXXXMIQMTINSQGTPV

SEQ ID NO: 18502 - protein, 38 aa, Artificial Sequence
  GFR-binding peptide
  MOD_RES (1), (3): Xaa is C or S
XAXELHEELRSMEGILKPKKRVYEMIQVTINSHHVRSP

SEQ ID NO: 18503 - protein, 40 aa, Artificial Sequence
  GFR-binding peptide
  MOD_RES (1), (3), (37): Xaa is C or S
  MOD_RES (15), (16), (17), (18), (19): Xaa is A or G
  MOD_RES (20), (21), (22), (23): Xaa is A or G or is absent
XEXKNHQLFSMEGLXXXXXXXXXMIQMTINSEETPVXELG

SEQ ID NO: 18504 - protein, 35 aa, Artificial Sequence
  GFR-binding peptide
  MOD_RES (13), (14), (15), (16), (17): Xaa is A or G
  MOD_RES (18), (19), (20), (21): Xaa is A or G or is absent
ALHDELTVTAKKXXXXXXXXXIKRVQVPRLQVQTP

SEQ ID NO: 18505 - protein, 41 aa, Artificial Sequence
  GFR-binding peptide
  MOD_RES (2), (36): Xaa is C or S
  MOD_RES (14), (15), (16), (17), (18): Xaa is A or G
  MOD_RES (19), (20), (21), (22): Xaa is A or G or is absent
EXKNHQLFSMEGIXXXXXXXXXMIQMTINSEETPVXELGED

SEQ ID NO: 18506 - protein, 37 aa, Artificial Sequence
  GFR-binding peptide
  MOD_RES (35), (35): Xaa is C or S
HDELTSMEGLFIPKKRVIEMIQVTINSLQVQTPRXQV

SEQ ID NO: 18507 - protein, 40 aa, Artificial Sequence
  GFR-binding peptide
  MOD_RES (2), (4): Xaa is C or S
EXKXALHDELTVTAKKFIPKKRVIEIKRVQVPRLQVQTPR

SEQ ID NO: 18508 - protein, 34 aa, Artificial Sequence
  GFR-binding peptide
  MOD_RES (12), (13), (14), (15), (16): Xaa is A or G
  MOD_RES (17), (18), (19), (20): Xaa is A or G or is absent
LHDELTVQVEKXXXXXXXXXVKAVKVSRLQVQTP

SEQ ID NO: 18509 - protein, 35 aa, Artificial Sequence
  GFR-binding peptide
  MOD_RES (12), (13), (14), (15), (16): Xaa is A or G
  MOD_RES (17), (18), (19), (20): Xaa is A or G or is absent
LHDELTVTAKKXXXXXXXXXIKRVQVPRLQVQTPR

SEQ ID NO: 18510 - protein, 38 aa, Artificial Sequence
  GFR-binding peptide
  MOD_RES (34), (34): Xaa is C or S
  MOD_RES (12), (13), (14), (15), (16): Xaa is A or G
  MOD_RES (17), (18), (19), (20): Xaa is A or G or is absent
QSHEELSMEGLXXXXXXXXXMIQMTINSQGTPVXELGE

SEQ ID NO: 18511 - protein, 39 aa, Artificial Sequence
  GFR-binding peptide
  MOD_RES (2), (4): Xaa is C or S
  MOD_RES (17), (18), (19), (20), (21): Xaa is A or G
  MOD_RES (22), (23), (24), (25): Xaa is A or G or is absent
AXAXELHEELRVQVEKXXXXXXXXXVKAVKVSRHHVRSP

SEQ ID NO: 18512 - protein, 35 aa, Artificial Sequence
  GFR-binding peptide
  MOD_RES (1), (1): Xaa is C or S
XELHEELRSMEGILKPKKRVYEMIQVTINSHHVRS

SEQ ID NO: 18513 - protein, 38 aa, Artificial Sequence
  GFR-binding peptide
  MOD_RES (36), (36): Xaa is C or S
LHDELTSMEGIFIPKKRVIEMIQVTINSLQVQTPRXQV

SEQ ID NO: 18514 - protein, 34 aa, Artificial Sequence
  GFR-binding peptide
  MOD_RES (33), (33): Xaa is C or S
  MOD_RES (11), (12), (13), (14), (15): Xaa is A or G
  MOD_RES (16), (17), (18), (19): Xaa is A or G or is absent
NHQLFVTAKKXXXXXXXXXIKRMQVPREETPVXE

SEQ ID NO: 18515 - protein, 33 aa, Artificial Sequence
  GFR-binding peptide
LHDELTVTAKKFIPKKRVIEIKRVQVPRLQVQT

SEQ ID NO: 18516 - protein, 42 aa, Artificial Sequence
  GFR-binding peptide
  MOD_RES (1), (3), (37): Xaa is C or S
  MOD_RES (15), (16), (17), (18), (19): Xaa is A or G
  MOD_RES (20), (21), (22), (23): Xaa is A or G or is absent
XEXKNHQLFVTAKKXXXXXXXXXIKRMQVPREETPVXELGED

SEQ ID NO: 18517 - protein, 42 aa, Artificial Sequence
  GFR-binding peptide
  MOD_RES (2), (39): Xaa is C or S
KXALHDELTSMEGIFIPKKRVIEMIQVTINSLQVQTPRXQVN

SEQ ID NO: 18518 - protein, 38 aa, Artificial Sequence
  GFR-binding peptide
  MOD_RES (34), (34): Xaa is C or S
QSHEELSMEGIHQGQHPKIRMIQMTINSQGTPVXELGE

SEQ ID NO: 18519 - protein, 38 aa, Artificial Sequence
  GFR-binding peptide
  MOD_RES (1), (3): Xaa is C or S
  MOD_RES (16), (17), (18), (19), (20): Xaa is A or G
  MOD_RES (21), (22), (23), (24): Xaa is A or G or is absent
XAXELHEELRVTAKKXXXXXXXXXIKRVQVPRHHVRSP

SEQ ID NO: 18520 - protein, 36 aa, Artificial Sequence
  GFR-binding peptide
  MOD_RES (1), (1): Xaa is C or S
XELHEELRSMEGILKPKKRVYEMIQVTINSHHVRSP

SEQ ID NO: 18521 - protein, 35 aa, Artificial Sequence
  GFR-binding peptide
  MOD_RES (1), (1): Xaa is C or S
XELHEELRVTAKKLKPKKRVYEIKRVQVPRHHVRS

SEQ ID NO: 18522 - protein, 38 aa, Artificial Sequence
  GFR-binding peptide
  MOD_RES (34), (34): Xaa is C or S
QSHEELVTAKKHQGQHPKIRIKRMQVPRQGTPVXELGE

SEQ ID NO: 18523 - protein, 36 aa, Artificial Sequence
  GFR-binding peptide
  MOD_RES (1), (1): Xaa is C or S
XALHDELTVTAKKFIPKKRVIEIKRVQVPRLQVQTP

SEQ ID NO: 18524 - protein, 36 aa, Artificial Sequence
  GFR-binding peptide
  MOD_RES (35), (35): Xaa is C or S
HDELTSMEGLFIPKKRVIEMIQVTINSLQVQTPRXQ

SEQ ID NO: 18525 - protein, 37 aa, Artificial Sequence
  GFR-binding peptide
  MOD_RES (2), (2): Xaa is C or S
  MOD_RES (15), (16), (17), (18), (19): Xaa is A or G
  MOD_RES (20), (21), (22), (23): Xaa is A or G or is absent
KXALHDELTSMEGLXXXXXXXXXMIQVTINSLQVQTP

SEQ ID NO: 18526 - protein, 33 aa, Artificial Sequence
  GFR-binding peptide
LHDELTSMEGIFIPKKRVIEMIQVTINSLQVQT

SEQ ID NO: 18527 - protein, 34 aa, Artificial Sequence
  GFR-binding peptide
ALHDELTSMEGIFIPKKRVIEMIQVTINSLQVQT

SEQ ID NO: 18528 - protein, 37 aa, Artificial Sequence
  GFR-binding peptide
  MOD_RES (1), (35): Xaa is C or S
XKNHQLFVTAKKHQGQHPKIRIKRMQVPREETPVXEL

SEQ ID NO: 18529 - protein, 36 aa, Artificial Sequence
  GFR-binding peptide
  MOD_RES (35), (35): Xaa is C or S
HEELRSMEGLLKPKKRVYEMIQVTINSHHVRSPQXK

SEQ ID NO: 18530 - protein, 37 aa, Artificial Sequence
  GFR-binding peptide
  MOD_RES (1), (35): Xaa is C or S
  MOD_RES (13), (14), (15), (16), (17): Xaa is A or G
  MOD_RES (18), (19), (20), (21): Xaa is A or G or is absent
XKNHQLFVTAKKXXXXXXXXXIKRMQVPREETPVXEL

SEQ ID NO: 18531 - protein, 35 aa, Artificial Sequence
  GFR-binding peptide
  MOD_RES (35), (35): Xaa is C or S
HDELTVTAKKFIPKKRVIEIKRVQVPRLQVQTPRX

SEQ ID NO: 18532 - protein, 38 aa, Artificial Sequence
  GFR-binding peptide
  MOD_RES (37), (37): Xaa is C or S
ALHDELTVQVEKFIPKKRVIEVKAVKVSRLQVQTPRXQ

SEQ ID NO: 18533 - protein, 38 aa, Artificial Sequence
  GFR-binding peptide
  MOD_RES (35), (35): Xaa is C or S
  MOD_RES (11), (12), (13), (14), (15): Xaa is A or G
  MOD_RES (16), (17), (18), (19): Xaa is A or G or is absent
HEELRSMEGLXXXXXXXXXMIQVTINSHHVRSPQXKVS

SEQ ID NO: 18534 - protein, 36 aa, Artificial Sequence
  GFR-binding peptide
  MOD_RES (1), (3): Xaa is C or S
  MOD_RES (15), (16), (17), (18), (19): Xaa is A or G
  MOD_RES (20), (21), (22), (23): Xaa is A or G or is absent
XEXQSHEELVQVEKXXXXXXXXXVKAMKVSRQGTPV

SEQ ID NO: 18535 - protein, 36 aa, Artificial Sequence
  GFR-binding peptide
  MOD_RES (36), (36): Xaa is C or S
  MOD_RES (12), (13), (14), (15), (16): Xaa is A or G
  MOD_RES (17), (18), (19), (20): Xaa is A or G or is absent
LHDELTVTAKKXXXXXXXXXIKRVQVPRLQVQTPRX

SEQ ID NO: 18536 - protein, 40 aa, Artificial Sequence
  GFR-binding peptide
  MOD_RES (1), (35): Xaa is C or S
XKNHQLFVQVEKHQGQHPKIRVKAMKVSREETPVXELGED

SEQ ID NO: 18537 - protein, 38 aa, Artificial Sequence
  GFR-binding peptide
  MOD_RES (2), (4), (38): Xaa is C or S
  MOD_RES (16), (17), (18), (19), (20): Xaa is A or G
  MOD_RES (21), (22), (23), (24): Xaa is A or G or is absent
RXEXKNHQLFSMEGLXXXXXXXXXMIQMTINSEETPVX

SEQ ID NO: 18538 - protein, 37 aa, Artificial Sequence
  GFR-binding peptide
  MOD_RES (1), (3), (37): Xaa is C or S
  MOD_RES (15), (16), (17), (18), (19): Xaa is A or G
  MOD_RES (20), (21), (22), (23): Xaa is A or G or is absent
XEXKNHQLFVQVEKXXXXXXXXXVKAMKVSREETPVX

SEQ ID NO: 18539 - protein, 40 aa, Artificial Sequence
  GFR-binding peptide
  MOD_RES (1), (35): Xaa is C or S
XQSHEELVTAKKHQGQHPKIRIKRMQVPRQGTPVXELGED

SEQ ID NO: 18540 - protein, 37 aa, Artificial Sequence
  GFR-binding peptide
  MOD_RES (35), (35): Xaa is C or S
HEELRVQVEKLKPKKRVYEVKAVKVSRHHVRSPQXKV

SEQ ID NO: 18541 - protein, 36 aa, Artificial Sequence
  GFR-binding peptide
  MOD_RES (35), (35): Xaa is C or S
  MOD_RES (11), (12), (13), (14), (15): Xaa is A or G
  MOD_RES (16), (17), (18), (19): Xaa is A or G or is absent
HDELTVQVEKXXXXXXXXXVKAVKVSRLQVQTPRXQ

SEQ ID NO: 18542 - protein, 40 aa, Artificial Sequence
  GFR-binding peptide
  MOD_RES (2), (4), (38): Xaa is C or S
  MOD_RES (16), (17), (18), (19), (20): Xaa is A or G
  MOD_RES (21), (22), (23), (24): Xaa is A or G or is absent
RXEXKNHQLFSMEGLXXXXXXXXXMIQMTINSEETPVXEL

SEQ ID NO: 18543 - protein, 40 aa, Artificial Sequence
  GFR-binding peptide
  MOD_RES (1), (38): Xaa is C or S
  MOD_RES (14), (15), (16), (17), (18): Xaa is A or G
  MOD_RES (19), (20), (21), (22): Xaa is A or G or is absent
XALHDELTVQVEKXXXXXXXXXVKAVKVSRLQVQTPRXQV

SEQ ID NO: 18544 - protein, 41 aa, Artificial Sequence
  GFR-binding peptide
  MOD_RES (2), (4), (38): Xaa is C or S
  MOD_RES (16), (17), (18), (19), (20): Xaa is A or G
  MOD_RES (21), (22), (23), (24): Xaa is A or G or is absent
RXEXQSHEELSMEGLXXXXXXXXXMIQMTINSQGTPVXELG

SEQ ID NO: 18545 - protein, 34 aa, Artificial Sequence
  GFR-binding peptide
  MOD_RES (11), (12), (13), (14), (15): Xaa is A or G
  MOD_RES (16), (17), (18), (19): Xaa is A or G or is absent
HDELTVQVEKXXXXXXXXXVKAVKVSRLQVQTPR

SEQ ID NO: 18546 - protein, 41 aa, Artificial Sequence
  GFR-binding peptide
  MOD_RES (2), (36): Xaa is C or S
EXKNHQLFSMEGLHQGQHPKIRMIQMTINSEETPVXELGED

SEQ ID NO: 18547 - protein, 40 aa, Artificial Sequence
  GFR-binding peptide
  MOD_RES (2), (4): Xaa is C or S
AXAXELHEELRVTAKKLKPKKRVYEIKRVQVPRHHVRSPQ

SEQ ID NO: 18548 - protein, 36 aa, Artificial Sequence
  GFR-binding peptide
  MOD_RES (2), (2): Xaa is C or S
AXELHEELRVTAKKLKPKKRVYEIKRVQVPRHHVRS

SEQ ID NO: 18549 - protein, 36 aa, Artificial Sequence
  GFR-binding peptide
  MOD_RES (36), (36): Xaa is C or S
  MOD_RES (12), (13), (14), (15), (16): Xaa is A or G
  MOD_RES (17), (18), (19), (20): Xaa is A or G or is absent
LHDELTSMEGIXXXXXXXXXMIQVTINSLQVQTPRX

SEQ ID NO: 18550 - protein, 37 aa, Artificial Sequence
  GFR-binding peptide
  MOD_RES (1), (3): Xaa is C or S
XAXELHEELRSMEGLLKPKKRVYEMIQVTINSHHVRS

SEQ ID NO: 18551 - protein, 33 aa, Artificial Sequence
  GFR-binding peptide
KNHQLFVQVEKHQGQHPKIRVKAMKVSREETPV

SEQ ID NO: 18552 - protein, 34 aa, Artificial Sequence
  GFR-binding peptide
ELHEELRVQVEKLKPKKRVYEVKAVKVSRHHVRS

SEQ ID NO: 18553 - protein, 43 aa, Artificial Sequence
  GFR-binding peptide
  MOD_RES (1), (3), (37): Xaa is C or S
XEXQSHEELSMEGIHQGQHPKIRMIQMTINSQGTPVXELGEDN

SEQ ID NO: 18554 - protein, 45 aa, Artificial Sequence
  GFR-binding peptide
  MOD_RES (2), (4), (41): Xaa is C or S
EXKXALHDELTSMEGIFIPKKRVIEMIQVTINSLQVQTPRXQVNR

SEQ ID NO: 18555 - protein, 38 aa, Artificial Sequence
  GFR-binding peptide
  MOD_RES (1), (38): Xaa is C or S
  MOD_RES (14), (15), (16), (17), (18): Xaa is A or G
  MOD_RES (19), (20), (21), (22): Xaa is A or G or is absent
XELHEELRSMEGIXXXXXXXXXMIQVTINSHHVRSPQX

SEQ ID NO: 18556 - protein, 36 aa, Artificial Sequence
  GFR-binding peptide
  MOD_RES (1), (1): Xaa is C or S
  MOD_RES (14), (15), (16), (17), (18): Xaa is A or G
  MOD_RES (19), (20), (21), (22): Xaa is A or G or is absent
XALHDELTVQVEKXXXXXXXXXVKAVKVSRLQVQTP

SEQ ID NO: 18557 - protein, 39 aa, Artificial Sequence
  GFR-binding peptide
  MOD_RES (2), (36): Xaa is C or S
  MOD_RES (14), (15), (16), (17), (18): Xaa is A or G
  MOD_RES (19), (20), (21), (22): Xaa is A or G or is absent
EXQSHEELVQVEKXXXXXXXXXVKAMKVSRQGTPVXELG

SEQ ID NO: 18558 - protein, 36 aa, Artificial Sequence
  GFR-binding peptide
  MOD_RES (36), (36): Xaa is C or S
LHEELRVQVEKLKPKKRVYEVKAVKVSRHHVRSPQX

SEQ ID NO: 18559 - protein, 34 aa, Artificial Sequence
  GFR-binding peptide
HEELRSMEGLLKPKKRVYEMIQVTINSHHVRSPQ

SEQ ID NO: 18560 - protein, 37 aa, Artificial Sequence
  GFR-binding peptide
  MOD_RES (34), (34): Xaa is C or S
KNHQLFSMEGLHQGQHPKIRMIQMTINSEETPVXELG

SEQ ID NO: 18561 - protein, 41 aa, Artificial Sequence
  GFR-binding peptide
  MOD_RES (37), (37): Xaa is C or S
  MOD_RES (13), (14), (15), (16), (17): Xaa is A or G
  MOD_RES (18), (19), (20), (21): Xaa is A or G or is absent
ELHEELRVQVEKXXXXXXXXXVKAVKVSRHHVRSPQXKVSS

SEQ ID NO: 18562 - protein, 42 aa, Artificial Sequence
  GFR-binding peptide
  MOD_RES (2), (4), (41): Xaa is C or S
  MOD_RES (17), (18), (19), (20), (21): Xaa is A or G
  MOD_RES (22), (23), (24), (25): Xaa is A or G or is absent
AXAXELHEELRVQVEKXXXXXXXXXVKAVKVSRHHVRSPQXK

SEQ ID NO: 18563 - protein, 42 aa, Artificial Sequence
  GFR-binding peptide
  MOD_RES (1), (3), (37): Xaa is C or S
  MOD_RES (15), (16), (17), (18), (19): Xaa is A or G
  MOD_RES (20), (21), (22), (23): Xaa is A or G or is absent
XEXKNHQLFSMEGIXXXXXXXXXMIQMTINSEETPVXELGED

SEQ ID NO: 18564 - protein, 39 aa, Artificial Sequence
  GFR-binding peptide
  MOD_RES (2), (4), (38): Xaa is C or S
RXEXQSHEELVQVEKHQGQHPKIRVKAMKVSRQGTPVXE

SEQ ID NO: 18565 - protein, 34 aa, Artificial Sequence
  GFR-binding peptide
  MOD_RES (13), (14), (15), (16), (17): Xaa is A or G
  MOD_RES (18), (19), (20), (21): Xaa is A or G or is absent
ELHEELRSMEGLXXXXXXXXXMIQVTINSHHVRS

SEQ ID NO: 18566 - protein, 44 aa, Artificial Sequence
  GFR-binding peptide
  MOD_RES (2), (4), (41): Xaa is C or S
  MOD_RES (17), (18), (19), (20), (21): Xaa is A or G
  MOD_RES (22), (23), (24), (25): Xaa is A or G or is absent
AXAXELHEELRSMEGLXXXXXXXXXMIQVTINSHHVRSPQXKVS

SEQ ID NO: 18567 - protein, 40 aa, Artificial Sequence
  GFR-binding peptide
  MOD_RES (1), (38): Xaa is C or S
XALHDELTVTAKKFIPKKRVIEIKRVQVPRLQVQTPRXQV

SEQ ID NO: 18568 - protein, 42 aa, Artificial Sequence
  GFR-binding peptide
  MOD_RES (1), (3), (37): Xaa is C or S
  MOD_RES (15), (16), (17), (18), (19): Xaa is A or G
  MOD_RES (20), (21), (22), (23): Xaa is A or G or is absent
XEXKNHQLFSMEGLXXXXXXXXXMIQMTINSEETPVXELGED

SEQ ID NO: 18569 - protein, 42 aa, Artificial Sequence
  GFR-binding peptide
  MOD_RES (2), (36): Xaa is C or S
  MOD_RES (14), (15), (16), (17), (18): Xaa is A or G
  MOD_RES (19), (20), (21), (22): Xaa is A or G or is absent
EXKNHQLFVTAKKXXXXXXXXXIKRMQVPREETPVXELGEDN

SEQ ID NO: 18570 - protein, 41 aa, Artificial Sequence
  GFR-binding peptide
  MOD_RES (2), (36): Xaa is C or S
EXKNHQLFSMEGIHQGQHPKIRMIQMTINSEETPVXELGED

SEQ ID NO: 18571 - protein, 41 aa, Artificial Sequence
  GFR-binding peptide
  MOD_RES (2), (36): Xaa is C or S
  MOD_RES (14), (15), (16), (17), (18): Xaa is A or G
  MOD_RES (19), (20), (21), (22): Xaa is A or G or is absent
EXQSHEELVQVEKXXXXXXXXXVKAMKVSRQGTPVXELGED

SEQ ID NO: 18572 - protein, 35 aa, Artificial Sequence
  GFR-binding peptide
  MOD_RES (12), (13), (14), (15), (16): Xaa is A or G
  MOD_RES (17), (18), (19), (20): Xaa is A or G or is absent
LHDELTSMEGIXXXXXXXXXMIQVTINSLQVQTPR

SEQ ID NO: 18573 - protein, 39 aa, Artificial Sequence
  GFR-binding peptide
  MOD_RES (1), (3): Xaa is C or S
  MOD_RES (16), (17), (18), (19), (20): Xaa is A or G
  MOD_RES (21), (22), (23), (24): Xaa is A or G or is absent
XKXALHDELTSMEGIXXXXXXXXXMIQVTINSLQVQTPR

SEQ ID NO: 18574 - protein, 39 aa, Artificial Sequence
  GFR-binding peptide
  MOD_RES (2), (39): Xaa is C or S
KXALHDELTSMEGIFIPKKRVIEMIQVTINSLQVQTPRX

SEQ ID NO: 18575 - protein, 41 aa, Artificial Sequence
  GFR-binding peptide
  MOD_RES (2), (39): Xaa is C or S
AXELHEELRSMEGILKPKKRVYEMIQVTINSHHVRSPQXKV

SEQ ID NO: 18576 - protein, 35 aa, Artificial Sequence
  GFR-binding peptide
LHEELRVQVEKLKPKKRVYEVKAVKVSRHHVRSPQ

SEQ ID NO: 18577 - protein, 39 aa, Artificial Sequence
  GFR-binding peptide
  MOD_RES (34), (34): Xaa is C or S
  MOD_RES (12), (13), (14), (15), (16): Xaa is A or G
  MOD_RES (17), (18), (19), (20): Xaa is A or G or is absent
QSHEELSMEGLXXXXXXXXXMIQMTINSQGTPVXELGED

SEQ ID NO: 18578 - protein, 39 aa, Artificial Sequence
  GFR-binding peptide
  MOD_RES (1), (3), (37): Xaa is C or S
XEXKNHQLFSMEGLHQGQHPKIRMIQMTINSEETPVXEL

SEQ ID NO: 18579 - protein, 39 aa, Artificial Sequence
  GFR-binding peptide
  MOD_RES (2), (36): Xaa is C or S
  MOD_RES (14), (15), (16), (17), (18): Xaa is A or G
  MOD_RES (19), (20), (21), (22): Xaa is A or G or is absent
EXKNHQLFSMEGIXXXXXXXXXMIQMTINSEETPVXELG

SEQ ID NO: 18580 - protein, 38 aa, Artificial Sequence
  GFR-binding peptide
  MOD_RES (2), (2): Xaa is C or S
AXELHEELRSMEGLLKPKKRVYEMIQVTINSHHVRSPQ

SEQ ID NO: 18581 - protein, 35 aa, Artificial Sequence
  GFR-binding peptide
  MOD_RES (13), (14), (15), (16), (17): Xaa is A or G
  MOD_RES (18), (19), (20), (21): Xaa is A or G or is absent
ELHEELRSMEGLXXXXXXXXXMIQVTINSHHVRSP

SEQ ID NO: 18582 - protein, 39 aa, Artificial Sequence
  GFR-binding peptide
  MOD_RES (2), (4), (38): Xaa is C or S
RXEXQSHEELVTAKKHQGQHPKIRIKRMQVPRQGTPVXE

SEQ ID NO: 18583 - protein, 40 aa, Artificial Sequence
  GFR-binding peptide
  MOD_RES (1), (3), (40): Xaa is C or S
  MOD_RES (16), (17), (18), (19), (20): Xaa is A or G
  MOD_RES (21), (22), (23), (24): Xaa is A or G or is absent
XKXALHDELTSMEGLXXXXXXXXXMIQVTINSLQVQTPRX

SEQ ID NO: 18584 - protein, 39 aa, Artificial Sequence
  GFR-binding peptide
  MOD_RES (2), (4): Xaa is C or S
  MOD_RES (17), (18), (19), (20), (21): Xaa is A or G
  MOD_RES (22), (23), (24), (25): Xaa is A or G or is absent
EXKXALHDELTSMEGLXXXXXXXXXMIQVTINSLQVQTP

SEQ ID NO: 18585 - protein, 39 aa, Artificial Sequence
  GFR-binding peptide
  MOD_RES (35), (35): Xaa is C or S
  MOD_RES (11), (12), (13), (14), (15): Xaa is A or G
  MOD_RES (16), (17), (18), (19): Xaa is A or G or is absent
HDELTVTAKKXXXXXXXXXIKRVQVPRLQVQTPRXQVNR

SEQ ID NO: 18586 - protein, 36 aa, Artificial Sequence
  GFR-binding peptide
ELHEELRVQVEKLKPKKRVYEVKAVKVSRHHVRSPQ

SEQ ID NO: 18587 - protein, 40 aa, Artificial Sequence
  GFR-binding peptide
  MOD_RES (1), (3), (37): Xaa is C or S
XEXKNHQLFVTAKKHQGQHPKIRIKRMQVPREETPVXELG

SEQ ID NO: 18588 - protein, 34 aa, Artificial Sequence
  GFR-binding peptide
HEELRVTAKKLKPKKRVYEIKRVQVPRHHVRSPQ

SEQ ID NO: 18589 - protein, 38 aa, Artificial Sequence
  GFR-binding peptide
  MOD_RES (2), (4), (38): Xaa is C or S
  MOD_RES (16), (17), (18), (19), (20): Xaa is A or G
  MOD_RES (21), (22), (23), (24): Xaa is A or G or is absent
RXEXQSHEELVTAKKXXXXXXXXXIKRMQVPRQGTPVX

SEQ ID NO: 18590 - protein, 34 aa, Artificial Sequence
  GFR-binding peptide
  MOD_RES (12), (13), (14), (15), (16): Xaa is A or G
  MOD_RES (17), (18), (19), (20): Xaa is A or G or is absent
LHEELRSMEGLXXXXXXXXXMIQVTINSHHVRSP

SEQ ID NO: 18591 - protein, 39 aa, Artificial Sequence
  GFR-binding peptide
  MOD_RES (1), (38): Xaa is C or S
XALHDELTSMEGLFIPKKRVIEMIQVTINSLQVQTPRXQ

SEQ ID NO: 18592 - protein, 42 aa, Artificial Sequence
  GFR-binding peptide
  MOD_RES (1), (38): Xaa is C or S
XELHEELRSMEGLLKPKKRVYEMIQVTINSHHVRSPQXKVSS

SEQ ID NO: 18593 - protein, 38 aa, Artificial Sequence
  GFR-binding peptide
  MOD_RES (1), (35): Xaa is C or S
XQSHEELVTAKKHQGQHPKIRIKRMQVPRQGTPVXELG

SEQ ID NO: 18594 - protein, 42 aa, Artificial Sequence
  GFR-binding peptide
  MOD_RES (1), (3), (40): Xaa is C or S
XKXALHDELTVQVEKFIPKKRVIEVKAVKVSRLQVQTPRXQV

SEQ ID NO: 18595 - protein, 41 aa, Artificial Sequence
  GFR-binding peptide
  MOD_RES (1), (35): Xaa is C or S
XKNHQLFVTAKKHQGQHPKIRIKRMQVPREETPVXELGEDN

SEQ ID NO: 18596 - protein, 40 aa, Artificial Sequence
  GFR-binding peptide
  MOD_RES (36), (36): Xaa is C or S
  MOD_RES (12), (13), (14), (15), (16): Xaa is A or G
  MOD_RES (17), (18), (19), (20): Xaa is A or G or is absent
LHDELTVTAKKXXXXXXXXXIKRVQVPRLQVQTPRXQVNR

SEQ ID NO: 18597 - protein, 39 aa, Artificial Sequence
  GFR-binding peptide
  MOD_RES (36), (36): Xaa is C or S
  MOD_RES (12), (13), (14), (15), (16): Xaa is A or G
  MOD_RES (17), (18), (19), (20): Xaa is A or G or is absent
LHEELRVQVEKXXXXXXXXXVKAVKVSRHHVRSPQXKVS

SEQ ID NO: 18598 - protein, 33 aa, Artificial Sequence
  GFR-binding peptide
  MOD_RES (12), (13), (14), (15), (16): Xaa is A or G
  MOD_RES (17), (18), (19), (20): Xaa is A or G or is absent
QSHEELSMEGIXXXXXXXXXMIQMTINSQGTPV

SEQ ID NO: 18599 - protein, 36 aa, Artificial Sequence
  GFR-binding peptide
  MOD_RES (1), (35): Xaa is C or S
  MOD_RES (13), (14), (15), (16), (17): Xaa is A or G
  MOD_RES (18), (19), (20), (21): Xaa is A or G or is absent
XQSHEELSMEGLXXXXXXXXXMIQMTINSQGTPVXE

SEQ ID NO: 18600 - protein, 40 aa, Artificial Sequence
  GFR-binding peptide
  MOD_RES (2), (4), (38): Xaa is C or S
RXEXKNHQLFSMEGLHQGQHPKIRMIQMTINSEETPVXEL

SEQ ID NO: 18601 - protein, 42 aa, Artificial Sequence
  GFR-binding peptide
  MOD_RES (2), (4), (38): Xaa is C or S
  MOD_RES (16), (17), (18), (19), (20): Xaa is A or G
  MOD_RES (21), (22), (23), (24): Xaa is A or G or is absent
RXEXQSHEELSMEGIXXXXXXXXXMIQMTINSQGTPVXELGE

SEQ ID NO: 18602 - protein, 34 aa, Artificial Sequence
  GFR-binding peptide
  MOD_RES (11), (12), (13), (14), (15): Xaa is A or G
  MOD_RES (16), (17), (18), (19): Xaa is A or G or is absent
HDELTSMEGLXXXXXXXXXMIQVTINSLQVQTPR

SEQ ID NO: 18603 - protein, 35 aa, Artificial Sequence
  GFR-binding peptide
  MOD_RES (12), (13), (14), (15), (16): Xaa is A or G
  MOD_RES (17), (18), (19), (20): Xaa is A or G or is absent
LHEELRSMEGIXXXXXXXXXMIQVTINSHHVRSPQ

SEQ ID NO: 18604 - protein, 43 aa, Artificial Sequence
  GFR-binding peptide
  MOD_RES (2), (4), (41): Xaa is C or S
  MOD_RES (17), (18), (19), (20), (21): Xaa is A or G
  MOD_RES (22), (23), (24), (25): Xaa is A or G or is absent
AXAXELHEELRSMEGIXXXXXXXXXMIQVTINSHHVRSPQXKV

SEQ ID NO: 18605 - protein, 35 aa, Artificial Sequence
  GFR-binding peptide
  MOD_RES (1), (35): Xaa is C or S
XKNHQLFVQVEKHQGQHPKIRVKAMKVSREETPVX

SEQ ID NO: 18606 - protein, 39 aa, Artificial Sequence
  GFR-binding peptide
  MOD_RES (2), (4), (38): Xaa is C or S
RXEXKNHQLFSMEGLHQGQHPKIRMIQMTINSEETPVXE

SEQ ID NO: 18607 - protein, 36 aa, Artificial Sequence
  GFR-binding peptide
  MOD_RES (1), (35): Xaa is C or S
  MOD_RES (13), (14), (15), (16), (17): Xaa is A or G
  MOD_RES (18), (19), (20), (21): Xaa is A or G or is absent
XQSHEELSMEGIXXXXXXXXXMIQMTINSQGTPVXE

SEQ ID NO: 18608 - protein, 43 aa, Artificial Sequence
  GFR-binding peptide
  MOD_RES (2), (39): Xaa is C or S
KXALHDELTVTAKKFIPKKRVIEIKRVQVPRLQVQTPRXQVNR

SEQ ID NO: 18609 - protein, 41 aa, Artificial Sequence
  GFR-binding peptide
  MOD_RES (1), (3), (40): Xaa is C or S
XAXELHEELRVTAKKLKPKKRVYEIKRVQVPRHHVRSPQXK

SEQ ID NO: 18610 - protein, 37 aa, Artificial Sequence
  GFR-binding peptide
  MOD_RES (2), (4): Xaa is C or S
RXEXKNHQLFVQVEKHQGQHPKIRVKAMKVSREETPV

SEQ ID NO: 18611 - protein, 37 aa, Artificial Sequence
  GFR-binding peptide
  MOD_RES (2), (36): Xaa is C or S
EXKNHQLFVTAKKHQGQHPKIRIKRMQVPREETPVXE

SEQ ID NO: 18612 - protein, 39 aa, Artificial Sequence
  GFR-binding peptide
  MOD_RES (1), (3), (37): Xaa is C or S
  MOD_RES (15), (16), (17), (18), (19): Xaa is A or G
  MOD_RES (20), (21), (22), (23): Xaa is A or G or is absent
XEXQSHEELSMEGLXXXXXXXXXMIQMTINSQGTPVXEL

SEQ ID NO: 18613 - protein, 40 aa, Artificial Sequence
  GFR-binding peptide
  MOD_RES (1), (3), (40): Xaa is C or S
XKXALHDELTSMEGIFIPKKRVIEMIQVTINSLQVQTPRX

SEQ ID NO: 18614 - protein, 33 aa, Artificial Sequence
  GFR-binding peptide
  MOD_RES (12), (13), (14), (15), (16): Xaa is A or G
  MOD_RES (17), (18), (19), (20): Xaa is A or G or is absent
QSHEELVTAKKXXXXXXXXXIKRMQVPRQGTPV

SEQ ID NO: 18615 - protein, 44 aa, Artificial Sequence
  GFR-binding peptide
  MOD_RES (1), (3), (40): Xaa is C or S
XAXELHEELRSMEGILKPKKRVYEMIQVTINSHHVRSPQXKVSS

SEQ ID NO: 18616 - protein, 42 aa, Artificial Sequence
  GFR-binding peptide
  MOD_RES (2), (36): Xaa is C or S
  MOD_RES (14), (15), (16), (17), (18): Xaa is A or G
  MOD_RES (19), (20), (21), (22): Xaa is A or G or is absent
EXKNHQLFSMEGIXXXXXXXXXMIQMTINSEETPVXELGEDN

SEQ ID NO: 18617 - protein, 37 aa, Artificial Sequence
  GFR-binding peptide
  MOD_RES (35), (35): Xaa is C or S
HEELRSMEGLLKPKKRVYEMIQVTINSHHVRSPQXKV

SEQ ID NO: 18618 - protein, 39 aa, Artificial Sequence
  GFR-binding peptide
  MOD_RES (2), (4): Xaa is C or S
  MOD_RES (17), (18), (19), (20), (21): Xaa is A or G
  MOD_RES (22), (23), (24), (25): Xaa is A or G or is absent
EXKXALHDELTVTAKKXXXXXXXXXIKRVQVPRLQVQTP

SEQ ID NO: 18619 - protein, 37 aa, Artificial Sequence
  GFR-binding peptide
  MOD_RES (35), (35): Xaa is C or S
HEELRSMEGILKPKKRVYEMIQVTINSHHVRSPQXKV

SEQ ID NO: 18620 - protein, 36 aa, Artificial Sequence
  GFR-binding peptide
  MOD_RES (2), (2): Xaa is C or S
  MOD_RES (15), (16), (17), (18), (19): Xaa is A or G
  MOD_RES (20), (21), (22), (23): Xaa is A or G or is absent
AXELHEELRSMEGLXXXXXXXXXMIQVTINSHHVRS

SEQ ID NO: 18621 - protein, 41 aa, Artificial Sequence
  GFR-binding peptide
  MOD_RES (1), (3), (40): Xaa is C or S
XKXALHDELTSMEGLFIPKKRVIEMIQVTINSLQVQTPRXQ

SEQ ID NO: 18622 - protein, 37 aa, Artificial Sequence
  GFR-binding peptide
  MOD_RES (2), (36): Xaa is C or S
EXQSHEELVQVEKHQGQHPKIRVKAMKVSRQGTPVXE

SEQ ID NO: 18623 - protein, 43 aa, Artificial Sequence
  GFR-binding peptide
  MOD_RES (2), (4), (41): Xaa is C or S
  MOD_RES (17), (18), (19), (20), (21): Xaa is A or G
  MOD_RES (22), (23), (24), (25): Xaa is A or G or is absent
AXAXELHEELRVQVEKXXXXXXXXXVKAVKVSRHHVRSPQXKV

SEQ ID NO: 18624 - protein, 40 aa, Artificial Sequence
  GFR-binding peptide
  MOD_RES (1), (3), (37): Xaa is C or S
XEXKNHQLFSMEGIHQGQHPKIRMIQMTINSEETPVXELG

SEQ ID NO: 18625 - protein, 41 aa, Artificial Sequence
  GFR-binding peptide
  MOD_RES (2), (39): Xaa is C or S
KXALHDELTSMEGIFIPKKRVIEMIQVTINSLQVQTPRXQV

SEQ ID NO: 18626 - protein, 41 aa, Artificial Sequence
  GFR-binding peptide
  MOD_RES (2), (4), (38): Xaa is C or S
RXEXKNHQLFVQVEKHQGQHPKIRVKAMKVSREETPVXELG

SEQ ID NO: 18627 - protein, 37 aa, Artificial Sequence
  GFR-binding peptide
  MOD_RES (36), (36): Xaa is C or S
  MOD_RES (12), (13), (14), (15), (16): Xaa is A or G
  MOD_RES (17), (18), (19), (20): Xaa is A or G or is absent
LHDELTSMEGLXXXXXXXXXMIQVTINSLQVQTPRXQ

SEQ ID NO: 18628 - protein, 40 aa, Artificial Sequence
  GFR-binding peptide
  MOD_RES (2), (4), (38): Xaa is C or S
RXEXQSHEELVQVEKHQGQHPKIRVKAMKVSRQGTPVXEL

SEQ ID NO: 18629 - protein, 39 aa, Artificial Sequence
  GFR-binding peptide
  MOD_RES (1), (3): Xaa is C or S
XAXELHEELRVTAKKLKPKKRVYEIKRVQVPRHHVRSPQ

SEQ ID NO: 18630 - protein, 38 aa, Artificial Sequence
  GFR-binding peptide
  MOD_RES (1), (35): Xaa is C or S
XKNHQLFSMEGLHQGQHPKIRMIQMTINSEETPVXELG

SEQ ID NO: 18631 - protein, 39 aa, Artificial Sequence
  GFR-binding peptide
  MOD_RES (37), (37): Xaa is C or S
ALHDELTVQVEKFIPKKRVIEVKAVKVSRLQVQTPRXQV

SEQ ID NO: 18632 - protein, 40 aa, Artificial Sequence
  GFR-binding peptide
  MOD_RES (34), (34): Xaa is C or S
QSHEELVQVEKHQGQHPKIRVKAMKVSRQGTPVXELGEDN

SEQ ID NO: 18633 - protein, 34 aa, Artificial Sequence
  GFR-binding peptide
HEELRVQVEKLKPKKRVYEVKAVKVSRHHVRSPQ

SEQ ID NO: 18634 - protein, 38 aa, Artificial Sequence
  GFR-binding peptide
  MOD_RES (1), (3), (37): Xaa is C or S
  MOD_RES (15), (16), (17), (18), (19): Xaa is A or G
  MOD_RES (20), (21), (22), (23): Xaa is A or G or is absent
XEXKNHQLFSMEGIXXXXXXXXXMIQMTINSEETPVXE

SEQ ID NO: 18635 - protein, 39 aa, Artificial Sequence
  GFR-binding peptide
  MOD_RES (1), (3), (37): Xaa is C or S
  MOD_RES (15), (16), (17), (18), (19): Xaa is A or G
  MOD_RES (20), (21), (22), (23): Xaa is A or G or is absent
XEXQSHEELVQVEKXXXXXXXXXVKAMKVSRQGTPVXEL

SEQ ID NO: 18636 - protein, 36 aa, Artificial Sequence
  GFR-binding peptide
  MOD_RES (1), (3): Xaa is C or S
  MOD_RES (15), (16), (17), (18), (19): Xaa is A or G
  MOD_RES (20), (21), (22), (23): Xaa is A or G or is absent
XEXQSHEELSMEGLXXXXXXXXXMIQMTINSQGTPV

SEQ ID NO: 18637 - protein, 41 aa, Artificial Sequence
  GFR-binding peptide
  MOD_RES (1), (3), (37): Xaa is C or S
  MOD_RES (15), (16), (17), (18), (19): Xaa is A or G
  MOD_RES (20), (21), (22), (23): Xaa is A or G or is absent
XEXQSHEELSMEGIXXXXXXXXXMIQMTINSQGTPVXELGE

SEQ ID NO: 18638 - protein, 35 aa, Artificial Sequence
  GFR-binding peptide
  MOD_RES (12), (13), (14), (15), (16): Xaa is A or G
  MOD_RES (17), (18), (19), (20): Xaa is A or G or is absent
LHEELRVTAKKXXXXXXXXXIKRVQVPRHHVRSPQ

SEQ ID NO: 18639 - protein, 41 aa, Artificial Sequence
  GFR-binding peptide
  MOD_RES (2), (39): Xaa is C or S
  MOD_RES (15), (16), (17), (18), (19): Xaa is A or G
  MOD_RES (20), (21), (22), (23): Xaa is A or G or is absent
AXELHEELRVQVEKXXXXXXXXXVKAVKVSRHHVRSPQXKV

SEQ ID NO: 18640 - protein, 43 aa, Artificial Sequence
  GFR-binding peptide
  MOD_RES (1), (3), (40): Xaa is C or S
  MOD_RES (16), (17), (18), (19), (20): Xaa is A or G
  MOD_RES (21), (22), (23), (24): Xaa is A or G or is absent
XAXELHEELRVTAKKXXXXXXXXXIKRVQVPRHHVRSPQXKVS

SEQ ID NO: 18641 - protein, 39 aa, Artificial Sequence
  GFR-binding peptide
  MOD_RES (2), (4): Xaa is C or S
  MOD_RES (17), (18), (19), (20), (21): Xaa is A or G
  MOD_RES (22), (23), (24), (25): Xaa is A or G or is absent
AXAXELHEELRSMEGIXXXXXXXXXMIQVTINSHHVRSP

SEQ ID NO: 18642 - protein, 35 aa, Artificial Sequence
  GFR-binding peptide
ALHDELTSMEGIFIPKKRVIEMIQVTINSLQVQTP

SEQ ID NO: 18643 - protein, 40 aa, Artificial Sequence
  GFR-binding peptide
  MOD_RES (36), (36): Xaa is C or S
  MOD_RES (12), (13), (14), (15), (16): Xaa is A or G
  MOD_RES (17), (18), (19), (20): Xaa is A or G or is absent
LHDELTSMEGIXXXXXXXXXMIQVTINSLQVQTPRXQVNR

SEQ ID NO: 18644 - protein, 38 aa, Artificial Sequence
  GFR-binding peptide
  MOD_RES (2), (36): Xaa is C or S
EXKNHQLFVTAKKHQGQHPKIRIKRMQVPREETPVXEL

SEQ ID NO: 18645 - protein, 43 aa, Artificial Sequence
  GFR-binding peptide
  MOD_RES (2), (39): Xaa is C or S
  MOD_RES (15), (16), (17), (18), (19): Xaa is A or G
  MOD_RES (20), (21), (22), (23): Xaa is A or G or is absent
KXALHDELTSMEGLXXXXXXXXXMIQVTINSLQVQTPRXQVNR

SEQ ID NO: 18646 - protein, 41 aa, Artificial Sequence
  GFR-binding peptide
  MOD_RES (1), (38): Xaa is C or S
  MOD_RES (14), (15), (16), (17), (18): Xaa is A or G
  MOD_RES (19), (20), (21), (22): Xaa is A or G or is absent
XALHDELTSMEGIXXXXXXXXXMIQVTINSLQVQTPRXQVN

SEQ ID NO: 18647 - protein, 41 aa, Artificial Sequence
  GFR-binding peptide
  MOD_RES (2), (4), (41): Xaa is C or S
  MOD_RES (17), (18), (19), (20), (21): Xaa is A or G
  MOD_RES (22), (23), (24), (25): Xaa is A or G or is absent
EXKXALHDELTVTAKKXXXXXXXXXIKRVQVPRLQVQTPRX

SEQ ID NO: 18648 - protein, 38 aa, Artificial Sequence
  GFR-binding peptide
  MOD_RES (2), (2): Xaa is C or S
  MOD_RES (15), (16), (17), (18), (19): Xaa is A or G
  MOD_RES (20), (21), (22), (23): Xaa is A or G or is absent
AXELHEELRSMEGLXXXXXXXXXMIQVTINSHHVRSPQ

SEQ ID NO: 18649 - protein, 34 aa, Artificial Sequence
  GFR-binding peptide
  MOD_RES (34), (34): Xaa is C or S
  MOD_RES (12), (13), (14), (15), (16): Xaa is A or G
  MOD_RES (17), (18), (19), (20): Xaa is A or G or is absent
QSHEELVQVEKXXXXXXXXXVKAMKVSRQGTPVX

SEQ ID NO: 18650 - protein, 41 aa, Artificial Sequence
  GFR-binding peptide
  MOD_RES (2), (4), (38): Xaa is C or S
  MOD_RES (16), (17), (18), (19), (20): Xaa is A or G
  MOD_RES (21), (22), (23), (24): Xaa is A or G or is absent
RXEXKNHQLFVTAKKXXXXXXXXXIKRMQVPREETPVXELG

SEQ ID NO: 18651 - protein, 41 aa, Artificial Sequence
  GFR-binding peptide
  MOD_RES (2), (39): Xaa is C or S
  MOD_RES (15), (16), (17), (18), (19): Xaa is A or G
  MOD_RES (20), (21), (22), (23): Xaa is A or G or is absent
KXALHDELTSMEGIXXXXXXXXXMIQVTINSLQVQTPRXQV

SEQ ID NO: 18652 - protein, 35 aa, Artificial Sequence
  GFR-binding peptide
  MOD_RES (1), (35): Xaa is C or S
  MOD_RES (13), (14), (15), (16), (17): Xaa is A or G
  MOD_RES (18), (19), (20), (21): Xaa is A or G or is absent
XKNHQLFVQVEKXXXXXXXXXVKAMKVSREETPVX

SEQ ID NO: 18653 - protein, 39 aa, Artificial Sequence
  GFR-binding peptide
  MOD_RES (36), (36): Xaa is C or S
LHDELTSMEGIFIPKKRVIEMIQVTINSLQVQTPRXQVN

SEQ ID NO: 18654 - protein, 38 aa, Artificial Sequence
  GFR-binding peptide
  MOD_RES (1), (35): Xaa is C or S
  MOD_RES (13), (14), (15), (16), (17): Xaa is A or G
  MOD_RES (18), (19), (20), (21): Xaa is A or G or is absent
XQSHEELVTAKKXXXXXXXXXIKRMQVPRQGTPVXELG

SEQ ID NO: 18655 - protein, 40 aa, Artificial Sequence
  GFR-binding peptide
  MOD_RES (36), (36): Xaa is C or S
LHDELTVQVEKFIPKKRVIEVKAVKVSRLQVQTPRXQVNR

SEQ ID NO: 18656 - protein, 37 aa, Artificial Sequence
  GFR-binding peptide
  MOD_RES (2), (2): Xaa is C or S
AXELHEELRSMEGILKPKKRVYEMIQVTINSHHVRSP

SEQ ID NO: 18657 - protein, 42 aa, Artificial Sequence
  GFR-binding peptide
  MOD_RES (2), (36): Xaa is C or S
EXKNHQLFSMEGLHQGQHPKIRMIQMTINSEETPVXELGEDN

SEQ ID NO: 18658 - protein, 41 aa, Artificial Sequence
  GFR-binding peptide
  MOD_RES (2), (4), (41): Xaa is C or S
  MOD_RES (17), (18), (19), (20), (21): Xaa is A or G
  MOD_RES (22), (23), (24), (25): Xaa is A or G or is absent
EXKXALHDELTSMEGLXXXXXXXXXMIQVTINSLQVQTPRX

SEQ ID NO: 18659 - protein, 36 aa, Artificial Sequence
  GFR-binding peptide
  MOD_RES (1), (3): Xaa is C or S
XEXKNHQLFSMEGLHQGQHPKIRMIQMTINSEETPV

SEQ ID NO: 18660 - protein, 37 aa, Artificial Sequence
  GFR-binding peptide
  MOD_RES (37), (37): Xaa is C or S
  MOD_RES (13), (14), (15), (16), (17): Xaa is A or G
  MOD_RES (18), (19), (20), (21): Xaa is A or G or is absent
ELHEELRSMEGIXXXXXXXXXMIQVTINSHHVRSPQX

SEQ ID NO: 18661 - protein, 41 aa, Artificial Sequence
  GFR-binding peptide
  MOD_RES (1), (38): Xaa is C or S
XELHEELRVTAKKLKPKKRVYEIKRVQVPRHHVRSPQXKVS

SEQ ID NO: 18662 - protein, 41 aa, Artificial Sequence
  GFR-binding peptide
  MOD_RES (1), (3), (37): Xaa is C or S
XEXKNHQLFSMEGIHQGQHPKIRMIQMTINSEETPVXELGE

SEQ ID NO: 18663 - protein, 36 aa, Artificial Sequence
  GFR-binding peptide
  MOD_RES (34), (34): Xaa is C or S
QSHEELVTAKKHQGQHPKIRIKRMQVPRQGTPVXEL

SEQ ID NO: 18664 - protein, 36 aa, Artificial Sequence
  GFR-binding peptide
  MOD_RES (1), (35): Xaa is C or S
XQSHEELSMEGLHQGQHPKIRMIQMTINSQGTPVXE

SEQ ID NO: 18665 - protein, 40 aa, Artificial Sequence
  GFR-binding peptide
  MOD_RES (1), (3), (40): Xaa is C or S
  MOD_RES (16), (17), (18), (19), (20): Xaa is A or G
  MOD_RES (21), (22), (23), (24): Xaa is A or G or is absent
XAXELHEELRVTAKKXXXXXXXXXIKRVQVPRHHVRSPQX

SEQ ID NO: 18666 - protein, 43 aa, Artificial Sequence
  GFR-binding peptide
  MOD_RES (2), (39): Xaa is C or S
KXALHDELTSMEGLFIPKKRVIEMIQVTINSLQVQTPRXQVNR

SEQ ID NO: 18667 - protein, 37 aa, Artificial Sequence
  GFR-binding peptide
  MOD_RES (2), (4): Xaa is C or S
  MOD_RES (16), (17), (18), (19), (20): Xaa is A or G
  MOD_RES (21), (22), (23), (24): Xaa is A or G or is absent
RXEXKNHQLFVTAKKXXXXXXXXXIKRMQVPREETPV

SEQ ID NO: 18668 - protein, 39 aa, Artificial Sequence
  GFR-binding peptide
  MOD_RES (36), (36): Xaa is C or S
LHDELTVTAKKFIPKKRVIEIKRVQVPRLQVQTPRXQVN

SEQ ID NO: 18669 - protein, 32 aa, Artificial Sequence
  GFR-binding peptide
  MOD_RES (11), (12), (13), (14), (15): Xaa is A or G
  MOD_RES (16), (17), (18), (19): Xaa is A or G or is absent
HEELRVQVEKXXXXXXXXXVKAVKVSRHHVRS

SEQ ID NO: 18670 - protein, 37 aa, Artificial Sequence
  GFR-binding peptide
  MOD_RES (1), (3): Xaa is C or S
  MOD_RES (16), (17), (18), (19), (20): Xaa is A or G
  MOD_RES (21), (22), (23), (24): Xaa is A or G or is absent
XKXALHDELTVQVEKXXXXXXXXXVKAVKVSRLQVQT

SEQ ID NO: 18671 - protein, 40 aa, Artificial Sequence
  GFR-binding peptide
  MOD_RES (1), (3), (37): Xaa is C or S
  MOD_RES (15), (16), (17), (18), (19): Xaa is A or G
  MOD_RES (20), (21), (22), (23): Xaa is A or G or is absent
XEXQSHEELVTAKKXXXXXXXXXIKRMQVPRQGTPVXELG

SEQ ID NO: 18672 - protein, 39 aa, Artificial Sequence
  GFR-binding peptide
  MOD_RES (35), (35): Xaa is C or S
  MOD_RES (11), (12), (13), (14), (15): Xaa is A or G
  MOD_RES (16), (17), (18), (19): Xaa is A or G or is absent
HDELTSMEGIXXXXXXXXXMIQVTINSLQVQTPRXQVNR

SEQ ID NO: 18673 - protein, 34 aa, Artificial Sequence
  GFR-binding peptide
  MOD_RES (1), (1): Xaa is C or S
  MOD_RES (13), (14), (15), (16), (17): Xaa is A or G
  MOD_RES (18), (19), (20), (21): Xaa is A or G or is absent
XKNHQLFVQVEKXXXXXXXXXVKAMKVSREETPV

SEQ ID NO: 18674 - protein, 36 aa, Artificial Sequence
  GFR-binding peptide
  MOD_RES (34), (34): Xaa is C or S
QSHEELSMEGIHQGQHPKIRMIQMTINSQGTPVXEL

SEQ ID NO: 18675 - protein, 37 aa, Artificial Sequence
  GFR-binding peptide
  MOD_RES (1), (1): Xaa is C or S
  MOD_RES (14), (15), (16), (17), (18): Xaa is A or G
  MOD_RES (19), (20), (21), (22): Xaa is A or G or is absent
XALHDELTSMEGLXXXXXXXXXMIQVTINSLQVQTPR

SEQ ID NO: 18676 - protein, 39 aa, Artificial Sequence
  GFR-binding peptide
  MOD_RES (35), (35): Xaa is C or S
  MOD_RES (11), (12), (13), (14), (15): Xaa is A or G
  MOD_RES (16), (17), (18), (19): Xaa is A or G or is absent
HDELTSMEGLXXXXXXXXXMIQVTINSLQVQTPRXQVNR

SEQ ID NO: 18677 - protein, 36 aa, Artificial Sequence
  GFR-binding peptide
  MOD_RES (2), (36): Xaa is C or S
EXKNHQLFSMEGIHQGQHPKIRMIQMTINSEETPVX

SEQ ID NO: 18678 - protein, 38 aa, Artificial Sequence
  GFR-binding peptide
  MOD_RES (1), (3), (37): Xaa is C or S
  MOD_RES (15), (16), (17), (18), (19): Xaa is A or G
  MOD_RES (20), (21), (22), (23): Xaa is A or G or is absent
XEXKNHQLFVTAKKXXXXXXXXXIKRMQVPREETPVXE

SEQ ID NO: 18679 - protein, 39 aa, Artificial Sequence
  GFR-binding peptide
  MOD_RES (1), (35): Xaa is C or S
XKNHQLFSMEGIHQGQHPKIRMIQMTINSEETPVXELGE

SEQ ID NO: 18680 - protein, 36 aa, Artificial Sequence
  GFR-binding peptide
ELHEELRSMEGLLKPKKRVYEMIQVTINSHHVRSPQ

SEQ ID NO: 18681 - protein, 39 aa, Artificial Sequence
  GFR-binding peptide
  MOD_RES (2), (36): Xaa is C or S
  MOD_RES (14), (15), (16), (17), (18): Xaa is A or G
  MOD_RES (19), (20), (21), (22): Xaa is A or G or is absent
EXKNHQLFVTAKKXXXXXXXXXIKRMQVPREETPVXELG

SEQ ID NO: 18682 - protein, 36 aa, Artificial Sequence
  GFR-binding peptide
  MOD_RES (36), (36): Xaa is C or S
  MOD_RES (12), (13), (14), (15), (16): Xaa is A or G
  MOD_RES (17), (18), (19), (20): Xaa is A or G or is absent
LHEELRVTAKKXXXXXXXXXIKRVQVPRHHVRSPQX

SEQ ID NO: 18683 - protein, 42 aa, Artificial Sequence
  GFR-binding peptide
  MOD_RES (2), (4), (41): Xaa is C or S
EXKXALHDELTSMEGIFIPKKRVIEMIQVTINSLQVQTPRXQ

SEQ ID NO: 18684 - protein, 41 aa, Artificial Sequence
  GFR-binding peptide
  MOD_RES (2), (36): Xaa is C or S
  MOD_RES (14), (15), (16), (17), (18): Xaa is A or G
  MOD_RES (19), (20), (21), (22): Xaa is A or G or is absent
EXKNHQLFVTAKKXXXXXXXXXIKRMQVPREETPVXELGED

SEQ ID NO: 18685 - protein, 34 aa, Artificial Sequence
  GFR-binding peptide
  MOD_RES (11), (12), (13), (14), (15): Xaa is A or G
  MOD_RES (16), (17), (18), (19): Xaa is A or G or is absent
HDELTSMEGIXXXXXXXXXMIQVTINSLQVQTPR

SEQ ID NO: 18686 - protein, 34 aa, Artificial Sequence
  GFR-binding peptide
  MOD_RES (1), (1): Xaa is C or S
XKNHQLFVQVEKHQGQHPKIRVKAMKVSREETPV

SEQ ID NO: 18687 - protein, 36 aa, Artificial Sequence
  GFR-binding peptide
  MOD_RES (36), (36): Xaa is C or S
  MOD_RES (12), (13), (14), (15), (16): Xaa is A or G
  MOD_RES (17), (18), (19), (20): Xaa is A or G or is absent
LHEELRSMEGIXXXXXXXXXMIQVTINSHHVRSPQX

SEQ ID NO: 18688 - protein, 41 aa, Artificial Sequence
  GFR-binding peptide
  MOD_RES (1), (3), (37): Xaa is C or S
  MOD_RES (15), (16), (17), (18), (19): Xaa is A or G
  MOD_RES (20), (21), (22), (23): Xaa is A or G or is absent
XEXQSHEELVTAKKXXXXXXXXXIKRMQVPRQGTPVXELGE

SEQ ID NO: 18689 - protein, 36 aa, Artificial Sequence
  GFR-binding peptide
  MOD_RES (34), (34): Xaa is C or S
  MOD_RES (12), (13), (14), (15), (16): Xaa is A or G
  MOD_RES (17), (18), (19), (20): Xaa is A or G or is absent
QSHEELSMEGLXXXXXXXXXMIQMTINSQGTPVXEL

SEQ ID NO: 18690 - protein, 39 aa, Artificial Sequence
  GFR-binding peptide
  MOD_RES (37), (37): Xaa is C or S
ALHDELTSMEGLFIPKKRVIEMIQVTINSLQVQTPRXQV

SEQ ID NO: 18691 - protein, 40 aa, Artificial Sequence
  GFR-binding peptide
  MOD_RES (1), (38): Xaa is C or S
  MOD_RES (14), (15), (16), (17), (18): Xaa is A or G
  MOD_RES (19), (20), (21), (22): Xaa is A or G or is absent
XELHEELRSMEGIXXXXXXXXXMIQVTINSHHVRSPQXKV

SEQ ID NO: 18692 - protein, 35 aa, Artificial Sequence
  GFR-binding peptide
  MOD_RES (1), (1): Xaa is C or S
  MOD_RES (14), (15), (16), (17), (18): Xaa is A or G
  MOD_RES (19), (20), (21), (22): Xaa is A or G or is absent
XELHEELRSMEGLXXXXXXXXXMIQVTINSHHVRS

SEQ ID NO: 18693 - protein, 34 aa, Artificial Sequence
  GFR-binding peptide
  MOD_RES (34), (34): Xaa is C or S
QSHEELSMEGLHQGQHPKIRMIQMTINSQGTPVX

SEQ ID NO: 18694 - protein, 37 aa, Artificial Sequence
  GFR-binding peptide
  MOD_RES (1), (35): Xaa is C or S
XQSHEELVQVEKHQGQHPKIRVKAMKVSRQGTPVXEL

SEQ ID NO: 18695 - protein, 41 aa, Artificial Sequence
  GFR-binding peptide
  MOD_RES (1), (35): Xaa is C or S
  MOD_RES (13), (14), (15), (16), (17): Xaa is A or G
  MOD_RES (18), (19), (20), (21): Xaa is A or G or is absent
XKNHQLFVTAKKXXXXXXXXXIKRMQVPREETPVXELGEDN

SEQ ID NO: 18696 - protein, 43 aa, Artificial Sequence
  GFR-binding peptide
  MOD_RES (2), (39): Xaa is C or S
AXELHEELRVQVEKLKPKKRVYEVKAVKVSRHHVRSPQXKVSS

SEQ ID NO: 18697 - protein, 37 aa, Artificial Sequence
  GFR-binding peptide
  MOD_RES (1), (35): Xaa is C or S
  MOD_RES (13), (14), (15), (16), (17): Xaa is A or G
  MOD_RES (18), (19), (20), (21): Xaa is A or G or is absent
XQSHEELVQVEKXXXXXXXXXVKAMKVSRQGTPVXEL

SEQ ID NO: 18698 - protein, 35 aa, Artificial Sequence
  GFR-binding peptide
  MOD_RES (2), (2): Xaa is C or S
  MOD_RES (14), (15), (16), (17), (18): Xaa is A or G
  MOD_RES (19), (20), (21), (22): Xaa is A or G or is absent
EXQSHEELSMEGLXXXXXXXXXMIQMTINSQGTPV

SEQ ID NO: 18699 - protein, 39 aa, Artificial Sequence
  GFR-binding peptide
  MOD_RES (1), (35): Xaa is C or S
  MOD_RES (13), (14), (15), (16), (17): Xaa is A or G
  MOD_RES (18), (19), (20), (21): Xaa is A or G or is absent
XKNHQLFSMEGIXXXXXXXXXMIQMTINSEETPVXELGE

SEQ ID NO: 18700 - protein, 38 aa, Artificial Sequence
  GFR-binding peptide
  MOD_RES (35), (35): Xaa is C or S
  MOD_RES (11), (12), (13), (14), (15): Xaa is A or G
  MOD_RES (16), (17), (18), (19): Xaa is A or G or is absent
HEELRVQVEKXXXXXXXXXVKAVKVSRHHVRSPQXKVS

SEQ ID NO: 18701 - protein, 40 aa, Artificial Sequence
  GFR-binding peptide
  MOD_RES (2), (4), (38): Xaa is C or S
  MOD_RES (16), (17), (18), (19), (20): Xaa is A or G
  MOD_RES (21), (22), (23), (24): Xaa is A or G or is absent
RXEXQSHEELVTAKKXXXXXXXXXIKRMQVPRQGTPVXEL

SEQ ID NO: 18702 - protein, 38 aa, Artificial Sequence
  GFR-binding peptide
  MOD_RES (2), (2): Xaa is C or S
  MOD_RES (15), (16), (17), (18), (19): Xaa is A or G
  MOD_RES (20), (21), (22), (23): Xaa is A or G or is absent
AXELHEELRVTAKKXXXXXXXXXIKRVQVPRHHVRSPQ

SEQ ID NO: 18703 - protein, 42 aa, Artificial Sequence
  GFR-binding peptide
  MOD_RES (7), (41): Xaa is C or S
  MOD_RES (21), (22), (23), (24), (25): Xaa is A or G
  MOD_RES (26), (27), (28), (29): Xaa is A or G or is absent
NDEGLEXVPTEERSVKMAKVXXXXXXXXXKEVQVFLQHNKXE

SEQ ID NO: 18704 - protein, 37 aa, Artificial Sequence
  GFR-binding peptide
  MOD_RES (37), (37): Xaa is C or S
  MOD_RES (16), (17), (18), (19), (20): Xaa is A or G
  MOD_RES (21), (22), (23), (24): Xaa is A or G or is absent
QPSRVHHSNITVQIMXXXXXXXXXLGEMSRLEEHLEX

SEQ ID NO: 18705 - protein, 36 aa, Artificial Sequence
  GFR-binding peptide
  MOD_RES (34), (36): Xaa is C or S
VPTGQSNITMQIMRIKPHQGQHIGEMSLEEHSQXEX

SEQ ID NO: 18706 - protein, 40 aa, Artificial Sequence
  GFR-binding peptide
  MOD_RES (6), (40): Xaa is C or S
  MOD_RES (20), (21), (22), (23), (24): Xaa is A or G
  MOD_RES (25), (26), (27), (28): Xaa is A or G or is absent
DEGLEXVPTGQSNITMQIMXXXXXXXXXLGEMSLEEHSQX

SEQ ID NO: 18707 - protein, 43 aa, Artificial Sequence
  GFR-binding peptide
  MOD_RES (7), (41), (43): Xaa is C or S
NDEGLEXVPTEESNITMQIMRIKPHQGQHLGEMSFLQHNKXEX

SEQ ID NO: 18708 - protein, 35 aa, Artificial Sequence
  GFR-binding peptide
  MOD_RES (1), (35): Xaa is C or S
XVPTGQSNITMQIMRIKPHQGQHIGEMSLEEHSQX

SEQ ID NO: 18709 - protein, 42 aa, Artificial Sequence
  GFR-binding peptide
  MOD_RES (2), (39), (41): Xaa is C or S
  MOD_RES (18), (19), (20), (21), (22): Xaa is A or G
  MOD_RES (23), (24), (25), (26): Xaa is A or G or is absent
KXQPSRVHHSNITVQIMXXXXXXXXXIGEMSRLEEHLEXAXA

SEQ ID NO: 18710 - protein, 38 aa, Artificial Sequence
  GFR-binding peptide
  MOD_RES (36), (38): Xaa is C or S
  MOD_RES (15), (16), (17), (18), (19): Xaa is A or G
  MOD_RES (20), (21), (22), (23): Xaa is A or G or is absent
PSRVHHSNITVQIMXXXXXXXXXIGEMSRLEEHLEXAX

SEQ ID NO: 18711 - protein, 41 aa, Artificial Sequence
  GFR-binding peptide
  MOD_RES (2), (39), (41): Xaa is C or S
  MOD_RES (18), (19), (20), (21), (22): Xaa is A or G
  MOD_RES (23), (24), (25), (26): Xaa is A or G or is absent
QXRPTQVQLSNITVQIMXXXXXXXXXIGEMSTLEDHLAXKX

SEQ ID NO: 18712 - protein, 39 aa, Artificial Sequence
  GFR-binding peptide
  MOD_RES (4), (38): Xaa is C or S
  MOD_RES (18), (19), (20), (21), (22): Xaa is A or G
  MOD_RES (23), (24), (25), (26): Xaa is A or G or is absent
GLEXVPTEERSVKMAKVXXXXXXXXXKEVQVFLQHNKXE

SEQ ID NO: 18713 - protein, 32 aa, Artificial Sequence
  GFR-binding peptide
VPTEERPVQMRKIRIKPHQGQHKKATVFLQHN

SEQ ID NO: 18714 - protein, 42 aa, Artificial Sequence
  GFR-binding peptide
  MOD_RES (5), (42): Xaa is C or S
SSVKXQPSRVHHRPVQVRKIEYVRKKPKLKKATVRLEEHLEX

SEQ ID NO: 18715 - protein, 34 aa, Artificial Sequence
  GFR-binding peptide
  MOD_RES (2), (2): Xaa is C or S
  MOD_RES (16), (17), (18), (19), (20): Xaa is A or G
  MOD_RES (21), (22), (23), (24): Xaa is A or G or is absent
EXVPTGQRPVQMRKIXXXXXXXXXKKATVLEEHS

SEQ ID NO: 18716 - protein, 35 aa, Artificial Sequence
  GFR-binding peptide
  MOD_RES (1), (1): Xaa is C or S
  MOD_RES (17), (18), (19), (20), (21): Xaa is A or G
  MOD_RES (22), (23), (24), (25): Xaa is A or G or is absent
XRPTQVQLRPVQVRKIXXXXXXXXXKKATVTLEDH

SEQ ID NO: 18717 - protein, 36 aa, Artificial Sequence
  GFR-binding peptide
  MOD_RES (2), (2): Xaa is C or S
  MOD_RES (18), (19), (20), (21), (22): Xaa is A or G
  MOD_RES (23), (24), (25), (26): Xaa is A or G or is absent
KXQPSRVHHSNITVQIMXXXXXXXXXLGEMSRLEEH

SEQ ID NO: 18718 - protein, 43 aa, Artificial Sequence
  GFR-binding peptide
  MOD_RES (7), (41), (43): Xaa is C or S
  MOD_RES (21), (22), (23), (24), (25): Xaa is A or G
  MOD_RES (26), (27), (28), (29): Xaa is A or G or is absent
NDEGLEXVPTGQRSVKMAKVXXXXXXXXXKEVQVLEEHSQXEX

SEQ ID NO: 18719 - protein, 40 aa, Artificial Sequence
  GFR-binding peptide
  MOD_RES (7), (7): Xaa is C or S
  MOD_RES (21), (22), (23), (24), (25): Xaa is A or G
  MOD_RES (26), (27), (28), (29): Xaa is A or G or is absent
NDEGLEXVPTGQRSVKMAKVXXXXXXXXXKEVQVLEEHSQ

SEQ ID NO: 18720 - protein, 38 aa, Artificial Sequence
  GFR-binding peptide
  MOD_RES (2), (2): Xaa is C or S
  MOD_RES (18), (19), (20), (21), (22): Xaa is A or G
  MOD_RES (23), (24), (25), (26): Xaa is A or G or is absent
QXRPTQVQLRSVKVAKVXXXXXXXXXKEVQVTLEDHLA

SEQ ID NO: 18721 - protein, 41 aa, Artificial Sequence
  GFR-binding peptide
  MOD_RES (4), (38), (40): Xaa is C or S
  MOD_RES (18), (19), (20), (21), (22): Xaa is A or G
  MOD_RES (23), (24), (25), (26): Xaa is A or G or is absent
GLEXVPTGQRSVKMAKVXXXXXXXXXKEVQVLEEHSQXEXR

SEQ ID NO: 18722 - protein, 36 aa, Artificial Sequence
  GFR-binding peptide
  MOD_RES (1), (35): Xaa is C or S
  MOD_RES (15), (16), (17), (18), (19): Xaa is A or G
  MOD_RES (20), (21), (22), (23): Xaa is A or G or is absent
XVPTGQRSVKMAKVXXXXXXXXXKEVQVLEEHSQXE

SEQ ID NO: 18723 - protein, 36 aa, Artificial Sequence
  GFR-binding peptide
  MOD_RES (1), (35): Xaa is C or S
  MOD_RES (15), (16), (17), (18), (19): Xaa is A or G
  MOD_RES (20), (21), (22), (23): Xaa is A or G or is absent
XVPTEESNITMQIMXXXXXXXXXIGEMSFLQHNKXE

SEQ ID NO: 18724 - protein, 35 aa, Artificial Sequence
  GFR-binding peptide
  MOD_RES (34), (34): Xaa is C or S
VPTEESNITMQIMRIKPHQGQHLGEMSFLQHNKXE

SEQ ID NO: 18725 - protein, 39 aa, Artificial Sequence
  GFR-binding peptide
  MOD_RES (2), (39): Xaa is C or S
KXQPSRVHHSNITVQIMEYVRKKPKLIGEMSRLEEHLEX

SEQ ID NO: 18726 - protein, 38 aa, Artificial Sequence
  GFR-binding peptide
  MOD_RES (4), (38): Xaa is C or S
  MOD_RES (18), (19), (20), (21), (22): Xaa is A or G
  MOD_RES (23), (24), (25), (26): Xaa is A or G or is absent
GLEXVPTEESNITMQIMXXXXXXXXXIGEMSFLQHNKX

SEQ ID NO: 18727 - protein, 36 aa, Artificial Sequence
  GFR-binding peptide
  MOD_RES (34), (36): Xaa is C or S
VPTEERSVKMAKVRIKPHQGQHKEVQVFLQHNKXEX

SEQ ID NO: 18728 - protein, 40 aa, Artificial Sequence
  GFR-binding peptide
  MOD_RES (2), (39): Xaa is C or S
  MOD_RES (18), (19), (20), (21), (22): Xaa is A or G
  MOD_RES (23), (24), (25), (26): Xaa is A or G or is absent
QXRPTQVQLRSVKVAKVXXXXXXXXXKEVQVTLEDHLAXK

SEQ ID NO: 18729 - protein, 37 aa, Artificial Sequence
  GFR-binding peptide
  MOD_RES (4), (4): Xaa is C or S
  MOD_RES (18), (19), (20), (21), (22): Xaa is A or G
  MOD_RES (23), (24), (25), (26): Xaa is A or G or is absent
GLEXVPTGQRSVKMAKVXXXXXXXXXKEVQVLEEHSQ

SEQ ID NO: 18730 - protein, 37 aa, Artificial Sequence
  GFR-binding peptide
  MOD_RES (2), (2): Xaa is C or S
  MOD_RES (18), (19), (20), (21), (22): Xaa is A or G
  MOD_RES (23), (24), (25), (26): Xaa is A or G or is absent
KXQPSRVHHRSVKVAKVXXXXXXXXXKEVQVRLEEHL

SEQ ID NO: 18731 - protein, 40 aa, Artificial Sequence
  GFR-binding peptide
  MOD_RES (37), (39): Xaa is C or S
  MOD_RES (16), (17), (18), (19), (20): Xaa is A or G
  MOD_RES (21), (22), (23), (24): Xaa is A or G or is absent
RPTQVQLRSVKVAKVXXXXXXXXXKEVQVTLEDHLAXKXE

SEQ ID NO: 18732 - protein, 37 aa, Artificial Sequence
  GFR-binding peptide
  MOD_RES (1), (1): Xaa is C or S
XRPTQVQLRSVKVAKVEIVRKKPIFKEVQVTLEDHLA

SEQ ID NO: 18733 - protein, 42 aa, Artificial Sequence
  GFR-binding peptide
  MOD_RES (5), (42): Xaa is C or S
  MOD_RES (21), (22), (23), (24), (25): Xaa is A or G
  MOD_RES (26), (27), (28), (29): Xaa is A or G or is absent
RNVQXRPTQVQLSNITVQIMXXXXXXXXXIGEMSTLEDHLAX

SEQ ID NO: 18734 - protein, 36 aa, Artificial Sequence
  GFR-binding peptide
  MOD_RES (35), (35): Xaa is C or S
  MOD_RES (14), (15), (16), (17), (18): Xaa is A or G
  MOD_RES (19), (20), (21), (22): Xaa is A or G or is absent
SRVHHRPVQVRKIXXXXXXXXXKKATVRLEEHLEXA

SEQ ID NO: 18735 - protein, 36 aa, Artificial Sequence
  GFR-binding peptide
  MOD_RES (1), (1): Xaa is C or S
XQPSRVHHSNITVQIMEYVRKKPKLIGEMSRLEEHL

SEQ ID NO: 18736 - protein, 45 aa, Artificial Sequence
  GFR-binding peptide
  MOD_RES (5), (42), (44): Xaa is C or S
SSVKXQPSRVHHSNITVQIMEYVRKKPKLIGEMSRLEEHLEXAXA

SEQ ID NO: 18737 - protein, 34 aa, Artificial Sequence
  GFR-binding peptide
SRVHHRPVQVRKIEYVRKKPKLKKATVRLEEHLE

SEQ ID NO: 18738 - protein, 37 aa, Artificial Sequence
  GFR-binding peptide
  MOD_RES (34), (36): Xaa is C or S
VPTGQRPVQMRKIRIKPHQGQHKKATVLEEHSQXEXR

SEQ ID NO: 18739 - protein, 35 aa, Artificial Sequence
  GFR-binding peptide
  MOD_RES (1), (1): Xaa is C or S
XRPTQVQLSNITVQIMEIVRKKPIFIGEMSTLEDH

SEQ ID NO: 18740 - protein, 37 aa, Artificial Sequence
  GFR-binding peptide
  MOD_RES (37), (37): Xaa is C or S
  MOD_RES (16), (17), (18), (19), (20): Xaa is A or G
  MOD_RES (21), (22), (23), (24): Xaa is A or G or is absent
QPSRVHHRSVKVAKVXXXXXXXXXKEVQVRLEEHLEX

SEQ ID NO: 18741 - protein, 34 aa, Artificial Sequence
  GFR-binding peptide
  MOD_RES (34), (34): Xaa is C or S
  MOD_RES (14), (15), (16), (17), (18): Xaa is A or G
  MOD_RES (19), (20), (21), (22): Xaa is A or G or is absent
VPTEESNITMQIMXXXXXXXXXLGEMSFLQHNKX

SEQ ID NO: 18742 - protein, 33 aa, Artificial Sequence
  GFR-binding peptide
VPTEESNITMQIMRIKPHQGQHLGEMSFLQHNK

SEQ ID NO: 18743 - protein, 44 aa, Artificial Sequence
  GFR-binding peptide
  MOD_RES (4), (41), (43): Xaa is C or S
NVQXRPTQVQLSNITVQIMEIVRKKPIFIGEMSTLEDHLAXKXE

SEQ ID NO: 18744 - protein, 40 aa, Artificial Sequence
  GFR-binding peptide
  MOD_RES (4), (38), (40): Xaa is C or S
  MOD_RES (18), (19), (20), (21), (22): Xaa is A or G
  MOD_RES (23), (24), (25), (26): Xaa is A or G or is absent
GLEXVPTEERSVKMAKVXXXXXXXXXKEVQVFLQHNKXEX

SEQ ID NO: 18745 - protein, 39 aa, Artificial Sequence
  GFR-binding peptide
  MOD_RES (4), (38): Xaa is C or S
  MOD_RES (18), (19), (20), (21), (22): Xaa is A or G
  MOD_RES (23), (24), (25), (26): Xaa is A or G or is absent
GLEXVPTEESNITMQIMXXXXXXXXXLGEMSFLQHNKXE

SEQ ID NO: 18746 - protein, 38 aa, Artificial Sequence
  GFR-binding peptide
  MOD_RES (2), (36), (38): Xaa is C or S
  MOD_RES (16), (17), (18), (19), (20): Xaa is A or G
  MOD_RES (21), (22), (23), (24): Xaa is A or G or is absent
EXVPTGQSNITMQIMXXXXXXXXXLGEMSLEEHSQXEX

SEQ ID NO: 18747 - protein, 41 aa, Artificial Sequence
  GFR-binding peptide
  MOD_RES (7), (41): Xaa is C or S
  MOD_RES (21), (22), (23), (24), (25): Xaa is A or G
  MOD_RES (26), (27), (28), (29): Xaa is A or G or is absent
NDEGLEXVPTGQRSVKMAKVXXXXXXXXXKEVQVLEEHSQX

SEQ ID NO: 18748 - protein, 42 aa, Artificial Sequence
  GFR-binding peptide
  MOD_RES (4), (41): Xaa is C or S
  MOD_RES (20), (21), (22), (23), (24): Xaa is A or G
  MOD_RES (25), (26), (27), (28): Xaa is A or G or is absent
NVQXRPTQVQLSNITVQIMXXXXXXXXXIGEMSTLEDHLAXK

SEQ ID NO: 18749 - protein, 36 aa, Artificial Sequence
  GFR-binding peptide
  MOD_RES (4), (4): Xaa is C or S
  MOD_RES (18), (19), (20), (21), (22): Xaa is A or G
  MOD_RES (23), (24), (25), (26): Xaa is A or G or is absent
GLEXVPTGQRSVKMAKVXXXXXXXXXKEVQVLEEHS

SEQ ID NO: 18750 - protein, 38 aa, Artificial Sequence
  GFR-binding peptide
  MOD_RES (3), (37): Xaa is C or S
LEXVPTGQRSVKMAKVRIKPHQGQHKEVQVLEEHSQXE

SEQ ID NO: 18751 - protein, 38 aa, Artificial Sequence
  GFR-binding peptide
  MOD_RES (37), (37): Xaa is C or S
QPSRVHHRPVQVRKIEYVRKKPKLKKATVRLEEHLEXA

SEQ ID NO: 18752 - protein, 40 aa, Artificial Sequence
  GFR-binding peptide
  MOD_RES (6), (40): Xaa is C or S
DEGLEXVPTGQSNITMQIMRIKPHQGQHIGEMSLEEHSQX

SEQ ID NO: 18753 - protein, 37 aa, Artificial Sequence
  GFR-binding peptide
  MOD_RES (34), (36): Xaa is C or S
  MOD_RES (14), (15), (16), (17), (18): Xaa is A or G
  MOD_RES (19), (20), (21), (22): Xaa is A or G or is absent
VPTGQSNITMQIMXXXXXXXXXIGEMSLEEHSQXEXR

SEQ ID NO: 18754 - protein, 39 aa, Artificial Sequence
  GFR-binding peptide
  MOD_RES (5), (5): Xaa is C or S
  MOD_RES (21), (22), (23), (24), (25): Xaa is A or G
  MOD_RES (26), (27), (28), (29): Xaa is A or G or is absent
SSVKXQPSRVHHRPVQVRKIXXXXXXXXXKKATVRLEEH

SEQ ID NO: 18755 - protein, 37 aa, Artificial Sequence
  GFR-binding peptide
  MOD_RES (3), (3): Xaa is C or S
VQXRPTQVQLSNITVQIMEIVRKKPIFIGEMSTLEDH

SEQ ID NO: 18756 - protein, 43 aa, Artificial Sequence
  GFR-binding peptide
  MOD_RES (5), (42): Xaa is C or S
  MOD_RES (21), (22), (23), (24), (25): Xaa is A or G
  MOD_RES (26), (27), (28), (29): Xaa is A or G or is absent
SSVKXQPSRVHHRSVKVAKVXXXXXXXXXKEVQVRLEEHLEXA

SEQ ID NO: 18757 - protein, 42 aa, Artificial Sequence
  GFR-binding peptide
  MOD_RES (6), (40), (42): Xaa is C or S
DEGLEXVPTEERPVQMRKIRIKPHQGQHKKATVFLQHNKXEX

SEQ ID NO: 18758 - protein, 41 aa, Artificial Sequence
  GFR-binding peptide
  MOD_RES (4), (41): Xaa is C or S
SVKXQPSRVHHSNITVQIMEYVRKKPKLIGEMSRLEEHLEX

SEQ ID NO: 18759 - protein, 35 aa, Artificial Sequence
  GFR-binding peptide
  MOD_RES (15), (16), (17), (18), (19): Xaa is A or G
  MOD_RES (20), (21), (22), (23): Xaa is A or G or is absent
PTQVQLRSVKVAKVXXXXXXXXXKEVQVTLEDHLA

SEQ ID NO: 18760 - protein, 38 aa, Artificial Sequence
  GFR-binding peptide
  MOD_RES (4), (4): Xaa is C or S
SVKXQPSRVHHRPVQVRKIEYVRKKPKLKKATVRLEEH

SEQ ID NO: 18761 - protein, 37 aa, Artificial Sequence
  GFR-binding peptide
  MOD_RES (5), (5): Xaa is C or S
EGLEXVPTEERSVKMAKVRIKPHQGQHKEVQVFLQHN

SEQ ID NO: 18762 - protein, 38 aa, Artificial Sequence
  GFR-binding peptide
  MOD_RES (1), (35), (37): Xaa is C or S
XVPTGQRPVQMRKIRIKPHQGQHKKATVLEEHSQXEXR

SEQ ID NO: 18763 - protein, 40 aa, Artificial Sequence
  GFR-binding peptide
  MOD_RES (4), (38), (40): Xaa is C or S
  MOD_RES (18), (19), (20), (21), (22): Xaa is A or G
  MOD_RES (23), (24), (25), (26): Xaa is A or G or is absent
GLEXVPTGQSNITMQIMXXXXXXXXXIGEMSLEEHSQXEX

SEQ ID NO: 18764 - protein, 43 aa, Artificial Sequence
  GFR-binding peptide
  MOD_RES (6), (40), (42): Xaa is C or S
  MOD_RES (20), (21), (22), (23), (24): Xaa is A or G
  MOD_RES (25), (26), (27), (28): Xaa is A or G or is absent
DEGLEXVPTGQSNITMQIMXXXXXXXXXLGEMSLEEHSQXEXR

SEQ ID NO: 18765 - protein, 35 aa, Artificial Sequence
  GFR-binding peptide
  MOD_RES (1), (1): Xaa is C or S
XQPSRVHHRPVQVRKIEYVRKKPKLKKATVRLEEH

SEQ ID NO: 18766 - protein, 39 aa, Artificial Sequence
  GFR-binding peptide
  MOD_RES (2), (36), (38): Xaa is C or S
EXVPTGQSNITMQIMRIKPHQGQHIGEMSLEEHSQXEXR

SEQ ID NO: 18767 - protein, 35 aa, Artificial Sequence
  GFR-binding peptide
  MOD_RES (3), (3): Xaa is C or S
LEXVPTEERSVKMAKVRIKPHQGQHKEVQVFLQHN

SEQ ID NO: 18768 - protein, 40 aa, Artificial Sequence
  GFR-binding peptide
  MOD_RES (4), (4): Xaa is C or S
  MOD_RES (20), (21), (22), (23), (24): Xaa is A or G
  MOD_RES (25), (26), (27), (28): Xaa is A or G or is absent
SVKXQPSRVHHRPVQVRKIXXXXXXXXXKKATVRLEEHLE

SEQ ID NO: 18769 - protein, 34 aa, Artificial Sequence
  GFR-binding peptide
  MOD_RES (1), (1): Xaa is C or S
  MOD_RES (15), (16), (17), (18), (19): Xaa is A or G
  MOD_RES (20), (21), (22), (23): Xaa is A or G or is absent
XVPTGQSNITMQIMXXXXXXXXXLGEMSLEEHSQ

SEQ ID NO: 18770 - protein, 40 aa, Artificial Sequence
  GFR-binding peptide
  MOD_RES (4), (4): Xaa is C or S
NVQXRPTQVQLSNITVQIMEIVRKKPIFLGEMSTLEDHLA

SEQ ID NO: 18771 - protein, 38 aa, Artificial Sequence
  GFR-binding peptide
  MOD_RES (1), (35), (37): Xaa is C or S
XVPTGQRSVKMAKVRIKPHQGQHKEVQVLEEHSQXEXR

SEQ ID NO: 18772 - protein, 42 aa, Artificial Sequence
  GFR-binding peptide
  MOD_RES (7), (41): Xaa is C or S
  MOD_RES (21), (22), (23), (24), (25): Xaa is A or G
  MOD_RES (26), (27), (28), (29): Xaa is A or G or is absent
NDEGLEXVPTEESNITMQIMXXXXXXXXXLGEMSFLQHNKXE

SEQ ID NO: 18773 - protein, 45 aa, Artificial Sequence
  GFR-binding peptide
  MOD_RES (5), (42), (44): Xaa is C or S
RNVQXRPTQVQLSNITVQIMEIVRKKPIFLGEMSTLEDHLAXKXE

SEQ ID NO: 18774 - protein, 42 aa, Artificial Sequence
  GFR-binding peptide
  MOD_RES (5), (39), (41): Xaa is C or S
  MOD_RES (19), (20), (21), (22), (23): Xaa is A or G
  MOD_RES (24), (25), (26), (27): Xaa is A or G or is absent
EGLEXVPTGQRSVKMAKVXXXXXXXXXKEVQVLEEHSQXEXR

SEQ ID NO: 18775 - protein, 39 aa, Artificial Sequence
  GFR-binding peptide
  MOD_RES (5), (39): Xaa is C or S
EGLEXVPTEESNITMQIMRIKPHQGQHLGEMSFLQHNKX

SEQ ID NO: 18776 - protein, 36 aa, Artificial Sequence
  GFR-binding peptide
  MOD_RES (2), (36): Xaa is C or S
  MOD_RES (16), (17), (18), (19), (20): Xaa is A or G
  MOD_RES (21), (22), (23), (24): Xaa is A or G or is absent
EXVPTEESNITMQIMXXXXXXXXXIGEMSFLQHNKX

SEQ ID NO: 18777 - protein, 42 aa, Artificial Sequence
  GFR-binding peptide
  MOD_RES (5), (42): Xaa is C or S
RNVQXRPTQVQLSNITVQIMEIVRKKPIFIGEMSTLEDHLAX

SEQ ID NO: 18778 - protein, 37 aa, Artificial Sequence
  GFR-binding peptide
  MOD_RES (2), (36): Xaa is C or S
  MOD_RES (16), (17), (18), (19), (20): Xaa is A or G
  MOD_RES (21), (22), (23), (24): Xaa is A or G or is absent
EXVPTGQSNITMQIMXXXXXXXXXIGEMSLEEHSQXE

SEQ ID NO: 18779 - protein, 41 aa, Artificial Sequence
  GFR-binding peptide
  MOD_RES (4), (38), (40): Xaa is C or S
  MOD_RES (18), (19), (20), (21), (22): Xaa is A or G
  MOD_RES (23), (24), (25), (26): Xaa is A or G or is absent
GLEXVPTGQRPVQMRKIXXXXXXXXXKKATVLEEHSQXEXR

SEQ ID NO: 18780 - protein, 35 aa, Artificial Sequence
  GFR-binding peptide
  MOD_RES (2), (2): Xaa is C or S
  MOD_RES (16), (17), (18), (19), (20): Xaa is A or G
  MOD_RES (21), (22), (23), (24): Xaa is A or G or is absent
EXVPTEERPVQMRKIXXXXXXXXXKKATVFLQHNK

SEQ ID NO: 18781 - protein, 38 aa, Artificial Sequence
  GFR-binding peptide
  MOD_RES (5), (5): Xaa is C or S
  MOD_RES (19), (20), (21), (22), (23): Xaa is A or G
  MOD_RES (24), (25), (26), (27): Xaa is A or G or is absent
EGLEXVPTGQSNITMQIMXXXXXXXXXIGEMSLEEHSQ

SEQ ID NO: 18782 - protein, 37 aa, Artificial Sequence
  GFR-binding peptide
  MOD_RES (1), (35), (37): Xaa is C or S
  MOD_RES (15), (16), (17), (18), (19): Xaa is A or G
  MOD_RES (20), (21), (22), (23): Xaa is A or G or is absent
XVPTGQSNITMQIMXXXXXXXXXLGEMSLEEHSQXEX

SEQ ID NO: 18783 - protein, 39 aa, Artificial Sequence
  GFR-binding peptide
  MOD_RES (36), (38): Xaa is C or S
  MOD_RES (15), (16), (17), (18), (19): Xaa is A or G
  MOD_RES (20), (21), (22), (23): Xaa is A or G or is absent
PTQVQLSNITVQIMXXXXXXXXXIGEMSTLEDHLAXKXE

SEQ ID NO: 18784 - protein, 33 aa, Artificial Sequence
  GFR-binding peptide
VPTGQRPVQMRKIRIKPHQGQHKKATVLEEHSQ

SEQ ID NO: 18785 - protein, 36 aa, Artificial Sequence
  GFR-binding peptide
  MOD_RES (3), (3): Xaa is C or S
  MOD_RES (17), (18), (19), (20), (21): Xaa is A or G
  MOD_RES (22), (23), (24), (25): Xaa is A or G or is absent
LEXVPTEERSVKMAKVXXXXXXXXXKEVQVFLQHNK

SEQ ID NO: 18786 - protein, 40 aa, Artificial Sequence
  GFR-binding peptide
  MOD_RES (5), (5): Xaa is C or S
RNVQXRPTQVQLSNITVQIMEIVRKKPIFLGEMSTLEDHL

SEQ ID NO: 18787 - protein, 35 aa, Artificial Sequence
  GFR-binding peptide
RPTQVQLRSVKVAKVEIVRKKPIFKEVQVTLEDHL

SEQ ID NO: 18788 - protein, 39 aa, Artificial Sequence
  GFR-binding peptide
  MOD_RES (3), (37), (39): Xaa is C or S
LEXVPTGQRPVQMRKIRIKPHQGQHKKATVLEEHSQXEX

SEQ ID NO: 18789 - protein, 41 aa, Artificial Sequence
  GFR-binding peptide
  MOD_RES (5), (5): Xaa is C or S
RNVQXRPTQVQLRSVKVAKVEIVRKKPIFKEVQVTLEDHLA

SEQ ID NO: 18790 - protein, 35 aa, Artificial Sequence
  GFR-binding peptide
  MOD_RES (34), (34): Xaa is C or S
VPTEERSVKMAKVRIKPHQGQHKEVQVFLQHNKXE

SEQ ID NO: 18791 - protein, 37 aa, Artificial Sequence
  GFR-binding peptide
  MOD_RES (2), (36): Xaa is C or S
  MOD_RES (16), (17), (18), (19), (20): Xaa is A or G
  MOD_RES (21), (22), (23), (24): Xaa is A or G or is absent
EXVPTEERPVQMRKIXXXXXXXXXKKATVFLQHNKXE

SEQ ID NO: 18792 - protein, 38 aa, Artificial Sequence
  GFR-binding peptide
  MOD_RES (2), (2): Xaa is C or S
  MOD_RES (18), (19), (20), (21), (22): Xaa is A or G
  MOD_RES (23), (24), (25), (26): Xaa is A or G or is absent
KXQPSRVHHRPVQVRKIXXXXXXXXXKKATVRLEEHLE

SEQ ID NO: 18793 - protein, 39 aa, Artificial Sequence
  GFR-binding peptide
  MOD_RES (1), (38): Xaa is C or S
  MOD_RES (17), (18), (19), (20), (21): Xaa is A or G
  MOD_RES (22), (23), (24), (25): Xaa is A or G or is absent
XRPTQVQLSNITVQIMXXXXXXXXXIGEMSTLEDHLAXK

SEQ ID NO: 18794 - protein, 34 aa, Artificial Sequence
  GFR-binding peptide
  MOD_RES (16), (17), (18), (19), (20): Xaa is A or G
  MOD_RES (21), (22), (23), (24): Xaa is A or G or is absent
RPTQVQLRPVQVRKIXXXXXXXXXKKATVTLEDH

SEQ ID NO: 18795 - protein, 44 aa, Artificial Sequence
  GFR-binding peptide
  MOD_RES (5), (42), (44): Xaa is C or S
  MOD_RES (21), (22), (23), (24), (25): Xaa is A or G
  MOD_RES (26), (27), (28), (29): Xaa is A or G or is absent
RNVQXRPTQVQLSNITVQIMXXXXXXXXXLGEMSTLEDHLAXKX

SEQ ID NO: 18796 - protein, 42 aa, Artificial Sequence
  GFR-binding peptide
  MOD_RES (5), (39), (41): Xaa is C or S
  MOD_RES (19), (20), (21), (22), (23): Xaa is A or G
  MOD_RES (24), (25), (26), (27): Xaa is A or G or is absent
EGLEXVPTGQRPVQMRKIXXXXXXXXXKKATVLEEHSQXEXR

SEQ ID NO: 18797 - protein, 41 aa, Artificial Sequence
  GFR-binding peptide
  MOD_RES (4), (41): Xaa is C or S
NVQXRPTQVQLSNITVQIMEIVRKKPIFIGEMSTLEDHLAX

SEQ ID NO: 18798 - protein, 38 aa, Artificial Sequence
  GFR-binding peptide
  MOD_RES (6), (6): Xaa is C or S
  MOD_RES (20), (21), (22), (23), (24): Xaa is A or G
  MOD_RES (25), (26), (27), (28): Xaa is A or G or is absent
DEGLEXVPTEERSVKMAKVXXXXXXXXXKEVQVFLQHN

SEQ ID NO: 18799 - protein, 40 aa, Artificial Sequence
  GFR-binding peptide
  MOD_RES (37), (39): Xaa is C or S
  MOD_RES (16), (17), (18), (19), (20): Xaa is A or G
  MOD_RES (21), (22), (23), (24): Xaa is A or G or is absent
QPSRVHHSNITVQIMXXXXXXXXXLGEMSRLEEHLEXAXA

SEQ ID NO: 18800 - protein, 36 aa, Artificial Sequence
  GFR-binding peptide
  MOD_RES (16), (17), (18), (19), (20): Xaa is A or G
  MOD_RES (21), (22), (23), (24): Xaa is A or G or is absent
RPTQVQLSNITVQIMXXXXXXXXXIGEMSTLEDHLA

SEQ ID NO: 18801 - protein, 36 aa, Artificial Sequence
  GFR-binding peptide
  MOD_RES (2), (36): Xaa is C or S
EXVPTEERPVQMRKIRIKPHQGQHKKATVFLQHNKX

SEQ ID NO: 18802 - protein, 37 aa, Artificial Sequence
  GFR-binding peptide
  MOD_RES (1), (1): Xaa is C or S
XQPSRVHHRPVQVRKIEYVRKKPKLKKATVRLEEHLE

SEQ ID NO: 18803 - protein, 40 aa, Artificial Sequence
  GFR-binding peptide
  MOD_RES (3), (40): Xaa is C or S
VQXRPTQVQLRSVKVAKVEIVRKKPIFKEVQVTLEDHLAX

SEQ ID NO: 18804 - protein, 45 aa, Artificial Sequence
  GFR-binding peptide
  MOD_RES (5), (42), (44): Xaa is C or S
  MOD_RES (21), (22), (23), (24), (25): Xaa is A or G
  MOD_RES (26), (27), (28), (29): Xaa is A or G or is absent
RNVQXRPTQVQLRSVKVAKVXXXXXXXXXKEVQVTLEDHLAXKXE

SEQ ID NO: 18805 - protein, 43 aa, Artificial Sequence
  GFR-binding peptide
  MOD_RES (6), (40), (42): Xaa is C or S
DEGLEXVPTEERPVQMRKIRIKPHQGQHKKATVFLQHNKXEXR

SEQ ID NO: 18806 - protein, 39 aa, Artificial Sequence
  GFR-binding peptide
  MOD_RES (37), (39): Xaa is C or S
  MOD_RES (16), (17), (18), (19), (20): Xaa is A or G
  MOD_RES (21), (22), (23), (24): Xaa is A or G or is absent
QPSRVHHRPVQVRKIXXXXXXXXXKKATVRLEEHLEXAX

SEQ ID NO: 18807 - protein, 33 aa, Artificial Sequence
  GFR-binding peptide
  MOD_RES (15), (16), (17), (18), (19): Xaa is A or G
  MOD_RES (20), (21), (22), (23): Xaa is A or G or is absent
PTQVQLSNITVQIMXXXXXXXXXIGEMSTLEDH

SEQ ID NO: 18808 - protein, 40 aa, Artificial Sequence
  GFR-binding peptide
  MOD_RES (2), (39): Xaa is C or S
QXRPTQVQLRSVKVAKVEIVRKKPIFKEVQVTLEDHLAXK

SEQ ID NO: 18809 - protein, 35 aa, Artificial Sequence
  GFR-binding peptide
  MOD_RES (2), (2): Xaa is C or S
EXVPTEERSVKMAKVRIKPHQGQHKEVQVFLQHNK

SEQ ID NO: 18810 - protein, 37 aa, Artificial Sequence
  GFR-binding peptide
  MOD_RES (1), (1): Xaa is C or S
XQPSRVHHSNITVQIMEYVRKKPKLLGEMSRLEEHLE

SEQ ID NO: 18811 - protein, 40 aa, Artificial Sequence
  GFR-binding peptide
  MOD_RES (37), (39): Xaa is C or S
  MOD_RES (16), (17), (18), (19), (20): Xaa is A or G
  MOD_RES (21), (22), (23), (24): Xaa is A or G or is absent
RPTQVQLSNITVQIMXXXXXXXXXLGEMSTLEDHLAXKXE

SEQ ID NO: 18812 - protein, 35 aa, Artificial Sequence
  GFR-binding peptide
QPSRVHHRPVQVRKIEYVRKKPKLKKATVRLEEHL

SEQ ID NO: 18813 - protein, 36 aa, Artificial Sequence
  GFR-binding peptide
  MOD_RES (2), (36): Xaa is C or S
EXVPTEESNITMQIMRIKPHQGQHLGEMSFLQHNKX

SEQ ID NO: 18814 - protein, 38 aa, Artificial Sequence
  GFR-binding peptide
  MOD_RES (3), (3): Xaa is C or S
  MOD_RES (19), (20), (21), (22), (23): Xaa is A or G
  MOD_RES (24), (25), (26), (27): Xaa is A or G or is absent
VQXRPTQVQLSNITVQIMXXXXXXXXXIGEMSTLEDHL

SEQ ID NO: 18815 - protein, 40 aa, Artificial Sequence
  GFR-binding peptide
  MOD_RES (37), (39): Xaa is C or S
  MOD_RES (16), (17), (18), (19), (20): Xaa is A or G
  MOD_RES (21), (22), (23), (24): Xaa is A or G or is absent
QPSRVHHRPVQVRKIXXXXXXXXXKKATVRLEEHLEXAXA

SEQ ID NO: 18816 - protein, 36 aa, Artificial Sequence
  GFR-binding peptide
  MOD_RES (1), (35): Xaa is C or S
  MOD_RES (15), (16), (17), (18), (19): Xaa is A or G
  MOD_RES (20), (21), (22), (23): Xaa is A or G or is absent
XVPTGQRPVQMRKIXXXXXXXXXKKATVLEEHSQXE

SEQ ID NO: 18817 - protein, 44 aa, Artificial Sequence
  GFR-binding peptide
  MOD_RES (4), (41), (43): Xaa is C or S
SVKXQPSRVHHSNITVQIMEYVRKKPKLIGEMSRLEEHLEXAXA

SEQ ID NO: 18818 - protein, 43 aa, Artificial Sequence
  GFR-binding peptide
  MOD_RES (5), (42): Xaa is C or S
SSVKXQPSRVHHSNITVQIMEYVRKKPKLIGEMSRLEEHLEXA

SEQ ID NO: 18819 - protein, 34 aa, Artificial Sequence
  GFR-binding peptide
  MOD_RES (34), (34): Xaa is C or S
  MOD_RES (14), (15), (16), (17), (18): Xaa is A or G
  MOD_RES (19), (20), (21), (22): Xaa is A or G or is absent
VPTGQRPVQMRKIXXXXXXXXXKKATVLEEHSQX

SEQ ID NO: 18820 - protein, 38 aa, Artificial Sequence
  GFR-binding peptide
  MOD_RES (5), (5): Xaa is C or S
EGLEXVPTEERSVKMAKVRIKPHQGQHKEVQVFLQHNK

SEQ ID NO: 18821 - protein, 35 aa, Artificial Sequence
  GFR-binding peptide
PSRVHHSNITVQIMEYVRKKPKLIGEMSRLEEHLE

SEQ ID NO: 18822 - protein, 36 aa, Artificial Sequence
  GFR-binding peptide
  MOD_RES (34), (36): Xaa is C or S
  MOD_RES (14), (15), (16), (17), (18): Xaa is A or G
  MOD_RES (19), (20), (21), (22): Xaa is A or G or is absent
VPTEESNITMQIMXXXXXXXXXIGEMSFLQHNKXEX

SEQ ID NO: 18823 - protein, 38 aa, Artificial Sequence
  GFR-binding peptide
  MOD_RES (4), (38): Xaa is C or S
GLEXVPTEERPVQMRKIRIKPHQGQHKKATVFLQHNKX

SEQ ID NO: 18824 - protein, 37 aa, Artificial Sequence
  GFR-binding peptide
  MOD_RES (3), (3): Xaa is C or S
VKXQPSRVHHRPVQVRKIEYVRKKPKLKKATVRLEEH

SEQ ID NO: 18825 - protein, 37 aa, Artificial Sequence
  GFR-binding peptide
  MOD_RES (37), (37): Xaa is C or S
  MOD_RES (16), (17), (18), (19), (20): Xaa is A or G
  MOD_RES (21), (22), (23), (24): Xaa is A or G or is absent
QPSRVHHRPVQVRKIXXXXXXXXXKKATVRLEEHLEX

SEQ ID NO: 18826 - protein, 39 aa, Artificial Sequence
  GFR-binding peptide
  MOD_RES (2), (36), (38): Xaa is C or S
  MOD_RES (16), (17), (18), (19), (20): Xaa is A or G
  MOD_RES (21), (22), (23), (24): Xaa is A or G or is absent
EXVPTEESNITMQIMXXXXXXXXXLGEMSFLQHNKXEXR

SEQ ID NO: 18827 - protein, 34 aa, Artificial Sequence
  GFR-binding peptide
QPSRVHHSNITVQIMEYVRKKPKLIGEMSRLEEH

SEQ ID NO: 18828 - protein, 38 aa, Artificial Sequence
  GFR-binding peptide
  MOD_RES (1), (35), (37): Xaa is C or S
  MOD_RES (15), (16), (17), (18), (19): Xaa is A or G
  MOD_RES (20), (21), (22), (23): Xaa is A or G or is absent
XVPTGQRSVKMAKVXXXXXXXXXKEVQVLEEHSQXEXR

SEQ ID NO: 18829 - protein, 39 aa, Artificial Sequence
  GFR-binding peptide
  MOD_RES (4), (38): Xaa is C or S
GLEXVPTGQRPVQMRKIRIKPHQGQHKKATVLEEHSQXE

SEQ ID NO: 18830 - protein, 40 aa, Artificial Sequence
  GFR-binding peptide
  MOD_RES (4), (4): Xaa is C or S
  MOD_RES (20), (21), (22), (23), (24): Xaa is A or G
  MOD_RES (25), (26), (27), (28): Xaa is A or G or is absent
SVKXQPSRVHHSNITVQIMXXXXXXXXXLGEMSRLEEHLE

SEQ ID NO: 18831 - protein, 36 aa, Artificial Sequence
  GFR-binding peptide
  MOD_RES (4), (4): Xaa is C or S
  MOD_RES (18), (19), (20), (21), (22): Xaa is A or G
  MOD_RES (23), (24), (25), (26): Xaa is A or G or is absent
GLEXVPTGQRPVQMRKIXXXXXXXXXKKATVLEEHS

SEQ ID NO: 18832 - protein, 36 aa, Artificial Sequence
  GFR-binding peptide
  MOD_RES (34), (36): Xaa is C or S
  MOD_RES (14), (15), (16), (17), (18): Xaa is A or G
  MOD_RES (19), (20), (21), (22): Xaa is A or G or is absent
VPTGQRPVQMRKIXXXXXXXXXKKATVLEEHSQXEX

SEQ ID NO: 18833 - protein, 40 aa, Artificial Sequence
  GFR-binding peptide
  MOD_RES (7), (7): Xaa is C or S
NDEGLEXVPTGQSNITMQIMRIKPHQGQHIGEMSLEEHSQ

SEQ ID NO: 18834 - protein, 36 aa, Artificial Sequence
  GFR-binding peptide
  MOD_RES (36), (36): Xaa is C or S
  MOD_RES (15), (16), (17), (18), (19): Xaa is A or G
  MOD_RES (20), (21), (22), (23): Xaa is A or G or is absent
PTQVQLSNITVQIMXXXXXXXXXIGEMSTLEDHLAX

SEQ ID NO: 18835 - protein, 35 aa, Artificial Sequence
  GFR-binding peptide
  MOD_RES (1), (35): Xaa is C or S
  MOD_RES (15), (16), (17), (18), (19): Xaa is A or G
  MOD_RES (20), (21), (22), (23): Xaa is A or G or is absent
XVPTGQSNITMQIMXXXXXXXXXLGEMSLEEHSQX

SEQ ID NO: 18836 - protein, 41 aa, Artificial Sequence
  GFR-binding peptide
  MOD_RES (3), (40): Xaa is C or S
  MOD_RES (19), (20), (21), (22), (23): Xaa is A or G
  MOD_RES (24), (25), (26), (27): Xaa is A or G or is absent
VQXRPTQVQLRSVKVAKVXXXXXXXXXKEVQVTLEDHLAXK

SEQ ID NO: 18837 - protein, 40 aa, Artificial Sequence
  GFR-binding peptide
  MOD_RES (2), (39): Xaa is C or S
  MOD_RES (18), (19), (20), (21), (22): Xaa is A or G
  MOD_RES (23), (24), (25), (26): Xaa is A or G or is absent
KXQPSRVHHRPVQVRKIXXXXXXXXXKKATVRLEEHLEXA

SEQ ID NO: 18838 - protein, 43 aa, Artificial Sequence
  GFR-binding peptide
  MOD_RES (5), (42): Xaa is C or S
RNVQXRPTQVQLRSVKVAKVEIVRKKPIFKEVQVTLEDHLAXK

SEQ ID NO: 18839 - protein, 39 aa, Artificial Sequence
  GFR-binding peptide
  MOD_RES (5), (39): Xaa is C or S
EGLEXVPTGQRSVKMAKVRIKPHQGQHKEVQVLEEHSQX

SEQ ID NO: 18840 - protein, 35 aa, Artificial Sequence
  GFR-binding peptide
  MOD_RES (35), (35): Xaa is C or S
  MOD_RES (14), (15), (16), (17), (18): Xaa is A or G
  MOD_RES (19), (20), (21), (22): Xaa is A or G or is absent
TQVQLRSVKVAKVXXXXXXXXXKEVQVTLEDHLAX

SEQ ID NO: 18841 - protein, 38 aa, Artificial Sequence
  GFR-binding peptide
  MOD_RES (1), (38): Xaa is C or S
XQPSRVHHRPVQVRKIEYVRKKPKLKKATVRLEEHLEX

SEQ ID NO: 18842 - protein, 37 aa, Artificial Sequence
  GFR-binding peptide
  MOD_RES (4), (4): Xaa is C or S
GLEXVPTGQSNITMQIMRIKPHQGQHIGEMSLEEHSQ

SEQ ID NO: 18843 - protein, 34 aa, Artificial Sequence
  GFR-binding peptide
  MOD_RES (1), (1): Xaa is C or S
  MOD_RES (15), (16), (17), (18), (19): Xaa is A or G
  MOD_RES (20), (21), (22), (23): Xaa is A or G or is absent
XVPTEESNITMQIMXXXXXXXXXLGEMSFLQHNK

SEQ ID NO: 18844 - protein, 41 aa, Artificial Sequence
  GFR-binding peptide
  MOD_RES (3), (40): Xaa is C or S
  MOD_RES (19), (20), (21), (22), (23): Xaa is A or G
  MOD_RES (24), (25), (26), (27): Xaa is A or G or is absent
VKXQPSRVHHRPVQVRKIXXXXXXXXXKKATVRLEEHLEXA

SEQ ID NO: 18845 - protein, 36 aa, Artificial Sequence
  GFR-binding peptide
  MOD_RES (1), (1): Xaa is C or S
  MOD_RES (17), (18), (19), (20), (21): Xaa is A or G
  MOD_RES (22), (23), (24), (25): Xaa is A or G or is absent
XQPSRVHHRSVKVAKVXXXXXXXXXKEVQVRLEEHL

SEQ ID NO: 18846 - protein, 35 aa, Artificial Sequence
  GFR-binding peptide
  MOD_RES (35), (35): Xaa is C or S
TQVQLSNITVQIMEIVRKKPIFLGEMSTLEDHLAX

SEQ ID NO: 18847 - protein, 43 aa, Artificial Sequence
  GFR-binding peptide
  MOD_RES (7), (41), (43): Xaa is C or S
  MOD_RES (21), (22), (23), (24), (25): Xaa is A or G
  MOD_RES (26), (27), (28), (29): Xaa is A or G or is absent
NDEGLEXVPTEESNITMQIMXXXXXXXXXIGEMSFLQHNKXEX

SEQ ID NO: 18848 - protein, 33 aa, Artificial Sequence
  GFR-binding peptide
  MOD_RES (1), (1): Xaa is C or S
XVPTEERSVKMAKVRIKPHQGQHKEVQVFLQHN

SEQ ID NO: 18849 - protein, 37 aa, Artificial Sequence
  GFR-binding peptide
  MOD_RES (1), (1): Xaa is C or S
  MOD_RES (17), (18), (19), (20), (21): Xaa is A or G
  MOD_RES (22), (23), (24), (25): Xaa is A or G or is absent
XQPSRVHHRSVKVAKVXXXXXXXXXKEVQVRLEEHLE

SEQ ID NO: 18850 - protein, 34 aa, Artificial Sequence
  GFR-binding peptide
  MOD_RES (2), (2): Xaa is C or S
  MOD_RES (16), (17), (18), (19), (20): Xaa is A or G
  MOD_RES (21), (22), (23), (24): Xaa is A or G or is absent
EXVPTEESNITMQIMXXXXXXXXXLGEMSFLQHN

SEQ ID NO: 18851 - protein, 41 aa, Artificial Sequence
  GFR-binding peptide
  MOD_RES (6), (40): Xaa is C or S
DEGLEXVPTEERPVQMRKIRIKPHQGQHKKATVFLQHNKXE

SEQ ID NO: 18852 - protein, 34 aa, Artificial Sequence
  GFR-binding peptide
SRVHHSNITVQIMEYVRKKPKLLGEMSRLEEHLE

SEQ ID NO: 18853 - protein, 43 aa, Artificial Sequence
  GFR-binding peptide
  MOD_RES (5), (42): Xaa is C or S
SSVKXQPSRVHHSNITVQIMEYVRKKPKLLGEMSRLEEHLEXA

SEQ ID NO: 18854 - protein, 42 aa, Artificial Sequence
  GFR-binding peptide
  MOD_RES (7), (41): Xaa is C or S
NDEGLEXVPTGQRPVQMRKIRIKPHQGQHKKATVLEEHSQXE

SEQ ID NO: 18855 - protein, 38 aa, Artificial Sequence
  GFR-binding peptide
  MOD_RES (2), (2): Xaa is C or S
  MOD_RES (18), (19), (20), (21), (22): Xaa is A or G
  MOD_RES (23), (24), (25), (26): Xaa is A or G or is absent
KXQPSRVHHSNITVQIMXXXXXXXXXLGEMSRLEEHLE

SEQ ID NO: 18856 - protein, 43 aa, Artificial Sequence
  GFR-binding peptide
  MOD_RES (6), (40), (42): Xaa is C or S
  MOD_RES (20), (21), (22), (23), (24): Xaa is A or G
  MOD_RES (25), (26), (27), (28): Xaa is A or G or is absent
DEGLEXVPTEERSVKMAKVXXXXXXXXXKEVQVFLQHNKXEXR

SEQ ID NO: 18857 - protein, 44 aa, Artificial Sequence
  GFR-binding peptide
  MOD_RES (4), (41), (43): Xaa is C or S
  MOD_RES (20), (21), (22), (23), (24): Xaa is A or G
  MOD_RES (25), (26), (27), (28): Xaa is A or G or is absent
SVKXQPSRVHHRSVKVAKVXXXXXXXXXKEVQVRLEEHLEXAXA

SEQ ID NO: 18858 - protein, 36 aa, Artificial Sequence
  GFR-binding peptide
  MOD_RES (34), (36): Xaa is C or S
VPTEERPVQMRKIRIKPHQGQHKKATVFLQHNKXEX

SEQ ID NO: 18859 - protein, 38 aa, Artificial Sequence
  GFR-binding peptide
  MOD_RES (2), (2): Xaa is C or S
QXRPTQVQLSNITVQIMEIVRKKPIFIGEMSTLEDHLA

SEQ ID NO: 18860 - protein, 32 aa, Artificial Sequence
  GFR-binding peptide
  MOD_RES (14), (15), (16), (17), (18): Xaa is A or G
  MOD_RES (19), (20), (21), (22): Xaa is A or G or is absent
VPTGQSNITMQIMXXXXXXXXXLGEMSLEEHS

SEQ ID NO: 18861 - protein, 37 aa, Artificial Sequence
  GFR-binding peptide
  MOD_RES (2), (2): Xaa is C or S
QXRPTQVQLSNITVQIMEIVRKKPIFLGEMSTLEDHL

SEQ ID NO: 18862 - protein, 43 aa, Artificial Sequence
  GFR-binding peptide
  MOD_RES (7), (41), (43): Xaa is C or S
  MOD_RES (21), (22), (23), (24), (25): Xaa is A or G
  MOD_RES (26), (27), (28), (29): Xaa is A or G or is absent
NDEGLEXVPTGQRPVQMRKIXXXXXXXXXKKATVLEEHSQXEX

SEQ ID NO: 18863 - protein, 35 aa, Artificial Sequence
  GFR-binding peptide
  MOD_RES (16), (17), (18), (19), (20): Xaa is A or G
  MOD_RES (21), (22), (23), (24): Xaa is A or G or is absent
RPTQVQLSNITVQIMXXXXXXXXXLGEMSTLEDHL

SEQ ID NO: 18864 - protein, 38 aa, Artificial Sequence
  GFR-binding peptide
  MOD_RES (37), (37): Xaa is C or S
  MOD_RES (16), (17), (18), (19), (20): Xaa is A or G
  MOD_RES (21), (22), (23), (24): Xaa is A or G or is absent
RPTQVQLSNITVQIMXXXXXXXXXIGEMSTLEDHLAXK

SEQ ID NO: 18865 - protein, 37 aa, Artificial Sequence
  GFR-binding peptide
  MOD_RES (3), (3): Xaa is C or S
  MOD_RES (19), (20), (21), (22), (23): Xaa is A or G
  MOD_RES (24), (25), (26), (27): Xaa is A or G or is absent
VQXRPTQVQLRSVKVAKVXXXXXXXXXKEVQVTLEDH

SEQ ID NO: 18866 - protein, 38 aa, Artificial Sequence
  GFR-binding peptide
  MOD_RES (1), (38): Xaa is C or S
XQPSRVHHSNITVQIMEYVRKKPKLLGEMSRLEEHLEX

SEQ ID NO: 18867 - protein, 37 aa, Artificial Sequence
  GFR-binding peptide
  MOD_RES (3), (3): Xaa is C or S
  MOD_RES (19), (20), (21), (22), (23): Xaa is A or G
  MOD_RES (24), (25), (26), (27): Xaa is A or G or is absent
VQXRPTQVQLRPVQVRKIXXXXXXXXXKKATVTLEDH

SEQ ID NO: 18868 - protein, 33 aa, Artificial Sequence
  GFR-binding peptide
PSRVHHSNITVQIMEYVRKKPKLLGEMSRLEEH

SEQ ID NO: 18869 - protein, 33 aa, Artificial Sequence
  GFR-binding peptide
  MOD_RES (1), (1): Xaa is C or S
  MOD_RES (15), (16), (17), (18), (19): Xaa is A or G
  MOD_RES (20), (21), (22), (23): Xaa is A or G or is absent
XVPTEESNITMQIMXXXXXXXXXIGEMSFLQHN

SEQ ID NO: 18870 - protein, 41 aa, Artificial Sequence
  GFR-binding peptide
  MOD_RES (3), (40): Xaa is C or S
VQXRPTQVQLRSVKVAKVEIVRKKPIFKEVQVTLEDHLAXK

SEQ ID NO: 18871 - protein, 34 aa, Artificial Sequence
  GFR-binding peptide
  MOD_RES (2), (2): Xaa is C or S
  MOD_RES (16), (17), (18), (19), (20): Xaa is A or G
  MOD_RES (21), (22), (23), (24): Xaa is A or G or is absent
EXVPTGQRSVKMAKVXXXXXXXXXKEVQVLEEHS

SEQ ID NO: 18872 - protein, 36 aa, Artificial Sequence
  GFR-binding peptide
  MOD_RES (1), (35): Xaa is C or S
  MOD_RES (15), (16), (17), (18), (19): Xaa is A or G
  MOD_RES (20), (21), (22), (23): Xaa is A or G or is absent
XVPTGQSNITMQIMXXXXXXXXXLGEMSLEEHSQXE

SEQ ID NO: 18873 - protein, 36 aa, Artificial Sequence
  GFR-binding peptide
  MOD_RES (16), (17), (18), (19), (20): Xaa is A or G
  MOD_RES (21), (22), (23), (24): Xaa is A or G or is absent
QPSRVHHSNITVQIMXXXXXXXXXIGEMSRLEEHLE

SEQ ID NO: 18874 - protein, 40 aa, Artificial Sequence
  GFR-binding peptide
  MOD_RES (5), (39): Xaa is C or S
EGLEXVPTGQRPVQMRKIRIKPHQGQHKKATVLEEHSQXE

SEQ ID NO: 18875 - protein, 42 aa, Artificial Sequence
  GFR-binding peptide
  MOD_RES (3), (40), (42): Xaa is C or S
VQXRPTQVQLSNITVQIMEIVRKKPIFIGEMSTLEDHLAXKX

SEQ ID NO: 18876 - protein, 40 aa, Artificial Sequence
  GFR-binding peptide
  MOD_RES (37), (39): Xaa is C or S
RPTQVQLSNITVQIMEIVRKKPIFLGEMSTLEDHLAXKXE

SEQ ID NO: 18877 - protein, 39 aa, Artificial Sequence
  GFR-binding peptide
  MOD_RES (6), (6): Xaa is C or S
  MOD_RES (20), (21), (22), (23), (24): Xaa is A or G
  MOD_RES (25), (26), (27), (28): Xaa is A or G or is absent
DEGLEXVPTEERSVKMAKVXXXXXXXXXKEVQVFLQHNK

SEQ ID NO: 18878 - protein, 37 aa, Artificial Sequence
  GFR-binding peptide
  MOD_RES (3), (37): Xaa is C or S
  MOD_RES (17), (18), (19), (20), (21): Xaa is A or G
  MOD_RES (22), (23), (24), (25): Xaa is A or G or is absent
LEXVPTEERSVKMAKVXXXXXXXXXKEVQVFLQHNKX

SEQ ID NO: 18879 - protein, 39 aa, Artificial Sequence
  GFR-binding peptide
  MOD_RES (3), (3): Xaa is C or S
  MOD_RES (19), (20), (21), (22), (23): Xaa is A or G
  MOD_RES (24), (25), (26), (27): Xaa is A or G or is absent
VKXQPSRVHHSNITVQIMXXXXXXXXXIGEMSRLEEHLE

SEQ ID NO: 18880 - protein, 34 aa, Artificial Sequence
  GFR-binding peptide
  MOD_RES (34), (34): Xaa is C or S
  MOD_RES (14), (15), (16), (17), (18): Xaa is A or G
  MOD_RES (19), (20), (21), (22): Xaa is A or G or is absent
VPTGQRSVKMAKVXXXXXXXXXKEVQVLEEHSQX

SEQ ID NO: 18881 - protein, 39 aa, Artificial Sequence
  GFR-binding peptide
  MOD_RES (5), (39): Xaa is C or S
EGLEXVPTGQRPVQMRKIRIKPHQGQHKKATVLEEHSQX

SEQ ID NO: 18882 - protein, 39 aa, Artificial Sequence
  GFR-binding peptide
  MOD_RES (4), (4): Xaa is C or S
NVQXRPTQVQLRSVKVAKVEIVRKKPIFKEVQVTLEDHL

SEQ ID NO: 18883 - protein, 34 aa, Artificial Sequence
  GFR-binding peptide
  MOD_RES (2), (2): Xaa is C or S
  MOD_RES (16), (17), (18), (19), (20): Xaa is A or G
  MOD_RES (21), (22), (23), (24): Xaa is A or G or is absent
EXVPTGQSNITMQIMXXXXXXXXXIGEMSLEEHS

SEQ ID NO: 18884 - protein, 37 aa, Artificial Sequence
  GFR-binding peptide
  MOD_RES (2), (36): Xaa is C or S
EXVPTEERSVKMAKVRIKPHQGQHKEVQVFLQHNKXE

SEQ ID NO: 18885 - protein, 42 aa, Artificial Sequence
  GFR-binding peptide
  MOD_RES (3), (40), (42): Xaa is C or S
  MOD_RES (19), (20), (21), (22), (23): Xaa is A or G
  MOD_RES (24), (25), (26), (27): Xaa is A or G or is absent
VKXQPSRVHHSNITVQIMXXXXXXXXXLGEMSRLEEHLEXAX

SEQ ID NO: 18886 - protein, 39 aa, Artificial Sequence
  GFR-binding peptide
  MOD_RES (3), (37), (39): Xaa is C or S
  MOD_RES (17), (18), (19), (20), (21): Xaa is A or G
  MOD_RES (22), (23), (24), (25): Xaa is A or G or is absent
LEXVPTGQSNITMQIMXXXXXXXXXIGEMSLEEHSQXEX

SEQ ID NO: 18887 - protein, 37 aa, Artificial Sequence
  GFR-binding peptide
  MOD_RES (2), (36): Xaa is C or S
  MOD_RES (16), (17), (18), (19), (20): Xaa is A or G
  MOD_RES (21), (22), (23), (24): Xaa is A or G or is absent
EXVPTEERSVKMAKVXXXXXXXXXKEVQVFLQHNKXE

SEQ ID NO: 18888 - protein, 35 aa, Artificial Sequence
  GFR-binding peptide
  MOD_RES (3), (3): Xaa is C or S
LEXVPTGQSNITMQIMRIKPHQGQHIGEMSLEEHS

SEQ ID NO: 18889 - protein, 35 aa, Artificial Sequence
  GFR-binding peptide
  MOD_RES (3), (3): Xaa is C or S
  MOD_RES (17), (18), (19), (20), (21): Xaa is A or G
  MOD_RES (22), (23), (24), (25): Xaa is A or G or is absent
LEXVPTGQSNITMQIMXXXXXXXXXLGEMSLEEHS

SEQ ID NO: 18890 - protein, 37 aa, Artificial Sequence
  GFR-binding peptide
  MOD_RES (1), (35), (37): Xaa is C or S
XVPTEESNITMQIMRIKPHQGQHLGEMSFLQHNKXEX

SEQ ID NO: 18891 - protein, 39 aa, Artificial Sequence
  GFR-binding peptide
  MOD_RES (7), (7): Xaa is C or S
  MOD_RES (21), (22), (23), (24), (25): Xaa is A or G
  MOD_RES (26), (27), (28), (29): Xaa is A or G or is absent
NDEGLEXVPTGQRSVKMAKVXXXXXXXXXKEVQVLEEHS

SEQ ID NO: 18892 - protein, 40 aa, Artificial Sequence
  GFR-binding peptide
  MOD_RES (7), (7): Xaa is C or S
  MOD_RES (21), (22), (23), (24), (25): Xaa is A or G
  MOD_RES (26), (27), (28), (29): Xaa is A or G or is absent
NDEGLEXVPTEERSVKMAKVXXXXXXXXXKEVQVFLQHNK

SEQ ID NO: 18893 - protein, 34 aa, Artificial Sequence
  GFR-binding peptide
PTQVQLSNITVQIMEIVRKKPIFIGEMSTLEDHL

SEQ ID NO: 18894 - protein, 37 aa, Artificial Sequence
  GFR-binding peptide
  MOD_RES (3), (37): Xaa is C or S
  MOD_RES (17), (18), (19), (20), (21): Xaa is A or G
  MOD_RES (22), (23), (24), (25): Xaa is A or G or is absent
LEXVPTGQSNITMQIMXXXXXXXXXIGEMSLEEHSQX

SEQ ID NO: 18895 - protein, 40 aa, Artificial Sequence
  GFR-binding peptide
  MOD_RES (4), (4): Xaa is C or S
SVKXQPSRVHHRPVQVRKIEYVRKKPKLKKATVRLEEHLE

SEQ ID NO: 18896 - protein, 34 aa, Artificial Sequence
  GFR-binding peptide
  MOD_RES (1), (1): Xaa is C or S
  MOD_RES (15), (16), (17), (18), (19): Xaa is A or G
  MOD_RES (20), (21), (22), (23): Xaa is A or G or is absent
XVPTGQRPVQMRKIXXXXXXXXXKKATVLEEHSQ

SEQ ID NO: 18897 - protein, 39 aa, Artificial Sequence
  GFR-binding peptide
  MOD_RES (1), (38): Xaa is C or S
  MOD_RES (17), (18), (19), (20), (21): Xaa is A or G
  MOD_RES (22), (23), (24), (25): Xaa is A or G or is absent
XRPTQVQLSNITVQIMXXXXXXXXXLGEMSTLEDHLAXK

SEQ ID NO: 18898 - protein, 40 aa, Artificial Sequence
  GFR-binding peptide
  MOD_RES (4), (4): Xaa is C or S
SVKXQPSRVHHSNITVQIMEYVRKKPKLLGEMSRLEEHLE

SEQ ID NO: 18899 - protein, 37 aa, Artificial Sequence
  GFR-binding peptide
  MOD_RES (35), (37): Xaa is C or S
  MOD_RES (14), (15), (16), (17), (18): Xaa is A or G
  MOD_RES (19), (20), (21), (22): Xaa is A or G or is absent
TQVQLSNITVQIMXXXXXXXXXLGEMSTLEDHLAXKX

SEQ ID NO: 18900 - protein, 35 aa, Artificial Sequence
  GFR-binding peptide
  MOD_RES (34), (34): Xaa is C or S
VPTGQSNITMQIMRIKPHQGQHIGEMSLEEHSQXE

SEQ ID NO: 18901 - protein, 40 aa, Artificial Sequence
  GFR-binding peptide
  MOD_RES (3), (40): Xaa is C or S
  MOD_RES (19), (20), (21), (22), (23): Xaa is A or G
  MOD_RES (24), (25), (26), (27): Xaa is A or G or is absent
VQXRPTQVQLSNITVQIMXXXXXXXXXLGEMSTLEDHLAX

SEQ ID NO: 18902 - protein, 34 aa, Artificial Sequence
  GFR-binding peptide
  MOD_RES (14), (15), (16), (17), (18): Xaa is A or G
  MOD_RES (19), (20), (21), (22): Xaa is A or G or is absent
SRVHHRPVQVRKIXXXXXXXXXKKATVRLEEHLE

SEQ ID NO: 18903 - protein, 39 aa, Artificial Sequence
  GFR-binding peptide
  MOD_RES (3), (37), (39): Xaa is C or S
  MOD_RES (17), (18), (19), (20), (21): Xaa is A or G
  MOD_RES (22), (23), (24), (25): Xaa is A or G or is absent
LEXVPTEERSVKMAKVXXXXXXXXXKEVQVFLQHNKXEX

SEQ ID NO: 18904 - protein, 43 aa, Artificial Sequence
  GFR-binding peptide
  MOD_RES (3), (40), (42): Xaa is C or S
  MOD_RES (19), (20), (21), (22), (23): Xaa is A or G
  MOD_RES (24), (25), (26), (27): Xaa is A or G or is absent
VKXQPSRVHHSNITVQIMXXXXXXXXXLGEMSRLEEHLEXAXA

SEQ ID NO: 18905 - protein, 41 aa, Artificial Sequence
  GFR-binding peptide
  MOD_RES (5), (39), (41): Xaa is C or S
  MOD_RES (19), (20), (21), (22), (23): Xaa is A or G
  MOD_RES (24), (25), (26), (27): Xaa is A or G or is absent
EGLEXVPTGQSNITMQIMXXXXXXXXXLGEMSLEEHSQXEX

SEQ ID NO: 18906 - protein, 35 aa, Artificial Sequence
  GFR-binding peptide
  MOD_RES (1), (1): Xaa is C or S
  MOD_RES (17), (18), (19), (20), (21): Xaa is A or G
  MOD_RES (22), (23), (24), (25): Xaa is A or G or is absent
XRPTQVQLRSVKVAKVXXXXXXXXXKEVQVTLEDH

SEQ ID NO: 18907 - protein, 38 aa, Artificial Sequence
  GFR-binding peptide
  MOD_RES (35), (37): Xaa is C or S
SRVHHSNITVQIMEYVRKKPKLIGEMSRLEEHLEXAXA

SEQ ID NO: 18908 - protein, 35 aa, Artificial Sequence
  GFR-binding peptide
  MOD_RES (2), (2): Xaa is C or S
  MOD_RES (16), (17), (18), (19), (20): Xaa is A or G
  MOD_RES (21), (22), (23), (24): Xaa is A or G or is absent
EXVPTEESNITMQIMXXXXXXXXXLGEMSFLQHNK

SEQ ID NO: 18909 - protein, 37 aa, Artificial Sequence
  GFR-binding peptide
  MOD_RES (1), (35), (37): Xaa is C or S
  MOD_RES (15), (16), (17), (18), (19): Xaa is A or G
  MOD_RES (20), (21), (22), (23): Xaa is A or G or is absent
XVPTGQRSVKMAKVXXXXXXXXXKEVQVLEEHSQXEX

SEQ ID NO: 18910 - protein, 42 aa, Artificial Sequence
  GFR-binding peptide
  MOD_RES (5), (39), (41): Xaa is C or S
EGLEXVPTGQRPVQMRKIRIKPHQGQHKKATVLEEHSQXEXR

SEQ ID NO: 18911 - protein, 41 aa, Artificial Sequence
  GFR-binding peptide
  MOD_RES (2), (39), (41): Xaa is C or S
  MOD_RES (18), (19), (20), (21), (22): Xaa is A or G
  MOD_RES (23), (24), (25), (26): Xaa is A or G or is absent
QXRPTQVQLRSVKVAKVXXXXXXXXXKEVQVTLEDHLAXKX

SEQ ID NO: 18912 - protein, 38 aa, Artificial Sequence
  GFR-binding peptide
  MOD_RES (37), (37): Xaa is C or S
  MOD_RES (16), (17), (18), (19), (20): Xaa is A or G
  MOD_RES (21), (22), (23), (24): Xaa is A or G or is absent
QPSRVHHSNITVQIMXXXXXXXXXIGEMSRLEEHLEXA

SEQ ID NO: 18913 - protein, 36 aa, Artificial Sequence
  GFR-binding peptide
  MOD_RES (2), (2): Xaa is C or S
  MOD_RES (18), (19), (20), (21), (22): Xaa is A or G
  MOD_RES (23), (24), (25), (26): Xaa is A or G or is absent
QXRPTQVQLSNITVQIMXXXXXXXXXIGEMSTLEDH

SEQ ID NO: 18914 - protein, 33 aa, Artificial Sequence
  GFR-binding peptide
  MOD_RES (1), (1): Xaa is C or S
XVPTEESNITMQIMRIKPHQGQHLGEMSFLQHN

SEQ ID NO: 18915 - protein, 39 aa, Artificial Sequence
  GFR-binding peptide
  MOD_RES (4), (4): Xaa is C or S
SVKXQPSRVHHSNITVQIMEYVRKKPKLIGEMSRLEEHL

SEQ ID NO: 18916 - protein, 39 aa, Artificial Sequence
  GFR-binding peptide
  MOD_RES (2), (39): Xaa is C or S
  MOD_RES (18), (19), (20), (21), (22): Xaa is A or G
  MOD_RES (23), (24), (25), (26): Xaa is A or G or is absent
QXRPTQVQLSNITVQIMXXXXXXXXXIGEMSTLEDHLAX

SEQ ID NO: 18917 - protein, 41 aa, Artificial Sequence
  GFR-binding peptide
  MOD_RES (4), (38), (40): Xaa is C or S
GLEXVPTGQRPVQMRKIRIKPHQGQHKKATVLEEHSQXEXR

SEQ ID NO: 18918 - protein, 33 aa, Artificial Sequence
  GFR-binding peptide
  MOD_RES (14), (15), (16), (17), (18): Xaa is A or G
  MOD_RES (19), (20), (21), (22): Xaa is A or G or is absent
TQVQLRSVKVAKVXXXXXXXXXKEVQVTLEDHL

SEQ ID NO: 18919 - protein, 38 aa, Artificial Sequence
  GFR-binding peptide
  MOD_RES (6), (6): Xaa is C or S
DEGLEXVPTGQRPVQMRKIRIKPHQGQHKKATVLEEHS

SEQ ID NO: 18920 - protein, 43 aa, Artificial Sequence
  GFR-binding peptide
  MOD_RES (7), (41), (43): Xaa is C or S
  MOD_RES (21), (22), (23), (24), (25): Xaa is A or G
  MOD_RES (26), (27), (28), (29): Xaa is A or G or is absent
NDEGLEXVPTGQSNITMQIMXXXXXXXXXLGEMSLEEHSQXEX

SEQ ID NO: 18921 - protein, 41 aa, Artificial Sequence
  GFR-binding peptide
  MOD_RES (2), (39), (41): Xaa is C or S
  MOD_RES (18), (19), (20), (21), (22): Xaa is A or G
  MOD_RES (23), (24), (25), (26): Xaa is A or G or is absent
QXRPTQVQLRPVQVRKIXXXXXXXXXKKATVTLEDHLAXKX

SEQ ID NO: 18922 - protein, 39 aa, Artificial Sequence
  GFR-binding peptide
  MOD_RES (2), (39): Xaa is C or S
QXRPTQVQLSNITVQIMEIVRKKPIFIGEMSTLEDHLAX

SEQ ID NO: 18923 - protein, 39 aa, Artificial Sequence
  GFR-binding peptide
  MOD_RES (6), (6): Xaa is C or S
  MOD_RES (20), (21), (22), (23), (24): Xaa is A or G
  MOD_RES (25), (26), (27), (28): Xaa is A or G or is absent
DEGLEXVPTGQRSVKMAKVXXXXXXXXXKEVQVLEEHSQ

SEQ ID NO: 18924 - protein, 39 aa, Artificial Sequence
  GFR-binding peptide
  MOD_RES (4), (4): Xaa is C or S
SVKXQPSRVHHRPVQVRKIEYVRKKPKLKKATVRLEEHL

SEQ ID NO: 18925 - protein, 38 aa, Artificial Sequence
  GFR-binding peptide
  MOD_RES (36), (38): Xaa is C or S
  MOD_RES (15), (16), (17), (18), (19): Xaa is A or G
  MOD_RES (20), (21), (22), (23): Xaa is A or G or is absent
PSRVHHRSVKVAKVXXXXXXXXXKEVQVRLEEHLEXAX

SEQ ID NO: 18926 - protein, 35 aa, Artificial Sequence
  GFR-binding peptide
  MOD_RES (34), (34): Xaa is C or S
  MOD_RES (14), (15), (16), (17), (18): Xaa is A or G
  MOD_RES (19), (20), (21), (22): Xaa is A or G or is absent
VPTGQSNITMQIMXXXXXXXXXIGEMSLEEHSQXE

SEQ ID NO: 18927 - protein, 40 aa, Artificial Sequence
  GFR-binding peptide
  MOD_RES (5), (39): Xaa is C or S
  MOD_RES (19), (20), (21), (22), (23): Xaa is A or G
  MOD_RES (24), (25), (26), (27): Xaa is A or G or is absent
EGLEXVPTGQRPVQMRKIXXXXXXXXXKKATVLEEHSQXE

SEQ ID NO: 18928 - protein, 42 aa, Artificial Sequence
  GFR-binding peptide
  MOD_RES (5), (39), (41): Xaa is C or S
EGLEXVPTGQRSVKMAKVRIKPHQGQHKEVQVLEEHSQXEXR

SEQ ID NO: 18929 - protein, 41 aa, Artificial Sequence
  GFR-binding peptide
  MOD_RES (5), (39), (41): Xaa is C or S
  MOD_RES (19), (20), (21), (22), (23): Xaa is A or G
  MOD_RES (24), (25), (26), (27): Xaa is A or G or is absent
EGLEXVPTEERPVQMRKIXXXXXXXXXKKATVFLQHNKXEX

SEQ ID NO: 18930 - protein, 42 aa, Artificial Sequence
  GFR-binding peptide
  MOD_RES (4), (41): Xaa is C or S
SVKXQPSRVHHSNITVQIMEYVRKKPKLIGEMSRLEEHLEXA

SEQ ID NO: 18931 - protein, 43 aa, Artificial Sequence
  GFR-binding peptide
  MOD_RES (7), (41), (43): Xaa is C or S
NDEGLEXVPTEERSVKMAKVRIKPHQGQHKEVQVFLQHNKXEX

SEQ ID NO: 18932 - protein, 35 aa, Artificial Sequence
  GFR-binding peptide
  MOD_RES (35), (35): Xaa is C or S
  MOD_RES (14), (15), (16), (17), (18): Xaa is A or G
  MOD_RES (19), (20), (21), (22): Xaa is A or G or is absent
SRVHHSNITVQIMXXXXXXXXXIGEMSRLEEHLEX

SEQ ID NO: 18933 - protein, 34 aa, Artificial Sequence
  GFR-binding peptide
PSRVHHRPVQVRKIEYVRKKPKLKKATVRLEEHL

SEQ ID NO: 18934 - protein, 39 aa, Artificial Sequence
  GFR-binding peptide
  MOD_RES (2), (36), (38): Xaa is C or S
  MOD_RES (16), (17), (18), (19), (20): Xaa is A or G
  MOD_RES (21), (22), (23), (24): Xaa is A or G or is absent
EXVPTGQSNITMQIMXXXXXXXXXIGEMSLEEHSQXEXR

SEQ ID NO: 18935 - protein, 38 aa, Artificial Sequence
  GFR-binding peptide
  MOD_RES (3), (3): Xaa is C or S
VKXQPSRVHHSNITVQIMEYVRKKPKLLGEMSRLEEHL

SEQ ID NO: 18936 - protein, 40 aa, Artificial Sequence
  GFR-binding peptide
  MOD_RES (4), (4): Xaa is C or S
  MOD_RES (20), (21), (22), (23), (24): Xaa is A or G
  MOD_RES (25), (26), (27), (28): Xaa is A or G or is absent
NVQXRPTQVQLSNITVQIMXXXXXXXXXLGEMSTLEDHLA

SEQ ID NO: 18937 - protein, 34 aa, Artificial Sequence
  GFR-binding peptide
PSRVHHSNITVQIMEYVRKKPKLIGEMSRLEEHL

SEQ ID NO: 18938 - protein, 33 aa, Artificial Sequence
  GFR-binding peptide
  MOD_RES (14), (15), (16), (17), (18): Xaa is A or G
  MOD_RES (19), (20), (21), (22): Xaa is A or G or is absent
SRVHHRSVKVAKVXXXXXXXXXKEVQVRLEEHL

SEQ ID NO: 18939 - protein, 38 aa, Artificial Sequence
  GFR-binding peptide
  MOD_RES (5), (5): Xaa is C or S
  MOD_RES (19), (20), (21), (22), (23): Xaa is A or G
  MOD_RES (24), (25), (26), (27): Xaa is A or G or is absent
EGLEXVPTEESNITMQIMXXXXXXXXXIGEMSFLQHNK

SEQ ID NO: 18940 - protein, 33 aa, Artificial Sequence
  GFR-binding peptide
  MOD_RES (14), (15), (16), (17), (18): Xaa is A or G
  MOD_RES (19), (20), (21), (22): Xaa is A or G or is absent
VPTEERPVQMRKIXXXXXXXXXKKATVFLQHNK

SEQ ID NO: 18941 - protein, 39 aa, Artificial Sequence
  GFR-binding peptide
  MOD_RES (4), (4): Xaa is C or S
  MOD_RES (20), (21), (22), (23), (24): Xaa is A or G
  MOD_RES (25), (26), (27), (28): Xaa is A or G or is absent
NVQXRPTQVQLSNITVQIMXXXXXXXXXLGEMSTLEDHL

SEQ ID NO: 18942 - protein, 41 aa, Artificial Sequence
  GFR-binding peptide
  MOD_RES (4), (38), (40): Xaa is C or S
  MOD_RES (18), (19), (20), (21), (22): Xaa is A or G
  MOD_RES (23), (24), (25), (26): Xaa is A or G or is absent
GLEXVPTGQSNITMQIMXXXXXXXXXIGEMSLEEHSQXEXR

SEQ ID NO: 18943 - protein, 38 aa, Artificial Sequence
  GFR-binding peptide
  MOD_RES (4), (4): Xaa is C or S
NVQXRPTQVQLSNITVQIMEIVRKKPIFLGEMSTLEDH

SEQ ID NO: 18944 - protein, 35 aa, Artificial Sequence
  GFR-binding peptide
  MOD_RES (2), (2): Xaa is C or S
EXVPTGQRSVKMAKVRIKPHQGQHKEVQVLEEHSQ

SEQ ID NO: 18945 - protein, 37 aa, Artificial Sequence
  GFR-binding peptide
  MOD_RES (3), (3): Xaa is C or S
  MOD_RES (19), (20), (21), (22), (23): Xaa is A or G
  MOD_RES (24), (25), (26), (27): Xaa is A or G or is absent
VQXRPTQVQLSNITVQIMXXXXXXXXXIGEMSTLEDH

SEQ ID NO: 18946 - protein, 37 aa, Artificial Sequence
  GFR-binding peptide
  MOD_RES (2), (2): Xaa is C or S
  MOD_RES (18), (19), (20), (21), (22): Xaa is A or G
  MOD_RES (23), (24), (25), (26): Xaa is A or G or is absent
KXQPSRVHHSNITVQIMXXXXXXXXXLGEMSRLEEHL

SEQ ID NO: 18947 - protein, 36 aa, Artificial Sequence
  GFR-binding peptide
  MOD_RES (2), (36): Xaa is C or S
EXVPTGQRPVQMRKIRIKPHQGQHKKATVLEEHSQX

SEQ ID NO: 18948 - protein, 42 aa, Artificial Sequence
  GFR-binding peptide
  MOD_RES (6), (40), (42): Xaa is C or S
DEGLEXVPTEERSVKMAKVRIKPHQGQHKEVQVFLQHNKXEX

SEQ ID NO: 18949 - protein, 38 aa, Artificial Sequence
  GFR-binding peptide
  MOD_RES (3), (37): Xaa is C or S
LEXVPTGQRPVQMRKIRIKPHQGQHKKATVLEEHSQXE

SEQ ID NO: 18950 - protein, 33 aa, Artificial Sequence
  GFR-binding peptide
  MOD_RES (14), (15), (16), (17), (18): Xaa is A or G
  MOD_RES (19), (20), (21), (22): Xaa is A or G or is absent
VPTEESNITMQIMXXXXXXXXXIGEMSFLQHNK

SEQ ID NO: 18951 - protein, 37 aa, Artificial Sequence
  GFR-binding peptide
  MOD_RES (5), (5): Xaa is C or S
EGLEXVPTEERPVQMRKIRIKPHQGQHKKATVFLQHN

SEQ ID NO: 18952 - protein, 35 aa, Artificial Sequence
  GFR-binding peptide
  MOD_RES (1), (35): Xaa is C or S
  MOD_RES (15), (16), (17), (18), (19): Xaa is A or G
  MOD_RES (20), (21), (22), (23): Xaa is A or G or is absent
XVPTGQRPVQMRKIXXXXXXXXXKKATVLEEHSQX

SEQ ID NO: 18953 - protein, 38 aa, Artificial Sequence
  GFR-binding peptide
  MOD_RES (6), (6): Xaa is C or S
  MOD_RES (20), (21), (22), (23), (24): Xaa is A or G
  MOD_RES (25), (26), (27), (28): Xaa is A or G or is absent
DEGLEXVPTEESNITMQIMXXXXXXXXXLGEMSFLQHN

SEQ ID NO: 18954 - protein, 35 aa, Artificial Sequence
  GFR-binding peptide
  MOD_RES (3), (3): Xaa is C or S
LEXVPTEERPVQMRKIRIKPHQGQHKKATVFLQHN

SEQ ID NO: 18955 - protein, 37 aa, Artificial Sequence
  GFR-binding peptide
  MOD_RES (5), (5): Xaa is C or S
  MOD_RES (19), (20), (21), (22), (23): Xaa is A or G
  MOD_RES (24), (25), (26), (27): Xaa is A or G or is absent
EGLEXVPTGQSNITMQIMXXXXXXXXXLGEMSLEEHS

SEQ ID NO: 18956 - protein, 42 aa, Artificial Sequence
  GFR-binding peptide
  MOD_RES (7), (41): Xaa is C or S
  MOD_RES (21), (22), (23), (24), (25): Xaa is A or G
  MOD_RES (26), (27), (28), (29): Xaa is A or G or is absent
NDEGLEXVPTGQSNITMQIMXXXXXXXXXIGEMSLEEHSQXE

SEQ ID NO: 18957 - protein, 42 aa, Artificial Sequence
  GFR-binding peptide
  MOD_RES (6), (40), (42): Xaa is C or S
  MOD_RES (20), (21), (22), (23), (24): Xaa is A or G
  MOD_RES (25), (26), (27), (28): Xaa is A or G or is absent
DEGLEXVPTGQRPVQMRKIXXXXXXXXXKKATVLEEHSQXEX

SEQ ID NO: 18958 - protein, 37 aa, Artificial Sequence
  GFR-binding peptide
  MOD_RES (36), (36): Xaa is C or S
  MOD_RES (15), (16), (17), (18), (19): Xaa is A or G
  MOD_RES (20), (21), (22), (23): Xaa is A or G or is absent
PTQVQLSNITVQIMXXXXXXXXXIGEMSTLEDHLAXK

SEQ ID NO: 18959 - protein, 33 aa, Artificial Sequence
  GFR-binding peptide
  MOD_RES (15), (16), (17), (18), (19): Xaa is A or G
  MOD_RES (20), (21), (22), (23): Xaa is A or G or is absent
PSRVHHSNITVQIMXXXXXXXXXIGEMSRLEEH

SEQ ID NO: 18960 - protein, 33 aa, Artificial Sequence
  GFR-binding peptide
  MOD_RES (15), (16), (17), (18), (19): Xaa is A or G
  MOD_RES (20), (21), (22), (23): Xaa is A or G or is absent
PTQVQLRPVQVRKIXXXXXXXXXKKATVTLEDH

SEQ ID NO: 18961 - protein, 43 aa, Artificial Sequence
  GFR-binding peptide
  MOD_RES (3), (40), (42): Xaa is C or S
  MOD_RES (19), (20), (21), (22), (23): Xaa is A or G
  MOD_RES (24), (25), (26), (27): Xaa is A or G or is absent
VQXRPTQVQLSNITVQIMXXXXXXXXXIGEMSTLEDHLAXKXE

SEQ ID NO: 18962 - protein, 40 aa, Artificial Sequence
  GFR-binding peptide
  MOD_RES (37), (39): Xaa is C or S
RPTQVQLRSVKVAKVEIVRKKPIFKEVQVTLEDHLAXKXE

SEQ ID NO: 18963 - protein, 37 aa, Artificial Sequence
  GFR-binding peptide
  MOD_RES (36), (36): Xaa is C or S
PTQVQLSNITVQIMEIVRKKPIFIGEMSTLEDHLAXK

SEQ ID NO: 18964 - protein, 38 aa, Artificial Sequence
  GFR-binding peptide
  MOD_RES (2), (2): Xaa is C or S
KXQPSRVHHSNITVQIMEYVRKKPKLLGEMSRLEEHLE

SEQ ID NO: 18965 - protein, 38 aa, Artificial Sequence
  GFR-binding peptide
  MOD_RES (5), (5): Xaa is C or S
  MOD_RES (19), (20), (21), (22), (23): Xaa is A or G
  MOD_RES (24), (25), (26), (27): Xaa is A or G or is absent
EGLEXVPTEERPVQMRKIXXXXXXXXXKKATVFLQHNK

SEQ ID NO: 18966 - protein, 33 aa, Artificial Sequence
  GFR-binding peptide
  MOD_RES (1), (1): Xaa is C or S
XVPTGQSNITMQIMRIKPHQGQHIGEMSLEEHS

SEQ ID NO: 18967 - protein, 35 aa, Artificial Sequence
  GFR-binding peptide
  MOD_RES (34), (34): Xaa is C or S
VPTEERPVQMRKIRIKPHQGQHKKATVFLQHNKXE

SEQ ID NO: 18968 - protein, 41 aa, Artificial Sequence
  GFR-binding peptide
  MOD_RES (7), (41): Xaa is C or S
  MOD_RES (21), (22), (23), (24), (25): Xaa is A or G
  MOD_RES (26), (27), (28), (29): Xaa is A or G or is absent
NDEGLEXVPTEESNITMQIMXXXXXXXXXLGEMSFLQHNKX

SEQ ID NO: 18969 - protein, 39 aa, Artificial Sequence
  GFR-binding peptide
  MOD_RES (5), (5): Xaa is C or S
SSVKXQPSRVHHSNITVQIMEYVRKKPKLLGEMSRLEEH

SEQ ID NO: 18970 - protein, 42 aa, Artificial Sequence
  GFR-binding peptide
  MOD_RES (4), (41): Xaa is C or S
  MOD_RES (20), (21), (22), (23), (24): Xaa is A or G
  MOD_RES (25), (26), (27), (28): Xaa is A or G or is absent
SVKXQPSRVHHRSVKVAKVXXXXXXXXXKEVQVRLEEHLEXA

SEQ ID NO: 18971 - protein, 37 aa, Artificial Sequence
  GFR-binding peptide
  MOD_RES (36), (36): Xaa is C or S
  MOD_RES (15), (16), (17), (18), (19): Xaa is A or G
  MOD_RES (20), (21), (22), (23): Xaa is A or G or is absent
PSRVHHSNITVQIMXXXXXXXXXLGEMSRLEEHLEXA

SEQ ID NO: 18972 - protein, 42 aa, Artificial Sequence
  GFR-binding peptide
  MOD_RES (4), (41): Xaa is C or S
NVQXRPTQVQLSNITVQIMEIVRKKPIFLGEMSTLEDHLAXK

SEQ ID NO: 18973 - protein, 38 aa, Artificial Sequence
  GFR-binding peptide
  MOD_RES (5), (5): Xaa is C or S
EGLEXVPTEESNITMQIMRIKPHQGQHLGEMSFLQHNK

SEQ ID NO: 18974 - protein, 42 aa, Artificial Sequence
  GFR-binding peptide
  MOD_RES (4), (41): Xaa is C or S
  MOD_RES (20), (21), (22), (23), (24): Xaa is A or G
  MOD_RES (25), (26), (27), (28): Xaa is A or G or is absent
NVQXRPTQVQLSNITVQIMXXXXXXXXXLGEMSTLEDHLAXK

SEQ ID NO: 18975 - protein, 37 aa, Artificial Sequence
  GFR-binding peptide
  MOD_RES (5), (5): Xaa is C or S
  MOD_RES (19), (20), (21), (22), (23): Xaa is A or G
  MOD_RES (24), (25), (26), (27): Xaa is A or G or is absent
EGLEXVPTEESNITMQIMXXXXXXXXXIGEMSFLQHN

SEQ ID NO: 18976 - protein, 41 aa, Artificial Sequence
  GFR-binding peptide
  MOD_RES (1), (38), (40): Xaa is C or S
  MOD_RES (17), (18), (19), (20), (21): Xaa is A or G
  MOD_RES (22), (23), (24), (25): Xaa is A or G or is absent
XRPTQVQLSNITVQIMXXXXXXXXXIGEMSTLEDHLAXKXE

SEQ ID NO: 18977 - protein, 39 aa, Artificial Sequence
  GFR-binding peptide
  MOD_RES (37), (39): Xaa is C or S
RPTQVQLRSVKVAKVEIVRKKPIFKEVQVTLEDHLAXKX

SEQ ID NO: 18978 - protein, 39 aa, Artificial Sequence
  GFR-binding peptide
  MOD_RES (3), (3): Xaa is C or S
  MOD_RES (19), (20), (21), (22), (23): Xaa is A or G
  MOD_RES (24), (25), (26), (27): Xaa is A or G or is absent
VQXRPTQVQLSNITVQIMXXXXXXXXXIGEMSTLEDHLA

SEQ ID NO: 18979 - protein, 42 aa, Artificial Sequence
  GFR-binding peptide
  MOD_RES (2), (39), (41): Xaa is C or S
  MOD_RES (18), (19), (20), (21), (22): Xaa is A or G
  MOD_RES (23), (24), (25), (26): Xaa is A or G or is absent
QXRPTQVQLSNITVQIMXXXXXXXXXIGEMSTLEDHLAXKXE

SEQ ID NO: 18980 - protein, 38 aa, Artificial Sequence
  GFR-binding peptide
  MOD_RES (1), (38): Xaa is C or S
XRPTQVQLSNITVQIMEIVRKKPIFIGEMSTLEDHLAX

SEQ ID NO: 18981 - protein, 40 aa, Artificial Sequence
  GFR-binding peptide
  MOD_RES (5), (5): Xaa is C or S
  MOD_RES (21), (22), (23), (24), (25): Xaa is A or G
  MOD_RES (26), (27), (28), (29): Xaa is A or G or is absent
SSVKXQPSRVHHSNITVQIMXXXXXXXXXLGEMSRLEEHL

SEQ ID NO: 18982 - protein, 42 aa, Artificial Sequence
  GFR-binding peptide
  MOD_RES (5), (42): Xaa is C or S
  MOD_RES (21), (22), (23), (24), (25): Xaa is A or G
  MOD_RES (26), (27), (28), (29): Xaa is A or G or is absent
SSVKXQPSRVHHSNITVQIMXXXXXXXXXLGEMSRLEEHLEX

SEQ ID NO: 18983 - protein, 39 aa, Artificial Sequence
  GFR-binding peptide
  MOD_RES (3), (37), (39): Xaa is C or S
LEXVPTGQRSVKMAKVRIKPHQGQHKEVQVLEEHSQXEX

SEQ ID NO: 18984 - protein, 41 aa, Artificial Sequence
  GFR-binding peptide
  MOD_RES (5), (5): Xaa is C or S
  MOD_RES (21), (22), (23), (24), (25): Xaa is A or G
  MOD_RES (26), (27), (28), (29): Xaa is A or G or is absent
RNVQXRPTQVQLRPVQVRKIXXXXXXXXXKKATVTLEDHLA

SEQ ID NO: 18985 - protein, 35 aa, Artificial Sequence
  GFR-binding peptide
  MOD_RES (1), (35): Xaa is C or S
  MOD_RES (15), (16), (17), (18), (19): Xaa is A or G
  MOD_RES (20), (21), (22), (23): Xaa is A or G or is absent
XVPTEESNITMQIMXXXXXXXXXLGEMSFLQHNKX

SEQ ID NO: 18986 - protein, 34 aa, Artificial Sequence
  GFR-binding peptide
  MOD_RES (1), (1): Xaa is C or S
  MOD_RES (15), (16), (17), (18), (19): Xaa is A or G
  MOD_RES (20), (21), (22), (23): Xaa is A or G or is absent
XVPTEERSVKMAKVXXXXXXXXXKEVQVFLQHNK

SEQ ID NO: 18987 - protein, 37 aa, Artificial Sequence
  GFR-binding peptide
  MOD_RES (1), (1): Xaa is C or S
  MOD_RES (17), (18), (19), (20), (21): Xaa is A or G
  MOD_RES (22), (23), (24), (25): Xaa is A or G or is absent
XRPTQVQLRPVQVRKIXXXXXXXXXKKATVTLEDHLA

SEQ ID NO: 18988 - protein, 36 aa, Artificial Sequence
  GFR-binding peptide
RPTQVQLSNITVQIMEIVRKKPIFIGEMSTLEDHLA

SEQ ID NO: 18989 - protein, 41 aa, Artificial Sequence
  GFR-binding peptide
  MOD_RES (1), (38), (40): Xaa is C or S
  MOD_RES (17), (18), (19), (20), (21): Xaa is A or G
  MOD_RES (22), (23), (24), (25): Xaa is A or G or is absent
XQPSRVHHSNITVQIMXXXXXXXXXIGEMSRLEEHLEXAXA

SEQ ID NO: 18990 - protein, 35 aa, Artificial Sequence
  GFR-binding peptide
  MOD_RES (35), (35): Xaa is C or S
TQVQLRSVKVAKVEIVRKKPIFKEVQVTLEDHLAX

SEQ ID NO: 18991 - protein, 36 aa, Artificial Sequence
  GFR-binding peptide
  MOD_RES (36), (36): Xaa is C or S
  MOD_RES (15), (16), (17), (18), (19): Xaa is A or G
  MOD_RES (20), (21), (22), (23): Xaa is A or G or is absent
PSRVHHSNITVQIMXXXXXXXXXLGEMSRLEEHLEX

SEQ ID NO: 18992 - protein, 44 aa, Artificial Sequence
  GFR-binding peptide
  MOD_RES (5), (42), (44): Xaa is C or S
SSVKXQPSRVHHSNITVQIMEYVRKKPKLLGEMSRLEEHLEXAX

SEQ ID NO: 18993 - protein, 44 aa, Artificial Sequence
  GFR-binding peptide
  MOD_RES (7), (41), (43): Xaa is C or S
  MOD_RES (21), (22), (23), (24), (25): Xaa is A or G
  MOD_RES (26), (27), (28), (29): Xaa is A or G or is absent
NDEGLEXVPTEERSVKMAKVXXXXXXXXXKEVQVFLQHNKXEXR

SEQ ID NO: 18994 - protein, 40 aa, Artificial Sequence
  GFR-binding peptide
  MOD_RES (3), (37), (39): Xaa is C or S
  MOD_RES (17), (18), (19), (20), (21): Xaa is A or G
  MOD_RES (22), (23), (24), (25): Xaa is A or G or is absent
LEXVPTEERSVKMAKVXXXXXXXXXKEVQVFLQHNKXEXR

SEQ ID NO: 18995 - protein, 42 aa, Artificial Sequence
  GFR-binding peptide
  MOD_RES (7), (41): Xaa is C or S
NDEGLEXVPTGQRSVKMAKVRIKPHQGQHKEVQVLEEHSQXE

SEQ ID NO: 18996 - protein, 34 aa, Artificial Sequence
  GFR-binding peptide
RPTQVQLSNITVQIMEIVRKKPIFIGEMSTLEDH

SEQ ID NO: 18997 - protein, 36 aa, Artificial Sequence
  GFR-binding peptide
  MOD_RES (2), (36): Xaa is C or S
EXVPTGQRSVKMAKVRIKPHQGQHKEVQVLEEHSQX

SEQ ID NO: 18998 - protein, 39 aa, Artificial Sequence
  GFR-binding peptide
  MOD_RES (4), (38): Xaa is C or S
GLEXVPTGQRSVKMAKVRIKPHQGQHKEVQVLEEHSQXE

SEQ ID NO: 18999 - protein, 36 aa, Artificial Sequence
  GFR-binding peptide
  MOD_RES (2), (2): Xaa is C or S
  MOD_RES (18), (19), (20), (21), (22): Xaa is A or G
  MOD_RES (23), (24), (25), (26): Xaa is A or G or is absent
KXQPSRVHHRSVKVAKVXXXXXXXXXKEVQVRLEEH

SEQ ID NO: 19000 - protein, 39 aa, Artificial Sequence
  GFR-binding peptide
  MOD_RES (7), (7): Xaa is C or S
  MOD_RES (21), (22), (23), (24), (25): Xaa is A or G
  MOD_RES (26), (27), (28), (29): Xaa is A or G or is absent
NDEGLEXVPTGQSNITMQIMXXXXXXXXXLGEMSLEEHS

SEQ ID NO: 19001 - protein, 38 aa, Artificial Sequence
  GFR-binding peptide
  MOD_RES (4), (38): Xaa is C or S
  MOD_RES (18), (19), (20), (21), (22): Xaa is A or G
  MOD_RES (23), (24), (25), (26): Xaa is A or G or is absent
GLEXVPTGQSNITMQIMXXXXXXXXXIGEMSLEEHSQX

SEQ ID NO: 19002 - protein, 41 aa, Artificial Sequence
  GFR-binding peptide
  MOD_RES (4), (41): Xaa is C or S
  MOD_RES (20), (21), (22), (23), (24): Xaa is A or G
  MOD_RES (25), (26), (27), (28): Xaa is A or G or is absent
SVKXQPSRVHHRPVQVRKIXXXXXXXXXKKATVRLEEHLEX

SEQ ID NO: 19003 - protein, 35 aa, Artificial Sequence
  GFR-binding peptide
  MOD_RES (3), (3): Xaa is C or S
  MOD_RES (17), (18), (19), (20), (21): Xaa is A or G
  MOD_RES (22), (23), (24), (25): Xaa is A or G or is absent
LEXVPTEESNITMQIMXXXXXXXXXIGEMSFLQHN

SEQ ID NO: 19004 - protein, 43 aa, Artificial Sequence
  GFR-binding peptide
  MOD_RES (6), (40), (42): Xaa is C or S
DEGLEXVPTEERSVKMAKVRIKPHQGQHKEVQVFLQHNKXEXR

SEQ ID NO: 19005 - protein, 40 aa, Artificial Sequence
  GFR-binding peptide
  MOD_RES (3), (40): Xaa is C or S
VQXRPTQVQLSNITVQIMEIVRKKPIFLGEMSTLEDHLAX

SEQ ID NO: 19006 - protein, 33 aa, Artificial Sequence
  GFR-binding peptide
VPTEERPVQMRKIRIKPHQGQHKKATVFLQHNK

SEQ ID NO: 19007 - protein, 39 aa, Artificial Sequence
  GFR-binding peptide
  MOD_RES (4), (4): Xaa is C or S
  MOD_RES (20), (21), (22), (23), (24): Xaa is A or G
  MOD_RES (25), (26), (27), (28): Xaa is A or G or is absent
NVQXRPTQVQLRSVKVAKVXXXXXXXXXKEVQVTLEDHL

SEQ ID NO: 19008 - protein, 36 aa, Artificial Sequence
  GFR-binding peptide
  MOD_RES (35), (35): Xaa is C or S
TQVQLRSVKVAKVEIVRKKPIFKEVQVTLEDHLAXK

SEQ ID NO: 19009 - protein, 38 aa, Artificial Sequence
  GFR-binding peptide
  MOD_RES (3), (3): Xaa is C or S
  MOD_RES (19), (20), (21), (22), (23): Xaa is A or G
  MOD_RES (24), (25), (26), (27): Xaa is A or G or is absent
VKXQPSRVHHSNITVQIMXXXXXXXXXIGEMSRLEEHL

SEQ ID NO: 19010 - protein, 40 aa, Artificial Sequence
  GFR-binding peptide
  MOD_RES (4), (38), (40): Xaa is C or S
GLEXVPTGQRPVQMRKIRIKPHQGQHKKATVLEEHSQXEX

SEQ ID NO: 19011 - protein, 40 aa, Artificial Sequence
  GFR-binding peptide
  MOD_RES (5), (39): Xaa is C or S
EGLEXVPTGQRSVKMAKVRIKPHQGQHKEVQVLEEHSQXE

SEQ ID NO: 19012 - protein, 36 aa, Artificial Sequence
  GFR-binding peptide
  MOD_RES (34), (36): Xaa is C or S
  MOD_RES (14), (15), (16), (17), (18): Xaa is A or G
  MOD_RES (19), (20), (21), (22): Xaa is A or G or is absent
VPTEESNITMQIMXXXXXXXXXLGEMSFLQHNKXEX

SEQ ID NO: 19013 - protein, 36 aa, Artificial Sequence
  GFR-binding peptide
  MOD_RES (3), (3): Xaa is C or S
  MOD_RES (17), (18), (19), (20), (21): Xaa is A or G
  MOD_RES (22), (23), (24), (25): Xaa is A or G or is absent
LEXVPTEESNITMQIMXXXXXXXXXLGEMSFLQHNK

SEQ ID NO: 19014 - protein, 39 aa, Artificial Sequence
  GFR-binding peptide
  MOD_RES (7), (7): Xaa is C or S
NDEGLEXVPTEERPVQMRKIRIKPHQGQHKKATVFLQHN

SEQ ID NO: 19015 - protein, 33 aa, Artificial Sequence
  GFR-binding peptide
  MOD_RES (15), (16), (17), (18), (19): Xaa is A or G
  MOD_RES (20), (21), (22), (23): Xaa is A or G or is absent
PSRVHHRSVKVAKVXXXXXXXXXKEVQVRLEEH

SEQ ID NO: 19016 - protein, 41 aa, Artificial Sequence
  GFR-binding peptide
  MOD_RES (5), (5): Xaa is C or S
SSVKXQPSRVHHSNITVQIMEYVRKKPKLLGEMSRLEEHLE

SEQ ID NO: 19017 - protein, 37 aa, Artificial Sequence
  GFR-binding peptide
  MOD_RES (2), (36): Xaa is C or S
EXVPTEESNITMQIMRIKPHQGQHLGEMSFLQHNKXE

SEQ ID NO: 19018 - protein, 38 aa, Artificial Sequence
  GFR-binding peptide
  MOD_RES (3), (3): Xaa is C or S
  MOD_RES (19), (20), (21), (22), (23): Xaa is A or G
  MOD_RES (24), (25), (26), (27): Xaa is A or G or is absent
VKXQPSRVHHRPVQVRKIXXXXXXXXXKKATVRLEEHL

SEQ ID NO: 19019 - protein, 39 aa, Artificial Sequence
  GFR-binding peptide
  MOD_RES (7), (7): Xaa is C or S
NDEGLEXVPTEERSVKMAKVRIKPHQGQHKEVQVFLQHN

SEQ ID NO: 19020 - protein, 39 aa, Artificial Sequence
  GFR-binding peptide
  MOD_RES (37), (39): Xaa is C or S
QPSRVHHSNITVQIMEYVRKKPKLIGEMSRLEEHLEXAX

SEQ ID NO: 19021 - protein, 37 aa, Artificial Sequence
  GFR-binding peptide
  MOD_RES (1), (1): Xaa is C or S
  MOD_RES (17), (18), (19), (20), (21): Xaa is A or G
  MOD_RES (22), (23), (24), (25): Xaa is A or G or is absent
XQPSRVHHRPVQVRKIXXXXXXXXXKKATVRLEEHLE

SEQ ID NO: 19022 - protein, 38 aa, Artificial Sequence
  GFR-binding peptide
  MOD_RES (6), (6): Xaa is C or S
DEGLEXVPTGQRSVKMAKVRIKPHQGQHKEVQVLEEHS

SEQ ID NO: 19023 - protein, 40 aa, Artificial Sequence
  GFR-binding peptide
  MOD_RES (3), (37), (39): Xaa is C or S
  MOD_RES (17), (18), (19), (20), (21): Xaa is A or G
  MOD_RES (22), (23), (24), (25): Xaa is A or G or is absent
LEXVPTGQSNITMQIMXXXXXXXXXIGEMSLEEHSQXEXR

SEQ ID NO: 19024 - protein, 33 aa, Artificial Sequence
  GFR-binding peptide
  MOD_RES (15), (16), (17), (18), (19): Xaa is A or G
  MOD_RES (20), (21), (22), (23): Xaa is A or G or is absent
PSRVHHRPVQVRKIXXXXXXXXXKKATVRLEEH

SEQ ID NO: 19025 - protein, 43 aa, Artificial Sequence
  GFR-binding peptide
  MOD_RES (4), (41), (43): Xaa is C or S
  MOD_RES (20), (21), (22), (23), (24): Xaa is A or G
  MOD_RES (25), (26), (27), (28): Xaa is A or G or is absent
SVKXQPSRVHHSNITVQIMXXXXXXXXXIGEMSRLEEHLEXAX

SEQ ID NO: 19026 - protein, 37 aa, Artificial Sequence
  GFR-binding peptide
  MOD_RES (36), (36): Xaa is C or S
PSRVHHRPVQVRKIEYVRKKPKLKKATVRLEEHLEXA

SEQ ID NO: 19027 - protein, 38 aa, Artificial Sequence
  GFR-binding peptide
  MOD_RES (3), (37): Xaa is C or S
  MOD_RES (17), (18), (19), (20), (21): Xaa is A or G
  MOD_RES (22), (23), (24), (25): Xaa is A or G or is absent
LEXVPTEERSVKMAKVXXXXXXXXXKEVQVFLQHNKXE

SEQ ID NO: 19028 - protein, 36 aa, Artificial Sequence
  GFR-binding peptide
  MOD_RES (16), (17), (18), (19), (20): Xaa is A or G
  MOD_RES (21), (22), (23), (24): Xaa is A or G or is absent
RPTQVQLRSVKVAKVXXXXXXXXXKEVQVTLEDHLA

SEQ ID NO: 19029 - protein, 38 aa, Artificial Sequence
  GFR-binding peptide
  MOD_RES (2), (36), (38): Xaa is C or S
  MOD_RES (16), (17), (18), (19), (20): Xaa is A or G
  MOD_RES (21), (22), (23), (24): Xaa is A or G or is absent
EXVPTGQRPVQMRKIXXXXXXXXXKKATVLEEHSQXEX

SEQ ID NO: 19030 - protein, 36 aa, Artificial Sequence
  GFR-binding peptide
  MOD_RES (35), (35): Xaa is C or S
  MOD_RES (14), (15), (16), (17), (18): Xaa is A or G
  MOD_RES (19), (20), (21), (22): Xaa is A or G or is absent
TQVQLRSVKVAKVXXXXXXXXXKEVQVTLEDHLAXK

SEQ ID NO: 19031 - protein, 43 aa, Artificial Sequence
  GFR-binding peptide
  MOD_RES (3), (40), (42): Xaa is C or S
VKXQPSRVHHSNITVQIMEYVRKKPKLIGEMSRLEEHLEXAXA

SEQ ID NO: 19032 - protein, 37 aa, Artificial Sequence
  GFR-binding peptide
  MOD_RES (36), (36): Xaa is C or S
PSRVHHSNITVQIMEYVRKKPKLLGEMSRLEEHLEXA

SEQ ID NO: 19033 - protein, 40 aa, Artificial Sequence
  GFR-binding peptide
  MOD_RES (3), (40): Xaa is C or S
VKXQPSRVHHSNITVQIMEYVRKKPKLIGEMSRLEEHLEX

SEQ ID NO: 19034 - protein, 38 aa, Artificial Sequence
  GFR-binding peptide
  MOD_RES (1), (35), (37): Xaa is C or S
  MOD_RES (15), (16), (17), (18), (19): Xaa is A or G
  MOD_RES (20), (21), (22), (23): Xaa is A or G or is absent
XVPTGQSNITMQIMXXXXXXXXXIGEMSLEEHSQXEXR

SEQ ID NO: 19035 - protein, 38 aa, Artificial Sequence
  GFR-binding peptide
  MOD_RES (6), (6): Xaa is C or S
  MOD_RES (20), (21), (22), (23), (24): Xaa is A or G
  MOD_RES (25), (26), (27), (28): Xaa is A or G or is absent
DEGLEXVPTGQSNITMQIMXXXXXXXXXIGEMSLEEHS

SEQ ID NO: 19036 - protein, 40 aa, Artificial Sequence
  GFR-binding peptide
  MOD_RES (4), (38), (40): Xaa is C or S
  MOD_RES (18), (19), (20), (21), (22): Xaa is A or G
  MOD_RES (23), (24), (25), (26): Xaa is A or G or is absent
GLEXVPTEERPVQMRKIXXXXXXXXXKKATVFLQHNKXEX

SEQ ID NO: 19037 - protein, 43 aa, Artificial Sequence
  GFR-binding peptide
  MOD_RES (6), (40), (42): Xaa is C or S
  MOD_RES (20), (21), (22), (23), (24): Xaa is A or G
  MOD_RES (25), (26), (27), (28): Xaa is A or G or is absent
DEGLEXVPTEERPVQMRKIXXXXXXXXXKKATVFLQHNKXEXR

SEQ ID NO: 19038 - protein, 35 aa, Artificial Sequence
  GFR-binding peptide
  MOD_RES (35), (35): Xaa is C or S
  MOD_RES (14), (15), (16), (17), (18): Xaa is A or G
  MOD_RES (19), (20), (21), (22): Xaa is A or G or is absent
TQVQLSNITVQIMXXXXXXXXXLGEMSTLEDHLAX

SEQ ID NO: 19039 - protein, 39 aa, Artificial Sequence
  GFR-binding peptide
  MOD_RES (5), (5): Xaa is C or S
RNVQXRPTQVQLSNITVQIMEIVRKKPIFLGEMSTLEDH

SEQ ID NO: 19040 - protein, 41 aa, Artificial Sequence
  GFR-binding peptide
  MOD_RES (6), (40): Xaa is C or S
DEGLEXVPTGQSNITMQIMRIKPHQGQHIGEMSLEEHSQXE

SEQ ID NO: 19041 - protein, 38 aa, Artificial Sequence
  GFR-binding peptide
  MOD_RES (6), (6): Xaa is C or S
DEGLEXVPTEESNITMQIMRIKPHQGQHLGEMSFLQHN

SEQ ID NO: 19042 - protein, 40 aa, Artificial Sequence
  GFR-binding peptide
  MOD_RES (5), (5): Xaa is C or S
  MOD_RES (21), (22), (23), (24), (25): Xaa is A or G
  MOD_RES (26), (27), (28), (29): Xaa is A or G or is absent
SSVKXQPSRVHHRPVQVRKIXXXXXXXXXKKATVRLEEHL

SEQ ID NO: 19043 - protein, 40 aa, Artificial Sequence
  GFR-binding peptide
  MOD_RES (1), (38), (40): Xaa is C or S
  MOD_RES (17), (18), (19), (20), (21): Xaa is A or G
  MOD_RES (22), (23), (24), (25): Xaa is A or G or is absent
XQPSRVHHSNITVQIMXXXXXXXXXIGEMSRLEEHLEXAX

SEQ ID NO: 19044 - protein, 35 aa, Artificial Sequence
  GFR-binding peptide
  MOD_RES (3), (3): Xaa is C or S
LEXVPTEESNITMQIMRIKPHQGQHLGEMSFLQHN

SEQ ID NO: 19045 - protein, 39 aa, Artificial Sequence
  GFR-binding peptide
  MOD_RES (5), (39): Xaa is C or S
EGLEXVPTEERPVQMRKIRIKPHQGQHKKATVFLQHNKX

SEQ ID NO: 19046 - protein, 41 aa, Artificial Sequence
  GFR-binding peptide
  MOD_RES (5), (39), (41): Xaa is C or S
EGLEXVPTGQRPVQMRKIRIKPHQGQHKKATVLEEHSQXEX

SEQ ID NO: 19047 - protein, 37 aa, Artificial Sequence
  GFR-binding peptide
  MOD_RES (1), (1): Xaa is C or S
XRPTQVQLSNITVQIMEIVRKKPIFIGEMSTLEDHLA

SEQ ID NO: 19048 - protein, 42 aa, Artificial Sequence
  GFR-binding peptide
  MOD_RES (6), (40), (42): Xaa is C or S
DEGLEXVPTEESNITMQIMRIKPHQGQHLGEMSFLQHNKXEX

SEQ ID NO: 19049 - protein, 38 aa, Artificial Sequence
  GFR-binding peptide
  MOD_RES (4), (4): Xaa is C or S
SVKXQPSRVHHSNITVQIMEYVRKKPKLLGEMSRLEEH

SEQ ID NO: 19050 - protein, 38 aa, Artificial Sequence
  GFR-binding peptide
  MOD_RES (36), (38): Xaa is C or S
PTQVQLRSVKVAKVEIVRKKPIFKEVQVTLEDHLAXKX

SEQ ID NO: 19051 - protein, 39 aa, Artificial Sequence
  GFR-binding peptide
  MOD_RES (7), (7): Xaa is C or S
  MOD_RES (21), (22), (23), (24), (25): Xaa is A or G
  MOD_RES (26), (27), (28), (29): Xaa is A or G or is absent
NDEGLEXVPTEESNITMQIMXXXXXXXXXIGEMSFLQHN

SEQ ID NO: 19052 - protein, 41 aa, Artificial Sequence
  GFR-binding peptide
  MOD_RES (3), (40): Xaa is C or S
VQXRPTQVQLSNITVQIMEIVRKKPIFLGEMSTLEDHLAXK

SEQ ID NO: 19053 - protein, 40 aa, Artificial Sequence
  GFR-binding peptide
  MOD_RES (37), (39): Xaa is C or S
QPSRVHHSNITVQIMEYVRKKPKLIGEMSRLEEHLEXAXA

SEQ ID NO: 19054 - protein, 37 aa, Artificial Sequence
  GFR-binding peptide
  MOD_RES (37), (37): Xaa is C or S
QPSRVHHSNITVQIMEYVRKKPKLLGEMSRLEEHLEX

SEQ ID NO: 19055 - protein, 40 aa, Artificial Sequence
  GFR-binding peptide
  MOD_RES (6), (40): Xaa is C or S
DEGLEXVPTEERPVQMRKIRIKPHQGQHKKATVFLQHNKX

SEQ ID NO: 19056 - protein, 39 aa, Artificial Sequence
  GFR-binding peptide
  MOD_RES (3), (3): Xaa is C or S
  MOD_RES (19), (20), (21), (22), (23): Xaa is A or G
  MOD_RES (24), (25), (26), (27): Xaa is A or G or is absent
VQXRPTQVQLRPVQVRKIXXXXXXXXXKKATVTLEDHLA

SEQ ID NO: 19057 - protein, 36 aa, Artificial Sequence
  GFR-binding peptide
  MOD_RES (1), (1): Xaa is C or S
  MOD_RES (17), (18), (19), (20), (21): Xaa is A or G
  MOD_RES (22), (23), (24), (25): Xaa is A or G or is absent
XRPTQVQLSNITVQIMXXXXXXXXXLGEMSTLEDHL

SEQ ID NO: 19058 - protein, 38 aa, Artificial Sequence
  GFR-binding peptide
  MOD_RES (2), (36), (38): Xaa is C or S
EXVPTGQRSVKMAKVRIKPHQGQHKEVQVLEEHSQXEX

SEQ ID NO: 19059 - protein, 32 aa, Artificial Sequence
  GFR-binding peptide
  MOD_RES (14), (15), (16), (17), (18): Xaa is A or G
  MOD_RES (19), (20), (21), (22): Xaa is A or G or is absent
TQVQLSNITVQIMXXXXXXXXXIGEMSTLEDH

SEQ ID NO: 19060 - protein, 41 aa, Artificial Sequence
  GFR-binding peptide
  MOD_RES (4), (38), (40): Xaa is C or S
GLEXVPTGQSNITMQIMRIKPHQGQHIGEMSLEEHSQXEXR

SEQ ID NO: 19061 - protein, 42 aa, Artificial Sequence
  GFR-binding peptide
  MOD_RES (3), (40), (42): Xaa is C or S
VKXQPSRVHHSNITVQIMEYVRKKPKLIGEMSRLEEHLEXAX

SEQ ID NO: 19062 - protein, 39 aa, Artificial Sequence
  GFR-binding peptide
  MOD_RES (5), (5): Xaa is C or S
  MOD_RES (21), (22), (23), (24), (25): Xaa is A or G
  MOD_RES (26), (27), (28), (29): Xaa is A or G or is absent
SSVKXQPSRVHHSNITVQIMXXXXXXXXXLGEMSRLEEH

SEQ ID NO: 19063 - protein, 41 aa, Artificial Sequence
  GFR-binding peptide
  MOD_RES (5), (5): Xaa is C or S
  MOD_RES (21), (22), (23), (24), (25): Xaa is A or G
  MOD_RES (26), (27), (28), (29): Xaa is A or G or is absent
SSVKXQPSRVHHRPVQVRKIXXXXXXXXXKKATVRLEEHLE

SEQ ID NO: 19064 - protein, 37 aa, Artificial Sequence
  GFR-binding peptide
  MOD_RES (1), (35), (37): Xaa is C or S
XVPTGQRSVKMAKVRIKPHQGQHKEVQVLEEHSQXEX

SEQ ID NO: 19065 - protein, 39 aa, Artificial Sequence
  GFR-binding peptide
  MOD_RES (4), (4): Xaa is C or S
NVQXRPTQVQLSNITVQIMEIVRKKPIFLGEMSTLEDHL

SEQ ID NO: 19066 - protein, 45 aa, Artificial Sequence
  GFR-binding peptide
  MOD_RES (5), (42), (44): Xaa is C or S
  MOD_RES (21), (22), (23), (24), (25): Xaa is A or G
  MOD_RES (26), (27), (28), (29): Xaa is A or G or is absent
RNVQXRPTQVQLRPVQVRKIXXXXXXXXXKKATVTLEDHLAXKXE

SEQ ID NO: 19067 - protein, 38 aa, Artificial Sequence
  GFR-binding peptide
  MOD_RES (35), (37): Xaa is C or S
  MOD_RES (14), (15), (16), (17), (18): Xaa is A or G
  MOD_RES (19), (20), (21), (22): Xaa is A or G or is absent
TQVQLRSVKVAKVXXXXXXXXXKEVQVTLEDHLAXKXE

SEQ ID NO: 19068 - protein, 42 aa, Artificial Sequence
  GFR-binding peptide
  MOD_RES (2), (39), (41): Xaa is C or S
KXQPSRVHHSNITVQIMEYVRKKPKLLGEMSRLEEHLEXAXA

SEQ ID NO: 19069 - protein, 44 aa, Artificial Sequence
  GFR-binding peptide
  MOD_RES (7), (41), (43): Xaa is C or S
  MOD_RES (21), (22), (23), (24), (25): Xaa is A or G
  MOD_RES (26), (27), (28), (29): Xaa is A or G or is absent
NDEGLEXVPTGQSNITMQIMXXXXXXXXXIGEMSLEEHSQXEXR

SEQ ID NO: 19070 - protein, 42 aa, Artificial Sequence
  GFR-binding peptide
  MOD_RES (4), (41): Xaa is C or S
  MOD_RES (20), (21), (22), (23), (24): Xaa is A or G
  MOD_RES (25), (26), (27), (28): Xaa is A or G or is absent
SVKXQPSRVHHSNITVQIMXXXXXXXXXLGEMSRLEEHLEXA

SEQ ID NO: 19071 - protein, 42 aa, Artificial Sequence
  GFR-binding peptide
  MOD_RES (7), (41): Xaa is C or S
NDEGLEXVPTEERSVKMAKVRIKPHQGQHKEVQVFLQHNKXE

SEQ ID NO: 19072 - protein, 37 aa, Artificial Sequence
  GFR-binding peptide
  MOD_RES (3), (37): Xaa is C or S
  MOD_RES (17), (18), (19), (20), (21): Xaa is A or G
  MOD_RES (22), (23), (24), (25): Xaa is A or G or is absent
LEXVPTEESNITMQIMXXXXXXXXXIGEMSFLQHNKX

SEQ ID NO: 19073 - protein, 37 aa, Artificial Sequence
  GFR-binding peptide
  MOD_RES (37), (37): Xaa is C or S
RPTQVQLSNITVQIMEIVRKKPIFLGEMSTLEDHLAX

SEQ ID NO: 19074 - protein, 37 aa, Artificial Sequence
  GFR-binding peptide
  MOD_RES (3), (37): Xaa is C or S
  MOD_RES (17), (18), (19), (20), (21): Xaa is A or G
  MOD_RES (22), (23), (24), (25): Xaa is A or G or is absent
LEXVPTEESNITMQIMXXXXXXXXXLGEMSFLQHNKX

SEQ ID NO: 19075 - protein, 38 aa, Artificial Sequence
  GFR-binding peptide
  MOD_RES (36), (38): Xaa is C or S
PSRVHHRPVQVRKIEYVRKKPKLKKATVRLEEHLEXAX

SEQ ID NO: 19076 - protein, 38 aa, Artificial Sequence
  GFR-binding peptide
  MOD_RES (6), (6): Xaa is C or S
DEGLEXVPTGQSNITMQIMRIKPHQGQHIGEMSLEEHS

SEQ ID NO: 19077 - protein, 39 aa, Artificial Sequence
  GFR-binding peptide
  MOD_RES (2), (39): Xaa is C or S
  MOD_RES (18), (19), (20), (21), (22): Xaa is A or G
  MOD_RES (23), (24), (25), (26): Xaa is A or G or is absent
KXQPSRVHHRPVQVRKIXXXXXXXXXKKATVRLEEHLEX

SEQ ID NO: 19078 - protein, 40 aa, Artificial Sequence
  GFR-binding peptide
  MOD_RES (6), (40): Xaa is C or S
DEGLEXVPTGQRSVKMAKVRIKPHQGQHKEVQVLEEHSQX

SEQ ID NO: 19079 - protein, 39 aa, Artificial Sequence
  GFR-binding peptide
  MOD_RES (5), (39): Xaa is C or S
  MOD_RES (19), (20), (21), (22), (23): Xaa is A or G
  MOD_RES (24), (25), (26), (27): Xaa is A or G or is absent
EGLEXVPTEERSVKMAKVXXXXXXXXXKEVQVFLQHNKX

SEQ ID NO: 19080 - protein, 42 aa, Artificial Sequence
  GFR-binding peptide
  MOD_RES (6), (40), (42): Xaa is C or S
  MOD_RES (20), (21), (22), (23), (24): Xaa is A or G
  MOD_RES (25), (26), (27), (28): Xaa is A or G or is absent
DEGLEXVPTGQRSVKMAKVXXXXXXXXXKEVQVLEEHSQXEX

SEQ ID NO: 19081 - protein, 39 aa, Artificial Sequence
  GFR-binding peptide
  MOD_RES (36), (38): Xaa is C or S
PTQVQLRSVKVAKVEIVRKKPIFKEVQVTLEDHLAXKXE

SEQ ID NO: 19082 - protein, 39 aa, Artificial Sequence
  GFR-binding peptide
  MOD_RES (1), (38): Xaa is C or S
XQPSRVHHSNITVQIMEYVRKKPKLIGEMSRLEEHLEXA

SEQ ID NO: 19083 - protein, 37 aa, Artificial Sequence
  GFR-binding peptide
  MOD_RES (3), (37): Xaa is C or S
LEXVPTEESNITMQIMRIKPHQGQHLGEMSFLQHNKX

SEQ ID NO: 19084 - protein, 43 aa, Artificial Sequence
  GFR-binding peptide
  MOD_RES (3), (40), (42): Xaa is C or S
VQXRPTQVQLSNITVQIMEIVRKKPIFLGEMSTLEDHLAXKXE

SEQ ID NO: 19085 - protein, 37 aa, Artificial Sequence
  GFR-binding peptide
  MOD_RES (37), (37): Xaa is C or S
  MOD_RES (16), (17), (18), (19), (20): Xaa is A or G
  MOD_RES (21), (22), (23), (24): Xaa is A or G or is absent
RPTQVQLRSVKVAKVXXXXXXXXXKEVQVTLEDHLAX

SEQ ID NO: 19086 - protein, 33 aa, Artificial Sequence
  GFR-binding peptide
  MOD_RES (14), (15), (16), (17), (18): Xaa is A or G
  MOD_RES (19), (20), (21), (22): Xaa is A or G or is absent
SRVHHSNITVQIMXXXXXXXXXIGEMSRLEEHL

SEQ ID NO: 19087 - protein, 37 aa, Artificial Sequence
  GFR-binding peptide
  MOD_RES (5), (5): Xaa is C or S
  MOD_RES (19), (20), (21), (22), (23): Xaa is A or G
  MOD_RES (24), (25), (26), (27): Xaa is A or G or is absent
EGLEXVPTGQRSVKMAKVXXXXXXXXXKEVQVLEEHS

SEQ ID NO: 19088 - protein, 39 aa, Artificial Sequence
  GFR-binding peptide
  MOD_RES (5), (39): Xaa is C or S
EGLEXVPTEERSVKMAKVRIKPHQGQHKEVQVFLQHNKX

SEQ ID NO: 19089 - protein, 39 aa, Artificial Sequence
  GFR-binding peptide
  MOD_RES (4), (4): Xaa is C or S
SVKXQPSRVHHSNITVQIMEYVRKKPKLLGEMSRLEEHL

SEQ ID NO: 19090 - protein, 39 aa, Artificial Sequence
  GFR-binding peptide
  MOD_RES (2), (39): Xaa is C or S
  MOD_RES (18), (19), (20), (21), (22): Xaa is A or G
  MOD_RES (23), (24), (25), (26): Xaa is A or G or is absent
KXQPSRVHHSNITVQIMXXXXXXXXXIGEMSRLEEHLEX

SEQ ID NO: 19091 - protein, 37 aa, Artificial Sequence
  GFR-binding peptide
  MOD_RES (3), (37): Xaa is C or S
  MOD_RES (17), (18), (19), (20), (21): Xaa is A or G
  MOD_RES (22), (23), (24), (25): Xaa is A or G or is absent
LEXVPTGQRPVQMRKIXXXXXXXXXKKATVLEEHSQX

SEQ ID NO: 19092 - protein, 38 aa, Artificial Sequence
  GFR-binding peptide
  MOD_RES (2), (36), (38): Xaa is C or S
EXVPTEERSVKMAKVRIKPHQGQHKEVQVFLQHNKXEX

SEQ ID NO: 19093 - protein, 38 aa, Artificial Sequence
  GFR-binding peptide
  MOD_RES (37), (37): Xaa is C or S
RPTQVQLSNITVQIMEIVRKKPIFLGEMSTLEDHLAXK

SEQ ID NO: 19094 - protein, 39 aa, Artificial Sequence
  GFR-binding peptide
  MOD_RES (4), (38): Xaa is C or S
GLEXVPTEERSVKMAKVRIKPHQGQHKEVQVFLQHNKXE

SEQ ID NO: 19095 - protein, 38 aa, Artificial Sequence
  GFR-binding peptide
  MOD_RES (35), (37): Xaa is C or S
SRVHHRPVQVRKIEYVRKKPKLKKATVRLEEHLEXAXA

SEQ ID NO: 19096 - protein, 40 aa, Artificial Sequence
  GFR-binding peptide
  MOD_RES (3), (40): Xaa is C or S
VKXQPSRVHHSNITVQIMEYVRKKPKLLGEMSRLEEHLEX

SEQ ID NO: 19097 - protein, 37 aa, Artificial Sequence
  GFR-binding peptide
  MOD_RES (1), (35), (37): Xaa is C or S
XVPTGQSNITMQIMRIKPHQGQHIGEMSLEEHSQXEX

SEQ ID NO: 19098 - protein, 39 aa, Artificial Sequence
  GFR-binding peptide
  MOD_RES (6), (6): Xaa is C or S
DEGLEXVPTEERPVQMRKIRIKPHQGQHKKATVFLQHNK

SEQ ID NO: 19099 - protein, 41 aa, Artificial Sequence
  GFR-binding peptide
  MOD_RES (6), (40): Xaa is C or S
  MOD_RES (20), (21), (22), (23), (24): Xaa is A or G
  MOD_RES (25), (26), (27), (28): Xaa is A or G or is absent
DEGLEXVPTGQRPVQMRKIXXXXXXXXXKKATVLEEHSQXE

SEQ ID NO: 19100 - protein, 41 aa, Artificial Sequence
  GFR-binding peptide
  MOD_RES (3), (40): Xaa is C or S
VKXQPSRVHHSNITVQIMEYVRKKPKLLGEMSRLEEHLEXA

SEQ ID NO: 19101 - protein, 39 aa, Artificial Sequence
  GFR-binding peptide
  MOD_RES (3), (37), (39): Xaa is C or S
  MOD_RES (17), (18), (19), (20), (21): Xaa is A or G
  MOD_RES (22), (23), (24), (25): Xaa is A or G or is absent
LEXVPTEESNITMQIMXXXXXXXXXLGEMSFLQHNKXEX

SEQ ID NO: 19102 - protein, 42 aa, Artificial Sequence
  GFR-binding peptide
  MOD_RES (5), (42): Xaa is C or S
  MOD_RES (21), (22), (23), (24), (25): Xaa is A or G
  MOD_RES (26), (27), (28), (29): Xaa is A or G or is absent
SSVKXQPSRVHHSNITVQIMXXXXXXXXXIGEMSRLEEHLEX

SEQ ID NO: 19103 - protein, 39 aa, Artificial Sequence
  GFR-binding peptide
  MOD_RES (37), (39): Xaa is C or S
RPTQVQLSNITVQIMEIVRKKPIFIGEMSTLEDHLAXKX

SEQ ID NO: 19104 - protein, 43 aa, Artificial Sequence
  GFR-binding peptide
  MOD_RES (4), (41), (43): Xaa is C or S
NVQXRPTQVQLSNITVQIMEIVRKKPIFIGEMSTLEDHLAXKX

SEQ ID NO: 19105 - protein, 33 aa, Artificial Sequence
  GFR-binding peptide
VPTGQRSVKMAKVRIKPHQGQHKEVQVLEEHSQ

SEQ ID NO: 19106 - protein, 39 aa, Artificial Sequence
  GFR-binding peptide
  MOD_RES (6), (6): Xaa is C or S
  MOD_RES (20), (21), (22), (23), (24): Xaa is A or G
  MOD_RES (25), (26), (27), (28): Xaa is A or G or is absent
DEGLEXVPTEESNITMQIMXXXXXXXXXLGEMSFLQHNK

SEQ ID NO: 19107 - protein, 44 aa, Artificial Sequence
  GFR-binding peptide
  MOD_RES (5), (42), (44): Xaa is C or S
RNVQXRPTQVQLSNITVQIMEIVRKKPIFIGEMSTLEDHLAXKX

SEQ ID NO: 19108 - protein, 44 aa, Artificial Sequence
  GFR-binding peptide
  MOD_RES (5), (42), (44): Xaa is C or S
RNVQXRPTQVQLSNITVQIMEIVRKKPIFLGEMSTLEDHLAXKX

SEQ ID NO: 19109 - protein, 38 aa, Artificial Sequence
  GFR-binding peptide
  MOD_RES (35), (37): Xaa is C or S
TQVQLSNITVQIMEIVRKKPIFLGEMSTLEDHLAXKXE

SEQ ID NO: 19110 - protein, 38 aa, Artificial Sequence
  GFR-binding peptide
  MOD_RES (5), (5): Xaa is C or S
  MOD_RES (19), (20), (21), (22), (23): Xaa is A or G
  MOD_RES (24), (25), (26), (27): Xaa is A or G or is absent
EGLEXVPTGQRPVQMRKIXXXXXXXXXKKATVLEEHSQ

SEQ ID NO: 19111 - protein, 35 aa, Artificial Sequence
  GFR-binding peptide
  MOD_RES (2), (2): Xaa is C or S
  MOD_RES (16), (17), (18), (19), (20): Xaa is A or G
  MOD_RES (21), (22), (23), (24): Xaa is A or G or is absent
EXVPTEESNITMQIMXXXXXXXXXIGEMSFLQHNK

SEQ ID NO: 19112 - protein, 32 aa, Artificial Sequence
  GFR-binding peptide
  MOD_RES (14), (15), (16), (17), (18): Xaa is A or G
  MOD_RES (19), (20), (21), (22): Xaa is A or G or is absent
VPTGQRPVQMRKIXXXXXXXXXKKATVLEEHS

SEQ ID NO: 19113 - protein, 40 aa, Artificial Sequence
  GFR-binding peptide
  MOD_RES (6), (40): Xaa is C or S
  MOD_RES (20), (21), (22), (23), (24): Xaa is A or G
  MOD_RES (25), (26), (27), (28): Xaa is A or G or is absent
DEGLEXVPTEERPVQMRKIXXXXXXXXXKKATVFLQHNKX

SEQ ID NO: 19114 - protein, 33 aa, Artificial Sequence
  GFR-binding peptide
VPTGQSNITMQIMRIKPHQGQHIGEMSLEEHSQ

SEQ ID NO: 19115 - protein, 35 aa, Artificial Sequence
  GFR-binding peptide
  MOD_RES (1), (35): Xaa is C or S
XVPTEERPVQMRKIRIKPHQGQHKKATVFLQHNKX

SEQ ID NO: 19116 - protein, 40 aa, Artificial Sequence
  GFR-binding peptide
  MOD_RES (6), (40): Xaa is C or S
  MOD_RES (20), (21), (22), (23), (24): Xaa is A or G
  MOD_RES (25), (26), (27), (28): Xaa is A or G or is absent
DEGLEXVPTGQRSVKMAKVXXXXXXXXXKEVQVLEEHSQX

SEQ ID NO: 19117 - protein, 39 aa, Artificial Sequence
  GFR-binding peptide
  MOD_RES (36), (38): Xaa is C or S
PSRVHHSNITVQIMEYVRKKPKLIGEMSRLEEHLEXAXA

SEQ ID NO: 19118 - protein, 43 aa, Artificial Sequence
  GFR-binding peptide
  MOD_RES (5), (42): Xaa is C or S
  MOD_RES (21), (22), (23), (24), (25): Xaa is A or G
  MOD_RES (26), (27), (28), (29): Xaa is A or G or is absent
SSVKXQPSRVHHRPVQVRKIXXXXXXXXXKKATVRLEEHLEXA

SEQ ID NO: 19119 - protein, 37 aa, Artificial Sequence
  GFR-binding peptide
  MOD_RES (2), (36): Xaa is C or S
EXVPTGQSNITMQIMRIKPHQGQHIGEMSLEEHSQXE

SEQ ID NO: 19120 - protein, 36 aa, Artificial Sequence
  GFR-binding peptide
  MOD_RES (1), (1): Xaa is C or S
  MOD_RES (17), (18), (19), (20), (21): Xaa is A or G
  MOD_RES (22), (23), (24), (25): Xaa is A or G or is absent
XQPSRVHHSNITVQIMXXXXXXXXXLGEMSRLEEHL

SEQ ID NO: 19121 - protein, 33 aa, Artificial Sequence
  GFR-binding peptide
  MOD_RES (1), (1): Xaa is C or S
  MOD_RES (15), (16), (17), (18), (19): Xaa is A or G
  MOD_RES (20), (21), (22), (23): Xaa is A or G or is absent
XVPTEERPVQMRKIXXXXXXXXXKKATVFLQHN

SEQ ID NO: 19122 - protein, 34 aa, Artificial Sequence
  GFR-binding peptide
  MOD_RES (1), (1): Xaa is C or S
XVPTGQSNITMQIMRIKPHQGQHIGEMSLEEHSQ

SEQ ID NO: 19123 - protein, 33 aa, Artificial Sequence
  GFR-binding peptide
  MOD_RES (15), (16), (17), (18), (19): Xaa is A or G
  MOD_RES (20), (21), (22), (23): Xaa is A or G or is absent
PTQVQLRSVKVAKVXXXXXXXXXKEVQVTLEDH

SEQ ID NO: 19124 - protein, 37 aa, Artificial Sequence
  GFR-binding peptide
  MOD_RES (1), (1): Xaa is C or S
  MOD_RES (17), (18), (19), (20), (21): Xaa is A or G
  MOD_RES (22), (23), (24), (25): Xaa is A or G or is absent
XQPSRVHHSNITVQIMXXXXXXXXXLGEMSRLEEHLE

SEQ ID NO: 19125 - protein, 37 aa, Artificial Sequence
  GFR-binding peptide
  MOD_RES (5), (5): Xaa is C or S
EGLEXVPTGQRPVQMRKIRIKPHQGQHKKATVLEEHS

SEQ ID NO: 19126 - protein, 40 aa, Artificial Sequence
  GFR-binding peptide
  MOD_RES (3), (37), (39): Xaa is C or S
  MOD_RES (17), (18), (19), (20), (21): Xaa is A or G
  MOD_RES (22), (23), (24), (25): Xaa is A or G or is absent
LEXVPTEERPVQMRKIXXXXXXXXXKKATVFLQHNKXEXR

SEQ ID NO: 19127 - protein, 38 aa, Artificial Sequence
  GFR-binding peptide
  MOD_RES (35), (37): Xaa is C or S
TQVQLSNITVQIMEIVRKKPIFIGEMSTLEDHLAXKXE

SEQ ID NO: 19128 - protein, 37 aa, Artificial Sequence
  GFR-binding peptide
  MOD_RES (35), (37): Xaa is C or S
  MOD_RES (14), (15), (16), (17), (18): Xaa is A or G
  MOD_RES (19), (20), (21), (22): Xaa is A or G or is absent
SRVHHSNITVQIMXXXXXXXXXLGEMSRLEEHLEXAX

SEQ ID NO: 19129 - protein, 45 aa, Artificial Sequence
  GFR-binding peptide
  MOD_RES (5), (42), (44): Xaa is C or S
  MOD_RES (21), (22), (23), (24), (25): Xaa is A or G
  MOD_RES (26), (27), (28), (29): Xaa is A or G or is absent
SSVKXQPSRVHHSNITVQIMXXXXXXXXXIGEMSRLEEHLEXAXA

SEQ ID NO: 19130 - protein, 38 aa, Artificial Sequence
  GFR-binding peptide
  MOD_RES (2), (36), (38): Xaa is C or S
EXVPTGQSNITMQIMRIKPHQGQHIGEMSLEEHSQXEX

SEQ ID NO: 19131 - protein, 39 aa, Artificial Sequence
  GFR-binding peptide
  MOD_RES (3), (3): Xaa is C or S
VKXQPSRVHHSNITVQIMEYVRKKPKLIGEMSRLEEHLE

SEQ ID NO: 19132 - protein, 42 aa, Artificial Sequence
  GFR-binding peptide
  MOD_RES (4), (41): Xaa is C or S
  MOD_RES (20), (21), (22), (23), (24): Xaa is A or G
  MOD_RES (25), (26), (27), (28): Xaa is A or G or is absent
NVQXRPTQVQLRPVQVRKIXXXXXXXXXKKATVTLEDHLAXK

SEQ ID NO: 19133 - protein, 45 aa, Artificial Sequence
  GFR-binding peptide
  MOD_RES (5), (42), (44): Xaa is C or S
  MOD_RES (21), (22), (23), (24), (25): Xaa is A or G
  MOD_RES (26), (27), (28), (29): Xaa is A or G or is absent
SSVKXQPSRVHHSNITVQIMXXXXXXXXXLGEMSRLEEHLEXAXA

SEQ ID NO: 19134 - protein, 36 aa, Artificial Sequence
  GFR-binding peptide
  MOD_RES (4), (4): Xaa is C or S
GLEXVPTEERSVKMAKVRIKPHQGQHKEVQVFLQHN

SEQ ID NO: 19135 - protein, 35 aa, Artificial Sequence
  GFR-binding peptide
  MOD_RES (34), (34): Xaa is C or S
  MOD_RES (14), (15), (16), (17), (18): Xaa is A or G
  MOD_RES (19), (20), (21), (22): Xaa is A or G or is absent
VPTEESNITMQIMXXXXXXXXXLGEMSFLQHNKXE

SEQ ID NO: 19136 - protein, 37 aa, Artificial Sequence
  GFR-binding peptide
  MOD_RES (1), (35), (37): Xaa is C or S
XVPTEERSVKMAKVRIKPHQGQHKEVQVFLQHNKXEX

SEQ ID NO: 19137 - protein, 34 aa, Artificial Sequence
  GFR-binding peptide
  MOD_RES (15), (16), (17), (18), (19): Xaa is A or G
  MOD_RES (20), (21), (22), (23): Xaa is A or G or is absent
PSRVHHSNITVQIMXXXXXXXXXIGEMSRLEEHL

SEQ ID NO: 19138 - protein, 39 aa, Artificial Sequence
  GFR-binding peptide
  MOD_RES (7), (7): Xaa is C or S
NDEGLEXVPTEESNITMQIMRIKPHQGQHLGEMSFLQHN

SEQ ID NO: 19139 - protein, 36 aa, Artificial Sequence
  GFR-binding peptide
  MOD_RES (1), (35): Xaa is C or S
XVPTGQSNITMQIMRIKPHQGQHIGEMSLEEHSQXE

SEQ ID NO: 19140 - protein, 41 aa, Artificial Sequence
  GFR-binding peptide
  MOD_RES (7), (41): Xaa is C or S
NDEGLEXVPTEESNITMQIMRIKPHQGQHLGEMSFLQHNKX

SEQ ID NO: 19141 - protein, 36 aa, Artificial Sequence
  GFR-binding peptide
  MOD_RES (4), (4): Xaa is C or S
GLEXVPTEERPVQMRKIRIKPHQGQHKKATVFLQHN

SEQ ID NO: 19142 - protein, 41 aa, Artificial Sequence
  GFR-binding peptide
  MOD_RES (7), (41): Xaa is C or S
  MOD_RES (21), (22), (23), (24), (25): Xaa is A or G
  MOD_RES (26), (27), (28), (29): Xaa is A or G or is absent
NDEGLEXVPTGQSNITMQIMXXXXXXXXXIGEMSLEEHSQX

SEQ ID NO: 19143 - protein, 35 aa, Artificial Sequence
  GFR-binding peptide
  MOD_RES (34), (34): Xaa is C or S
  MOD_RES (14), (15), (16), (17), (18): Xaa is A or G
  MOD_RES (19), (20), (21), (22): Xaa is A or G or is absent
VPTGQRSVKMAKVXXXXXXXXXKEVQVLEEHSQXE

SEQ ID NO: 19144 - protein, 36 aa, Artificial Sequence
  GFR-binding peptide
  MOD_RES (4), (4): Xaa is C or S
  MOD_RES (18), (19), (20), (21), (22): Xaa is A or G
  MOD_RES (23), (24), (25), (26): Xaa is A or G or is absent
GLEXVPTEESNITMQIMXXXXXXXXXLGEMSFLQHN

SEQ ID NO: 19145 - protein, 42 aa, Artificial Sequence
  GFR-binding peptide
  MOD_RES (4), (41): Xaa is C or S
  MOD_RES (20), (21), (22), (23), (24): Xaa is A or G
  MOD_RES (25), (26), (27), (28): Xaa is A or G or is absent
SVKXQPSRVHHSNITVQIMXXXXXXXXXIGEMSRLEEHLEXA

SEQ ID NO: 19146 - protein, 41 aa, Artificial Sequence
  GFR-binding peptide
  MOD_RES (5), (5): Xaa is C or S
  MOD_RES (21), (22), (23), (24), (25): Xaa is A or G
  MOD_RES (26), (27), (28), (29): Xaa is A or G or is absent
SSVKXQPSRVHHSNITVQIMXXXXXXXXXIGEMSRLEEHLE

SEQ ID NO: 19147 - protein, 40 aa, Artificial Sequence
  GFR-binding peptide
  MOD_RES (2), (39): Xaa is C or S
  MOD_RES (18), (19), (20), (21), (22): Xaa is A or G
  MOD_RES (23), (24), (25), (26): Xaa is A or G or is absent
KXQPSRVHHSNITVQIMXXXXXXXXXIGEMSRLEEHLEXA

SEQ ID NO: 19148 - protein, 43 aa, Artificial Sequence
  GFR-binding peptide
  MOD_RES (5), (42): Xaa is C or S
SSVKXQPSRVHHRPVQVRKIEYVRKKPKLKKATVRLEEHLEXA

SEQ ID NO: 19149 - protein, 37 aa, Artificial Sequence
  GFR-binding peptide
  MOD_RES (4), (4): Xaa is C or S
GLEXVPTEERPVQMRKIRIKPHQGQHKKATVFLQHNK

SEQ ID NO: 19150 - protein, 37 aa, Artificial Sequence
  GFR-binding peptide
  MOD_RES (1), (35), (37): Xaa is C or S
XVPTGQRPVQMRKIRIKPHQGQHKKATVLEEHSQXEX

SEQ ID NO: 19151 - protein, 38 aa, Artificial Sequence
  GFR-binding peptide
  MOD_RES (37), (37): Xaa is C or S
RPTQVQLSNITVQIMEIVRKKPIFIGEMSTLEDHLAXK

SEQ ID NO: 19152 - protein, 41 aa, Artificial Sequence
  GFR-binding peptide
  MOD_RES (1), (38), (40): Xaa is C or S
XQPSRVHHSNITVQIMEYVRKKPKLIGEMSRLEEHLEXAXA

SEQ ID NO: 19153 - protein, 37 aa, Artificial Sequence
  GFR-binding peptide
  MOD_RES (34), (36): Xaa is C or S
VPTEESNITMQIMRIKPHQGQHLGEMSFLQHNKXEXR

SEQ ID NO: 19154 - protein, 39 aa, Artificial Sequence
  GFR-binding peptide
  MOD_RES (36), (38): Xaa is C or S
PSRVHHSNITVQIMEYVRKKPKLLGEMSRLEEHLEXAXA

SEQ ID NO: 19155 - protein, 35 aa, Artificial Sequence
  GFR-binding peptide
  MOD_RES (1), (35): Xaa is C or S
  MOD_RES (15), (16), (17), (18), (19): Xaa is A or G
  MOD_RES (20), (21), (22), (23): Xaa is A or G or is absent
XVPTGQRSVKMAKVXXXXXXXXXKEVQVLEEHSQX

SEQ ID NO: 19156 - protein, 44 aa, Artificial Sequence
  GFR-binding peptide
  MOD_RES (7), (41), (43): Xaa is C or S
NDEGLEXVPTGQRPVQMRKIRIKPHQGQHKKATVLEEHSQXEXR

SEQ ID NO: 19157 - protein, 41 aa, Artificial Sequence
  GFR-binding peptide
  MOD_RES (4), (38), (40): Xaa is C or S
GLEXVPTEESNITMQIMRIKPHQGQHLGEMSFLQHNKXEXR

SEQ ID NO: 19158 - protein, 39 aa, Artificial Sequence
  GFR-binding peptide
  MOD_RES (2), (36), (38): Xaa is C or S
  MOD_RES (16), (17), (18), (19), (20): Xaa is A or G
  MOD_RES (21), (22), (23), (24): Xaa is A or G or is absent
EXVPTEERPVQMRKIXXXXXXXXXKKATVFLQHNKXEXR

SEQ ID NO: 19159 - protein, 36 aa, Artificial Sequence
  GFR-binding peptide
  MOD_RES (35), (35): Xaa is C or S
  MOD_RES (14), (15), (16), (17), (18): Xaa is A or G
  MOD_RES (19), (20), (21), (22): Xaa is A or G or is absent
SRVHHRSVKVAKVXXXXXXXXXKEVQVRLEEHLEXA

SEQ ID NO: 19160 - protein, 41 aa, Artificial Sequence
  GFR-binding peptide
  MOD_RES (3), (40): Xaa is C or S
  MOD_RES (19), (20), (21), (22), (23): Xaa is A or G
  MOD_RES (24), (25), (26), (27): Xaa is A or G or is absent
VKXQPSRVHHSNITVQIMXXXXXXXXXLGEMSRLEEHLEXA

SEQ ID NO: 19161 - protein, 38 aa, Artificial Sequence
  GFR-binding peptide
  MOD_RES (3), (37): Xaa is C or S
  MOD_RES (17), (18), (19), (20), (21): Xaa is A or G
  MOD_RES (22), (23), (24), (25): Xaa is A or G or is absent
LEXVPTGQSNITMQIMXXXXXXXXXLGEMSLEEHSQXE

SEQ ID NO: 19162 - protein, 35 aa, Artificial Sequence
  GFR-binding peptide
  MOD_RES (1), (35): Xaa is C or S
XVPTGQRSVKMAKVRIKPHQGQHKEVQVLEEHSQX

SEQ ID NO: 19163 - protein, 37 aa, Artificial Sequence
  GFR-binding peptide
  MOD_RES (37), (37): Xaa is C or S
QPSRVHHRPVQVRKIEYVRKKPKLKKATVRLEEHLEX

SEQ ID NO: 19164 - protein, 44 aa, Artificial Sequence
  GFR-binding peptide
  MOD_RES (5), (42), (44): Xaa is C or S
  MOD_RES (21), (22), (23), (24), (25): Xaa is A or G
  MOD_RES (26), (27), (28), (29): Xaa is A or G or is absent
SSVKXQPSRVHHSNITVQIMXXXXXXXXXLGEMSRLEEHLEXAX

SEQ ID NO: 19165 - protein, 40 aa, Artificial Sequence
  GFR-binding peptide
  MOD_RES (3), (40): Xaa is C or S
  MOD_RES (19), (20), (21), (22), (23): Xaa is A or G
  MOD_RES (24), (25), (26), (27): Xaa is A or G or is absent
VQXRPTQVQLRPVQVRKIXXXXXXXXXKKATVTLEDHLAX

SEQ ID NO: 19166 - protein, 40 aa, Artificial Sequence
  GFR-binding peptide
  MOD_RES (1), (38), (40): Xaa is C or S
XQPSRVHHRPVQVRKIEYVRKKPKLKKATVRLEEHLEXAX

SEQ ID NO: 19167 - protein, 37 aa, Artificial Sequence
  GFR-binding peptide
  MOD_RES (3), (3): Xaa is C or S
  MOD_RES (19), (20), (21), (22), (23): Xaa is A or G
  MOD_RES (24), (25), (26), (27): Xaa is A or G or is absent
VKXQPSRVHHSNITVQIMXXXXXXXXXIGEMSRLEEH

SEQ ID NO: 19168 - protein, 36 aa, Artificial Sequence
  GFR-binding peptide
  MOD_RES (3), (3): Xaa is C or S
  MOD_RES (17), (18), (19), (20), (21): Xaa is A or G
  MOD_RES (22), (23), (24), (25): Xaa is A or G or is absent
LEXVPTEERPVQMRKIXXXXXXXXXKKATVFLQHNK

SEQ ID NO: 19169 - protein, 33 aa, Artificial Sequence
  GFR-binding peptide
  MOD_RES (1), (1): Xaa is C or S
  MOD_RES (15), (16), (17), (18), (19): Xaa is A or G
  MOD_RES (20), (21), (22), (23): Xaa is A or G or is absent
XVPTGQRSVKMAKVXXXXXXXXXKEVQVLEEHS

SEQ ID NO: 19170 - protein, 45 aa, Artificial Sequence
  GFR-binding peptide
  MOD_RES (5), (42), (44): Xaa is C or S
  MOD_RES (21), (22), (23), (24), (25): Xaa is A or G
  MOD_RES (26), (27), (28), (29): Xaa is A or G or is absent
SSVKXQPSRVHHRPVQVRKIXXXXXXXXXKKATVRLEEHLEXAXA

SEQ ID NO: 19171 - protein, 44 aa, Artificial Sequence
  GFR-binding peptide
  MOD_RES (5), (42), (44): Xaa is C or S
  MOD_RES (21), (22), (23), (24), (25): Xaa is A or G
  MOD_RES (26), (27), (28), (29): Xaa is A or G or is absent
SSVKXQPSRVHHSNITVQIMXXXXXXXXXIGEMSRLEEHLEXAX

SEQ ID NO: 19172 - protein, 37 aa, Artificial Sequence
  GFR-binding peptide
  MOD_RES (4), (4): Xaa is C or S
  MOD_RES (18), (19), (20), (21), (22): Xaa is A or G
  MOD_RES (23), (24), (25), (26): Xaa is A or G or is absent
GLEXVPTEESNITMQIMXXXXXXXXXLGEMSFLQHNK

SEQ ID NO: 19173 - protein, 38 aa, Artificial Sequence
  GFR-binding peptide
  MOD_RES (37), (37): Xaa is C or S
  MOD_RES (16), (17), (18), (19), (20): Xaa is A or G
  MOD_RES (21), (22), (23), (24): Xaa is A or G or is absent
RPTQVQLRPVQVRKIXXXXXXXXXKKATVTLEDHLAXK

SEQ ID NO: 19174 - protein, 37 aa, Artificial Sequence
  GFR-binding peptide
  MOD_RES (2), (2): Xaa is C or S
  MOD_RES (18), (19), (20), (21), (22): Xaa is A or G
  MOD_RES (23), (24), (25), (26): Xaa is A or G or is absent
KXQPSRVHHRPVQVRKIXXXXXXXXXKKATVRLEEHL

SEQ ID NO: 19175 - protein, 39 aa, Artificial Sequence
  GFR-binding peptide
  MOD_RES (37), (39): Xaa is C or S
RPTQVQLSNITVQIMEIVRKKPIFLGEMSTLEDHLAXKX

SEQ ID NO: 19176 - protein, 38 aa, Artificial Sequence
  GFR-binding peptide
  MOD_RES (2), (2): Xaa is C or S
  MOD_RES (18), (19), (20), (21), (22): Xaa is A or G
  MOD_RES (23), (24), (25), (26): Xaa is A or G or is absent
KXQPSRVHHRSVKVAKVXXXXXXXXXKEVQVRLEEHLE

SEQ ID NO: 19177 - protein, 38 aa, Artificial Sequence
  GFR-binding peptide
  MOD_RES (4), (4): Xaa is C or S
NVQXRPTQVQLRSVKVAKVEIVRKKPIFKEVQVTLEDH

SEQ ID NO: 19178 - protein, 38 aa, Artificial Sequence
  GFR-binding peptide
  MOD_RES (4), (38): Xaa is C or S
  MOD_RES (18), (19), (20), (21), (22): Xaa is A or G
  MOD_RES (23), (24), (25), (26): Xaa is A or G or is absent
GLEXVPTGQSNITMQIMXXXXXXXXXLGEMSLEEHSQX

SEQ ID NO: 19179 - protein, 37 aa, Artificial Sequence
  GFR-binding peptide
  MOD_RES (5), (5): Xaa is C or S
EGLEXVPTEESNITMQIMRIKPHQGQHLGEMSFLQHN

SEQ ID NO: 19180 - protein, 40 aa, Artificial Sequence
  GFR-binding peptide
  MOD_RES (3), (37), (39): Xaa is C or S
LEXVPTEERSVKMAKVRIKPHQGQHKEVQVFLQHNKXEXR

SEQ ID NO: 19181 - protein, 38 aa, Artificial Sequence
  GFR-binding peptide
  MOD_RES (37), (37): Xaa is C or S
  MOD_RES (16), (17), (18), (19), (20): Xaa is A or G
  MOD_RES (21), (22), (23), (24): Xaa is A or G or is absent
RPTQVQLSNITVQIMXXXXXXXXXLGEMSTLEDHLAXK

SEQ ID NO: 19182 - protein, 35 aa, Artificial Sequence
  GFR-binding peptide
  MOD_RES (35), (35): Xaa is C or S
  MOD_RES (14), (15), (16), (17), (18): Xaa is A or G
  MOD_RES (19), (20), (21), (22): Xaa is A or G or is absent
TQVQLSNITVQIMXXXXXXXXXIGEMSTLEDHLAX

SEQ ID NO: 19183 - protein, 41 aa, Artificial Sequence
  GFR-binding peptide
  MOD_RES (4), (41): Xaa is C or S
  MOD_RES (20), (21), (22), (23), (24): Xaa is A or G
  MOD_RES (25), (26), (27), (28): Xaa is A or G or is absent
SVKXQPSRVHHRSVKVAKVXXXXXXXXXKEVQVRLEEHLEX

SEQ ID NO: 19184 - protein, 36 aa, Artificial Sequence
  GFR-binding peptide
  MOD_RES (36), (36): Xaa is C or S
PTQVQLRSVKVAKVEIVRKKPIFKEVQVTLEDHLAX

SEQ ID NO: 19185 - protein, 40 aa, Artificial Sequence
  GFR-binding peptide
  MOD_RES (5), (39): Xaa is C or S
  MOD_RES (19), (20), (21), (22), (23): Xaa is A or G
  MOD_RES (24), (25), (26), (27): Xaa is A or G or is absent
EGLEXVPTEERSVKMAKVXXXXXXXXXKEVQVFLQHNKXE

SEQ ID NO: 19186 - protein, 39 aa, Artificial Sequence
  GFR-binding peptide
  MOD_RES (36), (38): Xaa is C or S
PSRVHHRPVQVRKIEYVRKKPKLKKATVRLEEHLEXAXA

SEQ ID NO: 19187 - protein, 41 aa, Artificial Sequence
  GFR-binding peptide
  MOD_RES (5), (5): Xaa is C or S
RNVQXRPTQVQLSNITVQIMEIVRKKPIFLGEMSTLEDHLA

SEQ ID NO: 19188 - protein, 42 aa, Artificial Sequence
  GFR-binding peptide
  MOD_RES (5), (39), (41): Xaa is C or S
EGLEXVPTEERSVKMAKVRIKPHQGQHKEVQVFLQHNKXEXR

SEQ ID NO: 19189 - protein, 39 aa, Artificial Sequence
  GFR-binding peptide
  MOD_RES (2), (39): Xaa is C or S
QXRPTQVQLRSVKVAKVEIVRKKPIFKEVQVTLEDHLAX

SEQ ID NO: 19190 - protein, 36 aa, Artificial Sequence
  GFR-binding peptide
  MOD_RES (35), (35): Xaa is C or S
  MOD_RES (14), (15), (16), (17), (18): Xaa is A or G
  MOD_RES (19), (20), (21), (22): Xaa is A or G or is absent
TQVQLSNITVQIMXXXXXXXXXLGEMSTLEDHLAXK

SEQ ID NO: 19191 - protein, 36 aa, Artificial Sequence
  GFR-binding peptide
  MOD_RES (35), (35): Xaa is C or S
TQVQLSNITVQIMEIVRKKPIFIGEMSTLEDHLAXK

SEQ ID NO: 19192 - protein, 32 aa, Artificial Sequence
  GFR-binding peptide
  MOD_RES (14), (15), (16), (17), (18): Xaa is A or G
  MOD_RES (19), (20), (21), (22): Xaa is A or G or is absent
TQVQLSNITVQIMXXXXXXXXXLGEMSTLEDH

SEQ ID NO: 19193 - protein, 39 aa, Artificial Sequence
  GFR-binding peptide
  MOD_RES (1), (38): Xaa is C or S
  MOD_RES (17), (18), (19), (20), (21): Xaa is A or G
  MOD_RES (22), (23), (24), (25): Xaa is A or G or is absent
XQPSRVHHSNITVQIMXXXXXXXXXIGEMSRLEEHLEXA

SEQ ID NO: 19194 - protein, 43 aa, Artificial Sequence
  GFR-binding peptide
  MOD_RES (7), (41), (43): Xaa is C or S
NDEGLEXVPTEERPVQMRKIRIKPHQGQHKKATVFLQHNKXEX

SEQ ID NO: 19195 - protein, 38 aa, Artificial Sequence
  GFR-binding peptide
  MOD_RES (4), (4): Xaa is C or S
SVKXQPSRVHHSNITVQIMEYVRKKPKLIGEMSRLEEH

SEQ ID NO: 19196 - protein, 40 aa, Artificial Sequence
  GFR-binding peptide
  MOD_RES (5), (5): Xaa is C or S
  MOD_RES (21), (22), (23), (24), (25): Xaa is A or G
  MOD_RES (26), (27), (28), (29): Xaa is A or G or is absent
RNVQXRPTQVQLSNITVQIMXXXXXXXXXLGEMSTLEDHL

SEQ ID NO: 19197 - protein, 32 aa, Artificial Sequence
  GFR-binding peptide
SRVHHSNITVQIMEYVRKKPKLIGEMSRLEEH

SEQ ID NO: 19198 - protein, 40 aa, Artificial Sequence
  GFR-binding peptide
  MOD_RES (5), (39): Xaa is C or S
  MOD_RES (19), (20), (21), (22), (23): Xaa is A or G
  MOD_RES (24), (25), (26), (27): Xaa is A or G or is absent
EGLEXVPTGQSNITMQIMXXXXXXXXXIGEMSLEEHSQXE

SEQ ID NO: 19199 - protein, 39 aa, Artificial Sequence
  GFR-binding peptide
  MOD_RES (7), (7): Xaa is C or S
NDEGLEXVPTGQSNITMQIMRIKPHQGQHIGEMSLEEHS

SEQ ID NO: 19200 - protein, 42 aa, Artificial Sequence
  GFR-binding peptide
  MOD_RES (5), (39), (41): Xaa is C or S
  MOD_RES (19), (20), (21), (22), (23): Xaa is A or G
  MOD_RES (24), (25), (26), (27): Xaa is A or G or is absent
EGLEXVPTEESNITMQIMXXXXXXXXXIGEMSFLQHNKXEXR

SEQ ID NO: 19201 - protein, 37 aa, Artificial Sequence
  GFR-binding peptide
  MOD_RES (2), (36): Xaa is C or S
EXVPTGQRPVQMRKIRIKPHQGQHKKATVLEEHSQXE

SEQ ID NO: 19202 - protein, 37 aa, Artificial Sequence
  GFR-binding peptide
  MOD_RES (2), (2): Xaa is C or S
  MOD_RES (18), (19), (20), (21), (22): Xaa is A or G
  MOD_RES (23), (24), (25), (26): Xaa is A or G or is absent
QXRPTQVQLRSVKVAKVXXXXXXXXXKEVQVTLEDHL

SEQ ID NO: 19203 - protein, 36 aa, Artificial Sequence
  GFR-binding peptide
  MOD_RES (4), (4): Xaa is C or S
  MOD_RES (18), (19), (20), (21), (22): Xaa is A or G
  MOD_RES (23), (24), (25), (26): Xaa is A or G or is absent
GLEXVPTEERSVKMAKVXXXXXXXXXKEVQVFLQHN

SEQ ID NO: 19204 - protein, 40 aa, Artificial Sequence
  GFR-binding peptide
  MOD_RES (5), (5): Xaa is C or S
  MOD_RES (21), (22), (23), (24), (25): Xaa is A or G
  MOD_RES (26), (27), (28), (29): Xaa is A or G or is absent
SSVKXQPSRVHHRSVKVAKVXXXXXXXXXKEVQVRLEEHL

SEQ ID NO: 19205 - protein, 40 aa, Artificial Sequence
  GFR-binding peptide
  MOD_RES (4), (4): Xaa is C or S
  MOD_RES (20), (21), (22), (23), (24): Xaa is A or G
  MOD_RES (25), (26), (27), (28): Xaa is A or G or is absent
NVQXRPTQVQLRPVQVRKIXXXXXXXXXKKATVTLEDHLA

SEQ ID NO: 19206 - protein, 36 aa, Artificial Sequence
  GFR-binding peptide
  MOD_RES (36), (36): Xaa is C or S
  MOD_RES (15), (16), (17), (18), (19): Xaa is A or G
  MOD_RES (20), (21), (22), (23): Xaa is A or G or is absent
PSRVHHSNITVQIMXXXXXXXXXIGEMSRLEEHLEX

SEQ ID NO: 19207 - protein, 41 aa, Artificial Sequence
  GFR-binding peptide
  MOD_RES (2), (39), (41): Xaa is C or S
QXRPTQVQLRSVKVAKVEIVRKKPIFKEVQVTLEDHLAXKX

SEQ ID NO: 19208 - protein, 39 aa, Artificial Sequence
  GFR-binding peptide
  MOD_RES (2), (39): Xaa is C or S
  MOD_RES (18), (19), (20), (21), (22): Xaa is A or G
  MOD_RES (23), (24), (25), (26): Xaa is A or G or is absent
QXRPTQVQLSNITVQIMXXXXXXXXXLGEMSTLEDHLAX

SEQ ID NO: 19209 - protein, 38 aa, Artificial Sequence
  GFR-binding peptide
  MOD_RES (3), (37): Xaa is C or S
  MOD_RES (17), (18), (19), (20), (21): Xaa is A or G
  MOD_RES (22), (23), (24), (25): Xaa is A or G or is absent
LEXVPTEESNITMQIMXXXXXXXXXLGEMSFLQHNKXE

SEQ ID NO: 19210 - protein, 41 aa, Artificial Sequence
  GFR-binding peptide
  MOD_RES (7), (41): Xaa is C or S
NDEGLEXVPTGQSNITMQIMRIKPHQGQHIGEMSLEEHSQX

SEQ ID NO: 19211 - protein, 38 aa, Artificial Sequence
  GFR-binding peptide
  MOD_RES (35), (37): Xaa is C or S
TQVQLRSVKVAKVEIVRKKPIFKEVQVTLEDHLAXKXE

SEQ ID NO: 19212 - protein, 41 aa, Artificial Sequence
  GFR-binding peptide
  MOD_RES (6), (40): Xaa is C or S
  MOD_RES (20), (21), (22), (23), (24): Xaa is A or G
  MOD_RES (25), (26), (27), (28): Xaa is A or G or is absent
DEGLEXVPTGQSNITMQIMXXXXXXXXXIGEMSLEEHSQXE

SEQ ID NO: 19213 - protein, 39 aa, Artificial Sequence
  GFR-binding peptide
  MOD_RES (5), (39): Xaa is C or S
  MOD_RES (19), (20), (21), (22), (23): Xaa is A or G
  MOD_RES (24), (25), (26), (27): Xaa is A or G or is absent
EGLEXVPTGQSNITMQIMXXXXXXXXXIGEMSLEEHSQX

SEQ ID NO: 19214 - protein, 37 aa, Artificial Sequence
  GFR-binding peptide
  MOD_RES (3), (3): Xaa is C or S
  MOD_RES (19), (20), (21), (22), (23): Xaa is A or G
  MOD_RES (24), (25), (26), (27): Xaa is A or G or is absent
VKXQPSRVHHSNITVQIMXXXXXXXXXLGEMSRLEEH

SEQ ID NO: 19215 - protein, 43 aa, Artificial Sequence
  GFR-binding peptide
  MOD_RES (5), (42): Xaa is C or S
  MOD_RES (21), (22), (23), (24), (25): Xaa is A or G
  MOD_RES (26), (27), (28), (29): Xaa is A or G or is absent
RNVQXRPTQVQLRSVKVAKVXXXXXXXXXKEVQVTLEDHLAXK

SEQ ID NO: 19216 - protein, 37 aa, Artificial Sequence
  GFR-binding peptide
  MOD_RES (35), (37): Xaa is C or S
TQVQLSNITVQIMEIVRKKPIFIGEMSTLEDHLAXKX

SEQ ID NO: 19217 - protein, 37 aa, Artificial Sequence
  GFR-binding peptide
  MOD_RES (5), (5): Xaa is C or S
EGLEXVPTGQSNITMQIMRIKPHQGQHIGEMSLEEHS

SEQ ID NO: 19218 - protein, 34 aa, Artificial Sequence
  GFR-binding peptide
  MOD_RES (14), (15), (16), (17), (18): Xaa is A or G
  MOD_RES (19), (20), (21), (22): Xaa is A or G or is absent
TQVQLSNITVQIMXXXXXXXXXLGEMSTLEDHLA

SEQ ID NO: 19219 - protein, 38 aa, Artificial Sequence
  GFR-binding peptide
  MOD_RES (37), (37): Xaa is C or S
  MOD_RES (16), (17), (18), (19), (20): Xaa is A or G
  MOD_RES (21), (22), (23), (24): Xaa is A or G or is absent
QPSRVHHRSVKVAKVXXXXXXXXXKEVQVRLEEHLEXA

SEQ ID NO: 19220 - protein, 41 aa, Artificial Sequence
  GFR-binding peptide
  MOD_RES (7), (41): Xaa is C or S
NDEGLEXVPTGQRPVQMRKIRIKPHQGQHKKATVLEEHSQX

SEQ ID NO: 19221 - protein, 41 aa, Artificial Sequence
  GFR-binding peptide
  MOD_RES (1), (38), (40): Xaa is C or S
  MOD_RES (17), (18), (19), (20), (21): Xaa is A or G
  MOD_RES (22), (23), (24), (25): Xaa is A or G or is absent
XQPSRVHHRSVKVAKVXXXXXXXXXKEVQVRLEEHLEXAXA

SEQ ID NO: 19222 - protein, 43 aa, Artificial Sequence
  GFR-binding peptide
  MOD_RES (6), (40), (42): Xaa is C or S
DEGLEXVPTEESNITMQIMRIKPHQGQHLGEMSFLQHNKXEXR

SEQ ID NO: 19223 - protein, 36 aa, Artificial Sequence
  GFR-binding peptide
  MOD_RES (35), (35): Xaa is C or S
TQVQLSNITVQIMEIVRKKPIFLGEMSTLEDHLAXK

SEQ ID NO: 19224 - protein, 36 aa, Artificial Sequence
  GFR-binding peptide
  MOD_RES (3), (3): Xaa is C or S
LEXVPTEERSVKMAKVRIKPHQGQHKEVQVFLQHNK

SEQ ID NO: 19225 - protein, 33 aa, Artificial Sequence
  GFR-binding peptide
  MOD_RES (1), (1): Xaa is C or S
XVPTGQRSVKMAKVRIKPHQGQHKEVQVLEEHS

SEQ ID NO: 19226 - protein, 39 aa, Artificial Sequence
  GFR-binding peptide
  MOD_RES (4), (4): Xaa is C or S
  MOD_RES (20), (21), (22), (23), (24): Xaa is A or G
  MOD_RES (25), (26), (27), (28): Xaa is A or G or is absent
SVKXQPSRVHHSNITVQIMXXXXXXXXXLGEMSRLEEHL

SEQ ID NO: 19227 - protein, 39 aa, Artificial Sequence
  GFR-binding peptide
  MOD_RES (37), (39): Xaa is C or S
  MOD_RES (16), (17), (18), (19), (20): Xaa is A or G
  MOD_RES (21), (22), (23), (24): Xaa is A or G or is absent
QPSRVHHSNITVQIMXXXXXXXXXIGEMSRLEEHLEXAX

SEQ ID NO: 19228 - protein, 32 aa, Artificial Sequence
  GFR-binding peptide
TQVQLSNITVQIMEIVRKKPIFLGEMSTLEDH

SEQ ID NO: 19229 - protein, 45 aa, Artificial Sequence
  GFR-binding peptide
  MOD_RES (5), (42), (44): Xaa is C or S
  MOD_RES (21), (22), (23), (24), (25): Xaa is A or G
  MOD_RES (26), (27), (28), (29): Xaa is A or G or is absent
SSVKXQPSRVHHRSVKVAKVXXXXXXXXXKEVQVRLEEHLEXAXA

SEQ ID NO: 19230 - protein, 41 aa, Artificial Sequence
  GFR-binding peptide
  MOD_RES (2), (39), (41): Xaa is C or S
  MOD_RES (18), (19), (20), (21), (22): Xaa is A or G
  MOD_RES (23), (24), (25), (26): Xaa is A or G or is absent
KXQPSRVHHSNITVQIMXXXXXXXXXIGEMSRLEEHLEXAX

SEQ ID NO: 19231 - protein, 35 aa, Artificial Sequence
  GFR-binding peptide
  MOD_RES (15), (16), (17), (18), (19): Xaa is A or G
  MOD_RES (20), (21), (22), (23): Xaa is A or G or is absent
PTQVQLSNITVQIMXXXXXXXXXLGEMSTLEDHLA

SEQ ID NO: 19232 - protein, 38 aa, Artificial Sequence
  GFR-binding peptide
  MOD_RES (2), (2): Xaa is C or S
KXQPSRVHHSNITVQIMEYVRKKPKLIGEMSRLEEHLE

SEQ ID NO: 19233 - protein, 39 aa, Artificial Sequence
  GFR-binding peptide
  MOD_RES (4), (38): Xaa is C or S
  MOD_RES (18), (19), (20), (21), (22): Xaa is A or G
  MOD_RES (23), (24), (25), (26): Xaa is A or G or is absent
GLEXVPTGQSNITMQIMXXXXXXXXXIGEMSLEEHSQXE

SEQ ID NO: 19234 - protein, 39 aa, Artificial Sequence
  GFR-binding peptide
  MOD_RES (5), (39): Xaa is C or S
EGLEXVPTGQSNITMQIMRIKPHQGQHIGEMSLEEHSQX

SEQ ID NO: 19235 - protein, 33 aa, Artificial Sequence
  GFR-binding peptide
  MOD_RES (1), (1): Xaa is C or S
XVPTGQRPVQMRKIRIKPHQGQHKKATVLEEHS

SEQ ID NO: 19236 - protein, 33 aa, Artificial Sequence
  GFR-binding peptide
  MOD_RES (1), (1): Xaa is C or S
  MOD_RES (15), (16), (17), (18), (19): Xaa is A or G
  MOD_RES (20), (21), (22), (23): Xaa is A or G or is absent
XVPTGQSNITMQIMXXXXXXXXXLGEMSLEEHS

SEQ ID NO: 19237 - protein, 41 aa, Artificial Sequence
  GFR-binding peptide
  MOD_RES (7), (41): Xaa is C or S
  MOD_RES (21), (22), (23), (24), (25): Xaa is A or G
  MOD_RES (26), (27), (28), (29): Xaa is A or G or is absent
NDEGLEXVPTGQRPVQMRKIXXXXXXXXXKKATVLEEHSQX

SEQ ID NO: 19238 - protein, 32 aa, Artificial Sequence
  GFR-binding peptide
  MOD_RES (14), (15), (16), (17), (18): Xaa is A or G
  MOD_RES (19), (20), (21), (22): Xaa is A or G or is absent
VPTEESNITMQIMXXXXXXXXXIGEMSFLQHN

SEQ ID NO: 19239 - protein, 43 aa, Artificial Sequence
  GFR-binding peptide
  MOD_RES (3), (40), (42): Xaa is C or S
  MOD_RES (19), (20), (21), (22), (23): Xaa is A or G
  MOD_RES (24), (25), (26), (27): Xaa is A or G or is absent
VQXRPTQVQLRSVKVAKVXXXXXXXXXKEVQVTLEDHLAXKXE

SEQ ID NO: 19240 - protein, 42 aa, Artificial Sequence
  GFR-binding peptide
  MOD_RES (5), (39), (41): Xaa is C or S
  MOD_RES (19), (20), (21), (22), (23): Xaa is A or G
  MOD_RES (24), (25), (26), (27): Xaa is A or G or is absent
EGLEXVPTEERPVQMRKIXXXXXXXXXKKATVFLQHNKXEXR

SEQ ID NO: 19241 - protein, 39 aa, Artificial Sequence
  GFR-binding peptide
  MOD_RES (5), (5): Xaa is C or S
  MOD_RES (21), (22), (23), (24), (25): Xaa is A or G
  MOD_RES (26), (27), (28), (29): Xaa is A or G or is absent
SSVKXQPSRVHHSNITVQIMXXXXXXXXXIGEMSRLEEH

SEQ ID NO: 19242 - protein, 37 aa, Artificial Sequence
  GFR-binding peptide
  MOD_RES (35), (37): Xaa is C or S
TQVQLSNITVQIMEIVRKKPIFLGEMSTLEDHLAXKX

SEQ ID NO: 19243 - protein, 35 aa, Artificial Sequence
  GFR-binding peptide
  MOD_RES (34), (34): Xaa is C or S
VPTGQRPVQMRKIRIKPHQGQHKKATVLEEHSQXE

SEQ ID NO: 19244 - protein, 36 aa, Artificial Sequence
  GFR-binding peptide
  MOD_RES (35), (35): Xaa is C or S
  MOD_RES (14), (15), (16), (17), (18): Xaa is A or G
  MOD_RES (19), (20), (21), (22): Xaa is A or G or is absent
TQVQLRPVQVRKIXXXXXXXXXKKATVTLEDHLAXK

SEQ ID NO: 19245 - protein, 35 aa, Artificial Sequence
  GFR-binding peptide
  MOD_RES (1), (1): Xaa is C or S
  MOD_RES (17), (18), (19), (20), (21): Xaa is A or G
  MOD_RES (22), (23), (24), (25): Xaa is A or G or is absent
XRPTQVQLSNITVQIMXXXXXXXXXLGEMSTLEDH

SEQ ID NO: 19246 - protein, 42 aa, Artificial Sequence
  GFR-binding peptide
  MOD_RES (5), (39), (41): Xaa is C or S
  MOD_RES (19), (20), (21), (22), (23): Xaa is A or G
  MOD_RES (24), (25), (26), (27): Xaa is A or G or is absent
EGLEXVPTEERSVKMAKVXXXXXXXXXKEVQVFLQHNKXEXR

SEQ ID NO: 19247 - protein, 35 aa, Artificial Sequence
  GFR-binding peptide
  MOD_RES (1), (1): Xaa is C or S
  MOD_RES (17), (18), (19), (20), (21): Xaa is A or G
  MOD_RES (22), (23), (24), (25): Xaa is A or G or is absent
XRPTQVQLSNITVQIMXXXXXXXXXIGEMSTLEDH

SEQ ID NO: 19248 - protein, 32 aa, Artificial Sequence
  GFR-binding peptide
VPTEERSVKMAKVRIKPHQGQHKEVQVFLQHN

SEQ ID NO: 19249 - protein, 38 aa, Artificial Sequence
  GFR-binding peptide
  MOD_RES (4), (38): Xaa is C or S
  MOD_RES (18), (19), (20), (21), (22): Xaa is A or G
  MOD_RES (23), (24), (25), (26): Xaa is A or G or is absent
GLEXVPTGQRSVKMAKVXXXXXXXXXKEVQVLEEHSQX

SEQ ID NO: 19250 - protein, 38 aa, Artificial Sequence
  GFR-binding peptide
  MOD_RES (2), (36), (38): Xaa is C or S
EXVPTEESNITMQIMRIKPHQGQHLGEMSFLQHNKXEX

SEQ ID NO: 19251 - protein, 41 aa, Artificial Sequence
  GFR-binding peptide
  MOD_RES (1), (38), (40): Xaa is C or S
XRPTQVQLRSVKVAKVEIVRKKPIFKEVQVTLEDHLAXKXE

SEQ ID NO: 19252 - protein, 42 aa, Artificial Sequence
  GFR-binding peptide
  MOD_RES (6), (40), (42): Xaa is C or S
DEGLEXVPTGQRSVKMAKVRIKPHQGQHKEVQVLEEHSQXEX

SEQ ID NO: 19253 - protein, 32 aa, Artificial Sequence
  GFR-binding peptide
  MOD_RES (14), (15), (16), (17), (18): Xaa is A or G
  MOD_RES (19), (20), (21), (22): Xaa is A or G or is absent
TQVQLRPVQVRKIXXXXXXXXXKKATVTLEDH

SEQ ID NO: 19254 - protein, 33 aa, Artificial Sequence
  GFR-binding peptide
SRVHHRPVQVRKIEYVRKKPKLKKATVRLEEHL

SEQ ID NO: 19255 - protein, 42 aa, Artificial Sequence
  GFR-binding peptide
  MOD_RES (2), (39), (41): Xaa is C or S
KXQPSRVHHRPVQVRKIEYVRKKPKLKKATVRLEEHLEXAXA

SEQ ID NO: 19256 - protein, 45 aa, Artificial Sequence
  GFR-binding peptide
  MOD_RES (5), (42), (44): Xaa is C or S
  MOD_RES (21), (22), (23), (24), (25): Xaa is A or G
  MOD_RES (26), (27), (28), (29): Xaa is A or G or is absent
RNVQXRPTQVQLSNITVQIMXXXXXXXXXLGEMSTLEDHLAXKXE

SEQ ID NO: 19257 - protein, 32 aa, Artificial Sequence
  GFR-binding peptide
SRVHHSNITVQIMEYVRKKPKLLGEMSRLEEH

SEQ ID NO: 19258 - protein, 39 aa, Artificial Sequence
  GFR-binding peptide
  MOD_RES (6), (6): Xaa is C or S
DEGLEXVPTEERSVKMAKVRIKPHQGQHKEVQVFLQHNK

SEQ ID NO: 19259 - protein, 39 aa, Artificial Sequence
  GFR-binding peptide
  MOD_RES (3), (3): Xaa is C or S
  MOD_RES (19), (20), (21), (22), (23): Xaa is A or G
  MOD_RES (24), (25), (26), (27): Xaa is A or G or is absent
VKXQPSRVHHRSVKVAKVXXXXXXXXXKEVQVRLEEHLE

SEQ ID NO: 19260 - protein, 32 aa, Artificial Sequence
  GFR-binding peptide
TQVQLSNITVQIMEIVRKKPIFIGEMSTLEDH

SEQ ID NO: 19261 - protein, 37 aa, Artificial Sequence
  GFR-binding peptide
  MOD_RES (1), (1): Xaa is C or S
  MOD_RES (17), (18), (19), (20), (21): Xaa is A or G
  MOD_RES (22), (23), (24), (25): Xaa is A or G or is absent
XRPTQVQLSNITVQIMXXXXXXXXXIGEMSTLEDHLA

SEQ ID NO: 19262 - protein, 35 aa, Artificial Sequence
  GFR-binding peptide
RPTQVQLSNITVQIMEIVRKKPIFLGEMSTLEDHL

SEQ ID NO: 19263 - protein, 40 aa, Artificial Sequence
  GFR-binding peptide
  MOD_RES (2), (39): Xaa is C or S
  MOD_RES (18), (19), (20), (21), (22): Xaa is A or G
  MOD_RES (23), (24), (25), (26): Xaa is A or G or is absent
KXQPSRVHHRSVKVAKVXXXXXXXXXKEVQVRLEEHLEXA

SEQ ID NO: 19264 - protein, 37 aa, Artificial Sequence
  GFR-binding peptide
  MOD_RES (34), (36): Xaa is C or S
  MOD_RES (14), (15), (16), (17), (18): Xaa is A or G
  MOD_RES (19), (20), (21), (22): Xaa is A or G or is absent
VPTGQRSVKMAKVXXXXXXXXXKEVQVLEEHSQXEXR

SEQ ID NO: 19265 - protein, 41 aa, Artificial Sequence
  GFR-binding peptide
  MOD_RES (1), (38), (40): Xaa is C or S
  MOD_RES (17), (18), (19), (20), (21): Xaa is A or G
  MOD_RES (22), (23), (24), (25): Xaa is A or G or is absent
XQPSRVHHSNITVQIMXXXXXXXXXLGEMSRLEEHLEXAXA

SEQ ID NO: 19266 - protein, 43 aa, Artificial Sequence
  GFR-binding peptide
  MOD_RES (6), (40), (42): Xaa is C or S
  MOD_RES (20), (21), (22), (23), (24): Xaa is A or G
  MOD_RES (25), (26), (27), (28): Xaa is A or G or is absent
DEGLEXVPTEESNITMQIMXXXXXXXXXIGEMSFLQHNKXEXR

SEQ ID NO: 19267 - protein, 40 aa, Artificial Sequence
  GFR-binding peptide
  MOD_RES (2), (39): Xaa is C or S
QXRPTQVQLSNITVQIMEIVRKKPIFIGEMSTLEDHLAXK

SEQ ID NO: 19268 - protein, 32 aa, Artificial Sequence
  GFR-binding peptide
  MOD_RES (14), (15), (16), (17), (18): Xaa is A or G
  MOD_RES (19), (20), (21), (22): Xaa is A or G or is absent
VPTEESNITMQIMXXXXXXXXXLGEMSFLQHN

SEQ ID NO: 19269 - protein, 35 aa, Artificial Sequence
  GFR-binding peptide
  MOD_RES (15), (16), (17), (18), (19): Xaa is A or G
  MOD_RES (20), (21), (22), (23): Xaa is A or G or is absent
PSRVHHSNITVQIMXXXXXXXXXIGEMSRLEEHLE

SEQ ID NO: 19270 - protein, 37 aa, Artificial Sequence
  GFR-binding peptide
  MOD_RES (34), (36): Xaa is C or S
VPTGQSNITMQIMRIKPHQGQHIGEMSLEEHSQXEXR

SEQ ID NO: 19271 - protein, 34 aa, Artificial Sequence
  GFR-binding peptide
  MOD_RES (1), (1): Xaa is C or S
XVPTGQRSVKMAKVRIKPHQGQHKEVQVLEEHSQ

SEQ ID NO: 19272 - protein, 38 aa, Artificial Sequence
  GFR-binding peptide
  MOD_RES (36), (38): Xaa is C or S
  MOD_RES (15), (16), (17), (18), (19): Xaa is A or G
  MOD_RES (20), (21), (22), (23): Xaa is A or G or is absent
PTQVQLSNITVQIMXXXXXXXXXLGEMSTLEDHLAXKX

SEQ ID NO: 19273 - protein, 34 aa, Artificial Sequence
  GFR-binding peptide
  MOD_RES (15), (16), (17), (18), (19): Xaa is A or G
  MOD_RES (20), (21), (22), (23): Xaa is A or G or is absent
PSRVHHRSVKVAKVXXXXXXXXXKEVQVRLEEHL

SEQ ID NO: 19274 - protein, 37 aa, Artificial Sequence
  GFR-binding peptide
  MOD_RES (2), (36): Xaa is C or S
  MOD_RES (16), (17), (18), (19), (20): Xaa is A or G
  MOD_RES (21), (22), (23), (24): Xaa is A or G or is absent
EXVPTEESNITMQIMXXXXXXXXXLGEMSFLQHNKXE

SEQ ID NO: 19275 - protein, 43 aa, Artificial Sequence
  GFR-binding peptide
  MOD_RES (5), (42): Xaa is C or S
  MOD_RES (21), (22), (23), (24), (25): Xaa is A or G
  MOD_RES (26), (27), (28), (29): Xaa is A or G or is absent
SSVKXQPSRVHHSNITVQIMXXXXXXXXXLGEMSRLEEHLEXA

SEQ ID NO: 19276 - protein, 33 aa, Artificial Sequence
  GFR-binding peptide
  MOD_RES (1), (1): Xaa is C or S
XVPTEERPVQMRKIRIKPHQGQHKKATVFLQHN

SEQ ID NO: 19277 - protein, 42 aa, Artificial Sequence
  GFR-binding peptide
  MOD_RES (2), (39), (41): Xaa is C or S
  MOD_RES (18), (19), (20), (21), (22): Xaa is A or G
  MOD_RES (23), (24), (25), (26): Xaa is A or G or is absent
QXRPTQVQLSNITVQIMXXXXXXXXXLGEMSTLEDHLAXKXE

SEQ ID NO: 19278 - protein, 41 aa, Artificial Sequence
  GFR-binding peptide
  MOD_RES (4), (38), (40): Xaa is C or S
GLEXVPTGQRSVKMAKVRIKPHQGQHKEVQVLEEHSQXEXR

SEQ ID NO: 19279 - protein, 39 aa, Artificial Sequence
  GFR-binding peptide
  MOD_RES (4), (38): Xaa is C or S
  MOD_RES (18), (19), (20), (21), (22): Xaa is A or G
  MOD_RES (23), (24), (25), (26): Xaa is A or G or is absent
GLEXVPTGQSNITMQIMXXXXXXXXXLGEMSLEEHSQXE

SEQ ID NO: 19280 - protein, 38 aa, Artificial Sequence
  GFR-binding peptide
  MOD_RES (35), (37): Xaa is C or S
  MOD_RES (14), (15), (16), (17), (18): Xaa is A or G
  MOD_RES (19), (20), (21), (22): Xaa is A or G or is absent
TQVQLSNITVQIMXXXXXXXXXIGEMSTLEDHLAXKXE

SEQ ID NO: 19281 - protein, 41 aa, Artificial Sequence
  GFR-binding peptide
  MOD_RES (7), (41): Xaa is C or S
NDEGLEXVPTEERSVKMAKVRIKPHQGQHKEVQVFLQHNKX

SEQ ID NO: 19282 - protein, 41 aa, Artificial Sequence
  GFR-binding peptide
  MOD_RES (7), (41): Xaa is C or S
  MOD_RES (21), (22), (23), (24), (25): Xaa is A or G
  MOD_RES (26), (27), (28), (29): Xaa is A or G or is absent
NDEGLEXVPTEERSVKMAKVXXXXXXXXXKEVQVFLQHNKX

SEQ ID NO: 19283 - protein, 39 aa, Artificial Sequence
  GFR-binding peptide
  MOD_RES (36), (38): Xaa is C or S
PTQVQLSNITVQIMEIVRKKPIFIGEMSTLEDHLAXKXE

SEQ ID NO: 19284 - protein, 39 aa, Artificial Sequence
  GFR-binding peptide
  MOD_RES (2), (36), (38): Xaa is C or S
  MOD_RES (16), (17), (18), (19), (20): Xaa is A or G
  MOD_RES (21), (22), (23), (24): Xaa is A or G or is absent
EXVPTGQSNITMQIMXXXXXXXXXLGEMSLEEHSQXEXR

SEQ ID NO: 19285 - protein, 40 aa, Artificial Sequence
  GFR-binding peptide
  MOD_RES (37), (39): Xaa is C or S
  MOD_RES (16), (17), (18), (19), (20): Xaa is A or G
  MOD_RES (21), (22), (23), (24): Xaa is A or G or is absent
QPSRVHHRSVKVAKVXXXXXXXXXKEVQVRLEEHLEXAXA

SEQ ID NO: 19286 - protein, 34 aa, Artificial Sequence
  GFR-binding peptide
  MOD_RES (34), (34): Xaa is C or S
  MOD_RES (14), (15), (16), (17), (18): Xaa is A or G
  MOD_RES (19), (20), (21), (22): Xaa is A or G or is absent
VPTEERPVQMRKIXXXXXXXXXKKATVFLQHNKX

SEQ ID NO: 19287 - protein, 37 aa, Artificial Sequence
  GFR-binding peptide
  MOD_RES (2), (2): Xaa is C or S
  MOD_RES (18), (19), (20), (21), (22): Xaa is A or G
  MOD_RES (23), (24), (25), (26): Xaa is A or G or is absent
QXRPTQVQLRPVQVRKIXXXXXXXXXKKATVTLEDHL

SEQ ID NO: 19288 - protein, 40 aa, Artificial Sequence
  GFR-binding peptide
  MOD_RES (4), (38), (40): Xaa is C or S
GLEXVPTGQRSVKMAKVRIKPHQGQHKEVQVLEEHSQXEX

SEQ ID NO: 19289 - protein, 39 aa, Artificial Sequence
  GFR-binding peptide
  MOD_RES (3), (37), (39): Xaa is C or S
  MOD_RES (17), (18), (19), (20), (21): Xaa is A or G
  MOD_RES (22), (23), (24), (25): Xaa is A or G or is absent
LEXVPTEESNITMQIMXXXXXXXXXIGEMSFLQHNKXEX

SEQ ID NO: 19290 - protein, 42 aa, Artificial Sequence
  GFR-binding peptide
  MOD_RES (4), (41): Xaa is C or S
  MOD_RES (20), (21), (22), (23), (24): Xaa is A or G
  MOD_RES (25), (26), (27), (28): Xaa is A or G or is absent
SVKXQPSRVHHRPVQVRKIXXXXXXXXXKKATVRLEEHLEXA

SEQ ID NO: 19291 - protein, 37 aa, Artificial Sequence
  GFR-binding peptide
  MOD_RES (2), (2): Xaa is C or S
  MOD_RES (18), (19), (20), (21), (22): Xaa is A or G
  MOD_RES (23), (24), (25), (26): Xaa is A or G or is absent
QXRPTQVQLSNITVQIMXXXXXXXXXIGEMSTLEDHL

SEQ ID NO: 19292 - protein, 32 aa, Artificial Sequence
  GFR-binding peptide
  MOD_RES (14), (15), (16), (17), (18): Xaa is A or G
  MOD_RES (19), (20), (21), (22): Xaa is A or G or is absent
VPTGQRSVKMAKVXXXXXXXXXKEVQVLEEHS

SEQ ID NO: 19293 - protein, 32 aa, Artificial Sequence
  GFR-binding peptide
  MOD_RES (14), (15), (16), (17), (18): Xaa is A or G
  MOD_RES (19), (20), (21), (22): Xaa is A or G or is absent
VPTEERPVQMRKIXXXXXXXXXKKATVFLQHN

SEQ ID NO: 19294 - protein, 35 aa, Artificial Sequence
  GFR-binding peptide
  MOD_RES (16), (17), (18), (19), (20): Xaa is A or G
  MOD_RES (21), (22), (23), (24): Xaa is A or G or is absent
QPSRVHHSNITVQIMXXXXXXXXXLGEMSRLEEHL

SEQ ID NO: 19295 - protein, 36 aa, Artificial Sequence
  GFR-binding peptide
  MOD_RES (4), (4): Xaa is C or S
  MOD_RES (18), (19), (20), (21), (22): Xaa is A or G
  MOD_RES (23), (24), (25), (26): Xaa is A or G or is absent
GLEXVPTEESNITMQIMXXXXXXXXXIGEMSFLQHN

SEQ ID NO: 19296 - protein, 41 aa, Artificial Sequence
  GFR-binding peptide
  MOD_RES (5), (39), (41): Xaa is C or S
EGLEXVPTGQRSVKMAKVRIKPHQGQHKEVQVLEEHSQXEX

SEQ ID NO: 19297 - protein, 36 aa, Artificial Sequence
  GFR-binding peptide
  MOD_RES (3), (3): Xaa is C or S
  MOD_RES (17), (18), (19), (20), (21): Xaa is A or G
  MOD_RES (22), (23), (24), (25): Xaa is A or G or is absent
LEXVPTGQRSVKMAKVXXXXXXXXXKEVQVLEEHSQ

SEQ ID NO: 19298 - protein, 36 aa, Artificial Sequence
  GFR-binding peptide
  MOD_RES (1), (1): Xaa is C or S
XRPTQVQLSNITVQIMEIVRKKPIFLGEMSTLEDHL

SEQ ID NO: 19299 - protein, 41 aa, Artificial Sequence
  GFR-binding peptide
  MOD_RES (6), (40): Xaa is C or S
  MOD_RES (20), (21), (22), (23), (24): Xaa is A or G
  MOD_RES (25), (26), (27), (28): Xaa is A or G or is absent
DEGLEXVPTGQSNITMQIMXXXXXXXXXLGEMSLEEHSQXE

SEQ ID NO: 19300 - protein, 34 aa, Artificial Sequence
  GFR-binding peptide
  MOD_RES (16), (17), (18), (19), (20): Xaa is A or G
  MOD_RES (21), (22), (23), (24): Xaa is A or G or is absent
QPSRVHHRSVKVAKVXXXXXXXXXKEVQVRLEEH

SEQ ID NO: 19301 - protein, 38 aa, Artificial Sequence
  GFR-binding peptide
  MOD_RES (35), (37): Xaa is C or S
SRVHHSNITVQIMEYVRKKPKLLGEMSRLEEHLEXAXA

SEQ ID NO: 19302 - protein, 41 aa, Artificial Sequence
  GFR-binding peptide
  MOD_RES (4), (41): Xaa is C or S
  MOD_RES (20), (21), (22), (23), (24): Xaa is A or G
  MOD_RES (25), (26), (27), (28): Xaa is A or G or is absent
NVQXRPTQVQLRSVKVAKVXXXXXXXXXKEVQVTLEDHLAX

SEQ ID NO: 19303 - protein, 38 aa, Artificial Sequence
  GFR-binding peptide
  MOD_RES (1), (38): Xaa is C or S
  MOD_RES (17), (18), (19), (20), (21): Xaa is A or G
  MOD_RES (22), (23), (24), (25): Xaa is A or G or is absent
XRPTQVQLSNITVQIMXXXXXXXXXIGEMSTLEDHLAX

SEQ ID NO: 19304 - protein, 35 aa, Artificial Sequence
  GFR-binding peptide
  MOD_RES (2), (2): Xaa is C or S
  MOD_RES (16), (17), (18), (19), (20): Xaa is A or G
  MOD_RES (21), (22), (23), (24): Xaa is A or G or is absent
EXVPTGQRPVQMRKIXXXXXXXXXKKATVLEEHSQ

SEQ ID NO: 19305 - protein, 33 aa, Artificial Sequence
  GFR-binding peptide
  MOD_RES (1), (1): Xaa is C or S
  MOD_RES (15), (16), (17), (18), (19): Xaa is A or G
  MOD_RES (20), (21), (22), (23): Xaa is A or G or is absent
XVPTGQRPVQMRKIXXXXXXXXXKKATVLEEHS

SEQ ID NO: 19306 - protein, 39 aa, Artificial Sequence
  GFR-binding peptide
  MOD_RES (1), (38): Xaa is C or S
  MOD_RES (17), (18), (19), (20), (21): Xaa is A or G
  MOD_RES (22), (23), (24), (25): Xaa is A or G or is absent
XQPSRVHHSNITVQIMXXXXXXXXXLGEMSRLEEHLEXA

SEQ ID NO: 19307 - protein, 37 aa, Artificial Sequence
  GFR-binding peptide
  MOD_RES (34), (36): Xaa is C or S
  MOD_RES (14), (15), (16), (17), (18): Xaa is A or G
  MOD_RES (19), (20), (21), (22): Xaa is A or G or is absent
VPTGQRPVQMRKIXXXXXXXXXKKATVLEEHSQXEXR

SEQ ID NO: 19308 - protein, 33 aa, Artificial Sequence
  GFR-binding peptide
SRVHHSNITVQIMEYVRKKPKLIGEMSRLEEHL

SEQ ID NO: 19309 - protein, 43 aa, Artificial Sequence
  GFR-binding peptide
  MOD_RES (4), (41), (43): Xaa is C or S
  MOD_RES (20), (21), (22), (23), (24): Xaa is A or G
  MOD_RES (25), (26), (27), (28): Xaa is A or G or is absent
NVQXRPTQVQLSNITVQIMXXXXXXXXXLGEMSTLEDHLAXKX

SEQ ID NO: 19310 - protein, 39 aa, Artificial Sequence
  GFR-binding peptide
  MOD_RES (5), (39): Xaa is C or S
  MOD_RES (19), (20), (21), (22), (23): Xaa is A or G
  MOD_RES (24), (25), (26), (27): Xaa is A or G or is absent
EGLEXVPTGQSNITMQIMXXXXXXXXXLGEMSLEEHSQX

SEQ ID NO: 19311 - protein, 41 aa, Artificial Sequence
  GFR-binding peptide
  MOD_RES (5), (5): Xaa is C or S
  MOD_RES (21), (22), (23), (24), (25): Xaa is A or G
  MOD_RES (26), (27), (28), (29): Xaa is A or G or is absent
RNVQXRPTQVQLRSVKVAKVXXXXXXXXXKEVQVTLEDHLA

SEQ ID NO: 19312 - protein, 44 aa, Artificial Sequence
  GFR-binding peptide
  MOD_RES (7), (41), (43): Xaa is C or S
  MOD_RES (21), (22), (23), (24), (25): Xaa is A or G
  MOD_RES (26), (27), (28), (29): Xaa is A or G or is absent
NDEGLEXVPTEESNITMQIMXXXXXXXXXLGEMSFLQHNKXEXR

SEQ ID NO: 19313 - protein, 36 aa, Artificial Sequence
  GFR-binding peptide
  MOD_RES (1), (35): Xaa is C or S
XVPTEERSVKMAKVRIKPHQGQHKEVQVFLQHNKXE

SEQ ID NO: 19314 - protein, 35 aa, Artificial Sequence
  GFR-binding peptide
PTQVQLRSVKVAKVEIVRKKPIFKEVQVTLEDHLA

SEQ ID NO: 19315 - protein, 38 aa, Artificial Sequence
  GFR-binding peptide
  MOD_RES (2), (36), (38): Xaa is C or S
  MOD_RES (16), (17), (18), (19), (20): Xaa is A or G
  MOD_RES (21), (22), (23), (24): Xaa is A or G or is absent
EXVPTGQRSVKMAKVXXXXXXXXXKEVQVLEEHSQXEX

SEQ ID NO: 19316 - protein, 36 aa, Artificial Sequence
  GFR-binding peptide
  MOD_RES (36), (36): Xaa is C or S
  MOD_RES (15), (16), (17), (18), (19): Xaa is A or G
  MOD_RES (20), (21), (22), (23): Xaa is A or G or is absent
PTQVQLSNITVQIMXXXXXXXXXLGEMSTLEDHLAX

SEQ ID NO: 19317 - protein, 35 aa, Artificial Sequence
  GFR-binding peptide
  MOD_RES (2), (2): Xaa is C or S
  MOD_RES (16), (17), (18), (19), (20): Xaa is A or G
  MOD_RES (21), (22), (23), (24): Xaa is A or G or is absent
EXVPTGQSNITMQIMXXXXXXXXXIGEMSLEEHSQ

SEQ ID NO: 19318 - protein, 38 aa, Artificial Sequence
  GFR-binding peptide
  MOD_RES (3), (37): Xaa is C or S
  MOD_RES (17), (18), (19), (20), (21): Xaa is A or G
  MOD_RES (22), (23), (24), (25): Xaa is A or G or is absent
LEXVPTGQRPVQMRKIXXXXXXXXXKKATVLEEHSQXE

SEQ ID NO: 19319 - protein, 36 aa, Artificial Sequence
  GFR-binding peptide
  MOD_RES (36), (36): Xaa is C or S
  MOD_RES (15), (16), (17), (18), (19): Xaa is A or G
  MOD_RES (20), (21), (22), (23): Xaa is A or G or is absent
PSRVHHRPVQVRKIXXXXXXXXXKKATVRLEEHLEX

SEQ ID NO: 19320 - protein, 37 aa, Artificial Sequence
  GFR-binding peptide
  MOD_RES (4), (4): Xaa is C or S
  MOD_RES (18), (19), (20), (21), (22): Xaa is A or G
  MOD_RES (23), (24), (25), (26): Xaa is A or G or is absent
GLEXVPTGQRPVQMRKIXXXXXXXXXKKATVLEEHSQ

SEQ ID NO: 19321 - protein, 34 aa, Artificial Sequence
  GFR-binding peptide
TQVQLRSVKVAKVEIVRKKPIFKEVQVTLEDHLA

SEQ ID NO: 19322 - protein, 38 aa, Artificial Sequence
  GFR-binding peptide
  MOD_RES (4), (38): Xaa is C or S
GLEXVPTGQRSVKMAKVRIKPHQGQHKEVQVLEEHSQX

SEQ ID NO: 19323 - protein, 33 aa, Artificial Sequence
  GFR-binding peptide
  MOD_RES (1), (1): Xaa is C or S
  MOD_RES (15), (16), (17), (18), (19): Xaa is A or G
  MOD_RES (20), (21), (22), (23): Xaa is A or G or is absent
XVPTEERSVKMAKVXXXXXXXXXKEVQVFLQHN

SEQ ID NO: 19324 - protein, 39 aa, Artificial Sequence
  GFR-binding peptide
  MOD_RES (5), (5): Xaa is C or S
  MOD_RES (21), (22), (23), (24), (25): Xaa is A or G
  MOD_RES (26), (27), (28), (29): Xaa is A or G or is absent
SSVKXQPSRVHHRSVKVAKVXXXXXXXXXKEVQVRLEEH

SEQ ID NO: 19325 - protein, 42 aa, Artificial Sequence
  GFR-binding peptide
  MOD_RES (3), (40), (42): Xaa is C or S
VKXQPSRVHHRPVQVRKIEYVRKKPKLKKATVRLEEHLEXAX

SEQ ID NO: 19326 - protein, 36 aa, Artificial Sequence
  GFR-binding peptide
  MOD_RES (3), (3): Xaa is C or S
  MOD_RES (17), (18), (19), (20), (21): Xaa is A or G
  MOD_RES (22), (23), (24), (25): Xaa is A or G or is absent
LEXVPTGQSNITMQIMXXXXXXXXXIGEMSLEEHSQ

SEQ ID NO: 19327 - protein, 43 aa, Artificial Sequence
  GFR-binding peptide
  MOD_RES (3), (40), (42): Xaa is C or S
  MOD_RES (19), (20), (21), (22), (23): Xaa is A or G
  MOD_RES (24), (25), (26), (27): Xaa is A or G or is absent
VQXRPTQVQLSNITVQIMXXXXXXXXXLGEMSTLEDHLAXKXE

SEQ ID NO: 19328 - protein, 42 aa, Artificial Sequence
  GFR-binding peptide
  MOD_RES (6), (40), (42): Xaa is C or S
DEGLEXVPTGQRPVQMRKIRIKPHQGQHKKATVLEEHSQXEX

SEQ ID NO: 19329 - protein, 41 aa, Artificial Sequence
  GFR-binding peptide
  MOD_RES (5), (5): Xaa is C or S
SSVKXQPSRVHHRPVQVRKIEYVRKKPKLKKATVRLEEHLE

SEQ ID NO: 19330 - protein, 38 aa, Artificial Sequence
  GFR-binding peptide
  MOD_RES (36), (38): Xaa is C or S
PTQVQLSNITVQIMEIVRKKPIFIGEMSTLEDHLAXKX

SEQ ID NO: 19331 - protein, 36 aa, Artificial Sequence
  GFR-binding peptide
  MOD_RES (4), (4): Xaa is C or S
GLEXVPTGQRSVKMAKVRIKPHQGQHKEVQVLEEHS

SEQ ID NO: 19332 - protein, 37 aa, Artificial Sequence
  GFR-binding peptide
  MOD_RES (2), (2): Xaa is C or S
QXRPTQVQLRSVKVAKVEIVRKKPIFKEVQVTLEDHL

SEQ ID NO: 19333 - protein, 41 aa, Artificial Sequence
  GFR-binding peptide
  MOD_RES (5), (5): Xaa is C or S
  MOD_RES (21), (22), (23), (24), (25): Xaa is A or G
  MOD_RES (26), (27), (28), (29): Xaa is A or G or is absent
RNVQXRPTQVQLSNITVQIMXXXXXXXXXLGEMSTLEDHLA

SEQ ID NO: 19334 - protein, 39 aa, Artificial Sequence
  GFR-binding peptide
  MOD_RES (37), (39): Xaa is C or S
  MOD_RES (16), (17), (18), (19), (20): Xaa is A or G
  MOD_RES (21), (22), (23), (24): Xaa is A or G or is absent
QPSRVHHRSVKVAKVXXXXXXXXXKEVQVRLEEHLEXAX

SEQ ID NO: 19335 - protein, 43 aa, Artificial Sequence
  GFR-binding peptide
  MOD_RES (4), (41), (43): Xaa is C or S
NVQXRPTQVQLRSVKVAKVEIVRKKPIFKEVQVTLEDHLAXKX

SEQ ID NO: 19336 - protein, 41 aa, Artificial Sequence
  GFR-binding peptide
  MOD_RES (2), (39), (41): Xaa is C or S
  MOD_RES (18), (19), (20), (21), (22): Xaa is A or G
  MOD_RES (23), (24), (25), (26): Xaa is A or G or is absent
KXQPSRVHHRSVKVAKVXXXXXXXXXKEVQVRLEEHLEXAX

SEQ ID NO: 19337 - protein, 36 aa, Artificial Sequence
  GFR-binding peptide
  MOD_RES (3), (3): Xaa is C or S
  MOD_RES (17), (18), (19), (20), (21): Xaa is A or G
  MOD_RES (22), (23), (24), (25): Xaa is A or G or is absent
LEXVPTGQRPVQMRKIXXXXXXXXXKKATVLEEHSQ

SEQ ID NO: 19338 - protein, 35 aa, Artificial Sequence
  GFR-binding peptide
  MOD_RES (34), (34): Xaa is C or S
  MOD_RES (14), (15), (16), (17), (18): Xaa is A or G
  MOD_RES (19), (20), (21), (22): Xaa is A or G or is absent
VPTEERPVQMRKIXXXXXXXXXKKATVFLQHNKXE

SEQ ID NO: 19339 - protein, 36 aa, Artificial Sequence
  GFR-binding peptide
  MOD_RES (1), (35): Xaa is C or S
  MOD_RES (15), (16), (17), (18), (19): Xaa is A or G
  MOD_RES (20), (21), (22), (23): Xaa is A or G or is absent
XVPTGQSNITMQIMXXXXXXXXXIGEMSLEEHSQXE

SEQ ID NO: 19340 - protein, 39 aa, Artificial Sequence
  GFR-binding peptide
  MOD_RES (3), (3): Xaa is C or S
VQXRPTQVQLSNITVQIMEIVRKKPIFIGEMSTLEDHLA

SEQ ID NO: 19341 - protein, 41 aa, Artificial Sequence
  GFR-binding peptide
  MOD_RES (6), (40): Xaa is C or S
DEGLEXVPTEERSVKMAKVRIKPHQGQHKEVQVFLQHNKXE

SEQ ID NO: 19342 - protein, 38 aa, Artificial Sequence
  GFR-binding peptide
  MOD_RES (2), (2): Xaa is C or S
  MOD_RES (18), (19), (20), (21), (22): Xaa is A or G
  MOD_RES (23), (24), (25), (26): Xaa is A or G or is absent
QXRPTQVQLRPVQVRKIXXXXXXXXXKKATVTLEDHLA

SEQ ID NO: 19343 - protein, 36 aa, Artificial Sequence
  GFR-binding peptide
  MOD_RES (4), (4): Xaa is C or S
GLEXVPTGQRPVQMRKIRIKPHQGQHKKATVLEEHS

SEQ ID NO: 19344 - protein, 36 aa, Artificial Sequence
  GFR-binding peptide
  MOD_RES (4), (4): Xaa is C or S
  MOD_RES (18), (19), (20), (21), (22): Xaa is A or G
  MOD_RES (23), (24), (25), (26): Xaa is A or G or is absent
GLEXVPTGQSNITMQIMXXXXXXXXXLGEMSLEEHS

SEQ ID NO: 19345 - protein, 35 aa, Artificial Sequence
  GFR-binding peptide
  MOD_RES (1), (35): Xaa is C or S
  MOD_RES (15), (16), (17), (18), (19): Xaa is A or G
  MOD_RES (20), (21), (22), (23): Xaa is A or G or is absent
XVPTEERPVQMRKIXXXXXXXXXKKATVFLQHNKX

SEQ ID NO: 19346 - protein, 40 aa, Artificial Sequence
  GFR-binding peptide
  MOD_RES (3), (40): Xaa is C or S
  MOD_RES (19), (20), (21), (22), (23): Xaa is A or G
  MOD_RES (24), (25), (26), (27): Xaa is A or G or is absent
VKXQPSRVHHRSVKVAKVXXXXXXXXXKEVQVRLEEHLEX

SEQ ID NO: 19347 - protein, 43 aa, Artificial Sequence
  GFR-binding peptide
  MOD_RES (4), (41), (43): Xaa is C or S
  MOD_RES (20), (21), (22), (23), (24): Xaa is A or G
  MOD_RES (25), (26), (27), (28): Xaa is A or G or is absent
SVKXQPSRVHHSNITVQIMXXXXXXXXXLGEMSRLEEHLEXAX

SEQ ID NO: 19348 - protein, 38 aa, Artificial Sequence
  GFR-binding peptide
  MOD_RES (2), (36), (38): Xaa is C or S
EXVPTGQRPVQMRKIRIKPHQGQHKKATVLEEHSQXEX

SEQ ID NO: 19349 - protein, 34 aa, Artificial Sequence
  GFR-binding peptide
  MOD_RES (14), (15), (16), (17), (18): Xaa is A or G
  MOD_RES (19), (20), (21), (22): Xaa is A or G or is absent
SRVHHSNITVQIMXXXXXXXXXIGEMSRLEEHLE

SEQ ID NO: 19350 - protein, 34 aa, Artificial Sequence
  GFR-binding peptide
  MOD_RES (34), (34): Xaa is C or S
VPTEERPVQMRKIRIKPHQGQHKKATVFLQHNKX

SEQ ID NO: 19351 - protein, 37 aa, Artificial Sequence
  GFR-binding peptide
  MOD_RES (2), (2): Xaa is C or S
KXQPSRVHHRPVQVRKIEYVRKKPKLKKATVRLEEHL

SEQ ID NO: 19352 - protein, 36 aa, Artificial Sequence
  GFR-binding peptide
QPSRVHHSNITVQIMEYVRKKPKLIGEMSRLEEHLE

SEQ ID NO: 19353 - protein, 35 aa, Artificial Sequence
  GFR-binding peptide
  MOD_RES (35), (35): Xaa is C or S
  MOD_RES (14), (15), (16), (17), (18): Xaa is A or G
  MOD_RES (19), (20), (21), (22): Xaa is A or G or is absent
TQVQLRPVQVRKIXXXXXXXXXKKATVTLEDHLAX

SEQ ID NO: 19354 - protein, 44 aa, Artificial Sequence
  GFR-binding peptide
  MOD_RES (4), (41), (43): Xaa is C or S
NVQXRPTQVQLSNITVQIMEIVRKKPIFLGEMSTLEDHLAXKXE

SEQ ID NO: 19355 - protein, 36 aa, Artificial Sequence
  GFR-binding peptide
  MOD_RES (4), (4): Xaa is C or S
GLEXVPTGQSNITMQIMRIKPHQGQHIGEMSLEEHS

SEQ ID NO: 19356 - protein, 40 aa, Artificial Sequence
  GFR-binding peptide
  MOD_RES (3), (37), (39): Xaa is C or S
LEXVPTEERPVQMRKIRIKPHQGQHKKATVFLQHNKXEXR

SEQ ID NO: 19357 - protein, 43 aa, Artificial Sequence
  GFR-binding peptide
  MOD_RES (7), (41), (43): Xaa is C or S
  MOD_RES (21), (22), (23), (24), (25): Xaa is A or G
  MOD_RES (26), (27), (28), (29): Xaa is A or G or is absent
NDEGLEXVPTEERSVKMAKVXXXXXXXXXKEVQVFLQHNKXEX

SEQ ID NO: 19358 - protein, 37 aa, Artificial Sequence
  GFR-binding peptide
  MOD_RES (2), (2): Xaa is C or S
KXQPSRVHHSNITVQIMEYVRKKPKLIGEMSRLEEHL

SEQ ID NO: 19359 - protein, 37 aa, Artificial Sequence
  GFR-binding peptide
  MOD_RES (36), (36): Xaa is C or S
PTQVQLRSVKVAKVEIVRKKPIFKEVQVTLEDHLAXK

SEQ ID NO: 19360 - protein, 34 aa, Artificial Sequence
  GFR-binding peptide
  MOD_RES (15), (16), (17), (18), (19): Xaa is A or G
  MOD_RES (20), (21), (22), (23): Xaa is A or G or is absent
PTQVQLSNITVQIMXXXXXXXXXLGEMSTLEDHL

SEQ ID NO: 19361 - protein, 44 aa, Artificial Sequence
  GFR-binding peptide
  MOD_RES (7), (41), (43): Xaa is C or S
NDEGLEXVPTGQRSVKMAKVRIKPHQGQHKEVQVLEEHSQXEXR

SEQ ID NO: 19362 - protein, 39 aa, Artificial Sequence
  GFR-binding peptide
  MOD_RES (3), (37), (39): Xaa is C or S
  MOD_RES (17), (18), (19), (20), (21): Xaa is A or G
  MOD_RES (22), (23), (24), (25): Xaa is A or G or is absent
LEXVPTEERPVQMRKIXXXXXXXXXKKATVFLQHNKXEX

SEQ ID NO: 19363 - protein, 36 aa, Artificial Sequence
  GFR-binding peptide
  MOD_RES (1), (1): Xaa is C or S
XQPSRVHHSNITVQIMEYVRKKPKLLGEMSRLEEHL

SEQ ID NO: 19364 - protein, 35 aa, Artificial Sequence
  GFR-binding peptide
  MOD_RES (1), (1): Xaa is C or S
XQPSRVHHSNITVQIMEYVRKKPKLLGEMSRLEEH

SEQ ID NO: 19365 - protein, 35 aa, Artificial Sequence
  GFR-binding peptide
  MOD_RES (34), (34): Xaa is C or S
  MOD_RES (14), (15), (16), (17), (18): Xaa is A or G
  MOD_RES (19), (20), (21), (22): Xaa is A or G or is absent
VPTEESNITMQIMXXXXXXXXXIGEMSFLQHNKXE

SEQ ID NO: 19366 - protein, 36 aa, Artificial Sequence
  GFR-binding peptide
  MOD_RES (4), (4): Xaa is C or S
  MOD_RES (18), (19), (20), (21), (22): Xaa is A or G
  MOD_RES (23), (24), (25), (26): Xaa is A or G or is absent
GLEXVPTGQSNITMQIMXXXXXXXXXIGEMSLEEHS

SEQ ID NO: 19367 - protein, 40 aa, Artificial Sequence
  GFR-binding peptide
  MOD_RES (7), (7): Xaa is C or S
  MOD_RES (21), (22), (23), (24), (25): Xaa is A or G
  MOD_RES (26), (27), (28), (29): Xaa is A or G or is absent
NDEGLEXVPTEESNITMQIMXXXXXXXXXIGEMSFLQHNK

SEQ ID NO: 19368 - protein, 42 aa, Artificial Sequence
  GFR-binding peptide
  MOD_RES (7), (41): Xaa is C or S
  MOD_RES (21), (22), (23), (24), (25): Xaa is A or G
  MOD_RES (26), (27), (28), (29): Xaa is A or G or is absent
NDEGLEXVPTGQSNITMQIMXXXXXXXXXLGEMSLEEHSQXE

SEQ ID NO: 19369 - protein, 37 aa, Artificial Sequence
  GFR-binding peptide
  MOD_RES (37), (37): Xaa is C or S
RPTQVQLSNITVQIMEIVRKKPIFIGEMSTLEDHLAX

SEQ ID NO: 19370 - protein, 43 aa, Artificial Sequence
  GFR-binding peptide
  MOD_RES (3), (40), (42): Xaa is C or S
VKXQPSRVHHSNITVQIMEYVRKKPKLLGEMSRLEEHLEXAXA

SEQ ID NO: 19371 - protein, 34 aa, Artificial Sequence
  GFR-binding peptide
TQVQLSNITVQIMEIVRKKPIFLGEMSTLEDHLA

SEQ ID NO: 19372 - protein, 37 aa, Artificial Sequence
  GFR-binding peptide
  MOD_RES (4), (4): Xaa is C or S
GLEXVPTEERSVKMAKVRIKPHQGQHKEVQVFLQHNK

SEQ ID NO: 19373 - protein, 37 aa, Artificial Sequence
  GFR-binding peptide
  MOD_RES (3), (37): Xaa is C or S
LEXVPTGQRPVQMRKIRIKPHQGQHKKATVLEEHSQX

SEQ ID NO: 19374 - protein, 37 aa, Artificial Sequence
  GFR-binding peptide
  MOD_RES (34), (36): Xaa is C or S
VPTGQRSVKMAKVRIKPHQGQHKEVQVLEEHSQXEXR

SEQ ID NO: 19375 - protein, 40 aa, Artificial Sequence
  GFR-binding peptide
  MOD_RES (3), (40): Xaa is C or S
  MOD_RES (19), (20), (21), (22), (23): Xaa is A or G
  MOD_RES (24), (25), (26), (27): Xaa is A or G or is absent
VQXRPTQVQLSNITVQIMXXXXXXXXXIGEMSTLEDHLAX

SEQ ID NO: 19376 - protein, 42 aa, Artificial Sequence
  GFR-binding peptide
  MOD_RES (6), (40), (42): Xaa is C or S
DEGLEXVPTGQSNITMQIMRIKPHQGQHIGEMSLEEHSQXEX

SEQ ID NO: 19377 - protein, 39 aa, Artificial Sequence
  GFR-binding peptide
  MOD_RES (37), (39): Xaa is C or S
QPSRVHHSNITVQIMEYVRKKPKLLGEMSRLEEHLEXAX

SEQ ID NO: 19378 - protein, 35 aa, Artificial Sequence
  GFR-binding peptide
  MOD_RES (1), (1): Xaa is C or S
XQPSRVHHSNITVQIMEYVRKKPKLIGEMSRLEEH

SEQ ID NO: 19379 - protein, 36 aa, Artificial Sequence
  GFR-binding peptide
  MOD_RES (4), (4): Xaa is C or S
GLEXVPTEESNITMQIMRIKPHQGQHLGEMSFLQHN

SEQ ID NO: 19380 - protein, 34 aa, Artificial Sequence
  GFR-binding peptide
  MOD_RES (16), (17), (18), (19), (20): Xaa is A or G
  MOD_RES (21), (22), (23), (24): Xaa is A or G or is absent
QPSRVHHSNITVQIMXXXXXXXXXIGEMSRLEEH

SEQ ID NO: 19381 - protein, 38 aa, Artificial Sequence
  GFR-binding peptide
  MOD_RES (1), (35), (37): Xaa is C or S
XVPTEERPVQMRKIRIKPHQGQHKKATVFLQHNKXEXR

SEQ ID NO: 19382 - protein, 38 aa, Artificial Sequence
  GFR-binding peptide
  MOD_RES (3), (37): Xaa is C or S
  MOD_RES (17), (18), (19), (20), (21): Xaa is A or G
  MOD_RES (22), (23), (24), (25): Xaa is A or G or is absent
LEXVPTGQSNITMQIMXXXXXXXXXIGEMSLEEHSQXE

SEQ ID NO: 19383 - protein, 43 aa, Artificial Sequence
  GFR-binding peptide
  MOD_RES (3), (40), (42): Xaa is C or S
VKXQPSRVHHRPVQVRKIEYVRKKPKLKKATVRLEEHLEXAXA

SEQ ID NO: 19384 - protein, 42 aa, Artificial Sequence
  GFR-binding peptide
  MOD_RES (2), (39), (41): Xaa is C or S
  MOD_RES (18), (19), (20), (21), (22): Xaa is A or G
  MOD_RES (23), (24), (25), (26): Xaa is A or G or is absent
QXRPTQVQLRPVQVRKIXXXXXXXXXKKATVTLEDHLAXKXE

SEQ ID NO: 19385 - protein, 38 aa, Artificial Sequence
  GFR-binding peptide
  MOD_RES (3), (3): Xaa is C or S
VQXRPTQVQLSNITVQIMEIVRKKPIFLGEMSTLEDHL

SEQ ID NO: 19386 - protein, 40 aa, Artificial Sequence
  GFR-binding peptide
  MOD_RES (3), (37), (39): Xaa is C or S
  MOD_RES (17), (18), (19), (20), (21): Xaa is A or G
  MOD_RES (22), (23), (24), (25): Xaa is A or G or is absent
LEXVPTGQSNITMQIMXXXXXXXXXLGEMSLEEHSQXEXR

SEQ ID NO: 19387 - protein, 35 aa, Artificial Sequence
  GFR-binding peptide
QPSRVHHSNITVQIMEYVRKKPKLLGEMSRLEEHL

SEQ ID NO: 19388 - protein, 42 aa, Artificial Sequence
  GFR-binding peptide
  MOD_RES (4), (41): Xaa is C or S
SVKXQPSRVHHSNITVQIMEYVRKKPKLLGEMSRLEEHLEXA

SEQ ID NO: 19389 - protein, 42 aa, Artificial Sequence
  GFR-binding peptide
  MOD_RES (5), (42): Xaa is C or S
  MOD_RES (21), (22), (23), (24), (25): Xaa is A or G
  MOD_RES (26), (27), (28), (29): Xaa is A or G or is absent
SSVKXQPSRVHHRPVQVRKIXXXXXXXXXKKATVRLEEHLEX

SEQ ID NO: 19390 - protein, 39 aa, Artificial Sequence
  GFR-binding peptide
  MOD_RES (1), (38): Xaa is C or S
XQPSRVHHRPVQVRKIEYVRKKPKLKKATVRLEEHLEXA

SEQ ID NO: 19391 - protein, 38 aa, Artificial Sequence
  GFR-binding peptide
  MOD_RES (1), (38): Xaa is C or S
  MOD_RES (17), (18), (19), (20), (21): Xaa is A or G
  MOD_RES (22), (23), (24), (25): Xaa is A or G or is absent
XQPSRVHHRSVKVAKVXXXXXXXXXKEVQVRLEEHLEX

SEQ ID NO: 19392 - protein, 43 aa, Artificial Sequence
  GFR-binding peptide
  MOD_RES (7), (41), (43): Xaa is C or S
  MOD_RES (21), (22), (23), (24), (25): Xaa is A or G
  MOD_RES (26), (27), (28), (29): Xaa is A or G or is absent
NDEGLEXVPTEESNITMQIMXXXXXXXXXLGEMSFLQHNKXEX

SEQ ID NO: 19393 - protein, 41 aa, Artificial Sequence
  GFR-binding peptide
  MOD_RES (1), (38), (40): Xaa is C or S
XRPTQVQLSNITVQIMEIVRKKPIFIGEMSTLEDHLAXKXE

SEQ ID NO: 19394 - protein, 44 aa, Artificial Sequence
  GFR-binding peptide
  MOD_RES (4), (41), (43): Xaa is C or S
  MOD_RES (20), (21), (22), (23), (24): Xaa is A or G
  MOD_RES (25), (26), (27), (28): Xaa is A or G or is absent
NVQXRPTQVQLSNITVQIMXXXXXXXXXIGEMSTLEDHLAXKXE

SEQ ID NO: 19395 - protein, 40 aa, Artificial Sequence
  GFR-binding peptide
  MOD_RES (5), (39): Xaa is C or S
  MOD_RES (19), (20), (21), (22), (23): Xaa is A or G
  MOD_RES (24), (25), (26), (27): Xaa is A or G or is absent
EGLEXVPTGQSNITMQIMXXXXXXXXXLGEMSLEEHSQXE

SEQ ID NO: 19396 - protein, 39 aa, Artificial Sequence
  GFR-binding peptide
  MOD_RES (1), (38): Xaa is C or S
XQPSRVHHSNITVQIMEYVRKKPKLLGEMSRLEEHLEXA

SEQ ID NO: 19397 - protein, 38 aa, Artificial Sequence
  GFR-binding peptide
  MOD_RES (1), (38): Xaa is C or S
  MOD_RES (17), (18), (19), (20), (21): Xaa is A or G
  MOD_RES (22), (23), (24), (25): Xaa is A or G or is absent
XRPTQVQLRPVQVRKIXXXXXXXXXKKATVTLEDHLAX

SEQ ID NO: 19398 - protein, 42 aa, Artificial Sequence
  GFR-binding peptide
  MOD_RES (4), (41): Xaa is C or S
SVKXQPSRVHHRPVQVRKIEYVRKKPKLKKATVRLEEHLEXA

SEQ ID NO: 19399 - protein, 41 aa, Artificial Sequence
  GFR-binding peptide
  MOD_RES (4), (38), (40): Xaa is C or S
  MOD_RES (18), (19), (20), (21), (22): Xaa is A or G
  MOD_RES (23), (24), (25), (26): Xaa is A or G or is absent
GLEXVPTEESNITMQIMXXXXXXXXXLGEMSFLQHNKXEXR

SEQ ID NO: 19400 - protein, 38 aa, Artificial Sequence
  GFR-binding peptide
  MOD_RES (1), (35), (37): Xaa is C or S
  MOD_RES (15), (16), (17), (18), (19): Xaa is A or G
  MOD_RES (20), (21), (22), (23): Xaa is A or G or is absent
XVPTGQSNITMQIMXXXXXXXXXLGEMSLEEHSQXEXR

SEQ ID NO: 19401 - protein, 37 aa, Artificial Sequence
  GFR-binding peptide
  MOD_RES (37), (37): Xaa is C or S
QPSRVHHSNITVQIMEYVRKKPKLIGEMSRLEEHLEX

SEQ ID NO: 19402 - protein, 39 aa, Artificial Sequence
  GFR-binding peptide
  MOD_RES (6), (6): Xaa is C or S
  MOD_RES (20), (21), (22), (23), (24): Xaa is A or G
  MOD_RES (25), (26), (27), (28): Xaa is A or G or is absent
DEGLEXVPTGQRPVQMRKIXXXXXXXXXKKATVLEEHSQ

SEQ ID NO: 19403 - protein, 39 aa, Artificial Sequence
  GFR-binding peptide
  MOD_RES (2), (36), (38): Xaa is C or S
EXVPTEERPVQMRKIRIKPHQGQHKKATVFLQHNKXEXR

SEQ ID NO: 19404 - protein, 41 aa, Artificial Sequence
  GFR-binding peptide
  MOD_RES (2), (39), (41): Xaa is C or S
KXQPSRVHHSNITVQIMEYVRKKPKLLGEMSRLEEHLEXAX

SEQ ID NO: 19405 - protein, 34 aa, Artificial Sequence
  GFR-binding peptide
  MOD_RES (16), (17), (18), (19), (20): Xaa is A or G
  MOD_RES (21), (22), (23), (24): Xaa is A or G or is absent
QPSRVHHSNITVQIMXXXXXXXXXLGEMSRLEEH

SEQ ID NO: 19406 - protein, 37 aa, Artificial Sequence
  GFR-binding peptide
  MOD_RES (2), (36): Xaa is C or S
  MOD_RES (16), (17), (18), (19), (20): Xaa is A or G
  MOD_RES (21), (22), (23), (24): Xaa is A or G or is absent
EXVPTGQRPVQMRKIXXXXXXXXXKKATVLEEHSQXE

SEQ ID NO: 19407 - protein, 44 aa, Artificial Sequence
  GFR-binding peptide
  MOD_RES (7), (41), (43): Xaa is C or S
  MOD_RES (21), (22), (23), (24), (25): Xaa is A or G
  MOD_RES (26), (27), (28), (29): Xaa is A or G or is absent
NDEGLEXVPTGQRPVQMRKIXXXXXXXXXKKATVLEEHSQXEXR

SEQ ID NO: 19408 - protein, 40 aa, Artificial Sequence
  GFR-binding peptide
  MOD_RES (1), (38), (40): Xaa is C or S
  MOD_RES (17), (18), (19), (20), (21): Xaa is A or G
  MOD_RES (22), (23), (24), (25): Xaa is A or G or is absent
XQPSRVHHSNITVQIMXXXXXXXXXLGEMSRLEEHLEXAX

SEQ ID NO: 19409 - protein, 39 aa, Artificial Sequence
  GFR-binding peptide
  MOD_RES (6), (6): Xaa is C or S
  MOD_RES (20), (21), (22), (23), (24): Xaa is A or G
  MOD_RES (25), (26), (27), (28): Xaa is A or G or is absent
DEGLEXVPTGQSNITMQIMXXXXXXXXXIGEMSLEEHSQ

SEQ ID NO: 19410 - protein, 37 aa, Artificial Sequence
  GFR-binding peptide
  MOD_RES (34), (36): Xaa is C or S
  MOD_RES (14), (15), (16), (17), (18): Xaa is A or G
  MOD_RES (19), (20), (21), (22): Xaa is A or G or is absent
VPTEESNITMQIMXXXXXXXXXLGEMSFLQHNKXEXR

SEQ ID NO: 19411 - protein, 34 aa, Artificial Sequence
  GFR-binding peptide
  MOD_RES (14), (15), (16), (17), (18): Xaa is A or G
  MOD_RES (19), (20), (21), (22): Xaa is A or G or is absent
TQVQLRSVKVAKVXXXXXXXXXKEVQVTLEDHLA

SEQ ID NO: 19412 - protein, 36 aa, Artificial Sequence
  GFR-binding peptide
  MOD_RES (16), (17), (18), (19), (20): Xaa is A or G
  MOD_RES (21), (22), (23), (24): Xaa is A or G or is absent
RPTQVQLRPVQVRKIXXXXXXXXXKKATVTLEDHLA

SEQ ID NO: 19413 - protein, 34 aa, Artificial Sequence
  GFR-binding peptide
  MOD_RES (1), (1): Xaa is C or S
  MOD_RES (15), (16), (17), (18), (19): Xaa is A or G
  MOD_RES (20), (21), (22), (23): Xaa is A or G or is absent
XVPTEESNITMQIMXXXXXXXXXIGEMSFLQHNK

SEQ ID NO: 19414 - protein, 40 aa, Artificial Sequence
  GFR-binding peptide
  MOD_RES (1), (38), (40): Xaa is C or S
  MOD_RES (17), (18), (19), (20), (21): Xaa is A or G
  MOD_RES (22), (23), (24), (25): Xaa is A or G or is absent
XRPTQVQLRSVKVAKVXXXXXXXXXKEVQVTLEDHLAXKX

SEQ ID NO: 19415 - protein, 35 aa, Artificial Sequence
  GFR-binding peptide
PTQVQLSNITVQIMEIVRKKPIFLGEMSTLEDHLA

SEQ ID NO: 19416 - protein, 36 aa, Artificial Sequence
  GFR-binding peptide
  MOD_RES (16), (17), (18), (19), (20): Xaa is A or G
  MOD_RES (21), (22), (23), (24): Xaa is A or G or is absent
RPTQVQLSNITVQIMXXXXXXXXXLGEMSTLEDHLA

SEQ ID NO: 19417 - protein, 38 aa, Artificial Sequence
  GFR-binding peptide
  MOD_RES (36), (38): Xaa is C or S
  MOD_RES (15), (16), (17), (18), (19): Xaa is A or G
  MOD_RES (20), (21), (22), (23): Xaa is A or G or is absent
PSRVHHSNITVQIMXXXXXXXXXLGEMSRLEEHLEXAX

SEQ ID NO: 19418 - protein, 41 aa, Artificial Sequence
  GFR-binding peptide
  MOD_RES (2), (39), (41): Xaa is C or S
  MOD_RES (18), (19), (20), (21), (22): Xaa is A or G
  MOD_RES (23), (24), (25), (26): Xaa is A or G or is absent
QXRPTQVQLSNITVQIMXXXXXXXXXLGEMSTLEDHLAXKX

SEQ ID NO: 19419 - protein, 39 aa, Artificial Sequence
  GFR-binding peptide
  MOD_RES (4), (4): Xaa is C or S
  MOD_RES (20), (21), (22), (23), (24): Xaa is A or G
  MOD_RES (25), (26), (27), (28): Xaa is A or G or is absent
NVQXRPTQVQLSNITVQIMXXXXXXXXXIGEMSTLEDHL

SEQ ID NO: 19420 - protein, 41 aa, Artificial Sequence
  GFR-binding peptide
  MOD_RES (5), (39), (41): Xaa is C or S
EGLEXVPTEERPVQMRKIRIKPHQGQHKKATVFLQHNKXEX

SEQ ID NO: 19421 - protein, 36 aa, Artificial Sequence
  GFR-binding peptide
  MOD_RES (1), (35): Xaa is C or S
  MOD_RES (15), (16), (17), (18), (19): Xaa is A or G
  MOD_RES (20), (21), (22), (23): Xaa is A or G or is absent
XVPTEERPVQMRKIXXXXXXXXXKKATVFLQHNKXE

SEQ ID NO: 19422 - protein, 32 aa, Artificial Sequence
  GFR-binding peptide
VPTGQRSVKMAKVRIKPHQGQHKEVQVLEEHS

SEQ ID NO: 19423 - protein, 36 aa, Artificial Sequence
  GFR-binding peptide
  MOD_RES (3), (3): Xaa is C or S
LEXVPTEESNITMQIMRIKPHQGQHLGEMSFLQHNK

SEQ ID NO: 19424 - protein, 35 aa, Artificial Sequence
  GFR-binding peptide
  MOD_RES (2), (2): Xaa is C or S
EXVPTGQSNITMQIMRIKPHQGQHIGEMSLEEHSQ

SEQ ID NO: 19425 - protein, 33 aa, Artificial Sequence
  GFR-binding peptide
  MOD_RES (14), (15), (16), (17), (18): Xaa is A or G
  MOD_RES (19), (20), (21), (22): Xaa is A or G or is absent
SRVHHRPVQVRKIXXXXXXXXXKKATVRLEEHL

SEQ ID NO: 19426 - protein, 35 aa, Artificial Sequence
  GFR-binding peptide
  MOD_RES (3), (3): Xaa is C or S
  MOD_RES (17), (18), (19), (20), (21): Xaa is A or G
  MOD_RES (22), (23), (24), (25): Xaa is A or G or is absent
LEXVPTEESNITMQIMXXXXXXXXXLGEMSFLQHN

SEQ ID NO: 19427 - protein, 40 aa, Artificial Sequence
  GFR-binding peptide
  MOD_RES (1), (38), (40): Xaa is C or S
  MOD_RES (17), (18), (19), (20), (21): Xaa is A or G
  MOD_RES (22), (23), (24), (25): Xaa is A or G or is absent
XRPTQVQLRPVQVRKIXXXXXXXXXKKATVTLEDHLAXKX

SEQ ID NO: 19428 - protein, 37 aa, Artificial Sequence
  GFR-binding peptide
  MOD_RES (5), (5): Xaa is C or S
  MOD_RES (19), (20), (21), (22), (23): Xaa is A or G
  MOD_RES (24), (25), (26), (27): Xaa is A or G or is absent
EGLEXVPTGQSNITMQIMXXXXXXXXXIGEMSLEEHS

SEQ ID NO: 19429 - protein, 43 aa, Artificial Sequence
  GFR-binding peptide
  MOD_RES (6), (40), (42): Xaa is C or S
DEGLEXVPTGQRPVQMRKIRIKPHQGQHKKATVLEEHSQXEXR

SEQ ID NO: 19430 - protein, 38 aa, Artificial Sequence
  GFR-binding peptide
  MOD_RES (6), (6): Xaa is C or S
  MOD_RES (20), (21), (22), (23), (24): Xaa is A or G
  MOD_RES (25), (26), (27), (28): Xaa is A or G or is absent
DEGLEXVPTGQSNITMQIMXXXXXXXXXLGEMSLEEHS

SEQ ID NO: 19431 - protein, 33 aa, Artificial Sequence
  GFR-binding peptide
TQVQLSNITVQIMEIVRKKPIFLGEMSTLEDHL

SEQ ID NO: 19432 - protein, 42 aa, Artificial Sequence
  GFR-binding peptide
  MOD_RES (5), (42): Xaa is C or S
SSVKXQPSRVHHSNITVQIMEYVRKKPKLIGEMSRLEEHLEX

SEQ ID NO: 19433 - protein, 40 aa, Artificial Sequence
  GFR-binding peptide
  MOD_RES (5), (5): Xaa is C or S
SSVKXQPSRVHHRPVQVRKIEYVRKKPKLKKATVRLEEHL

SEQ ID NO: 19434 - protein, 38 aa, Artificial Sequence
  GFR-binding peptide
  MOD_RES (1), (35), (37): Xaa is C or S
  MOD_RES (15), (16), (17), (18), (19): Xaa is A or G
  MOD_RES (20), (21), (22), (23): Xaa is A or G or is absent
XVPTEERPVQMRKIXXXXXXXXXKKATVFLQHNKXEXR

SEQ ID NO: 19435 - protein, 35 aa, Artificial Sequence
  GFR-binding peptide
PSRVHHRPVQVRKIEYVRKKPKLKKATVRLEEHLE

SEQ ID NO: 19436 - protein, 36 aa, Artificial Sequence
  GFR-binding peptide
  MOD_RES (2), (2): Xaa is C or S
QXRPTQVQLRSVKVAKVEIVRKKPIFKEVQVTLEDH

SEQ ID NO: 19437 - protein, 38 aa, Artificial Sequence
  GFR-binding peptide
  MOD_RES (1), (35), (37): Xaa is C or S
  MOD_RES (15), (16), (17), (18), (19): Xaa is A or G
  MOD_RES (20), (21), (22), (23): Xaa is A or G or is absent
XVPTEERSVKMAKVXXXXXXXXXKEVQVFLQHNKXEXR

SEQ ID NO: 19438 - protein, 41 aa, Artificial Sequence
  GFR-binding peptide
  MOD_RES (4), (41): Xaa is C or S
SVKXQPSRVHHSNITVQIMEYVRKKPKLLGEMSRLEEHLEX

SEQ ID NO: 19439 - protein, 33 aa, Artificial Sequence
  GFR-binding peptide
  MOD_RES (1), (1): Xaa is C or S
  MOD_RES (15), (16), (17), (18), (19): Xaa is A or G
  MOD_RES (20), (21), (22), (23): Xaa is A or G or is absent
XVPTEESNITMQIMXXXXXXXXXLGEMSFLQHN

SEQ ID NO: 19440 - protein, 35 aa, Artificial Sequence
  GFR-binding peptide
RPTQVQLSNITVQIMEIVRKKPIFIGEMSTLEDHL

SEQ ID NO: 19441 - protein, 38 aa, Artificial Sequence
  GFR-binding peptide
  MOD_RES (4), (38): Xaa is C or S
  MOD_RES (18), (19), (20), (21), (22): Xaa is A or G
  MOD_RES (23), (24), (25), (26): Xaa is A or G or is absent
GLEXVPTEESNITMQIMXXXXXXXXXLGEMSFLQHNKX

SEQ ID NO: 19442 - protein, 39 aa, Artificial Sequence
  GFR-binding peptide
  MOD_RES (3), (37), (39): Xaa is C or S
LEXVPTGQSNITMQIMRIKPHQGQHIGEMSLEEHSQXEX

SEQ ID NO: 19443 - protein, 33 aa, Artificial Sequence
  GFR-binding peptide
PSRVHHSNITVQIMEYVRKKPKLIGEMSRLEEH

SEQ ID NO: 19444 - protein, 37 aa, Artificial Sequence
  GFR-binding peptide
  MOD_RES (35), (37): Xaa is C or S
SRVHHRPVQVRKIEYVRKKPKLKKATVRLEEHLEXAX

SEQ ID NO: 19445 - protein, 34 aa, Artificial Sequence
  GFR-binding peptide
  MOD_RES (2), (2): Xaa is C or S
  MOD_RES (16), (17), (18), (19), (20): Xaa is A or G
  MOD_RES (21), (22), (23), (24): Xaa is A or G or is absent
EXVPTEESNITMQIMXXXXXXXXXIGEMSFLQHN

SEQ ID NO: 19446 - protein, 39 aa, Artificial Sequence
  GFR-binding peptide
  MOD_RES (1), (38): Xaa is C or S
  MOD_RES (17), (18), (19), (20), (21): Xaa is A or G
  MOD_RES (22), (23), (24), (25): Xaa is A or G or is absent
XRPTQVQLRSVKVAKVXXXXXXXXXKEVQVTLEDHLAXK

SEQ ID NO: 19447 - protein, 37 aa, Artificial Sequence
  GFR-binding peptide
  MOD_RES (36), (36): Xaa is C or S
  MOD_RES (15), (16), (17), (18), (19): Xaa is A or G
  MOD_RES (20), (21), (22), (23): Xaa is A or G or is absent
PTQVQLRSVKVAKVXXXXXXXXXKEVQVTLEDHLAXK

SEQ ID NO: 19448 - protein, 39 aa, Artificial Sequence
  GFR-binding peptide
  MOD_RES (2), (39): Xaa is C or S
KXQPSRVHHRPVQVRKIEYVRKKPKLKKATVRLEEHLEX

SEQ ID NO: 19449 - protein, 38 aa, Artificial Sequence
  GFR-binding peptide
  MOD_RES (3), (37): Xaa is C or S
LEXVPTEESNITMQIMRIKPHQGQHLGEMSFLQHNKXE

SEQ ID NO: 19450 - protein, 37 aa, Artificial Sequence
  GFR-binding peptide
  MOD_RES (35), (37): Xaa is C or S
TQVQLRSVKVAKVEIVRKKPIFKEVQVTLEDHLAXKX

SEQ ID NO: 19451 - protein, 43 aa, Artificial Sequence
  GFR-binding peptide
  MOD_RES (6), (40), (42): Xaa is C or S
DEGLEXVPTGQRSVKMAKVRIKPHQGQHKEVQVLEEHSQXEXR

SEQ ID NO: 19452 - protein, 37 aa, Artificial Sequence
  GFR-binding peptide
  MOD_RES (1), (1): Xaa is C or S
XQPSRVHHSNITVQIMEYVRKKPKLIGEMSRLEEHLE

SEQ ID NO: 19453 - protein, 33 aa, Artificial Sequence
  GFR-binding peptide
  MOD_RES (14), (15), (16), (17), (18): Xaa is A or G
  MOD_RES (19), (20), (21), (22): Xaa is A or G or is absent
VPTEERSVKMAKVXXXXXXXXXKEVQVFLQHNK

SEQ ID NO: 19454 - protein, 37 aa, Artificial Sequence
  GFR-binding peptide
  MOD_RES (1), (35), (37): Xaa is C or S
  MOD_RES (15), (16), (17), (18), (19): Xaa is A or G
  MOD_RES (20), (21), (22), (23): Xaa is A or G or is absent
XVPTEESNITMQIMXXXXXXXXXLGEMSFLQHNKXEX

SEQ ID NO: 19455 - protein, 42 aa, Artificial Sequence
  GFR-binding peptide
  MOD_RES (5), (42): Xaa is C or S
  MOD_RES (21), (22), (23), (24), (25): Xaa is A or G
  MOD_RES (26), (27), (28), (29): Xaa is A or G or is absent
RNVQXRPTQVQLRPVQVRKIXXXXXXXXXKKATVTLEDHLAX

SEQ ID NO: 19456 - protein, 39 aa, Artificial Sequence
  GFR-binding peptide
  MOD_RES (7), (7): Xaa is C or S
  MOD_RES (21), (22), (23), (24), (25): Xaa is A or G
  MOD_RES (26), (27), (28), (29): Xaa is A or G or is absent
NDEGLEXVPTEERSVKMAKVXXXXXXXXXKEVQVFLQHN

SEQ ID NO: 19457 - protein, 38 aa, Artificial Sequence
  GFR-binding peptide
  MOD_RES (1), (38): Xaa is C or S
XRPTQVQLRSVKVAKVEIVRKKPIFKEVQVTLEDHLAX

SEQ ID NO: 19458 - protein, 37 aa, Artificial Sequence
  GFR-binding peptide
  MOD_RES (34), (36): Xaa is C or S
  MOD_RES (14), (15), (16), (17), (18): Xaa is A or G
  MOD_RES (19), (20), (21), (22): Xaa is A or G or is absent
VPTGQSNITMQIMXXXXXXXXXLGEMSLEEHSQXEXR

SEQ ID NO: 19459 - protein, 32 aa, Artificial Sequence
  GFR-binding peptide
  MOD_RES (14), (15), (16), (17), (18): Xaa is A or G
  MOD_RES (19), (20), (21), (22): Xaa is A or G or is absent
VPTEERSVKMAKVXXXXXXXXXKEVQVFLQHN

SEQ ID NO: 19460 - protein, 43 aa, Artificial Sequence
  GFR-binding peptide
  MOD_RES (5), (42): Xaa is C or S
RNVQXRPTQVQLSNITVQIMEIVRKKPIFIGEMSTLEDHLAXK

SEQ ID NO: 19461 - protein, 38 aa, Artificial Sequence
  GFR-binding peptide
  MOD_RES (3), (3): Xaa is C or S
VQXRPTQVQLRSVKVAKVEIVRKKPIFKEVQVTLEDHL

SEQ ID NO: 19462 - protein, 42 aa, Artificial Sequence
  GFR-binding peptide
  MOD_RES (5), (42): Xaa is C or S
  MOD_RES (21), (22), (23), (24), (25): Xaa is A or G
  MOD_RES (26), (27), (28), (29): Xaa is A or G or is absent
RNVQXRPTQVQLSNITVQIMXXXXXXXXXLGEMSTLEDHLAX

SEQ ID NO: 19463 - protein, 34 aa, Artificial Sequence
  GFR-binding peptide
PTQVQLSNITVQIMEIVRKKPIFLGEMSTLEDHL

SEQ ID NO: 19464 - protein, 38 aa, Artificial Sequence
  GFR-binding peptide
  MOD_RES (2), (2): Xaa is C or S
  MOD_RES (18), (19), (20), (21), (22): Xaa is A or G
  MOD_RES (23), (24), (25), (26): Xaa is A or G or is absent
KXQPSRVHHSNITVQIMXXXXXXXXXIGEMSRLEEHLE

SEQ ID NO: 19465 - protein, 35 aa, Artificial Sequence
  GFR-binding peptide
  MOD_RES (1), (35): Xaa is C or S
  MOD_RES (15), (16), (17), (18), (19): Xaa is A or G
  MOD_RES (20), (21), (22), (23): Xaa is A or G or is absent
XVPTGQSNITMQIMXXXXXXXXXIGEMSLEEHSQX

SEQ ID NO: 19466 - protein, 44 aa, Artificial Sequence
  GFR-binding peptide
  MOD_RES (4), (41), (43): Xaa is C or S
  MOD_RES (20), (21), (22), (23), (24): Xaa is A or G
  MOD_RES (25), (26), (27), (28): Xaa is A or G or is absent
NVQXRPTQVQLRSVKVAKVXXXXXXXXXKEVQVTLEDHLAXKXE

SEQ ID NO: 19467 - protein, 39 aa, Artificial Sequence
  GFR-binding peptide
  MOD_RES (5), (5): Xaa is C or S
  MOD_RES (21), (22), (23), (24), (25): Xaa is A or G
  MOD_RES (26), (27), (28), (29): Xaa is A or G or is absent
RNVQXRPTQVQLRSVKVAKVXXXXXXXXXKEVQVTLEDH

SEQ ID NO: 19468 - protein, 40 aa, Artificial Sequence
  GFR-binding peptide
  MOD_RES (7), (7): Xaa is C or S
  MOD_RES (21), (22), (23), (24), (25): Xaa is A or G
  MOD_RES (26), (27), (28), (29): Xaa is A or G or is absent
NDEGLEXVPTEERPVQMRKIXXXXXXXXXKKATVFLQHNK

SEQ ID NO: 19469 - protein, 34 aa, Artificial Sequence
  GFR-binding peptide
  MOD_RES (15), (16), (17), (18), (19): Xaa is A or G
  MOD_RES (20), (21), (22), (23): Xaa is A or G or is absent
PSRVHHRPVQVRKIXXXXXXXXXKKATVRLEEHL

SEQ ID NO: 19470 - protein, 39 aa, Artificial Sequence
  GFR-binding peptide
  MOD_RES (7), (7): Xaa is C or S
NDEGLEXVPTGQRSVKMAKVRIKPHQGQHKEVQVLEEHS

SEQ ID NO: 19471 - protein, 42 aa, Artificial Sequence
  GFR-binding peptide
  MOD_RES (4), (41): Xaa is C or S
  MOD_RES (20), (21), (22), (23), (24): Xaa is A or G
  MOD_RES (25), (26), (27), (28): Xaa is A or G or is absent
NVQXRPTQVQLRSVKVAKVXXXXXXXXXKEVQVTLEDHLAXK

SEQ ID NO: 19472 - protein, 32 aa, Artificial Sequence
  GFR-binding peptide
  MOD_RES (14), (15), (16), (17), (18): Xaa is A or G
  MOD_RES (19), (20), (21), (22): Xaa is A or G or is absent
SRVHHSNITVQIMXXXXXXXXXLGEMSRLEEH

SEQ ID NO: 19473 - protein, 40 aa, Artificial Sequence
  GFR-binding peptide
  MOD_RES (5), (39): Xaa is C or S
EGLEXVPTEERPVQMRKIRIKPHQGQHKKATVFLQHNKXE

SEQ ID NO: 19474 - protein, 39 aa, Artificial Sequence
  GFR-binding peptide
  MOD_RES (3), (37), (39): Xaa is C or S
LEXVPTEERPVQMRKIRIKPHQGQHKKATVFLQHNKXEX

SEQ ID NO: 19475 - protein, 37 aa, Artificial Sequence
  GFR-binding peptide
  MOD_RES (36), (36): Xaa is C or S
  MOD_RES (15), (16), (17), (18), (19): Xaa is A or G
  MOD_RES (20), (21), (22), (23): Xaa is A or G or is absent
PSRVHHRPVQVRKIXXXXXXXXXKKATVRLEEHLEXA

SEQ ID NO: 19476 - protein, 33 aa, Artificial Sequence
  GFR-binding peptide
  MOD_RES (14), (15), (16), (17), (18): Xaa is A or G
  MOD_RES (19), (20), (21), (22): Xaa is A or G or is absent
VPTGQSNITMQIMXXXXXXXXXLGEMSLEEHSQ

SEQ ID NO: 19477 - protein, 37 aa, Artificial Sequence
  GFR-binding peptide
  MOD_RES (5), (5): Xaa is C or S
  MOD_RES (19), (20), (21), (22), (23): Xaa is A or G
  MOD_RES (24), (25), (26), (27): Xaa is A or G or is absent
EGLEXVPTEESNITMQIMXXXXXXXXXLGEMSFLQHN

SEQ ID NO: 19478 - protein, 41 aa, Artificial Sequence
  GFR-binding peptide
  MOD_RES (1), (38), (40): Xaa is C or S
  MOD_RES (17), (18), (19), (20), (21): Xaa is A or G
  MOD_RES (22), (23), (24), (25): Xaa is A or G or is absent
XRPTQVQLRSVKVAKVXXXXXXXXXKEVQVTLEDHLAXKXE

SEQ ID NO: 19479 - protein, 38 aa, Artificial Sequence
  GFR-binding peptide
  MOD_RES (37), (37): Xaa is C or S
  MOD_RES (16), (17), (18), (19), (20): Xaa is A or G
  MOD_RES (21), (22), (23), (24): Xaa is A or G or is absent
RPTQVQLRSVKVAKVXXXXXXXXXKEVQVTLEDHLAXK

SEQ ID NO: 19480 - protein, 38 aa, Artificial Sequence
  GFR-binding peptide
  MOD_RES (36), (38): Xaa is C or S
  MOD_RES (15), (16), (17), (18), (19): Xaa is A or G
  MOD_RES (20), (21), (22), (23): Xaa is A or G or is absent
PTQVQLRSVKVAKVXXXXXXXXXKEVQVTLEDHLAXKX

SEQ ID NO: 19481 - protein, 41 aa, Artificial Sequence
  GFR-binding peptide
  MOD_RES (4), (41): Xaa is C or S
  MOD_RES (20), (21), (22), (23), (24): Xaa is A or G
  MOD_RES (25), (26), (27), (28): Xaa is A or G or is absent
NVQXRPTQVQLRPVQVRKIXXXXXXXXXKKATVTLEDHLAX

SEQ ID NO: 19482 - protein, 37 aa, Artificial Sequence
  GFR-binding peptide
  MOD_RES (4), (4): Xaa is C or S
  MOD_RES (18), (19), (20), (21), (22): Xaa is A or G
  MOD_RES (23), (24), (25), (26): Xaa is A or G or is absent
GLEXVPTEERPVQMRKIXXXXXXXXXKKATVFLQHNK

SEQ ID NO: 19483 - protein, 40 aa, Artificial Sequence
  GFR-binding peptide
  MOD_RES (5), (39): Xaa is C or S
EGLEXVPTEESNITMQIMRIKPHQGQHLGEMSFLQHNKXE

SEQ ID NO: 19484 - protein, 40 aa, Artificial Sequence
  GFR-binding peptide
  MOD_RES (4), (4): Xaa is C or S
  MOD_RES (20), (21), (22), (23), (24): Xaa is A or G
  MOD_RES (25), (26), (27), (28): Xaa is A or G or is absent
SVKXQPSRVHHSNITVQIMXXXXXXXXXIGEMSRLEEHLE

SEQ ID NO: 19485 - protein, 39 aa, Artificial Sequence
  GFR-binding peptide
  MOD_RES (3), (37), (39): Xaa is C or S
LEXVPTEERSVKMAKVRIKPHQGQHKEVQVFLQHNKXEX

SEQ ID NO: 19486 - protein, 38 aa, Artificial Sequence
  GFR-binding peptide
  MOD_RES (6), (6): Xaa is C or S
DEGLEXVPTEERPVQMRKIRIKPHQGQHKKATVFLQHN

SEQ ID NO: 19487 - protein, 39 aa, Artificial Sequence
  GFR-binding peptide
  MOD_RES (3), (3): Xaa is C or S
  MOD_RES (19), (20), (21), (22), (23): Xaa is A or G
  MOD_RES (24), (25), (26), (27): Xaa is A or G or is absent
VKXQPSRVHHSNITVQIMXXXXXXXXXLGEMSRLEEHLE

SEQ ID NO: 19488 - protein, 43 aa, Artificial Sequence
  GFR-binding peptide
  MOD_RES (6), (40), (42): Xaa is C or S
  MOD_RES (20), (21), (22), (23), (24): Xaa is A or G
  MOD_RES (25), (26), (27), (28): Xaa is A or G or is absent
DEGLEXVPTGQSNITMQIMXXXXXXXXXIGEMSLEEHSQXEXR

SEQ ID NO: 19489 - protein, 41 aa, Artificial Sequence
  GFR-binding peptide
  MOD_RES (6), (40): Xaa is C or S
DEGLEXVPTGQRPVQMRKIRIKPHQGQHKKATVLEEHSQXE

SEQ ID NO: 19490 - protein, 34 aa, Artificial Sequence
  GFR-binding peptide
  MOD_RES (16), (17), (18), (19), (20): Xaa is A or G
  MOD_RES (21), (22), (23), (24): Xaa is A or G or is absent
QPSRVHHRPVQVRKIXXXXXXXXXKKATVRLEEH

SEQ ID NO: 19491 - protein, 41 aa, Artificial Sequence
  GFR-binding peptide
  MOD_RES (1), (38), (40): Xaa is C or S
  MOD_RES (17), (18), (19), (20), (21): Xaa is A or G
  MOD_RES (22), (23), (24), (25): Xaa is A or G or is absent
XQPSRVHHRPVQVRKIXXXXXXXXXKKATVRLEEHLEXAXA

SEQ ID NO: 19492 - protein, 36 aa, Artificial Sequence
  GFR-binding peptide
  MOD_RES (34), (36): Xaa is C or S
VPTGQRSVKMAKVRIKPHQGQHKEVQVLEEHSQXEX

SEQ ID NO: 19493 - protein, 40 aa, Artificial Sequence
  GFR-binding peptide
  MOD_RES (2), (39): Xaa is C or S
  MOD_RES (18), (19), (20), (21), (22): Xaa is A or G
  MOD_RES (23), (24), (25), (26): Xaa is A or G or is absent
QXRPTQVQLSNITVQIMXXXXXXXXXIGEMSTLEDHLAXK

SEQ ID NO: 19494 - protein, 40 aa, Artificial Sequence
  GFR-binding peptide
  MOD_RES (3), (40): Xaa is C or S
  MOD_RES (19), (20), (21), (22), (23): Xaa is A or G
  MOD_RES (24), (25), (26), (27): Xaa is A or G or is absent
VKXQPSRVHHRPVQVRKIXXXXXXXXXKKATVRLEEHLEX

SEQ ID NO: 19495 - protein, 39 aa, Artificial Sequence
  GFR-binding peptide
  MOD_RES (4), (4): Xaa is C or S
  MOD_RES (20), (21), (22), (23), (24): Xaa is A or G
  MOD_RES (25), (26), (27), (28): Xaa is A or G or is absent
SVKXQPSRVHHRPVQVRKIXXXXXXXXXKKATVRLEEHL

SEQ ID NO: 19496 - protein, 32 aa, Artificial Sequence
  GFR-binding peptide
  MOD_RES (14), (15), (16), (17), (18): Xaa is A or G
  MOD_RES (19), (20), (21), (22): Xaa is A or G or is absent
TQVQLRSVKVAKVXXXXXXXXXKEVQVTLEDH

SEQ ID NO: 19497 - protein, 37 aa, Artificial Sequence
  GFR-binding peptide
  MOD_RES (2), (2): Xaa is C or S
QXRPTQVQLSNITVQIMEIVRKKPIFIGEMSTLEDHL

SEQ ID NO: 19498 - protein, 40 aa, Artificial Sequence
  GFR-binding peptide
  MOD_RES (4), (4): Xaa is C or S
  MOD_RES (20), (21), (22), (23), (24): Xaa is A or G
  MOD_RES (25), (26), (27), (28): Xaa is A or G or is absent
NVQXRPTQVQLRSVKVAKVXXXXXXXXXKEVQVTLEDHLA

SEQ ID NO: 19499 - protein, 40 aa, Artificial Sequence
  GFR-binding peptide
  MOD_RES (4), (38), (40): Xaa is C or S
  MOD_RES (18), (19), (20), (21), (22): Xaa is A or G
  MOD_RES (23), (24), (25), (26): Xaa is A or G or is absent
GLEXVPTGQRSVKMAKVXXXXXXXXXKEVQVLEEHSQXEX

SEQ ID NO: 19500 - protein, 38 aa, Artificial Sequence
  GFR-binding peptide
  MOD_RES (2), (2): Xaa is C or S
QXRPTQVQLSNITVQIMEIVRKKPIFLGEMSTLEDHLA

SEQ ID NO: 19501 - protein, 42 aa, Artificial Sequence
  GFR-binding peptide
  MOD_RES (4), (41): Xaa is C or S
NVQXRPTQVQLRSVKVAKVEIVRKKPIFKEVQVTLEDHLAXK

SEQ ID NO: 19502 - protein, 40 aa, Artificial Sequence
  GFR-binding peptide
  MOD_RES (5), (39): Xaa is C or S
EGLEXVPTEERSVKMAKVRIKPHQGQHKEVQVFLQHNKXE

SEQ ID NO: 19503 - protein, 36 aa, Artificial Sequence
  GFR-binding peptide
  MOD_RES (36), (36): Xaa is C or S
PSRVHHSNITVQIMEYVRKKPKLLGEMSRLEEHLEX

SEQ ID NO: 19504 - protein, 42 aa, Artificial Sequence
  GFR-binding peptide
  MOD_RES (2), (39), (41): Xaa is C or S
QXRPTQVQLRSVKVAKVEIVRKKPIFKEVQVTLEDHLAXKXE

SEQ ID NO: 19505 - protein, 40 aa, Artificial Sequence
  GFR-binding peptide
  MOD_RES (6), (40): Xaa is C or S
  MOD_RES (20), (21), (22), (23), (24): Xaa is A or G
  MOD_RES (25), (26), (27), (28): Xaa is A or G or is absent
DEGLEXVPTGQSNITMQIMXXXXXXXXXIGEMSLEEHSQX

SEQ ID NO: 19506 - protein, 34 aa, Artificial Sequence
  GFR-binding peptide
  MOD_RES (1), (1): Xaa is C or S
XVPTGQRPVQMRKIRIKPHQGQHKKATVLEEHSQ

SEQ ID NO: 19507 - protein, 39 aa, Artificial Sequence
  GFR-binding peptide
  MOD_RES (36), (38): Xaa is C or S
  MOD_RES (15), (16), (17), (18), (19): Xaa is A or G
  MOD_RES (20), (21), (22), (23): Xaa is A or G or is absent
PSRVHHRPVQVRKIXXXXXXXXXKKATVRLEEHLEXAXA

SEQ ID NO: 19508 - protein, 36 aa, Artificial Sequence
  GFR-binding peptide
  MOD_RES (16), (17), (18), (19), (20): Xaa is A or G
  MOD_RES (21), (22), (23), (24): Xaa is A or G or is absent
QPSRVHHSNITVQIMXXXXXXXXXLGEMSRLEEHLE

SEQ ID NO: 19509 - protein, 39 aa, Artificial Sequence
  GFR-binding peptide
  MOD_RES (5), (39): Xaa is C or S
  MOD_RES (19), (20), (21), (22), (23): Xaa is A or G
  MOD_RES (24), (25), (26), (27): Xaa is A or G or is absent
EGLEXVPTEESNITMQIMXXXXXXXXXLGEMSFLQHNKX

SEQ ID NO: 19510 - protein, 44 aa, Artificial Sequence
  GFR-binding peptide
  MOD_RES (5), (42), (44): Xaa is C or S
  MOD_RES (21), (22), (23), (24), (25): Xaa is A or G
  MOD_RES (26), (27), (28), (29): Xaa is A or G or is absent
RNVQXRPTQVQLSNITVQIMXXXXXXXXXIGEMSTLEDHLAXKX

SEQ ID NO: 19511 - protein, 44 aa, Artificial Sequence
  GFR-binding peptide
  MOD_RES (5), (42), (44): Xaa is C or S
SSVKXQPSRVHHRPVQVRKIEYVRKKPKLKKATVRLEEHLEXAX

SEQ ID NO: 19512 - protein, 38 aa, Artificial Sequence
  GFR-binding peptide
  MOD_RES (35), (37): Xaa is C or S
  MOD_RES (14), (15), (16), (17), (18): Xaa is A or G
  MOD_RES (19), (20), (21), (22): Xaa is A or G or is absent
TQVQLRPVQVRKIXXXXXXXXXKKATVTLEDHLAXKXE

SEQ ID NO: 19513 - protein, 37 aa, Artificial Sequence
  GFR-binding peptide
  MOD_RES (4), (4): Xaa is C or S
  MOD_RES (18), (19), (20), (21), (22): Xaa is A or G
  MOD_RES (23), (24), (25), (26): Xaa is A or G or is absent
GLEXVPTGQSNITMQIMXXXXXXXXXIGEMSLEEHSQ

SEQ ID NO: 19514 - protein, 38 aa, Artificial Sequence
  GFR-binding peptide
  MOD_RES (36), (38): Xaa is C or S
  MOD_RES (15), (16), (17), (18), (19): Xaa is A or G
  MOD_RES (20), (21), (22), (23): Xaa is A or G or is absent
PTQVQLRPVQVRKIXXXXXXXXXKKATVTLEDHLAXKX

SEQ ID NO: 19515 - protein, 41 aa, Artificial Sequence
  GFR-binding peptide
  MOD_RES (5), (5): Xaa is C or S
SSVKXQPSRVHHSNITVQIMEYVRKKPKLIGEMSRLEEHLE

SEQ ID NO: 19516 - protein, 34 aa, Artificial Sequence
  GFR-binding peptide
  MOD_RES (2), (2): Xaa is C or S
EXVPTEESNITMQIMRIKPHQGQHLGEMSFLQHN

SEQ ID NO: 19517 - protein, 37 aa, Artificial Sequence
  GFR-binding peptide
  MOD_RES (2), (2): Xaa is C or S
  MOD_RES (18), (19), (20), (21), (22): Xaa is A or G
  MOD_RES (23), (24), (25), (26): Xaa is A or G or is absent
KXQPSRVHHSNITVQIMXXXXXXXXXIGEMSRLEEHL

SEQ ID NO: 19518 - protein, 39 aa, Artificial Sequence
  GFR-binding peptide
  MOD_RES (5), (5): Xaa is C or S
SSVKXQPSRVHHRPVQVRKIEYVRKKPKLKKATVRLEEH

SEQ ID NO: 19519 - protein, 42 aa, Artificial Sequence
  GFR-binding peptide
  MOD_RES (5), (42): Xaa is C or S
RNVQXRPTQVQLSNITVQIMEIVRKKPIFLGEMSTLEDHLAX

SEQ ID NO: 19520 - protein, 36 aa, Artificial Sequence
  GFR-binding peptide
  MOD_RES (34), (36): Xaa is C or S
  MOD_RES (14), (15), (16), (17), (18): Xaa is A or G
  MOD_RES (19), (20), (21), (22): Xaa is A or G or is absent
VPTEERPVQMRKIXXXXXXXXXKKATVFLQHNKXEX

SEQ ID NO: 19521 - protein, 36 aa, Artificial Sequence
  GFR-binding peptide
  MOD_RES (3), (3): Xaa is C or S
  MOD_RES (17), (18), (19), (20), (21): Xaa is A or G
  MOD_RES (22), (23), (24), (25): Xaa is A or G or is absent
LEXVPTEESNITMQIMXXXXXXXXXIGEMSFLQHNK

SEQ ID NO: 19522 - protein, 38 aa, Artificial Sequence
  GFR-binding peptide
  MOD_RES (5), (5): Xaa is C or S
  MOD_RES (19), (20), (21), (22), (23): Xaa is A or G
  MOD_RES (24), (25), (26), (27): Xaa is A or G or is absent
EGLEXVPTGQRSVKMAKVXXXXXXXXXKEVQVLEEHSQ

SEQ ID NO: 19523 - protein, 39 aa, Artificial Sequence
  GFR-binding peptide
  MOD_RES (2), (39): Xaa is C or S
KXQPSRVHHSNITVQIMEYVRKKPKLLGEMSRLEEHLEX

SEQ ID NO: 19524 - protein, 43 aa, Artificial Sequence
  GFR-binding peptide
  MOD_RES (4), (41), (43): Xaa is C or S
SVKXQPSRVHHRPVQVRKIEYVRKKPKLKKATVRLEEHLEXAX

SEQ ID NO: 19525 - protein, 41 aa, Artificial Sequence
  GFR-binding peptide
  MOD_RES (2), (39), (41): Xaa is C or S
  MOD_RES (18), (19), (20), (21), (22): Xaa is A or G
  MOD_RES (23), (24), (25), (26): Xaa is A or G or is absent
KXQPSRVHHRPVQVRKIXXXXXXXXXKKATVRLEEHLEXAX

SEQ ID NO: 19526 - protein, 34 aa, Artificial Sequence
  GFR-binding peptide
  MOD_RES (34), (34): Xaa is C or S
VPTGQRPVQMRKIRIKPHQGQHKKATVLEEHSQX

SEQ ID NO: 19527 - protein, 41 aa, Artificial Sequence
  GFR-binding peptide
  MOD_RES (6), (40): Xaa is C or S
  MOD_RES (20), (21), (22), (23), (24): Xaa is A or G
  MOD_RES (25), (26), (27), (28): Xaa is A or G or is absent
DEGLEXVPTEERSVKMAKVXXXXXXXXXKEVQVFLQHNKXE

SEQ ID NO: 19528 - protein, 37 aa, Artificial Sequence
  GFR-binding peptide
  MOD_RES (3), (3): Xaa is C or S
  MOD_RES (19), (20), (21), (22), (23): Xaa is A or G
  MOD_RES (24), (25), (26), (27): Xaa is A or G or is absent
VKXQPSRVHHRSVKVAKVXXXXXXXXXKEVQVRLEEH

SEQ ID NO: 19529 - protein, 43 aa, Artificial Sequence
  GFR-binding peptide
  MOD_RES (7), (41), (43): Xaa is C or S
  MOD_RES (21), (22), (23), (24), (25): Xaa is A or G
  MOD_RES (26), (27), (28), (29): Xaa is A or G or is absent
NDEGLEXVPTGQSNITMQIMXXXXXXXXXIGEMSLEEHSQXEX

SEQ ID NO: 19530 - protein, 41 aa, Artificial Sequence
  GFR-binding peptide
  MOD_RES (5), (39), (41): Xaa is C or S
EGLEXVPTEERSVKMAKVRIKPHQGQHKEVQVFLQHNKXEX

SEQ ID NO: 19531 - protein, 39 aa, Artificial Sequence
  GFR-binding peptide
  MOD_RES (6), (6): Xaa is C or S
DEGLEXVPTGQRPVQMRKIRIKPHQGQHKKATVLEEHSQ

SEQ ID NO: 19532 - protein, 39 aa, Artificial Sequence
  GFR-binding peptide
  MOD_RES (6), (6): Xaa is C or S
DEGLEXVPTEESNITMQIMRIKPHQGQHLGEMSFLQHNK

SEQ ID NO: 19533 - protein, 37 aa, Artificial Sequence
  GFR-binding peptide
  MOD_RES (3), (3): Xaa is C or S
  MOD_RES (19), (20), (21), (22), (23): Xaa is A or G
  MOD_RES (24), (25), (26), (27): Xaa is A or G or is absent
VKXQPSRVHHRPVQVRKIXXXXXXXXXKKATVRLEEH

SEQ ID NO: 19534 - protein, 39 aa, Artificial Sequence
  GFR-binding peptide
  MOD_RES (1), (38): Xaa is C or S
  MOD_RES (17), (18), (19), (20), (21): Xaa is A or G
  MOD_RES (22), (23), (24), (25): Xaa is A or G or is absent
XQPSRVHHRPVQVRKIXXXXXXXXXKKATVRLEEHLEXA

SEQ ID NO: 19535 - protein, 40 aa, Artificial Sequence
  GFR-binding peptide
  MOD_RES (6), (40): Xaa is C or S
  MOD_RES (20), (21), (22), (23), (24): Xaa is A or G
  MOD_RES (25), (26), (27), (28): Xaa is A or G or is absent
DEGLEXVPTEERSVKMAKVXXXXXXXXXKEVQVFLQHNKX

SEQ ID NO: 19536 - protein, 43 aa, Artificial Sequence
  GFR-binding peptide
  MOD_RES (3), (40), (42): Xaa is C or S
  MOD_RES (19), (20), (21), (22), (23): Xaa is A or G
  MOD_RES (24), (25), (26), (27): Xaa is A or G or is absent
VQXRPTQVQLRPVQVRKIXXXXXXXXXKKATVTLEDHLAXKXE

SEQ ID NO: 19537 - protein, 37 aa, Artificial Sequence
  GFR-binding peptide
  MOD_RES (2), (2): Xaa is C or S
KXQPSRVHHSNITVQIMEYVRKKPKLLGEMSRLEEHL

SEQ ID NO: 19538 - protein, 41 aa, Artificial Sequence
  GFR-binding peptide
  MOD_RES (7), (41): Xaa is C or S
NDEGLEXVPTGQRSVKMAKVRIKPHQGQHKEVQVLEEHSQX

SEQ ID NO: 19539 - protein, 44 aa, Artificial Sequence
  GFR-binding peptide
  MOD_RES (5), (42), (44): Xaa is C or S
RNVQXRPTQVQLRSVKVAKVEIVRKKPIFKEVQVTLEDHLAXKX

SEQ ID NO: 19540 - protein, 42 aa, Artificial Sequence
  GFR-binding peptide
  MOD_RES (5), (42): Xaa is C or S
  MOD_RES (21), (22), (23), (24), (25): Xaa is A or G
  MOD_RES (26), (27), (28), (29): Xaa is A or G or is absent
RNVQXRPTQVQLRSVKVAKVXXXXXXXXXKEVQVTLEDHLAX

SEQ ID NO: 19541 - protein, 38 aa, Artificial Sequence
  GFR-binding peptide
  MOD_RES (3), (3): Xaa is C or S
VKXQPSRVHHSNITVQIMEYVRKKPKLIGEMSRLEEHL

SEQ ID NO: 19542 - protein, 38 aa, Artificial Sequence
  GFR-binding peptide
  MOD_RES (35), (37): Xaa is C or S
  MOD_RES (14), (15), (16), (17), (18): Xaa is A or G
  MOD_RES (19), (20), (21), (22): Xaa is A or G or is absent
SRVHHRPVQVRKIXXXXXXXXXKKATVRLEEHLEXAXA

SEQ ID NO: 19543 - protein, 40 aa, Artificial Sequence
  GFR-binding peptide
  MOD_RES (3), (40): Xaa is C or S
  MOD_RES (19), (20), (21), (22), (23): Xaa is A or G
  MOD_RES (24), (25), (26), (27): Xaa is A or G or is absent
VKXQPSRVHHSNITVQIMXXXXXXXXXLGEMSRLEEHLEX

SEQ ID NO: 19544 - protein, 34 aa, Artificial Sequence
  GFR-binding peptide
SRVHHSNITVQIMEYVRKKPKLIGEMSRLEEHLE

SEQ ID NO: 19545 - protein, 35 aa, Artificial Sequence
  GFR-binding peptide
  MOD_RES (2), (2): Xaa is C or S
  MOD_RES (16), (17), (18), (19), (20): Xaa is A or G
  MOD_RES (21), (22), (23), (24): Xaa is A or G or is absent
EXVPTGQRSVKMAKVXXXXXXXXXKEVQVLEEHSQ

SEQ ID NO: 19546 - protein, 37 aa, Artificial Sequence
  GFR-binding peptide
  MOD_RES (34), (36): Xaa is C or S
VPTEERPVQMRKIRIKPHQGQHKKATVFLQHNKXEXR

SEQ ID NO: 19547 - protein, 37 aa, Artificial Sequence
  GFR-binding peptide
  MOD_RES (34), (36): Xaa is C or S
  MOD_RES (14), (15), (16), (17), (18): Xaa is A or G
  MOD_RES (19), (20), (21), (22): Xaa is A or G or is absent
VPTEERSVKMAKVXXXXXXXXXKEVQVFLQHNKXEXR

SEQ ID NO: 19548 - protein, 35 aa, Artificial Sequence
  GFR-binding peptide
  MOD_RES (1), (1): Xaa is C or S
  MOD_RES (17), (18), (19), (20), (21): Xaa is A or G
  MOD_RES (22), (23), (24), (25): Xaa is A or G or is absent
XQPSRVHHRPVQVRKIXXXXXXXXXKKATVRLEEH

SEQ ID NO: 19549 - protein, 36 aa, Artificial Sequence
  GFR-binding peptide
  MOD_RES (35), (35): Xaa is C or S
  MOD_RES (14), (15), (16), (17), (18): Xaa is A or G
  MOD_RES (19), (20), (21), (22): Xaa is A or G or is absent
TQVQLSNITVQIMXXXXXXXXXIGEMSTLEDHLAXK

SEQ ID NO: 19550 - protein, 38 aa, Artificial Sequence
  GFR-binding peptide
  MOD_RES (3), (3): Xaa is C or S
  MOD_RES (19), (20), (21), (22), (23): Xaa is A or G
  MOD_RES (24), (25), (26), (27): Xaa is A or G or is absent
VKXQPSRVHHRSVKVAKVXXXXXXXXXKEVQVRLEEHL

SEQ ID NO: 19551 - protein, 34 aa, Artificial Sequence
  GFR-binding peptide
  MOD_RES (15), (16), (17), (18), (19): Xaa is A or G
  MOD_RES (20), (21), (22), (23): Xaa is A or G or is absent
PTQVQLRPVQVRKIXXXXXXXXXKKATVTLEDHL

SEQ ID NO: 19552 - protein, 35 aa, Artificial Sequence
  GFR-binding peptide
  MOD_RES (1), (1): Xaa is C or S
  MOD_RES (17), (18), (19), (20), (21): Xaa is A or G
  MOD_RES (22), (23), (24), (25): Xaa is A or G or is absent
XQPSRVHHRSVKVAKVXXXXXXXXXKEVQVRLEEH

SEQ ID NO: 19553 - protein, 33 aa, Artificial Sequence
  GFR-binding peptide
PTQVQLRSVKVAKVEIVRKKPIFKEVQVTLEDH

SEQ ID NO: 19554 - protein, 42 aa, Artificial Sequence
  GFR-binding peptide
  MOD_RES (3), (40), (42): Xaa is C or S
  MOD_RES (19), (20), (21), (22), (23): Xaa is A or G
  MOD_RES (24), (25), (26), (27): Xaa is A or G or is absent
VQXRPTQVQLRPVQVRKIXXXXXXXXXKKATVTLEDHLAXKX

SEQ ID NO: 19555 - protein, 38 aa, Artificial Sequence
  GFR-binding peptide
  MOD_RES (1), (38): Xaa is C or S
  MOD_RES (17), (18), (19), (20), (21): Xaa is A or G
  MOD_RES (22), (23), (24), (25): Xaa is A or G or is absent
XRPTQVQLRSVKVAKVXXXXXXXXXKEVQVTLEDHLAX

SEQ ID NO: 19556 - protein, 36 aa, Artificial Sequence
  GFR-binding peptide
  MOD_RES (4), (4): Xaa is C or S
  MOD_RES (18), (19), (20), (21), (22): Xaa is A or G
  MOD_RES (23), (24), (25), (26): Xaa is A or G or is absent
GLEXVPTEERPVQMRKIXXXXXXXXXKKATVFLQHN

SEQ ID NO: 19557 - protein, 40 aa, Artificial Sequence
  GFR-binding peptide
  MOD_RES (37), (39): Xaa is C or S
RPTQVQLSNITVQIMEIVRKKPIFIGEMSTLEDHLAXKXE

SEQ ID NO: 19558 - protein, 39 aa, Artificial Sequence
  GFR-binding peptide
  MOD_RES (2), (36), (38): Xaa is C or S
  MOD_RES (16), (17), (18), (19), (20): Xaa is A or G
  MOD_RES (21), (22), (23), (24): Xaa is A or G or is absent
EXVPTEESNITMQIMXXXXXXXXXIGEMSFLQHNKXEXR

SEQ ID NO: 19559 - protein, 42 aa, Artificial Sequence
  GFR-binding peptide
  MOD_RES (2), (39), (41): Xaa is C or S
  MOD_RES (18), (19), (20), (21), (22): Xaa is A or G
  MOD_RES (23), (24), (25), (26): Xaa is A or G or is absent
KXQPSRVHHSNITVQIMXXXXXXXXXLGEMSRLEEHLEXAXA

SEQ ID NO: 19560 - protein, 45 aa, Artificial Sequence
  GFR-binding peptide
  MOD_RES (5), (42), (44): Xaa is C or S
SSVKXQPSRVHHSNITVQIMEYVRKKPKLLGEMSRLEEHLEXAXA

SEQ ID NO: 19561 - protein, 34 aa, Artificial Sequence
  GFR-binding peptide
  MOD_RES (34), (34): Xaa is C or S
VPTGQRSVKMAKVRIKPHQGQHKEVQVLEEHSQX

SEQ ID NO: 19562 - protein, 41 aa, Artificial Sequence
  GFR-binding peptide
  MOD_RES (4), (38), (40): Xaa is C or S
  MOD_RES (18), (19), (20), (21), (22): Xaa is A or G
  MOD_RES (23), (24), (25), (26): Xaa is A or G or is absent
GLEXVPTEERSVKMAKVXXXXXXXXXKEVQVFLQHNKXEXR

SEQ ID NO: 19563 - protein, 38 aa, Artificial Sequence
  GFR-binding peptide
  MOD_RES (3), (37): Xaa is C or S
LEXVPTGQSNITMQIMRIKPHQGQHIGEMSLEEHSQXE

SEQ ID NO: 19564 - protein, 38 aa, Artificial Sequence
  GFR-binding peptide
  MOD_RES (1), (35), (37): Xaa is C or S
XVPTEERSVKMAKVRIKPHQGQHKEVQVFLQHNKXEXR

SEQ ID NO: 19565 - protein, 35 aa, Artificial Sequence
  GFR-binding peptide
  MOD_RES (35), (35): Xaa is C or S
  MOD_RES (14), (15), (16), (17), (18): Xaa is A or G
  MOD_RES (19), (20), (21), (22): Xaa is A or G or is absent
SRVHHRSVKVAKVXXXXXXXXXKEVQVRLEEHLEX

SEQ ID NO: 19566 - protein, 40 aa, Artificial Sequence
  GFR-binding peptide
  MOD_RES (37), (39): Xaa is C or S
  MOD_RES (16), (17), (18), (19), (20): Xaa is A or G
  MOD_RES (21), (22), (23), (24): Xaa is A or G or is absent
QPSRVHHSNITVQIMXXXXXXXXXIGEMSRLEEHLEXAXA

SEQ ID NO: 19567 - protein, 35 aa, Artificial Sequence
  GFR-binding peptide
  MOD_RES (1), (1): Xaa is C or S
XRPTQVQLSNITVQIMEIVRKKPIFLGEMSTLEDH

SEQ ID NO: 19568 - protein, 40 aa, Artificial Sequence
  GFR-binding peptide
  MOD_RES (4), (38), (40): Xaa is C or S
GLEXVPTEESNITMQIMRIKPHQGQHLGEMSFLQHNKXEX

SEQ ID NO: 19569 - protein, 38 aa, Artificial Sequence
  GFR-binding peptide
  MOD_RES (3), (37): Xaa is C or S
LEXVPTEERSVKMAKVRIKPHQGQHKEVQVFLQHNKXE

SEQ ID NO: 19570 - protein, 43 aa, Artificial Sequence
  GFR-binding peptide
  MOD_RES (7), (41), (43): Xaa is C or S
  MOD_RES (21), (22), (23), (24), (25): Xaa is A or G
  MOD_RES (26), (27), (28), (29): Xaa is A or G or is absent
NDEGLEXVPTEERPVQMRKIXXXXXXXXXKKATVFLQHNKXEX

SEQ ID NO: 19571 - protein, 33 aa, Artificial Sequence
  GFR-binding peptide
  MOD_RES (1), (1): Xaa is C or S
  MOD_RES (15), (16), (17), (18), (19): Xaa is A or G
  MOD_RES (20), (21), (22), (23): Xaa is A or G or is absent
XVPTGQSNITMQIMXXXXXXXXXIGEMSLEEHS

SEQ ID NO: 19572 - protein, 33 aa, Artificial Sequence
  GFR-binding peptide
PTQVQLSNITVQIMEIVRKKPIFLGEMSTLEDH

SEQ ID NO: 19573 - protein, 39 aa, Artificial Sequence
  GFR-binding peptide
  MOD_RES (3), (3): Xaa is C or S
  MOD_RES (19), (20), (21), (22), (23): Xaa is A or G
  MOD_RES (24), (25), (26), (27): Xaa is A or G or is absent
VQXRPTQVQLRSVKVAKVXXXXXXXXXKEVQVTLEDHLA

SEQ ID NO: 19574 - protein, 38 aa, Artificial Sequence
  GFR-binding peptide
  MOD_RES (3), (3): Xaa is C or S
  MOD_RES (19), (20), (21), (22), (23): Xaa is A or G
  MOD_RES (24), (25), (26), (27): Xaa is A or G or is absent
VQXRPTQVQLSNITVQIMXXXXXXXXXLGEMSTLEDHL

SEQ ID NO: 19575 - protein, 39 aa, Artificial Sequence
  GFR-binding peptide
  MOD_RES (2), (36), (38): Xaa is C or S
EXVPTEERSVKMAKVRIKPHQGQHKEVQVFLQHNKXEXR

SEQ ID NO: 19576 - protein, 40 aa, Artificial Sequence
  GFR-binding peptide
  MOD_RES (2), (39): Xaa is C or S
KXQPSRVHHSNITVQIMEYVRKKPKLIGEMSRLEEHLEXA

SEQ ID NO: 19577 - protein, 36 aa, Artificial Sequence
  GFR-binding peptide
  MOD_RES (34), (36): Xaa is C or S
VPTGQRPVQMRKIRIKPHQGQHKKATVLEEHSQXEX

SEQ ID NO: 19578 - protein, 35 aa, Artificial Sequence
  GFR-binding peptide
PSRVHHSNITVQIMEYVRKKPKLLGEMSRLEEHLE

SEQ ID NO: 19579 - protein, 38 aa, Artificial Sequence
  GFR-binding peptide
  MOD_RES (4), (4): Xaa is C or S
  MOD_RES (20), (21), (22), (23), (24): Xaa is A or G
  MOD_RES (25), (26), (27), (28): Xaa is A or G or is absent
NVQXRPTQVQLRSVKVAKVXXXXXXXXXKEVQVTLEDH

SEQ ID NO: 19580 - protein, 36 aa, Artificial Sequence
  GFR-binding peptide
  MOD_RES (2), (2): Xaa is C or S
  MOD_RES (18), (19), (20), (21), (22): Xaa is A or G
  MOD_RES (23), (24), (25), (26): Xaa is A or G or is absent
QXRPTQVQLSNITVQIMXXXXXXXXXLGEMSTLEDH

SEQ ID NO: 19581 - protein, 39 aa, Artificial Sequence
  GFR-binding peptide
  MOD_RES (3), (3): Xaa is C or S
  MOD_RES (19), (20), (21), (22), (23): Xaa is A or G
  MOD_RES (24), (25), (26), (27): Xaa is A or G or is absent
VKXQPSRVHHRPVQVRKIXXXXXXXXXKKATVRLEEHLE

SEQ ID NO: 19582 - protein, 39 aa, Artificial Sequence
  GFR-binding peptide
  MOD_RES (5), (39): Xaa is C or S
  MOD_RES (19), (20), (21), (22), (23): Xaa is A or G
  MOD_RES (24), (25), (26), (27): Xaa is A or G or is absent
EGLEXVPTGQRPVQMRKIXXXXXXXXXKKATVLEEHSQX

SEQ ID NO: 19583 - protein, 44 aa, Artificial Sequence
  GFR-binding peptide
  MOD_RES (7), (41), (43): Xaa is C or S
  MOD_RES (21), (22), (23), (24), (25): Xaa is A or G
  MOD_RES (26), (27), (28), (29): Xaa is A or G or is absent
NDEGLEXVPTGQRSVKMAKVXXXXXXXXXKEVQVLEEHSQXEXR

SEQ ID NO: 19584 - protein, 42 aa, Artificial Sequence
  GFR-binding peptide
  MOD_RES (7), (41): Xaa is C or S
  MOD_RES (21), (22), (23), (24), (25): Xaa is A or G
  MOD_RES (26), (27), (28), (29): Xaa is A or G or is absent
NDEGLEXVPTGQRSVKMAKVXXXXXXXXXKEVQVLEEHSQXE

SEQ ID NO: 19585 - protein, 39 aa, Artificial Sequence
  GFR-binding peptide
  MOD_RES (2), (39): Xaa is C or S
  MOD_RES (18), (19), (20), (21), (22): Xaa is A or G
  MOD_RES (23), (24), (25), (26): Xaa is A or G or is absent
QXRPTQVQLRPVQVRKIXXXXXXXXXKKATVTLEDHLAX

SEQ ID NO: 19586 - protein, 32 aa, Artificial Sequence
  GFR-binding peptide
VPTGQRPVQMRKIRIKPHQGQHKKATVLEEHS

SEQ ID NO: 19587 - protein, 44 aa, Artificial Sequence
  GFR-binding peptide
  MOD_RES (4), (41), (43): Xaa is C or S
SVKXQPSRVHHRPVQVRKIEYVRKKPKLKKATVRLEEHLEXAXA

SEQ ID NO: 19588 - protein, 36 aa, Artificial Sequence
  GFR-binding peptide
  MOD_RES (2), (36): Xaa is C or S
  MOD_RES (16), (17), (18), (19), (20): Xaa is A or G
  MOD_RES (21), (22), (23), (24): Xaa is A or G or is absent
EXVPTEESNITMQIMXXXXXXXXXLGEMSFLQHNKX

SEQ ID NO: 19589 - protein, 33 aa, Artificial Sequence
  GFR-binding peptide
  MOD_RES (14), (15), (16), (17), (18): Xaa is A or G
  MOD_RES (19), (20), (21), (22): Xaa is A or G or is absent
TQVQLRPVQVRKIXXXXXXXXXKKATVTLEDHL

SEQ ID NO: 19590 - protein, 38 aa, Artificial Sequence
  GFR-binding peptide
  MOD_RES (2), (36), (38): Xaa is C or S
  MOD_RES (16), (17), (18), (19), (20): Xaa is A or G
  MOD_RES (21), (22), (23), (24): Xaa is A or G or is absent
EXVPTEESNITMQIMXXXXXXXXXLGEMSFLQHNKXEX

SEQ ID NO: 19591 - protein, 36 aa, Artificial Sequence
  GFR-binding peptide
  MOD_RES (16), (17), (18), (19), (20): Xaa is A or G
  MOD_RES (21), (22), (23), (24): Xaa is A or G or is absent
QPSRVHHRPVQVRKIXXXXXXXXXKKATVRLEEHLE

SEQ ID NO: 19592 - protein, 33 aa, Artificial Sequence
  GFR-binding peptide
  MOD_RES (15), (16), (17), (18), (19): Xaa is A or G
  MOD_RES (20), (21), (22), (23): Xaa is A or G or is absent
PTQVQLSNITVQIMXXXXXXXXXLGEMSTLEDH

SEQ ID NO: 19593 - protein, 38 aa, Artificial Sequence
  GFR-binding peptide
  MOD_RES (1), (38): Xaa is C or S
XRPTQVQLSNITVQIMEIVRKKPIFLGEMSTLEDHLAX

SEQ ID NO: 19594 - protein, 42 aa, Artificial Sequence
  GFR-binding peptide
  MOD_RES (3), (40), (42): Xaa is C or S
VQXRPTQVQLSNITVQIMEIVRKKPIFLGEMSTLEDHLAXKX

SEQ ID NO: 19595 - protein, 40 aa, Artificial Sequence
  GFR-binding peptide
  MOD_RES (6), (40): Xaa is C or S
DEGLEXVPTEESNITMQIMRIKPHQGQHLGEMSFLQHNKX

SEQ ID NO: 19596 - protein, 37 aa, Artificial Sequence
  GFR-binding peptide
  MOD_RES (2), (36): Xaa is C or S
  MOD_RES (16), (17), (18), (19), (20): Xaa is A or G
  MOD_RES (21), (22), (23), (24): Xaa is A or G or is absent
EXVPTGQRSVKMAKVXXXXXXXXXKEVQVLEEHSQXE

SEQ ID NO: 19597 - protein, 42 aa, Artificial Sequence
  GFR-binding peptide
  MOD_RES (2), (39), (41): Xaa is C or S
  MOD_RES (18), (19), (20), (21), (22): Xaa is A or G
  MOD_RES (23), (24), (25), (26): Xaa is A or G or is absent
KXQPSRVHHRPVQVRKIXXXXXXXXXKKATVRLEEHLEXAXA

SEQ ID NO: 19598 - protein, 38 aa, Artificial Sequence
  GFR-binding peptide
  MOD_RES (4), (4): Xaa is C or S
  MOD_RES (20), (21), (22), (23), (24): Xaa is A or G
  MOD_RES (25), (26), (27), (28): Xaa is A or G or is absent
NVQXRPTQVQLRPVQVRKIXXXXXXXXXKKATVTLEDH

SEQ ID NO: 19599 - protein, 37 aa, Artificial Sequence
  GFR-binding peptide
  MOD_RES (3), (37): Xaa is C or S
LEXVPTEERSVKMAKVRIKPHQGQHKEVQVFLQHNKX

SEQ ID NO: 19600 - protein, 40 aa, Artificial Sequence
  GFR-binding peptide
  MOD_RES (3), (37), (39): Xaa is C or S
  MOD_RES (17), (18), (19), (20), (21): Xaa is A or G
  MOD_RES (22), (23), (24), (25): Xaa is A or G or is absent
LEXVPTGQRSVKMAKVXXXXXXXXXKEVQVLEEHSQXEXR

SEQ ID NO: 19601 - protein, 37 aa, Artificial Sequence
  GFR-binding peptide
  MOD_RES (5), (5): Xaa is C or S
  MOD_RES (19), (20), (21), (22), (23): Xaa is A or G
  MOD_RES (24), (25), (26), (27): Xaa is A or G or is absent
EGLEXVPTEERSVKMAKVXXXXXXXXXKEVQVFLQHN

SEQ ID NO: 19602 - protein, 41 aa, Artificial Sequence
  GFR-binding peptide
  MOD_RES (4), (41): Xaa is C or S
NVQXRPTQVQLRSVKVAKVEIVRKKPIFKEVQVTLEDHLAX

SEQ ID NO: 19603 - protein, 39 aa, Artificial Sequence
  GFR-binding peptide
  MOD_RES (7), (7): Xaa is C or S
  MOD_RES (21), (22), (23), (24), (25): Xaa is A or G
  MOD_RES (26), (27), (28), (29): Xaa is A or G or is absent
NDEGLEXVPTEERPVQMRKIXXXXXXXXXKKATVFLQHN

SEQ ID NO: 19604 - protein, 40 aa, Artificial Sequence
  GFR-binding peptide
  MOD_RES (4), (38), (40): Xaa is C or S
GLEXVPTEERSVKMAKVRIKPHQGQHKEVQVFLQHNKXEX

SEQ ID NO: 19605 - protein, 39 aa, Artificial Sequence
  GFR-binding peptide
  MOD_RES (5), (39): Xaa is C or S
  MOD_RES (19), (20), (21), (22), (23): Xaa is A or G
  MOD_RES (24), (25), (26), (27): Xaa is A or G or is absent
EGLEXVPTGQRSVKMAKVXXXXXXXXXKEVQVLEEHSQX

SEQ ID NO: 19606 - protein, 43 aa, Artificial Sequence
  GFR-binding peptide
  MOD_RES (6), (40), (42): Xaa is C or S
  MOD_RES (20), (21), (22), (23), (24): Xaa is A or G
  MOD_RES (25), (26), (27), (28): Xaa is A or G or is absent
DEGLEXVPTEESNITMQIMXXXXXXXXXLGEMSFLQHNKXEXR

SEQ ID NO: 19607 - protein, 35 aa, Artificial Sequence
  GFR-binding peptide
  MOD_RES (1), (35): Xaa is C or S
XVPTGQRPVQMRKIRIKPHQGQHKKATVLEEHSQX

SEQ ID NO: 19608 - protein, 38 aa, Artificial Sequence
  GFR-binding peptide
  MOD_RES (37), (37): Xaa is C or S
RPTQVQLRSVKVAKVEIVRKKPIFKEVQVTLEDHLAXK

SEQ ID NO: 19609 - protein, 40 aa, Artificial Sequence
  GFR-binding peptide
  MOD_RES (2), (39): Xaa is C or S
  MOD_RES (18), (19), (20), (21), (22): Xaa is A or G
  MOD_RES (23), (24), (25), (26): Xaa is A or G or is absent
QXRPTQVQLSNITVQIMXXXXXXXXXLGEMSTLEDHLAXK

SEQ ID NO: 19610 - protein, 39 aa, Artificial Sequence
  GFR-binding peptide
  MOD_RES (7), (7): Xaa is C or S
  MOD_RES (21), (22), (23), (24), (25): Xaa is A or G
  MOD_RES (26), (27), (28), (29): Xaa is A or G or is absent
NDEGLEXVPTGQSNITMQIMXXXXXXXXXIGEMSLEEHS

SEQ ID NO: 19611 - protein, 40 aa, Artificial Sequence
  GFR-binding peptide
  MOD_RES (37), (39): Xaa is C or S
  MOD_RES (16), (17), (18), (19), (20): Xaa is A or G
  MOD_RES (21), (22), (23), (24): Xaa is A or G or is absent
RPTQVQLSNITVQIMXXXXXXXXXIGEMSTLEDHLAXKXE

SEQ ID NO: 19612 - protein, 38 aa, Artificial Sequence
  GFR-binding peptide
  MOD_RES (36), (38): Xaa is C or S
PSRVHHSNITVQIMEYVRKKPKLLGEMSRLEEHLEXAX

SEQ ID NO: 19613 - protein, 39 aa, Artificial Sequence
  GFR-binding peptide
  MOD_RES (6), (6): Xaa is C or S
  MOD_RES (20), (21), (22), (23), (24): Xaa is A or G
  MOD_RES (25), (26), (27), (28): Xaa is A or G or is absent
DEGLEXVPTEERPVQMRKIXXXXXXXXXKKATVFLQHNK

SEQ ID NO: 19614 - protein, 42 aa, Artificial Sequence
  GFR-binding peptide
  MOD_RES (6), (40), (42): Xaa is C or S
  MOD_RES (20), (21), (22), (23), (24): Xaa is A or G
  MOD_RES (25), (26), (27), (28): Xaa is A or G or is absent
DEGLEXVPTGQSNITMQIMXXXXXXXXXLGEMSLEEHSQXEX

SEQ ID NO: 19615 - protein, 34 aa, Artificial Sequence
  GFR-binding peptide
  MOD_RES (2), (2): Xaa is C or S
EXVPTEERSVKMAKVRIKPHQGQHKEVQVFLQHN

SEQ ID NO: 19616 - protein, 38 aa, Artificial Sequence
  GFR-binding peptide
  MOD_RES (36), (38): Xaa is C or S
  MOD_RES (15), (16), (17), (18), (19): Xaa is A or G
  MOD_RES (20), (21), (22), (23): Xaa is A or G or is absent
PTQVQLSNITVQIMXXXXXXXXXIGEMSTLEDHLAXKX

SEQ ID NO: 19617 - protein, 35 aa, Artificial Sequence
  GFR-binding peptide
  MOD_RES (34), (34): Xaa is C or S
  MOD_RES (14), (15), (16), (17), (18): Xaa is A or G
  MOD_RES (19), (20), (21), (22): Xaa is A or G or is absent
VPTGQRPVQMRKIXXXXXXXXXKKATVLEEHSQXE

SEQ ID NO: 19618 - protein, 36 aa, Artificial Sequence
  GFR-binding peptide
QPSRVHHRPVQVRKIEYVRKKPKLKKATVRLEEHLE

SEQ ID NO: 19619 - protein, 36 aa, Artificial Sequence
  GFR-binding peptide
  MOD_RES (36), (36): Xaa is C or S
PSRVHHRPVQVRKIEYVRKKPKLKKATVRLEEHLEX

SEQ ID NO: 19620 - protein, 38 aa, Artificial Sequence
  GFR-binding peptide
  MOD_RES (4), (38): Xaa is C or S
  MOD_RES (18), (19), (20), (21), (22): Xaa is A or G
  MOD_RES (23), (24), (25), (26): Xaa is A or G or is absent
GLEXVPTEERPVQMRKIXXXXXXXXXKKATVFLQHNKX

SEQ ID NO: 19621 - protein, 33 aa, Artificial Sequence
  GFR-binding peptide
PSRVHHRPVQVRKIEYVRKKPKLKKATVRLEEH

SEQ ID NO: 19622 - protein, 39 aa, Artificial Sequence
  GFR-binding peptide
  MOD_RES (6), (6): Xaa is C or S
  MOD_RES (20), (21), (22), (23), (24): Xaa is A or G
  MOD_RES (25), (26), (27), (28): Xaa is A or G or is absent
DEGLEXVPTEESNITMQIMXXXXXXXXXIGEMSFLQHNK

SEQ ID NO: 19623 - protein, 35 aa, Artificial Sequence
  GFR-binding peptide
  MOD_RES (3), (3): Xaa is C or S
LEXVPTGQRSVKMAKVRIKPHQGQHKEVQVLEEHS

SEQ ID NO: 19624 - protein, 32 aa, Artificial Sequence
  GFR-binding peptide
  MOD_RES (14), (15), (16), (17), (18): Xaa is A or G
  MOD_RES (19), (20), (21), (22): Xaa is A or G or is absent
VPTGQSNITMQIMXXXXXXXXXIGEMSLEEHS

SEQ ID NO: 19625 - protein, 34 aa, Artificial Sequence
  GFR-binding peptide
  MOD_RES (1), (1): Xaa is C or S
XVPTEERPVQMRKIRIKPHQGQHKKATVFLQHNK

SEQ ID NO: 19626 - protein, 35 aa, Artificial Sequence
  GFR-binding peptide
  MOD_RES (35), (35): Xaa is C or S
  MOD_RES (14), (15), (16), (17), (18): Xaa is A or G
  MOD_RES (19), (20), (21), (22): Xaa is A or G or is absent
SRVHHRPVQVRKIXXXXXXXXXKKATVRLEEHLEX

SEQ ID NO: 19627 - protein, 36 aa, Artificial Sequence
  GFR-binding peptide
RPTQVQLSNITVQIMEIVRKKPIFLGEMSTLEDHLA

SEQ ID NO: 19628 - protein, 44 aa, Artificial Sequence
  GFR-binding peptide
  MOD_RES (4), (41), (43): Xaa is C or S
NVQXRPTQVQLRSVKVAKVEIVRKKPIFKEVQVTLEDHLAXKXE

SEQ ID NO: 19629 - protein, 37 aa, Artificial Sequence
  GFR-binding peptide
  MOD_RES (5), (5): Xaa is C or S
  MOD_RES (19), (20), (21), (22), (23): Xaa is A or G
  MOD_RES (24), (25), (26), (27): Xaa is A or G or is absent
EGLEXVPTGQRPVQMRKIXXXXXXXXXKKATVLEEHS

SEQ ID NO: 19630 - protein, 43 aa, Artificial Sequence
  GFR-binding peptide
  MOD_RES (5), (42): Xaa is C or S
  MOD_RES (21), (22), (23), (24), (25): Xaa is A or G
  MOD_RES (26), (27), (28), (29): Xaa is A or G or is absent
RNVQXRPTQVQLSNITVQIMXXXXXXXXXIGEMSTLEDHLAXK

SEQ ID NO: 19631 - protein, 36 aa, Artificial Sequence
  GFR-binding peptide
  MOD_RES (2), (36): Xaa is C or S
  MOD_RES (16), (17), (18), (19), (20): Xaa is A or G
  MOD_RES (21), (22), (23), (24): Xaa is A or G or is absent
EXVPTGQRSVKMAKVXXXXXXXXXKEVQVLEEHSQX

SEQ ID NO: 19632 - protein, 44 aa, Artificial Sequence
  GFR-binding peptide
  MOD_RES (4), (41), (43): Xaa is C or S
SVKXQPSRVHHSNITVQIMEYVRKKPKLLGEMSRLEEHLEXAXA

SEQ ID NO: 19633 - protein, 40 aa, Artificial Sequence
  GFR-binding peptide
  MOD_RES (4), (4): Xaa is C or S
NVQXRPTQVQLRSVKVAKVEIVRKKPIFKEVQVTLEDHLA

SEQ ID NO: 19634 - protein, 37 aa, Artificial Sequence
  GFR-binding peptide
  MOD_RES (3), (37): Xaa is C or S
  MOD_RES (17), (18), (19), (20), (21): Xaa is A or G
  MOD_RES (22), (23), (24), (25): Xaa is A or G or is absent
LEXVPTGQSNITMQIMXXXXXXXXXLGEMSLEEHSQX

SEQ ID NO: 19635 - protein, 38 aa, Artificial Sequence
  GFR-binding peptide
  MOD_RES (3), (3): Xaa is C or S
  MOD_RES (19), (20), (21), (22), (23): Xaa is A or G
  MOD_RES (24), (25), (26), (27): Xaa is A or G or is absent
VQXRPTQVQLRSVKVAKVXXXXXXXXXKEVQVTLEDHL

SEQ ID NO: 19636 - protein, 36 aa, Artificial Sequence
  GFR-binding peptide
  MOD_RES (34), (36): Xaa is C or S
  MOD_RES (14), (15), (16), (17), (18): Xaa is A or G
  MOD_RES (19), (20), (21), (22): Xaa is A or G or is absent
VPTEERSVKMAKVXXXXXXXXXKEVQVFLQHNKXEX

SEQ ID NO: 19637 - protein, 41 aa, Artificial Sequence
  GFR-binding peptide
  MOD_RES (3), (40): Xaa is C or S
VKXQPSRVHHRPVQVRKIEYVRKKPKLKKATVRLEEHLEXA

SEQ ID NO: 19638 - protein, 36 aa, Artificial Sequence
  GFR-binding peptide
  MOD_RES (2), (2): Xaa is C or S
  MOD_RES (18), (19), (20), (21), (22): Xaa is A or G
  MOD_RES (23), (24), (25), (26): Xaa is A or G or is absent
KXQPSRVHHSNITVQIMXXXXXXXXXIGEMSRLEEH

SEQ ID NO: 19639 - protein, 41 aa, Artificial Sequence
  GFR-binding peptide
  MOD_RES (1), (38), (40): Xaa is C or S
XQPSRVHHSNITVQIMEYVRKKPKLLGEMSRLEEHLEXAXA

SEQ ID NO: 19640 - protein, 44 aa, Artificial Sequence
  GFR-binding peptide
  MOD_RES (5), (42), (44): Xaa is C or S
  MOD_RES (21), (22), (23), (24), (25): Xaa is A or G
  MOD_RES (26), (27), (28), (29): Xaa is A or G or is absent
SSVKXQPSRVHHRPVQVRKIXXXXXXXXXKKATVRLEEHLEXAX

SEQ ID NO: 19641 - protein, 39 aa, Artificial Sequence
  GFR-binding peptide
  MOD_RES (4), (38): Xaa is C or S
  MOD_RES (18), (19), (20), (21), (22): Xaa is A or G
  MOD_RES (23), (24), (25), (26): Xaa is A or G or is absent
GLEXVPTGQRPVQMRKIXXXXXXXXXKKATVLEEHSQXE

SEQ ID NO: 19642 - protein, 38 aa, Artificial Sequence
  GFR-binding peptide
  MOD_RES (6), (6): Xaa is C or S
DEGLEXVPTEERSVKMAKVRIKPHQGQHKEVQVFLQHN

SEQ ID NO: 19643 - protein, 39 aa, Artificial Sequence
  GFR-binding peptide
  MOD_RES (7), (7): Xaa is C or S
NDEGLEXVPTGQRPVQMRKIRIKPHQGQHKKATVLEEHS

SEQ ID NO: 19644 - protein, 38 aa, Artificial Sequence
  GFR-binding peptide
  MOD_RES (1), (35), (37): Xaa is C or S
  MOD_RES (15), (16), (17), (18), (19): Xaa is A or G
  MOD_RES (20), (21), (22), (23): Xaa is A or G or is absent
XVPTEESNITMQIMXXXXXXXXXIGEMSFLQHNKXEXR

SEQ ID NO: 19645 - protein, 34 aa, Artificial Sequence
  GFR-binding peptide
  MOD_RES (2), (2): Xaa is C or S
EXVPTGQRPVQMRKIRIKPHQGQHKKATVLEEHS

SEQ ID NO: 19646 - protein, 44 aa, Artificial Sequence
  GFR-binding peptide
  MOD_RES (4), (41), (43): Xaa is C or S
  MOD_RES (20), (21), (22), (23), (24): Xaa is A or G
  MOD_RES (25), (26), (27), (28): Xaa is A or G or is absent
SVKXQPSRVHHSNITVQIMXXXXXXXXXIGEMSRLEEHLEXAXA

SEQ ID NO: 19647 - protein, 35 aa, Artificial Sequence
  GFR-binding peptide
  MOD_RES (3), (3): Xaa is C or S
  MOD_RES (17), (18), (19), (20), (21): Xaa is A or G
  MOD_RES (22), (23), (24), (25): Xaa is A or G or is absent
LEXVPTGQRPVQMRKIXXXXXXXXXKKATVLEEHS

SEQ ID NO: 19648 - protein, 37 aa, Artificial Sequence
  GFR-binding peptide
  MOD_RES (35), (37): Xaa is C or S
SRVHHSNITVQIMEYVRKKPKLIGEMSRLEEHLEXAX

SEQ ID NO: 19649 - protein, 40 aa, Artificial Sequence
  GFR-binding peptide
  MOD_RES (3), (37), (39): Xaa is C or S
  MOD_RES (17), (18), (19), (20), (21): Xaa is A or G
  MOD_RES (22), (23), (24), (25): Xaa is A or G or is absent
LEXVPTEESNITMQIMXXXXXXXXXIGEMSFLQHNKXEXR

SEQ ID NO: 19650 - protein, 36 aa, Artificial Sequence
  GFR-binding peptide
  MOD_RES (36), (36): Xaa is C or S
  MOD_RES (15), (16), (17), (18), (19): Xaa is A or G
  MOD_RES (20), (21), (22), (23): Xaa is A or G or is absent
PTQVQLRPVQVRKIXXXXXXXXXKKATVTLEDHLAX

SEQ ID NO: 19651 - protein, 44 aa, Artificial Sequence
  GFR-binding peptide
  MOD_RES (7), (41), (43): Xaa is C or S
  MOD_RES (21), (22), (23), (24), (25): Xaa is A or G
  MOD_RES (26), (27), (28), (29): Xaa is A or G or is absent
NDEGLEXVPTEESNITMQIMXXXXXXXXXIGEMSFLQHNKXEXR

SEQ ID NO: 19652 - protein, 36 aa, Artificial Sequence
  GFR-binding peptide
  MOD_RES (1), (35): Xaa is C or S
  MOD_RES (15), (16), (17), (18), (19): Xaa is A or G
  MOD_RES (20), (21), (22), (23): Xaa is A or G or is absent
XVPTEERSVKMAKVXXXXXXXXXKEVQVFLQHNKXE

SEQ ID NO: 19653 - protein, 40 aa, Artificial Sequence
  GFR-binding peptide
  MOD_RES (7), (7): Xaa is C or S
NDEGLEXVPTEESNITMQIMRIKPHQGQHLGEMSFLQHNK

SEQ ID NO: 19654 - protein, 37 aa, Artificial Sequence
  GFR-binding peptide
  MOD_RES (5), (5): Xaa is C or S
EGLEXVPTGQRSVKMAKVRIKPHQGQHKEVQVLEEHS

SEQ ID NO: 19655 - protein, 40 aa, Artificial Sequence
  GFR-binding peptide
  MOD_RES (5), (39): Xaa is C or S
EGLEXVPTGQSNITMQIMRIKPHQGQHIGEMSLEEHSQXE

SEQ ID NO: 19656 - protein, 41 aa, Artificial Sequence
  GFR-binding peptide
  MOD_RES (6), (40): Xaa is C or S
DEGLEXVPTGQRSVKMAKVRIKPHQGQHKEVQVLEEHSQXE

SEQ ID NO: 19657 - protein, 41 aa, Artificial Sequence
  GFR-binding peptide
  MOD_RES (4), (41): Xaa is C or S
NVQXRPTQVQLSNITVQIMEIVRKKPIFLGEMSTLEDHLAX

SEQ ID NO: 19658 - protein, 43 aa, Artificial Sequence
  GFR-binding peptide
  MOD_RES (4), (41), (43): Xaa is C or S
  MOD_RES (20), (21), (22), (23), (24): Xaa is A or G
  MOD_RES (25), (26), (27), (28): Xaa is A or G or is absent
NVQXRPTQVQLSNITVQIMXXXXXXXXXIGEMSTLEDHLAXKX

SEQ ID NO: 19659 - protein, 41 aa, Artificial Sequence
  GFR-binding peptide
  MOD_RES (4), (41): Xaa is C or S
  MOD_RES (20), (21), (22), (23), (24): Xaa is A or G
  MOD_RES (25), (26), (27), (28): Xaa is A or G or is absent
NVQXRPTQVQLSNITVQIMXXXXXXXXXLGEMSTLEDHLAX

SEQ ID NO: 19660 - protein, 43 aa, Artificial Sequence
  GFR-binding peptide
  MOD_RES (6), (40), (42): Xaa is C or S
  MOD_RES (20), (21), (22), (23), (24): Xaa is A or G
  MOD_RES (25), (26), (27), (28): Xaa is A or G or is absent
DEGLEXVPTGQRSVKMAKVXXXXXXXXXKEVQVLEEHSQXEXR

SEQ ID NO: 19661 - protein, 36 aa, Artificial Sequence
  GFR-binding peptide
  MOD_RES (1), (1): Xaa is C or S
  MOD_RES (17), (18), (19), (20), (21): Xaa is A or G
  MOD_RES (22), (23), (24), (25): Xaa is A or G or is absent
XRPTQVQLRSVKVAKVXXXXXXXXXKEVQVTLEDHL

SEQ ID NO: 19662 - protein, 33 aa, Artificial Sequence
  GFR-binding peptide
  MOD_RES (15), (16), (17), (18), (19): Xaa is A or G
  MOD_RES (20), (21), (22), (23): Xaa is A or G or is absent
PSRVHHSNITVQIMXXXXXXXXXLGEMSRLEEH

SEQ ID NO: 19663 - protein, 38 aa, Artificial Sequence
  GFR-binding peptide
  MOD_RES (5), (5): Xaa is C or S
  MOD_RES (19), (20), (21), (22), (23): Xaa is A or G
  MOD_RES (24), (25), (26), (27): Xaa is A or G or is absent
EGLEXVPTEERSVKMAKVXXXXXXXXXKEVQVFLQHNK

SEQ ID NO: 19664 - protein, 36 aa, Artificial Sequence
  GFR-binding peptide
  MOD_RES (36), (36): Xaa is C or S
PTQVQLSNITVQIMEIVRKKPIFLGEMSTLEDHLAX

SEQ ID NO: 19665 - protein, 40 aa, Artificial Sequence
  GFR-binding peptide
  MOD_RES (6), (40): Xaa is C or S
  MOD_RES (20), (21), (22), (23), (24): Xaa is A or G
  MOD_RES (25), (26), (27), (28): Xaa is A or G or is absent
DEGLEXVPTEESNITMQIMXXXXXXXXXIGEMSFLQHNKX

SEQ ID NO: 19666 - protein, 42 aa, Artificial Sequence
  GFR-binding peptide
  MOD_RES (7), (41): Xaa is C or S
NDEGLEXVPTGQSNITMQIMRIKPHQGQHIGEMSLEEHSQXE

SEQ ID NO: 19667 - protein, 40 aa, Artificial Sequence
  GFR-binding peptide
  MOD_RES (5), (5): Xaa is C or S
  MOD_RES (21), (22), (23), (24), (25): Xaa is A or G
  MOD_RES (26), (27), (28), (29): Xaa is A or G or is absent
RNVQXRPTQVQLRSVKVAKVXXXXXXXXXKEVQVTLEDHL

SEQ ID NO: 19668 - protein, 39 aa, Artificial Sequence
  GFR-binding peptide
  MOD_RES (37), (39): Xaa is C or S
  MOD_RES (16), (17), (18), (19), (20): Xaa is A or G
  MOD_RES (21), (22), (23), (24): Xaa is A or G or is absent
RPTQVQLSNITVQIMXXXXXXXXXLGEMSTLEDHLAXKX

SEQ ID NO: 19669 - protein, 38 aa, Artificial Sequence
  GFR-binding peptide
  MOD_RES (36), (38): Xaa is C or S
PTQVQLSNITVQIMEIVRKKPIFLGEMSTLEDHLAXKX

SEQ ID NO: 19670 - protein, 39 aa, Artificial Sequence
  GFR-binding peptide
  MOD_RES (3), (37), (39): Xaa is C or S
  MOD_RES (17), (18), (19), (20), (21): Xaa is A or G
  MOD_RES (22), (23), (24), (25): Xaa is A or G or is absent
LEXVPTGQRPVQMRKIXXXXXXXXXKKATVLEEHSQXEX

SEQ ID NO: 19671 - protein, 43 aa, Artificial Sequence
  GFR-binding peptide
  MOD_RES (6), (40), (42): Xaa is C or S
  MOD_RES (20), (21), (22), (23), (24): Xaa is A or G
  MOD_RES (25), (26), (27), (28): Xaa is A or G or is absent
DEGLEXVPTGQRPVQMRKIXXXXXXXXXKKATVLEEHSQXEXR

SEQ ID NO: 19672 - protein, 40 aa, Artificial Sequence
  GFR-binding peptide
  MOD_RES (1), (38), (40): Xaa is C or S
  MOD_RES (17), (18), (19), (20), (21): Xaa is A or G
  MOD_RES (22), (23), (24), (25): Xaa is A or G or is absent
XRPTQVQLSNITVQIMXXXXXXXXXIGEMSTLEDHLAXKX

SEQ ID NO: 19673 - protein, 44 aa, Artificial Sequence
  GFR-binding peptide
  MOD_RES (5), (42), (44): Xaa is C or S
  MOD_RES (21), (22), (23), (24), (25): Xaa is A or G
  MOD_RES (26), (27), (28), (29): Xaa is A or G or is absent
SSVKXQPSRVHHRSVKVAKVXXXXXXXXXKEVQVRLEEHLEXAX

SEQ ID NO: 19674 - protein, 38 aa, Artificial Sequence
  GFR-binding peptide
  MOD_RES (6), (6): Xaa is C or S
  MOD_RES (20), (21), (22), (23), (24): Xaa is A or G
  MOD_RES (25), (26), (27), (28): Xaa is A or G or is absent
DEGLEXVPTGQRSVKMAKVXXXXXXXXXKEVQVLEEHS

SEQ ID NO: 19675 - protein, 36 aa, Artificial Sequence
  GFR-binding peptide
  MOD_RES (2), (36): Xaa is C or S
  MOD_RES (16), (17), (18), (19), (20): Xaa is A or G
  MOD_RES (21), (22), (23), (24): Xaa is A or G or is absent
EXVPTEERPVQMRKIXXXXXXXXXKKATVFLQHNKX

SEQ ID NO: 19676 - protein, 40 aa, Artificial Sequence
  GFR-binding peptide
  MOD_RES (4), (38), (40): Xaa is C or S
GLEXVPTGQSNITMQIMRIKPHQGQHIGEMSLEEHSQXEX

SEQ ID NO: 19677 - protein, 33 aa, Artificial Sequence
  GFR-binding peptide
  MOD_RES (14), (15), (16), (17), (18): Xaa is A or G
  MOD_RES (19), (20), (21), (22): Xaa is A or G or is absent
TQVQLSNITVQIMXXXXXXXXXLGEMSTLEDHL

SEQ ID NO: 19678 - protein, 43 aa, Artificial Sequence
  GFR-binding peptide
  MOD_RES (6), (40), (42): Xaa is C or S
DEGLEXVPTGQSNITMQIMRIKPHQGQHIGEMSLEEHSQXEXR

SEQ ID NO: 19679 - protein, 40 aa, Artificial Sequence
  GFR-binding peptide
  MOD_RES (7), (7): Xaa is C or S
  MOD_RES (21), (22), (23), (24), (25): Xaa is A or G
  MOD_RES (26), (27), (28), (29): Xaa is A or G or is absent
NDEGLEXVPTGQRPVQMRKIXXXXXXXXXKKATVLEEHSQ

SEQ ID NO: 19680 - protein, 40 aa, Artificial Sequence
  GFR-binding peptide
  MOD_RES (7), (7): Xaa is C or S
  MOD_RES (21), (22), (23), (24), (25): Xaa is A or G
  MOD_RES (26), (27), (28), (29): Xaa is A or G or is absent
NDEGLEXVPTGQSNITMQIMXXXXXXXXXIGEMSLEEHSQ

SEQ ID NO: 19681 - protein, 37 aa, Artificial Sequence
  GFR-binding peptide
  MOD_RES (2), (36): Xaa is C or S
  MOD_RES (16), (17), (18), (19), (20): Xaa is A or G
  MOD_RES (21), (22), (23), (24): Xaa is A or G or is absent
EXVPTEESNITMQIMXXXXXXXXXIGEMSFLQHNKXE

SEQ ID NO: 19682 - protein, 41 aa, Artificial Sequence
  GFR-binding peptide
  MOD_RES (7), (41): Xaa is C or S
  MOD_RES (21), (22), (23), (24), (25): Xaa is A or G
  MOD_RES (26), (27), (28), (29): Xaa is A or G or is absent
NDEGLEXVPTGQSNITMQIMXXXXXXXXXLGEMSLEEHSQX

SEQ ID NO: 19683 - protein, 38 aa, Artificial Sequence
  GFR-binding peptide
  MOD_RES (4), (4): Xaa is C or S
NVQXRPTQVQLSNITVQIMEIVRKKPIFIGEMSTLEDH

SEQ ID NO: 19684 - protein, 37 aa, Artificial Sequence
  GFR-binding peptide
  MOD_RES (37), (37): Xaa is C or S
  MOD_RES (16), (17), (18), (19), (20): Xaa is A or G
  MOD_RES (21), (22), (23), (24): Xaa is A or G or is absent
RPTQVQLRPVQVRKIXXXXXXXXXKKATVTLEDHLAX

SEQ ID NO: 19685 - protein, 36 aa, Artificial Sequence
  GFR-binding peptide
  MOD_RES (2), (36): Xaa is C or S
  MOD_RES (16), (17), (18), (19), (20): Xaa is A or G
  MOD_RES (21), (22), (23), (24): Xaa is A or G or is absent
EXVPTGQRPVQMRKIXXXXXXXXXKKATVLEEHSQX

SEQ ID NO: 19686 - protein, 36 aa, Artificial Sequence
  GFR-binding peptide
  MOD_RES (1), (35): Xaa is C or S
  MOD_RES (15), (16), (17), (18), (19): Xaa is A or G
  MOD_RES (20), (21), (22), (23): Xaa is A or G or is absent
XVPTEESNITMQIMXXXXXXXXXLGEMSFLQHNKXE

SEQ ID NO: 19687 - protein, 35 aa, Artificial Sequence
  GFR-binding peptide
  MOD_RES (35), (35): Xaa is C or S
SRVHHSNITVQIMEYVRKKPKLLGEMSRLEEHLEX

SEQ ID NO: 19688 - protein, 41 aa, Artificial Sequence
  GFR-binding peptide
  MOD_RES (5), (39), (41): Xaa is C or S
EGLEXVPTGQSNITMQIMRIKPHQGQHIGEMSLEEHSQXEX

SEQ ID NO: 19689 - protein, 38 aa, Artificial Sequence
  GFR-binding peptide
  MOD_RES (35), (37): Xaa is C or S
  MOD_RES (14), (15), (16), (17), (18): Xaa is A or G
  MOD_RES (19), (20), (21), (22): Xaa is A or G or is absent
TQVQLSNITVQIMXXXXXXXXXLGEMSTLEDHLAXKXE

SEQ ID NO: 19690 - protein, 39 aa, Artificial Sequence
  GFR-binding peptide
  MOD_RES (5), (5): Xaa is C or S
RNVQXRPTQVQLSNITVQIMEIVRKKPIFIGEMSTLEDH

SEQ ID NO: 19691 - protein, 40 aa, Artificial Sequence
  GFR-binding peptide
  MOD_RES (2), (39): Xaa is C or S
QXRPTQVQLSNITVQIMEIVRKKPIFLGEMSTLEDHLAXK

SEQ ID NO: 19692 - protein, 38 aa, Artificial Sequence
  GFR-binding peptide
  MOD_RES (37), (37): Xaa is C or S
QPSRVHHSNITVQIMEYVRKKPKLIGEMSRLEEHLEXA

SEQ ID NO: 19693 - protein, 38 aa, Artificial Sequence
  GFR-binding peptide
  MOD_RES (2), (36), (38): Xaa is C or S
  MOD_RES (16), (17), (18), (19), (20): Xaa is A or G
  MOD_RES (21), (22), (23), (24): Xaa is A or G or is absent
EXVPTGQSNITMQIMXXXXXXXXXIGEMSLEEHSQXEX

SEQ ID NO: 19694 - protein, 39 aa, Artificial Sequence
  GFR-binding peptide
  MOD_RES (2), (39): Xaa is C or S
  MOD_RES (18), (19), (20), (21), (22): Xaa is A or G
  MOD_RES (23), (24), (25), (26): Xaa is A or G or is absent
QXRPTQVQLRSVKVAKVXXXXXXXXXKEVQVTLEDHLAX

SEQ ID NO: 19695 - protein, 35 aa, Artificial Sequence
  GFR-binding peptide
  MOD_RES (1), (35): Xaa is C or S
  MOD_RES (15), (16), (17), (18), (19): Xaa is A or G
  MOD_RES (20), (21), (22), (23): Xaa is A or G or is absent
XVPTEESNITMQIMXXXXXXXXXIGEMSFLQHNKX

SEQ ID NO: 19696 - protein, 39 aa, Artificial Sequence
  GFR-binding peptide
  MOD_RES (5), (5): Xaa is C or S
SSVKXQPSRVHHSNITVQIMEYVRKKPKLIGEMSRLEEH

SEQ ID NO: 19697 - protein, 40 aa, Artificial Sequence
  GFR-binding peptide
  MOD_RES (5), (5): Xaa is C or S
SSVKXQPSRVHHSNITVQIMEYVRKKPKLLGEMSRLEEHL

SEQ ID NO: 19698 - protein, 40 aa, Artificial Sequence
  GFR-binding peptide
  MOD_RES (1), (38), (40): Xaa is C or S
XRPTQVQLSNITVQIMEIVRKKPIFLGEMSTLEDHLAXKX

SEQ ID NO: 19699 - protein, 38 aa, Artificial Sequence
  GFR-binding peptide
  MOD_RES (1), (38): Xaa is C or S
  MOD_RES (17), (18), (19), (20), (21): Xaa is A or G
  MOD_RES (22), (23), (24), (25): Xaa is A or G or is absent
XRPTQVQLSNITVQIMXXXXXXXXXLGEMSTLEDHLAX

SEQ ID NO: 19700 - protein, 41 aa, Artificial Sequence
  GFR-binding peptide
  MOD_RES (1), (38), (40): Xaa is C or S
XRPTQVQLSNITVQIMEIVRKKPIFLGEMSTLEDHLAXKXE

SEQ ID NO: 19701 - protein, 37 aa, Artificial Sequence
  GFR-binding peptide
  MOD_RES (1), (35), (37): Xaa is C or S
  MOD_RES (15), (16), (17), (18), (19): Xaa is A or G
  MOD_RES (20), (21), (22), (23): Xaa is A or G or is absent
XVPTGQSNITMQIMXXXXXXXXXIGEMSLEEHSQXEX

SEQ ID NO: 19702 - protein, 42 aa, Artificial Sequence
  GFR-binding peptide
  MOD_RES (5), (39), (41): Xaa is C or S
  MOD_RES (19), (20), (21), (22), (23): Xaa is A or G
  MOD_RES (24), (25), (26), (27): Xaa is A or G or is absent
EGLEXVPTGQSNITMQIMXXXXXXXXXLGEMSLEEHSQXEXR

SEQ ID NO: 19703 - protein, 37 aa, Artificial Sequence
  GFR-binding peptide
  MOD_RES (1), (1): Xaa is C or S
XRPTQVQLSNITVQIMEIVRKKPIFLGEMSTLEDHLA

SEQ ID NO: 19704 - protein, 33 aa, Artificial Sequence
  GFR-binding peptide
  MOD_RES (14), (15), (16), (17), (18): Xaa is A or G
  MOD_RES (19), (20), (21), (22): Xaa is A or G or is absent
VPTEESNITMQIMXXXXXXXXXLGEMSFLQHNK

SEQ ID NO: 19705 - protein, 42 aa, Artificial Sequence
  GFR-binding peptide
  MOD_RES (7), (41): Xaa is C or S
NDEGLEXVPTEERPVQMRKIRIKPHQGQHKKATVFLQHNKXE

SEQ ID NO: 19706 - protein, 39 aa, Artificial Sequence
  GFR-binding peptide
  MOD_RES (36), (38): Xaa is C or S
  MOD_RES (15), (16), (17), (18), (19): Xaa is A or G
  MOD_RES (20), (21), (22), (23): Xaa is A or G or is absent
PSRVHHSNITVQIMXXXXXXXXXLGEMSRLEEHLEXAXA

SEQ ID NO: 19707 - protein, 36 aa, Artificial Sequence
  GFR-binding peptide
  MOD_RES (35), (35): Xaa is C or S
SRVHHSNITVQIMEYVRKKPKLIGEMSRLEEHLEXA

SEQ ID NO: 19708 - protein, 33 aa, Artificial Sequence
  GFR-binding peptide
  MOD_RES (14), (15), (16), (17), (18): Xaa is A or G
  MOD_RES (19), (20), (21), (22): Xaa is A or G or is absent
SRVHHSNITVQIMXXXXXXXXXLGEMSRLEEHL

SEQ ID NO: 19709 - protein, 37 aa, Artificial Sequence
  GFR-binding peptide
  MOD_RES (4), (4): Xaa is C or S
  MOD_RES (18), (19), (20), (21), (22): Xaa is A or G
  MOD_RES (23), (24), (25), (26): Xaa is A or G or is absent
GLEXVPTEESNITMQIMXXXXXXXXXIGEMSFLQHNK

SEQ ID NO: 19710 - protein, 44 aa, Artificial Sequence
  GFR-binding peptide
  MOD_RES (4), (41), (43): Xaa is C or S
  MOD_RES (20), (21), (22), (23), (24): Xaa is A or G
  MOD_RES (25), (26), (27), (28): Xaa is A or G or is absent
NVQXRPTQVQLRPVQVRKIXXXXXXXXXKKATVTLEDHLAXKXE

SEQ ID NO: 19711 - protein, 38 aa, Artificial Sequence
  GFR-binding peptide
  MOD_RES (2), (2): Xaa is C or S
  MOD_RES (18), (19), (20), (21), (22): Xaa is A or G
  MOD_RES (23), (24), (25), (26): Xaa is A or G or is absent
QXRPTQVQLSNITVQIMXXXXXXXXXLGEMSTLEDHLA

SEQ ID NO: 19712 - protein, 41 aa, Artificial Sequence
  GFR-binding peptide
  MOD_RES (2), (39), (41): Xaa is C or S
QXRPTQVQLSNITVQIMEIVRKKPIFIGEMSTLEDHLAXKX

SEQ ID NO: 19713 - protein, 39 aa, Artificial Sequence
  GFR-binding peptide
  MOD_RES (2), (39): Xaa is C or S
  MOD_RES (18), (19), (20), (21), (22): Xaa is A or G
  MOD_RES (23), (24), (25), (26): Xaa is A or G or is absent
KXQPSRVHHRSVKVAKVXXXXXXXXXKEVQVRLEEHLEX

SEQ ID NO: 19714 - protein, 34 aa, Artificial Sequence
  GFR-binding peptide
  MOD_RES (34), (34): Xaa is C or S
VPTEESNITMQIMRIKPHQGQHLGEMSFLQHNKX

SEQ ID NO: 19715 - protein, 39 aa, Artificial Sequence
  GFR-binding peptide
  MOD_RES (5), (5): Xaa is C or S
RNVQXRPTQVQLRSVKVAKVEIVRKKPIFKEVQVTLEDH

SEQ ID NO: 19716 - protein, 42 aa, Artificial Sequence
  GFR-binding peptide
  MOD_RES (6), (40), (42): Xaa is C or S
  MOD_RES (20), (21), (22), (23), (24): Xaa is A or G
  MOD_RES (25), (26), (27), (28): Xaa is A or G or is absent
DEGLEXVPTGQSNITMQIMXXXXXXXXXIGEMSLEEHSQXEX

SEQ ID NO: 19717 - protein, 39 aa, Artificial Sequence
  GFR-binding peptide
  MOD_RES (36), (38): Xaa is C or S
PTQVQLSNITVQIMEIVRKKPIFLGEMSTLEDHLAXKXE

SEQ ID NO: 19718 - protein, 34 aa, Artificial Sequence
  GFR-binding peptide
RPTQVQLRSVKVAKVEIVRKKPIFKEVQVTLEDH

SEQ ID NO: 19719 - protein, 38 aa, Artificial Sequence
  GFR-binding peptide
  MOD_RES (6), (6): Xaa is C or S
  MOD_RES (20), (21), (22), (23), (24): Xaa is A or G
  MOD_RES (25), (26), (27), (28): Xaa is A or G or is absent
DEGLEXVPTEESNITMQIMXXXXXXXXXIGEMSFLQHN

SEQ ID NO: 19720 - protein, 42 aa, Artificial Sequence
  GFR-binding peptide
  MOD_RES (2), (39), (41): Xaa is C or S
  MOD_RES (18), (19), (20), (21), (22): Xaa is A or G
  MOD_RES (23), (24), (25), (26): Xaa is A or G or is absent
QXRPTQVQLRSVKVAKVXXXXXXXXXKEVQVTLEDHLAXKXE

SEQ ID NO: 19721 - protein, 34 aa, Artificial Sequence
  GFR-binding peptide
  MOD_RES (1), (1): Xaa is C or S
XVPTEESNITMQIMRIKPHQGQHLGEMSFLQHNK

SEQ ID NO: 19722 - protein, 38 aa, Artificial Sequence
  GFR-binding peptide
  MOD_RES (1), (38): Xaa is C or S
XQPSRVHHSNITVQIMEYVRKKPKLIGEMSRLEEHLEX

SEQ ID NO: 19723 - protein, 38 aa, Artificial Sequence
  GFR-binding peptide
  MOD_RES (4), (38): Xaa is C or S
GLEXVPTGQSNITMQIMRIKPHQGQHIGEMSLEEHSQX

SEQ ID NO: 19724 - protein, 40 aa, Artificial Sequence
  GFR-binding peptide
  MOD_RES (4), (38), (40): Xaa is C or S
  MOD_RES (18), (19), (20), (21), (22): Xaa is A or G
  MOD_RES (23), (24), (25), (26): Xaa is A or G or is absent
GLEXVPTEESNITMQIMXXXXXXXXXIGEMSFLQHNKXEX

SEQ ID NO: 19725 - protein, 39 aa, Artificial Sequence
  GFR-binding peptide
  MOD_RES (1), (38): Xaa is C or S
XRPTQVQLRSVKVAKVEIVRKKPIFKEVQVTLEDHLAXK

SEQ ID NO: 19726 - protein, 37 aa, Artificial Sequence
  GFR-binding peptide
  MOD_RES (4), (4): Xaa is C or S
GLEXVPTGQRSVKMAKVRIKPHQGQHKEVQVLEEHSQ

SEQ ID NO: 19727 - protein, 34 aa, Artificial Sequence
  GFR-binding peptide
  MOD_RES (2), (2): Xaa is C or S
EXVPTGQSNITMQIMRIKPHQGQHIGEMSLEEHS

SEQ ID NO: 19728 - protein, 42 aa, Artificial Sequence
  GFR-binding peptide
  MOD_RES (5), (39), (41): Xaa is C or S
EGLEXVPTEERPVQMRKIRIKPHQGQHKKATVFLQHNKXEXR

SEQ ID NO: 19729 - protein, 36 aa, Artificial Sequence
  GFR-binding peptide
  MOD_RES (2), (2): Xaa is C or S
  MOD_RES (18), (19), (20), (21), (22): Xaa is A or G
  MOD_RES (23), (24), (25), (26): Xaa is A or G or is absent
KXQPSRVHHRPVQVRKIXXXXXXXXXKKATVRLEEH

SEQ ID NO: 19730 - protein, 40 aa, Artificial Sequence
  GFR-binding peptide
  MOD_RES (5), (5): Xaa is C or S
  MOD_RES (21), (22), (23), (24), (25): Xaa is A or G
  MOD_RES (26), (27), (28), (29): Xaa is A or G or is absent
SSVKXQPSRVHHSNITVQIMXXXXXXXXXIGEMSRLEEHL

SEQ ID NO: 19731 - protein, 39 aa, Artificial Sequence
  GFR-binding peptide
  MOD_RES (7), (7): Xaa is C or S
  MOD_RES (21), (22), (23), (24), (25): Xaa is A or G
  MOD_RES (26), (27), (28), (29): Xaa is A or G or is absent
NDEGLEXVPTEESNITMQIMXXXXXXXXXLGEMSFLQHN

SEQ ID NO: 19732 - protein, 41 aa, Artificial Sequence
  GFR-binding peptide
  MOD_RES (2), (39), (41): Xaa is C or S
KXQPSRVHHSNITVQIMEYVRKKPKLIGEMSRLEEHLEXAX

SEQ ID NO: 19733 - protein, 37 aa, Artificial Sequence
  GFR-binding peptide
  MOD_RES (3), (37): Xaa is C or S
LEXVPTGQSNITMQIMRIKPHQGQHIGEMSLEEHSQX

SEQ ID NO: 19734 - protein, 35 aa, Artificial Sequence
  GFR-binding peptide
  MOD_RES (1), (35): Xaa is C or S
XVPTEESNITMQIMRIKPHQGQHLGEMSFLQHNKX

SEQ ID NO: 19735 - protein, 35 aa, Artificial Sequence
  GFR-binding peptide
  MOD_RES (3), (3): Xaa is C or S
  MOD_RES (17), (18), (19), (20), (21): Xaa is A or G
  MOD_RES (22), (23), (24), (25): Xaa is A or G or is absent
LEXVPTGQSNITMQIMXXXXXXXXXIGEMSLEEHS

SEQ ID NO: 19736 - protein, 39 aa, Artificial Sequence
  GFR-binding peptide
  MOD_RES (4), (38): Xaa is C or S
GLEXVPTGQSNITMQIMRIKPHQGQHIGEMSLEEHSQXE

SEQ ID NO: 19737 - protein, 34 aa, Artificial Sequence
  GFR-binding peptide
  MOD_RES (34), (34): Xaa is C or S
  MOD_RES (14), (15), (16), (17), (18): Xaa is A or G
  MOD_RES (19), (20), (21), (22): Xaa is A or G or is absent
VPTEESNITMQIMXXXXXXXXXIGEMSFLQHNKX

SEQ ID NO: 19738 - protein, 41 aa, Artificial Sequence
  GFR-binding peptide
  MOD_RES (7), (41): Xaa is C or S
  MOD_RES (21), (22), (23), (24), (25): Xaa is A or G
  MOD_RES (26), (27), (28), (29): Xaa is A or G or is absent
NDEGLEXVPTEESNITMQIMXXXXXXXXXIGEMSFLQHNKX

SEQ ID NO: 19739 - protein, 37 aa, Artificial Sequence
  GFR-binding peptide
  MOD_RES (2), (36): Xaa is C or S
  MOD_RES (16), (17), (18), (19), (20): Xaa is A or G
  MOD_RES (21), (22), (23), (24): Xaa is A or G or is absent
EXVPTGQSNITMQIMXXXXXXXXXLGEMSLEEHSQXE

SEQ ID NO: 19740 - protein, 38 aa, Artificial Sequence
  GFR-binding peptide
  MOD_RES (2), (36), (38): Xaa is C or S
EXVPTEERPVQMRKIRIKPHQGQHKKATVFLQHNKXEX

SEQ ID NO: 19741 - protein, 43 aa, Artificial Sequence
  GFR-binding peptide
  MOD_RES (5), (42): Xaa is C or S
  MOD_RES (21), (22), (23), (24), (25): Xaa is A or G
  MOD_RES (26), (27), (28), (29): Xaa is A or G or is absent
SSVKXQPSRVHHSNITVQIMXXXXXXXXXIGEMSRLEEHLEXA

SEQ ID NO: 19742 - protein, 42 aa, Artificial Sequence
  GFR-binding peptide
  MOD_RES (3), (40), (42): Xaa is C or S
  MOD_RES (19), (20), (21), (22), (23): Xaa is A or G
  MOD_RES (24), (25), (26), (27): Xaa is A or G or is absent
VQXRPTQVQLRSVKVAKVXXXXXXXXXKEVQVTLEDHLAXKX

SEQ ID NO: 19743 - protein, 42 aa, Artificial Sequence
  GFR-binding peptide
  MOD_RES (5), (42): Xaa is C or S
RNVQXRPTQVQLRSVKVAKVEIVRKKPIFKEVQVTLEDHLAX

SEQ ID NO: 19744 - protein, 45 aa, Artificial Sequence
  GFR-binding peptide
  MOD_RES (5), (42), (44): Xaa is C or S
  MOD_RES (21), (22), (23), (24), (25): Xaa is A or G
  MOD_RES (26), (27), (28), (29): Xaa is A or G or is absent
RNVQXRPTQVQLSNITVQIMXXXXXXXXXIGEMSTLEDHLAXKXE

SEQ ID NO: 19745 - protein, 37 aa, Artificial Sequence
  GFR-binding peptide
  MOD_RES (37), (37): Xaa is C or S
  MOD_RES (16), (17), (18), (19), (20): Xaa is A or G
  MOD_RES (21), (22), (23), (24): Xaa is A or G or is absent
QPSRVHHSNITVQIMXXXXXXXXXIGEMSRLEEHLEX

SEQ ID NO: 19746 - protein, 41 aa, Artificial Sequence
  GFR-binding peptide
  MOD_RES (6), (40): Xaa is C or S
  MOD_RES (20), (21), (22), (23), (24): Xaa is A or G
  MOD_RES (25), (26), (27), (28): Xaa is A or G or is absent
DEGLEXVPTEESNITMQIMXXXXXXXXXLGEMSFLQHNKXE

SEQ ID NO: 19747 - protein, 42 aa, Artificial Sequence
  GFR-binding peptide
  MOD_RES (5), (39), (41): Xaa is C or S
EGLEXVPTEESNITMQIMRIKPHQGQHLGEMSFLQHNKXEXR

SEQ ID NO: 19748 - protein, 41 aa, Artificial Sequence
  GFR-binding peptide
  MOD_RES (5), (39), (41): Xaa is C or S
  MOD_RES (19), (20), (21), (22), (23): Xaa is A or G
  MOD_RES (24), (25), (26), (27): Xaa is A or G or is absent
EGLEXVPTEESNITMQIMXXXXXXXXXIGEMSFLQHNKXEX

SEQ ID NO: 19749 - protein, 41 aa, Artificial Sequence
  GFR-binding peptide
  MOD_RES (3), (40): Xaa is C or S
  MOD_RES (19), (20), (21), (22), (23): Xaa is A or G
  MOD_RES (24), (25), (26), (27): Xaa is A or G or is absent
VQXRPTQVQLRPVQVRKIXXXXXXXXXKKATVTLEDHLAXK

SEQ ID NO: 19750 - protein, 39 aa, Artificial Sequence
  GFR-binding peptide
  MOD_RES (3), (3): Xaa is C or S
VKXQPSRVHHSNITVQIMEYVRKKPKLLGEMSRLEEHLE

SEQ ID NO: 19751 - protein, 35 aa, Artificial Sequence
  GFR-binding peptide
  MOD_RES (15), (16), (17), (18), (19): Xaa is A or G
  MOD_RES (20), (21), (22), (23): Xaa is A or G or is absent
PSRVHHRPVQVRKIXXXXXXXXXKKATVRLEEHLE

SEQ ID NO: 19752 - protein, 41 aa, Artificial Sequence
  GFR-binding peptide
  MOD_RES (4), (38), (40): Xaa is C or S
  MOD_RES (18), (19), (20), (21), (22): Xaa is A or G
  MOD_RES (23), (24), (25), (26): Xaa is A or G or is absent
GLEXVPTEESNITMQIMXXXXXXXXXIGEMSFLQHNKXEXR

SEQ ID NO: 19753 - protein, 39 aa, Artificial Sequence
  GFR-binding peptide
  MOD_RES (5), (39): Xaa is C or S
  MOD_RES (19), (20), (21), (22), (23): Xaa is A or G
  MOD_RES (24), (25), (26), (27): Xaa is A or G or is absent
EGLEXVPTEERPVQMRKIXXXXXXXXXKKATVFLQHNKX

SEQ ID NO: 19754 - protein, 36 aa, Artificial Sequence
  GFR-binding peptide
  MOD_RES (3), (3): Xaa is C or S
LEXVPTEERPVQMRKIRIKPHQGQHKKATVFLQHNK

SEQ ID NO: 19755 - protein, 34 aa, Artificial Sequence
  GFR-binding peptide
RPTQVQLSNITVQIMEIVRKKPIFLGEMSTLEDH

SEQ ID NO: 19756 - protein, 42 aa, Artificial Sequence
  GFR-binding peptide
  MOD_RES (7), (41): Xaa is C or S
  MOD_RES (21), (22), (23), (24), (25): Xaa is A or G
  MOD_RES (26), (27), (28), (29): Xaa is A or G or is absent
NDEGLEXVPTGQRPVQMRKIXXXXXXXXXKKATVLEEHSQXE

SEQ ID NO: 19757 - protein, 36 aa, Artificial Sequence
  GFR-binding peptide
  MOD_RES (1), (35): Xaa is C or S
XVPTGQRPVQMRKIRIKPHQGQHKKATVLEEHSQXE

SEQ ID NO: 19758 - protein, 40 aa, Artificial Sequence
  GFR-binding peptide
  MOD_RES (4), (4): Xaa is C or S
NVQXRPTQVQLSNITVQIMEIVRKKPIFIGEMSTLEDHLA

SEQ ID NO: 19759 - protein, 42 aa, Artificial Sequence
  GFR-binding peptide
  MOD_RES (2), (39), (41): Xaa is C or S
QXRPTQVQLSNITVQIMEIVRKKPIFLGEMSTLEDHLAXKXE

SEQ ID NO: 19760 - protein, 35 aa, Artificial Sequence
  GFR-binding peptide
  MOD_RES (35), (35): Xaa is C or S
TQVQLSNITVQIMEIVRKKPIFIGEMSTLEDHLAX

SEQ ID NO: 19761 - protein, 38 aa, Artificial Sequence
  GFR-binding peptide
  MOD_RES (5), (5): Xaa is C or S
EGLEXVPTEERPVQMRKIRIKPHQGQHKKATVFLQHNK

SEQ ID NO: 19762 - protein, 35 aa, Artificial Sequence
  GFR-binding peptide
  MOD_RES (34), (34): Xaa is C or S
VPTGQRSVKMAKVRIKPHQGQHKEVQVLEEHSQXE

SEQ ID NO: 19763 - protein, 39 aa, Artificial Sequence
  GFR-binding peptide
  MOD_RES (36), (38): Xaa is C or S
  MOD_RES (15), (16), (17), (18), (19): Xaa is A or G
  MOD_RES (20), (21), (22), (23): Xaa is A or G or is absent
PTQVQLRSVKVAKVXXXXXXXXXKEVQVTLEDHLAXKXE

SEQ ID NO: 19764 - protein, 44 aa, Artificial Sequence
  GFR-binding peptide
  MOD_RES (4), (41), (43): Xaa is C or S
  MOD_RES (20), (21), (22), (23), (24): Xaa is A or G
  MOD_RES (25), (26), (27), (28): Xaa is A or G or is absent
NVQXRPTQVQLSNITVQIMXXXXXXXXXLGEMSTLEDHLAXKXE

SEQ ID NO: 19765 - protein, 37 aa, Artificial Sequence
  GFR-binding peptide
  MOD_RES (5), (5): Xaa is C or S
  MOD_RES (19), (20), (21), (22), (23): Xaa is A or G
  MOD_RES (24), (25), (26), (27): Xaa is A or G or is absent
EGLEXVPTEERPVQMRKIXXXXXXXXXKKATVFLQHN

SEQ ID NO: 19766 - protein, 39 aa, Artificial Sequence
  GFR-binding peptide
  MOD_RES (2), (36), (38): Xaa is C or S
  MOD_RES (16), (17), (18), (19), (20): Xaa is A or G
  MOD_RES (21), (22), (23), (24): Xaa is A or G or is absent
EXVPTEERSVKMAKVXXXXXXXXXKEVQVFLQHNKXEXR

SEQ ID NO: 19767 - protein, 40 aa, Artificial Sequence
  GFR-binding peptide
  MOD_RES (7), (7): Xaa is C or S
NDEGLEXVPTEERSVKMAKVRIKPHQGQHKEVQVFLQHNK

SEQ ID NO: 19768 - protein, 37 aa, Artificial Sequence
  GFR-binding peptide
  MOD_RES (34), (36): Xaa is C or S
  MOD_RES (14), (15), (16), (17), (18): Xaa is A or G
  MOD_RES (19), (20), (21), (22): Xaa is A or G or is absent
VPTEESNITMQIMXXXXXXXXXIGEMSFLQHNKXEXR

SEQ ID NO: 19769 - protein, 35 aa, Artificial Sequence
  GFR-binding peptide
  MOD_RES (2), (2): Xaa is C or S
EXVPTEERPVQMRKIRIKPHQGQHKKATVFLQHNK

SEQ ID NO: 19770 - protein, 41 aa, Artificial Sequence
  GFR-binding peptide
  MOD_RES (3), (40): Xaa is C or S
  MOD_RES (19), (20), (21), (22), (23): Xaa is A or G
  MOD_RES (24), (25), (26), (27): Xaa is A or G or is absent
VQXRPTQVQLSNITVQIMXXXXXXXXXLGEMSTLEDHLAXK

SEQ ID NO: 19771 - protein, 38 aa, Artificial Sequence
  GFR-binding peptide
  MOD_RES (4), (38): Xaa is C or S
GLEXVPTEERSVKMAKVRIKPHQGQHKEVQVFLQHNKX

SEQ ID NO: 19772 - protein, 38 aa, Artificial Sequence
  GFR-binding peptide
  MOD_RES (4), (4): Xaa is C or S
  MOD_RES (20), (21), (22), (23), (24): Xaa is A or G
  MOD_RES (25), (26), (27), (28): Xaa is A or G or is absent
SVKXQPSRVHHSNITVQIMXXXXXXXXXIGEMSRLEEH

SEQ ID NO: 19773 - protein, 38 aa, Artificial Sequence
  GFR-binding peptide
  MOD_RES (35), (37): Xaa is C or S
  MOD_RES (14), (15), (16), (17), (18): Xaa is A or G
  MOD_RES (19), (20), (21), (22): Xaa is A or G or is absent
SRVHHRSVKVAKVXXXXXXXXXKEVQVRLEEHLEXAXA

SEQ ID NO: 19774 - protein, 35 aa, Artificial Sequence
  GFR-binding peptide
  MOD_RES (1), (1): Xaa is C or S
XRPTQVQLRSVKVAKVEIVRKKPIFKEVQVTLEDH

SEQ ID NO: 19775 - protein, 37 aa, Artificial Sequence
  GFR-binding peptide
  MOD_RES (36), (36): Xaa is C or S
  MOD_RES (15), (16), (17), (18), (19): Xaa is A or G
  MOD_RES (20), (21), (22), (23): Xaa is A or G or is absent
PSRVHHSNITVQIMXXXXXXXXXIGEMSRLEEHLEXA

SEQ ID NO: 19776 - protein, 39 aa, Artificial Sequence
  GFR-binding peptide
  MOD_RES (7), (7): Xaa is C or S
  MOD_RES (21), (22), (23), (24), (25): Xaa is A or G
  MOD_RES (26), (27), (28), (29): Xaa is A or G or is absent
NDEGLEXVPTGQRPVQMRKIXXXXXXXXXKKATVLEEHS

SEQ ID NO: 19777 - protein, 36 aa, Artificial Sequence
  GFR-binding peptide
  MOD_RES (1), (35): Xaa is C or S
XVPTGQRSVKMAKVRIKPHQGQHKEVQVLEEHSQXE

SEQ ID NO: 19778 - protein, 35 aa, Artificial Sequence
  GFR-binding peptide
  MOD_RES (2), (2): Xaa is C or S
EXVPTGQRPVQMRKIRIKPHQGQHKKATVLEEHSQ

SEQ ID NO: 19779 - protein, 38 aa, Artificial Sequence
  GFR-binding peptide
  MOD_RES (5), (5): Xaa is C or S
  MOD_RES (19), (20), (21), (22), (23): Xaa is A or G
  MOD_RES (24), (25), (26), (27): Xaa is A or G or is absent
EGLEXVPTEESNITMQIMXXXXXXXXXLGEMSFLQHNK

SEQ ID NO: 19780 - protein, 36 aa, Artificial Sequence
  GFR-binding peptide
  MOD_RES (35), (35): Xaa is C or S
SRVHHSNITVQIMEYVRKKPKLLGEMSRLEEHLEXA

SEQ ID NO: 19781 - protein, 41 aa, Artificial Sequence
  GFR-binding peptide
  MOD_RES (5), (5): Xaa is C or S
  MOD_RES (21), (22), (23), (24), (25): Xaa is A or G
  MOD_RES (26), (27), (28), (29): Xaa is A or G or is absent
SSVKXQPSRVHHSNITVQIMXXXXXXXXXLGEMSRLEEHLE

SEQ ID NO: 19782 - protein, 39 aa, Artificial Sequence
  GFR-binding peptide
  MOD_RES (3), (3): Xaa is C or S
  MOD_RES (19), (20), (21), (22), (23): Xaa is A or G
  MOD_RES (24), (25), (26), (27): Xaa is A or G or is absent
VQXRPTQVQLSNITVQIMXXXXXXXXXLGEMSTLEDHLA

SEQ ID NO: 19783 - protein, 38 aa, Artificial Sequence
  GFR-binding peptide
  MOD_RES (3), (3): Xaa is C or S
  MOD_RES (19), (20), (21), (22), (23): Xaa is A or G
  MOD_RES (24), (25), (26), (27): Xaa is A or G or is absent
VKXQPSRVHHSNITVQIMXXXXXXXXXLGEMSRLEEHL

SEQ ID NO: 19784 - protein, 38 aa, Artificial Sequence
  GFR-binding peptide
  MOD_RES (2), (2): Xaa is C or S
  MOD_RES (18), (19), (20), (21), (22): Xaa is A or G
  MOD_RES (23), (24), (25), (26): Xaa is A or G or is absent
QXRPTQVQLSNITVQIMXXXXXXXXXIGEMSTLEDHLA

SEQ ID NO: 19785 - protein, 35 aa, Artificial Sequence
  GFR-binding peptide
  MOD_RES (3), (3): Xaa is C or S
LEXVPTGQRPVQMRKIRIKPHQGQHKKATVLEEHS

SEQ ID NO: 19786 - protein, 41 aa, Artificial Sequence
  GFR-binding peptide
  MOD_RES (5), (5): Xaa is C or S
RNVQXRPTQVQLSNITVQIMEIVRKKPIFIGEMSTLEDHLA

SEQ ID NO: 19787 - protein, 35 aa, Artificial Sequence
  GFR-binding peptide
  MOD_RES (2), (2): Xaa is C or S
  MOD_RES (16), (17), (18), (19), (20): Xaa is A or G
  MOD_RES (21), (22), (23), (24): Xaa is A or G or is absent
EXVPTGQSNITMQIMXXXXXXXXXLGEMSLEEHSQ

SEQ ID NO: 19788 - protein, 32 aa, Artificial Sequence
  GFR-binding peptide
  MOD_RES (14), (15), (16), (17), (18): Xaa is A or G
  MOD_RES (19), (20), (21), (22): Xaa is A or G or is absent
SRVHHRPVQVRKIXXXXXXXXXKKATVRLEEH

SEQ ID NO: 19789 - protein, 36 aa, Artificial Sequence
  GFR-binding peptide
  MOD_RES (1), (1): Xaa is C or S
XRPTQVQLRSVKVAKVEIVRKKPIFKEVQVTLEDHL

SEQ ID NO: 19790 - protein, 36 aa, Artificial Sequence
  GFR-binding peptide
  MOD_RES (35), (35): Xaa is C or S
  MOD_RES (14), (15), (16), (17), (18): Xaa is A or G
  MOD_RES (19), (20), (21), (22): Xaa is A or G or is absent
SRVHHSNITVQIMXXXXXXXXXIGEMSRLEEHLEXA

SEQ ID NO: 19791 - protein, 44 aa, Artificial Sequence
  GFR-binding peptide
  MOD_RES (4), (41), (43): Xaa is C or S
  MOD_RES (20), (21), (22), (23), (24): Xaa is A or G
  MOD_RES (25), (26), (27), (28): Xaa is A or G or is absent
SVKXQPSRVHHRPVQVRKIXXXXXXXXXKKATVRLEEHLEXAXA

SEQ ID NO: 19792 - protein, 44 aa, Artificial Sequence
  GFR-binding peptide
  MOD_RES (7), (41), (43): Xaa is C or S
  MOD_RES (21), (22), (23), (24), (25): Xaa is A or G
  MOD_RES (26), (27), (28), (29): Xaa is A or G or is absent
NDEGLEXVPTGQSNITMQIMXXXXXXXXXLGEMSLEEHSQXEXR

SEQ ID NO: 19793 - protein, 39 aa, Artificial Sequence
  GFR-binding peptide
  MOD_RES (2), (36), (38): Xaa is C or S
  MOD_RES (16), (17), (18), (19), (20): Xaa is A or G
  MOD_RES (21), (22), (23), (24): Xaa is A or G or is absent
EXVPTGQRPVQMRKIXXXXXXXXXKKATVLEEHSQXEXR

SEQ ID NO: 19794 - protein, 42 aa, Artificial Sequence
  GFR-binding peptide
  MOD_RES (3), (40), (42): Xaa is C or S
VKXQPSRVHHSNITVQIMEYVRKKPKLLGEMSRLEEHLEXAX

SEQ ID NO: 19795 - protein, 39 aa, Artificial Sequence
  GFR-binding peptide
  MOD_RES (4), (4): Xaa is C or S
  MOD_RES (20), (21), (22), (23), (24): Xaa is A or G
  MOD_RES (25), (26), (27), (28): Xaa is A or G or is absent
NVQXRPTQVQLRPVQVRKIXXXXXXXXXKKATVTLEDHL

SEQ ID NO: 19796 - protein, 34 aa, Artificial Sequence
  GFR-binding peptide
  MOD_RES (2), (2): Xaa is C or S
  MOD_RES (16), (17), (18), (19), (20): Xaa is A or G
  MOD_RES (21), (22), (23), (24): Xaa is A or G or is absent
EXVPTEERSVKMAKVXXXXXXXXXKEVQVFLQHN

SEQ ID NO: 19797 - protein, 35 aa, Artificial Sequence
  GFR-binding peptide
  MOD_RES (16), (17), (18), (19), (20): Xaa is A or G
  MOD_RES (21), (22), (23), (24): Xaa is A or G or is absent
QPSRVHHRSVKVAKVXXXXXXXXXKEVQVRLEEHL

SEQ ID NO: 19798 - protein, 43 aa, Artificial Sequence
  GFR-binding peptide
  MOD_RES (3), (40), (42): Xaa is C or S
  MOD_RES (19), (20), (21), (22), (23): Xaa is A or G
  MOD_RES (24), (25), (26), (27): Xaa is A or G or is absent
VKXQPSRVHHRPVQVRKIXXXXXXXXXKKATVRLEEHLEXAXA

SEQ ID NO: 19799 - protein, 40 aa, Artificial Sequence
  GFR-binding peptide
  MOD_RES (5), (39): Xaa is C or S
  MOD_RES (19), (20), (21), (22), (23): Xaa is A or G
  MOD_RES (24), (25), (26), (27): Xaa is A or G or is absent
EGLEXVPTEESNITMQIMXXXXXXXXXIGEMSFLQHNKXE

SEQ ID NO: 19800 - protein, 36 aa, Artificial Sequence
  GFR-binding peptide
  MOD_RES (2), (2): Xaa is C or S
QXRPTQVQLSNITVQIMEIVRKKPIFIGEMSTLEDH

SEQ ID NO: 19801 - protein, 40 aa, Artificial Sequence
  GFR-binding peptide
  MOD_RES (5), (39): Xaa is C or S
  MOD_RES (19), (20), (21), (22), (23): Xaa is A or G
  MOD_RES (24), (25), (26), (27): Xaa is A or G or is absent
EGLEXVPTEERPVQMRKIXXXXXXXXXKKATVFLQHNKXE

SEQ ID NO: 19802 - protein, 35 aa, Artificial Sequence
  GFR-binding peptide
  MOD_RES (34), (34): Xaa is C or S
  MOD_RES (14), (15), (16), (17), (18): Xaa is A or G
  MOD_RES (19), (20), (21), (22): Xaa is A or G or is absent
VPTEERSVKMAKVXXXXXXXXXKEVQVFLQHNKXE

SEQ ID NO: 19803 - protein, 40 aa, Artificial Sequence
  GFR-binding peptide
  MOD_RES (5), (39): Xaa is C or S
  MOD_RES (19), (20), (21), (22), (23): Xaa is A or G
  MOD_RES (24), (25), (26), (27): Xaa is A or G or is absent
EGLEXVPTGQRSVKMAKVXXXXXXXXXKEVQVLEEHSQXE

SEQ ID NO: 19804 - protein, 39 aa, Artificial Sequence
  GFR-binding peptide
  MOD_RES (37), (39): Xaa is C or S
  MOD_RES (16), (17), (18), (19), (20): Xaa is A or G
  MOD_RES (21), (22), (23), (24): Xaa is A or G or is absent
RPTQVQLRSVKVAKVXXXXXXXXXKEVQVTLEDHLAXKX

SEQ ID NO: 19805 - protein, 36 aa, Artificial Sequence
  GFR-binding peptide
  MOD_RES (16), (17), (18), (19), (20): Xaa is A or G
  MOD_RES (21), (22), (23), (24): Xaa is A or G or is absent
QPSRVHHRSVKVAKVXXXXXXXXXKEVQVRLEEHLE

SEQ ID NO: 19806 - protein, 36 aa, Artificial Sequence
  GFR-binding peptide
  MOD_RES (2), (36): Xaa is C or S
  MOD_RES (16), (17), (18), (19), (20): Xaa is A or G
  MOD_RES (21), (22), (23), (24): Xaa is A or G or is absent
EXVPTEERSVKMAKVXXXXXXXXXKEVQVFLQHNKX

SEQ ID NO: 19807 - protein, 39 aa, Artificial Sequence
  GFR-binding peptide
  MOD_RES (6), (6): Xaa is C or S
DEGLEXVPTGQRSVKMAKVRIKPHQGQHKEVQVLEEHSQ

SEQ ID NO: 19808 - protein, 38 aa, Artificial Sequence
  GFR-binding peptide
  MOD_RES (1), (35), (37): Xaa is C or S
XVPTEESNITMQIMRIKPHQGQHLGEMSFLQHNKXEXR

SEQ ID NO: 19809 - protein, 34 aa, Artificial Sequence
  GFR-binding peptide
  MOD_RES (1), (1): Xaa is C or S
  MOD_RES (15), (16), (17), (18), (19): Xaa is A or G
  MOD_RES (20), (21), (22), (23): Xaa is A or G or is absent
XVPTEERPVQMRKIXXXXXXXXXKKATVFLQHNK

SEQ ID NO: 19810 - protein, 35 aa, Artificial Sequence
  GFR-binding peptide
  MOD_RES (16), (17), (18), (19), (20): Xaa is A or G
  MOD_RES (21), (22), (23), (24): Xaa is A or G or is absent
RPTQVQLRSVKVAKVXXXXXXXXXKEVQVTLEDHL

SEQ ID NO: 19811 - protein, 40 aa, Artificial Sequence
  GFR-binding peptide
  MOD_RES (2), (39): Xaa is C or S
  MOD_RES (18), (19), (20), (21), (22): Xaa is A or G
  MOD_RES (23), (24), (25), (26): Xaa is A or G or is absent
KXQPSRVHHSNITVQIMXXXXXXXXXLGEMSRLEEHLEXA

SEQ ID NO: 19812 - protein, 44 aa, Artificial Sequence
  GFR-binding peptide
  MOD_RES (7), (41), (43): Xaa is C or S
NDEGLEXVPTEERSVKMAKVRIKPHQGQHKEVQVFLQHNKXEXR

SEQ ID NO: 19813 - protein, 36 aa, Artificial Sequence
  GFR-binding peptide
  MOD_RES (1), (1): Xaa is C or S
XQPSRVHHRPVQVRKIEYVRKKPKLKKATVRLEEHL

SEQ ID NO: 19814 - protein, 39 aa, Artificial Sequence
  GFR-binding peptide
  MOD_RES (37), (39): Xaa is C or S
  MOD_RES (16), (17), (18), (19), (20): Xaa is A or G
  MOD_RES (21), (22), (23), (24): Xaa is A or G or is absent
RPTQVQLRPVQVRKIXXXXXXXXXKKATVTLEDHLAXKX

SEQ ID NO: 19815 - protein, 39 aa, Artificial Sequence
  GFR-binding peptide
  MOD_RES (4), (38): Xaa is C or S
GLEXVPTEESNITMQIMRIKPHQGQHLGEMSFLQHNKXE

SEQ ID NO: 19816 - protein, 43 aa, Artificial Sequence
  GFR-binding peptide
  MOD_RES (3), (40), (42): Xaa is C or S
VQXRPTQVQLSNITVQIMEIVRKKPIFIGEMSTLEDHLAXKXE

SEQ ID NO: 19817 - protein, 36 aa, Artificial Sequence
  GFR-binding peptide
  MOD_RES (2), (36): Xaa is C or S
EXVPTGQSNITMQIMRIKPHQGQHIGEMSLEEHSQX

SEQ ID NO: 19818 - protein, 42 aa, Artificial Sequence
  GFR-binding peptide
  MOD_RES (5), (39), (41): Xaa is C or S
EGLEXVPTGQSNITMQIMRIKPHQGQHIGEMSLEEHSQXEXR

SEQ ID NO: 19819 - protein, 41 aa, Artificial Sequence
  GFR-binding peptide
  MOD_RES (4), (41): Xaa is C or S
  MOD_RES (20), (21), (22), (23), (24): Xaa is A or G
  MOD_RES (25), (26), (27), (28): Xaa is A or G or is absent
SVKXQPSRVHHSNITVQIMXXXXXXXXXIGEMSRLEEHLEX

SEQ ID NO: 19820 - protein, 43 aa, Artificial Sequence
  GFR-binding peptide
  MOD_RES (4), (41), (43): Xaa is C or S
  MOD_RES (20), (21), (22), (23), (24): Xaa is A or G
  MOD_RES (25), (26), (27), (28): Xaa is A or G or is absent
NVQXRPTQVQLRPVQVRKIXXXXXXXXXKKATVTLEDHLAXKX

SEQ ID NO: 19821 - protein, 34 aa, Artificial Sequence
  GFR-binding peptide
  MOD_RES (2), (2): Xaa is C or S
  MOD_RES (16), (17), (18), (19), (20): Xaa is A or G
  MOD_RES (21), (22), (23), (24): Xaa is A or G or is absent
EXVPTGQSNITMQIMXXXXXXXXXLGEMSLEEHS

SEQ ID NO: 19822 - protein, 40 aa, Artificial Sequence
  GFR-binding peptide
  MOD_RES (5), (39): Xaa is C or S
  MOD_RES (19), (20), (21), (22), (23): Xaa is A or G
  MOD_RES (24), (25), (26), (27): Xaa is A or G or is absent
EGLEXVPTEESNITMQIMXXXXXXXXXLGEMSFLQHNKXE

SEQ ID NO: 19823 - protein, 44 aa, Artificial Sequence
  GFR-binding peptide
  MOD_RES (7), (41), (43): Xaa is C or S
NDEGLEXVPTEERPVQMRKIRIKPHQGQHKKATVFLQHNKXEXR

SEQ ID NO: 19824 - protein, 39 aa, Artificial Sequence
  GFR-binding peptide
  MOD_RES (1), (38): Xaa is C or S
  MOD_RES (17), (18), (19), (20), (21): Xaa is A or G
  MOD_RES (22), (23), (24), (25): Xaa is A or G or is absent
XRPTQVQLRPVQVRKIXXXXXXXXXKKATVTLEDHLAXK

SEQ ID NO: 19825 - protein, 37 aa, Artificial Sequence
  GFR-binding peptide
  MOD_RES (36), (36): Xaa is C or S
PTQVQLSNITVQIMEIVRKKPIFLGEMSTLEDHLAXK

SEQ ID NO: 19826 - protein, 36 aa, Artificial Sequence
  GFR-binding peptide
  MOD_RES (36), (36): Xaa is C or S
  MOD_RES (15), (16), (17), (18), (19): Xaa is A or G
  MOD_RES (20), (21), (22), (23): Xaa is A or G or is absent
PSRVHHRSVKVAKVXXXXXXXXXKEVQVRLEEHLEX

SEQ ID NO: 19827 - protein, 38 aa, Artificial Sequence
  GFR-binding peptide
  MOD_RES (3), (37): Xaa is C or S
  MOD_RES (17), (18), (19), (20), (21): Xaa is A or G
  MOD_RES (22), (23), (24), (25): Xaa is A or G or is absent
LEXVPTGQRSVKMAKVXXXXXXXXXKEVQVLEEHSQXE

SEQ ID NO: 19828 - protein, 43 aa, Artificial Sequence
  GFR-binding peptide
  MOD_RES (4), (41), (43): Xaa is C or S
  MOD_RES (20), (21), (22), (23), (24): Xaa is A or G
  MOD_RES (25), (26), (27), (28): Xaa is A or G or is absent
NVQXRPTQVQLRSVKVAKVXXXXXXXXXKEVQVTLEDHLAXKX

SEQ ID NO: 19829 - protein, 38 aa, Artificial Sequence
  GFR-binding peptide
  MOD_RES (4), (38): Xaa is C or S
  MOD_RES (18), (19), (20), (21), (22): Xaa is A or G
  MOD_RES (23), (24), (25), (26): Xaa is A or G or is absent
GLEXVPTEERSVKMAKVXXXXXXXXXKEVQVFLQHNKX

SEQ ID NO: 19830 - protein, 38 aa, Artificial Sequence
  GFR-binding peptide
  MOD_RES (3), (37): Xaa is C or S
  MOD_RES (17), (18), (19), (20), (21): Xaa is A or G
  MOD_RES (22), (23), (24), (25): Xaa is A or G or is absent
LEXVPTEESNITMQIMXXXXXXXXXIGEMSFLQHNKXE

SEQ ID NO: 19831 - protein, 34 aa, Artificial Sequence
  GFR-binding peptide
  MOD_RES (2), (2): Xaa is C or S
EXVPTGQRSVKMAKVRIKPHQGQHKEVQVLEEHS

SEQ ID NO: 19832 - protein, 39 aa, Artificial Sequence
  GFR-binding peptide
  MOD_RES (1), (38): Xaa is C or S
XRPTQVQLSNITVQIMEIVRKKPIFLGEMSTLEDHLAXK

SEQ ID NO: 19833 - protein, 38 aa, Artificial Sequence
  GFR-binding peptide
  MOD_RES (4), (4): Xaa is C or S
  MOD_RES (20), (21), (22), (23), (24): Xaa is A or G
  MOD_RES (25), (26), (27), (28): Xaa is A or G or is absent
NVQXRPTQVQLSNITVQIMXXXXXXXXXLGEMSTLEDH

SEQ ID NO: 19834 - protein, 36 aa, Artificial Sequence
  GFR-binding peptide
  MOD_RES (2), (2): Xaa is C or S
  MOD_RES (18), (19), (20), (21), (22): Xaa is A or G
  MOD_RES (23), (24), (25), (26): Xaa is A or G or is absent
QXRPTQVQLRPVQVRKIXXXXXXXXXKKATVTLEDH

SEQ ID NO: 19835 - protein, 34 aa, Artificial Sequence
  GFR-binding peptide
  MOD_RES (14), (15), (16), (17), (18): Xaa is A or G
  MOD_RES (19), (20), (21), (22): Xaa is A or G or is absent
TQVQLSNITVQIMXXXXXXXXXIGEMSTLEDHLA

SEQ ID NO: 19836 - protein, 42 aa, Artificial Sequence
  GFR-binding peptide
  MOD_RES (6), (40), (42): Xaa is C or S
  MOD_RES (20), (21), (22), (23), (24): Xaa is A or G
  MOD_RES (25), (26), (27), (28): Xaa is A or G or is absent
DEGLEXVPTEERSVKMAKVXXXXXXXXXKEVQVFLQHNKXEX

SEQ ID NO: 19837 - protein, 38 aa, Artificial Sequence
  GFR-binding peptide
  MOD_RES (5), (5): Xaa is C or S
EGLEXVPTGQRSVKMAKVRIKPHQGQHKEVQVLEEHSQ

SEQ ID NO: 19838 - protein, 40 aa, Artificial Sequence
  GFR-binding peptide
  MOD_RES (2), (39): Xaa is C or S
  MOD_RES (18), (19), (20), (21), (22): Xaa is A or G
  MOD_RES (23), (24), (25), (26): Xaa is A or G or is absent
QXRPTQVQLRPVQVRKIXXXXXXXXXKKATVTLEDHLAXK

SEQ ID NO: 19839 - protein, 42 aa, Artificial Sequence
  GFR-binding peptide
  MOD_RES (3), (40), (42): Xaa is C or S
  MOD_RES (19), (20), (21), (22), (23): Xaa is A or G
  MOD_RES (24), (25), (26), (27): Xaa is A or G or is absent
VKXQPSRVHHRPVQVRKIXXXXXXXXXKKATVRLEEHLEXAX

SEQ ID NO: 19840 - protein, 44 aa, Artificial Sequence
  GFR-binding peptide
  MOD_RES (5), (42), (44): Xaa is C or S
  MOD_RES (21), (22), (23), (24), (25): Xaa is A or G
  MOD_RES (26), (27), (28), (29): Xaa is A or G or is absent
RNVQXRPTQVQLRPVQVRKIXXXXXXXXXKKATVTLEDHLAXKX

SEQ ID NO: 19841 - protein, 41 aa, Artificial Sequence
  GFR-binding peptide
  MOD_RES (4), (41): Xaa is C or S
  MOD_RES (20), (21), (22), (23), (24): Xaa is A or G
  MOD_RES (25), (26), (27), (28): Xaa is A or G or is absent
SVKXQPSRVHHSNITVQIMXXXXXXXXXLGEMSRLEEHLEX

SEQ ID NO: 19842 - protein, 37 aa, Artificial Sequence
  GFR-binding peptide
  MOD_RES (35), (37): Xaa is C or S
  MOD_RES (14), (15), (16), (17), (18): Xaa is A or G
  MOD_RES (19), (20), (21), (22): Xaa is A or G or is absent
SRVHHSNITVQIMXXXXXXXXXIGEMSRLEEHLEXAX

SEQ ID NO: 19843 - protein, 38 aa, Artificial Sequence
  GFR-binding peptide
  MOD_RES (6), (6): Xaa is C or S
  MOD_RES (20), (21), (22), (23), (24): Xaa is A or G
  MOD_RES (25), (26), (27), (28): Xaa is A or G or is absent
DEGLEXVPTGQRPVQMRKIXXXXXXXXXKKATVLEEHS

SEQ ID NO: 19844 - protein, 43 aa, Artificial Sequence
  GFR-binding peptide
  MOD_RES (4), (41), (43): Xaa is C or S
NVQXRPTQVQLSNITVQIMEIVRKKPIFLGEMSTLEDHLAXKX

SEQ ID NO: 19845 - protein, 39 aa, Artificial Sequence
  GFR-binding peptide
  MOD_RES (2), (36), (38): Xaa is C or S
  MOD_RES (16), (17), (18), (19), (20): Xaa is A or G
  MOD_RES (21), (22), (23), (24): Xaa is A or G or is absent
EXVPTGQRSVKMAKVXXXXXXXXXKEVQVLEEHSQXEXR

SEQ ID NO: 19846 - protein, 35 aa, Artificial Sequence
  GFR-binding peptide
  MOD_RES (3), (3): Xaa is C or S
  MOD_RES (17), (18), (19), (20), (21): Xaa is A or G
  MOD_RES (22), (23), (24), (25): Xaa is A or G or is absent
LEXVPTGQRSVKMAKVXXXXXXXXXKEVQVLEEHS

SEQ ID NO: 19847 - protein, 37 aa, Artificial Sequence
  GFR-binding peptide
  MOD_RES (1), (35), (37): Xaa is C or S
  MOD_RES (15), (16), (17), (18), (19): Xaa is A or G
  MOD_RES (20), (21), (22), (23): Xaa is A or G or is absent
XVPTEESNITMQIMXXXXXXXXXIGEMSFLQHNKXEX

SEQ ID NO: 19848 - protein, 34 aa, Artificial Sequence
  GFR-binding peptide
  MOD_RES (1), (1): Xaa is C or S
XVPTEERSVKMAKVRIKPHQGQHKEVQVFLQHNK

SEQ ID NO: 19849 - protein, 39 aa, Artificial Sequence
  GFR-binding peptide
  MOD_RES (3), (3): Xaa is C or S
VKXQPSRVHHRPVQVRKIEYVRKKPKLKKATVRLEEHLE

SEQ ID NO: 19850 - protein, 37 aa, Artificial Sequence
  GFR-binding peptide
  MOD_RES (3), (3): Xaa is C or S
  MOD_RES (19), (20), (21), (22), (23): Xaa is A or G
  MOD_RES (24), (25), (26), (27): Xaa is A or G or is absent
VQXRPTQVQLSNITVQIMXXXXXXXXXLGEMSTLEDH

SEQ ID NO: 19851 - protein, 35 aa, Artificial Sequence
  GFR-binding peptide
  MOD_RES (2), (2): Xaa is C or S
EXVPTEESNITMQIMRIKPHQGQHLGEMSFLQHNK

SEQ ID NO: 19852 - protein, 38 aa, Artificial Sequence
  GFR-binding peptide
  MOD_RES (4), (4): Xaa is C or S
  MOD_RES (20), (21), (22), (23), (24): Xaa is A or G
  MOD_RES (25), (26), (27), (28): Xaa is A or G or is absent
NVQXRPTQVQLSNITVQIMXXXXXXXXXIGEMSTLEDH

SEQ ID NO: 19853 - protein, 42 aa, Artificial Sequence
  GFR-binding peptide
  MOD_RES (3), (40), (42): Xaa is C or S
  MOD_RES (19), (20), (21), (22), (23): Xaa is A or G
  MOD_RES (24), (25), (26), (27): Xaa is A or G or is absent
VKXQPSRVHHRSVKVAKVXXXXXXXXXKEVQVRLEEHLEXAX

SEQ ID NO: 19854 - protein, 37 aa, Artificial Sequence
  GFR-binding peptide
  MOD_RES (37), (37): Xaa is C or S
RPTQVQLRSVKVAKVEIVRKKPIFKEVQVTLEDHLAX

SEQ ID NO: 19855 - protein, 36 aa, Artificial Sequence
  GFR-binding peptide
  MOD_RES (1), (35): Xaa is C or S
XVPTEERPVQMRKIRIKPHQGQHKKATVFLQHNKXE

SEQ ID NO: 19856 - protein, 39 aa, Artificial Sequence
  GFR-binding peptide
  MOD_RES (1), (38): Xaa is C or S
  MOD_RES (17), (18), (19), (20), (21): Xaa is A or G
  MOD_RES (22), (23), (24), (25): Xaa is A or G or is absent
XQPSRVHHRSVKVAKVXXXXXXXXXKEVQVRLEEHLEXA

SEQ ID NO: 19857 - protein, 35 aa, Artificial Sequence
  GFR-binding peptide
  MOD_RES (2), (2): Xaa is C or S
  MOD_RES (16), (17), (18), (19), (20): Xaa is A or G
  MOD_RES (21), (22), (23), (24): Xaa is A or G or is absent
EXVPTEERSVKMAKVXXXXXXXXXKEVQVFLQHNK

SEQ ID NO: 19858 - protein, 39 aa, Artificial Sequence
  GFR-binding peptide
  MOD_RES (4), (4): Xaa is C or S
  MOD_RES (20), (21), (22), (23), (24): Xaa is A or G
  MOD_RES (25), (26), (27), (28): Xaa is A or G or is absent
SVKXQPSRVHHSNITVQIMXXXXXXXXXIGEMSRLEEHL

SEQ ID NO: 19859 - protein, 40 aa, Artificial Sequence
  GFR-binding peptide
  MOD_RES (37), (39): Xaa is C or S
QPSRVHHSNITVQIMEYVRKKPKLLGEMSRLEEHLEXAXA

SEQ ID NO: 19860 - protein, 40 aa, Artificial Sequence
  GFR-binding peptide
  MOD_RES (3), (40): Xaa is C or S
VKXQPSRVHHRPVQVRKIEYVRKKPKLKKATVRLEEHLEX

SEQ ID NO: 19861 - protein, 36 aa, Artificial Sequence
  GFR-binding peptide
  MOD_RES (2), (2): Xaa is C or S
KXQPSRVHHRPVQVRKIEYVRKKPKLKKATVRLEEH

SEQ ID NO: 19862 - protein, 35 aa, Artificial Sequence
  GFR-binding peptide
QPSRVHHSNITVQIMEYVRKKPKLIGEMSRLEEHL

SEQ ID NO: 19863 - protein, 39 aa, Artificial Sequence
  GFR-binding peptide
  MOD_RES (6), (6): Xaa is C or S
DEGLEXVPTGQSNITMQIMRIKPHQGQHIGEMSLEEHSQ

SEQ ID NO: 19864 - protein, 38 aa, Artificial Sequence
  GFR-binding peptide
  MOD_RES (35), (37): Xaa is C or S
  MOD_RES (14), (15), (16), (17), (18): Xaa is A or G
  MOD_RES (19), (20), (21), (22): Xaa is A or G or is absent
SRVHHSNITVQIMXXXXXXXXXLGEMSRLEEHLEXAXA

SEQ ID NO: 19865 - protein, 43 aa, Artificial Sequence
  GFR-binding peptide
  MOD_RES (7), (41), (43): Xaa is C or S
NDEGLEXVPTGQRPVQMRKIRIKPHQGQHKKATVLEEHSQXEX

SEQ ID NO: 19866 - protein, 40 aa, Artificial Sequence
  GFR-binding peptide
  MOD_RES (1), (38), (40): Xaa is C or S
XQPSRVHHSNITVQIMEYVRKKPKLLGEMSRLEEHLEXAX

SEQ ID NO: 19867 - protein, 40 aa, Artificial Sequence
  GFR-binding peptide
  MOD_RES (1), (38), (40): Xaa is C or S
XQPSRVHHSNITVQIMEYVRKKPKLIGEMSRLEEHLEXAX

SEQ ID NO: 19868 - protein, 44 aa, Artificial Sequence
  GFR-binding peptide
  MOD_RES (7), (41), (43): Xaa is C or S
  MOD_RES (21), (22), (23), (24), (25): Xaa is A or G
  MOD_RES (26), (27), (28), (29): Xaa is A or G or is absent
NDEGLEXVPTEERPVQMRKIXXXXXXXXXKKATVFLQHNKXEXR

SEQ ID NO: 19869 - protein, 33 aa, Artificial Sequence
  GFR-binding peptide
PTQVQLSNITVQIMEIVRKKPIFIGEMSTLEDH

SEQ ID NO: 19870 - protein, 36 aa, Artificial Sequence
  GFR-binding peptide
  MOD_RES (1), (1): Xaa is C or S
XRPTQVQLSNITVQIMEIVRKKPIFIGEMSTLEDHL

SEQ ID NO: 19871 - protein, 34 aa, Artificial Sequence
  GFR-binding peptide
  MOD_RES (14), (15), (16), (17), (18): Xaa is A or G
  MOD_RES (19), (20), (21), (22): Xaa is A or G or is absent
SRVHHRSVKVAKVXXXXXXXXXKEVQVRLEEHLE

SEQ ID NO: 19872 - protein, 33 aa, Artificial Sequence
  GFR-binding peptide
TQVQLRSVKVAKVEIVRKKPIFKEVQVTLEDHL

SEQ ID NO: 19873 - protein, 34 aa, Artificial Sequence
  GFR-binding peptide
PSRVHHSNITVQIMEYVRKKPKLLGEMSRLEEHL

SEQ ID NO: 19874 - protein, 40 aa, Artificial Sequence
  GFR-binding peptide
  MOD_RES (4), (4): Xaa is C or S
SVKXQPSRVHHSNITVQIMEYVRKKPKLIGEMSRLEEHLE

SEQ ID NO: 19875 - protein, 35 aa, Artificial Sequence
  GFR-binding peptide
  MOD_RES (15), (16), (17), (18), (19): Xaa is A or G
  MOD_RES (20), (21), (22), (23): Xaa is A or G or is absent
PTQVQLSNITVQIMXXXXXXXXXIGEMSTLEDHLA

SEQ ID NO: 19876 - protein, 43 aa, Artificial Sequence
  GFR-binding peptide
  MOD_RES (4), (41), (43): Xaa is C or S
  MOD_RES (20), (21), (22), (23), (24): Xaa is A or G
  MOD_RES (25), (26), (27), (28): Xaa is A or G or is absent
SVKXQPSRVHHRSVKVAKVXXXXXXXXXKEVQVRLEEHLEXAX

SEQ ID NO: 19877 - protein, 41 aa, Artificial Sequence
  GFR-binding peptide
  MOD_RES (5), (39), (41): Xaa is C or S
  MOD_RES (19), (20), (21), (22), (23): Xaa is A or G
  MOD_RES (24), (25), (26), (27): Xaa is A or G or is absent
EGLEXVPTEERSVKMAKVXXXXXXXXXKEVQVFLQHNKXEX

SEQ ID NO: 19878 - protein, 34 aa, Artificial Sequence
  GFR-binding peptide
  MOD_RES (34), (34): Xaa is C or S
VPTGQSNITMQIMRIKPHQGQHIGEMSLEEHSQX

SEQ ID NO: 19879 - protein, 36 aa, Artificial Sequence
  GFR-binding peptide
  MOD_RES (2), (2): Xaa is C or S
KXQPSRVHHSNITVQIMEYVRKKPKLIGEMSRLEEH

SEQ ID NO: 19880 - protein, 40 aa, Artificial Sequence
  GFR-binding peptide
  MOD_RES (7), (7): Xaa is C or S
NDEGLEXVPTEERPVQMRKIRIKPHQGQHKKATVFLQHNK

SEQ ID NO: 19881 - protein, 37 aa, Artificial Sequence
  GFR-binding peptide
  MOD_RES (36), (36): Xaa is C or S
  MOD_RES (15), (16), (17), (18), (19): Xaa is A or G
  MOD_RES (20), (21), (22), (23): Xaa is A or G or is absent
PSRVHHRSVKVAKVXXXXXXXXXKEVQVRLEEHLEXA

SEQ ID NO: 19882 - protein, 36 aa, Artificial Sequence
  GFR-binding peptide
RPTQVQLRSVKVAKVEIVRKKPIFKEVQVTLEDHLA

SEQ ID NO: 19883 - protein, 37 aa, Artificial Sequence
  GFR-binding peptide
  MOD_RES (37), (37): Xaa is C or S
  MOD_RES (16), (17), (18), (19), (20): Xaa is A or G
  MOD_RES (21), (22), (23), (24): Xaa is A or G or is absent
RPTQVQLSNITVQIMXXXXXXXXXIGEMSTLEDHLAX

SEQ ID NO: 19884 - protein, 34 aa, Artificial Sequence
  GFR-binding peptide
  MOD_RES (34), (34): Xaa is C or S
  MOD_RES (14), (15), (16), (17), (18): Xaa is A or G
  MOD_RES (19), (20), (21), (22): Xaa is A or G or is absent
VPTGQSNITMQIMXXXXXXXXXLGEMSLEEHSQX

SEQ ID NO: 19885 - protein, 34 aa, Artificial Sequence
  GFR-binding peptide
  MOD_RES (15), (16), (17), (18), (19): Xaa is A or G
  MOD_RES (20), (21), (22), (23): Xaa is A or G or is absent
PTQVQLSNITVQIMXXXXXXXXXIGEMSTLEDHL

SEQ ID NO: 19886 - protein, 35 aa, Artificial Sequence
  GFR-binding peptide
  MOD_RES (3), (3): Xaa is C or S
  MOD_RES (17), (18), (19), (20), (21): Xaa is A or G
  MOD_RES (22), (23), (24), (25): Xaa is A or G or is absent
LEXVPTEERPVQMRKIXXXXXXXXXKKATVFLQHN

SEQ ID NO: 19887 - protein, 40 aa, Artificial Sequence
  GFR-binding peptide
  MOD_RES (2), (39): Xaa is C or S
KXQPSRVHHSNITVQIMEYVRKKPKLLGEMSRLEEHLEXA

SEQ ID NO: 19888 - protein, 34 aa, Artificial Sequence
  GFR-binding peptide
  MOD_RES (14), (15), (16), (17), (18): Xaa is A or G
  MOD_RES (19), (20), (21), (22): Xaa is A or G or is absent
TQVQLRPVQVRKIXXXXXXXXXKKATVTLEDHLA

SEQ ID NO: 19889 - protein, 38 aa, Artificial Sequence
  GFR-binding peptide
  MOD_RES (3), (3): Xaa is C or S
  MOD_RES (19), (20), (21), (22), (23): Xaa is A or G
  MOD_RES (24), (25), (26), (27): Xaa is A or G or is absent
VQXRPTQVQLRPVQVRKIXXXXXXXXXKKATVTLEDHL

SEQ ID NO: 19890 - protein, 38 aa, Artificial Sequence
  GFR-binding peptide
  MOD_RES (3), (3): Xaa is C or S
VKXQPSRVHHRPVQVRKIEYVRKKPKLKKATVRLEEHL

SEQ ID NO: 19891 - protein, 40 aa, Artificial Sequence
  GFR-binding peptide
  MOD_RES (37), (39): Xaa is C or S
  MOD_RES (16), (17), (18), (19), (20): Xaa is A or G
  MOD_RES (21), (22), (23), (24): Xaa is A or G or is absent
RPTQVQLRPVQVRKIXXXXXXXXXKKATVTLEDHLAXKXE

SEQ ID NO: 19892 - protein, 44 aa, Artificial Sequence
  GFR-binding peptide
  MOD_RES (5), (42), (44): Xaa is C or S
  MOD_RES (21), (22), (23), (24), (25): Xaa is A or G
  MOD_RES (26), (27), (28), (29): Xaa is A or G or is absent
RNVQXRPTQVQLRSVKVAKVXXXXXXXXXKEVQVTLEDHLAXKX

SEQ ID NO: 19893 - protein, 38 aa, Artificial Sequence
  GFR-binding peptide
  MOD_RES (1), (35), (37): Xaa is C or S
XVPTGQSNITMQIMRIKPHQGQHIGEMSLEEHSQXEXR

SEQ ID NO: 19894 - protein, 43 aa, Artificial Sequence
  GFR-binding peptide
  MOD_RES (4), (41), (43): Xaa is C or S
SVKXQPSRVHHSNITVQIMEYVRKKPKLIGEMSRLEEHLEXAX

SEQ ID NO: 19895 - protein, 40 aa, Artificial Sequence
  GFR-binding peptide
  MOD_RES (2), (39): Xaa is C or S
KXQPSRVHHRPVQVRKIEYVRKKPKLKKATVRLEEHLEXA

SEQ ID NO: 19896 - protein, 43 aa, Artificial Sequence
  GFR-binding peptide
  MOD_RES (4), (41), (43): Xaa is C or S
SVKXQPSRVHHSNITVQIMEYVRKKPKLLGEMSRLEEHLEXAX

SEQ ID NO: 19897 - protein, 34 aa, Artificial Sequence
  GFR-binding peptide
  MOD_RES (34), (34): Xaa is C or S
  MOD_RES (14), (15), (16), (17), (18): Xaa is A or G
  MOD_RES (19), (20), (21), (22): Xaa is A or G or is absent
VPTGQSNITMQIMXXXXXXXXXIGEMSLEEHSQX

SEQ ID NO: 19898 - protein, 37 aa, Artificial Sequence
  GFR-binding peptide
  MOD_RES (1), (35), (37): Xaa is C or S
  MOD_RES (15), (16), (17), (18), (19): Xaa is A or G
  MOD_RES (20), (21), (22), (23): Xaa is A or G or is absent
XVPTGQRPVQMRKIXXXXXXXXXKKATVLEEHSQXEX

SEQ ID NO: 19899 - protein, 43 aa, Artificial Sequence
  GFR-binding peptide
  MOD_RES (3), (40), (42): Xaa is C or S
VQXRPTQVQLRSVKVAKVEIVRKKPIFKEVQVTLEDHLAXKXE

SEQ ID NO: 19900 - protein, 38 aa, Artificial Sequence
  GFR-binding peptide
  MOD_RES (6), (6): Xaa is C or S
  MOD_RES (20), (21), (22), (23), (24): Xaa is A or G
  MOD_RES (25), (26), (27), (28): Xaa is A or G or is absent
DEGLEXVPTEERPVQMRKIXXXXXXXXXKKATVFLQHN

SEQ ID NO: 19901 - protein, 40 aa, Artificial Sequence
  GFR-binding peptide
  MOD_RES (7), (7): Xaa is C or S
  MOD_RES (21), (22), (23), (24), (25): Xaa is A or G
  MOD_RES (26), (27), (28), (29): Xaa is A or G or is absent
NDEGLEXVPTEESNITMQIMXXXXXXXXXLGEMSFLQHNK

SEQ ID NO: 19902 - protein, 40 aa, Artificial Sequence
  GFR-binding peptide
  MOD_RES (4), (38), (40): Xaa is C or S
  MOD_RES (18), (19), (20), (21), (22): Xaa is A or G
  MOD_RES (23), (24), (25), (26): Xaa is A or G or is absent
GLEXVPTGQSNITMQIMXXXXXXXXXLGEMSLEEHSQXEX

SEQ ID NO: 19903 - protein, 41 aa, Artificial Sequence
  GFR-binding peptide
  MOD_RES (5), (39), (41): Xaa is C or S
  MOD_RES (19), (20), (21), (22), (23): Xaa is A or G
  MOD_RES (24), (25), (26), (27): Xaa is A or G or is absent
EGLEXVPTGQRSVKMAKVXXXXXXXXXKEVQVLEEHSQXEX

SEQ ID NO: 19904 - protein, 41 aa, Artificial Sequence
  GFR-binding peptide
  MOD_RES (4), (38), (40): Xaa is C or S
GLEXVPTEERPVQMRKIRIKPHQGQHKKATVFLQHNKXEXR

SEQ ID NO: 19905 - protein, 38 aa, Artificial Sequence
  GFR-binding peptide
  MOD_RES (2), (36), (38): Xaa is C or S
  MOD_RES (16), (17), (18), (19), (20): Xaa is A or G
  MOD_RES (21), (22), (23), (24): Xaa is A or G or is absent
EXVPTEERSVKMAKVXXXXXXXXXKEVQVFLQHNKXEX

SEQ ID NO: 19906 - protein, 35 aa, Artificial Sequence
  GFR-binding peptide
  MOD_RES (1), (1): Xaa is C or S
  MOD_RES (17), (18), (19), (20), (21): Xaa is A or G
  MOD_RES (22), (23), (24), (25): Xaa is A or G or is absent
XQPSRVHHSNITVQIMXXXXXXXXXIGEMSRLEEH

SEQ ID NO: 19907 - protein, 37 aa, Artificial Sequence
  GFR-binding peptide
  MOD_RES (36), (36): Xaa is C or S
  MOD_RES (15), (16), (17), (18), (19): Xaa is A or G
  MOD_RES (20), (21), (22), (23): Xaa is A or G or is absent
PTQVQLRPVQVRKIXXXXXXXXXKKATVTLEDHLAXK

SEQ ID NO: 19908 - protein, 36 aa, Artificial Sequence
  GFR-binding peptide
  MOD_RES (1), (35): Xaa is C or S
XVPTEESNITMQIMRIKPHQGQHLGEMSFLQHNKXE

SEQ ID NO: 19909 - protein, 36 aa, Artificial Sequence
  GFR-binding peptide
  MOD_RES (3), (3): Xaa is C or S
LEXVPTGQRSVKMAKVRIKPHQGQHKEVQVLEEHSQ

SEQ ID NO: 19910 - protein, 39 aa, Artificial Sequence
  GFR-binding peptide
  MOD_RES (4), (38): Xaa is C or S
GLEXVPTEERPVQMRKIRIKPHQGQHKKATVFLQHNKXE

SEQ ID NO: 19911 - protein, 37 aa, Artificial Sequence
  GFR-binding peptide
  MOD_RES (1), (1): Xaa is C or S
  MOD_RES (17), (18), (19), (20), (21): Xaa is A or G
  MOD_RES (22), (23), (24), (25): Xaa is A or G or is absent
XRPTQVQLSNITVQIMXXXXXXXXXLGEMSTLEDHLA

SEQ ID NO: 19912 - protein, 35 aa, Artificial Sequence
  GFR-binding peptide
  MOD_RES (3), (3): Xaa is C or S
  MOD_RES (17), (18), (19), (20), (21): Xaa is A or G
  MOD_RES (22), (23), (24), (25): Xaa is A or G or is absent
LEXVPTEERSVKMAKVXXXXXXXXXKEVQVFLQHN

SEQ ID NO: 19913 - protein, 37 aa, Artificial Sequence
  GFR-binding peptide
  MOD_RES (3), (3): Xaa is C or S
VQXRPTQVQLRSVKVAKVEIVRKKPIFKEVQVTLEDH

SEQ ID NO: 19914 - protein, 33 aa, Artificial Sequence
  GFR-binding peptide
  MOD_RES (14), (15), (16), (17), (18): Xaa is A or G
  MOD_RES (19), (20), (21), (22): Xaa is A or G or is absent
TQVQLSNITVQIMXXXXXXXXXIGEMSTLEDHL

SEQ ID NO: 19915 - protein, 40 aa, Artificial Sequence
  GFR-binding peptide
  MOD_RES (4), (4): Xaa is C or S
  MOD_RES (20), (21), (22), (23), (24): Xaa is A or G
  MOD_RES (25), (26), (27), (28): Xaa is A or G or is absent
NVQXRPTQVQLSNITVQIMXXXXXXXXXIGEMSTLEDHLA

SEQ ID NO: 19916 - protein, 40 aa, Artificial Sequence
  GFR-binding peptide
  MOD_RES (3), (37), (39): Xaa is C or S
LEXVPTGQRPVQMRKIRIKPHQGQHKKATVLEEHSQXEXR

SEQ ID NO: 19917 - protein, 41 aa, Artificial Sequence
  GFR-binding peptide
  MOD_RES (5), (39), (41): Xaa is C or S
EGLEXVPTEESNITMQIMRIKPHQGQHLGEMSFLQHNKXEX

SEQ ID NO: 19918 - protein, 40 aa, Artificial Sequence
  GFR-binding peptide
  MOD_RES (1), (38), (40): Xaa is C or S
  MOD_RES (17), (18), (19), (20), (21): Xaa is A or G
  MOD_RES (22), (23), (24), (25): Xaa is A or G or is absent
XQPSRVHHRSVKVAKVXXXXXXXXXKEVQVRLEEHLEXAX

SEQ ID NO: 19919 - protein, 40 aa, Artificial Sequence
  GFR-binding peptide
  MOD_RES (4), (4): Xaa is C or S
  MOD_RES (20), (21), (22), (23), (24): Xaa is A or G
  MOD_RES (25), (26), (27), (28): Xaa is A or G or is absent
SVKXQPSRVHHRSVKVAKVXXXXXXXXXKEVQVRLEEHLE

SEQ ID NO: 19920 - protein, 38 aa, Artificial Sequence
  GFR-binding peptide
  MOD_RES (3), (37): Xaa is C or S
  MOD_RES (17), (18), (19), (20), (21): Xaa is A or G
  MOD_RES (22), (23), (24), (25): Xaa is A or G or is absent
LEXVPTEERPVQMRKIXXXXXXXXXKKATVFLQHNKXE

SEQ ID NO: 19921 - protein, 38 aa, Artificial Sequence
  GFR-binding peptide
  MOD_RES (1), (38): Xaa is C or S
  MOD_RES (17), (18), (19), (20), (21): Xaa is A or G
  MOD_RES (22), (23), (24), (25): Xaa is A or G or is absent
XQPSRVHHRPVQVRKIXXXXXXXXXKKATVRLEEHLEX

SEQ ID NO: 19922 - protein, 36 aa, Artificial Sequence
  GFR-binding peptide
  MOD_RES (2), (36): Xaa is C or S
EXVPTEERSVKMAKVRIKPHQGQHKEVQVFLQHNKX

SEQ ID NO: 19923 - protein, 35 aa, Artificial Sequence
  GFR-binding peptide
  MOD_RES (15), (16), (17), (18), (19): Xaa is A or G
  MOD_RES (20), (21), (22), (23): Xaa is A or G or is absent
PSRVHHRSVKVAKVXXXXXXXXXKEVQVRLEEHLE

SEQ ID NO: 19924 - protein, 37 aa, Artificial Sequence
  GFR-binding peptide
  MOD_RES (1), (1): Xaa is C or S
  MOD_RES (17), (18), (19), (20), (21): Xaa is A or G
  MOD_RES (22), (23), (24), (25): Xaa is A or G or is absent
XRPTQVQLRSVKVAKVXXXXXXXXXKEVQVTLEDHLA

SEQ ID NO: 19925 - protein, 40 aa, Artificial Sequence
  GFR-binding peptide
  MOD_RES (1), (38), (40): Xaa is C or S
XRPTQVQLRSVKVAKVEIVRKKPIFKEVQVTLEDHLAXKX

SEQ ID NO: 19926 - protein, 40 aa, Artificial Sequence
  GFR-binding peptide
  MOD_RES (5), (5): Xaa is C or S
SSVKXQPSRVHHSNITVQIMEYVRKKPKLIGEMSRLEEHL

SEQ ID NO: 19927 - protein, 37 aa, Artificial Sequence
  GFR-binding peptide
  MOD_RES (4), (4): Xaa is C or S
GLEXVPTGQRPVQMRKIRIKPHQGQHKKATVLEEHSQ

SEQ ID NO: 19928 - protein, 40 aa, Artificial Sequence
  GFR-binding peptide
  MOD_RES (7), (7): Xaa is C or S
NDEGLEXVPTGQRPVQMRKIRIKPHQGQHKKATVLEEHSQ

SEQ ID NO: 19929 - protein, 37 aa, Artificial Sequence
  GFR-binding peptide
  MOD_RES (1), (35), (37): Xaa is C or S
XVPTEERPVQMRKIRIKPHQGQHKKATVFLQHNKXEX

SEQ ID NO: 19930 - protein, 42 aa, Artificial Sequence
  GFR-binding peptide
  MOD_RES (5), (39), (41): Xaa is C or S
  MOD_RES (19), (20), (21), (22), (23): Xaa is A or G
  MOD_RES (24), (25), (26), (27): Xaa is A or G or is absent
EGLEXVPTEESNITMQIMXXXXXXXXXLGEMSFLQHNKXEXR

SEQ ID NO: 19931 - protein, 34 aa, Artificial Sequence
  GFR-binding peptide
  MOD_RES (2), (2): Xaa is C or S
EXVPTEERPVQMRKIRIKPHQGQHKKATVFLQHN

SEQ ID NO: 19932 - protein, 35 aa, Artificial Sequence
  GFR-binding peptide
  MOD_RES (1), (1): Xaa is C or S
  MOD_RES (17), (18), (19), (20), (21): Xaa is A or G
  MOD_RES (22), (23), (24), (25): Xaa is A or G or is absent
XQPSRVHHSNITVQIMXXXXXXXXXLGEMSRLEEH

SEQ ID NO: 19933 - protein, 38 aa, Artificial Sequence
  GFR-binding peptide
  MOD_RES (1), (38): Xaa is C or S
  MOD_RES (17), (18), (19), (20), (21): Xaa is A or G
  MOD_RES (22), (23), (24), (25): Xaa is A or G or is absent
XQPSRVHHSNITVQIMXXXXXXXXXLGEMSRLEEHLEX

SEQ ID NO: 19934 - protein, 42 aa, Artificial Sequence
  GFR-binding peptide
  MOD_RES (2), (39), (41): Xaa is C or S
KXQPSRVHHSNITVQIMEYVRKKPKLIGEMSRLEEHLEXAXA

SEQ ID NO: 19935 - protein, 34 aa, Artificial Sequence
  GFR-binding peptide
PTQVQLRSVKVAKVEIVRKKPIFKEVQVTLEDHL

SEQ ID NO: 19936 - protein, 41 aa, Artificial Sequence
  GFR-binding peptide
  MOD_RES (1), (38), (40): Xaa is C or S
XQPSRVHHRPVQVRKIEYVRKKPKLKKATVRLEEHLEXAXA

SEQ ID NO: 19937 - protein, 34 aa, Artificial Sequence
  GFR-binding peptide
  MOD_RES (1), (1): Xaa is C or S
  MOD_RES (15), (16), (17), (18), (19): Xaa is A or G
  MOD_RES (20), (21), (22), (23): Xaa is A or G or is absent
XVPTGQSNITMQIMXXXXXXXXXIGEMSLEEHSQ

SEQ ID NO: 19938 - protein, 37 aa, Artificial Sequence
  GFR-binding peptide
  MOD_RES (1), (35), (37): Xaa is C or S
  MOD_RES (15), (16), (17), (18), (19): Xaa is A or G
  MOD_RES (20), (21), (22), (23): Xaa is A or G or is absent
XVPTEERPVQMRKIXXXXXXXXXKKATVFLQHNKXEX

SEQ ID NO: 19939 - protein, 40 aa, Artificial Sequence
  GFR-binding peptide
  MOD_RES (3), (37), (39): Xaa is C or S
LEXVPTGQSNITMQIMRIKPHQGQHIGEMSLEEHSQXEXR

SEQ ID NO: 19940 - protein, 41 aa, Artificial Sequence
  GFR-binding peptide
  MOD_RES (3), (40): Xaa is C or S
  MOD_RES (19), (20), (21), (22), (23): Xaa is A or G
  MOD_RES (24), (25), (26), (27): Xaa is A or G or is absent
VKXQPSRVHHSNITVQIMXXXXXXXXXIGEMSRLEEHLEXA

SEQ ID NO: 19941 - protein, 42 aa, Artificial Sequence
  GFR-binding peptide
  MOD_RES (3), (40), (42): Xaa is C or S
  MOD_RES (19), (20), (21), (22), (23): Xaa is A or G
  MOD_RES (24), (25), (26), (27): Xaa is A or G or is absent
VQXRPTQVQLSNITVQIMXXXXXXXXXIGEMSTLEDHLAXKX

SEQ ID NO: 19942 - protein, 42 aa, Artificial Sequence
  GFR-binding peptide
  MOD_RES (3), (40), (42): Xaa is C or S
  MOD_RES (19), (20), (21), (22), (23): Xaa is A or G
  MOD_RES (24), (25), (26), (27): Xaa is A or G or is absent
VQXRPTQVQLSNITVQIMXXXXXXXXXLGEMSTLEDHLAXKX

SEQ ID NO: 19943 - protein, 40 aa, Artificial Sequence
  GFR-binding peptide
  MOD_RES (6), (40): Xaa is C or S
  MOD_RES (20), (21), (22), (23), (24): Xaa is A or G
  MOD_RES (25), (26), (27), (28): Xaa is A or G or is absent
DEGLEXVPTEESNITMQIMXXXXXXXXXLGEMSFLQHNKX

SEQ ID NO: 19944 - protein, 38 aa, Artificial Sequence
  GFR-binding peptide
  MOD_RES (35), (37): Xaa is C or S
  MOD_RES (14), (15), (16), (17), (18): Xaa is A or G
  MOD_RES (19), (20), (21), (22): Xaa is A or G or is absent
SRVHHSNITVQIMXXXXXXXXXIGEMSRLEEHLEXAXA

SEQ ID NO: 19945 - protein, 38 aa, Artificial Sequence
  GFR-binding peptide
  MOD_RES (2), (2): Xaa is C or S
KXQPSRVHHRPVQVRKIEYVRKKPKLKKATVRLEEHLE

SEQ ID NO: 19946 - protein, 41 aa, Artificial Sequence
  GFR-binding peptide
  MOD_RES (2), (39), (41): Xaa is C or S
  MOD_RES (18), (19), (20), (21), (22): Xaa is A or G
  MOD_RES (23), (24), (25), (26): Xaa is A or G or is absent
KXQPSRVHHSNITVQIMXXXXXXXXXLGEMSRLEEHLEXAX

SEQ ID NO: 19947 - protein, 39 aa, Artificial Sequence
  GFR-binding peptide
  MOD_RES (37), (39): Xaa is C or S
  MOD_RES (16), (17), (18), (19), (20): Xaa is A or G
  MOD_RES (21), (22), (23), (24): Xaa is A or G or is absent
QPSRVHHSNITVQIMXXXXXXXXXLGEMSRLEEHLEXAX

SEQ ID NO: 19948 - protein, 41 aa, Artificial Sequence
  GFR-binding peptide
  MOD_RES (5), (39), (41): Xaa is C or S
  MOD_RES (19), (20), (21), (22), (23): Xaa is A or G
  MOD_RES (24), (25), (26), (27): Xaa is A or G or is absent
EGLEXVPTEESNITMQIMXXXXXXXXXLGEMSFLQHNKXEX

SEQ ID NO: 19949 - protein, 33 aa, Artificial Sequence
  GFR-binding peptide
  MOD_RES (14), (15), (16), (17), (18): Xaa is A or G
  MOD_RES (19), (20), (21), (22): Xaa is A or G or is absent
VPTGQRSVKMAKVXXXXXXXXXKEVQVLEEHSQ

SEQ ID NO: 19950 - protein, 40 aa, Artificial Sequence
  GFR-binding peptide
  MOD_RES (7), (7): Xaa is C or S
  MOD_RES (21), (22), (23), (24), (25): Xaa is A or G
  MOD_RES (26), (27), (28), (29): Xaa is A or G or is absent
NDEGLEXVPTGQSNITMQIMXXXXXXXXXLGEMSLEEHSQ

SEQ ID NO: 19951 - protein, 37 aa, Artificial Sequence
  GFR-binding peptide
  MOD_RES (35), (37): Xaa is C or S
  MOD_RES (14), (15), (16), (17), (18): Xaa is A or G
  MOD_RES (19), (20), (21), (22): Xaa is A or G or is absent
TQVQLRPVQVRKIXXXXXXXXXKKATVTLEDHLAXKX

SEQ ID NO: 19952 - protein, 40 aa, Artificial Sequence
  GFR-binding peptide
  MOD_RES (3), (40): Xaa is C or S
VQXRPTQVQLSNITVQIMEIVRKKPIFIGEMSTLEDHLAX

SEQ ID NO: 19953 - protein, 42 aa, Artificial Sequence
  GFR-binding peptide
  MOD_RES (5), (42): Xaa is C or S
  MOD_RES (21), (22), (23), (24), (25): Xaa is A or G
  MOD_RES (26), (27), (28), (29): Xaa is A or G or is absent
SSVKXQPSRVHHRSVKVAKVXXXXXXXXXKEVQVRLEEHLEX

SEQ ID NO: 19954 - protein, 37 aa, Artificial Sequence
  GFR-binding peptide
  MOD_RES (4), (4): Xaa is C or S
  MOD_RES (18), (19), (20), (21), (22): Xaa is A or G
  MOD_RES (23), (24), (25), (26): Xaa is A or G or is absent
GLEXVPTGQSNITMQIMXXXXXXXXXLGEMSLEEHSQ

SEQ ID NO: 19955 - protein, 39 aa, Artificial Sequence
  GFR-binding peptide
  MOD_RES (2), (39): Xaa is C or S
  MOD_RES (18), (19), (20), (21), (22): Xaa is A or G
  MOD_RES (23), (24), (25), (26): Xaa is A or G or is absent
KXQPSRVHHSNITVQIMXXXXXXXXXLGEMSRLEEHLEX

SEQ ID NO: 19956 - protein, 33 aa, Artificial Sequence
  GFR-binding peptide
SRVHHSNITVQIMEYVRKKPKLLGEMSRLEEHL

SEQ ID NO: 19957 - protein, 40 aa, Artificial Sequence
  GFR-binding peptide
  MOD_RES (5), (5): Xaa is C or S
RNVQXRPTQVQLSNITVQIMEIVRKKPIFIGEMSTLEDHL

SEQ ID NO: 19958 - protein, 36 aa, Artificial Sequence
  GFR-binding peptide
  MOD_RES (36), (36): Xaa is C or S
PTQVQLSNITVQIMEIVRKKPIFIGEMSTLEDHLAX

SEQ ID NO: 19959 - protein, 43 aa, Artificial Sequence
  GFR-binding peptide
  MOD_RES (7), (41), (43): Xaa is C or S
NDEGLEXVPTGQRSVKMAKVRIKPHQGQHKEVQVLEEHSQXEX

SEQ ID NO: 19960 - protein, 42 aa, Artificial Sequence
  GFR-binding peptide
  MOD_RES (3), (40), (42): Xaa is C or S
  MOD_RES (19), (20), (21), (22), (23): Xaa is A or G
  MOD_RES (24), (25), (26), (27): Xaa is A or G or is absent
VKXQPSRVHHSNITVQIMXXXXXXXXXIGEMSRLEEHLEXAX

SEQ ID NO: 19961 - protein, 40 aa, Artificial Sequence
  GFR-binding peptide
  MOD_RES (6), (40): Xaa is C or S
  MOD_RES (20), (21), (22), (23), (24): Xaa is A or G
  MOD_RES (25), (26), (27), (28): Xaa is A or G or is absent
DEGLEXVPTGQRPVQMRKIXXXXXXXXXKKATVLEEHSQX

SEQ ID NO: 19962 - protein, 38 aa, Artificial Sequence
  GFR-binding peptide
  MOD_RES (4), (4): Xaa is C or S
  MOD_RES (20), (21), (22), (23), (24): Xaa is A or G
  MOD_RES (25), (26), (27), (28): Xaa is A or G or is absent
SVKXQPSRVHHRPVQVRKIXXXXXXXXXKKATVRLEEH

SEQ ID NO: 19963 - protein, 37 aa, Artificial Sequence
  GFR-binding peptide
  MOD_RES (4), (4): Xaa is C or S
  MOD_RES (18), (19), (20), (21), (22): Xaa is A or G
  MOD_RES (23), (24), (25), (26): Xaa is A or G or is absent
GLEXVPTEERSVKMAKVXXXXXXXXXKEVQVFLQHNK

SEQ ID NO: 19964 - protein, 43 aa, Artificial Sequence
  GFR-binding peptide
  MOD_RES (5), (42): Xaa is C or S
  MOD_RES (21), (22), (23), (24), (25): Xaa is A or G
  MOD_RES (26), (27), (28), (29): Xaa is A or G or is absent
RNVQXRPTQVQLRPVQVRKIXXXXXXXXXKKATVTLEDHLAXK

SEQ ID NO: 19965 - protein, 37 aa, Artificial Sequence
  GFR-binding peptide
  MOD_RES (35), (37): Xaa is C or S
  MOD_RES (14), (15), (16), (17), (18): Xaa is A or G
  MOD_RES (19), (20), (21), (22): Xaa is A or G or is absent
SRVHHRSVKVAKVXXXXXXXXXKEVQVRLEEHLEXAX

SEQ ID NO: 19966 - protein, 37 aa, Artificial Sequence
  GFR-binding peptide
  MOD_RES (35), (37): Xaa is C or S
  MOD_RES (14), (15), (16), (17), (18): Xaa is A or G
  MOD_RES (19), (20), (21), (22): Xaa is A or G or is absent
SRVHHRPVQVRKIXXXXXXXXXKKATVRLEEHLEXAX

SEQ ID NO: 19967 - protein, 32 aa, Artificial Sequence
  GFR-binding peptide
  MOD_RES (14), (15), (16), (17), (18): Xaa is A or G
  MOD_RES (19), (20), (21), (22): Xaa is A or G or is absent
SRVHHSNITVQIMXXXXXXXXXIGEMSRLEEH

SEQ ID NO: 19968 - protein, 41 aa, Artificial Sequence
  GFR-binding peptide
  MOD_RES (5), (5): Xaa is C or S
  MOD_RES (21), (22), (23), (24), (25): Xaa is A or G
  MOD_RES (26), (27), (28), (29): Xaa is A or G or is absent
RNVQXRPTQVQLSNITVQIMXXXXXXXXXIGEMSTLEDHLA

SEQ ID NO: 19969 - protein, 37 aa, Artificial Sequence
  GFR-binding peptide
  MOD_RES (35), (37): Xaa is C or S
  MOD_RES (14), (15), (16), (17), (18): Xaa is A or G
  MOD_RES (19), (20), (21), (22): Xaa is A or G or is absent
TQVQLSNITVQIMXXXXXXXXXIGEMSTLEDHLAXKX

SEQ ID NO: 19970 - protein, 36 aa, Artificial Sequence
  GFR-binding peptide
  MOD_RES (34), (36): Xaa is C or S
  MOD_RES (14), (15), (16), (17), (18): Xaa is A or G
  MOD_RES (19), (20), (21), (22): Xaa is A or G or is absent
VPTGQSNITMQIMXXXXXXXXXIGEMSLEEHSQXEX

SEQ ID NO: 19971 - protein, 38 aa, Artificial Sequence
  GFR-binding peptide
  MOD_RES (36), (38): Xaa is C or S
PSRVHHSNITVQIMEYVRKKPKLIGEMSRLEEHLEXAX

SEQ ID NO: 19972 - protein, 40 aa, Artificial Sequence
  GFR-binding peptide
  MOD_RES (4), (38), (40): Xaa is C or S
  MOD_RES (18), (19), (20), (21), (22): Xaa is A or G
  MOD_RES (23), (24), (25), (26): Xaa is A or G or is absent
GLEXVPTEESNITMQIMXXXXXXXXXLGEMSFLQHNKXEX

SEQ ID NO: 19973 - protein, 35 aa, Artificial Sequence
  GFR-binding peptide
  MOD_RES (15), (16), (17), (18), (19): Xaa is A or G
  MOD_RES (20), (21), (22), (23): Xaa is A or G or is absent
PTQVQLRPVQVRKIXXXXXXXXXKKATVTLEDHLA

SEQ ID NO: 19974 - protein, 41 aa, Artificial Sequence
  GFR-binding peptide
  MOD_RES (6), (40): Xaa is C or S
  MOD_RES (20), (21), (22), (23), (24): Xaa is A or G
  MOD_RES (25), (26), (27), (28): Xaa is A or G or is absent
DEGLEXVPTEESNITMQIMXXXXXXXXXIGEMSFLQHNKXE

SEQ ID NO: 19975 - protein, 37 aa, Artificial Sequence
  GFR-binding peptide
  MOD_RES (3), (3): Xaa is C or S
VQXRPTQVQLSNITVQIMEIVRKKPIFLGEMSTLEDH

SEQ ID NO: 19976 - protein, 34 aa, Artificial Sequence
  GFR-binding peptide
  MOD_RES (15), (16), (17), (18), (19): Xaa is A or G
  MOD_RES (20), (21), (22), (23): Xaa is A or G or is absent
PTQVQLRSVKVAKVXXXXXXXXXKEVQVTLEDHL

SEQ ID NO: 19977 - protein, 35 aa, Artificial Sequence
  GFR-binding peptide
  MOD_RES (16), (17), (18), (19), (20): Xaa is A or G
  MOD_RES (21), (22), (23), (24): Xaa is A or G or is absent
RPTQVQLRPVQVRKIXXXXXXXXXKKATVTLEDHL

SEQ ID NO: 19978 - protein, 38 aa, Artificial Sequence
  GFR-binding peptide
  MOD_RES (5), (5): Xaa is C or S
  MOD_RES (19), (20), (21), (22), (23): Xaa is A or G
  MOD_RES (24), (25), (26), (27): Xaa is A or G or is absent
EGLEXVPTGQSNITMQIMXXXXXXXXXLGEMSLEEHSQ

SEQ ID NO: 19979 - protein, 39 aa, Artificial Sequence
  GFR-binding peptide
  MOD_RES (36), (38): Xaa is C or S
  MOD_RES (15), (16), (17), (18), (19): Xaa is A or G
  MOD_RES (20), (21), (22), (23): Xaa is A or G or is absent
PSRVHHRSVKVAKVXXXXXXXXXKEVQVRLEEHLEXAXA

SEQ ID NO: 19980 - protein, 35 aa, Artificial Sequence
  GFR-binding peptide
  MOD_RES (35), (35): Xaa is C or S
SRVHHSNITVQIMEYVRKKPKLIGEMSRLEEHLEX

SEQ ID NO: 19981 - protein, 38 aa, Artificial Sequence
  GFR-binding peptide
  MOD_RES (3), (3): Xaa is C or S
VQXRPTQVQLSNITVQIMEIVRKKPIFIGEMSTLEDHL

SEQ ID NO: 19982 - protein, 34 aa, Artificial Sequence
  GFR-binding peptide
  MOD_RES (2), (2): Xaa is C or S
  MOD_RES (16), (17), (18), (19), (20): Xaa is A or G
  MOD_RES (21), (22), (23), (24): Xaa is A or G or is absent
EXVPTEERPVQMRKIXXXXXXXXXKKATVFLQHN

SEQ ID NO: 19983 - protein, 42 aa, Artificial Sequence
  GFR-binding peptide
  MOD_RES (6), (40), (42): Xaa is C or S
  MOD_RES (20), (21), (22), (23), (24): Xaa is A or G
  MOD_RES (25), (26), (27), (28): Xaa is A or G or is absent
DEGLEXVPTEERPVQMRKIXXXXXXXXXKKATVFLQHNKXEX

SEQ ID NO: 19984 - protein, 42 aa, Artificial Sequence
  GFR-binding peptide
  MOD_RES (4), (41): Xaa is C or S
NVQXRPTQVQLSNITVQIMEIVRKKPIFIGEMSTLEDHLAXK

SEQ ID NO: 19985 - protein, 38 aa, Artificial Sequence
  GFR-binding peptide
  MOD_RES (5), (5): Xaa is C or S
EGLEXVPTGQSNITMQIMRIKPHQGQHIGEMSLEEHSQ

SEQ ID NO: 19986 - protein, 38 aa, Artificial Sequence
  GFR-binding peptide
  MOD_RES (36), (38): Xaa is C or S
  MOD_RES (15), (16), (17), (18), (19): Xaa is A or G
  MOD_RES (20), (21), (22), (23): Xaa is A or G or is absent
PSRVHHRPVQVRKIXXXXXXXXXKKATVRLEEHLEXAX

SEQ ID NO: 19987 - protein, 36 aa, Artificial Sequence
  GFR-binding peptide
  MOD_RES (36), (36): Xaa is C or S
PSRVHHSNITVQIMEYVRKKPKLIGEMSRLEEHLEX

SEQ ID NO: 19988 - protein, 35 aa, Artificial Sequence
  GFR-binding peptide
  MOD_RES (35), (35): Xaa is C or S
SRVHHRPVQVRKIEYVRKKPKLKKATVRLEEHLEX

SEQ ID NO: 19989 - protein, 38 aa, Artificial Sequence
  GFR-binding peptide
  MOD_RES (5), (5): Xaa is C or S
EGLEXVPTGQRPVQMRKIRIKPHQGQHKKATVLEEHSQ

SEQ ID NO: 19990 - protein, 36 aa, Artificial Sequence
  GFR-binding peptide
  MOD_RES (2), (2): Xaa is C or S
QXRPTQVQLSNITVQIMEIVRKKPIFLGEMSTLEDH

SEQ ID NO: 19991 - protein, 37 aa, Artificial Sequence
  GFR-binding peptide
  MOD_RES (36), (36): Xaa is C or S
  MOD_RES (15), (16), (17), (18), (19): Xaa is A or G
  MOD_RES (20), (21), (22), (23): Xaa is A or G or is absent
PTQVQLSNITVQIMXXXXXXXXXLGEMSTLEDHLAXK

SEQ ID NO: 19992 - protein, 33 aa, Artificial Sequence
  GFR-binding peptide
TQVQLSNITVQIMEIVRKKPIFIGEMSTLEDHL

SEQ ID NO: 19993 - protein, 34 aa, Artificial Sequence
  GFR-binding peptide
TQVQLSNITVQIMEIVRKKPIFIGEMSTLEDHLA

SEQ ID NO: 19994 - protein, 37 aa, Artificial Sequence
  GFR-binding peptide
  MOD_RES (3), (37): Xaa is C or S
LEXVPTEERPVQMRKIRIKPHQGQHKKATVFLQHNKX

SEQ ID NO: 19995 - protein, 36 aa, Artificial Sequence
  GFR-binding peptide
  MOD_RES (2), (2): Xaa is C or S
KXQPSRVHHSNITVQIMEYVRKKPKLLGEMSRLEEH

SEQ ID NO: 19996 - protein, 37 aa, Artificial Sequence
  GFR-binding peptide
  MOD_RES (3), (37): Xaa is C or S
  MOD_RES (17), (18), (19), (20), (21): Xaa is A or G
  MOD_RES (22), (23), (24), (25): Xaa is A or G or is absent
LEXVPTEERPVQMRKIXXXXXXXXXKKATVFLQHNKX

SEQ ID NO: 19997 - protein, 38 aa, Artificial Sequence
  GFR-binding peptide
  MOD_RES (2), (2): Xaa is C or S
QXRPTQVQLRSVKVAKVEIVRKKPIFKEVQVTLEDHLA

SEQ ID NO: 19998 - protein, 38 aa, Artificial Sequence
  GFR-binding peptide
  MOD_RES (4), (4): Xaa is C or S
  MOD_RES (20), (21), (22), (23), (24): Xaa is A or G
  MOD_RES (25), (26), (27), (28): Xaa is A or G or is absent
SVKXQPSRVHHSNITVQIMXXXXXXXXXLGEMSRLEEH

SEQ ID NO: 19999 - protein, 36 aa, Artificial Sequence
  GFR-binding peptide
  MOD_RES (34), (36): Xaa is C or S
  MOD_RES (14), (15), (16), (17), (18): Xaa is A or G
  MOD_RES (19), (20), (21), (22): Xaa is A or G or is absent
VPTGQRSVKMAKVXXXXXXXXXKEVQVLEEHSQXEX

SEQ ID NO: 20000 - protein, 36 aa, Artificial Sequence
  GFR-binding peptide
  MOD_RES (1), (1): Xaa is C or S
  MOD_RES (17), (18), (19), (20), (21): Xaa is A or G
  MOD_RES (22), (23), (24), (25): Xaa is A or G or is absent
XRPTQVQLRPVQVRKIXXXXXXXXXKKATVTLEDHL

SEQ ID NO: 20001 - protein, 40 aa, Artificial Sequence
  GFR-binding peptide
  MOD_RES (6), (40): Xaa is C or S
DEGLEXVPTEERSVKMAKVRIKPHQGQHKEVQVFLQHNKX

SEQ ID NO: 20002 - protein, 38 aa, Artificial Sequence
  GFR-binding peptide
  MOD_RES (1), (35), (37): Xaa is C or S
  MOD_RES (15), (16), (17), (18), (19): Xaa is A or G
  MOD_RES (20), (21), (22), (23): Xaa is A or G or is absent
XVPTEESNITMQIMXXXXXXXXXLGEMSFLQHNKXEXR

SEQ ID NO: 20003 - protein, 37 aa, Artificial Sequence
  GFR-binding peptide
  MOD_RES (1), (35), (37): Xaa is C or S
  MOD_RES (15), (16), (17), (18), (19): Xaa is A or G
  MOD_RES (20), (21), (22), (23): Xaa is A or G or is absent
XVPTEERSVKMAKVXXXXXXXXXKEVQVFLQHNKXEX

SEQ ID NO: 20004 - protein, 40 aa, Artificial Sequence
  GFR-binding peptide
  MOD_RES (6), (40): Xaa is C or S
DEGLEXVPTGQRPVQMRKIRIKPHQGQHKKATVLEEHSQX

SEQ ID NO: 20005 - protein, 36 aa, Artificial Sequence
  GFR-binding peptide
  MOD_RES (2), (2): Xaa is C or S
  MOD_RES (18), (19), (20), (21), (22): Xaa is A or G
  MOD_RES (23), (24), (25), (26): Xaa is A or G or is absent
QXRPTQVQLRSVKVAKVXXXXXXXXXKEVQVTLEDH

SEQ ID NO: 20006 - protein, 40 aa, Artificial Sequence
  GFR-binding peptide
  MOD_RES (3), (37), (39): Xaa is C or S
  MOD_RES (17), (18), (19), (20), (21): Xaa is A or G
  MOD_RES (22), (23), (24), (25): Xaa is A or G or is absent
LEXVPTEESNITMQIMXXXXXXXXXLGEMSFLQHNKXEXR

SEQ ID NO: 20007 - protein, 40 aa, Artificial Sequence
  GFR-binding peptide
  MOD_RES (3), (40): Xaa is C or S
  MOD_RES (19), (20), (21), (22), (23): Xaa is A or G
  MOD_RES (24), (25), (26), (27): Xaa is A or G or is absent
VQXRPTQVQLRSVKVAKVXXXXXXXXXKEVQVTLEDHLAX

SEQ ID NO: 20008 - protein, 41 aa, Artificial Sequence
  GFR-binding peptide
  MOD_RES (4), (38), (40): Xaa is C or S
  MOD_RES (18), (19), (20), (21), (22): Xaa is A or G
  MOD_RES (23), (24), (25), (26): Xaa is A or G or is absent
GLEXVPTGQSNITMQIMXXXXXXXXXLGEMSLEEHSQXEXR

SEQ ID NO: 20009 - protein, 34 aa, Artificial Sequence
  GFR-binding peptide
  MOD_RES (16), (17), (18), (19), (20): Xaa is A or G
  MOD_RES (21), (22), (23), (24): Xaa is A or G or is absent
RPTQVQLRSVKVAKVXXXXXXXXXKEVQVTLEDH

SEQ ID NO: 20010 - protein, 41 aa, Artificial Sequence
  GFR-binding peptide
  MOD_RES (6), (40): Xaa is C or S
DEGLEXVPTEESNITMQIMRIKPHQGQHLGEMSFLQHNKXE

SEQ ID NO: 20011 - protein, 40 aa, Artificial Sequence
  GFR-binding peptide
  MOD_RES (37), (39): Xaa is C or S
QPSRVHHRPVQVRKIEYVRKKPKLKKATVRLEEHLEXAXA

SEQ ID NO: 20012 - protein, 36 aa, Artificial Sequence
  GFR-binding peptide
  MOD_RES (35), (35): Xaa is C or S
SRVHHRPVQVRKIEYVRKKPKLKKATVRLEEHLEXA

SEQ ID NO: 20013 - protein, 36 aa, Artificial Sequence
  GFR-binding peptide
  MOD_RES (1), (1): Xaa is C or S
  MOD_RES (17), (18), (19), (20), (21): Xaa is A or G
  MOD_RES (22), (23), (24), (25): Xaa is A or G or is absent
XRPTQVQLSNITVQIMXXXXXXXXXIGEMSTLEDHL

SEQ ID NO: 20014 - protein, 37 aa, Artificial Sequence
  GFR-binding peptide
  MOD_RES (35), (37): Xaa is C or S
SRVHHSNITVQIMEYVRKKPKLLGEMSRLEEHLEXAX

SEQ ID NO: 20015 - protein, 33 aa, Artificial Sequence
  GFR-binding peptide
VPTEERSVKMAKVRIKPHQGQHKEVQVFLQHNK

SEQ ID NO: 20016 - protein, 43 aa, Artificial Sequence
  GFR-binding peptide
  MOD_RES (7), (41), (43): Xaa is C or S
NDEGLEXVPTGQSNITMQIMRIKPHQGQHIGEMSLEEHSQXEX

SEQ ID NO: 20017 - protein, 45 aa, Artificial Sequence
  GFR-binding peptide
  MOD_RES (5), (42), (44): Xaa is C or S
RNVQXRPTQVQLSNITVQIMEIVRKKPIFIGEMSTLEDHLAXKXE

SEQ ID NO: 20018 - protein, 38 aa, Artificial Sequence
  GFR-binding peptide
  MOD_RES (1), (38): Xaa is C or S
  MOD_RES (17), (18), (19), (20), (21): Xaa is A or G
  MOD_RES (22), (23), (24), (25): Xaa is A or G or is absent
XQPSRVHHSNITVQIMXXXXXXXXXIGEMSRLEEHLEX

SEQ ID NO: 20019 - protein, 36 aa, Artificial Sequence
  GFR-binding peptide
  MOD_RES (36), (36): Xaa is C or S
  MOD_RES (15), (16), (17), (18), (19): Xaa is A or G
  MOD_RES (20), (21), (22), (23): Xaa is A or G or is absent
PTQVQLRSVKVAKVXXXXXXXXXKEVQVTLEDHLAX

SEQ ID NO: 20020 - protein, 39 aa, Artificial Sequence
  GFR-binding peptide
  MOD_RES (4), (38): Xaa is C or S
  MOD_RES (18), (19), (20), (21), (22): Xaa is A or G
  MOD_RES (23), (24), (25), (26): Xaa is A or G or is absent
GLEXVPTGQRSVKMAKVXXXXXXXXXKEVQVLEEHSQXE

SEQ ID NO: 20021 - protein, 34 aa, Artificial Sequence
  GFR-binding peptide
QPSRVHHSNITVQIMEYVRKKPKLLGEMSRLEEH

SEQ ID NO: 20022 - protein, 37 aa, Artificial Sequence
  GFR-binding peptide
  MOD_RES (4), (4): Xaa is C or S
GLEXVPTEESNITMQIMRIKPHQGQHLGEMSFLQHNK

SEQ ID NO: 20023 - protein, 41 aa, Artificial Sequence
  GFR-binding peptide
  MOD_RES (5), (5): Xaa is C or S
  MOD_RES (21), (22), (23), (24), (25): Xaa is A or G
  MOD_RES (26), (27), (28), (29): Xaa is A or G or is absent
SSVKXQPSRVHHRSVKVAKVXXXXXXXXXKEVQVRLEEHLE

SEQ ID NO: 20024 - protein, 42 aa, Artificial Sequence
  GFR-binding peptide
  MOD_RES (2), (39), (41): Xaa is C or S
  MOD_RES (18), (19), (20), (21), (22): Xaa is A or G
  MOD_RES (23), (24), (25), (26): Xaa is A or G or is absent
KXQPSRVHHRSVKVAKVXXXXXXXXXKEVQVRLEEHLEXAXA

SEQ ID NO: 20025 - protein, 42 aa, Artificial Sequence
  GFR-binding peptide
  MOD_RES (6), (40), (42): Xaa is C or S
  MOD_RES (20), (21), (22), (23), (24): Xaa is A or G
  MOD_RES (25), (26), (27), (28): Xaa is A or G or is absent
DEGLEXVPTEESNITMQIMXXXXXXXXXIGEMSFLQHNKXEX

SEQ ID NO: 20026 - protein, 39 aa, Artificial Sequence
  GFR-binding peptide
  MOD_RES (2), (36), (38): Xaa is C or S
EXVPTGQRSVKMAKVRIKPHQGQHKEVQVLEEHSQXEXR

SEQ ID NO: 20027 - protein, 34 aa, Artificial Sequence
  GFR-binding peptide
  MOD_RES (14), (15), (16), (17), (18): Xaa is A or G
  MOD_RES (19), (20), (21), (22): Xaa is A or G or is absent
SRVHHSNITVQIMXXXXXXXXXLGEMSRLEEHLE

SEQ ID NO: 20028 - protein, 44 aa, Artificial Sequence
  GFR-binding peptide
  MOD_RES (4), (41), (43): Xaa is C or S
  MOD_RES (20), (21), (22), (23), (24): Xaa is A or G
  MOD_RES (25), (26), (27), (28): Xaa is A or G or is absent
SVKXQPSRVHHSNITVQIMXXXXXXXXXLGEMSRLEEHLEXAXA

SEQ ID NO: 20029 - protein, 42 aa, Artificial Sequence
  GFR-binding peptide
  MOD_RES (6), (40), (42): Xaa is C or S
  MOD_RES (20), (21), (22), (23), (24): Xaa is A or G
  MOD_RES (25), (26), (27), (28): Xaa is A or G or is absent
DEGLEXVPTEESNITMQIMXXXXXXXXXLGEMSFLQHNKXEX

SEQ ID NO: 20030 - protein, 42 aa, Artificial Sequence
  GFR-binding peptide
  MOD_RES (7), (41): Xaa is C or S
  MOD_RES (21), (22), (23), (24), (25): Xaa is A or G
  MOD_RES (26), (27), (28), (29): Xaa is A or G or is absent
NDEGLEXVPTEERPVQMRKIXXXXXXXXXKKATVFLQHNKXE

SEQ ID NO: 20031 - protein, 41 aa, Artificial Sequence
  GFR-binding peptide
  MOD_RES (6), (40): Xaa is C or S
  MOD_RES (20), (21), (22), (23), (24): Xaa is A or G
  MOD_RES (25), (26), (27), (28): Xaa is A or G or is absent
DEGLEXVPTGQRSVKMAKVXXXXXXXXXKEVQVLEEHSQXE

SEQ ID NO: 20032 - protein, 35 aa, Artificial Sequence
  GFR-binding peptide
  MOD_RES (16), (17), (18), (19), (20): Xaa is A or G
  MOD_RES (21), (22), (23), (24): Xaa is A or G or is absent
RPTQVQLSNITVQIMXXXXXXXXXIGEMSTLEDHL

SEQ ID NO: 20033 - protein, 39 aa, Artificial Sequence
  GFR-binding peptide
  MOD_RES (37), (39): Xaa is C or S
  MOD_RES (16), (17), (18), (19), (20): Xaa is A or G
  MOD_RES (21), (22), (23), (24): Xaa is A or G or is absent
RPTQVQLSNITVQIMXXXXXXXXXIGEMSTLEDHLAXKX

SEQ ID NO: 20034 - protein, 39 aa, Artificial Sequence
  GFR-binding peptide
  MOD_RES (1), (38): Xaa is C or S
XRPTQVQLSNITVQIMEIVRKKPIFIGEMSTLEDHLAXK

SEQ ID NO: 20035 - protein, 41 aa, Artificial Sequence
  GFR-binding peptide
  MOD_RES (3), (40): Xaa is C or S
VKXQPSRVHHSNITVQIMEYVRKKPKLIGEMSRLEEHLEXA

SEQ ID NO: 20036 - protein, 39 aa, Artificial Sequence
  GFR-binding peptide
  MOD_RES (6), (6): Xaa is C or S
  MOD_RES (20), (21), (22), (23), (24): Xaa is A or G
  MOD_RES (25), (26), (27), (28): Xaa is A or G or is absent
DEGLEXVPTGQSNITMQIMXXXXXXXXXLGEMSLEEHSQ

SEQ ID NO: 20037 - protein, 39 aa, Artificial Sequence
  GFR-binding peptide
  MOD_RES (3), (37), (39): Xaa is C or S
LEXVPTEESNITMQIMRIKPHQGQHLGEMSFLQHNKXEX

SEQ ID NO: 20038 - protein, 39 aa, Artificial Sequence
  GFR-binding peptide
  MOD_RES (4), (38): Xaa is C or S
  MOD_RES (18), (19), (20), (21), (22): Xaa is A or G
  MOD_RES (23), (24), (25), (26): Xaa is A or G or is absent
GLEXVPTEESNITMQIMXXXXXXXXXIGEMSFLQHNKXE

SEQ ID NO: 20039 - protein, 38 aa, Artificial Sequence
  GFR-binding peptide
  MOD_RES (37), (37): Xaa is C or S
QPSRVHHSNITVQIMEYVRKKPKLLGEMSRLEEHLEXA

SEQ ID NO: 20040 - protein, 35 aa, Artificial Sequence
  GFR-binding peptide
  MOD_RES (15), (16), (17), (18), (19): Xaa is A or G
  MOD_RES (20), (21), (22), (23): Xaa is A or G or is absent
PSRVHHSNITVQIMXXXXXXXXXLGEMSRLEEHLE

SEQ ID NO: 20041 - protein, 39 aa, Artificial Sequence
  GFR-binding peptide
  MOD_RES (2), (36), (38): Xaa is C or S
EXVPTGQRPVQMRKIRIKPHQGQHKKATVLEEHSQXEXR

SEQ ID NO: 20042 - protein, 40 aa, Artificial Sequence
  GFR-binding peptide
  MOD_RES (1), (38), (40): Xaa is C or S
  MOD_RES (17), (18), (19), (20), (21): Xaa is A or G
  MOD_RES (22), (23), (24), (25): Xaa is A or G or is absent
XRPTQVQLSNITVQIMXXXXXXXXXLGEMSTLEDHLAXKX

SEQ ID NO: 20043 - protein, 39 aa, Artificial Sequence
  GFR-binding peptide
  MOD_RES (36), (38): Xaa is C or S
  MOD_RES (15), (16), (17), (18), (19): Xaa is A or G
  MOD_RES (20), (21), (22), (23): Xaa is A or G or is absent
PTQVQLSNITVQIMXXXXXXXXXLGEMSTLEDHLAXKXE

SEQ ID NO: 20044 - protein, 39 aa, Artificial Sequence
  GFR-binding peptide
  MOD_RES (5), (5): Xaa is C or S
  MOD_RES (21), (22), (23), (24), (25): Xaa is A or G
  MOD_RES (26), (27), (28), (29): Xaa is A or G or is absent
RNVQXRPTQVQLRPVQVRKIXXXXXXXXXKKATVTLEDH

SEQ ID NO: 20045 - protein, 40 aa, Artificial Sequence
  GFR-binding peptide
  MOD_RES (4), (38), (40): Xaa is C or S
GLEXVPTEERPVQMRKIRIKPHQGQHKKATVFLQHNKXEX

SEQ ID NO: 20046 - protein, 34 aa, Artificial Sequence
  GFR-binding peptide
QPSRVHHRPVQVRKIEYVRKKPKLKKATVRLEEH

SEQ ID NO: 20047 - protein, 38 aa, Artificial Sequence
  GFR-binding peptide
  MOD_RES (1), (35), (37): Xaa is C or S
  MOD_RES (15), (16), (17), (18), (19): Xaa is A or G
  MOD_RES (20), (21), (22), (23): Xaa is A or G or is absent
XVPTGQRPVQMRKIXXXXXXXXXKKATVLEEHSQXEXR

SEQ ID NO: 20048 - protein, 34 aa, Artificial Sequence
  GFR-binding peptide
  MOD_RES (15), (16), (17), (18), (19): Xaa is A or G
  MOD_RES (20), (21), (22), (23): Xaa is A or G or is absent
PSRVHHSNITVQIMXXXXXXXXXLGEMSRLEEHL

SEQ ID NO: 20049 - protein, 39 aa, Artificial Sequence
  GFR-binding peptide
  MOD_RES (2), (39): Xaa is C or S
QXRPTQVQLSNITVQIMEIVRKKPIFLGEMSTLEDHLAX

SEQ ID NO: 20050 - protein, 42 aa, Artificial Sequence
  GFR-binding peptide
  MOD_RES (5), (42): Xaa is C or S
SSVKXQPSRVHHSNITVQIMEYVRKKPKLLGEMSRLEEHLEX

SEQ ID NO: 20051 - protein, 38 aa, Artificial Sequence
  GFR-binding peptide
  MOD_RES (4), (38): Xaa is C or S
GLEXVPTGQRPVQMRKIRIKPHQGQHKKATVLEEHSQX

SEQ ID NO: 20052 - protein, 42 aa, Artificial Sequence
  GFR-binding peptide
  MOD_RES (3), (40), (42): Xaa is C or S
VQXRPTQVQLRSVKVAKVEIVRKKPIFKEVQVTLEDHLAXKX

SEQ ID NO: 20053 - protein, 41 aa, Artificial Sequence
  GFR-binding peptide
  MOD_RES (7), (41): Xaa is C or S
NDEGLEXVPTEERPVQMRKIRIKPHQGQHKKATVFLQHNKX

SEQ ID NO: 20054 - protein, 40 aa, Artificial Sequence
  GFR-binding peptide
  MOD_RES (5), (5): Xaa is C or S
  MOD_RES (21), (22), (23), (24), (25): Xaa is A or G
  MOD_RES (26), (27), (28), (29): Xaa is A or G or is absent
RNVQXRPTQVQLRPVQVRKIXXXXXXXXXKKATVTLEDHL

SEQ ID NO: 20055 - protein, 39 aa, Artificial Sequence
  GFR-binding peptide
  MOD_RES (4), (4): Xaa is C or S
  MOD_RES (20), (21), (22), (23), (24): Xaa is A or G
  MOD_RES (25), (26), (27), (28): Xaa is A or G or is absent
SVKXQPSRVHHRSVKVAKVXXXXXXXXXKEVQVRLEEHL

SEQ ID NO: 20056 - protein, 33 aa, Artificial Sequence
  GFR-binding peptide
  MOD_RES (14), (15), (16), (17), (18): Xaa is A or G
  MOD_RES (19), (20), (21), (22): Xaa is A or G or is absent
VPTGQSNITMQIMXXXXXXXXXIGEMSLEEHSQ

SEQ ID NO: 20057 - protein, 36 aa, Artificial Sequence
  GFR-binding peptide
  MOD_RES (2), (36): Xaa is C or S
  MOD_RES (16), (17), (18), (19), (20): Xaa is A or G
  MOD_RES (21), (22), (23), (24): Xaa is A or G or is absent
EXVPTGQSNITMQIMXXXXXXXXXLGEMSLEEHSQX

SEQ ID NO: 20058 - protein, 40 aa, Artificial Sequence
  GFR-binding peptide
  MOD_RES (3), (37), (39): Xaa is C or S
LEXVPTEESNITMQIMRIKPHQGQHLGEMSFLQHNKXEXR

SEQ ID NO: 20059 - protein, 42 aa, Artificial Sequence
  GFR-binding peptide
  MOD_RES (5), (39), (41): Xaa is C or S
  MOD_RES (19), (20), (21), (22), (23): Xaa is A or G
  MOD_RES (24), (25), (26), (27): Xaa is A or G or is absent
EGLEXVPTGQSNITMQIMXXXXXXXXXIGEMSLEEHSQXEXR

SEQ ID NO: 20060 - protein, 34 aa, Artificial Sequence
  GFR-binding peptide
  MOD_RES (16), (17), (18), (19), (20): Xaa is A or G
  MOD_RES (21), (22), (23), (24): Xaa is A or G or is absent
RPTQVQLSNITVQIMXXXXXXXXXLGEMSTLEDH

SEQ ID NO: 20061 - protein, 35 aa, Artificial Sequence
  GFR-binding peptide
  MOD_RES (16), (17), (18), (19), (20): Xaa is A or G
  MOD_RES (21), (22), (23), (24): Xaa is A or G or is absent
QPSRVHHSNITVQIMXXXXXXXXXIGEMSRLEEHL

SEQ ID NO: 20062 - protein, 43 aa, Artificial Sequence
  GFR-binding peptide
  MOD_RES (3), (40), (42): Xaa is C or S
  MOD_RES (19), (20), (21), (22), (23): Xaa is A or G
  MOD_RES (24), (25), (26), (27): Xaa is A or G or is absent
VKXQPSRVHHSNITVQIMXXXXXXXXXIGEMSRLEEHLEXAXA

SEQ ID NO: 20063 - protein, 35 aa, Artificial Sequence
  GFR-binding peptide
  MOD_RES (1), (35): Xaa is C or S
XVPTEERSVKMAKVRIKPHQGQHKEVQVFLQHNKX

SEQ ID NO: 20064 - protein, 39 aa, Artificial Sequence
  GFR-binding peptide
  MOD_RES (2), (36), (38): Xaa is C or S
EXVPTEESNITMQIMRIKPHQGQHLGEMSFLQHNKXEXR

SEQ ID NO: 20065 - protein, 36 aa, Artificial Sequence
  GFR-binding peptide
  MOD_RES (2), (36): Xaa is C or S
  MOD_RES (16), (17), (18), (19), (20): Xaa is A or G
  MOD_RES (21), (22), (23), (24): Xaa is A or G or is absent
EXVPTGQSNITMQIMXXXXXXXXXIGEMSLEEHSQX

SEQ ID NO: 20066 - protein, 41 aa, Artificial Sequence
  GFR-binding peptide
  MOD_RES (2), (39), (41): Xaa is C or S
KXQPSRVHHRPVQVRKIEYVRKKPKLKKATVRLEEHLEXAX

SEQ ID NO: 20067 - protein, 37 aa, Artificial Sequence
  GFR-binding peptide
  MOD_RES (34), (36): Xaa is C or S
VPTEERSVKMAKVRIKPHQGQHKEVQVFLQHNKXEXR

SEQ ID NO: 20068 - protein, 37 aa, Artificial Sequence
  GFR-binding peptide
  MOD_RES (2), (36): Xaa is C or S
EXVPTEERPVQMRKIRIKPHQGQHKKATVFLQHNKXE

SEQ ID NO: 20069 - protein, 39 aa, Artificial Sequence
  GFR-binding peptide
  MOD_RES (3), (37), (39): Xaa is C or S
  MOD_RES (17), (18), (19), (20), (21): Xaa is A or G
  MOD_RES (22), (23), (24), (25): Xaa is A or G or is absent
LEXVPTGQSNITMQIMXXXXXXXXXLGEMSLEEHSQXEX

SEQ ID NO: 20070 - protein, 40 aa, Artificial Sequence
  GFR-binding peptide
  MOD_RES (1), (38), (40): Xaa is C or S
XRPTQVQLSNITVQIMEIVRKKPIFIGEMSTLEDHLAXKX

SEQ ID NO: 20071 - protein, 33 aa, Artificial Sequence
  GFR-binding peptide
  MOD_RES (14), (15), (16), (17), (18): Xaa is A or G
  MOD_RES (19), (20), (21), (22): Xaa is A or G or is absent
VPTGQRPVQMRKIXXXXXXXXXKKATVLEEHSQ

SEQ ID NO: 20072 - protein, 44 aa, Artificial Sequence
  GFR-binding peptide
  MOD_RES (5), (42), (44): Xaa is C or S
SSVKXQPSRVHHSNITVQIMEYVRKKPKLIGEMSRLEEHLEXAX

SEQ ID NO: 20073 - protein, 42 aa, Artificial Sequence
  GFR-binding peptide
  MOD_RES (7), (41): Xaa is C or S
  MOD_RES (21), (22), (23), (24), (25): Xaa is A or G
  MOD_RES (26), (27), (28), (29): Xaa is A or G or is absent
NDEGLEXVPTEESNITMQIMXXXXXXXXXIGEMSFLQHNKXE

SEQ ID NO: 20074 - protein, 37 aa, Artificial Sequence
  GFR-binding peptide
  MOD_RES (3), (3): Xaa is C or S
VKXQPSRVHHSNITVQIMEYVRKKPKLLGEMSRLEEH

SEQ ID NO: 20075 - protein, 39 aa, Artificial Sequence
  GFR-binding peptide
  MOD_RES (36), (38): Xaa is C or S
  MOD_RES (15), (16), (17), (18), (19): Xaa is A or G
  MOD_RES (20), (21), (22), (23): Xaa is A or G or is absent
PTQVQLRPVQVRKIXXXXXXXXXKKATVTLEDHLAXKXE

SEQ ID NO: 20076 - protein, 37 aa, Artificial Sequence
  GFR-binding peptide
  MOD_RES (3), (3): Xaa is C or S
VKXQPSRVHHSNITVQIMEYVRKKPKLIGEMSRLEEH

SEQ ID NO: 20077 - protein, 36 aa, Artificial Sequence
  GFR-binding peptide
  MOD_RES (35), (35): Xaa is C or S
  MOD_RES (14), (15), (16), (17), (18): Xaa is A or G
  MOD_RES (19), (20), (21), (22): Xaa is A or G or is absent
SRVHHSNITVQIMXXXXXXXXXLGEMSRLEEHLEXA

SEQ ID NO: 20078 - protein, 41 aa, Artificial Sequence
  GFR-binding peptide
  MOD_RES (2), (39), (41): Xaa is C or S
QXRPTQVQLSNITVQIMEIVRKKPIFLGEMSTLEDHLAXKX

SEQ ID NO: 20079 - protein, 37 aa, Artificial Sequence
  GFR-binding peptide
  MOD_RES (2), (36): Xaa is C or S
EXVPTGQRSVKMAKVRIKPHQGQHKEVQVLEEHSQXE

SEQ ID NO: 20080 - protein, 43 aa, Artificial Sequence
  GFR-binding peptide
  MOD_RES (3), (40), (42): Xaa is C or S
  MOD_RES (19), (20), (21), (22), (23): Xaa is A or G
  MOD_RES (24), (25), (26), (27): Xaa is A or G or is absent
VKXQPSRVHHRSVKVAKVXXXXXXXXXKEVQVRLEEHLEXAXA

SEQ ID NO: 20081 - protein, 41 aa, Artificial Sequence
  GFR-binding peptide
  MOD_RES (3), (40): Xaa is C or S
VQXRPTQVQLSNITVQIMEIVRKKPIFIGEMSTLEDHLAXK

SEQ ID NO: 20082 - protein, 41 aa, Artificial Sequence
  GFR-binding peptide
  MOD_RES (4), (38), (40): Xaa is C or S
GLEXVPTEERSVKMAKVRIKPHQGQHKEVQVFLQHNKXEXR

SEQ ID NO: 20083 - protein, 37 aa, Artificial Sequence
  GFR-binding peptide
  MOD_RES (2), (2): Xaa is C or S
  MOD_RES (18), (19), (20), (21), (22): Xaa is A or G
  MOD_RES (23), (24), (25), (26): Xaa is A or G or is absent
QXRPTQVQLSNITVQIMXXXXXXXXXLGEMSTLEDHL

SEQ ID NO: 20084 - protein, 40 aa, Artificial Sequence
  GFR-binding peptide
  MOD_RES (3), (37), (39): Xaa is C or S
LEXVPTGQRSVKMAKVRIKPHQGQHKEVQVLEEHSQXEXR

SEQ ID NO: 20085 - protein, 39 aa, Artificial Sequence
  GFR-binding peptide
  MOD_RES (37), (39): Xaa is C or S
QPSRVHHRPVQVRKIEYVRKKPKLKKATVRLEEHLEXAX

SEQ ID NO: 20086 - protein, 38 aa, Artificial Sequence
  GFR-binding peptide
  MOD_RES (4), (38): Xaa is C or S
GLEXVPTEESNITMQIMRIKPHQGQHLGEMSFLQHNKX

SEQ ID NO: 20087 - protein, 39 aa, Artificial Sequence
  GFR-binding peptide
  MOD_RES (3), (3): Xaa is C or S
VQXRPTQVQLRSVKVAKVEIVRKKPIFKEVQVTLEDHLA

SEQ ID NO: 20088 - protein, 40 aa, Artificial Sequence
  GFR-binding peptide
  MOD_RES (7), (7): Xaa is C or S
NDEGLEXVPTGQRSVKMAKVRIKPHQGQHKEVQVLEEHSQ

SEQ ID NO: 20089 - protein, 38 aa, Artificial Sequence
  GFR-binding peptide
  MOD_RES (2), (36), (38): Xaa is C or S
  MOD_RES (16), (17), (18), (19), (20): Xaa is A or G
  MOD_RES (21), (22), (23), (24): Xaa is A or G or is absent
EXVPTEESNITMQIMXXXXXXXXXIGEMSFLQHNKXEX

SEQ ID NO: 20090 - protein, 39 aa, Artificial Sequence
  GFR-binding peptide
  MOD_RES (3), (37), (39): Xaa is C or S
  MOD_RES (17), (18), (19), (20), (21): Xaa is A or G
  MOD_RES (22), (23), (24), (25): Xaa is A or G or is absent
LEXVPTGQRSVKMAKVXXXXXXXXXKEVQVLEEHSQXEX

SEQ ID NO: 20091 - protein, 36 aa, Artificial Sequence
  GFR-binding peptide
  MOD_RES (34), (36): Xaa is C or S
  MOD_RES (14), (15), (16), (17), (18): Xaa is A or G
  MOD_RES (19), (20), (21), (22): Xaa is A or G or is absent
VPTGQSNITMQIMXXXXXXXXXLGEMSLEEHSQXEX

SEQ ID NO: 20092 - protein, 41 aa, Artificial Sequence
  GFR-binding peptide
  MOD_RES (5), (39), (41): Xaa is C or S
  MOD_RES (19), (20), (21), (22), (23): Xaa is A or G
  MOD_RES (24), (25), (26), (27): Xaa is A or G or is absent
EGLEXVPTGQSNITMQIMXXXXXXXXXIGEMSLEEHSQXEX

SEQ ID NO: 20093 - protein, 35 aa, Artificial Sequence
  GFR-binding peptide
  MOD_RES (16), (17), (18), (19), (20): Xaa is A or G
  MOD_RES (21), (22), (23), (24): Xaa is A or G or is absent
QPSRVHHRPVQVRKIXXXXXXXXXKKATVRLEEHL

SEQ ID NO: 20094 - protein, 41 aa, Artificial Sequence
  GFR-binding peptide
  MOD_RES (3), (40): Xaa is C or S
  MOD_RES (19), (20), (21), (22), (23): Xaa is A or G
  MOD_RES (24), (25), (26), (27): Xaa is A or G or is absent
VKXQPSRVHHRSVKVAKVXXXXXXXXXKEVQVRLEEHLEXA

SEQ ID NO: 20095 - protein, 43 aa, Artificial Sequence
  GFR-binding peptide
  MOD_RES (4), (41), (43): Xaa is C or S
  MOD_RES (20), (21), (22), (23), (24): Xaa is A or G
  MOD_RES (25), (26), (27), (28): Xaa is A or G or is absent
SVKXQPSRVHHRPVQVRKIXXXXXXXXXKKATVRLEEHLEXAX

SEQ ID NO: 20096 - protein, 39 aa, Artificial Sequence
  GFR-binding peptide
  MOD_RES (36), (38): Xaa is C or S
  MOD_RES (15), (16), (17), (18), (19): Xaa is A or G
  MOD_RES (20), (21), (22), (23): Xaa is A or G or is absent
PSRVHHSNITVQIMXXXXXXXXXIGEMSRLEEHLEXAXA

SEQ ID NO: 20097 - protein, 35 aa, Artificial Sequence
  GFR-binding peptide
PTQVQLSNITVQIMEIVRKKPIFIGEMSTLEDHLA

SEQ ID NO: 20098 - protein, 40 aa, Artificial Sequence
  GFR-binding peptide
  MOD_RES (5), (5): Xaa is C or S
  MOD_RES (21), (22), (23), (24), (25): Xaa is A or G
  MOD_RES (26), (27), (28), (29): Xaa is A or G or is absent
RNVQXRPTQVQLSNITVQIMXXXXXXXXXIGEMSTLEDHL

SEQ ID NO: 20099 - protein, 38 aa, Artificial Sequence
  GFR-binding peptide
  MOD_RES (3), (37): Xaa is C or S
LEXVPTEERPVQMRKIRIKPHQGQHKKATVFLQHNKXE

SEQ ID NO: 20100 - protein, 43 aa, Artificial Sequence
  GFR-binding peptide
  MOD_RES (5), (42): Xaa is C or S
  MOD_RES (21), (22), (23), (24), (25): Xaa is A or G
  MOD_RES (26), (27), (28), (29): Xaa is A or G or is absent
RNVQXRPTQVQLSNITVQIMXXXXXXXXXLGEMSTLEDHLAXK

SEQ ID NO: 20101 - protein, 41 aa, Artificial Sequence
  GFR-binding peptide
  MOD_RES (4), (41): Xaa is C or S
  MOD_RES (20), (21), (22), (23), (24): Xaa is A or G
  MOD_RES (25), (26), (27), (28): Xaa is A or G or is absent
NVQXRPTQVQLSNITVQIMXXXXXXXXXIGEMSTLEDHLAX

SEQ ID NO: 20102 - protein, 41 aa, Artificial Sequence
  GFR-binding peptide
  MOD_RES (1), (38), (40): Xaa is C or S
  MOD_RES (17), (18), (19), (20), (21): Xaa is A or G
  MOD_RES (22), (23), (24), (25): Xaa is A or G or is absent
XRPTQVQLRPVQVRKIXXXXXXXXXKKATVTLEDHLAXKXE

SEQ ID NO: 20103 - protein, 38 aa, Artificial Sequence
  GFR-binding peptide
  MOD_RES (37), (37): Xaa is C or S
  MOD_RES (16), (17), (18), (19), (20): Xaa is A or G
  MOD_RES (21), (22), (23), (24): Xaa is A or G or is absent
QPSRVHHSNITVQIMXXXXXXXXXLGEMSRLEEHLEXA

SEQ ID NO: 20104 - protein, 34 aa, Artificial Sequence
  GFR-binding peptide
  MOD_RES (1), (1): Xaa is C or S
  MOD_RES (15), (16), (17), (18), (19): Xaa is A or G
  MOD_RES (20), (21), (22), (23): Xaa is A or G or is absent
XVPTGQRSVKMAKVXXXXXXXXXKEVQVLEEHSQ

SEQ ID NO: 20105 - protein, 41 aa, Artificial Sequence
  GFR-binding peptide
  MOD_RES (4), (38), (40): Xaa is C or S
  MOD_RES (18), (19), (20), (21), (22): Xaa is A or G
  MOD_RES (23), (24), (25), (26): Xaa is A or G or is absent
GLEXVPTEERPVQMRKIXXXXXXXXXKKATVFLQHNKXEXR

SEQ ID NO: 20106 - protein, 41 aa, Artificial Sequence
  GFR-binding peptide
  MOD_RES (3), (40): Xaa is C or S
  MOD_RES (19), (20), (21), (22), (23): Xaa is A or G
  MOD_RES (24), (25), (26), (27): Xaa is A or G or is absent
VQXRPTQVQLSNITVQIMXXXXXXXXXIGEMSTLEDHLAXK

SEQ ID NO: 20107 - protein, 35 aa, Artificial Sequence
  GFR-binding peptide
  MOD_RES (1), (35): Xaa is C or S
  MOD_RES (15), (16), (17), (18), (19): Xaa is A or G
  MOD_RES (20), (21), (22), (23): Xaa is A or G or is absent
XVPTEERSVKMAKVXXXXXXXXXKEVQVFLQHNKX

SEQ ID NO: 20108 - protein, 39 aa, Artificial Sequence
  GFR-binding peptide
  MOD_RES (4), (4): Xaa is C or S
NVQXRPTQVQLSNITVQIMEIVRKKPIFIGEMSTLEDHL

SEQ ID NO: 20109 - protein, 38 aa, Artificial Sequence
  GFR-binding peptide
  MOD_RES (4), (38): Xaa is C or S
  MOD_RES (18), (19), (20), (21), (22): Xaa is A or G
  MOD_RES (23), (24), (25), (26): Xaa is A or G or is absent
GLEXVPTGQRPVQMRKIXXXXXXXXXKKATVLEEHSQX

SEQ ID NO: 20110 - protein, 40 aa, Artificial Sequence
  GFR-binding peptide
  MOD_RES (5), (5): Xaa is C or S
RNVQXRPTQVQLRSVKVAKVEIVRKKPIFKEVQVTLEDHL

SEQ ID NO: 20111 - protein, 37 aa, Artificial Sequence
  GFR-binding peptide
  MOD_RES (36), (36): Xaa is C or S
PSRVHHSNITVQIMEYVRKKPKLIGEMSRLEEHLEXA

SEQ ID NO: 20112 - protein, 42 aa, Artificial Sequence
  GFR-binding peptide
  MOD_RES (7), (41): Xaa is C or S
NDEGLEXVPTEESNITMQIMRIKPHQGQHLGEMSFLQHNKXE

SEQ ID NO: 20113 - protein, 41 aa, Artificial Sequence
  GFR-binding peptide
  MOD_RES (1), (38), (40): Xaa is C or S
  MOD_RES (17), (18), (19), (20), (21): Xaa is A or G
  MOD_RES (22), (23), (24), (25): Xaa is A or G or is absent
XRPTQVQLSNITVQIMXXXXXXXXXLGEMSTLEDHLAXKXE

SEQ ID NO: 20114 - protein, 36 aa, Artificial Sequence
  GFR-binding peptide
  MOD_RES (34), (36): Xaa is C or S
VPTEESNITMQIMRIKPHQGQHLGEMSFLQHNKXEX

SEQ ID NO: 20115 - protein, 37 aa, Artificial Sequence
  GFR-binding peptide
  MOD_RES (1), (1): Xaa is C or S
  MOD_RES (17), (18), (19), (20), (21): Xaa is A or G
  MOD_RES (22), (23), (24), (25): Xaa is A or G or is absent
XQPSRVHHSNITVQIMXXXXXXXXXIGEMSRLEEHLE

SEQ ID NO: 20116 - protein, 41 aa, Artificial Sequence
  GFR-binding peptide
  MOD_RES (4), (41): Xaa is C or S
SVKXQPSRVHHRPVQVRKIEYVRKKPKLKKATVRLEEHLEX

SEQ ID NO: 20117 - protein, 36 aa, Artificial Sequence
  GFR-binding peptide
  MOD_RES (3), (3): Xaa is C or S
LEXVPTGQRPVQMRKIRIKPHQGQHKKATVLEEHSQ

SEQ ID NO: 20118 - protein, 40 aa, Artificial Sequence
  GFR-binding peptide
  MOD_RES (1), (38), (40): Xaa is C or S
  MOD_RES (17), (18), (19), (20), (21): Xaa is A or G
  MOD_RES (22), (23), (24), (25): Xaa is A or G or is absent
XQPSRVHHRPVQVRKIXXXXXXXXXKKATVRLEEHLEXAX

SEQ ID NO: 20119 - protein, 43 aa, Artificial Sequence
  GFR-binding peptide
  MOD_RES (5), (42): Xaa is C or S
RNVQXRPTQVQLSNITVQIMEIVRKKPIFLGEMSTLEDHLAXK

SEQ ID NO: 20120 - protein, 37 aa, Artificial Sequence
  GFR-binding peptide
  MOD_RES (34), (36): Xaa is C or S
  MOD_RES (14), (15), (16), (17), (18): Xaa is A or G
  MOD_RES (19), (20), (21), (22): Xaa is A or G or is absent
VPTEERPVQMRKIXXXXXXXXXKKATVFLQHNKXEXR

SEQ ID NO: 20121 - protein, 32 aa, Artificial Sequence
  GFR-binding peptide
  MOD_RES (14), (15), (16), (17), (18): Xaa is A or G
  MOD_RES (19), (20), (21), (22): Xaa is A or G or is absent
SRVHHRSVKVAKVXXXXXXXXXKEVQVRLEEH

SEQ ID NO: 20122 - protein, 37 aa, Artificial Sequence
  GFR-binding peptide
  MOD_RES (35), (37): Xaa is C or S
  MOD_RES (14), (15), (16), (17), (18): Xaa is A or G
  MOD_RES (19), (20), (21), (22): Xaa is A or G or is absent
TQVQLRSVKVAKVXXXXXXXXXKEVQVTLEDHLAXKX

SEQ ID NO: 20123 - protein, 40 aa, Artificial Sequence
  GFR-binding peptide
  MOD_RES (4), (38), (40): Xaa is C or S
  MOD_RES (18), (19), (20), (21), (22): Xaa is A or G
  MOD_RES (23), (24), (25), (26): Xaa is A or G or is absent
GLEXVPTGQRPVQMRKIXXXXXXXXXKKATVLEEHSQXEX

SEQ ID NO: 20124 - protein, 39 aa, Artificial Sequence
  GFR-binding peptide
  MOD_RES (5), (5): Xaa is C or S
  MOD_RES (21), (22), (23), (24), (25): Xaa is A or G
  MOD_RES (26), (27), (28), (29): Xaa is A or G or is absent
RNVQXRPTQVQLSNITVQIMXXXXXXXXXIGEMSTLEDH

SEQ ID NO: 20125 - protein, 34 aa, Artificial Sequence
  GFR-binding peptide
  MOD_RES (34), (34): Xaa is C or S
  MOD_RES (14), (15), (16), (17), (18): Xaa is A or G
  MOD_RES (19), (20), (21), (22): Xaa is A or G or is absent
VPTEERSVKMAKVXXXXXXXXXKEVQVFLQHNKX

SEQ ID NO: 20126 - protein, 36 aa, Artificial Sequence
  GFR-binding peptide
  MOD_RES (3), (3): Xaa is C or S
LEXVPTGQSNITMQIMRIKPHQGQHIGEMSLEEHSQ

SEQ ID NO: 20127 - protein, 37 aa, Artificial Sequence
  GFR-binding peptide
  MOD_RES (37), (37): Xaa is C or S
  MOD_RES (16), (17), (18), (19), (20): Xaa is A or G
  MOD_RES (21), (22), (23), (24): Xaa is A or G or is absent
RPTQVQLSNITVQIMXXXXXXXXXLGEMSTLEDHLAX

SEQ ID NO: 20128 - protein, 39 aa, Artificial Sequence
  GFR-binding peptide
  MOD_RES (5), (5): Xaa is C or S
  MOD_RES (21), (22), (23), (24), (25): Xaa is A or G
  MOD_RES (26), (27), (28), (29): Xaa is A or G or is absent
RNVQXRPTQVQLSNITVQIMXXXXXXXXXLGEMSTLEDH

SEQ ID NO: 20129 - protein, 38 aa, Artificial Sequence
  GFR-binding peptide
  MOD_RES (2), (36), (38): Xaa is C or S
  MOD_RES (16), (17), (18), (19), (20): Xaa is A or G
  MOD_RES (21), (22), (23), (24): Xaa is A or G or is absent
EXVPTEERPVQMRKIXXXXXXXXXKKATVFLQHNKXEX

SEQ ID NO: 20130 - protein, 36 aa, Artificial Sequence
  GFR-binding peptide
QPSRVHHSNITVQIMEYVRKKPKLLGEMSRLEEHLE

SEQ ID NO: 20131 - protein, 39 aa, Artificial Sequence
  GFR-binding peptide
  MOD_RES (4), (38): Xaa is C or S
  MOD_RES (18), (19), (20), (21), (22): Xaa is A or G
  MOD_RES (23), (24), (25), (26): Xaa is A or G or is absent
GLEXVPTEERPVQMRKIXXXXXXXXXKKATVFLQHNKXE

SEQ ID NO: 20132 - protein, 36 aa, Artificial Sequence
  GFR-binding peptide
  MOD_RES (1), (1): Xaa is C or S
  MOD_RES (17), (18), (19), (20), (21): Xaa is A or G
  MOD_RES (22), (23), (24), (25): Xaa is A or G or is absent
XQPSRVHHRPVQVRKIXXXXXXXXXKKATVRLEEHL

SEQ ID NO: 20133 - protein, 42 aa, Artificial Sequence
  GFR-binding peptide
  MOD_RES (2), (39), (41): Xaa is C or S
QXRPTQVQLSNITVQIMEIVRKKPIFIGEMSTLEDHLAXKXE

SEQ ID NO: 20134 - protein, 41 aa, Artificial Sequence
  GFR-binding peptide
  MOD_RES (6), (40): Xaa is C or S
  MOD_RES (20), (21), (22), (23), (24): Xaa is A or G
  MOD_RES (25), (26), (27), (28): Xaa is A or G or is absent
DEGLEXVPTEERPVQMRKIXXXXXXXXXKKATVFLQHNKXE

SEQ ID NO: 20135 - protein, 34 aa, Artificial Sequence
  GFR-binding peptide
  MOD_RES (16), (17), (18), (19), (20): Xaa is A or G
  MOD_RES (21), (22), (23), (24): Xaa is A or G or is absent
RPTQVQLSNITVQIMXXXXXXXXXIGEMSTLEDH

SEQ ID NO: 20136 - protein, 34 aa, Artificial Sequence
  GFR-binding peptide
  MOD_RES (34), (34): Xaa is C or S
VPTEERSVKMAKVRIKPHQGQHKEVQVFLQHNKX

SEQ ID NO: 20137 - protein, 36 aa, Artificial Sequence
  GFR-binding peptide
  MOD_RES (1), (1): Xaa is C or S
  MOD_RES (17), (18), (19), (20), (21): Xaa is A or G
  MOD_RES (22), (23), (24), (25): Xaa is A or G or is absent
XQPSRVHHSNITVQIMXXXXXXXXXIGEMSRLEEHL

SEQ ID NO: 20138 - protein, 41 aa, Artificial Sequence
  GFR-binding peptide
  MOD_RES (5), (39), (41): Xaa is C or S
  MOD_RES (19), (20), (21), (22), (23): Xaa is A or G
  MOD_RES (24), (25), (26), (27): Xaa is A or G or is absent
EGLEXVPTGQRPVQMRKIXXXXXXXXXKKATVLEEHSQXEX

SEQ ID NO: 20139 - protein, 36 aa, Artificial Sequence
  GFR-binding peptide
  MOD_RES (3), (3): Xaa is C or S
  MOD_RES (17), (18), (19), (20), (21): Xaa is A or G
  MOD_RES (22), (23), (24), (25): Xaa is A or G or is absent
LEXVPTGQSNITMQIMXXXXXXXXXLGEMSLEEHSQ

SEQ ID NO: 20140 - protein, 39 aa, Artificial Sequence
  GFR-binding peptide
  MOD_RES (3), (3): Xaa is C or S
VQXRPTQVQLSNITVQIMEIVRKKPIFLGEMSTLEDHLA

SEQ ID NO: 20141 - protein, 40 aa, Artificial Sequence
  GFR-binding peptide
  MOD_RES (3), (40): Xaa is C or S
  MOD_RES (19), (20), (21), (22), (23): Xaa is A or G
  MOD_RES (24), (25), (26), (27): Xaa is A or G or is absent
VKXQPSRVHHSNITVQIMXXXXXXXXXIGEMSRLEEHLEX

SEQ ID NO: 20142 - protein, 35 aa, Artificial Sequence
  GFR-binding peptide
  MOD_RES (35), (35): Xaa is C or S
  MOD_RES (14), (15), (16), (17), (18): Xaa is A or G
  MOD_RES (19), (20), (21), (22): Xaa is A or G or is absent
SRVHHSNITVQIMXXXXXXXXXLGEMSRLEEHLEX

SEQ ID NO: 20143 - protein, 37 aa, Artificial Sequence
  GFR-binding peptide
  MOD_RES (3), (37): Xaa is C or S
LEXVPTGQRSVKMAKVRIKPHQGQHKEVQVLEEHSQX

SEQ ID NO: 20144 - protein, 41 aa, Artificial Sequence
  GFR-binding peptide
  MOD_RES (7), (41): Xaa is C or S
  MOD_RES (21), (22), (23), (24), (25): Xaa is A or G
  MOD_RES (26), (27), (28), (29): Xaa is A or G or is absent
NDEGLEXVPTEERPVQMRKIXXXXXXXXXKKATVFLQHNKX

SEQ ID NO: 20145 - protein, 37 aa, Artificial Sequence
  GFR-binding peptide
  MOD_RES (3), (37): Xaa is C or S
  MOD_RES (17), (18), (19), (20), (21): Xaa is A or G
  MOD_RES (22), (23), (24), (25): Xaa is A or G or is absent
LEXVPTGQRSVKMAKVXXXXXXXXXKEVQVLEEHSQX

SEQ ID NO: 20146 - protein, 35 aa, Artificial Sequence
  GFR-binding peptide
  MOD_RES (34), (34): Xaa is C or S
  MOD_RES (14), (15), (16), (17), (18): Xaa is A or G
  MOD_RES (19), (20), (21), (22): Xaa is A or G or is absent
VPTGQSNITMQIMXXXXXXXXXLGEMSLEEHSQXE

SEQ ID NO: 20147 - protein, 39 aa, Artificial Sequence
  GFR-binding peptide
  MOD_RES (5), (39): Xaa is C or S
  MOD_RES (19), (20), (21), (22), (23): Xaa is A or G
  MOD_RES (24), (25), (26), (27): Xaa is A or G or is absent
EGLEXVPTEESNITMQIMXXXXXXXXXIGEMSFLQHNKX

SEQ ID NO: 20148 - protein, 38 aa, Artificial Sequence
  GFR-binding peptide
  MOD_RES (4), (4): Xaa is C or S
  MOD_RES (20), (21), (22), (23), (24): Xaa is A or G
  MOD_RES (25), (26), (27), (28): Xaa is A or G or is absent
SVKXQPSRVHHRSVKVAKVXXXXXXXXXKEVQVRLEEH

SEQ ID NO: 20149 - protein, 40 aa, Artificial Sequence
  GFR-binding peptide
  MOD_RES (3), (37), (39): Xaa is C or S
  MOD_RES (17), (18), (19), (20), (21): Xaa is A or G
  MOD_RES (22), (23), (24), (25): Xaa is A or G or is absent
LEXVPTGQRPVQMRKIXXXXXXXXXKKATVLEEHSQXEXR

SEQ ID NO: 20150 - protein, 38 aa, Artificial Sequence
  GFR-binding peptide
  MOD_RES (37), (37): Xaa is C or S
  MOD_RES (16), (17), (18), (19), (20): Xaa is A or G
  MOD_RES (21), (22), (23), (24): Xaa is A or G or is absent
QPSRVHHRPVQVRKIXXXXXXXXXKKATVRLEEHLEXA

SEQ ID NO: 20151 - protein, 42 aa, Artificial Sequence; identical to SEQ ID NO: 17047
  GFR-binding peptide
  MOD_RES (2), (36): Xaa is C or S
  MOD_RES (14), (15), (16), (17), (18): Xaa is A or G
  MOD_RES (19), (20), (21), (22): Xaa is A or G or is absent

SEQ ID NO: 20152 - protein, 37 aa, Artificial Sequence; identical to SEQ ID NO: 17048
  GFR-binding peptide
  MOD_RES (1), (1): Xaa is C or S
  MOD_RES (14), (15), (16), (17), (18): Xaa is A or G
  MOD_RES (19), (20), (21), (22): Xaa is A or G or is absent

SEQ ID NO: 20153 - protein, 36 aa, Artificial Sequence; identical to SEQ ID NO: 17049
  GFR-binding peptide
  MOD_RES (1), (3): Xaa is C or S

SEQ ID NO: 20154 - protein, 40 aa, Artificial Sequence; identical to SEQ ID NO: 17050
  GFR-binding peptide
  MOD_RES (1), (35): Xaa is C or S
  MOD_RES (13), (14), (15), (16), (17): Xaa is A or G
  MOD_RES (18), (19), (20), (21): Xaa is A or G or is absent

SEQ ID NO: 20155 - protein, 43 aa, Artificial Sequence; identical to SEQ ID NO: 17051
  GFR-binding peptide
  MOD_RES (1), (3), (37): Xaa is C or S

SEQ ID NO: 20156 - protein, 35 aa, Artificial Sequence; identical to SEQ ID NO: 17052
  GFR-binding peptide
  MOD_RES (1), (35): Xaa is C or S

SEQ ID NO: 20157 - protein, 42 aa, Artificial Sequence; identical to SEQ ID NO: 17053
  GFR-binding peptide
  MOD_RES (2), (4), (41): Xaa is C or S
  MOD_RES (17), (18), (19), (20), (21): Xaa is A or G
  MOD_RES (22), (23), (24), (25): Xaa is A or G or is absent

SEQ ID NO: 20158 - protein, 38 aa, Artificial Sequence; identical to SEQ ID NO: 17054
  GFR-binding peptide
  MOD_RES (1), (3): Xaa is C or S
  MOD_RES (16), (17), (18), (19), (20): Xaa is A or G
  MOD_RES (21), (22), (23), (24): Xaa is A or G or is absent

SEQ ID NO: 20159 - protein, 41 aa, Artificial Sequence; identical to SEQ ID NO: 17055
  GFR-binding peptide
  MOD_RES (1), (3), (40): Xaa is C or S
  MOD_RES (16), (17), (18), (19), (20): Xaa is A or G
  MOD_RES (21), (22), (23), (24): Xaa is A or G or is absent

SEQ ID NO: 20160 - protein, 39 aa, Artificial Sequence; identical to SEQ ID NO: 17056
  GFR-binding peptide
  MOD_RES (2), (36): Xaa is C or S
  MOD_RES (14), (15), (16), (17), (18): Xaa is A or G
  MOD_RES (19), (20), (21), (22): Xaa is A or G or is absent

SEQ ID NO: 20161 - protein, 32 aa, Artificial Sequence; identical to SEQ ID NO: 17057
  GFR-binding peptide

SEQ ID NO: 20162 - protein, 42 aa, Artificial Sequence; identical to SEQ ID NO: 17058
  GFR-binding peptide
  MOD_RES (1), (38): Xaa is C or S

SEQ ID NO: 20163 - protein, 34 aa, Artificial Sequence; identical to SEQ ID NO: 17059
  GFR-binding peptide
  MOD_RES (33), (33): Xaa is C or S
  MOD_RES (11), (12), (13), (14), (15): Xaa is A or G
  MOD_RES (16), (17), (18), (19): Xaa is A or G or is absent

SEQ ID NO: 20164 - protein, 35 aa, Artificial Sequence; identical to SEQ ID NO: 17060
  GFR-binding peptide
  MOD_RES (35), (35): Xaa is C or S
  MOD_RES (11), (12), (13), (14), (15): Xaa is A or G
  MOD_RES (16), (17), (18), (19): Xaa is A or G or is absent

SEQ ID NO: 20165 - protein, 36 aa, Artificial Sequence; identical to SEQ ID NO: 17061
  GFR-binding peptide
  MOD_RES (35), (35): Xaa is C or S
  MOD_RES (11), (12), (13), (14), (15): Xaa is A or G
  MOD_RES (16), (17), (18), (19): Xaa is A or G or is absent

SEQ ID NO: 20166 - protein, 43 aa, Artificial Sequence; identical to SEQ ID NO: 17062
  GFR-binding peptide
  MOD_RES (1), (3), (37): Xaa is C or S
  MOD_RES (15), (16), (17), (18), (19): Xaa is A or G
  MOD_RES (20), (21), (22), (23): Xaa is A or G or is absent

SEQ ID NO: 20167 - protein, 40 aa, Artificial Sequence; identical to SEQ ID NO: 17063
  GFR-binding peptide
  MOD_RES (34), (34): Xaa is C or S
  MOD_RES (12), (13), (14), (15), (16): Xaa is A or G
  MOD_RES (17), (18), (19), (20): Xaa is A or G or is absent

SEQ ID NO: 20168 - protein, 38 aa, Artificial Sequence; identical to SEQ ID NO: 17064
  GFR-binding peptide
  MOD_RES (37), (37): Xaa is C or S
  MOD_RES (13), (14), (15), (16), (17): Xaa is A or G
  MOD_RES (18), (19), (20), (21): Xaa is A or G or is absent

SEQ ID NO: 20169 - protein, 41 aa, Artificial Sequence; identical to SEQ ID NO: 17065
  GFR-binding peptide
  MOD_RES (2), (4), (38): Xaa is C or S
  MOD_RES (16), (17), (18), (19), (20): Xaa is A or G
  MOD_RES (21), (22), (23), (24): Xaa is A or G or is absent

SEQ ID NO: 20170 - protein, 36 aa, Artificial Sequence; identical to SEQ ID NO: 17066
  GFR-binding peptide
  MOD_RES (2), (36): Xaa is C or S
  MOD_RES (14), (15), (16), (17), (18): Xaa is A or G
  MOD_RES (19), (20), (21), (22): Xaa is A or G or is absent

SEQ ID NO: 20171 - protein, 36 aa, Artificial Sequence; identical to SEQ ID NO: 17067
  GFR-binding peptide
  MOD_RES (2), (36): Xaa is C or S
  MOD_RES (14), (15), (16), (17), (18): Xaa is A or G
  MOD_RES (19), (20), (21), (22): Xaa is A or G or is absent

SEQ ID NO: 20172 - protein, 35 aa, Artificial Sequence; identical to SEQ ID NO: 17068
  GFR-binding peptide
  MOD_RES (2), (2): Xaa is C or S

SEQ ID NO: 20173 - protein, 39 aa, Artificial Sequence; identical to SEQ ID NO: 17069
  GFR-binding peptide
  MOD_RES (1), (38): Xaa is C or S

SEQ ID NO: 20174 - protein, 38 aa, Artificial Sequence; identical to SEQ ID NO: 17070
  GFR-binding peptide
  MOD_RES (1), (35): Xaa is C or S
  MOD_RES (13), (14), (15), (16), (17): Xaa is A or G
  MOD_RES (18), (19), (20), (21): Xaa is A or G or is absent

SEQ ID NO: 20175 - protein, 36 aa, Artificial Sequence; identical to SEQ ID NO: 17071
  GFR-binding peptide
  MOD_RES (1), (3): Xaa is C or S

SEQ ID NO: 20176 - protein, 40 aa, Artificial Sequence; identical to SEQ ID NO: 17072
  GFR-binding peptide
  MOD_RES (2), (39): Xaa is C or S
  MOD_RES (15), (16), (17), (18), (19): Xaa is A or G
  MOD_RES (20), (21), (22), (23): Xaa is A or G or is absent

SEQ ID NO: 20177 - protein, 37 aa, Artificial Sequence; identical to SEQ ID NO: 17073
  GFR-binding peptide
  MOD_RES (34), (34): Xaa is C or S
  MOD_RES (12), (13), (14), (15), (16): Xaa is A or G
  MOD_RES (17), (18), (19), (20): Xaa is A or G or is absent

SEQ ID NO: 20178 - protein, 37 aa, Artificial Sequence; identical to SEQ ID NO: 17074
  GFR-binding peptide
  MOD_RES (36), (36): Xaa is C or S
  MOD_RES (12), (13), (14), (15), (16): Xaa is A or G
  MOD_RES (17), (18), (19), (20): Xaa is A or G or is absent

SEQ ID NO: 20179 - protein, 40 aa, Artificial Sequence; identical to SEQ ID NO: 17075
  GFR-binding peptide
  MOD_RES (2), (4): Xaa is C or S
  MOD_RES (17), (18), (19), (20), (21): Xaa is A or G
  MOD_RES (22), (23), (24), (25): Xaa is A or G or is absent

SEQ ID NO: 20180 - protein, 37 aa, Artificial Sequence; identical to SEQ ID NO: 17076
  GFR-binding peptide
  MOD_RES (37), (37): Xaa is C or S

SEQ ID NO: 20181 - protein, 42 aa, Artificial Sequence; identical to SEQ ID NO: 17077
  GFR-binding peptide
  MOD_RES (1), (38): Xaa is C or S
  MOD_RES (14), (15), (16), (17), (18): Xaa is A or G
  MOD_RES (19), (20), (21), (22): Xaa is A or G or is absent

SEQ ID NO: 20182 - protein, 36 aa, Artificial Sequence; identical to SEQ ID NO: 17078
  GFR-binding peptide
  MOD_RES (2), (2): Xaa is C or S
  MOD_RES (15), (16), (17), (18), (19): Xaa is A or G
  MOD_RES (20), (21), (22), (23): Xaa is A or G or is absent

SEQ ID NO: 20183 - protein, 36 aa, Artificial Sequence; identical to SEQ ID NO: 17079
  GFR-binding peptide
  MOD_RES (36), (36): Xaa is C or S

SEQ ID NO: 20184 - protein, 45 aa, Artificial Sequence; identical to SEQ ID NO: 17080
  GFR-binding peptide
  MOD_RES (2), (4), (41): Xaa is C or S

SEQ ID NO: 20185 - protein, 34 aa, Artificial Sequence; identical to SEQ ID NO: 17081
  GFR-binding peptide

SEQ ID NO: 20186 - protein, 37 aa, Artificial Sequence; identical to SEQ ID NO: 17082
  GFR-binding peptide
  MOD_RES (2), (4): Xaa is C or S

SEQ ID NO: 20187 - protein, 35 aa, Artificial Sequence; identical to SEQ ID NO: 17083
  GFR-binding peptide
  MOD_RES (35), (35): Xaa is C or S

SEQ ID NO: 20188 - protein, 37 aa, Artificial Sequence; identical to SEQ ID NO: 17084
  GFR-binding peptide
  MOD_RES (1), (1): Xaa is C or S
  MOD_RES (14), (15), (16), (17), (18): Xaa is A or G
  MOD_RES (19), (20), (21), (22): Xaa is A or G or is absent

SEQ ID NO: 20189 - protein, 34 aa, Artificial Sequence; identical to SEQ ID NO: 17085
  GFR-binding peptide
  MOD_RES (1), (1): Xaa is C or S
  MOD_RES (13), (14), (15), (16), (17): Xaa is A or G
  MOD_RES (18), (19), (20), (21): Xaa is A or G or is absent

SEQ ID NO: 20190 - protein, 33 aa, Artificial Sequence; identical to SEQ ID NO: 17086
  GFR-binding peptide

SEQ ID NO: 20191 - protein, 44 aa, Artificial Sequence; identical to SEQ ID NO: 17087
  GFR-binding peptide
  MOD_RES (2), (4), (41): Xaa is C or S

SEQ ID NO: 20192 - protein, 40 aa, Artificial Sequence; identical to SEQ ID NO: 17088
  GFR-binding peptide
  MOD_RES (1), (3), (37): Xaa is C or S
  MOD_RES (15), (16), (17), (18), (19): Xaa is A or G
  MOD_RES (20), (21), (22), (23): Xaa is A or G or is absent

SEQ ID NO: 20193 - protein, 39 aa, Artificial Sequence; identical to SEQ ID NO: 17089
  GFR-binding peptide
  MOD_RES (2), (36): Xaa is C or S
  MOD_RES (14), (15), (16), (17), (18): Xaa is A or G
  MOD_RES (19), (20), (21), (22): Xaa is A or G or is absent

SEQ ID NO: 20194 - protein, 38 aa, Artificial Sequence; identical to SEQ ID NO: 17090
  GFR-binding peptide
  MOD_RES (1), (3), (37): Xaa is C or S
  MOD_RES (15), (16), (17), (18), (19): Xaa is A or G
  MOD_RES (20), (21), (22), (23): Xaa is A or G or is absent

SEQ ID NO: 20195 - protein, 41 aa, Artificial Sequence; identical to SEQ ID NO: 17091
  GFR-binding peptide
  MOD_RES (1), (35): Xaa is C or S
  MOD_RES (13), (14), (15), (16), (17): Xaa is A or G
  MOD_RES (18), (19), (20), (21): Xaa is A or G or is absent

SEQ ID NO: 20196 - protein, 40 aa, Artificial Sequence; identical to SEQ ID NO: 17092
  GFR-binding peptide
  MOD_RES (2), (39): Xaa is C or S

SEQ ID NO: 20197 - protein, 42 aa, Artificial Sequence; identical to SEQ ID NO: 17093
  GFR-binding peptide
  MOD_RES (2), (39): Xaa is C or S
  MOD_RES (15), (16), (17), (18), (19): Xaa is A or G
  MOD_RES (20), (21), (22), (23): Xaa is A or G or is absent

SEQ ID NO: 20198 - protein, 36 aa, Artificial Sequence; identical to SEQ ID NO: 17094
  GFR-binding peptide
  MOD_RES (33), (33): Xaa is C or S
  MOD_RES (11), (12), (13), (14), (15): Xaa is A or G
  MOD_RES (16), (17), (18), (19): Xaa is A or G or is absent

SEQ ID NO: 20199 - protein, 38 aa, Artificial Sequence; identical to SEQ ID NO: 17095
  GFR-binding peptide
  MOD_RES (2), (36): Xaa is C or S

SEQ ID NO: 20200 - protein, 38 aa, Artificial Sequence; identical to SEQ ID NO: 17096
  GFR-binding peptide
  MOD_RES (2), (2): Xaa is C or S

SEQ ID NO: 20201 - protein, 40 aa, Artificial Sequence; identical to SEQ ID NO: 17097
  GFR-binding peptide
  MOD_RES (1), (35): Xaa is C or S

SEQ ID NO: 20202 - protein, 37 aa, Artificial Sequence; identical to SEQ ID NO: 17098
  GFR-binding peptide
  MOD_RES (2), (4): Xaa is C or S
  MOD_RES (16), (17), (18), (19), (20): Xaa is A or G
  MOD_RES (21), (22), (23), (24): Xaa is A or G or is absent

SEQ ID NO: 20203 - protein, 39 aa, Artificial Sequence; identical to SEQ ID NO: 17099
  GFR-binding peptide
  MOD_RES (35), (35): Xaa is C or S
  MOD_RES (11), (12), (13), (14), (15): Xaa is A or G
  MOD_RES (16), (17), (18), (19): Xaa is A or G or is absent

SEQ ID NO: 20204 - protein, 37 aa, Artificial Sequence; identical to SEQ ID NO: 17100
  GFR-binding peptide
  MOD_RES (35), (35): Xaa is C or S

SEQ ID NO: 20205 - protein, 38 aa, Artificial Sequence; identical to SEQ ID NO: 17101
  GFR-binding peptide
  MOD_RES (36), (36): Xaa is C or S

SEQ ID NO: 20206 - protein, 39 aa, Artificial Sequence; identical to SEQ ID NO: 17102
  GFR-binding peptide
  MOD_RES (37), (37): Xaa is C or S

SEQ ID NO: 20207 - protein, 43 aa, Artificial Sequence; identical to SEQ ID NO: 17103
  GFR-binding peptide
  MOD_RES (2), (39): Xaa is C or S
  MOD_RES (15), (16), (17), (18), (19): Xaa is A or G
  MOD_RES (20), (21), (22), (23): Xaa is A or G or is absent

SEQ ID NO: 20208 - protein, 42 aa, Artificial Sequence; identical to SEQ ID NO: 17104
  GFR-binding peptide
  MOD_RES (1), (3), (37): Xaa is C or S

SEQ ID NO: 20209 - protein, 41 aa, Artificial Sequence; identical to SEQ ID NO: 17105
  GFR-binding peptide
  MOD_RES (1), (38): Xaa is C or S

SEQ ID NO: 20210 - protein, 35 aa, Artificial Sequence; identical to SEQ ID NO: 17106
  GFR-binding peptide
  MOD_RES (13), (14), (15), (16), (17): Xaa is A or G
  MOD_RES (18), (19), (20), (21): Xaa is A or G or is absent

SEQ ID NO: 20211 - protein, 38 aa, Artificial Sequence; identical to SEQ ID NO: 17107
  GFR-binding peptide
  MOD_RES (35), (35): Xaa is C or S

SEQ ID NO: 20212 - protein, 37 aa, Artificial Sequence; identical to SEQ ID NO: 17108
  GFR-binding peptide
  MOD_RES (33), (33): Xaa is C or S

SEQ ID NO: 20213 - protein, 38 aa, Artificial Sequence; identical to SEQ ID NO: 17109
  GFR-binding peptide
  MOD_RES (2), (4), (38): Xaa is C or S

SEQ ID NO: 20214 - protein, 40 aa, Artificial Sequence; identical to SEQ ID NO: 17110
  GFR-binding peptide
  MOD_RES (1), (3), (37): Xaa is C or S
  MOD_RES (15), (16), (17), (18), (19): Xaa is A or G
  MOD_RES (20), (21), (22), (23): Xaa is A or G or is absent

SEQ ID NO: 20215 - protein, 43 aa, Artificial Sequence; identical to SEQ ID NO: 17111
  GFR-binding peptide
  MOD_RES (2), (4), (38): Xaa is C or S
  MOD_RES (16), (17), (18), (19), (20): Xaa is A or G
  MOD_RES (21), (22), (23), (24): Xaa is A or G or is absent

SEQ ID NO: 20216 - protein, 35 aa, Artificial Sequence; identical to SEQ ID NO: 17112
  GFR-binding peptide
  MOD_RES (35), (35): Xaa is C or S

SEQ ID NO: 20217 - protein, 39 aa, Artificial Sequence; identical to SEQ ID NO: 17113
  GFR-binding peptide
  MOD_RES (2), (4), (38): Xaa is C or S

SEQ ID NO: 20218 - protein, 35 aa, Artificial Sequence; identical to SEQ ID NO: 17114
  GFR-binding peptide
  MOD_RES (33), (33): Xaa is C or S

SEQ ID NO: 20219 - protein, 40 aa, Artificial Sequence; identical to SEQ ID NO: 17115
  GFR-binding peptide
  MOD_RES (37), (37): Xaa is C or S
  MOD_RES (13), (14), (15), (16), (17): Xaa is A or G
  MOD_RES (18), (19), (20), (21): Xaa is A or G or is absent

SEQ ID NO: 20220 - protein, 34 aa, Artificial Sequence; identical to SEQ ID NO: 17116
  GFR-binding peptide
  MOD_RES (34), (34): Xaa is C or S
  MOD_RES (12), (13), (14), (15), (16): Xaa is A or G
  MOD_RES (17), (18), (19), (20): Xaa is A or G or is absent

SEQ ID NO: 20221 - protein, 40 aa, Artificial Sequence; identical to SEQ ID NO: 17117
  GFR-binding peptide
  MOD_RES (37), (37): Xaa is C or S

SEQ ID NO: 20222 - protein, 38 aa, Artificial Sequence; identical to SEQ ID NO: 17118
  GFR-binding peptide
  MOD_RES (2), (4), (38): Xaa is C or S

SEQ ID NO: 20223 - protein, 42 aa, Artificial Sequence; identical to SEQ ID NO: 17119
  GFR-binding peptide
  MOD_RES (2), (36): Xaa is C or S
  MOD_RES (14), (15), (16), (17), (18): Xaa is A or G
  MOD_RES (19), (20), (21), (22): Xaa is A or G or is absent

SEQ ID NO: 20224 - protein, 39 aa, Artificial Sequence; identical to SEQ ID NO: 17120
  GFR-binding peptide
  MOD_RES (1), (3), (37): Xaa is C or S

SEQ ID NO: 20225 - protein, 45 aa, Artificial Sequence; identical to SEQ ID NO: 17121
  GFR-binding peptide
  MOD_RES (2), (4), (41): Xaa is C or S

SEQ ID NO: 20226 - protein, 42 aa, Artificial Sequence; identical to SEQ ID NO: 17122
  GFR-binding peptide
  MOD_RES (2), (4), (38): Xaa is C or S
  MOD_RES (16), (17), (18), (19), (20): Xaa is A or G
  MOD_RES (21), (22), (23), (24): Xaa is A or G or is absent

SEQ ID NO: 20227 - protein, 39 aa, Artificial Sequence; identical to SEQ ID NO: 17123
  GFR-binding peptide
  MOD_RES (34), (34): Xaa is C or S

SEQ ID NO: 20228 - protein, 39 aa, Artificial Sequence; identical to SEQ ID NO: 17124
  GFR-binding peptide
  MOD_RES (1), (35): Xaa is C or S

SEQ ID NO: 20229 - protein, 36 aa, Artificial Sequence; identical to SEQ ID NO: 17125
  GFR-binding peptide
  MOD_RES (1), (35): Xaa is C or S
  MOD_RES (13), (14), (15), (16), (17): Xaa is A or G
  MOD_RES (18), (19), (20), (21): Xaa is A or G or is absent

SEQ ID NO: 20230 - protein, 32 aa, Artificial Sequence; identical to SEQ ID NO: 17126
  GFR-binding peptide

SEQ ID NO: 20231 - protein, 42 aa, Artificial Sequence; identical to SEQ ID NO: 17127
  GFR-binding peptide
  MOD_RES (1), (38): Xaa is C or S

SEQ ID NO: 20232 - protein, 37 aa, Artificial Sequence; identical to SEQ ID NO: 17128
  GFR-binding peptide
  MOD_RES (2), (36): Xaa is C or S
  MOD_RES (14), (15), (16), (17), (18): Xaa is A or G
  MOD_RES (19), (20), (21), (22): Xaa is A or G or is absent

SEQ ID NO: 20233 - protein, 41 aa, Artificial Sequence; identical to SEQ ID NO: 17129
  GFR-binding peptide
  MOD_RES (2), (4), (38): Xaa is C or S
  MOD_RES (16), (17), (18), (19), (20): Xaa is A or G
  MOD_RES (21), (22), (23), (24): Xaa is A or G or is absent

SEQ ID NO: 20234 - protein, 35 aa, Artificial Sequence; identical to SEQ ID NO: 17130
  GFR-binding peptide
  MOD_RES (34), (34): Xaa is C or S
  MOD_RES (12), (13), (14), (15), (16): Xaa is A or G
  MOD_RES (17), (18), (19), (20): Xaa is A or G or is absent

SEQ ID NO: 20235 - protein, 38 aa, Artificial Sequence; identical to SEQ ID NO: 17131
  GFR-binding peptide
  MOD_RES (34), (34): Xaa is C or S
  MOD_RES (12), (13), (14), (15), (16): Xaa is A or G
  MOD_RES (17), (18), (19), (20): Xaa is A or G or is absent

SEQ ID NO: 20236 - protein, 37 aa, Artificial Sequence; identical to SEQ ID NO: 17132
  GFR-binding peptide
  MOD_RES (1), (3), (37): Xaa is C or S
  MOD_RES (15), (16), (17), (18), (19): Xaa is A or G
  MOD_RES (20), (21), (22), (23): Xaa is A or G or is absent

SEQ ID NO: 20237 - protein, 39 aa, Artificial Sequence; identical to SEQ ID NO: 17133
  GFR-binding peptide
  MOD_RES (2), (4): Xaa is C or S
  MOD_RES (17), (18), (19), (20), (21): Xaa is A or G
  MOD_RES (22), (23), (24), (25): Xaa is A or G or is absent

SEQ ID NO: 20238 - protein, 33 aa, Artificial Sequence; identical to SEQ ID NO: 17134
  GFR-binding peptide

SEQ ID NO: 20239 - protein, 36 aa, Artificial Sequence; identical to SEQ ID NO: 17135
  GFR-binding peptide
  MOD_RES (34), (34): Xaa is C or S
  MOD_RES (12), (13), (14), (15), (16): Xaa is A or G
  MOD_RES (17), (18), (19), (20): Xaa is A or G or is absent

SEQ ID NO: 20240 - protein, 38 aa, Artificial Sequence; identical to SEQ ID NO: 17136
  GFR-binding peptide
  MOD_RES (2), (36): Xaa is C or S

SEQ ID NO: 20241 - protein, 40 aa, Artificial Sequence; identical to SEQ ID NO: 17137
  GFR-binding peptide
  MOD_RES (36), (36): Xaa is C or S

SEQ ID NO: 20242 - protein, 35 aa, Artificial Sequence; identical to SEQ ID NO: 17138
  GFR-binding peptide

SEQ ID NO: 20243 - protein, 39 aa, Artificial Sequence; identical to SEQ ID NO: 17139
  GFR-binding peptide
  MOD_RES (1), (3), (37): Xaa is C or S

SEQ ID NO: 20244 - protein, 41 aa, Artificial Sequence; identical to SEQ ID NO: 17140
  GFR-binding peptide
  MOD_RES (37), (37): Xaa is C or S

SEQ ID NO: 20245 - protein, 35 aa, Artificial Sequence; identical to SEQ ID NO: 17141
  GFR-binding peptide
  MOD_RES (2), (2): Xaa is C or S

SEQ ID NO: 20246 - protein, 37 aa, Artificial Sequence; identical to SEQ ID NO: 17142
  GFR-binding peptide
  MOD_RES (2), (36): Xaa is C or S
  MOD_RES (14), (15), (16), (17), (18): Xaa is A or G
  MOD_RES (19), (20), (21), (22): Xaa is A or G or is absent

SEQ ID NO: 20247 - protein, 38 aa, Artificial Sequence; identical to SEQ ID NO: 17143
  GFR-binding peptide
  MOD_RES (37), (37): Xaa is C or S
  MOD_RES (13), (14), (15), (16), (17): Xaa is A or G
  MOD_RES (18), (19), (20), (21): Xaa is A or G or is absent

SEQ ID NO: 20248 - protein, 39 aa, Artificial Sequence; identical to SEQ ID NO: 17144
  GFR-binding peptide
  MOD_RES (2), (39): Xaa is C or S
  MOD_RES (15), (16), (17), (18), (19): Xaa is A or G
  MOD_RES (20), (21), (22), (23): Xaa is A or G or is absent

SEQ ID NO: 20249 - protein, 34 aa, Artificial Sequence; identical to SEQ ID NO: 17145
  GFR-binding peptide
  MOD_RES (11), (12), (13), (14), (15): Xaa is A or G
  MOD_RES (16), (17), (18), (19): Xaa is A or G or is absent

SEQ ID NO: 20250 - protein, 44 aa, Artificial Sequence; identical to SEQ ID NO: 17146
  GFR-binding peptide
  MOD_RES (1), (3), (40): Xaa is C or S
  MOD_RES (16), (17), (18), (19), (20): Xaa is A or G
  MOD_RES (21), (22), (23), (24): Xaa is A or G or is absent

SEQ ID NO: 20251 - protein, 42 aa, Artificial Sequence; identical to SEQ ID NO: 17147
  GFR-binding peptide
  MOD_RES (2), (4), (38): Xaa is C or S
  MOD_RES (16), (17), (18), (19), (20): Xaa is A or G
  MOD_RES (21), (22), (23), (24): Xaa is A or G or is absent

SEQ ID NO: 20252 - protein, 41 aa, Artificial Sequence; identical to SEQ ID NO: 17148
  GFR-binding peptide
  MOD_RES (1), (38): Xaa is C or S

SEQ ID NO: 20253 - protein, 38 aa, Artificial Sequence; identical to SEQ ID NO: 17149
  GFR-binding peptide
  MOD_RES (33), (33): Xaa is C or S
  MOD_RES (11), (12), (13), (14), (15): Xaa is A or G
  MOD_RES (16), (17), (18), (19): Xaa is A or G or is absent

SEQ ID NO: 20254 - protein, 40 aa, Artificial Sequence; identical to SEQ ID NO: 17150
  GFR-binding peptide
  MOD_RES (2), (4): Xaa is C or S
  MOD_RES (17), (18), (19), (20), (21): Xaa is A or G
  MOD_RES (22), (23), (24), (25): Xaa is A or G or is absent

SEQ ID NO: 20255 - protein, 36 aa, Artificial Sequence; identical to SEQ ID NO: 17151
  GFR-binding peptide
  MOD_RES (13), (14), (15), (16), (17): Xaa is A or G
  MOD_RES (18), (19), (20), (21): Xaa is A or G or is absent

SEQ ID NO: 20256 - protein, 36 aa, Artificial Sequence; identical to SEQ ID NO: 17152
  GFR-binding peptide
  MOD_RES (1), (35): Xaa is C or S

SEQ ID NO: 20257 - protein, 37 aa, Artificial Sequence; identical to SEQ ID NO: 17153
  GFR-binding peptide
  MOD_RES (37), (37): Xaa is C or S

SEQ ID NO: 20258 - protein, 40 aa, Artificial Sequence; identical to SEQ ID NO: 17154
  GFR-binding peptide
  MOD_RES (1), (38): Xaa is C or S

SEQ ID NO: 20259 - protein, 45 aa, Artificial Sequence; identical to SEQ ID NO: 17155
  GFR-binding peptide
  MOD_RES (2), (4), (41): Xaa is C or S
  MOD_RES (17), (18), (19), (20), (21): Xaa is A or G
  MOD_RES (22), (23), (24), (25): Xaa is A or G or is absent

SEQ ID NO: 20260 - protein, 39 aa, Artificial Sequence; identical to SEQ ID NO: 17156
  GFR-binding peptide
  MOD_RES (1), (3): Xaa is C or S

SEQ ID NO: 20261 - protein, 43 aa, Artificial Sequence; identical to SEQ ID NO: 17157
  GFR-binding peptide
  MOD_RES (2), (4), (38): Xaa is C or S

SEQ ID NO: 20262 - protein, 39 aa, Artificial Sequence; identical to SEQ ID NO: 17158
  GFR-binding peptide
  MOD_RES (1), (3): Xaa is C or S
  MOD_RES (16), (17), (18), (19), (20): Xaa is A or G
  MOD_RES (21), (22), (23), (24): Xaa is A or G or is absent

SEQ ID NO: 20263 - protein, 40 aa, Artificial Sequence; identical to SEQ ID NO: 17159
  GFR-binding peptide
  MOD_RES (1), (3), (37): Xaa is C or S

SEQ ID NO: 20264 - protein, 33 aa, Artificial Sequence; identical to SEQ ID NO: 17160
  GFR-binding peptide
  MOD_RES (11), (12), (13), (14), (15): Xaa is A or G
  MOD_RES (16), (17), (18), (19): Xaa is A or G or is absent

SEQ ID NO: 20265 - protein, 40 aa, Artificial Sequence; identical to SEQ ID NO: 17161
  GFR-binding peptide
  MOD_RES (2), (39): Xaa is C or S

SEQ ID NO: 20266 - protein, 35 aa, Artificial Sequence; identical to SEQ ID NO: 17162
  GFR-binding peptide
  MOD_RES (34), (34): Xaa is C or S

SEQ ID NO: 20267 - protein, 37 aa, Artificial Sequence; identical to SEQ ID NO: 17163
  GFR-binding peptide
  MOD_RES (37), (37): Xaa is C or S

SEQ ID NO: 20268 - protein, 40 aa, Artificial Sequence; identical to SEQ ID NO: 17164
  GFR-binding peptide
  MOD_RES (2), (4): Xaa is C or S
  MOD_RES (17), (18), (19), (20), (21): Xaa is A or G
  MOD_RES (22), (23), (24), (25): Xaa is A or G or is absent

SEQ ID NO: 20269 - protein, 35 aa, Artificial Sequence; identical to SEQ ID NO: 17165
  GFR-binding peptide

SEQ ID NO: 20270 - protein, 36 aa, Artificial Sequence; identical to SEQ ID NO: 17166
  GFR-binding peptide
  MOD_RES (1), (35): Xaa is C or S

SEQ ID NO: 20271 - protein, 38 aa, Artificial Sequence; identical to SEQ ID NO: 17167
  GFR-binding peptide
  MOD_RES (36), (36): Xaa is C or S
  MOD_RES (12), (13), (14), (15), (16): Xaa is A or G
  MOD_RES (17), (18), (19), (20): Xaa is A or G or is absent

SEQ ID NO: 20272 - protein, 39 aa, Artificial Sequence; identical to SEQ ID NO: 17168
  GFR-binding peptide
  MOD_RES (1), (3): Xaa is C or S

SEQ ID NO: 20273 - protein, 40 aa, Artificial Sequence; identical to SEQ ID NO: 17169
  GFR-binding peptide
  MOD_RES (2), (4): Xaa is C or S
  MOD_RES (17), (18), (19), (20), (21): Xaa is A or G
  MOD_RES (22), (23), (24), (25): Xaa is A or G or is absent

SEQ ID NO: 20274 - protein, 36 aa, Artificial Sequence; identical to SEQ ID NO: 17170
  GFR-binding peptide
  MOD_RES (2), (36): Xaa is C or S
  MOD_RES (14), (15), (16), (17), (18): Xaa is A or G
  MOD_RES (19), (20), (21), (22): Xaa is A or G or is absent

SEQ ID NO: 20275 - protein, 44 aa, Artificial Sequence; identical to SEQ ID NO: 17171
  GFR-binding peptide
  MOD_RES (2), (4), (41): Xaa is C or S

SEQ ID NO: 20276 - protein, 43 aa, Artificial Sequence; identical to SEQ ID NO: 17172
  GFR-binding peptide
  MOD_RES (2), (39): Xaa is C or S

SEQ ID NO: 20277 - protein, 40 aa, Artificial Sequence; identical to SEQ ID NO: 17173
  GFR-binding peptide
  MOD_RES (2), (36): Xaa is C or S

SEQ ID NO: 20278 - protein, 40 aa, Artificial Sequence; identical to SEQ ID NO: 17174
  GFR-binding peptide
  MOD_RES (34), (34): Xaa is C or S

SEQ ID NO: 20279 - protein, 34 aa, Artificial Sequence; identical to SEQ ID NO: 17175
  GFR-binding peptide
  MOD_RES (1), (1): Xaa is C or S
  MOD_RES (13), (14), (15), (16), (17): Xaa is A or G
  MOD_RES (18), (19), (20), (21): Xaa is A or G or is absent

SEQ ID NO: 20280 - protein, 38 aa, Artificial Sequence; identical to SEQ ID NO: 17176
  GFR-binding peptide
  MOD_RES (34), (34): Xaa is C or S

SEQ ID NO: 20281 - protein, 36 aa, Artificial Sequence; identical to SEQ ID NO: 17177
  GFR-binding peptide
  MOD_RES (36), (36): Xaa is C or S

SEQ ID NO: 20282 - protein, 38 aa, Artificial Sequence; identical to SEQ ID NO: 17178
  GFR-binding peptide
  MOD_RES (34), (34): Xaa is C or S

SEQ ID NO: 20283 - protein, 35 aa, Artificial Sequence; identical to SEQ ID NO: 17179
  GFR-binding peptide

SEQ ID NO: 20284 - protein, 36 aa, Artificial Sequence; identical to SEQ ID NO: 17180
  GFR-binding peptide
  MOD_RES (1), (3): Xaa is C or S
  MOD_RES (15), (16), (17), (18), (19): Xaa is A or G
  MOD_RES (20), (21), (22), (23): Xaa is A or G or is absent

SEQ ID NO: 20285 - protein, 38 aa, Artificial Sequence; identical to SEQ ID NO: 17181
  GFR-binding peptide
  MOD_RES (1), (35): Xaa is C or S

SEQ ID NO: 20286 - protein, 37 aa, Artificial Sequence; identical to SEQ ID NO: 17182
  GFR-binding peptide
  MOD_RES (35), (35): Xaa is C or S

SEQ ID NO: 20287 - protein, 41 aa, Artificial Sequence; identical to SEQ ID NO: 17183
  GFR-binding peptide
  MOD_RES (2), (39): Xaa is C or S

SEQ ID NO: 20288 - protein, 37 aa, Artificial Sequence; identical to SEQ ID NO: 17184
  GFR-binding peptide
  MOD_RES (1), (1): Xaa is C or S
  MOD_RES (14), (15), (16), (17), (18): Xaa is A or G
  MOD_RES (19), (20), (21), (22): Xaa is A or G or is absent

SEQ ID NO: 20289 - protein, 39 aa, Artificial Sequence; identical to SEQ ID NO: 17185
  GFR-binding peptide
  MOD_RES (2), (4), (38): Xaa is C or S
  MOD_RES (16), (17), (18), (19), (20): Xaa is A or G
  MOD_RES (21), (22), (23), (24): Xaa is A or G or is absent

SEQ ID NO: 20290 - protein, 34 aa, Artificial Sequence; identical to SEQ ID NO: 17186
  GFR-binding peptide

SEQ ID NO: 20291 - protein, 38 aa, Artificial Sequence; identical to SEQ ID NO: 17187
  GFR-binding peptide
  MOD_RES (2), (4), (38): Xaa is C or S
  MOD_RES (16), (17), (18), (19), (20): Xaa is A or G
  MOD_RES (21), (22), (23), (24): Xaa is A or G or is absent

SEQ ID NO: 20292 - protein, 39 aa, Artificial Sequence; identical to SEQ ID NO: 17188
  GFR-binding peptide
  MOD_RES (2), (36): Xaa is C or S

SEQ ID NO: 20293 - protein, 40 aa, Artificial Sequence; identical to SEQ ID NO: 17189
  GFR-binding peptide
  MOD_RES (37), (37): Xaa is C or S
  MOD_RES (13), (14), (15), (16), (17): Xaa is A or G
  MOD_RES (18), (19), (20), (21): Xaa is A or G or is absent

SEQ ID NO: 20294 - protein, 36 aa, Artificial Sequence; identical to SEQ ID NO: 17190
  GFR-binding peptide
  MOD_RES (33), (33): Xaa is C or S
  MOD_RES (11), (12), (13), (14), (15): Xaa is A or G
  MOD_RES (16), (17), (18), (19): Xaa is A or G or is absent

SEQ ID NO: 20295 - protein, 36 aa, Artificial Sequence; identical to SEQ ID NO: 17191
  GFR-binding peptide
  MOD_RES (1), (3): Xaa is C or S
  MOD_RES (15), (16), (17), (18), (19): Xaa is A or G
  MOD_RES (20), (21), (22), (23): Xaa is A or G or is absent

SEQ ID NO: 20296 - protein, 40 aa, Artificial Sequence; identical to SEQ ID NO: 17192
  GFR-binding peptide
  MOD_RES (34), (34): Xaa is C or S

SEQ ID NO: 20297 - protein, 36 aa, Artificial Sequence; identical to SEQ ID NO: 17193
  GFR-binding peptide
  MOD_RES (1), (1): Xaa is C or S
  MOD_RES (14), (15), (16), (17), (18): Xaa is A or G
  MOD_RES (19), (20), (21), (22): Xaa is A or G or is absent

SEQ ID NO: 20298 - protein, 35 aa, Artificial Sequence; identical to SEQ ID NO: 17194
  GFR-binding peptide
  MOD_RES (1), (35): Xaa is C or S
  MOD_RES (13), (14), (15), (16), (17): Xaa is A or G
  MOD_RES (18), (19), (20), (21): Xaa is A or G or is absent

SEQ ID NO: 20299 - protein, 41 aa, Artificial Sequence; identical to SEQ ID NO: 17195
  GFR-binding peptide
  MOD_RES (2), (39): Xaa is C or S
  MOD_RES (15), (16), (17), (18), (19): Xaa is A or G
  MOD_RES (20), (21), (22), (23): Xaa is A or G or is absent

SEQ ID NO: 20300 - protein, 40 aa, Artificial Sequence; identical to SEQ ID NO: 17196
  GFR-binding peptide
  MOD_RES (2), (39): Xaa is C or S
  MOD_RES (15), (16), (17), (18), (19): Xaa is A or G
  MOD_RES (20), (21), (22), (23): Xaa is A or G or is absent

SEQ ID NO: 20301 - protein, 43 aa, Artificial Sequence; identical to SEQ ID NO: 17197
  GFR-binding peptide
  MOD_RES (2), (39): Xaa is C or S

SEQ ID NO: 20302 - protein, 39 aa, Artificial Sequence; identical to SEQ ID NO: 17198
  GFR-binding peptide
  MOD_RES (1), (35): Xaa is C or S

SEQ ID NO: 20303 - protein, 37 aa, Artificial Sequence; identical to SEQ ID NO: 17199
  GFR-binding peptide
  MOD_RES (35), (35): Xaa is C or S

SEQ ID NO: 20304 - protein, 35 aa, Artificial Sequence; identical to SEQ ID NO: 17200
  GFR-binding peptide
  MOD_RES (1), (1): Xaa is C or S
  MOD_RES (14), (15), (16), (17), (18): Xaa is A or G
  MOD_RES (19), (20), (21), (22): Xaa is A or G or is absent

SEQ ID NO: 20305 - protein, 38 aa, Artificial Sequence; identical to SEQ ID NO: 17201
  GFR-binding peptide
  MOD_RES (1), (38): Xaa is C or S

SEQ ID NO: 20306 - protein, 37 aa, Artificial Sequence; identical to SEQ ID NO: 17202
  GFR-binding peptide
  MOD_RES (34), (34): Xaa is C or S

SEQ ID NO: 20307 - protein, 34 aa, Artificial Sequence; identical to SEQ ID NO: 17203
  GFR-binding peptide
  MOD_RES (34), (34): Xaa is C or S
  MOD_RES (12), (13), (14), (15), (16): Xaa is A or G
  MOD_RES (17), (18), (19), (20): Xaa is A or G or is absent

SEQ ID NO: 20308 - protein, 41 aa, Artificial Sequence; identical to SEQ ID NO: 17204
  GFR-binding peptide
  MOD_RES (2), (39): Xaa is C or S
  MOD_RES (15), (16), (17), (18), (19): Xaa is A or G
  MOD_RES (20), (21), (22), (23): Xaa is A or G or is absent

SEQ ID NO: 20309 - protein, 36 aa, Artificial Sequence; identical to SEQ ID NO: 17205
  GFR-binding peptide
  MOD_RES (36), (36): Xaa is C or S
  MOD_RES (12), (13), (14), (15), (16): Xaa is A or G
  MOD_RES (17), (18), (19), (20): Xaa is A or G or is absent

SEQ ID NO: 20310 - protein, 35 aa, Artificial Sequence; identical to SEQ ID NO: 17206
  GFR-binding peptide
  MOD_RES (1), (1): Xaa is C or S

SEQ ID NO: 20311 - protein, 43 aa, Artificial Sequence; identical to SEQ ID NO: 17207
  GFR-binding peptide
  MOD_RES (1), (3), (37): Xaa is C or S
  MOD_RES (15), (16), (17), (18), (19): Xaa is A or G
  MOD_RES (20), (21), (22), (23): Xaa is A or G or is absent

SEQ ID NO: 20312 - protein, 33 aa, Artificial Sequence; identical to SEQ ID NO: 17208
  GFR-binding peptide
  MOD_RES (33), (33): Xaa is C or S

SEQ ID NO: 20313 - protein, 37 aa, Artificial Sequence; identical to SEQ ID NO: 17209
  GFR-binding peptide
  MOD_RES (37), (37): Xaa is C or S
  MOD_RES (13), (14), (15), (16), (17): Xaa is A or G
  MOD_RES (18), (19), (20), (21): Xaa is A or G or is absent

SEQ ID NO: 20314 - protein, 34 aa, Artificial Sequence; identical to SEQ ID NO: 17210
  GFR-binding peptide
  MOD_RES (33), (33): Xaa is C or S
  MOD_RES (11), (12), (13), (14), (15): Xaa is A or G
  MOD_RES (16), (17), (18), (19): Xaa is A or G or is absent

SEQ ID NO: 20315 - protein, 42 aa, Artificial Sequence; identical to SEQ ID NO: 17211
  GFR-binding peptide
  MOD_RES (1), (38): Xaa is C or S

SEQ ID NO: 20316 - protein, 41 aa, Artificial Sequence; identical to SEQ ID NO: 17212
  GFR-binding peptide
  MOD_RES (2), (36): Xaa is C or S

SEQ ID NO: 20317 - protein, 34 aa, Artificial Sequence; identical to SEQ ID NO: 17213
  GFR-binding peptide

SEQ ID NO: 20318 - protein, 43 aa, Artificial Sequence; identical to SEQ ID NO: 17214
  GFR-binding peptide
  MOD_RES (2), (39): Xaa is C or S

SEQ ID NO: 20319 - protein, 42 aa, Artificial Sequence; identical to SEQ ID NO: 17215
  GFR-binding peptide
  MOD_RES (2), (36): Xaa is C or S

SEQ ID NO: 20320 - protein, 40 aa, Artificial Sequence; identical to SEQ ID NO: 17216
  GFR-binding peptide
  MOD_RES (2), (36): Xaa is C or S

SEQ ID NO: 20321 - protein, 37 aa, Artificial Sequence; identical to SEQ ID NO: 17217
  GFR-binding peptide
  MOD_RES (34), (34): Xaa is C or S

SEQ ID NO: 20322 - protein, 38 aa, Artificial Sequence; identical to SEQ ID NO: 17218
  GFR-binding peptide
  MOD_RES (37), (37): Xaa is C or S
  MOD_RES (13), (14), (15), (16), (17): Xaa is A or G
  MOD_RES (18), (19), (20), (21): Xaa is A or G or is absent

SEQ ID NO: 20323 - protein, 43 aa, Artificial Sequence; identical to SEQ ID NO: 17219
  GFR-binding peptide
  MOD_RES (2), (4), (38): Xaa is C or S
  MOD_RES (16), (17), (18), (19), (20): Xaa is A or G
  MOD_RES (21), (22), (23), (24): Xaa is A or G or is absent

SEQ ID NO: 20324 - protein, 44 aa, Artificial Sequence; identical to SEQ ID NO: 17220
  GFR-binding peptide
  MOD_RES (2), (4), (41): Xaa is C or S
  MOD_RES (17), (18), (19), (20), (21): Xaa is A or G
  MOD_RES (22), (23), (24), (25): Xaa is A or G or is absent

SEQ ID NO: 20325 - protein, 36 aa, Artificial Sequence; identical to SEQ ID NO: 17221
  GFR-binding peptide
  MOD_RES (1), (3): Xaa is C or S

SEQ ID NO: 20326 - protein, 38 aa, Artificial Sequence; identical to SEQ ID NO: 17222
  GFR-binding peptide
  MOD_RES (37), (37): Xaa is C or S

SEQ ID NO: 20327 - protein, 32 aa, Artificial Sequence; identical to SEQ ID NO: 17223
  GFR-binding peptide
  MOD_RES (11), (12), (13), (14), (15): Xaa is A or G
  MOD_RES (16), (17), (18), (19): Xaa is A or G or is absent

SEQ ID NO: 20328 - protein, 37 aa, Artificial Sequence; identical to SEQ ID NO: 17224
  GFR-binding peptide
  MOD_RES (36), (36): Xaa is C or S

SEQ ID NO: 20329 - protein, 43 aa, Artificial Sequence; identical to SEQ ID NO: 17225
  GFR-binding peptide
  MOD_RES (1), (3), (37): Xaa is C or S
  MOD_RES (15), (16), (17), (18), (19): Xaa is A or G
  MOD_RES (20), (21), (22), (23): Xaa is A or G or is absent

SEQ ID NO: 20330 - protein, 35 aa, Artificial Sequence; identical to SEQ ID NO: 17226
  GFR-binding peptide
  MOD_RES (12), (13), (14), (15), (16): Xaa is A or G
  MOD_RES (17), (18), (19), (20): Xaa is A or G or is absent

SEQ ID NO: 20331 - protein, 38 aa, Artificial Sequence; identical to SEQ ID NO: 17227
  GFR-binding peptide
  MOD_RES (2), (2): Xaa is C or S
  MOD_RES (15), (16), (17), (18), (19): Xaa is A or G
  MOD_RES (20), (21), (22), (23): Xaa is A or G or is absent

SEQ ID NO: 20332 - protein, 37 aa, Artificial Sequence; identical to SEQ ID NO: 17228
  GFR-binding peptide
  MOD_RES (35), (35): Xaa is C or S
  MOD_RES (11), (12), (13), (14), (15): Xaa is A or G
  MOD_RES (16), (17), (18), (19): Xaa is A or G or is absent

SEQ ID NO: 20333 - protein, 38 aa, Artificial Sequence; identical to SEQ ID NO: 17229
  GFR-binding peptide
  MOD_RES (1), (38): Xaa is C or S

SEQ ID NO: 20334 - protein, 37 aa, Artificial Sequence; identical to SEQ ID NO: 17230
  GFR-binding peptide
  MOD_RES (35), (35): Xaa is C or S
  MOD_RES (11), (12), (13), (14), (15): Xaa is A or G
  MOD_RES (16), (17), (18), (19): Xaa is A or G or is absent

SEQ ID NO: 20335 - protein, 33 aa, Artificial Sequence; identical to SEQ ID NO: 17231
  GFR-binding peptide

SEQ ID NO: 20336 - protein, 33 aa, Artificial Sequence; identical to SEQ ID NO: 17232
  GFR-binding peptide
  MOD_RES (33), (33): Xaa is C or S
  MOD_RES (11), (12), (13), (14), (15): Xaa is A or G
  MOD_RES (16), (17), (18), (19): Xaa is A or G or is absent

SEQ ID NO: 20337 - protein, 41 aa, Artificial Sequence; identical to SEQ ID NO: 17233
  GFR-binding peptide
  MOD_RES (2), (39): Xaa is C or S

SEQ ID NO: 20338 - protein, 34 aa, Artificial Sequence; identical to SEQ ID NO: 17234
  GFR-binding peptide
  MOD_RES (33), (33): Xaa is C or S
  MOD_RES (11), (12), (13), (14), (15): Xaa is A or G
  MOD_RES (16), (17), (18), (19): Xaa is A or G or is absent

SEQ ID NO: 20339 - protein, 36 aa, Artificial Sequence; identical to SEQ ID NO: 17235
  GFR-binding peptide
  MOD_RES (2), (36): Xaa is C or S
  MOD_RES (14), (15), (16), (17), (18): Xaa is A or G
  MOD_RES (19), (20), (21), (22): Xaa is A or G or is absent

SEQ ID NO: 20340 - protein, 36 aa, Artificial Sequence; identical to SEQ ID NO: 17236
  GFR-binding peptide
  MOD_RES (13), (14), (15), (16), (17): Xaa is A or G
  MOD_RES (18), (19), (20), (21): Xaa is A or G or is absent

SEQ ID NO: 20341 - protein, 40 aa, Artificial Sequence; identical to SEQ ID NO: 17237
  GFR-binding peptide
  MOD_RES (36), (36): Xaa is C or S

SEQ ID NO: 20342 - protein, 40 aa, Artificial Sequence; identical to SEQ ID NO: 17238
  GFR-binding peptide
  MOD_RES (2), (36): Xaa is C or S

SEQ ID NO: 20343 - protein, 42 aa, Artificial Sequence; identical to SEQ ID NO: 17239
  GFR-binding peptide
  MOD_RES (1), (3), (40): Xaa is C or S

SEQ ID NO: 20344 - protein, 40 aa, Artificial Sequence; identical to SEQ ID NO: 17240
  GFR-binding peptide
  MOD_RES (2), (4): Xaa is C or S

SEQ ID NO: 20345 - protein, 39 aa, Artificial Sequence; identical to SEQ ID NO: 17241
  GFR-binding peptide
  MOD_RES (34), (34): Xaa is C or S
  MOD_RES (12), (13), (14), (15), (16): Xaa is A or G
  MOD_RES (17), (18), (19), (20): Xaa is A or G or is absent

SEQ ID NO: 20346 - protein, 37 aa, Artificial Sequence; identical to SEQ ID NO: 17242
  GFR-binding peptide
  MOD_RES (1), (35): Xaa is C or S
  MOD_RES (13), (14), (15), (16), (17): Xaa is A or G
  MOD_RES (18), (19), (20), (21): Xaa is A or G or is absent

SEQ ID NO: 20347 - protein, 39 aa, Artificial Sequence; identical to SEQ ID NO: 17243
  GFR-binding peptide
  MOD_RES (37), (37): Xaa is C or S
  MOD_RES (13), (14), (15), (16), (17): Xaa is A or G
  MOD_RES (18), (19), (20), (21): Xaa is A or G or is absent

SEQ ID NO: 20348 - protein, 34 aa, Artificial Sequence; identical to SEQ ID NO: 17244
  GFR-binding peptide
  MOD_RES (1), (1): Xaa is C or S
  MOD_RES (13), (14), (15), (16), (17): Xaa is A or G
  MOD_RES (18), (19), (20), (21): Xaa is A or G or is absent

SEQ ID NO: 20349 - protein, 39 aa, Artificial Sequence; identical to SEQ ID NO: 17245
  GFR-binding peptide
  MOD_RES (1), (35): Xaa is C or S

SEQ ID NO: 20350 - protein, 39 aa, Artificial Sequence; identical to SEQ ID NO: 17246
  GFR-binding peptide
  MOD_RES (36), (36): Xaa is C or S

SEQ ID NO: 20351 - protein, 34 aa, Artificial Sequence; identical to SEQ ID NO: 17247
  GFR-binding peptide
  MOD_RES (33), (33): Xaa is C or S
  MOD_RES (11), (12), (13), (14), (15): Xaa is A or G
  MOD_RES (16), (17), (18), (19): Xaa is A or G or is absent

SEQ ID NO: 20352 - protein, 37 aa, Artificial Sequence; identical to SEQ ID NO: 17248
  GFR-binding peptide
  MOD_RES (2), (36): Xaa is C or S

SEQ ID NO: 20353 - protein, 42 aa, Artificial Sequence; identical to SEQ ID NO: 17249
  GFR-binding peptide
  MOD_RES (1), (3), (40): Xaa is C or S
  MOD_RES (16), (17), (18), (19), (20): Xaa is A or G
  MOD_RES (21), (22), (23), (24): Xaa is A or G or is absent

SEQ ID NO: 20354 - protein, 39 aa, Artificial Sequence; identical to SEQ ID NO: 17250
  GFR-binding peptide
  MOD_RES (1), (3), (37): Xaa is C or S
  MOD_RES (15), (16), (17), (18), (19): Xaa is A or G
  MOD_RES (20), (21), (22), (23): Xaa is A or G or is absent

SEQ ID NO: 20355 - protein, 37 aa, Artificial Sequence; identical to SEQ ID NO: 17251
  GFR-binding peptide
  MOD_RES (2), (36): Xaa is C or S
  MOD_RES (14), (15), (16), (17), (18): Xaa is A or G
  MOD_RES (19), (20), (21), (22): Xaa is A or G or is absent

SEQ ID NO: 20356 - protein, 35 aa, Artificial Sequence; identical to SEQ ID NO: 17252
  GFR-binding peptide
  MOD_RES (33), (33): Xaa is C or S

SEQ ID NO: 20357 - protein, 35 aa, Artificial Sequence; identical to SEQ ID NO: 17253
  GFR-binding peptide
  MOD_RES (33), (33): Xaa is C or S
  MOD_RES (11), (12), (13), (14), (15): Xaa is A or G
  MOD_RES (16), (17), (18), (19): Xaa is A or G or is absent

SEQ ID NO: 20358 - protein, 37 aa, Artificial Sequence; identical to SEQ ID NO: 17254
  GFR-binding peptide
  MOD_RES (1), (3), (37): Xaa is C or S

SEQ ID NO: 20359 - protein, 39 aa, Artificial Sequence; identical to SEQ ID NO: 17255
  GFR-binding peptide
  MOD_RES (33), (33): Xaa is C or S
  MOD_RES (11), (12), (13), (14), (15): Xaa is A or G
  MOD_RES (16), (17), (18), (19): Xaa is A or G or is absent

SEQ ID NO: 20360 - protein, 40 aa, Artificial Sequence; identical to SEQ ID NO: 17256
  GFR-binding peptide
  MOD_RES (34), (34): Xaa is C or S
  MOD_RES (12), (13), (14), (15), (16): Xaa is A or G
  MOD_RES (17), (18), (19), (20): Xaa is A or G or is absent

SEQ ID NO: 20361 - protein, 34 aa, Artificial Sequence; identical to SEQ ID NO: 17257
  GFR-binding peptide

SEQ ID NO: 20362 - protein, 37 aa, Artificial Sequence; identical to SEQ ID NO: 17258
  GFR-binding peptide
  MOD_RES (1), (35): Xaa is C or S
  MOD_RES (13), (14), (15), (16), (17): Xaa is A or G
  MOD_RES (18), (19), (20), (21): Xaa is A or G or is absent

SEQ ID NO: 20363 - protein, 39 aa, Artificial Sequence; identical to SEQ ID NO: 17259
  GFR-binding peptide
  MOD_RES (37), (37): Xaa is C or S

SEQ ID NO: 20364 - protein, 40 aa, Artificial Sequence; identical to SEQ ID NO: 17260
  GFR-binding peptide
  MOD_RES (37), (37): Xaa is C or S

SEQ ID NO: 20365 - protein, 34 aa, Artificial Sequence; identical to SEQ ID NO: 17261
  GFR-binding peptide
  MOD_RES (34), (34): Xaa is C or S
  MOD_RES (12), (13), (14), (15), (16): Xaa is A or G
  MOD_RES (17), (18), (19), (20): Xaa is A or G or is absent

SEQ ID NO: 20366 - protein, 39 aa, Artificial Sequence; identical to SEQ ID NO: 17262
  GFR-binding peptide
  MOD_RES (2), (39): Xaa is C or S
  MOD_RES (15), (16), (17), (18), (19): Xaa is A or G
  MOD_RES (20), (21), (22), (23): Xaa is A or G or is absent

SEQ ID NO: 20367 - protein, 40 aa, Artificial Sequence; identical to SEQ ID NO: 17263
  GFR-binding peptide
  MOD_RES (37), (37): Xaa is C or S

SEQ ID NO: 20368 - protein, 37 aa, Artificial Sequence; identical to SEQ ID NO: 17264
  GFR-binding peptide
  MOD_RES (1), (3): Xaa is C or S
  MOD_RES (16), (17), (18), (19), (20): Xaa is A or G
  MOD_RES (21), (22), (23), (24): Xaa is A or G or is absent

SEQ ID NO: 20369 - protein, 35 aa, Artificial Sequence; identical to SEQ ID NO: 17265
  GFR-binding peptide
  MOD_RES (2), (2): Xaa is C or S

SEQ ID NO: 20370 - protein, 40 aa, Artificial Sequence; identical to SEQ ID NO: 17266
  GFR-binding peptide
  MOD_RES (1), (38): Xaa is C or S
  MOD_RES (14), (15), (16), (17), (18): Xaa is A or G
  MOD_RES (19), (20), (21), (22): Xaa is A or G or is absent

SEQ ID NO: 20371 - protein, 34 aa, Artificial Sequence; identical to SEQ ID NO: 17267
  GFR-binding peptide
  MOD_RES (13), (14), (15), (16), (17): Xaa is A or G
  MOD_RES (18), (19), (20), (21): Xaa is A or G or is absent

SEQ ID NO: 20372 - protein, 39 aa, Artificial Sequence; identical to SEQ ID NO: 17268
  GFR-binding peptide
  MOD_RES (1), (3), (37): Xaa is C or S
  MOD_RES (15), (16), (17), (18), (19): Xaa is A or G
  MOD_RES (20), (21), (22), (23): Xaa is A or G or is absent

SEQ ID NO: 20373 - protein, 43 aa, Artificial Sequence; identical to SEQ ID NO: 17269
  GFR-binding peptide
  MOD_RES (2), (4), (41): Xaa is C or S
  MOD_RES (17), (18), (19), (20), (21): Xaa is A or G
  MOD_RES (22), (23), (24), (25): Xaa is A or G or is absent

SEQ ID NO: 20374 - protein, 41 aa, Artificial Sequence; identical to SEQ ID NO: 17270
  GFR-binding peptide
  MOD_RES (1), (3), (37): Xaa is C or S
  MOD_RES (15), (16), (17), (18), (19): Xaa is A or G
  MOD_RES (20), (21), (22), (23): Xaa is A or G or is absent

SEQ ID NO: 20375 - protein, 32 aa, Artificial Sequence; identical to SEQ ID NO: 17271
  GFR-binding peptide

SEQ ID NO: 20376 - protein, 35 aa, Artificial Sequence; identical to SEQ ID NO: 17272
  GFR-binding peptide
  MOD_RES (35), (35): Xaa is C or S
  MOD_RES (11), (12), (13), (14), (15): Xaa is A or G
  MOD_RES (16), (17), (18), (19): Xaa is A or G or is absent

SEQ ID NO: 20377 - protein, 38 aa, Artificial Sequence; identical to SEQ ID NO: 17273
  GFR-binding peptide
  MOD_RES (2), (4): Xaa is C or S

SEQ ID NO: 20378 - protein, 35 aa, Artificial Sequence; identical to SEQ ID NO: 17274
  GFR-binding peptide
  MOD_RES (34), (34): Xaa is C or S
  MOD_RES (12), (13), (14), (15), (16): Xaa is A or G
  MOD_RES (17), (18), (19), (20): Xaa is A or G or is absent

SEQ ID NO: 20379 - protein, 37 aa, Artificial Sequence; identical to SEQ ID NO: 17275
  GFR-binding peptide
  MOD_RES (1), (3), (37): Xaa is C or S
  MOD_RES (15), (16), (17), (18), (19): Xaa is A or G
  MOD_RES (20), (21), (22), (23): Xaa is A or G or is absent

SEQ ID NO: 20380 - protein, 42 aa, Artificial Sequence; identical to SEQ ID NO: 17276
  GFR-binding peptide
  MOD_RES (2), (4), (38): Xaa is C or S

SEQ ID NO: 20381 - protein, 41 aa, Artificial Sequence; identical to SEQ ID NO: 17277
  GFR-binding peptide
  MOD_RES (1), (3), (40): Xaa is C or S
  MOD_RES (16), (17), (18), (19), (20): Xaa is A or G
  MOD_RES (21), (22), (23), (24): Xaa is A or G or is absent

SEQ ID NO: 20382 - protein, 38 aa, Artificial Sequence; identical to SEQ ID NO: 17278
  GFR-binding peptide
  MOD_RES (2), (2): Xaa is C or S
  MOD_RES (15), (16), (17), (18), (19): Xaa is A or G
  MOD_RES (20), (21), (22), (23): Xaa is A or G or is absent

SEQ ID NO: 20383 - protein, 38 aa, Artificial Sequence; identical to SEQ ID NO: 17279
  GFR-binding peptide
  MOD_RES (33), (33): Xaa is C or S

SEQ ID NO: 20384 - protein, 36 aa, Artificial Sequence; identical to SEQ ID NO: 17280
  GFR-binding peptide
  MOD_RES (35), (35): Xaa is C or S
  MOD_RES (11), (12), (13), (14), (15): Xaa is A or G
  MOD_RES (16), (17), (18), (19): Xaa is A or G or is absent

SEQ ID NO: 20385 - protein, 33 aa, Artificial Sequence; identical to SEQ ID NO: 17281
  GFR-binding peptide
  MOD_RES (33), (33): Xaa is C or S

SEQ ID NO: 20386 - protein, 39 aa, Artificial Sequence; identical to SEQ ID NO: 17282
  GFR-binding peptide
  MOD_RES (36), (36): Xaa is C or S

SEQ ID NO: 20387 - protein, 39 aa, Artificial Sequence; identical to SEQ ID NO: 17283
  GFR-binding peptide
  MOD_RES (1), (38): Xaa is C or S
  MOD_RES (14), (15), (16), (17), (18): Xaa is A or G
  MOD_RES (19), (20), (21), (22): Xaa is A or G or is absent

SEQ ID NO: 20388 - protein, 41 aa, Artificial Sequence; identical to SEQ ID NO: 17284
  GFR-binding peptide
  MOD_RES (2), (4), (38): Xaa is C or S

SEQ ID NO: 20389 - protein, 33 aa, Artificial Sequence; identical to SEQ ID NO: 17285
  GFR-binding peptide
  MOD_RES (12), (13), (14), (15), (16): Xaa is A or G
  MOD_RES (17), (18), (19), (20): Xaa is A or G or is absent

SEQ ID NO: 20390 - protein, 38 aa, Artificial Sequence; identical to SEQ ID NO: 17286
  GFR-binding peptide
  MOD_RES (33), (33): Xaa is C or S

SEQ ID NO: 20391 - protein, 43 aa, Artificial Sequence; identical to SEQ ID NO: 17287
  GFR-binding peptide
  MOD_RES (1), (3), (37): Xaa is C or S
  MOD_RES (15), (16), (17), (18), (19): Xaa is A or G
  MOD_RES (20), (21), (22), (23): Xaa is A or G or is absent

SEQ ID NO: 20392 - protein, 41 aa, Artificial Sequence; identical to SEQ ID NO: 17288
  GFR-binding peptide
  MOD_RES (1), (3), (40): Xaa is C or S
  MOD_RES (16), (17), (18), (19), (20): Xaa is A or G
  MOD_RES (21), (22), (23), (24): Xaa is A or G or is absent

SEQ ID NO: 20393 - protein, 39 aa, Artificial Sequence; identical to SEQ ID NO: 17289
  GFR-binding peptide
  MOD_RES (1), (38): Xaa is C or S

SEQ ID NO: 20394 - protein, 39 aa, Artificial Sequence; identical to SEQ ID NO: 17290
  GFR-binding peptide
  MOD_RES (2), (39): Xaa is C or S

SEQ ID NO: 20395 - protein, 39 aa, Artificial Sequence; identical to SEQ ID NO: 17291
  GFR-binding peptide
  MOD_RES (34), (34): Xaa is C or S
  MOD_RES (12), (13), (14), (15), (16): Xaa is A or G
  MOD_RES (17), (18), (19), (20): Xaa is A or G or is absent

SEQ ID NO: 20396 - protein, 39 aa, Artificial Sequence; identical to SEQ ID NO: 17292
  GFR-binding peptide
  MOD_RES (36), (36): Xaa is C or S

SEQ ID NO: 20397 - protein, 38 aa, Artificial Sequence; identical to SEQ ID NO: 17293
  GFR-binding peptide
  MOD_RES (1), (3): Xaa is C or S
  MOD_RES (16), (17), (18), (19), (20): Xaa is A or G
  MOD_RES (21), (22), (23), (24): Xaa is A or G or is absent

SEQ ID NO: 20398 - protein, 35 aa, Artificial Sequence; identical to SEQ ID NO: 17294
  GFR-binding peptide
  MOD_RES (2), (2): Xaa is C or S
  MOD_RES (14), (15), (16), (17), (18): Xaa is A or G
  MOD_RES (19), (20), (21), (22): Xaa is A or G or is absent

SEQ ID NO: 20399 - protein, 40 aa, Artificial Sequence; identical to SEQ ID NO: 17295
  GFR-binding peptide
  MOD_RES (2), (36): Xaa is C or S
  MOD_RES (14), (15), (16), (17), (18): Xaa is A or G
  MOD_RES (19), (20), (21), (22): Xaa is A or G or is absent

SEQ ID NO: 20400 - protein, 42 aa, Artificial Sequence; identical to SEQ ID NO: 17296
  GFR-binding peptide
  MOD_RES (2), (4), (38): Xaa is C or S

SEQ ID NO: 20401 - protein, 41 aa, Artificial Sequence; identical to SEQ ID NO: 17297
  GFR-binding peptide
  MOD_RES (1), (3), (37): Xaa is C or S
  MOD_RES (15), (16), (17), (18), (19): Xaa is A or G
  MOD_RES (20), (21), (22), (23): Xaa is A or G or is absent

SEQ ID NO: 20402 - protein, 42 aa, Artificial Sequence; identical to SEQ ID NO: 17298
  GFR-binding peptide
  MOD_RES (2), (39): Xaa is C or S

SEQ ID NO: 20403 - protein, 43 aa, Artificial Sequence; identical to SEQ ID NO: 17299
  GFR-binding peptide
  MOD_RES (1), (3), (37): Xaa is C or S

SEQ ID NO: 20404 - protein, 35 aa, Artificial Sequence; identical to SEQ ID NO: 17300
  GFR-binding peptide
  MOD_RES (1), (1): Xaa is C or S
  MOD_RES (14), (15), (16), (17), (18): Xaa is A or G
  MOD_RES (19), (20), (21), (22): Xaa is A or G or is absent

SEQ ID NO: 20405 - protein, 40 aa, Artificial Sequence; identical to SEQ ID NO: 17301
  GFR-binding peptide
  MOD_RES (36), (36): Xaa is C or S

SEQ ID NO: 20406 - protein, 34 aa, Artificial Sequence; identical to SEQ ID NO: 17302
  GFR-binding peptide

SEQ ID NO: 20407 - protein, 39 aa, Artificial Sequence; identical to SEQ ID NO: 17303
  GFR-binding peptide
  MOD_RES (2), (4), (38): Xaa is C or S
  MOD_RES (16), (17), (18), (19), (20): Xaa is A or G
  MOD_RES (21), (22), (23), (24): Xaa is A or G or is absent

SEQ ID NO: 20408 - protein, 38 aa, Artificial Sequence; identical to SEQ ID NO: 17304
  GFR-binding peptide
  MOD_RES (36), (36): Xaa is C or S

SEQ ID NO: 20409 - protein, 34 aa, Artificial Sequence; identical to SEQ ID NO: 17305
  GFR-binding peptide
  MOD_RES (34), (34): Xaa is C or S

SEQ ID NO: 20410 - protein, 40 aa, Artificial Sequence; identical to SEQ ID NO: 17306
  GFR-binding peptide
  MOD_RES (37), (37): Xaa is C or S
  MOD_RES (13), (14), (15), (16), (17): Xaa is A or G
  MOD_RES (18), (19), (20), (21): Xaa is A or G or is absent

SEQ ID NO: 20411 - protein, 34 aa, Artificial Sequence; identical to SEQ ID NO: 17307
  GFR-binding peptide

SEQ ID NO: 20412 - protein, 33 aa, Artificial Sequence; identical to SEQ ID NO: 17308
  GFR-binding peptide
  MOD_RES (12), (13), (14), (15), (16): Xaa is A or G
  MOD_RES (17), (18), (19), (20): Xaa is A or G or is absent

SEQ ID NO: 20413 - protein, 38 aa, Artificial Sequence; identical to SEQ ID NO: 17309
  GFR-binding peptide
  MOD_RES (34), (34): Xaa is C or S
  MOD_RES (12), (13), (14), (15), (16): Xaa is A or G
  MOD_RES (17), (18), (19), (20): Xaa is A or G or is absent

SEQ ID NO: 20414 - protein, 33 aa, Artificial Sequence; identical to SEQ ID NO: 17310
  GFR-binding peptide
  MOD_RES (12), (13), (14), (15), (16): Xaa is A or G
  MOD_RES (17), (18), (19), (20): Xaa is A or G or is absent

SEQ ID NO: 20415 - protein, 39 aa, Artificial Sequence; identical to SEQ ID NO: 17311
  GFR-binding peptide
  MOD_RES (36), (36): Xaa is C or S
  MOD_RES (12), (13), (14), (15), (16): Xaa is A or G
  MOD_RES (17), (18), (19), (20): Xaa is A or G or is absent

SEQ ID NO: 20416 - protein, 41 aa, Artificial Sequence; identical to SEQ ID NO: 17312
  GFR-binding peptide
  MOD_RES (2), (4), (38): Xaa is C or S
  MOD_RES (16), (17), (18), (19), (20): Xaa is A or G
  MOD_RES (21), (22), (23), (24): Xaa is A or G or is absent

SEQ ID NO: 20417 - protein, 42 aa, Artificial Sequence; identical to SEQ ID NO: 17313
  GFR-binding peptide
  MOD_RES (2), (36): Xaa is C or S

SEQ ID NO: 20418 - protein, 37 aa, Artificial Sequence; identical to SEQ ID NO: 17314
  GFR-binding peptide
  MOD_RES (1), (35): Xaa is C or S

SEQ ID NO: 20419 - protein, 35 aa, Artificial Sequence; identical to SEQ ID NO: 17315
  GFR-binding peptide
  MOD_RES (1), (35): Xaa is C or S

SEQ ID NO: 20420 - protein, 38 aa, Artificial Sequence; identical to SEQ ID NO: 17316
  GFR-binding peptide
  MOD_RES (35), (35): Xaa is C or S

SEQ ID NO: 20421 - protein, 35 aa, Artificial Sequence; identical to SEQ ID NO: 17317
  GFR-binding peptide
  MOD_RES (34), (34): Xaa is C or S

SEQ ID NO: 20422 - protein, 34 aa, Artificial Sequence; identical to SEQ ID NO: 17318
  GFR-binding peptide
  MOD_RES (33), (33): Xaa is C or S

SEQ ID NO: 20423 - protein, 37 aa, Artificial Sequence; identical to SEQ ID NO: 17319
  GFR-binding peptide
  MOD_RES (35), (35): Xaa is C or S
  MOD_RES (11), (12), (13), (14), (15): Xaa is A or G
  MOD_RES (16), (17), (18), (19): Xaa is A or G or is absent

SEQ ID NO: 20424 - protein, 37 aa, Artificial Sequence; identical to SEQ ID NO: 17320
  GFR-binding peptide
  MOD_RES (36), (36): Xaa is C or S
  MOD_RES (12), (13), (14), (15), (16): Xaa is A or G
  MOD_RES (17), (18), (19), (20): Xaa is A or G or is absent

SEQ ID NO: 20425 - protein, 36 aa, Artificial Sequence; identical to SEQ ID NO: 17321
  GFR-binding peptide
  MOD_RES (1), (35): Xaa is C or S

SEQ ID NO: 20426 - protein, 41 aa, Artificial Sequence; identical to SEQ ID NO: 17322
  GFR-binding peptide
  MOD_RES (1), (35): Xaa is C or S

SEQ ID NO: 20427 - protein, 42 aa, Artificial Sequence; identical to SEQ ID NO: 17323
  GFR-binding peptide
  MOD_RES (1), (3), (37): Xaa is C or S

SEQ ID NO: 20428 - protein, 38 aa, Artificial Sequence; identical to SEQ ID NO: 17324
  GFR-binding peptide
  MOD_RES (2), (36): Xaa is C or S

SEQ ID NO: 20429 - protein, 33 aa, Artificial Sequence; identical to SEQ ID NO: 17325
  GFR-binding peptide
  MOD_RES (12), (13), (14), (15), (16): Xaa is A or G
  MOD_RES (17), (18), (19), (20): Xaa is A or G or is absent

SEQ ID NO: 20430 - protein, 37 aa, Artificial Sequence; identical to SEQ ID NO: 17326
  GFR-binding peptide
  MOD_RES (33), (33): Xaa is C or S

SEQ ID NO: 20431 - protein, 35 aa, Artificial Sequence; identical to SEQ ID NO: 17327
  GFR-binding peptide
  MOD_RES (1), (35): Xaa is C or S
  MOD_RES (13), (14), (15), (16), (17): Xaa is A or G
  MOD_RES (18), (19), (20), (21): Xaa is A or G or is absent

SEQ ID NO: 20432 - protein, 39 aa, Artificial Sequence; identical to SEQ ID NO: 17328
  GFR-binding peptide
  MOD_RES (33), (33): Xaa is C or S

SEQ ID NO: 20433 - protein, 38 aa, Artificial Sequence; identical to SEQ ID NO: 17329
  GFR-binding peptide
  MOD_RES (33), (33): Xaa is C or S
  MOD_RES (11), (12), (13), (14), (15): Xaa is A or G
  MOD_RES (16), (17), (18), (19): Xaa is A or G or is absent

SEQ ID NO: 20434 - protein, 35 aa, Artificial Sequence; identical to SEQ ID NO: 17330
  GFR-binding peptide
  MOD_RES (33), (33): Xaa is C or S

SEQ ID NO: 20435 - protein, 37 aa, Artificial Sequence; identical to SEQ ID NO: 17331
  GFR-binding peptide
  MOD_RES (33), (33): Xaa is C or S
  MOD_RES (11), (12), (13), (14), (15): Xaa is A or G
  MOD_RES (16), (17), (18), (19): Xaa is A or G or is absent

SEQ ID NO: 20436 - protein, 35 aa, Artificial Sequence; identical to SEQ ID NO: 17332
  GFR-binding peptide
  MOD_RES (1), (1): Xaa is C or S

SEQ ID NO: 20437 - protein, 42 aa, Artificial Sequence; identical to SEQ ID NO: 17333
  GFR-binding peptide
  MOD_RES (2), (36): Xaa is C or S
  MOD_RES (14), (15), (16), (17), (18): Xaa is A or G
  MOD_RES (19), (20), (21), (22): Xaa is A or G or is absent

SEQ ID NO: 20438 - protein, 42 aa, Artificial Sequence; identical to SEQ ID NO: 17334
  GFR-binding peptide
  MOD_RES (1), (3), (37): Xaa is C or S
  MOD_RES (15), (16), (17), (18), (19): Xaa is A or G
  MOD_RES (20), (21), (22), (23): Xaa is A or G or is absent

SEQ ID NO: 20439 - protein, 37 aa, Artificial Sequence; identical to SEQ ID NO: 17335
  GFR-binding peptide
  MOD_RES (2), (2): Xaa is C or S
  MOD_RES (15), (16), (17), (18), (19): Xaa is A or G
  MOD_RES (20), (21), (22), (23): Xaa is A or G or is absent

SEQ ID NO: 20440 - protein, 33 aa, Artificial Sequence; identical to SEQ ID NO: 17336
  GFR-binding peptide
  MOD_RES (11), (12), (13), (14), (15): Xaa is A or G
  MOD_RES (16), (17), (18), (19): Xaa is A or G or is absent

SEQ ID NO: 20441 - protein, 33 aa, Artificial Sequence; identical to SEQ ID NO: 17337
  GFR-binding peptide
  MOD_RES (11), (12), (13), (14), (15): Xaa is A or G
  MOD_RES (16), (17), (18), (19): Xaa is A or G or is absent

SEQ ID NO: 20442 - protein, 43 aa, Artificial Sequence; identical to SEQ ID NO: 17338
  GFR-binding peptide
  MOD_RES (2), (4), (41): Xaa is C or S
  MOD_RES (17), (18), (19), (20), (21): Xaa is A or G
  MOD_RES (22), (23), (24), (25): Xaa is A or G or is absent

SEQ ID NO: 20443 - protein, 40 aa, Artificial Sequence; identical to SEQ ID NO: 17339
  GFR-binding peptide
  MOD_RES (1), (35): Xaa is C or S

SEQ ID NO: 20444 - protein, 40 aa, Artificial Sequence; identical to SEQ ID NO: 17340
  GFR-binding peptide
  MOD_RES (2), (4): Xaa is C or S

SEQ ID NO: 20445 - protein, 37 aa, Artificial Sequence; identical to SEQ ID NO: 17341
  GFR-binding peptide
  MOD_RES (2), (2): Xaa is C or S

SEQ ID NO: 20446 - protein, 38 aa, Artificial Sequence; identical to SEQ ID NO: 17342
  GFR-binding peptide
  MOD_RES (37), (37): Xaa is C or S

SEQ ID NO: 20447 - protein, 38 aa, Artificial Sequence; identical to SEQ ID NO: 17343
  GFR-binding peptide
  MOD_RES (34), (34): Xaa is C or S
  MOD_RES (12), (13), (14), (15), (16): Xaa is A or G
  MOD_RES (17), (18), (19), (20): Xaa is A or G or is absent

SEQ ID NO: 20448 - protein, 33 aa, Artificial Sequence; identical to SEQ ID NO: 17344
  GFR-binding peptide
  MOD_RES (33), (33): Xaa is C or S

SEQ ID NO: 20449 - protein, 35 aa, Artificial Sequence; identical to SEQ ID NO: 17345
  GFR-binding peptide
  MOD_RES (2), (2): Xaa is C or S

SEQ ID NO: 20450 - protein, 41 aa, Artificial Sequence; identical to SEQ ID NO: 17346
  GFR-binding peptide
  MOD_RES (1), (35): Xaa is C or S
  MOD_RES (13), (14), (15), (16), (17): Xaa is A or G
  MOD_RES (18), (19), (20), (21): Xaa is A or G or is absent

SEQ ID NO: 20451 - protein, 39 aa, Artificial Sequence; identical to SEQ ID NO: 17347
  GFR-binding peptide
  MOD_RES (35), (35): Xaa is C or S

SEQ ID NO: 20452 - protein, 42 aa, Artificial Sequence; identical to SEQ ID NO: 17348
  GFR-binding peptide
  MOD_RES (2), (39): Xaa is C or S
  MOD_RES (15), (16), (17), (18), (19): Xaa is A or G
  MOD_RES (20), (21), (22), (23): Xaa is A or G or is absent

SEQ ID NO: 20453 - protein, 37 aa, Artificial Sequence; identical to SEQ ID NO: 17349
  GFR-binding peptide
  MOD_RES (2), (2): Xaa is C or S
  MOD_RES (15), (16), (17), (18), (19): Xaa is A or G
  MOD_RES (20), (21), (22), (23): Xaa is A or G or is absent

SEQ ID NO: 20454 - protein, 42 aa, Artificial Sequence; identical to SEQ ID NO: 17350
  GFR-binding peptide
  MOD_RES (2), (39): Xaa is C or S

SEQ ID NO: 20455 - protein, 42 aa, Artificial Sequence; identical to SEQ ID NO: 17351
  GFR-binding peptide
  MOD_RES (2), (39): Xaa is C or S

SEQ ID NO: 20456 - protein, 38 aa, Artificial Sequence; identical to SEQ ID NO: 17352
  GFR-binding peptide
  MOD_RES (34), (34): Xaa is C or S

SEQ ID NO: 20457 - protein, 42 aa, Artificial Sequence; identical to SEQ ID NO: 17353
  GFR-binding peptide
  MOD_RES (2), (39): Xaa is C or S
  MOD_RES (15), (16), (17), (18), (19): Xaa is A or G
  MOD_RES (20), (21), (22), (23): Xaa is A or G or is absent

SEQ ID NO: 20458 - protein, 37 aa, Artificial Sequence; identical to SEQ ID NO: 17354
  GFR-binding peptide
  MOD_RES (33), (33): Xaa is C or S
  MOD_RES (11), (12), (13), (14), (15): Xaa is A or G
  MOD_RES (16), (17), (18), (19): Xaa is A or G or is absent

SEQ ID NO: 20459 - protein, 41 aa, Artificial Sequence; identical to SEQ ID NO: 17355
  GFR-binding peptide
  MOD_RES (1), (35): Xaa is C or S

SEQ ID NO: 20460 - protein, 41 aa, Artificial Sequence; identical to SEQ ID NO: 17356
  GFR-binding peptide
  MOD_RES (2), (4), (41): Xaa is C or S
  MOD_RES (17), (18), (19), (20), (21): Xaa is A or G
  MOD_RES (22), (23), (24), (25): Xaa is A or G or is absent

SEQ ID NO: 20461 - protein, 39 aa, Artificial Sequence; identical to SEQ ID NO: 17357
  GFR-binding peptide
  MOD_RES (1), (3): Xaa is C or S

SEQ ID NO: 20462 - protein, 34 aa, Artificial Sequence; identical to SEQ ID NO: 17358
  GFR-binding peptide
  MOD_RES (33), (33): Xaa is C or S

SEQ ID NO: 20463 - protein, 39 aa, Artificial Sequence; identical to SEQ ID NO: 17359
  GFR-binding peptide
  MOD_RES (37), (37): Xaa is C or S
  MOD_RES (13), (14), (15), (16), (17): Xaa is A or G
  MOD_RES (18), (19), (20), (21): Xaa is A or G or is absent

SEQ ID NO: 20464 - protein, 42 aa, Artificial Sequence; identical to SEQ ID NO: 17360
  GFR-binding peptide
  MOD_RES (2), (4), (41): Xaa is C or S
  MOD_RES (17), (18), (19), (20), (21): Xaa is A or G
  MOD_RES (22), (23), (24), (25): Xaa is A or G or is absent

SEQ ID NO: 20465 - protein, 38 aa, Artificial Sequence; identical to SEQ ID NO: 17361
  GFR-binding peptide
  MOD_RES (1), (38): Xaa is C or S

SEQ ID NO: 20466 - protein, 40 aa, Artificial Sequence; identical to SEQ ID NO: 17362
  GFR-binding peptide
  MOD_RES (36), (36): Xaa is C or S
  MOD_RES (12), (13), (14), (15), (16): Xaa is A or G
  MOD_RES (17), (18), (19), (20): Xaa is A or G or is absent

SEQ ID NO: 20467 - protein, 42 aa, Artificial Sequence; identical to SEQ ID NO: 17363
  GFR-binding peptide
  MOD_RES (1), (38): Xaa is C or S
  MOD_RES (14), (15), (16), (17), (18): Xaa is A or G
  MOD_RES (19), (20), (21), (22): Xaa is A or G or is absent

SEQ ID NO: 20468 - protein, 39 aa, Artificial Sequence; identical to SEQ ID NO: 17364
  GFR-binding peptide
  MOD_RES (1), (3), (37): Xaa is C or S

SEQ ID NO: 20469 - protein, 41 aa, Artificial Sequence; identical to SEQ ID NO: 17365
  GFR-binding peptide
  MOD_RES (37), (37): Xaa is C or S
  MOD_RES (13), (14), (15), (16), (17): Xaa is A or G
  MOD_RES (18), (19), (20), (21): Xaa is A or G or is absent

SEQ ID NO: 20470 - protein, 35 aa, Artificial Sequence; identical to SEQ ID NO: 17366
  GFR-binding peptide
  MOD_RES (1), (35): Xaa is C or S
  MOD_RES (13), (14), (15), (16), (17): Xaa is A or G
  MOD_RES (18), (19), (20), (21): Xaa is A or G or is absent

SEQ ID NO: 20471 - protein, 34 aa, Artificial Sequence; identical to SEQ ID NO: 17367
  GFR-binding peptide
  MOD_RES (34), (34): Xaa is C or S
  MOD_RES (12), (13), (14), (15), (16): Xaa is A or G
  MOD_RES (17), (18), (19), (20): Xaa is A or G or is absent

SEQ ID NO: 20472 - protein, 37 aa, Artificial Sequence; identical to SEQ ID NO: 17368
  GFR-binding peptide
  MOD_RES (37), (37): Xaa is C or S
  MOD_RES (13), (14), (15), (16), (17): Xaa is A or G
  MOD_RES (18), (19), (20), (21): Xaa is A or G or is absent

SEQ ID NO: 20473 - protein, 36 aa, Artificial Sequence; identical to SEQ ID NO: 17369
  GFR-binding peptide

SEQ ID NO: 20474 - protein, 41 aa, Artificial Sequence; identical to SEQ ID NO: 17370
  GFR-binding peptide
  MOD_RES (2), (4), (41): Xaa is C or S
  MOD_RES (17), (18), (19), (20), (21): Xaa is A or G
  MOD_RES (22), (23), (24), (25): Xaa is A or G or is absent

SEQ ID NO: 20475 - protein, 35 aa, Artificial Sequence; identical to SEQ ID NO: 17371
  GFR-binding peptide
  MOD_RES (1), (1): Xaa is C or S

SEQ ID NO: 20476 - protein, 36 aa, Artificial Sequence; identical to SEQ ID NO: 17372
  GFR-binding peptide
  MOD_RES (1), (1): Xaa is C or S
  MOD_RES (14), (15), (16), (17), (18): Xaa is A or G
  MOD_RES (19), (20), (21), (22): Xaa is A or G or is absent

SEQ ID NO: 20477 - protein, 44 aa, Artificial Sequence; identical to SEQ ID NO: 17373
  GFR-binding peptide
  MOD_RES (1), (3), (40): Xaa is C or S

SEQ ID NO: 20478 - protein, 44 aa, Artificial Sequence; identical to SEQ ID NO: 17374
  GFR-binding peptide
  MOD_RES (2), (4), (38): Xaa is C or S
  MOD_RES (16), (17), (18), (19), (20): Xaa is A or G
  MOD_RES (21), (22), (23), (24): Xaa is A or G or is absent

SEQ ID NO: 20479 - protein, 40 aa, Artificial Sequence; identical to SEQ ID NO: 17375
  GFR-binding peptide
  MOD_RES (2), (4), (38): Xaa is C or S
  MOD_RES (16), (17), (18), (19), (20): Xaa is A or G
  MOD_RES (21), (22), (23), (24): Xaa is A or G or is absent

SEQ ID NO: 20480 - protein, 42 aa, Artificial Sequence; identical to SEQ ID NO: 17376
  GFR-binding peptide
  MOD_RES (2), (36): Xaa is C or S

SEQ ID NO: 20481 - protein, 34 aa, Artificial Sequence; identical to SEQ ID NO: 17377
  GFR-binding peptide

SEQ ID NO: 20482 - protein, 39 aa, Artificial Sequence; identical to SEQ ID NO: 17378
  GFR-binding peptide
  MOD_RES (1), (3), (37): Xaa is C or S

SEQ ID NO: 20483 - protein, 34 aa, Artificial Sequence; identical to SEQ ID NO: 17379
  GFR-binding peptide
  MOD_RES (1), (1): Xaa is C or S

SEQ ID NO: 20484 - protein, 34 aa, Artificial Sequence; identical to SEQ ID NO: 17380
  GFR-binding peptide

SEQ ID NO: 20485 - protein, 36 aa, Artificial Sequence; identical to SEQ ID NO: 17381
  GFR-binding peptide
  MOD_RES (1), (35): Xaa is C or S

SEQ ID NO: 20486 - protein, 38 aa, Artificial Sequence; identical to SEQ ID NO: 17382
  GFR-binding peptide
  MOD_RES (1), (3), (37): Xaa is C or S

SEQ ID NO: 20487 - protein, 34 aa, Artificial Sequence; identical to SEQ ID NO: 17383
  GFR-binding peptide

SEQ ID NO: 20488 - protein, 39 aa, Artificial Sequence; identical to SEQ ID NO: 17384
  GFR-binding peptide
  MOD_RES (2), (36): Xaa is C or S

SEQ ID NO: 20489 - protein, 36 aa, Artificial Sequence; identical to SEQ ID NO: 17385
  GFR-binding peptide
  MOD_RES (35), (35): Xaa is C or S
  MOD_RES (11), (12), (13), (14), (15): Xaa is A or G
  MOD_RES (16), (17), (18), (19): Xaa is A or G or is absent

SEQ ID NO: 20490 - protein, 39 aa, Artificial Sequence; identical to SEQ ID NO: 17386
  GFR-binding peptide
  MOD_RES (33), (33): Xaa is C or S
  MOD_RES (11), (12), (13), (14), (15): Xaa is A or G
  MOD_RES (16), (17), (18), (19): Xaa is A or G or is absent

SEQ ID NO: 20491 - protein, 38 aa, Artificial Sequence; identical to SEQ ID NO: 17387
  GFR-binding peptide
  MOD_RES (1), (35): Xaa is C or S
  MOD_RES (13), (14), (15), (16), (17): Xaa is A or G
  MOD_RES (18), (19), (20), (21): Xaa is A or G or is absent

SEQ ID NO: 20492 - protein, 41 aa, Artificial Sequence; identical to SEQ ID NO: 17388
  GFR-binding peptide
  MOD_RES (1), (38): Xaa is C or S
  MOD_RES (14), (15), (16), (17), (18): Xaa is A or G
  MOD_RES (19), (20), (21), (22): Xaa is A or G or is absent

SEQ ID NO: 20493 - protein, 35 aa, Artificial Sequence; identical to SEQ ID NO: 17389
  GFR-binding peptide
  MOD_RES (33), (33): Xaa is C or S
  MOD_RES (11), (12), (13), (14), (15): Xaa is A or G
  MOD_RES (16), (17), (18), (19): Xaa is A or G or is absent

SEQ ID NO: 20494 - protein, 43 aa, Artificial Sequence; identical to SEQ ID NO: 17390
  GFR-binding peptide
  MOD_RES (2), (4), (38): Xaa is C or S

SEQ ID NO: 20495 - protein, 40 aa, Artificial Sequence; identical to SEQ ID NO: 17391
  GFR-binding peptide
  MOD_RES (1), (3), (40): Xaa is C or S

SEQ ID NO: 20496 - protein, 40 aa, Artificial Sequence; identical to SEQ ID NO: 17392
  GFR-binding peptide
  MOD_RES (1), (38): Xaa is C or S

SEQ ID NO: 20497 - protein, 33 aa, Artificial Sequence; identical to SEQ ID NO: 17393
  GFR-binding peptide

SEQ ID NO: 20498 - protein, 39 aa, Artificial Sequence; identical to SEQ ID NO: 17394
  GFR-binding peptide
  MOD_RES (36), (36): Xaa is C or S
  MOD_RES (12), (13), (14), (15), (16): Xaa is A or G
  MOD_RES (17), (18), (19), (20): Xaa is A or G or is absent

SEQ ID NO: 20499 - protein, 36 aa, Artificial Sequence; identical to SEQ ID NO: 17395
  GFR-binding peptide
  MOD_RES (2), (2): Xaa is C or S

SEQ ID NO: 20500 - protein, 38 aa, Artificial Sequence; identical to SEQ ID NO: 17396
  GFR-binding peptide
  MOD_RES (36), (36): Xaa is C or S
  MOD_RES (12), (13), (14), (15), (16): Xaa is A or G
  MOD_RES (17), (18), (19), (20): Xaa is A or G or is absent

SEQ ID NO: 20501 - protein, 40 aa, Artificial Sequence; identical to SEQ ID NO: 17397
  GFR-binding peptide
  MOD_RES (1), (3), (37): Xaa is C or S

SEQ ID NO: 20502 - protein, 40 aa, Artificial Sequence; identical to SEQ ID NO: 17398
  GFR-binding peptide
  MOD_RES (2), (36): Xaa is C or S

SEQ ID NO: 20503 - protein, 36 aa, Artificial Sequence; identical to SEQ ID NO: 17399
  GFR-binding peptide
  MOD_RES (1), (3): Xaa is C or S
  MOD_RES (15), (16), (17), (18), (19): Xaa is A or G
  MOD_RES (20), (21), (22), (23): Xaa is A or G or is absent

SEQ ID NO: 20504 - protein, 36 aa, Artificial Sequence; identical to SEQ ID NO: 17400
  GFR-binding peptide
  MOD_RES (34), (34): Xaa is C or S
  MOD_RES (12), (13), (14), (15), (16): Xaa is A or G
  MOD_RES (17), (18), (19), (20): Xaa is A or G or is absent

SEQ ID NO: 20505 - protein, 39 aa, Artificial Sequence; identical to SEQ ID NO: 17401
  GFR-binding peptide
  MOD_RES (33), (33): Xaa is C or S

SEQ ID NO: 20506 - protein, 33 aa, Artificial Sequence; identical to SEQ ID NO: 17402
  GFR-binding peptide
  MOD_RES (11), (12), (13), (14), (15): Xaa is A or G
  MOD_RES (16), (17), (18), (19): Xaa is A or G or is absent

SEQ ID NO: 20507 - protein, 38 aa, Artificial Sequence; identical to SEQ ID NO: 17403
  GFR-binding peptide
  MOD_RES (1), (38): Xaa is C or S

SEQ ID NO: 20508 - protein, 41 aa, Artificial Sequence; identical to SEQ ID NO: 17404
  GFR-binding peptide
  MOD_RES (37), (37): Xaa is C or S

SEQ ID NO: 20509 - protein, 37 aa, Artificial Sequence; identical to SEQ ID NO: 17405
  GFR-binding peptide
  MOD_RES (2), (36): Xaa is C or S

SEQ ID NO: 20510 - protein, 38 aa, Artificial Sequence; identical to SEQ ID NO: 17406
  GFR-binding peptide
  MOD_RES (36), (36): Xaa is C or S
  MOD_RES (12), (13), (14), (15), (16): Xaa is A or G
  MOD_RES (17), (18), (19), (20): Xaa is A or G or is absent

SEQ ID NO: 20511 - protein, 39 aa, Artificial Sequence; identical to SEQ ID NO: 17407
  GFR-binding peptide
  MOD_RES (33), (33): Xaa is C or S

SEQ ID NO: 20512 - protein, 39 aa, Artificial Sequence; identical to SEQ ID NO: 17408
  GFR-binding peptide
  MOD_RES (1), (3): Xaa is C or S

SEQ ID NO: 20513 - protein, 36 aa, Artificial Sequence; identical to SEQ ID NO: 17409
  GFR-binding peptide
  MOD_RES (34), (34): Xaa is C or S

SEQ ID NO: 20514 - protein, 37 aa, Artificial Sequence; identical to SEQ ID NO: 17410
  GFR-binding peptide
  MOD_RES (37), (37): Xaa is C or S
  MOD_RES (13), (14), (15), (16), (17): Xaa is A or G
  MOD_RES (18), (19), (20), (21): Xaa is A or G or is absent

SEQ ID NO: 20515 - protein, 38 aa, Artificial Sequence; identical to SEQ ID NO: 17411
  GFR-binding peptide
  MOD_RES (33), (33): Xaa is C or S

SEQ ID NO: 20516 - protein, 40 aa, Artificial Sequence; identical to SEQ ID NO: 17412
  GFR-binding peptide
  MOD_RES (2), (4), (38): Xaa is C or S
  MOD_RES (16), (17), (18), (19), (20): Xaa is A or G
  MOD_RES (21), (22), (23), (24): Xaa is A or G or is absent

SEQ ID NO: 20517 - protein, 33 aa, Artificial Sequence; identical to SEQ ID NO: 17413
  GFR-binding peptide
  MOD_RES (11), (12), (13), (14), (15): Xaa is A or G
  MOD_RES (16), (17), (18), (19): Xaa is A or G or is absent

SEQ ID NO: 20518 - protein, 43 aa, Artificial Sequence; identical to SEQ ID NO: 17414
  GFR-binding peptide
  MOD_RES (1), (3), (40): Xaa is C or S
  MOD_RES (16), (17), (18), (19), (20): Xaa is A or G
  MOD_RES (21), (22), (23), (24): Xaa is A or G or is absent

SEQ ID NO: 20519 - protein, 37 aa, Artificial Sequence; identical to SEQ ID NO: 17415
  GFR-binding peptide
  MOD_RES (2), (2): Xaa is C or S

SEQ ID NO: 20520 - protein, 38 aa, Artificial Sequence; identical to SEQ ID NO: 17416
  GFR-binding peptide
  MOD_RES (2), (36): Xaa is C or S
  MOD_RES (14), (15), (16), (17), (18): Xaa is A or G
  MOD_RES (19), (20), (21), (22): Xaa is A or G or is absent

SEQ ID NO: 20521 - protein, 36 aa, Artificial Sequence; identical to SEQ ID NO: 17417
  GFR-binding peptide
  MOD_RES (13), (14), (15), (16), (17): Xaa is A or G
  MOD_RES (18), (19), (20), (21): Xaa is A or G or is absent

SEQ ID NO: 20522 - protein, 38 aa, Artificial Sequence; identical to SEQ ID NO: 17418
  GFR-binding peptide
  MOD_RES (1), (3), (37): Xaa is C or S
  MOD_RES (15), (16), (17), (18), (19): Xaa is A or G
  MOD_RES (20), (21), (22), (23): Xaa is A or G or is absent

SEQ ID NO: 20523 - protein, 36 aa, Artificial Sequence; identical to SEQ ID NO: 17419
  GFR-binding peptide
  MOD_RES (2), (2): Xaa is C or S
  MOD_RES (15), (16), (17), (18), (19): Xaa is A or G
  MOD_RES (20), (21), (22), (23): Xaa is A or G or is absent

SEQ ID NO: 20524 - protein, 43 aa, Artificial Sequence; identical to SEQ ID NO: 17420
  GFR-binding peptide
  MOD_RES (2), (4), (41): Xaa is C or S

SEQ ID NO: 20525 - protein, 37 aa, Artificial Sequence; identical to SEQ ID NO: 17421
  GFR-binding peptide
  MOD_RES (2), (2): Xaa is C or S

SEQ ID NO: 20526 - protein, 40 aa, Artificial Sequence; identical to SEQ ID NO: 17422
  GFR-binding peptide
  MOD_RES (2), (4): Xaa is C or S

SEQ ID NO: 20527 - protein, 40 aa, Artificial Sequence; identical to SEQ ID NO: 17423
  GFR-binding peptide
  MOD_RES (1), (38): Xaa is C or S

SEQ ID NO: 20528 - protein, 38 aa, Artificial Sequence; identical to SEQ ID NO: 17424
  GFR-binding peptide
  MOD_RES (2), (4), (38): Xaa is C or S
  MOD_RES (16), (17), (18), (19), (20): Xaa is A or G
  MOD_RES (21), (22), (23), (24): Xaa is A or G or is absent

SEQ ID NO: 20529 - protein, 38 aa, Artificial Sequence; identical to SEQ ID NO: 17425
  GFR-binding peptide
  MOD_RES (33), (33): Xaa is C or S
  MOD_RES (11), (12), (13), (14), (15): Xaa is A or G
  MOD_RES (16), (17), (18), (19): Xaa is A or G or is absent

SEQ ID NO: 20530 - protein, 40 aa, Artificial Sequence; identical to SEQ ID NO: 17426
  GFR-binding peptide
  MOD_RES (1), (3), (37): Xaa is C or S
  MOD_RES (15), (16), (17), (18), (19): Xaa is A or G
  MOD_RES (20), (21), (22), (23): Xaa is A or G or is absent

SEQ ID NO: 20531 - protein, 43 aa, Artificial Sequence; identical to SEQ ID NO: 17427
  GFR-binding peptide
  MOD_RES (2), (4), (38): Xaa is C or S
  MOD_RES (16), (17), (18), (19), (20): Xaa is A or G
  MOD_RES (21), (22), (23), (24): Xaa is A or G or is absent

SEQ ID NO: 20532 - protein, 35 aa, Artificial Sequence; identical to SEQ ID NO: 17428
  GFR-binding peptide
  MOD_RES (1), (1): Xaa is C or S
  MOD_RES (14), (15), (16), (17), (18): Xaa is A or G
  MOD_RES (19), (20), (21), (22): Xaa is A or G or is absent

SEQ ID NO: 20533 - protein, 39 aa, Artificial Sequence; identical to SEQ ID NO: 17429
  GFR-binding peptide
  MOD_RES (35), (35): Xaa is C or S

SEQ ID NO: 20534 - protein, 41 aa, Artificial Sequence; identical to SEQ ID NO: 17430
  GFR-binding peptide
  MOD_RES (2), (36): Xaa is C or S

SEQ ID NO: 20535 - protein, 38 aa, Artificial Sequence; identical to SEQ ID NO: 17431
  GFR-binding peptide
  MOD_RES (33), (33): Xaa is C or S

SEQ ID NO: 20536 - protein, 40 aa, Artificial Sequence; identical to SEQ ID NO: 17432
  GFR-binding peptide
  MOD_RES (36), (36): Xaa is C or S
  MOD_RES (12), (13), (14), (15), (16): Xaa is A or G
  MOD_RES (17), (18), (19), (20): Xaa is A or G or is absent

SEQ ID NO: 20537 - protein, 40 aa, Artificial Sequence; identical to SEQ ID NO: 17433
  GFR-binding peptide
  MOD_RES (1), (3), (40): Xaa is C or S
  MOD_RES (16), (17), (18), (19), (20): Xaa is A or G
  MOD_RES (21), (22), (23), (24): Xaa is A or G or is absent

SEQ ID NO: 20538 - protein, 35 aa, Artificial Sequence; identical to SEQ ID NO: 17434
  GFR-binding peptide
  MOD_RES (33), (33): Xaa is C or S

SEQ ID NO: 20539 - protein, 39 aa, Artificial Sequence; identical to SEQ ID NO: 17435
  GFR-binding peptide
  MOD_RES (1), (35): Xaa is C or S

SEQ ID NO: 20540 - protein, 41 aa, Artificial Sequence; identical to SEQ ID NO: 17436
  GFR-binding peptide
  MOD_RES (1), (3), (37): Xaa is C or S

SEQ ID NO: 20541 - protein, 37 aa, Artificial Sequence; identical to SEQ ID NO: 17437
  GFR-binding peptide
  MOD_RES (37), (37): Xaa is C or S

SEQ ID NO: 20542 - protein, 42 aa, Artificial Sequence; identical to SEQ ID NO: 17438
  GFR-binding peptide
  MOD_RES (1), (3), (37): Xaa is C or S

SEQ ID NO: 20543 - protein, 38 aa, Artificial Sequence; identical to SEQ ID NO: 17439
  GFR-binding peptide
  MOD_RES (35), (35): Xaa is C or S

SEQ ID NO: 20544 - protein, 38 aa, Artificial Sequence; identical to SEQ ID NO: 17440
  GFR-binding peptide
  MOD_RES (1), (3): Xaa is C or S

SEQ ID NO: 20545 - protein, 39 aa, Artificial Sequence; identical to SEQ ID NO: 17441
  GFR-binding peptide
  MOD_RES (33), (33): Xaa is C or S
  MOD_RES (11), (12), (13), (14), (15): Xaa is A or G
  MOD_RES (16), (17), (18), (19): Xaa is A or G or is absent

SEQ ID NO: 20546 - protein, 41 aa, Artificial Sequence; identical to SEQ ID NO: 17442
  GFR-binding peptide
  MOD_RES (2), (39): Xaa is C or S

SEQ ID NO: 20547 - protein, 41 aa, Artificial Sequence; identical to SEQ ID NO: 17443
  GFR-binding peptide
  MOD_RES (1), (3), (37): Xaa is C or S

SEQ ID NO: 20548 - protein, 40 aa, Artificial Sequence; identical to SEQ ID NO: 17444
  GFR-binding peptide
  MOD_RES (2), (4): Xaa is C or S

SEQ ID NO: 20549 - protein, 37 aa, Artificial Sequence; identical to SEQ ID NO: 17445
  GFR-binding peptide
  MOD_RES (1), (1): Xaa is C or S

SEQ ID NO: 20550 - protein, 40 aa, Artificial Sequence; identical to SEQ ID NO: 17446
  GFR-binding peptide
  MOD_RES (1), (35): Xaa is C or S

SEQ ID NO: 20551 - protein, 39 aa, Artificial Sequence; identical to SEQ ID NO: 17447
  GFR-binding peptide
  MOD_RES (37), (37): Xaa is C or S
  MOD_RES (13), (14), (15), (16), (17): Xaa is A or G
  MOD_RES (18), (19), (20), (21): Xaa is A or G or is absent

SEQ ID NO: 20552 - protein, 36 aa, Artificial Sequence; identical to SEQ ID NO: 17448
  GFR-binding peptide
  MOD_RES (36), (36): Xaa is C or S
  MOD_RES (12), (13), (14), (15), (16): Xaa is A or G
  MOD_RES (17), (18), (19), (20): Xaa is A or G or is absent

SEQ ID NO: 20553 - protein, 38 aa, Artificial Sequence; identical to SEQ ID NO: 17449
  GFR-binding peptide
  MOD_RES (1), (3), (37): Xaa is C or S

SEQ ID NO: 20554 - protein, 32 aa, Artificial Sequence; identical to SEQ ID NO: 17450
  GFR-binding peptide
  MOD_RES (11), (12), (13), (14), (15): Xaa is A or G
  MOD_RES (16), (17), (18), (19): Xaa is A or G or is absent

SEQ ID NO: 20555 - protein, 41 aa, Artificial Sequence; identical to SEQ ID NO: 17451
  GFR-binding peptide
  MOD_RES (2), (4), (38): Xaa is C or S

SEQ ID NO: 20556 - protein, 42 aa, Artificial Sequence; identical to SEQ ID NO: 17452
  GFR-binding peptide
  MOD_RES (1), (3), (40): Xaa is C or S

SEQ ID NO: 20557 - protein, 37 aa, Artificial Sequence; identical to SEQ ID NO: 17453
  GFR-binding peptide
  MOD_RES (1), (35): Xaa is C or S

SEQ ID NO: 20558 - protein, 39 aa, Artificial Sequence; identical to SEQ ID NO: 17454
  GFR-binding peptide
  MOD_RES (35), (35): Xaa is C or S
  MOD_RES (11), (12), (13), (14), (15): Xaa is A or G
  MOD_RES (16), (17), (18), (19): Xaa is A or G or is absent

SEQ ID NO: 20559 - protein, 41 aa, Artificial Sequence; identical to SEQ ID NO: 17455
  GFR-binding peptide
  MOD_RES (37), (37): Xaa is C or S
  MOD_RES (13), (14), (15), (16), (17): Xaa is A or G
  MOD_RES (18), (19), (20), (21): Xaa is A or G or is absent

SEQ ID NO: 20560 - protein, 37 aa, Artificial Sequence; identical to SEQ ID NO: 17456
  GFR-binding peptide
  MOD_RES (1), (3), (37): Xaa is C or S

SEQ ID NO: 20561 - protein, 39 aa, Artificial Sequence; identical to SEQ ID NO: 17457
  GFR-binding peptide
  MOD_RES (36), (36): Xaa is C or S

SEQ ID NO: 20562 - protein, 45 aa, Artificial Sequence; identical to SEQ ID NO: 17458
  GFR-binding peptide
  MOD_RES (2), (4), (41): Xaa is C or S
  MOD_RES (17), (18), (19), (20), (21): Xaa is A or G
  MOD_RES (22), (23), (24), (25): Xaa is A or G or is absent

SEQ ID NO: 20563 - protein, 38 aa, Artificial Sequence; identical to SEQ ID NO: 17459
  GFR-binding peptide
  MOD_RES (2), (4): Xaa is C or S
  MOD_RES (17), (18), (19), (20), (21): Xaa is A or G
  MOD_RES (22), (23), (24), (25): Xaa is A or G or is absent

SEQ ID NO: 20564 - protein, 42 aa, Artificial Sequence; identical to SEQ ID NO: 17460
  GFR-binding peptide
  MOD_RES (2), (4), (41): Xaa is C or S

SEQ ID NO: 20565 - protein, 44 aa, Artificial Sequence; identical to SEQ ID NO: 17461
  GFR-binding peptide
  MOD_RES (2), (4), (38): Xaa is C or S
  MOD_RES (16), (17), (18), (19), (20): Xaa is A or G
  MOD_RES (21), (22), (23), (24): Xaa is A or G or is absent

SEQ ID NO: 20566 - protein, 35 aa, Artificial Sequence; identical to SEQ ID NO: 17462
  GFR-binding peptide
  MOD_RES (33), (33): Xaa is C or S

SEQ ID NO: 20567 - protein, 38 aa, Artificial Sequence; identical to SEQ ID NO: 17463
  GFR-binding peptide
  MOD_RES (2), (2): Xaa is C or S

SEQ ID NO: 20568 - protein, 42 aa, Artificial Sequence; identical to SEQ ID NO: 17464
  GFR-binding peptide
  MOD_RES (2), (39): Xaa is C or S
  MOD_RES (15), (16), (17), (18), (19): Xaa is A or G
  MOD_RES (20), (21), (22), (23): Xaa is A or G or is absent

SEQ ID NO: 20569 - protein, 42 aa, Artificial Sequence; identical to SEQ ID NO: 17465
  GFR-binding peptide
  MOD_RES (2), (36): Xaa is C or S

SEQ ID NO: 20570 - protein, 37 aa, Artificial Sequence; identical to SEQ ID NO: 17466
  GFR-binding peptide
  MOD_RES (1), (35): Xaa is C or S
  MOD_RES (13), (14), (15), (16), (17): Xaa is A or G
  MOD_RES (18), (19), (20), (21): Xaa is A or G or is absent

SEQ ID NO: 20571 - protein, 37 aa, Artificial Sequence; identical to SEQ ID NO: 17467
  GFR-binding peptide
  MOD_RES (1), (1): Xaa is C or S

SEQ ID NO: 20572 - protein, 37 aa, Artificial Sequence; identical to SEQ ID NO: 17468
  GFR-binding peptide
  MOD_RES (1), (35): Xaa is C or S
  MOD_RES (13), (14), (15), (16), (17): Xaa is A or G
  MOD_RES (18), (19), (20), (21): Xaa is A or G or is absent

SEQ ID NO: 20573 - protein, 33 aa, Artificial Sequence; identical to SEQ ID NO: 17469
  GFR-binding peptide
  MOD_RES (33), (33): Xaa is C or S

SEQ ID NO: 20574 - protein, 38 aa, Artificial Sequence; identical to SEQ ID NO: 17470
  GFR-binding peptide
  MOD_RES (1), (3): Xaa is C or S

SEQ ID NO: 20575 - protein, 38 aa, Artificial Sequence; identical to SEQ ID NO: 17471
  GFR-binding peptide
  MOD_RES (33), (33): Xaa is C or S

SEQ ID NO: 20576 - protein, 39 aa, Artificial Sequence; identical to SEQ ID NO: 17472
  GFR-binding peptide
  MOD_RES (1), (38): Xaa is C or S
  MOD_RES (14), (15), (16), (17), (18): Xaa is A or G
  MOD_RES (19), (20), (21), (22): Xaa is A or G or is absent

SEQ ID NO: 20577 - protein, 40 aa, Artificial Sequence; identical to SEQ ID NO: 17473
  GFR-binding peptide
  MOD_RES (1), (35): Xaa is C or S

SEQ ID NO: 20578 - protein, 39 aa, Artificial Sequence; identical to SEQ ID NO: 17474
  GFR-binding peptide
  MOD_RES (1), (35): Xaa is C or S
  MOD_RES (13), (14), (15), (16), (17): Xaa is A or G
  MOD_RES (18), (19), (20), (21): Xaa is A or G or is absent

SEQ ID NO: 20579 - protein, 42 aa, Artificial Sequence; identical to SEQ ID NO: 17475
  GFR-binding peptide
  MOD_RES (1), (3), (37): Xaa is C or S
  MOD_RES (15), (16), (17), (18), (19): Xaa is A or G
  MOD_RES (20), (21), (22), (23): Xaa is A or G or is absent

SEQ ID NO: 20580 - protein, 39 aa, Artificial Sequence; identical to SEQ ID NO: 17476
  GFR-binding peptide
  MOD_RES (2), (4): Xaa is C or S

SEQ ID NO: 20581 - protein, 33 aa, Artificial Sequence; identical to SEQ ID NO: 17477
  GFR-binding peptide

SEQ ID NO: 20582 - protein, 39 aa, Artificial Sequence; identical to SEQ ID NO: 17478
  GFR-binding peptide
  MOD_RES (2), (39): Xaa is C or S

SEQ ID NO: 20583 - protein, 37 aa, Artificial Sequence; identical to SEQ ID NO: 17479
  GFR-binding peptide
  MOD_RES (1), (35): Xaa is C or S

SEQ ID NO: 20584 - protein, 43 aa, Artificial Sequence; identical to SEQ ID NO: 17480
  GFR-binding peptide
  MOD_RES (2), (4), (41): Xaa is C or S

SEQ ID NO: 20585 - protein, 37 aa, Artificial Sequence; identical to SEQ ID NO: 17481
  GFR-binding peptide
  MOD_RES (1), (1): Xaa is C or S
  MOD_RES (14), (15), (16), (17), (18): Xaa is A or G
  MOD_RES (19), (20), (21), (22): Xaa is A or G or is absent

SEQ ID NO: 20586 - protein, 33 aa, Artificial Sequence; identical to SEQ ID NO: 17482
  GFR-binding peptide
  MOD_RES (12), (13), (14), (15), (16): Xaa is A or G
  MOD_RES (17), (18), (19), (20): Xaa is A or G or is absent

SEQ ID NO: 20587 - protein, 37 aa, Artificial Sequence; identical to SEQ ID NO: 17483
  GFR-binding peptide
  MOD_RES (33), (33): Xaa is C or S
  MOD_RES (11), (12), (13), (14), (15): Xaa is A or G
  MOD_RES (16), (17), (18), (19): Xaa is A or G or is absent

SEQ ID NO: 20588 - protein, 39 aa, Artificial Sequence; identical to SEQ ID NO: 17484
  GFR-binding peptide
  MOD_RES (1), (35): Xaa is C or S

SEQ ID NO: 20589 - protein, 38 aa, Artificial Sequence; identical to SEQ ID NO: 17485
  GFR-binding peptide
  MOD_RES (2), (4), (38): Xaa is C or S

SEQ ID NO: 20590 - protein, 39 aa, Artificial Sequence; identical to SEQ ID NO: 17486
  GFR-binding peptide
  MOD_RES (36), (36): Xaa is C or S

SEQ ID NO: 20591 - protein, 39 aa, Artificial Sequence; identical to SEQ ID NO: 17487
  GFR-binding peptide
  MOD_RES (1), (38): Xaa is C or S
  MOD_RES (14), (15), (16), (17), (18): Xaa is A or G
  MOD_RES (19), (20), (21), (22): Xaa is A or G or is absent

SEQ ID NO: 20592 - protein, 37 aa, Artificial Sequence; identical to SEQ ID NO: 17488
  GFR-binding peptide
  MOD_RES (1), (35): Xaa is C or S
  MOD_RES (13), (14), (15), (16), (17): Xaa is A or G
  MOD_RES (18), (19), (20), (21): Xaa is A or G or is absent

SEQ ID NO: 20593 - protein, 38 aa, Artificial Sequence; identical to SEQ ID NO: 17489
  GFR-binding peptide
  MOD_RES (1), (3), (37): Xaa is C or S

SEQ ID NO: 20594 - protein, 38 aa, Artificial Sequence; identical to SEQ ID NO: 17490
  GFR-binding peptide
  MOD_RES (2), (2): Xaa is C or S

SEQ ID NO: 20595 - protein, 36 aa, Artificial Sequence; identical to SEQ ID NO: 17491
  GFR-binding peptide
  MOD_RES (2), (36): Xaa is C or S

SEQ ID NO: 20596 - protein, 39 aa, Artificial Sequence; identical to SEQ ID NO: 17492
  GFR-binding peptide
  MOD_RES (2), (36): Xaa is C or S

SEQ ID NO: 20597 - protein, 37 aa, Artificial Sequence; identical to SEQ ID NO: 17493
  GFR-binding peptide
  MOD_RES (2), (36): Xaa is C or S

SEQ ID NO: 20598 - protein, 38 aa, Artificial Sequence; identical to SEQ ID NO: 17494
  GFR-binding peptide
  MOD_RES (2), (4): Xaa is C or S

SEQ ID NO: 20599 - protein, 40 aa, Artificial Sequence; identical to SEQ ID NO: 17495
  GFR-binding peptide
  MOD_RES (1), (38): Xaa is C or S

SEQ ID NO: 20600 - protein, 42 aa, Artificial Sequence; identical to SEQ ID NO: 17496
  GFR-binding peptide
  MOD_RES (1), (3), (37): Xaa is C or S

SEQ ID NO: 20601 - protein, 37 aa, Artificial Sequence; identical to SEQ ID NO: 17497
  GFR-binding peptide
  MOD_RES (1), (3), (37): Xaa is C or S

SEQ ID NO: 20602 - protein, 39 aa, Artificial Sequence; identical to SEQ ID NO: 17498
  GFR-binding peptide
  MOD_RES (34), (34): Xaa is C or S

SEQ ID NO: 20603 - protein, 41 aa, Artificial Sequence; identical to SEQ ID NO: 17499
  GFR-binding peptide
  MOD_RES (2), (36): Xaa is C or S
  MOD_RES (14), (15), (16), (17), (18): Xaa is A or G
  MOD_RES (19), (20), (21), (22): Xaa is A or G or is absent

SEQ ID NO: 20604 - protein, 41 aa, Artificial Sequence; identical to SEQ ID NO: 17500
  GFR-binding peptide
  MOD_RES (2), (39): Xaa is C or S

SEQ ID NO: 20605 - protein, 39 aa, Artificial Sequence; identical to SEQ ID NO: 17501
  GFR-binding peptide
  MOD_RES (1), (3), (37): Xaa is C or S
  MOD_RES (15), (16), (17), (18), (19): Xaa is A or G
  MOD_RES (20), (21), (22), (23): Xaa is A or G or is absent

SEQ ID NO: 20606 - protein, 42 aa, Artificial Sequence; identical to SEQ ID NO: 17502
  GFR-binding peptide
  MOD_RES (1), (38): Xaa is C or S
  MOD_RES (14), (15), (16), (17), (18): Xaa is A or G
  MOD_RES (19), (20), (21), (22): Xaa is A or G or is absent

SEQ ID NO: 20607 - protein, 39 aa, Artificial Sequence; identical to SEQ ID NO: 17503
  GFR-binding peptide
  MOD_RES (1), (3): Xaa is C or S

SEQ ID NO: 20608 - protein, 43 aa, Artificial Sequence; identical to SEQ ID NO: 17504
  GFR-binding peptide
  MOD_RES (1), (3), (40): Xaa is C or S

SEQ ID NO: 20609 - protein, 33 aa, Artificial Sequence; identical to SEQ ID NO: 17505
  GFR-binding peptide

SEQ ID NO: 20610 - protein, 39 aa, Artificial Sequence; identical to SEQ ID NO: 17506
  GFR-binding peptide
  MOD_RES (34), (34): Xaa is C or S
  MOD_RES (12), (13), (14), (15), (16): Xaa is A or G
  MOD_RES (17), (18), (19), (20): Xaa is A or G or is absent

SEQ ID NO: 20611 - protein, 44 aa, Artificial Sequence; identical to SEQ ID NO: 17507
  GFR-binding peptide
  MOD_RES (1), (3), (40): Xaa is C or S

SEQ ID NO: 20612 - protein, 44 aa, Artificial Sequence; identical to SEQ ID NO: 17508
  GFR-binding peptide
  MOD_RES (1), (3), (40): Xaa is C or S

SEQ ID NO: 20613 - protein, 38 aa, Artificial Sequence; identical to SEQ ID NO: 17509
  GFR-binding peptide
  MOD_RES (2), (4): Xaa is C or S

SEQ ID NO: 20614 - protein, 38 aa, Artificial Sequence; identical to SEQ ID NO: 17510
  GFR-binding peptide
  MOD_RES (34), (34): Xaa is C or S
  MOD_RES (12), (13), (14), (15), (16): Xaa is A or G
  MOD_RES (17), (18), (19), (20): Xaa is A or G or is absent

SEQ ID NO: 20615 - protein, 35 aa, Artificial Sequence; identical to SEQ ID NO: 17511
  GFR-binding peptide
  MOD_RES (34), (34): Xaa is C or S
  MOD_RES (12), (13), (14), (15), (16): Xaa is A or G
  MOD_RES (17), (18), (19), (20): Xaa is A or G or is absent

SEQ ID NO: 20616 - protein, 32 aa, Artificial Sequence; identical to SEQ ID NO: 17512
  GFR-binding peptide
  MOD_RES (11), (12), (13), (14), (15): Xaa is A or G
  MOD_RES (16), (17), (18), (19): Xaa is A or G or is absent

SEQ ID NO: 20617 - protein, 40 aa, Artificial Sequence; identical to SEQ ID NO: 17513
  GFR-binding peptide
  MOD_RES (1), (35): Xaa is C or S
  MOD_RES (13), (14), (15), (16), (17): Xaa is A or G
  MOD_RES (18), (19), (20), (21): Xaa is A or G or is absent

SEQ ID NO: 20618 - protein, 33 aa, Artificial Sequence; identical to SEQ ID NO: 17514
  GFR-binding peptide

SEQ ID NO: 20619 - protein, 35 aa, Artificial Sequence; identical to SEQ ID NO: 17515
  GFR-binding peptide
  MOD_RES (1), (35): Xaa is C or S

SEQ ID NO: 20620 - protein, 40 aa, Artificial Sequence; identical to SEQ ID NO: 17516
  GFR-binding peptide
  MOD_RES (1), (35): Xaa is C or S
  MOD_RES (13), (14), (15), (16), (17): Xaa is A or G
  MOD_RES (18), (19), (20), (21): Xaa is A or G or is absent

SEQ ID NO: 20621 - protein, 39 aa, Artificial Sequence; identical to SEQ ID NO: 17517
  GFR-binding peptide
  MOD_RES (2), (4): Xaa is C or S

SEQ ID NO: 20622 - protein, 43 aa, Artificial Sequence; identical to SEQ ID NO: 17518
  GFR-binding peptide
  MOD_RES (2), (39): Xaa is C or S
  MOD_RES (15), (16), (17), (18), (19): Xaa is A or G
  MOD_RES (20), (21), (22), (23): Xaa is A or G or is absent

SEQ ID NO: 20623 - protein, 37 aa, Artificial Sequence; identical to SEQ ID NO: 17519
  GFR-binding peptide
  MOD_RES (2), (36): Xaa is C or S

SEQ ID NO: 20624 - protein, 36 aa, Artificial Sequence; identical to SEQ ID NO: 17520
  GFR-binding peptide
  MOD_RES (36), (36): Xaa is C or S
  MOD_RES (12), (13), (14), (15), (16): Xaa is A or G
  MOD_RES (17), (18), (19), (20): Xaa is A or G or is absent

SEQ ID NO: 20625 - protein, 33 aa, Artificial Sequence; identical to SEQ ID NO: 17521
  GFR-binding peptide
  MOD_RES (33), (33): Xaa is C or S
  MOD_RES (11), (12), (13), (14), (15): Xaa is A or G
  MOD_RES (16), (17), (18), (19): Xaa is A or G or is absent

SEQ ID NO: 20626 - protein, 34 aa, Artificial Sequence; identical to SEQ ID NO: 17522
  GFR-binding peptide
  MOD_RES (34), (34): Xaa is C or S

SEQ ID NO: 20627 - protein, 33 aa, Artificial Sequence; identical to SEQ ID NO: 17523
  GFR-binding peptide
  MOD_RES (11), (12), (13), (14), (15): Xaa is A or G
  MOD_RES (16), (17), (18), (19): Xaa is A or G or is absent

SEQ ID NO: 20628 - protein, 37 aa, Artificial Sequence; identical to SEQ ID NO: 17524
  GFR-binding peptide
  MOD_RES (37), (37): Xaa is C or S
  MOD_RES (13), (14), (15), (16), (17): Xaa is A or G
  MOD_RES (18), (19), (20), (21): Xaa is A or G or is absent

SEQ ID NO: 20629 - protein, 37 aa, Artificial Sequence; identical to SEQ ID NO: 17525
  GFR-binding peptide
  MOD_RES (33), (33): Xaa is C or S

SEQ ID NO: 20630 - protein, 40 aa, Artificial Sequence; identical to SEQ ID NO: 17526
  GFR-binding peptide
  MOD_RES (2), (4), (38): Xaa is C or S
  MOD_RES (16), (17), (18), (19), (20): Xaa is A or G
  MOD_RES (21), (22), (23), (24): Xaa is A or G or is absent

SEQ ID NO: 20631 - protein, 38 aa, Artificial Sequence; identical to SEQ ID NO: 17527
  GFR-binding peptide
  MOD_RES (2), (4): Xaa is C or S

SEQ ID NO: 20632 - protein, 37 aa, Artificial Sequence; identical to SEQ ID NO: 17528
  GFR-binding peptide
  MOD_RES (37), (37): Xaa is C or S

SEQ ID NO: 20633 - protein, 37 aa, Artificial Sequence; identical to SEQ ID NO: 17529
  GFR-binding peptide
  MOD_RES (1), (3): Xaa is C or S
  MOD_RES (16), (17), (18), (19), (20): Xaa is A or G
  MOD_RES (21), (22), (23), (24): Xaa is A or G or is absent

SEQ ID NO: 20634 - protein, 45 aa, Artificial Sequence; identical to SEQ ID NO: 17530
  GFR-binding peptide
  MOD_RES (2), (4), (41): Xaa is C or S
  MOD_RES (17), (18), (19), (20), (21): Xaa is A or G
  MOD_RES (22), (23), (24), (25): Xaa is A or G or is absent

SEQ ID NO: 20635 - protein, 38 aa, Artificial Sequence; identical to SEQ ID NO: 17531
  GFR-binding peptide
  MOD_RES (1), (3), (37): Xaa is C or S

SEQ ID NO: 20636 - protein, 39 aa, Artificial Sequence; identical to SEQ ID NO: 17532
  GFR-binding peptide
  MOD_RES (37), (37): Xaa is C or S

SEQ ID NO: 20637 - protein, 42 aa, Artificial Sequence; identical to SEQ ID NO: 17533
  GFR-binding peptide
  MOD_RES (2), (39): Xaa is C or S
  MOD_RES (15), (16), (17), (18), (19): Xaa is A or G
  MOD_RES (20), (21), (22), (23): Xaa is A or G or is absent

SEQ ID NO: 20638 - protein, 45 aa, Artificial Sequence; identical to SEQ ID NO: 17534
  GFR-binding peptide
  MOD_RES (2), (4), (41): Xaa is C or S
  MOD_RES (17), (18), (19), (20), (21): Xaa is A or G
  MOD_RES (22), (23), (24), (25): Xaa is A or G or is absent

SEQ ID NO: 20639 - protein, 36 aa, Artificial Sequence; identical to SEQ ID NO: 17535
  GFR-binding peptide
  MOD_RES (33), (33): Xaa is C or S

SEQ ID NO: 20640 - protein, 39 aa, Artificial Sequence; identical to SEQ ID NO: 17536
  GFR-binding peptide
  MOD_RES (1), (35): Xaa is C or S

SEQ ID NO: 20641 - protein, 37 aa, Artificial Sequence; identical to SEQ ID NO: 17537
  GFR-binding peptide
  MOD_RES (36), (36): Xaa is C or S

SEQ ID NO: 20642 - protein, 37 aa, Artificial Sequence; identical to SEQ ID NO: 17538
  GFR-binding peptide
  MOD_RES (1), (1): Xaa is C or S

SEQ ID NO: 20643 - protein, 35 aa, Artificial Sequence; identical to SEQ ID NO: 17539
  GFR-binding peptide
  MOD_RES (2), (2): Xaa is C or S
  MOD_RES (14), (15), (16), (17), (18): Xaa is A or G
  MOD_RES (19), (20), (21), (22): Xaa is A or G or is absent

SEQ ID NO: 20644 - protein, 37 aa, Artificial Sequence; identical to SEQ ID NO: 17540
  GFR-binding peptide
  MOD_RES (1), (3), (37): Xaa is C or S

SEQ ID NO: 20645 - protein, 34 aa, Artificial Sequence; identical to SEQ ID NO: 17541
  GFR-binding peptide
  MOD_RES (12), (13), (14), (15), (16): Xaa is A or G
  MOD_RES (17), (18), (19), (20): Xaa is A or G or is absent

SEQ ID NO: 20646 - protein, 39 aa, Artificial Sequence; identical to SEQ ID NO: 17542
  GFR-binding peptide
  MOD_RES (33), (33): Xaa is C or S

SEQ ID NO: 20647 - protein, 36 aa, Artificial Sequence; identical to SEQ ID NO: 17543
  GFR-binding peptide
  MOD_RES (2), (36): Xaa is C or S

SEQ ID NO: 20648 - protein, 41 aa, Artificial Sequence; identical to SEQ ID NO: 17544
  GFR-binding peptide
  MOD_RES (1), (35): Xaa is C or S

SEQ ID NO: 20649 - protein, 36 aa, Artificial Sequence; identical to SEQ ID NO: 17545
  GFR-binding peptide
  MOD_RES (33), (33): Xaa is C or S

SEQ ID NO: 20650 - protein, 41 aa, Artificial Sequence; identical to SEQ ID NO: 17546
  GFR-binding peptide
  MOD_RES (1), (35): Xaa is C or S
  MOD_RES (13), (14), (15), (16), (17): Xaa is A or G
  MOD_RES (18), (19), (20), (21): Xaa is A or G or is absent

SEQ ID NO: 20651 - protein, 35 aa, Artificial Sequence; identical to SEQ ID NO: 17547
  GFR-binding peptide
  MOD_RES (2), (2): Xaa is C or S
  MOD_RES (14), (15), (16), (17), (18): Xaa is A or G
  MOD_RES (19), (20), (21), (22): Xaa is A or G or is absent

SEQ ID NO: 20652 - protein, 36 aa, Artificial Sequence; identical to SEQ ID NO: 17548
  GFR-binding peptide
  MOD_RES (33), (33): Xaa is C or S
  MOD_RES (11), (12), (13), (14), (15): Xaa is A or G
  MOD_RES (16), (17), (18), (19): Xaa is A or G or is absent

SEQ ID NO: 20653 - protein, 42 aa, Artificial Sequence; identical to SEQ ID NO: 17549
  GFR-binding peptide
  MOD_RES (2), (39): Xaa is C or S
  MOD_RES (15), (16), (17), (18), (19): Xaa is A or G
  MOD_RES (20), (21), (22), (23): Xaa is A or G or is absent

SEQ ID NO: 20654 - protein, 41 aa, Artificial Sequence; identical to SEQ ID NO: 17550
  GFR-binding peptide
  MOD_RES (37), (37): Xaa is C or S
  MOD_RES (13), (14), (15), (16), (17): Xaa is A or G
  MOD_RES (18), (19), (20), (21): Xaa is A or G or is absent

SEQ ID NO: 20655 - protein, 39 aa, Artificial Sequence; identical to SEQ ID NO: 17551
  GFR-binding peptide
  MOD_RES (33), (33): Xaa is C or S

SEQ ID NO: 20656 - protein, 40 aa, Artificial Sequence; identical to SEQ ID NO: 17552
  GFR-binding peptide
  MOD_RES (2), (39): Xaa is C or S
  MOD_RES (15), (16), (17), (18), (19): Xaa is A or G
  MOD_RES (20), (21), (22), (23): Xaa is A or G or is absent

SEQ ID NO: 20657 - protein, 43 aa, Artificial Sequence; identical to SEQ ID NO: 17553
  GFR-binding peptide
  MOD_RES (2), (39): Xaa is C or S

SEQ ID NO: 20658 - protein, 37 aa, Artificial Sequence; identical to SEQ ID NO: 17554
  GFR-binding peptide
  MOD_RES (34), (34): Xaa is C or S

SEQ ID NO: 20659 - protein, 37 aa, Artificial Sequence; identical to SEQ ID NO: 17555
  GFR-binding peptide
  MOD_RES (1), (3), (37): Xaa is C or S

SEQ ID NO: 20660 - protein, 38 aa, Artificial Sequence; identical to SEQ ID NO: 17556
  GFR-binding peptide
  MOD_RES (2), (2): Xaa is C or S

SEQ ID NO: 20661 - protein, 41 aa, Artificial Sequence; identical to SEQ ID NO: 17557
  GFR-binding peptide
  MOD_RES (2), (4), (41): Xaa is C or S

SEQ ID NO: 20662 - protein, 41 aa, Artificial Sequence; identical to SEQ ID NO: 17558
  GFR-binding peptide
  MOD_RES (37), (37): Xaa is C or S

SEQ ID NO: 20663 - protein, 37 aa, Artificial Sequence; identical to SEQ ID NO: 17559
  GFR-binding peptide
  MOD_RES (2), (4): Xaa is C or S

SEQ ID NO: 20664 - protein, 39 aa, Artificial Sequence; identical to SEQ ID NO: 17560
  GFR-binding peptide
  MOD_RES (2), (4): Xaa is C or S

SEQ ID NO: 20665 - protein, 35 aa, Artificial Sequence; identical to SEQ ID NO: 17561
  GFR-binding peptide
  MOD_RES (1), (35): Xaa is C or S
  MOD_RES (13), (14), (15), (16), (17): Xaa is A or G
  MOD_RES (18), (19), (20), (21): Xaa is A or G or is absent

SEQ ID NO: 20666 - protein, 44 aa, Artificial Sequence; identical to SEQ ID NO: 17562
  GFR-binding peptide
  MOD_RES (2), (4), (38): Xaa is C or S

SEQ ID NO: 20667 - protein, 41 aa, Artificial Sequence; identical to SEQ ID NO: 17563
  GFR-binding peptide
  MOD_RES (2), (4), (38): Xaa is C or S

SEQ ID NO: 20668 - protein, 39 aa, Artificial Sequence; identical to SEQ ID NO: 17564
  GFR-binding peptide
  MOD_RES (2), (4), (38): Xaa is C or S
  MOD_RES (16), (17), (18), (19), (20): Xaa is A or G
  MOD_RES (21), (22), (23), (24): Xaa is A or G or is absent

SEQ ID NO: 20669 - protein, 36 aa, Artificial Sequence; identical to SEQ ID NO: 17565
  GFR-binding peptide
  MOD_RES (2), (2): Xaa is C or S
  MOD_RES (15), (16), (17), (18), (19): Xaa is A or G
  MOD_RES (20), (21), (22), (23): Xaa is A or G or is absent

SEQ ID NO: 20670 - protein, 41 aa, Artificial Sequence; identical to SEQ ID NO: 17566
  GFR-binding peptide
  MOD_RES (2), (39): Xaa is C or S
  MOD_RES (15), (16), (17), (18), (19): Xaa is A or G
  MOD_RES (20), (21), (22), (23): Xaa is A or G or is absent

SEQ ID NO: 20671 - protein, 38 aa, Artificial Sequence; identical to SEQ ID NO: 17567
  GFR-binding peptide
  MOD_RES (2), (36): Xaa is C or S
  MOD_RES (14), (15), (16), (17), (18): Xaa is A or G
  MOD_RES (19), (20), (21), (22): Xaa is A or G or is absent

SEQ ID NO: 20672 - protein, 35 aa, Artificial Sequence; identical to SEQ ID NO: 17568
  GFR-binding peptide
  MOD_RES (1), (35): Xaa is C or S

SEQ ID NO: 20673 - protein, 37 aa, Artificial Sequence; identical to SEQ ID NO: 17569
  GFR-binding peptide
  MOD_RES (1), (1): Xaa is C or S

SEQ ID NO: 20674 - protein, 45 aa, Artificial Sequence; identical to SEQ ID NO: 17570
  GFR-binding peptide
  MOD_RES (2), (4), (41): Xaa is C or S

SEQ ID NO: 20675 - protein, 44 aa, Artificial Sequence; identical to SEQ ID NO: 17571
  GFR-binding peptide
  MOD_RES (1), (3), (40): Xaa is C or S
  MOD_RES (16), (17), (18), (19), (20): Xaa is A or G
  MOD_RES (21), (22), (23), (24): Xaa is A or G or is absent

SEQ ID NO: 20676 - protein, 40 aa, Artificial Sequence; identical to SEQ ID NO: 17572
  GFR-binding peptide
  MOD_RES (1), (38): Xaa is C or S
  MOD_RES (14), (15), (16), (17), (18): Xaa is A or G
  MOD_RES (19), (20), (21), (22): Xaa is A or G or is absent

SEQ ID NO: 20677 - protein, 40 aa, Artificial Sequence; identical to SEQ ID NO: 17573
  GFR-binding peptide
  MOD_RES (1), (3), (40): Xaa is C or S

SEQ ID NO: 20678 - protein, 37 aa, Artificial Sequence; identical to SEQ ID NO: 17574
  GFR-binding peptide
  MOD_RES (35), (35): Xaa is C or S
  MOD_RES (11), (12), (13), (14), (15): Xaa is A or G
  MOD_RES (16), (17), (18), (19): Xaa is A or G or is absent

SEQ ID NO: 20679 - protein, 36 aa, Artificial Sequence; identical to SEQ ID NO: 17575
  GFR-binding peptide
  MOD_RES (34), (34): Xaa is C or S
  MOD_RES (12), (13), (14), (15), (16): Xaa is A or G
  MOD_RES (17), (18), (19), (20): Xaa is A or G or is absent

SEQ ID NO: 20680 - protein, 33 aa, Artificial Sequence; identical to SEQ ID NO: 17576
  GFR-binding peptide
  MOD_RES (33), (33): Xaa is C or S
  MOD_RES (11), (12), (13), (14), (15): Xaa is A or G
  MOD_RES (16), (17), (18), (19): Xaa is A or G or is absent

SEQ ID NO: 20681 - protein, 45 aa, Artificial Sequence; identical to SEQ ID NO: 17577
  GFR-binding peptide
  MOD_RES (2), (4), (41): Xaa is C or S
  MOD_RES (17), (18), (19), (20), (21): Xaa is A or G
  MOD_RES (22), (23), (24), (25): Xaa is A or G or is absent

SEQ ID NO: 20682 - protein, 44 aa, Artificial Sequence; identical to SEQ ID NO: 17578
  GFR-binding peptide
  MOD_RES (1), (3), (40): Xaa is C or S
  MOD_RES (16), (17), (18), (19), (20): Xaa is A or G
  MOD_RES (21), (22), (23), (24): Xaa is A or G or is absent

SEQ ID NO: 20683 - protein, 37 aa, Artificial Sequence; identical to SEQ ID NO: 17579
  GFR-binding peptide
  MOD_RES (34), (34): Xaa is C or S
  MOD_RES (12), (13), (14), (15), (16): Xaa is A or G
  MOD_RES (17), (18), (19), (20): Xaa is A or G or is absent

SEQ ID NO: 20684 - protein, 38 aa, Artificial Sequence; identical to SEQ ID NO: 17580
  GFR-binding peptide
  MOD_RES (2), (4), (38): Xaa is C or S

SEQ ID NO: 20685 - protein, 38 aa, Artificial Sequence; identical to SEQ ID NO: 17581
  GFR-binding peptide
  MOD_RES (2), (2): Xaa is C or S
  MOD_RES (15), (16), (17), (18), (19): Xaa is A or G
  MOD_RES (20), (21), (22), (23): Xaa is A or G or is absent

SEQ ID NO: 20686 - protein, 37 aa, Artificial Sequence; identical to SEQ ID NO: 17582
  GFR-binding peptide
  MOD_RES (36), (36): Xaa is C or S
  MOD_RES (12), (13), (14), (15), (16): Xaa is A or G
  MOD_RES (17), (18), (19), (20): Xaa is A or G or is absent

SEQ ID NO: 20687 - protein, 39 aa, Artificial Sequence; identical to SEQ ID NO: 17583
  GFR-binding peptide
  MOD_RES (1), (3): Xaa is C or S

SEQ ID NO: 20688 - protein, 38 aa, Artificial Sequence; identical to SEQ ID NO: 17584
  GFR-binding peptide
  MOD_RES (37), (37): Xaa is C or S
  MOD_RES (13), (14), (15), (16), (17): Xaa is A or G
  MOD_RES (18), (19), (20), (21): Xaa is A or G or is absent

SEQ ID NO: 20689 - protein, 38 aa, Artificial Sequence; identical to SEQ ID NO: 17585
  GFR-binding peptide
  MOD_RES (35), (35): Xaa is C or S

SEQ ID NO: 20690 - protein, 43 aa, Artificial Sequence; identical to SEQ ID NO: 17586
  GFR-binding peptide
  MOD_RES (1), (3), (37): Xaa is C or S

SEQ ID NO: 20691 - protein, 38 aa, Artificial Sequence; identical to SEQ ID NO: 17587
  GFR-binding peptide
  MOD_RES (1), (35): Xaa is C or S
  MOD_RES (13), (14), (15), (16), (17): Xaa is A or G
  MOD_RES (18), (19), (20), (21): Xaa is A or G or is absent

SEQ ID NO: 20692 - protein, 37 aa, Artificial Sequence; identical to SEQ ID NO: 17588
  GFR-binding peptide
  MOD_RES (33), (33): Xaa is C or S

SEQ ID NO: 20693 - protein, 40 aa, Artificial Sequence; identical to SEQ ID NO: 17589
  GFR-binding peptide
  MOD_RES (2), (4), (38): Xaa is C or S

SEQ ID NO: 20694 - protein, 38 aa, Artificial Sequence; identical to SEQ ID NO: 17590
  GFR-binding peptide
  MOD_RES (2), (2): Xaa is C or S
  MOD_RES (15), (16), (17), (18), (19): Xaa is A or G
  MOD_RES (20), (21), (22), (23): Xaa is A or G or is absent

SEQ ID NO: 20695 - protein, 35 aa, Artificial Sequence; identical to SEQ ID NO: 17591
  GFR-binding peptide
  MOD_RES (1), (1): Xaa is C or S
  MOD_RES (14), (15), (16), (17), (18): Xaa is A or G
  MOD_RES (19), (20), (21), (22): Xaa is A or G or is absent

SEQ ID NO: 20696 - protein, 41 aa, Artificial Sequence; identical to SEQ ID NO: 17592
  GFR-binding peptide
  MOD_RES (1), (38): Xaa is C or S
  MOD_RES (14), (15), (16), (17), (18): Xaa is A or G
  MOD_RES (19), (20), (21), (22): Xaa is A or G or is absent

SEQ ID NO: 20697 - protein, 36 aa, Artificial Sequence; identical to SEQ ID NO: 17593
  GFR-binding peptide
  MOD_RES (1), (1): Xaa is C or S

SEQ ID NO: 20698 - protein, 40 aa, Artificial Sequence; identical to SEQ ID NO: 17594
  GFR-binding peptide
  MOD_RES (2), (36): Xaa is C or S
  MOD_RES (14), (15), (16), (17), (18): Xaa is A or G
  MOD_RES (19), (20), (21), (22): Xaa is A or G or is absent

SEQ ID NO: 20699 - protein, 39 aa, Artificial Sequence; identical to SEQ ID NO: 17595
  GFR-binding peptide
  MOD_RES (2), (4): Xaa is C or S

SEQ ID NO: 20700 - protein, 35 aa, Artificial Sequence; identical to SEQ ID NO: 17596
  GFR-binding peptide
  MOD_RES (1), (1): Xaa is C or S

SEQ ID NO: 20701 - protein, 41 aa, Artificial Sequence; identical to SEQ ID NO: 17597
  GFR-binding peptide
  MOD_RES (37), (37): Xaa is C or S

SEQ ID NO: 20702 - protein, 42 aa, Artificial Sequence; identical to SEQ ID NO: 17598
  GFR-binding peptide
  MOD_RES (2), (4), (38): Xaa is C or S

SEQ ID NO: 20703 - protein, 39 aa, Artificial Sequence; identical to SEQ ID NO: 17599
  GFR-binding peptide
  MOD_RES (1), (38): Xaa is C or S

SEQ ID NO: 20704 - protein, 38 aa, Artificial Sequence; identical to SEQ ID NO: 17600
  GFR-binding peptide
  MOD_RES (1), (35): Xaa is C or S

SEQ ID NO: 20705 - protein, 36 aa, Artificial Sequence; identical to SEQ ID NO: 17601
  GFR-binding peptide
  MOD_RES (2), (2): Xaa is C or S
  MOD_RES (15), (16), (17), (18), (19): Xaa is A or G
  MOD_RES (20), (21), (22), (23): Xaa is A or G or is absent

SEQ ID NO: 20706 - protein, 36 aa, Artificial Sequence; identical to SEQ ID NO: 17602
  GFR-binding peptide
  MOD_RES (2), (2): Xaa is C or S

SEQ ID NO: 20707 - protein, 32 aa, Artificial Sequence; identical to SEQ ID NO: 17603
  GFR-binding peptide
  MOD_RES (11), (12), (13), (14), (15): Xaa is A or G
  MOD_RES (16), (17), (18), (19): Xaa is A or G or is absent

SEQ ID NO: 20708 - protein, 39 aa, Artificial Sequence; identical to SEQ ID NO: 17604
  GFR-binding peptide
  MOD_RES (2), (39): Xaa is C or S
  MOD_RES (15), (16), (17), (18), (19): Xaa is A or G
  MOD_RES (20), (21), (22), (23): Xaa is A or G or is absent

SEQ ID NO: 20709 - protein, 43 aa, Artificial Sequence; identical to SEQ ID NO: 17605
  GFR-binding peptide
  MOD_RES (1), (3), (37): Xaa is C or S

SEQ ID NO: 20710 - protein, 38 aa, Artificial Sequence; identical to SEQ ID NO: 17606
  GFR-binding peptide
  MOD_RES (35), (35): Xaa is C or S

SEQ ID NO: 20711 - protein, 40 aa, Artificial Sequence; identical to SEQ ID NO: 17607
  GFR-binding peptide
  MOD_RES (36), (36): Xaa is C or S
  MOD_RES (12), (13), (14), (15), (16): Xaa is A or G
  MOD_RES (17), (18), (19), (20): Xaa is A or G or is absent

SEQ ID NO: 20712 - protein, 32 aa, Artificial Sequence; identical to SEQ ID NO: 17608
  GFR-binding peptide

SEQ ID NO: 20713 - protein, 40 aa, Artificial Sequence; identical to SEQ ID NO: 17609
  GFR-binding peptide
  MOD_RES (2), (36): Xaa is C or S
  MOD_RES (14), (15), (16), (17), (18): Xaa is A or G
  MOD_RES (19), (20), (21), (22): Xaa is A or G or is absent

SEQ ID NO: 20714 - protein, 39 aa, Artificial Sequence; identical to SEQ ID NO: 17610
  GFR-binding peptide
  MOD_RES (33), (33): Xaa is C or S

SEQ ID NO: 20715 - protein, 42 aa, Artificial Sequence; identical to SEQ ID NO: 17611
  GFR-binding peptide
  MOD_RES (2), (4), (38): Xaa is C or S
  MOD_RES (16), (17), (18), (19), (20): Xaa is A or G
  MOD_RES (21), (22), (23), (24): Xaa is A or G or is absent

SEQ ID NO: 20716 - protein, 37 aa, Artificial Sequence; identical to SEQ ID NO: 17612
  GFR-binding peptide
  MOD_RES (2), (36): Xaa is C or S

SEQ ID NO: 20717 - protein, 37 aa, Artificial Sequence; identical to SEQ ID NO: 17613
  GFR-binding peptide
  MOD_RES (36), (36): Xaa is C or S
  MOD_RES (12), (13), (14), (15), (16): Xaa is A or G
  MOD_RES (17), (18), (19), (20): Xaa is A or G or is absent

SEQ ID NO: 20718 - protein, 36 aa, Artificial Sequence; identical to SEQ ID NO: 17614
  GFR-binding peptide
  MOD_RES (33), (33): Xaa is C or S
  MOD_RES (11), (12), (13), (14), (15): Xaa is A or G
  MOD_RES (16), (17), (18), (19): Xaa is A or G or is absent

SEQ ID NO: 20719 - protein, 40 aa, Artificial Sequence; identical to SEQ ID NO: 17615
  GFR-binding peptide
  MOD_RES (36), (36): Xaa is C or S
  MOD_RES (12), (13), (14), (15), (16): Xaa is A or G
  MOD_RES (17), (18), (19), (20): Xaa is A or G or is absent

SEQ ID NO: 20720 - protein, 37 aa, Artificial Sequence; identical to SEQ ID NO: 17616
  GFR-binding peptide
  MOD_RES (33), (33): Xaa is C or S

SEQ ID NO: 20721 - protein, 40 aa, Artificial Sequence; identical to SEQ ID NO: 17617
  GFR-binding peptide
  MOD_RES (37), (37): Xaa is C or S
  MOD_RES (13), (14), (15), (16), (17): Xaa is A or G
  MOD_RES (18), (19), (20), (21): Xaa is A or G or is absent

SEQ ID NO: 20722 - protein, 36 aa, Artificial Sequence; identical to SEQ ID NO: 17618
  GFR-binding peptide
  MOD_RES (1), (1): Xaa is C or S
  MOD_RES (14), (15), (16), (17), (18): Xaa is A or G
  MOD_RES (19), (20), (21), (22): Xaa is A or G or is absent

SEQ ID NO: 20723 - protein, 41 aa, Artificial Sequence; identical to SEQ ID NO: 17619
  GFR-binding peptide
  MOD_RES (1), (3), (40): Xaa is C or S

SEQ ID NO: 20724 - protein, 39 aa, Artificial Sequence; identical to SEQ ID NO: 17620
  GFR-binding peptide
  MOD_RES (1), (38): Xaa is C or S
  MOD_RES (14), (15), (16), (17), (18): Xaa is A or G
  MOD_RES (19), (20), (21), (22): Xaa is A or G or is absent

SEQ ID NO: 20725 - protein, 38 aa, Artificial Sequence; identical to SEQ ID NO: 17621
  GFR-binding peptide
  MOD_RES (2), (36): Xaa is C or S
  MOD_RES (14), (15), (16), (17), (18): Xaa is A or G
  MOD_RES (19), (20), (21), (22): Xaa is A or G or is absent

SEQ ID NO: 20726 - protein, 41 aa, Artificial Sequence; identical to SEQ ID NO: 17622
  GFR-binding peptide
  MOD_RES (1), (35): Xaa is C or S

SEQ ID NO: 20727 - protein, 38 aa, Artificial Sequence; identical to SEQ ID NO: 17623
  GFR-binding peptide
  MOD_RES (2), (4): Xaa is C or S

SEQ ID NO: 20728 - protein, 41 aa, Artificial Sequence; identical to SEQ ID NO: 17624
  GFR-binding peptide
  MOD_RES (2), (36): Xaa is C or S
  MOD_RES (14), (15), (16), (17), (18): Xaa is A or G
  MOD_RES (19), (20), (21), (22): Xaa is A or G or is absent

SEQ ID NO: 20729 - protein, 39 aa, Artificial Sequence; identical to SEQ ID NO: 17625
  GFR-binding peptide
  MOD_RES (1), (35): Xaa is C or S
  MOD_RES (13), (14), (15), (16), (17): Xaa is A or G
  MOD_RES (18), (19), (20), (21): Xaa is A or G or is absent

SEQ ID NO: 20730 - protein, 37 aa, Artificial Sequence; identical to SEQ ID NO: 17626
  GFR-binding peptide
  MOD_RES (35), (35): Xaa is C or S
  MOD_RES (11), (12), (13), (14), (15): Xaa is A or G
  MOD_RES (16), (17), (18), (19): Xaa is A or G or is absent

SEQ ID NO: 20731 - protein, 43 aa, Artificial Sequence; identical to SEQ ID NO: 17627
  GFR-binding peptide
  MOD_RES (2), (39): Xaa is C or S
  MOD_RES (15), (16), (17), (18), (19): Xaa is A or G
  MOD_RES (20), (21), (22), (23): Xaa is A or G or is absent

SEQ ID NO: 20732 - protein, 37 aa, Artificial Sequence; identical to SEQ ID NO: 17628
  GFR-binding peptide
  MOD_RES (1), (3): Xaa is C or S

SEQ ID NO: 20733 - protein, 37 aa, Artificial Sequence; identical to SEQ ID NO: 17629
  GFR-binding peptide
  MOD_RES (33), (33): Xaa is C or S

SEQ ID NO: 20734 - protein, 40 aa, Artificial Sequence; identical to SEQ ID NO: 17630
  GFR-binding peptide
  MOD_RES (2), (4), (38): Xaa is C or S

SEQ ID NO: 20735 - protein, 34 aa, Artificial Sequence; identical to SEQ ID NO: 17631
  GFR-binding peptide
  MOD_RES (13), (14), (15), (16), (17): Xaa is A or G
  MOD_RES (18), (19), (20), (21): Xaa is A or G or is absent

SEQ ID NO: 20736 - protein, 39 aa, Artificial Sequence; identical to SEQ ID NO: 17632
  GFR-binding peptide
  MOD_RES (2), (36): Xaa is C or S

SEQ ID NO: 20737 - protein, 38 aa, Artificial Sequence; identical to SEQ ID NO: 17633
  GFR-binding peptide
  MOD_RES (2), (2): Xaa is C or S
  MOD_RES (15), (16), (17), (18), (19): Xaa is A or G
  MOD_RES (20), (21), (22), (23): Xaa is A or G or is absent

SEQ ID NO: 20738 - protein, 41 aa, Artificial Sequence; identical to SEQ ID NO: 17634
  GFR-binding peptide
  MOD_RES (1), (35): Xaa is C or S

SEQ ID NO: 20739 - protein, 41 aa, Artificial Sequence; identical to SEQ ID NO: 17635
  GFR-binding peptide
  MOD_RES (2), (4), (41): Xaa is C or S
  MOD_RES (17), (18), (19), (20), (21): Xaa is A or G
  MOD_RES (22), (23), (24), (25): Xaa is A or G or is absent

SEQ ID NO: 20740 - protein, 43 aa, Artificial Sequence; identical to SEQ ID NO: 17636
  GFR-binding peptide
  MOD_RES (2), (4), (38): Xaa is C or S

SEQ ID NO: 20741 - protein, 36 aa, Artificial Sequence; identical to SEQ ID NO: 17637
  GFR-binding peptide
  MOD_RES (2), (2): Xaa is C or S

SEQ ID NO: 20742 - protein, 43 aa, Artificial Sequence; identical to SEQ ID NO: 17638
  GFR-binding peptide
  MOD_RES (2), (4), (38): Xaa is C or S

SEQ ID NO: 20743 - protein, 36 aa, Artificial Sequence; identical to SEQ ID NO: 17639
  GFR-binding peptide
  MOD_RES (34), (34): Xaa is C or S

SEQ ID NO: 20744 - protein, 33 aa, Artificial Sequence; identical to SEQ ID NO: 17640
  GFR-binding peptide
  MOD_RES (33), (33): Xaa is C or S

SEQ ID NO: 20745 - protein, 39 aa, Artificial Sequence; identical to SEQ ID NO: 17641
  GFR-binding peptide
  MOD_RES (36), (36): Xaa is C or S
  MOD_RES (12), (13), (14), (15), (16): Xaa is A or G
  MOD_RES (17), (18), (19), (20): Xaa is A or G or is absent

SEQ ID NO: 20746 - protein, 39 aa, Artificial Sequence; identical to SEQ ID NO: 17642
  GFR-binding peptide
  MOD_RES (1), (3): Xaa is C or S
  MOD_RES (16), (17), (18), (19), (20): Xaa is A or G
  MOD_RES (21), (22), (23), (24): Xaa is A or G or is absent

SEQ ID NO: 20747 - protein, 32 aa, Artificial Sequence; identical to SEQ ID NO: 17643
  GFR-binding peptide

SEQ ID NO: 20748 - protein, 45 aa, Artificial Sequence; identical to SEQ ID NO: 17644
  GFR-binding peptide
  MOD_RES (2), (4), (41): Xaa is C or S
  MOD_RES (17), (18), (19), (20), (21): Xaa is A or G
  MOD_RES (22), (23), (24), (25): Xaa is A or G or is absent

SEQ ID NO: 20749 - protein, 41 aa, Artificial Sequence; identical to SEQ ID NO: 17645
  GFR-binding peptide
  MOD_RES (1), (3), (40): Xaa is C or S
  MOD_RES (16), (17), (18), (19), (20): Xaa is A or G
  MOD_RES (21), (22), (23), (24): Xaa is A or G or is absent

SEQ ID NO: 20750 - protein, 35 aa, Artificial Sequence; identical to SEQ ID NO: 17646
  GFR-binding peptide
  MOD_RES (13), (14), (15), (16), (17): Xaa is A or G
  MOD_RES (18), (19), (20), (21): Xaa is A or G or is absent

SEQ ID NO: 20751 - protein, 38 aa, Artificial Sequence; identical to SEQ ID NO: 17647
  GFR-binding peptide
  MOD_RES (37), (37): Xaa is C or S

SEQ ID NO: 20752 - protein, 39 aa, Artificial Sequence; identical to SEQ ID NO: 17648
  GFR-binding peptide
  MOD_RES (2), (36): Xaa is C or S
  MOD_RES (14), (15), (16), (17), (18): Xaa is A or G
  MOD_RES (19), (20), (21), (22): Xaa is A or G or is absent

SEQ ID NO: 20753 - protein, 39 aa, Artificial Sequence; identical to SEQ ID NO: 17649
  GFR-binding peptide
  MOD_RES (1), (35): Xaa is C or S

SEQ ID NO: 20754 - protein, 33 aa, Artificial Sequence; identical to SEQ ID NO: 17650
  GFR-binding peptide
  MOD_RES (33), (33): Xaa is C or S

SEQ ID NO: 20755 - protein, 33 aa, Artificial Sequence; identical to SEQ ID NO: 17651
  GFR-binding peptide
  MOD_RES (33), (33): Xaa is C or S
  MOD_RES (11), (12), (13), (14), (15): Xaa is A or G
  MOD_RES (16), (17), (18), (19): Xaa is A or G or is absent

SEQ ID NO: 20756 - protein, 41 aa, Artificial Sequence; identical to SEQ ID NO: 17652
  GFR-binding peptide
  MOD_RES (1), (35): Xaa is C or S
  MOD_RES (13), (14), (15), (16), (17): Xaa is A or G
  MOD_RES (18), (19), (20), (21): Xaa is A or G or is absent

SEQ ID NO: 20757 - protein, 32 aa, Artificial Sequence; identical to SEQ ID NO: 17653
  GFR-binding peptide
  MOD_RES (11), (12), (13), (14), (15): Xaa is A or G
  MOD_RES (16), (17), (18), (19): Xaa is A or G or is absent

SEQ ID NO: 20758 - protein, 43 aa, Artificial Sequence; identical to SEQ ID NO: 17654
  GFR-binding peptide
  MOD_RES (2), (4), (41): Xaa is C or S
  MOD_RES (17), (18), (19), (20), (21): Xaa is A or G
  MOD_RES (22), (23), (24), (25): Xaa is A or G or is absent

SEQ ID NO: 20759 - protein, 42 aa, Artificial Sequence; identical to SEQ ID NO: 17655
  GFR-binding peptide
  MOD_RES (2), (4), (38): Xaa is C or S
  MOD_RES (16), (17), (18), (19), (20): Xaa is A or G
  MOD_RES (21), (22), (23), (24): Xaa is A or G or is absent

SEQ ID NO: 20760 - protein, 39 aa, Artificial Sequence; identical to SEQ ID NO: 17656
  GFR-binding peptide
  MOD_RES (35), (35): Xaa is C or S
  MOD_RES (11), (12), (13), (14), (15): Xaa is A or G
  MOD_RES (16), (17), (18), (19): Xaa is A or G or is absent

SEQ ID NO: 20761 - protein, 37 aa, Artificial Sequence; identical to SEQ ID NO: 17657
  GFR-binding peptide
  MOD_RES (1), (3): Xaa is C or S

SEQ ID NO: 20762 - protein, 35 aa, Artificial Sequence; identical to SEQ ID NO: 17658
  GFR-binding peptide
  MOD_RES (2), (2): Xaa is C or S

SEQ ID NO: 20763 - protein, 36 aa, Artificial Sequence; identical to SEQ ID NO: 17659
  GFR-binding peptide
  MOD_RES (2), (2): Xaa is C or S
  MOD_RES (15), (16), (17), (18), (19): Xaa is A or G
  MOD_RES (20), (21), (22), (23): Xaa is A or G or is absent

SEQ ID NO: 20764 - protein, 35 aa, Artificial Sequence; identical to SEQ ID NO: 17660
  GFR-binding peptide
  MOD_RES (35), (35): Xaa is C or S
  MOD_RES (11), (12), (13), (14), (15): Xaa is A or G
  MOD_RES (16), (17), (18), (19): Xaa is A or G or is absent

SEQ ID NO: 20765 - protein, 42 aa, Artificial Sequence; identical to SEQ ID NO: 17661
  GFR-binding peptide
  MOD_RES (2), (4), (38): Xaa is C or S
  MOD_RES (16), (17), (18), (19), (20): Xaa is A or G
  MOD_RES (21), (22), (23), (24): Xaa is A or G or is absent

SEQ ID NO: 20766 - protein, 35 aa, Artificial Sequence; identical to SEQ ID NO: 17662
  GFR-binding peptide
  MOD_RES (35), (35): Xaa is C or S
  MOD_RES (11), (12), (13), (14), (15): Xaa is A or G
  MOD_RES (16), (17), (18), (19): Xaa is A or G or is absent

SEQ ID NO: 20767 - protein, 32 aa, Artificial Sequence; identical to SEQ ID NO: 17663
  GFR-binding peptide

SEQ ID NO: 20768 - protein, 38 aa, Artificial Sequence; identical to SEQ ID NO: 17664
  GFR-binding peptide
  MOD_RES (1), (35): Xaa is C or S
  MOD_RES (13), (14), (15), (16), (17): Xaa is A or G
  MOD_RES (18), (19), (20), (21): Xaa is A or G or is absent

SEQ ID NO: 20769 - protein, 38 aa, Artificial Sequence; identical to SEQ ID NO: 17665
  GFR-binding peptide
  MOD_RES (1), (3), (37): Xaa is C or S

SEQ ID NO: 20770 - protein, 41 aa, Artificial Sequence; identical to SEQ ID NO: 17666
  GFR-binding peptide
  MOD_RES (2), (4), (41): Xaa is C or S

SEQ ID NO: 20771 - protein, 42 aa, Artificial Sequence; identical to SEQ ID NO: 17667
  GFR-binding peptide
  MOD_RES (1), (3), (37): Xaa is C or S

SEQ ID NO: 20772 - protein, 32 aa, Artificial Sequence; identical to SEQ ID NO: 17668
  GFR-binding peptide
  MOD_RES (11), (12), (13), (14), (15): Xaa is A or G
  MOD_RES (16), (17), (18), (19): Xaa is A or G or is absent

SEQ ID NO: 20773 - protein, 33 aa, Artificial Sequence; identical to SEQ ID NO: 17669
  GFR-binding peptide

SEQ ID NO: 20774 - protein, 42 aa, Artificial Sequence; identical to SEQ ID NO: 17670
  GFR-binding peptide
  MOD_RES (2), (4), (41): Xaa is C or S

SEQ ID NO: 20775 - protein, 45 aa, Artificial Sequence; identical to SEQ ID NO: 17671
  GFR-binding peptide
  MOD_RES (2), (4), (41): Xaa is C or S
  MOD_RES (17), (18), (19), (20), (21): Xaa is A or G
  MOD_RES (22), (23), (24), (25): Xaa is A or G or is absent

SEQ ID NO: 20776 - protein, 32 aa, Artificial Sequence; identical to SEQ ID NO: 17672
  GFR-binding peptide

SEQ ID NO: 20777 - protein, 39 aa, Artificial Sequence; identical to SEQ ID NO: 17673
  GFR-binding peptide
  MOD_RES (34), (34): Xaa is C or S

SEQ ID NO: 20778 - protein, 39 aa, Artificial Sequence; identical to SEQ ID NO: 17674
  GFR-binding peptide
  MOD_RES (37), (37): Xaa is C or S
  MOD_RES (13), (14), (15), (16), (17): Xaa is A or G
  MOD_RES (18), (19), (20), (21): Xaa is A or G or is absent

SEQ ID NO: 20779 - protein, 32 aa, Artificial Sequence; identical to SEQ ID NO: 17675
  GFR-binding peptide

SEQ ID NO: 20780 - protein, 37 aa, Artificial Sequence; identical to SEQ ID NO: 17676
  GFR-binding peptide
  MOD_RES (37), (37): Xaa is C or S
  MOD_RES (13), (14), (15), (16), (17): Xaa is A or G
  MOD_RES (18), (19), (20), (21): Xaa is A or G or is absent

SEQ ID NO: 20781 - protein, 35 aa, Artificial Sequence; identical to SEQ ID NO: 17677
  GFR-binding peptide

SEQ ID NO: 20782 - protein, 36 aa, Artificial Sequence; identical to SEQ ID NO: 17678
  GFR-binding peptide

SEQ ID NO: 20783 - protein, 36 aa, Artificial Sequence; identical to SEQ ID NO: 17679
  GFR-binding peptide
  MOD_RES (34), (34): Xaa is C or S

SEQ ID NO: 20784 - protein, 40 aa, Artificial Sequence; identical to SEQ ID NO: 17680
  GFR-binding peptide
  MOD_RES (2), (39): Xaa is C or S
  MOD_RES (15), (16), (17), (18), (19): Xaa is A or G
  MOD_RES (20), (21), (22), (23): Xaa is A or G or is absent

SEQ ID NO: 20785 - protein, 37 aa, Artificial Sequence; identical to SEQ ID NO: 17681
  GFR-binding peptide
  MOD_RES (2), (4): Xaa is C or S
  MOD_RES (16), (17), (18), (19), (20): Xaa is A or G
  MOD_RES (21), (22), (23), (24): Xaa is A or G or is absent

SEQ ID NO: 20786 - protein, 41 aa, Artificial Sequence; identical to SEQ ID NO: 17682
  GFR-binding peptide
  MOD_RES (2), (4), (41): Xaa is C or S
  MOD_RES (17), (18), (19), (20), (21): Xaa is A or G
  MOD_RES (22), (23), (24), (25): Xaa is A or G or is absent

SEQ ID NO: 20787 - protein, 43 aa, Artificial Sequence; identical to SEQ ID NO: 17683
  GFR-binding peptide
  MOD_RES (2), (4), (38): Xaa is C or S
  MOD_RES (16), (17), (18), (19), (20): Xaa is A or G
  MOD_RES (21), (22), (23), (24): Xaa is A or G or is absent

SEQ ID NO: 20788 - protein, 40 aa, Artificial Sequence; identical to SEQ ID NO: 17684
  GFR-binding peptide
  MOD_RES (2), (39): Xaa is C or S

SEQ ID NO: 20789 - protein, 32 aa, Artificial Sequence; identical to SEQ ID NO: 17685
  GFR-binding peptide
  MOD_RES (11), (12), (13), (14), (15): Xaa is A or G
  MOD_RES (16), (17), (18), (19): Xaa is A or G or is absent

SEQ ID NO: 20790 - protein, 35 aa, Artificial Sequence; identical to SEQ ID NO: 17686
  GFR-binding peptide
  MOD_RES (13), (14), (15), (16), (17): Xaa is A or G
  MOD_RES (18), (19), (20), (21): Xaa is A or G or is absent

SEQ ID NO: 20791 - protein, 37 aa, Artificial Sequence; identical to SEQ ID NO: 17687
  GFR-binding peptide
  MOD_RES (2), (4): Xaa is C or S

SEQ ID NO: 20792 - protein, 34 aa, Artificial Sequence; identical to SEQ ID NO: 17688
  GFR-binding peptide
  MOD_RES (34), (34): Xaa is C or S

SEQ ID NO: 20793 - protein, 39 aa, Artificial Sequence; identical to SEQ ID NO: 17689
  GFR-binding peptide
  MOD_RES (2), (4): Xaa is C or S

SEQ ID NO: 20794 - protein, 38 aa, Artificial Sequence; identical to SEQ ID NO: 17690
  GFR-binding peptide
  MOD_RES (1), (3): Xaa is C or S
  MOD_RES (16), (17), (18), (19), (20): Xaa is A or G
  MOD_RES (21), (22), (23), (24): Xaa is A or G or is absent

SEQ ID NO: 20795 - protein, 38 aa, Artificial Sequence; identical to SEQ ID NO: 17691
  GFR-binding peptide
  MOD_RES (2), (4): Xaa is C or S

SEQ ID NO: 20796 - protein, 34 aa, Artificial Sequence; identical to SEQ ID NO: 17692
  GFR-binding peptide
  MOD_RES (12), (13), (14), (15), (16): Xaa is A or G
  MOD_RES (17), (18), (19), (20): Xaa is A or G or is absent

SEQ ID NO: 20797 - protein, 37 aa, Artificial Sequence; identical to SEQ ID NO: 17693
  GFR-binding peptide
  MOD_RES (2), (36): Xaa is C or S
  MOD_RES (14), (15), (16), (17), (18): Xaa is A or G
  MOD_RES (19), (20), (21), (22): Xaa is A or G or is absent

SEQ ID NO: 20798 - protein, 43 aa, Artificial Sequence; identical to SEQ ID NO: 17694
  GFR-binding peptide
  MOD_RES (2), (39): Xaa is C or S
  MOD_RES (15), (16), (17), (18), (19): Xaa is A or G
  MOD_RES (20), (21), (22), (23): Xaa is A or G or is absent

SEQ ID NO: 20799 - protein, 33 aa, Artificial Sequence; identical to SEQ ID NO: 17695
  GFR-binding peptide
  MOD_RES (33), (33): Xaa is C or S

SEQ ID NO: 20800 - protein, 42 aa, Artificial Sequence; identical to SEQ ID NO: 17696
  GFR-binding peptide
  MOD_RES (2), (4), (41): Xaa is C or S
  MOD_RES (17), (18), (19), (20), (21): Xaa is A or G
  MOD_RES (22), (23), (24), (25): Xaa is A or G or is absent

SEQ ID NO: 20801 - protein, 41 aa, Artificial Sequence; identical to SEQ ID NO: 17697
  GFR-binding peptide
  MOD_RES (2), (4), (38): Xaa is C or S

SEQ ID NO: 20802 - protein, 39 aa, Artificial Sequence; identical to SEQ ID NO: 17698
  GFR-binding peptide
  MOD_RES (2), (36): Xaa is C or S
  MOD_RES (14), (15), (16), (17), (18): Xaa is A or G
  MOD_RES (19), (20), (21), (22): Xaa is A or G or is absent

SEQ ID NO: 20803 - protein, 38 aa, Artificial Sequence; identical to SEQ ID NO: 17699
  GFR-binding peptide
  MOD_RES (2), (4): Xaa is C or S
  MOD_RES (17), (18), (19), (20), (21): Xaa is A or G
  MOD_RES (22), (23), (24), (25): Xaa is A or G or is absent

SEQ ID NO: 20804 - protein, 41 aa, Artificial Sequence; identical to SEQ ID NO: 17700
  GFR-binding peptide
  MOD_RES (1), (35): Xaa is C or S

SEQ ID NO: 20805 - protein, 41 aa, Artificial Sequence; identical to SEQ ID NO: 17701
  GFR-binding peptide
  MOD_RES (1), (35): Xaa is C or S
  MOD_RES (13), (14), (15), (16), (17): Xaa is A or G
  MOD_RES (18), (19), (20), (21): Xaa is A or G or is absent

SEQ ID NO: 20806 - protein, 39 aa, Artificial Sequence; identical to SEQ ID NO: 17702
  GFR-binding peptide
  MOD_RES (2), (4): Xaa is C or S

SEQ ID NO: 20807 - protein, 39 aa, Artificial Sequence; identical to SEQ ID NO: 17703
  GFR-binding peptide
  MOD_RES (2), (4), (38): Xaa is C or S
  MOD_RES (16), (17), (18), (19), (20): Xaa is A or G
  MOD_RES (21), (22), (23), (24): Xaa is A or G or is absent

SEQ ID NO: 20808 - protein, 40 aa, Artificial Sequence; identical to SEQ ID NO: 17704
  GFR-binding peptide
  MOD_RES (2), (4): Xaa is C or S
  MOD_RES (17), (18), (19), (20), (21): Xaa is A or G
  MOD_RES (22), (23), (24), (25): Xaa is A or G or is absent

SEQ ID NO: 20809 - protein, 34 aa, Artificial Sequence; identical to SEQ ID NO: 17705
  GFR-binding peptide
  MOD_RES (1), (1): Xaa is C or S
  MOD_RES (13), (14), (15), (16), (17): Xaa is A or G
  MOD_RES (18), (19), (20), (21): Xaa is A or G or is absent

SEQ ID NO: 20810 - protein, 37 aa, Artificial Sequence; identical to SEQ ID NO: 17706
  GFR-binding peptide
  MOD_RES (36), (36): Xaa is C or S
  MOD_RES (12), (13), (14), (15), (16): Xaa is A or G
  MOD_RES (17), (18), (19), (20): Xaa is A or G or is absent

SEQ ID NO: 20811 - protein, 40 aa, Artificial Sequence; identical to SEQ ID NO: 17707
  GFR-binding peptide
  MOD_RES (1), (3), (37): Xaa is C or S

SEQ ID NO: 20812 - protein, 39 aa, Artificial Sequence; identical to SEQ ID NO: 17708
  GFR-binding peptide
  MOD_RES (1), (3), (37): Xaa is C or S
  MOD_RES (15), (16), (17), (18), (19): Xaa is A or G
  MOD_RES (20), (21), (22), (23): Xaa is A or G or is absent

SEQ ID NO: 20813 - protein, 38 aa, Artificial Sequence; identical to SEQ ID NO: 17709
  GFR-binding peptide
  MOD_RES (2), (2): Xaa is C or S

SEQ ID NO: 20814 - protein, 42 aa, Artificial Sequence; identical to SEQ ID NO: 17710
  GFR-binding peptide
  MOD_RES (2), (39): Xaa is C or S
  MOD_RES (15), (16), (17), (18), (19): Xaa is A or G
  MOD_RES (20), (21), (22), (23): Xaa is A or G or is absent

SEQ ID NO: 20815 - protein, 37 aa, Artificial Sequence; identical to SEQ ID NO: 17711
  GFR-binding peptide
  MOD_RES (36), (36): Xaa is C or S
  MOD_RES (12), (13), (14), (15), (16): Xaa is A or G
  MOD_RES (17), (18), (19), (20): Xaa is A or G or is absent

SEQ ID NO: 20816 - protein, 32 aa, Artificial Sequence; identical to SEQ ID NO: 17712
  GFR-binding peptide
  MOD_RES (11), (12), (13), (14), (15): Xaa is A or G
  MOD_RES (16), (17), (18), (19): Xaa is A or G or is absent

SEQ ID NO: 20817 - protein, 32 aa, Artificial Sequence; identical to SEQ ID NO: 17713
  GFR-binding peptide
  MOD_RES (11), (12), (13), (14), (15): Xaa is A or G
  MOD_RES (16), (17), (18), (19): Xaa is A or G or is absent

SEQ ID NO: 20818 - protein, 35 aa, Artificial Sequence; identical to SEQ ID NO: 17714
  GFR-binding peptide
  MOD_RES (12), (13), (14), (15), (16): Xaa is A or G
  MOD_RES (17), (18), (19), (20): Xaa is A or G or is absent

SEQ ID NO: 20819 - protein, 36 aa, Artificial Sequence; identical to SEQ ID NO: 17715
  GFR-binding peptide
  MOD_RES (33), (33): Xaa is C or S
  MOD_RES (11), (12), (13), (14), (15): Xaa is A or G
  MOD_RES (16), (17), (18), (19): Xaa is A or G or is absent

SEQ ID NO: 20820 - protein, 35 aa, Artificial Sequence; identical to SEQ ID NO: 17716
  GFR-binding peptide
  MOD_RES (34), (34): Xaa is C or S

SEQ ID NO: 20821 - protein, 41 aa, Artificial Sequence; identical to SEQ ID NO: 17717
  GFR-binding peptide
  MOD_RES (1), (3), (37): Xaa is C or S

SEQ ID NO: 20822 - protein, 36 aa, Artificial Sequence; identical to SEQ ID NO: 17718
  GFR-binding peptide
  MOD_RES (34), (34): Xaa is C or S
  MOD_RES (12), (13), (14), (15), (16): Xaa is A or G
  MOD_RES (17), (18), (19), (20): Xaa is A or G or is absent

SEQ ID NO: 20823 - protein, 36 aa, Artificial Sequence; identical to SEQ ID NO: 17719
  GFR-binding peptide
  MOD_RES (36), (36): Xaa is C or S

SEQ ID NO: 20824 - protein, 41 aa, Artificial Sequence; identical to SEQ ID NO: 17720
  GFR-binding peptide
  MOD_RES (2), (36): Xaa is C or S
  MOD_RES (14), (15), (16), (17), (18): Xaa is A or G
  MOD_RES (19), (20), (21), (22): Xaa is A or G or is absent

SEQ ID NO: 20825 - protein, 34 aa, Artificial Sequence; identical to SEQ ID NO: 17721
  GFR-binding peptide
  MOD_RES (11), (12), (13), (14), (15): Xaa is A or G
  MOD_RES (16), (17), (18), (19): Xaa is A or G or is absent

SEQ ID NO: 20826 - protein, 38 aa, Artificial Sequence; identical to SEQ ID NO: 17722
  GFR-binding peptide
  MOD_RES (2), (4): Xaa is C or S

SEQ ID NO: 20827 - protein, 41 aa, Artificial Sequence; identical to SEQ ID NO: 17723
  GFR-binding peptide
  MOD_RES (1), (38): Xaa is C or S
  MOD_RES (14), (15), (16), (17), (18): Xaa is A or G
  MOD_RES (19), (20), (21), (22): Xaa is A or G or is absent

SEQ ID NO: 20828 - protein, 38 aa, Artificial Sequence; identical to SEQ ID NO: 17724
  GFR-binding peptide
  MOD_RES (1), (38): Xaa is C or S
  MOD_RES (14), (15), (16), (17), (18): Xaa is A or G
  MOD_RES (19), (20), (21), (22): Xaa is A or G or is absent

SEQ ID NO: 20829 - protein, 38 aa, Artificial Sequence; identical to SEQ ID NO: 17725
  GFR-binding peptide
  MOD_RES (35), (35): Xaa is C or S

SEQ ID NO: 20830 - protein, 35 aa, Artificial Sequence; identical to SEQ ID NO: 17726
  GFR-binding peptide
  MOD_RES (34), (34): Xaa is C or S
  MOD_RES (12), (13), (14), (15), (16): Xaa is A or G
  MOD_RES (17), (18), (19), (20): Xaa is A or G or is absent

SEQ ID NO: 20831 - protein, 33 aa, Artificial Sequence; identical to SEQ ID NO: 17727
  GFR-binding peptide
  MOD_RES (33), (33): Xaa is C or S
  MOD_RES (11), (12), (13), (14), (15): Xaa is A or G
  MOD_RES (16), (17), (18), (19): Xaa is A or G or is absent

SEQ ID NO: 20832 - protein, 39 aa, Artificial Sequence; identical to SEQ ID NO: 17728
  GFR-binding peptide
  MOD_RES (2), (39): Xaa is C or S
  MOD_RES (15), (16), (17), (18), (19): Xaa is A or G
  MOD_RES (20), (21), (22), (23): Xaa is A or G or is absent

SEQ ID NO: 20833 - protein, 35 aa, Artificial Sequence; identical to SEQ ID NO: 17729
  GFR-binding peptide
  MOD_RES (35), (35): Xaa is C or S

SEQ ID NO: 20834 - protein, 37 aa, Artificial Sequence; identical to SEQ ID NO: 17730
  GFR-binding peptide
  MOD_RES (2), (4): Xaa is C or S
  MOD_RES (16), (17), (18), (19), (20): Xaa is A or G
  MOD_RES (21), (22), (23), (24): Xaa is A or G or is absent

SEQ ID NO: 20835 - protein, 33 aa, Artificial Sequence; identical to SEQ ID NO: 17731
  GFR-binding peptide

SEQ ID NO: 20836 - protein, 43 aa, Artificial Sequence; identical to SEQ ID NO: 17732
  GFR-binding peptide
  MOD_RES (1), (3), (40): Xaa is C or S
  MOD_RES (16), (17), (18), (19), (20): Xaa is A or G
  MOD_RES (21), (22), (23), (24): Xaa is A or G or is absent

SEQ ID NO: 20837 - protein, 39 aa, Artificial Sequence; identical to SEQ ID NO: 17733
  GFR-binding peptide
  MOD_RES (1), (35): Xaa is C or S
  MOD_RES (13), (14), (15), (16), (17): Xaa is A or G
  MOD_RES (18), (19), (20), (21): Xaa is A or G or is absent

SEQ ID NO: 20838 - protein, 41 aa, Artificial Sequence; identical to SEQ ID NO: 17734
  GFR-binding peptide
  MOD_RES (37), (37): Xaa is C or S
  MOD_RES (13), (14), (15), (16), (17): Xaa is A or G
  MOD_RES (18), (19), (20), (21): Xaa is A or G or is absent

SEQ ID NO: 20839 - protein, 44 aa, Artificial Sequence; identical to SEQ ID NO: 17735
  GFR-binding peptide
  MOD_RES (2), (4), (38): Xaa is C or S
  MOD_RES (16), (17), (18), (19), (20): Xaa is A or G
  MOD_RES (21), (22), (23), (24): Xaa is A or G or is absent

SEQ ID NO: 20840 - protein, 36 aa, Artificial Sequence; identical to SEQ ID NO: 17736
  GFR-binding peptide
  MOD_RES (2), (36): Xaa is C or S

SEQ ID NO: 20841 - protein, 35 aa, Artificial Sequence; identical to SEQ ID NO: 17737
  GFR-binding peptide

SEQ ID NO: 20842 - protein, 38 aa, Artificial Sequence; identical to SEQ ID NO: 17738
  GFR-binding peptide
  MOD_RES (1), (3), (37): Xaa is C or S
  MOD_RES (15), (16), (17), (18), (19): Xaa is A or G
  MOD_RES (20), (21), (22), (23): Xaa is A or G or is absent

SEQ ID NO: 20843 - protein, 36 aa, Artificial Sequence; identical to SEQ ID NO: 17739
  GFR-binding peptide
  MOD_RES (1), (1): Xaa is C or S
  MOD_RES (14), (15), (16), (17), (18): Xaa is A or G
  MOD_RES (19), (20), (21), (22): Xaa is A or G or is absent

SEQ ID NO: 20844 - protein, 35 aa, Artificial Sequence; identical to SEQ ID NO: 17740
  GFR-binding peptide
  MOD_RES (34), (34): Xaa is C or S
  MOD_RES (12), (13), (14), (15), (16): Xaa is A or G
  MOD_RES (17), (18), (19), (20): Xaa is A or G or is absent

SEQ ID NO: 20845 - protein, 36 aa, Artificial Sequence; identical to SEQ ID NO: 17741
  GFR-binding peptide
  MOD_RES (2), (2): Xaa is C or S

SEQ ID NO: 20846 - protein, 42 aa, Artificial Sequence; identical to SEQ ID NO: 17742
  GFR-binding peptide
  MOD_RES (1), (3), (40): Xaa is C or S

SEQ ID NO: 20847 - protein, 38 aa, Artificial Sequence; identical to SEQ ID NO: 17743
  GFR-binding peptide
  MOD_RES (2), (36): Xaa is C or S
  MOD_RES (14), (15), (16), (17), (18): Xaa is A or G
  MOD_RES (19), (20), (21), (22): Xaa is A or G or is absent

SEQ ID NO: 20848 - protein, 36 aa, Artificial Sequence; identical to SEQ ID NO: 17744
  GFR-binding peptide
  MOD_RES (1), (1): Xaa is C or S
  MOD_RES (14), (15), (16), (17), (18): Xaa is A or G
  MOD_RES (19), (20), (21), (22): Xaa is A or G or is absent

SEQ ID NO: 20849 - protein, 37 aa, Artificial Sequence; identical to SEQ ID NO: 17745
  GFR-binding peptide
  MOD_RES (34), (34): Xaa is C or S
  MOD_RES (12), (13), (14), (15), (16): Xaa is A or G
  MOD_RES (17), (18), (19), (20): Xaa is A or G or is absent

SEQ ID NO: 20850 - protein, 34 aa, Artificial Sequence; identical to SEQ ID NO: 17746
  GFR-binding peptide

SEQ ID NO: 20851 - protein, 38 aa, Artificial Sequence; identical to SEQ ID NO: 17747
  GFR-binding peptide
  MOD_RES (1), (35): Xaa is C or S

SEQ ID NO: 20852 - protein, 44 aa, Artificial Sequence; identical to SEQ ID NO: 17748
  GFR-binding peptide
  MOD_RES (2), (4), (41): Xaa is C or S

SEQ ID NO: 20853 - protein, 33 aa, Artificial Sequence; identical to SEQ ID NO: 17749
  GFR-binding peptide
  MOD_RES (33), (33): Xaa is C or S
  MOD_RES (11), (12), (13), (14), (15): Xaa is A or G
  MOD_RES (16), (17), (18), (19): Xaa is A or G or is absent

SEQ ID NO: 20854 - protein, 39 aa, Artificial Sequence; identical to SEQ ID NO: 17750
  GFR-binding peptide
  MOD_RES (35), (35): Xaa is C or S
  MOD_RES (11), (12), (13), (14), (15): Xaa is A or G
  MOD_RES (16), (17), (18), (19): Xaa is A or G or is absent

SEQ ID NO: 20855 - protein, 42 aa, Artificial Sequence; identical to SEQ ID NO: 17751
  GFR-binding peptide
  MOD_RES (1), (3), (40): Xaa is C or S

SEQ ID NO: 20856 - protein, 36 aa, Artificial Sequence; identical to SEQ ID NO: 17752
  GFR-binding peptide
  MOD_RES (34), (34): Xaa is C or S
  MOD_RES (12), (13), (14), (15), (16): Xaa is A or G
  MOD_RES (17), (18), (19), (20): Xaa is A or G or is absent

SEQ ID NO: 20857 - protein, 43 aa, Artificial Sequence; identical to SEQ ID NO: 17753
  GFR-binding peptide
  MOD_RES (2), (4), (41): Xaa is C or S
  MOD_RES (17), (18), (19), (20), (21): Xaa is A or G
  MOD_RES (22), (23), (24), (25): Xaa is A or G or is absent

SEQ ID NO: 20858 - protein, 42 aa, Artificial Sequence; identical to SEQ ID NO: 17754
  GFR-binding peptide
  MOD_RES (1), (3), (37): Xaa is C or S

SEQ ID NO: 20859 - protein, 37 aa, Artificial Sequence; identical to SEQ ID NO: 17755
  GFR-binding peptide
  MOD_RES (1), (3), (37): Xaa is C or S

SEQ ID NO: 20860 - protein, 41 aa, Artificial Sequence; identical to SEQ ID NO: 17756
  GFR-binding peptide
  MOD_RES (37), (37): Xaa is C or S

SEQ ID NO: 20861 - protein, 38 aa, Artificial Sequence; identical to SEQ ID NO: 17757
  GFR-binding peptide
  MOD_RES (1), (3): Xaa is C or S

SEQ ID NO: 20862 - protein, 36 aa, Artificial Sequence; identical to SEQ ID NO: 17758
  GFR-binding peptide
  MOD_RES (33), (33): Xaa is C or S

SEQ ID NO: 20863 - protein, 37 aa, Artificial Sequence; identical to SEQ ID NO: 17759
  GFR-binding peptide
  MOD_RES (36), (36): Xaa is C or S

SEQ ID NO: 20864 - protein, 41 aa, Artificial Sequence; identical to SEQ ID NO: 17760
  GFR-binding peptide
  MOD_RES (37), (37): Xaa is C or S
  MOD_RES (13), (14), (15), (16), (17): Xaa is A or G
  MOD_RES (18), (19), (20), (21): Xaa is A or G or is absent

SEQ ID NO: 20865 - protein, 39 aa, Artificial Sequence; identical to SEQ ID NO: 17761
  GFR-binding peptide
  MOD_RES (1), (3): Xaa is C or S
  MOD_RES (16), (17), (18), (19), (20): Xaa is A or G
  MOD_RES (21), (22), (23), (24): Xaa is A or G or is absent

SEQ ID NO: 20866 - protein, 43 aa, Artificial Sequence; identical to SEQ ID NO: 17762
  GFR-binding peptide
  MOD_RES (1), (3), (40): Xaa is C or S

SEQ ID NO: 20867 - protein, 36 aa, Artificial Sequence; identical to SEQ ID NO: 17763
  GFR-binding peptide
  MOD_RES (33), (33): Xaa is C or S

SEQ ID NO: 20868 - protein, 41 aa, Artificial Sequence; identical to SEQ ID NO: 17764
  GFR-binding peptide
  MOD_RES (1), (3), (40): Xaa is C or S
  MOD_RES (16), (17), (18), (19), (20): Xaa is A or G
  MOD_RES (21), (22), (23), (24): Xaa is A or G or is absent

SEQ ID NO: 20869 - protein, 36 aa, Artificial Sequence; identical to SEQ ID NO: 17765
  GFR-binding peptide
  MOD_RES (34), (34): Xaa is C or S
  MOD_RES (12), (13), (14), (15), (16): Xaa is A or G
  MOD_RES (17), (18), (19), (20): Xaa is A or G or is absent

SEQ ID NO: 20870 - protein, 35 aa, Artificial Sequence; identical to SEQ ID NO: 17766
  GFR-binding peptide
  MOD_RES (2), (2): Xaa is C or S
  MOD_RES (14), (15), (16), (17), (18): Xaa is A or G
  MOD_RES (19), (20), (21), (22): Xaa is A or G or is absent

SEQ ID NO: 20871 - protein, 36 aa, Artificial Sequence; identical to SEQ ID NO: 17767
  GFR-binding peptide
  MOD_RES (2), (36): Xaa is C or S
  MOD_RES (14), (15), (16), (17), (18): Xaa is A or G
  MOD_RES (19), (20), (21), (22): Xaa is A or G or is absent

SEQ ID NO: 20872 - protein, 39 aa, Artificial Sequence; identical to SEQ ID NO: 17768
  GFR-binding peptide
  MOD_RES (37), (37): Xaa is C or S

SEQ ID NO: 20873 - protein, 41 aa, Artificial Sequence; identical to SEQ ID NO: 17769
  GFR-binding peptide
  MOD_RES (2), (36): Xaa is C or S

SEQ ID NO: 20874 - protein, 38 aa, Artificial Sequence; identical to SEQ ID NO: 17770
  GFR-binding peptide
  MOD_RES (37), (37): Xaa is C or S
  MOD_RES (13), (14), (15), (16), (17): Xaa is A or G
  MOD_RES (18), (19), (20), (21): Xaa is A or G or is absent

SEQ ID NO: 20875 - protein, 36 aa, Artificial Sequence; identical to SEQ ID NO: 17771
  GFR-binding peptide
  MOD_RES (33), (33): Xaa is C or S

SEQ ID NO: 20876 - protein, 36 aa, Artificial Sequence; identical to SEQ ID NO: 17772
  GFR-binding peptide
  MOD_RES (33), (33): Xaa is C or S
  MOD_RES (11), (12), (13), (14), (15): Xaa is A or G
  MOD_RES (16), (17), (18), (19): Xaa is A or G or is absent

SEQ ID NO: 20877 - protein, 35 aa, Artificial Sequence; identical to SEQ ID NO: 17773
  GFR-binding peptide
  MOD_RES (1), (35): Xaa is C or S
  MOD_RES (13), (14), (15), (16), (17): Xaa is A or G
  MOD_RES (18), (19), (20), (21): Xaa is A or G or is absent

SEQ ID NO: 20878 - protein, 40 aa, Artificial Sequence; identical to SEQ ID NO: 17774
  GFR-binding peptide
  MOD_RES (1), (38): Xaa is C or S
  MOD_RES (14), (15), (16), (17), (18): Xaa is A or G
  MOD_RES (19), (20), (21), (22): Xaa is A or G or is absent

SEQ ID NO: 20879 - protein, 43 aa, Artificial Sequence; identical to SEQ ID NO: 17775
  GFR-binding peptide
  MOD_RES (1), (3), (40): Xaa is C or S
  MOD_RES (16), (17), (18), (19), (20): Xaa is A or G
  MOD_RES (21), (22), (23), (24): Xaa is A or G or is absent

SEQ ID NO: 20880 - protein, 38 aa, Artificial Sequence; identical to SEQ ID NO: 17776
  GFR-binding peptide
  MOD_RES (1), (3), (37): Xaa is C or S

SEQ ID NO: 20881 - protein, 34 aa, Artificial Sequence; identical to SEQ ID NO: 17777
  GFR-binding peptide
  MOD_RES (13), (14), (15), (16), (17): Xaa is A or G
  MOD_RES (18), (19), (20), (21): Xaa is A or G or is absent

SEQ ID NO: 20882 - protein, 34 aa, Artificial Sequence; identical to SEQ ID NO: 17778
  GFR-binding peptide
  MOD_RES (1), (1): Xaa is C or S

SEQ ID NO: 20883 - protein, 37 aa, Artificial Sequence; identical to SEQ ID NO: 17779
  GFR-binding peptide
  MOD_RES (36), (36): Xaa is C or S

SEQ ID NO: 20884 - protein, 39 aa, Artificial Sequence; identical to SEQ ID NO: 17780
  GFR-binding peptide
  MOD_RES (1), (38): Xaa is C or S

SEQ ID NO: 20885 - protein, 36 aa, Artificial Sequence; identical to SEQ ID NO: 17781
  GFR-binding peptide

SEQ ID NO: 20886 - protein, 35 aa, Artificial Sequence; identical to SEQ ID NO: 17782
  GFR-binding peptide
  MOD_RES (1), (1): Xaa is C or S
  MOD_RES (14), (15), (16), (17), (18): Xaa is A or G
  MOD_RES (19), (20), (21), (22): Xaa is A or G or is absent

SEQ ID NO: 20887 - protein, 44 aa, Artificial Sequence; identical to SEQ ID NO: 17783
  GFR-binding peptide
  MOD_RES (2), (4), (41): Xaa is C or S

SEQ ID NO: 20888 - protein, 36 aa, Artificial Sequence; identical to SEQ ID NO: 17784
  GFR-binding peptide
  MOD_RES (33), (33): Xaa is C or S

SEQ ID NO: 20889 - protein, 40 aa, Artificial Sequence; identical to SEQ ID NO: 17785
  GFR-binding peptide
  MOD_RES (2), (4), (38): Xaa is C or S

SEQ ID NO: 20890 - protein, 43 aa, Artificial Sequence; identical to SEQ ID NO: 17786
  GFR-binding peptide
  MOD_RES (1), (3), (37): Xaa is C or S
  MOD_RES (15), (16), (17), (18), (19): Xaa is A or G
  MOD_RES (20), (21), (22), (23): Xaa is A or G or is absent

SEQ ID NO: 20891 - protein, 38 aa, Artificial Sequence; identical to SEQ ID NO: 17787
  GFR-binding peptide
  MOD_RES (2), (36): Xaa is C or S

SEQ ID NO: 20892 - protein, 37 aa, Artificial Sequence; identical to SEQ ID NO: 17788
  GFR-binding peptide
  MOD_RES (36), (36): Xaa is C or S

SEQ ID NO: 20893 - protein, 37 aa, Artificial Sequence; identical to SEQ ID NO: 17789
  GFR-binding peptide
  MOD_RES (2), (2): Xaa is C or S

SEQ ID NO: 20894 - protein, 34 aa, Artificial Sequence; identical to SEQ ID NO: 17790
  GFR-binding peptide
  MOD_RES (12), (13), (14), (15), (16): Xaa is A or G
  MOD_RES (17), (18), (19), (20): Xaa is A or G or is absent

SEQ ID NO: 20895 - protein, 44 aa, Artificial Sequence; identical to SEQ ID NO: 17791
  GFR-binding peptide
  MOD_RES (2), (4), (38): Xaa is C or S

SEQ ID NO: 20896 - protein, 39 aa, Artificial Sequence; identical to SEQ ID NO: 17792
  GFR-binding peptide
  MOD_RES (1), (3), (37): Xaa is C or S
  MOD_RES (15), (16), (17), (18), (19): Xaa is A or G
  MOD_RES (20), (21), (22), (23): Xaa is A or G or is absent

SEQ ID NO: 20897 - protein, 36 aa, Artificial Sequence; identical to SEQ ID NO: 17793
  GFR-binding peptide
  MOD_RES (36), (36): Xaa is C or S

SEQ ID NO: 20898 - protein, 35 aa, Artificial Sequence; identical to SEQ ID NO: 17794
  GFR-binding peptide
  MOD_RES (35), (35): Xaa is C or S

SEQ ID NO: 20899 - protein, 35 aa, Artificial Sequence; identical to SEQ ID NO: 17795
  GFR-binding peptide
  MOD_RES (2), (2): Xaa is C or S
  MOD_RES (14), (15), (16), (17), (18): Xaa is A or G
  MOD_RES (19), (20), (21), (22): Xaa is A or G or is absent

SEQ ID NO: 20900 - protein, 36 aa, Artificial Sequence; identical to SEQ ID NO: 17796
  GFR-binding peptide
  MOD_RES (33), (33): Xaa is C or S
  MOD_RES (11), (12), (13), (14), (15): Xaa is A or G
  MOD_RES (16), (17), (18), (19): Xaa is A or G or is absent

SEQ ID NO: 20901 - protein, 40 aa, Artificial Sequence; identical to SEQ ID NO: 17797
  GFR-binding peptide
  MOD_RES (34), (34): Xaa is C or S
  MOD_RES (12), (13), (14), (15), (16): Xaa is A or G
  MOD_RES (17), (18), (19), (20): Xaa is A or G or is absent

SEQ ID NO: 20902 - protein, 42 aa, Artificial Sequence; identical to SEQ ID NO: 17798
  GFR-binding peptide
  MOD_RES (2), (36): Xaa is C or S
  MOD_RES (14), (15), (16), (17), (18): Xaa is A or G
  MOD_RES (19), (20), (21), (22): Xaa is A or G or is absent

SEQ ID NO: 20903 - protein, 37 aa, Artificial Sequence; identical to SEQ ID NO: 17799
  GFR-binding peptide
  MOD_RES (1), (1): Xaa is C or S

SEQ ID NO: 20904 - protein, 43 aa, Artificial Sequence; identical to SEQ ID NO: 17800
  GFR-binding peptide
  MOD_RES (2), (4), (41): Xaa is C or S

SEQ ID NO: 20905 - protein, 41 aa, Artificial Sequence; identical to SEQ ID NO: 17801
  GFR-binding peptide
  MOD_RES (1), (3), (40): Xaa is C or S

SEQ ID NO: 20906 - protein, 34 aa, Artificial Sequence; identical to SEQ ID NO: 17802
  GFR-binding peptide

SEQ ID NO: 20907 - protein, 37 aa, Artificial Sequence; identical to SEQ ID NO: 17803
  GFR-binding peptide
  MOD_RES (34), (34): Xaa is C or S

SEQ ID NO: 20908 - protein, 37 aa, Artificial Sequence; identical to SEQ ID NO: 17804
  GFR-binding peptide
  MOD_RES (1), (35): Xaa is C or S

SEQ ID NO: 20909 - protein, 37 aa, Artificial Sequence; identical to SEQ ID NO: 17805
  GFR-binding peptide
  MOD_RES (2), (4): Xaa is C or S

SEQ ID NO: 20910 - protein, 40 aa, Artificial Sequence; identical to SEQ ID NO: 17806
  GFR-binding peptide
  MOD_RES (1), (38): Xaa is C or S
  MOD_RES (14), (15), (16), (17), (18): Xaa is A or G
  MOD_RES (19), (20), (21), (22): Xaa is A or G or is absent

SEQ ID NO: 20911 - protein, 42 aa, Artificial Sequence; identical to SEQ ID NO: 17807
  GFR-binding peptide
  MOD_RES (1), (3), (37): Xaa is C or S

SEQ ID NO: 20912 - protein, 34 aa, Artificial Sequence; identical to SEQ ID NO: 17808
  GFR-binding peptide

SEQ ID NO: 20913 - protein, 39 aa, Artificial Sequence; identical to SEQ ID NO: 17809
  GFR-binding peptide
  MOD_RES (1), (3): Xaa is C or S

SEQ ID NO: 20914 - protein, 35 aa, Artificial Sequence; identical to SEQ ID NO: 17810
  GFR-binding peptide
  MOD_RES (35), (35): Xaa is C or S

SEQ ID NO: 20915 - protein, 36 aa, Artificial Sequence; identical to SEQ ID NO: 17811
  GFR-binding peptide
  MOD_RES (33), (33): Xaa is C or S

SEQ ID NO: 20916 - protein, 34 aa, Artificial Sequence; identical to SEQ ID NO: 17812
  GFR-binding peptide
  MOD_RES (11), (12), (13), (14), (15): Xaa is A or G
  MOD_RES (16), (17), (18), (19): Xaa is A or G or is absent

SEQ ID NO: 20917 - protein, 38 aa, Artificial Sequence; identical to SEQ ID NO: 17813
  GFR-binding peptide
  MOD_RES (2), (4), (38): Xaa is C or S

SEQ ID NO: 20918 - protein, 38 aa, Artificial Sequence; identical to SEQ ID NO: 17814
  GFR-binding peptide
  MOD_RES (2), (36): Xaa is C or S
  MOD_RES (14), (15), (16), (17), (18): Xaa is A or G
  MOD_RES (19), (20), (21), (22): Xaa is A or G or is absent

SEQ ID NO: 20919 - protein, 43 aa, Artificial Sequence; identical to SEQ ID NO: 17815
  GFR-binding peptide
  MOD_RES (2), (4), (41): Xaa is C or S

SEQ ID NO: 20920 - protein, 42 aa, Artificial Sequence; identical to SEQ ID NO: 17816
  GFR-binding peptide
  MOD_RES (2), (4), (41): Xaa is C or S
  MOD_RES (17), (18), (19), (20), (21): Xaa is A or G
  MOD_RES (22), (23), (24), (25): Xaa is A or G or is absent

SEQ ID NO: 20921 - protein, 38 aa, Artificial Sequence; identical to SEQ ID NO: 17817
  GFR-binding peptide
  MOD_RES (36), (36): Xaa is C or S

SEQ ID NO: 20922 - protein, 40 aa, Artificial Sequence; identical to SEQ ID NO: 17818
  GFR-binding peptide
  MOD_RES (2), (4), (38): Xaa is C or S
  MOD_RES (16), (17), (18), (19), (20): Xaa is A or G
  MOD_RES (21), (22), (23), (24): Xaa is A or G or is absent

SEQ ID NO: 20923 - protein, 35 aa, Artificial Sequence; identical to SEQ ID NO: 17819
  GFR-binding peptide

SEQ ID NO: 20924 - protein, 42 aa, Artificial Sequence; identical to SEQ ID NO: 17820
  GFR-binding peptide
  MOD_RES (2), (39): Xaa is C or S

SEQ ID NO: 20925 - protein, 42 aa, Artificial Sequence; identical to SEQ ID NO: 17821
  GFR-binding peptide
  MOD_RES (1), (38): Xaa is C or S
  MOD_RES (14), (15), (16), (17), (18): Xaa is A or G
  MOD_RES (19), (20), (21), (22): Xaa is A or G or is absent

SEQ ID NO: 20926 - protein, 39 aa, Artificial Sequence; identical to SEQ ID NO: 17822
  GFR-binding peptide
  MOD_RES (2), (39): Xaa is C or S

SEQ ID NO: 20927 - protein, 38 aa, Artificial Sequence; identical to SEQ ID NO: 17823
  GFR-binding peptide
  MOD_RES (1), (38): Xaa is C or S
  MOD_RES (14), (15), (16), (17), (18): Xaa is A or G
  MOD_RES (19), (20), (21), (22): Xaa is A or G or is absent

SEQ ID NO: 20928 - protein, 43 aa, Artificial Sequence; identical to SEQ ID NO: 17824
  GFR-binding peptide
  MOD_RES (1), (3), (37): Xaa is C or S
  MOD_RES (15), (16), (17), (18), (19): Xaa is A or G
  MOD_RES (20), (21), (22), (23): Xaa is A or G or is absent

SEQ ID NO: 20929 - protein, 41 aa, Artificial Sequence; identical to SEQ ID NO: 17825
  GFR-binding peptide
  MOD_RES (2), (4), (41): Xaa is C or S

SEQ ID NO: 20930 - protein, 44 aa, Artificial Sequence; identical to SEQ ID NO: 17826
  GFR-binding peptide
  MOD_RES (2), (4), (41): Xaa is C or S
  MOD_RES (17), (18), (19), (20), (21): Xaa is A or G
  MOD_RES (22), (23), (24), (25): Xaa is A or G or is absent

SEQ ID NO: 20931 - protein, 40 aa, Artificial Sequence; identical to SEQ ID NO: 17827
  GFR-binding peptide
  MOD_RES (2), (36): Xaa is C or S
  MOD_RES (14), (15), (16), (17), (18): Xaa is A or G
  MOD_RES (19), (20), (21), (22): Xaa is A or G or is absent

SEQ ID NO: 20932 - protein, 39 aa, Artificial Sequence; identical to SEQ ID NO: 17828
  GFR-binding peptide
  MOD_RES (2), (39): Xaa is C or S

SEQ ID NO: 20933 - protein, 38 aa, Artificial Sequence; identical to SEQ ID NO: 17829
  GFR-binding peptide
  MOD_RES (1), (38): Xaa is C or S
  MOD_RES (14), (15), (16), (17), (18): Xaa is A or G
  MOD_RES (19), (20), (21), (22): Xaa is A or G or is absent

SEQ ID NO: 20934 - protein, 42 aa, Artificial Sequence; identical to SEQ ID NO: 17830
  GFR-binding peptide
  MOD_RES (2), (39): Xaa is C or S

SEQ ID NO: 20935 - protein, 41 aa, Artificial Sequence; identical to SEQ ID NO: 17831
  GFR-binding peptide
  MOD_RES (2), (4), (38): Xaa is C or S
  MOD_RES (16), (17), (18), (19), (20): Xaa is A or G
  MOD_RES (21), (22), (23), (24): Xaa is A or G or is absent

SEQ ID NO: 20936 - protein, 42 aa, Artificial Sequence; identical to SEQ ID NO: 17832
  GFR-binding peptide
  MOD_RES (2), (4), (38): Xaa is C or S

SEQ ID NO: 20937 - protein, 38 aa, Artificial Sequence; identical to SEQ ID NO: 17833
  GFR-binding peptide
  MOD_RES (2), (4), (38): Xaa is C or S
  MOD_RES (16), (17), (18), (19), (20): Xaa is A or G
  MOD_RES (21), (22), (23), (24): Xaa is A or G or is absent

SEQ ID NO: 20938 - protein, 37 aa, Artificial Sequence; identical to SEQ ID NO: 17834
  GFR-binding peptide
  MOD_RES (1), (1): Xaa is C or S

SEQ ID NO: 20939 - protein, 36 aa, Artificial Sequence; identical to SEQ ID NO: 17835
  GFR-binding peptide
  MOD_RES (33), (33): Xaa is C or S

SEQ ID NO: 20940 - protein, 39 aa, Artificial Sequence; identical to SEQ ID NO: 17836
  GFR-binding peptide
  MOD_RES (34), (34): Xaa is C or S
  MOD_RES (12), (13), (14), (15), (16): Xaa is A or G
  MOD_RES (17), (18), (19), (20): Xaa is A or G or is absent

SEQ ID NO: 20941 - protein, 39 aa, Artificial Sequence; identical to SEQ ID NO: 17837
  GFR-binding peptide
  MOD_RES (2), (4), (38): Xaa is C or S

SEQ ID NO: 20942 - protein, 41 aa, Artificial Sequence; identical to SEQ ID NO: 17838
  GFR-binding peptide
  MOD_RES (1), (3), (40): Xaa is C or S

SEQ ID NO: 20943 - protein, 34 aa, Artificial Sequence; identical to SEQ ID NO: 17839
  GFR-binding peptide
  MOD_RES (11), (12), (13), (14), (15): Xaa is A or G
  MOD_RES (16), (17), (18), (19): Xaa is A or G or is absent

SEQ ID NO: 20944 - protein, 37 aa, Artificial Sequence; identical to SEQ ID NO: 17840
  GFR-binding peptide
  MOD_RES (2), (36): Xaa is C or S
  MOD_RES (14), (15), (16), (17), (18): Xaa is A or G
  MOD_RES (19), (20), (21), (22): Xaa is A or G or is absent

SEQ ID NO: 20945 - protein, 44 aa, Artificial Sequence; identical to SEQ ID NO: 17841
  GFR-binding peptide
  MOD_RES (2), (4), (38): Xaa is C or S
  MOD_RES (16), (17), (18), (19), (20): Xaa is A or G
  MOD_RES (21), (22), (23), (24): Xaa is A or G or is absent

SEQ ID NO: 20946 - protein, 40 aa, Artificial Sequence; identical to SEQ ID NO: 17842
  GFR-binding peptide
  MOD_RES (1), (3), (40): Xaa is C or S
  MOD_RES (16), (17), (18), (19), (20): Xaa is A or G
  MOD_RES (21), (22), (23), (24): Xaa is A or G or is absent

SEQ ID NO: 20947 - protein, 40 aa, Artificial Sequence; identical to SEQ ID NO: 17843
  GFR-binding peptide
  MOD_RES (37), (37): Xaa is C or S

SEQ ID NO: 20948 - protein, 39 aa, Artificial Sequence; identical to SEQ ID NO: 17844
  GFR-binding peptide
  MOD_RES (34), (34): Xaa is C or S
  MOD_RES (12), (13), (14), (15), (16): Xaa is A or G
  MOD_RES (17), (18), (19), (20): Xaa is A or G or is absent

SEQ ID NO: 20949 - protein, 37 aa, Artificial Sequence; identical to SEQ ID NO: 17845
  GFR-binding peptide
  MOD_RES (2), (4): Xaa is C or S
  MOD_RES (16), (17), (18), (19), (20): Xaa is A or G
  MOD_RES (21), (22), (23), (24): Xaa is A or G or is absent

SEQ ID NO: 20950 - protein, 34 aa, Artificial Sequence; identical to SEQ ID NO: 17846
  GFR-binding peptide
  MOD_RES (13), (14), (15), (16), (17): Xaa is A or G
  MOD_RES (18), (19), (20), (21): Xaa is A or G or is absent

SEQ ID NO: 20951 - protein, 36 aa, Artificial Sequence; identical to SEQ ID NO: 17847
  GFR-binding peptide
  MOD_RES (13), (14), (15), (16), (17): Xaa is A or G
  MOD_RES (18), (19), (20), (21): Xaa is A or G or is absent

SEQ ID NO: 20952 - protein, 34 aa, Artificial Sequence; identical to SEQ ID NO: 17848
  GFR-binding peptide
  MOD_RES (34), (34): Xaa is C or S
  MOD_RES (12), (13), (14), (15), (16): Xaa is A or G
  MOD_RES (17), (18), (19), (20): Xaa is A or G or is absent

SEQ ID NO: 20953 - protein, 40 aa, Artificial Sequence; identical to SEQ ID NO: 17849
  GFR-binding peptide
  MOD_RES (1), (3), (40): Xaa is C or S
  MOD_RES (16), (17), (18), (19), (20): Xaa is A or G
  MOD_RES (21), (22), (23), (24): Xaa is A or G or is absent

SEQ ID NO: 20954 - protein, 38 aa, Artificial Sequence; identical to SEQ ID NO: 17850
  GFR-binding peptide
  MOD_RES (34), (34): Xaa is C or S

SEQ ID NO: 20955 - protein, 37 aa, Artificial Sequence; identical to SEQ ID NO: 17851
  GFR-binding peptide
  MOD_RES (34), (34): Xaa is C or S

SEQ ID NO: 20956 - protein, 35 aa, Artificial Sequence; identical to SEQ ID NO: 17852
  GFR-binding peptide

SEQ ID NO: 20957 - protein, 36 aa, Artificial Sequence; identical to SEQ ID NO: 17853
  GFR-binding peptide
  MOD_RES (13), (14), (15), (16), (17): Xaa is A or G
  MOD_RES (18), (19), (20), (21): Xaa is A or G or is absent

SEQ ID NO: 20958 - protein, 32 aa, Artificial Sequence; identical to SEQ ID NO: 17854
  GFR-binding peptide

SEQ ID NO: 20959 - protein, 38 aa, Artificial Sequence; identical to SEQ ID NO: 17855
  GFR-binding peptide
  MOD_RES (1), (3): Xaa is C or S
  MOD_RES (16), (17), (18), (19), (20): Xaa is A or G
  MOD_RES (21), (22), (23), (24): Xaa is A or G or is absent

SEQ ID NO: 20960 - protein, 40 aa, Artificial Sequence; identical to SEQ ID NO: 17856
  GFR-binding peptide
  MOD_RES (34), (34): Xaa is C or S

SEQ ID NO: 20961 - protein, 41 aa, Artificial Sequence; identical to SEQ ID NO: 17857
  GFR-binding peptide
  MOD_RES (1), (3), (40): Xaa is C or S
  MOD_RES (16), (17), (18), (19), (20): Xaa is A or G
  MOD_RES (21), (22), (23), (24): Xaa is A or G or is absent

SEQ ID NO: 20962 - protein, 39 aa, Artificial Sequence; identical to SEQ ID NO: 17858
  GFR-binding peptide
  MOD_RES (36), (36): Xaa is C or S
  MOD_RES (12), (13), (14), (15), (16): Xaa is A or G
  MOD_RES (17), (18), (19), (20): Xaa is A or G or is absent

SEQ ID NO: 20963 - protein, 41 aa, Artificial Sequence; identical to SEQ ID NO: 17859
  GFR-binding peptide
  MOD_RES (1), (3), (37): Xaa is C or S

SEQ ID NO: 20964 - protein, 36 aa, Artificial Sequence; identical to SEQ ID NO: 17860
  GFR-binding peptide
  MOD_RES (2), (36): Xaa is C or S
  MOD_RES (14), (15), (16), (17), (18): Xaa is A or G
  MOD_RES (19), (20), (21), (22): Xaa is A or G or is absent

SEQ ID NO: 20965 - protein, 35 aa, Artificial Sequence; identical to SEQ ID NO: 17861
  GFR-binding peptide
  MOD_RES (1), (35): Xaa is C or S

SEQ ID NO: 20966 - protein, 32 aa, Artificial Sequence; identical to SEQ ID NO: 17862
  GFR-binding peptide

SEQ ID NO: 20967 - protein, 42 aa, Artificial Sequence; identical to SEQ ID NO: 17863
  GFR-binding peptide
  MOD_RES (1), (38): Xaa is C or S

SEQ ID NO: 20968 - protein, 36 aa, Artificial Sequence; identical to SEQ ID NO: 17864
  GFR-binding peptide
  MOD_RES (34), (34): Xaa is C or S

SEQ ID NO: 20969 - protein, 35 aa, Artificial Sequence; identical to SEQ ID NO: 17865
  GFR-binding peptide
  MOD_RES (34), (34): Xaa is C or S

SEQ ID NO: 20970 - protein, 33 aa, Artificial Sequence; identical to SEQ ID NO: 17866
  GFR-binding peptide
  MOD_RES (12), (13), (14), (15), (16): Xaa is A or G
  MOD_RES (17), (18), (19), (20): Xaa is A or G or is absent

SEQ ID NO: 20971 - protein, 35 aa, Artificial Sequence; identical to SEQ ID NO: 17867
  GFR-binding peptide
  MOD_RES (33), (33): Xaa is C or S
  MOD_RES (11), (12), (13), (14), (15): Xaa is A or G
  MOD_RES (16), (17), (18), (19): Xaa is A or G or is absent

SEQ ID NO: 20972 - protein, 40 aa, Artificial Sequence; identical to SEQ ID NO: 17868
  GFR-binding peptide
  MOD_RES (1), (3), (40): Xaa is C or S
  MOD_RES (16), (17), (18), (19), (20): Xaa is A or G
  MOD_RES (21), (22), (23), (24): Xaa is A or G or is absent

SEQ ID NO: 20973 - protein, 37 aa, Artificial Sequence; identical to SEQ ID NO: 17869
  GFR-binding peptide
  MOD_RES (1), (3): Xaa is C or S

SEQ ID NO: 20974 - protein, 37 aa, Artificial Sequence; identical to SEQ ID NO: 17870
  GFR-binding peptide
  MOD_RES (33), (33): Xaa is C or S
  MOD_RES (11), (12), (13), (14), (15): Xaa is A or G
  MOD_RES (16), (17), (18), (19): Xaa is A or G or is absent

SEQ ID NO: 20975 - protein, 43 aa, Artificial Sequence; identical to SEQ ID NO: 17871
  GFR-binding peptide
  MOD_RES (2), (4), (38): Xaa is C or S

SEQ ID NO: 20976 - protein, 38 aa, Artificial Sequence; identical to SEQ ID NO: 17872
  GFR-binding peptide
  MOD_RES (33), (33): Xaa is C or S
  MOD_RES (11), (12), (13), (14), (15): Xaa is A or G
  MOD_RES (16), (17), (18), (19): Xaa is A or G or is absent

SEQ ID NO: 20977 - protein, 33 aa, Artificial Sequence; identical to SEQ ID NO: 17873
  GFR-binding peptide

SEQ ID NO: 20978 - protein, 42 aa, Artificial Sequence; identical to SEQ ID NO: 17874
  GFR-binding peptide
  MOD_RES (1), (38): Xaa is C or S

SEQ ID NO: 20979 - protein, 40 aa, Artificial Sequence; identical to SEQ ID NO: 17875
  GFR-binding peptide
  MOD_RES (36), (36): Xaa is C or S

SEQ ID NO: 20980 - protein, 38 aa, Artificial Sequence; identical to SEQ ID NO: 17876
  GFR-binding peptide
  MOD_RES (2), (4), (38): Xaa is C or S
  MOD_RES (16), (17), (18), (19), (20): Xaa is A or G
  MOD_RES (21), (22), (23), (24): Xaa is A or G or is absent

SEQ ID NO: 20981 - protein, 35 aa, Artificial Sequence; identical to SEQ ID NO: 17877
  GFR-binding peptide

SEQ ID NO: 20982 - protein, 36 aa, Artificial Sequence; identical to SEQ ID NO: 17878
  GFR-binding peptide
  MOD_RES (35), (35): Xaa is C or S

SEQ ID NO: 20983 - protein, 38 aa, Artificial Sequence; identical to SEQ ID NO: 17879
  GFR-binding peptide
  MOD_RES (2), (4), (38): Xaa is C or S
  MOD_RES (16), (17), (18), (19), (20): Xaa is A or G
  MOD_RES (21), (22), (23), (24): Xaa is A or G or is absent

SEQ ID NO: 20984 - protein, 41 aa, Artificial Sequence; identical to SEQ ID NO: 17880
  GFR-binding peptide
  MOD_RES (1), (38): Xaa is C or S

SEQ ID NO: 20985 - protein, 33 aa, Artificial Sequence; identical to SEQ ID NO: 17881
  GFR-binding peptide
  MOD_RES (33), (33): Xaa is C or S
  MOD_RES (11), (12), (13), (14), (15): Xaa is A or G
  MOD_RES (16), (17), (18), (19): Xaa is A or G or is absent

SEQ ID NO: 20986 - protein, 35 aa, Artificial Sequence; identical to SEQ ID NO: 17882
  GFR-binding peptide

SEQ ID NO: 20987 - protein, 38 aa, Artificial Sequence; identical to SEQ ID NO: 17883
  GFR-binding peptide
  MOD_RES (1), (35): Xaa is C or S
  MOD_RES (13), (14), (15), (16), (17): Xaa is A or G
  MOD_RES (18), (19), (20), (21): Xaa is A or G or is absent

SEQ ID NO: 20988 - protein, 39 aa, Artificial Sequence; identical to SEQ ID NO: 17884
  GFR-binding peptide
  MOD_RES (1), (3), (37): Xaa is C or S

SEQ ID NO: 20989 - protein, 33 aa, Artificial Sequence; identical to SEQ ID NO: 17885
  GFR-binding peptide

SEQ ID NO: 20990 - protein, 37 aa, Artificial Sequence; identical to SEQ ID NO: 17886
  GFR-binding peptide
  MOD_RES (1), (3): Xaa is C or S

SEQ ID NO: 20991 - protein, 34 aa, Artificial Sequence; identical to SEQ ID NO: 17887
  GFR-binding peptide
  MOD_RES (33), (33): Xaa is C or S
  MOD_RES (11), (12), (13), (14), (15): Xaa is A or G
  MOD_RES (16), (17), (18), (19): Xaa is A or G or is absent

SEQ ID NO: 20992 - protein, 39 aa, Artificial Sequence; identical to SEQ ID NO: 17888
  GFR-binding peptide
  MOD_RES (2), (39): Xaa is C or S
  MOD_RES (15), (16), (17), (18), (19): Xaa is A or G
  MOD_RES (20), (21), (22), (23): Xaa is A or G or is absent

SEQ ID NO: 20993 - protein, 37 aa, Artificial Sequence; identical to SEQ ID NO: 17889
  GFR-binding peptide
  MOD_RES (2), (2): Xaa is C or S
  MOD_RES (15), (16), (17), (18), (19): Xaa is A or G
  MOD_RES (20), (21), (22), (23): Xaa is A or G or is absent

SEQ ID NO: 20994 - protein, 39 aa, Artificial Sequence; identical to SEQ ID NO: 17890
  GFR-binding peptide
  MOD_RES (1), (38): Xaa is C or S

SEQ ID NO: 20995 - protein, 38 aa, Artificial Sequence; identical to SEQ ID NO: 17891
  GFR-binding peptide
  MOD_RES (2), (36): Xaa is C or S

SEQ ID NO: 20996 - protein, 36 aa, Artificial Sequence; identical to SEQ ID NO: 17892
  GFR-binding peptide
  MOD_RES (1), (3): Xaa is C or S

SEQ ID NO: 20997 - protein, 37 aa, Artificial Sequence; identical to SEQ ID NO: 17893
  GFR-binding peptide
  MOD_RES (1), (3): Xaa is C or S

SEQ ID NO: 20998 - protein, 43 aa, Artificial Sequence; identical to SEQ ID NO: 17894
  GFR-binding peptide
  MOD_RES (2), (4), (38): Xaa is C or S

SEQ ID NO: 20999 - protein, 37 aa, Artificial Sequence; identical to SEQ ID NO: 17895
  GFR-binding peptide
  MOD_RES (37), (37): Xaa is C or S

SEQ ID NO: 21000 - protein, 33 aa, Artificial Sequence; identical to SEQ ID NO: 17896
  GFR-binding peptide
  MOD_RES (12), (13), (14), (15), (16): Xaa is A or G
  MOD_RES (17), (18), (19), (20): Xaa is A or G or is absent

SEQ ID NO: 21001 - protein, 37 aa, Artificial Sequence; identical to SEQ ID NO: 17897
  GFR-binding peptide
  MOD_RES (1), (3), (37): Xaa is C or S
  MOD_RES (15), (16), (17), (18), (19): Xaa is A or G
  MOD_RES (20), (21), (22), (23): Xaa is A or G or is absent

SEQ ID NO: 21002 - protein, 42 aa, Artificial Sequence; identical to SEQ ID NO: 17898
  GFR-binding peptide
  MOD_RES (1), (38): Xaa is C or S
  MOD_RES (14), (15), (16), (17), (18): Xaa is A or G
  MOD_RES (19), (20), (21), (22): Xaa is A or G or is absent

SEQ ID NO: 21003 - protein, 43 aa, Artificial Sequence; identical to SEQ ID NO: 17899
  GFR-binding peptide
  MOD_RES (1), (3), (37): Xaa is C or S

SEQ ID NO: 21004 - protein, 39 aa, Artificial Sequence; identical to SEQ ID NO: 17900
  GFR-binding peptide
  MOD_RES (33), (33): Xaa is C or S
  MOD_RES (11), (12), (13), (14), (15): Xaa is A or G
  MOD_RES (16), (17), (18), (19): Xaa is A or G or is absent

SEQ ID NO: 21005 - protein, 38 aa, Artificial Sequence; identical to SEQ ID NO: 17901
  GFR-binding peptide
  MOD_RES (1), (38): Xaa is C or S

SEQ ID NO: 21006 - protein, 35 aa, Artificial Sequence; identical to SEQ ID NO: 17902
  GFR-binding peptide

SEQ ID NO: 21007 - protein, 37 aa, Artificial Sequence; identical to SEQ ID NO: 17903
  GFR-binding peptide
  MOD_RES (2), (4): Xaa is C or S
  MOD_RES (16), (17), (18), (19), (20): Xaa is A or G
  MOD_RES (21), (22), (23), (24): Xaa is A or G or is absent

SEQ ID NO: 21008 - protein, 32 aa, Artificial Sequence; identical to SEQ ID NO: 17904
  GFR-binding peptide
  MOD_RES (11), (12), (13), (14), (15): Xaa is A or G
  MOD_RES (16), (17), (18), (19): Xaa is A or G or is absent

SEQ ID NO: 21009 - protein, 43 aa, Artificial Sequence; identical to SEQ ID NO: 17905
  GFR-binding peptide
  MOD_RES (2), (39): Xaa is C or S

SEQ ID NO: 21010 - protein, 38 aa, Artificial Sequence; identical to SEQ ID NO: 17906
  GFR-binding peptide
  MOD_RES (36), (36): Xaa is C or S

SEQ ID NO: 21011 - protein, 42 aa, Artificial Sequence; identical to SEQ ID NO: 17907
  GFR-binding peptide
  MOD_RES (1), (38): Xaa is C or S
  MOD_RES (14), (15), (16), (17), (18): Xaa is A or G
  MOD_RES (19), (20), (21), (22): Xaa is A or G or is absent

SEQ ID NO: 21012 - protein, 34 aa, Artificial Sequence; identical to SEQ ID NO: 17908
  GFR-binding peptide

SEQ ID NO: 21013 - protein, 38 aa, Artificial Sequence; identical to SEQ ID NO: 17909
  GFR-binding peptide
  MOD_RES (37), (37): Xaa is C or S
  MOD_RES (13), (14), (15), (16), (17): Xaa is A or G
  MOD_RES (18), (19), (20), (21): Xaa is A or G or is absent

SEQ ID NO: 21014 - protein, 35 aa, Artificial Sequence; identical to SEQ ID NO: 17910
  GFR-binding peptide
  MOD_RES (1), (35): Xaa is C or S
  MOD_RES (13), (14), (15), (16), (17): Xaa is A or G
  MOD_RES (18), (19), (20), (21): Xaa is A or G or is absent

SEQ ID NO: 21015 - protein, 44 aa, Artificial Sequence; identical to SEQ ID NO: 17911
  GFR-binding peptide
  MOD_RES (2), (4), (41): Xaa is C or S
  MOD_RES (17), (18), (19), (20), (21): Xaa is A or G
  MOD_RES (22), (23), (24), (25): Xaa is A or G or is absent

SEQ ID NO: 21016 - protein, 39 aa, Artificial Sequence; identical to SEQ ID NO: 17912
  GFR-binding peptide
  MOD_RES (35), (35): Xaa is C or S
  MOD_RES (11), (12), (13), (14), (15): Xaa is A or G
  MOD_RES (16), (17), (18), (19): Xaa is A or G or is absent

SEQ ID NO: 21017 - protein, 40 aa, Artificial Sequence; identical to SEQ ID NO: 17913
  GFR-binding peptide
  MOD_RES (34), (34): Xaa is C or S
  MOD_RES (12), (13), (14), (15), (16): Xaa is A or G
  MOD_RES (17), (18), (19), (20): Xaa is A or G or is absent

SEQ ID NO: 21018 - protein, 34 aa, Artificial Sequence; identical to SEQ ID NO: 17914
  GFR-binding peptide
  MOD_RES (12), (13), (14), (15), (16): Xaa is A or G
  MOD_RES (17), (18), (19), (20): Xaa is A or G or is absent

SEQ ID NO: 21019 - protein, 39 aa, Artificial Sequence; identical to SEQ ID NO: 17915
  GFR-binding peptide
  MOD_RES (33), (33): Xaa is C or S

SEQ ID NO: 21020 - protein, 42 aa, Artificial Sequence; identical to SEQ ID NO: 17916
  GFR-binding peptide
  MOD_RES (2), (39): Xaa is C or S
  MOD_RES (15), (16), (17), (18), (19): Xaa is A or G
  MOD_RES (20), (21), (22), (23): Xaa is A or G or is absent

SEQ ID NO: 21021 - protein, 33 aa, Artificial Sequence; identical to SEQ ID NO: 17917
  GFR-binding peptide
  MOD_RES (33), (33): Xaa is C or S

SEQ ID NO: 21022 - protein, 44 aa, Artificial Sequence; identical to SEQ ID NO: 17918
  GFR-binding peptide
  MOD_RES (1), (3), (40): Xaa is C or S

SEQ ID NO: 21023 - protein, 32 aa, Artificial Sequence; identical to SEQ ID NO: 17919
  GFR-binding peptide
  MOD_RES (11), (12), (13), (14), (15): Xaa is A or G
  MOD_RES (16), (17), (18), (19): Xaa is A or G or is absent

SEQ ID NO: 21024 - protein, 40 aa, Artificial Sequence; identical to SEQ ID NO: 17920
  GFR-binding peptide
  MOD_RES (2), (36): Xaa is C or S

SEQ ID NO: 21025 - protein, 39 aa, Artificial Sequence; identical to SEQ ID NO: 17921
  GFR-binding peptide
  MOD_RES (1), (3), (37): Xaa is C or S

SEQ ID NO: 21026 - protein, 37 aa, Artificial Sequence; identical to SEQ ID NO: 17922
  GFR-binding peptide
  MOD_RES (2), (2): Xaa is C or S
  MOD_RES (15), (16), (17), (18), (19): Xaa is A or G
  MOD_RES (20), (21), (22), (23): Xaa is A or G or is absent

SEQ ID NO: 21027 - protein, 33 aa, Artificial Sequence; identical to SEQ ID NO: 17923
  GFR-binding peptide
  MOD_RES (12), (13), (14), (15), (16): Xaa is A or G
  MOD_RES (17), (18), (19), (20): Xaa is A or G or is absent

SEQ ID NO: 21028 - protein, 37 aa, Artificial Sequence; identical to SEQ ID NO: 17924
  GFR-binding peptide
  MOD_RES (33), (33): Xaa is C or S
  MOD_RES (11), (12), (13), (14), (15): Xaa is A or G
  MOD_RES (16), (17), (18), (19): Xaa is A or G or is absent

SEQ ID NO: 21029 - protein, 41 aa, Artificial Sequence; identical to SEQ ID NO: 17925
  GFR-binding peptide
  MOD_RES (2), (4), (41): Xaa is C or S
  MOD_RES (17), (18), (19), (20), (21): Xaa is A or G
  MOD_RES (22), (23), (24), (25): Xaa is A or G or is absent

SEQ ID NO: 21030 - protein, 38 aa, Artificial Sequence; identical to SEQ ID NO: 17926
  GFR-binding peptide
  MOD_RES (2), (2): Xaa is C or S
  MOD_RES (15), (16), (17), (18), (19): Xaa is A or G
  MOD_RES (20), (21), (22), (23): Xaa is A or G or is absent

SEQ ID NO: 21031 - protein, 38 aa, Artificial Sequence; identical to SEQ ID NO: 17927
  GFR-binding peptide
  MOD_RES (1), (3): Xaa is C or S
  MOD_RES (16), (17), (18), (19), (20): Xaa is A or G
  MOD_RES (21), (22), (23), (24): Xaa is A or G or is absent

SEQ ID NO: 21032 - protein, 33 aa, Artificial Sequence; identical to SEQ ID NO: 17928
  GFR-binding peptide

SEQ ID NO: 21033 - protein, 41 aa, Artificial Sequence; identical to SEQ ID NO: 17929
  GFR-binding peptide
  MOD_RES (1), (38): Xaa is C or S
  MOD_RES (14), (15), (16), (17), (18): Xaa is A or G
  MOD_RES (19), (20), (21), (22): Xaa is A or G or is absent

SEQ ID NO: 21034 - protein, 37 aa, Artificial Sequence; identical to SEQ ID NO: 17930
  GFR-binding peptide
  MOD_RES (34), (34): Xaa is C or S
  MOD_RES (12), (13), (14), (15), (16): Xaa is A or G
  MOD_RES (17), (18), (19), (20): Xaa is A or G or is absent

SEQ ID NO: 21035 - protein, 40 aa, Artificial Sequence; identical to SEQ ID NO: 17931
  GFR-binding peptide
  MOD_RES (2), (36): Xaa is C or S

SEQ ID NO: 21036 - protein, 36 aa, Artificial Sequence; identical to SEQ ID NO: 17932
  GFR-binding peptide
  MOD_RES (1), (1): Xaa is C or S

SEQ ID NO: 21037 - protein, 40 aa, Artificial Sequence; identical to SEQ ID NO: 17933
  GFR-binding peptide
  MOD_RES (37), (37): Xaa is C or S
  MOD_RES (13), (14), (15), (16), (17): Xaa is A or G
  MOD_RES (18), (19), (20), (21): Xaa is A or G or is absent

SEQ ID NO: 21038 - protein, 39 aa, Artificial Sequence; identical to SEQ ID NO: 17934
  GFR-binding peptide
  MOD_RES (1), (3), (37): Xaa is C or S

SEQ ID NO: 21039 - protein, 39 aa, Artificial Sequence; identical to SEQ ID NO: 17935
  GFR-binding peptide
  MOD_RES (2), (4), (38): Xaa is C or S

SEQ ID NO: 21040 - protein, 38 aa, Artificial Sequence; identical to SEQ ID NO: 17936
  GFR-binding peptide
  MOD_RES (33), (33): Xaa is C or S

SEQ ID NO: 21041 - protein, 39 aa, Artificial Sequence; identical to SEQ ID NO: 17937
  GFR-binding peptide
  MOD_RES (37), (37): Xaa is C or S
  MOD_RES (13), (14), (15), (16), (17): Xaa is A or G
  MOD_RES (18), (19), (20), (21): Xaa is A or G or is absent

SEQ ID NO: 21042 - protein, 43 aa, Artificial Sequence; identical to SEQ ID NO: 17938
  GFR-binding peptide
  MOD_RES (2), (4), (38): Xaa is C or S
  MOD_RES (16), (17), (18), (19), (20): Xaa is A or G
  MOD_RES (21), (22), (23), (24): Xaa is A or G or is absent

SEQ ID NO: 21043 - protein, 41 aa, Artificial Sequence; identical to SEQ ID NO: 17939
  GFR-binding peptide
  MOD_RES (2), (36): Xaa is C or S

SEQ ID NO: 21044 - protein, 34 aa, Artificial Sequence; identical to SEQ ID NO: 17940
  GFR-binding peptide
  MOD_RES (11), (12), (13), (14), (15): Xaa is A or G
  MOD_RES (16), (17), (18), (19): Xaa is A or G or is absent

SEQ ID NO: 21045 - protein, 41 aa, Artificial Sequence; identical to SEQ ID NO: 17941
  GFR-binding peptide
  MOD_RES (2), (4), (41): Xaa is C or S
  MOD_RES (17), (18), (19), (20), (21): Xaa is A or G
  MOD_RES (22), (23), (24), (25): Xaa is A or G or is absent

SEQ ID NO: 21046 - protein, 36 aa, Artificial Sequence; identical to SEQ ID NO: 17942
  GFR-binding peptide
  MOD_RES (1), (3): Xaa is C or S

SEQ ID NO: 21047 - protein, 40 aa, Artificial Sequence; identical to SEQ ID NO: 17943
  GFR-binding peptide
  MOD_RES (2), (39): Xaa is C or S
  MOD_RES (15), (16), (17), (18), (19): Xaa is A or G
  MOD_RES (20), (21), (22), (23): Xaa is A or G or is absent

SEQ ID NO: 21048 - protein, 40 aa, Artificial Sequence; identical to SEQ ID NO: 17944
  GFR-binding peptide
  MOD_RES (1), (38): Xaa is C or S
  MOD_RES (14), (15), (16), (17), (18): Xaa is A or G
  MOD_RES (19), (20), (21), (22): Xaa is A or G or is absent

SEQ ID NO: 21049 - protein, 39 aa, Artificial Sequence; identical to SEQ ID NO: 17945
  GFR-binding peptide
  MOD_RES (36), (36): Xaa is C or S
  MOD_RES (12), (13), (14), (15), (16): Xaa is A or G
  MOD_RES (17), (18), (19), (20): Xaa is A or G or is absent

SEQ ID NO: 21050 - protein, 32 aa, Artificial Sequence; identical to SEQ ID NO: 17946
  GFR-binding peptide
  MOD_RES (11), (12), (13), (14), (15): Xaa is A or G
  MOD_RES (16), (17), (18), (19): Xaa is A or G or is absent

SEQ ID NO: 21051 - protein, 37 aa, Artificial Sequence; identical to SEQ ID NO: 17947
  GFR-binding peptide
  MOD_RES (36), (36): Xaa is C or S

SEQ ID NO: 21052 - protein, 40 aa, Artificial Sequence; identical to SEQ ID NO: 17948
  GFR-binding peptide
  MOD_RES (37), (37): Xaa is C or S
  MOD_RES (13), (14), (15), (16), (17): Xaa is A or G
  MOD_RES (18), (19), (20), (21): Xaa is A or G or is absent

SEQ ID NO: 21053 - protein, 40 aa, Artificial Sequence; identical to SEQ ID NO: 17949
  GFR-binding peptide
  MOD_RES (1), (3), (37): Xaa is C or S
  MOD_RES (15), (16), (17), (18), (19): Xaa is A or G
  MOD_RES (20), (21), (22), (23): Xaa is A or G or is absent

SEQ ID NO: 21054 - protein, 38 aa, Artificial Sequence; identical to SEQ ID NO: 17950
  GFR-binding peptide
  MOD_RES (37), (37): Xaa is C or S

SEQ ID NO: 21055 - protein, 42 aa, Artificial Sequence; identical to SEQ ID NO: 17951
  GFR-binding peptide
  MOD_RES (2), (39): Xaa is C or S

SEQ ID NO: 21056 - protein, 40 aa, Artificial Sequence; identical to SEQ ID NO: 17952
  GFR-binding peptide
  MOD_RES (2), (36): Xaa is C or S

SEQ ID NO: 21057 - protein, 36 aa, Artificial Sequence; identical to SEQ ID NO: 17953
  GFR-binding peptide
  MOD_RES (1), (1): Xaa is C or S

SEQ ID NO: 21058 - protein, 42 aa, Artificial Sequence; identical to SEQ ID NO: 17954
  GFR-binding peptide
  MOD_RES (2), (4), (41): Xaa is C or S

SEQ ID NO: 21059 - protein, 40 aa, Artificial Sequence; identical to SEQ ID NO: 17955
  GFR-binding peptide
  MOD_RES (1), (35): Xaa is C or S
  MOD_RES (13), (14), (15), (16), (17): Xaa is A or G
  MOD_RES (18), (19), (20), (21): Xaa is A or G or is absent

SEQ ID NO: 21060 - protein, 34 aa, Artificial Sequence; identical to SEQ ID NO: 17956
  GFR-binding peptide
  MOD_RES (34), (34): Xaa is C or S

SEQ ID NO: 21061 - protein, 39 aa, Artificial Sequence; identical to SEQ ID NO: 17957
  GFR-binding peptide
  MOD_RES (2), (4): Xaa is C or S
  MOD_RES (17), (18), (19), (20), (21): Xaa is A or G
  MOD_RES (22), (23), (24), (25): Xaa is A or G or is absent

SEQ ID NO: 21062 - protein, 36 aa, Artificial Sequence; identical to SEQ ID NO: 17958
  GFR-binding peptide
  MOD_RES (13), (14), (15), (16), (17): Xaa is A or G
  MOD_RES (18), (19), (20), (21): Xaa is A or G or is absent

SEQ ID NO: 21063 - protein, 39 aa, Artificial Sequence; identical to SEQ ID NO: 17959
  GFR-binding peptide
  MOD_RES (1), (35): Xaa is C or S
  MOD_RES (13), (14), (15), (16), (17): Xaa is A or G
  MOD_RES (18), (19), (20), (21): Xaa is A or G or is absent

SEQ ID NO: 21064 - protein, 44 aa, Artificial Sequence; identical to SEQ ID NO: 17960
  GFR-binding peptide
  MOD_RES (1), (3), (40): Xaa is C or S
  MOD_RES (16), (17), (18), (19), (20): Xaa is A or G
  MOD_RES (21), (22), (23), (24): Xaa is A or G or is absent

SEQ ID NO: 21065 - protein, 44 aa, Artificial Sequence; identical to SEQ ID NO: 17961
  GFR-binding peptide
  MOD_RES (1), (3), (40): Xaa is C or S

SEQ ID NO: 21066 - protein, 38 aa, Artificial Sequence; identical to SEQ ID NO: 17962
  GFR-binding peptide
  MOD_RES (2), (4): Xaa is C or S
  MOD_RES (17), (18), (19), (20), (21): Xaa is A or G
  MOD_RES (22), (23), (24), (25): Xaa is A or G or is absent

SEQ ID NO: 21067 - protein, 37 aa, Artificial Sequence; identical to SEQ ID NO: 17963
  GFR-binding peptide
  MOD_RES (34), (34): Xaa is C or S
  MOD_RES (12), (13), (14), (15), (16): Xaa is A or G
  MOD_RES (17), (18), (19), (20): Xaa is A or G or is absent

SEQ ID NO: 21068 - protein, 38 aa, Artificial Sequence; identical to SEQ ID NO: 17964
  GFR-binding peptide
  MOD_RES (1), (3): Xaa is C or S
  MOD_RES (16), (17), (18), (19), (20): Xaa is A or G
  MOD_RES (21), (22), (23), (24): Xaa is A or G or is absent

SEQ ID NO: 21069 - protein, 41 aa, Artificial Sequence; identical to SEQ ID NO: 17965
  GFR-binding peptide
  MOD_RES (37), (37): Xaa is C or S

SEQ ID NO: 21070 - protein, 34 aa, Artificial Sequence; identical to SEQ ID NO: 17966
  GFR-binding peptide
  MOD_RES (33), (33): Xaa is C or S

SEQ ID NO: 21071 - protein, 37 aa, Artificial Sequence; identical to SEQ ID NO: 17967
  GFR-binding peptide
  MOD_RES (36), (36): Xaa is C or S
  MOD_RES (12), (13), (14), (15), (16): Xaa is A or G
  MOD_RES (17), (18), (19), (20): Xaa is A or G or is absent

SEQ ID NO: 21072 - protein, 39 aa, Artificial Sequence; identical to SEQ ID NO: 17968
  GFR-binding peptide
  MOD_RES (35), (35): Xaa is C or S

SEQ ID NO: 21073 - protein, 42 aa, Artificial Sequence; identical to SEQ ID NO: 17969
  GFR-binding peptide
  MOD_RES (1), (38): Xaa is C or S

SEQ ID NO: 21074 - protein, 36 aa, Artificial Sequence; identical to SEQ ID NO: 17970
  GFR-binding peptide
  MOD_RES (1), (3): Xaa is C or S
  MOD_RES (15), (16), (17), (18), (19): Xaa is A or G
  MOD_RES (20), (21), (22), (23): Xaa is A or G or is absent

SEQ ID NO: 21075 - protein, 35 aa, Artificial Sequence; identical to SEQ ID NO: 17971
  GFR-binding peptide
  MOD_RES (2), (2): Xaa is C or S

SEQ ID NO: 21076 - protein, 36 aa, Artificial Sequence; identical to SEQ ID NO: 17972
  GFR-binding peptide
  MOD_RES (34), (34): Xaa is C or S
  MOD_RES (12), (13), (14), (15), (16): Xaa is A or G
  MOD_RES (17), (18), (19), (20): Xaa is A or G or is absent

SEQ ID NO: 21077 - protein, 38 aa, Artificial Sequence; identical to SEQ ID NO: 17973
  GFR-binding peptide
  MOD_RES (35), (35): Xaa is C or S

SEQ ID NO: 21078 - protein, 38 aa, Artificial Sequence; identical to SEQ ID NO: 17974
  GFR-binding peptide
  MOD_RES (34), (34): Xaa is C or S
  MOD_RES (12), (13), (14), (15), (16): Xaa is A or G
  MOD_RES (17), (18), (19), (20): Xaa is A or G or is absent

SEQ ID NO: 21079 - protein, 39 aa, Artificial Sequence; identical to SEQ ID NO: 17975
  GFR-binding peptide
  MOD_RES (1), (38): Xaa is C or S

SEQ ID NO: 21080 - protein, 43 aa, Artificial Sequence; identical to SEQ ID NO: 17976
  GFR-binding peptide
  MOD_RES (1), (3), (40): Xaa is C or S

SEQ ID NO: 21081 - protein, 43 aa, Artificial Sequence; identical to SEQ ID NO: 17977
  GFR-binding peptide
  MOD_RES (1), (3), (40): Xaa is C or S

SEQ ID NO: 21082 - protein, 41 aa, Artificial Sequence; identical to SEQ ID NO: 17978
  GFR-binding peptide
  MOD_RES (1), (3), (40): Xaa is C or S
  MOD_RES (16), (17), (18), (19), (20): Xaa is A or G
  MOD_RES (21), (22), (23), (24): Xaa is A or G or is absent

SEQ ID NO: 21083 - protein, 34 aa, Artificial Sequence; identical to SEQ ID NO: 17979
  GFR-binding peptide
  MOD_RES (1), (1): Xaa is C or S

SEQ ID NO: 21084 - protein, 41 aa, Artificial Sequence; identical to SEQ ID NO: 17980
  GFR-binding peptide
  MOD_RES (2), (36): Xaa is C or S
  MOD_RES (14), (15), (16), (17), (18): Xaa is A or G
  MOD_RES (19), (20), (21), (22): Xaa is A or G or is absent

SEQ ID NO: 21085 - protein, 37 aa, Artificial Sequence; identical to SEQ ID NO: 17981
  GFR-binding peptide
  MOD_RES (35), (35): Xaa is C or S
  MOD_RES (11), (12), (13), (14), (15): Xaa is A or G
  MOD_RES (16), (17), (18), (19): Xaa is A or G or is absent

SEQ ID NO: 21086 - protein, 36 aa, Artificial Sequence; identical to SEQ ID NO: 17982
  GFR-binding peptide
  MOD_RES (1), (35): Xaa is C or S

SEQ ID NO: 21087 - protein, 41 aa, Artificial Sequence; identical to SEQ ID NO: 17983
  GFR-binding peptide
  MOD_RES (1), (38): Xaa is C or S

SEQ ID NO: 21088 - protein, 43 aa, Artificial Sequence; identical to SEQ ID NO: 17984
  GFR-binding peptide
  MOD_RES (1), (3), (37): Xaa is C or S
  MOD_RES (15), (16), (17), (18), (19): Xaa is A or G
  MOD_RES (20), (21), (22), (23): Xaa is A or G or is absent

SEQ ID NO: 21089 - protein, 41 aa, Artificial Sequence; identical to SEQ ID NO: 17985
  GFR-binding peptide
  MOD_RES (1), (3), (37): Xaa is C or S

SEQ ID NO: 21090 - protein, 36 aa, Artificial Sequence; identical to SEQ ID NO: 17986
  GFR-binding peptide
  MOD_RES (35), (35): Xaa is C or S

SEQ ID NO: 21091 - protein, 39 aa, Artificial Sequence; identical to SEQ ID NO: 17987
  GFR-binding peptide
  MOD_RES (34), (34): Xaa is C or S

SEQ ID NO: 21092 - protein, 39 aa, Artificial Sequence; identical to SEQ ID NO: 17988
  GFR-binding peptide
  MOD_RES (34), (34): Xaa is C or S

SEQ ID NO: 21093 - protein, 37 aa, Artificial Sequence; identical to SEQ ID NO: 17989
  GFR-binding peptide
  MOD_RES (35), (35): Xaa is C or S
  MOD_RES (11), (12), (13), (14), (15): Xaa is A or G
  MOD_RES (16), (17), (18), (19): Xaa is A or G or is absent

SEQ ID NO: 21094 - protein, 39 aa, Artificial Sequence; identical to SEQ ID NO: 17990
  GFR-binding peptide
  MOD_RES (2), (39): Xaa is C or S
  MOD_RES (15), (16), (17), (18), (19): Xaa is A or G
  MOD_RES (20), (21), (22), (23): Xaa is A or G or is absent

SEQ ID NO: 21095 - protein, 40 aa, Artificial Sequence; identical to SEQ ID NO: 17991
  GFR-binding peptide
  MOD_RES (1), (35): Xaa is C or S
  MOD_RES (13), (14), (15), (16), (17): Xaa is A or G
  MOD_RES (18), (19), (20), (21): Xaa is A or G or is absent

SEQ ID NO: 21096 - protein, 39 aa, Artificial Sequence; identical to SEQ ID NO: 17992
  GFR-binding peptide
  MOD_RES (36), (36): Xaa is C or S

SEQ ID NO: 21097 - protein, 43 aa, Artificial Sequence; identical to SEQ ID NO: 17993
  GFR-binding peptide
  MOD_RES (2), (4), (41): Xaa is C or S
  MOD_RES (17), (18), (19), (20), (21): Xaa is A or G
  MOD_RES (22), (23), (24), (25): Xaa is A or G or is absent

SEQ ID NO: 21098 - protein, 37 aa, Artificial Sequence; identical to SEQ ID NO: 17994
  GFR-binding peptide
  MOD_RES (36), (36): Xaa is C or S

SEQ ID NO: 21099 - protein, 41 aa, Artificial Sequence; identical to SEQ ID NO: 17995
  GFR-binding peptide
  MOD_RES (1), (35): Xaa is C or S

SEQ ID NO: 21100 - protein, 41 aa, Artificial Sequence; identical to SEQ ID NO: 17996
  GFR-binding peptide
  MOD_RES (2), (36): Xaa is C or S

SEQ ID NO: 21101 - protein, 44 aa, Artificial Sequence; identical to SEQ ID NO: 17997
  GFR-binding peptide
  MOD_RES (1), (3), (40): Xaa is C or S

SEQ ID NO: 21102 - protein, 42 aa, Artificial Sequence; identical to SEQ ID NO: 17998
  GFR-binding peptide
  MOD_RES (1), (38): Xaa is C or S
  MOD_RES (14), (15), (16), (17), (18): Xaa is A or G
  MOD_RES (19), (20), (21), (22): Xaa is A or G or is absent

SEQ ID NO: 21103 - protein, 38 aa, Artificial Sequence; identical to SEQ ID NO: 17999
  GFR-binding peptide
  MOD_RES (36), (36): Xaa is C or S

SEQ ID NO: 21104 - protein, 38 aa, Artificial Sequence; identical to SEQ ID NO: 18000
  GFR-binding peptide
  MOD_RES (2), (4): Xaa is C or S
  MOD_RES (17), (18), (19), (20), (21): Xaa is A or G
  MOD_RES (22), (23), (24), (25): Xaa is A or G or is absent

SEQ ID NO: 21105 - protein, 40 aa, Artificial Sequence; identical to SEQ ID NO: 18001
  GFR-binding peptide
  MOD_RES (1), (38): Xaa is C or S
  MOD_RES (14), (15), (16), (17), (18): Xaa is A or G
  MOD_RES (19), (20), (21), (22): Xaa is A or G or is absent

SEQ ID NO: 21106 - protein, 34 aa, Artificial Sequence; identical to SEQ ID NO: 18002
  GFR-binding peptide

SEQ ID NO: 21107 - protein, 35 aa, Artificial Sequence; identical to SEQ ID NO: 18003
  GFR-binding peptide
  MOD_RES (34), (34): Xaa is C or S
  MOD_RES (12), (13), (14), (15), (16): Xaa is A or G
  MOD_RES (17), (18), (19), (20): Xaa is A or G or is absent

SEQ ID NO: 21108 - protein, 37 aa, Artificial Sequence; identical to SEQ ID NO: 18004
  GFR-binding peptide
  MOD_RES (2), (4): Xaa is C or S

SEQ ID NO: 21109 - protein, 37 aa, Artificial Sequence; identical to SEQ ID NO: 18005
  GFR-binding peptide
  MOD_RES (2), (4): Xaa is C or S
  MOD_RES (16), (17), (18), (19), (20): Xaa is A or G
  MOD_RES (21), (22), (23), (24): Xaa is A or G or is absent

SEQ ID NO: 21110 - protein, 35 aa, Artificial Sequence; identical to SEQ ID NO: 18006
  GFR-binding peptide
  MOD_RES (35), (35): Xaa is C or S
  MOD_RES (11), (12), (13), (14), (15): Xaa is A or G
  MOD_RES (16), (17), (18), (19): Xaa is A or G or is absent

SEQ ID NO: 21111 - protein, 36 aa, Artificial Sequence; identical to SEQ ID NO: 18007
  GFR-binding peptide
  MOD_RES (2), (2): Xaa is C or S
  MOD_RES (15), (16), (17), (18), (19): Xaa is A or G
  MOD_RES (20), (21), (22), (23): Xaa is A or G or is absent

SEQ ID NO: 21112 - protein, 38 aa, Artificial Sequence; identical to SEQ ID NO: 18008
  GFR-binding peptide
  MOD_RES (36), (36): Xaa is C or S
  MOD_RES (12), (13), (14), (15), (16): Xaa is A or G
  MOD_RES (17), (18), (19), (20): Xaa is A or G or is absent

SEQ ID NO: 21113 - protein, 41 aa, Artificial Sequence; identical to SEQ ID NO: 18009
  GFR-binding peptide
  MOD_RES (1), (3), (40): Xaa is C or S

SEQ ID NO: 21114 - protein, 34 aa, Artificial Sequence; identical to SEQ ID NO: 18010
  GFR-binding peptide
  MOD_RES (12), (13), (14), (15), (16): Xaa is A or G
  MOD_RES (17), (18), (19), (20): Xaa is A or G or is absent

SEQ ID NO: 21115 - protein, 35 aa, Artificial Sequence; identical to SEQ ID NO: 18011
  GFR-binding peptide
  MOD_RES (35), (35): Xaa is C or S
  MOD_RES (11), (12), (13), (14), (15): Xaa is A or G
  MOD_RES (16), (17), (18), (19): Xaa is A or G or is absent

SEQ ID NO: 21116 - protein, 38 aa, Artificial Sequence; identical to SEQ ID NO: 18012
  GFR-binding peptide
  MOD_RES (1), (38): Xaa is C or S

SEQ ID NO: 21117 - protein, 38 aa, Artificial Sequence; identical to SEQ ID NO: 18013
  GFR-binding peptide
  MOD_RES (1), (35): Xaa is C or S

SEQ ID NO: 21118 - protein, 33 aa, Artificial Sequence; identical to SEQ ID NO: 18014
  GFR-binding peptide

SEQ ID NO: 21119 - protein, 42 aa, Artificial Sequence; identical to SEQ ID NO: 18015
  GFR-binding peptide
  MOD_RES (1), (3), (40): Xaa is C or S
  MOD_RES (16), (17), (18), (19), (20): Xaa is A or G
  MOD_RES (21), (22), (23), (24): Xaa is A or G or is absent

SEQ ID NO: 21120 - protein, 41 aa, Artificial Sequence; identical to SEQ ID NO: 18016
  GFR-binding peptide
  MOD_RES (2), (4), (41): Xaa is C or S

SEQ ID NO: 21121 - protein, 41 aa, Artificial Sequence; identical to SEQ ID NO: 18017
  GFR-binding peptide
  MOD_RES (1), (38): Xaa is C or S

SEQ ID NO: 21122 - protein, 38 aa, Artificial Sequence; identical to SEQ ID NO: 18018
  GFR-binding peptide
  MOD_RES (1), (38): Xaa is C or S
  MOD_RES (14), (15), (16), (17), (18): Xaa is A or G
  MOD_RES (19), (20), (21), (22): Xaa is A or G or is absent

SEQ ID NO: 21123 - protein, 42 aa, Artificial Sequence; identical to SEQ ID NO: 18019
  GFR-binding peptide
  MOD_RES (2), (39): Xaa is C or S

SEQ ID NO: 21124 - protein, 36 aa, Artificial Sequence; identical to SEQ ID NO: 18020
  GFR-binding peptide
  MOD_RES (33), (33): Xaa is C or S
  MOD_RES (11), (12), (13), (14), (15): Xaa is A or G
  MOD_RES (16), (17), (18), (19): Xaa is A or G or is absent

SEQ ID NO: 21125 - protein, 40 aa, Artificial Sequence; identical to SEQ ID NO: 18021
  GFR-binding peptide
  MOD_RES (2), (4): Xaa is C or S

SEQ ID NO: 21126 - protein, 39 aa, Artificial Sequence; identical to SEQ ID NO: 18022
  GFR-binding peptide
  MOD_RES (2), (4), (38): Xaa is C or S
  MOD_RES (16), (17), (18), (19), (20): Xaa is A or G
  MOD_RES (21), (22), (23), (24): Xaa is A or G or is absent

SEQ ID NO: 21127 - protein, 42 aa, Artificial Sequence; identical to SEQ ID NO: 18023
  GFR-binding peptide
  MOD_RES (2), (4), (41): Xaa is C or S
  MOD_RES (17), (18), (19), (20), (21): Xaa is A or G
  MOD_RES (22), (23), (24), (25): Xaa is A or G or is absent

SEQ ID NO: 21128 - protein, 45 aa, Artificial Sequence; identical to SEQ ID NO: 18024
  GFR-binding peptide
  MOD_RES (2), (4), (41): Xaa is C or S

SEQ ID NO: 21129 - protein, 34 aa, Artificial Sequence; identical to SEQ ID NO: 18025
  GFR-binding peptide
  MOD_RES (1), (1): Xaa is C or S

SEQ ID NO: 21130 - protein, 41 aa, Artificial Sequence; identical to SEQ ID NO: 18026
  GFR-binding peptide
  MOD_RES (2), (4), (38): Xaa is C or S
  MOD_RES (16), (17), (18), (19), (20): Xaa is A or G
  MOD_RES (21), (22), (23), (24): Xaa is A or G or is absent

SEQ ID NO: 21131 - protein, 35 aa, Artificial Sequence; identical to SEQ ID NO: 18027
  GFR-binding peptide
  MOD_RES (2), (2): Xaa is C or S

SEQ ID NO: 21132 - protein, 38 aa, Artificial Sequence; identical to SEQ ID NO: 18028
  GFR-binding peptide
  MOD_RES (2), (36): Xaa is C or S

SEQ ID NO: 21133 - protein, 38 aa, Artificial Sequence; identical to SEQ ID NO: 18029
  GFR-binding peptide
  MOD_RES (2), (4), (38): Xaa is C or S

SEQ ID NO: 21134 - protein, 37 aa, Artificial Sequence; identical to SEQ ID NO: 18030
  GFR-binding peptide
  MOD_RES (2), (2): Xaa is C or S

SEQ ID NO: 21135 - protein, 35 aa, Artificial Sequence; identical to SEQ ID NO: 18031
  GFR-binding peptide
  MOD_RES (1), (1): Xaa is C or S
  MOD_RES (14), (15), (16), (17), (18): Xaa is A or G
  MOD_RES (19), (20), (21), (22): Xaa is A or G or is absent

SEQ ID NO: 21136 - protein, 40 aa, Artificial Sequence; identical to SEQ ID NO: 18032
  GFR-binding peptide
  MOD_RES (2), (4): Xaa is C or S
  MOD_RES (17), (18), (19), (20), (21): Xaa is A or G
  MOD_RES (22), (23), (24), (25): Xaa is A or G or is absent

SEQ ID NO: 21137 - protein, 35 aa, Artificial Sequence; identical to SEQ ID NO: 18033
  GFR-binding peptide
  MOD_RES (35), (35): Xaa is C or S

SEQ ID NO: 21138 - protein, 40 aa, Artificial Sequence; identical to SEQ ID NO: 18034
  GFR-binding peptide
  MOD_RES (1), (3), (37): Xaa is C or S

SEQ ID NO: 21139 - protein, 38 aa, Artificial Sequence; identical to SEQ ID NO: 18035
  GFR-binding peptide
  MOD_RES (2), (36): Xaa is C or S

SEQ ID NO: 21140 - protein, 39 aa, Artificial Sequence; identical to SEQ ID NO: 18036
  GFR-binding peptide
  MOD_RES (34), (34): Xaa is C or S

SEQ ID NO: 21141 - protein, 43 aa, Artificial Sequence; identical to SEQ ID NO: 18037
  GFR-binding peptide
  MOD_RES (1), (3), (37): Xaa is C or S
  MOD_RES (15), (16), (17), (18), (19): Xaa is A or G
  MOD_RES (20), (21), (22), (23): Xaa is A or G or is absent

SEQ ID NO: 21142 - protein, 37 aa, Artificial Sequence; identical to SEQ ID NO: 18038
  GFR-binding peptide
  MOD_RES (1), (3): Xaa is C or S

SEQ ID NO: 21143 - protein, 33 aa, Artificial Sequence; identical to SEQ ID NO: 18039
  GFR-binding peptide
  MOD_RES (33), (33): Xaa is C or S
  MOD_RES (11), (12), (13), (14), (15): Xaa is A or G
  MOD_RES (16), (17), (18), (19): Xaa is A or G or is absent

SEQ ID NO: 21144 - protein, 33 aa, Artificial Sequence; identical to SEQ ID NO: 18040
  GFR-binding peptide

SEQ ID NO: 21145 - protein, 39 aa, Artificial Sequence; identical to SEQ ID NO: 18041
  GFR-binding peptide
  MOD_RES (37), (37): Xaa is C or S
  MOD_RES (13), (14), (15), (16), (17): Xaa is A or G
  MOD_RES (18), (19), (20), (21): Xaa is A or G or is absent

SEQ ID NO: 21146 - protein, 38 aa, Artificial Sequence; identical to SEQ ID NO: 18042
  GFR-binding peptide
  MOD_RES (36), (36): Xaa is C or S
  MOD_RES (12), (13), (14), (15), (16): Xaa is A or G
  MOD_RES (17), (18), (19), (20): Xaa is A or G or is absent

SEQ ID NO: 21147 - protein, 39 aa, Artificial Sequence; identical to SEQ ID NO: 18043
  GFR-binding peptide
  MOD_RES (2), (4), (38): Xaa is C or S

SEQ ID NO: 21148 - protein, 40 aa, Artificial Sequence; identical to SEQ ID NO: 18044
  GFR-binding peptide
  MOD_RES (2), (39): Xaa is C or S

SEQ ID NO: 21149 - protein, 36 aa, Artificial Sequence; identical to SEQ ID NO: 18045
  GFR-binding peptide
  MOD_RES (1), (3): Xaa is C or S

SEQ ID NO: 21150 - protein, 37 aa, Artificial Sequence; identical to SEQ ID NO: 18046
  GFR-binding peptide
  MOD_RES (33), (33): Xaa is C or S

SEQ ID NO: 21151 - protein, 35 aa, Artificial Sequence; identical to SEQ ID NO: 18047
  GFR-binding peptide

SEQ ID NO: 21152 - protein, 38 aa, Artificial Sequence; identical to SEQ ID NO: 18048
  GFR-binding peptide
  MOD_RES (35), (35): Xaa is C or S
  MOD_RES (11), (12), (13), (14), (15): Xaa is A or G
  MOD_RES (16), (17), (18), (19): Xaa is A or G or is absent

SEQ ID NO: 21153 - protein, 38 aa, Artificial Sequence; identical to SEQ ID NO: 18049
  GFR-binding peptide
  MOD_RES (37), (37): Xaa is C or S

SEQ ID NO: 21154 - protein, 36 aa, Artificial Sequence; identical to SEQ ID NO: 18050
  GFR-binding peptide
  MOD_RES (35), (35): Xaa is C or S
  MOD_RES (11), (12), (13), (14), (15): Xaa is A or G
  MOD_RES (16), (17), (18), (19): Xaa is A or G or is absent

SEQ ID NO: 21155 - protein, 39 aa, Artificial Sequence; identical to SEQ ID NO: 18051
  GFR-binding peptide
  MOD_RES (37), (37): Xaa is C or S
  MOD_RES (13), (14), (15), (16), (17): Xaa is A or G
  MOD_RES (18), (19), (20), (21): Xaa is A or G or is absent

SEQ ID NO: 21156 - protein, 39 aa, Artificial Sequence; identical to SEQ ID NO: 18052
  GFR-binding peptide
  MOD_RES (1), (35): Xaa is C or S
  MOD_RES (13), (14), (15), (16), (17): Xaa is A or G
  MOD_RES (18), (19), (20), (21): Xaa is A or G or is absent

SEQ ID NO: 21157 - protein, 44 aa, Artificial Sequence; identical to SEQ ID NO: 18053
  GFR-binding peptide
  MOD_RES (2), (4), (38): Xaa is C or S
  MOD_RES (16), (17), (18), (19), (20): Xaa is A or G
  MOD_RES (21), (22), (23), (24): Xaa is A or G or is absent

SEQ ID NO: 21158 - protein, 42 aa, Artificial Sequence; identical to SEQ ID NO: 18054
  GFR-binding peptide
  MOD_RES (2), (36): Xaa is C or S
  MOD_RES (14), (15), (16), (17), (18): Xaa is A or G
  MOD_RES (19), (20), (21), (22): Xaa is A or G or is absent

SEQ ID NO: 21159 - protein, 39 aa, Artificial Sequence; identical to SEQ ID NO: 18055
  GFR-binding peptide
  MOD_RES (1), (38): Xaa is C or S
  MOD_RES (14), (15), (16), (17), (18): Xaa is A or G
  MOD_RES (19), (20), (21), (22): Xaa is A or G or is absent

SEQ ID NO: 21160 - protein, 32 aa, Artificial Sequence; identical to SEQ ID NO: 18056
  GFR-binding peptide

SEQ ID NO: 21161 - protein, 44 aa, Artificial Sequence; identical to SEQ ID NO: 18057
  GFR-binding peptide
  MOD_RES (2), (4), (41): Xaa is C or S

SEQ ID NO: 21162 - protein, 36 aa, Artificial Sequence; identical to SEQ ID NO: 18058
  GFR-binding peptide
  MOD_RES (1), (35): Xaa is C or S
  MOD_RES (13), (14), (15), (16), (17): Xaa is A or G
  MOD_RES (18), (19), (20), (21): Xaa is A or G or is absent

SEQ ID NO: 21163 - protein, 33 aa, Artificial Sequence; identical to SEQ ID NO: 18059
  GFR-binding peptide
  MOD_RES (12), (13), (14), (15), (16): Xaa is A or G
  MOD_RES (17), (18), (19), (20): Xaa is A or G or is absent

SEQ ID NO: 21164 - protein, 38 aa, Artificial Sequence; identical to SEQ ID NO: 18060
  GFR-binding peptide
  MOD_RES (1), (3), (37): Xaa is C or S
  MOD_RES (15), (16), (17), (18), (19): Xaa is A or G
  MOD_RES (20), (21), (22), (23): Xaa is A or G or is absent

SEQ ID NO: 21165 - protein, 36 aa, Artificial Sequence; identical to SEQ ID NO: 18061
  GFR-binding peptide
  MOD_RES (13), (14), (15), (16), (17): Xaa is A or G
  MOD_RES (18), (19), (20), (21): Xaa is A or G or is absent

SEQ ID NO: 21166 - protein, 33 aa, Artificial Sequence; identical to SEQ ID NO: 18062
  GFR-binding peptide
  MOD_RES (11), (12), (13), (14), (15): Xaa is A or G
  MOD_RES (16), (17), (18), (19): Xaa is A or G or is absent

SEQ ID NO: 21167 - protein, 38 aa, Artificial Sequence; identical to SEQ ID NO: 18063
  GFR-binding peptide
  MOD_RES (1), (38): Xaa is C or S

SEQ ID NO: 21168 - protein, 42 aa, Artificial Sequence; identical to SEQ ID NO: 18064
  GFR-binding peptide
  MOD_RES (1), (3), (40): Xaa is C or S

SEQ ID NO: 21169 - protein, 40 aa, Artificial Sequence; identical to SEQ ID NO: 18065
  GFR-binding peptide
  MOD_RES (1), (35): Xaa is C or S

SEQ ID NO: 21170 - protein, 37 aa, Artificial Sequence; identical to SEQ ID NO: 18066
  GFR-binding peptide
  MOD_RES (2), (36): Xaa is C or S
  MOD_RES (14), (15), (16), (17), (18): Xaa is A or G
  MOD_RES (19), (20), (21), (22): Xaa is A or G or is absent

SEQ ID NO: 21171 - protein, 36 aa, Artificial Sequence; identical to SEQ ID NO: 18067
  GFR-binding peptide
  MOD_RES (2), (2): Xaa is C or S

SEQ ID NO: 21172 - protein, 42 aa, Artificial Sequence; identical to SEQ ID NO: 18068
  GFR-binding peptide
  MOD_RES (2), (4), (41): Xaa is C or S
  MOD_RES (17), (18), (19), (20), (21): Xaa is A or G
  MOD_RES (22), (23), (24), (25): Xaa is A or G or is absent

SEQ ID NO: 21173 - protein, 38 aa, Artificial Sequence; identical to SEQ ID NO: 18069
  GFR-binding peptide
  MOD_RES (35), (35): Xaa is C or S
  MOD_RES (11), (12), (13), (14), (15): Xaa is A or G
  MOD_RES (16), (17), (18), (19): Xaa is A or G or is absent

SEQ ID NO: 21174 - protein, 37 aa, Artificial Sequence; identical to SEQ ID NO: 18070
  GFR-binding peptide
  MOD_RES (1), (35): Xaa is C or S

SEQ ID NO: 21175 - protein, 40 aa, Artificial Sequence; identical to SEQ ID NO: 18071
  GFR-binding peptide
  MOD_RES (2), (4), (38): Xaa is C or S
  MOD_RES (16), (17), (18), (19), (20): Xaa is A or G
  MOD_RES (21), (22), (23), (24): Xaa is A or G or is absent

SEQ ID NO: 21176 - protein, 37 aa, Artificial Sequence; identical to SEQ ID NO: 18072
  GFR-binding peptide
  MOD_RES (33), (33): Xaa is C or S
  MOD_RES (11), (12), (13), (14), (15): Xaa is A or G
  MOD_RES (16), (17), (18), (19): Xaa is A or G or is absent

SEQ ID NO: 21177 - protein, 35 aa, Artificial Sequence; identical to SEQ ID NO: 18073
  GFR-binding peptide
  MOD_RES (34), (34): Xaa is C or S

SEQ ID NO: 21178 - protein, 41 aa, Artificial Sequence; identical to SEQ ID NO: 18074
  GFR-binding peptide
  MOD_RES (1), (38): Xaa is C or S

SEQ ID NO: 21179 - protein, 43 aa, Artificial Sequence; identical to SEQ ID NO: 18075
  GFR-binding peptide
  MOD_RES (2), (4), (41): Xaa is C or S

SEQ ID NO: 21180 - protein, 39 aa, Artificial Sequence; identical to SEQ ID NO: 18076
  GFR-binding peptide
  MOD_RES (33), (33): Xaa is C or S
  MOD_RES (11), (12), (13), (14), (15): Xaa is A or G
  MOD_RES (16), (17), (18), (19): Xaa is A or G or is absent

SEQ ID NO: 21181 - protein, 40 aa, Artificial Sequence; identical to SEQ ID NO: 18077
  GFR-binding peptide
  MOD_RES (1), (3), (37): Xaa is C or S

SEQ ID NO: 21182 - protein, 39 aa, Artificial Sequence; identical to SEQ ID NO: 18078
  GFR-binding peptide
  MOD_RES (1), (35): Xaa is C or S
  MOD_RES (13), (14), (15), (16), (17): Xaa is A or G
  MOD_RES (18), (19), (20), (21): Xaa is A or G or is absent

SEQ ID NO: 21183 - protein, 43 aa, Artificial Sequence; identical to SEQ ID NO: 18079
  GFR-binding peptide
  MOD_RES (2), (4), (38): Xaa is C or S
  MOD_RES (16), (17), (18), (19), (20): Xaa is A or G
  MOD_RES (21), (22), (23), (24): Xaa is A or G or is absent

SEQ ID NO: 21184 - protein, 37 aa, Artificial Sequence; identical to SEQ ID NO: 18080
  GFR-binding peptide
  MOD_RES (2), (4): Xaa is C or S

SEQ ID NO: 21185 - protein, 35 aa, Artificial Sequence; identical to SEQ ID NO: 18081
  GFR-binding peptide
  MOD_RES (1), (35): Xaa is C or S

SEQ ID NO: 21186 - protein, 38 aa, Artificial Sequence; identical to SEQ ID NO: 18082
  GFR-binding peptide
  MOD_RES (2), (2): Xaa is C or S

SEQ ID NO: 21187 - protein, 40 aa, Artificial Sequence; identical to SEQ ID NO: 18083
  GFR-binding peptide
  MOD_RES (2), (39): Xaa is C or S
  MOD_RES (15), (16), (17), (18), (19): Xaa is A or G
  MOD_RES (20), (21), (22), (23): Xaa is A or G or is absent

SEQ ID NO: 21188 - protein, 39 aa, Artificial Sequence; identical to SEQ ID NO: 18084
  GFR-binding peptide
  MOD_RES (33), (33): Xaa is C or S
  MOD_RES (11), (12), (13), (14), (15): Xaa is A or G
  MOD_RES (16), (17), (18), (19): Xaa is A or G or is absent

SEQ ID NO: 21189 - protein, 40 aa, Artificial Sequence; identical to SEQ ID NO: 18085
  GFR-binding peptide
  MOD_RES (2), (4): Xaa is C or S
  MOD_RES (17), (18), (19), (20), (21): Xaa is A or G
  MOD_RES (22), (23), (24), (25): Xaa is A or G or is absent

SEQ ID NO: 21190 - protein, 38 aa, Artificial Sequence; identical to SEQ ID NO: 18086
  GFR-binding peptide
  MOD_RES (1), (3): Xaa is C or S

SEQ ID NO: 21191 - protein, 39 aa, Artificial Sequence; identical to SEQ ID NO: 18087
  GFR-binding peptide
  MOD_RES (34), (34): Xaa is C or S
  MOD_RES (12), (13), (14), (15), (16): Xaa is A or G
  MOD_RES (17), (18), (19), (20): Xaa is A or G or is absent

SEQ ID NO: 21192 - protein, 42 aa, Artificial Sequence; identical to SEQ ID NO: 18088
  GFR-binding peptide
  MOD_RES (1), (3), (37): Xaa is C or S
  MOD_RES (15), (16), (17), (18), (19): Xaa is A or G
  MOD_RES (20), (21), (22), (23): Xaa is A or G or is absent

SEQ ID NO: 21193 - protein, 34 aa, Artificial Sequence; identical to SEQ ID NO: 18089
  GFR-binding peptide
  MOD_RES (33), (33): Xaa is C or S

SEQ ID NO: 21194 - protein, 38 aa, Artificial Sequence; identical to SEQ ID NO: 18090
  GFR-binding peptide
  MOD_RES (1), (3): Xaa is C or S
  MOD_RES (16), (17), (18), (19), (20): Xaa is A or G
  MOD_RES (21), (22), (23), (24): Xaa is A or G or is absent

SEQ ID NO: 21195 - protein, 35 aa, Artificial Sequence; identical to SEQ ID NO: 18091
  GFR-binding peptide
  MOD_RES (2), (2): Xaa is C or S
  MOD_RES (14), (15), (16), (17), (18): Xaa is A or G
  MOD_RES (19), (20), (21), (22): Xaa is A or G or is absent

SEQ ID NO: 21196 - protein, 36 aa, Artificial Sequence; identical to SEQ ID NO: 18092
  GFR-binding peptide

SEQ ID NO: 21197 - protein, 36 aa, Artificial Sequence; identical to SEQ ID NO: 18093
  GFR-binding peptide
  MOD_RES (1), (1): Xaa is C or S

SEQ ID NO: 21198 - protein, 38 aa, Artificial Sequence; identical to SEQ ID NO: 18094
  GFR-binding peptide
  MOD_RES (1), (35): Xaa is C or S
  MOD_RES (13), (14), (15), (16), (17): Xaa is A or G
  MOD_RES (18), (19), (20), (21): Xaa is A or G or is absent

SEQ ID NO: 21199 - protein, 33 aa, Artificial Sequence; identical to SEQ ID NO: 18095
  GFR-binding peptide

SEQ ID NO: 21200 - protein, 39 aa, Artificial Sequence; identical to SEQ ID NO: 18096
  GFR-binding peptide
  MOD_RES (34), (34): Xaa is C or S
  MOD_RES (12), (13), (14), (15), (16): Xaa is A or G
  MOD_RES (17), (18), (19), (20): Xaa is A or G or is absent

SEQ ID NO: 21201 - protein, 35 aa, Artificial Sequence; identical to SEQ ID NO: 18097
  GFR-binding peptide
  MOD_RES (33), (33): Xaa is C or S

SEQ ID NO: 21202 - protein, 32 aa, Artificial Sequence; identical to SEQ ID NO: 18098
  GFR-binding peptide
  MOD_RES (11), (12), (13), (14), (15): Xaa is A or G
  MOD_RES (16), (17), (18), (19): Xaa is A or G or is absent

SEQ ID NO: 21203 - protein, 36 aa, Artificial Sequence; identical to SEQ ID NO: 18099
  GFR-binding peptide
  MOD_RES (35), (35): Xaa is C or S

SEQ ID NO: 21204 - protein, 34 aa, Artificial Sequence; identical to SEQ ID NO: 18100
  GFR-binding peptide
  MOD_RES (34), (34): Xaa is C or S

SEQ ID NO: 21205 - protein, 35 aa, Artificial Sequence; identical to SEQ ID NO: 18101
  GFR-binding peptide
  MOD_RES (1), (1): Xaa is C or S
  MOD_RES (14), (15), (16), (17), (18): Xaa is A or G
  MOD_RES (19), (20), (21), (22): Xaa is A or G or is absent

SEQ ID NO: 21206 - protein, 36 aa, Artificial Sequence; identical to SEQ ID NO: 18102
  GFR-binding peptide

SEQ ID NO: 21207 - protein, 44 aa, Artificial Sequence; identical to SEQ ID NO: 18103
  GFR-binding peptide
  MOD_RES (2), (4), (41): Xaa is C or S

SEQ ID NO: 21208 - protein, 37 aa, Artificial Sequence; identical to SEQ ID NO: 18104
  GFR-binding peptide
  MOD_RES (33), (33): Xaa is C or S
  MOD_RES (11), (12), (13), (14), (15): Xaa is A or G
  MOD_RES (16), (17), (18), (19): Xaa is A or G or is absent

SEQ ID NO: 21209 - protein, 43 aa, Artificial Sequence; identical to SEQ ID NO: 18105
  GFR-binding peptide
  MOD_RES (2), (39): Xaa is C or S
  MOD_RES (15), (16), (17), (18), (19): Xaa is A or G
  MOD_RES (20), (21), (22), (23): Xaa is A or G or is absent

SEQ ID NO: 21210 - protein, 36 aa, Artificial Sequence; identical to SEQ ID NO: 18106
  GFR-binding peptide
  MOD_RES (1), (35): Xaa is C or S
  MOD_RES (13), (14), (15), (16), (17): Xaa is A or G
  MOD_RES (18), (19), (20), (21): Xaa is A or G or is absent

SEQ ID NO: 21211 - protein, 44 aa, Artificial Sequence; identical to SEQ ID NO: 18107
  GFR-binding peptide
  MOD_RES (2), (4), (41): Xaa is C or S

SEQ ID NO: 21212 - protein, 40 aa, Artificial Sequence; identical to SEQ ID NO: 18108
  GFR-binding peptide
  MOD_RES (37), (37): Xaa is C or S

SEQ ID NO: 21213 - protein, 37 aa, Artificial Sequence; identical to SEQ ID NO: 18109
  GFR-binding peptide
  MOD_RES (1), (35): Xaa is C or S
  MOD_RES (13), (14), (15), (16), (17): Xaa is A or G
  MOD_RES (18), (19), (20), (21): Xaa is A or G or is absent

SEQ ID NO: 21214 - protein, 38 aa, Artificial Sequence; identical to SEQ ID NO: 18110
  GFR-binding peptide
  MOD_RES (36), (36): Xaa is C or S
  MOD_RES (12), (13), (14), (15), (16): Xaa is A or G
  MOD_RES (17), (18), (19), (20): Xaa is A or G or is absent

SEQ ID NO: 21215 - protein, 38 aa, Artificial Sequence; identical to SEQ ID NO: 18111
  GFR-binding peptide
  MOD_RES (1), (3), (37): Xaa is C or S

SEQ ID NO: 21216 - protein, 36 aa, Artificial Sequence; identical to SEQ ID NO: 18112
  GFR-binding peptide
  MOD_RES (1), (3): Xaa is C or S
  MOD_RES (15), (16), (17), (18), (19): Xaa is A or G
  MOD_RES (20), (21), (22), (23): Xaa is A or G or is absent

SEQ ID NO: 21217 - protein, 41 aa, Artificial Sequence; identical to SEQ ID NO: 18113
  GFR-binding peptide
  MOD_RES (2), (39): Xaa is C or S

SEQ ID NO: 21218 - protein, 39 aa, Artificial Sequence; identical to SEQ ID NO: 18114
  GFR-binding peptide
  MOD_RES (1), (38): Xaa is C or S

SEQ ID NO: 21219 - protein, 36 aa, Artificial Sequence; identical to SEQ ID NO: 18115
  GFR-binding peptide
  MOD_RES (35), (35): Xaa is C or S
  MOD_RES (11), (12), (13), (14), (15): Xaa is A or G
  MOD_RES (16), (17), (18), (19): Xaa is A or G or is absent

SEQ ID NO: 21220 - protein, 41 aa, Artificial Sequence; identical to SEQ ID NO: 18116
  GFR-binding peptide
  MOD_RES (2), (4), (41): Xaa is C or S

SEQ ID NO: 21221 - protein, 44 aa, Artificial Sequence; identical to SEQ ID NO: 18117
  GFR-binding peptide
  MOD_RES (1), (3), (40): Xaa is C or S
  MOD_RES (16), (17), (18), (19), (20): Xaa is A or G
  MOD_RES (21), (22), (23), (24): Xaa is A or G or is absent

SEQ ID NO: 21222 - protein, 39 aa, Artificial Sequence; identical to SEQ ID NO: 18118
  GFR-binding peptide
  MOD_RES (2), (36): Xaa is C or S
  MOD_RES (14), (15), (16), (17), (18): Xaa is A or G
  MOD_RES (19), (20), (21), (22): Xaa is A or G or is absent

SEQ ID NO: 21223 - protein, 38 aa, Artificial Sequence; identical to SEQ ID NO: 18119
  GFR-binding peptide
  MOD_RES (33), (33): Xaa is C or S

SEQ ID NO: 21224 - protein, 39 aa, Artificial Sequence; identical to SEQ ID NO: 18120
  GFR-binding peptide
  MOD_RES (33), (33): Xaa is C or S

SEQ ID NO: 21225 - protein, 43 aa, Artificial Sequence; identical to SEQ ID NO: 18121
  GFR-binding peptide
  MOD_RES (2), (4), (41): Xaa is C or S

SEQ ID NO: 21226 - protein, 38 aa, Artificial Sequence; identical to SEQ ID NO: 18122
  GFR-binding peptide
  MOD_RES (2), (4), (38): Xaa is C or S
  MOD_RES (16), (17), (18), (19), (20): Xaa is A or G
  MOD_RES (21), (22), (23), (24): Xaa is A or G or is absent

SEQ ID NO: 21227 - protein, 34 aa, Artificial Sequence; identical to SEQ ID NO: 18123
  GFR-binding peptide
  MOD_RES (33), (33): Xaa is C or S

SEQ ID NO: 21228 - protein, 44 aa, Artificial Sequence; identical to SEQ ID NO: 18124
  GFR-binding peptide
  MOD_RES (2), (4), (41): Xaa is C or S
  MOD_RES (17), (18), (19), (20), (21): Xaa is A or G
  MOD_RES (22), (23), (24), (25): Xaa is A or G or is absent

SEQ ID NO: 21229 - protein, 45 aa, Artificial Sequence; identical to SEQ ID NO: 18125
  GFR-binding peptide
  MOD_RES (2), (4), (41): Xaa is C or S

SEQ ID NO: 21230 - protein, 35 aa, Artificial Sequence; identical to SEQ ID NO: 18126
  GFR-binding peptide
  MOD_RES (33), (33): Xaa is C or S
  MOD_RES (11), (12), (13), (14), (15): Xaa is A or G
  MOD_RES (16), (17), (18), (19): Xaa is A or G or is absent

SEQ ID NO: 21231 - protein, 37 aa, Artificial Sequence; identical to SEQ ID NO: 18127
  GFR-binding peptide
  MOD_RES (1), (3): Xaa is C or S

SEQ ID NO: 21232 - protein, 40 aa, Artificial Sequence; identical to SEQ ID NO: 18128
  GFR-binding peptide
  MOD_RES (2), (4), (38): Xaa is C or S
  MOD_RES (16), (17), (18), (19), (20): Xaa is A or G
  MOD_RES (21), (22), (23), (24): Xaa is A or G or is absent

SEQ ID NO: 21233 - protein, 36 aa, Artificial Sequence; identical to SEQ ID NO: 18129
  GFR-binding peptide
  MOD_RES (1), (1): Xaa is C or S
  MOD_RES (14), (15), (16), (17), (18): Xaa is A or G
  MOD_RES (19), (20), (21), (22): Xaa is A or G or is absent

SEQ ID NO: 21234 - protein, 44 aa, Artificial Sequence; identical to SEQ ID NO: 18130
  GFR-binding peptide
  MOD_RES (2), (4), (38): Xaa is C or S
  MOD_RES (16), (17), (18), (19), (20): Xaa is A or G
  MOD_RES (21), (22), (23), (24): Xaa is A or G or is absent

SEQ ID NO: 21235 - protein, 40 aa, Artificial Sequence; identical to SEQ ID NO: 18131
  GFR-binding peptide
  MOD_RES (2), (39): Xaa is C or S

SEQ ID NO: 21236 - protein, 36 aa, Artificial Sequence; identical to SEQ ID NO: 18132
  GFR-binding peptide
  MOD_RES (2), (36): Xaa is C or S
  MOD_RES (14), (15), (16), (17), (18): Xaa is A or G
  MOD_RES (19), (20), (21), (22): Xaa is A or G or is absent

SEQ ID NO: 21237 - protein, 40 aa, Artificial Sequence; identical to SEQ ID NO: 18133
  GFR-binding peptide
  MOD_RES (34), (34): Xaa is C or S

SEQ ID NO: 21238 - protein, 37 aa, Artificial Sequence; identical to SEQ ID NO: 18134
  GFR-binding peptide
  MOD_RES (33), (33): Xaa is C or S

SEQ ID NO: 21239 - protein, 40 aa, Artificial Sequence; identical to SEQ ID NO: 18135
  GFR-binding peptide
  MOD_RES (2), (36): Xaa is C or S

SEQ ID NO: 21240 - protein, 41 aa, Artificial Sequence; identical to SEQ ID NO: 18136
  GFR-binding peptide
  MOD_RES (2), (36): Xaa is C or S

SEQ ID NO: 21241 - protein, 41 aa, Artificial Sequence; identical to SEQ ID NO: 18137
  GFR-binding peptide
  MOD_RES (1), (38): Xaa is C or S

SEQ ID NO: 21242 - protein, 43 aa, Artificial Sequence; identical to SEQ ID NO: 18138
  GFR-binding peptide
  MOD_RES (1), (3), (40): Xaa is C or S
  MOD_RES (16), (17), (18), (19), (20): Xaa is A or G
  MOD_RES (21), (22), (23), (24): Xaa is A or G or is absent

SEQ ID NO: 21243 - protein, 41 aa, Artificial Sequence; identical to SEQ ID NO: 18139
  GFR-binding peptide
  MOD_RES (1), (38): Xaa is C or S
  MOD_RES (14), (15), (16), (17), (18): Xaa is A or G
  MOD_RES (19), (20), (21), (22): Xaa is A or G or is absent

SEQ ID NO: 21244 - protein, 43 aa, Artificial Sequence; identical to SEQ ID NO: 18140
  GFR-binding peptide
  MOD_RES (2), (4), (38): Xaa is C or S
  MOD_RES (16), (17), (18), (19), (20): Xaa is A or G
  MOD_RES (21), (22), (23), (24): Xaa is A or G or is absent

SEQ ID NO: 21245 - protein, 32 aa, Artificial Sequence; identical to SEQ ID NO: 18141
  GFR-binding peptide

SEQ ID NO: 21246 - protein, 36 aa, Artificial Sequence; identical to SEQ ID NO: 18142
  GFR-binding peptide
  MOD_RES (36), (36): Xaa is C or S
  MOD_RES (12), (13), (14), (15), (16): Xaa is A or G
  MOD_RES (17), (18), (19), (20): Xaa is A or G or is absent

SEQ ID NO: 21247 - protein, 33 aa, Artificial Sequence; identical to SEQ ID NO: 18143
  GFR-binding peptide
  MOD_RES (11), (12), (13), (14), (15): Xaa is A or G
  MOD_RES (16), (17), (18), (19): Xaa is A or G or is absent

SEQ ID NO: 21248 - protein, 38 aa, Artificial Sequence; identical to SEQ ID NO: 18144
  GFR-binding peptide
  MOD_RES (34), (34): Xaa is C or S
  MOD_RES (12), (13), (14), (15), (16): Xaa is A or G
  MOD_RES (17), (18), (19), (20): Xaa is A or G or is absent

SEQ ID NO: 21249 - protein, 44 aa, Artificial Sequence; identical to SEQ ID NO: 18145
  GFR-binding peptide
  MOD_RES (2), (4), (38): Xaa is C or S

SEQ ID NO: 21250 - protein, 36 aa, Artificial Sequence; identical to SEQ ID NO: 18146
  GFR-binding peptide
  MOD_RES (1), (1): Xaa is C or S

SEQ ID NO: 21251 - protein, 40 aa, Artificial Sequence; identical to SEQ ID NO: 18147
  GFR-binding peptide
  MOD_RES (1), (35): Xaa is C or S
  MOD_RES (13), (14), (15), (16), (17): Xaa is A or G
  MOD_RES (18), (19), (20), (21): Xaa is A or G or is absent

SEQ ID NO: 21252 - protein, 42 aa, Artificial Sequence; identical to SEQ ID NO: 18148
  GFR-binding peptide
  MOD_RES (2), (36): Xaa is C or S

SEQ ID NO: 21253 - protein, 40 aa, Artificial Sequence; identical to SEQ ID NO: 18149
  GFR-binding peptide
  MOD_RES (36), (36): Xaa is C or S
  MOD_RES (12), (13), (14), (15), (16): Xaa is A or G
  MOD_RES (17), (18), (19), (20): Xaa is A or G or is absent

SEQ ID NO: 21254 - protein, 39 aa, Artificial Sequence; identical to SEQ ID NO: 18150
  GFR-binding peptide
  MOD_RES (1), (3): Xaa is C or S
  MOD_RES (16), (17), (18), (19), (20): Xaa is A or G
  MOD_RES (21), (22), (23), (24): Xaa is A or G or is absent

SEQ ID NO: 21255 - protein, 38 aa, Artificial Sequence; identical to SEQ ID NO: 18151
  GFR-binding peptide
  MOD_RES (1), (3): Xaa is C or S

SEQ ID NO: 21256 - protein, 39 aa, Artificial Sequence; identical to SEQ ID NO: 18152
  GFR-binding peptide
  MOD_RES (1), (3), (37): Xaa is C or S
  MOD_RES (15), (16), (17), (18), (19): Xaa is A or G
  MOD_RES (20), (21), (22), (23): Xaa is A or G or is absent

SEQ ID NO: 21257 - protein, 43 aa, Artificial Sequence; identical to SEQ ID NO: 18153
  GFR-binding peptide
  MOD_RES (2), (4), (38): Xaa is C or S
  MOD_RES (16), (17), (18), (19), (20): Xaa is A or G
  MOD_RES (21), (22), (23), (24): Xaa is A or G or is absent

SEQ ID NO: 21258 - protein, 40 aa, Artificial Sequence; identical to SEQ ID NO: 18154
  GFR-binding peptide
  MOD_RES (1), (3), (40): Xaa is C or S
  MOD_RES (16), (17), (18), (19), (20): Xaa is A or G
  MOD_RES (21), (22), (23), (24): Xaa is A or G or is absent

SEQ ID NO: 21259 - protein, 44 aa, Artificial Sequence; identical to SEQ ID NO: 18155
  GFR-binding peptide
  MOD_RES (1), (3), (40): Xaa is C or S
  MOD_RES (16), (17), (18), (19), (20): Xaa is A or G
  MOD_RES (21), (22), (23), (24): Xaa is A or G or is absent

SEQ ID NO: 21260 - protein, 38 aa, Artificial Sequence; identical to SEQ ID NO: 18156
  GFR-binding peptide
  MOD_RES (33), (33): Xaa is C or S
  MOD_RES (11), (12), (13), (14), (15): Xaa is A or G
  MOD_RES (16), (17), (18), (19): Xaa is A or G or is absent

SEQ ID NO: 21261 - protein, 36 aa, Artificial Sequence; identical to SEQ ID NO: 18157
  GFR-binding peptide
  MOD_RES (1), (35): Xaa is C or S
  MOD_RES (13), (14), (15), (16), (17): Xaa is A or G
  MOD_RES (18), (19), (20), (21): Xaa is A or G or is absent

SEQ ID NO: 21262 - protein, 40 aa, Artificial Sequence; identical to SEQ ID NO: 18158
  GFR-binding peptide
  MOD_RES (1), (3), (37): Xaa is C or S

SEQ ID NO: 21263 - protein, 33 aa, Artificial Sequence; identical to SEQ ID NO: 18159
  GFR-binding peptide
  MOD_RES (12), (13), (14), (15), (16): Xaa is A or G
  MOD_RES (17), (18), (19), (20): Xaa is A or G or is absent

SEQ ID NO: 21264 - protein, 43 aa, Artificial Sequence; identical to SEQ ID NO: 18160
  GFR-binding peptide
  MOD_RES (2), (4), (38): Xaa is C or S

SEQ ID NO: 21265 - protein, 40 aa, Artificial Sequence; identical to SEQ ID NO: 18161
  GFR-binding peptide
  MOD_RES (34), (34): Xaa is C or S
  MOD_RES (12), (13), (14), (15), (16): Xaa is A or G
  MOD_RES (17), (18), (19), (20): Xaa is A or G or is absent

SEQ ID NO: 21266 - protein, 37 aa, Artificial Sequence; identical to SEQ ID NO: 18162
  GFR-binding peptide
  MOD_RES (36), (36): Xaa is C or S

SEQ ID NO: 21267 - protein, 40 aa, Artificial Sequence; identical to SEQ ID NO: 18163
  GFR-binding peptide
  MOD_RES (34), (34): Xaa is C or S
  MOD_RES (12), (13), (14), (15), (16): Xaa is A or G
  MOD_RES (17), (18), (19), (20): Xaa is A or G or is absent

SEQ ID NO: 21268 - protein, 37 aa, Artificial Sequence; identical to SEQ ID NO: 18164
  GFR-binding peptide
  MOD_RES (2), (36): Xaa is C or S
  MOD_RES (14), (15), (16), (17), (18): Xaa is A or G
  MOD_RES (19), (20), (21), (22): Xaa is A or G or is absent

SEQ ID NO: 21269 - protein, 41 aa, Artificial Sequence; identical to SEQ ID NO: 18165
  GFR-binding peptide
  MOD_RES (1), (35): Xaa is C or S
  MOD_RES (13), (14), (15), (16), (17): Xaa is A or G
  MOD_RES (18), (19), (20), (21): Xaa is A or G or is absent

SEQ ID NO: 21270 - protein, 43 aa, Artificial Sequence; identical to SEQ ID NO: 18166
  GFR-binding peptide
  MOD_RES (1), (3), (40): Xaa is C or S

SEQ ID NO: 21271 - protein, 38 aa, Artificial Sequence; identical to SEQ ID NO: 18167
  GFR-binding peptide
  MOD_RES (35), (35): Xaa is C or S

SEQ ID NO: 21272 - protein, 37 aa, Artificial Sequence; identical to SEQ ID NO: 18168
  GFR-binding peptide
  MOD_RES (1), (1): Xaa is C or S
  MOD_RES (14), (15), (16), (17), (18): Xaa is A or G
  MOD_RES (19), (20), (21), (22): Xaa is A or G or is absent

SEQ ID NO: 21273 - protein, 36 aa, Artificial Sequence; identical to SEQ ID NO: 18169
  GFR-binding peptide
  MOD_RES (1), (35): Xaa is C or S
  MOD_RES (13), (14), (15), (16), (17): Xaa is A or G
  MOD_RES (18), (19), (20), (21): Xaa is A or G or is absent

SEQ ID NO: 21274 - protein, 36 aa, Artificial Sequence; identical to SEQ ID NO: 18170
  GFR-binding peptide
  MOD_RES (2), (36): Xaa is C or S
  MOD_RES (14), (15), (16), (17), (18): Xaa is A or G
  MOD_RES (19), (20), (21), (22): Xaa is A or G or is absent

SEQ ID NO: 21275 - protein, 35 aa, Artificial Sequence; identical to SEQ ID NO: 18171
  GFR-binding peptide
  MOD_RES (1), (1): Xaa is C or S

SEQ ID NO: 21276 - protein, 40 aa, Artificial Sequence; identical to SEQ ID NO: 18172
  GFR-binding peptide
  MOD_RES (2), (4), (38): Xaa is C or S

SEQ ID NO: 21277 - protein, 41 aa, Artificial Sequence; identical to SEQ ID NO: 18173
  GFR-binding peptide
  MOD_RES (1), (3), (37): Xaa is C or S

SEQ ID NO: 21278 - protein, 38 aa, Artificial Sequence; identical to SEQ ID NO: 18174
  GFR-binding peptide
  MOD_RES (2), (4): Xaa is C or S
  MOD_RES (17), (18), (19), (20), (21): Xaa is A or G
  MOD_RES (22), (23), (24), (25): Xaa is A or G or is absent

SEQ ID NO: 21279 - protein, 39 aa, Artificial Sequence; identical to SEQ ID NO: 18175
  GFR-binding peptide
  MOD_RES (35), (35): Xaa is C or S

SEQ ID NO: 21280 - protein, 40 aa, Artificial Sequence; identical to SEQ ID NO: 18176
  GFR-binding peptide
  MOD_RES (2), (39): Xaa is C or S

SEQ ID NO: 21281 - protein, 38 aa, Artificial Sequence; identical to SEQ ID NO: 18177
  GFR-binding peptide
  MOD_RES (2), (2): Xaa is C or S

SEQ ID NO: 21282 - protein, 38 aa, Artificial Sequence; identical to SEQ ID NO: 18178
  GFR-binding peptide
  MOD_RES (1), (3), (37): Xaa is C or S
  MOD_RES (15), (16), (17), (18), (19): Xaa is A or G
  MOD_RES (20), (21), (22), (23): Xaa is A or G or is absent

SEQ ID NO: 21283 - protein, 39 aa, Artificial Sequence; identical to SEQ ID NO: 18179
  GFR-binding peptide
  MOD_RES (1), (38): Xaa is C or S
  MOD_RES (14), (15), (16), (17), (18): Xaa is A or G
  MOD_RES (19), (20), (21), (22): Xaa is A or G or is absent

SEQ ID NO: 21284 - protein, 39 aa, Artificial Sequence; identical to SEQ ID NO: 18180
  GFR-binding peptide
  MOD_RES (2), (4), (38): Xaa is C or S

SEQ ID NO: 21285 - protein, 35 aa, Artificial Sequence; identical to SEQ ID NO: 18181
  GFR-binding peptide
  MOD_RES (1), (35): Xaa is C or S
  MOD_RES (13), (14), (15), (16), (17): Xaa is A or G
  MOD_RES (18), (19), (20), (21): Xaa is A or G or is absent

SEQ ID NO: 21286 - protein, 40 aa, Artificial Sequence; identical to SEQ ID NO: 18182
  GFR-binding peptide
  MOD_RES (37), (37): Xaa is C or S

SEQ ID NO: 21287 - protein, 39 aa, Artificial Sequence; identical to SEQ ID NO: 18183
  GFR-binding peptide
  MOD_RES (35), (35): Xaa is C or S

SEQ ID NO: 21288 - protein, 42 aa, Artificial Sequence; identical to SEQ ID NO: 18184
  GFR-binding peptide
  MOD_RES (1), (3), (37): Xaa is C or S

SEQ ID NO: 21289 - protein, 39 aa, Artificial Sequence; identical to SEQ ID NO: 18185
  GFR-binding peptide
  MOD_RES (35), (35): Xaa is C or S

SEQ ID NO: 21290 - protein, 40 aa, Artificial Sequence; identical to SEQ ID NO: 18186
  GFR-binding peptide
  MOD_RES (36), (36): Xaa is C or S

SEQ ID NO: 21291 - protein, 40 aa, Artificial Sequence; identical to SEQ ID NO: 18187
  GFR-binding peptide
  MOD_RES (1), (3), (40): Xaa is C or S

SEQ ID NO: 21292 - protein, 38 aa, Artificial Sequence; identical to SEQ ID NO: 18188
  GFR-binding peptide
  MOD_RES (1), (38): Xaa is C or S
  MOD_RES (14), (15), (16), (17), (18): Xaa is A or G
  MOD_RES (19), (20), (21), (22): Xaa is A or G or is absent

SEQ ID NO: 21293 - protein, 41 aa, Artificial Sequence; identical to SEQ ID NO: 18189
  GFR-binding peptide
  MOD_RES (2), (4), (41): Xaa is C or S

SEQ ID NO: 21294 - protein, 37 aa, Artificial Sequence; identical to SEQ ID NO: 18190
  GFR-binding peptide
  MOD_RES (1), (3), (37): Xaa is C or S
  MOD_RES (15), (16), (17), (18), (19): Xaa is A or G
  MOD_RES (20), (21), (22), (23): Xaa is A or G or is absent

SEQ ID NO: 21295 - protein, 42 aa, Artificial Sequence; identical to SEQ ID NO: 18191
  GFR-binding peptide
  MOD_RES (2), (4), (38): Xaa is C or S
  MOD_RES (16), (17), (18), (19), (20): Xaa is A or G
  MOD_RES (21), (22), (23), (24): Xaa is A or G or is absent

SEQ ID NO: 21296 - protein, 37 aa, Artificial Sequence; identical to SEQ ID NO: 18192
  GFR-binding peptide
  MOD_RES (37), (37): Xaa is C or S

SEQ ID NO: 21297 - protein, 33 aa, Artificial Sequence; identical to SEQ ID NO: 18193
  GFR-binding peptide
  MOD_RES (12), (13), (14), (15), (16): Xaa is A or G
  MOD_RES (17), (18), (19), (20): Xaa is A or G or is absent

SEQ ID NO: 21298 - protein, 42 aa, Artificial Sequence; identical to SEQ ID NO: 18194
  GFR-binding peptide
  MOD_RES (2), (36): Xaa is C or S

SEQ ID NO: 21299 - protein, 39 aa, Artificial Sequence; identical to SEQ ID NO: 18195
  GFR-binding peptide
  MOD_RES (2), (4): Xaa is C or S
  MOD_RES (17), (18), (19), (20), (21): Xaa is A or G
  MOD_RES (22), (23), (24), (25): Xaa is A or G or is absent

SEQ ID NO: 21300 - protein, 36 aa, Artificial Sequence; identical to SEQ ID NO: 18196
  GFR-binding peptide
  MOD_RES (2), (2): Xaa is C or S

SEQ ID NO: 21301 - protein, 33 aa, Artificial Sequence; identical to SEQ ID NO: 18197
  GFR-binding peptide
  MOD_RES (12), (13), (14), (15), (16): Xaa is A or G
  MOD_RES (17), (18), (19), (20): Xaa is A or G or is absent

SEQ ID NO: 21302 - protein, 42 aa, Artificial Sequence; identical to SEQ ID NO: 18198
  GFR-binding peptide
  MOD_RES (2), (4), (41): Xaa is C or S

SEQ ID NO: 21303 - protein, 37 aa, Artificial Sequence; identical to SEQ ID NO: 18199
  GFR-binding peptide
  MOD_RES (34), (34): Xaa is C or S
  MOD_RES (12), (13), (14), (15), (16): Xaa is A or G
  MOD_RES (17), (18), (19), (20): Xaa is A or G or is absent

SEQ ID NO: 21304 - protein, 42 aa, Artificial Sequence; identical to SEQ ID NO: 18200
  GFR-binding peptide
  MOD_RES (2), (4), (41): Xaa is C or S

SEQ ID NO: 21305 - protein, 44 aa, Artificial Sequence; identical to SEQ ID NO: 18201
  GFR-binding peptide
  MOD_RES (2), (4), (41): Xaa is C or S
  MOD_RES (17), (18), (19), (20), (21): Xaa is A or G
  MOD_RES (22), (23), (24), (25): Xaa is A or G or is absent

SEQ ID NO: 21306 - protein, 38 aa, Artificial Sequence; identical to SEQ ID NO: 18202
  GFR-binding peptide
  MOD_RES (37), (37): Xaa is C or S
  MOD_RES (13), (14), (15), (16), (17): Xaa is A or G
  MOD_RES (18), (19), (20), (21): Xaa is A or G or is absent

SEQ ID NO: 21307 - protein, 41 aa, Artificial Sequence; identical to SEQ ID NO: 18203
  GFR-binding peptide
  MOD_RES (2), (4), (41): Xaa is C or S

SEQ ID NO: 21308 - protein, 41 aa, Artificial Sequence; identical to SEQ ID NO: 18204
  GFR-binding peptide
  MOD_RES (1), (3), (40): Xaa is C or S

SEQ ID NO: 21309 - protein, 39 aa, Artificial Sequence; identical to SEQ ID NO: 18205
  GFR-binding peptide
  MOD_RES (1), (38): Xaa is C or S
  MOD_RES (14), (15), (16), (17), (18): Xaa is A or G
  MOD_RES (19), (20), (21), (22): Xaa is A or G or is absent

SEQ ID NO: 21310 - protein, 34 aa, Artificial Sequence; identical to SEQ ID NO: 18206
  GFR-binding peptide
  MOD_RES (1), (1): Xaa is C or S

SEQ ID NO: 21311 - protein, 39 aa, Artificial Sequence; identical to SEQ ID NO: 18207
  GFR-binding peptide
  MOD_RES (35), (35): Xaa is C or S

SEQ ID NO: 21312 - protein, 33 aa, Artificial Sequence; identical to SEQ ID NO: 18208
  GFR-binding peptide

SEQ ID NO: 21313 - protein, 42 aa, Artificial Sequence; identical to SEQ ID NO: 18209
  GFR-binding peptide
  MOD_RES (1), (3), (37): Xaa is C or S
  MOD_RES (15), (16), (17), (18), (19): Xaa is A or G
  MOD_RES (20), (21), (22), (23): Xaa is A or G or is absent

SEQ ID NO: 21314 - protein, 39 aa, Artificial Sequence; identical to SEQ ID NO: 18210
  GFR-binding peptide
  MOD_RES (2), (4): Xaa is C or S

SEQ ID NO: 21315 - protein, 34 aa, Artificial Sequence; identical to SEQ ID NO: 18211
  GFR-binding peptide

SEQ ID NO: 21316 - protein, 38 aa, Artificial Sequence; identical to SEQ ID NO: 18212
  GFR-binding peptide
  MOD_RES (33), (33): Xaa is C or S
  MOD_RES (11), (12), (13), (14), (15): Xaa is A or G
  MOD_RES (16), (17), (18), (19): Xaa is A or G or is absent

SEQ ID NO: 21317 - protein, 42 aa, Artificial Sequence; identical to SEQ ID NO: 18213
  GFR-binding peptide
  MOD_RES (2), (4), (41): Xaa is C or S
  MOD_RES (17), (18), (19), (20), (21): Xaa is A or G
  MOD_RES (22), (23), (24), (25): Xaa is A or G or is absent

SEQ ID NO: 21318 - protein, 44 aa, Artificial Sequence; identical to SEQ ID NO: 18214
  GFR-binding peptide
  MOD_RES (1), (3), (40): Xaa is C or S

SEQ ID NO: 21319 - protein, 40 aa, Artificial Sequence; identical to SEQ ID NO: 18215
  GFR-binding peptide
  MOD_RES (1), (3), (40): Xaa is C or S

SEQ ID NO: 21320 - protein, 34 aa, Artificial Sequence; identical to SEQ ID NO: 18216
  GFR-binding peptide
  MOD_RES (34), (34): Xaa is C or S

SEQ ID NO: 21321 - protein, 36 aa, Artificial Sequence; identical to SEQ ID NO: 18217
  GFR-binding peptide
  MOD_RES (1), (3): Xaa is C or S

SEQ ID NO: 21322 - protein, 38 aa, Artificial Sequence; identical to SEQ ID NO: 18218
  GFR-binding peptide
  MOD_RES (1), (38): Xaa is C or S

SEQ ID NO: 21323 - protein, 38 aa, Artificial Sequence; identical to SEQ ID NO: 18219
  GFR-binding peptide
  MOD_RES (1), (35): Xaa is C or S

SEQ ID NO: 21324 - protein, 38 aa, Artificial Sequence; identical to SEQ ID NO: 18220
  GFR-binding peptide
  MOD_RES (37), (37): Xaa is C or S

SEQ ID NO: 21325 - protein, 40 aa, Artificial Sequence; identical to SEQ ID NO: 18221
  GFR-binding peptide
  MOD_RES (1), (3), (37): Xaa is C or S
  MOD_RES (15), (16), (17), (18), (19): Xaa is A or G
  MOD_RES (20), (21), (22), (23): Xaa is A or G or is absent

SEQ ID NO: 21326 - protein, 39 aa, Artificial Sequence; identical to SEQ ID NO: 18222
  GFR-binding peptide
  MOD_RES (2), (39): Xaa is C or S

SEQ ID NO: 21327 - protein, 37 aa, Artificial Sequence; identical to SEQ ID NO: 18223
  GFR-binding peptide
  MOD_RES (34), (34): Xaa is C or S

SEQ ID NO: 21328 - protein, 34 aa, Artificial Sequence; identical to SEQ ID NO: 18224
  GFR-binding peptide
  MOD_RES (33), (33): Xaa is C or S

SEQ ID NO: 21329 - protein, 42 aa, Artificial Sequence; identical to SEQ ID NO: 18225
  GFR-binding peptide
  MOD_RES (2), (4), (38): Xaa is C or S

SEQ ID NO: 21330 - protein, 39 aa, Artificial Sequence; identical to SEQ ID NO: 18226
  GFR-binding peptide
  MOD_RES (2), (4): Xaa is C or S

SEQ ID NO: 21331 - protein, 36 aa, Artificial Sequence; identical to SEQ ID NO: 18227
  GFR-binding peptide
  MOD_RES (35), (35): Xaa is C or S
  MOD_RES (11), (12), (13), (14), (15): Xaa is A or G
  MOD_RES (16), (17), (18), (19): Xaa is A or G or is absent

SEQ ID NO: 21332 - protein, 40 aa, Artificial Sequence; identical to SEQ ID NO: 18228
  GFR-binding peptide
  MOD_RES (1), (35): Xaa is C or S

SEQ ID NO: 21333 - protein, 40 aa, Artificial Sequence; identical to SEQ ID NO: 18229
  GFR-binding peptide
  MOD_RES (36), (36): Xaa is C or S
  MOD_RES (12), (13), (14), (15), (16): Xaa is A or G
  MOD_RES (17), (18), (19), (20): Xaa is A or G or is absent

SEQ ID NO: 21334 - protein, 39 aa, Artificial Sequence; identical to SEQ ID NO: 18230
  GFR-binding peptide
  MOD_RES (33), (33): Xaa is C or S
  MOD_RES (11), (12), (13), (14), (15): Xaa is A or G
  MOD_RES (16), (17), (18), (19): Xaa is A or G or is absent

SEQ ID NO: 21335 - protein, 41 aa, Artificial Sequence; identical to SEQ ID NO: 18231
  GFR-binding peptide
  MOD_RES (1), (3), (40): Xaa is C or S

SEQ ID NO: 21336 - protein, 37 aa, Artificial Sequence; identical to SEQ ID NO: 18232
  GFR-binding peptide
  MOD_RES (1), (35): Xaa is C or S

SEQ ID NO: 21337 - protein, 35 aa, Artificial Sequence; identical to SEQ ID NO: 18233
  GFR-binding peptide
  MOD_RES (1), (35): Xaa is C or S

SEQ ID NO: 21338 - protein, 35 aa, Artificial Sequence; identical to SEQ ID NO: 18234
  GFR-binding peptide
  MOD_RES (33), (33): Xaa is C or S

SEQ ID NO: 21339 - protein, 35 aa, Artificial Sequence; identical to SEQ ID NO: 18235
  GFR-binding peptide
  MOD_RES (33), (33): Xaa is C or S
  MOD_RES (11), (12), (13), (14), (15): Xaa is A or G
  MOD_RES (16), (17), (18), (19): Xaa is A or G or is absent

SEQ ID NO: 21340 - protein, 39 aa, Artificial Sequence; identical to SEQ ID NO: 18236
  GFR-binding peptide
  MOD_RES (2), (36): Xaa is C or S

SEQ ID NO: 21341 - protein, 34 aa, Artificial Sequence; identical to SEQ ID NO: 18237
  GFR-binding peptide
  MOD_RES (1), (1): Xaa is C or S
  MOD_RES (13), (14), (15), (16), (17): Xaa is A or G
  MOD_RES (18), (19), (20), (21): Xaa is A or G or is absent

SEQ ID NO: 21342 - protein, 41 aa, Artificial Sequence; identical to SEQ ID NO: 18238
  GFR-binding peptide
  MOD_RES (1), (35): Xaa is C or S
  MOD_RES (13), (14), (15), (16), (17): Xaa is A or G
  MOD_RES (18), (19), (20), (21): Xaa is A or G or is absent

SEQ ID NO: 21343 - protein, 37 aa, Artificial Sequence; identical to SEQ ID NO: 18239
  GFR-binding peptide
  MOD_RES (2), (36): Xaa is C or S
  MOD_RES (14), (15), (16), (17), (18): Xaa is A or G
  MOD_RES (19), (20), (21), (22): Xaa is A or G or is absent

SEQ ID NO: 21344 - protein, 38 aa, Artificial Sequence; identical to SEQ ID NO: 18240
  GFR-binding peptide
  MOD_RES (1), (3), (37): Xaa is C or S

SEQ ID NO: 21345 - protein, 43 aa, Artificial Sequence; identical to SEQ ID NO: 18241
  GFR-binding peptide
  MOD_RES (2), (39): Xaa is C or S
  MOD_RES (15), (16), (17), (18), (19): Xaa is A or G
  MOD_RES (20), (21), (22), (23): Xaa is A or G or is absent

SEQ ID NO: 21346 - protein, 38 aa, Artificial Sequence; identical to SEQ ID NO: 18242
  GFR-binding peptide
  MOD_RES (33), (33): Xaa is C or S

SEQ ID NO: 21347 - protein, 42 aa, Artificial Sequence; identical to SEQ ID NO: 18243
  GFR-binding peptide
  MOD_RES (1), (3), (40): Xaa is C or S
  MOD_RES (16), (17), (18), (19), (20): Xaa is A or G
  MOD_RES (21), (22), (23), (24): Xaa is A or G or is absent

SEQ ID NO: 21348 - protein, 42 aa, Artificial Sequence; identical to SEQ ID NO: 18244
  GFR-binding peptide
  MOD_RES (1), (38): Xaa is C or S

SEQ ID NO: 21349 - protein, 45 aa, Artificial Sequence; identical to SEQ ID NO: 18245
  GFR-binding peptide
  MOD_RES (2), (4), (41): Xaa is C or S
  MOD_RES (17), (18), (19), (20), (21): Xaa is A or G
  MOD_RES (22), (23), (24), (25): Xaa is A or G or is absent

SEQ ID NO: 21350 - protein, 37 aa, Artificial Sequence; identical to SEQ ID NO: 18246
  GFR-binding peptide
  MOD_RES (1), (1): Xaa is C or S
  MOD_RES (14), (15), (16), (17), (18): Xaa is A or G
  MOD_RES (19), (20), (21), (22): Xaa is A or G or is absent

SEQ ID NO: 21351 - protein, 41 aa, Artificial Sequence; identical to SEQ ID NO: 18247
  GFR-binding peptide
  MOD_RES (2), (36): Xaa is C or S
  MOD_RES (14), (15), (16), (17), (18): Xaa is A or G
  MOD_RES (19), (20), (21), (22): Xaa is A or G or is absent

SEQ ID NO: 21352 - protein, 42 aa, Artificial Sequence; identical to SEQ ID NO: 18248
  GFR-binding peptide
  MOD_RES (2), (4), (38): Xaa is C or S

SEQ ID NO: 21353 - protein, 41 aa, Artificial Sequence; identical to SEQ ID NO: 18249
  GFR-binding peptide
  MOD_RES (1), (3), (37): Xaa is C or S
  MOD_RES (15), (16), (17), (18), (19): Xaa is A or G
  MOD_RES (20), (21), (22), (23): Xaa is A or G or is absent

SEQ ID NO: 21354 - protein, 41 aa, Artificial Sequence; identical to SEQ ID NO: 18250
  GFR-binding peptide
  MOD_RES (2), (39): Xaa is C or S
  MOD_RES (15), (16), (17), (18), (19): Xaa is A or G
  MOD_RES (20), (21), (22), (23): Xaa is A or G or is absent

SEQ ID NO: 21355 - protein, 39 aa, Artificial Sequence; identical to SEQ ID NO: 18251
  GFR-binding peptide
  MOD_RES (37), (37): Xaa is C or S

SEQ ID NO: 21356 - protein, 35 aa, Artificial Sequence; identical to SEQ ID NO: 18252
  GFR-binding peptide
  MOD_RES (13), (14), (15), (16), (17): Xaa is A or G
  MOD_RES (18), (19), (20), (21): Xaa is A or G or is absent

SEQ ID NO: 21357 - protein, 41 aa, Artificial Sequence; identical to SEQ ID NO: 18253
  GFR-binding peptide
  MOD_RES (2), (4), (38): Xaa is C or S
  MOD_RES (16), (17), (18), (19), (20): Xaa is A or G
  MOD_RES (21), (22), (23), (24): Xaa is A or G or is absent

SEQ ID NO: 21358 - protein, 39 aa, Artificial Sequence; identical to SEQ ID NO: 18254
  GFR-binding peptide
  MOD_RES (1), (35): Xaa is C or S
  MOD_RES (13), (14), (15), (16), (17): Xaa is A or G
  MOD_RES (18), (19), (20), (21): Xaa is A or G or is absent

SEQ ID NO: 21359 - protein, 38 aa, Artificial Sequence; identical to SEQ ID NO: 18255
  GFR-binding peptide
  MOD_RES (2), (4): Xaa is C or S

SEQ ID NO: 21360 - protein, 36 aa, Artificial Sequence; identical to SEQ ID NO: 18256
  GFR-binding peptide
  MOD_RES (34), (34): Xaa is C or S

SEQ ID NO: 21361 - protein, 34 aa, Artificial Sequence; identical to SEQ ID NO: 18257
  GFR-binding peptide

SEQ ID NO: 21362 - protein, 42 aa, Artificial Sequence; identical to SEQ ID NO: 18258
  GFR-binding peptide
  MOD_RES (2), (36): Xaa is C or S
  MOD_RES (14), (15), (16), (17), (18): Xaa is A or G
  MOD_RES (19), (20), (21), (22): Xaa is A or G or is absent

SEQ ID NO: 21363 - protein, 36 aa, Artificial Sequence; identical to SEQ ID NO: 18259
  GFR-binding peptide
  MOD_RES (2), (36): Xaa is C or S

SEQ ID NO: 21364 - protein, 40 aa, Artificial Sequence; identical to SEQ ID NO: 18260
  GFR-binding peptide
  MOD_RES (37), (37): Xaa is C or S

SEQ ID NO: 21365 - protein, 42 aa, Artificial Sequence; identical to SEQ ID NO: 18261
  GFR-binding peptide
  MOD_RES (2), (4), (41): Xaa is C or S

SEQ ID NO: 21366 - protein, 35 aa, Artificial Sequence; identical to SEQ ID NO: 18262
  GFR-binding peptide
  MOD_RES (1), (1): Xaa is C or S

SEQ ID NO: 21367 - protein, 38 aa, Artificial Sequence; identical to SEQ ID NO: 18263
  GFR-binding peptide
  MOD_RES (34), (34): Xaa is C or S

SEQ ID NO: 21368 - protein, 41 aa, Artificial Sequence; identical to SEQ ID NO: 18264
  GFR-binding peptide
  MOD_RES (2), (39): Xaa is C or S

SEQ ID NO: 21369 - protein, 35 aa, Artificial Sequence; identical to SEQ ID NO: 18265
  GFR-binding peptide
  MOD_RES (2), (2): Xaa is C or S

SEQ ID NO: 21370 - protein, 39 aa, Artificial Sequence; identical to SEQ ID NO: 18266
  GFR-binding peptide
  MOD_RES (2), (4): Xaa is C or S
  MOD_RES (17), (18), (19), (20), (21): Xaa is A or G
  MOD_RES (22), (23), (24), (25): Xaa is A or G or is absent

SEQ ID NO: 21371 - protein, 44 aa, Artificial Sequence; identical to SEQ ID NO: 18267
  GFR-binding peptide
  MOD_RES (2), (4), (41): Xaa is C or S
  MOD_RES (17), (18), (19), (20), (21): Xaa is A or G
  MOD_RES (22), (23), (24), (25): Xaa is A or G or is absent

SEQ ID NO: 21372 - protein, 34 aa, Artificial Sequence; identical to SEQ ID NO: 18268
  GFR-binding peptide

SEQ ID NO: 21373 - protein, 37 aa, Artificial Sequence; identical to SEQ ID NO: 18269
  GFR-binding peptide
  MOD_RES (33), (33): Xaa is C or S
  MOD_RES (11), (12), (13), (14), (15): Xaa is A or G
  MOD_RES (16), (17), (18), (19): Xaa is A or G or is absent

SEQ ID NO: 21374 - protein, 39 aa, Artificial Sequence; identical to SEQ ID NO: 18270
  GFR-binding peptide
  MOD_RES (2), (4), (38): Xaa is C or S
  MOD_RES (16), (17), (18), (19), (20): Xaa is A or G
  MOD_RES (21), (22), (23), (24): Xaa is A or G or is absent

SEQ ID NO: 21375 - protein, 40 aa, Artificial Sequence; identical to SEQ ID NO: 18271
  GFR-binding peptide
  MOD_RES (34), (34): Xaa is C or S

SEQ ID NO: 21376 - protein, 37 aa, Artificial Sequence; identical to SEQ ID NO: 18272
  GFR-binding peptide
  MOD_RES (2), (4): Xaa is C or S
  MOD_RES (16), (17), (18), (19), (20): Xaa is A or G
  MOD_RES (21), (22), (23), (24): Xaa is A or G or is absent

SEQ ID NO: 21377 - protein, 35 aa, Artificial Sequence; identical to SEQ ID NO: 18273
  GFR-binding peptide
  MOD_RES (34), (34): Xaa is C or S

SEQ ID NO: 21378 - protein, 41 aa, Artificial Sequence; identical to SEQ ID NO: 18274
  GFR-binding peptide
  MOD_RES (2), (39): Xaa is C or S
  MOD_RES (15), (16), (17), (18), (19): Xaa is A or G
  MOD_RES (20), (21), (22), (23): Xaa is A or G or is absent

SEQ ID NO: 21379 - protein, 38 aa, Artificial Sequence; identical to SEQ ID NO: 18275
  GFR-binding peptide
  MOD_RES (1), (35): Xaa is C or S

SEQ ID NO: 21380 - protein, 38 aa, Artificial Sequence; identical to SEQ ID NO: 18276
  GFR-binding peptide
  MOD_RES (35), (35): Xaa is C or S
  MOD_RES (11), (12), (13), (14), (15): Xaa is A or G
  MOD_RES (16), (17), (18), (19): Xaa is A or G or is absent

SEQ ID NO: 21381 - protein, 38 aa, Artificial Sequence; identical to SEQ ID NO: 18277
  GFR-binding peptide
  MOD_RES (2), (4): Xaa is C or S
  MOD_RES (17), (18), (19), (20), (21): Xaa is A or G
  MOD_RES (22), (23), (24), (25): Xaa is A or G or is absent

SEQ ID NO: 21382 - protein, 35 aa, Artificial Sequence; identical to SEQ ID NO: 18278
  GFR-binding peptide
  MOD_RES (35), (35): Xaa is C or S

SEQ ID NO: 21383 - protein, 37 aa, Artificial Sequence; identical to SEQ ID NO: 18279
  GFR-binding peptide
  MOD_RES (2), (2): Xaa is C or S
  MOD_RES (15), (16), (17), (18), (19): Xaa is A or G
  MOD_RES (20), (21), (22), (23): Xaa is A or G or is absent

SEQ ID NO: 21384 - protein, 39 aa, Artificial Sequence; identical to SEQ ID NO: 18280
  GFR-binding peptide
  MOD_RES (33), (33): Xaa is C or S
  MOD_RES (11), (12), (13), (14), (15): Xaa is A or G
  MOD_RES (16), (17), (18), (19): Xaa is A or G or is absent

SEQ ID NO: 21385 - protein, 36 aa, Artificial Sequence; identical to SEQ ID NO: 18281
  GFR-binding peptide
  MOD_RES (2), (36): Xaa is C or S

SEQ ID NO: 21386 - protein, 35 aa, Artificial Sequence; identical to SEQ ID NO: 18282
  GFR-binding peptide
  MOD_RES (34), (34): Xaa is C or S

SEQ ID NO: 21387 - protein, 38 aa, Artificial Sequence; identical to SEQ ID NO: 18283
  GFR-binding peptide
  MOD_RES (34), (34): Xaa is C or S
  MOD_RES (12), (13), (14), (15), (16): Xaa is A or G
  MOD_RES (17), (18), (19), (20): Xaa is A or G or is absent

SEQ ID NO: 21388 - protein, 36 aa, Artificial Sequence; identical to SEQ ID NO: 18284
  GFR-binding peptide
  MOD_RES (2), (2): Xaa is C or S

SEQ ID NO: 21389 - protein, 41 aa, Artificial Sequence; identical to SEQ ID NO: 18285
  GFR-binding peptide
  MOD_RES (37), (37): Xaa is C or S
  MOD_RES (13), (14), (15), (16), (17): Xaa is A or G
  MOD_RES (18), (19), (20), (21): Xaa is A or G or is absent

SEQ ID NO: 21390 - protein, 39 aa, Artificial Sequence; identical to SEQ ID NO: 18286
  GFR-binding peptide
  MOD_RES (37), (37): Xaa is C or S
  MOD_RES (13), (14), (15), (16), (17): Xaa is A or G
  MOD_RES (18), (19), (20), (21): Xaa is A or G or is absent

SEQ ID NO: 21391 - protein, 41 aa, Artificial Sequence; identical to SEQ ID NO: 18287
  GFR-binding peptide
  MOD_RES (2), (4), (38): Xaa is C or S

SEQ ID NO: 21392 - protein, 38 aa, Artificial Sequence; identical to SEQ ID NO: 18288
  GFR-binding peptide
  MOD_RES (36), (36): Xaa is C or S
  MOD_RES (12), (13), (14), (15), (16): Xaa is A or G
  MOD_RES (17), (18), (19), (20): Xaa is A or G or is absent

SEQ ID NO: 21393 - protein, 38 aa, Artificial Sequence; identical to SEQ ID NO: 18289
  GFR-binding peptide
  MOD_RES (37), (37): Xaa is C or S
  MOD_RES (13), (14), (15), (16), (17): Xaa is A or G
  MOD_RES (18), (19), (20), (21): Xaa is A or G or is absent

SEQ ID NO: 21394 - protein, 35 aa, Artificial Sequence; identical to SEQ ID NO: 18290
  GFR-binding peptide
  MOD_RES (33), (33): Xaa is C or S

SEQ ID NO: 21395 - protein, 41 aa, Artificial Sequence; identical to SEQ ID NO: 18291
  GFR-binding peptide
  MOD_RES (37), (37): Xaa is C or S

SEQ ID NO: 21396 - protein, 38 aa, Artificial Sequence; identical to SEQ ID NO: 18292
  GFR-binding peptide
  MOD_RES (1), (3): Xaa is C or S

SEQ ID NO: 21397 - protein, 35 aa, Artificial Sequence; identical to SEQ ID NO: 18293
  GFR-binding peptide
  MOD_RES (34), (34): Xaa is C or S
  MOD_RES (12), (13), (14), (15), (16): Xaa is A or G
  MOD_RES (17), (18), (19), (20): Xaa is A or G or is absent

SEQ ID NO: 21398 - protein, 32 aa, Artificial Sequence; identical to SEQ ID NO: 18294
  GFR-binding peptide
  MOD_RES (11), (12), (13), (14), (15): Xaa is A or G
  MOD_RES (16), (17), (18), (19): Xaa is A or G or is absent

SEQ ID NO: 21399 - protein, 36 aa, Artificial Sequence; identical to SEQ ID NO: 18295
  GFR-binding peptide
  MOD_RES (36), (36): Xaa is C or S

SEQ ID NO: 21400 - protein, 36 aa, Artificial Sequence; identical to SEQ ID NO: 18296
  GFR-binding peptide
  MOD_RES (2), (2): Xaa is C or S
  MOD_RES (15), (16), (17), (18), (19): Xaa is A or G
  MOD_RES (20), (21), (22), (23): Xaa is A or G or is absent

SEQ ID NO: 21401 - protein, 44 aa, Artificial Sequence; identical to SEQ ID NO: 18297
  GFR-binding peptide
  MOD_RES (2), (4), (41): Xaa is C or S
  MOD_RES (17), (18), (19), (20), (21): Xaa is A or G
  MOD_RES (22), (23), (24), (25): Xaa is A or G or is absent

SEQ ID NO: 21402 - protein, 44 aa, Artificial Sequence; identical to SEQ ID NO: 18298
  GFR-binding peptide
  MOD_RES (2), (4), (38): Xaa is C or S
  MOD_RES (16), (17), (18), (19), (20): Xaa is A or G
  MOD_RES (21), (22), (23), (24): Xaa is A or G or is absent

SEQ ID NO: 21403 - protein, 39 aa, Artificial Sequence; identical to SEQ ID NO: 18299
  GFR-binding peptide
  MOD_RES (2), (4), (38): Xaa is C or S
  MOD_RES (16), (17), (18), (19), (20): Xaa is A or G
  MOD_RES (21), (22), (23), (24): Xaa is A or G or is absent

SEQ ID NO: 21404 - protein, 42 aa, Artificial Sequence; identical to SEQ ID NO: 18300
  GFR-binding peptide
  MOD_RES (1), (3), (40): Xaa is C or S

SEQ ID NO: 21405 - protein, 39 aa, Artificial Sequence; identical to SEQ ID NO: 18301
  GFR-binding peptide
  MOD_RES (36), (36): Xaa is C or S
  MOD_RES (12), (13), (14), (15), (16): Xaa is A or G
  MOD_RES (17), (18), (19), (20): Xaa is A or G or is absent

SEQ ID NO: 21406 - protein, 34 aa, Artificial Sequence; identical to SEQ ID NO: 18302
  GFR-binding peptide
  MOD_RES (33), (33): Xaa is C or S
  MOD_RES (11), (12), (13), (14), (15): Xaa is A or G
  MOD_RES (16), (17), (18), (19): Xaa is A or G or is absent

SEQ ID NO: 21407 - protein, 35 aa, Artificial Sequence; identical to SEQ ID NO: 18303
  GFR-binding peptide
  MOD_RES (12), (13), (14), (15), (16): Xaa is A or G
  MOD_RES (17), (18), (19), (20): Xaa is A or G or is absent

SEQ ID NO: 21408 - protein, 43 aa, Artificial Sequence; identical to SEQ ID NO: 18304
  GFR-binding peptide
  MOD_RES (2), (4), (41): Xaa is C or S
  MOD_RES (17), (18), (19), (20), (21): Xaa is A or G
  MOD_RES (22), (23), (24), (25): Xaa is A or G or is absent

SEQ ID NO: 21409 - protein, 40 aa, Artificial Sequence; identical to SEQ ID NO: 18305
  GFR-binding peptide
  MOD_RES (2), (36): Xaa is C or S
  MOD_RES (14), (15), (16), (17), (18): Xaa is A or G
  MOD_RES (19), (20), (21), (22): Xaa is A or G or is absent

SEQ ID NO: 21410 - protein, 36 aa, Artificial Sequence; identical to SEQ ID NO: 18306
  GFR-binding peptide
  MOD_RES (35), (35): Xaa is C or S

SEQ ID NO: 21411 - protein, 40 aa, Artificial Sequence; identical to SEQ ID NO: 18307
  GFR-binding peptide
  MOD_RES (2), (36): Xaa is C or S
  MOD_RES (14), (15), (16), (17), (18): Xaa is A or G
  MOD_RES (19), (20), (21), (22): Xaa is A or G or is absent

SEQ ID NO: 21412 - protein, 35 aa, Artificial Sequence; identical to SEQ ID NO: 18308
  GFR-binding peptide
  MOD_RES (2), (2): Xaa is C or S
  MOD_RES (14), (15), (16), (17), (18): Xaa is A or G
  MOD_RES (19), (20), (21), (22): Xaa is A or G or is absent

SEQ ID NO: 21413 - protein, 40 aa, Artificial Sequence; identical to SEQ ID NO: 18309
  GFR-binding peptide
  MOD_RES (2), (36): Xaa is C or S
  MOD_RES (14), (15), (16), (17), (18): Xaa is A or G
  MOD_RES (19), (20), (21), (22): Xaa is A or G or is absent

SEQ ID NO: 21414 - protein, 39 aa, Artificial Sequence; identical to SEQ ID NO: 18310
  GFR-binding peptide
  MOD_RES (1), (3): Xaa is C or S
  MOD_RES (16), (17), (18), (19), (20): Xaa is A or G
  MOD_RES (21), (22), (23), (24): Xaa is A or G or is absent

SEQ ID NO: 21415 - protein, 41 aa, Artificial Sequence; identical to SEQ ID NO: 18311
  GFR-binding peptide
  MOD_RES (37), (37): Xaa is C or S

SEQ ID NO: 21416 - protein, 36 aa, Artificial Sequence; identical to SEQ ID NO: 18312
  GFR-binding peptide
  MOD_RES (13), (14), (15), (16), (17): Xaa is A or G
  MOD_RES (18), (19), (20), (21): Xaa is A or G or is absent

SEQ ID NO: 21417 - protein, 36 aa, Artificial Sequence; identical to SEQ ID NO: 18313
  GFR-binding peptide
  MOD_RES (1), (35): Xaa is C or S
  MOD_RES (13), (14), (15), (16), (17): Xaa is A or G
  MOD_RES (18), (19), (20), (21): Xaa is A or G or is absent

SEQ ID NO: 21418 - protein, 39 aa, Artificial Sequence; identical to SEQ ID NO: 18314
  GFR-binding peptide
  MOD_RES (34), (34): Xaa is C or S

SEQ ID NO: 21419 - protein, 38 aa, Artificial Sequence; identical to SEQ ID NO: 18315
  GFR-binding peptide
  MOD_RES (2), (4), (38): Xaa is C or S

SEQ ID NO: 21420 - protein, 34 aa, Artificial Sequence; identical to SEQ ID NO: 18316
  GFR-binding peptide
  MOD_RES (34), (34): Xaa is C or S
  MOD_RES (12), (13), (14), (15), (16): Xaa is A or G
  MOD_RES (17), (18), (19), (20): Xaa is A or G or is absent

SEQ ID NO: 21421 - protein, 35 aa, Artificial Sequence; identical to SEQ ID NO: 18317
  GFR-binding peptide
  MOD_RES (12), (13), (14), (15), (16): Xaa is A or G
  MOD_RES (17), (18), (19), (20): Xaa is A or G or is absent

SEQ ID NO: 21422 - protein, 40 aa, Artificial Sequence; identical to SEQ ID NO: 18318
  GFR-binding peptide
  MOD_RES (2), (39): Xaa is C or S
  MOD_RES (15), (16), (17), (18), (19): Xaa is A or G
  MOD_RES (20), (21), (22), (23): Xaa is A or G or is absent

SEQ ID NO: 21423 - protein, 44 aa, Artificial Sequence; identical to SEQ ID NO: 18319
  GFR-binding peptide
  MOD_RES (2), (4), (38): Xaa is C or S

SEQ ID NO: 21424 - protein, 36 aa, Artificial Sequence; identical to SEQ ID NO: 18320
  GFR-binding peptide
  MOD_RES (36), (36): Xaa is C or S

SEQ ID NO: 21425 - protein, 39 aa, Artificial Sequence; identical to SEQ ID NO: 18321
  GFR-binding peptide
  MOD_RES (1), (3): Xaa is C or S
  MOD_RES (16), (17), (18), (19), (20): Xaa is A or G
  MOD_RES (21), (22), (23), (24): Xaa is A or G or is absent

SEQ ID NO: 21426 - protein, 42 aa, Artificial Sequence; identical to SEQ ID NO: 18322
  GFR-binding peptide
  MOD_RES (2), (4), (38): Xaa is C or S

SEQ ID NO: 21427 - protein, 39 aa, Artificial Sequence; identical to SEQ ID NO: 18323
  GFR-binding peptide
  MOD_RES (2), (36): Xaa is C or S

SEQ ID NO: 21428 - protein, 43 aa, Artificial Sequence; identical to SEQ ID NO: 18324
  GFR-binding peptide
  MOD_RES (2), (4), (41): Xaa is C or S

SEQ ID NO: 21429 - protein, 36 aa, Artificial Sequence; identical to SEQ ID NO: 18325
  GFR-binding peptide
  MOD_RES (1), (35): Xaa is C or S

SEQ ID NO: 21430 - protein, 42 aa, Artificial Sequence; identical to SEQ ID NO: 18326
  GFR-binding peptide
  MOD_RES (2), (4), (38): Xaa is C or S

SEQ ID NO: 21431 - protein, 41 aa, Artificial Sequence; identical to SEQ ID NO: 18327
  GFR-binding peptide
  MOD_RES (1), (38): Xaa is C or S
  MOD_RES (14), (15), (16), (17), (18): Xaa is A or G
  MOD_RES (19), (20), (21), (22): Xaa is A or G or is absent

SEQ ID NO: 21432 - protein, 43 aa, Artificial Sequence; identical to SEQ ID NO: 18328
  GFR-binding peptide
  MOD_RES (1), (3), (40): Xaa is C or S
  MOD_RES (16), (17), (18), (19), (20): Xaa is A or G
  MOD_RES (21), (22), (23), (24): Xaa is A or G or is absent

SEQ ID NO: 21433 - protein, 34 aa, Artificial Sequence; identical to SEQ ID NO: 18329
  GFR-binding peptide
  MOD_RES (33), (33): Xaa is C or S
  MOD_RES (11), (12), (13), (14), (15): Xaa is A or G
  MOD_RES (16), (17), (18), (19): Xaa is A or G or is absent

SEQ ID NO: 21434 - protein, 40 aa, Artificial Sequence; identical to SEQ ID NO: 18330
  GFR-binding peptide
  MOD_RES (2), (36): Xaa is C or S
  MOD_RES (14), (15), (16), (17), (18): Xaa is A or G
  MOD_RES (19), (20), (21), (22): Xaa is A or G or is absent

SEQ ID NO: 21435 - protein, 44 aa, Artificial Sequence; identical to SEQ ID NO: 18331
  GFR-binding peptide
  MOD_RES (2), (4), (38): Xaa is C or S

SEQ ID NO: 21436 - protein, 39 aa, Artificial Sequence; identical to SEQ ID NO: 18332
  GFR-binding peptide
  MOD_RES (2), (39): Xaa is C or S
  MOD_RES (15), (16), (17), (18), (19): Xaa is A or G
  MOD_RES (20), (21), (22), (23): Xaa is A or G or is absent

SEQ ID NO: 21437 - protein, 37 aa, Artificial Sequence; identical to SEQ ID NO: 18333
  GFR-binding peptide
  MOD_RES (2), (2): Xaa is C or S

SEQ ID NO: 21438 - protein, 36 aa, Artificial Sequence; identical to SEQ ID NO: 18334
  GFR-binding peptide
  MOD_RES (1), (1): Xaa is C or S
  MOD_RES (14), (15), (16), (17), (18): Xaa is A or G
  MOD_RES (19), (20), (21), (22): Xaa is A or G or is absent

SEQ ID NO: 21439 - protein, 38 aa, Artificial Sequence; identical to SEQ ID NO: 18335
  GFR-binding peptide
  MOD_RES (2), (36): Xaa is C or S
  MOD_RES (14), (15), (16), (17), (18): Xaa is A or G
  MOD_RES (19), (20), (21), (22): Xaa is A or G or is absent

SEQ ID NO: 21440 - protein, 43 aa, Artificial Sequence; identical to SEQ ID NO: 18336
  GFR-binding peptide
  MOD_RES (1), (3), (40): Xaa is C or S
  MOD_RES (16), (17), (18), (19), (20): Xaa is A or G
  MOD_RES (21), (22), (23), (24): Xaa is A or G or is absent

SEQ ID NO: 21441 - protein, 38 aa, Artificial Sequence; identical to SEQ ID NO: 18337
  GFR-binding peptide
  MOD_RES (1), (35): Xaa is C or S
  MOD_RES (13), (14), (15), (16), (17): Xaa is A or G
  MOD_RES (18), (19), (20), (21): Xaa is A or G or is absent

SEQ ID NO: 21442 - protein, 38 aa, Artificial Sequence; identical to SEQ ID NO: 18338
  GFR-binding peptide
  MOD_RES (2), (36): Xaa is C or S
  MOD_RES (14), (15), (16), (17), (18): Xaa is A or G
  MOD_RES (19), (20), (21), (22): Xaa is A or G or is absent

SEQ ID NO: 21443 - protein, 34 aa, Artificial Sequence; identical to SEQ ID NO: 18339
  GFR-binding peptide
  MOD_RES (33), (33): Xaa is C or S

SEQ ID NO: 21444 - protein, 39 aa, Artificial Sequence; identical to SEQ ID NO: 18340
  GFR-binding peptide
  MOD_RES (2), (39): Xaa is C or S

SEQ ID NO: 21445 - protein, 38 aa, Artificial Sequence; identical to SEQ ID NO: 18341
  GFR-binding peptide
  MOD_RES (35), (35): Xaa is C or S
  MOD_RES (11), (12), (13), (14), (15): Xaa is A or G
  MOD_RES (16), (17), (18), (19): Xaa is A or G or is absent

SEQ ID NO: 21446 - protein, 38 aa, Artificial Sequence; identical to SEQ ID NO: 18342
  GFR-binding peptide
  MOD_RES (1), (3): Xaa is C or S

SEQ ID NO: 21447 - protein, 36 aa, Artificial Sequence; identical to SEQ ID NO: 18343
  GFR-binding peptide
  MOD_RES (35), (35): Xaa is C or S
  MOD_RES (11), (12), (13), (14), (15): Xaa is A or G
  MOD_RES (16), (17), (18), (19): Xaa is A or G or is absent

SEQ ID NO: 21448 - protein, 34 aa, Artificial Sequence; identical to SEQ ID NO: 18344
  GFR-binding peptide
  MOD_RES (13), (14), (15), (16), (17): Xaa is A or G
  MOD_RES (18), (19), (20), (21): Xaa is A or G or is absent

SEQ ID NO: 21449 - protein, 42 aa, Artificial Sequence; identical to SEQ ID NO: 18345
  GFR-binding peptide
  MOD_RES (1), (3), (37): Xaa is C or S
  MOD_RES (15), (16), (17), (18), (19): Xaa is A or G
  MOD_RES (20), (21), (22), (23): Xaa is A or G or is absent

SEQ ID NO: 21450 - protein, 38 aa, Artificial Sequence; identical to SEQ ID NO: 18346
  GFR-binding peptide
  MOD_RES (34), (34): Xaa is C or S

SEQ ID NO: 21451 - protein, 35 aa, Artificial Sequence; identical to SEQ ID NO: 18347
  GFR-binding peptide

SEQ ID NO: 21452 - protein, 37 aa, Artificial Sequence; identical to SEQ ID NO: 18348
  GFR-binding peptide
  MOD_RES (1), (1): Xaa is C or S

SEQ ID NO: 21453 - protein, 40 aa, Artificial Sequence; identical to SEQ ID NO: 18349
  GFR-binding peptide
  MOD_RES (2), (39): Xaa is C or S
  MOD_RES (15), (16), (17), (18), (19): Xaa is A or G
  MOD_RES (20), (21), (22), (23): Xaa is A or G or is absent

SEQ ID NO: 21454 - protein, 42 aa, Artificial Sequence; identical to SEQ ID NO: 18350
  GFR-binding peptide
  MOD_RES (1), (3), (40): Xaa is C or S
  MOD_RES (16), (17), (18), (19), (20): Xaa is A or G
  MOD_RES (21), (22), (23), (24): Xaa is A or G or is absent

SEQ ID NO: 21455 - protein, 44 aa, Artificial Sequence; identical to SEQ ID NO: 18351
  GFR-binding peptide
  MOD_RES (1), (3), (40): Xaa is C or S
  MOD_RES (16), (17), (18), (19), (20): Xaa is A or G
  MOD_RES (21), (22), (23), (24): Xaa is A or G or is absent

SEQ ID NO: 21456 - protein, 41 aa, Artificial Sequence; identical to SEQ ID NO: 18352
  GFR-binding peptide
  MOD_RES (1), (38): Xaa is C or S
  MOD_RES (14), (15), (16), (17), (18): Xaa is A or G
  MOD_RES (19), (20), (21), (22): Xaa is A or G or is absent

SEQ ID NO: 21457 - protein, 37 aa, Artificial Sequence; identical to SEQ ID NO: 18353
  GFR-binding peptide
  MOD_RES (1), (3): Xaa is C or S
  MOD_RES (16), (17), (18), (19), (20): Xaa is A or G
  MOD_RES (21), (22), (23), (24): Xaa is A or G or is absent

SEQ ID NO: 21458 - protein, 38 aa, Artificial Sequence; identical to SEQ ID NO: 18354
  GFR-binding peptide
  MOD_RES (33), (33): Xaa is C or S
  MOD_RES (11), (12), (13), (14), (15): Xaa is A or G
  MOD_RES (16), (17), (18), (19): Xaa is A or G or is absent

SEQ ID NO: 21459 - protein, 43 aa, Artificial Sequence; identical to SEQ ID NO: 18355
  GFR-binding peptide
  MOD_RES (1), (3), (40): Xaa is C or S

SEQ ID NO: 21460 - protein, 39 aa, Artificial Sequence; identical to SEQ ID NO: 18356
  GFR-binding peptide
  MOD_RES (2), (4), (38): Xaa is C or S
  MOD_RES (16), (17), (18), (19), (20): Xaa is A or G
  MOD_RES (21), (22), (23), (24): Xaa is A or G or is absent

SEQ ID NO: 21461 - protein, 35 aa, Artificial Sequence; identical to SEQ ID NO: 18357
  GFR-binding peptide
  MOD_RES (33), (33): Xaa is C or S
  MOD_RES (11), (12), (13), (14), (15): Xaa is A or G
  MOD_RES (16), (17), (18), (19): Xaa is A or G or is absent

SEQ ID NO: 21462 - protein, 37 aa, Artificial Sequence; identical to SEQ ID NO: 18358
  GFR-binding peptide
  MOD_RES (1), (3), (37): Xaa is C or S
  MOD_RES (15), (16), (17), (18), (19): Xaa is A or G
  MOD_RES (20), (21), (22), (23): Xaa is A or G or is absent

SEQ ID NO: 21463 - protein, 34 aa, Artificial Sequence; identical to SEQ ID NO: 18359
  GFR-binding peptide
  MOD_RES (34), (34): Xaa is C or S

SEQ ID NO: 21464 - protein, 39 aa, Artificial Sequence; identical to SEQ ID NO: 18360
  GFR-binding peptide
  MOD_RES (37), (37): Xaa is C or S

SEQ ID NO: 21465 - protein, 40 aa, Artificial Sequence; identical to SEQ ID NO: 18361
  GFR-binding peptide
  MOD_RES (1), (38): Xaa is C or S

SEQ ID NO: 21466 - protein, 37 aa, Artificial Sequence; identical to SEQ ID NO: 18362
  GFR-binding peptide
  MOD_RES (35), (35): Xaa is C or S
  MOD_RES (11), (12), (13), (14), (15): Xaa is A or G
  MOD_RES (16), (17), (18), (19): Xaa is A or G or is absent

SEQ ID NO: 21467 - protein, 35 aa, Artificial Sequence; identical to SEQ ID NO: 18363
  GFR-binding peptide
  MOD_RES (34), (34): Xaa is C or S

SEQ ID NO: 21468 - protein, 38 aa, Artificial Sequence; identical to SEQ ID NO: 18364
  GFR-binding peptide
  MOD_RES (35), (35): Xaa is C or S
  MOD_RES (11), (12), (13), (14), (15): Xaa is A or G
  MOD_RES (16), (17), (18), (19): Xaa is A or G or is absent

SEQ ID NO: 21469 - protein, 42 aa, Artificial Sequence; identical to SEQ ID NO: 18365
  GFR-binding peptide
  MOD_RES (1), (3), (40): Xaa is C or S
  MOD_RES (16), (17), (18), (19), (20): Xaa is A or G
  MOD_RES (21), (22), (23), (24): Xaa is A or G or is absent

SEQ ID NO: 21470 - protein, 37 aa, Artificial Sequence; identical to SEQ ID NO: 18366
  GFR-binding peptide
  MOD_RES (1), (1): Xaa is C or S

SEQ ID NO: 21471 - protein, 36 aa, Artificial Sequence; identical to SEQ ID NO: 18367
  GFR-binding peptide
  MOD_RES (2), (36): Xaa is C or S

SEQ ID NO: 21472 - protein, 39 aa, Artificial Sequence; identical to SEQ ID NO: 18368
  GFR-binding peptide
  MOD_RES (2), (39): Xaa is C or S
  MOD_RES (15), (16), (17), (18), (19): Xaa is A or G
  MOD_RES (20), (21), (22), (23): Xaa is A or G or is absent

SEQ ID NO: 21473 - protein, 35 aa, Artificial Sequence; identical to SEQ ID NO: 18369
  GFR-binding peptide
  MOD_RES (34), (34): Xaa is C or S
  MOD_RES (12), (13), (14), (15), (16): Xaa is A or G
  MOD_RES (17), (18), (19), (20): Xaa is A or G or is absent

SEQ ID NO: 21474 - protein, 39 aa, Artificial Sequence; identical to SEQ ID NO: 18370
  GFR-binding peptide
  MOD_RES (36), (36): Xaa is C or S
  MOD_RES (12), (13), (14), (15), (16): Xaa is A or G
  MOD_RES (17), (18), (19), (20): Xaa is A or G or is absent

SEQ ID NO: 21475 - protein, 40 aa, Artificial Sequence; identical to SEQ ID NO: 18371
  GFR-binding peptide
  MOD_RES (2), (4): Xaa is C or S

SEQ ID NO: 21476 - protein, 40 aa, Artificial Sequence; identical to SEQ ID NO: 18372
  GFR-binding peptide
  MOD_RES (1), (38): Xaa is C or S

SEQ ID NO: 21477 - protein, 36 aa, Artificial Sequence; identical to SEQ ID NO: 18373
  GFR-binding peptide
  MOD_RES (35), (35): Xaa is C or S

SEQ ID NO: 21478 - protein, 35 aa, Artificial Sequence; identical to SEQ ID NO: 18374
  GFR-binding peptide

SEQ ID NO: 21479 - protein, 39 aa, Artificial Sequence; identical to SEQ ID NO: 18375
  GFR-binding peptide
  MOD_RES (34), (34): Xaa is C or S

SEQ ID NO: 21480 - protein, 38 aa, Artificial Sequence; identical to SEQ ID NO: 18376
  GFR-binding peptide
  MOD_RES (2), (4): Xaa is C or S
  MOD_RES (17), (18), (19), (20), (21): Xaa is A or G
  MOD_RES (22), (23), (24), (25): Xaa is A or G or is absent

SEQ ID NO: 21481 - protein, 43 aa, Artificial Sequence; identical to SEQ ID NO: 18377
  GFR-binding peptide
  MOD_RES (1), (3), (37): Xaa is C or S

SEQ ID NO: 21482 - protein, 40 aa, Artificial Sequence; identical to SEQ ID NO: 18378
  GFR-binding peptide
  MOD_RES (1), (3), (40): Xaa is C or S

SEQ ID NO: 21483 - protein, 40 aa, Artificial Sequence; identical to SEQ ID NO: 18379
  GFR-binding peptide
  MOD_RES (1), (3), (40): Xaa is C or S

SEQ ID NO: 21484 - protein, 44 aa, Artificial Sequence; identical to SEQ ID NO: 18380
  GFR-binding peptide
  MOD_RES (2), (4), (38): Xaa is C or S
  MOD_RES (16), (17), (18), (19), (20): Xaa is A or G
  MOD_RES (21), (22), (23), (24): Xaa is A or G or is absent

SEQ ID NO: 21485 - protein, 37 aa, Artificial Sequence; identical to SEQ ID NO: 18381
  GFR-binding peptide
  MOD_RES (1), (3), (37): Xaa is C or S

SEQ ID NO: 21486 - protein, 37 aa, Artificial Sequence; identical to SEQ ID NO: 18382
  GFR-binding peptide
  MOD_RES (37), (37): Xaa is C or S

SEQ ID NO: 21487 - protein, 33 aa, Artificial Sequence; identical to SEQ ID NO: 18383
  GFR-binding peptide

SEQ ID NO: 21488 - protein, 33 aa, Artificial Sequence; identical to SEQ ID NO: 18384
  GFR-binding peptide

SEQ ID NO: 21489 - protein, 36 aa, Artificial Sequence; identical to SEQ ID NO: 18385
  GFR-binding peptide
  MOD_RES (36), (36): Xaa is C or S

SEQ ID NO: 21490 - protein, 37 aa, Artificial Sequence; identical to SEQ ID NO: 18386
  GFR-binding peptide
  MOD_RES (2), (36): Xaa is C or S

SEQ ID NO: 21491 - protein, 34 aa, Artificial Sequence; identical to SEQ ID NO: 18387
  GFR-binding peptide
  MOD_RES (13), (14), (15), (16), (17): Xaa is A or G
  MOD_RES (18), (19), (20), (21): Xaa is A or G or is absent

SEQ ID NO: 21492 - protein, 33 aa, Artificial Sequence; identical to SEQ ID NO: 18388
  GFR-binding peptide

SEQ ID NO: 21493 - protein, 34 aa, Artificial Sequence; identical to SEQ ID NO: 18389
  GFR-binding peptide

SEQ ID NO: 21494 - protein, 44 aa, Artificial Sequence; identical to SEQ ID NO: 18390
  GFR-binding peptide
  MOD_RES (2), (4), (41): Xaa is C or S

SEQ ID NO: 21495 - protein, 40 aa, Artificial Sequence; identical to SEQ ID NO: 18391
  GFR-binding peptide
  MOD_RES (37), (37): Xaa is C or S

SEQ ID NO: 21496 - protein, 35 aa, Artificial Sequence; identical to SEQ ID NO: 18392
  GFR-binding peptide
  MOD_RES (13), (14), (15), (16), (17): Xaa is A or G
  MOD_RES (18), (19), (20), (21): Xaa is A or G or is absent

SEQ ID NO: 21497 - protein, 34 aa, Artificial Sequence; identical to SEQ ID NO: 18393
  GFR-binding peptide
  MOD_RES (1), (1): Xaa is C or S

SEQ ID NO: 21498 - protein, 43 aa, Artificial Sequence; identical to SEQ ID NO: 18394
  GFR-binding peptide
  MOD_RES (1), (3), (40): Xaa is C or S
  MOD_RES (16), (17), (18), (19), (20): Xaa is A or G
  MOD_RES (21), (22), (23), (24): Xaa is A or G or is absent

SEQ ID NO: 21499 - protein, 41 aa, Artificial Sequence; identical to SEQ ID NO: 18395
  GFR-binding peptide
  MOD_RES (1), (3), (37): Xaa is C or S
  MOD_RES (15), (16), (17), (18), (19): Xaa is A or G
  MOD_RES (20), (21), (22), (23): Xaa is A or G or is absent

SEQ ID NO: 21500 - protein, 34 aa, Artificial Sequence; identical to SEQ ID NO: 18396
  GFR-binding peptide
  MOD_RES (1), (1): Xaa is C or S

SEQ ID NO: 21501 - protein, 36 aa, Artificial Sequence; identical to SEQ ID NO: 18397
  GFR-binding peptide
  MOD_RES (35), (35): Xaa is C or S

SEQ ID NO: 21502 - protein, 37 aa, Artificial Sequence; identical to SEQ ID NO: 18398
  GFR-binding peptide
  MOD_RES (2), (4): Xaa is C or S

SEQ ID NO: 21503 - protein, 40 aa, Artificial Sequence; identical to SEQ ID NO: 18399
  GFR-binding peptide
  MOD_RES (34), (34): Xaa is C or S

SEQ ID NO: 21504 - protein, 35 aa, Artificial Sequence; identical to SEQ ID NO: 18400
  GFR-binding peptide

SEQ ID NO: 21505 - protein, 39 aa, Artificial Sequence; identical to SEQ ID NO: 18401
  GFR-binding peptide
  MOD_RES (35), (35): Xaa is C or S

SEQ ID NO: 21506 - protein, 42 aa, Artificial Sequence; identical to SEQ ID NO: 18402
  GFR-binding peptide
  MOD_RES (1), (3), (40): Xaa is C or S

SEQ ID NO: 21507 - protein, 37 aa, Artificial Sequence; identical to SEQ ID NO: 18403
  GFR-binding peptide
  MOD_RES (2), (2): Xaa is C or S
  MOD_RES (15), (16), (17), (18), (19): Xaa is A or G
  MOD_RES (20), (21), (22), (23): Xaa is A or G or is absent

SEQ ID NO: 21508 - protein, 36 aa, Artificial Sequence; identical to SEQ ID NO: 18404
  GFR-binding peptide

SEQ ID NO: 21509 - protein, 37 aa, Artificial Sequence; identical to SEQ ID NO: 18405
  GFR-binding peptide
  MOD_RES (1), (1): Xaa is C or S
  MOD_RES (14), (15), (16), (17), (18): Xaa is A or G
  MOD_RES (19), (20), (21), (22): Xaa is A or G or is absent

SEQ ID NO: 21510 - protein, 34 aa, Artificial Sequence; identical to SEQ ID NO: 18406
  GFR-binding peptide
  MOD_RES (1), (1): Xaa is C or S
  MOD_RES (13), (14), (15), (16), (17): Xaa is A or G
  MOD_RES (18), (19), (20), (21): Xaa is A or G or is absent

SEQ ID NO: 21511 - protein, 34 aa, Artificial Sequence; identical to SEQ ID NO: 18407
  GFR-binding peptide
  MOD_RES (12), (13), (14), (15), (16): Xaa is A or G
  MOD_RES (17), (18), (19), (20): Xaa is A or G or is absent

SEQ ID NO: 21512 - protein, 35 aa, Artificial Sequence; identical to SEQ ID NO: 18408
  GFR-binding peptide
  MOD_RES (33), (33): Xaa is C or S
  MOD_RES (11), (12), (13), (14), (15): Xaa is A or G
  MOD_RES (16), (17), (18), (19): Xaa is A or G or is absent

SEQ ID NO: 21513 - protein, 40 aa, Artificial Sequence; identical to SEQ ID NO: 18409
  GFR-binding peptide
  MOD_RES (2), (39): Xaa is C or S

SEQ ID NO: 21514 - protein, 34 aa, Artificial Sequence; identical to SEQ ID NO: 18410
  GFR-binding peptide
  MOD_RES (13), (14), (15), (16), (17): Xaa is A or G
  MOD_RES (18), (19), (20), (21): Xaa is A or G or is absent

SEQ ID NO: 21515 - protein, 38 aa, Artificial Sequence; identical to SEQ ID NO: 18411
  GFR-binding peptide
  MOD_RES (36), (36): Xaa is C or S
  MOD_RES (12), (13), (14), (15), (16): Xaa is A or G
  MOD_RES (17), (18), (19), (20): Xaa is A or G or is absent

SEQ ID NO: 21516 - protein, 38 aa, Artificial Sequence; identical to SEQ ID NO: 18412
  GFR-binding peptide
  MOD_RES (36), (36): Xaa is C or S

SEQ ID NO: 21517 - protein, 40 aa, Artificial Sequence; identical to SEQ ID NO: 18413
  GFR-binding peptide
  MOD_RES (2), (4): Xaa is C or S
  MOD_RES (17), (18), (19), (20), (21): Xaa is A or G
  MOD_RES (22), (23), (24), (25): Xaa is A or G or is absent

SEQ ID NO: 21518 - protein, 44 aa, Artificial Sequence; identical to SEQ ID NO: 18414
  GFR-binding peptide
  MOD_RES (1), (3), (40): Xaa is C or S
  MOD_RES (16), (17), (18), (19), (20): Xaa is A or G
  MOD_RES (21), (22), (23), (24): Xaa is A or G or is absent

SEQ ID NO: 21519 - protein, 38 aa, Artificial Sequence; identical to SEQ ID NO: 18415
  GFR-binding peptide
  MOD_RES (2), (4), (38): Xaa is C or S

SEQ ID NO: 21520 - protein, 43 aa, Artificial Sequence; identical to SEQ ID NO: 18416
  GFR-binding peptide
  MOD_RES (1), (3), (40): Xaa is C or S

SEQ ID NO: 21521 - protein, 40 aa, Artificial Sequence; identical to SEQ ID NO: 18417
  GFR-binding peptide
  MOD_RES (2), (39): Xaa is C or S

SEQ ID NO: 21522 - protein, 43 aa, Artificial Sequence; identical to SEQ ID NO: 18418
  GFR-binding peptide
  MOD_RES (1), (3), (40): Xaa is C or S

SEQ ID NO: 21523 - protein, 34 aa, Artificial Sequence; identical to SEQ ID NO: 18419
  GFR-binding peptide
  MOD_RES (1), (1): Xaa is C or S
  MOD_RES (13), (14), (15), (16), (17): Xaa is A or G
  MOD_RES (18), (19), (20), (21): Xaa is A or G or is absent

SEQ ID NO: 21524 - protein, 39 aa, Artificial Sequence; identical to SEQ ID NO: 18420
  GFR-binding peptide
  MOD_RES (2), (36): Xaa is C or S

SEQ ID NO: 21525 - protein, 37 aa, Artificial Sequence; identical to SEQ ID NO: 18421
  GFR-binding peptide
  MOD_RES (1), (3), (37): Xaa is C or S
  MOD_RES (15), (16), (17), (18), (19): Xaa is A or G
  MOD_RES (20), (21), (22), (23): Xaa is A or G or is absent

SEQ ID NO: 21526 - protein, 43 aa, Artificial Sequence; identical to SEQ ID NO: 18422
  GFR-binding peptide
  MOD_RES (2), (4), (41): Xaa is C or S

SEQ ID NO: 21527 - protein, 38 aa, Artificial Sequence; identical to SEQ ID NO: 18423
  GFR-binding peptide
  MOD_RES (33), (33): Xaa is C or S
  MOD_RES (11), (12), (13), (14), (15): Xaa is A or G
  MOD_RES (16), (17), (18), (19): Xaa is A or G or is absent

SEQ ID NO: 21528 - protein, 40 aa, Artificial Sequence; identical to SEQ ID NO: 18424
  GFR-binding peptide
  MOD_RES (34), (34): Xaa is C or S
  MOD_RES (12), (13), (14), (15), (16): Xaa is A or G
  MOD_RES (17), (18), (19), (20): Xaa is A or G or is absent

SEQ ID NO: 21529 - protein, 40 aa, Artificial Sequence; identical to SEQ ID NO: 18425
  GFR-binding peptide
  MOD_RES (1), (3), (37): Xaa is C or S
  MOD_RES (15), (16), (17), (18), (19): Xaa is A or G
  MOD_RES (20), (21), (22), (23): Xaa is A or G or is absent

SEQ ID NO: 21530 - protein, 41 aa, Artificial Sequence; identical to SEQ ID NO: 18426
  GFR-binding peptide
  MOD_RES (1), (3), (37): Xaa is C or S
  MOD_RES (15), (16), (17), (18), (19): Xaa is A or G
  MOD_RES (20), (21), (22), (23): Xaa is A or G or is absent

SEQ ID NO: 21531 - protein, 41 aa, Artificial Sequence; identical to SEQ ID NO: 18427
  GFR-binding peptide
  MOD_RES (2), (4), (38): Xaa is C or S

SEQ ID NO: 21532 - protein, 38 aa, Artificial Sequence; identical to SEQ ID NO: 18428
  GFR-binding peptide
  MOD_RES (1), (3), (37): Xaa is C or S
  MOD_RES (15), (16), (17), (18), (19): Xaa is A or G
  MOD_RES (20), (21), (22), (23): Xaa is A or G or is absent

SEQ ID NO: 21533 - protein, 35 aa, Artificial Sequence; identical to SEQ ID NO: 18429
  GFR-binding peptide
  MOD_RES (35), (35): Xaa is C or S
  MOD_RES (11), (12), (13), (14), (15): Xaa is A or G
  MOD_RES (16), (17), (18), (19): Xaa is A or G or is absent

SEQ ID NO: 21534 - protein, 37 aa, Artificial Sequence; identical to SEQ ID NO: 18430
  GFR-binding peptide
  MOD_RES (2), (2): Xaa is C or S
  MOD_RES (15), (16), (17), (18), (19): Xaa is A or G
  MOD_RES (20), (21), (22), (23): Xaa is A or G or is absent

SEQ ID NO: 21535 - protein, 36 aa, Artificial Sequence; identical to SEQ ID NO: 18431
  GFR-binding peptide
  MOD_RES (2), (36): Xaa is C or S

SEQ ID NO: 21536 - protein, 36 aa, Artificial Sequence; identical to SEQ ID NO: 18432
  GFR-binding peptide
  MOD_RES (34), (34): Xaa is C or S

SEQ ID NO: 21537 - protein, 39 aa, Artificial Sequence; identical to SEQ ID NO: 18433
  GFR-binding peptide
  MOD_RES (2), (36): Xaa is C or S

SEQ ID NO: 21538 - protein, 37 aa, Artificial Sequence; identical to SEQ ID NO: 18434
  GFR-binding peptide
  MOD_RES (37), (37): Xaa is C or S
  MOD_RES (13), (14), (15), (16), (17): Xaa is A or G
  MOD_RES (18), (19), (20), (21): Xaa is A or G or is absent

SEQ ID NO: 21539 - protein, 35 aa, Artificial Sequence; identical to SEQ ID NO: 18435
  GFR-binding peptide
  MOD_RES (33), (33): Xaa is C or S
  MOD_RES (11), (12), (13), (14), (15): Xaa is A or G
  MOD_RES (16), (17), (18), (19): Xaa is A or G or is absent

SEQ ID NO: 21540 - protein, 37 aa, Artificial Sequence; identical to SEQ ID NO: 18436
  GFR-binding peptide
  MOD_RES (35), (35): Xaa is C or S

SEQ ID NO: 21541 - protein, 33 aa, Artificial Sequence; identical to SEQ ID NO: 18437
  GFR-binding peptide
  MOD_RES (12), (13), (14), (15), (16): Xaa is A or G
  MOD_RES (17), (18), (19), (20): Xaa is A or G or is absent

SEQ ID NO: 21542 - protein, 40 aa, Artificial Sequence; identical to SEQ ID NO: 18438
  GFR-binding peptide
  MOD_RES (37), (37): Xaa is C or S
  MOD_RES (13), (14), (15), (16), (17): Xaa is A or G
  MOD_RES (18), (19), (20), (21): Xaa is A or G or is absent

SEQ ID NO: 21543 - protein, 40 aa, Artificial Sequence; identical to SEQ ID NO: 18439
  GFR-binding peptide
  MOD_RES (2), (4), (38): Xaa is C or S

SEQ ID NO: 21544 - protein, 41 aa, Artificial Sequence; identical to SEQ ID NO: 18440
  GFR-binding peptide
  MOD_RES (1), (3), (37): Xaa is C or S

SEQ ID NO: 21545 - protein, 40 aa, Artificial Sequence; identical to SEQ ID NO: 18441
  GFR-binding peptide
  MOD_RES (1), (3), (40): Xaa is C or S
  MOD_RES (16), (17), (18), (19), (20): Xaa is A or G
  MOD_RES (21), (22), (23), (24): Xaa is A or G or is absent

SEQ ID NO: 21546 - protein, 40 aa, Artificial Sequence; identical to SEQ ID NO: 18442
  GFR-binding peptide
  MOD_RES (37), (37): Xaa is C or S
  MOD_RES (13), (14), (15), (16), (17): Xaa is A or G
  MOD_RES (18), (19), (20), (21): Xaa is A or G or is absent

SEQ ID NO: 21547 - protein, 38 aa, Artificial Sequence; identical to SEQ ID NO: 18443
  GFR-binding peptide
  MOD_RES (2), (36): Xaa is C or S
  MOD_RES (14), (15), (16), (17), (18): Xaa is A or G
  MOD_RES (19), (20), (21), (22): Xaa is A or G or is absent

SEQ ID NO: 21548 - protein, 38 aa, Artificial Sequence; identical to SEQ ID NO: 18444
  GFR-binding peptide
  MOD_RES (1), (38): Xaa is C or S
  MOD_RES (14), (15), (16), (17), (18): Xaa is A or G
  MOD_RES (19), (20), (21), (22): Xaa is A or G or is absent

SEQ ID NO: 21549 - protein, 36 aa, Artificial Sequence; identical to SEQ ID NO: 18445
  GFR-binding peptide
  MOD_RES (1), (35): Xaa is C or S

SEQ ID NO: 21550 - protein, 35 aa, Artificial Sequence; identical to SEQ ID NO: 18446
  GFR-binding peptide
  MOD_RES (13), (14), (15), (16), (17): Xaa is A or G
  MOD_RES (18), (19), (20), (21): Xaa is A or G or is absent

SEQ ID NO: 21551 - protein, 37 aa, Artificial Sequence; identical to SEQ ID NO: 18447
  GFR-binding peptide
  MOD_RES (37), (37): Xaa is C or S
  MOD_RES (13), (14), (15), (16), (17): Xaa is A or G
  MOD_RES (18), (19), (20), (21): Xaa is A or G or is absent

SEQ ID NO: 21552 - protein, 40 aa, Artificial Sequence; identical to SEQ ID NO: 18448
  GFR-binding peptide
  MOD_RES (1), (3), (40): Xaa is C or S

SEQ ID NO: 21553 - protein, 40 aa, Artificial Sequence; identical to SEQ ID NO: 18449
  GFR-binding peptide
  MOD_RES (36), (36): Xaa is C or S

SEQ ID NO: 21554 - protein, 37 aa, Artificial Sequence; identical to SEQ ID NO: 18450
  GFR-binding peptide
  MOD_RES (34), (34): Xaa is C or S

SEQ ID NO: 21555 - protein, 40 aa, Artificial Sequence; identical to SEQ ID NO: 18451
  GFR-binding peptide
  MOD_RES (34), (34): Xaa is C or S

SEQ ID NO: 21556 - protein, 37 aa, Artificial Sequence; identical to SEQ ID NO: 18452
  GFR-binding peptide
  MOD_RES (1), (3), (37): Xaa is C or S

SEQ ID NO: 21557 - protein, 42 aa, Artificial Sequence; identical to SEQ ID NO: 18453
  GFR-binding peptide
  MOD_RES (2), (4), (38): Xaa is C or S
  MOD_RES (16), (17), (18), (19), (20): Xaa is A or G
  MOD_RES (21), (22), (23), (24): Xaa is A or G or is absent

SEQ ID NO: 21558 - protein, 34 aa, Artificial Sequence; identical to SEQ ID NO: 18454
  GFR-binding peptide
  MOD_RES (33), (33): Xaa is C or S

SEQ ID NO: 21559 - protein, 35 aa, Artificial Sequence; identical to SEQ ID NO: 18455
  GFR-binding peptide
  MOD_RES (35), (35): Xaa is C or S
  MOD_RES (11), (12), (13), (14), (15): Xaa is A or G
  MOD_RES (16), (17), (18), (19): Xaa is A or G or is absent

SEQ ID NO: 21560 - protein, 38 aa, Artificial Sequence; identical to SEQ ID NO: 18456
  GFR-binding peptide
  MOD_RES (1), (38): Xaa is C or S
  MOD_RES (14), (15), (16), (17), (18): Xaa is A or G
  MOD_RES (19), (20), (21), (22): Xaa is A or G or is absent

SEQ ID NO: 21561 - protein, 42 aa, Artificial Sequence; identical to SEQ ID NO: 18457
  GFR-binding peptide
  MOD_RES (2), (4), (41): Xaa is C or S

SEQ ID NO: 21562 - protein, 34 aa, Artificial Sequence; identical to SEQ ID NO: 18458
  GFR-binding peptide

SEQ ID NO: 21563 - protein, 41 aa, Artificial Sequence; identical to SEQ ID NO: 18459
  GFR-binding peptide
  MOD_RES (2), (4), (41): Xaa is C or S

SEQ ID NO: 21564 - protein, 34 aa, Artificial Sequence; identical to SEQ ID NO: 18460
  GFR-binding peptide
  MOD_RES (34), (34): Xaa is C or S
  MOD_RES (12), (13), (14), (15), (16): Xaa is A or G
  MOD_RES (17), (18), (19), (20): Xaa is A or G or is absent

SEQ ID NO: 21565 - protein, 37 aa, Artificial Sequence; identical to SEQ ID NO: 18461
  GFR-binding peptide
  MOD_RES (1), (3), (37): Xaa is C or S
  MOD_RES (15), (16), (17), (18), (19): Xaa is A or G
  MOD_RES (20), (21), (22), (23): Xaa is A or G or is absent

SEQ ID NO: 21566 - protein, 40 aa, Artificial Sequence; identical to SEQ ID NO: 18462
  GFR-binding peptide
  MOD_RES (2), (4), (38): Xaa is C or S

SEQ ID NO: 21567 - protein, 41 aa, Artificial Sequence; identical to SEQ ID NO: 18463
  GFR-binding peptide
  MOD_RES (2), (39): Xaa is C or S
  MOD_RES (15), (16), (17), (18), (19): Xaa is A or G
  MOD_RES (20), (21), (22), (23): Xaa is A or G or is absent

SEQ ID NO: 21568 - protein, 42 aa, Artificial Sequence; identical to SEQ ID NO: 18464
  GFR-binding peptide
  MOD_RES (1), (3), (40): Xaa is C or S
  MOD_RES (16), (17), (18), (19), (20): Xaa is A or G
  MOD_RES (21), (22), (23), (24): Xaa is A or G or is absent

SEQ ID NO: 21569 - protein, 42 aa, Artificial Sequence; identical to SEQ ID NO: 18465
  GFR-binding peptide
  MOD_RES (1), (3), (40): Xaa is C or S
  MOD_RES (16), (17), (18), (19), (20): Xaa is A or G
  MOD_RES (21), (22), (23), (24): Xaa is A or G or is absent

SEQ ID NO: 21570 - protein, 40 aa, Artificial Sequence; identical to SEQ ID NO: 18466
  GFR-binding peptide
  MOD_RES (1), (35): Xaa is C or S
  MOD_RES (13), (14), (15), (16), (17): Xaa is A or G
  MOD_RES (18), (19), (20), (21): Xaa is A or G or is absent

SEQ ID NO: 21571 - protein, 41 aa, Artificial Sequence; identical to SEQ ID NO: 18467
  GFR-binding peptide
  MOD_RES (2), (4), (38): Xaa is C or S

SEQ ID NO: 21572 - protein, 38 aa, Artificial Sequence; identical to SEQ ID NO: 18468
  GFR-binding peptide
  MOD_RES (2), (4): Xaa is C or S
  MOD_RES (17), (18), (19), (20), (21): Xaa is A or G
  MOD_RES (22), (23), (24), (25): Xaa is A or G or is absent

SEQ ID NO: 21573 - protein, 38 aa, Artificial Sequence; identical to SEQ ID NO: 18469
  GFR-binding peptide
  MOD_RES (37), (37): Xaa is C or S

SEQ ID NO: 21574 - protein, 41 aa, Artificial Sequence; identical to SEQ ID NO: 18470
  GFR-binding peptide
  MOD_RES (1), (3), (40): Xaa is C or S
  MOD_RES (16), (17), (18), (19), (20): Xaa is A or G
  MOD_RES (21), (22), (23), (24): Xaa is A or G or is absent

SEQ ID NO: 21575 - protein, 39 aa, Artificial Sequence; identical to SEQ ID NO: 18471
  GFR-binding peptide
  MOD_RES (1), (3): Xaa is C or S
  MOD_RES (16), (17), (18), (19), (20): Xaa is A or G
  MOD_RES (21), (22), (23), (24): Xaa is A or G or is absent

SEQ ID NO: 21576 - protein, 41 aa, Artificial Sequence; identical to SEQ ID NO: 18472
  GFR-binding peptide
  MOD_RES (1), (3), (37): Xaa is C or S
  MOD_RES (15), (16), (17), (18), (19): Xaa is A or G
  MOD_RES (20), (21), (22), (23): Xaa is A or G or is absent

SEQ ID NO: 21577 - protein, 33 aa, Artificial Sequence; identical to SEQ ID NO: 18473
  GFR-binding peptide
  MOD_RES (12), (13), (14), (15), (16): Xaa is A or G
  MOD_RES (17), (18), (19), (20): Xaa is A or G or is absent

SEQ ID NO: 21578 - protein, 42 aa, Artificial Sequence; identical to SEQ ID NO: 18474
  GFR-binding peptide
  MOD_RES (2), (36): Xaa is C or S

SEQ ID NO: 21579 - protein, 40 aa, Artificial Sequence; identical to SEQ ID NO: 18475
  GFR-binding peptide
  MOD_RES (34), (34): Xaa is C or S
  MOD_RES (12), (13), (14), (15), (16): Xaa is A or G
  MOD_RES (17), (18), (19), (20): Xaa is A or G or is absent

SEQ ID NO: 21580 - protein, 37 aa, Artificial Sequence; identical to SEQ ID NO: 18476
  GFR-binding peptide
  MOD_RES (1), (3): Xaa is C or S
  MOD_RES (16), (17), (18), (19), (20): Xaa is A or G
  MOD_RES (21), (22), (23), (24): Xaa is A or G or is absent

SEQ ID NO: 21581 - protein, 40 aa, Artificial Sequence; identical to SEQ ID NO: 18477
  GFR-binding peptide
  MOD_RES (1), (38): Xaa is C or S

SEQ ID NO: 21582 - protein, 44 aa, Artificial Sequence; identical to SEQ ID NO: 18478
  GFR-binding peptide
  MOD_RES (2), (4), (38): Xaa is C or S

SEQ ID NO: 21583 - protein, 42 aa, Artificial Sequence; identical to SEQ ID NO: 18479
  GFR-binding peptide
  MOD_RES (1), (38): Xaa is C or S
  MOD_RES (14), (15), (16), (17), (18): Xaa is A or G
  MOD_RES (19), (20), (21), (22): Xaa is A or G or is absent

SEQ ID NO: 21584 - protein, 39 aa, Artificial Sequence; identical to SEQ ID NO: 18480
  GFR-binding peptide
  MOD_RES (2), (39): Xaa is C or S

SEQ ID NO: 21585 - protein, 37 aa, Artificial Sequence; identical to SEQ ID NO: 18481
  GFR-binding peptide
  MOD_RES (34), (34): Xaa is C or S
  MOD_RES (12), (13), (14), (15), (16): Xaa is A or G
  MOD_RES (17), (18), (19), (20): Xaa is A or G or is absent

SEQ ID NO: 21586 - protein, 39 aa, Artificial Sequence; identical to SEQ ID NO: 18482
  GFR-binding peptide
  MOD_RES (1), (38): Xaa is C or S
  MOD_RES (14), (15), (16), (17), (18): Xaa is A or G
  MOD_RES (19), (20), (21), (22): Xaa is A or G or is absent

SEQ ID NO: 21587 - protein, 33 aa, Artificial Sequence; identical to SEQ ID NO: 18483
  GFR-binding peptide

SEQ ID NO: 21588 - protein, 40 aa, Artificial Sequence; identical to SEQ ID NO: 18484
  GFR-binding peptide
  MOD_RES (36), (36): Xaa is C or S

SEQ ID NO: 21589 - protein, 36 aa, Artificial Sequence; identical to SEQ ID NO: 18485
  GFR-binding peptide
  MOD_RES (1), (1): Xaa is C or S

SEQ ID NO: 21590 - protein, 43 aa, Artificial Sequence; identical to SEQ ID NO: 18486
  GFR-binding peptide
  MOD_RES (2), (4), (38): Xaa is C or S

SEQ ID NO: 21591 - protein, 43 aa, Artificial Sequence; identical to SEQ ID NO: 18487
  GFR-binding peptide
  MOD_RES (1), (3), (37): Xaa is C or S

SEQ ID NO: 21592 - protein, 42 aa, Artificial Sequence; identical to SEQ ID NO: 18488
  GFR-binding peptide
  MOD_RES (1), (3), (40): Xaa is C or S
  MOD_RES (16), (17), (18), (19), (20): Xaa is A or G
  MOD_RES (21), (22), (23), (24): Xaa is A or G or is absent

SEQ ID NO: 21593 - protein, 40 aa, Artificial Sequence; identical to SEQ ID NO: 18489
  GFR-binding peptide
  MOD_RES (1), (35): Xaa is C or S
  MOD_RES (13), (14), (15), (16), (17): Xaa is A or G
  MOD_RES (18), (19), (20), (21): Xaa is A or G or is absent

SEQ ID NO: 21594 - protein, 37 aa, Artificial Sequence; identical to SEQ ID NO: 18490
  GFR-binding peptide
  MOD_RES (2), (2): Xaa is C or S

SEQ ID NO: 21595 - protein, 38 aa, Artificial Sequence; identical to SEQ ID NO: 18491
  GFR-binding peptide
  MOD_RES (35), (35): Xaa is C or S
  MOD_RES (11), (12), (13), (14), (15): Xaa is A or G
  MOD_RES (16), (17), (18), (19): Xaa is A or G or is absent

SEQ ID NO: 21596 - protein, 37 aa, Artificial Sequence; identical to SEQ ID NO: 18492
  GFR-binding peptide
  MOD_RES (34), (34): Xaa is C or S
  MOD_RES (12), (13), (14), (15), (16): Xaa is A or G
  MOD_RES (17), (18), (19), (20): Xaa is A or G or is absent

SEQ ID NO: 21597 - protein, 43 aa, Artificial Sequence; identical to SEQ ID NO: 18493
  GFR-binding peptide
  MOD_RES (2), (39): Xaa is C or S
  MOD_RES (15), (16), (17), (18), (19): Xaa is A or G
  MOD_RES (20), (21), (22), (23): Xaa is A or G or is absent

SEQ ID NO: 21598 - protein, 37 aa, Artificial Sequence; identical to SEQ ID NO: 18494
  GFR-binding peptide
  MOD_RES (1), (3): Xaa is C or S
  MOD_RES (16), (17), (18), (19), (20): Xaa is A or G
  MOD_RES (21), (22), (23), (24): Xaa is A or G or is absent

SEQ ID NO: 21599 - protein, 37 aa, Artificial Sequence; identical to SEQ ID NO: 18495
  GFR-binding peptide
  MOD_RES (1), (3): Xaa is C or S
  MOD_RES (16), (17), (18), (19), (20): Xaa is A or G
  MOD_RES (21), (22), (23), (24): Xaa is A or G or is absent

SEQ ID NO: 21600 - protein, 32 aa, Artificial Sequence; identical to SEQ ID NO: 18496
  GFR-binding peptide
  MOD_RES (11), (12), (13), (14), (15): Xaa is A or G
  MOD_RES (16), (17), (18), (19): Xaa is A or G or is absent

SEQ ID NO: 21601 - protein, 41 aa, Artificial Sequence; identical to SEQ ID NO: 18497
  GFR-binding peptide
  MOD_RES (37), (37): Xaa is C or S
  MOD_RES (13), (14), (15), (16), (17): Xaa is A or G
  MOD_RES (18), (19), (20), (21): Xaa is A or G or is absent

SEQ ID NO: 21602 - protein, 37 aa, Artificial Sequence; identical to SEQ ID NO: 18498
  GFR-binding peptide
  MOD_RES (1), (3): Xaa is C or S
  MOD_RES (16), (17), (18), (19), (20): Xaa is A or G
  MOD_RES (21), (22), (23), (24): Xaa is A or G or is absent

SEQ ID NO: 21603 - protein, 33 aa, Artificial Sequence; identical to SEQ ID NO: 18499
  GFR-binding peptide

SEQ ID NO: 21604 - protein, 38 aa, Artificial Sequence; identical to SEQ ID NO: 18500
  GFR-binding peptide
  MOD_RES (36), (36): Xaa is C or S

SEQ ID NO: 21605 - protein, 36 aa, Artificial Sequence; identical to SEQ ID NO: 18501
  GFR-binding peptide
  MOD_RES (1), (3): Xaa is C or S
  MOD_RES (15), (16), (17), (18), (19): Xaa is A or G
  MOD_RES (20), (21), (22), (23): Xaa is A or G or is absent

SEQ ID NO: 21606 - protein, 38 aa, Artificial Sequence; identical to SEQ ID NO: 18502
  GFR-binding peptide
  MOD_RES (1), (3): Xaa is C or S

SEQ ID NO: 21607 - protein, 40 aa, Artificial Sequence; identical to SEQ ID NO: 18503
  GFR-binding peptide
  MOD_RES (1), (3), (37): Xaa is C or S
  MOD_RES (15), (16), (17), (18), (19): Xaa is A or G
  MOD_RES (20), (21), (22), (23): Xaa is A or G or is absent

SEQ ID NO: 21608 - protein, 35 aa, Artificial Sequence; identical to SEQ ID NO: 18504
  GFR-binding peptide
  MOD_RES (13), (14), (15), (16), (17): Xaa is A or G
  MOD_RES (18), (19), (20), (21): Xaa is A or G or is absent

SEQ ID NO: 21609 - protein, 41 aa, Artificial Sequence; identical to SEQ ID NO: 18505
  GFR-binding peptide
  MOD_RES (2), (36): Xaa is C or S
  MOD_RES (14), (15), (16), (17), (18): Xaa is A or G
  MOD_RES (19), (20), (21), (22): Xaa is A or G or is absent

SEQ ID NO: 21610 - protein, 37 aa, Artificial Sequence; identical to SEQ ID NO: 18506
  GFR-binding peptide
  MOD_RES (35), (35): Xaa is C or S

SEQ ID NO: 21611 - protein, 40 aa, Artificial Sequence; identical to SEQ ID NO: 18507
  GFR-binding peptide
  MOD_RES (2), (4): Xaa is C or S

SEQ ID NO: 21612 - protein, 34 aa, Artificial Sequence; identical to SEQ ID NO: 18508
  GFR-binding peptide
  MOD_RES (12), (13), (14), (15), (16): Xaa is A or G
  MOD_RES (17), (18), (19), (20): Xaa is A or G or is absent

SEQ ID NO: 21613 - protein, 35 aa, Artificial Sequence; identical to SEQ ID NO: 18509
  GFR-binding peptide
  MOD_RES (12), (13), (14), (15), (16): Xaa is A or G
  MOD_RES (17), (18), (19), (20): Xaa is A or G or is absent

SEQ ID NO: 21614 - protein, 38 aa, Artificial Sequence; identical to SEQ ID NO: 18510
  GFR-binding peptide
  MOD_RES (34), (34): Xaa is C or S
  MOD_RES (12), (13), (14), (15), (16): Xaa is A or G
  MOD_RES (17), (18), (19), (20): Xaa is A or G or is absent

SEQ ID NO: 21615 - protein, 39 aa, Artificial Sequence; identical to SEQ ID NO: 18511
  GFR-binding peptide
  MOD_RES (2), (4): Xaa is C or S
  MOD_RES (17), (18), (19), (20), (21): Xaa is A or G
  MOD_RES (22), (23), (24), (25): Xaa is A or G or is absent

SEQ ID NO: 21616 - protein, 35 aa, Artificial Sequence; identical to SEQ ID NO: 18512
  GFR-binding peptide
  MOD_RES (1), (1): Xaa is C or S

SEQ ID NO: 21617 - protein, 38 aa, Artificial Sequence; identical to SEQ ID NO: 18513
  GFR-binding peptide
  MOD_RES (36), (36): Xaa is C or S

SEQ ID NO: 21618 - protein, 34 aa, Artificial Sequence; identical to SEQ ID NO: 18514
  GFR-binding peptide
  MOD_RES (33), (33): Xaa is C or S
  MOD_RES (11), (12), (13), (14), (15): Xaa is A or G
  MOD_RES (16), (17), (18), (19): Xaa is A or G or is absent

SEQ ID NO: 21619 - protein, 33 aa, Artificial Sequence; identical to SEQ ID NO: 18515
  GFR-binding peptide

SEQ ID NO: 21620 - protein, 42 aa, Artificial Sequence; identical to SEQ ID NO: 18516
  GFR-binding peptide
  MOD_RES (1), (3), (37): Xaa is C or S
  MOD_RES (15), (16), (17), (18), (19): Xaa is A or G
  MOD_RES (20), (21), (22), (23): Xaa is A or G or is absent

SEQ ID NO: 21621 - protein, 42 aa, Artificial Sequence; identical to SEQ ID NO: 18517
  GFR-binding peptide
  MOD_RES (2), (39): Xaa is C or S

SEQ ID NO: 21622 - protein, 38 aa, Artificial Sequence; identical to SEQ ID NO: 18518
  GFR-binding peptide
  MOD_RES (34), (34): Xaa is C or S

SEQ ID NO: 21623 - protein, 38 aa, Artificial Sequence; identical to SEQ ID NO: 18519
  GFR-binding peptide
  MOD_RES (1), (3): Xaa is C or S
  MOD_RES (16), (17), (18), (19), (20): Xaa is A or G
  MOD_RES (21), (22), (23), (24): Xaa is A or G or is absent

SEQ ID NO: 21624 - protein, 36 aa, Artificial Sequence; identical to SEQ ID NO: 18520
  GFR-binding peptide
  MOD_RES (1), (1): Xaa is C or S

SEQ ID NO: 21625 - protein, 35 aa, Artificial Sequence; identical to SEQ ID NO: 18521
  GFR-binding peptide
  MOD_RES (1), (1): Xaa is C or S

SEQ ID NO: 21626 - protein, 38 aa, Artificial Sequence; identical to SEQ ID NO: 18522
  GFR-binding peptide
  MOD_RES (34), (34): Xaa is C or S

SEQ ID NO: 21627 - protein, 36 aa, Artificial Sequence; identical to SEQ ID NO: 18523
  GFR-binding peptide
  MOD_RES (1), (1): Xaa is C or S

SEQ ID NO: 21628 - protein, 36 aa, Artificial Sequence; identical to SEQ ID NO: 18524
  GFR-binding peptide
  MOD_RES (35), (35): Xaa is C or S

SEQ ID NO: 21629 - protein, 37 aa, Artificial Sequence; identical to SEQ ID NO: 18525
  GFR-binding peptide
  MOD_RES (2), (2): Xaa is C or S
  MOD_RES (15), (16), (17), (18), (19): Xaa is A or G
  MOD_RES (20), (21), (22), (23): Xaa is A or G or is absent

SEQ ID NO: 21630 - protein, 33 aa, Artificial Sequence; identical to SEQ ID NO: 18526
  GFR-binding peptide

SEQ ID NO: 21631 - protein, 34 aa, Artificial Sequence; identical to SEQ ID NO: 18527
  GFR-binding peptide

SEQ ID NO: 21632 - protein, 37 aa, Artificial Sequence; identical to SEQ ID NO: 18528
  GFR-binding peptide
  MOD_RES (1), (35): Xaa is C or S

SEQ ID NO: 21633 - protein, 36 aa, Artificial Sequence; identical to SEQ ID NO: 18529
  GFR-binding peptide
  MOD_RES (35), (35): Xaa is C or S

SEQ ID NO: 21634 - protein, 37 aa, Artificial Sequence; identical to SEQ ID NO: 18530
  GFR-binding peptide
  MOD_RES (1), (35): Xaa is C or S
  MOD_RES (13), (14), (15), (16), (17): Xaa is A or G
  MOD_RES (18), (19), (20), (21): Xaa is A or G or is absent

SEQ ID NO: 21635 - protein, 35 aa, Artificial Sequence; identical to SEQ ID NO: 18531
  GFR-binding peptide
  MOD_RES (35), (35): Xaa is C or S

SEQ ID NO: 21636 - protein, 38 aa, Artificial Sequence; identical to SEQ ID NO: 18532
  GFR-binding peptide
  MOD_RES (37), (37): Xaa is C or S

SEQ ID NO: 21637 - protein, 38 aa, Artificial Sequence; identical to SEQ ID NO: 18533
  GFR-binding peptide
  MOD_RES (35), (35): Xaa is C or S
  MOD_RES (11), (12), (13), (14), (15): Xaa is A or G
  MOD_RES (16), (17), (18), (19): Xaa is A or G or is absent

SEQ ID NO: 21638 - protein, 36 aa, Artificial Sequence; identical to SEQ ID NO: 18534
  GFR-binding peptide
  MOD_RES (1), (3): Xaa is C or S
  MOD_RES (15), (16), (17), (18), (19): Xaa is A or G
  MOD_RES (20), (21), (22), (23): Xaa is A or G or is absent

SEQ ID NO: 21639 - protein, 36 aa, Artificial Sequence; identical to SEQ ID NO: 18535
  GFR-binding peptide
  MOD_RES (36), (36): Xaa is C or S
  MOD_RES (12), (13), (14), (15), (16): Xaa is A or G
  MOD_RES (17), (18), (19), (20): Xaa is A or G or is absent

SEQ ID NO: 21640 - protein, 40 aa, Artificial Sequence; identical to SEQ ID NO: 18536
  GFR-binding peptide
  MOD_RES (1), (35): Xaa is C or S

SEQ ID NO: 21641 - protein, 38 aa, Artificial Sequence; identical to SEQ ID NO: 18537
  GFR-binding peptide
  MOD_RES (2), (4), (38): Xaa is C or S
  MOD_RES (16), (17), (18), (19), (20): Xaa is A or G
  MOD_RES (21), (22), (23), (24): Xaa is A or G or is absent

SEQ ID NO: 21642 - protein, 37 aa, Artificial Sequence; identical to SEQ ID NO: 18538
  GFR-binding peptide
  MOD_RES (1), (3), (37): Xaa is C or S
  MOD_RES (15), (16), (17), (18), (19): Xaa is A or G
  MOD_RES (20), (21), (22), (23): Xaa is A or G or is absent

SEQ ID NO: 21643 - protein, 40 aa, Artificial Sequence; identical to SEQ ID NO: 18539
  GFR-binding peptide
  MOD_RES (1), (35): Xaa is C or S

SEQ ID NO: 21644 - protein, 37 aa, Artificial Sequence; identical to SEQ ID NO: 18540
  GFR-binding peptide
  MOD_RES (35), (35): Xaa is C or S

SEQ ID NO: 21645 - protein, 36 aa, Artificial Sequence; identical to SEQ ID NO: 18541
  GFR-binding peptide
  MOD_RES (35), (35): Xaa is C or S
  MOD_RES (11), (12), (13), (14), (15): Xaa is A or G
  MOD_RES (16), (17), (18), (19): Xaa is A or G or is absent

SEQ ID NO: 21646 - protein, 40 aa, Artificial Sequence; identical to SEQ ID NO: 18542
  GFR-binding peptide
  MOD_RES (2), (4), (38): Xaa is C or S
  MOD_RES (16), (17), (18), (19), (20): Xaa is A or G
  MOD_RES (21), (22), (23), (24): Xaa is A or G or is absent

SEQ ID NO: 21647 - protein, 40 aa, Artificial Sequence; identical to SEQ ID NO: 18543
  GFR-binding peptide
  MOD_RES (1), (38): Xaa is C or S
  MOD_RES (14), (15), (16), (17), (18): Xaa is A or G
  MOD_RES (19), (20), (21), (22): Xaa is A or G or is absent

SEQ ID NO: 21648 - protein, 41 aa, Artificial Sequence; identical to SEQ ID NO: 18544
  GFR-binding peptide
  MOD_RES (2), (4), (38): Xaa is C or S
  MOD_RES (16), (17), (18), (19), (20): Xaa is A or G
  MOD_RES (21), (22), (23), (24): Xaa is A or G or is absent

SEQ ID NO: 21649 - protein, 34 aa, Artificial Sequence; identical to SEQ ID NO: 18545
  GFR-binding peptide
  MOD_RES (11), (12), (13), (14), (15): Xaa is A or G
  MOD_RES (16), (17), (18), (19): Xaa is A or G or is absent

SEQ ID NO: 21650 - protein, 41 aa, Artificial Sequence; identical to SEQ ID NO: 18546
  GFR-binding peptide
  MOD_RES (2), (36): Xaa is C or S

SEQ ID NO: 21651 - protein, 40 aa, Artificial Sequence; identical to SEQ ID NO: 18547
  GFR-binding peptide
  MOD_RES (2), (4): Xaa is C or S

SEQ ID NO: 21652 - protein, 36 aa, Artificial Sequence; identical to SEQ ID NO: 18548
  GFR-binding peptide
  MOD_RES (2), (2): Xaa is C or S

SEQ ID NO: 21653 - protein, 36 aa, Artificial Sequence; identical to SEQ ID NO: 18549
  GFR-binding peptide
  MOD_RES (36), (36): Xaa is C or S
  MOD_RES (12), (13), (14), (15), (16): Xaa is A or G
  MOD_RES (17), (18), (19), (20): Xaa is A or G or is absent

SEQ ID NO: 21654 - protein, 37 aa, Artificial Sequence; identical to SEQ ID NO: 18550
  GFR-binding peptide
  MOD_RES (1), (3): Xaa is C or S

SEQ ID NO: 21655 - protein, 33 aa, Artificial Sequence; identical to SEQ ID NO: 18551
  GFR-binding peptide

SEQ ID NO: 21656 - protein, 34 aa, Artificial Sequence; identical to SEQ ID NO: 18552
  GFR-binding peptide

SEQ ID NO: 21657 - protein, 43 aa, Artificial Sequence; identical to SEQ ID NO: 18553
  GFR-binding peptide
  MOD_RES (1), (3), (37): Xaa is C or S

SEQ ID NO: 21658 - protein, 45 aa, Artificial Sequence; identical to SEQ ID NO: 18554
  GFR-binding peptide
  MOD_RES (2), (4), (41): Xaa is C or S

SEQ ID NO: 21659 - protein, 38 aa, Artificial Sequence; identical to SEQ ID NO: 18555
  GFR-binding peptide
  MOD_RES (1), (38): Xaa is C or S
  MOD_RES (14), (15), (16), (17), (18): Xaa is A or G
  MOD_RES (19), (20), (21), (22): Xaa is A or G or is absent

SEQ ID NO: 21660 - protein, 36 aa, Artificial Sequence; identical to SEQ ID NO: 18556
  GFR-binding peptide
  MOD_RES (1), (1): Xaa is C or S
  MOD_RES (14), (15), (16), (17), (18): Xaa is A or G
  MOD_RES (19), (20), (21), (22): Xaa is A or G or is absent

SEQ ID NO: 21661 - protein, 39 aa, Artificial Sequence; identical to SEQ ID NO: 18557
  GFR-binding peptide
  MOD_RES (2), (36): Xaa is C or S
  MOD_RES (14), (15), (16), (17), (18): Xaa is A or G
  MOD_RES (19), (20), (21), (22): Xaa is A or G or is absent

SEQ ID NO: 21662 - protein, 36 aa, Artificial Sequence; identical to SEQ ID NO: 18558
  GFR-binding peptide
  MOD_RES (36), (36): Xaa is C or S

SEQ ID NO: 21663 - protein, 34 aa, Artificial Sequence; identical to SEQ ID NO: 18559
  GFR-binding peptide

SEQ ID NO: 21664 - protein, 37 aa, Artificial Sequence; identical to SEQ ID NO: 18560
  GFR-binding peptide
  MOD_RES (34), (34): Xaa is C or S

SEQ ID NO: 21665 - protein, 41 aa, Artificial Sequence; identical to SEQ ID NO: 18561
  GFR-binding peptide
  MOD_RES (37), (37): Xaa is C or S
  MOD_RES (13), (14), (15), (16), (17): Xaa is A or G
  MOD_RES (18), (19), (20), (21): Xaa is A or G or is absent

SEQ ID NO: 21666 - protein, 42 aa, Artificial Sequence; identical to SEQ ID NO: 18562
  GFR-binding peptide
  MOD_RES (2), (4), (41): Xaa is C or S
  MOD_RES (17), (18), (19), (20), (21): Xaa is A or G
  MOD_RES (22), (23), (24), (25): Xaa is A or G or is absent

SEQ ID NO: 21667 - protein, 42 aa, Artificial Sequence; identical to SEQ ID NO: 18563
  GFR-binding peptide
  MOD_RES (1), (3), (37): Xaa is C or S
  MOD_RES (15), (16), (17), (18), (19): Xaa is A or G
  MOD_RES (20), (21), (22), (23): Xaa is A or G or is absent

SEQ ID NO: 21668 - protein, 39 aa, Artificial Sequence; identical to SEQ ID NO: 18564
  GFR-binding peptide
  MOD_RES (2), (4), (38): Xaa is C or S

SEQ ID NO: 21669 - protein, 34 aa, Artificial Sequence; identical to SEQ ID NO: 18565
  GFR-binding peptide
  MOD_RES (13), (14), (15), (16), (17): Xaa is A or G
  MOD_RES (18), (19), (20), (21): Xaa is A or G or is absent

SEQ ID NO: 21670 - protein, 44 aa, Artificial Sequence; identical to SEQ ID NO: 18566
  GFR-binding peptide
  MOD_RES (2), (4), (41): Xaa is C or S
  MOD_RES (17), (18), (19), (20), (21): Xaa is A or G
  MOD_RES (22), (23), (24), (25): Xaa is A or G or is absent

SEQ ID NO: 21671 - protein, 40 aa, Artificial Sequence; identical to SEQ ID NO: 18567
  GFR-binding peptide
  MOD_RES (1), (38): Xaa is C or S

SEQ ID NO: 21672 - protein, 42 aa, Artificial Sequence; identical to SEQ ID NO: 18568
  GFR-binding peptide
  MOD_RES (1), (3), (37): Xaa is C or S
  MOD_RES (15), (16), (17), (18), (19): Xaa is A or G
  MOD_RES (20), (21), (22), (23): Xaa is A or G or is absent

SEQ ID NO: 21673 - protein, 42 aa, Artificial Sequence; identical to SEQ ID NO: 18569
  GFR-binding peptide
  MOD_RES (2), (36): Xaa is C or S
  MOD_RES (14), (15), (16), (17), (18): Xaa is A or G
  MOD_RES (19), (20), (21), (22): Xaa is A or G or is absent

SEQ ID NO: 21674 - protein, 41 aa, Artificial Sequence; identical to SEQ ID NO: 18570
  GFR-binding peptide
  MOD_RES (2), (36): Xaa is C or S

SEQ ID NO: 21675 - protein, 41 aa, Artificial Sequence; identical to SEQ ID NO: 18571
  GFR-binding peptide
  MOD_RES (2), (36): Xaa is C or S
  MOD_RES (14), (15), (16), (17), (18): Xaa is A or G
  MOD_RES (19), (20), (21), (22): Xaa is A or G or is absent

SEQ ID NO: 21676 - protein, 35 aa, Artificial Sequence; identical to SEQ ID NO: 18572
  GFR-binding peptide
  MOD_RES (12), (13), (14), (15), (16): Xaa is A or G
  MOD_RES (17), (18), (19), (20): Xaa is A or G or is absent

SEQ ID NO: 21677 - protein, 39 aa, Artificial Sequence; identical to SEQ ID NO: 18573
  GFR-binding peptide
  MOD_RES (1), (3): Xaa is C or S
  MOD_RES (16), (17), (18), (19), (20): Xaa is A or G
  MOD_RES (21), (22), (23), (24): Xaa is A or G or is absent

SEQ ID NO: 21678 - protein, 39 aa, Artificial Sequence; identical to SEQ ID NO: 18574
  GFR-binding peptide
  MOD_RES (2), (39): Xaa is C or S

SEQ ID NO: 21679 - protein, 41 aa, Artificial Sequence; identical to SEQ ID NO: 18575
  GFR-binding peptide
  MOD_RES (2), (39): Xaa is C or S

SEQ ID NO: 21680 - protein, 35 aa, Artificial Sequence; identical to SEQ ID NO: 18576
  GFR-binding peptide

SEQ ID NO: 21681 - protein, 39 aa, Artificial Sequence; identical to SEQ ID NO: 18577
  GFR-binding peptide
  MOD_RES (34), (34): Xaa is C or S
  MOD_RES (12), (13), (14), (15), (16): Xaa is A or G
  MOD_RES (17), (18), (19), (20): Xaa is A or G or is absent

SEQ ID NO: 21682 - protein, 39 aa, Artificial Sequence; identical to SEQ ID NO: 18578
  GFR-binding peptide
  MOD_RES (1), (3), (37): Xaa is C or S

SEQ ID NO: 21683 - protein, 39 aa, Artificial Sequence; identical to SEQ ID NO: 18579
  GFR-binding peptide
  MOD_RES (2), (36): Xaa is C or S
  MOD_RES (14), (15), (16), (17), (18): Xaa is A or G
  MOD_RES (19), (20), (21), (22): Xaa is A or G or is absent

SEQ ID NO: 21684 - protein, 38 aa, Artificial Sequence; identical to SEQ ID NO: 18580
  GFR-binding peptide
  MOD_RES (2), (2): Xaa is C or S

SEQ ID NO: 21685 - protein, 35 aa, Artificial Sequence; identical to SEQ ID NO: 18581
  GFR-binding peptide
  MOD_RES (13), (14), (15), (16), (17): Xaa is A or G
  MOD_RES (18), (19), (20), (21): Xaa is A or G or is absent

SEQ ID NO: 21686 - protein, 39 aa, Artificial Sequence; identical to SEQ ID NO: 18582
  GFR-binding peptide
  MOD_RES (2), (4), (38): Xaa is C or S

SEQ ID NO: 21687 - protein, 40 aa, Artificial Sequence; identical to SEQ ID NO: 18583
  GFR-binding peptide
  MOD_RES (1), (3), (40): Xaa is C or S
  MOD_RES (16), (17), (18), (19), (20): Xaa is A or G
  MOD_RES (21), (22), (23), (24): Xaa is A or G or is absent

SEQ ID NO: 21688 - protein, 39 aa, Artificial Sequence; identical to SEQ ID NO: 18584
  GFR-binding peptide
  MOD_RES (2), (4): Xaa is C or S
  MOD_RES (17), (18), (19), (20), (21): Xaa is A or G
  MOD_RES (22), (23), (24), (25): Xaa is A or G or is absent

SEQ ID NO: 21689 - protein, 39 aa, Artificial Sequence; identical to SEQ ID NO: 18585
  GFR-binding peptide
  MOD_RES (35), (35): Xaa is C or S
  MOD_RES (11), (12), (13), (14), (15): Xaa is A or G
  MOD_RES (16), (17), (18), (19): Xaa is A or G or is absent

SEQ ID NO: 21690 - protein, 36 aa, Artificial Sequence; identical to SEQ ID NO: 18586
  GFR-binding peptide

SEQ ID NO: 21691 - protein, 40 aa, Artificial Sequence; identical to SEQ ID NO: 18587
  GFR-binding peptide
  MOD_RES (1), (3), (37): Xaa is C or S

SEQ ID NO: 21692 - protein, 34 aa, Artificial Sequence; identical to SEQ ID NO: 18588
  GFR-binding peptide

SEQ ID NO: 21693 - protein, 38 aa, Artificial Sequence; identical to SEQ ID NO: 18589
  GFR-binding peptide
  MOD_RES (2), (4), (38): Xaa is C or S
  MOD_RES (16), (17), (18), (19), (20): Xaa is A or G
  MOD_RES (21), (22), (23), (24): Xaa is A or G or is absent

SEQ ID NO: 21694 - protein, 34 aa, Artificial Sequence; identical to SEQ ID NO: 18590
  GFR-binding peptide
  MOD_RES (12), (13), (14), (15), (16): Xaa is A or G
  MOD_RES (17), (18), (19), (20): Xaa is A or G or is absent

SEQ ID NO: 21695 - protein, 39 aa, Artificial Sequence; identical to SEQ ID NO: 18591
  GFR-binding peptide
  MOD_RES (1), (38): Xaa is C or S

SEQ ID NO: 21696 - protein, 42 aa, Artificial Sequence; identical to SEQ ID NO: 18592
  GFR-binding peptide
  MOD_RES (1), (38): Xaa is C or S

SEQ ID NO: 21697 - protein, 38 aa, Artificial Sequence; identical to SEQ ID NO: 18593
  GFR-binding peptide
  MOD_RES (1), (35): Xaa is C or S

SEQ ID NO: 21698 - protein, 42 aa, Artificial Sequence; identical to SEQ ID NO: 18594
  GFR-binding peptide
  MOD_RES (1), (3), (40): Xaa is C or S

SEQ ID NO: 21699 - protein, 41 aa, Artificial Sequence; identical to SEQ ID NO: 18595
  GFR-binding peptide
  MOD_RES (1), (35): Xaa is C or S

SEQ ID NO: 21700 - protein, 40 aa, Artificial Sequence; identical to SEQ ID NO: 18596
  GFR-binding peptide
  MOD_RES (36), (36): Xaa is C or S
  MOD_RES (12), (13), (14), (15), (16): Xaa is A or G
  MOD_RES (17), (18), (19), (20): Xaa is A or G or is absent

SEQ ID NO: 21701 - protein, 39 aa, Artificial Sequence; identical to SEQ ID NO: 18597
  GFR-binding peptide
  MOD_RES (36), (36): Xaa is C or S
  MOD_RES (12), (13), (14), (15), (16): Xaa is A or G
  MOD_RES (17), (18), (19), (20): Xaa is A or G or is absent

SEQ ID NO: 21702 - protein, 33 aa, Artificial Sequence; identical to SEQ ID NO: 18598
  GFR-binding peptide
  MOD_RES (12), (13), (14), (15), (16): Xaa is A or G
  MOD_RES (17), (18), (19), (20): Xaa is A or G or is absent

SEQ ID NO: 21703 - protein, 36 aa, Artificial Sequence; identical to SEQ ID NO: 18599
  GFR-binding peptide
  MOD_RES (1), (35): Xaa is C or S
  MOD_RES (13), (14), (15), (16), (17): Xaa is A or G
  MOD_RES (18), (19), (20), (21): Xaa is A or G or is absent

SEQ ID NO: 21704 - protein, 40 aa, Artificial Sequence; identical to SEQ ID NO: 18600
  GFR-binding peptide
  MOD_RES (2), (4), (38): Xaa is C or S

SEQ ID NO: 21705 - protein, 42 aa, Artificial Sequence; identical to SEQ ID NO: 18601
  GFR-binding peptide
  MOD_RES (2), (4), (38): Xaa is C or S
  MOD_RES (16), (17), (18), (19), (20): Xaa is A or G
  MOD_RES (21), (22), (23), (24): Xaa is A or G or is absent

SEQ ID NO: 21706 - protein, 34 aa, Artificial Sequence; identical to SEQ ID NO: 18602
  GFR-binding peptide
  MOD_RES (11), (12), (13), (14), (15): Xaa is A or G
  MOD_RES (16), (17), (18), (19): Xaa is A or G or is absent

SEQ ID NO: 21707 - protein, 35 aa, Artificial Sequence; identical to SEQ ID NO: 18603
  GFR-binding peptide
  MOD_RES (12), (13), (14), (15), (16): Xaa is A or G
  MOD_RES (17), (18), (19), (20): Xaa is A or G or is absent

SEQ ID NO: 21708 - protein, 43 aa, Artificial Sequence; identical to SEQ ID NO: 18604
  GFR-binding peptide
  MOD_RES (2), (4), (41): Xaa is C or S
  MOD_RES (17), (18), (19), (20), (21): Xaa is A or G
  MOD_RES (22), (23), (24), (25): Xaa is A or G or is absent

SEQ ID NO: 21709 - protein, 35 aa, Artificial Sequence; identical to SEQ ID NO: 18605
  GFR-binding peptide
  MOD_RES (1), (35): Xaa is C or S

SEQ ID NO: 21710 - protein, 39 aa, Artificial Sequence; identical to SEQ ID NO: 18606
  GFR-binding peptide
  MOD_RES (2), (4), (38): Xaa is C or S

SEQ ID NO: 21711 - protein, 36 aa, Artificial Sequence; identical to SEQ ID NO: 18607
  GFR-binding peptide
  MOD_RES (1), (35): Xaa is C or S
  MOD_RES (13), (14), (15), (16), (17): Xaa is A or G
  MOD_RES (18), (19), (20), (21): Xaa is A or G or is absent

SEQ ID NO: 21712 - protein, 43 aa, Artificial Sequence; identical to SEQ ID NO: 18608
  GFR-binding peptide
  MOD_RES (2), (39): Xaa is C or S

SEQ ID NO: 21713 - protein, 41 aa, Artificial Sequence; identical to SEQ ID NO: 18609
  GFR-binding peptide
  MOD_RES (1), (3), (40): Xaa is C or S

SEQ ID NO: 21714 - protein, 37 aa, Artificial Sequence; identical to SEQ ID NO: 18610
  GFR-binding peptide
  MOD_RES (2), (4): Xaa is C or S

SEQ ID NO: 21715 - protein, 37 aa, Artificial Sequence; identical to SEQ ID NO: 18611
  GFR-binding peptide
  MOD_RES (2), (36): Xaa is C or S

SEQ ID NO: 21716 - protein, 39 aa, Artificial Sequence; identical to SEQ ID NO: 18612
  GFR-binding peptide
  MOD_RES (1), (3), (37): Xaa is C or S
  MOD_RES (15), (16), (17), (18), (19): Xaa is A or G
  MOD_RES (20), (21), (22), (23): Xaa is A or G or is absent

SEQ ID NO: 21717 - protein, 40 aa, Artificial Sequence; identical to SEQ ID NO: 18613
  GFR-binding peptide
  MOD_RES (1), (3), (40): Xaa is C or S

SEQ ID NO: 21718 - protein, 33 aa, Artificial Sequence; identical to SEQ ID NO: 18614
  GFR-binding peptide
  MOD_RES (12), (13), (14), (15), (16): Xaa is A or G
  MOD_RES (17), (18), (19), (20): Xaa is A or G or is absent

SEQ ID NO: 21719 - protein, 44 aa, Artificial Sequence; identical to SEQ ID NO: 18615
  GFR-binding peptide
  MOD_RES (1), (3), (40): Xaa is C or S

SEQ ID NO: 21720 - protein, 42 aa, Artificial Sequence; identical to SEQ ID NO: 18616
  GFR-binding peptide
  MOD_RES (2), (36): Xaa is C or S
  MOD_RES (14), (15), (16), (17), (18): Xaa is A or G
  MOD_RES (19), (20), (21), (22): Xaa is A or G or is absent

SEQ ID NO: 21721 - protein, 37 aa, Artificial Sequence; identical to SEQ ID NO: 18617
  GFR-binding peptide
  MOD_RES (35), (35): Xaa is C or S

SEQ ID NO: 21722 - protein, 39 aa, Artificial Sequence; identical to SEQ ID NO: 18618
  GFR-binding peptide
  MOD_RES (2), (4): Xaa is C or S
  MOD_RES (17), (18), (19), (20), (21): Xaa is A or G
  MOD_RES (22), (23), (24), (25): Xaa is A or G or is absent

SEQ ID NO: 21723 - protein, 37 aa, Artificial Sequence; identical to SEQ ID NO: 18619
  GFR-binding peptide
  MOD_RES (35), (35): Xaa is C or S

SEQ ID NO: 21724 - protein, 36 aa, Artificial Sequence; identical to SEQ ID NO: 18620
  GFR-binding peptide
  MOD_RES (2), (2): Xaa is C or S
  MOD_RES (15), (16), (17), (18), (19): Xaa is A or G
  MOD_RES (20), (21), (22), (23): Xaa is A or G or is absent

SEQ ID NO: 21725 - protein, 41 aa, Artificial Sequence; identical to SEQ ID NO: 18621
  GFR-binding peptide
  MOD_RES (1), (3), (40): Xaa is C or S

SEQ ID NO: 21726 - protein, 37 aa, Artificial Sequence; identical to SEQ ID NO: 18622
  GFR-binding peptide
  MOD_RES (2), (36): Xaa is C or S

SEQ ID NO: 21727 - protein, 43 aa, Artificial Sequence; identical to SEQ ID NO: 18623
  GFR-binding peptide
  MOD_RES (2), (4), (41): Xaa is C or S
  MOD_RES (17), (18), (19), (20), (21): Xaa is A or G
  MOD_RES (22), (23), (24), (25): Xaa is A or G or is absent

SEQ ID NO: 21728 - protein, 40 aa, Artificial Sequence; identical to SEQ ID NO: 18624
  GFR-binding peptide
  MOD_RES (1), (3), (37): Xaa is C or S

SEQ ID NO: 21729 - protein, 41 aa, Artificial Sequence; identical to SEQ ID NO: 18625
  GFR-binding peptide
  MOD_RES (2), (39): Xaa is C or S

SEQ ID NO: 21730 - protein, 41 aa, Artificial Sequence; identical to SEQ ID NO: 18626
  GFR-binding peptide
  MOD_RES (2), (4), (38): Xaa is C or S

SEQ ID NO: 21731 - protein, 37 aa, Artificial Sequence; identical to SEQ ID NO: 18627
  GFR-binding peptide
  MOD_RES (36), (36): Xaa is C or S
  MOD_RES (12), (13), (14), (15), (16): Xaa is A or G
  MOD_RES (17), (18), (19), (20): Xaa is A or G or is absent

SEQ ID NO: 21732 - protein, 40 aa, Artificial Sequence; identical to SEQ ID NO: 18628
  GFR-binding peptide
  MOD_RES (2), (4), (38): Xaa is C or S

SEQ ID NO: 21733 - protein, 39 aa, Artificial Sequence; identical to SEQ ID NO: 18629
  GFR-binding peptide
  MOD_RES (1), (3): Xaa is C or S

SEQ ID NO: 21734 - protein, 38 aa, Artificial Sequence; identical to SEQ ID NO: 18630
  GFR-binding peptide
  MOD_RES (1), (35): Xaa is C or S

SEQ ID NO: 21735 - protein, 39 aa, Artificial Sequence; identical to SEQ ID NO: 18631
  GFR-binding peptide
  MOD_RES (37), (37): Xaa is C or S

SEQ ID NO: 21736 - protein, 40 aa, Artificial Sequence; identical to SEQ ID NO: 18632
  GFR-binding peptide
  MOD_RES (34), (34): Xaa is C or S

SEQ ID NO: 21737 - protein, 34 aa, Artificial Sequence; identical to SEQ ID NO: 18633
  GFR-binding peptide

SEQ ID NO: 21738 - protein, 38 aa, Artificial Sequence; identical to SEQ ID NO: 18634
  GFR-binding peptide
  MOD_RES (1), (3), (37): Xaa is C or S
  MOD_RES (15), (16), (17), (18), (19): Xaa is A or G
  MOD_RES (20), (21), (22), (23): Xaa is A or G or is absent

SEQ ID NO: 21739 - protein, 39 aa, Artificial Sequence; identical to SEQ ID NO: 18635
  GFR-binding peptide
  MOD_RES (1), (3), (37): Xaa is C or S
  MOD_RES (15), (16), (17), (18), (19): Xaa is A or G
  MOD_RES (20), (21), (22), (23): Xaa is A or G or is absent

SEQ ID NO: 21740 - protein, 36 aa, Artificial Sequence; identical to SEQ ID NO: 18636
  GFR-binding peptide
  MOD_RES (1), (3): Xaa is C or S
  MOD_RES (15), (16), (17), (18), (19): Xaa is A or G
  MOD_RES (20), (21), (22), (23): Xaa is A or G or is absent

SEQ ID NO: 21741 - protein, 41 aa, Artificial Sequence; identical to SEQ ID NO: 18637
  GFR-binding peptide
  MOD_RES (1), (3), (37): Xaa is C or S
  MOD_RES (15), (16), (17), (18), (19): Xaa is A or G
  MOD_RES (20), (21), (22), (23): Xaa is A or G or is absent

SEQ ID NO: 21742 - protein, 35 aa, Artificial Sequence; identical to SEQ ID NO: 18638
  GFR-binding peptide
  MOD_RES (12), (13), (14), (15), (16): Xaa is A or G
  MOD_RES (17), (18), (19), (20): Xaa is A or G or is absent

SEQ ID NO: 21743 - protein, 41 aa, Artificial Sequence; identical to SEQ ID NO: 18639
  GFR-binding peptide
  MOD_RES (2), (39): Xaa is C or S
  MOD_RES (15), (16), (17), (18), (19): Xaa is A or G
  MOD_RES (20), (21), (22), (23): Xaa is A or G or is absent

SEQ ID NO: 21744 - protein, 43 aa, Artificial Sequence; identical to SEQ ID NO: 18640
  GFR-binding peptide
  MOD_RES (1), (3), (40): Xaa is C or S
  MOD_RES (16), (17), (18), (19), (20): Xaa is A or G
  MOD_RES (21), (22), (23), (24): Xaa is A or G or is absent

SEQ ID NO: 21745 - protein, 39 aa, Artificial Sequence; identical to SEQ ID NO: 18641
  GFR-binding peptide
  MOD_RES (2), (4): Xaa is C or S
  MOD_RES (17), (18), (19), (20), (21): Xaa is A or G
  MOD_RES (22), (23), (24), (25): Xaa is A or G or is absent

SEQ ID NO: 21746 - protein, 35 aa, Artificial Sequence; identical to SEQ ID NO: 18642
  GFR-binding peptide

SEQ ID NO: 21747 - protein, 40 aa, Artificial Sequence; identical to SEQ ID NO: 18643
  GFR-binding peptide
  MOD_RES (36), (36): Xaa is C or S
  MOD_RES (12), (13), (14), (15), (16): Xaa is A or G
  MOD_RES (17), (18), (19), (20): Xaa is A or G or is absent

SEQ ID NO: 21748 - protein, 38 aa, Artificial Sequence; identical to SEQ ID NO: 18644
  GFR-binding peptide
  MOD_RES (2), (36): Xaa is C or S

SEQ ID NO: 21749 - protein, 43 aa, Artificial Sequence; identical to SEQ ID NO: 18645
  GFR-binding peptide
  MOD_RES (2), (39): Xaa is C or S
  MOD_RES (15), (16), (17), (18), (19): Xaa is A or G
  MOD_RES (20), (21), (22), (23): Xaa is A or G or is absent

SEQ ID NO: 21750 - protein, 41 aa, Artificial Sequence; identical to SEQ ID NO: 18646
  GFR-binding peptide
  MOD_RES (1), (38): Xaa is C or S
  MOD_RES (14), (15), (16), (17), (18): Xaa is A or G
  MOD_RES (19), (20), (21), (22): Xaa is A or G or is absent

SEQ ID NO: 21751 - protein, 41 aa, Artificial Sequence; identical to SEQ ID NO: 18647
  GFR-binding peptide
  MOD_RES (2), (4), (41): Xaa is C or S
  MOD_RES (17), (18), (19), (20), (21): Xaa is A or G
  MOD_RES (22), (23), (24), (25): Xaa is A or G or is absent

SEQ ID NO: 21752 - protein, 38 aa, Artificial Sequence; identical to SEQ ID NO: 18648
  GFR-binding peptide
  MOD_RES (2), (2): Xaa is C or S
  MOD_RES (15), (16), (17), (18), (19): Xaa is A or G
  MOD_RES (20), (21), (22), (23): Xaa is A or G or is absent

SEQ ID NO: 21753 - protein, 34 aa, Artificial Sequence; identical to SEQ ID NO: 18649
  GFR-binding peptide
  MOD_RES (34), (34): Xaa is C or S
  MOD_RES (12), (13), (14), (15), (16): Xaa is A or G
  MOD_RES (17), (18), (19), (20): Xaa is A or G or is absent

SEQ ID NO: 21754 - protein, 41 aa, Artificial Sequence; identical to SEQ ID NO: 18650
  GFR-binding peptide
  MOD_RES (2), (4), (38): Xaa is C or S
  MOD_RES (16), (17), (18), (19), (20): Xaa is A or G
  MOD_RES (21), (22), (23), (24): Xaa is A or G or is absent

SEQ ID NO: 21755 - protein, 41 aa, Artificial Sequence; identical to SEQ ID NO: 18651
  GFR-binding peptide
  MOD_RES (2), (39): Xaa is C or S
  MOD_RES (15), (16), (17), (18), (19): Xaa is A or G
  MOD_RES (20), (21), (22), (23): Xaa is A or G or is absent

SEQ ID NO: 21756 - protein, 35 aa, Artificial Sequence; identical to SEQ ID NO: 18652
  GFR-binding peptide
  MOD_RES (1), (35): Xaa is C or S
  MOD_RES (13), (14), (15), (16), (17): Xaa is A or G
  MOD_RES (18), (19), (20), (21): Xaa is A or G or is absent

SEQ ID NO: 21757 - protein, 39 aa, Artificial Sequence; identical to SEQ ID NO: 18653
  GFR-binding peptide
  MOD_RES (36), (36): Xaa is C or S

SEQ ID NO: 21758 - protein, 38 aa, Artificial Sequence; identical to SEQ ID NO: 18654
  GFR-binding peptide
  MOD_RES (1), (35): Xaa is C or S
  MOD_RES (13), (14), (15), (16), (17): Xaa is A or G
  MOD_RES (18), (19), (20), (21): Xaa is A or G or is absent

SEQ ID NO: 21759 - protein, 40 aa, Artificial Sequence; identical to SEQ ID NO: 18655
  GFR-binding peptide
  MOD_RES (36), (36): Xaa is C or S

SEQ ID NO: 21760 - protein, 37 aa, Artificial Sequence; identical to SEQ ID NO: 18656
  GFR-binding peptide
  MOD_RES (2), (2): Xaa is C or S

SEQ ID NO: 21761 - protein, 42 aa, Artificial Sequence; identical to SEQ ID NO: 18657
  GFR-binding peptide
  MOD_RES (2), (36): Xaa is C or S

SEQ ID NO: 21762 - protein, 41 aa, Artificial Sequence; identical to SEQ ID NO: 18658
  GFR-binding peptide
  MOD_RES (2), (4), (41): Xaa is C or S
  MOD_RES (17), (18), (19), (20), (21): Xaa is A or G
  MOD_RES (22), (23), (24), (25): Xaa is A or G or is absent

SEQ ID NO: 21763 - protein, 36 aa, Artificial Sequence; identical to SEQ ID NO: 18659
  GFR-binding peptide
  MOD_RES (1), (3): Xaa is C or S

SEQ ID NO: 21764 - protein, 37 aa, Artificial Sequence; identical to SEQ ID NO: 18660
  GFR-binding peptide
  MOD_RES (37), (37): Xaa is C or S
  MOD_RES (13), (14), (15), (16), (17): Xaa is A or G
  MOD_RES (18), (19), (20), (21): Xaa is A or G or is absent

SEQ ID NO: 21765 - protein, 41 aa, Artificial Sequence; identical to SEQ ID NO: 18661
  GFR-binding peptide
  MOD_RES (1), (38): Xaa is C or S

SEQ ID NO: 21766 - protein, 41 aa, Artificial Sequence; identical to SEQ ID NO: 18662
  GFR-binding peptide
  MOD_RES (1), (3), (37): Xaa is C or S

SEQ ID NO: 21767 - protein, 36 aa, Artificial Sequence; identical to SEQ ID NO: 18663
  GFR-binding peptide
  MOD_RES (34), (34): Xaa is C or S

SEQ ID NO: 21768 - protein, 36 aa, Artificial Sequence; identical to SEQ ID NO: 18664
  GFR-binding peptide
  MOD_RES (1), (35): Xaa is C or S

SEQ ID NO: 21769 - protein, 40 aa, Artificial Sequence; identical to SEQ ID NO: 18665
  GFR-binding peptide
  MOD_RES (1), (3), (40): Xaa is C or S
  MOD_RES (16), (17), (18), (19), (20): Xaa is A or G
  MOD_RES (21), (22), (23), (24): Xaa is A or G or is absent

SEQ ID NO: 21770 - protein, 43 aa, Artificial Sequence; identical to SEQ ID NO: 18666
  GFR-binding peptide
  MOD_RES (2), (39): Xaa is C or S

SEQ ID NO: 21771 - protein, 37 aa, Artificial Sequence; identical to SEQ ID NO: 18667
  GFR-binding peptide
  MOD_RES (2), (4): Xaa is C or S
  MOD_RES (16), (17), (18), (19), (20): Xaa is A or G
  MOD_RES (21), (22), (23), (24): Xaa is A or G or is absent

SEQ ID NO: 21772 - protein, 39 aa, Artificial Sequence; identical to SEQ ID NO: 18668
  GFR-binding peptide
  MOD_RES (36), (36): Xaa is C or S

SEQ ID NO: 21773 - protein, 32 aa, Artificial Sequence; identical to SEQ ID NO: 18669
  GFR-binding peptide
  MOD_RES (11), (12), (13), (14), (15): Xaa is A or G
  MOD_RES (16), (17), (18), (19): Xaa is A or G or is absent

SEQ ID NO: 21774 - protein, 37 aa, Artificial Sequence; identical to SEQ ID NO: 18670
  GFR-binding peptide
  MOD_RES (1), (3): Xaa is C or S
  MOD_RES (16), (17), (18), (19), (20): Xaa is A or G
  MOD_RES (21), (22), (23), (24): Xaa is A or G or is absent

SEQ ID NO: 21775 - protein, 40 aa, Artificial Sequence; identical to SEQ ID NO: 18671
  GFR-binding peptide
  MOD_RES (1), (3), (37): Xaa is C or S
  MOD_RES (15), (16), (17), (18), (19): Xaa is A or G
  MOD_RES (20), (21), (22), (23): Xaa is A or G or is absent

SEQ ID NO: 21776 - protein, 39 aa, Artificial Sequence; identical to SEQ ID NO: 18672
  GFR-binding peptide
  MOD_RES (35), (35): Xaa is C or S
  MOD_RES (11), (12), (13), (14), (15): Xaa is A or G
  MOD_RES (16), (17), (18), (19): Xaa is A or G or is absent

SEQ ID NO: 21777 - protein, 34 aa, Artificial Sequence; identical to SEQ ID NO: 18673
  GFR-binding peptide
  MOD_RES (1), (1): Xaa is C or S
  MOD_RES (13), (14), (15), (16), (17): Xaa is A or G
  MOD_RES (18), (19), (20), (21): Xaa is A or G or is absent

SEQ ID NO: 21778 - protein, 36 aa, Artificial Sequence; identical to SEQ ID NO: 18674
  GFR-binding peptide
  MOD_RES (34), (34): Xaa is C or S

SEQ ID NO: 21779 - protein, 37 aa, Artificial Sequence; identical to SEQ ID NO: 18675
  GFR-binding peptide
  MOD_RES (1), (1): Xaa is C or S
  MOD_RES (14), (15), (16), (17), (18): Xaa is A or G
  MOD_RES (19), (20), (21), (22): Xaa is A or G or is absent

SEQ ID NO: 21780 - protein, 39 aa, Artificial Sequence; identical to SEQ ID NO: 18676
  GFR-binding peptide
  MOD_RES (35), (35): Xaa is C or S
  MOD_RES (11), (12), (13), (14), (15): Xaa is A or G
  MOD_RES (16), (17), (18), (19): Xaa is A or G or is absent

SEQ ID NO: 21781 - protein, 36 aa, Artificial Sequence; identical to SEQ ID NO: 18677
  GFR-binding peptide
  MOD_RES (2), (36): Xaa is C or S

SEQ ID NO: 21782 - protein, 38 aa, Artificial Sequence; identical to SEQ ID NO: 18678
  GFR-binding peptide
  MOD_RES (1), (3), (37): Xaa is C or S
  MOD_RES (15), (16), (17), (18), (19): Xaa is A or G
  MOD_RES (20), (21), (22), (23): Xaa is A or G or is absent

SEQ ID NO: 21783 - protein, 39 aa, Artificial Sequence; identical to SEQ ID NO: 18679
  GFR-binding peptide
  MOD_RES (1), (35): Xaa is C or S

SEQ ID NO: 21784 - protein, 36 aa, Artificial Sequence; identical to SEQ ID NO: 18680
  GFR-binding peptide

SEQ ID NO: 21785 - protein, 39 aa, Artificial Sequence; identical to SEQ ID NO: 18681
  GFR-binding peptide
  MOD_RES (2), (36): Xaa is C or S
  MOD_RES (14), (15), (16), (17), (18): Xaa is A or G
  MOD_RES (19), (20), (21), (22): Xaa is A or G or is absent

SEQ ID NO: 21786 - protein, 36 aa, Artificial Sequence; identical to SEQ ID NO: 18682
  GFR-binding peptide
  MOD_RES (36), (36): Xaa is C or S
  MOD_RES (12), (13), (14), (15), (16): Xaa is A or G
  MOD_RES (17), (18), (19), (20): Xaa is A or G or is absent

SEQ ID NO: 21787 - protein, 42 aa, Artificial Sequence; identical to SEQ ID NO: 18683
  GFR-binding peptide
  MOD_RES (2), (4), (41): Xaa is C or S

SEQ ID NO: 21788 - protein, 41 aa, Artificial Sequence; identical to SEQ ID NO: 18684
  GFR-binding peptide
  MOD_RES (2), (36): Xaa is C or S
  MOD_RES (14), (15), (16), (17), (18): Xaa is A or G
  MOD_RES (19), (20), (21), (22): Xaa is A or G or is absent

SEQ ID NO: 21789 - protein, 34 aa, Artificial Sequence; identical to SEQ ID NO: 18685
  GFR-binding peptide
  MOD_RES (11), (12), (13), (14), (15): Xaa is A or G
  MOD_RES (16), (17), (18), (19): Xaa is A or G or is absent

SEQ ID NO: 21790 - protein, 34 aa, Artificial Sequence; identical to SEQ ID NO: 18686
  GFR-binding peptide
  MOD_RES (1), (1): Xaa is C or S

SEQ ID NO: 21791 - protein, 36 aa, Artificial Sequence; identical to SEQ ID NO: 18687
  GFR-binding peptide
  MOD_RES (36), (36): Xaa is C or S
  MOD_RES (12), (13), (14), (15), (16): Xaa is A or G
  MOD_RES (17), (18), (19), (20): Xaa is A or G or is absent

SEQ ID NO: 21792 - protein, 41 aa, Artificial Sequence; identical to SEQ ID NO: 18688
  GFR-binding peptide
  MOD_RES (1), (3), (37): Xaa is C or S
  MOD_RES (15), (16), (17), (18), (19): Xaa is A or G
  MOD_RES (20), (21), (22), (23): Xaa is A or G or is absent

SEQ ID NO: 21793 - protein, 36 aa, Artificial Sequence; identical to SEQ ID NO: 18689
  GFR-binding peptide
  MOD_RES (34), (34): Xaa is C or S
  MOD_RES (12), (13), (14), (15), (16): Xaa is A or G
  MOD_RES (17), (18), (19), (20): Xaa is A or G or is absent

SEQ ID NO: 21794 - protein, 39 aa, Artificial Sequence; identical to SEQ ID NO: 18690
  GFR-binding peptide
  MOD_RES (37), (37): Xaa is C or S

SEQ ID NO: 21795 - protein, 40 aa, Artificial Sequence; identical to SEQ ID NO: 18691
  GFR-binding peptide
  MOD_RES (1), (38): Xaa is C or S
  MOD_RES (14), (15), (16), (17), (18): Xaa is A or G
  MOD_RES (19), (20), (21), (22): Xaa is A or G or is absent

SEQ ID NO: 21796 - protein, 35 aa, Artificial Sequence; identical to SEQ ID NO: 18692
  GFR-binding peptide
  MOD_RES (1), (1): Xaa is C or S
  MOD_RES (14), (15), (16), (17), (18): Xaa is A or G
  MOD_RES (19), (20), (21), (22): Xaa is A or G or is absent

SEQ ID NO: 21797 - protein, 34 aa, Artificial Sequence; identical to SEQ ID NO: 18693
  GFR-binding peptide
  MOD_RES (34), (34): Xaa is C or S

SEQ ID NO: 21798 - protein, 37 aa, Artificial Sequence; identical to SEQ ID NO: 18694
  GFR-binding peptide
  MOD_RES (1), (35): Xaa is C or S

SEQ ID NO: 21799 - protein, 41 aa, Artificial Sequence; identical to SEQ ID NO: 18695
  GFR-binding peptide
  MOD_RES (1), (35): Xaa is C or S
  MOD_RES (13), (14), (15), (16), (17): Xaa is A or G
  MOD_RES (18), (19), (20), (21): Xaa is A or G or is absent

SEQ ID NO: 21800 - protein, 43 aa, Artificial Sequence; identical to SEQ ID NO: 18696
  GFR-binding peptide
  MOD_RES (2), (39): Xaa is C or S

SEQ ID NO: 21801 - protein, 37 aa, Artificial Sequence; identical to SEQ ID NO: 18697
  GFR-binding peptide
  MOD_RES (1), (35): Xaa is C or S
  MOD_RES (13), (14), (15), (16), (17): Xaa is A or G
  MOD_RES (18), (19), (20), (21): Xaa is A or G or is absent

SEQ ID NO: 21802 - protein, 35 aa, Artificial Sequence; identical to SEQ ID NO: 18698
  GFR-binding peptide
  MOD_RES (2), (2): Xaa is C or S
  MOD_RES (14), (15), (16), (17), (18): Xaa is A or G
  MOD_RES (19), (20), (21), (22): Xaa is A or G or is absent

SEQ ID NO: 21803 - protein, 39 aa, Artificial Sequence; identical to SEQ ID NO: 18699
  GFR-binding peptide
  MOD_RES (1), (35): Xaa is C or S
  MOD_RES (13), (14), (15), (16), (17): Xaa is A or G
  MOD_RES (18), (19), (20), (21): Xaa is A or G or is absent

SEQ ID NO: 21804 - protein, 38 aa, Artificial Sequence; identical to SEQ ID NO: 18700
  GFR-binding peptide
  MOD_RES (35), (35): Xaa is C or S
  MOD_RES (11), (12), (13), (14), (15): Xaa is A or G
  MOD_RES (16), (17), (18), (19): Xaa is A or G or is absent

SEQ ID NO: 21805 - protein, 40 aa, Artificial Sequence; identical to SEQ ID NO: 18701
  GFR-binding peptide
  MOD_RES (2), (4), (38): Xaa is C or S
  MOD_RES (16), (17), (18), (19), (20): Xaa is A or G
  MOD_RES (21), (22), (23), (24): Xaa is A or G or is absent

SEQ ID NO: 21806 - protein, 38 aa, Artificial Sequence; identical to SEQ ID NO: 18702
  GFR-binding peptide
  MOD_RES (2), (2): Xaa is C or S
  MOD_RES (15), (16), (17), (18), (19): Xaa is A or G
  MOD_RES (20), (21), (22), (23): Xaa is A or G or is absent

SEQ ID NO: 21807 - protein, 42 aa, Artificial Sequence; identical to SEQ ID NO: 18703
  GFR-binding peptide
  MOD_RES (7), (41): Xaa is C or S
  MOD_RES (21), (22), (23), (24), (25): Xaa is A or G
  MOD_RES (26), (27), (28), (29): Xaa is A or G or is absent

SEQ ID NO: 21808 - protein, 37 aa, Artificial Sequence; identical to SEQ ID NO: 18704
  GFR-binding peptide
  MOD_RES (37), (37): Xaa is C or S
  MOD_RES (16), (17), (18), (19), (20): Xaa is A or G
  MOD_RES (21), (22), (23), (24): Xaa is A or G or is absent

SEQ ID NO: 21809 - protein, 36 aa, Artificial Sequence; identical to SEQ ID NO: 18705
  GFR-binding peptide
  MOD_RES (34), (36): Xaa is C or S

SEQ ID NO: 21810 - protein, 40 aa, Artificial Sequence; identical to SEQ ID NO: 18706
  GFR-binding peptide
  MOD_RES (6), (40): Xaa is C or S
  MOD_RES (20), (21), (22), (23), (24): Xaa is A or G
  MOD_RES (25), (26), (27), (28): Xaa is A or G or is absent

SEQ ID NO: 21811 - protein, 43 aa, Artificial Sequence; identical to SEQ ID NO: 18707
  GFR-binding peptide
  MOD_RES (7), (41), (43): Xaa is C or S

SEQ ID NO: 21812 - protein, 35 aa, Artificial Sequence; identical to SEQ ID NO: 18708
  GFR-binding peptide
  MOD_RES (1), (35): Xaa is C or S

SEQ ID NO: 21813 - protein, 42 aa, Artificial Sequence; identical to SEQ ID NO: 18709
  GFR-binding peptide
  MOD_RES (2), (39), (41): Xaa is C or S
  MOD_RES (18), (19), (20), (21), (22): Xaa is A or G
  MOD_RES (23), (24), (25), (26): Xaa is A or G or is absent

SEQ ID NO: 21814 - protein, 38 aa, Artificial Sequence; identical to SEQ ID NO: 18710
  GFR-binding peptide
  MOD_RES (36), (38): Xaa is C or S
  MOD_RES (15), (16), (17), (18), (19): Xaa is A or G
  MOD_RES (20), (21), (22), (23): Xaa is A or G or is absent

SEQ ID NO: 21815 - protein, 41 aa, Artificial Sequence; identical to SEQ ID NO: 18711
  GFR-binding peptide
  MOD_RES (2), (39), (41): Xaa is C or S
  MOD_RES (18), (19), (20), (21), (22): Xaa is A or G
  MOD_RES (23), (24), (25), (26): Xaa is A or G or is absent

SEQ ID NO: 21816 - protein, 39 aa, Artificial Sequence; identical to SEQ ID NO: 18712
  GFR-binding peptide
  MOD_RES (4), (38): Xaa is C or S
  MOD_RES (18), (19), (20), (21), (22): Xaa is A or G
  MOD_RES (23), (24), (25), (26): Xaa is A or G or is absent

SEQ ID NO: 21817 - protein, 32 aa, Artificial Sequence; identical to SEQ ID NO: 18713
  GFR-binding peptide

SEQ ID NO: 21818 - protein, 42 aa, Artificial Sequence; identical to SEQ ID NO: 18714
  GFR-binding peptide
  MOD_RES (5), (42): Xaa is C or S

SEQ ID NO: 21819 - protein, 34 aa, Artificial Sequence; identical to SEQ ID NO: 18715
  GFR-binding peptide
  MOD_RES (2), (2): Xaa is C or S
  MOD_RES (16), (17), (18), (19), (20): Xaa is A or G
  MOD_RES (21), (22), (23), (24): Xaa is A or G or is absent

SEQ ID NO: 21820 - protein, 35 aa, Artificial Sequence; identical to SEQ ID NO: 18716
  GFR-binding peptide
  MOD_RES (1), (1): Xaa is C or S
  MOD_RES (17), (18), (19), (20), (21): Xaa is A or G
  MOD_RES (22), (23), (24), (25): Xaa is A or G or is absent

SEQ ID NO: 21821 - protein, 36 aa, Artificial Sequence; identical to SEQ ID NO: 18717
  GFR-binding peptide
  MOD_RES (2), (2): Xaa is C or S
  MOD_RES (18), (19), (20), (21), (22): Xaa is A or G
  MOD_RES (23), (24), (25), (26): Xaa is A or G or is absent

SEQ ID NO: 21822 - protein, 43 aa, Artificial Sequence; identical to SEQ ID NO: 18718
  GFR-binding peptide
  MOD_RES (7), (41), (43): Xaa is C or S
  MOD_RES (21), (22), (23), (24), (25): Xaa is A or G
  MOD_RES (26), (27), (28), (29): Xaa is A or G or is absent

SEQ ID NO: 21823 - protein, 40 aa, Artificial Sequence; identical to SEQ ID NO: 18719
  GFR-binding peptide
  MOD_RES (7), (7): Xaa is C or S
  MOD_RES (21), (22), (23), (24), (25): Xaa is A or G
  MOD_RES (26), (27), (28), (29): Xaa is A or G or is absent

SEQ ID NO: 21824 - protein, 38 aa, Artificial Sequence; identical to SEQ ID NO: 18720
  GFR-binding peptide
  MOD_RES (2), (2): Xaa is C or S
  MOD_RES (18), (19), (20), (21), (22): Xaa is A or G
  MOD_RES (23), (24), (25), (26): Xaa is A or G or is absent

SEQ ID NO: 21825 - protein, 41 aa, Artificial Sequence; identical to SEQ ID NO: 18721
  GFR-binding peptide
  MOD_RES (4), (38), (40): Xaa is C or S
  MOD_RES (18), (19), (20), (21), (22): Xaa is A or G
  MOD_RES (23), (24), (25), (26): Xaa is A or G or is absent

SEQ ID NO: 21826 - protein, 36 aa, Artificial Sequence; identical to SEQ ID NO: 18722
  GFR-binding peptide
  MOD_RES (1), (35): Xaa is C or S
  MOD_RES (15), (16), (17), (18), (19): Xaa is A or G
  MOD_RES (20), (21), (22), (23): Xaa is A or G or is absent

SEQ ID NO: 21827 - protein, 36 aa, Artificial Sequence; identical to SEQ ID NO: 18723
  GFR-binding peptide
  MOD_RES (1), (35): Xaa is C or S
  MOD_RES (15), (16), (17), (18), (19): Xaa is A or G
  MOD_RES (20), (21), (22), (23): Xaa is A or G or is absent

SEQ ID NO: 21828 - protein, 35 aa, Artificial Sequence; identical to SEQ ID NO: 18724
  GFR-binding peptide
  MOD_RES (34), (34): Xaa is C or S

SEQ ID NO: 21829 - protein, 39 aa, Artificial Sequence; identical to SEQ ID NO: 18725
  GFR-binding peptide
  MOD_RES (2), (39): Xaa is C or S

SEQ ID NO: 21830 - protein, 38 aa, Artificial Sequence; identical to SEQ ID NO: 18726
  GFR-binding peptide
  MOD_RES (4), (38): Xaa is C or S
  MOD_RES (18), (19), (20), (21), (22): Xaa is A or G
  MOD_RES (23), (24), (25), (26): Xaa is A or G or is absent

SEQ ID NO: 21831 - protein, 36 aa, Artificial Sequence; identical to SEQ ID NO: 18727
  GFR-binding peptide
  MOD_RES (34), (36): Xaa is C or S

SEQ ID NO: 21832 - protein, 40 aa, Artificial Sequence; identical to SEQ ID NO: 18728
  GFR-binding peptide
  MOD_RES (2), (39): Xaa is C or S
  MOD_RES (18), (19), (20), (21), (22): Xaa is A or G
  MOD_RES (23), (24), (25), (26): Xaa is A or G or is absent

SEQ ID NO: 21833 - protein, 37 aa, Artificial Sequence; identical to SEQ ID NO: 18729
  GFR-binding peptide
  MOD_RES (4), (4): Xaa is C or S
  MOD_RES (18), (19), (20), (21), (22): Xaa is A or G
  MOD_RES (23), (24), (25), (26): Xaa is A or G or is absent

SEQ ID NO: 21834 - protein, 37 aa, Artificial Sequence; identical to SEQ ID NO: 18730
  GFR-binding peptide
  MOD_RES (2), (2): Xaa is C or S
  MOD_RES (18), (19), (20), (21), (22): Xaa is A or G
  MOD_RES (23), (24), (25), (26): Xaa is A or G or is absent

SEQ ID NO: 21835 - protein, 40 aa, Artificial Sequence; identical to SEQ ID NO: 18731
  GFR-binding peptide
  MOD_RES (37), (39): Xaa is C or S
  MOD_RES (16), (17), (18), (19), (20): Xaa is A or G
  MOD_RES (21), (22), (23), (24): Xaa is A or G or is absent

SEQ ID NO: 21836 - protein, 37 aa, Artificial Sequence; identical to SEQ ID NO: 18732
  GFR-binding peptide
  MOD_RES (1), (1): Xaa is C or S

SEQ ID NO: 21837 - protein, 42 aa, Artificial Sequence; identical to SEQ ID NO: 18733
  GFR-binding peptide
  MOD_RES (5), (42): Xaa is C or S
  MOD_RES (21), (22), (23), (24), (25): Xaa is A or G
  MOD_RES (26), (27), (28), (29): Xaa is A or G or is absent

SEQ ID NO: 21838 - protein, 36 aa, Artificial Sequence; identical to SEQ ID NO: 18734
  GFR-binding peptide
  MOD_RES (35), (35): Xaa is C or S
  MOD_RES (14), (15), (16), (17), (18): Xaa is A or G
  MOD_RES (19), (20), (21), (22): Xaa is A or G or is absent

SEQ ID NO: 21839 - protein, 36 aa, Artificial Sequence; identical to SEQ ID NO: 18735
  GFR-binding peptide
  MOD_RES (1), (1): Xaa is C or S

SEQ ID NO: 21840 - protein, 45 aa, Artificial Sequence; identical to SEQ ID NO: 18736
  GFR-binding peptide
  MOD_RES (5), (42), (44): Xaa is C or S

SEQ ID NO: 21841 - protein, 34 aa, Artificial Sequence; identical to SEQ ID NO: 18737
  GFR-binding peptide

SEQ ID NO: 21842 - protein, 37 aa, Artificial Sequence; identical to SEQ ID NO: 18738
  GFR-binding peptide
  MOD_RES (34), (36): Xaa is C or S

SEQ ID NO: 21843 - protein, 35 aa, Artificial Sequence; identical to SEQ ID NO: 18739
  GFR-binding peptide
  MOD_RES (1), (1): Xaa is C or S

SEQ ID NO: 21844 - protein, 37 aa, Artificial Sequence; identical to SEQ ID NO: 18740
  GFR-binding peptide
  MOD_RES (37), (37): Xaa is C or S
  MOD_RES (16), (17), (18), (19), (20): Xaa is A or G
  MOD_RES (21), (22), (23), (24): Xaa is A or G or is absent

SEQ ID NO: 21845 - protein, 34 aa, Artificial Sequence; identical to SEQ ID NO: 18741
  GFR-binding peptide
  MOD_RES (34), (34): Xaa is C or S
  MOD_RES (14), (15), (16), (17), (18): Xaa is A or G
  MOD_RES (19), (20), (21), (22): Xaa is A or G or is absent

SEQ ID NO: 21846 - protein, 33 aa, Artificial Sequence; identical to SEQ ID NO: 18742
  GFR-binding peptide

SEQ ID NO: 21847 - protein, 44 aa, Artificial Sequence; identical to SEQ ID NO: 18743
  GFR-binding peptide
  MOD_RES (4), (41), (43): Xaa is C or S

SEQ ID NO: 21848 - protein, 40 aa, Artificial Sequence; identical to SEQ ID NO: 18744
  GFR-binding peptide
  MOD_RES (4), (38), (40): Xaa is C or S
  MOD_RES (18), (19), (20), (21), (22): Xaa is A or G
  MOD_RES (23), (24), (25), (26): Xaa is A or G or is absent

SEQ ID NO: 21849 - protein, 39 aa, Artificial Sequence; identical to SEQ ID NO: 18745
  GFR-binding peptide
  MOD_RES (4), (38): Xaa is C or S
  MOD_RES (18), (19), (20), (21), (22): Xaa is A or G
  MOD_RES (23), (24), (25), (26): Xaa is A or G or is absent

SEQ ID NO: 21850 - protein, 38 aa, Artificial Sequence; identical to SEQ ID NO: 18746
  GFR-binding peptide
  MOD_RES (2), (36), (38): Xaa is C or S
  MOD_RES (16), (17), (18), (19), (20): Xaa is A or G
  MOD_RES (21), (22), (23), (24): Xaa is A or G or is absent

SEQ ID NO: 21851 - protein, 41 aa, Artificial Sequence; identical to SEQ ID NO: 18747
  GFR-binding peptide
  MOD_RES (7), (41): Xaa is C or S
  MOD_RES (21), (22), (23), (24), (25): Xaa is A or G
  MOD_RES (26), (27), (28), (29): Xaa is A or G or is absent

SEQ ID NO: 21852 - protein, 42 aa, Artificial Sequence; identical to SEQ ID NO: 18748
  GFR-binding peptide
  MOD_RES (4), (41): Xaa is C or S
  MOD_RES (20), (21), (22), (23), (24): Xaa is A or G
  MOD_RES (25), (26), (27), (28): Xaa is A or G or is absent

SEQ ID NO: 21853 - protein, 36 aa, Artificial Sequence; identical to SEQ ID NO: 18749
  GFR-binding peptide
  MOD_RES (4), (4): Xaa is C or S
  MOD_RES (18), (19), (20), (21), (22): Xaa is A or G
  MOD_RES (23), (24), (25), (26): Xaa is A or G or is absent

SEQ ID NO: 21854 - protein, 38 aa, Artificial Sequence; identical to SEQ ID NO: 18750
  GFR-binding peptide
  MOD_RES (3), (37): Xaa is C or S

SEQ ID NO: 21855 - protein, 38 aa, Artificial Sequence; identical to SEQ ID NO: 18751
  GFR-binding peptide
  MOD_RES (37), (37): Xaa is C or S

SEQ ID NO: 21856 - protein, 40 aa, Artificial Sequence; identical to SEQ ID NO: 18752
  GFR-binding peptide
  MOD_RES (6), (40): Xaa is C or S

SEQ ID NO: 21857 - protein, 37 aa, Artificial Sequence; identical to SEQ ID NO: 18753
  GFR-binding peptide
  MOD_RES (34), (36): Xaa is C or S
  MOD_RES (14), (15), (16), (17), (18): Xaa is A or G
  MOD_RES (19), (20), (21), (22): Xaa is A or G or is absent

SEQ ID NO: 21858 - protein, 39 aa, Artificial Sequence; identical to SEQ ID NO: 18754
  GFR-binding peptide
  MOD_RES (5), (5): Xaa is C or S
  MOD_RES (21), (22), (23), (24), (25): Xaa is A or G
  MOD_RES (26), (27), (28), (29): Xaa is A or G or is absent

SEQ ID NO: 21859 - protein, 37 aa, Artificial Sequence; identical to SEQ ID NO: 18755
  GFR-binding peptide
  MOD_RES (3), (3): Xaa is C or S

SEQ ID NO: 21860 - protein, 43 aa, Artificial Sequence; identical to SEQ ID NO: 18756
  GFR-binding peptide
  MOD_RES (5), (42): Xaa is C or S
  MOD_RES (21), (22), (23), (24), (25): Xaa is A or G
  MOD_RES (26), (27), (28), (29): Xaa is A or G or is absent

SEQ ID NO: 21861 - protein, 42 aa, Artificial Sequence; identical to SEQ ID NO: 18757
  GFR-binding peptide
  MOD_RES (6), (40), (42): Xaa is C or S

SEQ ID NO: 21862 - protein, 41 aa, Artificial Sequence; identical to SEQ ID NO: 18758
  GFR-binding peptide
  MOD_RES (4), (41): Xaa is C or S

SEQ ID NO: 21863 - protein, 35 aa, Artificial Sequence; identical to SEQ ID NO: 18759
  GFR-binding peptide
  MOD_RES (15), (16), (17), (18), (19): Xaa is A or G
  MOD_RES (20), (21), (22), (23): Xaa is A or G or is absent

SEQ ID NO: 21864 - protein, 38 aa, Artificial Sequence; identical to SEQ ID NO: 18760
  GFR-binding peptide
  MOD_RES (4), (4): Xaa is C or S

SEQ ID NO: 21865 - protein, 37 aa, Artificial Sequence; identical to SEQ ID NO: 18761
  GFR-binding peptide
  MOD_RES (5), (5): Xaa is C or S

SEQ ID NO: 21866 - protein, 38 aa, Artificial Sequence; identical to SEQ ID NO: 18762
  GFR-binding peptide
  MOD_RES (1), (35), (37): Xaa is C or S

SEQ ID NO: 21867 - protein, 40 aa, Artificial Sequence; identical to SEQ ID NO: 18763
  GFR-binding peptide
  MOD_RES (4), (38), (40): Xaa is C or S
  MOD_RES (18), (19), (20), (21), (22): Xaa is A or G
  MOD_RES (23), (24), (25), (26): Xaa is A or G or is absent

SEQ ID NO: 21868 - protein, 43 aa, Artificial Sequence; identical to SEQ ID NO: 18764
  GFR-binding peptide
  MOD_RES (6), (40), (42): Xaa is C or S
  MOD_RES (20), (21), (22), (23), (24): Xaa is A or G
  MOD_RES (25), (26), (27), (28): Xaa is A or G or is absent

SEQ ID NO: 21869 - protein, 35 aa, Artificial Sequence; identical to SEQ ID NO: 18765
  GFR-binding peptide
  MOD_RES (1), (1): Xaa is C or S

SEQ ID NO: 21870 - protein, 39 aa, Artificial Sequence; identical to SEQ ID NO: 18766
  GFR-binding peptide
  MOD_RES (2), (36), (38): Xaa is C or S

SEQ ID NO: 21871 - protein, 35 aa, Artificial Sequence; identical to SEQ ID NO: 18767
  GFR-binding peptide
  MOD_RES (3), (3): Xaa is C or S

SEQ ID NO: 21872 - protein, 40 aa, Artificial Sequence; identical to SEQ ID NO: 18768
  GFR-binding peptide
  MOD_RES (4), (4): Xaa is C or S
  MOD_RES (20), (21), (22), (23), (24): Xaa is A or G
  MOD_RES (25), (26), (27), (28): Xaa is A or G or is absent

SEQ ID NO: 21873 - protein, 34 aa, Artificial Sequence; identical to SEQ ID NO: 18769
  GFR-binding peptide
  MOD_RES (1), (1): Xaa is C or S
  MOD_RES (15), (16), (17), (18), (19): Xaa is A or G
  MOD_RES (20), (21), (22), (23): Xaa is A or G or is absent

SEQ ID NO: 21874 - protein, 40 aa, Artificial Sequence; identical to SEQ ID NO: 18770
  GFR-binding peptide
  MOD_RES (4), (4): Xaa is C or S

SEQ ID NO: 21875 - protein, 38 aa, Artificial Sequence; identical to SEQ ID NO: 18771
  GFR-binding peptide
  MOD_RES (1), (35), (37): Xaa is C or S

SEQ ID NO: 21876 - protein, 42 aa, Artificial Sequence; identical to SEQ ID NO: 18772
  GFR-binding peptide
  MOD_RES (7), (41): Xaa is C or S
  MOD_RES (21), (22), (23), (24), (25): Xaa is A or G
  MOD_RES (26), (27), (28), (29): Xaa is A or G or is absent

SEQ ID NO: 21877 - protein, 45 aa, Artificial Sequence; identical to SEQ ID NO: 18773
  GFR-binding peptide
  MOD_RES (5), (42), (44): Xaa is C or S

SEQ ID NO: 21878 - protein, 42 aa, Artificial Sequence; identical to SEQ ID NO: 18774
  GFR-binding peptide
  MOD_RES (5), (39), (41): Xaa is C or S
  MOD_RES (19), (20), (21), (22), (23): Xaa is A or G
  MOD_RES (24), (25), (26), (27): Xaa is A or G or is absent

SEQ ID NO: 21879 - protein, 39 aa, Artificial Sequence; identical to SEQ ID NO: 18775
  GFR-binding peptide
  MOD_RES (5), (39): Xaa is C or S

SEQ ID NO: 21880 - protein, 36 aa, Artificial Sequence; identical to SEQ ID NO: 18776
  GFR-binding peptide
  MOD_RES (2), (36): Xaa is C or S
  MOD_RES (16), (17), (18), (19), (20): Xaa is A or G
  MOD_RES (21), (22), (23), (24): Xaa is A or G or is absent

SEQ ID NO: 21881 - protein, 42 aa, Artificial Sequence; identical to SEQ ID NO: 18777
  GFR-binding peptide
  MOD_RES (5), (42): Xaa is C or S

SEQ ID NO: 21882 - protein, 37 aa, Artificial Sequence; identical to SEQ ID NO: 18778
  GFR-binding peptide
  MOD_RES (2), (36): Xaa is C or S
  MOD_RES (16), (17), (18), (19), (20): Xaa is A or G
  MOD_RES (21), (22), (23), (24): Xaa is A or G or is absent

SEQ ID NO: 21883 - protein, 41 aa, Artificial Sequence; identical to SEQ ID NO: 18779
  GFR-binding peptide
  MOD_RES (4), (38), (40): Xaa is C or S
  MOD_RES (18), (19), (20), (21), (22): Xaa is A or G
  MOD_RES (23), (24), (25), (26): Xaa is A or G or is absent

SEQ ID NO: 21884 - protein, 35 aa, Artificial Sequence; identical to SEQ ID NO: 18780
  GFR-binding peptide
  MOD_RES (2), (2): Xaa is C or S
  MOD_RES (16), (17), (18), (19), (20): Xaa is A or G
  MOD_RES (21), (22), (23), (24): Xaa is A or G or is absent

SEQ ID NO: 21885 - protein, 38 aa, Artificial Sequence; identical to SEQ ID NO: 18781
  GFR-binding peptide
  MOD_RES (5), (5): Xaa is C or S
  MOD_RES (19), (20), (21), (22), (23): Xaa is A or G
  MOD_RES (24), (25), (26), (27): Xaa is A or G or is absent

SEQ ID NO: 21886 - protein, 37 aa, Artificial Sequence; identical to SEQ ID NO: 18782
  GFR-binding peptide
  MOD_RES (1), (35), (37): Xaa is C or S
  MOD_RES (15), (16), (17), (18), (19): Xaa is A or G
  MOD_RES (20), (21), (22), (23): Xaa is A or G or is absent

SEQ ID NO: 21887 - protein, 39 aa, Artificial Sequence; identical to SEQ ID NO: 18783
  GFR-binding peptide
  MOD_RES (36), (38): Xaa is C or S
  MOD_RES (15), (16), (17), (18), (19): Xaa is A or G
  MOD_RES (20), (21), (22), (23): Xaa is A or G or is absent

SEQ ID NO: 21888 - protein, 33 aa, Artificial Sequence; identical to SEQ ID NO: 18784
  GFR-binding peptide

SEQ ID NO: 21889 - protein, 36 aa, Artificial Sequence; identical to SEQ ID NO: 18785
  GFR-binding peptide
  MOD_RES (3), (3): Xaa is C or S
  MOD_RES (17), (18), (19), (20), (21): Xaa is A or G
  MOD_RES (22), (23), (24), (25): Xaa is A or G or is absent

SEQ ID NO: 21890 - protein, 40 aa, Artificial Sequence; identical to SEQ ID NO: 18786
  GFR-binding peptide
  MOD_RES (5), (5): Xaa is C or S

SEQ ID NO: 21891 - protein, 35 aa, Artificial Sequence; identical to SEQ ID NO: 18787
  GFR-binding peptide

SEQ ID NO: 21892 - protein, 39 aa, Artificial Sequence; identical to SEQ ID NO: 18788
  GFR-binding peptide
  MOD_RES (3), (37), (39): Xaa is C or S

SEQ ID NO: 21893 - protein, 41 aa, Artificial Sequence; identical to SEQ ID NO: 18789
  GFR-binding peptide
  MOD_RES (5), (5): Xaa is C or S

SEQ ID NO: 21894 - protein, 35 aa, Artificial Sequence; identical to SEQ ID NO: 18790
  GFR-binding peptide
  MOD_RES (34), (34): Xaa is C or S

SEQ ID NO: 21895 - protein, 37 aa, Artificial Sequence; identical to SEQ ID NO: 18791
  GFR-binding peptide
  MOD_RES (2), (36): Xaa is C or S
  MOD_RES (16), (17), (18), (19), (20): Xaa is A or G
  MOD_RES (21), (22), (23), (24): Xaa is A or G or is absent

SEQ ID NO: 21896 - protein, 38 aa, Artificial Sequence; identical to SEQ ID NO: 18792
  GFR-binding peptide
  MOD_RES (2), (2): Xaa is C or S
  MOD_RES (18), (19), (20), (21), (22): Xaa is A or G
  MOD_RES (23), (24), (25), (26): Xaa is A or G or is absent

SEQ ID NO: 21897 - protein, 39 aa, Artificial Sequence; identical to SEQ ID NO: 18793
  GFR-binding peptide
  MOD_RES (1), (38): Xaa is C or S
  MOD_RES (17), (18), (19), (20), (21): Xaa is A or G
  MOD_RES (22), (23), (24), (25): Xaa is A or G or is absent

SEQ ID NO: 21898 - protein, 34 aa, Artificial Sequence; identical to SEQ ID NO: 18794
  GFR-binding peptide
  MOD_RES (16), (17), (18), (19), (20): Xaa is A or G
  MOD_RES (21), (22), (23), (24): Xaa is A or G or is absent

SEQ ID NO: 21899 - protein, 44 aa, Artificial Sequence; identical to SEQ ID NO: 18795
  GFR-binding peptide
  MOD_RES (5), (42), (44): Xaa is C or S
  MOD_RES (21), (22), (23), (24), (25): Xaa is A or G
  MOD_RES (26), (27), (28), (29): Xaa is A or G or is absent

SEQ ID NO: 21900 - protein, 42 aa, Artificial Sequence; identical to SEQ ID NO: 18796
  GFR-binding peptide
  MOD_RES (5), (39), (41): Xaa is C or S
  MOD_RES (19), (20), (21), (22), (23): Xaa is A or G
  MOD_RES (24), (25), (26), (27): Xaa is A or G or is absent

SEQ ID NO: 21901 - protein, 41 aa, Artificial Sequence; identical to SEQ ID NO: 18797
  GFR-binding peptide
  MOD_RES (4), (41): Xaa is C or S

SEQ ID NO: 21902 - protein, 38 aa, Artificial Sequence; identical to SEQ ID NO: 18798
  GFR-binding peptide
  MOD_RES (6), (6): Xaa is C or S
  MOD_RES (20), (21), (22), (23), (24): Xaa is A or G
  MOD_RES (25), (26), (27), (28): Xaa is A or G or is absent

SEQ ID NO: 21903 - protein, 40 aa, Artificial Sequence; identical to SEQ ID NO: 18799
  GFR-binding peptide
  MOD_RES (37), (39): Xaa is C or S
  MOD_RES (16), (17), (18), (19), (20): Xaa is A or G
  MOD_RES (21), (22), (23), (24): Xaa is A or G or is absent

SEQ ID NO: 21904 - protein, 36 aa, Artificial Sequence; identical to SEQ ID NO: 18800
  GFR-binding peptide
  MOD_RES (16), (17), (18), (19), (20): Xaa is A or G
  MOD_RES (21), (22), (23), (24): Xaa is A or G or is absent

SEQ ID NO: 21905 - protein, 36 aa, Artificial Sequence; identical to SEQ ID NO: 18801
  GFR-binding peptide
  MOD_RES (2), (36): Xaa is C or S

SEQ ID NO: 21906 - protein, 37 aa, Artificial Sequence; identical to SEQ ID NO: 18802
  GFR-binding peptide
  MOD_RES (1), (1): Xaa is C or S

SEQ ID NO: 21907 - protein, 40 aa, Artificial Sequence; identical to SEQ ID NO: 18803
  GFR-binding peptide
  MOD_RES (3), (40): Xaa is C or S

SEQ ID NO: 21908 - protein, 45 aa, Artificial Sequence; identical to SEQ ID NO: 18804
  GFR-binding peptide
  MOD_RES (5), (42), (44): Xaa is C or S
  MOD_RES (21), (22), (23), (24), (25): Xaa is A or G
  MOD_RES (26), (27), (28), (29): Xaa is A or G or is absent

SEQ ID NO: 21909 - protein, 43 aa, Artificial Sequence; identical to SEQ ID NO: 18805
  GFR-binding peptide
  MOD_RES (6), (40), (42): Xaa is C or S

SEQ ID NO: 21910 - protein, 39 aa, Artificial Sequence; identical to SEQ ID NO: 18806
  GFR-binding peptide
  MOD_RES (37), (39): Xaa is C or S
  MOD_RES (16), (17), (18), (19), (20): Xaa is A or G
  MOD_RES (21), (22), (23), (24): Xaa is A or G or is absent

SEQ ID NO: 21911 - protein, 33 aa, Artificial Sequence; identical to SEQ ID NO: 18807
  GFR-binding peptide
  MOD_RES (15), (16), (17), (18), (19): Xaa is A or G
  MOD_RES (20), (21), (22), (23): Xaa is A or G or is absent

SEQ ID NO: 21912 - protein, 40 aa, Artificial Sequence; identical to SEQ ID NO: 18808
  GFR-binding peptide
  MOD_RES (2), (39): Xaa is C or S

SEQ ID NO: 21913 - protein, 35 aa, Artificial Sequence; identical to SEQ ID NO: 18809
  GFR-binding peptide
  MOD_RES (2), (2): Xaa is C or S

SEQ ID NO: 21914 - protein, 37 aa, Artificial Sequence; identical to SEQ ID NO: 18810
  GFR-binding peptide
  MOD_RES (1), (1): Xaa is C or S

SEQ ID NO: 21915 - protein, 40 aa, Artificial Sequence; identical to SEQ ID NO: 18811
  GFR-binding peptide
  MOD_RES (37), (39): Xaa is C or S
  MOD_RES (16), (17), (18), (19), (20): Xaa is A or G
  MOD_RES (21), (22), (23), (24): Xaa is A or G or is absent

SEQ ID NO: 21916 - protein, 35 aa, Artificial Sequence; identical to SEQ ID NO: 18812
  GFR-binding peptide

SEQ ID NO: 21917 - protein, 36 aa, Artificial Sequence; identical to SEQ ID NO: 18813
  GFR-binding peptide
  MOD_RES (2), (36): Xaa is C or S

SEQ ID NO: 21918 - protein, 38 aa, Artificial Sequence; identical to SEQ ID NO: 18814
  GFR-binding peptide
  MOD_RES (3), (3): Xaa is C or S
  MOD_RES (19), (20), (21), (22), (23): Xaa is A or G
  MOD_RES (24), (25), (26), (27): Xaa is A or G or is absent

SEQ ID NO: 21919 - protein, 40 aa, Artificial Sequence; identical to SEQ ID NO: 18815
  GFR-binding peptide
  MOD_RES (37), (39): Xaa is C or S
  MOD_RES (16), (17), (18), (19), (20): Xaa is A or G
  MOD_RES (21), (22), (23), (24): Xaa is A or G or is absent

SEQ ID NO: 21920 - protein, 36 aa, Artificial Sequence; identical to SEQ ID NO: 18816
  GFR-binding peptide
  MOD_RES (1), (35): Xaa is C or S
  MOD_RES (15), (16), (17), (18), (19): Xaa is A or G
  MOD_RES (20), (21), (22), (23): Xaa is A or G or is absent

SEQ ID NO: 21921 - protein, 44 aa, Artificial Sequence; identical to SEQ ID NO: 18817
  GFR-binding peptide
  MOD_RES (4), (41), (43): Xaa is C or S

SEQ ID NO: 21922 - protein, 43 aa, Artificial Sequence; identical to SEQ ID NO: 18818
  GFR-binding peptide
  MOD_RES (5), (42): Xaa is C or S

SEQ ID NO: 21923 - protein, 34 aa, Artificial Sequence; identical to SEQ ID NO: 18819
  GFR-binding peptide
  MOD_RES (34), (34): Xaa is C or S
  MOD_RES (14), (15), (16), (17), (18): Xaa is A or G
  MOD_RES (19), (20), (21), (22): Xaa is A or G or is absent

SEQ ID NO: 21924 - protein, 38 aa, Artificial Sequence; identical to SEQ ID NO: 18820
  GFR-binding peptide
  MOD_RES (5), (5): Xaa is C or S

SEQ ID NO: 21925 - protein, 35 aa, Artificial Sequence; identical to SEQ ID NO: 18821
  GFR-binding peptide

SEQ ID NO: 21926 - protein, 36 aa, Artificial Sequence; identical to SEQ ID NO: 18822
  GFR-binding peptide
  MOD_RES (34), (36): Xaa is C or S
  MOD_RES (14), (15), (16), (17), (18): Xaa is A or G
  MOD_RES (19), (20), (21), (22): Xaa is A or G or is absent

SEQ ID NO: 21927 - protein, 38 aa, Artificial Sequence; identical to SEQ ID NO: 18823
  GFR-binding peptide
  MOD_RES (4), (38): Xaa is C or S

SEQ ID NO: 21928 - protein, 37 aa, Artificial Sequence; identical to SEQ ID NO: 18824
  GFR-binding peptide
  MOD_RES (3), (3): Xaa is C or S

SEQ ID NO: 21929 - protein, 37 aa, Artificial Sequence; identical to SEQ ID NO: 18825
  GFR-binding peptide
  MOD_RES (37), (37): Xaa is C or S
  MOD_RES (16), (17), (18), (19), (20): Xaa is A or G
  MOD_RES (21), (22), (23), (24): Xaa is A or G or is absent

SEQ ID NO: 21930 - protein, 39 aa, Artificial Sequence; identical to SEQ ID NO: 18826
  GFR-binding peptide
  MOD_RES (2), (36), (38): Xaa is C or S
  MOD_RES (16), (17), (18), (19), (20): Xaa is A or G
  MOD_RES (21), (22), (23), (24): Xaa is A or G or is absent

SEQ ID NO: 21931 - protein, 34 aa, Artificial Sequence; identical to SEQ ID NO: 18827
  GFR-binding peptide

SEQ ID NO: 21932 - protein, 38 aa, Artificial Sequence; identical to SEQ ID NO: 18828
  GFR-binding peptide
  MOD_RES (1), (35), (37): Xaa is C or S
  MOD_RES (15), (16), (17), (18), (19): Xaa is A or G
  MOD_RES (20), (21), (22), (23): Xaa is A or G or is absent

SEQ ID NO: 21933 - protein, 39 aa, Artificial Sequence; identical to SEQ ID NO: 18829
  GFR-binding peptide
  MOD_RES (4), (38): Xaa is C or S

SEQ ID NO: 21934 - protein, 40 aa, Artificial Sequence; identical to SEQ ID NO: 18830
  GFR-binding peptide
  MOD_RES (4), (4): Xaa is C or S
  MOD_RES (20), (21), (22), (23), (24): Xaa is A or G
  MOD_RES (25), (26), (27), (28): Xaa is A or G or is absent

SEQ ID NO: 21935 - protein, 36 aa, Artificial Sequence; identical to SEQ ID NO: 18831
  GFR-binding peptide
  MOD_RES (4), (4): Xaa is C or S
  MOD_RES (18), (19), (20), (21), (22): Xaa is A or G
  MOD_RES (23), (24), (25), (26): Xaa is A or G or is absent

SEQ ID NO: 21936 - protein, 36 aa, Artificial Sequence; identical to SEQ ID NO: 18832
  GFR-binding peptide
  MOD_RES (34), (36): Xaa is C or S
  MOD_RES (14), (15), (16), (17), (18): Xaa is A or G
  MOD_RES (19), (20), (21), (22): Xaa is A or G or is absent

SEQ ID NO: 21937 - protein, 40 aa, Artificial Sequence; identical to SEQ ID NO: 18833
  GFR-binding peptide
  MOD_RES (7), (7): Xaa is C or S

SEQ ID NO: 21938 - protein, 36 aa, Artificial Sequence; identical to SEQ ID NO: 18834
  GFR-binding peptide
  MOD_RES (36), (36): Xaa is C or S
  MOD_RES (15), (16), (17), (18), (19): Xaa is A or G
  MOD_RES (20), (21), (22), (23): Xaa is A or G or is absent

SEQ ID NO: 21939 - protein, 35 aa, Artificial Sequence; identical to SEQ ID NO: 18835
  GFR-binding peptide
  MOD_RES (1), (35): Xaa is C or S
  MOD_RES (15), (16), (17), (18), (19): Xaa is A or G
  MOD_RES (20), (21), (22), (23): Xaa is A or G or is absent

SEQ ID NO: 21940 - protein, 41 aa, Artificial Sequence; identical to SEQ ID NO: 18836
  GFR-binding peptide
  MOD_RES (3), (40): Xaa is C or S
  MOD_RES (19), (20), (21), (22), (23): Xaa is A or G
  MOD_RES (24), (25), (26), (27): Xaa is A or G or is absent

SEQ ID NO: 21941 - protein, 40 aa, Artificial Sequence; identical to SEQ ID NO: 18837
  GFR-binding peptide
  MOD_RES (2), (39): Xaa is C or S
  MOD_RES (18), (19), (20), (21), (22): Xaa is A or G
  MOD_RES (23), (24), (25), (26): Xaa is A or G or is absent

SEQ ID NO: 21942 - protein, 43 aa, Artificial Sequence; identical to SEQ ID NO: 18838
  GFR-binding peptide
  MOD_RES (5), (42): Xaa is C or S

SEQ ID NO: 21943 - protein, 39 aa, Artificial Sequence; identical to SEQ ID NO: 18839
  GFR-binding peptide
  MOD_RES (5), (39): Xaa is C or S

SEQ ID NO: 21944 - protein, 35 aa, Artificial Sequence; identical to SEQ ID NO: 18840
  GFR-binding peptide
  MOD_RES (35), (35): Xaa is C or S
  MOD_RES (14), (15), (16), (17), (18): Xaa is A or G
  MOD_RES (19), (20), (21), (22): Xaa is A or G or is absent

SEQ ID NO: 21945 - protein, 38 aa, Artificial Sequence; identical to SEQ ID NO: 18841
  GFR-binding peptide
  MOD_RES (1), (38): Xaa is C or S

SEQ ID NO: 21946 - protein, 37 aa, Artificial Sequence; identical to SEQ ID NO: 18842
  GFR-binding peptide
  MOD_RES (4), (4): Xaa is C or S

SEQ ID NO: 21947 - protein, 34 aa, Artificial Sequence; identical to SEQ ID NO: 18843
  GFR-binding peptide
  MOD_RES (1), (1): Xaa is C or S
  MOD_RES (15), (16), (17), (18), (19): Xaa is A or G
  MOD_RES (20), (21), (22), (23): Xaa is A or G or is absent

SEQ ID NO: 21948 - protein, 41 aa, Artificial Sequence; identical to SEQ ID NO: 18844
  GFR-binding peptide
  MOD_RES (3), (40): Xaa is C or S
  MOD_RES (19), (20), (21), (22), (23): Xaa is A or G
  MOD_RES (24), (25), (26), (27): Xaa is A or G or is absent

SEQ ID NO: 21949 - protein, 36 aa, Artificial Sequence; identical to SEQ ID NO: 18845
  GFR-binding peptide
  MOD_RES (1), (1): Xaa is C or S
  MOD_RES (17), (18), (19), (20), (21): Xaa is A or G
  MOD_RES (22), (23), (24), (25): Xaa is A or G or is absent

SEQ ID NO: 21950 - protein, 35 aa, Artificial Sequence; identical to SEQ ID NO: 18846
  GFR-binding peptide
  MOD_RES (35), (35): Xaa is C or S

SEQ ID NO: 21951 - protein, 43 aa, Artificial Sequence; identical to SEQ ID NO: 18847
  GFR-binding peptide
  MOD_RES (7), (41), (43): Xaa is C or S
  MOD_RES (21), (22), (23), (24), (25): Xaa is A or G
  MOD_RES (26), (27), (28), (29): Xaa is A or G or is absent

SEQ ID NO: 21952 - protein, 33 aa, Artificial Sequence; identical to SEQ ID NO: 18848
  GFR-binding peptide
  MOD_RES (1), (1): Xaa is C or S

SEQ ID NO: 21953 - protein, 37 aa, Artificial Sequence; identical to SEQ ID NO: 18849
  GFR-binding peptide
  MOD_RES (1), (1): Xaa is C or S
  MOD_RES (17), (18), (19), (20), (21): Xaa is A or G
  MOD_RES (22), (23), (24), (25): Xaa is A or G or is absent

SEQ ID NO: 21954 - protein, 34 aa, Artificial Sequence; identical to SEQ ID NO: 18850
  GFR-binding peptide
  MOD_RES (2), (2): Xaa is C or S
  MOD_RES (16), (17), (18), (19), (20): Xaa is A or G
  MOD_RES (21), (22), (23), (24): Xaa is A or G or is absent

SEQ ID NO: 21955 - protein, 41 aa, Artificial Sequence; identical to SEQ ID NO: 18851
  GFR-binding peptide
  MOD_RES (6), (40): Xaa is C or S

SEQ ID NO: 21956 - protein, 34 aa, Artificial Sequence; identical to SEQ ID NO: 18852
  GFR-binding peptide

SEQ ID NO: 21957 - protein, 43 aa, Artificial Sequence; identical to SEQ ID NO: 18853
  GFR-binding peptide
  MOD_RES (5), (42): Xaa is C or S

SEQ ID NO: 21958 - protein, 42 aa, Artificial Sequence; identical to SEQ ID NO: 18854
  GFR-binding peptide
  MOD_RES (7), (41): Xaa is C or S

SEQ ID NO: 21959 - protein, 38 aa, Artificial Sequence; identical to SEQ ID NO: 18855
  GFR-binding peptide
  MOD_RES (2), (2): Xaa is C or S
  MOD_RES (18), (19), (20), (21), (22): Xaa is A or G
  MOD_RES (23), (24), (25), (26): Xaa is A or G or is absent

SEQ ID NO: 21960 - protein, 43 aa, Artificial Sequence; identical to SEQ ID NO: 18856
  GFR-binding peptide
  MOD_RES (6), (40), (42): Xaa is C or S
  MOD_RES (20), (21), (22), (23), (24): Xaa is A or G
  MOD_RES (25), (26), (27), (28): Xaa is A or G or is absent

SEQ ID NO: 21961 - protein, 44 aa, Artificial Sequence; identical to SEQ ID NO: 18857
  GFR-binding peptide
  MOD_RES (4), (41), (43): Xaa is C or S
  MOD_RES (20), (21), (22), (23), (24): Xaa is A or G
  MOD_RES (25), (26), (27), (28): Xaa is A or G or is absent

SEQ ID NO: 21962 - protein, 36 aa, Artificial Sequence; identical to SEQ ID NO: 18858
  GFR-binding peptide
  MOD_RES (34), (36): Xaa is C or S

SEQ ID NO: 21963 - protein, 38 aa, Artificial Sequence; identical to SEQ ID NO: 18859
  GFR-binding peptide
  MOD_RES (2), (2): Xaa is C or S

SEQ ID NO: 21964 - protein, 32 aa, Artificial Sequence; identical to SEQ ID NO: 18860
  GFR-binding peptide
  MOD_RES (14), (15), (16), (17), (18): Xaa is A or G
  MOD_RES (19), (20), (21), (22): Xaa is A or G or is absent

SEQ ID NO: 21965 - protein, 37 aa, Artificial Sequence; identical to SEQ ID NO: 18861
  GFR-binding peptide
  MOD_RES (2), (2): Xaa is C or S

SEQ ID NO: 21966 - protein, 43 aa, Artificial Sequence; identical to SEQ ID NO: 18862
  GFR-binding peptide
  MOD_RES (7), (41), (43): Xaa is C or S
  MOD_RES (21), (22), (23), (24), (25): Xaa is A or G
  MOD_RES (26), (27), (28), (29): Xaa is A or G or is absent

SEQ ID NO: 21967 - protein, 35 aa, Artificial Sequence; identical to SEQ ID NO: 18863
  GFR-binding peptide
  MOD_RES (16), (17), (18), (19), (20): Xaa is A or G
  MOD_RES (21), (22), (23), (24): Xaa is A or G or is absent

SEQ ID NO: 21968 - protein, 38 aa, Artificial Sequence; identical to SEQ ID NO: 18864
  GFR-binding peptide
  MOD_RES (37), (37): Xaa is C or S
  MOD_RES (16), (17), (18), (19), (20): Xaa is A or G
  MOD_RES (21), (22), (23), (24): Xaa is A or G or is absent

SEQ ID NO: 21969 - protein, 37 aa, Artificial Sequence; identical to SEQ ID NO: 18865
  GFR-binding peptide
  MOD_RES (3), (3): Xaa is C or S
  MOD_RES (19), (20), (21), (22), (23): Xaa is A or G
  MOD_RES (24), (25), (26), (27): Xaa is A or G or is absent

SEQ ID NO: 21970 - protein, 38 aa, Artificial Sequence; identical to SEQ ID NO: 18866
  GFR-binding peptide
  MOD_RES (1), (38): Xaa is C or S

SEQ ID NO: 21971 - protein, 37 aa, Artificial Sequence; identical to SEQ ID NO: 18867
  GFR-binding peptide
  MOD_RES (3), (3): Xaa is C or S
  MOD_RES (19), (20), (21), (22), (23): Xaa is A or G
  MOD_RES (24), (25), (26), (27): Xaa is A or G or is absent

SEQ ID NO: 21972 - protein, 33 aa, Artificial Sequence; identical to SEQ ID NO: 18868
  GFR-binding peptide

SEQ ID NO: 21973 - protein, 33 aa, Artificial Sequence; identical to SEQ ID NO: 18869
  GFR-binding peptide
  MOD_RES (1), (1): Xaa is C or S
  MOD_RES (15), (16), (17), (18), (19): Xaa is A or G
  MOD_RES (20), (21), (22), (23): Xaa is A or G or is absent

SEQ ID NO: 21974 - protein, 41 aa, Artificial Sequence; identical to SEQ ID NO: 18870
  GFR-binding peptide
  MOD_RES (3), (40): Xaa is C or S

SEQ ID NO: 21975 - protein, 34 aa, Artificial Sequence; identical to SEQ ID NO: 18871
  GFR-binding peptide
  MOD_RES (2), (2): Xaa is C or S
  MOD_RES (16), (17), (18), (19), (20): Xaa is A or G
  MOD_RES (21), (22), (23), (24): Xaa is A or G or is absent

SEQ ID NO: 21976 - protein, 36 aa, Artificial Sequence; identical to SEQ ID NO: 18872
  GFR-binding peptide
  MOD_RES (1), (35): Xaa is C or S
  MOD_RES (15), (16), (17), (18), (19): Xaa is A or G
  MOD_RES (20), (21), (22), (23): Xaa is A or G or is absent

SEQ ID NO: 21977 - protein, 36 aa, Artificial Sequence; identical to SEQ ID NO: 18873
  GFR-binding peptide
  MOD_RES (16), (17), (18), (19), (20): Xaa is A or G
  MOD_RES (21), (22), (23), (24): Xaa is A or G or is absent

SEQ ID NO: 21978 - protein, 40 aa, Artificial Sequence; identical to SEQ ID NO: 18874
  GFR-binding peptide
  MOD_RES (5), (39): Xaa is C or S

SEQ ID NO: 21979 - protein, 42 aa, Artificial Sequence; identical to SEQ ID NO: 18875
  GFR-binding peptide
  MOD_RES (3), (40), (42): Xaa is C or S

SEQ ID NO: 21980 - protein, 40 aa, Artificial Sequence; identical to SEQ ID NO: 18876
  GFR-binding peptide
  MOD_RES (37), (39): Xaa is C or S

SEQ ID NO: 21981 - protein, 39 aa, Artificial Sequence; identical to SEQ ID NO: 18877
  GFR-binding peptide
  MOD_RES (6), (6): Xaa is C or S
  MOD_RES (20), (21), (22), (23), (24): Xaa is A or G
  MOD_RES (25), (26), (27), (28): Xaa is A or G or is absent

SEQ ID NO: 21982 - protein, 37 aa, Artificial Sequence; identical to SEQ ID NO: 18878
  GFR-binding peptide
  MOD_RES (3), (37): Xaa is C or S
  MOD_RES (17), (18), (19), (20), (21): Xaa is A or G
  MOD_RES (22), (23), (24), (25): Xaa is A or G or is absent

SEQ ID NO: 21983 - protein, 39 aa, Artificial Sequence; identical to SEQ ID NO: 18879
  GFR-binding peptide
  MOD_RES (3), (3): Xaa is C or S
  MOD_RES (19), (20), (21), (22), (23): Xaa is A or G
  MOD_RES (24), (25), (26), (27): Xaa is A or G or is absent

SEQ ID NO: 21984 - protein, 34 aa, Artificial Sequence; identical to SEQ ID NO: 18880
  GFR-binding peptide
  MOD_RES (34), (34): Xaa is C or S
  MOD_RES (14), (15), (16), (17), (18): Xaa is A or G
  MOD_RES (19), (20), (21), (22): Xaa is A or G or is absent

SEQ ID NO: 21985 - protein, 39 aa, Artificial Sequence; identical to SEQ ID NO: 18881
  GFR-binding peptide
  MOD_RES (5), (39): Xaa is C or S

SEQ ID NO: 21986 - protein, 39 aa, Artificial Sequence; identical to SEQ ID NO: 18882
  GFR-binding peptide
  MOD_RES (4), (4): Xaa is C or S

SEQ ID NO: 21987 - protein, 34 aa, Artificial Sequence; identical to SEQ ID NO: 18883
  GFR-binding peptide
  MOD_RES (2), (2): Xaa is C or S
  MOD_RES (16), (17), (18), (19), (20): Xaa is A or G
  MOD_RES (21), (22), (23), (24): Xaa is A or G or is absent

SEQ ID NO: 21988 - protein, 37 aa, Artificial Sequence; identical to SEQ ID NO: 18884
  GFR-binding peptide
  MOD_RES (2), (36): Xaa is C or S

SEQ ID NO: 21989 - protein, 42 aa, Artificial Sequence; identical to SEQ ID NO: 18885
  GFR-binding peptide
  MOD_RES (3), (40), (42): Xaa is C or S
  MOD_RES (19), (20), (21), (22), (23): Xaa is A or G
  MOD_RES (24), (25), (26), (27): Xaa is A or G or is absent

SEQ ID NO: 21990 - protein, 39 aa, Artificial Sequence; identical to SEQ ID NO: 18886
  GFR-binding peptide
  MOD_RES (3), (37), (39): Xaa is C or S
  MOD_RES (17), (18), (19), (20), (21): Xaa is A or G
  MOD_RES (22), (23), (24), (25): Xaa is A or G or is absent

SEQ ID NO: 21991 - protein, 37 aa, Artificial Sequence; identical to SEQ ID NO: 18887
  GFR-binding peptide
  MOD_RES (2), (36): Xaa is C or S
  MOD_RES (16), (17), (18), (19), (20): Xaa is A or G
  MOD_RES (21), (22), (23), (24): Xaa is A or G or is absent

SEQ ID NO: 21992 - protein, 35 aa, Artificial Sequence; identical to SEQ ID NO: 18888
  GFR-binding peptide
  MOD_RES (3), (3): Xaa is C or S

SEQ ID NO: 21993 - protein, 35 aa, Artificial Sequence; identical to SEQ ID NO: 18889
  GFR-binding peptide
  MOD_RES (3), (3): Xaa is C or S
  MOD_RES (17), (18), (19), (20), (21): Xaa is A or G
  MOD_RES (22), (23), (24), (25): Xaa is A or G or is absent

SEQ ID NO: 21994 - protein, 37 aa, Artificial Sequence; identical to SEQ ID NO: 18890
  GFR-binding peptide
  MOD_RES (1), (35), (37): Xaa is C or S

SEQ ID NO: 21995 - protein, 39 aa, Artificial Sequence; identical to SEQ ID NO: 18891
  GFR-binding peptide
  MOD_RES (7), (7): Xaa is C or S
  MOD_RES (21), (22), (23), (24), (25): Xaa is A or G
  MOD_RES (26), (27), (28), (29): Xaa is A or G or is absent

SEQ ID NO: 21996 - protein, 40 aa, Artificial Sequence; identical to SEQ ID NO: 18892
  GFR-binding peptide
  MOD_RES (7), (7): Xaa is C or S
  MOD_RES (21), (22), (23), (24), (25): Xaa is A or G
  MOD_RES (26), (27), (28), (29): Xaa is A or G or is absent

SEQ ID NO: 21997 - protein, 34 aa, Artificial Sequence; identical to SEQ ID NO: 18893
  GFR-binding peptide

SEQ ID NO: 21998 - protein, 37 aa, Artificial Sequence; identical to SEQ ID NO: 18894
  GFR-binding peptide
  MOD_RES (3), (37): Xaa is C or S
  MOD_RES (17), (18), (19), (20), (21): Xaa is A or G
  MOD_RES (22), (23), (24), (25): Xaa is A or G or is absent

SEQ ID NO: 21999 - protein, 40 aa, Artificial Sequence; identical to SEQ ID NO: 18895
  GFR-binding peptide
  MOD_RES (4), (4): Xaa is C or S

SEQ ID NO: 22000 - protein, 34 aa, Artificial Sequence; identical to SEQ ID NO: 18896
  GFR-binding peptide
  MOD_RES (1), (1): Xaa is C or S
  MOD_RES (15), (16), (17), (18), (19): Xaa is A or G
  MOD_RES (20), (21), (22), (23): Xaa is A or G or is absent

SEQ ID NO: 22001 - protein, 39 aa, Artificial Sequence; identical to SEQ ID NO: 18897
  GFR-binding peptide
  MOD_RES (1), (38): Xaa is C or S
  MOD_RES (17), (18), (19), (20), (21): Xaa is A or G
  MOD_RES (22), (23), (24), (25): Xaa is A or G or is absent

SEQ ID NO: 22002 - protein, 40 aa, Artificial Sequence; identical to SEQ ID NO: 18898
  GFR-binding peptide
  MOD_RES (4), (4): Xaa is C or S

SEQ ID NO: 22003 - protein, 37 aa, Artificial Sequence; identical to SEQ ID NO: 18899
  GFR-binding peptide
  MOD_RES (35), (37): Xaa is C or S
  MOD_RES (14), (15), (16), (17), (18): Xaa is A or G
  MOD_RES (19), (20), (21), (22): Xaa is A or G or is absent

SEQ ID NO: 22004 - protein, 35 aa, Artificial Sequence; identical to SEQ ID NO: 18900
  GFR-binding peptide
  MOD_RES (34), (34): Xaa is C or S

SEQ ID NO: 22005 - protein, 40 aa, Artificial Sequence; identical to SEQ ID NO: 18901
  GFR-binding peptide
  MOD_RES (3), (40): Xaa is C or S
  MOD_RES (19), (20), (21), (22), (23): Xaa is A or G
  MOD_RES (24), (25), (26), (27): Xaa is A or G or is absent

SEQ ID NO: 22006 - protein, 34 aa, Artificial Sequence; identical to SEQ ID NO: 18902
  GFR-binding peptide
  MOD_RES (14), (15), (16), (17), (18): Xaa is A or G
  MOD_RES (19), (20), (21), (22): Xaa is A or G or is absent

SEQ ID NO: 22007 - protein, 39 aa, Artificial Sequence; identical to SEQ ID NO: 18903
  GFR-binding peptide
  MOD_RES (3), (37), (39): Xaa is C or S
  MOD_RES (17), (18), (19), (20), (21): Xaa is A or G
  MOD_RES (22), (23), (24), (25): Xaa is A or G or is absent

SEQ ID NO: 22008 - protein, 43 aa, Artificial Sequence; identical to SEQ ID NO: 18904
  GFR-binding peptide
  MOD_RES (3), (40), (42): Xaa is C or S
  MOD_RES (19), (20), (21), (22), (23): Xaa is A or G
  MOD_RES (24), (25), (26), (27): Xaa is A or G or is absent

SEQ ID NO: 22009 - protein, 41 aa, Artificial Sequence; identical to SEQ ID NO: 18905
  GFR-binding peptide
  MOD_RES (5), (39), (41): Xaa is C or S
  MOD_RES (19), (20), (21), (22), (23): Xaa is A or G
  MOD_RES (24), (25), (26), (27): Xaa is A or G or is absent

SEQ ID NO: 22010 - protein, 35 aa, Artificial Sequence; identical to SEQ ID NO: 18906
  GFR-binding peptide
  MOD_RES (1), (1): Xaa is C or S
  MOD_RES (17), (18), (19), (20), (21): Xaa is A or G
  MOD_RES (22), (23), (24), (25): Xaa is A or G or is absent

SEQ ID NO: 22011 - protein, 38 aa, Artificial Sequence; identical to SEQ ID NO: 18907
  GFR-binding peptide
  MOD_RES (35), (37): Xaa is C or S

SEQ ID NO: 22012 - protein, 35 aa, Artificial Sequence; identical to SEQ ID NO: 18908
  GFR-binding peptide
  MOD_RES (2), (2): Xaa is C or S
  MOD_RES (16), (17), (18), (19), (20): Xaa is A or G
  MOD_RES (21), (22), (23), (24): Xaa is A or G or is absent

SEQ ID NO: 22013 - protein, 37 aa, Artificial Sequence; identical to SEQ ID NO: 18909
  GFR-binding peptide
  MOD_RES (1), (35), (37): Xaa is C or S
  MOD_RES (15), (16), (17), (18), (19): Xaa is A or G
  MOD_RES (20), (21), (22), (23): Xaa is A or G or is absent

SEQ ID NO: 22014 - protein, 42 aa, Artificial Sequence; identical to SEQ ID NO: 18910
  GFR-binding peptide
  MOD_RES (5), (39), (41): Xaa is C or S

SEQ ID NO: 22015 - protein, 41 aa, Artificial Sequence; identical to SEQ ID NO: 18911
  GFR-binding peptide
  MOD_RES (2), (39), (41): Xaa is C or S
  MOD_RES (18), (19), (20), (21), (22): Xaa is A or G
  MOD_RES (23), (24), (25), (26): Xaa is A or G or is absent

SEQ ID NO: 22016 - protein, 38 aa, Artificial Sequence; identical to SEQ ID NO: 18912
  GFR-binding peptide
  MOD_RES (37), (37): Xaa is C or S
  MOD_RES (16), (17), (18), (19), (20): Xaa is A or G
  MOD_RES (21), (22), (23), (24): Xaa is A or G or is absent

SEQ ID NO: 22017 - protein, 36 aa, Artificial Sequence; identical to SEQ ID NO: 18913
  GFR-binding peptide
  MOD_RES (2), (2): Xaa is C or S
  MOD_RES (18), (19), (20), (21), (22): Xaa is A or G
  MOD_RES (23), (24), (25), (26): Xaa is A or G or is absent

SEQ ID NO: 22018 - protein, 33 aa, Artificial Sequence; identical to SEQ ID NO: 18914
  GFR-binding peptide
  MOD_RES (1), (1): Xaa is C or S

SEQ ID NO: 22019 - protein, 39 aa, Artificial Sequence; identical to SEQ ID NO: 18915
  GFR-binding peptide
  MOD_RES (4), (4): Xaa is C or S

SEQ ID NO: 22020 - protein, 39 aa, Artificial Sequence; identical to SEQ ID NO: 18916
  GFR-binding peptide
  MOD_RES (2), (39): Xaa is C or S
  MOD_RES (18), (19), (20), (21), (22): Xaa is A or G
  MOD_RES (23), (24), (25), (26): Xaa is A or G or is absent

SEQ ID NO: 22021 - protein, 41 aa, Artificial Sequence; identical to SEQ ID NO: 18917
  GFR-binding peptide
  MOD_RES (4), (38), (40): Xaa is C or S

SEQ ID NO: 22022 - protein, 33 aa, Artificial Sequence; identical to SEQ ID NO: 18918
  GFR-binding peptide
  MOD_RES (14), (15), (16), (17), (18): Xaa is A or G
  MOD_RES (19), (20), (21), (22): Xaa is A or G or is absent

SEQ ID NO: 22023 - protein, 38 aa, Artificial Sequence; identical to SEQ ID NO: 18919
  GFR-binding peptide
  MOD_RES (6), (6): Xaa is C or S

SEQ ID NO: 22024 - protein, 43 aa, Artificial Sequence; identical to SEQ ID NO: 18920
  GFR-binding peptide
  MOD_RES (7), (41), (43): Xaa is C or S
  MOD_RES (21), (22), (23), (24), (25): Xaa is A or G
  MOD_RES (26), (27), (28), (29): Xaa is A or G or is absent

SEQ ID NO: 22025 - protein, 41 aa, Artificial Sequence; identical to SEQ ID NO: 18921
  GFR-binding peptide
  MOD_RES (2), (39), (41): Xaa is C or S
  MOD_RES (18), (19), (20), (21), (22): Xaa is A or G
  MOD_RES (23), (24), (25), (26): Xaa is A or G or is absent

SEQ ID NO: 22026 - protein, 39 aa, Artificial Sequence; identical to SEQ ID NO: 18922
  GFR-binding peptide
  MOD_RES (2), (39): Xaa is C or S

SEQ ID NO: 22027 - protein, 39 aa, Artificial Sequence; identical to SEQ ID NO: 18923
  GFR-binding peptide
  MOD_RES (6), (6): Xaa is C or S
  MOD_RES (20), (21), (22), (23), (24): Xaa is A or G
  MOD_RES (25), (26), (27), (28): Xaa is A or G or is absent

SEQ ID NO: 22028 - protein, 39 aa, Artificial Sequence; identical to SEQ ID NO: 18924
  GFR-binding peptide
  MOD_RES (4), (4): Xaa is C or S

SEQ ID NO: 22029 - protein, 38 aa, Artificial Sequence; identical to SEQ ID NO: 18925
  GFR-binding peptide
  MOD_RES (36), (38): Xaa is C or S
  MOD_RES (15), (16), (17), (18), (19): Xaa is A or G
  MOD_RES (20), (21), (22), (23): Xaa is A or G or is absent

SEQ ID NO: 22030 - protein, 35 aa, Artificial Sequence; identical to SEQ ID NO: 18926
  GFR-binding peptide
  MOD_RES (34), (34): Xaa is C or S
  MOD_RES (14), (15), (16), (17), (18): Xaa is A or G
  MOD_RES (19), (20), (21), (22): Xaa is A or G or is absent

SEQ ID NO: 22031 - protein, 40 aa, Artificial Sequence; identical to SEQ ID NO: 18927
  GFR-binding peptide
  MOD_RES (5), (39): Xaa is C or S
  MOD_RES (19), (20), (21), (22), (23): Xaa is A or G
  MOD_RES (24), (25), (26), (27): Xaa is A or G or is absent

SEQ ID NO: 22032 - protein, 42 aa, Artificial Sequence; identical to SEQ ID NO: 18928
  GFR-binding peptide
  MOD_RES (5), (39), (41): Xaa is C or S

SEQ ID NO: 22033 - protein, 41 aa, Artificial Sequence; identical to SEQ ID NO: 18929
  GFR-binding peptide
  MOD_RES (5), (39), (41): Xaa is C or S
  MOD_RES (19), (20), (21), (22), (23): Xaa is A or G
  MOD_RES (24), (25), (26), (27): Xaa is A or G or is absent

SEQ ID NO: 22034 - protein, 42 aa, Artificial Sequence; identical to SEQ ID NO: 18930
  GFR-binding peptide
  MOD_RES (4), (41): Xaa is C or S

SEQ ID NO: 22035 - protein, 43 aa, Artificial Sequence; identical to SEQ ID NO: 18931
  GFR-binding peptide
  MOD_RES (7), (41), (43): Xaa is C or S

SEQ ID NO: 22036 - protein, 35 aa, Artificial Sequence; identical to SEQ ID NO: 18932
  GFR-binding peptide
  MOD_RES (35), (35): Xaa is C or S
  MOD_RES (14), (15), (16), (17), (18): Xaa is A or G
  MOD_RES (19), (20), (21), (22): Xaa is A or G or is absent

SEQ ID NO: 22037 - protein, 34 aa, Artificial Sequence; identical to SEQ ID NO: 18933
  GFR-binding peptide

SEQ ID NO: 22038 - protein, 39 aa, Artificial Sequence; identical to SEQ ID NO: 18934
  GFR-binding peptide
  MOD_RES (2), (36), (38): Xaa is C or S
  MOD_RES (16), (17), (18), (19), (20): Xaa is A or G
  MOD_RES (21), (22), (23), (24): Xaa is A or G or is absent

SEQ ID NO: 22039 - protein, 38 aa, Artificial Sequence; identical to SEQ ID NO: 18935
  GFR-binding peptide
  MOD_RES (3), (3): Xaa is C or S

SEQ ID NO: 22040 - protein, 40 aa, Artificial Sequence; identical to SEQ ID NO: 18936
  GFR-binding peptide
  MOD_RES (4), (4): Xaa is C or S
  MOD_RES (20), (21), (22), (23), (24): Xaa is A or G
  MOD_RES (25), (26), (27), (28): Xaa is A or G or is absent

SEQ ID NO: 22041 - protein, 34 aa, Artificial Sequence; identical to SEQ ID NO: 18937
  GFR-binding peptide

SEQ ID NO: 22042 - protein, 33 aa, Artificial Sequence; identical to SEQ ID NO: 18938
  GFR-binding peptide
  MOD_RES (14), (15), (16), (17), (18): Xaa is A or G
  MOD_RES (19), (20), (21), (22): Xaa is A or G or is absent

SEQ ID NO: 22043 - protein, 38 aa, Artificial Sequence; identical to SEQ ID NO: 18939
  GFR-binding peptide
  MOD_RES (5), (5): Xaa is C or S
  MOD_RES (19), (20), (21), (22), (23): Xaa is A or G
  MOD_RES (24), (25), (26), (27): Xaa is A or G or is absent

SEQ ID NO: 22044 - protein, 33 aa, Artificial Sequence; identical to SEQ ID NO: 18940
  GFR-binding peptide
  MOD_RES (14), (15), (16), (17), (18): Xaa is A or G
  MOD_RES (19), (20), (21), (22): Xaa is A or G or is absent

SEQ ID NO: 22045 - protein, 39 aa, Artificial Sequence; identical to SEQ ID NO: 18941
  GFR-binding peptide
  MOD_RES (4), (4): Xaa is C or S
  MOD_RES (20), (21), (22), (23), (24): Xaa is A or G
  MOD_RES (25), (26), (27), (28): Xaa is A or G or is absent

SEQ ID NO: 22046 - protein, 41 aa, Artificial Sequence; identical to SEQ ID NO: 18942
  GFR-binding peptide
  MOD_RES (4), (38), (40): Xaa is C or S
  MOD_RES (18), (19), (20), (21), (22): Xaa is A or G
  MOD_RES (23), (24), (25), (26): Xaa is A or G or is absent

SEQ ID NO: 22047 - protein, 38 aa, Artificial Sequence; identical to SEQ ID NO: 18943
  GFR-binding peptide
  MOD_RES (4), (4): Xaa is C or S

SEQ ID NO: 22048 - protein, 35 aa, Artificial Sequence; identical to SEQ ID NO: 18944
  GFR-binding peptide
  MOD_RES (2), (2): Xaa is C or S

SEQ ID NO: 22049 - protein, 37 aa, Artificial Sequence; identical to SEQ ID NO: 18945
  GFR-binding peptide
  MOD_RES (3), (3): Xaa is C or S
  MOD_RES (19), (20), (21), (22), (23): Xaa is A or G
  MOD_RES (24), (25), (26), (27): Xaa is A or G or is absent

SEQ ID NO: 22050 - protein, 37 aa, Artificial Sequence; identical to SEQ ID NO: 18946
  GFR-binding peptide
  MOD_RES (2), (2): Xaa is C or S
  MOD_RES (18), (19), (20), (21), (22): Xaa is A or G
  MOD_RES (23), (24), (25), (26): Xaa is A or G or is absent

SEQ ID NO: 22051 - protein, 36 aa, Artificial Sequence; identical to SEQ ID NO: 18947
  GFR-binding peptide
  MOD_RES (2), (36): Xaa is C or S

SEQ ID NO: 22052 - protein, 42 aa, Artificial Sequence; identical to SEQ ID NO: 18948
  GFR-binding peptide
  MOD_RES (6), (40), (42): Xaa is C or S

SEQ ID NO: 22053 - protein, 38 aa, Artificial Sequence; identical to SEQ ID NO: 18949
  GFR-binding peptide
  MOD_RES (3), (37): Xaa is C or S

SEQ ID NO: 22054 - protein, 33 aa, Artificial Sequence; identical to SEQ ID NO: 18950
  GFR-binding peptide
  MOD_RES (14), (15), (16), (17), (18): Xaa is A or G
  MOD_RES (19), (20), (21), (22): Xaa is A or G or is absent

SEQ ID NO: 22055 - protein, 37 aa, Artificial Sequence; identical to SEQ ID NO: 18951
  GFR-binding peptide
  MOD_RES (5), (5): Xaa is C or S

SEQ ID NO: 22056 - protein, 35 aa, Artificial Sequence; identical to SEQ ID NO: 18952
  GFR-binding peptide
  MOD_RES (1), (35): Xaa is C or S
  MOD_RES (15), (16), (17), (18), (19): Xaa is A or G
  MOD_RES (20), (21), (22), (23): Xaa is A or G or is absent

SEQ ID NO: 22057 - protein, 38 aa, Artificial Sequence; identical to SEQ ID NO: 18953
  GFR-binding peptide
  MOD_RES (6), (6): Xaa is C or S
  MOD_RES (20), (21), (22), (23), (24): Xaa is A or G
  MOD_RES (25), (26), (27), (28): Xaa is A or G or is absent

SEQ ID NO: 22058 - protein, 35 aa, Artificial Sequence; identical to SEQ ID NO: 18954
  GFR-binding peptide
  MOD_RES (3), (3): Xaa is C or S

SEQ ID NO: 22059 - protein, 37 aa, Artificial Sequence; identical to SEQ ID NO: 18955
  GFR-binding peptide
  MOD_RES (5), (5): Xaa is C or S
  MOD_RES (19), (20), (21), (22), (23): Xaa is A or G
  MOD_RES (24), (25), (26), (27): Xaa is A or G or is absent

SEQ ID NO: 22060 - protein, 42 aa, Artificial Sequence; identical to SEQ ID NO: 18956
  GFR-binding peptide
  MOD_RES (7), (41): Xaa is C or S
  MOD_RES (21), (22), (23), (24), (25): Xaa is A or G
  MOD_RES (26), (27), (28), (29): Xaa is A or G or is absent

SEQ ID NO: 22061 - protein, 42 aa, Artificial Sequence; identical to SEQ ID NO: 18957
  GFR-binding peptide
  MOD_RES (6), (40), (42): Xaa is C or S
  MOD_RES (20), (21), (22), (23), (24): Xaa is A or G
  MOD_RES (25), (26), (27), (28): Xaa is A or G or is absent

SEQ ID NO: 22062 - protein, 37 aa, Artificial Sequence; identical to SEQ ID NO: 18958
  GFR-binding peptide
  MOD_RES (36), (36): Xaa is C or S
  MOD_RES (15), (16), (17), (18), (19): Xaa is A or G
  MOD_RES (20), (21), (22), (23): Xaa is A or G or is absent

SEQ ID NO: 22063 - protein, 33 aa, Artificial Sequence; identical to SEQ ID NO: 18959
  GFR-binding peptide
  MOD_RES (15), (16), (17), (18), (19): Xaa is A or G
  MOD_RES (20), (21), (22), (23): Xaa is A or G or is absent

SEQ ID NO: 22064 - protein, 33 aa, Artificial Sequence; identical to SEQ ID NO: 18960
  GFR-binding peptide
  MOD_RES (15), (16), (17), (18), (19): Xaa is A or G
  MOD_RES (20), (21), (22), (23): Xaa is A or G or is absent

SEQ ID NO: 22065 - protein, 43 aa, Artificial Sequence; identical to SEQ ID NO: 18961
  GFR-binding peptide
  MOD_RES (3), (40), (42): Xaa is C or S
  MOD_RES (19), (20), (21), (22), (23): Xaa is A or G
  MOD_RES (24), (25), (26), (27): Xaa is A or G or is absent

SEQ ID NO: 22066 - protein, 40 aa, Artificial Sequence; identical to SEQ ID NO: 18962
  GFR-binding peptide
  MOD_RES (37), (39): Xaa is C or S

SEQ ID NO: 22067 - protein, 37 aa, Artificial Sequence; identical to SEQ ID NO: 18963
  GFR-binding peptide
  MOD_RES (36), (36): Xaa is C or S

SEQ ID NO: 22068 - protein, 38 aa, Artificial Sequence; identical to SEQ ID NO: 18964
  GFR-binding peptide
  MOD_RES (2), (2): Xaa is C or S

SEQ ID NO: 22069 - protein, 38 aa, Artificial Sequence; identical to SEQ ID NO: 18965
  GFR-binding peptide
  MOD_RES (5), (5): Xaa is C or S
  MOD_RES (19), (20), (21), (22), (23): Xaa is A or G
  MOD_RES (24), (25), (26), (27): Xaa is A or G or is absent

SEQ ID NO: 22070 - protein, 33 aa, Artificial Sequence; identical to SEQ ID NO: 18966
  GFR-binding peptide
  MOD_RES (1), (1): Xaa is C or S

SEQ ID NO: 22071 - protein, 35 aa, Artificial Sequence; identical to SEQ ID NO: 18967
  GFR-binding peptide
  MOD_RES (34), (34): Xaa is C or S

SEQ ID NO: 22072 - protein, 41 aa, Artificial Sequence; identical to SEQ ID NO: 18968
  GFR-binding peptide
  MOD_RES (7), (41): Xaa is C or S
  MOD_RES (21), (22), (23), (24), (25): Xaa is A or G
  MOD_RES (26), (27), (28), (29): Xaa is A or G or is absent

SEQ ID NO: 22073 - protein, 39 aa, Artificial Sequence; identical to SEQ ID NO: 18969
  GFR-binding peptide
  MOD_RES (5), (5): Xaa is C or S

SEQ ID NO: 22074 - protein, 42 aa, Artificial Sequence; identical to SEQ ID NO: 18970
  GFR-binding peptide
  MOD_RES (4), (41): Xaa is C or S
  MOD_RES (20), (21), (22), (23), (24): Xaa is A or G
  MOD_RES (25), (26), (27), (28): Xaa is A or G or is absent

SEQ ID NO: 22075 - protein, 37 aa, Artificial Sequence; identical to SEQ ID NO: 18971
  GFR-binding peptide
  MOD_RES (36), (36): Xaa is C or S
  MOD_RES (15), (16), (17), (18), (19): Xaa is A or G
  MOD_RES (20), (21), (22), (23): Xaa is A or G or is absent

SEQ ID NO: 22076 - protein, 42 aa, Artificial Sequence; identical to SEQ ID NO: 18972
  GFR-binding peptide
  MOD_RES (4), (41): Xaa is C or S

SEQ ID NO: 22077 - protein, 38 aa, Artificial Sequence; identical to SEQ ID NO: 18973
  GFR-binding peptide
  MOD_RES (5), (5): Xaa is C or S

SEQ ID NO: 22078 - protein, 42 aa, Artificial Sequence; identical to SEQ ID NO: 18974
  GFR-binding peptide
  MOD_RES (4), (41): Xaa is C or S
  MOD_RES (20), (21), (22), (23), (24): Xaa is A or G
  MOD_RES (25), (26), (27), (28): Xaa is A or G or is absent

SEQ ID NO: 22079 - protein, 37 aa, Artificial Sequence; identical to SEQ ID NO: 18975
  GFR-binding peptide
  MOD_RES (5), (5): Xaa is C or S
  MOD_RES (19), (20), (21), (22), (23): Xaa is A or G
  MOD_RES (24), (25), (26), (27): Xaa is A or G or is absent

SEQ ID NO: 22080 - protein, 41 aa, Artificial Sequence; identical to SEQ ID NO: 18976
  GFR-binding peptide
  MOD_RES (1), (38), (40): Xaa is C or S
  MOD_RES (17), (18), (19), (20), (21): Xaa is A or G
  MOD_RES (22), (23), (24), (25): Xaa is A or G or is absent

SEQ ID NO: 22081 - protein, 39 aa, Artificial Sequence; identical to SEQ ID NO: 18977
  GFR-binding peptide
  MOD_RES (37), (39): Xaa is C or S

SEQ ID NO: 22082 - protein, 39 aa, Artificial Sequence; identical to SEQ ID NO: 18978
  GFR-binding peptide
  MOD_RES (3), (3): Xaa is C or S
  MOD_RES (19), (20), (21), (22), (23): Xaa is A or G
  MOD_RES (24), (25), (26), (27): Xaa is A or G or is absent

SEQ ID NO: 22083 - protein, 42 aa, Artificial Sequence; identical to SEQ ID NO: 18979
  GFR-binding peptide
  MOD_RES (2), (39), (41): Xaa is C or S
  MOD_RES (18), (19), (20), (21), (22): Xaa is A or G
  MOD_RES (23), (24), (25), (26): Xaa is A or G or is absent

SEQ ID NO: 22084 - protein, 38 aa, Artificial Sequence; identical to SEQ ID NO: 18980
  GFR-binding peptide
  MOD_RES (1), (38): Xaa is C or S

SEQ ID NO: 22085 - protein, 40 aa, Artificial Sequence; identical to SEQ ID NO: 18981
  GFR-binding peptide
  MOD_RES (5), (5): Xaa is C or S
  MOD_RES (21), (22), (23), (24), (25): Xaa is A or G
  MOD_RES (26), (27), (28), (29): Xaa is A or G or is absent

SEQ ID NO: 22086 - protein, 42 aa, Artificial Sequence; identical to SEQ ID NO: 18982
  GFR-binding peptide
  MOD_RES (5), (42): Xaa is C or S
  MOD_RES (21), (22), (23), (24), (25): Xaa is A or G
  MOD_RES (26), (27), (28), (29): Xaa is A or G or is absent

SEQ ID NO: 22087 - protein, 39 aa, Artificial Sequence; identical to SEQ ID NO: 18983
  GFR-binding peptide
  MOD_RES (3), (37), (39): Xaa is C or S

SEQ ID NO: 22088 - protein, 41 aa, Artificial Sequence; identical to SEQ ID NO: 18984
  GFR-binding peptide
  MOD_RES (5), (5): Xaa is C or S
  MOD_RES (21), (22), (23), (24), (25): Xaa is A or G
  MOD_RES (26), (27), (28), (29): Xaa is A or G or is absent

SEQ ID NO: 22089 - protein, 35 aa, Artificial Sequence; identical to SEQ ID NO: 18985
  GFR-binding peptide
  MOD_RES (1), (35): Xaa is C or S
  MOD_RES (15), (16), (17), (18), (19): Xaa is A or G
  MOD_RES (20), (21), (22), (23): Xaa is A or G or is absent

SEQ ID NO: 22090 - protein, 34 aa, Artificial Sequence; identical to SEQ ID NO: 18986
  GFR-binding peptide
  MOD_RES (1), (1): Xaa is C or S
  MOD_RES (15), (16), (17), (18), (19): Xaa is A or G
  MOD_RES (20), (21), (22), (23): Xaa is A or G or is absent

SEQ ID NO: 22091 - protein, 37 aa, Artificial Sequence; identical to SEQ ID NO: 18987
  GFR-binding peptide
  MOD_RES (1), (1): Xaa is C or S
  MOD_RES (17), (18), (19), (20), (21): Xaa is A or G
  MOD_RES (22), (23), (24), (25): Xaa is A or G or is absent

SEQ ID NO: 22092 - protein, 36 aa, Artificial Sequence; identical to SEQ ID NO: 18988
  GFR-binding peptide

SEQ ID NO: 22093 - protein, 41 aa, Artificial Sequence; identical to SEQ ID NO: 18989
  GFR-binding peptide
  MOD_RES (1), (38), (40): Xaa is C or S
  MOD_RES (17), (18), (19), (20), (21): Xaa is A or G
  MOD_RES (22), (23), (24), (25): Xaa is A or G or is absent

SEQ ID NO: 22094 - protein, 35 aa, Artificial Sequence; identical to SEQ ID NO: 18990
  GFR-binding peptide
  MOD_RES (35), (35): Xaa is C or S

SEQ ID NO: 22095 - protein, 36 aa, Artificial Sequence; identical to SEQ ID NO: 18991
  GFR-binding peptide
  MOD_RES (36), (36): Xaa is C or S
  MOD_RES (15), (16), (17), (18), (19): Xaa is A or G
  MOD_RES (20), (21), (22), (23): Xaa is A or G or is absent

SEQ ID NO: 22096 - protein, 44 aa, Artificial Sequence; identical to SEQ ID NO: 18992
  GFR-binding peptide
  MOD_RES (5), (42), (44): Xaa is C or S

SEQ ID NO: 22097 - protein, 44 aa, Artificial Sequence; identical to SEQ ID NO: 18993
  GFR-binding peptide
  MOD_RES (7), (41), (43): Xaa is C or S
  MOD_RES (21), (22), (23), (24), (25): Xaa is A or G
  MOD_RES (26), (27), (28), (29): Xaa is A or G or is absent

SEQ ID NO: 22098 - protein, 40 aa, Artificial Sequence; identical to SEQ ID NO: 18994
  GFR-binding peptide
  MOD_RES (3), (37), (39): Xaa is C or S
  MOD_RES (17), (18), (19), (20), (21): Xaa is A or G
  MOD_RES (22), (23), (24), (25): Xaa is A or G or is absent

SEQ ID NO: 22099 - protein, 42 aa, Artificial Sequence; identical to SEQ ID NO: 18995
  GFR-binding peptide
  MOD_RES (7), (41): Xaa is C or S

SEQ ID NO: 22100 - protein, 34 aa, Artificial Sequence; identical to SEQ ID NO: 18996
  GFR-binding peptide

SEQ ID NO: 22101 - protein, 36 aa, Artificial Sequence; identical to SEQ ID NO: 18997
  GFR-binding peptide
  MOD_RES (2), (36): Xaa is C or S

SEQ ID NO: 22102 - protein, 39 aa, Artificial Sequence; identical to SEQ ID NO: 18998
  GFR-binding peptide
  MOD_RES (4), (38): Xaa is C or S

SEQ ID NO: 22103 - protein, 36 aa, Artificial Sequence; identical to SEQ ID NO: 18999
  GFR-binding peptide
  MOD_RES (2), (2): Xaa is C or S
  MOD_RES (18), (19), (20), (21), (22): Xaa is A or G
  MOD_RES (23), (24), (25), (26): Xaa is A or G or is absent

SEQ ID NO: 22104 - protein, 39 aa, Artificial Sequence; identical to SEQ ID NO: 19000
  GFR-binding peptide
  MOD_RES (7), (7): Xaa is C or S
  MOD_RES (21), (22), (23), (24), (25): Xaa is A or G
  MOD_RES (26), (27), (28), (29): Xaa is A or G or is absent

SEQ ID NO: 22105 - protein, 38 aa, Artificial Sequence; identical to SEQ ID NO: 19001
  GFR-binding peptide
  MOD_RES (4), (38): Xaa is C or S
  MOD_RES (18), (19), (20), (21), (22): Xaa is A or G
  MOD_RES (23), (24), (25), (26): Xaa is A or G or is absent

SEQ ID NO: 22106 - protein, 41 aa, Artificial Sequence; identical to SEQ ID NO: 19002
  GFR-binding peptide
  MOD_RES (4), (41): Xaa is C or S
  MOD_RES (20), (21), (22), (23), (24): Xaa is A or G
  MOD_RES (25), (26), (27), (28): Xaa is A or G or is absent

SEQ ID NO: 22107 - protein, 35 aa, Artificial Sequence; identical to SEQ ID NO: 19003
  GFR-binding peptide
  MOD_RES (3), (3): Xaa is C or S
  MOD_RES (17), (18), (19), (20), (21): Xaa is A or G
  MOD_RES (22), (23), (24), (25): Xaa is A or G or is absent

SEQ ID NO: 22108 - protein, 43 aa, Artificial Sequence; identical to SEQ ID NO: 19004
  GFR-binding peptide
  MOD_RES (6), (40), (42): Xaa is C or S

SEQ ID NO: 22109 - protein, 40 aa, Artificial Sequence; identical to SEQ ID NO: 19005
  GFR-binding peptide
  MOD_RES (3), (40): Xaa is C or S

SEQ ID NO: 22110 - protein, 33 aa, Artificial Sequence; identical to SEQ ID NO: 19006
  GFR-binding peptide

SEQ ID NO: 22111 - protein, 39 aa, Artificial Sequence; identical to SEQ ID NO: 19007
  GFR-binding peptide
  MOD_RES (4), (4): Xaa is C or S
  MOD_RES (20), (21), (22), (23), (24): Xaa is A or G
  MOD_RES (25), (26), (27), (28): Xaa is A or G or is absent

SEQ ID NO: 22112 - protein, 36 aa, Artificial Sequence; identical to SEQ ID NO: 19008
  GFR-binding peptide
  MOD_RES (35), (35): Xaa is C or S

SEQ ID NO: 22113 - protein, 38 aa, Artificial Sequence; identical to SEQ ID NO: 19009
  GFR-binding peptide
  MOD_RES (3), (3): Xaa is C or S
  MOD_RES (19), (20), (21), (22), (23): Xaa is A or G
  MOD_RES (24), (25), (26), (27): Xaa is A or G or is absent

SEQ ID NO: 22114 - protein, 40 aa, Artificial Sequence; identical to SEQ ID NO: 19010
  GFR-binding peptide
  MOD_RES (4), (38), (40): Xaa is C or S

SEQ ID NO: 22115 - protein, 40 aa, Artificial Sequence; identical to SEQ ID NO: 19011
  GFR-binding peptide
  MOD_RES (5), (39): Xaa is C or S

SEQ ID NO: 22116 - protein, 36 aa, Artificial Sequence; identical to SEQ ID NO: 19012
  GFR-binding peptide
  MOD_RES (34), (36): Xaa is C or S
  MOD_RES (14), (15), (16), (17), (18): Xaa is A or G
  MOD_RES (19), (20), (21), (22): Xaa is A or G or is absent

SEQ ID NO: 22117 - protein, 36 aa, Artificial Sequence; identical to SEQ ID NO: 19013
  GFR-binding peptide
  MOD_RES (3), (3): Xaa is C or S
  MOD_RES (17), (18), (19), (20), (21): Xaa is A or G
  MOD_RES (22), (23), (24), (25): Xaa is A or G or is absent

SEQ ID NO: 22118 - protein, 39 aa, Artificial Sequence; identical to SEQ ID NO: 19014
  GFR-binding peptide
  MOD_RES (7), (7): Xaa is C or S

SEQ ID NO: 22119 - protein, 33 aa, Artificial Sequence; identical to SEQ ID NO: 19015
  GFR-binding peptide
  MOD_RES (15), (16), (17), (18), (19): Xaa is A or G
  MOD_RES (20), (21), (22), (23): Xaa is A or G or is absent

SEQ ID NO: 22120 - protein, 41 aa, Artificial Sequence; identical to SEQ ID NO: 19016
  GFR-binding peptide
  MOD_RES (5), (5): Xaa is C or S

SEQ ID NO: 22121 - protein, 37 aa, Artificial Sequence; identical to SEQ ID NO: 19017
  GFR-binding peptide
  MOD_RES (2), (36): Xaa is C or S

SEQ ID NO: 22122 - protein, 38 aa, Artificial Sequence; identical to SEQ ID NO: 19018
  GFR-binding peptide
  MOD_RES (3), (3): Xaa is C or S
  MOD_RES (19), (20), (21), (22), (23): Xaa is A or G
  MOD_RES (24), (25), (26), (27): Xaa is A or G or is absent

SEQ ID NO: 22123 - protein, 39 aa, Artificial Sequence; identical to SEQ ID NO: 19019
  GFR-binding peptide
  MOD_RES (7), (7): Xaa is C or S

SEQ ID NO: 22124 - protein, 39 aa, Artificial Sequence; identical to SEQ ID NO: 19020
  GFR-binding peptide
  MOD_RES (37), (39): Xaa is C or S

SEQ ID NO: 22125 - protein, 37 aa, Artificial Sequence; identical to SEQ ID NO: 19021
  GFR-binding peptide
  MOD_RES (1), (1): Xaa is C or S
  MOD_RES (17), (18), (19), (20), (21): Xaa is A or G
  MOD_RES (22), (23), (24), (25): Xaa is A or G or is absent

SEQ ID NO: 22126 - protein, 38 aa, Artificial Sequence; identical to SEQ ID NO: 19022
  GFR-binding peptide
  MOD_RES (6), (6): Xaa is C or S

SEQ ID NO: 22127 - protein, 40 aa, Artificial Sequence; identical to SEQ ID NO: 19023
  GFR-binding peptide
  MOD_RES (3), (37), (39): Xaa is C or S
  MOD_RES (17), (18), (19), (20), (21): Xaa is A or G
  MOD_RES (22), (23), (24), (25): Xaa is A or G or is absent

SEQ ID NO: 22128 - protein, 33 aa, Artificial Sequence; identical to SEQ ID NO: 19024
  GFR-binding peptide
  MOD_RES (15), (16), (17), (18), (19): Xaa is A or G
  MOD_RES (20), (21), (22), (23): Xaa is A or G or is absent

SEQ ID NO: 22129 - protein, 43 aa, Artificial Sequence; identical to SEQ ID NO: 19025
  GFR-binding peptide
  MOD_RES (4), (41), (43): Xaa is C or S
  MOD_RES (20), (21), (22), (23), (24): Xaa is A or G
  MOD_RES (25), (26), (27), (28): Xaa is A or G or is absent

SEQ ID NO: 22130 - protein, 37 aa, Artificial Sequence; identical to SEQ ID NO: 19026
  GFR-binding peptide
  MOD_RES (36), (36): Xaa is C or S

SEQ ID NO: 22131 - protein, 38 aa, Artificial Sequence; identical to SEQ ID NO: 19027
  GFR-binding peptide
  MOD_RES (3), (37): Xaa is C or S
  MOD_RES (17), (18), (19), (20), (21): Xaa is A or G
  MOD_RES (22), (23), (24), (25): Xaa is A or G or is absent

SEQ ID NO: 22132 - protein, 36 aa, Artificial Sequence; identical to SEQ ID NO: 19028
  GFR-binding peptide
  MOD_RES (16), (17), (18), (19), (20): Xaa is A or G
  MOD_RES (21), (22), (23), (24): Xaa is A or G or is absent

SEQ ID NO: 22133 - protein, 38 aa, Artificial Sequence; identical to SEQ ID NO: 19029
  GFR-binding peptide
  MOD_RES (2), (36), (38): Xaa is C or S
  MOD_RES (16), (17), (18), (19), (20): Xaa is A or G
  MOD_RES (21), (22), (23), (24): Xaa is A or G or is absent

SEQ ID NO: 22134 - protein, 36 aa, Artificial Sequence; identical to SEQ ID NO: 19030
  GFR-binding peptide
  MOD_RES (35), (35): Xaa is C or S
  MOD_RES (14), (15), (16), (17), (18): Xaa is A or G
  MOD_RES (19), (20), (21), (22): Xaa is A or G or is absent

SEQ ID NO: 22135 - protein, 43 aa, Artificial Sequence; identical to SEQ ID NO: 19031
  GFR-binding peptide
  MOD_RES (3), (40), (42): Xaa is C or S

SEQ ID NO: 22136 - protein, 37 aa, Artificial Sequence; identical to SEQ ID NO: 19032
  GFR-binding peptide
  MOD_RES (36), (36): Xaa is C or S

SEQ ID NO: 22137 - protein, 40 aa, Artificial Sequence; identical to SEQ ID NO: 19033
  GFR-binding peptide
  MOD_RES (3), (40): Xaa is C or S

SEQ ID NO: 22138 - protein, 38 aa, Artificial Sequence; identical to SEQ ID NO: 19034
  GFR-binding peptide
  MOD_RES (1), (35), (37): Xaa is C or S
  MOD_RES (15), (16), (17), (18), (19): Xaa is A or G
  MOD_RES (20), (21), (22), (23): Xaa is A or G or is absent

SEQ ID NO: 22139 - protein, 38 aa, Artificial Sequence; identical to SEQ ID NO: 19035
  GFR-binding peptide
  MOD_RES (6), (6): Xaa is C or S
  MOD_RES (20), (21), (22), (23), (24): Xaa is A or G
  MOD_RES (25), (26), (27), (28): Xaa is A or G or is absent

SEQ ID NO: 22140 - protein, 40 aa, Artificial Sequence; identical to SEQ ID NO: 19036
  GFR-binding peptide
  MOD_RES (4), (38), (40): Xaa is C or S
  MOD_RES (18), (19), (20), (21), (22): Xaa is A or G
  MOD_RES (23), (24), (25), (26): Xaa is A or G or is absent

SEQ ID NO: 22141 - protein, 43 aa, Artificial Sequence; identical to SEQ ID NO: 19037
  GFR-binding peptide
  MOD_RES (6), (40), (42): Xaa is C or S
  MOD_RES (20), (21), (22), (23), (24): Xaa is A or G
  MOD_RES (25), (26), (27), (28): Xaa is A or G or is absent

SEQ ID NO: 22142 - protein, 35 aa, Artificial Sequence; identical to SEQ ID NO: 19038
  GFR-binding peptide
  MOD_RES (35), (35): Xaa is C or S
  MOD_RES (14), (15), (16), (17), (18): Xaa is A or G
  MOD_RES (19), (20), (21), (22): Xaa is A or G or is absent

SEQ ID NO: 22143 - protein, 39 aa, Artificial Sequence; identical to SEQ ID NO: 19039
  GFR-binding peptide
  MOD_RES (5), (5): Xaa is C or S

SEQ ID NO: 22144 - protein, 41 aa, Artificial Sequence; identical to SEQ ID NO: 19040
  GFR-binding peptide
  MOD_RES (6), (40): Xaa is C or S

SEQ ID NO: 22145 - protein, 38 aa, Artificial Sequence; identical to SEQ ID NO: 19041
  GFR-binding peptide
  MOD_RES (6), (6): Xaa is C or S

SEQ ID NO: 22146 - protein, 40 aa, Artificial Sequence; identical to SEQ ID NO: 19042
  GFR-binding peptide
  MOD_RES (5), (5): Xaa is C or S
  MOD_RES (21), (22), (23), (24), (25): Xaa is A or G
  MOD_RES (26), (27), (28), (29): Xaa is A or G or is absent

SEQ ID NO: 22147 - protein, 40 aa, Artificial Sequence; identical to SEQ ID NO: 19043
  GFR-binding peptide
  MOD_RES (1), (38), (40): Xaa is C or S
  MOD_RES (17), (18), (19), (20), (21): Xaa is A or G
  MOD_RES (22), (23), (24), (25): Xaa is A or G or is absent

SEQ ID NO: 22148 - protein, 35 aa, Artificial Sequence; identical to SEQ ID NO: 19044
  GFR-binding peptide
  MOD_RES (3), (3): Xaa is C or S

SEQ ID NO: 22149 - protein, 39 aa, Artificial Sequence; identical to SEQ ID NO: 19045
  GFR-binding peptide
  MOD_RES (5), (39): Xaa is C or S

SEQ ID NO: 22150 - protein, 41 aa, Artificial Sequence; identical to SEQ ID NO: 19046
  GFR-binding peptide
  MOD_RES (5), (39), (41): Xaa is C or S

SEQ ID NO: 22151 - protein, 37 aa, Artificial Sequence; identical to SEQ ID NO: 19047
  GFR-binding peptide
  MOD_RES (1), (1): Xaa is C or S

SEQ ID NO: 22152 - protein, 42 aa, Artificial Sequence; identical to SEQ ID NO: 19048
  GFR-binding peptide
  MOD_RES (6), (40), (42): Xaa is C or S

SEQ ID NO: 22153 - protein, 38 aa, Artificial Sequence; identical to SEQ ID NO: 19049
  GFR-binding peptide
  MOD_RES (4), (4): Xaa is C or S

SEQ ID NO: 22154 - protein, 38 aa, Artificial Sequence; identical to SEQ ID NO: 19050
  GFR-binding peptide
  MOD_RES (36), (38): Xaa is C or S

SEQ ID NO: 22155 - protein, 39 aa, Artificial Sequence; identical to SEQ ID NO: 19051
  GFR-binding peptide
  MOD_RES (7), (7): Xaa is C or S
  MOD_RES (21), (22), (23), (24), (25): Xaa is A or G
  MOD_RES (26), (27), (28), (29): Xaa is A or G or is absent

SEQ ID NO: 22156 - protein, 41 aa, Artificial Sequence; identical to SEQ ID NO: 19052
  GFR-binding peptide
  MOD_RES (3), (40): Xaa is C or S

SEQ ID NO: 22157 - protein, 40 aa, Artificial Sequence; identical to SEQ ID NO: 19053
  GFR-binding peptide
  MOD_RES (37), (39): Xaa is C or S

SEQ ID NO: 22158 - protein, 37 aa, Artificial Sequence; identical to SEQ ID NO: 19054
  GFR-binding peptide
  MOD_RES (37), (37): Xaa is C or S

SEQ ID NO: 22159 - protein, 40 aa, Artificial Sequence; identical to SEQ ID NO: 19055
  GFR-binding peptide
  MOD_RES (6), (40): Xaa is C or S

SEQ ID NO: 22160 - protein, 39 aa, Artificial Sequence; identical to SEQ ID NO: 19056
  GFR-binding peptide
  MOD_RES (3), (3): Xaa is C or S
  MOD_RES (19), (20), (21), (22), (23): Xaa is A or G
  MOD_RES (24), (25), (26), (27): Xaa is A or G or is absent

SEQ ID NO: 22161 - protein, 36 aa, Artificial Sequence; identical to SEQ ID NO: 19057
  GFR-binding peptide
  MOD_RES (1), (1): Xaa is C or S
  MOD_RES (17), (18), (19), (20), (21): Xaa is A or G
  MOD_RES (22), (23), (24), (25): Xaa is A or G or is absent

SEQ ID NO: 22162 - protein, 38 aa, Artificial Sequence; identical to SEQ ID NO: 19058
  GFR-binding peptide
  MOD_RES (2), (36), (38): Xaa is C or S

SEQ ID NO: 22163 - protein, 32 aa, Artificial Sequence; identical to SEQ ID NO: 19059
  GFR-binding peptide
  MOD_RES (14), (15), (16), (17), (18): Xaa is A or G
  MOD_RES (19), (20), (21), (22): Xaa is A or G or is absent

SEQ ID NO: 22164 - protein, 41 aa, Artificial Sequence; identical to SEQ ID NO: 19060
  GFR-binding peptide
  MOD_RES (4), (38), (40): Xaa is C or S

SEQ ID NO: 22165 - protein, 42 aa, Artificial Sequence; identical to SEQ ID NO: 19061
  GFR-binding peptide
  MOD_RES (3), (40), (42): Xaa is C or S

SEQ ID NO: 22166 - protein, 39 aa, Artificial Sequence; identical to SEQ ID NO: 19062
  GFR-binding peptide
  MOD_RES (5), (5): Xaa is C or S
  MOD_RES (21), (22), (23), (24), (25): Xaa is A or G
  MOD_RES (26), (27), (28), (29): Xaa is A or G or is absent

SEQ ID NO: 22167 - protein, 41 aa, Artificial Sequence; identical to SEQ ID NO: 19063
  GFR-binding peptide
  MOD_RES (5), (5): Xaa is C or S
  MOD_RES (21), (22), (23), (24), (25): Xaa is A or G
  MOD_RES (26), (27), (28), (29): Xaa is A or G or is absent

SEQ ID NO: 22168 - protein, 37 aa, Artificial Sequence; identical to SEQ ID NO: 19064
  GFR-binding peptide
  MOD_RES (1), (35), (37): Xaa is C or S

SEQ ID NO: 22169 - protein, 39 aa, Artificial Sequence; identical to SEQ ID NO: 19065
  GFR-binding peptide
  MOD_RES (4), (4): Xaa is C or S

SEQ ID NO: 22170 - protein, 45 aa, Artificial Sequence; identical to SEQ ID NO: 19066
  GFR-binding peptide
  MOD_RES (5), (42), (44): Xaa is C or S
  MOD_RES (21), (22), (23), (24), (25): Xaa is A or G
  MOD_RES (26), (27), (28), (29): Xaa is A or G or is absent

SEQ ID NO: 22171 - protein, 38 aa, Artificial Sequence; identical to SEQ ID NO: 19067
  GFR-binding peptide
  MOD_RES (35), (37): Xaa is C or S
  MOD_RES (14), (15), (16), (17), (18): Xaa is A or G
  MOD_RES (19), (20), (21), (22): Xaa is A or G or is absent

SEQ ID NO: 22172 - protein, 42 aa, Artificial Sequence; identical to SEQ ID NO: 19068
  GFR-binding peptide
  MOD_RES (2), (39), (41): Xaa is C or S

SEQ ID NO: 22173 - protein, 44 aa, Artificial Sequence; identical to SEQ ID NO: 19069
  GFR-binding peptide
  MOD_RES (7), (41), (43): Xaa is C or S
  MOD_RES (21), (22), (23), (24), (25): Xaa is A or G
  MOD_RES (26), (27), (28), (29): Xaa is A or G or is absent

SEQ ID NO: 22174 - protein, 42 aa, Artificial Sequence; identical to SEQ ID NO: 19070
  GFR-binding peptide
  MOD_RES (4), (41): Xaa is C or S
  MOD_RES (20), (21), (22), (23), (24): Xaa is A or G
  MOD_RES (25), (26), (27), (28): Xaa is A or G or is absent

SEQ ID NO: 22175 - protein, 42 aa, Artificial Sequence; identical to SEQ ID NO: 19071
  GFR-binding peptide
  MOD_RES (7), (41): Xaa is C or S

SEQ ID NO: 22176 - protein, 37 aa, Artificial Sequence; identical to SEQ ID NO: 19072
  GFR-binding peptide
  MOD_RES (3), (37): Xaa is C or S
  MOD_RES (17), (18), (19), (20), (21): Xaa is A or G
  MOD_RES (22), (23), (24), (25): Xaa is A or G or is absent

SEQ ID NO: 22177 - protein, 37 aa, Artificial Sequence; identical to SEQ ID NO: 19073
  GFR-binding peptide
  MOD_RES (37), (37): Xaa is C or S

SEQ ID NO: 22178 - protein, 37 aa, Artificial Sequence; identical to SEQ ID NO: 19074
  GFR-binding peptide
  MOD_RES (3), (37): Xaa is C or S
  MOD_RES (17), (18), (19), (20), (21): Xaa is A or G
  MOD_RES (22), (23), (24), (25): Xaa is A or G or is absent

SEQ ID NO: 22179 - protein, 38 aa, Artificial Sequence; identical to SEQ ID NO: 19075
  GFR-binding peptide
  MOD_RES (36), (38): Xaa is C or S

SEQ ID NO: 22180 - protein, 38 aa, Artificial Sequence; identical to SEQ ID NO: 19076
  GFR-binding peptide
  MOD_RES (6), (6): Xaa is C or S

SEQ ID NO: 22181 - protein, 39 aa, Artificial Sequence; identical to SEQ ID NO: 19077
  GFR-binding peptide
  MOD_RES (2), (39): Xaa is C or S
  MOD_RES (18), (19), (20), (21), (22): Xaa is A or G
  MOD_RES (23), (24), (25), (26): Xaa is A or G or is absent

SEQ ID NO: 22182 - protein, 40 aa, Artificial Sequence; identical to SEQ ID NO: 19078
  GFR-binding peptide
  MOD_RES (6), (40): Xaa is C or S

SEQ ID NO: 22183 - protein, 39 aa, Artificial Sequence; identical to SEQ ID NO: 19079
  GFR-binding peptide
  MOD_RES (5), (39): Xaa is C or S
  MOD_RES (19), (20), (21), (22), (23): Xaa is A or G
  MOD_RES (24), (25), (26), (27): Xaa is A or G or is absent

SEQ ID NO: 22184 - protein, 42 aa, Artificial Sequence; identical to SEQ ID NO: 19080
  GFR-binding peptide
  MOD_RES (6), (40), (42): Xaa is C or S
  MOD_RES (20), (21), (22), (23), (24): Xaa is A or G
  MOD_RES (25), (26), (27), (28): Xaa is A or G or is absent

SEQ ID NO: 22185 - protein, 39 aa, Artificial Sequence; identical to SEQ ID NO: 19081
  GFR-binding peptide
  MOD_RES (36), (38): Xaa is C or S

SEQ ID NO: 22186 - protein, 39 aa, Artificial Sequence; identical to SEQ ID NO: 19082
  GFR-binding peptide
  MOD_RES (1), (38): Xaa is C or S

SEQ ID NO: 22187 - protein, 37 aa, Artificial Sequence; identical to SEQ ID NO: 19083
  GFR-binding peptide
  MOD_RES (3), (37): Xaa is C or S

SEQ ID NO: 22188 - protein, 43 aa, Artificial Sequence; identical to SEQ ID NO: 19084
  GFR-binding peptide
  MOD_RES (3), (40), (42): Xaa is C or S

SEQ ID NO: 22189 - protein, 37 aa, Artificial Sequence; identical to SEQ ID NO: 19085
  GFR-binding peptide
  MOD_RES (37), (37): Xaa is C or S
  MOD_RES (16), (17), (18), (19), (20): Xaa is A or G
  MOD_RES (21), (22), (23), (24): Xaa is A or G or is absent

SEQ ID NO: 22190 - protein, 33 aa, Artificial Sequence; identical to SEQ ID NO: 19086
  GFR-binding peptide
  MOD_RES (14), (15), (16), (17), (18): Xaa is A or G
  MOD_RES (19), (20), (21), (22): Xaa is A or G or is absent

SEQ ID NO: 22191 - protein, 37 aa, Artificial Sequence; identical to SEQ ID NO: 19087
  GFR-binding peptide
  MOD_RES (5), (5): Xaa is C or S
  MOD_RES (19), (20), (21), (22), (23): Xaa is A or G
  MOD_RES (24), (25), (26), (27): Xaa is A or G or is absent

SEQ ID NO: 22192 - protein, 39 aa, Artificial Sequence; identical to SEQ ID NO: 19088
  GFR-binding peptide
  MOD_RES (5), (39): Xaa is C or S

SEQ ID NO: 22193 - protein, 39 aa, Artificial Sequence; identical to SEQ ID NO: 19089
  GFR-binding peptide
  MOD_RES (4), (4): Xaa is C or S

SEQ ID NO: 22194 - protein, 39 aa, Artificial Sequence; identical to SEQ ID NO: 19090
  GFR-binding peptide
  MOD_RES (2), (39): Xaa is C or S
  MOD_RES (18), (19), (20), (21), (22): Xaa is A or G
  MOD_RES (23), (24), (25), (26): Xaa is A or G or is absent

SEQ ID NO: 22195 - protein, 37 aa, Artificial Sequence; identical to SEQ ID NO: 19091
  GFR-binding peptide
  MOD_RES (3), (37): Xaa is C or S
  MOD_RES (17), (18), (19), (20), (21): Xaa is A or G
  MOD_RES (22), (23), (24), (25): Xaa is A or G or is absent

SEQ ID NO: 22196 - protein, 38 aa, Artificial Sequence; identical to SEQ ID NO: 19092
  GFR-binding peptide
  MOD_RES (2), (36), (38): Xaa is C or S

SEQ ID NO: 22197 - protein, 38 aa, Artificial Sequence; identical to SEQ ID NO: 19093
  GFR-binding peptide
  MOD_RES (37), (37): Xaa is C or S

SEQ ID NO: 22198 - protein, 39 aa, Artificial Sequence; identical to SEQ ID NO: 19094
  GFR-binding peptide
  MOD_RES (4), (38): Xaa is C or S

SEQ ID NO: 22199 - protein, 38 aa, Artificial Sequence; identical to SEQ ID NO: 19095
  GFR-binding peptide
  MOD_RES (35), (37): Xaa is C or S

SEQ ID NO: 22200 - protein, 40 aa, Artificial Sequence; identical to SEQ ID NO: 19096
  GFR-binding peptide
  MOD_RES (3), (40): Xaa is C or S

SEQ ID NO: 22201 - protein, 37 aa, Artificial Sequence; identical to SEQ ID NO: 19097
  GFR-binding peptide
  MOD_RES (1), (35), (37): Xaa is C or S

SEQ ID NO: 22202 - protein, 39 aa, Artificial Sequence; identical to SEQ ID NO: 19098
  GFR-binding peptide
  MOD_RES (6), (6): Xaa is C or S

SEQ ID NO: 22203 - protein, 41 aa, Artificial Sequence; identical to SEQ ID NO: 19099
  GFR-binding peptide
  MOD_RES (6), (40): Xaa is C or S
  MOD_RES (20), (21), (22), (23), (24): Xaa is A or G
  MOD_RES (25), (26), (27), (28): Xaa is A or G or is absent

SEQ ID NO: 22204 - protein, 41 aa, Artificial Sequence; identical to SEQ ID NO: 19100
  GFR-binding peptide
  MOD_RES (3), (40): Xaa is C or S

SEQ ID NO: 22205 - protein, 39 aa, Artificial Sequence; identical to SEQ ID NO: 19101
  GFR-binding peptide
  MOD_RES (3), (37), (39): Xaa is C or S
  MOD_RES (17), (18), (19), (20), (21): Xaa is A or G
  MOD_RES (22), (23), (24), (25): Xaa is A or G or is absent

SEQ ID NO: 22206 - protein, 42 aa, Artificial Sequence; identical to SEQ ID NO: 19102
  GFR-binding peptide
  MOD_RES (5), (42): Xaa is C or S
  MOD_RES (21), (22), (23), (24), (25): Xaa is A or G
  MOD_RES (26), (27), (28), (29): Xaa is A or G or is absent

SEQ ID NO: 22207 - protein, 39 aa, Artificial Sequence; identical to SEQ ID NO: 19103
  GFR-binding peptide
  MOD_RES (37), (39): Xaa is C or S

SEQ ID NO: 22208 - protein, 43 aa, Artificial Sequence; identical to SEQ ID NO: 19104
  GFR-binding peptide
  MOD_RES (4), (41), (43): Xaa is C or S

SEQ ID NO: 22209 - protein, 33 aa, Artificial Sequence; identical to SEQ ID NO: 19105
  GFR-binding peptide

SEQ ID NO: 22210 - protein, 39 aa, Artificial Sequence; identical to SEQ ID NO: 19106
  GFR-binding peptide
  MOD_RES (6), (6): Xaa is C or S
  MOD_RES (20), (21), (22), (23), (24): Xaa is A or G
  MOD_RES (25), (26), (27), (28): Xaa is A or G or is absent

SEQ ID NO: 22211 - protein, 44 aa, Artificial Sequence; identical to SEQ ID NO: 19107
  GFR-binding peptide
  MOD_RES (5), (42), (44): Xaa is C or S

SEQ ID NO: 22212 - protein, 44 aa, Artificial Sequence; identical to SEQ ID NO: 19108
  GFR-binding peptide
  MOD_RES (5), (42), (44): Xaa is C or S

SEQ ID NO: 22213 - protein, 38 aa, Artificial Sequence; identical to SEQ ID NO: 19109
  GFR-binding peptide
  MOD_RES (35), (37): Xaa is C or S

SEQ ID NO: 22214 - protein, 38 aa, Artificial Sequence; identical to SEQ ID NO: 19110
  GFR-binding peptide
  MOD_RES (5), (5): Xaa is C or S
  MOD_RES (19), (20), (21), (22), (23): Xaa is A or G
  MOD_RES (24), (25), (26), (27): Xaa is A or G or is absent

SEQ ID NO: 22215 - protein, 35 aa, Artificial Sequence; identical to SEQ ID NO: 19111
  GFR-binding peptide
  MOD_RES (2), (2): Xaa is C or S
  MOD_RES (16), (17), (18), (19), (20): Xaa is A or G
  MOD_RES (21), (22), (23), (24): Xaa is A or G or is absent

SEQ ID NO: 22216 - protein, 32 aa, Artificial Sequence; identical to SEQ ID NO: 19112
  GFR-binding peptide
  MOD_RES (14), (15), (16), (17), (18): Xaa is A or G
  MOD_RES (19), (20), (21), (22): Xaa is A or G or is absent

SEQ ID NO: 22217 - protein, 40 aa, Artificial Sequence; identical to SEQ ID NO: 19113
  GFR-binding peptide
  MOD_RES (6), (40): Xaa is C or S
  MOD_RES (20), (21), (22), (23), (24): Xaa is A or G
  MOD_RES (25), (26), (27), (28): Xaa is A or G or is absent

SEQ ID NO: 22218 - protein, 33 aa, Artificial Sequence; identical to SEQ ID NO: 19114
  GFR-binding peptide

SEQ ID NO: 22219 - protein, 35 aa, Artificial Sequence; identical to SEQ ID NO: 19115
  GFR-binding peptide
  MOD_RES (1), (35): Xaa is C or S

SEQ ID NO: 22220 - protein, 40 aa, Artificial Sequence; identical to SEQ ID NO: 19116
  GFR-binding peptide
  MOD_RES (6), (40): Xaa is C or S
  MOD_RES (20), (21), (22), (23), (24): Xaa is A or G
  MOD_RES (25), (26), (27), (28): Xaa is A or G or is absent

SEQ ID NO: 22221 - protein, 39 aa, Artificial Sequence; identical to SEQ ID NO: 19117
  GFR-binding peptide
  MOD_RES (36), (38): Xaa is C or S

SEQ ID NO: 22222 - protein, 43 aa, Artificial Sequence; identical to SEQ ID NO: 19118
  GFR-binding peptide
  MOD_RES (5), (42): Xaa is C or S
  MOD_RES (21), (22), (23), (24), (25): Xaa is A or G
  MOD_RES (26), (27), (28), (29): Xaa is A or G or is absent

SEQ ID NO: 22223 - protein, 37 aa, Artificial Sequence; identical to SEQ ID NO: 19119
  GFR-binding peptide
  MOD_RES (2), (36): Xaa is C or S

SEQ ID NO: 22224 - protein, 36 aa, Artificial Sequence; identical to SEQ ID NO: 19120
  GFR-binding peptide
  MOD_RES (1), (1): Xaa is C or S
  MOD_RES (17), (18), (19), (20), (21): Xaa is A or G
  MOD_RES (22), (23), (24), (25): Xaa is A or G or is absent

SEQ ID NO: 22225 - protein, 33 aa, Artificial Sequence; identical to SEQ ID NO: 19121
  GFR-binding peptide
  MOD_RES (1), (1): Xaa is C or S
  MOD_RES (15), (16), (17), (18), (19): Xaa is A or G
  MOD_RES (20), (21), (22), (23): Xaa is A or G or is absent

SEQ ID NO: 22226 - protein, 34 aa, Artificial Sequence; identical to SEQ ID NO: 19122
  GFR-binding peptide
  MOD_RES (1), (1): Xaa is C or S

SEQ ID NO: 22227 - protein, 33 aa, Artificial Sequence; identical to SEQ ID NO: 19123
  GFR-binding peptide
  MOD_RES (15), (16), (17), (18), (19): Xaa is A or G
  MOD_RES (20), (21), (22), (23): Xaa is A or G or is absent

SEQ ID NO: 22228 - protein, 37 aa, Artificial Sequence; identical to SEQ ID NO: 19124
  GFR-binding peptide
  MOD_RES (1), (1): Xaa is C or S
  MOD_RES (17), (18), (19), (20), (21): Xaa is A or G
  MOD_RES (22), (23), (24), (25): Xaa is A or G or is absent

SEQ ID NO: 22229 - protein, 37 aa, Artificial Sequence; identical to SEQ ID NO: 19125
  GFR-binding peptide
  MOD_RES (5), (5): Xaa is C or S

SEQ ID NO: 22230 - protein, 40 aa, Artificial Sequence; identical to SEQ ID NO: 19126
  GFR-binding peptide
  MOD_RES (3), (37), (39): Xaa is C or S
  MOD_RES (17), (18), (19), (20), (21): Xaa is A or G
  MOD_RES (22), (23), (24), (25): Xaa is A or G or is absent

SEQ ID NO: 22231 - protein, 38 aa, Artificial Sequence; identical to SEQ ID NO: 19127
  GFR-binding peptide
  MOD_RES (35), (37): Xaa is C or S

SEQ ID NO: 22232 - protein, 37 aa, Artificial Sequence; identical to SEQ ID NO: 19128
  GFR-binding peptide
  MOD_RES (35), (37): Xaa is C or S
  MOD_RES (14), (15), (16), (17), (18): Xaa is A or G
  MOD_RES (19), (20), (21), (22): Xaa is A or G or is absent

SEQ ID NO: 22233 - protein, 45 aa, Artificial Sequence; identical to SEQ ID NO: 19129
  GFR-binding peptide
  MOD_RES (5), (42), (44): Xaa is C or S
  MOD_RES (21), (22), (23), (24), (25): Xaa is A or G
  MOD_RES (26), (27), (28), (29): Xaa is A or G or is absent

SEQ ID NO: 22234 - protein, 38 aa, Artificial Sequence; identical to SEQ ID NO: 19130
  GFR-binding peptide
  MOD_RES (2), (36), (38): Xaa is C or S

SEQ ID NO: 22235 - protein, 39 aa, Artificial Sequence; identical to SEQ ID NO: 19131
  GFR-binding peptide
  MOD_RES (3), (3): Xaa is C or S

SEQ ID NO: 22236 - protein, 42 aa, Artificial Sequence; identical to SEQ ID NO: 19132
  GFR-binding peptide
  MOD_RES (4), (41): Xaa is C or S
  MOD_RES (20), (21), (22), (23), (24): Xaa is A or G
  MOD_RES (25), (26), (27), (28): Xaa is A or G or is absent

SEQ ID NO: 22237 - protein, 45 aa, Artificial Sequence; identical to SEQ ID NO: 19133
  GFR-binding peptide
  MOD_RES (5), (42), (44): Xaa is C or S
  MOD_RES (21), (22), (23), (24), (25): Xaa is A or G
  MOD_RES (26), (27), (28), (29): Xaa is A or G or is absent

SEQ ID NO: 22238 - protein, 36 aa, Artificial Sequence; identical to SEQ ID NO: 19134
  GFR-binding peptide
  MOD_RES (4), (4): Xaa is C or S

SEQ ID NO: 22239 - protein, 35 aa, Artificial Sequence; identical to SEQ ID NO: 19135
  GFR-binding peptide
  MOD_RES (34), (34): Xaa is C or S
  MOD_RES (14), (15), (16), (17), (18): Xaa is A or G
  MOD_RES (19), (20), (21), (22): Xaa is A or G or is absent

SEQ ID NO: 22240 - protein, 37 aa, Artificial Sequence; identical to SEQ ID NO: 19136
  GFR-binding peptide
  MOD_RES (1), (35), (37): Xaa is C or S

SEQ ID NO: 22241 - protein, 34 aa, Artificial Sequence; identical to SEQ ID NO: 19137
  GFR-binding peptide
  MOD_RES (15), (16), (17), (18), (19): Xaa is A or G
  MOD_RES (20), (21), (22), (23): Xaa is A or G or is absent

SEQ ID NO: 22242 - protein, 39 aa, Artificial Sequence; identical to SEQ ID NO: 19138
  GFR-binding peptide
  MOD_RES (7), (7): Xaa is C or S

SEQ ID NO: 22243 - protein, 36 aa, Artificial Sequence; identical to SEQ ID NO: 19139
  GFR-binding peptide
  MOD_RES (1), (35): Xaa is C or S

SEQ ID NO: 22244 - protein, 41 aa, Artificial Sequence; identical to SEQ ID NO: 19140
  GFR-binding peptide
  MOD_RES (7), (41): Xaa is C or S

SEQ ID NO: 22245 - protein, 36 aa, Artificial Sequence; identical to SEQ ID NO: 19141
  GFR-binding peptide
  MOD_RES (4), (4): Xaa is C or S

SEQ ID NO: 22246 - protein, 41 aa, Artificial Sequence; identical to SEQ ID NO: 19142
  GFR-binding peptide
  MOD_RES (7), (41): Xaa is C or S
  MOD_RES (21), (22), (23), (24), (25): Xaa is A or G
  MOD_RES (26), (27), (28), (29): Xaa is A or G or is absent

SEQ ID NO: 22247 - protein, 35 aa, Artificial Sequence; identical to SEQ ID NO: 19143
  GFR-binding peptide
  MOD_RES (34), (34): Xaa is C or S
  MOD_RES (14), (15), (16), (17), (18): Xaa is A or G
  MOD_RES (19), (20), (21), (22): Xaa is A or G or is absent

SEQ ID NO: 22248 - protein, 36 aa, Artificial Sequence; identical to SEQ ID NO: 19144
  GFR-binding peptide
  MOD_RES (4), (4): Xaa is C or S
  MOD_RES (18), (19), (20), (21), (22): Xaa is A or G
  MOD_RES (23), (24), (25), (26): Xaa is A or G or is absent

SEQ ID NO: 22249 - protein, 42 aa, Artificial Sequence; identical to SEQ ID NO: 19145
  GFR-binding peptide
  MOD_RES (4), (41): Xaa is C or S
  MOD_RES (20), (21), (22), (23), (24): Xaa is A or G
  MOD_RES (25), (26), (27), (28): Xaa is A or G or is absent

SEQ ID NO: 22250 - protein, 41 aa, Artificial Sequence; identical to SEQ ID NO: 19146
  GFR-binding peptide
  MOD_RES (5), (5): Xaa is C or S
  MOD_RES (21), (22), (23), (24), (25): Xaa is A or G
  MOD_RES (26), (27), (28), (29): Xaa is A or G or is absent

SEQ ID NO: 22251 - protein, 40 aa, Artificial Sequence; identical to SEQ ID NO: 19147
  GFR-binding peptide
  MOD_RES (2), (39): Xaa is C or S
  MOD_RES (18), (19), (20), (21), (22): Xaa is A or G
  MOD_RES (23), (24), (25), (26): Xaa is A or G or is absent

SEQ ID NO: 22252 - protein, 43 aa, Artificial Sequence; identical to SEQ ID NO: 19148
  GFR-binding peptide
  MOD_RES (5), (42): Xaa is C or S

SEQ ID NO: 22253 - protein, 37 aa, Artificial Sequence; identical to SEQ ID NO: 19149
  GFR-binding peptide
  MOD_RES (4), (4): Xaa is C or S

SEQ ID NO: 22254 - protein, 37 aa, Artificial Sequence; identical to SEQ ID NO: 19150
  GFR-binding peptide
  MOD_RES (1), (35), (37): Xaa is C or S

SEQ ID NO: 22255 - protein, 38 aa, Artificial Sequence; identical to SEQ ID NO: 19151
  GFR-binding peptide
  MOD_RES (37), (37): Xaa is C or S

SEQ ID NO: 22256 - protein, 41 aa, Artificial Sequence; identical to SEQ ID NO: 19152
  GFR-binding peptide
  MOD_RES (1), (38), (40): Xaa is C or S

SEQ ID NO: 22257 - protein, 37 aa, Artificial Sequence; identical to SEQ ID NO: 19153
  GFR-binding peptide
  MOD_RES (34), (36): Xaa is C or S

SEQ ID NO: 22258 - protein, 39 aa, Artificial Sequence; identical to SEQ ID NO: 19154
  GFR-binding peptide
  MOD_RES (36), (38): Xaa is C or S

SEQ ID NO: 22259 - protein, 35 aa, Artificial Sequence; identical to SEQ ID NO: 19155
  GFR-binding peptide
  MOD_RES (1), (35): Xaa is C or S
  MOD_RES (15), (16), (17), (18), (19): Xaa is A or G
  MOD_RES (20), (21), (22), (23): Xaa is A or G or is absent

SEQ ID NO: 22260 - protein, 44 aa, Artificial Sequence; identical to SEQ ID NO: 19156
  GFR-binding peptide
  MOD_RES (7), (41), (43): Xaa is C or S

SEQ ID NO: 22261 - protein, 41 aa, Artificial Sequence; identical to SEQ ID NO: 19157
  GFR-binding peptide
  MOD_RES (4), (38), (40): Xaa is C or S

SEQ ID NO: 22262 - protein, 39 aa, Artificial Sequence; identical to SEQ ID NO: 19158
  GFR-binding peptide
  MOD_RES (2), (36), (38): Xaa is C or S
  MOD_RES (16), (17), (18), (19), (20): Xaa is A or G
  MOD_RES (21), (22), (23), (24): Xaa is A or G or is absent

SEQ ID NO: 22263 - protein, 36 aa, Artificial Sequence; identical to SEQ ID NO: 19159
  GFR-binding peptide
  MOD_RES (35), (35): Xaa is C or S
  MOD_RES (14), (15), (16), (17), (18): Xaa is A or G
  MOD_RES (19), (20), (21), (22): Xaa is A or G or is absent

SEQ ID NO: 22264 - protein, 41 aa, Artificial Sequence; identical to SEQ ID NO: 19160
  GFR-binding peptide
  MOD_RES (3), (40): Xaa is C or S
  MOD_RES (19), (20), (21), (22), (23): Xaa is A or G
  MOD_RES (24), (25), (26), (27): Xaa is A or G or is absent

SEQ ID NO: 22265 - protein, 38 aa, Artificial Sequence; identical to SEQ ID NO: 19161
  GFR-binding peptide
  MOD_RES (3), (37): Xaa is C or S
  MOD_RES (17), (18), (19), (20), (21): Xaa is A or G
  MOD_RES (22), (23), (24), (25): Xaa is A or G or is absent

SEQ ID NO: 22266 - protein, 35 aa, Artificial Sequence; identical to SEQ ID NO: 19162
  GFR-binding peptide
  MOD_RES (1), (35): Xaa is C or S

SEQ ID NO: 22267 - protein, 37 aa, Artificial Sequence; identical to SEQ ID NO: 19163
  GFR-binding peptide
  MOD_RES (37), (37): Xaa is C or S

SEQ ID NO: 22268 - protein, 44 aa, Artificial Sequence; identical to SEQ ID NO: 19164
  GFR-binding peptide
  MOD_RES (5), (42), (44): Xaa is C or S
  MOD_RES (21), (22), (23), (24), (25): Xaa is A or G
  MOD_RES (26), (27), (28), (29): Xaa is A or G or is absent

SEQ ID NO: 22269 - protein, 40 aa, Artificial Sequence; identical to SEQ ID NO: 19165
  GFR-binding peptide
  MOD_RES (3), (40): Xaa is C or S
  MOD_RES (19), (20), (21), (22), (23): Xaa is A or G
  MOD_RES (24), (25), (26), (27): Xaa is A or G or is absent

SEQ ID NO: 22270 - protein, 40 aa, Artificial Sequence; identical to SEQ ID NO: 19166
  GFR-binding peptide
  MOD_RES (1), (38), (40): Xaa is C or S

SEQ ID NO: 22271 - protein, 37 aa, Artificial Sequence; identical to SEQ ID NO: 19167
  GFR-binding peptide
  MOD_RES (3), (3): Xaa is C or S
  MOD_RES (19), (20), (21), (22), (23): Xaa is A or G
  MOD_RES (24), (25), (26), (27): Xaa is A or G or is absent

SEQ ID NO: 22272 - protein, 36 aa, Artificial Sequence; identical to SEQ ID NO: 19168
  GFR-binding peptide
  MOD_RES (3), (3): Xaa is C or S
  MOD_RES (17), (18), (19), (20), (21): Xaa is A or G
  MOD_RES (22), (23), (24), (25): Xaa is A or G or is absent

SEQ ID NO: 22273 - protein, 33 aa, Artificial Sequence; identical to SEQ ID NO: 19169
  GFR-binding peptide
  MOD_RES (1), (1): Xaa is C or S
  MOD_RES (15), (16), (17), (18), (19): Xaa is A or G
  MOD_RES (20), (21), (22), (23): Xaa is A or G or is absent

SEQ ID NO: 22274 - protein, 45 aa, Artificial Sequence; identical to SEQ ID NO: 19170
  GFR-binding peptide
  MOD_RES (5), (42), (44): Xaa is C or S
  MOD_RES (21), (22), (23), (24), (25): Xaa is A or G
  MOD_RES (26), (27), (28), (29): Xaa is A or G or is absent

SEQ ID NO: 22275 - protein, 44 aa, Artificial Sequence; identical to SEQ ID NO: 19171
  GFR-binding peptide
  MOD_RES (5), (42), (44): Xaa is C or S
  MOD_RES (21), (22), (23), (24), (25): Xaa is A or G
  MOD_RES (26), (27), (28), (29): Xaa is A or G or is absent

SEQ ID NO: 22276 - protein, 37 aa, Artificial Sequence; identical to SEQ ID NO: 19172
  GFR-binding peptide
  MOD_RES (4), (4): Xaa is C or S
  MOD_RES (18), (19), (20), (21), (22): Xaa is A or G
  MOD_RES (23), (24), (25), (26): Xaa is A or G or is absent

SEQ ID NO: 22277 - protein, 38 aa, Artificial Sequence; identical to SEQ ID NO: 19173
  GFR-binding peptide
  MOD_RES (37), (37): Xaa is C or S
  MOD_RES (16), (17), (18), (19), (20): Xaa is A or G
  MOD_RES (21), (22), (23), (24): Xaa is A or G or is absent

SEQ ID NO: 22278 - protein, 37 aa, Artificial Sequence; identical to SEQ ID NO: 19174
  GFR-binding peptide
  MOD_RES (2), (2): Xaa is C or S
  MOD_RES (18), (19), (20), (21), (22): Xaa is A or G
  MOD_RES (23), (24), (25), (26): Xaa is A or G or is absent

SEQ ID NO: 22279 - protein, 39 aa, Artificial Sequence; identical to SEQ ID NO: 19175
  GFR-binding peptide
  MOD_RES (37), (39): Xaa is C or S

SEQ ID NO: 22280 - protein, 38 aa, Artificial Sequence; identical to SEQ ID NO: 19176
  GFR-binding peptide
  MOD_RES (2), (2): Xaa is C or S
  MOD_RES (18), (19), (20), (21), (22): Xaa is A or G
  MOD_RES (23), (24), (25), (26): Xaa is A or G or is absent

SEQ ID NO: 22281 - protein, 38 aa, Artificial Sequence; identical to SEQ ID NO: 19177
  GFR-binding peptide
  MOD_RES (4), (4): Xaa is C or S

SEQ ID NO: 22282 - protein, 38 aa, Artificial Sequence; identical to SEQ ID NO: 19178
  GFR-binding peptide
  MOD_RES (4), (38): Xaa is C or S
  MOD_RES (18), (19), (20), (21), (22): Xaa is A or G
  MOD_RES (23), (24), (25), (26): Xaa is A or G or is absent

SEQ ID NO: 22283 - protein, 37 aa, Artificial Sequence; identical to SEQ ID NO: 19179
  GFR-binding peptide
  MOD_RES (5), (5): Xaa is C or S

SEQ ID NO: 22284 - protein, 40 aa, Artificial Sequence; identical to SEQ ID NO: 19180
  GFR-binding peptide
  MOD_RES (3), (37), (39): Xaa is C or S

SEQ ID NO: 22285 - protein, 38 aa, Artificial Sequence; identical to SEQ ID NO: 19181
  GFR-binding peptide
  MOD_RES (37), (37): Xaa is C or S
  MOD_RES (16), (17), (18), (19), (20): Xaa is A or G
  MOD_RES (21), (22), (23), (24): Xaa is A or G or is absent

SEQ ID NO: 22286 - protein, 35 aa, Artificial Sequence; identical to SEQ ID NO: 19182
  GFR-binding peptide
  MOD_RES (35), (35): Xaa is C or S
  MOD_RES (14), (15), (16), (17), (18): Xaa is A or G
  MOD_RES (19), (20), (21), (22): Xaa is A or G or is absent

SEQ ID NO: 22287 - protein, 41 aa, Artificial Sequence; identical to SEQ ID NO: 19183
  GFR-binding peptide
  MOD_RES (4), (41): Xaa is C or S
  MOD_RES (20), (21), (22), (23), (24): Xaa is A or G
  MOD_RES (25), (26), (27), (28): Xaa is A or G or is absent

SEQ ID NO: 22288 - protein, 36 aa, Artificial Sequence; identical to SEQ ID NO: 19184
  GFR-binding peptide
  MOD_RES (36), (36): Xaa is C or S

SEQ ID NO: 22289 - protein, 40 aa, Artificial Sequence; identical to SEQ ID NO: 19185
  GFR-binding peptide
  MOD_RES (5), (39): Xaa is C or S
  MOD_RES (19), (20), (21), (22), (23): Xaa is A or G
  MOD_RES (24), (25), (26), (27): Xaa is A or G or is absent

SEQ ID NO: 22290 - protein, 39 aa, Artificial Sequence; identical to SEQ ID NO: 19186
  GFR-binding peptide
  MOD_RES (36), (38): Xaa is C or S

SEQ ID NO: 22291 - protein, 41 aa, Artificial Sequence; identical to SEQ ID NO: 19187
  GFR-binding peptide
  MOD_RES (5), (5): Xaa is C or S

SEQ ID NO: 22292 - protein, 42 aa, Artificial Sequence; identical to SEQ ID NO: 19188
  GFR-binding peptide
  MOD_RES (5), (39), (41): Xaa is C or S

SEQ ID NO: 22293 - protein, 39 aa, Artificial Sequence; identical to SEQ ID NO: 19189
  GFR-binding peptide
  MOD_RES (2), (39): Xaa is C or S

SEQ ID NO: 22294 - protein, 36 aa, Artificial Sequence; identical to SEQ ID NO: 19190
  GFR-binding peptide
  MOD_RES (35), (35): Xaa is C or S
  MOD_RES (14), (15), (16), (17), (18): Xaa is A or G
  MOD_RES (19), (20), (21), (22): Xaa is A or G or is absent

SEQ ID NO: 22295 - protein, 36 aa, Artificial Sequence; identical to SEQ ID NO: 19191
  GFR-binding peptide
  MOD_RES (35), (35): Xaa is C or S

SEQ ID NO: 22296 - protein, 32 aa, Artificial Sequence; identical to SEQ ID NO: 19192
  GFR-binding peptide
  MOD_RES (14), (15), (16), (17), (18): Xaa is A or G
  MOD_RES (19), (20), (21), (22): Xaa is A or G or is absent

SEQ ID NO: 22297 - protein, 39 aa, Artificial Sequence; identical to SEQ ID NO: 19193
  GFR-binding peptide
  MOD_RES (1), (38): Xaa is C or S
  MOD_RES (17), (18), (19), (20), (21): Xaa is A or G
  MOD_RES (22), (23), (24), (25): Xaa is A or G or is absent

SEQ ID NO: 22298 - protein, 43 aa, Artificial Sequence; identical to SEQ ID NO: 19194
  GFR-binding peptide
  MOD_RES (7), (41), (43): Xaa is C or S

SEQ ID NO: 22299 - protein, 38 aa, Artificial Sequence; identical to SEQ ID NO: 19195
  GFR-binding peptide
  MOD_RES (4), (4): Xaa is C or S

SEQ ID NO: 22300 - protein, 40 aa, Artificial Sequence; identical to SEQ ID NO: 19196
  GFR-binding peptide
  MOD_RES (5), (5): Xaa is C or S
  MOD_RES (21), (22), (23), (24), (25): Xaa is A or G
  MOD_RES (26), (27), (28), (29): Xaa is A or G or is absent

SEQ ID NO: 22301 - protein, 32 aa, Artificial Sequence; identical to SEQ ID NO: 19197
  GFR-binding peptide

SEQ ID NO: 22302 - protein, 40 aa, Artificial Sequence; identical to SEQ ID NO: 19198
  GFR-binding peptide
  MOD_RES (5), (39): Xaa is C or S
  MOD_RES (19), (20), (21), (22), (23): Xaa is A or G
  MOD_RES (24), (25), (26), (27): Xaa is A or G or is absent

SEQ ID NO: 22303 - protein, 39 aa, Artificial Sequence; identical to SEQ ID NO: 19199
  GFR-binding peptide
  MOD_RES (7), (7): Xaa is C or S

SEQ ID NO: 22304 - protein, 42 aa, Artificial Sequence; identical to SEQ ID NO: 19200
  GFR-binding peptide
  MOD_RES (5), (39), (41): Xaa is C or S
  MOD_RES (19), (20), (21), (22), (23): Xaa is A or G
  MOD_RES (24), (25), (26), (27): Xaa is A or G or is absent

SEQ ID NO: 22305 - protein, 37 aa, Artificial Sequence; identical to SEQ ID NO: 19201
  GFR-binding peptide
  MOD_RES (2), (36): Xaa is C or S

SEQ ID NO: 22306 - protein, 37 aa, Artificial Sequence; identical to SEQ ID NO: 19202
  GFR-binding peptide
  MOD_RES (2), (2): Xaa is C or S
  MOD_RES (18), (19), (20), (21), (22): Xaa is A or G
  MOD_RES (23), (24), (25), (26): Xaa is A or G or is absent

SEQ ID NO: 22307 - protein, 36 aa, Artificial Sequence; identical to SEQ ID NO: 19203
  GFR-binding peptide
  MOD_RES (4), (4): Xaa is C or S
  MOD_RES (18), (19), (20), (21), (22): Xaa is A or G
  MOD_RES (23), (24), (25), (26): Xaa is A or G or is absent

SEQ ID NO: 22308 - protein, 40 aa, Artificial Sequence; identical to SEQ ID NO: 19204
  GFR-binding peptide
  MOD_RES (5), (5): Xaa is C or S
  MOD_RES (21), (22), (23), (24), (25): Xaa is A or G
  MOD_RES (26), (27), (28), (29): Xaa is A or G or is absent

SEQ ID NO: 22309 - protein, 40 aa, Artificial Sequence; identical to SEQ ID NO: 19205
  GFR-binding peptide
  MOD_RES (4), (4): Xaa is C or S
  MOD_RES (20), (21), (22), (23), (24): Xaa is A or G
  MOD_RES (25), (26), (27), (28): Xaa is A or G or is absent

SEQ ID NO: 22310 - protein, 36 aa, Artificial Sequence; identical to SEQ ID NO: 19206
  GFR-binding peptide
  MOD_RES (36), (36): Xaa is C or S
  MOD_RES (15), (16), (17), (18), (19): Xaa is A or G
  MOD_RES (20), (21), (22), (23): Xaa is A or G or is absent

SEQ ID NO: 22311 - protein, 41 aa, Artificial Sequence; identical to SEQ ID NO: 19207
  GFR-binding peptide
  MOD_RES (2), (39), (41): Xaa is C or S

SEQ ID NO: 22312 - protein, 39 aa, Artificial Sequence; identical to SEQ ID NO: 19208
  GFR-binding peptide
  MOD_RES (2), (39): Xaa is C or S
  MOD_RES (18), (19), (20), (21), (22): Xaa is A or G
  MOD_RES (23), (24), (25), (26): Xaa is A or G or is absent

SEQ ID NO: 22313 - protein, 38 aa, Artificial Sequence; identical to SEQ ID NO: 19209
  GFR-binding peptide
  MOD_RES (3), (37): Xaa is C or S
  MOD_RES (17), (18), (19), (20), (21): Xaa is A or G
  MOD_RES (22), (23), (24), (25): Xaa is A or G or is absent

SEQ ID NO: 22314 - protein, 41 aa, Artificial Sequence; identical to SEQ ID NO: 19210
  GFR-binding peptide
  MOD_RES (7), (41): Xaa is C or S

SEQ ID NO: 22315 - protein, 38 aa, Artificial Sequence; identical to SEQ ID NO: 19211
  GFR-binding peptide
  MOD_RES (35), (37): Xaa is C or S

SEQ ID NO: 22316 - protein, 41 aa, Artificial Sequence; identical to SEQ ID NO: 19212
  GFR-binding peptide
  MOD_RES (6), (40): Xaa is C or S
  MOD_RES (20), (21), (22), (23), (24): Xaa is A or G
  MOD_RES (25), (26), (27), (28): Xaa is A or G or is absent

SEQ ID NO: 22317 - protein, 39 aa, Artificial Sequence; identical to SEQ ID NO: 19213
  GFR-binding peptide
  MOD_RES (5), (39): Xaa is C or S
  MOD_RES (19), (20), (21), (22), (23): Xaa is A or G
  MOD_RES (24), (25), (26), (27): Xaa is A or G or is absent

SEQ ID NO: 22318 - protein, 37 aa, Artificial Sequence; identical to SEQ ID NO: 19214
  GFR-binding peptide
  MOD_RES (3), (3): Xaa is C or S
  MOD_RES (19), (20), (21), (22), (23): Xaa is A or G
  MOD_RES (24), (25), (26), (27): Xaa is A or G or is absent

SEQ ID NO: 22319 - protein, 43 aa, Artificial Sequence; identical to SEQ ID NO: 19215
  GFR-binding peptide
  MOD_RES (5), (42): Xaa is C or S
  MOD_RES (21), (22), (23), (24), (25): Xaa is A or G
  MOD_RES (26), (27), (28), (29): Xaa is A or G or is absent

SEQ ID NO: 22320 - protein, 37 aa, Artificial Sequence; identical to SEQ ID NO: 19216
  GFR-binding peptide
  MOD_RES (35), (37): Xaa is C or S

SEQ ID NO: 22321 - protein, 37 aa, Artificial Sequence; identical to SEQ ID NO: 19217
  GFR-binding peptide
  MOD_RES (5), (5): Xaa is C or S

SEQ ID NO: 22322 - protein, 34 aa, Artificial Sequence; identical to SEQ ID NO: 19218
  GFR-binding peptide
  MOD_RES (14), (15), (16), (17), (18): Xaa is A or G
  MOD_RES (19), (20), (21), (22): Xaa is A or G or is absent

SEQ ID NO: 22323 - protein, 38 aa, Artificial Sequence; identical to SEQ ID NO: 19219
  GFR-binding peptide
  MOD_RES (37), (37): Xaa is C or S
  MOD_RES (16), (17), (18), (19), (20): Xaa is A or G
  MOD_RES (21), (22), (23), (24): Xaa is A or G or is absent

SEQ ID NO: 22324 - protein, 41 aa, Artificial Sequence; identical to SEQ ID NO: 19220
  GFR-binding peptide
  MOD_RES (7), (41): Xaa is C or S

SEQ ID NO: 22325 - protein, 41 aa, Artificial Sequence; identical to SEQ ID NO: 19221
  GFR-binding peptide
  MOD_RES (1), (38), (40): Xaa is C or S
  MOD_RES (17), (18), (19), (20), (21): Xaa is A or G
  MOD_RES (22), (23), (24), (25): Xaa is A or G or is absent

SEQ ID NO: 22326 - protein, 43 aa, Artificial Sequence; identical to SEQ ID NO: 19222
  GFR-binding peptide
  MOD_RES (6), (40), (42): Xaa is C or S

SEQ ID NO: 22327 - protein, 36 aa, Artificial Sequence; identical to SEQ ID NO: 19223
  GFR-binding peptide
  MOD_RES (35), (35): Xaa is C or S

SEQ ID NO: 22328 - protein, 36 aa, Artificial Sequence; identical to SEQ ID NO: 19224
  GFR-binding peptide
  MOD_RES (3), (3): Xaa is C or S

SEQ ID NO: 22329 - protein, 33 aa, Artificial Sequence; identical to SEQ ID NO: 19225
  GFR-binding peptide
  MOD_RES (1), (1): Xaa is C or S

SEQ ID NO: 22330 - protein, 39 aa, Artificial Sequence; identical to SEQ ID NO: 19226
  GFR-binding peptide
  MOD_RES (4), (4): Xaa is C or S
  MOD_RES (20), (21), (22), (23), (24): Xaa is A or G
  MOD_RES (25), (26), (27), (28): Xaa is A or G or is absent

SEQ ID NO: 22331 - protein, 39 aa, Artificial Sequence; identical to SEQ ID NO: 19227
  GFR-binding peptide
  MOD_RES (37), (39): Xaa is C or S
  MOD_RES (16), (17), (18), (19), (20): Xaa is A or G
  MOD_RES (21), (22), (23), (24): Xaa is A or G or is absent

SEQ ID NO: 22332 - protein, 32 aa, Artificial Sequence; identical to SEQ ID NO: 19228
  GFR-binding peptide

SEQ ID NO: 22333 - protein, 45 aa, Artificial Sequence; identical to SEQ ID NO: 19229
  GFR-binding peptide
  MOD_RES (5), (42), (44): Xaa is C or S
  MOD_RES (21), (22), (23), (24), (25): Xaa is A or G
  MOD_RES (26), (27), (28), (29): Xaa is A or G or is absent

SEQ ID NO: 22334 - protein, 41 aa, Artificial Sequence; identical to SEQ ID NO: 19230
  GFR-binding peptide
  MOD_RES (2), (39), (41): Xaa is C or S
  MOD_RES (18), (19), (20), (21), (22): Xaa is A or G
  MOD_RES (23), (24), (25), (26): Xaa is A or G or is absent

SEQ ID NO: 22335 - protein, 35 aa, Artificial Sequence; identical to SEQ ID NO: 19231
  GFR-binding peptide
  MOD_RES (15), (16), (17), (18), (19): Xaa is A or G
  MOD_RES (20), (21), (22), (23): Xaa is A or G or is absent

SEQ ID NO: 22336 - protein, 38 aa, Artificial Sequence; identical to SEQ ID NO: 19232
  GFR-binding peptide
  MOD_RES (2), (2): Xaa is C or S

SEQ ID NO: 22337 - protein, 39 aa, Artificial Sequence; identical to SEQ ID NO: 19233
  GFR-binding peptide
  MOD_RES (4), (38): Xaa is C or S
  MOD_RES (18), (19), (20), (21), (22): Xaa is A or G
  MOD_RES (23), (24), (25), (26): Xaa is A or G or is absent

SEQ ID NO: 22338 - protein, 39 aa, Artificial Sequence; identical to SEQ ID NO: 19234
  GFR-binding peptide
  MOD_RES (5), (39): Xaa is C or S

SEQ ID NO: 22339 - protein, 33 aa, Artificial Sequence; identical to SEQ ID NO: 19235
  GFR-binding peptide
  MOD_RES (1), (1): Xaa is C or S

SEQ ID NO: 22340 - protein, 33 aa, Artificial Sequence; identical to SEQ ID NO: 19236
  GFR-binding peptide
  MOD_RES (1), (1): Xaa is C or S
  MOD_RES (15), (16), (17), (18), (19): Xaa is A or G
  MOD_RES (20), (21), (22), (23): Xaa is A or G or is absent

SEQ ID NO: 22341 - protein, 41 aa, Artificial Sequence; identical to SEQ ID NO: 19237
  GFR-binding peptide
  MOD_RES (7), (41): Xaa is C or S
  MOD_RES (21), (22), (23), (24), (25): Xaa is A or G
  MOD_RES (26), (27), (28), (29): Xaa is A or G or is absent

SEQ ID NO: 22342 - protein, 32 aa, Artificial Sequence; identical to SEQ ID NO: 19238
  GFR-binding peptide
  MOD_RES (14), (15), (16), (17), (18): Xaa is A or G
  MOD_RES (19), (20), (21), (22): Xaa is A or G or is absent

SEQ ID NO: 22343 - protein, 43 aa, Artificial Sequence; identical to SEQ ID NO: 19239
  GFR-binding peptide
  MOD_RES (3), (40), (42): Xaa is C or S
  MOD_RES (19), (20), (21), (22), (23): Xaa is A or G
  MOD_RES (24), (25), (26), (27): Xaa is A or G or is absent

SEQ ID NO: 22344 - protein, 42 aa, Artificial Sequence; identical to SEQ ID NO: 19240
  GFR-binding peptide
  MOD_RES (5), (39), (41): Xaa is C or S
  MOD_RES (19), (20), (21), (22), (23): Xaa is A or G
  MOD_RES (24), (25), (26), (27): Xaa is A or G or is absent

SEQ ID NO: 22345 - protein, 39 aa, Artificial Sequence; identical to SEQ ID NO: 19241
  GFR-binding peptide
  MOD_RES (5), (5): Xaa is C or S
  MOD_RES (21), (22), (23), (24), (25): Xaa is A or G
  MOD_RES (26), (27), (28), (29): Xaa is A or G or is absent

SEQ ID NO: 22346 - protein, 37 aa, Artificial Sequence; identical to SEQ ID NO: 19242
  GFR-binding peptide
  MOD_RES (35), (37): Xaa is C or S

SEQ ID NO: 22347 - protein, 35 aa, Artificial Sequence; identical to SEQ ID NO: 19243
  GFR-binding peptide
  MOD_RES (34), (34): Xaa is C or S

SEQ ID NO: 22348 - protein, 36 aa, Artificial Sequence; identical to SEQ ID NO: 19244
  GFR-binding peptide
  MOD_RES (35), (35): Xaa is C or S
  MOD_RES (14), (15), (16), (17), (18): Xaa is A or G
  MOD_RES (19), (20), (21), (22): Xaa is A or G or is absent

SEQ ID NO: 22349 - protein, 35 aa, Artificial Sequence; identical to SEQ ID NO: 19245
  GFR-binding peptide
  MOD_RES (1), (1): Xaa is C or S
  MOD_RES (17), (18), (19), (20), (21): Xaa is A or G
  MOD_RES (22), (23), (24), (25): Xaa is A or G or is absent

SEQ ID NO: 22350 - protein, 42 aa, Artificial Sequence; identical to SEQ ID NO: 19246
  GFR-binding peptide
  MOD_RES (5), (39), (41): Xaa is C or S
  MOD_RES (19), (20), (21), (22), (23): Xaa is A or G
  MOD_RES (24), (25), (26), (27): Xaa is A or G or is absent

SEQ ID NO: 22351 - protein, 35 aa, Artificial Sequence; identical to SEQ ID NO: 19247
  GFR-binding peptide
  MOD_RES (1), (1): Xaa is C or S
  MOD_RES (17), (18), (19), (20), (21): Xaa is A or G
  MOD_RES (22), (23), (24), (25): Xaa is A or G or is absent

SEQ ID NO: 22352 - protein, 32 aa, Artificial Sequence; identical to SEQ ID NO: 19248
  GFR-binding peptide

SEQ ID NO: 22353 - protein, 38 aa, Artificial Sequence; identical to SEQ ID NO: 19249
  GFR-binding peptide
  MOD_RES (4), (38): Xaa is C or S
  MOD_RES (18), (19), (20), (21), (22): Xaa is A or G
  MOD_RES (23), (24), (25), (26): Xaa is A or G or is absent

SEQ ID NO: 22354 - protein, 38 aa, Artificial Sequence; identical to SEQ ID NO: 19250
  GFR-binding peptide
  MOD_RES (2), (36), (38): Xaa is C or S

SEQ ID NO: 22355 - protein, 41 aa, Artificial Sequence; identical to SEQ ID NO: 19251
  GFR-binding peptide
  MOD_RES (1), (38), (40): Xaa is C or S

SEQ ID NO: 22356 - protein, 42 aa, Artificial Sequence; identical to SEQ ID NO: 19252
  GFR-binding peptide
  MOD_RES (6), (40), (42): Xaa is C or S

SEQ ID NO: 22357 - protein, 32 aa, Artificial Sequence; identical to SEQ ID NO: 19253
  GFR-binding peptide
  MOD_RES (14), (15), (16), (17), (18): Xaa is A or G
  MOD_RES (19), (20), (21), (22): Xaa is A or G or is absent

SEQ ID NO: 22358 - protein, 33 aa, Artificial Sequence; identical to SEQ ID NO: 19254
  GFR-binding peptide

SEQ ID NO: 22359 - protein, 42 aa, Artificial Sequence; identical to SEQ ID NO: 19255
  GFR-binding peptide
  MOD_RES (2), (39), (41): Xaa is C or S

SEQ ID NO: 22360 - protein, 45 aa, Artificial Sequence; identical to SEQ ID NO: 19256
  GFR-binding peptide
  MOD_RES (5), (42), (44): Xaa is C or S
  MOD_RES (21), (22), (23), (24), (25): Xaa is A or G
  MOD_RES (26), (27), (28), (29): Xaa is A or G or is absent

SEQ ID NO: 22361 - protein, 32 aa, Artificial Sequence; identical to SEQ ID NO: 19257
  GFR-binding peptide

SEQ ID NO: 22362 - protein, 39 aa, Artificial Sequence; identical to SEQ ID NO: 19258
  GFR-binding peptide
  MOD_RES (6), (6): Xaa is C or S

SEQ ID NO: 22363 - protein, 39 aa, Artificial Sequence; identical to SEQ ID NO: 19259
  GFR-binding peptide
  MOD_RES (3), (3): Xaa is C or S
  MOD_RES (19), (20), (21), (22), (23): Xaa is A or G
  MOD_RES (24), (25), (26), (27): Xaa is A or G or is absent

SEQ ID NO: 22364 - protein, 32 aa, Artificial Sequence; identical to SEQ ID NO: 19260
  GFR-binding peptide

SEQ ID NO: 22365 - protein, 37 aa, Artificial Sequence; identical to SEQ ID NO: 19261
  GFR-binding peptide
  MOD_RES (1), (1): Xaa is C or S
  MOD_RES (17), (18), (19), (20), (21): Xaa is A or G
  MOD_RES (22), (23), (24), (25): Xaa is A or G or is absent

SEQ ID NO: 22366 - protein, 35 aa, Artificial Sequence; identical to SEQ ID NO: 19262
  GFR-binding peptide

SEQ ID NO: 22367 - protein, 40 aa, Artificial Sequence; identical to SEQ ID NO: 19263
  GFR-binding peptide
  MOD_RES (2), (39): Xaa is C or S
  MOD_RES (18), (19), (20), (21), (22): Xaa is A or G
  MOD_RES (23), (24), (25), (26): Xaa is A or G or is absent

SEQ ID NO: 22368 - protein, 37 aa, Artificial Sequence; identical to SEQ ID NO: 19264
  GFR-binding peptide
  MOD_RES (34), (36): Xaa is C or S
  MOD_RES (14), (15), (16), (17), (18): Xaa is A or G
  MOD_RES (19), (20), (21), (22): Xaa is A or G or is absent

SEQ ID NO: 22369 - protein, 41 aa, Artificial Sequence; identical to SEQ ID NO: 19265
  GFR-binding peptide
  MOD_RES (1), (38), (40): Xaa is C or S
  MOD_RES (17), (18), (19), (20), (21): Xaa is A or G
  MOD_RES (22), (23), (24), (25): Xaa is A or G or is absent

SEQ ID NO: 22370 - protein, 43 aa, Artificial Sequence; identical to SEQ ID NO: 19266
  GFR-binding peptide
  MOD_RES (6), (40), (42): Xaa is C or S
  MOD_RES (20), (21), (22), (23), (24): Xaa is A or G
  MOD_RES (25), (26), (27), (28): Xaa is A or G or is absent

SEQ ID NO: 22371 - protein, 40 aa, Artificial Sequence; identical to SEQ ID NO: 19267
  GFR-binding peptide
  MOD_RES (2), (39): Xaa is C or S

SEQ ID NO: 22372 - protein, 32 aa, Artificial Sequence; identical to SEQ ID NO: 19268
  GFR-binding peptide
  MOD_RES (14), (15), (16), (17), (18): Xaa is A or G
  MOD_RES (19), (20), (21), (22): Xaa is A or G or is absent

SEQ ID NO: 22373 - protein, 35 aa, Artificial Sequence; identical to SEQ ID NO: 19269
  GFR-binding peptide
  MOD_RES (15), (16), (17), (18), (19): Xaa is A or G
  MOD_RES (20), (21), (22), (23): Xaa is A or G or is absent

SEQ ID NO: 22374 - protein, 37 aa, Artificial Sequence; identical to SEQ ID NO: 19270
  GFR-binding peptide
  MOD_RES (34), (36): Xaa is C or S

SEQ ID NO: 22375 - protein, 34 aa, Artificial Sequence; identical to SEQ ID NO: 19271
  GFR-binding peptide
  MOD_RES (1), (1): Xaa is C or S

SEQ ID NO: 22376 - protein, 38 aa, Artificial Sequence; identical to SEQ ID NO: 19272
  GFR-binding peptide
  MOD_RES (36), (38): Xaa is C or S
  MOD_RES (15), (16), (17), (18), (19): Xaa is A or G
  MOD_RES (20), (21), (22), (23): Xaa is A or G or is absent

SEQ ID NO: 22377 - protein, 34 aa, Artificial Sequence; identical to SEQ ID NO: 19273
  GFR-binding peptide
  MOD_RES (15), (16), (17), (18), (19): Xaa is A or G
  MOD_RES (20), (21), (22), (23): Xaa is A or G or is absent

SEQ ID NO: 22378 - protein, 37 aa, Artificial Sequence; identical to SEQ ID NO: 19274
  GFR-binding peptide
  MOD_RES (2), (36): Xaa is C or S
  MOD_RES (16), (17), (18), (19), (20): Xaa is A or G
  MOD_RES (21), (22), (23), (24): Xaa is A or G or is absent

SEQ ID NO: 22379 - protein, 43 aa, Artificial Sequence; identical to SEQ ID NO: 19275
  GFR-binding peptide
  MOD_RES (5), (42): Xaa is C or S
  MOD_RES (21), (22), (23), (24), (25): Xaa is A or G
  MOD_RES (26), (27), (28), (29): Xaa is A or G or is absent

SEQ ID NO: 22380 - protein, 33 aa, Artificial Sequence; identical to SEQ ID NO: 19276
  GFR-binding peptide
  MOD_RES (1), (1): Xaa is C or S

SEQ ID NO: 22381 - protein, 42 aa, Artificial Sequence; identical to SEQ ID NO: 19277
  GFR-binding peptide
  MOD_RES (2), (39), (41): Xaa is C or S
  MOD_RES (18), (19), (20), (21), (22): Xaa is A or G
  MOD_RES (23), (24), (25), (26): Xaa is A or G or is absent

SEQ ID NO: 22382 - protein, 41 aa, Artificial Sequence; identical to SEQ ID NO: 19278
  GFR-binding peptide
  MOD_RES (4), (38), (40): Xaa is C or S

SEQ ID NO: 22383 - protein, 39 aa, Artificial Sequence; identical to SEQ ID NO: 19279
  GFR-binding peptide
  MOD_RES (4), (38): Xaa is C or S
  MOD_RES (18), (19), (20), (21), (22): Xaa is A or G
  MOD_RES (23), (24), (25), (26): Xaa is A or G or is absent

SEQ ID NO: 22384 - protein, 38 aa, Artificial Sequence; identical to SEQ ID NO: 19280
  GFR-binding peptide
  MOD_RES (35), (37): Xaa is C or S
  MOD_RES (14), (15), (16), (17), (18): Xaa is A or G
  MOD_RES (19), (20), (21), (22): Xaa is A or G or is absent

SEQ ID NO: 22385 - protein, 41 aa, Artificial Sequence; identical to SEQ ID NO: 19281
  GFR-binding peptide
  MOD_RES (7), (41): Xaa is C or S

SEQ ID NO: 22386 - protein, 41 aa, Artificial Sequence; identical to SEQ ID NO: 19282
  GFR-binding peptide
  MOD_RES (7), (41): Xaa is C or S
  MOD_RES (21), (22), (23), (24), (25): Xaa is A or G
  MOD_RES (26), (27), (28), (29): Xaa is A or G or is absent

SEQ ID NO: 22387 - protein, 39 aa, Artificial Sequence; identical to SEQ ID NO: 19283
  GFR-binding peptide
  MOD_RES (36), (38): Xaa is C or S

SEQ ID NO: 22388 - protein, 39 aa, Artificial Sequence; identical to SEQ ID NO: 19284
  GFR-binding peptide
  MOD_RES (2), (36), (38): Xaa is C or S
  MOD_RES (16), (17), (18), (19), (20): Xaa is A or G
  MOD_RES (21), (22), (23), (24): Xaa is A or G or is absent

SEQ ID NO: 22389 - protein, 40 aa, Artificial Sequence; identical to SEQ ID NO: 19285
  GFR-binding peptide
  MOD_RES (37), (39): Xaa is C or S
  MOD_RES (16), (17), (18), (19), (20): Xaa is A or G
  MOD_RES (21), (22), (23), (24): Xaa is A or G or is absent

SEQ ID NO: 22390 - protein, 34 aa, Artificial Sequence; identical to SEQ ID NO: 19286
  GFR-binding peptide
  MOD_RES (34), (34): Xaa is C or S
  MOD_RES (14), (15), (16), (17), (18): Xaa is A or G
  MOD_RES (19), (20), (21), (22): Xaa is A or G or is absent

SEQ ID NO: 22391 - protein, 37 aa, Artificial Sequence; identical to SEQ ID NO: 19287
  GFR-binding peptide
  MOD_RES (2), (2): Xaa is C or S
  MOD_RES (18), (19), (20), (21), (22): Xaa is A or G
  MOD_RES (23), (24), (25), (26): Xaa is A or G or is absent

SEQ ID NO: 22392 - protein, 40 aa, Artificial Sequence; identical to SEQ ID NO: 19288
  GFR-binding peptide
  MOD_RES (4), (38), (40): Xaa is C or S

SEQ ID NO: 22393 - protein, 39 aa, Artificial Sequence; identical to SEQ ID NO: 19289
  GFR-binding peptide
  MOD_RES (3), (37), (39): Xaa is C or S
  MOD_RES (17), (18), (19), (20), (21): Xaa is A or G
  MOD_RES (22), (23), (24), (25): Xaa is A or G or is absent

SEQ ID NO: 22394 - protein, 42 aa, Artificial Sequence; identical to SEQ ID NO: 19290
  GFR-binding peptide
  MOD_RES (4), (41): Xaa is C or S
  MOD_RES (20), (21), (22), (23), (24): Xaa is A or G
  MOD_RES (25), (26), (27), (28): Xaa is A or G or is absent

SEQ ID NO: 22395 - protein, 37 aa, Artificial Sequence; identical to SEQ ID NO: 19291
  GFR-binding peptide
  MOD_RES (2), (2): Xaa is C or S
  MOD_RES (18), (19), (20), (21), (22): Xaa is A or G
  MOD_RES (23), (24), (25), (26): Xaa is A or G or is absent

SEQ ID NO: 22396 - protein, 32 aa, Artificial Sequence; identical to SEQ ID NO: 19292
  GFR-binding peptide
  MOD_RES (14), (15), (16), (17), (18): Xaa is A or G
  MOD_RES (19), (20), (21), (22): Xaa is A or G or is absent

SEQ ID NO: 22397 - protein, 32 aa, Artificial Sequence; identical to SEQ ID NO: 19293
  GFR-binding peptide
  MOD_RES (14), (15), (16), (17), (18): Xaa is A or G
  MOD_RES (19), (20), (21), (22): Xaa is A or G or is absent

SEQ ID NO: 22398 - protein, 35 aa, Artificial Sequence; identical to SEQ ID NO: 19294
  GFR-binding peptide
  MOD_RES (16), (17), (18), (19), (20): Xaa is A or G
  MOD_RES (21), (22), (23), (24): Xaa is A or G or is absent

SEQ ID NO: 22399 - protein, 36 aa, Artificial Sequence; identical to SEQ ID NO: 19295
  GFR-binding peptide
  MOD_RES (4), (4): Xaa is C or S
  MOD_RES (18), (19), (20), (21), (22): Xaa is A or G
  MOD_RES (23), (24), (25), (26): Xaa is A or G or is absent

SEQ ID NO: 22400 - protein, 41 aa, Artificial Sequence; identical to SEQ ID NO: 19296
  GFR-binding peptide
  MOD_RES (5), (39), (41): Xaa is C or S

SEQ ID NO: 22401 - protein, 36 aa, Artificial Sequence; identical to SEQ ID NO: 19297
  GFR-binding peptide
  MOD_RES (3), (3): Xaa is C or S
  MOD_RES (17), (18), (19), (20), (21): Xaa is A or G
  MOD_RES (22), (23), (24), (25): Xaa is A or G or is absent

SEQ ID NO: 22402 - protein, 36 aa, Artificial Sequence; identical to SEQ ID NO: 19298
  GFR-binding peptide
  MOD_RES (1), (1): Xaa is C or S

SEQ ID NO: 22403 - protein, 41 aa, Artificial Sequence; identical to SEQ ID NO: 19299
  GFR-binding peptide
  MOD_RES (6), (40): Xaa is C or S
  MOD_RES (20), (21), (22), (23), (24): Xaa is A or G
  MOD_RES (25), (26), (27), (28): Xaa is A or G or is absent

SEQ ID NO: 22404 - protein, 34 aa, Artificial Sequence; identical to SEQ ID NO: 19300
  GFR-binding peptide
  MOD_RES (16), (17), (18), (19), (20): Xaa is A or G
  MOD_RES (21), (22), (23), (24): Xaa is A or G or is absent

SEQ ID NO: 22405 - protein, 38 aa, Artificial Sequence; identical to SEQ ID NO: 19301
  GFR-binding peptide
  MOD_RES (35), (37): Xaa is C or S

SEQ ID NO: 22406 - protein, 41 aa, Artificial Sequence; identical to SEQ ID NO: 19302
  GFR-binding peptide
  MOD_RES (4), (41): Xaa is C or S
  MOD_RES (20), (21), (22), (23), (24): Xaa is A or G
  MOD_RES (25), (26), (27), (28): Xaa is A or G or is absent

SEQ ID NO: 22407 - protein, 38 aa, Artificial Sequence; identical to SEQ ID NO: 19303
  GFR-binding peptide
  MOD_RES (1), (38): Xaa is C or S
  MOD_RES (17), (18), (19), (20), (21): Xaa is A or G
  MOD_RES (22), (23), (24), (25): Xaa is A or G or is absent

SEQ ID NO: 22408 - protein, 35 aa, Artificial Sequence; identical to SEQ ID NO: 19304
  GFR-binding peptide
  MOD_RES (2), (2): Xaa is C or S
  MOD_RES (16), (17), (18), (19), (20): Xaa is A or G
  MOD_RES (21), (22), (23), (24): Xaa is A or G or is absent

SEQ ID NO: 22409 - protein, 33 aa, Artificial Sequence; identical to SEQ ID NO: 19305
  GFR-binding peptide
  MOD_RES (1), (1): Xaa is C or S
  MOD_RES (15), (16), (17), (18), (19): Xaa is A or G
  MOD_RES (20), (21), (22), (23): Xaa is A or G or is absent

SEQ ID NO: 22410 - protein, 39 aa, Artificial Sequence; identical to SEQ ID NO: 19306
  GFR-binding peptide
  MOD_RES (1), (38): Xaa is C or S
  MOD_RES (17), (18), (19), (20), (21): Xaa is A or G
  MOD_RES (22), (23), (24), (25): Xaa is A or G or is absent

SEQ ID NO: 22411 - protein, 37 aa, Artificial Sequence; identical to SEQ ID NO: 19307
  GFR-binding peptide
  MOD_RES (34), (36): Xaa is C or S
  MOD_RES (14), (15), (16), (17), (18): Xaa is A or G
  MOD_RES (19), (20), (21), (22): Xaa is A or G or is absent

SEQ ID NO: 22412 - protein, 33 aa, Artificial Sequence; identical to SEQ ID NO: 19308
  GFR-binding peptide

SEQ ID NO: 22413 - protein, 43 aa, Artificial Sequence; identical to SEQ ID NO: 19309
  GFR-binding peptide
  MOD_RES (4), (41), (43): Xaa is C or S
  MOD_RES (20), (21), (22), (23), (24): Xaa is A or G
  MOD_RES (25), (26), (27), (28): Xaa is A or G or is absent

SEQ ID NO: 22414 - protein, 39 aa, Artificial Sequence; identical to SEQ ID NO: 19310
  GFR-binding peptide
  MOD_RES (5), (39): Xaa is C or S
  MOD_RES (19), (20), (21), (22), (23): Xaa is A or G
  MOD_RES (24), (25), (26), (27): Xaa is A or G or is absent

SEQ ID NO: 22415 - protein, 41 aa, Artificial Sequence; identical to SEQ ID NO: 19311
  GFR-binding peptide
  MOD_RES (5), (5): Xaa is C or S
  MOD_RES (21), (22), (23), (24), (25): Xaa is A or G
  MOD_RES (26), (27), (28), (29): Xaa is A or G or is absent

SEQ ID NO: 22416 - protein, 44 aa, Artificial Sequence; identical to SEQ ID NO: 19312
  GFR-binding peptide
  MOD_RES (7), (41), (43): Xaa is C or S
  MOD_RES (21), (22), (23), (24), (25): Xaa is A or G
  MOD_RES (26), (27), (28), (29): Xaa is A or G or is absent

SEQ ID NO: 22417 - protein, 36 aa, Artificial Sequence; identical to SEQ ID NO: 19313
  GFR-binding peptide
  MOD_RES (1), (35): Xaa is C or S

SEQ ID NO: 22418 - protein, 35 aa, Artificial Sequence; identical to SEQ ID NO: 19314
  GFR-binding peptide

SEQ ID NO: 22419 - protein, 38 aa, Artificial Sequence; identical to SEQ ID NO: 19315
  GFR-binding peptide
  MOD_RES (2), (36), (38): Xaa is C or S
  MOD_RES (16), (17), (18), (19), (20): Xaa is A or G
  MOD_RES (21), (22), (23), (24): Xaa is A or G or is absent

SEQ ID NO: 22420 - protein, 36 aa, Artificial Sequence; identical to SEQ ID NO: 19316
  GFR-binding peptide
  MOD_RES (36), (36): Xaa is C or S
  MOD_RES (15), (16), (17), (18), (19): Xaa is A or G
  MOD_RES (20), (21), (22), (23): Xaa is A or G or is absent

SEQ ID NO: 22421 - protein, 35 aa, Artificial Sequence; identical to SEQ ID NO: 19317
  GFR-binding peptide
  MOD_RES (2), (2): Xaa is C or S
  MOD_RES (16), (17), (18), (19), (20): Xaa is A or G
  MOD_RES (21), (22), (23), (24): Xaa is A or G or is absent

SEQ ID NO: 22422 - protein, 38 aa, Artificial Sequence; identical to SEQ ID NO: 19318
  GFR-binding peptide
  MOD_RES (3), (37): Xaa is C or S
  MOD_RES (17), (18), (19), (20), (21): Xaa is A or G
  MOD_RES (22), (23), (24), (25): Xaa is A or G or is absent

SEQ ID NO: 22423 - protein, 36 aa, Artificial Sequence; identical to SEQ ID NO: 19319
  GFR-binding peptide
  MOD_RES (36), (36): Xaa is C or S
  MOD_RES (15), (16), (17), (18), (19): Xaa is A or G
  MOD_RES (20), (21), (22), (23): Xaa is A or G or is absent

SEQ ID NO: 22424 - protein, 37 aa, Artificial Sequence; identical to SEQ ID NO: 19320
  GFR-binding peptide
  MOD_RES (4), (4): Xaa is C or S
  MOD_RES (18), (19), (20), (21), (22): Xaa is A or G
  MOD_RES (23), (24), (25), (26): Xaa is A or G or is absent

SEQ ID NO: 22425 - protein, 34 aa, Artificial Sequence; identical to SEQ ID NO: 19321
  GFR-binding peptide

SEQ ID NO: 22426 - protein, 38 aa, Artificial Sequence; identical to SEQ ID NO: 19322
  GFR-binding peptide
  MOD_RES (4), (38): Xaa is C or S

SEQ ID NO: 22427 - protein, 33 aa, Artificial Sequence; identical to SEQ ID NO: 19323
  GFR-binding peptide
  MOD_RES (1), (1): Xaa is C or S
  MOD_RES (15), (16), (17), (18), (19): Xaa is A or G
  MOD_RES (20), (21), (22), (23): Xaa is A or G or is absent

SEQ ID NO: 22428 - protein, 39 aa, Artificial Sequence; identical to SEQ ID NO: 19324
  GFR-binding peptide
  MOD_RES (5), (5): Xaa is C or S
  MOD_RES (21), (22), (23), (24), (25): Xaa is A or G
  MOD_RES (26), (27), (28), (29): Xaa is A or G or is absent

SEQ ID NO: 22429 - protein, 42 aa, Artificial Sequence; identical to SEQ ID NO: 19325
  GFR-binding peptide
  MOD_RES (3), (40), (42): Xaa is C or S

SEQ ID NO: 22430 - protein, 36 aa, Artificial Sequence; identical to SEQ ID NO: 19326
  GFR-binding peptide
  MOD_RES (3), (3): Xaa is C or S
  MOD_RES (17), (18), (19), (20), (21): Xaa is A or G
  MOD_RES (22), (23), (24), (25): Xaa is A or G or is absent

SEQ ID NO: 22431 - protein, 43 aa, Artificial Sequence; identical to SEQ ID NO: 19327
  GFR-binding peptide
  MOD_RES (3), (40), (42): Xaa is C or S
  MOD_RES (19), (20), (21), (22), (23): Xaa is A or G
  MOD_RES (24), (25), (26), (27): Xaa is A or G or is absent

SEQ ID NO: 22432 - protein, 42 aa, Artificial Sequence; identical to SEQ ID NO: 19328
  GFR-binding peptide
  MOD_RES (6), (40), (42): Xaa is C or S

SEQ ID NO: 22433 - protein, 41 aa, Artificial Sequence; identical to SEQ ID NO: 19329
  GFR-binding peptide
  MOD_RES (5), (5): Xaa is C or S

SEQ ID NO: 22434 - protein, 38 aa, Artificial Sequence; identical to SEQ ID NO: 19330
  GFR-binding peptide
  MOD_RES (36), (38): Xaa is C or S

SEQ ID NO: 22435 - protein, 36 aa, Artificial Sequence; identical to SEQ ID NO: 19331
  GFR-binding peptide
  MOD_RES (4), (4): Xaa is C or S

SEQ ID NO: 22436 - protein, 37 aa, Artificial Sequence; identical to SEQ ID NO: 19332
  GFR-binding peptide
  MOD_RES (2), (2): Xaa is C or S

SEQ ID NO: 22437 - protein, 41 aa, Artificial Sequence; identical to SEQ ID NO: 19333
  GFR-binding peptide
  MOD_RES (5), (5): Xaa is C or S
  MOD_RES (21), (22), (23), (24), (25): Xaa is A or G
  MOD_RES (26), (27), (28), (29): Xaa is A or G or is absent

SEQ ID NO: 22438 - protein, 39 aa, Artificial Sequence; identical to SEQ ID NO: 19334
  GFR-binding peptide
  MOD_RES (37), (39): Xaa is C or S
  MOD_RES (16), (17), (18), (19), (20): Xaa is A or G
  MOD_RES (21), (22), (23), (24): Xaa is A or G or is absent

SEQ ID NO: 22439 - protein, 43 aa, Artificial Sequence; identical to SEQ ID NO: 19335
  GFR-binding peptide
  MOD_RES (4), (41), (43): Xaa is C or S

SEQ ID NO: 22440 - protein, 41 aa, Artificial Sequence; identical to SEQ ID NO: 19336
  GFR-binding peptide
  MOD_RES (2), (39), (41): Xaa is C or S
  MOD_RES (18), (19), (20), (21), (22): Xaa is A or G
  MOD_RES (23), (24), (25), (26): Xaa is A or G or is absent

SEQ ID NO: 22441 - protein, 36 aa, Artificial Sequence; identical to SEQ ID NO: 19337
  GFR-binding peptide
  MOD_RES (3), (3): Xaa is C or S
  MOD_RES (17), (18), (19), (20), (21): Xaa is A or G
  MOD_RES (22), (23), (24), (25): Xaa is A or G or is absent

SEQ ID NO: 22442 - protein, 35 aa, Artificial Sequence; identical to SEQ ID NO: 19338
  GFR-binding peptide
  MOD_RES (34), (34): Xaa is C or S
  MOD_RES (14), (15), (16), (17), (18): Xaa is A or G
  MOD_RES (19), (20), (21), (22): Xaa is A or G or is absent

SEQ ID NO: 22443 - protein, 36 aa, Artificial Sequence; identical to SEQ ID NO: 19339
  GFR-binding peptide
  MOD_RES (1), (35): Xaa is C or S
  MOD_RES (15), (16), (17), (18), (19): Xaa is A or G
  MOD_RES (20), (21), (22), (23): Xaa is A or G or is absent

SEQ ID NO: 22444 - protein, 39 aa, Artificial Sequence; identical to SEQ ID NO: 19340
  GFR-binding peptide
  MOD_RES (3), (3): Xaa is C or S

SEQ ID NO: 22445 - protein, 41 aa, Artificial Sequence; identical to SEQ ID NO: 19341
  GFR-binding peptide
  MOD_RES (6), (40): Xaa is C or S

SEQ ID NO: 22446 - protein, 38 aa, Artificial Sequence; identical to SEQ ID NO: 19342
  GFR-binding peptide
  MOD_RES (2), (2): Xaa is C or S
  MOD_RES (18), (19), (20), (21), (22): Xaa is A or G
  MOD_RES (23), (24), (25), (26): Xaa is A or G or is absent

SEQ ID NO: 22447 - protein, 36 aa, Artificial Sequence; identical to SEQ ID NO: 19343
  GFR-binding peptide
  MOD_RES (4), (4): Xaa is C or S

SEQ ID NO: 22448 - protein, 36 aa, Artificial Sequence; identical to SEQ ID NO: 19344
  GFR-binding peptide
  MOD_RES (4), (4): Xaa is C or S
  MOD_RES (18), (19), (20), (21), (22): Xaa is A or G
  MOD_RES (23), (24), (25), (26): Xaa is A or G or is absent

SEQ ID NO: 22449 - protein, 35 aa, Artificial Sequence; identical to SEQ ID NO: 19345
  GFR-binding peptide
  MOD_RES (1), (35): Xaa is C or S
  MOD_RES (15), (16), (17), (18), (19): Xaa is A or G
  MOD_RES (20), (21), (22), (23): Xaa is A or G or is absent

SEQ ID NO: 22450 - protein, 40 aa, Artificial Sequence; identical to SEQ ID NO: 19346
  GFR-binding peptide
  MOD_RES (3), (40): Xaa is C or S
  MOD_RES (19), (20), (21), (22), (23): Xaa is A or G
  MOD_RES (24), (25), (26), (27): Xaa is A or G or is absent

SEQ ID NO: 22451 - protein, 43 aa, Artificial Sequence; identical to SEQ ID NO: 19347
  GFR-binding peptide
  MOD_RES (4), (41), (43): Xaa is C or S
  MOD_RES (20), (21), (22), (23), (24): Xaa is A or G
  MOD_RES (25), (26), (27), (28): Xaa is A or G or is absent

SEQ ID NO: 22452 - protein, 38 aa, Artificial Sequence; identical to SEQ ID NO: 19348
  GFR-binding peptide
  MOD_RES (2), (36), (38): Xaa is C or S

SEQ ID NO: 22453 - protein, 34 aa, Artificial Sequence; identical to SEQ ID NO: 19349
  GFR-binding peptide
  MOD_RES (14), (15), (16), (17), (18): Xaa is A or G
  MOD_RES (19), (20), (21), (22): Xaa is A or G or is absent

SEQ ID NO: 22454 - protein, 34 aa, Artificial Sequence; identical to SEQ ID NO: 19350
  GFR-binding peptide
  MOD_RES (34), (34): Xaa is C or S

SEQ ID NO: 22455 - protein, 37 aa, Artificial Sequence; identical to SEQ ID NO: 19351
  GFR-binding peptide
  MOD_RES (2), (2): Xaa is C or S

SEQ ID NO: 22456 - protein, 36 aa, Artificial Sequence; identical to SEQ ID NO: 19352
  GFR-binding peptide

SEQ ID NO: 22457 - protein, 35 aa, Artificial Sequence; identical to SEQ ID NO: 19353
  GFR-binding peptide
  MOD_RES (35), (35): Xaa is C or S
  MOD_RES (14), (15), (16), (17), (18): Xaa is A or G
  MOD_RES (19), (20), (21), (22): Xaa is A or G or is absent

SEQ ID NO: 22458 - protein, 44 aa, Artificial Sequence; identical to SEQ ID NO: 19354
  GFR-binding peptide
  MOD_RES (4), (41), (43): Xaa is C or S

SEQ ID NO: 22459 - protein, 36 aa, Artificial Sequence; identical to SEQ ID NO: 19355
  GFR-binding peptide
  MOD_RES (4), (4): Xaa is C or S

SEQ ID NO: 22460 - protein, 40 aa, Artificial Sequence; identical to SEQ ID NO: 19356
  GFR-binding peptide
  MOD_RES (3), (37), (39): Xaa is C or S

SEQ ID NO: 22461 - protein, 43 aa, Artificial Sequence; identical to SEQ ID NO: 19357
  GFR-binding peptide
  MOD_RES (7), (41), (43): Xaa is C or S
  MOD_RES (21), (22), (23), (24), (25): Xaa is A or G
  MOD_RES (26), (27), (28), (29): Xaa is A or G or is absent

SEQ ID NO: 22462 - protein, 37 aa, Artificial Sequence; identical to SEQ ID NO: 19358
  GFR-binding peptide
  MOD_RES (2), (2): Xaa is C or S

SEQ ID NO: 22463 - protein, 37 aa, Artificial Sequence; identical to SEQ ID NO: 19359
  GFR-binding peptide
  MOD_RES (36), (36): Xaa is C or S

SEQ ID NO: 22464 - protein, 34 aa, Artificial Sequence; identical to SEQ ID NO: 19360
  GFR-binding peptide
  MOD_RES (15), (16), (17), (18), (19): Xaa is A or G
  MOD_RES (20), (21), (22), (23): Xaa is A or G or is absent

SEQ ID NO: 22465 - protein, 44 aa, Artificial Sequence; identical to SEQ ID NO: 19361
  GFR-binding peptide
  MOD_RES (7), (41), (43): Xaa is C or S

SEQ ID NO: 22466 - protein, 39 aa, Artificial Sequence; identical to SEQ ID NO: 19362
  GFR-binding peptide
  MOD_RES (3), (37), (39): Xaa is C or S
  MOD_RES (17), (18), (19), (20), (21): Xaa is A or G
  MOD_RES (22), (23), (24), (25): Xaa is A or G or is absent

SEQ ID NO: 22467 - protein, 36 aa, Artificial Sequence; identical to SEQ ID NO: 19363
  GFR-binding peptide
  MOD_RES (1), (1): Xaa is C or S

SEQ ID NO: 22468 - protein, 35 aa, Artificial Sequence; identical to SEQ ID NO: 19364
  GFR-binding peptide
  MOD_RES (1), (1): Xaa is C or S

SEQ ID NO: 22469 - protein, 35 aa, Artificial Sequence; identical to SEQ ID NO: 19365
  GFR-binding peptide
  MOD_RES (34), (34): Xaa is C or S
  MOD_RES (14), (15), (16), (17), (18): Xaa is A or G
  MOD_RES (19), (20), (21), (22): Xaa is A or G or is absent

SEQ ID NO: 22470 - protein, 36 aa, Artificial Sequence; identical to SEQ ID NO: 19366
  GFR-binding peptide
  MOD_RES (4), (4): Xaa is C or S
  MOD_RES (18), (19), (20), (21), (22): Xaa is A or G
  MOD_RES (23), (24), (25), (26): Xaa is A or G or is absent

SEQ ID NO: 22471 - protein, 40 aa, Artificial Sequence; identical to SEQ ID NO: 19367
  GFR-binding peptide
  MOD_RES (7), (7): Xaa is C or S
  MOD_RES (21), (22), (23), (24), (25): Xaa is A or G
  MOD_RES (26), (27), (28), (29): Xaa is A or G or is absent

SEQ ID NO: 22472 - protein, 42 aa, Artificial Sequence; identical to SEQ ID NO: 19368
  GFR-binding peptide
  MOD_RES (7), (41): Xaa is C or S
  MOD_RES (21), (22), (23), (24), (25): Xaa is A or G
  MOD_RES (26), (27), (28), (29): Xaa is A or G or is absent

SEQ ID NO: 22473 - protein, 37 aa, Artificial Sequence; identical to SEQ ID NO: 19369
  GFR-binding peptide
  MOD_RES (37), (37): Xaa is C or S

SEQ ID NO: 22474 - protein, 43 aa, Artificial Sequence; identical to SEQ ID NO: 19370
  GFR-binding peptide
  MOD_RES (3), (40), (42): Xaa is C or S

SEQ ID NO: 22475 - protein, 34 aa, Artificial Sequence; identical to SEQ ID NO: 19371
  GFR-binding peptide

SEQ ID NO: 22476 - protein, 37 aa, Artificial Sequence; identical to SEQ ID NO: 19372
  GFR-binding peptide
  MOD_RES (4), (4): Xaa is C or S

SEQ ID NO: 22477 - protein, 37 aa, Artificial Sequence; identical to SEQ ID NO: 19373
  GFR-binding peptide
  MOD_RES (3), (37): Xaa is C or S

SEQ ID NO: 22478 - protein, 37 aa, Artificial Sequence; identical to SEQ ID NO: 19374
  GFR-binding peptide
  MOD_RES (34), (36): Xaa is C or S

SEQ ID NO: 22479 - protein, 40 aa, Artificial Sequence; identical to SEQ ID NO: 19375
  GFR-binding peptide
  MOD_RES (3), (40): Xaa is C or S
  MOD_RES (19), (20), (21), (22), (23): Xaa is A or G
  MOD_RES (24), (25), (26), (27): Xaa is A or G or is absent

SEQ ID NO: 22480 - protein, 42 aa, Artificial Sequence; identical to SEQ ID NO: 19376
  GFR-binding peptide
  MOD_RES (6), (40), (42): Xaa is C or S

SEQ ID NO: 22481 - protein, 39 aa, Artificial Sequence; identical to SEQ ID NO: 19377
  GFR-binding peptide
  MOD_RES (37), (39): Xaa is C or S

SEQ ID NO: 22482 - protein, 35 aa, Artificial Sequence; identical to SEQ ID NO: 19378
  GFR-binding peptide
  MOD_RES (1), (1): Xaa is C or S

SEQ ID NO: 22483 - protein, 36 aa, Artificial Sequence; identical to SEQ ID NO: 19379
  GFR-binding peptide
  MOD_RES (4), (4): Xaa is C or S

SEQ ID NO: 22484 - protein, 34 aa, Artificial Sequence; identical to SEQ ID NO: 19380
  GFR-binding peptide
  MOD_RES (16), (17), (18), (19), (20): Xaa is A or G
  MOD_RES (21), (22), (23), (24): Xaa is A or G or is absent

SEQ ID NO: 22485 - protein, 38 aa, Artificial Sequence; identical to SEQ ID NO: 19381
  GFR-binding peptide
  MOD_RES (1), (35), (37): Xaa is C or S

SEQ ID NO: 22486 - protein, 38 aa, Artificial Sequence; identical to SEQ ID NO: 19382
  GFR-binding peptide
  MOD_RES (3), (37): Xaa is C or S
  MOD_RES (17), (18), (19), (20), (21): Xaa is A or G
  MOD_RES (22), (23), (24), (25): Xaa is A or G or is absent

SEQ ID NO: 22487 - protein, 43 aa, Artificial Sequence; identical to SEQ ID NO: 19383
  GFR-binding peptide
  MOD_RES (3), (40), (42): Xaa is C or S

SEQ ID NO: 22488 - protein, 42 aa, Artificial Sequence; identical to SEQ ID NO: 19384
  GFR-binding peptide
  MOD_RES (2), (39), (41): Xaa is C or S
  MOD_RES (18), (19), (20), (21), (22): Xaa is A or G
  MOD_RES (23), (24), (25), (26): Xaa is A or G or is absent

SEQ ID NO: 22489 - protein, 38 aa, Artificial Sequence; identical to SEQ ID NO: 19385
  GFR-binding peptide
  MOD_RES (3), (3): Xaa is C or S

SEQ ID NO: 22490 - protein, 40 aa, Artificial Sequence; identical to SEQ ID NO: 19386
  GFR-binding peptide
  MOD_RES (3), (37), (39): Xaa is C or S
  MOD_RES (17), (18), (19), (20), (21): Xaa is A or G
  MOD_RES (22), (23), (24), (25): Xaa is A or G or is absent

SEQ ID NO: 22491 - protein, 35 aa, Artificial Sequence; identical to SEQ ID NO: 19387
  GFR-binding peptide

SEQ ID NO: 22492 - protein, 42 aa, Artificial Sequence; identical to SEQ ID NO: 19388
  GFR-binding peptide
  MOD_RES (4), (41): Xaa is C or S

SEQ ID NO: 22493 - protein, 42 aa, Artificial Sequence; identical to SEQ ID NO: 19389
  GFR-binding peptide
  MOD_RES (5), (42): Xaa is C or S
  MOD_RES (21), (22), (23), (24), (25): Xaa is A or G
  MOD_RES (26), (27), (28), (29): Xaa is A or G or is absent

SEQ ID NO: 22494 - protein, 39 aa, Artificial Sequence; identical to SEQ ID NO: 19390
  GFR-binding peptide
  MOD_RES (1), (38): Xaa is C or S

SEQ ID NO: 22495 - protein, 38 aa, Artificial Sequence; identical to SEQ ID NO: 19391
  GFR-binding peptide
  MOD_RES (1), (38): Xaa is C or S
  MOD_RES (17), (18), (19), (20), (21): Xaa is A or G
  MOD_RES (22), (23), (24), (25): Xaa is A or G or is absent

SEQ ID NO: 22496 - protein, 43 aa, Artificial Sequence; identical to SEQ ID NO: 19392
  GFR-binding peptide
  MOD_RES (7), (41), (43): Xaa is C or S
  MOD_RES (21), (22), (23), (24), (25): Xaa is A or G
  MOD_RES (26), (27), (28), (29): Xaa is A or G or is absent

SEQ ID NO: 22497 - protein, 41 aa, Artificial Sequence; identical to SEQ ID NO: 19393
  GFR-binding peptide
  MOD_RES (1), (38), (40): Xaa is C or S

SEQ ID NO: 22498 - protein, 44 aa, Artificial Sequence; identical to SEQ ID NO: 19394
  GFR-binding peptide
  MOD_RES (4), (41), (43): Xaa is C or S
  MOD_RES (20), (21), (22), (23), (24): Xaa is A or G
  MOD_RES (25), (26), (27), (28): Xaa is A or G or is absent

SEQ ID NO: 22499 - protein, 40 aa, Artificial Sequence; identical to SEQ ID NO: 19395
  GFR-binding peptide
  MOD_RES (5), (39): Xaa is C or S
  MOD_RES (19), (20), (21), (22), (23): Xaa is A or G
  MOD_RES (24), (25), (26), (27): Xaa is A or G or is absent

SEQ ID NO: 22500 - protein, 39 aa, Artificial Sequence; identical to SEQ ID NO: 19396
  GFR-binding peptide
  MOD_RES (1), (38): Xaa is C or S

SEQ ID NO: 22501 - protein, 38 aa, Artificial Sequence; identical to SEQ ID NO: 19397
  GFR-binding peptide
  MOD_RES (1), (38): Xaa is C or S
  MOD_RES (17), (18), (19), (20), (21): Xaa is A or G
  MOD_RES (22), (23), (24), (25): Xaa is A or G or is absent

SEQ ID NO: 22502 - protein, 42 aa, Artificial Sequence; identical to SEQ ID NO: 19398
  GFR-binding peptide
  MOD_RES (4), (41): Xaa is C or S

SEQ ID NO: 22503 - protein, 41 aa, Artificial Sequence; identical to SEQ ID NO: 19399
  GFR-binding peptide
  MOD_RES (4), (38), (40): Xaa is C or S
  MOD_RES (18), (19), (20), (21), (22): Xaa is A or G
  MOD_RES (23), (24), (25), (26): Xaa is A or G or is absent

SEQ ID NO: 22504 - protein, 38 aa, Artificial Sequence; identical to SEQ ID NO: 19400
  GFR-binding peptide
  MOD_RES (1), (35), (37): Xaa is C or S
  MOD_RES (15), (16), (17), (18), (19): Xaa is A or G
  MOD_RES (20), (21), (22), (23): Xaa is A or G or is absent

SEQ ID NO: 22505 - protein, 37 aa, Artificial Sequence; identical to SEQ ID NO: 19401
  GFR-binding peptide
  MOD_RES (37), (37): Xaa is C or S

SEQ ID NO: 22506 - protein, 39 aa, Artificial Sequence; identical to SEQ ID NO: 19402
  GFR-binding peptide
  MOD_RES (6), (6): Xaa is C or S
  MOD_RES (20), (21), (22), (23), (24): Xaa is A or G
  MOD_RES (25), (26), (27), (28): Xaa is A or G or is absent

SEQ ID NO: 22507 - protein, 39 aa, Artificial Sequence; identical to SEQ ID NO: 19403
  GFR-binding peptide
  MOD_RES (2), (36), (38): Xaa is C or S

SEQ ID NO: 22508 - protein, 41 aa, Artificial Sequence; identical to SEQ ID NO: 19404
  GFR-binding peptide
  MOD_RES (2), (39), (41): Xaa is C or S

SEQ ID NO: 22509 - protein, 34 aa, Artificial Sequence; identical to SEQ ID NO: 19405
  GFR-binding peptide
  MOD_RES (16), (17), (18), (19), (20): Xaa is A or G
  MOD_RES (21), (22), (23), (24): Xaa is A or G or is absent

SEQ ID NO: 22510 - protein, 37 aa, Artificial Sequence; identical to SEQ ID NO: 19406
  GFR-binding peptide
  MOD_RES (2), (36): Xaa is C or S
  MOD_RES (16), (17), (18), (19), (20): Xaa is A or G
  MOD_RES (21), (22), (23), (24): Xaa is A or G or is absent

SEQ ID NO: 22511 - protein, 44 aa, Artificial Sequence; identical to SEQ ID NO: 19407
  GFR-binding peptide
  MOD_RES (7), (41), (43): Xaa is C or S
  MOD_RES (21), (22), (23), (24), (25): Xaa is A or G
  MOD_RES (26), (27), (28), (29): Xaa is A or G or is absent

SEQ ID NO: 22512 - protein, 40 aa, Artificial Sequence; identical to SEQ ID NO: 19408
  GFR-binding peptide
  MOD_RES (1), (38), (40): Xaa is C or S
  MOD_RES (17), (18), (19), (20), (21): Xaa is A or G
  MOD_RES (22), (23), (24), (25): Xaa is A or G or is absent

SEQ ID NO: 22513 - protein, 39 aa, Artificial Sequence; identical to SEQ ID NO: 19409
  GFR-binding peptide
  MOD_RES (6), (6): Xaa is C or S
  MOD_RES (20), (21), (22), (23), (24): Xaa is A or G
  MOD_RES (25), (26), (27), (28): Xaa is A or G or is absent

SEQ ID NO: 22514 - protein, 37 aa, Artificial Sequence; identical to SEQ ID NO: 19410
  GFR-binding peptide
  MOD_RES (34), (36): Xaa is C or S
  MOD_RES (14), (15), (16), (17), (18): Xaa is A or G
  MOD_RES (19), (20), (21), (22): Xaa is A or G or is absent

SEQ ID NO: 22515 - protein, 34 aa, Artificial Sequence; identical to SEQ ID NO: 19411
  GFR-binding peptide
  MOD_RES (14), (15), (16), (17), (18): Xaa is A or G
  MOD_RES (19), (20), (21), (22): Xaa is A or G or is absent

SEQ ID NO: 22516 - protein, 36 aa, Artificial Sequence; identical to SEQ ID NO: 19412
  GFR-binding peptide
  MOD_RES (16), (17), (18), (19), (20): Xaa is A or G
  MOD_RES (21), (22), (23), (24): Xaa is A or G or is absent

SEQ ID NO: 22517 - protein, 34 aa, Artificial Sequence; identical to SEQ ID NO: 19413
  GFR-binding peptide
  MOD_RES (1), (1): Xaa is C or S
  MOD_RES (15), (16), (17), (18), (19): Xaa is A or G
  MOD_RES (20), (21), (22), (23): Xaa is A or G or is absent

SEQ ID NO: 22518 - protein, 40 aa, Artificial Sequence; identical to SEQ ID NO: 19414
  GFR-binding peptide
  MOD_RES (1), (38), (40): Xaa is C or S
  MOD_RES (17), (18), (19), (20), (21): Xaa is A or G
  MOD_RES (22), (23), (24), (25): Xaa is A or G or is absent

SEQ ID NO: 22519 - protein, 35 aa, Artificial Sequence; identical to SEQ ID NO: 19415
  GFR-binding peptide

SEQ ID NO: 22520 - protein, 36 aa, Artificial Sequence; identical to SEQ ID NO: 19416
  GFR-binding peptide
  MOD_RES (16), (17), (18), (19), (20): Xaa is A or G
  MOD_RES (21), (22), (23), (24): Xaa is A or G or is absent

SEQ ID NO: 22521 - protein, 38 aa, Artificial Sequence; identical to SEQ ID NO: 19417
  GFR-binding peptide
  MOD_RES (36), (38): Xaa is C or S
  MOD_RES (15), (16), (17), (18), (19): Xaa is A or G
  MOD_RES (20), (21), (22), (23): Xaa is A or G or is absent

SEQ ID NO: 22522 - protein, 41 aa, Artificial Sequence; identical to SEQ ID NO: 19418
  GFR-binding peptide
  MOD_RES (2), (39), (41): Xaa is C or S
  MOD_RES (18), (19), (20), (21), (22): Xaa is A or G
  MOD_RES (23), (24), (25), (26): Xaa is A or G or is absent

SEQ ID NO: 22523 - protein, 39 aa, Artificial Sequence; identical to SEQ ID NO: 19419
  GFR-binding peptide
  MOD_RES (4), (4): Xaa is C or S
  MOD_RES (20), (21), (22), (23), (24): Xaa is A or G
  MOD_RES (25), (26), (27), (28): Xaa is A or G or is absent

SEQ ID NO: 22524 - protein, 41 aa, Artificial Sequence; identical to SEQ ID NO: 19420
  GFR-binding peptide
  MOD_RES (5), (39), (41): Xaa is C or S

SEQ ID NO: 22525 - protein, 36 aa, Artificial Sequence; identical to SEQ ID NO: 19421
  GFR-binding peptide
  MOD_RES (1), (35): Xaa is C or S
  MOD_RES (15), (16), (17), (18), (19): Xaa is A or G
  MOD_RES (20), (21), (22), (23): Xaa is A or G or is absent

SEQ ID NO: 22526 - protein, 32 aa, Artificial Sequence; identical to SEQ ID NO: 19422
  GFR-binding peptide

SEQ ID NO: 22527 - protein, 36 aa, Artificial Sequence; identical to SEQ ID NO: 19423
  GFR-binding peptide
  MOD_RES (3), (3): Xaa is C or S

SEQ ID NO: 22528 - protein, 35 aa, Artificial Sequence; identical to SEQ ID NO: 19424
  GFR-binding peptide
  MOD_RES (2), (2): Xaa is C or S

SEQ ID NO: 22529 - protein, 33 aa, Artificial Sequence; identical to SEQ ID NO: 19425
  GFR-binding peptide
  MOD_RES (14), (15), (16), (17), (18): Xaa is A or G
  MOD_RES (19), (20), (21), (22): Xaa is A or G or is absent

SEQ ID NO: 22530 - protein, 35 aa, Artificial Sequence; identical to SEQ ID NO: 19426
  GFR-binding peptide
  MOD_RES (3), (3): Xaa is C or S
  MOD_RES (17), (18), (19), (20), (21): Xaa is A or G
  MOD_RES (22), (23), (24), (25): Xaa is A or G or is absent

SEQ ID NO: 22531 - protein, 40 aa, Artificial Sequence; identical to SEQ ID NO: 19427
  GFR-binding peptide
  MOD_RES (1), (38), (40): Xaa is C or S
  MOD_RES (17), (18), (19), (20), (21): Xaa is A or G
  MOD_RES (22), (23), (24), (25): Xaa is A or G or is absent

SEQ ID NO: 22532 - protein, 37 aa, Artificial Sequence; identical to SEQ ID NO: 19428
  GFR-binding peptide
  MOD_RES (5), (5): Xaa is C or S
  MOD_RES (19), (20), (21), (22), (23): Xaa is A or G
  MOD_RES (24), (25), (26), (27): Xaa is A or G or is absent

SEQ ID NO: 22533 - protein, 43 aa, Artificial Sequence; identical to SEQ ID NO: 19429
  GFR-binding peptide
  MOD_RES (6), (40), (42): Xaa is C or S

SEQ ID NO: 22534 - protein, 38 aa, Artificial Sequence; identical to SEQ ID NO: 19430
  GFR-binding peptide
  MOD_RES (6), (6): Xaa is C or S
  MOD_RES (20), (21), (22), (23), (24): Xaa is A or G
  MOD_RES (25), (26), (27), (28): Xaa is A or G or is absent

SEQ ID NO: 22535 - protein, 33 aa, Artificial Sequence; identical to SEQ ID NO: 19431
  GFR-binding peptide

SEQ ID NO: 22536 - protein, 42 aa, Artificial Sequence; identical to SEQ ID NO: 19432
  GFR-binding peptide
  MOD_RES (5), (42): Xaa is C or S

SEQ ID NO: 22537 - protein, 40 aa, Artificial Sequence; identical to SEQ ID NO: 19433
  GFR-binding peptide
  MOD_RES (5), (5): Xaa is C or S

SEQ ID NO: 22538 - protein, 38 aa, Artificial Sequence; identical to SEQ ID NO: 19434
  GFR-binding peptide
  MOD_RES (1), (35), (37): Xaa is C or S
  MOD_RES (15), (16), (17), (18), (19): Xaa is A or G
  MOD_RES (20), (21), (22), (23): Xaa is A or G or is absent

SEQ ID NO: 22539 - protein, 35 aa, Artificial Sequence; identical to SEQ ID NO: 19435
  GFR-binding peptide

SEQ ID NO: 22540 - protein, 36 aa, Artificial Sequence; identical to SEQ ID NO: 19436
  GFR-binding peptide
  MOD_RES (2), (2): Xaa is C or S

SEQ ID NO: 22541 - protein, 38 aa, Artificial Sequence; identical to SEQ ID NO: 19437
  GFR-binding peptide
  MOD_RES (1), (35), (37): Xaa is C or S
  MOD_RES (15), (16), (17), (18), (19): Xaa is A or G
  MOD_RES (20), (21), (22), (23): Xaa is A or G or is absent

SEQ ID NO: 22542 - protein, 41 aa, Artificial Sequence; identical to SEQ ID NO: 19438
  GFR-binding peptide
  MOD_RES (4), (41): Xaa is C or S

SEQ ID NO: 22543 - protein, 33 aa, Artificial Sequence; identical to SEQ ID NO: 19439
  GFR-binding peptide
  MOD_RES (1), (1): Xaa is C or S
  MOD_RES (15), (16), (17), (18), (19): Xaa is A or G
  MOD_RES (20), (21), (22), (23): Xaa is A or G or is absent

SEQ ID NO: 22544 - protein, 35 aa, Artificial Sequence; identical to SEQ ID NO: 19440
  GFR-binding peptide

SEQ ID NO: 22545 - protein, 38 aa, Artificial Sequence; identical to SEQ ID NO: 19441
  GFR-binding peptide
  MOD_RES (4), (38): Xaa is C or S
  MOD_RES (18), (19), (20), (21), (22): Xaa is A or G
  MOD_RES (23), (24), (25), (26): Xaa is A or G or is absent

SEQ ID NO: 22546 - protein, 39 aa, Artificial Sequence; identical to SEQ ID NO: 19442
  GFR-binding peptide
  MOD_RES (3), (37), (39): Xaa is C or S

SEQ ID NO: 22547 - protein, 33 aa, Artificial Sequence; identical to SEQ ID NO: 19443
  GFR-binding peptide

SEQ ID NO: 22548 - protein, 37 aa, Artificial Sequence; identical to SEQ ID NO: 19444
  GFR-binding peptide
  MOD_RES (35), (37): Xaa is C or S

SEQ ID NO: 22549 - protein, 34 aa, Artificial Sequence; identical to SEQ ID NO: 19445
  GFR-binding peptide
  MOD_RES (2), (2): Xaa is C or S
  MOD_RES (16), (17), (18), (19), (20): Xaa is A or G
  MOD_RES (21), (22), (23), (24): Xaa is A or G or is absent

SEQ ID NO: 22550 - protein, 39 aa, Artificial Sequence; identical to SEQ ID NO: 19446
  GFR-binding peptide
  MOD_RES (1), (38): Xaa is C or S
  MOD_RES (17), (18), (19), (20), (21): Xaa is A or G
  MOD_RES (22), (23), (24), (25): Xaa is A or G or is absent

SEQ ID NO: 22551 - protein, 37 aa, Artificial Sequence; identical to SEQ ID NO: 19447
  GFR-binding peptide
  MOD_RES (36), (36): Xaa is C or S
  MOD_RES (15), (16), (17), (18), (19): Xaa is A or G
  MOD_RES (20), (21), (22), (23): Xaa is A or G or is absent

SEQ ID NO: 22552 - protein, 39 aa, Artificial Sequence; identical to SEQ ID NO: 19448
  GFR-binding peptide
  MOD_RES (2), (39): Xaa is C or S

SEQ ID NO: 22553 - protein, 38 aa, Artificial Sequence; identical to SEQ ID NO: 19449
  GFR-binding peptide
  MOD_RES (3), (37): Xaa is C or S

SEQ ID NO: 22554 - protein, 37 aa, Artificial Sequence; identical to SEQ ID NO: 19450
  GFR-binding peptide
  MOD_RES (35), (37): Xaa is C or S

SEQ ID NO: 22555 - protein, 43 aa, Artificial Sequence; identical to SEQ ID NO: 19451
  GFR-binding peptide
  MOD_RES (6), (40), (42): Xaa is C or S

SEQ ID NO: 22556 - protein, 37 aa, Artificial Sequence; identical to SEQ ID NO: 19452
  GFR-binding peptide
  MOD_RES (1), (1): Xaa is C or S

SEQ ID NO: 22557 - protein, 33 aa, Artificial Sequence; identical to SEQ ID NO: 19453
  GFR-binding peptide
  MOD_RES (14), (15), (16), (17), (18): Xaa is A or G
  MOD_RES (19), (20), (21), (22): Xaa is A or G or is absent

SEQ ID NO: 22558 - protein, 37 aa, Artificial Sequence; identical to SEQ ID NO: 19454
  GFR-binding peptide
  MOD_RES (1), (35), (37): Xaa is C or S
  MOD_RES (15), (16), (17), (18), (19): Xaa is A or G
  MOD_RES (20), (21), (22), (23): Xaa is A or G or is absent

SEQ ID NO: 22559 - protein, 42 aa, Artificial Sequence; identical to SEQ ID NO: 19455
  GFR-binding peptide
  MOD_RES (5), (42): Xaa is C or S
  MOD_RES (21), (22), (23), (24), (25): Xaa is A or G
  MOD_RES (26), (27), (28), (29): Xaa is A or G or is absent

SEQ ID NO: 22560 - protein, 39 aa, Artificial Sequence; identical to SEQ ID NO: 19456
  GFR-binding peptide
  MOD_RES (7), (7): Xaa is C or S
  MOD_RES (21), (22), (23), (24), (25): Xaa is A or G
  MOD_RES (26), (27), (28), (29): Xaa is A or G or is absent

SEQ ID NO: 22561 - protein, 38 aa, Artificial Sequence; identical to SEQ ID NO: 19457
  GFR-binding peptide
  MOD_RES (1), (38): Xaa is C or S

SEQ ID NO: 22562 - protein, 37 aa, Artificial Sequence; identical to SEQ ID NO: 19458
  GFR-binding peptide
  MOD_RES (34), (36): Xaa is C or S
  MOD_RES (14), (15), (16), (17), (18): Xaa is A or G
  MOD_RES (19), (20), (21), (22): Xaa is A or G or is absent

SEQ ID NO: 22563 - protein, 32 aa, Artificial Sequence; identical to SEQ ID NO: 19459
  GFR-binding peptide
  MOD_RES (14), (15), (16), (17), (18): Xaa is A or G
  MOD_RES (19), (20), (21), (22): Xaa is A or G or is absent

SEQ ID NO: 22564 - protein, 43 aa, Artificial Sequence; identical to SEQ ID NO: 19460
  GFR-binding peptide
  MOD_RES (5), (42): Xaa is C or S

SEQ ID NO: 22565 - protein, 38 aa, Artificial Sequence; identical to SEQ ID NO: 19461
  GFR-binding peptide
  MOD_RES (3), (3): Xaa is C or S

SEQ ID NO: 22566 - protein, 42 aa, Artificial Sequence; identical to SEQ ID NO: 19462
  GFR-binding peptide
  MOD_RES (5), (42): Xaa is C or S
  MOD_RES (21), (22), (23), (24), (25): Xaa is A or G
  MOD_RES (26), (27), (28), (29): Xaa is A or G or is absent

SEQ ID NO: 22567 - protein, 34 aa, Artificial Sequence; identical to SEQ ID NO: 19463
  GFR-binding peptide

SEQ ID NO: 22568 - protein, 38 aa, Artificial Sequence; identical to SEQ ID NO: 19464
  GFR-binding peptide
  MOD_RES (2), (2): Xaa is C or S
  MOD_RES (18), (19), (20), (21), (22): Xaa is A or G
  MOD_RES (23), (24), (25), (26): Xaa is A or G or is absent

SEQ ID NO: 22569 - protein, 35 aa, Artificial Sequence; identical to SEQ ID NO: 19465
  GFR-binding peptide
  MOD_RES (1), (35): Xaa is C or S
  MOD_RES (15), (16), (17), (18), (19): Xaa is A or G
  MOD_RES (20), (21), (22), (23): Xaa is A or G or is absent

SEQ ID NO: 22570 - protein, 44 aa, Artificial Sequence; identical to SEQ ID NO: 19466
  GFR-binding peptide
  MOD_RES (4), (41), (43): Xaa is C or S
  MOD_RES (20), (21), (22), (23), (24): Xaa is A or G
  MOD_RES (25), (26), (27), (28): Xaa is A or G or is absent

SEQ ID NO: 22571 - protein, 39 aa, Artificial Sequence; identical to SEQ ID NO: 19467
  GFR-binding peptide
  MOD_RES (5), (5): Xaa is C or S
  MOD_RES (21), (22), (23), (24), (25): Xaa is A or G
  MOD_RES (26), (27), (28), (29): Xaa is A or G or is absent

SEQ ID NO: 22572 - protein, 40 aa, Artificial Sequence; identical to SEQ ID NO: 19468
  GFR-binding peptide
  MOD_RES (7), (7): Xaa is C or S
  MOD_RES (21), (22), (23), (24), (25): Xaa is A or G
  MOD_RES (26), (27), (28), (29): Xaa is A or G or is absent

SEQ ID NO: 22573 - protein, 34 aa, Artificial Sequence; identical to SEQ ID NO: 19469
  GFR-binding peptide
  MOD_RES (15), (16), (17), (18), (19): Xaa is A or G
  MOD_RES (20), (21), (22), (23): Xaa is A or G or is absent

SEQ ID NO: 22574 - protein, 39 aa, Artificial Sequence; identical to SEQ ID NO: 19470
  GFR-binding peptide
  MOD_RES (7), (7): Xaa is C or S

SEQ ID NO: 22575 - protein, 42 aa, Artificial Sequence; identical to SEQ ID NO: 19471
  GFR-binding peptide
  MOD_RES (4), (41): Xaa is C or S
  MOD_RES (20), (21), (22), (23), (24): Xaa is A or G
  MOD_RES (25), (26), (27), (28): Xaa is A or G or is absent

SEQ ID NO: 22576 - protein, 32 aa, Artificial Sequence; identical to SEQ ID NO: 19472
  GFR-binding peptide
  MOD_RES (14), (15), (16), (17), (18): Xaa is A or G
  MOD_RES (19), (20), (21), (22): Xaa is A or G or is absent

SEQ ID NO: 22577 - protein, 40 aa, Artificial Sequence; identical to SEQ ID NO: 19473
  GFR-binding peptide
  MOD_RES (5), (39): Xaa is C or S

SEQ ID NO: 22578 - protein, 39 aa, Artificial Sequence; identical to SEQ ID NO: 19474
  GFR-binding peptide
  MOD_RES (3), (37), (39): Xaa is C or S

SEQ ID NO: 22579 - protein, 37 aa, Artificial Sequence; identical to SEQ ID NO: 19475
  GFR-binding peptide
  MOD_RES (36), (36): Xaa is C or S
  MOD_RES (15), (16), (17), (18), (19): Xaa is A or G
  MOD_RES (20), (21), (22), (23): Xaa is A or G or is absent

SEQ ID NO: 22580 - protein, 33 aa, Artificial Sequence; identical to SEQ ID NO: 19476
  GFR-binding peptide
  MOD_RES (14), (15), (16), (17), (18): Xaa is A or G
  MOD_RES (19), (20), (21), (22): Xaa is A or G or is absent

SEQ ID NO: 22581 - protein, 37 aa, Artificial Sequence; identical to SEQ ID NO: 19477
  GFR-binding peptide
  MOD_RES (5), (5): Xaa is C or S
  MOD_RES (19), (20), (21), (22), (23): Xaa is A or G
  MOD_RES (24), (25), (26), (27): Xaa is A or G or is absent

SEQ ID NO: 22582 - protein, 41 aa, Artificial Sequence; identical to SEQ ID NO: 19478
  GFR-binding peptide
  MOD_RES (1), (38), (40): Xaa is C or S
  MOD_RES (17), (18), (19), (20), (21): Xaa is A or G
  MOD_RES (22), (23), (24), (25): Xaa is A or G or is absent

SEQ ID NO: 22583 - protein, 38 aa, Artificial Sequence; identical to SEQ ID NO: 19479
  GFR-binding peptide
  MOD_RES (37), (37): Xaa is C or S
  MOD_RES (16), (17), (18), (19), (20): Xaa is A or G
  MOD_RES (21), (22), (23), (24): Xaa is A or G or is absent

SEQ ID NO: 22584 - protein, 38 aa, Artificial Sequence; identical to SEQ ID NO: 19480
  GFR-binding peptide
  MOD_RES (36), (38): Xaa is C or S
  MOD_RES (15), (16), (17), (18), (19): Xaa is A or G
  MOD_RES (20), (21), (22), (23): Xaa is A or G or is absent

SEQ ID NO: 22585 - protein, 41 aa, Artificial Sequence; identical to SEQ ID NO: 19481
  GFR-binding peptide
  MOD_RES (4), (41): Xaa is C or S
  MOD_RES (20), (21), (22), (23), (24): Xaa is A or G
  MOD_RES (25), (26), (27), (28): Xaa is A or G or is absent

SEQ ID NO: 22586 - protein, 37 aa, Artificial Sequence; identical to SEQ ID NO: 19482
  GFR-binding peptide
  MOD_RES (4), (4): Xaa is C or S
  MOD_RES (18), (19), (20), (21), (22): Xaa is A or G
  MOD_RES (23), (24), (25), (26): Xaa is A or G or is absent

SEQ ID NO: 22587 - protein, 40 aa, Artificial Sequence; identical to SEQ ID NO: 19483
  GFR-binding peptide
  MOD_RES (5), (39): Xaa is C or S

SEQ ID NO: 22588 - protein, 40 aa, Artificial Sequence; identical to SEQ ID NO: 19484
  GFR-binding peptide
  MOD_RES (4), (4): Xaa is C or S
  MOD_RES (20), (21), (22), (23), (24): Xaa is A or G
  MOD_RES (25), (26), (27), (28): Xaa is A or G or is absent

SEQ ID NO: 22589 - protein, 39 aa, Artificial Sequence; identical to SEQ ID NO: 19485
  GFR-binding peptide
  MOD_RES (3), (37), (39): Xaa is C or S

SEQ ID NO: 22590 - protein, 38 aa, Artificial Sequence; identical to SEQ ID NO: 19486
  GFR-binding peptide
  MOD_RES (6), (6): Xaa is C or S

SEQ ID NO: 22591 - protein, 39 aa, Artificial Sequence; identical to SEQ ID NO: 19487
  GFR-binding peptide
  MOD_RES (3), (3): Xaa is C or S
  MOD_RES (19), (20), (21), (22), (23): Xaa is A or G
  MOD_RES (24), (25), (26), (27): Xaa is A or G or is absent

SEQ ID NO: 22592 - protein, 43 aa, Artificial Sequence; identical to SEQ ID NO: 19488
  GFR-binding peptide
  MOD_RES (6), (40), (42): Xaa is C or S
  MOD_RES (20), (21), (22), (23), (24): Xaa is A or G
  MOD_RES (25), (26), (27), (28): Xaa is A or G or is absent

SEQ ID NO: 22593 - protein, 41 aa, Artificial Sequence; identical to SEQ ID NO: 19489
  GFR-binding peptide
  MOD_RES (6), (40): Xaa is C or S

SEQ ID NO: 22594 - protein, 34 aa, Artificial Sequence; identical to SEQ ID NO: 19490
  GFR-binding peptide
  MOD_RES (16), (17), (18), (19), (20): Xaa is A or G
  MOD_RES (21), (22), (23), (24): Xaa is A or G or is absent

SEQ ID NO: 22595 - protein, 41 aa, Artificial Sequence; identical to SEQ ID NO: 19491
  GFR-binding peptide
  MOD_RES (1), (38), (40): Xaa is C or S
  MOD_RES (17), (18), (19), (20), (21): Xaa is A or G
  MOD_RES (22), (23), (24), (25): Xaa is A or G or is absent

SEQ ID NO: 22596 - protein, 36 aa, Artificial Sequence; identical to SEQ ID NO: 19492
  GFR-binding peptide
  MOD_RES (34), (36): Xaa is C or S

SEQ ID NO: 22597 - protein, 40 aa, Artificial Sequence; identical to SEQ ID NO: 19493
  GFR-binding peptide
  MOD_RES (2), (39): Xaa is C or S
  MOD_RES (18), (19), (20), (21), (22): Xaa is A or G
  MOD_RES (23), (24), (25), (26): Xaa is A or G or is absent

SEQ ID NO: 22598 - protein, 40 aa, Artificial Sequence; identical to SEQ ID NO: 19494
  GFR-binding peptide
  MOD_RES (3), (40): Xaa is C or S
  MOD_RES (19), (20), (21), (22), (23): Xaa is A or G
  MOD_RES (24), (25), (26), (27): Xaa is A or G or is absent

SEQ ID NO: 22599 - protein, 39 aa, Artificial Sequence; identical to SEQ ID NO: 19495
  GFR-binding peptide
  MOD_RES (4), (4): Xaa is C or S
  MOD_RES (20), (21), (22), (23), (24): Xaa is A or G
  MOD_RES (25), (26), (27), (28): Xaa is A or G or is absent

SEQ ID NO: 22600 - protein, 32 aa, Artificial Sequence; identical to SEQ ID NO: 19496
  GFR-binding peptide
  MOD_RES (14), (15), (16), (17), (18): Xaa is A or G
  MOD_RES (19), (20), (21), (22): Xaa is A or G or is absent

SEQ ID NO: 22601 - protein, 37 aa, Artificial Sequence; identical to SEQ ID NO: 19497
  GFR-binding peptide
  MOD_RES (2), (2): Xaa is C or S

SEQ ID NO: 22602 - protein, 40 aa, Artificial Sequence; identical to SEQ ID NO: 19498
  GFR-binding peptide
  MOD_RES (4), (4): Xaa is C or S
  MOD_RES (20), (21), (22), (23), (24): Xaa is A or G
  MOD_RES (25), (26), (27), (28): Xaa is A or G or is absent

SEQ ID NO: 22603 - protein, 40 aa, Artificial Sequence; identical to SEQ ID NO: 19499
  GFR-binding peptide
  MOD_RES (4), (38), (40): Xaa is C or S
  MOD_RES (18), (19), (20), (21), (22): Xaa is A or G
  MOD_RES (23), (24), (25), (26): Xaa is A or G or is absent

SEQ ID NO: 22604 - protein, 38 aa, Artificial Sequence; identical to SEQ ID NO: 19500
  GFR-binding peptide
  MOD_RES (2), (2): Xaa is C or S

SEQ ID NO: 22605 - protein, 42 aa, Artificial Sequence; identical to SEQ ID NO: 19501
  GFR-binding peptide
  MOD_RES (4), (41): Xaa is C or S

SEQ ID NO: 22606 - protein, 40 aa, Artificial Sequence; identical to SEQ ID NO: 19502
  GFR-binding peptide
  MOD_RES (5), (39): Xaa is C or S

SEQ ID NO: 22607 - protein, 36 aa, Artificial Sequence; identical to SEQ ID NO: 19503
  GFR-binding peptide
  MOD_RES (36), (36): Xaa is C or S

SEQ ID NO: 22608 - protein, 42 aa, Artificial Sequence; identical to SEQ ID NO: 19504
  GFR-binding peptide
  MOD_RES (2), (39), (41): Xaa is C or S

SEQ ID NO: 22609 - protein, 40 aa, Artificial Sequence; identical to SEQ ID NO: 19505
  GFR-binding peptide
  MOD_RES (6), (40): Xaa is C or S
  MOD_RES (20), (21), (22), (23), (24): Xaa is A or G
  MOD_RES (25), (26), (27), (28): Xaa is A or G or is absent

SEQ ID NO: 22610 - protein, 34 aa, Artificial Sequence; identical to SEQ ID NO: 19506
  GFR-binding peptide
  MOD_RES (1), (1): Xaa is C or S

SEQ ID NO: 22611 - protein, 39 aa, Artificial Sequence; identical to SEQ ID NO: 19507
  GFR-binding peptide
  MOD_RES (36), (38): Xaa is C or S
  MOD_RES (15), (16), (17), (18), (19): Xaa is A or G
  MOD_RES (20), (21), (22), (23): Xaa is A or G or is absent

SEQ ID NO: 22612 - protein, 36 aa, Artificial Sequence; identical to SEQ ID NO: 19508
  GFR-binding peptide
  MOD_RES (16), (17), (18), (19), (20): Xaa is A or G
  MOD_RES (21), (22), (23), (24): Xaa is A or G or is absent

SEQ ID NO: 22613 - protein, 39 aa, Artificial Sequence; identical to SEQ ID NO: 19509
  GFR-binding peptide
  MOD_RES (5), (39): Xaa is C or S
  MOD_RES (19), (20), (21), (22), (23): Xaa is A or G
  MOD_RES (24), (25), (26), (27): Xaa is A or G or is absent

SEQ ID NO: 22614 - protein, 44 aa, Artificial Sequence; identical to SEQ ID NO: 19510
  GFR-binding peptide
  MOD_RES (5), (42), (44): Xaa is C or S
  MOD_RES (21), (22), (23), (24), (25): Xaa is A or G
  MOD_RES (26), (27), (28), (29): Xaa is A or G or is absent

SEQ ID NO: 22615 - protein, 44 aa, Artificial Sequence; identical to SEQ ID NO: 19511
  GFR-binding peptide
  MOD_RES (5), (42), (44): Xaa is C or S

SEQ ID NO: 22616 - protein, 38 aa, Artificial Sequence; identical to SEQ ID NO: 19512
  GFR-binding peptide
  MOD_RES (35), (37): Xaa is C or S
  MOD_RES (14), (15), (16), (17), (18): Xaa is A or G
  MOD_RES (19), (20), (21), (22): Xaa is A or G or is absent

SEQ ID NO: 22617 - protein, 37 aa, Artificial Sequence; identical to SEQ ID NO: 19513
  GFR-binding peptide
  MOD_RES (4), (4): Xaa is C or S
  MOD_RES (18), (19), (20), (21), (22): Xaa is A or G
  MOD_RES (23), (24), (25), (26): Xaa is A or G or is absent

SEQ ID NO: 22618 - protein, 38 aa, Artificial Sequence; identical to SEQ ID NO: 19514
  GFR-binding peptide
  MOD_RES (36), (38): Xaa is C or S
  MOD_RES (15), (16), (17), (18), (19): Xaa is A or G
  MOD_RES (20), (21), (22), (23): Xaa is A or G or is absent

SEQ ID NO: 22619 - protein, 41 aa, Artificial Sequence; identical to SEQ ID NO: 19515
  GFR-binding peptide
  MOD_RES (5), (5): Xaa is C or S

SEQ ID NO: 22620 - protein, 34 aa, Artificial Sequence; identical to SEQ ID NO: 19516
  GFR-binding peptide
  MOD_RES (2), (2): Xaa is C or S

SEQ ID NO: 22621 - protein, 37 aa, Artificial Sequence; identical to SEQ ID NO: 19517
  GFR-binding peptide
  MOD_RES (2), (2): Xaa is C or S
  MOD_RES (18), (19), (20), (21), (22): Xaa is A or G
  MOD_RES (23), (24), (25), (26): Xaa is A or G or is absent

SEQ ID NO: 22622 - protein, 39 aa, Artificial Sequence; identical to SEQ ID NO: 19518
  GFR-binding peptide
  MOD_RES (5), (5): Xaa is C or S

SEQ ID NO: 22623 - protein, 42 aa, Artificial Sequence; identical to SEQ ID NO: 19519
  GFR-binding peptide
  MOD_RES (5), (42): Xaa is C or S

SEQ ID NO: 22624 - protein, 36 aa, Artificial Sequence; identical to SEQ ID NO: 19520
  GFR-binding peptide
  MOD_RES (34), (36): Xaa is C or S
  MOD_RES (14), (15), (16), (17), (18): Xaa is A or G
  MOD_RES (19), (20), (21), (22): Xaa is A or G or is absent

SEQ ID NO: 22625 - protein, 36 aa, Artificial Sequence; identical to SEQ ID NO: 19521
  GFR-binding peptide
  MOD_RES (3), (3): Xaa is C or S
  MOD_RES (17), (18), (19), (20), (21): Xaa is A or G
  MOD_RES (22), (23), (24), (25): Xaa is A or G or is absent

SEQ ID NO: 22626 - protein, 38 aa, Artificial Sequence; identical to SEQ ID NO: 19522
  GFR-binding peptide
  MOD_RES (5), (5): Xaa is C or S
  MOD_RES (19), (20), (21), (22), (23): Xaa is A or G
  MOD_RES (24), (25), (26), (27): Xaa is A or G or is absent

SEQ ID NO: 22627 - protein, 39 aa, Artificial Sequence; identical to SEQ ID NO: 19523
  GFR-binding peptide
  MOD_RES (2), (39): Xaa is C or S

SEQ ID NO: 22628 - protein, 43 aa, Artificial Sequence; identical to SEQ ID NO: 19524
  GFR-binding peptide
  MOD_RES (4), (41), (43): Xaa is C or S

SEQ ID NO: 22629 - protein, 41 aa, Artificial Sequence; identical to SEQ ID NO: 19525
  GFR-binding peptide
  MOD_RES (2), (39), (41): Xaa is C or S
  MOD_RES (18), (19), (20), (21), (22): Xaa is A or G
  MOD_RES (23), (24), (25), (26): Xaa is A or G or is absent

SEQ ID NO: 22630 - protein, 34 aa, Artificial Sequence; identical to SEQ ID NO: 19526
  GFR-binding peptide
  MOD_RES (34), (34): Xaa is C or S

SEQ ID NO: 22631 - protein, 41 aa, Artificial Sequence; identical to SEQ ID NO: 19527
  GFR-binding peptide
  MOD_RES (6), (40): Xaa is C or S
  MOD_RES (20), (21), (22), (23), (24): Xaa is A or G
  MOD_RES (25), (26), (27), (28): Xaa is A or G or is absent

SEQ ID NO: 22632 - protein, 37 aa, Artificial Sequence; identical to SEQ ID NO: 19528
  GFR-binding peptide
  MOD_RES (3), (3): Xaa is C or S
  MOD_RES (19), (20), (21), (22), (23): Xaa is A or G
  MOD_RES (24), (25), (26), (27): Xaa is A or G or is absent

SEQ ID NO: 22633 - protein, 43 aa, Artificial Sequence; identical to SEQ ID NO: 19529
  GFR-binding peptide
  MOD_RES (7), (41), (43): Xaa is C or S
  MOD_RES (21), (22), (23), (24), (25): Xaa is A or G
  MOD_RES (26), (27), (28), (29): Xaa is A or G or is absent

SEQ ID NO: 22634 - protein, 41 aa, Artificial Sequence; identical to SEQ ID NO: 19530
  GFR-binding peptide
  MOD_RES (5), (39), (41): Xaa is C or S

SEQ ID NO: 22635 - protein, 39 aa, Artificial Sequence; identical to SEQ ID NO: 19531
  GFR-binding peptide
  MOD_RES (6), (6): Xaa is C or S

SEQ ID NO: 22636 - protein, 39 aa, Artificial Sequence; identical to SEQ ID NO: 19532
  GFR-binding peptide
  MOD_RES (6), (6): Xaa is C or S

SEQ ID NO: 22637 - protein, 37 aa, Artificial Sequence; identical to SEQ ID NO: 19533
  GFR-binding peptide
  MOD_RES (3), (3): Xaa is C or S
  MOD_RES (19), (20), (21), (22), (23): Xaa is A or G
  MOD_RES (24), (25), (26), (27): Xaa is A or G or is absent

SEQ ID NO: 22638 - protein, 39 aa, Artificial Sequence; identical to SEQ ID NO: 19534
  GFR-binding peptide
  MOD_RES (1), (38): Xaa is C or S
  MOD_RES (17), (18), (19), (20), (21): Xaa is A or G
  MOD_RES (22), (23), (24), (25): Xaa is A or G or is absent

SEQ ID NO: 22639 - protein, 40 aa, Artificial Sequence; identical to SEQ ID NO: 19535
  GFR-binding peptide
  MOD_RES (6), (40): Xaa is C or S
  MOD_RES (20), (21), (22), (23), (24): Xaa is A or G
  MOD_RES (25), (26), (27), (28): Xaa is A or G or is absent

SEQ ID NO: 22640 - protein, 43 aa, Artificial Sequence; identical to SEQ ID NO: 19536
  GFR-binding peptide
  MOD_RES (3), (40), (42): Xaa is C or S
  MOD_RES (19), (20), (21), (22), (23): Xaa is A or G
  MOD_RES (24), (25), (26), (27): Xaa is A or G or is absent

SEQ ID NO: 22641 - protein, 37 aa, Artificial Sequence; identical to SEQ ID NO: 19537
  GFR-binding peptide
  MOD_RES (2), (2): Xaa is C or S

SEQ ID NO: 22642 - protein, 41 aa, Artificial Sequence; identical to SEQ ID NO: 19538
  GFR-binding peptide
  MOD_RES (7), (41): Xaa is C or S

SEQ ID NO: 22643 - protein, 44 aa, Artificial Sequence; identical to SEQ ID NO: 19539
  GFR-binding peptide
  MOD_RES (5), (42), (44): Xaa is C or S

SEQ ID NO: 22644 - protein, 42 aa, Artificial Sequence; identical to SEQ ID NO: 19540
  GFR-binding peptide
  MOD_RES (5), (42): Xaa is C or S
  MOD_RES (21), (22), (23), (24), (25): Xaa is A or G
  MOD_RES (26), (27), (28), (29): Xaa is A or G or is absent

SEQ ID NO: 22645 - protein, 38 aa, Artificial Sequence; identical to SEQ ID NO: 19541
  GFR-binding peptide
  MOD_RES (3), (3): Xaa is C or S

SEQ ID NO: 22646 - protein, 38 aa, Artificial Sequence; identical to SEQ ID NO: 19542
  GFR-binding peptide
  MOD_RES (35), (37): Xaa is C or S
  MOD_RES (14), (15), (16), (17), (18): Xaa is A or G
  MOD_RES (19), (20), (21), (22): Xaa is A or G or is absent

SEQ ID NO: 22647 - protein, 40 aa, Artificial Sequence; identical to SEQ ID NO: 19543
  GFR-binding peptide
  MOD_RES (3), (40): Xaa is C or S
  MOD_RES (19), (20), (21), (22), (23): Xaa is A or G
  MOD_RES (24), (25), (26), (27): Xaa is A or G or is absent

SEQ ID NO: 22648 - protein, 34 aa, Artificial Sequence; identical to SEQ ID NO: 19544
  GFR-binding peptide

SEQ ID NO: 22649 - protein, 35 aa, Artificial Sequence; identical to SEQ ID NO: 19545
  GFR-binding peptide
  MOD_RES (2), (2): Xaa is C or S
  MOD_RES (16), (17), (18), (19), (20): Xaa is A or G
  MOD_RES (21), (22), (23), (24): Xaa is A or G or is absent

SEQ ID NO: 22650 - protein, 37 aa, Artificial Sequence; identical to SEQ ID NO: 19546
  GFR-binding peptide
  MOD_RES (34), (36): Xaa is C or S

SEQ ID NO: 22651 - protein, 37 aa, Artificial Sequence; identical to SEQ ID NO: 19547
  GFR-binding peptide
  MOD_RES (34), (36): Xaa is C or S
  MOD_RES (14), (15), (16), (17), (18): Xaa is A or G
  MOD_RES (19), (20), (21), (22): Xaa is A or G or is absent

SEQ ID NO: 22652 - protein, 35 aa, Artificial Sequence; identical to SEQ ID NO: 19548
  GFR-binding peptide
  MOD_RES (1), (1): Xaa is C or S
  MOD_RES (17), (18), (19), (20), (21): Xaa is A or G
  MOD_RES (22), (23), (24), (25): Xaa is A or G or is absent

SEQ ID NO: 22653 - protein, 36 aa, Artificial Sequence; identical to SEQ ID NO: 19549
  GFR-binding peptide
  MOD_RES (35), (35): Xaa is C or S
  MOD_RES (14), (15), (16), (17), (18): Xaa is A or G
  MOD_RES (19), (20), (21), (22): Xaa is A or G or is absent

SEQ ID NO: 22654 - protein, 38 aa, Artificial Sequence; identical to SEQ ID NO: 19550
  GFR-binding peptide
  MOD_RES (3), (3): Xaa is C or S
  MOD_RES (19), (20), (21), (22), (23): Xaa is A or G
  MOD_RES (24), (25), (26), (27): Xaa is A or G or is absent

SEQ ID NO: 22655 - protein, 34 aa, Artificial Sequence; identical to SEQ ID NO: 19551
  GFR-binding peptide
  MOD_RES (15), (16), (17), (18), (19): Xaa is A or G
  MOD_RES (20), (21), (22), (23): Xaa is A or G or is absent

SEQ ID NO: 22656 - protein, 35 aa, Artificial Sequence; identical to SEQ ID NO: 19552
  GFR-binding peptide
  MOD_RES (1), (1): Xaa is C or S
  MOD_RES (17), (18), (19), (20), (21): Xaa is A or G
  MOD_RES (22), (23), (24), (25): Xaa is A or G or is absent

SEQ ID NO: 22657 - protein, 33 aa, Artificial Sequence; identical to SEQ ID NO: 19553
  GFR-binding peptide

SEQ ID NO: 22658 - protein, 42 aa, Artificial Sequence; identical to SEQ ID NO: 19554
  GFR-binding peptide
  MOD_RES (3), (40), (42): Xaa is C or S
  MOD_RES (19), (20), (21), (22), (23): Xaa is A or G
  MOD_RES (24), (25), (26), (27): Xaa is A or G or is absent

SEQ ID NO: 22659 - protein, 38 aa, Artificial Sequence; identical to SEQ ID NO: 19555
  GFR-binding peptide
  MOD_RES (1), (38): Xaa is C or S
  MOD_RES (17), (18), (19), (20), (21): Xaa is A or G
  MOD_RES (22), (23), (24), (25): Xaa is A or G or is absent

SEQ ID NO: 22660 - protein, 36 aa, Artificial Sequence; identical to SEQ ID NO: 19556
  GFR-binding peptide
  MOD_RES (4), (4): Xaa is C or S
  MOD_RES (18), (19), (20), (21), (22): Xaa is A or G
  MOD_RES (23), (24), (25), (26): Xaa is A or G or is absent

SEQ ID NO: 22661 - protein, 40 aa, Artificial Sequence; identical to SEQ ID NO: 19557
  GFR-binding peptide
  MOD_RES (37), (39): Xaa is C or S

SEQ ID NO: 22662 - protein, 39 aa, Artificial Sequence; identical to SEQ ID NO: 19558
  GFR-binding peptide
  MOD_RES (2), (36), (38): Xaa is C or S
  MOD_RES (16), (17), (18), (19), (20): Xaa is A or G
  MOD_RES (21), (22), (23), (24): Xaa is A or G or is absent

SEQ ID NO: 22663 - protein, 42 aa, Artificial Sequence; identical to SEQ ID NO: 19559
  GFR-binding peptide
  MOD_RES (2), (39), (41): Xaa is C or S
  MOD_RES (18), (19), (20), (21), (22): Xaa is A or G
  MOD_RES (23), (24), (25), (26): Xaa is A or G or is absent

SEQ ID NO: 22664 - protein, 45 aa, Artificial Sequence; identical to SEQ ID NO: 19560
  GFR-binding peptide
  MOD_RES (5), (42), (44): Xaa is C or S

SEQ ID NO: 22665 - protein, 34 aa, Artificial Sequence; identical to SEQ ID NO: 19561
  GFR-binding peptide
  MOD_RES (34), (34): Xaa is C or S

SEQ ID NO: 22666 - protein, 41 aa, Artificial Sequence; identical to SEQ ID NO: 19562
  GFR-binding peptide
  MOD_RES (4), (38), (40): Xaa is C or S
  MOD_RES (18), (19), (20), (21), (22): Xaa is A or G
  MOD_RES (23), (24), (25), (26): Xaa is A or G or is absent

SEQ ID NO: 22667 - protein, 38 aa, Artificial Sequence; identical to SEQ ID NO: 19563
  GFR-binding peptide
  MOD_RES (3), (37): Xaa is C or S

SEQ ID NO: 22668 - protein, 38 aa, Artificial Sequence; identical to SEQ ID NO: 19564
  GFR-binding peptide
  MOD_RES (1), (35), (37): Xaa is C or S

SEQ ID NO: 22669 - protein, 35 aa, Artificial Sequence; identical to SEQ ID NO: 19565
  GFR-binding peptide
  MOD_RES (35), (35): Xaa is C or S
  MOD_RES (14), (15), (16), (17), (18): Xaa is A or G
  MOD_RES (19), (20), (21), (22): Xaa is A or G or is absent

SEQ ID NO: 22670 - protein, 40 aa, Artificial Sequence; identical to SEQ ID NO: 19566
  GFR-binding peptide
  MOD_RES (37), (39): Xaa is C or S
  MOD_RES (16), (17), (18), (19), (20): Xaa is A or G
  MOD_RES (21), (22), (23), (24): Xaa is A or G or is absent

SEQ ID NO: 22671 - protein, 35 aa, Artificial Sequence; identical to SEQ ID NO: 19567
  GFR-binding peptide
  MOD_RES (1), (1): Xaa is C or S

SEQ ID NO: 22672 - protein, 40 aa, Artificial Sequence; identical to SEQ ID NO: 19568
  GFR-binding peptide
  MOD_RES (4), (38), (40): Xaa is C or S

SEQ ID NO: 22673 - protein, 38 aa, Artificial Sequence; identical to SEQ ID NO: 19569
  GFR-binding peptide
  MOD_RES (3), (37): Xaa is C or S

SEQ ID NO: 22674 - protein, 43 aa, Artificial Sequence; identical to SEQ ID NO: 19570
  GFR-binding peptide
  MOD_RES (7), (41), (43): Xaa is C or S
  MOD_RES (21), (22), (23), (24), (25): Xaa is A or G
  MOD_RES (26), (27), (28), (29): Xaa is A or G or is absent

SEQ ID NO: 22675 - protein, 33 aa, Artificial Sequence; identical to SEQ ID NO: 19571
  GFR-binding peptide
  MOD_RES (1), (1): Xaa is C or S
  MOD_RES (15), (16), (17), (18), (19): Xaa is A or G
  MOD_RES (20), (21), (22), (23): Xaa is A or G or is absent

SEQ ID NO: 22676 - protein, 33 aa, Artificial Sequence; identical to SEQ ID NO: 19572
  GFR-binding peptide

SEQ ID NO: 22677 - protein, 39 aa, Artificial Sequence; identical to SEQ ID NO: 19573
  GFR-binding peptide
  MOD_RES (3), (3): Xaa is C or S
  MOD_RES (19), (20), (21), (22), (23): Xaa is A or G
  MOD_RES (24), (25), (26), (27): Xaa is A or G or is absent

SEQ ID NO: 22678 - protein, 38 aa, Artificial Sequence; identical to SEQ ID NO: 19574
  GFR-binding peptide
  MOD_RES (3), (3): Xaa is C or S
  MOD_RES (19), (20), (21), (22), (23): Xaa is A or G
  MOD_RES (24), (25), (26), (27): Xaa is A or G or is absent

SEQ ID NO: 22679 - protein, 39 aa, Artificial Sequence; identical to SEQ ID NO: 19575
  GFR-binding peptide
  MOD_RES (2), (36), (38): Xaa is C or S

SEQ ID NO: 22680 - protein, 40 aa, Artificial Sequence; identical to SEQ ID NO: 19576
  GFR-binding peptide
  MOD_RES (2), (39): Xaa is C or S

SEQ ID NO: 22681 - protein, 36 aa, Artificial Sequence; identical to SEQ ID NO: 19577
  GFR-binding peptide
  MOD_RES (34), (36): Xaa is C or S

SEQ ID NO: 22682 - protein, 35 aa, Artificial Sequence; identical to SEQ ID NO: 19578
  GFR-binding peptide

SEQ ID NO: 22683 - protein, 38 aa, Artificial Sequence; identical to SEQ ID NO: 19579
  GFR-binding peptide
  MOD_RES (4), (4): Xaa is C or S
  MOD_RES (20), (21), (22), (23), (24): Xaa is A or G
  MOD_RES (25), (26), (27), (28): Xaa is A or G or is absent

SEQ ID NO: 22684 - protein, 36 aa, Artificial Sequence; identical to SEQ ID NO: 19580
  GFR-binding peptide
  MOD_RES (2), (2): Xaa is C or S
  MOD_RES (18), (19), (20), (21), (22): Xaa is A or G
  MOD_RES (23), (24), (25), (26): Xaa is A or G or is absent

SEQ ID NO: 22685 - protein, 39 aa, Artificial Sequence; identical to SEQ ID NO: 19581
  GFR-binding peptide
  MOD_RES (3), (3): Xaa is C or S
  MOD_RES (19), (20), (21), (22), (23): Xaa is A or G
  MOD_RES (24), (25), (26), (27): Xaa is A or G or is absent

SEQ ID NO: 22686 - protein, 39 aa, Artificial Sequence; identical to SEQ ID NO: 19582
  GFR-binding peptide
  MOD_RES (5), (39): Xaa is C or S
  MOD_RES (19), (20), (21), (22), (23): Xaa is A or G
  MOD_RES (24), (25), (26), (27): Xaa is A or G or is absent

SEQ ID NO: 22687 - protein, 44 aa, Artificial Sequence; identical to SEQ ID NO: 19583
  GFR-binding peptide
  MOD_RES (7), (41), (43): Xaa is C or S
  MOD_RES (21), (22), (23), (24), (25): Xaa is A or G
  MOD_RES (26), (27), (28), (29): Xaa is A or G or is absent

SEQ ID NO: 22688 - protein, 42 aa, Artificial Sequence; identical to SEQ ID NO: 19584
  GFR-binding peptide
  MOD_RES (7), (41): Xaa is C or S
  MOD_RES (21), (22), (23), (24), (25): Xaa is A or G
  MOD_RES (26), (27), (28), (29): Xaa is A or G or is absent

SEQ ID NO: 22689 - protein, 39 aa, Artificial Sequence; identical to SEQ ID NO: 19585
  GFR-binding peptide
  MOD_RES (2), (39): Xaa is C or S
  MOD_RES (18), (19), (20), (21), (22): Xaa is A or G
  MOD_RES (23), (24), (25), (26): Xaa is A or G or is absent

SEQ ID NO: 22690 - protein, 32 aa, Artificial Sequence; identical to SEQ ID NO: 19586
  GFR-binding peptide

SEQ ID NO: 22691 - protein, 44 aa, Artificial Sequence; identical to SEQ ID NO: 19587
  GFR-binding peptide
  MOD_RES (4), (41), (43): Xaa is C or S

SEQ ID NO: 22692 - protein, 36 aa, Artificial Sequence; identical to SEQ ID NO: 19588
  GFR-binding peptide
  MOD_RES (2), (36): Xaa is C or S
  MOD_RES (16), (17), (18), (19), (20): Xaa is A or G
  MOD_RES (21), (22), (23), (24): Xaa is A or G or is absent

SEQ ID NO: 22693 - protein, 33 aa, Artificial Sequence; identical to SEQ ID NO: 19589
  GFR-binding peptide
  MOD_RES (14), (15), (16), (17), (18): Xaa is A or G
  MOD_RES (19), (20), (21), (22): Xaa is A or G or is absent

SEQ ID NO: 22694 - protein, 38 aa, Artificial Sequence; identical to SEQ ID NO: 19590
  GFR-binding peptide
  MOD_RES (2), (36), (38): Xaa is C or S
  MOD_RES (16), (17), (18), (19), (20): Xaa is A or G
  MOD_RES (21), (22), (23), (24): Xaa is A or G or is absent

SEQ ID NO: 22695 - protein, 36 aa, Artificial Sequence; identical to SEQ ID NO: 19591
  GFR-binding peptide
  MOD_RES (16), (17), (18), (19), (20): Xaa is A or G
  MOD_RES (21), (22), (23), (24): Xaa is A or G or is absent

SEQ ID NO: 22696 - protein, 33 aa, Artificial Sequence; identical to SEQ ID NO: 19592
  GFR-binding peptide
  MOD_RES (15), (16), (17), (18), (19): Xaa is A or G
  MOD_RES (20), (21), (22), (23): Xaa is A or G or is absent

SEQ ID NO: 22697 - protein, 38 aa, Artificial Sequence; identical to SEQ ID NO: 19593
  GFR-binding peptide
  MOD_RES (1), (38): Xaa is C or S

SEQ ID NO: 22698 - protein, 42 aa, Artificial Sequence; identical to SEQ ID NO: 19594
  GFR-binding peptide
  MOD_RES (3), (40), (42): Xaa is C or S

SEQ ID NO: 22699 - protein, 40 aa, Artificial Sequence; identical to SEQ ID NO: 19595
  GFR-binding peptide
  MOD_RES (6), (40): Xaa is C or S

SEQ ID NO: 22700 - protein, 37 aa, Artificial Sequence; identical to SEQ ID NO: 19596
  GFR-binding peptide
  MOD_RES (2), (36): Xaa is C or S
  MOD_RES (16), (17), (18), (19), (20): Xaa is A or G
  MOD_RES (21), (22), (23), (24): Xaa is A or G or is absent

SEQ ID NO: 22701 - protein, 42 aa, Artificial Sequence; identical to SEQ ID NO: 19597
  GFR-binding peptide
  MOD_RES (2), (39), (41): Xaa is C or S
  MOD_RES (18), (19), (20), (21), (22): Xaa is A or G
  MOD_RES (23), (24), (25), (26): Xaa is A or G or is absent

SEQ ID NO: 22702 - protein, 38 aa, Artificial Sequence; identical to SEQ ID NO: 19598
  GFR-binding peptide
  MOD_RES (4), (4): Xaa is C or S
  MOD_RES (20), (21), (22), (23), (24): Xaa is A or G
  MOD_RES (25), (26), (27), (28): Xaa is A or G or is absent

SEQ ID NO: 22703 - protein, 37 aa, Artificial Sequence; identical to SEQ ID NO: 19599
  GFR-binding peptide
  MOD_RES (3), (37): Xaa is C or S

SEQ ID NO: 22704 - protein, 40 aa, Artificial Sequence; identical to SEQ ID NO: 19600
  GFR-binding peptide
  MOD_RES (3), (37), (39): Xaa is C or S
  MOD_RES (17), (18), (19), (20), (21): Xaa is A or G
  MOD_RES (22), (23), (24), (25): Xaa is A or G or is absent

SEQ ID NO: 22705 - protein, 37 aa, Artificial Sequence; identical to SEQ ID NO: 19601
  GFR-binding peptide
  MOD_RES (5), (5): Xaa is C or S
  MOD_RES (19), (20), (21), (22), (23): Xaa is A or G
  MOD_RES (24), (25), (26), (27): Xaa is A or G or is absent

SEQ ID NO: 22706 - protein, 41 aa, Artificial Sequence; identical to SEQ ID NO: 19602
  GFR-binding peptide
  MOD_RES (4), (41): Xaa is C or S

SEQ ID NO: 22707 - protein, 39 aa, Artificial Sequence; identical to SEQ ID NO: 19603
  GFR-binding peptide
  MOD_RES (7), (7): Xaa is C or S
  MOD_RES (21), (22), (23), (24), (25): Xaa is A or G
  MOD_RES (26), (27), (28), (29): Xaa is A or G or is absent

SEQ ID NO: 22708 - protein, 40 aa, Artificial Sequence; identical to SEQ ID NO: 19604
  GFR-binding peptide
  MOD_RES (4), (38), (40): Xaa is C or S

SEQ ID NO: 22709 - protein, 39 aa, Artificial Sequence; identical to SEQ ID NO: 19605
  GFR-binding peptide
  MOD_RES (5), (39): Xaa is C or S
  MOD_RES (19), (20), (21), (22), (23): Xaa is A or G
  MOD_RES (24), (25), (26), (27): Xaa is A or G or is absent

SEQ ID NO: 22710 - protein, 43 aa, Artificial Sequence; identical to SEQ ID NO: 19606
  GFR-binding peptide
  MOD_RES (6), (40), (42): Xaa is C or S
  MOD_RES (20), (21), (22), (23), (24): Xaa is A or G
  MOD_RES (25), (26), (27), (28): Xaa is A or G or is absent

SEQ ID NO: 22711 - protein, 35 aa, Artificial Sequence; identical to SEQ ID NO: 19607
  GFR-binding peptide
  MOD_RES (1), (35): Xaa is C or S

SEQ ID NO: 22712 - protein, 38 aa, Artificial Sequence; identical to SEQ ID NO: 19608
  GFR-binding peptide
  MOD_RES (37), (37): Xaa is C or S

SEQ ID NO: 22713 - protein, 40 aa, Artificial Sequence; identical to SEQ ID NO: 19609
  GFR-binding peptide
  MOD_RES (2), (39): Xaa is C or S
  MOD_RES (18), (19), (20), (21), (22): Xaa is A or G
  MOD_RES (23), (24), (25), (26): Xaa is A or G or is absent

SEQ ID NO: 22714 - protein, 39 aa, Artificial Sequence; identical to SEQ ID NO: 19610
  GFR-binding peptide
  MOD_RES (7), (7): Xaa is C or S
  MOD_RES (21), (22), (23), (24), (25): Xaa is A or G
  MOD_RES (26), (27), (28), (29): Xaa is A or G or is absent

SEQ ID NO: 22715 - protein, 40 aa, Artificial Sequence; identical to SEQ ID NO: 19611
  GFR-binding peptide
  MOD_RES (37), (39): Xaa is C or S
  MOD_RES (16), (17), (18), (19), (20): Xaa is A or G
  MOD_RES (21), (22), (23), (24): Xaa is A or G or is absent

SEQ ID NO: 22716 - protein, 38 aa, Artificial Sequence; identical to SEQ ID NO: 19612
  GFR-binding peptide
  MOD_RES (36), (38): Xaa is C or S

SEQ ID NO: 22717 - protein, 39 aa, Artificial Sequence; identical to SEQ ID NO: 19613
  GFR-binding peptide
  MOD_RES (6), (6): Xaa is C or S
  MOD_RES (20), (21), (22), (23), (24): Xaa is A or G
  MOD_RES (25), (26), (27), (28): Xaa is A or G or is absent

SEQ ID NO: 22718 - protein, 42 aa, Artificial Sequence; identical to SEQ ID NO: 19614
  GFR-binding peptide
  MOD_RES (6), (40), (42): Xaa is C or S
  MOD_RES (20), (21), (22), (23), (24): Xaa is A or G
  MOD_RES (25), (26), (27), (28): Xaa is A or G or is absent

SEQ ID NO: 22719 - protein, 34 aa, Artificial Sequence; identical to SEQ ID NO: 19615
  GFR-binding peptide
  MOD_RES (2), (2): Xaa is C or S

SEQ ID NO: 22720 - protein, 38 aa, Artificial Sequence; identical to SEQ ID NO: 19616
  GFR-binding peptide
  MOD_RES (36), (38): Xaa is C or S
  MOD_RES (15), (16), (17), (18), (19): Xaa is A or G
  MOD_RES (20), (21), (22), (23): Xaa is A or G or is absent

SEQ ID NO: 22721 - protein, 35 aa, Artificial Sequence; identical to SEQ ID NO: 19617
  GFR-binding peptide
  MOD_RES (34), (34): Xaa is C or S
  MOD_RES (14), (15), (16), (17), (18): Xaa is A or G
  MOD_RES (19), (20), (21), (22): Xaa is A or G or is absent

SEQ ID NO: 22722 - protein, 36 aa, Artificial Sequence; identical to SEQ ID NO: 19618
  GFR-binding peptide

SEQ ID NO: 22723 - protein, 36 aa, Artificial Sequence; identical to SEQ ID NO: 19619
  GFR-binding peptide
  MOD_RES (36), (36): Xaa is C or S

SEQ ID NO: 22724 - protein, 38 aa, Artificial Sequence; identical to SEQ ID NO: 19620
  GFR-binding peptide
  MOD_RES (4), (38): Xaa is C or S
  MOD_RES (18), (19), (20), (21), (22): Xaa is A or G
  MOD_RES (23), (24), (25), (26): Xaa is A or G or is absent

SEQ ID NO: 22725 - protein, 33 aa, Artificial Sequence; identical to SEQ ID NO: 19621
  GFR-binding peptide

SEQ ID NO: 22726 - protein, 39 aa, Artificial Sequence; identical to SEQ ID NO: 19622
  GFR-binding peptide
  MOD_RES (6), (6): Xaa is C or S
  MOD_RES (20), (21), (22), (23), (24): Xaa is A or G
  MOD_RES (25), (26), (27), (28): Xaa is A or G or is absent

SEQ ID NO: 22727 - protein, 35 aa, Artificial Sequence; identical to SEQ ID NO: 19623
  GFR-binding peptide
  MOD_RES (3), (3): Xaa is C or S

SEQ ID NO: 22728 - protein, 32 aa, Artificial Sequence; identical to SEQ ID NO: 19624
  GFR-binding peptide
  MOD_RES (14), (15), (16), (17), (18): Xaa is A or G
  MOD_RES (19), (20), (21), (22): Xaa is A or G or is absent

SEQ ID NO: 22729 - protein, 34 aa, Artificial Sequence; identical to SEQ ID NO: 19625
  GFR-binding peptide
  MOD_RES (1), (1): Xaa is C or S

SEQ ID NO: 22730 - protein, 35 aa, Artificial Sequence; identical to SEQ ID NO: 19626
  GFR-binding peptide
  MOD_RES (35), (35): Xaa is C or S
  MOD_RES (14), (15), (16), (17), (18): Xaa is A or G
  MOD_RES (19), (20), (21), (22): Xaa is A or G or is absent

SEQ ID NO: 22731 - protein, 36 aa, Artificial Sequence; identical to SEQ ID NO: 19627
  GFR-binding peptide

SEQ ID NO: 22732 - protein, 44 aa, Artificial Sequence; identical to SEQ ID NO: 19628
  GFR-binding peptide
  MOD_RES (4), (41), (43): Xaa is C or S

SEQ ID NO: 22733 - protein, 37 aa, Artificial Sequence; identical to SEQ ID NO: 19629
  GFR-binding peptide
  MOD_RES (5), (5): Xaa is C or S
  MOD_RES (19), (20), (21), (22), (23): Xaa is A or G
  MOD_RES (24), (25), (26), (27): Xaa is A or G or is absent

SEQ ID NO: 22734 - protein, 43 aa, Artificial Sequence; identical to SEQ ID NO: 19630
  GFR-binding peptide
  MOD_RES (5), (42): Xaa is C or S
  MOD_RES (21), (22), (23), (24), (25): Xaa is A or G
  MOD_RES (26), (27), (28), (29): Xaa is A or G or is absent

SEQ ID NO: 22735 - protein, 36 aa, Artificial Sequence; identical to SEQ ID NO: 19631
  GFR-binding peptide
  MOD_RES (2), (36): Xaa is C or S
  MOD_RES (16), (17), (18), (19), (20): Xaa is A or G
  MOD_RES (21), (22), (23), (24): Xaa is A or G or is absent

SEQ ID NO: 22736 - protein, 44 aa, Artificial Sequence; identical to SEQ ID NO: 19632
  GFR-binding peptide
  MOD_RES (4), (41), (43): Xaa is C or S

SEQ ID NO: 22737 - protein, 40 aa, Artificial Sequence; identical to SEQ ID NO: 19633
  GFR-binding peptide
  MOD_RES (4), (4): Xaa is C or S

SEQ ID NO: 22738 - protein, 37 aa, Artificial Sequence; identical to SEQ ID NO: 19634
  GFR-binding peptide
  MOD_RES (3), (37): Xaa is C or S
  MOD_RES (17), (18), (19), (20), (21): Xaa is A or G
  MOD_RES (22), (23), (24), (25): Xaa is A or G or is absent

SEQ ID NO: 22739 - protein, 38 aa, Artificial Sequence; identical to SEQ ID NO: 19635
  GFR-binding peptide
  MOD_RES (3), (3): Xaa is C or S
  MOD_RES (19), (20), (21), (22), (23): Xaa is A or G
  MOD_RES (24), (25), (26), (27): Xaa is A or G or is absent

SEQ ID NO: 22740 - protein, 36 aa, Artificial Sequence; identical to SEQ ID NO: 19636
  GFR-binding peptide
  MOD_RES (34), (36): Xaa is C or S
  MOD_RES (14), (15), (16), (17), (18): Xaa is A or G
  MOD_RES (19), (20), (21), (22): Xaa is A or G or is absent

SEQ ID NO: 22741 - protein, 41 aa, Artificial Sequence; identical to SEQ ID NO: 19637
  GFR-binding peptide
  MOD_RES (3), (40): Xaa is C or S

SEQ ID NO: 22742 - protein, 36 aa, Artificial Sequence; identical to SEQ ID NO: 19638
  GFR-binding peptide
  MOD_RES (2), (2): Xaa is C or S
  MOD_RES (18), (19), (20), (21), (22): Xaa is A or G
  MOD_RES (23), (24), (25), (26): Xaa is A or G or is absent

SEQ ID NO: 22743 - protein, 41 aa, Artificial Sequence; identical to SEQ ID NO: 19639
  GFR-binding peptide
  MOD_RES (1), (38), (40): Xaa is C or S

SEQ ID NO: 22744 - protein, 44 aa, Artificial Sequence; identical to SEQ ID NO: 19640
  GFR-binding peptide
  MOD_RES (5), (42), (44): Xaa is C or S
  MOD_RES (21), (22), (23), (24), (25): Xaa is A or G
  MOD_RES (26), (27), (28), (29): Xaa is A or G or is absent

SEQ ID NO: 22745 - protein, 39 aa, Artificial Sequence; identical to SEQ ID NO: 19641
  GFR-binding peptide
  MOD_RES (4), (38): Xaa is C or S
  MOD_RES (18), (19), (20), (21), (22): Xaa is A or G
  MOD_RES (23), (24), (25), (26): Xaa is A or G or is absent

SEQ ID NO: 22746 - protein, 38 aa, Artificial Sequence; identical to SEQ ID NO: 19642
  GFR-binding peptide
  MOD_RES (6), (6): Xaa is C or S

SEQ ID NO: 22747 - protein, 39 aa, Artificial Sequence; identical to SEQ ID NO: 19643
  GFR-binding peptide
  MOD_RES (7), (7): Xaa is C or S

SEQ ID NO: 22748 - protein, 38 aa, Artificial Sequence; identical to SEQ ID NO: 19644
  GFR-binding peptide
  MOD_RES (1), (35), (37): Xaa is C or S
  MOD_RES (15), (16), (17), (18), (19): Xaa is A or G
  MOD_RES (20), (21), (22), (23): Xaa is A or G or is absent

SEQ ID NO: 22749 - protein, 34 aa, Artificial Sequence; identical to SEQ ID NO: 19645
  GFR-binding peptide
  MOD_RES (2), (2): Xaa is C or S

SEQ ID NO: 22750 - protein, 44 aa, Artificial Sequence; identical to SEQ ID NO: 19646
  GFR-binding peptide
  MOD_RES (4), (41), (43): Xaa is C or S
  MOD_RES (20), (21), (22), (23), (24): Xaa is A or G
  MOD_RES (25), (26), (27), (28): Xaa is A or G or is absent

SEQ ID NO: 22751 - protein, 35 aa, Artificial Sequence; identical to SEQ ID NO: 19647
  GFR-binding peptide
  MOD_RES (3), (3): Xaa is C or S
  MOD_RES (17), (18), (19), (20), (21): Xaa is A or G
  MOD_RES (22), (23), (24), (25): Xaa is A or G or is absent

SEQ ID NO: 22752 - protein, 37 aa, Artificial Sequence; identical to SEQ ID NO: 19648
  GFR-binding peptide
  MOD_RES (35), (37): Xaa is C or S

SEQ ID NO: 22753 - protein, 40 aa, Artificial Sequence; identical to SEQ ID NO: 19649
  GFR-binding peptide
  MOD_RES (3), (37), (39): Xaa is C or S
  MOD_RES (17), (18), (19), (20), (21): Xaa is A or G
  MOD_RES (22), (23), (24), (25): Xaa is A or G or is absent

SEQ ID NO: 22754 - protein, 36 aa, Artificial Sequence; identical to SEQ ID NO: 19650
  GFR-binding peptide
  MOD_RES (36), (36): Xaa is C or S
  MOD_RES (15), (16), (17), (18), (19): Xaa is A or G
  MOD_RES (20), (21), (22), (23): Xaa is A or G or is absent

SEQ ID NO: 22755 - protein, 44 aa, Artificial Sequence; identical to SEQ ID NO: 19651
  GFR-binding peptide
  MOD_RES (7), (41), (43): Xaa is C or S
  MOD_RES (21), (22), (23), (24), (25): Xaa is A or G
  MOD_RES (26), (27), (28), (29): Xaa is A or G or is absent

SEQ ID NO: 22756 - protein, 36 aa, Artificial Sequence; identical to SEQ ID NO: 19652
  GFR-binding peptide
  MOD_RES (1), (35): Xaa is C or S
  MOD_RES (15), (16), (17), (18), (19): Xaa is A or G
  MOD_RES (20), (21), (22), (23): Xaa is A or G or is absent

SEQ ID NO: 22757 - protein, 40 aa, Artificial Sequence; identical to SEQ ID NO: 19653
  GFR-binding peptide
  MOD_RES (7), (7): Xaa is C or S

SEQ ID NO: 22758 - protein, 37 aa, Artificial Sequence; identical to SEQ ID NO: 19654
  GFR-binding peptide
  MOD_RES (5), (5): Xaa is C or S

SEQ ID NO: 22759 - protein, 40 aa, Artificial Sequence; identical to SEQ ID NO: 19655
  GFR-binding peptide
  MOD_RES (5), (39): Xaa is C or S

SEQ ID NO: 22760 - protein, 41 aa, Artificial Sequence; identical to SEQ ID NO: 19656
  GFR-binding peptide
  MOD_RES (6), (40): Xaa is C or S

SEQ ID NO: 22761 - protein, 41 aa, Artificial Sequence; identical to SEQ ID NO: 19657
  GFR-binding peptide
  MOD_RES (4), (41): Xaa is C or S

SEQ ID NO: 22762 - protein, 43 aa, Artificial Sequence; identical to SEQ ID NO: 19658
  GFR-binding peptide
  MOD_RES (4), (41), (43): Xaa is C or S
  MOD_RES (20), (21), (22), (23), (24): Xaa is A or G
  MOD_RES (25), (26), (27), (28): Xaa is A or G or is absent

SEQ ID NO: 22763 - protein, 41 aa, Artificial Sequence; identical to SEQ ID NO: 19659
  GFR-binding peptide
  MOD_RES (4), (41): Xaa is C or S
  MOD_RES (20), (21), (22), (23), (24): Xaa is A or G
  MOD_RES (25), (26), (27), (28): Xaa is A or G or is absent

SEQ ID NO: 22764 - protein, 43 aa, Artificial Sequence; identical to SEQ ID NO: 19660
  GFR-binding peptide
  MOD_RES (6), (40), (42): Xaa is C or S
  MOD_RES (20), (21), (22), (23), (24): Xaa is A or G
  MOD_RES (25), (26), (27), (28): Xaa is A or G or is absent

SEQ ID NO: 22765 - protein, 36 aa, Artificial Sequence; identical to SEQ ID NO: 19661
  GFR-binding peptide
  MOD_RES (1), (1): Xaa is C or S
  MOD_RES (17), (18), (19), (20), (21): Xaa is A or G
  MOD_RES (22), (23), (24), (25): Xaa is A or G or is absent

SEQ ID NO: 22766 - protein, 33 aa, Artificial Sequence; identical to SEQ ID NO: 19662
  GFR-binding peptide
  MOD_RES (15), (16), (17), (18), (19): Xaa is A or G
  MOD_RES (20), (21), (22), (23): Xaa is A or G or is absent

SEQ ID NO: 22767 - protein, 38 aa, Artificial Sequence; identical to SEQ ID NO: 19663
  GFR-binding peptide
  MOD_RES (5), (5): Xaa is C or S
  MOD_RES (19), (20), (21), (22), (23): Xaa is A or G
  MOD_RES (24), (25), (26), (27): Xaa is A or G or is absent

SEQ ID NO: 22768 - protein, 36 aa, Artificial Sequence; identical to SEQ ID NO: 19664
  GFR-binding peptide
  MOD_RES (36), (36): Xaa is C or S

SEQ ID NO: 22769 - protein, 40 aa, Artificial Sequence; identical to SEQ ID NO: 19665
  GFR-binding peptide
  MOD_RES (6), (40): Xaa is C or S
  MOD_RES (20), (21), (22), (23), (24): Xaa is A or G
  MOD_RES (25), (26), (27), (28): Xaa is A or G or is absent

SEQ ID NO: 22770 - protein, 42 aa, Artificial Sequence; identical to SEQ ID NO: 19666
  GFR-binding peptide
  MOD_RES (7), (41): Xaa is C or S

SEQ ID NO: 22771 - protein, 40 aa, Artificial Sequence; identical to SEQ ID NO: 19667
  GFR-binding peptide
  MOD_RES (5), (5): Xaa is C or S
  MOD_RES (21), (22), (23), (24), (25): Xaa is A or G
  MOD_RES (26), (27), (28), (29): Xaa is A or G or is absent

SEQ ID NO: 22772 - protein, 39 aa, Artificial Sequence; identical to SEQ ID NO: 19668
  GFR-binding peptide
  MOD_RES (37), (39): Xaa is C or S
  MOD_RES (16), (17), (18), (19), (20): Xaa is A or G
  MOD_RES (21), (22), (23), (24): Xaa is A or G or is absent

SEQ ID NO: 22773 - protein, 38 aa, Artificial Sequence; identical to SEQ ID NO: 19669
  GFR-binding peptide
  MOD_RES (36), (38): Xaa is C or S

SEQ ID NO: 22774 - protein, 39 aa, Artificial Sequence; identical to SEQ ID NO: 19670
  GFR-binding peptide
  MOD_RES (3), (37), (39): Xaa is C or S
  MOD_RES (17), (18), (19), (20), (21): Xaa is A or G
  MOD_RES (22), (23), (24), (25): Xaa is A or G or is absent

SEQ ID NO: 22775 - protein, 43 aa, Artificial Sequence; identical to SEQ ID NO: 19671
  GFR-binding peptide
  MOD_RES (6), (40), (42): Xaa is C or S
  MOD_RES (20), (21), (22), (23), (24): Xaa is A or G
  MOD_RES (25), (26), (27), (28): Xaa is A or G or is absent

SEQ ID NO: 22776 - protein, 40 aa, Artificial Sequence; identical to SEQ ID NO: 19672
  GFR-binding peptide
  MOD_RES (1), (38), (40): Xaa is C or S
  MOD_RES (17), (18), (19), (20), (21): Xaa is A or G
  MOD_RES (22), (23), (24), (25): Xaa is A or G or is absent

SEQ ID NO: 22777 - protein, 44 aa, Artificial Sequence; identical to SEQ ID NO: 19673
  GFR-binding peptide
  MOD_RES (5), (42), (44): Xaa is C or S
  MOD_RES (21), (22), (23), (24), (25): Xaa is A or G
  MOD_RES (26), (27), (28), (29): Xaa is A or G or is absent

SEQ ID NO: 22778 - protein, 38 aa, Artificial Sequence; identical to SEQ ID NO: 19674
  GFR-binding peptide
  MOD_RES (6), (6): Xaa is C or S
  MOD_RES (20), (21), (22), (23), (24): Xaa is A or G
  MOD_RES (25), (26), (27), (28): Xaa is A or G or is absent

SEQ ID NO: 22779 - protein, 36 aa, Artificial Sequence; identical to SEQ ID NO: 19675
  GFR-binding peptide
  MOD_RES (2), (36): Xaa is C or S
  MOD_RES (16), (17), (18), (19), (20): Xaa is A or G
  MOD_RES (21), (22), (23), (24): Xaa is A or G or is absent

SEQ ID NO: 22780 - protein, 40 aa, Artificial Sequence; identical to SEQ ID NO: 19676
  GFR-binding peptide
  MOD_RES (4), (38), (40): Xaa is C or S

SEQ ID NO: 22781 - protein, 33 aa, Artificial Sequence; identical to SEQ ID NO: 19677
  GFR-binding peptide
  MOD_RES (14), (15), (16), (17), (18): Xaa is A or G
  MOD_RES (19), (20), (21), (22): Xaa is A or G or is absent

SEQ ID NO: 22782 - protein, 43 aa, Artificial Sequence; identical to SEQ ID NO: 19678
  GFR-binding peptide
  MOD_RES (6), (40), (42): Xaa is C or S

SEQ ID NO: 22783 - protein, 40 aa, Artificial Sequence; identical to SEQ ID NO: 19679
  GFR-binding peptide
  MOD_RES (7), (7): Xaa is C or S
  MOD_RES (21), (22), (23), (24), (25): Xaa is A or G
  MOD_RES (26), (27), (28), (29): Xaa is A or G or is absent

SEQ ID NO: 22784 - protein, 40 aa, Artificial Sequence; identical to SEQ ID NO: 19680
  GFR-binding peptide
  MOD_RES (7), (7): Xaa is C or S
  MOD_RES (21), (22), (23), (24), (25): Xaa is A or G
  MOD_RES (26), (27), (28), (29): Xaa is A or G or is absent

SEQ ID NO: 22785 - protein, 37 aa, Artificial Sequence; identical to SEQ ID NO: 19681
  GFR-binding peptide
  MOD_RES (2), (36): Xaa is C or S
  MOD_RES (16), (17), (18), (19), (20): Xaa is A or G
  MOD_RES (21), (22), (23), (24): Xaa is A or G or is absent

SEQ ID NO: 22786 - protein, 41 aa, Artificial Sequence; identical to SEQ ID NO: 19682
  GFR-binding peptide
  MOD_RES (7), (41): Xaa is C or S
  MOD_RES (21), (22), (23), (24), (25): Xaa is A or G
  MOD_RES (26), (27), (28), (29): Xaa is A or G or is absent

SEQ ID NO: 22787 - protein, 38 aa, Artificial Sequence; identical to SEQ ID NO: 19683
  GFR-binding peptide
  MOD_RES (4), (4): Xaa is C or S

SEQ ID NO: 22788 - protein, 37 aa, Artificial Sequence; identical to SEQ ID NO: 19684
  GFR-binding peptide
  MOD_RES (37), (37): Xaa is C or S
  MOD_RES (16), (17), (18), (19), (20): Xaa is A or G
  MOD_RES (21), (22), (23), (24): Xaa is A or G or is absent

SEQ ID NO: 22789 - protein, 36 aa, Artificial Sequence; identical to SEQ ID NO: 19685
  GFR-binding peptide
  MOD_RES (2), (36): Xaa is C or S
  MOD_RES (16), (17), (18), (19), (20): Xaa is A or G
  MOD_RES (21), (22), (23), (24): Xaa is A or G or is absent

SEQ ID NO: 22790 - protein, 36 aa, Artificial Sequence; identical to SEQ ID NO: 19686
  GFR-binding peptide
  MOD_RES (1), (35): Xaa is C or S
  MOD_RES (15), (16), (17), (18), (19): Xaa is A or G
  MOD_RES (20), (21), (22), (23): Xaa is A or G or is absent

SEQ ID NO: 22791 - protein, 35 aa, Artificial Sequence; identical to SEQ ID NO: 19687
  GFR-binding peptide
  MOD_RES (35), (35): Xaa is C or S

SEQ ID NO: 22792 - protein, 41 aa, Artificial Sequence; identical to SEQ ID NO: 19688
  GFR-binding peptide
  MOD_RES (5), (39), (41): Xaa is C or S

SEQ ID NO: 22793 - protein, 38 aa, Artificial Sequence; identical to SEQ ID NO: 19689
  GFR-binding peptide
  MOD_RES (35), (37): Xaa is C or S
  MOD_RES (14), (15), (16), (17), (18): Xaa is A or G
  MOD_RES (19), (20), (21), (22): Xaa is A or G or is absent

SEQ ID NO: 22794 - protein, 39 aa, Artificial Sequence; identical to SEQ ID NO: 19690
  GFR-binding peptide
  MOD_RES (5), (5): Xaa is C or S

SEQ ID NO: 22795 - protein, 40 aa, Artificial Sequence; identical to SEQ ID NO: 19691
  GFR-binding peptide
  MOD_RES (2), (39): Xaa is C or S

SEQ ID NO: 22796 - protein, 38 aa, Artificial Sequence; identical to SEQ ID NO: 19692
  GFR-binding peptide
  MOD_RES (37), (37): Xaa is C or S

SEQ ID NO: 22797 - protein, 38 aa, Artificial Sequence; identical to SEQ ID NO: 19693
  GFR-binding peptide
  MOD_RES (2), (36), (38): Xaa is C or S
  MOD_RES (16), (17), (18), (19), (20): Xaa is A or G
  MOD_RES (21), (22), (23), (24): Xaa is A or G or is absent

SEQ ID NO: 22798 - protein, 39 aa, Artificial Sequence; identical to SEQ ID NO: 19694
  GFR-binding peptide
  MOD_RES (2), (39): Xaa is C or S
  MOD_RES (18), (19), (20), (21), (22): Xaa is A or G
  MOD_RES (23), (24), (25), (26): Xaa is A or G or is absent

SEQ ID NO: 22799 - protein, 35 aa, Artificial Sequence; identical to SEQ ID NO: 19695
  GFR-binding peptide
  MOD_RES (1), (35): Xaa is C or S
  MOD_RES (15), (16), (17), (18), (19): Xaa is A or G
  MOD_RES (20), (21), (22), (23): Xaa is A or G or is absent

SEQ ID NO: 22800 - protein, 39 aa, Artificial Sequence; identical to SEQ ID NO: 19696
  GFR-binding peptide
  MOD_RES (5), (5): Xaa is C or S

SEQ ID NO: 22801 - protein, 40 aa, Artificial Sequence; identical to SEQ ID NO: 19697
  GFR-binding peptide
  MOD_RES (5), (5): Xaa is C or S

SEQ ID NO: 22802 - protein, 40 aa, Artificial Sequence; identical to SEQ ID NO: 19698
  GFR-binding peptide
  MOD_RES (1), (38), (40): Xaa is C or S

SEQ ID NO: 22803 - protein, 38 aa, Artificial Sequence; identical to SEQ ID NO: 19699
  GFR-binding peptide
  MOD_RES (1), (38): Xaa is C or S
  MOD_RES (17), (18), (19), (20), (21): Xaa is A or G
  MOD_RES (22), (23), (24), (25): Xaa is A or G or is absent

SEQ ID NO: 22804 - protein, 41 aa, Artificial Sequence; identical to SEQ ID NO: 19700
  GFR-binding peptide
  MOD_RES (1), (38), (40): Xaa is C or S

SEQ ID NO: 22805 - protein, 37 aa, Artificial Sequence; identical to SEQ ID NO: 19701
  GFR-binding peptide
  MOD_RES (1), (35), (37): Xaa is C or S
  MOD_RES (15), (16), (17), (18), (19): Xaa is A or G
  MOD_RES (20), (21), (22), (23): Xaa is A or G or is absent

SEQ ID NO: 22806 - protein, 42 aa, Artificial Sequence; identical to SEQ ID NO: 19702
  GFR-binding peptide
  MOD_RES (5), (39), (41): Xaa is C or S
  MOD_RES (19), (20), (21), (22), (23): Xaa is A or G
  MOD_RES (24), (25), (26), (27): Xaa is A or G or is absent

SEQ ID NO: 22807 - protein, 37 aa, Artificial Sequence; identical to SEQ ID NO: 19703
  GFR-binding peptide
  MOD_RES (1), (1): Xaa is C or S

SEQ ID NO: 22808 - protein, 33 aa, Artificial Sequence; identical to SEQ ID NO: 19704
  GFR-binding peptide
  MOD_RES (14), (15), (16), (17), (18): Xaa is A or G
  MOD_RES (19), (20), (21), (22): Xaa is A or G or is absent

SEQ ID NO: 22809 - protein, 42 aa, Artificial Sequence; identical to SEQ ID NO: 19705
  GFR-binding peptide
  MOD_RES (7), (41): Xaa is C or S

SEQ ID NO: 22810 - protein, 39 aa, Artificial Sequence; identical to SEQ ID NO: 19706
  GFR-binding peptide
  MOD_RES (36), (38): Xaa is C or S
  MOD_RES (15), (16), (17), (18), (19): Xaa is A or G
  MOD_RES (20), (21), (22), (23): Xaa is A or G or is absent

SEQ ID NO: 22811 - protein, 36 aa, Artificial Sequence; identical to SEQ ID NO: 19707
  GFR-binding peptide
  MOD_RES (35), (35): Xaa is C or S

SEQ ID NO: 22812 - protein, 33 aa, Artificial Sequence; identical to SEQ ID NO: 19708
  GFR-binding peptide
  MOD_RES (14), (15), (16), (17), (18): Xaa is A or G
  MOD_RES (19), (20), (21), (22): Xaa is A or G or is absent

SEQ ID NO: 22813 - protein, 37 aa, Artificial Sequence; identical to SEQ ID NO: 19709
  GFR-binding peptide
  MOD_RES (4), (4): Xaa is C or S
  MOD_RES (18), (19), (20), (21), (22): Xaa is A or G
  MOD_RES (23), (24), (25), (26): Xaa is A or G or is absent

SEQ ID NO: 22814 - protein, 44 aa, Artificial Sequence; identical to SEQ ID NO: 19710
  GFR-binding peptide
  MOD_RES (4), (41), (43): Xaa is C or S
  MOD_RES (20), (21), (22), (23), (24): Xaa is A or G
  MOD_RES (25), (26), (27), (28): Xaa is A or G or is absent

SEQ ID NO: 22815 - protein, 38 aa, Artificial Sequence; identical to SEQ ID NO: 19711
  GFR-binding peptide
  MOD_RES (2), (2): Xaa is C or S
  MOD_RES (18), (19), (20), (21), (22): Xaa is A or G
  MOD_RES (23), (24), (25), (26): Xaa is A or G or is absent

SEQ ID NO: 22816 - protein, 41 aa, Artificial Sequence; identical to SEQ ID NO: 19712
  GFR-binding peptide
  MOD_RES (2), (39), (41): Xaa is C or S

SEQ ID NO: 22817 - protein, 39 aa, Artificial Sequence; identical to SEQ ID NO: 19713
  GFR-binding peptide
  MOD_RES (2), (39): Xaa is C or S
  MOD_RES (18), (19), (20), (21), (22): Xaa is A or G
  MOD_RES (23), (24), (25), (26): Xaa is A or G or is absent

SEQ ID NO: 22818 - protein, 34 aa, Artificial Sequence; identical to SEQ ID NO: 19714
  GFR-binding peptide
  MOD_RES (34), (34): Xaa is C or S

SEQ ID NO: 22819 - protein, 39 aa, Artificial Sequence; identical to SEQ ID NO: 19715
  GFR-binding peptide
  MOD_RES (5), (5): Xaa is C or S

SEQ ID NO: 22820 - protein, 42 aa, Artificial Sequence; identical to SEQ ID NO: 19716
  GFR-binding peptide
  MOD_RES (6), (40), (42): Xaa is C or S
  MOD_RES (20), (21), (22), (23), (24): Xaa is A or G
  MOD_RES (25), (26), (27), (28): Xaa is A or G or is absent

SEQ ID NO: 22821 - protein, 39 aa, Artificial Sequence; identical to SEQ ID NO: 19717
  GFR-binding peptide
  MOD_RES (36), (38): Xaa is C or S

SEQ ID NO: 22822 - protein, 34 aa, Artificial Sequence; identical to SEQ ID NO: 19718
  GFR-binding peptide

SEQ ID NO: 22823 - protein, 38 aa, Artificial Sequence; identical to SEQ ID NO: 19719
  GFR-binding peptide
  MOD_RES (6), (6): Xaa is C or S
  MOD_RES (20), (21), (22), (23), (24): Xaa is A or G
  MOD_RES (25), (26), (27), (28): Xaa is A or G or is absent

SEQ ID NO: 22824 - protein, 42 aa, Artificial Sequence; identical to SEQ ID NO: 19720
  GFR-binding peptide
  MOD_RES (2), (39), (41): Xaa is C or S
  MOD_RES (18), (19), (20), (21), (22): Xaa is A or G
  MOD_RES (23), (24), (25), (26): Xaa is A or G or is absent

SEQ ID NO: 22825 - protein, 34 aa, Artificial Sequence; identical to SEQ ID NO: 19721
  GFR-binding peptide
  MOD_RES (1), (1): Xaa is C or S

SEQ ID NO: 22826 - protein, 38 aa, Artificial Sequence; identical to SEQ ID NO: 19722
  GFR-binding peptide
  MOD_RES (1), (38): Xaa is C or S

SEQ ID NO: 22827 - protein, 38 aa, Artificial Sequence; identical to SEQ ID NO: 19723
  GFR-binding peptide
  MOD_RES (4), (38): Xaa is C or S

SEQ ID NO: 22828 - protein, 40 aa, Artificial Sequence; identical to SEQ ID NO: 19724
  GFR-binding peptide
  MOD_RES (4), (38), (40): Xaa is C or S
  MOD_RES (18), (19), (20), (21), (22): Xaa is A or G
  MOD_RES (23), (24), (25), (26): Xaa is A or G or is absent

SEQ ID NO: 22829 - protein, 39 aa, Artificial Sequence; identical to SEQ ID NO: 19725
  GFR-binding peptide
  MOD_RES (1), (38): Xaa is C or S

SEQ ID NO: 22830 - protein, 37 aa, Artificial Sequence; identical to SEQ ID NO: 19726
  GFR-binding peptide
  MOD_RES (4), (4): Xaa is C or S

SEQ ID NO: 22831 - protein, 34 aa, Artificial Sequence; identical to SEQ ID NO: 19727
  GFR-binding peptide
  MOD_RES (2), (2): Xaa is C or S

SEQ ID NO: 22832 - protein, 42 aa, Artificial Sequence; identical to SEQ ID NO: 19728
  GFR-binding peptide
  MOD_RES (5), (39), (41): Xaa is C or S

SEQ ID NO: 22833 - protein, 36 aa, Artificial Sequence; identical to SEQ ID NO: 19729
  GFR-binding peptide
  MOD_RES (2), (2): Xaa is C or S
  MOD_RES (18), (19), (20), (21), (22): Xaa is A or G
  MOD_RES (23), (24), (25), (26): Xaa is A or G or is absent

SEQ ID NO: 22834 - protein, 40 aa, Artificial Sequence; identical to SEQ ID NO: 19730
  GFR-binding peptide
  MOD_RES (5), (5): Xaa is C or S
  MOD_RES (21), (22), (23), (24), (25): Xaa is A or G
  MOD_RES (26), (27), (28), (29): Xaa is A or G or is absent

SEQ ID NO: 22835 - protein, 39 aa, Artificial Sequence; identical to SEQ ID NO: 19731
  GFR-binding peptide
  MOD_RES (7), (7): Xaa is C or S
  MOD_RES (21), (22), (23), (24), (25): Xaa is A or G
  MOD_RES (26), (27), (28), (29): Xaa is A or G or is absent

SEQ ID NO: 22836 - protein, 41 aa, Artificial Sequence; identical to SEQ ID NO: 19732
  GFR-binding peptide
  MOD_RES (2), (39), (41): Xaa is C or S

SEQ ID NO: 22837 - protein, 37 aa, Artificial Sequence; identical to SEQ ID NO: 19733
  GFR-binding peptide
  MOD_RES (3), (37): Xaa is C or S

SEQ ID NO: 22838 - protein, 35 aa, Artificial Sequence; identical to SEQ ID NO: 19734
  GFR-binding peptide
  MOD_RES (1), (35): Xaa is C or S

SEQ ID NO: 22839 - protein, 35 aa, Artificial Sequence; identical to SEQ ID NO: 19735
  GFR-binding peptide
  MOD_RES (3), (3): Xaa is C or S
  MOD_RES (17), (18), (19), (20), (21): Xaa is A or G
  MOD_RES (22), (23), (24), (25): Xaa is A or G or is absent

SEQ ID NO: 22840 - protein, 39 aa, Artificial Sequence; identical to SEQ ID NO: 19736
  GFR-binding peptide
  MOD_RES (4), (38): Xaa is C or S

SEQ ID NO: 22841 - protein, 34 aa, Artificial Sequence; identical to SEQ ID NO: 19737
  GFR-binding peptide
  MOD_RES (34), (34): Xaa is C or S
  MOD_RES (14), (15), (16), (17), (18): Xaa is A or G
  MOD_RES (19), (20), (21), (22): Xaa is A or G or is absent

SEQ ID NO: 22842 - protein, 41 aa, Artificial Sequence; identical to SEQ ID NO: 19738
  GFR-binding peptide
  MOD_RES (7), (41): Xaa is C or S
  MOD_RES (21), (22), (23), (24), (25): Xaa is A or G
  MOD_RES (26), (27), (28), (29): Xaa is A or G or is absent

SEQ ID NO: 22843 - protein, 37 aa, Artificial Sequence; identical to SEQ ID NO: 19739
  GFR-binding peptide
  MOD_RES (2), (36): Xaa is C or S
  MOD_RES (16), (17), (18), (19), (20): Xaa is A or G
  MOD_RES (21), (22), (23), (24): Xaa is A or G or is absent

SEQ ID NO: 22844 - protein, 38 aa, Artificial Sequence; identical to SEQ ID NO: 19740
  GFR-binding peptide
  MOD_RES (2), (36), (38): Xaa is C or S

SEQ ID NO: 22845 - protein, 43 aa, Artificial Sequence; identical to SEQ ID NO: 19741
  GFR-binding peptide
  MOD_RES (5), (42): Xaa is C or S
  MOD_RES (21), (22), (23), (24), (25): Xaa is A or G
  MOD_RES (26), (27), (28), (29): Xaa is A or G or is absent

SEQ ID NO: 22846 - protein, 42 aa, Artificial Sequence; identical to SEQ ID NO: 19742
  GFR-binding peptide
  MOD_RES (3), (40), (42): Xaa is C or S
  MOD_RES (19), (20), (21), (22), (23): Xaa is A or G
  MOD_RES (24), (25), (26), (27): Xaa is A or G or is absent

SEQ ID NO: 22847 - protein, 42 aa, Artificial Sequence; identical to SEQ ID NO: 19743
  GFR-binding peptide
  MOD_RES (5), (42): Xaa is C or S

SEQ ID NO: 22848 - protein, 45 aa, Artificial Sequence; identical to SEQ ID NO: 19744
  GFR-binding peptide
  MOD_RES (5), (42), (44): Xaa is C or S
  MOD_RES (21), (22), (23), (24), (25): Xaa is A or G
  MOD_RES (26), (27), (28), (29): Xaa is A or G or is absent

SEQ ID NO: 22849 - protein, 37 aa, Artificial Sequence; identical to SEQ ID NO: 19745
  GFR-binding peptide
  MOD_RES (37), (37): Xaa is C or S
  MOD_RES (16), (17), (18), (19), (20): Xaa is A or G
  MOD_RES (21), (22), (23), (24): Xaa is A or G or is absent

SEQ ID NO: 22850 - protein, 41 aa, Artificial Sequence; identical to SEQ ID NO: 19746
  GFR-binding peptide
  MOD_RES (6), (40): Xaa is C or S
  MOD_RES (20), (21), (22), (23), (24): Xaa is A or G
  MOD_RES (25), (26), (27), (28): Xaa is A or G or is absent

SEQ ID NO: 22851 - protein, 42 aa, Artificial Sequence; identical to SEQ ID NO: 19747
  GFR-binding peptide
  MOD_RES (5), (39), (41): Xaa is C or S

SEQ ID NO: 22852 - protein, 41 aa, Artificial Sequence; identical to SEQ ID NO: 19748
  GFR-binding peptide
  MOD_RES (5), (39), (41): Xaa is C or S
  MOD_RES (19), (20), (21), (22), (23): Xaa is A or G
  MOD_RES (24), (25), (26), (27): Xaa is A or G or is absent

SEQ ID NO: 22853 - protein, 41 aa, Artificial Sequence; identical to SEQ ID NO: 19749
  GFR-binding peptide
  MOD_RES (3), (40): Xaa is C or S
  MOD_RES (19), (20), (21), (22), (23): Xaa is A or G
  MOD_RES (24), (25), (26), (27): Xaa is A or G or is absent

SEQ ID NO: 22854 - protein, 39 aa, Artificial Sequence; identical to SEQ ID NO: 19750
  GFR-binding peptide
  MOD_RES (3), (3): Xaa is C or S

SEQ ID NO: 22855 - protein, 35 aa, Artificial Sequence; identical to SEQ ID NO: 19751
  GFR-binding peptide
  MOD_RES (15), (16), (17), (18), (19): Xaa is A or G
  MOD_RES (20), (21), (22), (23): Xaa is A or G or is absent

SEQ ID NO: 22856 - protein, 41 aa, Artificial Sequence; identical to SEQ ID NO: 19752
  GFR-binding peptide
  MOD_RES (4), (38), (40): Xaa is C or S
  MOD_RES (18), (19), (20), (21), (22): Xaa is A or G
  MOD_RES (23), (24), (25), (26): Xaa is A or G or is absent

SEQ ID NO: 22857 - protein, 39 aa, Artificial Sequence; identical to SEQ ID NO: 19753
  GFR-binding peptide
  MOD_RES (5), (39): Xaa is C or S
  MOD_RES (19), (20), (21), (22), (23): Xaa is A or G
  MOD_RES (24), (25), (26), (27): Xaa is A or G or is absent

SEQ ID NO: 22858 - protein, 36 aa, Artificial Sequence; identical to SEQ ID NO: 19754
  GFR-binding peptide
  MOD_RES (3), (3): Xaa is C or S

SEQ ID NO: 22859 - protein, 34 aa, Artificial Sequence; identical to SEQ ID NO: 19755
  GFR-binding peptide

SEQ ID NO: 22860 - protein, 42 aa, Artificial Sequence; identical to SEQ ID NO: 19756
  GFR-binding peptide
  MOD_RES (7), (41): Xaa is C or S
  MOD_RES (21), (22), (23), (24), (25): Xaa is A or G
  MOD_RES (26), (27), (28), (29): Xaa is A or G or is absent

SEQ ID NO: 22861 - protein, 36 aa, Artificial Sequence; identical to SEQ ID NO: 19757
  GFR-binding peptide
  MOD_RES (1), (35): Xaa is C or S

SEQ ID NO: 22862 - protein, 40 aa, Artificial Sequence; identical to SEQ ID NO: 19758
  GFR-binding peptide
  MOD_RES (4), (4): Xaa is C or S

SEQ ID NO: 22863 - protein, 42 aa, Artificial Sequence; identical to SEQ ID NO: 19759
  GFR-binding peptide
  MOD_RES (2), (39), (41): Xaa is C or S

SEQ ID NO: 22864 - protein, 35 aa, Artificial Sequence; identical to SEQ ID NO: 19760
  GFR-binding peptide
  MOD_RES (35), (35): Xaa is C or S

SEQ ID NO: 22865 - protein, 38 aa, Artificial Sequence; identical to SEQ ID NO: 19761
  GFR-binding peptide
  MOD_RES (5), (5): Xaa is C or S

SEQ ID NO: 22866 - protein, 35 aa, Artificial Sequence; identical to SEQ ID NO: 19762
  GFR-binding peptide
  MOD_RES (34), (34): Xaa is C or S

SEQ ID NO: 22867 - protein, 39 aa, Artificial Sequence; identical to SEQ ID NO: 19763
  GFR-binding peptide
  MOD_RES (36), (38): Xaa is C or S
  MOD_RES (15), (16), (17), (18), (19): Xaa is A or G
  MOD_RES (20), (21), (22), (23): Xaa is A or G or is absent

SEQ ID NO: 22868 - protein, 44 aa, Artificial Sequence; identical to SEQ ID NO: 19764
  GFR-binding peptide
  MOD_RES (4), (41), (43): Xaa is C or S
  MOD_RES (20), (21), (22), (23), (24): Xaa is A or G
  MOD_RES (25), (26), (27), (28): Xaa is A or G or is absent

SEQ ID NO: 22869 - protein, 37 aa, Artificial Sequence; identical to SEQ ID NO: 19765
  GFR-binding peptide
  MOD_RES (5), (5): Xaa is C or S
  MOD_RES (19), (20), (21), (22), (23): Xaa is A or G
  MOD_RES (24), (25), (26), (27): Xaa is A or G or is absent

SEQ ID NO: 22870 - protein, 39 aa, Artificial Sequence; identical to SEQ ID NO: 19766
  GFR-binding peptide
  MOD_RES (2), (36), (38): Xaa is C or S
  MOD_RES (16), (17), (18), (19), (20): Xaa is A or G
  MOD_RES (21), (22), (23), (24): Xaa is A or G or is absent

SEQ ID NO: 22871 - protein, 40 aa, Artificial Sequence; identical to SEQ ID NO: 19767
  GFR-binding peptide
  MOD_RES (7), (7): Xaa is C or S

SEQ ID NO: 22872 - protein, 37 aa, Artificial Sequence; identical to SEQ ID NO: 19768
  GFR-binding peptide
  MOD_RES (34), (36): Xaa is C or S
  MOD_RES (14), (15), (16), (17), (18): Xaa is A or G
  MOD_RES (19), (20), (21), (22): Xaa is A or G or is absent

SEQ ID NO: 22873 - protein, 35 aa, Artificial Sequence; identical to SEQ ID NO: 19769
  GFR-binding peptide
  MOD_RES (2), (2): Xaa is C or S

SEQ ID NO: 22874 - protein, 41 aa, Artificial Sequence; identical to SEQ ID NO: 19770
  GFR-binding peptide
  MOD_RES (3), (40): Xaa is C or S
  MOD_RES (19), (20), (21), (22), (23): Xaa is A or G
  MOD_RES (24), (25), (26), (27): Xaa is A or G or is absent

SEQ ID NO: 22875 - protein, 38 aa, Artificial Sequence; identical to SEQ ID NO: 19771
  GFR-binding peptide
  MOD_RES (4), (38): Xaa is C or S

SEQ ID NO: 22876 - protein, 38 aa, Artificial Sequence; identical to SEQ ID NO: 19772
  GFR-binding peptide
  MOD_RES (4), (4): Xaa is C or S
  MOD_RES (20), (21), (22), (23), (24): Xaa is A or G
  MOD_RES (25), (26), (27), (28): Xaa is A or G or is absent

SEQ ID NO: 22877 - protein, 38 aa, Artificial Sequence; identical to SEQ ID NO: 19773
  GFR-binding peptide
  MOD_RES (35), (37): Xaa is C or S
  MOD_RES (14), (15), (16), (17), (18): Xaa is A or G
  MOD_RES (19), (20), (21), (22): Xaa is A or G or is absent

SEQ ID NO: 22878 - protein, 35 aa, Artificial Sequence; identical to SEQ ID NO: 19774
  GFR-binding peptide
  MOD_RES (1), (1): Xaa is C or S

SEQ ID NO: 22879 - protein, 37 aa, Artificial Sequence; identical to SEQ ID NO: 19775
  GFR-binding peptide
  MOD_RES (36), (36): Xaa is C or S
  MOD_RES (15), (16), (17), (18), (19): Xaa is A or G
  MOD_RES (20), (21), (22), (23): Xaa is A or G or is absent

SEQ ID NO: 22880 - protein, 39 aa, Artificial Sequence; identical to SEQ ID NO: 19776
  GFR-binding peptide
  MOD_RES (7), (7): Xaa is C or S
  MOD_RES (21), (22), (23), (24), (25): Xaa is A or G
  MOD_RES (26), (27), (28), (29): Xaa is A or G or is absent

SEQ ID NO: 22881 - protein, 36 aa, Artificial Sequence; identical to SEQ ID NO: 19777
  GFR-binding peptide
  MOD_RES (1), (35): Xaa is C or S

SEQ ID NO: 22882 - protein, 35 aa, Artificial Sequence; identical to SEQ ID NO: 19778
  GFR-binding peptide
  MOD_RES (2), (2): Xaa is C or S

SEQ ID NO: 22883 - protein, 38 aa, Artificial Sequence; identical to SEQ ID NO: 19779
  GFR-binding peptide
  MOD_RES (5), (5): Xaa is C or S
  MOD_RES (19), (20), (21), (22), (23): Xaa is A or G
  MOD_RES (24), (25), (26), (27): Xaa is A or G or is absent

SEQ ID NO: 22884 - protein, 36 aa, Artificial Sequence; identical to SEQ ID NO: 19780
  GFR-binding peptide
  MOD_RES (35), (35): Xaa is C or S

SEQ ID NO: 22885 - protein, 41 aa, Artificial Sequence; identical to SEQ ID NO: 19781
  GFR-binding peptide
  MOD_RES (5), (5): Xaa is C or S
  MOD_RES (21), (22), (23), (24), (25): Xaa is A or G
  MOD_RES (26), (27), (28), (29): Xaa is A or G or is absent

SEQ ID NO: 22886 - protein, 39 aa, Artificial Sequence; identical to SEQ ID NO: 19782
  GFR-binding peptide
  MOD_RES (3), (3): Xaa is C or S
  MOD_RES (19), (20), (21), (22), (23): Xaa is A or G
  MOD_RES (24), (25), (26), (27): Xaa is A or G or is absent

SEQ ID NO: 22887 - protein, 38 aa, Artificial Sequence; identical to SEQ ID NO: 19783
  GFR-binding peptide
  MOD_RES (3), (3): Xaa is C or S
  MOD_RES (19), (20), (21), (22), (23): Xaa is A or G
  MOD_RES (24), (25), (26), (27): Xaa is A or G or is absent

SEQ ID NO: 22888 - protein, 38 aa, Artificial Sequence; identical to SEQ ID NO: 19784
  GFR-binding peptide
  MOD_RES (2), (2): Xaa is C or S
  MOD_RES (18), (19), (20), (21), (22): Xaa is A or G
  MOD_RES (23), (24), (25), (26): Xaa is A or G or is absent

SEQ ID NO: 22889 - protein, 35 aa, Artificial Sequence; identical to SEQ ID NO: 19785
  GFR-binding peptide
  MOD_RES (3), (3): Xaa is C or S

SEQ ID NO: 22890 - protein, 41 aa, Artificial Sequence; identical to SEQ ID NO: 19786
  GFR-binding peptide
  MOD_RES (5), (5): Xaa is C or S

SEQ ID NO: 22891 - protein, 35 aa, Artificial Sequence; identical to SEQ ID NO: 19787
  GFR-binding peptide
  MOD_RES (2), (2): Xaa is C or S
  MOD_RES (16), (17), (18), (19), (20): Xaa is A or G
  MOD_RES (21), (22), (23), (24): Xaa is A or G or is absent

SEQ ID NO: 22892 - protein, 32 aa, Artificial Sequence; identical to SEQ ID NO: 19788
  GFR-binding peptide
  MOD_RES (14), (15), (16), (17), (18): Xaa is A or G
  MOD_RES (19), (20), (21), (22): Xaa is A or G or is absent

SEQ ID NO: 22893 - protein, 36 aa, Artificial Sequence; identical to SEQ ID NO: 19789
  GFR-binding peptide
  MOD_RES (1), (1): Xaa is C or S

SEQ ID NO: 22894 - protein, 36 aa, Artificial Sequence; identical to SEQ ID NO: 19790
  GFR-binding peptide
  MOD_RES (35), (35): Xaa is C or S
  MOD_RES (14), (15), (16), (17), (18): Xaa is A or G
  MOD_RES (19), (20), (21), (22): Xaa is A or G or is absent

SEQ ID NO: 22895 - protein, 44 aa, Artificial Sequence; identical to SEQ ID NO: 19791
  GFR-binding peptide
  MOD_RES (4), (41), (43): Xaa is C or S
  MOD_RES (20), (21), (22), (23), (24): Xaa is A or G
  MOD_RES (25), (26), (27), (28): Xaa is A or G or is absent

SEQ ID NO: 22896 - protein, 44 aa, Artificial Sequence; identical to SEQ ID NO: 19792
  GFR-binding peptide
  MOD_RES (7), (41), (43): Xaa is C or S
  MOD_RES (21), (22), (23), (24), (25): Xaa is A or G
  MOD_RES (26), (27), (28), (29): Xaa is A or G or is absent

SEQ ID NO: 22897 - protein, 39 aa, Artificial Sequence; identical to SEQ ID NO: 19793
  GFR-binding peptide
  MOD_RES (2), (36), (38): Xaa is C or S
  MOD_RES (16), (17), (18), (19), (20): Xaa is A or G
  MOD_RES (21), (22), (23), (24): Xaa is A or G or is absent

SEQ ID NO: 22898 - protein, 42 aa, Artificial Sequence; identical to SEQ ID NO: 19794
  GFR-binding peptide
  MOD_RES (3), (40), (42): Xaa is C or S

SEQ ID NO: 22899 - protein, 39 aa, Artificial Sequence; identical to SEQ ID NO: 19795
  GFR-binding peptide
  MOD_RES (4), (4): Xaa is C or S
  MOD_RES (20), (21), (22), (23), (24): Xaa is A or G
  MOD_RES (25), (26), (27), (28): Xaa is A or G or is absent

SEQ ID NO: 22900 - protein, 34 aa, Artificial Sequence; identical to SEQ ID NO: 19796
  GFR-binding peptide
  MOD_RES (2), (2): Xaa is C or S
  MOD_RES (16), (17), (18), (19), (20): Xaa is A or G
  MOD_RES (21), (22), (23), (24): Xaa is A or G or is absent

SEQ ID NO: 22901 - protein, 35 aa, Artificial Sequence; identical to SEQ ID NO: 19797
  GFR-binding peptide
  MOD_RES (16), (17), (18), (19), (20): Xaa is A or G
  MOD_RES (21), (22), (23), (24): Xaa is A or G or is absent

SEQ ID NO: 22902 - protein, 43 aa, Artificial Sequence; identical to SEQ ID NO: 19798
  GFR-binding peptide
  MOD_RES (3), (40), (42): Xaa is C or S
  MOD_RES (19), (20), (21), (22), (23): Xaa is A or G
  MOD_RES (24), (25), (26), (27): Xaa is A or G or is absent

SEQ ID NO: 22903 - protein, 40 aa, Artificial Sequence; identical to SEQ ID NO: 19799
  GFR-binding peptide
  MOD_RES (5), (39): Xaa is C or S
  MOD_RES (19), (20), (21), (22), (23): Xaa is A or G
  MOD_RES (24), (25), (26), (27): Xaa is A or G or is absent

SEQ ID NO: 22904 - protein, 36 aa, Artificial Sequence; identical to SEQ ID NO: 19800
  GFR-binding peptide
  MOD_RES (2), (2): Xaa is C or S

SEQ ID NO: 22905 - protein, 40 aa, Artificial Sequence; identical to SEQ ID NO: 19801
  GFR-binding peptide
  MOD_RES (5), (39): Xaa is C or S
  MOD_RES (19), (20), (21), (22), (23): Xaa is A or G
  MOD_RES (24), (25), (26), (27): Xaa is A or G or is absent

SEQ ID NO: 22906 - protein, 35 aa, Artificial Sequence; identical to SEQ ID NO: 19802
  GFR-binding peptide
  MOD_RES (34), (34): Xaa is C or S
  MOD_RES (14), (15), (16), (17), (18): Xaa is A or G
  MOD_RES (19), (20), (21), (22): Xaa is A or G or is absent

SEQ ID NO: 22907 - protein, 40 aa, Artificial Sequence; identical to SEQ ID NO: 19803
  GFR-binding peptide
  MOD_RES (5), (39): Xaa is C or S
  MOD_RES (19), (20), (21), (22), (23): Xaa is A or G
  MOD_RES (24), (25), (26), (27): Xaa is A or G or is absent

SEQ ID NO: 22908 - protein, 39 aa, Artificial Sequence; identical to SEQ ID NO: 19804
  GFR-binding peptide
  MOD_RES (37), (39): Xaa is C or S
  MOD_RES (16), (17), (18), (19), (20): Xaa is A or G
  MOD_RES (21), (22), (23), (24): Xaa is A or G or is absent

SEQ ID NO: 22909 - protein, 36 aa, Artificial Sequence; identical to SEQ ID NO: 19805
  GFR-binding peptide
  MOD_RES (16), (17), (18), (19), (20): Xaa is A or G
  MOD_RES (21), (22), (23), (24): Xaa is A or G or is absent

SEQ ID NO: 22910 - protein, 36 aa, Artificial Sequence; identical to SEQ ID NO: 19806
  GFR-binding peptide
  MOD_RES (2), (36): Xaa is C or S
  MOD_RES (16), (17), (18), (19), (20): Xaa is A or G
  MOD_RES (21), (22), (23), (24): Xaa is A or G or is absent

SEQ ID NO: 22911 - protein, 39 aa, Artificial Sequence; identical to SEQ ID NO: 19807
  GFR-binding peptide
  MOD_RES (6), (6): Xaa is C or S

SEQ ID NO: 22912 - protein, 38 aa, Artificial Sequence; identical to SEQ ID NO: 19808
  GFR-binding peptide
  MOD_RES (1), (35), (37): Xaa is C or S

SEQ ID NO: 22913 - protein, 34 aa, Artificial Sequence; identical to SEQ ID NO: 19809
  GFR-binding peptide
  MOD_RES (1), (1): Xaa is C or S
  MOD_RES (15), (16), (17), (18), (19): Xaa is A or G
  MOD_RES (20), (21), (22), (23): Xaa is A or G or is absent

SEQ ID NO: 22914 - protein, 35 aa, Artificial Sequence; identical to SEQ ID NO: 19810
  GFR-binding peptide
  MOD_RES (16), (17), (18), (19), (20): Xaa is A or G
  MOD_RES (21), (22), (23), (24): Xaa is A or G or is absent

SEQ ID NO: 22915 - protein, 40 aa, Artificial Sequence; identical to SEQ ID NO: 19811
  GFR-binding peptide
  MOD_RES (2), (39): Xaa is C or S
  MOD_RES (18), (19), (20), (21), (22): Xaa is A or G
  MOD_RES (23), (24), (25), (26): Xaa is A or G or is absent

SEQ ID NO: 22916 - protein, 44 aa, Artificial Sequence; identical to SEQ ID NO: 19812
  GFR-binding peptide
  MOD_RES (7), (41), (43): Xaa is C or S

SEQ ID NO: 22917 - protein, 36 aa, Artificial Sequence; identical to SEQ ID NO: 19813
  GFR-binding peptide
  MOD_RES (1), (1): Xaa is C or S

SEQ ID NO: 22918 - protein, 39 aa, Artificial Sequence; identical to SEQ ID NO: 19814
  GFR-binding peptide
  MOD_RES (37), (39): Xaa is C or S
  MOD_RES (16), (17), (18), (19), (20): Xaa is A or G
  MOD_RES (21), (22), (23), (24): Xaa is A or G or is absent

SEQ ID NO: 22919 - protein, 39 aa, Artificial Sequence; identical to SEQ ID NO: 19815
  GFR-binding peptide
  MOD_RES (4), (38): Xaa is C or S

SEQ ID NO: 22920 - protein, 43 aa, Artificial Sequence; identical to SEQ ID NO: 19816
  GFR-binding peptide
  MOD_RES (3), (40), (42): Xaa is C or S

SEQ ID NO: 22921 - protein, 36 aa, Artificial Sequence; identical to SEQ ID NO: 19817
  GFR-binding peptide
  MOD_RES (2), (36): Xaa is C or S

SEQ ID NO: 22922 - protein, 42 aa, Artificial Sequence; identical to SEQ ID NO: 19818
  GFR-binding peptide
  MOD_RES (5), (39), (41): Xaa is C or S

SEQ ID NO: 22923 - protein, 41 aa, Artificial Sequence; identical to SEQ ID NO: 19819
  GFR-binding peptide
  MOD_RES (4), (41): Xaa is C or S
  MOD_RES (20), (21), (22), (23), (24): Xaa is A or G
  MOD_RES (25), (26), (27), (28): Xaa is A or G or is absent

SEQ ID NO: 22924 - protein, 43 aa, Artificial Sequence; identical to SEQ ID NO: 19820
  GFR-binding peptide
  MOD_RES (4), (41), (43): Xaa is C or S
  MOD_RES (20), (21), (22), (23), (24): Xaa is A or G
  MOD_RES (25), (26), (27), (28): Xaa is A or G or is absent

SEQ ID NO: 22925 - protein, 34 aa, Artificial Sequence; identical to SEQ ID NO: 19821
  GFR-binding peptide
  MOD_RES (2), (2): Xaa is C or S
  MOD_RES (16), (17), (18), (19), (20): Xaa is A or G
  MOD_RES (21), (22), (23), (24): Xaa is A or G or is absent

SEQ ID NO: 22926 - protein, 40 aa, Artificial Sequence; identical to SEQ ID NO: 19822
  GFR-binding peptide
  MOD_RES (5), (39): Xaa is C or S
  MOD_RES (19), (20), (21), (22), (23): Xaa is A or G
  MOD_RES (24), (25), (26), (27): Xaa is A or G or is absent

SEQ ID NO: 22927 - protein, 44 aa, Artificial Sequence; identical to SEQ ID NO: 19823
  GFR-binding peptide
  MOD_RES (7), (41), (43): Xaa is C or S

SEQ ID NO: 22928 - protein, 39 aa, Artificial Sequence; identical to SEQ ID NO: 19824
  GFR-binding peptide
  MOD_RES (1), (38): Xaa is C or S
  MOD_RES (17), (18), (19), (20), (21): Xaa is A or G
  MOD_RES (22), (23), (24), (25): Xaa is A or G or is absent

SEQ ID NO: 22929 - protein, 37 aa, Artificial Sequence; identical to SEQ ID NO: 19825
  GFR-binding peptide
  MOD_RES (36), (36): Xaa is C or S

SEQ ID NO: 22930 - protein, 36 aa, Artificial Sequence; identical to SEQ ID NO: 19826
  GFR-binding peptide
  MOD_RES (36), (36): Xaa is C or S
  MOD_RES (15), (16), (17), (18), (19): Xaa is A or G
  MOD_RES (20), (21), (22), (23): Xaa is A or G or is absent

SEQ ID NO: 22931 - protein, 38 aa, Artificial Sequence; identical to SEQ ID NO: 19827
  GFR-binding peptide
  MOD_RES (3), (37): Xaa is C or S
  MOD_RES (17), (18), (19), (20), (21): Xaa is A or G
  MOD_RES (22), (23), (24), (25): Xaa is A or G or is absent

SEQ ID NO: 22932 - protein, 43 aa, Artificial Sequence; identical to SEQ ID NO: 19828
  GFR-binding peptide
  MOD_RES (4), (41), (43): Xaa is C or S
  MOD_RES (20), (21), (22), (23), (24): Xaa is A or G
  MOD_RES (25), (26), (27), (28): Xaa is A or G or is absent

SEQ ID NO: 22933 - protein, 38 aa, Artificial Sequence; identical to SEQ ID NO: 19829
  GFR-binding peptide
  MOD_RES (4), (38): Xaa is C or S
  MOD_RES (18), (19), (20), (21), (22): Xaa is A or G
  MOD_RES (23), (24), (25), (26): Xaa is A or G or is absent

SEQ ID NO: 22934 - protein, 38 aa, Artificial Sequence; identical to SEQ ID NO: 19830
  GFR-binding peptide
  MOD_RES (3), (37): Xaa is C or S
  MOD_RES (17), (18), (19), (20), (21): Xaa is A or G
  MOD_RES (22), (23), (24), (25): Xaa is A or G or is absent

SEQ ID NO: 22935 - protein, 34 aa, Artificial Sequence; identical to SEQ ID NO: 19831
  GFR-binding peptide
  MOD_RES (2), (2): Xaa is C or S

SEQ ID NO: 22936 - protein, 39 aa, Artificial Sequence; identical to SEQ ID NO: 19832
  GFR-binding peptide
  MOD_RES (1), (38): Xaa is C or S

SEQ ID NO: 22937 - protein, 38 aa, Artificial Sequence; identical to SEQ ID NO: 19833
  GFR-binding peptide
  MOD_RES (4), (4): Xaa is C or S
  MOD_RES (20), (21), (22), (23), (24): Xaa is A or G
  MOD_RES (25), (26), (27), (28): Xaa is A or G or is absent

SEQ ID NO: 22938 - protein, 36 aa, Artificial Sequence; identical to SEQ ID NO: 19834
  GFR-binding peptide
  MOD_RES (2), (2): Xaa is C or S
  MOD_RES (18), (19), (20), (21), (22): Xaa is A or G
  MOD_RES (23), (24), (25), (26): Xaa is A or G or is absent

SEQ ID NO: 22939 - protein, 34 aa, Artificial Sequence; identical to SEQ ID NO: 19835
  GFR-binding peptide
  MOD_RES (14), (15), (16), (17), (18): Xaa is A or G
  MOD_RES (19), (20), (21), (22): Xaa is A or G or is absent

SEQ ID NO: 22940 - protein, 42 aa, Artificial Sequence; identical to SEQ ID NO: 19836
  GFR-binding peptide
  MOD_RES (6), (40), (42): Xaa is C or S
  MOD_RES (20), (21), (22), (23), (24): Xaa is A or G
  MOD_RES (25), (26), (27), (28): Xaa is A or G or is absent

SEQ ID NO: 22941 - protein, 38 aa, Artificial Sequence; identical to SEQ ID NO: 19837
  GFR-binding peptide
  MOD_RES (5), (5): Xaa is C or S

SEQ ID NO: 22942 - protein, 40 aa, Artificial Sequence; identical to SEQ ID NO: 19838
  GFR-binding peptide
  MOD_RES (2), (39): Xaa is C or S
  MOD_RES (18), (19), (20), (21), (22): Xaa is A or G
  MOD_RES (23), (24), (25), (26): Xaa is A or G or is absent

SEQ ID NO: 22943 - protein, 42 aa, Artificial Sequence; identical to SEQ ID NO: 19839
  GFR-binding peptide
  MOD_RES (3), (40), (42): Xaa is C or S
  MOD_RES (19), (20), (21), (22), (23): Xaa is A or G
  MOD_RES (24), (25), (26), (27): Xaa is A or G or is absent

SEQ ID NO: 22944 - protein, 44 aa, Artificial Sequence; identical to SEQ ID NO: 19840
  GFR-binding peptide
  MOD_RES (5), (42), (44): Xaa is C or S
  MOD_RES (21), (22), (23), (24), (25): Xaa is A or G
  MOD_RES (26), (27), (28), (29): Xaa is A or G or is absent

SEQ ID NO: 22945 - protein, 41 aa, Artificial Sequence; identical to SEQ ID NO: 19841
  GFR-binding peptide
  MOD_RES (4), (41): Xaa is C or S
  MOD_RES (20), (21), (22), (23), (24): Xaa is A or G
  MOD_RES (25), (26), (27), (28): Xaa is A or G or is absent

SEQ ID NO: 22946 - protein, 37 aa, Artificial Sequence; identical to SEQ ID NO: 19842
  GFR-binding peptide
  MOD_RES (35), (37): Xaa is C or S
  MOD_RES (14), (15), (16), (17), (18): Xaa is A or G
  MOD_RES (19), (20), (21), (22): Xaa is A or G or is absent

SEQ ID NO: 22947 - protein, 38 aa, Artificial Sequence; identical to SEQ ID NO: 19843
  GFR-binding peptide
  MOD_RES (6), (6): Xaa is C or S
  MOD_RES (20), (21), (22), (23), (24): Xaa is A or G
  MOD_RES (25), (26), (27), (28): Xaa is A or G or is absent

SEQ ID NO: 22948 - protein, 43 aa, Artificial Sequence; identical to SEQ ID NO: 19844
  GFR-binding peptide
  MOD_RES (4), (41), (43): Xaa is C or S

SEQ ID NO: 22949 - protein, 39 aa, Artificial Sequence; identical to SEQ ID NO: 19845
  GFR-binding peptide
  MOD_RES (2), (36), (38): Xaa is C or S
  MOD_RES (16), (17), (18), (19), (20): Xaa is A or G
  MOD_RES (21), (22), (23), (24): Xaa is A or G or is absent

SEQ ID NO: 22950 - protein, 35 aa, Artificial Sequence; identical to SEQ ID NO: 19846
  GFR-binding peptide
  MOD_RES (3), (3): Xaa is C or S
  MOD_RES (17), (18), (19), (20), (21): Xaa is A or G
  MOD_RES (22), (23), (24), (25): Xaa is A or G or is absent

SEQ ID NO: 22951 - protein, 37 aa, Artificial Sequence; identical to SEQ ID NO: 19847
  GFR-binding peptide
  MOD_RES (1), (35), (37): Xaa is C or S
  MOD_RES (15), (16), (17), (18), (19): Xaa is A or G
  MOD_RES (20), (21), (22), (23): Xaa is A or G or is absent

SEQ ID NO: 22952 - protein, 34 aa, Artificial Sequence; identical to SEQ ID NO: 19848
  GFR-binding peptide
  MOD_RES (1), (1): Xaa is C or S

SEQ ID NO: 22953 - protein, 39 aa, Artificial Sequence; identical to SEQ ID NO: 19849
  GFR-binding peptide
  MOD_RES (3), (3): Xaa is C or S

SEQ ID NO: 22954 - protein, 37 aa, Artificial Sequence; identical to SEQ ID NO: 19850
  GFR-binding peptide
  MOD_RES (3), (3): Xaa is C or S
  MOD_RES (19), (20), (21), (22), (23): Xaa is A or G
  MOD_RES (24), (25), (26), (27): Xaa is A or G or is absent

SEQ ID NO: 22955 - protein, 35 aa, Artificial Sequence; identical to SEQ ID NO: 19851
  GFR-binding peptide
  MOD_RES (2), (2): Xaa is C or S

SEQ ID NO: 22956 - protein, 38 aa, Artificial Sequence; identical to SEQ ID NO: 19852
  GFR-binding peptide
  MOD_RES (4), (4): Xaa is C or S
  MOD_RES (20), (21), (22), (23), (24): Xaa is A or G
  MOD_RES (25), (26), (27), (28): Xaa is A or G or is absent

SEQ ID NO: 22957 - protein, 42 aa, Artificial Sequence; identical to SEQ ID NO: 19853
  GFR-binding peptide
  MOD_RES (3), (40), (42): Xaa is C or S
  MOD_RES (19), (20), (21), (22), (23): Xaa is A or G
  MOD_RES (24), (25), (26), (27): Xaa is A or G or is absent

SEQ ID NO: 22958 - protein, 37 aa, Artificial Sequence; identical to SEQ ID NO: 19854
  GFR-binding peptide
  MOD_RES (37), (37): Xaa is C or S

SEQ ID NO: 22959 - protein, 36 aa, Artificial Sequence; identical to SEQ ID NO: 19855
  GFR-binding peptide
  MOD_RES (1), (35): Xaa is C or S

SEQ ID NO: 22960 - protein, 39 aa, Artificial Sequence; identical to SEQ ID NO: 19856
  GFR-binding peptide
  MOD_RES (1), (38): Xaa is C or S
  MOD_RES (17), (18), (19), (20), (21): Xaa is A or G
  MOD_RES (22), (23), (24), (25): Xaa is A or G or is absent

SEQ ID NO: 22961 - protein, 35 aa, Artificial Sequence; identical to SEQ ID NO: 19857
  GFR-binding peptide
  MOD_RES (2), (2): Xaa is C or S
  MOD_RES (16), (17), (18), (19), (20): Xaa is A or G
  MOD_RES (21), (22), (23), (24): Xaa is A or G or is absent

SEQ ID NO: 22962 - protein, 39 aa, Artificial Sequence; identical to SEQ ID NO: 19858
  GFR-binding peptide
  MOD_RES (4), (4): Xaa is C or S
  MOD_RES (20), (21), (22), (23), (24): Xaa is A or G
  MOD_RES (25), (26), (27), (28): Xaa is A or G or is absent

SEQ ID NO: 22963 - protein, 40 aa, Artificial Sequence; identical to SEQ ID NO: 19859
  GFR-binding peptide
  MOD_RES (37), (39): Xaa is C or S

SEQ ID NO: 22964 - protein, 40 aa, Artificial Sequence; identical to SEQ ID NO: 19860
  GFR-binding peptide
  MOD_RES (3), (40): Xaa is C or S

SEQ ID NO: 22965 - protein, 36 aa, Artificial Sequence; identical to SEQ ID NO: 19861
  GFR-binding peptide
  MOD_RES (2), (2): Xaa is C or S

SEQ ID NO: 22966 - protein, 35 aa, Artificial Sequence; identical to SEQ ID NO: 19862
  GFR-binding peptide

SEQ ID NO: 22967 - protein, 39 aa, Artificial Sequence; identical to SEQ ID NO: 19863
  GFR-binding peptide
  MOD_RES (6), (6): Xaa is C or S

SEQ ID NO: 22968 - protein, 38 aa, Artificial Sequence; identical to SEQ ID NO: 19864
  GFR-binding peptide
  MOD_RES (35), (37): Xaa is C or S
  MOD_RES (14), (15), (16), (17), (18): Xaa is A or G
  MOD_RES (19), (20), (21), (22): Xaa is A or G or is absent

SEQ ID NO: 22969 - protein, 43 aa, Artificial Sequence; identical to SEQ ID NO: 19865
  GFR-binding peptide
  MOD_RES (7), (41), (43): Xaa is C or S

SEQ ID NO: 22970 - protein, 40 aa, Artificial Sequence; identical to SEQ ID NO: 19866
  GFR-binding peptide
  MOD_RES (1), (38), (40): Xaa is C or S

SEQ ID NO: 22971 - protein, 40 aa, Artificial Sequence; identical to SEQ ID NO: 19867
  GFR-binding peptide
  MOD_RES (1), (38), (40): Xaa is C or S

SEQ ID NO: 22972 - protein, 44 aa, Artificial Sequence; identical to SEQ ID NO: 19868
  GFR-binding peptide
  MOD_RES (7), (41), (43): Xaa is C or S
  MOD_RES (21), (22), (23), (24), (25): Xaa is A or G
  MOD_RES (26), (27), (28), (29): Xaa is A or G or is absent

SEQ ID NO: 22973 - protein, 33 aa, Artificial Sequence; identical to SEQ ID NO: 19869
  GFR-binding peptide

SEQ ID NO: 22974 - protein, 36 aa, Artificial Sequence; identical to SEQ ID NO: 19870
  GFR-binding peptide
  MOD_RES (1), (1): Xaa is C or S

SEQ ID NO: 22975 - protein, 34 aa, Artificial Sequence; identical to SEQ ID NO: 19871
  GFR-binding peptide
  MOD_RES (14), (15), (16), (17), (18): Xaa is A or G
  MOD_RES (19), (20), (21), (22): Xaa is A or G or is absent

SEQ ID NO: 22976 - protein, 33 aa, Artificial Sequence; identical to SEQ ID NO: 19872
  GFR-binding peptide

SEQ ID NO: 22977 - protein, 34 aa, Artificial Sequence; identical to SEQ ID NO: 19873
  GFR-binding peptide

SEQ ID NO: 22978 - protein, 40 aa, Artificial Sequence; identical to SEQ ID NO: 19874
  GFR-binding peptide
  MOD_RES (4), (4): Xaa is C or S

SEQ ID NO: 22979 - protein, 35 aa, Artificial Sequence; identical to SEQ ID NO: 19875
  GFR-binding peptide
  MOD_RES (15), (16), (17), (18), (19): Xaa is A or G
  MOD_RES (20), (21), (22), (23): Xaa is A or G or is absent

SEQ ID NO: 22980 - protein, 43 aa, Artificial Sequence; identical to SEQ ID NO: 19876
  GFR-binding peptide
  MOD_RES (4), (41), (43): Xaa is C or S
  MOD_RES (20), (21), (22), (23), (24): Xaa is A or G
  MOD_RES (25), (26), (27), (28): Xaa is A or G or is absent

SEQ ID NO: 22981 - protein, 41 aa, Artificial Sequence; identical to SEQ ID NO: 19877
  GFR-binding peptide
  MOD_RES (5), (39), (41): Xaa is C or S
  MOD_RES (19), (20), (21), (22), (23): Xaa is A or G
  MOD_RES (24), (25), (26), (27): Xaa is A or G or is absent

SEQ ID NO: 22982 - protein, 34 aa, Artificial Sequence; identical to SEQ ID NO: 19878
  GFR-binding peptide
  MOD_RES (34), (34): Xaa is C or S

SEQ ID NO: 22983 - protein, 36 aa, Artificial Sequence; identical to SEQ ID NO: 19879
  GFR-binding peptide
  MOD_RES (2), (2): Xaa is C or S

SEQ ID NO: 22984 - protein, 40 aa, Artificial Sequence; identical to SEQ ID NO: 19880
  GFR-binding peptide
  MOD_RES (7), (7): Xaa is C or S

SEQ ID NO: 22985 - protein, 37 aa, Artificial Sequence; identical to SEQ ID NO: 19881
  GFR-binding peptide
  MOD_RES (36), (36): Xaa is C or S
  MOD_RES (15), (16), (17), (18), (19): Xaa is A or G
  MOD_RES (20), (21), (22), (23): Xaa is A or G or is absent

SEQ ID NO: 22986 - protein, 36 aa, Artificial Sequence; identical to SEQ ID NO: 19882
  GFR-binding peptide

SEQ ID NO: 22987 - protein, 37 aa, Artificial Sequence; identical to SEQ ID NO: 19883
  GFR-binding peptide
  MOD_RES (37), (37): Xaa is C or S
  MOD_RES (16), (17), (18), (19), (20): Xaa is A or G
  MOD_RES (21), (22), (23), (24): Xaa is A or G or is absent

SEQ ID NO: 22988 - protein, 34 aa, Artificial Sequence; identical to SEQ ID NO: 19884
  GFR-binding peptide
  MOD_RES (34), (34): Xaa is C or S
  MOD_RES (14), (15), (16), (17), (18): Xaa is A or G
  MOD_RES (19), (20), (21), (22): Xaa is A or G or is absent

SEQ ID NO: 22989 - protein, 34 aa, Artificial Sequence; identical to SEQ ID NO: 19885
  GFR-binding peptide
  MOD_RES (15), (16), (17), (18), (19): Xaa is A or G
  MOD_RES (20), (21), (22), (23): Xaa is A or G or is absent

SEQ ID NO: 22990 - protein, 35 aa, Artificial Sequence; identical to SEQ ID NO: 19886
  GFR-binding peptide
  MOD_RES (3), (3): Xaa is C or S
  MOD_RES (17), (18), (19), (20), (21): Xaa is A or G
  MOD_RES (22), (23), (24), (25): Xaa is A or G or is absent

SEQ ID NO: 22991 - protein, 40 aa, Artificial Sequence; identical to SEQ ID NO: 19887
  GFR-binding peptide
  MOD_RES (2), (39): Xaa is C or S

SEQ ID NO: 22992 - protein, 34 aa, Artificial Sequence; identical to SEQ ID NO: 19888
  GFR-binding peptide
  MOD_RES (14), (15), (16), (17), (18): Xaa is A or G
  MOD_RES (19), (20), (21), (22): Xaa is A or G or is absent

SEQ ID NO: 22993 - protein, 38 aa, Artificial Sequence; identical to SEQ ID NO: 19889
  GFR-binding peptide
  MOD_RES (3), (3): Xaa is C or S
  MOD_RES (19), (20), (21), (22), (23): Xaa is A or G
  MOD_RES (24), (25), (26), (27): Xaa is A or G or is absent

SEQ ID NO: 22994 - protein, 38 aa, Artificial Sequence; identical to SEQ ID NO: 19890
  GFR-binding peptide
  MOD_RES (3), (3): Xaa is C or S

SEQ ID NO: 22995 - protein, 40 aa, Artificial Sequence; identical to SEQ ID NO: 19891
  GFR-binding peptide
  MOD_RES (37), (39): Xaa is C or S
  MOD_RES (16), (17), (18), (19), (20): Xaa is A or G
  MOD_RES (21), (22), (23), (24): Xaa is A or G or is absent

SEQ ID NO: 22996 - protein, 44 aa, Artificial Sequence; identical to SEQ ID NO: 19892
  GFR-binding peptide
  MOD_RES (5), (42), (44): Xaa is C or S
  MOD_RES (21), (22), (23), (24), (25): Xaa is A or G
  MOD_RES (26), (27), (28), (29): Xaa is A or G or is absent

SEQ ID NO: 22997 - protein, 38 aa, Artificial Sequence; identical to SEQ ID NO: 19893
  GFR-binding peptide
  MOD_RES (1), (35), (37): Xaa is C or S

SEQ ID NO: 22998 - protein, 43 aa, Artificial Sequence; identical to SEQ ID NO: 19894
  GFR-binding peptide
  MOD_RES (4), (41), (43): Xaa is C or S

SEQ ID NO: 22999 - protein, 40 aa, Artificial Sequence; identical to SEQ ID NO: 19895
  GFR-binding peptide
  MOD_RES (2), (39): Xaa is C or S

SEQ ID NO: 23000 - protein, 43 aa, Artificial Sequence; identical to SEQ ID NO: 19896
  GFR-binding peptide
  MOD_RES (4), (41), (43): Xaa is C or S

SEQ ID NO: 23001 - protein, 34 aa, Artificial Sequence; identical to SEQ ID NO: 19897
  GFR-binding peptide
  MOD_RES (34), (34): Xaa is C or S
  MOD_RES (14), (15), (16), (17), (18): Xaa is A or G
  MOD_RES (19), (20), (21), (22): Xaa is A or G or is absent

SEQ ID NO: 23002 - protein, 37 aa, Artificial Sequence; identical to SEQ ID NO: 19898
  GFR-binding peptide
  MOD_RES (1), (35), (37): Xaa is C or S
  MOD_RES (15), (16), (17), (18), (19): Xaa is A or G
  MOD_RES (20), (21), (22), (23): Xaa is A or G or is absent

SEQ ID NO: 23003 - protein, 43 aa, Artificial Sequence; identical to SEQ ID NO: 19899
  GFR-binding peptide
  MOD_RES (3), (40), (42): Xaa is C or S

SEQ ID NO: 23004 - protein, 38 aa, Artificial Sequence; identical to SEQ ID NO: 19900
  GFR-binding peptide
  MOD_RES (6), (6): Xaa is C or S
  MOD_RES (20), (21), (22), (23), (24): Xaa is A or G
  MOD_RES (25), (26), (27), (28): Xaa is A or G or is absent

SEQ ID NO: 23005 - protein, 40 aa, Artificial Sequence; identical to SEQ ID NO: 19901
  GFR-binding peptide
  MOD_RES (7), (7): Xaa is C or S
  MOD_RES (21), (22), (23), (24), (25): Xaa is A or G
  MOD_RES (26), (27), (28), (29): Xaa is A or G or is absent

SEQ ID NO: 23006 - protein, 40 aa, Artificial Sequence; identical to SEQ ID NO: 19902
  GFR-binding peptide
  MOD_RES (4), (38), (40): Xaa is C or S
  MOD_RES (18), (19), (20), (21), (22): Xaa is A or G
  MOD_RES (23), (24), (25), (26): Xaa is A or G or is absent

SEQ ID NO: 23007 - protein, 41 aa, Artificial Sequence; identical to SEQ ID NO: 19903
  GFR-binding peptide
  MOD_RES (5), (39), (41): Xaa is C or S
  MOD_RES (19), (20), (21), (22), (23): Xaa is A or G
  MOD_RES (24), (25), (26), (27): Xaa is A or G or is absent

SEQ ID NO: 23008 - protein, 41 aa, Artificial Sequence; identical to SEQ ID NO: 19904
  GFR-binding peptide
  MOD_RES (4), (38), (40): Xaa is C or S

SEQ ID NO: 23009 - protein, 38 aa, Artificial Sequence; identical to SEQ ID NO: 19905
  GFR-binding peptide
  MOD_RES (2), (36), (38): Xaa is C or S
  MOD_RES (16), (17), (18), (19), (20): Xaa is A or G
  MOD_RES (21), (22), (23), (24): Xaa is A or G or is absent

SEQ ID NO: 23010 - protein, 35 aa, Artificial Sequence; identical to SEQ ID NO: 19906
  GFR-binding peptide
  MOD_RES (1), (1): Xaa is C or S
  MOD_RES (17), (18), (19), (20), (21): Xaa is A or G
  MOD_RES (22), (23), (24), (25): Xaa is A or G or is absent

SEQ ID NO: 23011 - protein, 37 aa, Artificial Sequence; identical to SEQ ID NO: 19907
  GFR-binding peptide
  MOD_RES (36), (36): Xaa is C or S
  MOD_RES (15), (16), (17), (18), (19): Xaa is A or G
  MOD_RES (20), (21), (22), (23): Xaa is A or G or is absent

SEQ ID NO: 23012 - protein, 36 aa, Artificial Sequence; identical to SEQ ID NO: 19908
  GFR-binding peptide
  MOD_RES (1), (35): Xaa is C or S

SEQ ID NO: 23013 - protein, 36 aa, Artificial Sequence; identical to SEQ ID NO: 19909
  GFR-binding peptide
  MOD_RES (3), (3): Xaa is C or S

SEQ ID NO: 23014 - protein, 39 aa, Artificial Sequence; identical to SEQ ID NO: 19910
  GFR-binding peptide
  MOD_RES (4), (38): Xaa is C or S

SEQ ID NO: 23015 - protein, 37 aa, Artificial Sequence; identical to SEQ ID NO: 19911
  GFR-binding peptide
  MOD_RES (1), (1): Xaa is C or S
  MOD_RES (17), (18), (19), (20), (21): Xaa is A or G
  MOD_RES (22), (23), (24), (25): Xaa is A or G or is absent

SEQ ID NO: 23016 - protein, 35 aa, Artificial Sequence; identical to SEQ ID NO: 19912
  GFR-binding peptide
  MOD_RES (3), (3): Xaa is C or S
  MOD_RES (17), (18), (19), (20), (21): Xaa is A or G
  MOD_RES (22), (23), (24), (25): Xaa is A or G or is absent

SEQ ID NO: 23017 - protein, 37 aa, Artificial Sequence; identical to SEQ ID NO: 19913
  GFR-binding peptide
  MOD_RES (3), (3): Xaa is C or S

SEQ ID NO: 23018 - protein, 33 aa, Artificial Sequence; identical to SEQ ID NO: 19914
  GFR-binding peptide
  MOD_RES (14), (15), (16), (17), (18): Xaa is A or G
  MOD_RES (19), (20), (21), (22): Xaa is A or G or is absent

SEQ ID NO: 23019 - protein, 40 aa, Artificial Sequence; identical to SEQ ID NO: 19915
  GFR-binding peptide
  MOD_RES (4), (4): Xaa is C or S
  MOD_RES (20), (21), (22), (23), (24): Xaa is A or G
  MOD_RES (25), (26), (27), (28): Xaa is A or G or is absent

SEQ ID NO: 23020 - protein, 40 aa, Artificial Sequence; identical to SEQ ID NO: 19916
  GFR-binding peptide
  MOD_RES (3), (37), (39): Xaa is C or S

SEQ ID NO: 23021 - protein, 41 aa, Artificial Sequence; identical to SEQ ID NO: 19917
  GFR-binding peptide
  MOD_RES (5), (39), (41): Xaa is C or S

SEQ ID NO: 23022 - protein, 40 aa, Artificial Sequence; identical to SEQ ID NO: 19918
  GFR-binding peptide
  MOD_RES (1), (38), (40): Xaa is C or S
  MOD_RES (17), (18), (19), (20), (21): Xaa is A or G
  MOD_RES (22), (23), (24), (25): Xaa is A or G or is absent

SEQ ID NO: 23023 - protein, 40 aa, Artificial Sequence; identical to SEQ ID NO: 19919
  GFR-binding peptide
  MOD_RES (4), (4): Xaa is C or S
  MOD_RES (20), (21), (22), (23), (24): Xaa is A or G
  MOD_RES (25), (26), (27), (28): Xaa is A or G or is absent

SEQ ID NO: 23024 - protein, 38 aa, Artificial Sequence; identical to SEQ ID NO: 19920
  GFR-binding peptide
  MOD_RES (3), (37): Xaa is C or S
  MOD_RES (17), (18), (19), (20), (21): Xaa is A or G
  MOD_RES (22), (23), (24), (25): Xaa is A or G or is absent

SEQ ID NO: 23025 - protein, 38 aa, Artificial Sequence; identical to SEQ ID NO: 19921
  GFR-binding peptide
  MOD_RES (1), (38): Xaa is C or S
  MOD_RES (17), (18), (19), (20), (21): Xaa is A or G
  MOD_RES (22), (23), (24), (25): Xaa is A or G or is absent

SEQ ID NO: 23026 - protein, 36 aa, Artificial Sequence; identical to SEQ ID NO: 19922
  GFR-binding peptide
  MOD_RES (2), (36): Xaa is C or S

SEQ ID NO: 23027 - protein, 35 aa, Artificial Sequence; identical to SEQ ID NO: 19923
  GFR-binding peptide
  MOD_RES (15), (16), (17), (18), (19): Xaa is A or G
  MOD_RES (20), (21), (22), (23): Xaa is A or G or is absent

SEQ ID NO: 23028 - protein, 37 aa, Artificial Sequence; identical to SEQ ID NO: 19924
  GFR-binding peptide
  MOD_RES (1), (1): Xaa is C or S
  MOD_RES (17), (18), (19), (20), (21): Xaa is A or G
  MOD_RES (22), (23), (24), (25): Xaa is A or G or is absent

SEQ ID NO: 23029 - protein, 40 aa, Artificial Sequence; identical to SEQ ID NO: 19925
  GFR-binding peptide
  MOD_RES (1), (38), (40): Xaa is C or S

SEQ ID NO: 23030 - protein, 40 aa, Artificial Sequence; identical to SEQ ID NO: 19926
  GFR-binding peptide
  MOD_RES (5), (5): Xaa is C or S

SEQ ID NO: 23031 - protein, 37 aa, Artificial Sequence; identical to SEQ ID NO: 19927
  GFR-binding peptide
  MOD_RES (4), (4): Xaa is C or S

SEQ ID NO: 23032 - protein, 40 aa, Artificial Sequence; identical to SEQ ID NO: 19928
  GFR-binding peptide
  MOD_RES (7), (7): Xaa is C or S

SEQ ID NO: 23033 - protein, 37 aa, Artificial Sequence; identical to SEQ ID NO: 19929
  GFR-binding peptide
  MOD_RES (1), (35), (37): Xaa is C or S

SEQ ID NO: 23034 - protein, 42 aa, Artificial Sequence; identical to SEQ ID NO: 19930
  GFR-binding peptide
  MOD_RES (5), (39), (41): Xaa is C or S
  MOD_RES (19), (20), (21), (22), (23): Xaa is A or G
  MOD_RES (24), (25), (26), (27): Xaa is A or G or is absent

SEQ ID NO: 23035 - protein, 34 aa, Artificial Sequence; identical to SEQ ID NO: 19931
  GFR-binding peptide
  MOD_RES (2), (2): Xaa is C or S

SEQ ID NO: 23036 - protein, 35 aa, Artificial Sequence; identical to SEQ ID NO: 19932
  GFR-binding peptide
  MOD_RES (1), (1): Xaa is C or S
  MOD_RES (17), (18), (19), (20), (21): Xaa is A or G
  MOD_RES (22), (23), (24), (25): Xaa is A or G or is absent

SEQ ID NO: 23037 - protein, 38 aa, Artificial Sequence; identical to SEQ ID NO: 19933
  GFR-binding peptide
  MOD_RES (1), (38): Xaa is C or S
  MOD_RES (17), (18), (19), (20), (21): Xaa is A or G
  MOD_RES (22), (23), (24), (25): Xaa is A or G or is absent

SEQ ID NO: 23038 - protein, 42 aa, Artificial Sequence; identical to SEQ ID NO: 19934
  GFR-binding peptide
  MOD_RES (2), (39), (41): Xaa is C or S

SEQ ID NO: 23039 - protein, 34 aa, Artificial Sequence; identical to SEQ ID NO: 19935
  GFR-binding peptide

SEQ ID NO: 23040 - protein, 41 aa, Artificial Sequence; identical to SEQ ID NO: 19936
  GFR-binding peptide
  MOD_RES (1), (38), (40): Xaa is C or S

SEQ ID NO: 23041 - protein, 34 aa, Artificial Sequence; identical to SEQ ID NO: 19937
  GFR-binding peptide
  MOD_RES (1), (1): Xaa is C or S
  MOD_RES (15), (16), (17), (18), (19): Xaa is A or G
  MOD_RES (20), (21), (22), (23): Xaa is A or G or is absent

SEQ ID NO: 23042 - protein, 37 aa, Artificial Sequence; identical to SEQ ID NO: 19938
  GFR-binding peptide
  MOD_RES (1), (35), (37): Xaa is C or S
  MOD_RES (15), (16), (17), (18), (19): Xaa is A or G
  MOD_RES (20), (21), (22), (23): Xaa is A or G or is absent

SEQ ID NO: 23043 - protein, 40 aa, Artificial Sequence; identical to SEQ ID NO: 19939
  GFR-binding peptide
  MOD_RES (3), (37), (39): Xaa is C or S

SEQ ID NO: 23044 - protein, 41 aa, Artificial Sequence; identical to SEQ ID NO: 19940
  GFR-binding peptide
  MOD_RES (3), (40): Xaa is C or S
  MOD_RES (19), (20), (21), (22), (23): Xaa is A or G
  MOD_RES (24), (25), (26), (27): Xaa is A or G or is absent

SEQ ID NO: 23045 - protein, 42 aa, Artificial Sequence; identical to SEQ ID NO: 19941
  GFR-binding peptide
  MOD_RES (3), (40), (42): Xaa is C or S
  MOD_RES (19), (20), (21), (22), (23): Xaa is A or G
  MOD_RES (24), (25), (26), (27): Xaa is A or G or is absent

SEQ ID NO: 23046 - protein, 42 aa, Artificial Sequence; identical to SEQ ID NO: 19942
  GFR-binding peptide
  MOD_RES (3), (40), (42): Xaa is C or S
  MOD_RES (19), (20), (21), (22), (23): Xaa is A or G
  MOD_RES (24), (25), (26), (27): Xaa is A or G or is absent

SEQ ID NO: 23047 - protein, 40 aa, Artificial Sequence; identical to SEQ ID NO: 19943
  GFR-binding peptide
  MOD_RES (6), (40): Xaa is C or S
  MOD_RES (20), (21), (22), (23), (24): Xaa is A or G
  MOD_RES (25), (26), (27), (28): Xaa is A or G or is absent

SEQ ID NO: 23048 - protein, 38 aa, Artificial Sequence; identical to SEQ ID NO: 19944
  GFR-binding peptide
  MOD_RES (35), (37): Xaa is C or S
  MOD_RES (14), (15), (16), (17), (18): Xaa is A or G
  MOD_RES (19), (20), (21), (22): Xaa is A or G or is absent

SEQ ID NO: 23049 - protein, 38 aa, Artificial Sequence; identical to SEQ ID NO: 19945
  GFR-binding peptide
  MOD_RES (2), (2): Xaa is C or S

SEQ ID NO: 23050 - protein, 41 aa, Artificial Sequence; identical to SEQ ID NO: 19946
  GFR-binding peptide
  MOD_RES (2), (39), (41): Xaa is C or S
  MOD_RES (18), (19), (20), (21), (22): Xaa is A or G
  MOD_RES (23), (24), (25), (26): Xaa is A or G or is absent

SEQ ID NO: 23051 - protein, 39 aa, Artificial Sequence; identical to SEQ ID NO: 19947
  GFR-binding peptide
  MOD_RES (37), (39): Xaa is C or S
  MOD_RES (16), (17), (18), (19), (20): Xaa is A or G
  MOD_RES (21), (22), (23), (24): Xaa is A or G or is absent

SEQ ID NO: 23052 - protein, 41 aa, Artificial Sequence; identical to SEQ ID NO: 19948
  GFR-binding peptide
  MOD_RES (5), (39), (41): Xaa is C or S
  MOD_RES (19), (20), (21), (22), (23): Xaa is A or G
  MOD_RES (24), (25), (26), (27): Xaa is A or G or is absent

SEQ ID NO: 23053 - protein, 33 aa, Artificial Sequence; identical to SEQ ID NO: 19949
  GFR-binding peptide
  MOD_RES (14), (15), (16), (17), (18): Xaa is A or G
  MOD_RES (19), (20), (21), (22): Xaa is A or G or is absent

SEQ ID NO: 23054 - protein, 40 aa, Artificial Sequence; identical to SEQ ID NO: 19950
  GFR-binding peptide
  MOD_RES (7), (7): Xaa is C or S
  MOD_RES (21), (22), (23), (24), (25): Xaa is A or G
  MOD_RES (26), (27), (28), (29): Xaa is A or G or is absent

SEQ ID NO: 23055 - protein, 37 aa, Artificial Sequence; identical to SEQ ID NO: 19951
  GFR-binding peptide
  MOD_RES (35), (37): Xaa is C or S
  MOD_RES (14), (15), (16), (17), (18): Xaa is A or G
  MOD_RES (19), (20), (21), (22): Xaa is A or G or is absent

SEQ ID NO: 23056 - protein, 40 aa, Artificial Sequence; identical to SEQ ID NO: 19952
  GFR-binding peptide
  MOD_RES (3), (40): Xaa is C or S

SEQ ID NO: 23057 - protein, 42 aa, Artificial Sequence; identical to SEQ ID NO: 19953
  GFR-binding peptide
  MOD_RES (5), (42): Xaa is C or S
  MOD_RES (21), (22), (23), (24), (25): Xaa is A or G
  MOD_RES (26), (27), (28), (29): Xaa is A or G or is absent

SEQ ID NO: 23058 - protein, 37 aa, Artificial Sequence; identical to SEQ ID NO: 19954
  GFR-binding peptide
  MOD_RES (4), (4): Xaa is C or S
  MOD_RES (18), (19), (20), (21), (22): Xaa is A or G
  MOD_RES (23), (24), (25), (26): Xaa is A or G or is absent

SEQ ID NO: 23059 - protein, 39 aa, Artificial Sequence; identical to SEQ ID NO: 19955
  GFR-binding peptide
  MOD_RES (2), (39): Xaa is C or S
  MOD_RES (18), (19), (20), (21), (22): Xaa is A or G
  MOD_RES (23), (24), (25), (26): Xaa is A or G or is absent

SEQ ID NO: 23060 - protein, 33 aa, Artificial Sequence; identical to SEQ ID NO: 19956
  GFR-binding peptide

SEQ ID NO: 23061 - protein, 40 aa, Artificial Sequence; identical to SEQ ID NO: 19957
  GFR-binding peptide
  MOD_RES (5), (5): Xaa is C or S

SEQ ID NO: 23062 - protein, 36 aa, Artificial Sequence; identical to SEQ ID NO: 19958
  GFR-binding peptide
  MOD_RES (36), (36): Xaa is C or S

SEQ ID NO: 23063 - protein, 43 aa, Artificial Sequence; identical to SEQ ID NO: 19959
  GFR-binding peptide
  MOD_RES (7), (41), (43): Xaa is C or S

SEQ ID NO: 23064 - protein, 42 aa, Artificial Sequence; identical to SEQ ID NO: 19960
  GFR-binding peptide
  MOD_RES (3), (40), (42): Xaa is C or S
  MOD_RES (19), (20), (21), (22), (23): Xaa is A or G
  MOD_RES (24), (25), (26), (27): Xaa is A or G or is absent

SEQ ID NO: 23065 - protein, 40 aa, Artificial Sequence; identical to SEQ ID NO: 19961
  GFR-binding peptide
  MOD_RES (6), (40): Xaa is C or S
  MOD_RES (20), (21), (22), (23), (24): Xaa is A or G
  MOD_RES (25), (26), (27), (28): Xaa is A or G or is absent

SEQ ID NO: 23066 - protein, 38 aa, Artificial Sequence; identical to SEQ ID NO: 19962
  GFR-binding peptide
  MOD_RES (4), (4): Xaa is C or S
  MOD_RES (20), (21), (22), (23), (24): Xaa is A or G
  MOD_RES (25), (26), (27), (28): Xaa is A or G or is absent

SEQ ID NO: 23067 - protein, 37 aa, Artificial Sequence; identical to SEQ ID NO: 19963
  GFR-binding peptide
  MOD_RES (4), (4): Xaa is C or S
  MOD_RES (18), (19), (20), (21), (22): Xaa is A or G
  MOD_RES (23), (24), (25), (26): Xaa is A or G or is absent

SEQ ID NO: 23068 - protein, 43 aa, Artificial Sequence; identical to SEQ ID NO: 19964
  GFR-binding peptide
  MOD_RES (5), (42): Xaa is C or S
  MOD_RES (21), (22), (23), (24), (25): Xaa is A or G
  MOD_RES (26), (27), (28), (29): Xaa is A or G or is absent

SEQ ID NO: 23069 - protein, 37 aa, Artificial Sequence; identical to SEQ ID NO: 19965
  GFR-binding peptide
  MOD_RES (35), (37): Xaa is C or S
  MOD_RES (14), (15), (16), (17), (18): Xaa is A or G
  MOD_RES (19), (20), (21), (22): Xaa is A or G or is absent

SEQ ID NO: 23070 - protein, 37 aa, Artificial Sequence; identical to SEQ ID NO: 19966
  GFR-binding peptide
  MOD_RES (35), (37): Xaa is C or S
  MOD_RES (14), (15), (16), (17), (18): Xaa is A or G
  MOD_RES (19), (20), (21), (22): Xaa is A or G or is absent

SEQ ID NO: 23071 - protein, 32 aa, Artificial Sequence; identical to SEQ ID NO: 19967
  GFR-binding peptide
  MOD_RES (14), (15), (16), (17), (18): Xaa is A or G
  MOD_RES (19), (20), (21), (22): Xaa is A or G or is absent

SEQ ID NO: 23072 - protein, 41 aa, Artificial Sequence; identical to SEQ ID NO: 19968
  GFR-binding peptide
  MOD_RES (5), (5): Xaa is C or S
  MOD_RES (21), (22), (23), (24), (25): Xaa is A or G
  MOD_RES (26), (27), (28), (29): Xaa is A or G or is absent

SEQ ID NO: 23073 - protein, 37 aa, Artificial Sequence; identical to SEQ ID NO: 19969
  GFR-binding peptide
  MOD_RES (35), (37): Xaa is C or S
  MOD_RES (14), (15), (16), (17), (18): Xaa is A or G
  MOD_RES (19), (20), (21), (22): Xaa is A or G or is absent

SEQ ID NO: 23074 - protein, 36 aa, Artificial Sequence; identical to SEQ ID NO: 19970
  GFR-binding peptide
  MOD_RES (34), (36): Xaa is C or S
  MOD_RES (14), (15), (16), (17), (18): Xaa is A or G
  MOD_RES (19), (20), (21), (22): Xaa is A or G or is absent

SEQ ID NO: 23075 - protein, 38 aa, Artificial Sequence; identical to SEQ ID NO: 19971
  GFR-binding peptide
  MOD_RES (36), (38): Xaa is C or S

SEQ ID NO: 23076 - protein, 40 aa, Artificial Sequence; identical to SEQ ID NO: 19972
  GFR-binding peptide
  MOD_RES (4), (38), (40): Xaa is C or S
  MOD_RES (18), (19), (20), (21), (22): Xaa is A or G
  MOD_RES (23), (24), (25), (26): Xaa is A or G or is absent

SEQ ID NO: 23077 - protein, 35 aa, Artificial Sequence; identical to SEQ ID NO: 19973
  GFR-binding peptide
  MOD_RES (15), (16), (17), (18), (19): Xaa is A or G
  MOD_RES (20), (21), (22), (23): Xaa is A or G or is absent

SEQ ID NO: 23078 - protein, 41 aa, Artificial Sequence; identical to SEQ ID NO: 19974
  GFR-binding peptide
  MOD_RES (6), (40): Xaa is C or S
  MOD_RES (20), (21), (22), (23), (24): Xaa is A or G
  MOD_RES (25), (26), (27), (28): Xaa is A or G or is absent

SEQ ID NO: 23079 - protein, 37 aa, Artificial Sequence; identical to SEQ ID NO: 19975
  GFR-binding peptide
  MOD_RES (3), (3): Xaa is C or S

SEQ ID NO: 23080 - protein, 34 aa, Artificial Sequence; identical to SEQ ID NO: 19976
  GFR-binding peptide
  MOD_RES (15), (16), (17), (18), (19): Xaa is A or G
  MOD_RES (20), (21), (22), (23): Xaa is A or G or is absent

SEQ ID NO: 23081 - protein, 35 aa, Artificial Sequence; identical to SEQ ID NO: 19977
  GFR-binding peptide
  MOD_RES (16), (17), (18), (19), (20): Xaa is A or G
  MOD_RES (21), (22), (23), (24): Xaa is A or G or is absent

SEQ ID NO: 23082 - protein, 38 aa, Artificial Sequence; identical to SEQ ID NO: 19978
  GFR-binding peptide
  MOD_RES (5), (5): Xaa is C or S
  MOD_RES (19), (20), (21), (22), (23): Xaa is A or G
  MOD_RES (24), (25), (26), (27): Xaa is A or G or is absent

SEQ ID NO: 23083 - protein, 39 aa, Artificial Sequence; identical to SEQ ID NO: 19979
  GFR-binding peptide
  MOD_RES (36), (38): Xaa is C or S
  MOD_RES (15), (16), (17), (18), (19): Xaa is A or G
  MOD_RES (20), (21), (22), (23): Xaa is A or G or is absent

SEQ ID NO: 23084 - protein, 35 aa, Artificial Sequence; identical to SEQ ID NO: 19980
  GFR-binding peptide
  MOD_RES (35), (35): Xaa is C or S

SEQ ID NO: 23085 - protein, 38 aa, Artificial Sequence; identical to SEQ ID NO: 19981
  GFR-binding peptide
  MOD_RES (3), (3): Xaa is C or S

SEQ ID NO: 23086 - protein, 34 aa, Artificial Sequence; identical to SEQ ID NO: 19982
  GFR-binding peptide
  MOD_RES (2), (2): Xaa is C or S
  MOD_RES (16), (17), (18), (19), (20): Xaa is A or G
  MOD_RES (21), (22), (23), (24): Xaa is A or G or is absent

SEQ ID NO: 23087 - protein, 42 aa, Artificial Sequence; identical to SEQ ID NO: 19983
  GFR-binding peptide
  MOD_RES (6), (40), (42): Xaa is C or S
  MOD_RES (20), (21), (22), (23), (24): Xaa is A or G
  MOD_RES (25), (26), (27), (28): Xaa is A or G or is absent

SEQ ID NO: 23088 - protein, 42 aa, Artificial Sequence; identical to SEQ ID NO: 19984
  GFR-binding peptide
  MOD_RES (4), (41): Xaa is C or S

SEQ ID NO: 23089 - protein, 38 aa, Artificial Sequence; identical to SEQ ID NO: 19985
  GFR-binding peptide
  MOD_RES (5), (5): Xaa is C or S

SEQ ID NO: 23090 - protein, 38 aa, Artificial Sequence; identical to SEQ ID NO: 19986
  GFR-binding peptide
  MOD_RES (36), (38): Xaa is C or S
  MOD_RES (15), (16), (17), (18), (19): Xaa is A or G
  MOD_RES (20), (21), (22), (23): Xaa is A or G or is absent

SEQ ID NO: 23091 - protein, 36 aa, Artificial Sequence; identical to SEQ ID NO: 19987
  GFR-binding peptide
  MOD_RES (36), (36): Xaa is C or S

SEQ ID NO: 23092 - protein, 35 aa, Artificial Sequence; identical to SEQ ID NO: 19988
  GFR-binding peptide
  MOD_RES (35), (35): Xaa is C or S

SEQ ID NO: 23093 - protein, 38 aa, Artificial Sequence; identical to SEQ ID NO: 19989
  GFR-binding peptide
  MOD_RES (5), (5): Xaa is C or S

SEQ ID NO: 23094 - protein, 36 aa, Artificial Sequence; identical to SEQ ID NO: 19990
  GFR-binding peptide
  MOD_RES (2), (2): Xaa is C or S

SEQ ID NO: 23095 - protein, 37 aa, Artificial Sequence; identical to SEQ ID NO: 19991
  GFR-binding peptide
  MOD_RES (36), (36): Xaa is C or S
  MOD_RES (15), (16), (17), (18), (19): Xaa is A or G
  MOD_RES (20), (21), (22), (23): Xaa is A or G or is absent

SEQ ID NO: 23096 - protein, 33 aa, Artificial Sequence; identical to SEQ ID NO: 19992
  GFR-binding peptide

SEQ ID NO: 23097 - protein, 34 aa, Artificial Sequence; identical to SEQ ID NO: 19993
  GFR-binding peptide

SEQ ID NO: 23098 - protein, 37 aa, Artificial Sequence; identical to SEQ ID NO: 19994
  GFR-binding peptide
  MOD_RES (3), (37): Xaa is C or S

SEQ ID NO: 23099 - protein, 36 aa, Artificial Sequence; identical to SEQ ID NO: 19995
  GFR-binding peptide
  MOD_RES (2), (2): Xaa is C or S

SEQ ID NO: 23100 - protein, 37 aa, Artificial Sequence; identical to SEQ ID NO: 19996
  GFR-binding peptide
  MOD_RES (3), (37): Xaa is C or S
  MOD_RES (17), (18), (19), (20), (21): Xaa is A or G
  MOD_RES (22), (23), (24), (25): Xaa is A or G or is absent

SEQ ID NO: 23101 - protein, 38 aa, Artificial Sequence; identical to SEQ ID NO: 19997
  GFR-binding peptide
  MOD_RES (2), (2): Xaa is C or S

SEQ ID NO: 23102 - protein, 38 aa, Artificial Sequence; identical to SEQ ID NO: 19998
  GFR-binding peptide
  MOD_RES (4), (4): Xaa is C or S
  MOD_RES (20), (21), (22), (23), (24): Xaa is A or G
  MOD_RES (25), (26), (27), (28): Xaa is A or G or is absent

SEQ ID NO: 23103 - protein, 36 aa, Artificial Sequence; identical to SEQ ID NO: 19999
  GFR-binding peptide
  MOD_RES (34), (36): Xaa is C or S
  MOD_RES (14), (15), (16), (17), (18): Xaa is A or G
  MOD_RES (19), (20), (21), (22): Xaa is A or G or is absent

SEQ ID NO: 23104 - protein, 36 aa, Artificial Sequence; identical to SEQ ID NO: 20000
  GFR-binding peptide
  MOD_RES (1), (1): Xaa is C or S
  MOD_RES (17), (18), (19), (20), (21): Xaa is A or G
  MOD_RES (22), (23), (24), (25): Xaa is A or G or is absent

SEQ ID NO: 23105 - protein, 40 aa, Artificial Sequence; identical to SEQ ID NO: 20001
  GFR-binding peptide
  MOD_RES (6), (40): Xaa is C or S

SEQ ID NO: 23106 - protein, 38 aa, Artificial Sequence; identical to SEQ ID NO: 20002
  GFR-binding peptide
  MOD_RES (1), (35), (37): Xaa is C or S
  MOD_RES (15), (16), (17), (18), (19): Xaa is A or G
  MOD_RES (20), (21), (22), (23): Xaa is A or G or is absent

SEQ ID NO: 23107 - protein, 37 aa, Artificial Sequence; identical to SEQ ID NO: 20003
  GFR-binding peptide
  MOD_RES (1), (35), (37): Xaa is C or S
  MOD_RES (15), (16), (17), (18), (19): Xaa is A or G
  MOD_RES (20), (21), (22), (23): Xaa is A or G or is absent

SEQ ID NO: 23108 - protein, 40 aa, Artificial Sequence; identical to SEQ ID NO: 20004
  GFR-binding peptide
  MOD_RES (6), (40): Xaa is C or S

SEQ ID NO: 23109 - protein, 36 aa, Artificial Sequence; identical to SEQ ID NO: 20005
  GFR-binding peptide
  MOD_RES (2), (2): Xaa is C or S
  MOD_RES (18), (19), (20), (21), (22): Xaa is A or G
  MOD_RES (23), (24), (25), (26): Xaa is A or G or is absent

SEQ ID NO: 23110 - protein, 40 aa, Artificial Sequence; identical to SEQ ID NO: 20006
  GFR-binding peptide
  MOD_RES (3), (37), (39): Xaa is C or S
  MOD_RES (17), (18), (19), (20), (21): Xaa is A or G
  MOD_RES (22), (23), (24), (25): Xaa is A or G or is absent

SEQ ID NO: 23111 - protein, 40 aa, Artificial Sequence; identical to SEQ ID NO: 20007
  GFR-binding peptide
  MOD_RES (3), (40): Xaa is C or S
  MOD_RES (19), (20), (21), (22), (23): Xaa is A or G
  MOD_RES (24), (25), (26), (27): Xaa is A or G or is absent

SEQ ID NO: 23112 - protein, 41 aa, Artificial Sequence; identical to SEQ ID NO: 20008
  GFR-binding peptide
  MOD_RES (4), (38), (40): Xaa is C or S
  MOD_RES (18), (19), (20), (21), (22): Xaa is A or G
  MOD_RES (23), (24), (25), (26): Xaa is A or G or is absent

SEQ ID NO: 23113 - protein, 34 aa, Artificial Sequence; identical to SEQ ID NO: 20009
  GFR-binding peptide
  MOD_RES (16), (17), (18), (19), (20): Xaa is A or G
  MOD_RES (21), (22), (23), (24): Xaa is A or G or is absent

SEQ ID NO: 23114 - protein, 41 aa, Artificial Sequence; identical to SEQ ID NO: 20010
  GFR-binding peptide
  MOD_RES (6), (40): Xaa is C or S

SEQ ID NO: 23115 - protein, 40 aa, Artificial Sequence; identical to SEQ ID NO: 20011
  GFR-binding peptide
  MOD_RES (37), (39): Xaa is C or S

SEQ ID NO: 23116 - protein, 36 aa, Artificial Sequence; identical to SEQ ID NO: 20012
  GFR-binding peptide
  MOD_RES (35), (35): Xaa is C or S

SEQ ID NO: 23117 - protein, 36 aa, Artificial Sequence; identical to SEQ ID NO: 20013
  GFR-binding peptide
  MOD_RES (1), (1): Xaa is C or S
  MOD_RES (17), (18), (19), (20), (21): Xaa is A or G
  MOD_RES (22), (23), (24), (25): Xaa is A or G or is absent

SEQ ID NO: 23118 - protein, 37 aa, Artificial Sequence; identical to SEQ ID NO: 20014
  GFR-binding peptide
  MOD_RES (35), (37): Xaa is C or S

SEQ ID NO: 23119 - protein, 33 aa, Artificial Sequence; identical to SEQ ID NO: 20015
  GFR-binding peptide

SEQ ID NO: 23120 - protein, 43 aa, Artificial Sequence; identical to SEQ ID NO: 20016
  GFR-binding peptide
  MOD_RES (7), (41), (43): Xaa is C or S

SEQ ID NO: 23121 - protein, 45 aa, Artificial Sequence; identical to SEQ ID NO: 20017
  GFR-binding peptide
  MOD_RES (5), (42), (44): Xaa is C or S

SEQ ID NO: 23122 - protein, 38 aa, Artificial Sequence; identical to SEQ ID NO: 20018
  GFR-binding peptide
  MOD_RES (1), (38): Xaa is C or S
  MOD_RES (17), (18), (19), (20), (21): Xaa is A or G
  MOD_RES (22), (23), (24), (25): Xaa is A or G or is absent

SEQ ID NO: 23123 - protein, 36 aa, Artificial Sequence; identical to SEQ ID NO: 20019
  GFR-binding peptide
  MOD_RES (36), (36): Xaa is C or S
  MOD_RES (15), (16), (17), (18), (19): Xaa is A or G
  MOD_RES (20), (21), (22), (23): Xaa is A or G or is absent

SEQ ID NO: 23124 - protein, 39 aa, Artificial Sequence; identical to SEQ ID NO: 20020
  GFR-binding peptide
  MOD_RES (4), (38): Xaa is C or S
  MOD_RES (18), (19), (20), (21), (22): Xaa is A or G
  MOD_RES (23), (24), (25), (26): Xaa is A or G or is absent

SEQ ID NO: 23125 - protein, 34 aa, Artificial Sequence; identical to SEQ ID NO: 20021
  GFR-binding peptide

SEQ ID NO: 23126 - protein, 37 aa, Artificial Sequence; identical to SEQ ID NO: 20022
  GFR-binding peptide
  MOD_RES (4), (4): Xaa is C or S

SEQ ID NO: 23127 - protein, 41 aa, Artificial Sequence; identical to SEQ ID NO: 20023
  GFR-binding peptide
  MOD_RES (5), (5): Xaa is C or S
  MOD_RES (21), (22), (23), (24), (25): Xaa is A or G
  MOD_RES (26), (27), (28), (29): Xaa is A or G or is absent

SEQ ID NO: 23128 - protein, 42 aa, Artificial Sequence; identical to SEQ ID NO: 20024
  GFR-binding peptide
  MOD_RES (2), (39), (41): Xaa is C or S
  MOD_RES (18), (19), (20), (21), (22): Xaa is A or G
  MOD_RES (23), (24), (25), (26): Xaa is A or G or is absent

SEQ ID NO: 23129 - protein, 42 aa, Artificial Sequence; identical to SEQ ID NO: 20025
  GFR-binding peptide
  MOD_RES (6), (40), (42): Xaa is C or S
  MOD_RES (20), (21), (22), (23), (24): Xaa is A or G
  MOD_RES (25), (26), (27), (28): Xaa is A or G or is absent

SEQ ID NO: 23130 - protein, 39 aa, Artificial Sequence; identical to SEQ ID NO: 20026
  GFR-binding peptide
  MOD_RES (2), (36), (38): Xaa is C or S

SEQ ID NO: 23131 - protein, 34 aa, Artificial Sequence; identical to SEQ ID NO: 20027
  GFR-binding peptide
  MOD_RES (14), (15), (16), (17), (18): Xaa is A or G
  MOD_RES (19), (20), (21), (22): Xaa is A or G or is absent

SEQ ID NO: 23132 - protein, 44 aa, Artificial Sequence; identical to SEQ ID NO: 20028
  GFR-binding peptide
  MOD_RES (4), (41), (43): Xaa is C or S
  MOD_RES (20), (21), (22), (23), (24): Xaa is A or G
  MOD_RES (25), (26), (27), (28): Xaa is A or G or is absent

SEQ ID NO: 23133 - protein, 42 aa, Artificial Sequence; identical to SEQ ID NO: 20029
  GFR-binding peptide
  MOD_RES (6), (40), (42): Xaa is C or S
  MOD_RES (20), (21), (22), (23), (24): Xaa is A or G
  MOD_RES (25), (26), (27), (28): Xaa is A or G or is absent

SEQ ID NO: 23134 - protein, 42 aa, Artificial Sequence; identical to SEQ ID NO: 20030
  GFR-binding peptide
  MOD_RES (7), (41): Xaa is C or S
  MOD_RES (21), (22), (23), (24), (25): Xaa is A or G
  MOD_RES (26), (27), (28), (29): Xaa is A or G or is absent

SEQ ID NO: 23135 - protein, 41 aa, Artificial Sequence; identical to SEQ ID NO: 20031
  GFR-binding peptide
  MOD_RES (6), (40): Xaa is C or S
  MOD_RES (20), (21), (22), (23), (24): Xaa is A or G
  MOD_RES (25), (26), (27), (28): Xaa is A or G or is absent

SEQ ID NO: 23136 - protein, 35 aa, Artificial Sequence; identical to SEQ ID NO: 20032
  GFR-binding peptide
  MOD_RES (16), (17), (18), (19), (20): Xaa is A or G
  MOD_RES (21), (22), (23), (24): Xaa is A or G or is absent

SEQ ID NO: 23137 - protein, 39 aa, Artificial Sequence; identical to SEQ ID NO: 20033
  GFR-binding peptide
  MOD_RES (37), (39): Xaa is C or S
  MOD_RES (16), (17), (18), (19), (20): Xaa is A or G
  MOD_RES (21), (22), (23), (24): Xaa is A or G or is absent

SEQ ID NO: 23138 - protein, 39 aa, Artificial Sequence; identical to SEQ ID NO: 20034
  GFR-binding peptide
  MOD_RES (1), (38): Xaa is C or S

SEQ ID NO: 23139 - protein, 41 aa, Artificial Sequence; identical to SEQ ID NO: 20035
  GFR-binding peptide
  MOD_RES (3), (40): Xaa is C or S

SEQ ID NO: 23140 - protein, 39 aa, Artificial Sequence; identical to SEQ ID NO: 20036
  GFR-binding peptide
  MOD_RES (6), (6): Xaa is C or S
  MOD_RES (20), (21), (22), (23), (24): Xaa is A or G
  MOD_RES (25), (26), (27), (28): Xaa is A or G or is absent

SEQ ID NO: 23141 - protein, 39 aa, Artificial Sequence; identical to SEQ ID NO: 20037
  GFR-binding peptide
  MOD_RES (3), (37), (39): Xaa is C or S

SEQ ID NO: 23142 - protein, 39 aa, Artificial Sequence; identical to SEQ ID NO: 20038
  GFR-binding peptide
  MOD_RES (4), (38): Xaa is C or S
  MOD_RES (18), (19), (20), (21), (22): Xaa is A or G
  MOD_RES (23), (24), (25), (26): Xaa is A or G or is absent

SEQ ID NO: 23143 - protein, 38 aa, Artificial Sequence; identical to SEQ ID NO: 20039
  GFR-binding peptide
  MOD_RES (37), (37): Xaa is C or S

SEQ ID NO: 23144 - protein, 35 aa, Artificial Sequence; identical to SEQ ID NO: 20040
  GFR-binding peptide
  MOD_RES (15), (16), (17), (18), (19): Xaa is A or G
  MOD_RES (20), (21), (22), (23): Xaa is A or G or is absent

SEQ ID NO: 23145 - protein, 39 aa, Artificial Sequence; identical to SEQ ID NO: 20041
  GFR-binding peptide
  MOD_RES (2), (36), (38): Xaa is C or S

SEQ ID NO: 23146 - protein, 40 aa, Artificial Sequence; identical to SEQ ID NO: 20042
  GFR-binding peptide
  MOD_RES (1), (38), (40): Xaa is C or S
  MOD_RES (17), (18), (19), (20), (21): Xaa is A or G
  MOD_RES (22), (23), (24), (25): Xaa is A or G or is absent

SEQ ID NO: 23147 - protein, 39 aa, Artificial Sequence; identical to SEQ ID NO: 20043
  GFR-binding peptide
  MOD_RES (36), (38): Xaa is C or S
  MOD_RES (15), (16), (17), (18), (19): Xaa is A or G
  MOD_RES (20), (21), (22), (23): Xaa is A or G or is absent

SEQ ID NO: 23148 - protein, 39 aa, Artificial Sequence; identical to SEQ ID NO: 20044
  GFR-binding peptide
  MOD_RES (5), (5): Xaa is C or S
  MOD_RES (21), (22), (23), (24), (25): Xaa is A or G
  MOD_RES (26), (27), (28), (29): Xaa is A or G or is absent

SEQ ID NO: 23149 - protein, 40 aa, Artificial Sequence; identical to SEQ ID NO: 20045
  GFR-binding peptide
  MOD_RES (4), (38), (40): Xaa is C or S

SEQ ID NO: 23150 - protein, 34 aa, Artificial Sequence; identical to SEQ ID NO: 20046
  GFR-binding peptide

SEQ ID NO: 23151 - protein, 38 aa, Artificial Sequence; identical to SEQ ID NO: 20047
  GFR-binding peptide
  MOD_RES (1), (35), (37): Xaa is C or S
  MOD_RES (15), (16), (17), (18), (19): Xaa is A or G
  MOD_RES (20), (21), (22), (23): Xaa is A or G or is absent

SEQ ID NO: 23152 - protein, 34 aa, Artificial Sequence; identical to SEQ ID NO: 20048
  GFR-binding peptide
  MOD_RES (15), (16), (17), (18), (19): Xaa is A or G
  MOD_RES (20), (21), (22), (23): Xaa is A or G or is absent

SEQ ID NO: 23153 - protein, 39 aa, Artificial Sequence; identical to SEQ ID NO: 20049
  GFR-binding peptide
  MOD_RES (2), (39): Xaa is C or S

SEQ ID NO: 23154 - protein, 42 aa, Artificial Sequence; identical to SEQ ID NO: 20050
  GFR-binding peptide
  MOD_RES (5), (42): Xaa is C or S

SEQ ID NO: 23155 - protein, 38 aa, Artificial Sequence; identical to SEQ ID NO: 20051
  GFR-binding peptide
  MOD_RES (4), (38): Xaa is C or S

SEQ ID NO: 23156 - protein, 42 aa, Artificial Sequence; identical to SEQ ID NO: 20052
  GFR-binding peptide
  MOD_RES (3), (40), (42): Xaa is C or S

SEQ ID NO: 23157 - protein, 41 aa, Artificial Sequence; identical to SEQ ID NO: 20053
  GFR-binding peptide
  MOD_RES (7), (41): Xaa is C or S

SEQ ID NO: 23158 - protein, 40 aa, Artificial Sequence; identical to SEQ ID NO: 20054
  GFR-binding peptide
  MOD_RES (5), (5): Xaa is C or S
  MOD_RES (21), (22), (23), (24), (25): Xaa is A or G
  MOD_RES (26), (27), (28), (29): Xaa is A or G or is absent

SEQ ID NO: 23159 - protein, 39 aa, Artificial Sequence; identical to SEQ ID NO: 20055
  GFR-binding peptide
  MOD_RES (4), (4): Xaa is C or S
  MOD_RES (20), (21), (22), (23), (24): Xaa is A or G
  MOD_RES (25), (26), (27), (28): Xaa is A or G or is absent

SEQ ID NO: 23160 - protein, 33 aa, Artificial Sequence; identical to SEQ ID NO: 20056
  GFR-binding peptide
  MOD_RES (14), (15), (16), (17), (18): Xaa is A or G
  MOD_RES (19), (20), (21), (22): Xaa is A or G or is absent

SEQ ID NO: 23161 - protein, 36 aa, Artificial Sequence; identical to SEQ ID NO: 20057
  GFR-binding peptide
  MOD_RES (2), (36): Xaa is C or S
  MOD_RES (16), (17), (18), (19), (20): Xaa is A or G
  MOD_RES (21), (22), (23), (24): Xaa is A or G or is absent

SEQ ID NO: 23162 - protein, 40 aa, Artificial Sequence; identical to SEQ ID NO: 20058
  GFR-binding peptide
  MOD_RES (3), (37), (39): Xaa is C or S

SEQ ID NO: 23163 - protein, 42 aa, Artificial Sequence; identical to SEQ ID NO: 20059
  GFR-binding peptide
  MOD_RES (5), (39), (41): Xaa is C or S
  MOD_RES (19), (20), (21), (22), (23): Xaa is A or G
  MOD_RES (24), (25), (26), (27): Xaa is A or G or is absent

SEQ ID NO: 23164 - protein, 34 aa, Artificial Sequence; identical to SEQ ID NO: 20060
  GFR-binding peptide
  MOD_RES (16), (17), (18), (19), (20): Xaa is A or G
  MOD_RES (21), (22), (23), (24): Xaa is A or G or is absent

SEQ ID NO: 23165 - protein, 35 aa, Artificial Sequence; identical to SEQ ID NO: 20061
  GFR-binding peptide
  MOD_RES (16), (17), (18), (19), (20): Xaa is A or G
  MOD_RES (21), (22), (23), (24): Xaa is A or G or is absent

SEQ ID NO: 23166 - protein, 43 aa, Artificial Sequence; identical to SEQ ID NO: 20062
  GFR-binding peptide
  MOD_RES (3), (40), (42): Xaa is C or S
  MOD_RES (19), (20), (21), (22), (23): Xaa is A or G
  MOD_RES (24), (25), (26), (27): Xaa is A or G or is absent

SEQ ID NO: 23167 - protein, 35 aa, Artificial Sequence; identical to SEQ ID NO: 20063
  GFR-binding peptide
  MOD_RES (1), (35): Xaa is C or S

SEQ ID NO: 23168 - protein, 39 aa, Artificial Sequence; identical to SEQ ID NO: 20064
  GFR-binding peptide
  MOD_RES (2), (36), (38): Xaa is C or S

SEQ ID NO: 23169 - protein, 36 aa, Artificial Sequence; identical to SEQ ID NO: 20065
  GFR-binding peptide
  MOD_RES (2), (36): Xaa is C or S
  MOD_RES (16), (17), (18), (19), (20): Xaa is A or G
  MOD_RES (21), (22), (23), (24): Xaa is A or G or is absent

SEQ ID NO: 23170 - protein, 41 aa, Artificial Sequence; identical to SEQ ID NO: 20066
  GFR-binding peptide
  MOD_RES (2), (39), (41): Xaa is C or S

SEQ ID NO: 23171 - protein, 37 aa, Artificial Sequence; identical to SEQ ID NO: 20067
  GFR-binding peptide
  MOD_RES (34), (36): Xaa is C or S

SEQ ID NO: 23172 - protein, 37 aa, Artificial Sequence; identical to SEQ ID NO: 20068
  GFR-binding peptide
  MOD_RES (2), (36): Xaa is C or S

SEQ ID NO: 23173 - protein, 39 aa, Artificial Sequence; identical to SEQ ID NO: 20069
  GFR-binding peptide
  MOD_RES (3), (37), (39): Xaa is C or S
  MOD_RES (17), (18), (19), (20), (21): Xaa is A or G
  MOD_RES (22), (23), (24), (25): Xaa is A or G or is absent

SEQ ID NO: 23174 - protein, 40 aa, Artificial Sequence; identical to SEQ ID NO: 20070
  GFR-binding peptide
  MOD_RES (1), (38), (40): Xaa is C or S

SEQ ID NO: 23175 - protein, 33 aa, Artificial Sequence; identical to SEQ ID NO: 20071
  GFR-binding peptide
  MOD_RES (14), (15), (16), (17), (18): Xaa is A or G
  MOD_RES (19), (20), (21), (22): Xaa is A or G or is absent

SEQ ID NO: 23176 - protein, 44 aa, Artificial Sequence; identical to SEQ ID NO: 20072
  GFR-binding peptide
  MOD_RES (5), (42), (44): Xaa is C or S

SEQ ID NO: 23177 - protein, 42 aa, Artificial Sequence; identical to SEQ ID NO: 20073
  GFR-binding peptide
  MOD_RES (7), (41): Xaa is C or S
  MOD_RES (21), (22), (23), (24), (25): Xaa is A or G
  MOD_RES (26), (27), (28), (29): Xaa is A or G or is absent

SEQ ID NO: 23178 - protein, 37 aa, Artificial Sequence; identical to SEQ ID NO: 20074
  GFR-binding peptide
  MOD_RES (3), (3): Xaa is C or S

SEQ ID NO: 23179 - protein, 39 aa, Artificial Sequence; identical to SEQ ID NO: 20075
  GFR-binding peptide
  MOD_RES (36), (38): Xaa is C or S
  MOD_RES (15), (16), (17), (18), (19): Xaa is A or G
  MOD_RES (20), (21), (22), (23): Xaa is A or G or is absent

SEQ ID NO: 23180 - protein, 37 aa, Artificial Sequence; identical to SEQ ID NO: 20076
  GFR-binding peptide
  MOD_RES (3), (3): Xaa is C or S

SEQ ID NO: 23181 - protein, 36 aa, Artificial Sequence; identical to SEQ ID NO: 20077
  GFR-binding peptide
  MOD_RES (35), (35): Xaa is C or S
  MOD_RES (14), (15), (16), (17), (18): Xaa is A or G
  MOD_RES (19), (20), (21), (22): Xaa is A or G or is absent

SEQ ID NO: 23182 - protein, 41 aa, Artificial Sequence; identical to SEQ ID NO: 20078
  GFR-binding peptide
  MOD_RES (2), (39), (41): Xaa is C or S

SEQ ID NO: 23183 - protein, 37 aa, Artificial Sequence; identical to SEQ ID NO: 20079
  GFR-binding peptide
  MOD_RES (2), (36): Xaa is C or S

SEQ ID NO: 23184 - protein, 43 aa, Artificial Sequence; identical to SEQ ID NO: 20080
  GFR-binding peptide
  MOD_RES (3), (40), (42): Xaa is C or S
  MOD_RES (19), (20), (21), (22), (23): Xaa is A or G
  MOD_RES (24), (25), (26), (27): Xaa is A or G or is absent

SEQ ID NO: 23185 - protein, 41 aa, Artificial Sequence; identical to SEQ ID NO: 20081
  GFR-binding peptide
  MOD_RES (3), (40): Xaa is C or S

SEQ ID NO: 23186 - protein, 41 aa, Artificial Sequence; identical to SEQ ID NO: 20082
  GFR-binding peptide
  MOD_RES (4), (38), (40): Xaa is C or S

SEQ ID NO: 23187 - protein, 37 aa, Artificial Sequence; identical to SEQ ID NO: 20083
  GFR-binding peptide
  MOD_RES (2), (2): Xaa is C or S
  MOD_RES (18), (19), (20), (21), (22): Xaa is A or G
  MOD_RES (23), (24), (25), (26): Xaa is A or G or is absent

SEQ ID NO: 23188 - protein, 40 aa, Artificial Sequence; identical to SEQ ID NO: 20084
  GFR-binding peptide
  MOD_RES (3), (37), (39): Xaa is C or S

SEQ ID NO: 23189 - protein, 39 aa, Artificial Sequence; identical to SEQ ID NO: 20085
  GFR-binding peptide
  MOD_RES (37), (39): Xaa is C or S

SEQ ID NO: 23190 - protein, 38 aa, Artificial Sequence; identical to SEQ ID NO: 20086
  GFR-binding peptide
  MOD_RES (4), (38): Xaa is C or S

SEQ ID NO: 23191 - protein, 39 aa, Artificial Sequence; identical to SEQ ID NO: 20087
  GFR-binding peptide
  MOD_RES (3), (3): Xaa is C or S

SEQ ID NO: 23192 - protein, 40 aa, Artificial Sequence; identical to SEQ ID NO: 20088
  GFR-binding peptide
  MOD_RES (7), (7): Xaa is C or S

SEQ ID NO: 23193 - protein, 38 aa, Artificial Sequence; identical to SEQ ID NO: 20089
  GFR-binding peptide
  MOD_RES (2), (36), (38): Xaa is C or S
  MOD_RES (16), (17), (18), (19), (20): Xaa is A or G
  MOD_RES (21), (22), (23), (24): Xaa is A or G or is absent

SEQ ID NO: 23194 - protein, 39 aa, Artificial Sequence; identical to SEQ ID NO: 20090
  GFR-binding peptide
  MOD_RES (3), (37), (39): Xaa is C or S
  MOD_RES (17), (18), (19), (20), (21): Xaa is A or G
  MOD_RES (22), (23), (24), (25): Xaa is A or G or is absent

SEQ ID NO: 23195 - protein, 36 aa, Artificial Sequence; identical to SEQ ID NO: 20091
  GFR-binding peptide
  MOD_RES (34), (36): Xaa is C or S
  MOD_RES (14), (15), (16), (17), (18): Xaa is A or G
  MOD_RES (19), (20), (21), (22): Xaa is A or G or is absent

SEQ ID NO: 23196 - protein, 41 aa, Artificial Sequence; identical to SEQ ID NO: 20092
  GFR-binding peptide
  MOD_RES (5), (39), (41): Xaa is C or S
  MOD_RES (19), (20), (21), (22), (23): Xaa is A or G
  MOD_RES (24), (25), (26), (27): Xaa is A or G or is absent

SEQ ID NO: 23197 - protein, 35 aa, Artificial Sequence; identical to SEQ ID NO: 20093
  GFR-binding peptide
  MOD_RES (16), (17), (18), (19), (20): Xaa is A or G
  MOD_RES (21), (22), (23), (24): Xaa is A or G or is absent

SEQ ID NO: 23198 - protein, 41 aa, Artificial Sequence; identical to SEQ ID NO: 20094
  GFR-binding peptide
  MOD_RES (3), (40): Xaa is C or S
  MOD_RES (19), (20), (21), (22), (23): Xaa is A or G
  MOD_RES (24), (25), (26), (27): Xaa is A or G or is absent

SEQ ID NO: 23199 - protein, 43 aa, Artificial Sequence; identical to SEQ ID NO: 20095
  GFR-binding peptide
  MOD_RES (4), (41), (43): Xaa is C or S
  MOD_RES (20), (21), (22), (23), (24): Xaa is A or G
  MOD_RES (25), (26), (27), (28): Xaa is A or G or is absent

SEQ ID NO: 23200 - protein, 39 aa, Artificial Sequence; identical to SEQ ID NO: 20096
  GFR-binding peptide
  MOD_RES (36), (38): Xaa is C or S
  MOD_RES (15), (16), (17), (18), (19): Xaa is A or G
  MOD_RES (20), (21), (22), (23): Xaa is A or G or is absent

SEQ ID NO: 23201 - protein, 35 aa, Artificial Sequence; identical to SEQ ID NO: 20097
  GFR-binding peptide

SEQ ID NO: 23202 - protein, 40 aa, Artificial Sequence; identical to SEQ ID NO: 20098
  GFR-binding peptide
  MOD_RES (5), (5): Xaa is C or S
  MOD_RES (21), (22), (23), (24), (25): Xaa is A or G
  MOD_RES (26), (27), (28), (29): Xaa is A or G or is absent

SEQ ID NO: 23203 - protein, 38 aa, Artificial Sequence; identical to SEQ ID NO: 20099
  GFR-binding peptide
  MOD_RES (3), (37): Xaa is C or S

SEQ ID NO: 23204 - protein, 43 aa, Artificial Sequence; identical to SEQ ID NO: 20100
  GFR-binding peptide
  MOD_RES (5), (42): Xaa is C or S
  MOD_RES (21), (22), (23), (24), (25): Xaa is A or G
  MOD_RES (26), (27), (28), (29): Xaa is A or G or is absent

SEQ ID NO: 23205 - protein, 41 aa, Artificial Sequence; identical to SEQ ID NO: 20101
  GFR-binding peptide
  MOD_RES (4), (41): Xaa is C or S
  MOD_RES (20), (21), (22), (23), (24): Xaa is A or G
  MOD_RES (25), (26), (27), (28): Xaa is A or G or is absent

SEQ ID NO: 23206 - protein, 41 aa, Artificial Sequence; identical to SEQ ID NO: 20102
  GFR-binding peptide
  MOD_RES (1), (38), (40): Xaa is C or S
  MOD_RES (17), (18), (19), (20), (21): Xaa is A or G
  MOD_RES (22), (23), (24), (25): Xaa is A or G or is absent

SEQ ID NO: 23207 - protein, 38 aa, Artificial Sequence; identical to SEQ ID NO: 20103
  GFR-binding peptide
  MOD_RES (37), (37): Xaa is C or S
  MOD_RES (16), (17), (18), (19), (20): Xaa is A or G
  MOD_RES (21), (22), (23), (24): Xaa is A or G or is absent

SEQ ID NO: 23208 - protein, 34 aa, Artificial Sequence; identical to SEQ ID NO: 20104
  GFR-binding peptide
  MOD_RES (1), (1): Xaa is C or S
  MOD_RES (15), (16), (17), (18), (19): Xaa is A or G
  MOD_RES (20), (21), (22), (23): Xaa is A or G or is absent

SEQ ID NO: 23209 - protein, 41 aa, Artificial Sequence; identical to SEQ ID NO: 20105
  GFR-binding peptide
  MOD_RES (4), (38), (40): Xaa is C or S
  MOD_RES (18), (19), (20), (21), (22): Xaa is A or G
  MOD_RES (23), (24), (25), (26): Xaa is A or G or is absent

SEQ ID NO: 23210 - protein, 41 aa, Artificial Sequence; identical to SEQ ID NO: 20106
  GFR-binding peptide
  MOD_RES (3), (40): Xaa is C or S
  MOD_RES (19), (20), (21), (22), (23): Xaa is A or G
  MOD_RES (24), (25), (26), (27): Xaa is A or G or is absent

SEQ ID NO: 23211 - protein, 35 aa, Artificial Sequence; identical to SEQ ID NO: 20107
  GFR-binding peptide
  MOD_RES (1), (35): Xaa is C or S
  MOD_RES (15), (16), (17), (18), (19): Xaa is A or G
  MOD_RES (20), (21), (22), (23): Xaa is A or G or is absent

SEQ ID NO: 23212 - protein, 39 aa, Artificial Sequence; identical to SEQ ID NO: 20108
  GFR-binding peptide
  MOD_RES (4), (4): Xaa is C or S

SEQ ID NO: 23213 - protein, 38 aa, Artificial Sequence; identical to SEQ ID NO: 20109
  GFR-binding peptide
  MOD_RES (4), (38): Xaa is C or S
  MOD_RES (18), (19), (20), (21), (22): Xaa is A or G
  MOD_RES (23), (24), (25), (26): Xaa is A or G or is absent

SEQ ID NO: 23214 - protein, 40 aa, Artificial Sequence; identical to SEQ ID NO: 20110
  GFR-binding peptide
  MOD_RES (5), (5): Xaa is C or S

SEQ ID NO: 23215 - protein, 37 aa, Artificial Sequence; identical to SEQ ID NO: 20111
  GFR-binding peptide
  MOD_RES (36), (36): Xaa is C or S

SEQ ID NO: 23216 - protein, 42 aa, Artificial Sequence; identical to SEQ ID NO: 20112
  GFR-binding peptide
  MOD_RES (7), (41): Xaa is C or S

SEQ ID NO: 23217 - protein, 41 aa, Artificial Sequence; identical to SEQ ID NO: 20113
  GFR-binding peptide
  MOD_RES (1), (38), (40): Xaa is C or S
  MOD_RES (17), (18), (19), (20), (21): Xaa is A or G
  MOD_RES (22), (23), (24), (25): Xaa is A or G or is absent

SEQ ID NO: 23218 - protein, 36 aa, Artificial Sequence; identical to SEQ ID NO: 20114
  GFR-binding peptide
  MOD_RES (34), (36): Xaa is C or S

SEQ ID NO: 23219 - protein, 37 aa, Artificial Sequence; identical to SEQ ID NO: 20115
  GFR-binding peptide
  MOD_RES (1), (1): Xaa is C or S
  MOD_RES (17), (18), (19), (20), (21): Xaa is A or G
  MOD_RES (22), (23), (24), (25): Xaa is A or G or is absent

SEQ ID NO: 23220 - protein, 41 aa, Artificial Sequence; identical to SEQ ID NO: 20116
  GFR-binding peptide
  MOD_RES (4), (41): Xaa is C or S

SEQ ID NO: 23221 - protein, 36 aa, Artificial Sequence; identical to SEQ ID NO: 20117
  GFR-binding peptide
  MOD_RES (3), (3): Xaa is C or S

SEQ ID NO: 23222 - protein, 40 aa, Artificial Sequence; identical to SEQ ID NO: 20118
  GFR-binding peptide
  MOD_RES (1), (38), (40): Xaa is C or S
  MOD_RES (17), (18), (19), (20), (21): Xaa is A or G
  MOD_RES (22), (23), (24), (25): Xaa is A or G or is absent

SEQ ID NO: 23223 - protein, 43 aa, Artificial Sequence; identical to SEQ ID NO: 20119
  GFR-binding peptide
  MOD_RES (5), (42): Xaa is C or S

SEQ ID NO: 23224 - protein, 37 aa, Artificial Sequence; identical to SEQ ID NO: 20120
  GFR-binding peptide
  MOD_RES (34), (36): Xaa is C or S
  MOD_RES (14), (15), (16), (17), (18): Xaa is A or G
  MOD_RES (19), (20), (21), (22): Xaa is A or G or is absent

SEQ ID NO: 23225 - protein, 32 aa, Artificial Sequence; identical to SEQ ID NO: 20121
  GFR-binding peptide
  MOD_RES (14), (15), (16), (17), (18): Xaa is A or G
  MOD_RES (19), (20), (21), (22): Xaa is A or G or is absent

SEQ ID NO: 23226 - protein, 37 aa, Artificial Sequence; identical to SEQ ID NO: 20122
  GFR-binding peptide
  MOD_RES (35), (37): Xaa is C or S
  MOD_RES (14), (15), (16), (17), (18): Xaa is A or G
  MOD_RES (19), (20), (21), (22): Xaa is A or G or is absent

SEQ ID NO: 23227 - protein, 40 aa, Artificial Sequence; identical to SEQ ID NO: 20123
  GFR-binding peptide
  MOD_RES (4), (38), (40): Xaa is C or S
  MOD_RES (18), (19), (20), (21), (22): Xaa is A or G
  MOD_RES (23), (24), (25), (26): Xaa is A or G or is absent

SEQ ID NO: 23228 - protein, 39 aa, Artificial Sequence; identical to SEQ ID NO: 20124
  GFR-binding peptide
  MOD_RES (5), (5): Xaa is C or S
  MOD_RES (21), (22), (23), (24), (25): Xaa is A or G
  MOD_RES (26), (27), (28), (29): Xaa is A or G or is absent

SEQ ID NO: 23229 - protein, 34 aa, Artificial Sequence; identical to SEQ ID NO: 20125
  GFR-binding peptide
  MOD_RES (34), (34): Xaa is C or S
  MOD_RES (14), (15), (16), (17), (18): Xaa is A or G
  MOD_RES (19), (20), (21), (22): Xaa is A or G or is absent

SEQ ID NO: 23230 - protein, 36 aa, Artificial Sequence; identical to SEQ ID NO: 20126
  GFR-binding peptide
  MOD_RES (3), (3): Xaa is C or S

SEQ ID NO: 23231 - protein, 37 aa, Artificial Sequence; identical to SEQ ID NO: 20127
  GFR-binding peptide
  MOD_RES (37), (37): Xaa is C or S
  MOD_RES (16), (17), (18), (19), (20): Xaa is A or G
  MOD_RES (21), (22), (23), (24): Xaa is A or G or is absent

SEQ ID NO: 23232 - protein, 39 aa, Artificial Sequence; identical to SEQ ID NO: 20128
  GFR-binding peptide
  MOD_RES (5), (5): Xaa is C or S
  MOD_RES (21), (22), (23), (24), (25): Xaa is A or G
  MOD_RES (26), (27), (28), (29): Xaa is A or G or is absent

SEQ ID NO: 23233 - protein, 38 aa, Artificial Sequence; identical to SEQ ID NO: 20129
  GFR-binding peptide
  MOD_RES (2), (36), (38): Xaa is C or S
  MOD_RES (16), (17), (18), (19), (20): Xaa is A or G
  MOD_RES (21), (22), (23), (24): Xaa is A or G or is absent

SEQ ID NO: 23234 - protein, 36 aa, Artificial Sequence; identical to SEQ ID NO: 20130
  GFR-binding peptide

SEQ ID NO: 23235 - protein, 39 aa, Artificial Sequence; identical to SEQ ID NO: 20131
  GFR-binding peptide
  MOD_RES (4), (38): Xaa is C or S
  MOD_RES (18), (19), (20), (21), (22): Xaa is A or G
  MOD_RES (23), (24), (25), (26): Xaa is A or G or is absent

SEQ ID NO: 23236 - protein, 36 aa, Artificial Sequence; identical to SEQ ID NO: 20132
  GFR-binding peptide
  MOD_RES (1), (1): Xaa is C or S
  MOD_RES (17), (18), (19), (20), (21): Xaa is A or G
  MOD_RES (22), (23), (24), (25): Xaa is A or G or is absent

SEQ ID NO: 23237 - protein, 42 aa, Artificial Sequence; identical to SEQ ID NO: 20133
  GFR-binding peptide
  MOD_RES (2), (39), (41): Xaa is C or S

SEQ ID NO: 23238 - protein, 41 aa, Artificial Sequence; identical to SEQ ID NO: 20134
  GFR-binding peptide
  MOD_RES (6), (40): Xaa is C or S
  MOD_RES (20), (21), (22), (23), (24): Xaa is A or G
  MOD_RES (25), (26), (27), (28): Xaa is A or G or is absent

SEQ ID NO: 23239 - protein, 34 aa, Artificial Sequence; identical to SEQ ID NO: 20135
  GFR-binding peptide
  MOD_RES (16), (17), (18), (19), (20): Xaa is A or G
  MOD_RES (21), (22), (23), (24): Xaa is A or G or is absent

SEQ ID NO: 23240 - protein, 34 aa, Artificial Sequence; identical to SEQ ID NO: 20136
  GFR-binding peptide
  MOD_RES (34), (34): Xaa is C or S

SEQ ID NO: 23241 - protein, 36 aa, Artificial Sequence; identical to SEQ ID NO: 20137
  GFR-binding peptide
  MOD_RES (1), (1): Xaa is C or S
  MOD_RES (17), (18), (19), (20), (21): Xaa is A or G
  MOD_RES (22), (23), (24), (25): Xaa is A or G or is absent

SEQ ID NO: 23242 - protein, 41 aa, Artificial Sequence; identical to SEQ ID NO: 20138
  GFR-binding peptide
  MOD_RES (5), (39), (41): Xaa is C or S
  MOD_RES (19), (20), (21), (22), (23): Xaa is A or G
  MOD_RES (24), (25), (26), (27): Xaa is A or G or is absent

SEQ ID NO: 23243 - protein, 36 aa, Artificial Sequence; identical to SEQ ID NO: 20139
  GFR-binding peptide
  MOD_RES (3), (3): Xaa is C or S
  MOD_RES (17), (18), (19), (20), (21): Xaa is A or G
  MOD_RES (22), (23), (24), (25): Xaa is A or G or is absent

SEQ ID NO: 23244 - protein, 39 aa, Artificial Sequence; identical to SEQ ID NO: 20140
  GFR-binding peptide
  MOD_RES (3), (3): Xaa is C or S

SEQ ID NO: 23245 - protein, 40 aa, Artificial Sequence; identical to SEQ ID NO: 20141
  GFR-binding peptide
  MOD_RES (3), (40): Xaa is C or S
  MOD_RES (19), (20), (21), (22), (23): Xaa is A or G
  MOD_RES (24), (25), (26), (27): Xaa is A or G or is absent

SEQ ID NO: 23246 - protein, 35 aa, Artificial Sequence; identical to SEQ ID NO: 20142
  GFR-binding peptide
  MOD_RES (35), (35): Xaa is C or S
  MOD_RES (14), (15), (16), (17), (18): Xaa is A or G
  MOD_RES (19), (20), (21), (22): Xaa is A or G or is absent

SEQ ID NO: 23247 - protein, 37 aa, Artificial Sequence; identical to SEQ ID NO: 20143
  GFR-binding peptide
  MOD_RES (3), (37): Xaa is C or S

SEQ ID NO: 23248 - protein, 41 aa, Artificial Sequence; identical to SEQ ID NO: 20144
  GFR-binding peptide
  MOD_RES (7), (41): Xaa is C or S
  MOD_RES (21), (22), (23), (24), (25): Xaa is A or G
  MOD_RES (26), (27), (28), (29): Xaa is A or G or is absent

SEQ ID NO: 23249 - protein, 37 aa, Artificial Sequence; identical to SEQ ID NO: 20145
  GFR-binding peptide
  MOD_RES (3), (37): Xaa is C or S
  MOD_RES (17), (18), (19), (20), (21): Xaa is A or G
  MOD_RES (22), (23), (24), (25): Xaa is A or G or is absent

SEQ ID NO: 23250 - protein, 35 aa, Artificial Sequence; identical to SEQ ID NO: 20146
  GFR-binding peptide
  MOD_RES (34), (34): Xaa is C or S
  MOD_RES (14), (15), (16), (17), (18): Xaa is A or G
  MOD_RES (19), (20), (21), (22): Xaa is A or G or is absent

SEQ ID NO: 23251 - protein, 39 aa, Artificial Sequence; identical to SEQ ID NO: 20147
  GFR-binding peptide
  MOD_RES (5), (39): Xaa is C or S
  MOD_RES (19), (20), (21), (22), (23): Xaa is A or G
  MOD_RES (24), (25), (26), (27): Xaa is A or G or is absent

SEQ ID NO: 23252 - protein, 38 aa, Artificial Sequence; identical to SEQ ID NO: 20148
  GFR-binding peptide
  MOD_RES (4), (4): Xaa is C or S
  MOD_RES (20), (21), (22), (23), (24): Xaa is A or G
  MOD_RES (25), (26), (27), (28): Xaa is A or G or is absent

SEQ ID NO: 23253 - protein, 40 aa, Artificial Sequence; identical to SEQ ID NO: 20149
  GFR-binding peptide
  MOD_RES (3), (37), (39): Xaa is C or S
  MOD_RES (17), (18), (19), (20), (21): Xaa is A or G
  MOD_RES (22), (23), (24), (25): Xaa is A or G or is absent

SEQ ID NO: 23254 - protein, 38 aa, Artificial Sequence; identical to SEQ ID NO: 20150
  GFR-binding peptide
  MOD_RES (37), (37): Xaa is C or S
  MOD_RES (16), (17), (18), (19), (20): Xaa is A or G
  MOD_RES (21), (22), (23), (24): Xaa is A or G or is absent

SEQ ID NO: 23255 - protein, 38 aa, Artificial Sequence; identical to SEQ ID NO: 2269
  GFR-binding peptide
  MOD_RES (32), (33): Xaa is C or S

SEQ ID NO: 23256 - protein, 40 aa, Artificial Sequence
  GFR-binding peptide
  MOD_RES (1), (3), (38), (39): Xaa is C or S
  MOD_RES (16), (17), (18), (19), (20): Xaa is A or G
  MOD_RES (21), (22), (23), (24): Xaa is A or G or is absent
XGXEAVSMGEEYQKYXXXXXXXXXIYLVSIPSLKTPVXXA

SEQ ID NO: 23257 - protein, 34 aa, Artificial Sequence; identical to SEQ ID NO: 2272
  GFR-binding peptide
  MOD_RES (13), (14), (15), (16), (17): Xaa is A or G
  MOD_RES (18), (19), (20), (21): Xaa is A or G or is absent

SEQ ID NO: 23258 - protein, 42 aa, Artificial Sequence; identical to SEQ ID NO: 2274
  GFR-binding peptide
  MOD_RES (1), (3), (38), (39): Xaa is C or S
  MOD_RES (16), (17), (18), (19), (20): Xaa is A or G
  MOD_RES (21), (22), (23), (24): Xaa is A or G or is absent

SEQ ID NO: 23259 - protein, 36 aa, Artificial Sequence
  GFR-binding peptide
  MOD_RES (2), (36): Xaa is C or S
  MOD_RES (14), (15), (16), (17), (18): Xaa is A or G
  MOD_RES (19), (20), (21), (22): Xaa is A or G or is absent
GXESVAMGEYQKYXXXXXXXXXIYLISIPSLKTPVX

SEQ ID NO: 23260 - protein, 35 aa, Artificial Sequence
  GFR-binding peptide
  MOD_RES (1), (33), (34): Xaa is C or S
XGEVVMDEYQKYVVKENEDIYLMSIPSLETPVXXA

SEQ ID NO: 23261 - protein, 33 aa, Artificial Sequence; identical to SEQ ID NO: 2277
  GFR-binding peptide
  MOD_RES (2), (2): Xaa is C or S

SEQ ID NO: 23262 - protein, 38 aa, Artificial Sequence; identical to SEQ ID NO: 2278
  GFR-binding peptide
  MOD_RES (1), (3), (36), (37): Xaa is C or S
  MOD_RES (14), (15), (16), (17), (18): Xaa is A or G
  MOD_RES (19), (20), (21), (22): Xaa is A or G or is absent

SEQ ID NO: 23263 - protein, 40 aa, Artificial Sequence
  GFR-binding peptide
  MOD_RES (2), (4), (36), (37): Xaa is C or S
RXGXGEVVMEEYKFKVVKDYEDLYLMSIPELETPVXXAKP

SEQ ID NO: 23264 - protein, 41 aa, Artificial Sequence
  GFR-binding peptide
  MOD_RES (2), (4), (39), (40): Xaa is C or S
  MOD_RES (17), (18), (19), (20), (21): Xaa is A or G
  MOD_RES (22), (23), (24), (25): Xaa is A or G or is absent
RXGXEAVSMGEEYQKYXXXXXXXXXIYLVSIPSLKTPVXXA

SEQ ID NO: 23265 - protein, 36 aa, Artificial Sequence; identical to SEQ ID NO: 2280
  GFR-binding peptide
  MOD_RES (1), (33), (34): Xaa is C or S

SEQ ID NO: 23266 - protein, 32 aa, Artificial Sequence; identical to SEQ ID NO: 2282
  GFR-binding peptide
  MOD_RES (1), (32): Xaa is C or S

SEQ ID NO: 23267 - protein, 32 aa, Artificial Sequence
  GFR-binding peptide
  MOD_RES (31), (32): Xaa is C or S
KVVMNEYQKYIVNNSSDIYLVSIPSLKTPAXX

SEQ ID NO: 23268 - protein, 40 aa, Artificial Sequence
  GFR-binding peptide
  MOD_RES (2), (4), (39), (40): Xaa is C or S
  MOD_RES (17), (18), (19), (20), (21): Xaa is A or G
  MOD_RES (22), (23), (24), (25): Xaa is A or G or is absent
RXGXEAVSMGEEYQKYXXXXXXXXXIYLVSIPSLKTPVXX

SEQ ID NO: 23269 - protein, 33 aa, Artificial Sequence
  GFR-binding peptide
  MOD_RES (31), (32): Xaa is C or S
SKVVMEYKFKVKPTRGVLYLISIPELDQPVXXP

SEQ ID NO: 23270 - protein, 35 aa, Artificial Sequence; identical to SEQ ID NO: 2288
  GFR-binding peptide
  MOD_RES (31), (32): Xaa is C or S

SEQ ID NO: 23271 - protein, 42 aa, Artificial Sequence; identical to SEQ ID NO: 2289
  GFR-binding peptide
  MOD_RES (1), (3), (37), (38): Xaa is C or S
  MOD_RES (15), (16), (17), (18), (19): Xaa is A or G
  MOD_RES (20), (21), (22), (23): Xaa is A or G or is absent

SEQ ID NO: 23272 - protein, 40 aa, Artificial Sequence
  GFR-binding peptide
  MOD_RES (1), (3), (36), (37): Xaa is C or S
  MOD_RES (14), (15), (16), (17), (18): Xaa is A or G
  MOD_RES (19), (20), (21), (22): Xaa is A or G or is absent
XKXSKVVMEYKFKXXXXXXXXXLYLISIPELDQPVXXPSA

SEQ ID NO: 23273 - protein, 33 aa, Artificial Sequence
  GFR-binding peptide
  MOD_RES (1), (1): Xaa is C or S
  MOD_RES (12), (13), (14), (15), (16): Xaa is A or G
  MOD_RES (17), (18), (19), (20): Xaa is A or G or is absent
XSRVIMEYQKYXXXXXXXXXIYLISIPSLAQPV

SEQ ID NO: 23274 - protein, 39 aa, Artificial Sequence
  GFR-binding peptide
  MOD_RES (2), (36): Xaa is C or S
  MOD_RES (14), (15), (16), (17), (18): Xaa is A or G
  MOD_RES (19), (20), (21), (22): Xaa is A or G or is absent
GXSRVVMNEYQKYXXXXXXXXXIYLVSIPSLKTPAXTPK

SEQ ID NO: 23275 - protein, 42 aa, Artificial Sequence; identical to SEQ ID NO: 2293
  GFR-binding peptide
  MOD_RES (2), (4), (36), (37): Xaa is C or S

SEQ ID NO: 23276 - protein, 38 aa, Artificial Sequence; identical to SEQ ID NO: 2294
  GFR-binding peptide
  MOD_RES (2), (4), (37), (38): Xaa is C or S
  MOD_RES (15), (16), (17), (18), (19): Xaa is A or G
  MOD_RES (20), (21), (22), (23): Xaa is A or G or is absent

SEQ ID NO: 23277 - protein, 37 aa, Artificial Sequence
  GFR-binding peptide
  MOD_RES (2), (33), (34): Xaa is C or S
KXSKVIMEYKFKIKPTKGILYLISIPELDQSVXXPSA

SEQ ID NO: 23278 - protein, 40 aa, Artificial Sequence
  GFR-binding peptide
  MOD_RES (2), (4), (36), (37): Xaa is C or S
HXGXARVVMNEYKFKIVNSSDDLYLVSIPELQTPAXXPKP

SEQ ID NO: 23279 - protein, 36 aa, Artificial Sequence
  GFR-binding peptide
  MOD_RES (33), (34): Xaa is C or S
  MOD_RES (11), (12), (13), (14), (15): Xaa is A or G
  MOD_RES (16), (17), (18), (19): Xaa is A or G or is absent
KVVMNEYQKYXXXXXXXXXIYLVSIPSLKTPAXXAK

SEQ ID NO: 23280 - protein, 40 aa, Artificial Sequence
  GFR-binding peptide
  MOD_RES (1), (3), (35), (36): Xaa is C or S
XGXESVAMGEYKFKYTVVGKDLYLISIPELKTPVXXAKSA

SEQ ID NO: 23281 - protein, 42 aa, Artificial Sequence
  GFR-binding peptide
  MOD_RES (1), (3), (37), (38): Xaa is C or S
  MOD_RES (15), (16), (17), (18), (19): Xaa is A or G
  MOD_RES (20), (21), (22), (23): Xaa is A or G or is absent
XGXAEVVMDEYQKYXXXXXXXXXIYLISIPSLRAPVXXSAPA

SEQ ID NO: 23282 - protein, 36 aa, Artificial Sequence
  GFR-binding peptide
  MOD_RES (31), (32): Xaa is C or S
EVVMEEYQKYVVKDYEDIYLMSIPSLETPVXXAKPI

SEQ ID NO: 23283 - protein, 38 aa, Artificial Sequence
  GFR-binding peptide
  MOD_RES (33), (34): Xaa is C or S
  MOD_RES (11), (12), (13), (14), (15): Xaa is A or G
  MOD_RES (16), (17), (18), (19): Xaa is A or G or is absent
EVVMEEYQKYXXXXXXXXXIYLMSIPSLETPVXXAKPI

SEQ ID NO: 23284 - protein, 39 aa, Artificial Sequence; identical to SEQ ID NO: 2299
  GFR-binding peptide
  MOD_RES (1), (3), (35), (36): Xaa is C or S

SEQ ID NO: 23285 - protein, 34 aa, Artificial Sequence
  GFR-binding peptide
  MOD_RES (1), (33), (34): Xaa is C or S
XAEVVMDYHYKLVVNNAADKYLISIPSLRAPVXX

SEQ ID NO: 23286 - protein, 35 aa, Artificial Sequence
  GFR-binding peptide
  MOD_RES (1), (35): Xaa is C or S
  MOD_RES (13), (14), (15), (16), (17): Xaa is A or G
  MOD_RES (18), (19), (20), (21): Xaa is A or G or is absent
XARVVMNEYKFKXXXXXXXXXLYLVSIPELQTPAX

SEQ ID NO: 23287 - protein, 35 aa, Artificial Sequence
  GFR-binding peptide
  MOD_RES (33), (34): Xaa is C or S
  MOD_RES (11), (12), (13), (14), (15): Xaa is A or G
  MOD_RES (16), (17), (18), (19): Xaa is A or G or is absent
EVVMDRYKKLXXXXXXXXXFYLISIANLRAPVXXS

SEQ ID NO: 23288 - protein, 32 aa, Artificial Sequence; identical to SEQ ID NO: 2302
  GFR-binding peptide
  MOD_RES (31), (32): Xaa is C or S

SEQ ID NO: 23289 - protein, 41 aa, Artificial Sequence; identical to SEQ ID NO: 2304
  GFR-binding peptide
  MOD_RES (1), (35), (36): Xaa is C or S
  MOD_RES (13), (14), (15), (16), (17): Xaa is A or G
  MOD_RES (18), (19), (20), (21): Xaa is A or G or is absent

SEQ ID NO: 23290 - protein, 36 aa, Artificial Sequence
  GFR-binding peptide
  MOD_RES (1), (35), (36): Xaa is C or S
  MOD_RES (13), (14), (15), (16), (17): Xaa is A or G
  MOD_RES (18), (19), (20), (21): Xaa is A or G or is absent
XESVAMGYHYKLXXXXXXXXXKYLISIPSLKTPVXX

SEQ ID NO: 23291 - protein, 35 aa, Artificial Sequence
  GFR-binding peptide
  MOD_RES (1), (3), (35): Xaa is C or S
XGXGEVVMEEYKFKVVKDYEDLYLMSIPELETPVX

SEQ ID NO: 23292 - protein, 30 aa, Artificial Sequence; identical to SEQ ID NO: 2308
  GFR-binding peptide

SEQ ID NO: 23293 - protein, 43 aa, Artificial Sequence; identical to SEQ ID NO: 2309
  GFR-binding peptide
  MOD_RES (2), (4), (38), (39): Xaa is C or S
  MOD_RES (16), (17), (18), (19), (20): Xaa is A or G
  MOD_RES (21), (22), (23), (24): Xaa is A or G or is absent

SEQ ID NO: 23294 - protein, 32 aa, Artificial Sequence; identical to SEQ ID NO: 2312
  GFR-binding peptide
  MOD_RES (32), (32): Xaa is C or S

SEQ ID NO: 23295 - protein, 35 aa, Artificial Sequence
  GFR-binding peptide
  MOD_RES (1), (3): Xaa is C or S
  MOD_RES (14), (15), (16), (17), (18): Xaa is A or G
  MOD_RES (19), (20), (21), (22): Xaa is A or G or is absent
XKXSKVVMEYKFKXXXXXXXXXLYLISIPELDQPV

SEQ ID NO: 23296 - protein, 31 aa, Artificial Sequence
  GFR-binding peptide
  MOD_RES (31), (31): Xaa is C or S
SVAMGRYKKLYTVVGKDFYLISIANLKTPVX

SEQ ID NO: 23297 - protein, 40 aa, Artificial Sequence
  GFR-binding peptide
  MOD_RES (1), (35), (36): Xaa is C or S
  MOD_RES (13), (14), (15), (16), (17): Xaa is A or G
  MOD_RES (18), (19), (20), (21): Xaa is A or G or is absent
XESVAMGRYKKLXXXXXXXXXFYLISIANLKTPVXXAKSA

SEQ ID NO: 23298 - protein, 32 aa, Artificial Sequence; identical to SEQ ID NO: 2317
  GFR-binding peptide
  MOD_RES (1), (1): Xaa is C or S

SEQ ID NO: 23299 - protein, 37 aa, Artificial Sequence; identical to SEQ ID NO: 2318
  GFR-binding peptide
  MOD_RES (1), (3), (36), (37): Xaa is C or S

SEQ ID NO: 23300 - protein, 34 aa, Artificial Sequence
  GFR-binding peptide
  MOD_RES (2), (34): Xaa is C or S
GXGEVVMEEYQKYVVKDYEDIYLMSIPSLETPVX

SEQ ID NO: 23301 - protein, 37 aa, Artificial Sequence; identical to SEQ ID NO: 2323
  GFR-binding peptide
  MOD_RES (2), (4): Xaa is C or S
  MOD_RES (16), (17), (18), (19), (20): Xaa is A or G
  MOD_RES (21), (22), (23), (24): Xaa is A or G or is absent

SEQ ID NO: 23302 - protein, 30 aa, Artificial Sequence
  GFR-binding peptide
KVVMNEYKFKIVNNSSDLYLVSIPELKTPA

SEQ ID NO: 23303 - protein, 34 aa, Artificial Sequence; identical to SEQ ID NO: 2326
  GFR-binding peptide
  MOD_RES (1), (34): Xaa is C or S
  MOD_RES (12), (13), (14), (15), (16): Xaa is A or G
  MOD_RES (17), (18), (19), (20): Xaa is A or G or is absent

SEQ ID NO: 23304 - protein, 37 aa, Artificial Sequence
  GFR-binding peptide
  MOD_RES (34), (35): Xaa is C or S
  MOD_RES (12), (13), (14), (15), (16): Xaa is A or G
  MOD_RES (17), (18), (19), (20): Xaa is A or G or is absent
ESVAMGEYQKYXXXXXXXXXIYLISIPSLKTPVXXAK

SEQ ID NO: 23305 - protein, 36 aa, Artificial Sequence
  GFR-binding peptide
  MOD_RES (31), (32): Xaa is C or S
SKVVMEYQKYVKPTRGVIYLISIPSLDQPVXXPSAS

SEQ ID NO: 23306 - protein, 35 aa, Artificial Sequence
  GFR-binding peptide
  MOD_RES (34), (35): Xaa is C or S
  MOD_RES (12), (13), (14), (15), (16): Xaa is A or G
  MOD_RES (17), (18), (19), (20): Xaa is A or G or is absent
GEVVMDEYKFKXXXXXXXXXLYLMSIPELETPVXX

SEQ ID NO: 23307 - protein, 32 aa, Artificial Sequence; identical to SEQ ID NO: 2327
  GFR-binding peptide
  MOD_RES (31), (32): Xaa is C or S

SEQ ID NO: 23308 - protein, 40 aa, Artificial Sequence
  GFR-binding peptide
  MOD_RES (35), (36): Xaa is C or S
  MOD_RES (13), (14), (15), (16), (17): Xaa is A or G
  MOD_RES (18), (19), (20), (21): Xaa is A or G or is absent
EAVSMGEEYKFKXXXXXXXXXLYLVSIPELKTPVXXAKGV

SEQ ID NO: 23309 - protein, 38 aa, Artificial Sequence
  GFR-binding peptide
  MOD_RES (2), (4), (36): Xaa is C or S
HXGXSRVVMNEYQKYIVNSSDDIYLVSIPSLKTPAXTP

SEQ ID NO: 23310 - protein, 42 aa, Artificial Sequence; identical to SEQ ID NO: 2328
  GFR-binding peptide
  MOD_RES (2), (4), (37), (38): Xaa is C or S
  MOD_RES (15), (16), (17), (18), (19): Xaa is A or G
  MOD_RES (20), (21), (22), (23): Xaa is A or G or is absent

SEQ ID NO: 23311 - protein, 37 aa, Artificial Sequence
  GFR-binding peptide
  MOD_RES (31), (32): Xaa is C or S
SRVIMEYQKYVKPKRGVIYLISIPSLAQPVXXPAASA

SEQ ID NO: 23312 - protein, 38 aa, Artificial Sequence
  GFR-binding peptide
  MOD_RES (2), (4), (38): Xaa is C or S
  MOD_RES (16), (17), (18), (19), (20): Xaa is A or G
  MOD_RES (21), (22), (23), (24): Xaa is A or G or is absent
HXGXARVVMNEYQKYXXXXXXXXXIYLVSIPSLQTPAX

SEQ ID NO: 23313 - protein, 41 aa, Artificial Sequence
  GFR-binding peptide
  MOD_RES (1), (3), (35), (36): Xaa is C or S
XGXSRVVMNEYQKYIVNSSDDIYLVSIPSLKTPAXXPKPVY

SEQ ID NO: 23314 - protein, 33 aa, Artificial Sequence; identical to SEQ ID NO: 2330
  GFR-binding peptide
  MOD_RES (1), (1): Xaa is C or S
  MOD_RES (12), (13), (14), (15), (16): Xaa is A or G
  MOD_RES (17), (18), (19), (20): Xaa is A or G or is absent

SEQ ID NO: 23315 - protein, 32 aa, Artificial Sequence
  GFR-binding peptide
  MOD_RES (1), (32): Xaa is C or S
XSKVVMEYQKYVKPTRGVIYLISIPSLDQPVX

SEQ ID NO: 23316 - protein, 40 aa, Artificial Sequence
  GFR-binding peptide
  MOD_RES (1), (3), (35), (36): Xaa is C or S
XGXSRVVMNEYKFKIVNSSDDLYLVSIPELKTPAXXPKPV

SEQ ID NO: 23317 - protein, 40 aa, Artificial Sequence; identical to SEQ ID NO: 2333
  GFR-binding peptide
  MOD_RES (1), (3), (36), (37): Xaa is C or S

SEQ ID NO: 23318 - protein, 37 aa, Artificial Sequence
  GFR-binding peptide
  MOD_RES (1), (33), (34): Xaa is C or S
XESVAMGRYKKLYTVVGKDFYLISIANLKTPVXXAKS

SEQ ID NO: 23319 - protein, 36 aa, Artificial Sequence; identical to SEQ ID NO: 2335
  GFR-binding peptide
  MOD_RES (1), (3): Xaa is C or S
  MOD_RES (15), (16), (17), (18), (19): Xaa is A or G
  MOD_RES (20), (21), (22), (23): Xaa is A or G or is absent

SEQ ID NO: 23320 - protein, 43 aa, Artificial Sequence
  GFR-binding peptide
  MOD_RES (2), (4), (38), (39): Xaa is C or S
  MOD_RES (16), (17), (18), (19), (20): Xaa is A or G
  MOD_RES (21), (22), (23), (24): Xaa is A or G or is absent
HXGXARVVMNEYKFKXXXXXXXXXLYLVSIPELQTPAXXPKPV

SEQ ID NO: 23321 - protein, 42 aa, Artificial Sequence
  GFR-binding peptide
  MOD_RES (2), (4), (36), (37): Xaa is C or S
RXGXAEVVMDYHYKLVVNNAADKYLISIPSLRAPVXXSAPAA

SEQ ID NO: 23322 - protein, 37 aa, Artificial Sequence
  GFR-binding peptide
  MOD_RES (2), (35), (36): Xaa is C or S
  MOD_RES (13), (14), (15), (16), (17): Xaa is A or G
  MOD_RES (18), (19), (20), (21): Xaa is A or G or is absent
KXSKVVMEYKFKXXXXXXXXXLYLISIPELDQPVXXP

SEQ ID NO: 23323 - protein, 39 aa, Artificial Sequence; identical to SEQ ID NO: 2341
  GFR-binding peptide
  MOD_RES (33), (34): Xaa is C or S
  MOD_RES (11), (12), (13), (14), (15): Xaa is A or G
  MOD_RES (16), (17), (18), (19): Xaa is A or G or is absent

SEQ ID NO: 23324 - protein, 41 aa, Artificial Sequence
  GFR-binding peptide
  MOD_RES (1), (3), (35), (36): Xaa is C or S
XGXGEVVMDEYQKYVVKENEDIYLMSIPSLETPVXXAKPIK

SEQ ID NO: 23325 - protein, 37 aa, Artificial Sequence
  GFR-binding peptide
  MOD_RES (2), (34), (35): Xaa is C or S
GXAEVVMDEYKFKVVNNAADLYLISIPELRAPVXXSA

SEQ ID NO: 23326 - protein, 36 aa, Artificial Sequence
  GFR-binding peptide
  MOD_RES (2), (36): Xaa is C or S
  MOD_RES (14), (15), (16), (17), (18): Xaa is A or G
  MOD_RES (19), (20), (21), (22): Xaa is A or G or is absent
GXSRVVMNEYQKYXXXXXXXXXIYLVSIPSLKTPAX

SEQ ID NO: 23327 - protein, 42 aa, Artificial Sequence
  GFR-binding peptide
  MOD_RES (2), (36), (37): Xaa is C or S
  MOD_RES (14), (15), (16), (17), (18): Xaa is A or G
  MOD_RES (19), (20), (21), (22): Xaa is A or G or is absent
GXAKVVMNEYQKYXXXXXXXXXIYLVSIPSLKTPAXXAKPVA

SEQ ID NO: 23328 - protein, 36 aa, Artificial Sequence
  GFR-binding peptide
  MOD_RES (31), (31): Xaa is C or S
RVVMNEYQKYIVNSSDDIYLVSIPSLKTPAXTPKTV

SEQ ID NO: 23329 - protein, 37 aa, Artificial Sequence
  GFR-binding peptide
  MOD_RES (1), (33), (34): Xaa is C or S
XGEVVMDEYKFKVVKENEDLYLMSIPELETPVXXAKP

SEQ ID NO: 23330 - protein, 36 aa, Artificial Sequence
  GFR-binding peptide
  MOD_RES (1), (3), (36): Xaa is C or S
  MOD_RES (14), (15), (16), (17), (18): Xaa is A or G
  MOD_RES (19), (20), (21), (22): Xaa is A or G or is absent
XKXSKVVMEYKFKXXXXXXXXXLYLISIPELDQPVX

SEQ ID NO: 23331 - protein, 43 aa, Artificial Sequence; identical to SEQ ID NO: 2348
  GFR-binding peptide
  MOD_RES (2), (4), (38), (39): Xaa is C or S
  MOD_RES (16), (17), (18), (19), (20): Xaa is A or G
  MOD_RES (21), (22), (23), (24): Xaa is A or G or is absent

SEQ ID NO: 23332 - protein, 36 aa, Artificial Sequence
  GFR-binding peptide
  MOD_RES (34), (35): Xaa is C or S
  MOD_RES (12), (13), (14), (15), (16): Xaa is A or G
  MOD_RES (17), (18), (19), (20): Xaa is A or G or is absent
SRVVMNEYKFKXXXXXXXXXLYLVSIPELKTPAXXP

SEQ ID NO: 23333 - protein, 38 aa, Artificial Sequence; identical to SEQ ID NO: 2351
  GFR-binding peptide
  MOD_RES (1), (3), (35), (36): Xaa is C or S

SEQ ID NO: 23334 - protein, 33 aa, Artificial Sequence; identical to SEQ ID NO: 2352
  GFR-binding peptide
  MOD_RES (2), (33): Xaa is C or S

SEQ ID NO: 23335 - protein, 35 aa, Artificial Sequence
  GFR-binding peptide
  MOD_RES (1), (32), (33): Xaa is C or S
XSKVVMEYKFKVKPTRGVLYLISIPELDQPVXXPS

SEQ ID NO: 23336 - protein, 36 aa, Artificial Sequence
  GFR-binding peptide
  MOD_RES (34), (35): Xaa is C or S
  MOD_RES (12), (13), (14), (15), (16): Xaa is A or G
  MOD_RES (17), (18), (19), (20): Xaa is A or G or is absent
AEVVMDEYQKYXXXXXXXXXIYLISIPSLRAPVXXS

SEQ ID NO: 23337 - protein, 34 aa, Artificial Sequence; identical to SEQ ID NO: 2356
  GFR-binding peptide
  MOD_RES (1), (34): Xaa is C or S
  MOD_RES (12), (13), (14), (15), (16): Xaa is A or G
  MOD_RES (17), (18), (19), (20): Xaa is A or G or is absent

SEQ ID NO: 23338 - protein, 36 aa, Artificial Sequence
  GFR-binding peptide
  MOD_RES (31), (32): Xaa is C or S
EVVMDEYQKYVVNNAADIYLISIPSLRAPVXXSAPA

SEQ ID NO: 23339 - protein, 43 aa, Artificial Sequence; identical to SEQ ID NO: 2357
  GFR-binding peptide
  MOD_RES (2), (4), (38), (39): Xaa is C or S
  MOD_RES (16), (17), (18), (19), (20): Xaa is A or G
  MOD_RES (21), (22), (23), (24): Xaa is A or G or is absent

SEQ ID NO: 23340 - protein, 33 aa, Artificial Sequence; identical to SEQ ID NO: 2358
  GFR-binding peptide
  MOD_RES (33), (33): Xaa is C or S
  MOD_RES (11), (12), (13), (14), (15): Xaa is A or G
  MOD_RES (16), (17), (18), (19): Xaa is A or G or is absent

SEQ ID NO: 23341 - protein, 38 aa, Artificial Sequence; identical to SEQ ID NO: 2359
  GFR-binding peptide
  MOD_RES (1), (34), (35): Xaa is C or S
  MOD_RES (12), (13), (14), (15), (16): Xaa is A or G
  MOD_RES (17), (18), (19), (20): Xaa is A or G or is absent

SEQ ID NO: 23342 - protein, 36 aa, Artificial Sequence
  GFR-binding peptide
  MOD_RES (1), (35), (36): Xaa is C or S
  MOD_RES (13), (14), (15), (16), (17): Xaa is A or G
  MOD_RES (18), (19), (20), (21): Xaa is A or G or is absent
XARVVMNEYKFKXXXXXXXXXLYLVSIPELQTPAXX

SEQ ID NO: 23343 - protein, 37 aa, Artificial Sequence; identical to SEQ ID NO: 2360
  GFR-binding peptide
  MOD_RES (1), (3), (37): Xaa is C or S
  MOD_RES (15), (16), (17), (18), (19): Xaa is A or G
  MOD_RES (20), (21), (22), (23): Xaa is A or G or is absent

SEQ ID NO: 23344 - protein, 41 aa, Artificial Sequence
  GFR-binding peptide
  MOD_RES (2), (4), (36), (37): Xaa is C or S
HXGXAKVVMNEYKFKIVNNSSDLYLVSIPELKTPAXXAKPV

SEQ ID NO: 23345 - protein, 39 aa, Artificial Sequence; identical to SEQ ID NO: 2363
  GFR-binding peptide
  MOD_RES (33), (34): Xaa is C or S
  MOD_RES (11), (12), (13), (14), (15): Xaa is A or G
  MOD_RES (16), (17), (18), (19): Xaa is A or G or is absent

SEQ ID NO: 23346 - protein, 39 aa, Artificial Sequence
  GFR-binding peptide
  MOD_RES (33), (34): Xaa is C or S
  MOD_RES (11), (12), (13), (14), (15): Xaa is A or G
  MOD_RES (16), (17), (18), (19): Xaa is A or G or is absent
EVVMDEYKFKXXXXXXXXXLYLISIPELRAPVXXSAPAA

SEQ ID NO: 23347 - protein, 33 aa, Artificial Sequence
  GFR-binding peptide
  MOD_RES (1), (33): Xaa is C or S
XSRVVMNEYKFKIVNSSDDLYLVSIPELKTPAX

SEQ ID NO: 23348 - protein, 36 aa, Artificial Sequence
  GFR-binding peptide
  MOD_RES (2), (4), (35), (36): Xaa is C or S
SXKXSKVIMEYKFKIKPTKGILYLISIPELDQSVXX

SEQ ID NO: 23349 - protein, 37 aa, Artificial Sequence; identical to SEQ ID NO: 2370
  GFR-binding peptide
  MOD_RES (32), (33): Xaa is C or S

SEQ ID NO: 23350 - protein, 38 aa, Artificial Sequence; identical to SEQ ID NO: 2374
  GFR-binding peptide
  MOD_RES (1), (33), (34): Xaa is C or S

SEQ ID NO: 23351 - protein, 33 aa, Artificial Sequence
  GFR-binding peptide
  MOD_RES (2), (2): Xaa is C or S
GXESVAMGEYQKYYTVVGKDIYLISIPSLKTPV

SEQ ID NO: 23352 - protein, 38 aa, Artificial Sequence; identical to SEQ ID NO: 2380
  GFR-binding peptide
  MOD_RES (1), (3), (37), (38): Xaa is C or S
  MOD_RES (15), (16), (17), (18), (19): Xaa is A or G
  MOD_RES (20), (21), (22), (23): Xaa is A or G or is absent

SEQ ID NO: 23353 - protein, 39 aa, Artificial Sequence; identical to SEQ ID NO: 2381
  GFR-binding peptide
  MOD_RES (2), (36), (37): Xaa is C or S
  MOD_RES (14), (15), (16), (17), (18): Xaa is A or G
  MOD_RES (19), (20), (21), (22): Xaa is A or G or is absent

SEQ ID NO: 23354 - protein, 42 aa, Artificial Sequence; identical to SEQ ID NO: 2383
  GFR-binding peptide
  MOD_RES (2), (36), (37): Xaa is C or S
  MOD_RES (14), (15), (16), (17), (18): Xaa is A or G
  MOD_RES (19), (20), (21), (22): Xaa is A or G or is absent

SEQ ID NO: 23355 - protein, 38 aa, Artificial Sequence
  GFR-binding peptide
  MOD_RES (32), (33): Xaa is C or S
GEVVMDEYKFKVVKENEDLYLMSIPELETPVXXAKPIK

SEQ ID NO: 23356 - protein, 37 aa, Artificial Sequence; identical to SEQ ID NO: 2385
  GFR-binding peptide
  MOD_RES (31), (32): Xaa is C or S

SEQ ID NO: 23357 - protein, 36 aa, Artificial Sequence; identical to SEQ ID NO: 2386
  GFR-binding peptide
  MOD_RES (1), (3), (34), (35): Xaa is C or S

SEQ ID NO: 23358 - protein, 38 aa, Artificial Sequence
  GFR-binding peptide
  MOD_RES (34), (35): Xaa is C or S
  MOD_RES (12), (13), (14), (15), (16): Xaa is A or G
  MOD_RES (17), (18), (19), (20): Xaa is A or G or is absent
AKVVMNEYKFKXXXXXXXXXLYLVSIPELKTPAXXAKP

SEQ ID NO: 23359 - protein, 44 aa, Artificial Sequence; identical to SEQ ID NO: 2388
  GFR-binding peptide
  MOD_RES (1), (3), (38), (39): Xaa is C or S
  MOD_RES (16), (17), (18), (19), (20): Xaa is A or G
  MOD_RES (21), (22), (23), (24): Xaa is A or G or is absent

SEQ ID NO: 23360 - protein, 38 aa, Artificial Sequence
  GFR-binding peptide
  MOD_RES (1), (3), (35), (36): Xaa is C or S
XGXGEVVMDEYKFKVVKENEDLYLMSIPELETPVXXAK

SEQ ID NO: 23361 - protein, 35 aa, Artificial Sequence; identical to SEQ ID NO: 2390
  GFR-binding peptide
  MOD_RES (1), (32), (33): Xaa is C or S

SEQ ID NO: 23362 - protein, 40 aa, Artificial Sequence; identical to SEQ ID NO: 2391
  GFR-binding peptide
  MOD_RES (1), (3), (38), (39): Xaa is C or S
  MOD_RES (16), (17), (18), (19), (20): Xaa is A or G
  MOD_RES (21), (22), (23), (24): Xaa is A or G or is absent

SEQ ID NO: 23363 - protein, 35 aa, Artificial Sequence; identical to SEQ ID NO: 2393
  GFR-binding peptide
  MOD_RES (1), (3), (35): Xaa is C or S

SEQ ID NO: 23364 - protein, 41 aa, Artificial Sequence; identical to SEQ ID NO: 2394
  GFR-binding peptide
  MOD_RES (2), (36), (37): Xaa is C or S
  MOD_RES (14), (15), (16), (17), (18): Xaa is A or G
  MOD_RES (19), (20), (21), (22): Xaa is A or G or is absent

SEQ ID NO: 23365 - protein, 39 aa, Artificial Sequence
  GFR-binding peptide
  MOD_RES (2), (4), (36), (37): Xaa is C or S
HXGXSRVVMNEYQKYIVNSSDDIYLVSIPSLKTPAXXPK

SEQ ID NO: 23366 - protein, 41 aa, Artificial Sequence
  GFR-binding peptide
  MOD_RES (1), (3), (35), (36): Xaa is C or S
XGXESVAMGYHYKLYTVVGKDKYLISIPSLKTPVXXAKSAK

SEQ ID NO: 23367 - protein, 44 aa, Artificial Sequence
  GFR-binding peptide
  MOD_RES (1), (3), (38), (39): Xaa is C or S
  MOD_RES (16), (17), (18), (19), (20): Xaa is A or G
  MOD_RES (21), (22), (23), (24): Xaa is A or G or is absent
XGXEAVSMGEEYKFKXXXXXXXXXLYLVSIPELKTPVXXAKGVK

SEQ ID NO: 23368 - protein, 35 aa, Artificial Sequence
  GFR-binding peptide
  MOD_RES (1), (3), (35): Xaa is C or S
XGXAKVVMNEYKFKIVNNSSDLYLVSIPELKTPAX

SEQ ID NO: 23369 - protein, 36 aa, Artificial Sequence; identical to SEQ ID NO: 2398
  GFR-binding peptide
  MOD_RES (1), (34), (35): Xaa is C or S
  MOD_RES (12), (13), (14), (15), (16): Xaa is A or G
  MOD_RES (17), (18), (19), (20): Xaa is A or G or is absent

SEQ ID NO: 23370 - protein, 36 aa, Artificial Sequence
  GFR-binding peptide
  MOD_RES (33), (34): Xaa is C or S
  MOD_RES (11), (12), (13), (14), (15): Xaa is A or G
  MOD_RES (16), (17), (18), (19): Xaa is A or G or is absent
EVVMEEYKFKXXXXXXXXXLYLMSIPELETPVXXAK

SEQ ID NO: 23371 - protein, 36 aa, Artificial Sequence
  GFR-binding peptide
  MOD_RES (33), (34): Xaa is C or S
  MOD_RES (11), (12), (13), (14), (15): Xaa is A or G
  MOD_RES (16), (17), (18), (19): Xaa is A or G or is absent
SRVIMEYQKYXXXXXXXXXIYLISIPSLAQPVXXPA

SEQ ID NO: 23372 - protein, 36 aa, Artificial Sequence
  GFR-binding peptide
  MOD_RES (34), (35): Xaa is C or S
  MOD_RES (12), (13), (14), (15), (16): Xaa is A or G
  MOD_RES (17), (18), (19), (20): Xaa is A or G or is absent
ESVAMGEYKFKXXXXXXXXXLYLISIPELKTPVXXA

SEQ ID NO: 23373 - protein, 39 aa, Artificial Sequence
  GFR-binding peptide
  MOD_RES (1), (35), (36): Xaa is C or S
  MOD_RES (13), (14), (15), (16), (17): Xaa is A or G
  MOD_RES (18), (19), (20), (21): Xaa is A or G or is absent
XARVVMNEYQKYXXXXXXXXXIYLVSIPSLQTPAXXPKP

SEQ ID NO: 23374 - protein, 34 aa, Artificial Sequence
  GFR-binding peptide
  MOD_RES (1), (3): Xaa is C or S
XGXESVAMGEYQKYYTVVGKDIYLISIPSLKTPV

SEQ ID NO: 23375 - protein, 35 aa, Artificial Sequence
  GFR-binding peptide
  MOD_RES (1), (34), (35): Xaa is C or S
  MOD_RES (12), (13), (14), (15), (16): Xaa is A or G
  MOD_RES (17), (18), (19), (20): Xaa is A or G or is absent
XSKVVMEYQKYXXXXXXXXXIYLISIPSLDQPVXX

SEQ ID NO: 23376 - protein, 36 aa, Artificial Sequence
  GFR-binding peptide
  MOD_RES (2), (34), (35): Xaa is C or S
GXGEVVMDEYQKYVVKENEDIYLMSIPSLETPVXXA

SEQ ID NO: 23377 - protein, 41 aa, Artificial Sequence; identical to SEQ ID NO: 2401
  GFR-binding peptide
  MOD_RES (1), (3), (35), (36): Xaa is C or S

SEQ ID NO: 23378 - protein, 38 aa, Artificial Sequence; identical to SEQ ID NO: 2402
  GFR-binding peptide
  MOD_RES (2), (4), (36), (37): Xaa is C or S

SEQ ID NO: 23379 - protein, 38 aa, Artificial Sequence
  GFR-binding peptide
  MOD_RES (1), (34), (35): Xaa is C or S
  MOD_RES (12), (13), (14), (15), (16): Xaa is A or G
  MOD_RES (17), (18), (19), (20): Xaa is A or G or is absent
XSRVIMEYQKYXXXXXXXXXIYLISIPSLAQPVXXPAA

SEQ ID NO: 23380 - protein, 40 aa, Artificial Sequence; identical to SEQ ID NO: 2405
  GFR-binding peptide
  MOD_RES (2), (4), (36), (37): Xaa is C or S

SEQ ID NO: 23381 - protein, 39 aa, Artificial Sequence; identical to SEQ ID NO: 2406
  GFR-binding peptide
  MOD_RES (2), (4), (38), (39): Xaa is C or S
  MOD_RES (16), (17), (18), (19), (20): Xaa is A or G
  MOD_RES (21), (22), (23), (24): Xaa is A or G or is absent

SEQ ID NO: 23382 - protein, 39 aa, Artificial Sequence
  GFR-binding peptide
  MOD_RES (2), (35), (36): Xaa is C or S
  MOD_RES (13), (14), (15), (16), (17): Xaa is A or G
  MOD_RES (18), (19), (20), (21): Xaa is A or G or is absent
KXSRVIMEYQKYXXXXXXXXXIYLISIPSLAQPVXXPAA

SEQ ID NO: 23383 - protein, 38 aa, Artificial Sequence; identical to SEQ ID NO: 2407
  GFR-binding peptide
  MOD_RES (33), (34): Xaa is C or S
  MOD_RES (11), (12), (13), (14), (15): Xaa is A or G
  MOD_RES (16), (17), (18), (19): Xaa is A or G or is absent

SEQ ID NO: 23384 - protein, 32 aa, Artificial Sequence
  GFR-binding peptide
  MOD_RES (11), (12), (13), (14), (15): Xaa is A or G
  MOD_RES (16), (17), (18), (19): Xaa is A or G or is absent
EVVMDEYQKYXXXXXXXXXIYLISIPSLRAPV

SEQ ID NO: 23385 - protein, 34 aa, Artificial Sequence; identical to SEQ ID NO: 2411
  GFR-binding peptide
  MOD_RES (31), (32): Xaa is C or S

SEQ ID NO: 23386 - protein, 31 aa, Artificial Sequence
  GFR-binding peptide
SRVVMNEYQKYIVNSSDDIYLVSIPSLKTPA

SEQ ID NO: 23387 - protein, 38 aa, Artificial Sequence; identical to SEQ ID NO: 2412
  GFR-binding peptide
  MOD_RES (2), (4), (36), (37): Xaa is C or S

SEQ ID NO: 23388 - protein, 39 aa, Artificial Sequence
  GFR-binding peptide
  MOD_RES (2), (4), (38), (39): Xaa is C or S
  MOD_RES (16), (17), (18), (19), (20): Xaa is A or G
  MOD_RES (21), (22), (23), (24): Xaa is A or G or is absent
RXGXAEVVMDEYQKYXXXXXXXXXIYLISIPSLRAPVXX

SEQ ID NO: 23389 - protein, 42 aa, Artificial Sequence
  GFR-binding peptide
  MOD_RES (1), (3), (37), (38): Xaa is C or S
  MOD_RES (15), (16), (17), (18), (19): Xaa is A or G
  MOD_RES (20), (21), (22), (23): Xaa is A or G or is absent
XGXAEVVMDEYKFKXXXXXXXXXLYLISIPELRAPVXXSAPA

SEQ ID NO: 23390 - protein, 35 aa, Artificial Sequence
  GFR-binding peptide
  MOD_RES (1), (35): Xaa is C or S
  MOD_RES (13), (14), (15), (16), (17): Xaa is A or G
  MOD_RES (18), (19), (20), (21): Xaa is A or G or is absent
XESVAMGEYQKYXXXXXXXXXIYLISIPSLKTPVX

SEQ ID NO: 23391 - protein, 40 aa, Artificial Sequence
  GFR-binding peptide
  MOD_RES (1), (3), (35), (36): Xaa is C or S
XGXGEVVMEEYKFKVVKDYEDLYLMSIPELETPVXXAKPI

SEQ ID NO: 23392 - protein, 39 aa, Artificial Sequence; identical to SEQ ID NO: 2415
  GFR-binding peptide
  MOD_RES (1), (3), (35), (36): Xaa is C or S

SEQ ID NO: 23393 - protein, 38 aa, Artificial Sequence
  GFR-binding peptide
  MOD_RES (2), (4), (37), (38): Xaa is C or S
  MOD_RES (15), (16), (17), (18), (19): Xaa is A or G
  MOD_RES (20), (21), (22), (23): Xaa is A or G or is absent
SXKXSKVIMEYKFKXXXXXXXXXLYLISIPELDQSVXX

SEQ ID NO: 23394 - protein, 34 aa, Artificial Sequence
  GFR-binding peptide
  MOD_RES (31), (32): Xaa is C or S
EVVMDEYQKYVVKENEDIYLMSIPSLETPVXXAK

SEQ ID NO: 23395 - protein, 37 aa, Artificial Sequence
  GFR-binding peptide
  MOD_RES (2), (34), (35): Xaa is C or S
GXAEVVMDRYKKLVVNNAADFYLISIANLRAPVXXSA

SEQ ID NO: 23396 - protein, 37 aa, Artificial Sequence
  GFR-binding peptide
  MOD_RES (2), (4), (36), (37): Xaa is C or S
RXGXAEVVMDYHYKLVVNNAADKYLISIPSLRAPVXX

SEQ ID NO: 23397 - protein, 38 aa, Artificial Sequence; identical to SEQ ID NO: 2417
  GFR-binding peptide
  MOD_RES (1), (33), (34): Xaa is C or S

SEQ ID NO: 23398 - protein, 36 aa, Artificial Sequence; identical to SEQ ID NO: 2418
  GFR-binding peptide
  MOD_RES (1), (32), (33): Xaa is C or S

SEQ ID NO: 23399 - protein, 40 aa, Artificial Sequence; identical to SEQ ID NO: 2420
  GFR-binding peptide
  MOD_RES (2), (4), (36), (37): Xaa is C or S

SEQ ID NO: 23400 - protein, 38 aa, Artificial Sequence
  GFR-binding peptide
  MOD_RES (2), (34), (35): Xaa is C or S
GXAEVVMDRYKKLVVNNAADFYLISIANLRAPVXXSAP

SEQ ID NO: 23401 - protein, 40 aa, Artificial Sequence
  GFR-binding peptide
  MOD_RES (2), (36): Xaa is C or S
  MOD_RES (14), (15), (16), (17), (18): Xaa is A or G
  MOD_RES (19), (20), (21), (22): Xaa is A or G or is absent
GXSRVVMNEYQKYXXXXXXXXXIYLVSIPSLKTPAXTPKT

SEQ ID NO: 23402 - protein, 35 aa, Artificial Sequence; identical to SEQ ID NO: 2426
  GFR-binding peptide
  MOD_RES (2), (2): Xaa is C or S
  MOD_RES (14), (15), (16), (17), (18): Xaa is A or G
  MOD_RES (19), (20), (21), (22): Xaa is A or G or is absent

SEQ ID NO: 23403 - protein, 41 aa, Artificial Sequence
  GFR-binding peptide
  MOD_RES (2), (4), (36), (37): Xaa is C or S
RXGXGEVVMEEYKFKVVKDYEDLYLMSIPELETPVXXAKPI

SEQ ID NO: 23404 - protein, 41 aa, Artificial Sequence
  GFR-binding peptide
  MOD_RES (1), (3), (36), (37): Xaa is C or S
  MOD_RES (14), (15), (16), (17), (18): Xaa is A or G
  MOD_RES (19), (20), (21), (22): Xaa is A or G or is absent
XKXSRVIMEYKFKXXXXXXXXXLYLISIPELAQPVXXPAAS

SEQ ID NO: 23405 - protein, 39 aa, Artificial Sequence
  GFR-binding peptide
  MOD_RES (1), (3), (37), (38): Xaa is C or S
  MOD_RES (15), (16), (17), (18), (19): Xaa is A or G
  MOD_RES (20), (21), (22), (23): Xaa is A or G or is absent
XGXGEVVMDEYQKYXXXXXXXXXIYLMSIPSLETPVXXA

SEQ ID NO: 23406 - protein, 37 aa, Artificial Sequence
  GFR-binding peptide
  MOD_RES (34), (35): Xaa is C or S
  MOD_RES (12), (13), (14), (15), (16): Xaa is A or G
  MOD_RES (17), (18), (19), (20): Xaa is A or G or is absent
SRVVMNEYQKYXXXXXXXXXIYLVSIPSLKTPAXXPK

SEQ ID NO: 23407 - protein, 36 aa, Artificial Sequence; identical to SEQ ID NO: 2427
  GFR-binding peptide
  MOD_RES (1), (33), (34): Xaa is C or S

SEQ ID NO: 23408 - protein, 38 aa, Artificial Sequence
  GFR-binding peptide
  MOD_RES (1), (3), (35), (36): Xaa is C or S
XGXSRVVMNEYQKYIVNSSDDIYLVSIPSLKTPAXXPK

SEQ ID NO: 23409 - protein, 32 aa, Artificial Sequence; identical to SEQ ID NO: 2428
  GFR-binding peptide
  MOD_RES (32), (32): Xaa is C or S

SEQ ID NO: 23410 - protein, 35 aa, Artificial Sequence
  GFR-binding peptide
  MOD_RES (2), (35): Xaa is C or S
  MOD_RES (13), (14), (15), (16), (17): Xaa is A or G
  MOD_RES (18), (19), (20), (21): Xaa is A or G or is absent
KXSRVIMEYKFKXXXXXXXXXLYLISIPELAQPVX

SEQ ID NO: 23411 - protein, 40 aa, Artificial Sequence
  GFR-binding peptide
  MOD_RES (2), (36), (37): Xaa is C or S
  MOD_RES (14), (15), (16), (17), (18): Xaa is A or G
  MOD_RES (19), (20), (21), (22): Xaa is A or G or is absent
GXAEVVMDEYKFKXXXXXXXXXLYLISIPELRAPVXXSAP

SEQ ID NO: 23412 - protein, 33 aa, Artificial Sequence
  GFR-binding peptide
  MOD_RES (31), (32): Xaa is C or S
SVAMGRYKKLYTVVGKDFYLISIANLKTPVXXA

SEQ ID NO: 23413 - protein, 37 aa, Artificial Sequence; identical to SEQ ID NO: 2433
  GFR-binding peptide
  MOD_RES (2), (36), (37): Xaa is C or S
  MOD_RES (14), (15), (16), (17), (18): Xaa is A or G
  MOD_RES (19), (20), (21), (22): Xaa is A or G or is absent

SEQ ID NO: 23414 - protein, 32 aa, Artificial Sequence
  GFR-binding peptide
  MOD_RES (11), (12), (13), (14), (15): Xaa is A or G
  MOD_RES (16), (17), (18), (19): Xaa is A or G or is absent
EVVMEEYQKYXXXXXXXXXIYLMSIPSLETPV

SEQ ID NO: 23415 - protein, 43 aa, Artificial Sequence
  GFR-binding peptide
  MOD_RES (1), (3), (37), (38): Xaa is C or S
  MOD_RES (15), (16), (17), (18), (19): Xaa is A or G
  MOD_RES (20), (21), (22), (23): Xaa is A or G or is absent
XGXSRVVMNEYKFKXXXXXXXXXLYLVSIPELKTPAXXPKPVY

SEQ ID NO: 23416 - protein, 32 aa, Artificial Sequence
  GFR-binding peptide
  MOD_RES (31), (32): Xaa is C or S
EVVMDEYQKYVVNNAADIYLISIPSLRAPVXX

SEQ ID NO: 23417 - protein, 33 aa, Artificial Sequence; identical to SEQ ID NO: 2439
  GFR-binding peptide
  MOD_RES (31), (32): Xaa is C or S

SEQ ID NO: 23418 - protein, 38 aa, Artificial Sequence
  GFR-binding peptide
  MOD_RES (1), (35), (36): Xaa is C or S
  MOD_RES (13), (14), (15), (16), (17): Xaa is A or G
  MOD_RES (18), (19), (20), (21): Xaa is A or G or is absent
XAEVVMDYHYKLXXXXXXXXXKYLISIPSLRAPVXXSA

SEQ ID NO: 23419 - protein, 37 aa, Artificial Sequence
  GFR-binding peptide
  MOD_RES (33), (34): Xaa is C or S
  MOD_RES (11), (12), (13), (14), (15): Xaa is A or G
  MOD_RES (16), (17), (18), (19): Xaa is A or G or is absent
EVVMDEYKFKXXXXXXXXXLYLISIPELRAPVXXSAP

SEQ ID NO: 23420 - protein, 36 aa, Artificial Sequence
  GFR-binding peptide
  MOD_RES (2), (36): Xaa is C or S
  MOD_RES (14), (15), (16), (17), (18): Xaa is A or G
  MOD_RES (19), (20), (21), (22): Xaa is A or G or is absent
GXAKVVMNEYKFKXXXXXXXXXLYLVSIPELKTPAX

SEQ ID NO: 23421 - protein, 35 aa, Artificial Sequence
  GFR-binding peptide
  MOD_RES (2), (34), (35): Xaa is C or S
GXESVAMGYHYKLYTVVGKDKYLISIPSLKTPVXX

SEQ ID NO: 23422 - protein, 37 aa, Artificial Sequence; identical to SEQ ID NO: 2445
  GFR-binding peptide
  MOD_RES (2), (36): Xaa is C or S
  MOD_RES (14), (15), (16), (17), (18): Xaa is A or G
  MOD_RES (19), (20), (21), (22): Xaa is A or G or is absent

SEQ ID NO: 23423 - protein, 39 aa, Artificial Sequence
  GFR-binding peptide
  MOD_RES (1), (35), (36): Xaa is C or S
  MOD_RES (13), (14), (15), (16), (17): Xaa is A or G
  MOD_RES (18), (19), (20), (21): Xaa is A or G or is absent
XESVAMGEYKFKXXXXXXXXXLYLISIPELKTPVXXAKS

SEQ ID NO: 23424 - protein, 37 aa, Artificial Sequence
  GFR-binding peptide
  MOD_RES (2), (36): Xaa is C or S
  MOD_RES (14), (15), (16), (17), (18): Xaa is A or G
  MOD_RES (19), (20), (21), (22): Xaa is A or G or is absent
GXSRVVMNEYKFKXXXXXXXXXLYLVSIPELKTPAXT

SEQ ID NO: 23425 - protein, 41 aa, Artificial Sequence
  GFR-binding peptide
  MOD_RES (2), (4), (36), (37): Xaa is C or S
HXGXARVVMNEYQKYIVNSSDDIYLVSIPSLQTPAXXPKPV

SEQ ID NO: 23426 - protein, 41 aa, Artificial Sequence
  GFR-binding peptide
  MOD_RES (2), (36), (37): Xaa is C or S
  MOD_RES (14), (15), (16), (17), (18): Xaa is A or G
  MOD_RES (19), (20), (21), (22): Xaa is A or G or is absent
GXAKVVMNEYQKYXXXXXXXXXIYLVSIPSLKTPAXXAKPV

SEQ ID NO: 23427 - protein, 36 aa, Artificial Sequence
  GFR-binding peptide
  MOD_RES (33), (34): Xaa is C or S
  MOD_RES (11), (12), (13), (14), (15): Xaa is A or G
  MOD_RES (16), (17), (18), (19): Xaa is A or G or is absent
RVVMNEYQKYXXXXXXXXXIYLVSIPSLQTPAXXPK

SEQ ID NO: 23428 - protein, 31 aa, Artificial Sequence; identical to SEQ ID NO: 2448
  GFR-binding peptide
  MOD_RES (31), (31): Xaa is C or S

SEQ ID NO: 23429 - protein, 37 aa, Artificial Sequence
  GFR-binding peptide
  MOD_RES (31), (32): Xaa is C or S
EVVMDEYQKYVVNNAADIYLISIPSLRAPVXXSAPAA

SEQ ID NO: 23430 - protein, 36 aa, Artificial Sequence; identical to SEQ ID NO: 2449
  GFR-binding peptide
  MOD_RES (1), (3), (36): Xaa is C or S

SEQ ID NO: 23431 - protein, 35 aa, Artificial Sequence
  GFR-binding peptide
  MOD_RES (33), (34): Xaa is C or S
  MOD_RES (11), (12), (13), (14), (15): Xaa is A or G
  MOD_RES (16), (17), (18), (19): Xaa is A or G or is absent
KVVMNEYQKYXXXXXXXXXIYLVSIPSLKTPAXXA

SEQ ID NO: 23432 - protein, 37 aa, Artificial Sequence
  GFR-binding peptide
  MOD_RES (1), (3), (35): Xaa is C or S
XGXSRVVMNEYKFKIVNSSDDLYLVSIPELKTPAXTP

SEQ ID NO: 23433 - protein, 35 aa, Artificial Sequence; identical to SEQ ID NO: 2452
  GFR-binding peptide
  MOD_RES (2), (2): Xaa is C or S
  MOD_RES (14), (15), (16), (17), (18): Xaa is A or G
  MOD_RES (19), (20), (21), (22): Xaa is A or G or is absent

SEQ ID NO: 23434 - protein, 33 aa, Artificial Sequence
  GFR-binding peptide
  MOD_RES (12), (13), (14), (15), (16): Xaa is A or G
  MOD_RES (17), (18), (19), (20): Xaa is A or G or is absent
ESVAMGEYQKYXXXXXXXXXIYLISIPSLKTPV

SEQ ID NO: 23435 - protein, 40 aa, Artificial Sequence; identical to SEQ ID NO: 2454
  GFR-binding peptide
  MOD_RES (2), (4), (36), (37): Xaa is C or S

SEQ ID NO: 23436 - protein, 36 aa, Artificial Sequence
  GFR-binding peptide
  MOD_RES (2), (4), (36): Xaa is C or S
RXGXAEVVMDEYQKYVVNNAADIYLISIPSLRAPVX

SEQ ID NO: 23437 - protein, 33 aa, Artificial Sequence; identical to SEQ ID NO: 2458
  GFR-binding peptide
  MOD_RES (33), (33): Xaa is C or S
  MOD_RES (11), (12), (13), (14), (15): Xaa is A or G
  MOD_RES (16), (17), (18), (19): Xaa is A or G or is absent

SEQ ID NO: 23438 - protein, 40 aa, Artificial Sequence
  GFR-binding peptide
  MOD_RES (1), (3), (36), (37): Xaa is C or S
  MOD_RES (14), (15), (16), (17), (18): Xaa is A or G
  MOD_RES (19), (20), (21), (22): Xaa is A or G or is absent
XKXSRVIMEYQKYXXXXXXXXXIYLISIPSLAQPVXXPAA

SEQ ID NO: 23439 - protein, 41 aa, Artificial Sequence
  GFR-binding peptide
  MOD_RES (1), (3), (37), (38): Xaa is C or S
  MOD_RES (15), (16), (17), (18), (19): Xaa is A or G
  MOD_RES (20), (21), (22), (23): Xaa is A or G or is absent
XGXESVAMGRYKKLXXXXXXXXXFYLISIANLKTPVXXAKS

SEQ ID NO: 23440 - protein, 39 aa, Artificial Sequence; identical to SEQ ID NO: 2459
  GFR-binding peptide
  MOD_RES (33), (34): Xaa is C or S
  MOD_RES (11), (12), (13), (14), (15): Xaa is A or G
  MOD_RES (16), (17), (18), (19): Xaa is A or G or is absent

SEQ ID NO: 23441 - protein, 39 aa, Artificial Sequence
  GFR-binding peptide
  MOD_RES (1), (3), (36), (37): Xaa is C or S
XGXEAVSMGEEYQKYTPVGMDDIYLVSIPSLKTPVXXAK

SEQ ID NO: 23442 - protein, 40 aa, Artificial Sequence
  GFR-binding peptide
  MOD_RES (1), (35), (36): Xaa is C or S
  MOD_RES (13), (14), (15), (16), (17): Xaa is A or G
  MOD_RES (18), (19), (20), (21): Xaa is A or G or is absent
XGEVVMDEYKFKXXXXXXXXXLYLMSIPELETPVXXAKPI

SEQ ID NO: 23443 - protein, 39 aa, Artificial Sequence
  GFR-binding peptide
  MOD_RES (33), (34): Xaa is C or S
  MOD_RES (11), (12), (13), (14), (15): Xaa is A or G
  MOD_RES (16), (17), (18), (19): Xaa is A or G or is absent
RVVMNEYKFKXXXXXXXXXLYLVSIPELQTPAXXPKPVT

SEQ ID NO: 23444 - protein, 42 aa, Artificial Sequence
  GFR-binding peptide
  MOD_RES (1), (3), (37), (38): Xaa is C or S
  MOD_RES (15), (16), (17), (18), (19): Xaa is A or G
  MOD_RES (20), (21), (22), (23): Xaa is A or G or is absent
XGXESVAMGRYKKLXXXXXXXXXFYLISIANLKTPVXXAKSA

SEQ ID NO: 23445 - protein, 42 aa, Artificial Sequence
  GFR-binding peptide
  MOD_RES (2), (36), (37): Xaa is C or S
  MOD_RES (14), (15), (16), (17), (18): Xaa is A or G
  MOD_RES (19), (20), (21), (22): Xaa is A or G or is absent
GXGEVVMDEYKFKXXXXXXXXXLYLMSIPELETPVXXAKPIK

SEQ ID NO: 23446 - protein, 37 aa, Artificial Sequence
  GFR-binding peptide
  MOD_RES (1), (3), (37): Xaa is C or S
  MOD_RES (15), (16), (17), (18), (19): Xaa is A or G
  MOD_RES (20), (21), (22), (23): Xaa is A or G or is absent
XGXESVAMGRYKKLXXXXXXXXXFYLISIANLKTPVX

SEQ ID NO: 23447 - protein, 40 aa, Artificial Sequence
  GFR-binding peptide
  MOD_RES (1), (3), (37), (38): Xaa is C or S
  MOD_RES (15), (16), (17), (18), (19): Xaa is A or G
  MOD_RES (20), (21), (22), (23): Xaa is A or G or is absent
XGXAEVVMDRYKKLXXXXXXXXXFYLISIANLRAPVXXSA

SEQ ID NO: 23448 - protein, 39 aa, Artificial Sequence; identical to SEQ ID NO: 2468
  GFR-binding peptide
  MOD_RES (33), (34): Xaa is C or S
  MOD_RES (11), (12), (13), (14), (15): Xaa is A or G
  MOD_RES (16), (17), (18), (19): Xaa is A or G or is absent

SEQ ID NO: 23449 - protein, 32 aa, Artificial Sequence; identical to SEQ ID NO: 2470
  GFR-binding peptide
  MOD_RES (11), (12), (13), (14), (15): Xaa is A or G
  MOD_RES (16), (17), (18), (19): Xaa is A or G or is absent

SEQ ID NO: 23450 - protein, 37 aa, Artificial Sequence; identical to SEQ ID NO: 2472
  GFR-binding peptide
  MOD_RES (32), (33): Xaa is C or S

SEQ ID NO: 23451 - protein, 43 aa, Artificial Sequence; identical to SEQ ID NO: 2473
  GFR-binding peptide
  MOD_RES (2), (4), (39), (40): Xaa is C or S
  MOD_RES (17), (18), (19), (20), (21): Xaa is A or G
  MOD_RES (22), (23), (24), (25): Xaa is A or G or is absent

SEQ ID NO: 23452 - protein, 35 aa, Artificial Sequence
  GFR-binding peptide
  MOD_RES (2), (2): Xaa is C or S
  MOD_RES (14), (15), (16), (17), (18): Xaa is A or G
  MOD_RES (19), (20), (21), (22): Xaa is A or G or is absent
GXGEVVMEEYQKYXXXXXXXXXIYLMSIPSLETPV

SEQ ID NO: 23453 - protein, 40 aa, Artificial Sequence; identical to SEQ ID NO: 2475
  GFR-binding peptide
  MOD_RES (1), (3), (34), (35): Xaa is C or S

SEQ ID NO: 23454 - protein, 39 aa, Artificial Sequence; identical to SEQ ID NO: 2476
  GFR-binding peptide
  MOD_RES (2), (36), (37): Xaa is C or S
  MOD_RES (14), (15), (16), (17), (18): Xaa is A or G
  MOD_RES (19), (20), (21), (22): Xaa is A or G or is absent

SEQ ID NO: 23455 - protein, 38 aa, Artificial Sequence; identical to SEQ ID NO: 2477
  GFR-binding peptide
  MOD_RES (2), (4): Xaa is C or S
  MOD_RES (17), (18), (19), (20), (21): Xaa is A or G
  MOD_RES (22), (23), (24), (25): Xaa is A or G or is absent

SEQ ID NO: 23456 - protein, 35 aa, Artificial Sequence; identical to SEQ ID NO: 2478
  GFR-binding peptide
  MOD_RES (31), (32): Xaa is C or S

SEQ ID NO: 23457 - protein, 35 aa, Artificial Sequence
  GFR-binding peptide
  MOD_RES (2), (34): Xaa is C or S
GXSRVVMNEYQKYIVNSSDDIYLVSIPSLKTPAXT

SEQ ID NO: 23458 - protein, 38 aa, Artificial Sequence
  GFR-binding peptide
  MOD_RES (2), (36), (37): Xaa is C or S
  MOD_RES (14), (15), (16), (17), (18): Xaa is A or G
  MOD_RES (19), (20), (21), (22): Xaa is A or G or is absent
GXESVAMGYHYKLXXXXXXXXXKYLISIPSLKTPVXXA

SEQ ID NO: 23459 - protein, 35 aa, Artificial Sequence
  GFR-binding peptide
  MOD_RES (1), (35): Xaa is C or S
  MOD_RES (13), (14), (15), (16), (17): Xaa is A or G
  MOD_RES (18), (19), (20), (21): Xaa is A or G or is absent
XESVAMGYHYKLXXXXXXXXXKYLISIPSLKTPVX

SEQ ID NO: 23460 - protein, 36 aa, Artificial Sequence; identical to SEQ ID NO: 2480
  GFR-binding peptide
  MOD_RES (33), (34): Xaa is C or S
  MOD_RES (11), (12), (13), (14), (15): Xaa is A or G
  MOD_RES (16), (17), (18), (19): Xaa is A or G or is absent

SEQ ID NO: 23461 - protein, 37 aa, Artificial Sequence; identical to SEQ ID NO: 2481
  GFR-binding peptide
  MOD_RES (1), (3), (35), (36): Xaa is C or S

SEQ ID NO: 23462 - protein, 35 aa, Artificial Sequence; identical to SEQ ID NO: 2482
  GFR-binding peptide
  MOD_RES (1), (1): Xaa is C or S
  MOD_RES (14), (15), (16), (17), (18): Xaa is A or G
  MOD_RES (19), (20), (21), (22): Xaa is A or G or is absent

SEQ ID NO: 23463 - protein, 39 aa, Artificial Sequence
  GFR-binding peptide
  MOD_RES (1), (3), (37), (38): Xaa is C or S
  MOD_RES (15), (16), (17), (18), (19): Xaa is A or G
  MOD_RES (20), (21), (22), (23): Xaa is A or G or is absent
XGXGEVVMDEYKFKXXXXXXXXXLYLMSIPELETPVXXA

SEQ ID NO: 23464 - protein, 40 aa, Artificial Sequence
  GFR-binding peptide
  MOD_RES (1), (3), (36), (37): Xaa is C or S
  MOD_RES (14), (15), (16), (17), (18): Xaa is A or G
  MOD_RES (19), (20), (21), (22): Xaa is A or G or is absent
XKXSKVIMEYQKYXXXXXXXXXIYLISIPSLDQSVXXPSA

SEQ ID NO: 23465 - protein, 33 aa, Artificial Sequence
  GFR-binding peptide
  MOD_RES (2), (2): Xaa is C or S
GXGEVVMDEYKFKVVKENEDLYLMSIPELETPV

SEQ ID NO: 23466 - protein, 39 aa, Artificial Sequence; identical to SEQ ID NO: 2487
  GFR-binding peptide
  MOD_RES (2), (4), (35), (36): Xaa is C or S

SEQ ID NO: 23467 - protein, 38 aa, Artificial Sequence
  GFR-binding peptide
  MOD_RES (2), (35), (36): Xaa is C or S
  MOD_RES (13), (14), (15), (16), (17): Xaa is A or G
  MOD_RES (18), (19), (20), (21): Xaa is A or G or is absent
KXSKVIMEYQKYXXXXXXXXXIYLISIPSLDQSVXXPS

SEQ ID NO: 23468 - protein, 39 aa, Artificial Sequence; identical to SEQ ID NO: 2489
  GFR-binding peptide
  MOD_RES (34), (35): Xaa is C or S
  MOD_RES (12), (13), (14), (15), (16): Xaa is A or G
  MOD_RES (17), (18), (19), (20): Xaa is A or G or is absent

SEQ ID NO: 23469 - protein, 40 aa, Artificial Sequence; identical to SEQ ID NO: 2491
  GFR-binding peptide
  MOD_RES (2), (4), (35), (36): Xaa is C or S

SEQ ID NO: 23470 - protein, 37 aa, Artificial Sequence
  GFR-binding peptide
  MOD_RES (31), (32): Xaa is C or S
SKVVMEYQKYVKPTRGVIYLISIPSLDQPVXXPSASA

SEQ ID NO: 23471 - protein, 39 aa, Artificial Sequence
  GFR-binding peptide
  MOD_RES (2), (4), (38), (39): Xaa is C or S
  MOD_RES (16), (17), (18), (19), (20): Xaa is A or G
  MOD_RES (21), (22), (23), (24): Xaa is A or G or is absent
RXGXAEVVMDYHYKLXXXXXXXXXKYLISIPSLRAPVXX

SEQ ID NO: 23472 - protein, 32 aa, Artificial Sequence
  GFR-binding peptide
  MOD_RES (31), (32): Xaa is C or S
RVVMNEYQKYIVNSSDDIYLVSIPSLKTPAXX

SEQ ID NO: 23473 - protein, 30 aa, Artificial Sequence
  GFR-binding peptide
RVVMNEYKFKIVNSSDDLYLVSIPELKTPA

SEQ ID NO: 23474 - protein, 43 aa, Artificial Sequence
  GFR-binding peptide
  MOD_RES (1), (3), (37), (38): Xaa is C or S
  MOD_RES (15), (16), (17), (18), (19): Xaa is A or G
  MOD_RES (20), (21), (22), (23): Xaa is A or G or is absent
XGXSRVVMNEYQKYXXXXXXXXXIYLVSIPSLKTPAXXPKPVY

SEQ ID NO: 23475 - protein, 38 aa, Artificial Sequence; identical to SEQ ID NO: 2496
  GFR-binding peptide
  MOD_RES (34), (35): Xaa is C or S
  MOD_RES (12), (13), (14), (15), (16): Xaa is A or G
  MOD_RES (17), (18), (19), (20): Xaa is A or G or is absent

SEQ ID NO: 23476 - protein, 38 aa, Artificial Sequence; identical to SEQ ID NO: 2497
  GFR-binding peptide
  MOD_RES (2), (34), (35): Xaa is C or S

SEQ ID NO: 23477 - protein, 38 aa, Artificial Sequence
  GFR-binding peptide
  MOD_RES (2), (4), (37), (38): Xaa is C or S
  MOD_RES (15), (16), (17), (18), (19): Xaa is A or G
  MOD_RES (20), (21), (22), (23): Xaa is A or G or is absent
SXKXSKVIMEYQKYXXXXXXXXXIYLISIPSLDQSVXX

SEQ ID NO: 23478 - protein, 39 aa, Artificial Sequence
  GFR-binding peptide
  MOD_RES (1), (3), (35), (36): Xaa is C or S
XGXESVAMGEYQKYYTVVGKDIYLISIPSLKTPVXXAKS

SEQ ID NO: 23479 - protein, 34 aa, Artificial Sequence; identical to SEQ ID NO: 2502
  GFR-binding peptide
  MOD_RES (2), (4): Xaa is C or S

SEQ ID NO: 23480 - protein, 40 aa, Artificial Sequence
  GFR-binding peptide
  MOD_RES (35), (36): Xaa is C or S
  MOD_RES (13), (14), (15), (16), (17): Xaa is A or G
  MOD_RES (18), (19), (20), (21): Xaa is A or G or is absent
EAVSMGEEYQKYXXXXXXXXXIYLVSIPSLKTPVXXAKGV

SEQ ID NO: 23481 - protein, 37 aa, Artificial Sequence
  GFR-binding peptide
  MOD_RES (2), (36), (37): Xaa is C or S
  MOD_RES (14), (15), (16), (17), (18): Xaa is A or G
  MOD_RES (19), (20), (21), (22): Xaa is A or G or is absent
GXAEVVMDRYKKLXXXXXXXXXFYLISIANLRAPVXX

SEQ ID NO: 23482 - protein, 39 aa, Artificial Sequence
  GFR-binding peptide
  MOD_RES (1), (35), (36): Xaa is C or S
  MOD_RES (13), (14), (15), (16), (17): Xaa is A or G
  MOD_RES (18), (19), (20), (21): Xaa is A or G or is absent
XAKVVMNEYQKYXXXXXXXXXIYLVSIPSLKTPAXXAKP

SEQ ID NO: 23483 - protein, 38 aa, Artificial Sequence; identical to SEQ ID NO: 2504
  GFR-binding peptide
  MOD_RES (2), (4), (38): Xaa is C or S
  MOD_RES (16), (17), (18), (19), (20): Xaa is A or G
  MOD_RES (21), (22), (23), (24): Xaa is A or G or is absent

SEQ ID NO: 23484 - protein, 38 aa, Artificial Sequence; identical to SEQ ID NO: 2505
  GFR-binding peptide
  MOD_RES (2), (35), (36): Xaa is C or S
  MOD_RES (13), (14), (15), (16), (17): Xaa is A or G
  MOD_RES (18), (19), (20), (21): Xaa is A or G or is absent

SEQ ID NO: 23485 - protein, 35 aa, Artificial Sequence
  GFR-binding peptide
  MOD_RES (1), (3), (35): Xaa is C or S
XGXARVVMNEYKFKIVNSSDDLYLVSIPELQTPAX

SEQ ID NO: 23486 - protein, 37 aa, Artificial Sequence
  GFR-binding peptide
  MOD_RES (2), (36), (37): Xaa is C or S
  MOD_RES (14), (15), (16), (17), (18): Xaa is A or G
  MOD_RES (19), (20), (21), (22): Xaa is A or G or is absent
GXAEVVMDEYQKYXXXXXXXXXIYLISIPSLRAPVXX

SEQ ID NO: 23487 - protein, 32 aa, Artificial Sequence; identical to SEQ ID NO: 2506
  GFR-binding peptide
  MOD_RES (31), (31): Xaa is C or S

SEQ ID NO: 23488 - protein, 35 aa, Artificial Sequence; identical to SEQ ID NO: 2508
  GFR-binding peptide
  MOD_RES (33), (33): Xaa is C or S
  MOD_RES (11), (12), (13), (14), (15): Xaa is A or G
  MOD_RES (16), (17), (18), (19): Xaa is A or G or is absent

SEQ ID NO: 23489 - protein, 38 aa, Artificial Sequence
  GFR-binding peptide
  MOD_RES (2), (35), (36): Xaa is C or S
  MOD_RES (13), (14), (15), (16), (17): Xaa is A or G
  MOD_RES (18), (19), (20), (21): Xaa is A or G or is absent
KXSRVIMEYKFKXXXXXXXXXLYLISIPELAQPVXXPA

SEQ ID NO: 23490 - protein, 34 aa, Artificial Sequence
  GFR-binding peptide
  MOD_RES (31), (32): Xaa is C or S
SVAMGEYQKYYTVVGKDIYLISIPSLKTPVXXAK

SEQ ID NO: 23491 - protein, 34 aa, Artificial Sequence
  GFR-binding peptide
  MOD_RES (1), (1): Xaa is C or S
  MOD_RES (13), (14), (15), (16), (17): Xaa is A or G
  MOD_RES (18), (19), (20), (21): Xaa is A or G or is absent
XESVAMGEYKFKXXXXXXXXXLYLISIPELKTPV

SEQ ID NO: 23492 - protein, 39 aa, Artificial Sequence
  GFR-binding peptide
  MOD_RES (2), (4), (38), (39): Xaa is C or S
  MOD_RES (16), (17), (18), (19), (20): Xaa is A or G
  MOD_RES (21), (22), (23), (24): Xaa is A or G or is absent
HXGXARVVMNEYKFKXXXXXXXXXLYLVSIPELQTPAXX

SEQ ID NO: 23493 - protein, 35 aa, Artificial Sequence
  GFR-binding peptide
  MOD_RES (1), (34), (35): Xaa is C or S
XEAVSMGEEYKFKTPVGMDDLYLVSIPELKTPVXX

SEQ ID NO: 23494 - protein, 39 aa, Artificial Sequence; identical to SEQ ID NO: 2512
  GFR-binding peptide
  MOD_RES (1), (33), (34): Xaa is C or S

SEQ ID NO: 23495 - protein, 38 aa, Artificial Sequence; identical to SEQ ID NO: 2513
  GFR-binding peptide
  MOD_RES (1), (3), (35), (36): Xaa is C or S

SEQ ID NO: 23496 - protein, 39 aa, Artificial Sequence; identical to SEQ ID NO: 2514
  GFR-binding peptide
  MOD_RES (35), (36): Xaa is C or S
  MOD_RES (13), (14), (15), (16), (17): Xaa is A or G
  MOD_RES (18), (19), (20), (21): Xaa is A or G or is absent

SEQ ID NO: 23497 - protein, 37 aa, Artificial Sequence
  GFR-binding peptide
  MOD_RES (34), (35): Xaa is C or S
  MOD_RES (12), (13), (14), (15), (16): Xaa is A or G
  MOD_RES (17), (18), (19), (20): Xaa is A or G or is absent
AEVVMDEYQKYXXXXXXXXXIYLISIPSLRAPVXXSA

SEQ ID NO: 23498 - protein, 39 aa, Artificial Sequence; identical to SEQ ID NO: 2516
  GFR-binding peptide
  MOD_RES (1), (34), (35): Xaa is C or S

SEQ ID NO: 23499 - protein, 42 aa, Artificial Sequence; identical to SEQ ID NO: 2517
  GFR-binding peptide
  MOD_RES (1), (3), (37): Xaa is C or S
  MOD_RES (15), (16), (17), (18), (19): Xaa is A or G
  MOD_RES (20), (21), (22), (23): Xaa is A or G or is absent

SEQ ID NO: 23500 - protein, 41 aa, Artificial Sequence
  GFR-binding peptide
  MOD_RES (1), (3), (36), (37): Xaa is C or S
  MOD_RES (14), (15), (16), (17), (18): Xaa is A or G
  MOD_RES (19), (20), (21), (22): Xaa is A or G or is absent
XKXSKVIMEYKFKXXXXXXXXXLYLISIPELDQSVXXPSAS

SEQ ID NO: 23501 - protein, 32 aa, Artificial Sequence
  GFR-binding peptide
  MOD_RES (11), (12), (13), (14), (15): Xaa is A or G
  MOD_RES (16), (17), (18), (19): Xaa is A or G or is absent
SRVIMEYQKYXXXXXXXXXIYLISIPSLAQPV

SEQ ID NO: 23502 - protein, 39 aa, Artificial Sequence
  GFR-binding peptide
  MOD_RES (2), (36), (37): Xaa is C or S
  MOD_RES (14), (15), (16), (17), (18): Xaa is A or G
  MOD_RES (19), (20), (21), (22): Xaa is A or G or is absent
GXARVVMNEYQKYXXXXXXXXXIYLVSIPSLQTPAXXPK

SEQ ID NO: 23503 - protein, 34 aa, Artificial Sequence; identical to SEQ ID NO: 2521
  GFR-binding peptide
  MOD_RES (34), (34): Xaa is C or S
  MOD_RES (12), (13), (14), (15), (16): Xaa is A or G
  MOD_RES (17), (18), (19), (20): Xaa is A or G or is absent

SEQ ID NO: 23504 - protein, 40 aa, Artificial Sequence
  GFR-binding peptide
  MOD_RES (34), (35): Xaa is C or S
  MOD_RES (12), (13), (14), (15), (16): Xaa is A or G
  MOD_RES (17), (18), (19), (20): Xaa is A or G or is absent
ESVAMGEYKFKXXXXXXXXXLYLISIPELKTPVXXAKSAK

SEQ ID NO: 23505 - protein, 40 aa, Artificial Sequence
  GFR-binding peptide
  MOD_RES (1), (35): Xaa is C or S
  MOD_RES (13), (14), (15), (16), (17): Xaa is A or G
  MOD_RES (18), (19), (20), (21): Xaa is A or G or is absent
XSRVVMNEYQKYXXXXXXXXXIYLVSIPSLKTPAXTPKTV

SEQ ID NO: 23506 - protein, 36 aa, Artificial Sequence
  GFR-binding peptide
  MOD_RES (34), (34): Xaa is C or S
  MOD_RES (12), (13), (14), (15), (16): Xaa is A or G
  MOD_RES (17), (18), (19), (20): Xaa is A or G or is absent
SRVVMNEYQKYXXXXXXXXXIYLVSIPSLKTPAXTP

SEQ ID NO: 23507 - protein, 33 aa, Artificial Sequence
  GFR-binding peptide
  MOD_RES (1), (1): Xaa is C or S
  MOD_RES (12), (13), (14), (15), (16): Xaa is A or G
  MOD_RES (17), (18), (19), (20): Xaa is A or G or is absent
XSRVIMEYKFKXXXXXXXXXLYLISIPELAQPV

SEQ ID NO: 23508 - protein, 38 aa, Artificial Sequence
  GFR-binding peptide
  MOD_RES (1), (3), (35), (36): Xaa is C or S
XGXAEVVMDYHYKLVVNNAADKYLISIPSLRAPVXXSA

SEQ ID NO: 23509 - protein, 40 aa, Artificial Sequence
  GFR-binding peptide
  MOD_RES (2), (4), (38), (39): Xaa is C or S
  MOD_RES (16), (17), (18), (19), (20): Xaa is A or G
  MOD_RES (21), (22), (23), (24): Xaa is A or G or is absent
HXGXSRVVMNEYQKYXXXXXXXXXIYLVSIPSLKTPAXXP

SEQ ID NO: 23510 - protein, 37 aa, Artificial Sequence
  GFR-binding peptide
  MOD_RES (2), (4), (36), (37): Xaa is C or S
RXGXAEVVMDEYKFKVVNNAADLYLISIPELRAPVXX

SEQ ID NO: 23511 - protein, 36 aa, Artificial Sequence; identical to SEQ ID NO: 2529
  GFR-binding peptide
  MOD_RES (1), (33), (34): Xaa is C or S

SEQ ID NO: 23512 - protein, 40 aa, Artificial Sequence
  GFR-binding peptide
  MOD_RES (34), (35): Xaa is C or S
  MOD_RES (12), (13), (14), (15), (16): Xaa is A or G
  MOD_RES (17), (18), (19), (20): Xaa is A or G or is absent
AEVVMDEYQKYXXXXXXXXXIYLISIPSLRAPVXXSAPAA

SEQ ID NO: 23513 - protein, 41 aa, Artificial Sequence
  GFR-binding peptide
  MOD_RES (1), (35), (36): Xaa is C or S
  MOD_RES (13), (14), (15), (16), (17): Xaa is A or G
  MOD_RES (18), (19), (20), (21): Xaa is A or G or is absent
XGEVVMDEYKFKXXXXXXXXXLYLMSIPELETPVXXAKPIK

SEQ ID NO: 23514 - protein, 36 aa, Artificial Sequence; identical to SEQ ID NO: 2532
  GFR-binding peptide
  MOD_RES (34), (35): Xaa is C or S
  MOD_RES (12), (13), (14), (15), (16): Xaa is A or G
  MOD_RES (17), (18), (19), (20): Xaa is A or G or is absent

SEQ ID NO: 23515 - protein, 35 aa, Artificial Sequence
  GFR-binding peptide
  MOD_RES (1), (3), (34), (35): Xaa is C or S
XKXSKVIMEYKFKIKPTKGILYLISIPELDQSVXX

SEQ ID NO: 23516 - protein, 38 aa, Artificial Sequence
  GFR-binding peptide
  MOD_RES (1), (3), (35), (36): Xaa is C or S
XGXSRVVMNEYKFKIVNSSDDLYLVSIPELKTPAXXPK

SEQ ID NO: 23517 - protein, 36 aa, Artificial Sequence
  GFR-binding peptide
  MOD_RES (2), (35), (36): Xaa is C or S
  MOD_RES (13), (14), (15), (16), (17): Xaa is A or G
  MOD_RES (18), (19), (20), (21): Xaa is A or G or is absent
KXSRVIMEYQKYXXXXXXXXXIYLISIPSLAQPVXX

SEQ ID NO: 23518 - protein, 43 aa, Artificial Sequence
  GFR-binding peptide
  MOD_RES (2), (4), (37), (38): Xaa is C or S
  MOD_RES (15), (16), (17), (18), (19): Xaa is A or G
  MOD_RES (20), (21), (22), (23): Xaa is A or G or is absent
SXKXSRVIMEYKFKXXXXXXXXXLYLISIPELAQPVXXPAASA

SEQ ID NO: 23519 - protein, 33 aa, Artificial Sequence; identical to SEQ ID NO: 2537
  GFR-binding peptide
  MOD_RES (2), (2): Xaa is C or S

SEQ ID NO: 23520 - protein, 41 aa, Artificial Sequence
  GFR-binding peptide
  MOD_RES (2), (36), (37): Xaa is C or S
  MOD_RES (14), (15), (16), (17), (18): Xaa is A or G
  MOD_RES (19), (20), (21), (22): Xaa is A or G or is absent
GXAEVVMDEYKFKXXXXXXXXXLYLISIPELRAPVXXSAPA

SEQ ID NO: 23521 - protein, 36 aa, Artificial Sequence
  GFR-binding peptide
  MOD_RES (33), (34): Xaa is C or S
  MOD_RES (11), (12), (13), (14), (15): Xaa is A or G
  MOD_RES (16), (17), (18), (19): Xaa is A or G or is absent
RVVMNEYQKYXXXXXXXXXIYLVSIPSLKTPAXXPK

SEQ ID NO: 23522 - protein, 36 aa, Artificial Sequence; identical to SEQ ID NO: 2538
  GFR-binding peptide
  MOD_RES (1), (3), (35), (36): Xaa is C or S

SEQ ID NO: 23523 - protein, 35 aa, Artificial Sequence
  GFR-binding peptide
  MOD_RES (1), (3): Xaa is C or S
  MOD_RES (14), (15), (16), (17), (18): Xaa is A or G
  MOD_RES (19), (20), (21), (22): Xaa is A or G or is absent
XKXSKVIMEYQKYXXXXXXXXXIYLISIPSLDQSV

SEQ ID NO: 23524 - protein, 41 aa, Artificial Sequence
  GFR-binding peptide
  MOD_RES (2), (4), (36), (37): Xaa is C or S
RXGXAEVVMDEYQKYVVNNAADIYLISIPSLRAPVXXSAPA

SEQ ID NO: 23525 - protein, 36 aa, Artificial Sequence
  GFR-binding peptide
  MOD_RES (1), (32), (33): Xaa is C or S
XSKVVMEYKFKVKPTRGVLYLISIPELDQPVXXPSA

SEQ ID NO: 23526 - protein, 37 aa, Artificial Sequence; identical to SEQ ID NO: 2539
  GFR-binding peptide
  MOD_RES (2), (33), (34): Xaa is C or S

SEQ ID NO: 23527 - protein, 41 aa, Artificial Sequence; identical to SEQ ID NO: 2543
  GFR-binding peptide
  MOD_RES (1), (3), (37), (38): Xaa is C or S
  MOD_RES (15), (16), (17), (18), (19): Xaa is A or G
  MOD_RES (20), (21), (22), (23): Xaa is A or G or is absent

SEQ ID NO: 23528 - protein, 41 aa, Artificial Sequence; identical to SEQ ID NO: 2544
  GFR-binding peptide
  MOD_RES (2), (4), (36), (37): Xaa is C or S

SEQ ID NO: 23529 - protein, 35 aa, Artificial Sequence
  GFR-binding peptide
  MOD_RES (31), (32): Xaa is C or S
KVVMNEYKFKIVNNSSDLYLVSIPELKTPAXXAKP

SEQ ID NO: 23530 - protein, 39 aa, Artificial Sequence
  GFR-binding peptide
  MOD_RES (1), (33), (34): Xaa is C or S
XAEVVMDEYQKYVVNNAADIYLISIPSLRAPVXXSAPAA

SEQ ID NO: 23531 - protein, 40 aa, Artificial Sequence
  GFR-binding peptide
  MOD_RES (2), (4), (38), (39): Xaa is C or S
  MOD_RES (16), (17), (18), (19), (20): Xaa is A or G
  MOD_RES (21), (22), (23), (24): Xaa is A or G or is absent
HXGXARVVMNEYKFKXXXXXXXXXLYLVSIPELQTPAXXP

SEQ ID NO: 23532 - protein, 36 aa, Artificial Sequence
  GFR-binding peptide
  MOD_RES (2), (4), (36): Xaa is C or S
RXGXAEVVMDYHYKLVVNNAADKYLISIPSLRAPVX

SEQ ID NO: 23533 - protein, 36 aa, Artificial Sequence
  GFR-binding peptide
  MOD_RES (31), (32): Xaa is C or S
SRVIMEYQKYVKPKRGVIYLISIPSLAQPVXXPAAS

SEQ ID NO: 23534 - protein, 40 aa, Artificial Sequence
  GFR-binding peptide
  MOD_RES (1), (3), (35), (36): Xaa is C or S
XGXGEVVMEEYQKYVVKDYEDIYLMSIPSLETPVXXAKPI

SEQ ID NO: 23535 - protein, 42 aa, Artificial Sequence
  GFR-binding peptide
  MOD_RES (2), (36): Xaa is C or S
  MOD_RES (14), (15), (16), (17), (18): Xaa is A or G
  MOD_RES (19), (20), (21), (22): Xaa is A or G or is absent
GXSRVVMNEYQKYXXXXXXXXXIYLVSIPSLKTPAXTPKTVH

SEQ ID NO: 23536 - protein, 41 aa, Artificial Sequence; identical to SEQ ID NO: 2551
  GFR-binding peptide
  MOD_RES (2), (4), (38), (39): Xaa is C or S
  MOD_RES (16), (17), (18), (19), (20): Xaa is A or G
  MOD_RES (21), (22), (23), (24): Xaa is A or G or is absent

SEQ ID NO: 23537 - protein, 35 aa, Artificial Sequence; identical to SEQ ID NO: 2552
  GFR-binding peptide
  MOD_RES (2), (34), (35): Xaa is C or S

SEQ ID NO: 23538 - protein, 40 aa, Artificial Sequence
  GFR-binding peptide
  MOD_RES (1), (35): Xaa is C or S
  MOD_RES (13), (14), (15), (16), (17): Xaa is A or G
  MOD_RES (18), (19), (20), (21): Xaa is A or G or is absent
XSRVVMNEYKFKXXXXXXXXXLYLVSIPELKTPAXTPKTV

SEQ ID NO: 23539 - protein, 37 aa, Artificial Sequence; identical to SEQ ID NO: 2553
  GFR-binding peptide
  MOD_RES (2), (4), (37): Xaa is C or S

SEQ ID NO: 23540 - protein, 36 aa, Artificial Sequence; identical to SEQ ID NO: 2554
  GFR-binding peptide
  MOD_RES (32), (33): Xaa is C or S

SEQ ID NO: 23541 - protein, 33 aa, Artificial Sequence; identical to SEQ ID NO: 2555
  GFR-binding peptide
  MOD_RES (31), (32): Xaa is C or S

SEQ ID NO: 23542 - protein, 43 aa, Artificial Sequence
  GFR-binding peptide
  MOD_RES (1), (3), (38), (39): Xaa is C or S
  MOD_RES (16), (17), (18), (19), (20): Xaa is A or G
  MOD_RES (21), (22), (23), (24): Xaa is A or G or is absent
XGXEAVSMGEEYKFKXXXXXXXXXLYLVSIPELKTPVXXAKGV

SEQ ID NO: 23543 - protein, 36 aa, Artificial Sequence
  GFR-binding peptide
  MOD_RES (2), (4): Xaa is C or S
  MOD_RES (15), (16), (17), (18), (19): Xaa is A or G
  MOD_RES (20), (21), (22), (23): Xaa is A or G or is absent
SXKXSKVIMEYKFKXXXXXXXXXLYLISIPELDQSV

SEQ ID NO: 23544 - protein, 37 aa, Artificial Sequence
  GFR-binding peptide
  MOD_RES (1), (3), (35): Xaa is C or S
XGXSRVVMNEYQKYIVNSSDDIYLVSIPSLKTPAXTP

SEQ ID NO: 23545 - protein, 35 aa, Artificial Sequence; identical to SEQ ID NO: 2556
  GFR-binding peptide
  MOD_RES (1), (3): Xaa is C or S
  MOD_RES (14), (15), (16), (17), (18): Xaa is A or G
  MOD_RES (19), (20), (21), (22): Xaa is A or G or is absent

SEQ ID NO: 23546 - protein, 34 aa, Artificial Sequence; identical to SEQ ID NO: 2558
  GFR-binding peptide
  MOD_RES (2), (4): Xaa is C or S

SEQ ID NO: 23547 - protein, 37 aa, Artificial Sequence
  GFR-binding peptide
  MOD_RES (2), (4), (36), (37): Xaa is C or S
RXGXAEVVMDEYQKYVVNNAADIYLISIPSLRAPVXX

SEQ ID NO: 23548 - protein, 37 aa, Artificial Sequence
  GFR-binding peptide
  MOD_RES (2), (34): Xaa is C or S
GXSRVVMNEYKFKIVNSSDDLYLVSIPELKTPAXTPK

SEQ ID NO: 23549 - protein, 34 aa, Artificial Sequence
  GFR-binding peptide
  MOD_RES (33), (34): Xaa is C or S
  MOD_RES (11), (12), (13), (14), (15): Xaa is A or G
  MOD_RES (16), (17), (18), (19): Xaa is A or G or is absent
EVVMEEYQKYXXXXXXXXXIYLMSIPSLETPVXX

SEQ ID NO: 23550 - protein, 38 aa, Artificial Sequence; identical to SEQ ID NO: 2561
  GFR-binding peptide
  MOD_RES (1), (3), (35), (36): Xaa is C or S

SEQ ID NO: 23551 - protein, 37 aa, Artificial Sequence
  GFR-binding peptide
  MOD_RES (1), (33), (34): Xaa is C or S
XESVAMGEYKFKYTVVGKDLYLISIPELKTPVXXAKS

SEQ ID NO: 23552 - protein, 36 aa, Artificial Sequence
  GFR-binding peptide
  MOD_RES (2), (4), (36): Xaa is C or S
RXGXGEVVMDEYQKYVVKENEDIYLMSIPSLETPVX

SEQ ID NO: 23553 - protein, 40 aa, Artificial Sequence; identical to SEQ ID NO: 2563
  GFR-binding peptide
  MOD_RES (1), (3), (35), (36): Xaa is C or S

SEQ ID NO: 23554 - protein, 36 aa, Artificial Sequence
  GFR-binding peptide
  MOD_RES (34), (35): Xaa is C or S
  MOD_RES (12), (13), (14), (15), (16): Xaa is A or G
  MOD_RES (17), (18), (19), (20): Xaa is A or G or is absent
ARVVMNEYKFKXXXXXXXXXLYLVSIPELQTPAXXP

SEQ ID NO: 23555 - protein, 38 aa, Artificial Sequence; identical to SEQ ID NO: 2564
  GFR-binding peptide
  MOD_RES (1), (34), (35): Xaa is C or S

SEQ ID NO: 23556 - protein, 39 aa, Artificial Sequence
  GFR-binding peptide
  MOD_RES (2), (4), (36), (37): Xaa is C or S
RXGXESVAMGEYQKYYTVVGKDIYLISIPSLKTPVXXAK

SEQ ID NO: 23557 - protein, 40 aa, Artificial Sequence; identical to SEQ ID NO: 2565
  GFR-binding peptide
  MOD_RES (1), (3), (35), (36): Xaa is C or S

SEQ ID NO: 23558 - protein, 35 aa, Artificial Sequence
  GFR-binding peptide
  MOD_RES (1), (33), (34): Xaa is C or S
XSRVVMNEYQKYIVNSSDDIYLVSIPSLKTPAXXP

SEQ ID NO: 23559 - protein, 36 aa, Artificial Sequence; identical to SEQ ID NO: 2566
  GFR-binding peptide
  MOD_RES (1), (3), (36): Xaa is C or S
  MOD_RES (14), (15), (16), (17), (18): Xaa is A or G
  MOD_RES (19), (20), (21), (22): Xaa is A or G or is absent

SEQ ID NO: 23560 - protein, 40 aa, Artificial Sequence
  GFR-binding peptide
  MOD_RES (2), (4), (38), (39): Xaa is C or S
  MOD_RES (16), (17), (18), (19), (20): Xaa is A or G
  MOD_RES (21), (22), (23), (24): Xaa is A or G or is absent
RXGXESVAMGYHYKLXXXXXXXXXKYLISIPSLKTPVXXA

SEQ ID NO: 23561 - protein, 34 aa, Artificial Sequence; identical to SEQ ID NO: 2567
  GFR-binding peptide
  MOD_RES (32), (33): Xaa is C or S

SEQ ID NO: 23562 - protein, 39 aa, Artificial Sequence
  GFR-binding peptide
  MOD_RES (2), (4), (38), (39): Xaa is C or S
  MOD_RES (16), (17), (18), (19), (20): Xaa is A or G
  MOD_RES (21), (22), (23), (24): Xaa is A or G or is absent
HXGXSRVVMNEYQKYXXXXXXXXXIYLVSIPSLKTPAXX

SEQ ID NO: 23563 - protein, 35 aa, Artificial Sequence; identical to SEQ ID NO: 2569
  GFR-binding peptide
  MOD_RES (1), (33), (34): Xaa is C or S

SEQ ID NO: 23564 - protein, 39 aa, Artificial Sequence
  GFR-binding peptide
  MOD_RES (2), (4), (36), (37): Xaa is C or S
RXGXAEVVMDYHYKLVVNNAADKYLISIPSLRAPVXXSA

SEQ ID NO: 23565 - protein, 37 aa, Artificial Sequence
  GFR-binding peptide
  MOD_RES (1), (3), (37): Xaa is C or S
  MOD_RES (15), (16), (17), (18), (19): Xaa is A or G
  MOD_RES (20), (21), (22), (23): Xaa is A or G or is absent
XGXAEVVMDRYKKLXXXXXXXXXFYLISIANLRAPVX

SEQ ID NO: 23566 - protein, 41 aa, Artificial Sequence
  GFR-binding peptide
  MOD_RES (1), (35), (36): Xaa is C or S
  MOD_RES (13), (14), (15), (16), (17): Xaa is A or G
  MOD_RES (18), (19), (20), (21): Xaa is A or G or is absent
XGEVVMEEYQKYXXXXXXXXXIYLMSIPSLETPVXXAKPIS

SEQ ID NO: 23567 - protein, 37 aa, Artificial Sequence
  GFR-binding peptide
  MOD_RES (1), (35): Xaa is C or S
  MOD_RES (13), (14), (15), (16), (17): Xaa is A or G
  MOD_RES (18), (19), (20), (21): Xaa is A or G or is absent
XSRVVMNEYQKYXXXXXXXXXIYLVSIPSLKTPAXTP

SEQ ID NO: 23568 - protein, 34 aa, Artificial Sequence
  GFR-binding peptide
  MOD_RES (31), (32): Xaa is C or S
EVVMDEYQKYVVNNAADIYLISIPSLRAPVXXSA

SEQ ID NO: 23569 - protein, 36 aa, Artificial Sequence
  GFR-binding peptide
  MOD_RES (2), (4), (36): Xaa is C or S
RXGXESVAMGEYQKYYTVVGKDIYLISIPSLKTPVX

SEQ ID NO: 23570 - protein, 40 aa, Artificial Sequence
  GFR-binding peptide
  MOD_RES (1), (34), (35): Xaa is C or S
  MOD_RES (12), (13), (14), (15), (16): Xaa is A or G
  MOD_RES (17), (18), (19), (20): Xaa is A or G or is absent
XSKVVMEYKFKXXXXXXXXXLYLISIPELDQPVXXPSASA

SEQ ID NO: 23571 - protein, 32 aa, Artificial Sequence
  GFR-binding peptide
  MOD_RES (11), (12), (13), (14), (15): Xaa is A or G
  MOD_RES (16), (17), (18), (19): Xaa is A or G or is absent
RVVMNEYKFKXXXXXXXXXLYLVSIPELQTPA

SEQ ID NO: 23572 - protein, 39 aa, Artificial Sequence; identical to SEQ ID NO: 2576
  GFR-binding peptide
  MOD_RES (1), (35), (36): Xaa is C or S
  MOD_RES (13), (14), (15), (16), (17): Xaa is A or G
  MOD_RES (18), (19), (20), (21): Xaa is A or G or is absent

SEQ ID NO: 23573 - protein, 36 aa, Artificial Sequence
  GFR-binding peptide
  MOD_RES (33), (34): Xaa is C or S
  MOD_RES (11), (12), (13), (14), (15): Xaa is A or G
  MOD_RES (16), (17), (18), (19): Xaa is A or G or is absent
EVVMDEYQKYXXXXXXXXXIYLISIPSLRAPVXXSA

SEQ ID NO: 23574 - protein, 37 aa, Artificial Sequence
  GFR-binding peptide
  MOD_RES (34), (35): Xaa is C or S
  MOD_RES (12), (13), (14), (15), (16): Xaa is A or G
  MOD_RES (17), (18), (19), (20): Xaa is A or G or is absent
AEVVMDRYKKLXXXXXXXXXFYLISIANLRAPVXXSA

SEQ ID NO: 23575 - protein, 42 aa, Artificial Sequence; identical to SEQ ID NO: 2578
  GFR-binding peptide
  MOD_RES (2), (4), (38), (39): Xaa is C or S
  MOD_RES (16), (17), (18), (19), (20): Xaa is A or G
  MOD_RES (21), (22), (23), (24): Xaa is A or G or is absent

SEQ ID NO: 23576 - protein, 38 aa, Artificial Sequence; identical to SEQ ID NO: 2579
  GFR-binding peptide
  MOD_RES (1), (3), (36), (37): Xaa is C or S
  MOD_RES (14), (15), (16), (17), (18): Xaa is A or G
  MOD_RES (19), (20), (21), (22): Xaa is A or G or is absent

SEQ ID NO: 23577 - protein, 42 aa, Artificial Sequence; identical to SEQ ID NO: 2581
  GFR-binding peptide
  MOD_RES (1), (3), (37), (38): Xaa is C or S
  MOD_RES (15), (16), (17), (18), (19): Xaa is A or G
  MOD_RES (20), (21), (22), (23): Xaa is A or G or is absent

SEQ ID NO: 23578 - protein, 35 aa, Artificial Sequence
  GFR-binding peptide
  MOD_RES (1), (35): Xaa is C or S
  MOD_RES (13), (14), (15), (16), (17): Xaa is A or G
  MOD_RES (18), (19), (20), (21): Xaa is A or G or is absent
XAEVVMDRYKKLXXXXXXXXXFYLISIANLRAPVX

SEQ ID NO: 23579 - protein, 36 aa, Artificial Sequence; identical to SEQ ID NO: 2582
  GFR-binding peptide
  MOD_RES (1), (3): Xaa is C or S
  MOD_RES (15), (16), (17), (18), (19): Xaa is A or G
  MOD_RES (20), (21), (22), (23): Xaa is A or G or is absent

SEQ ID NO: 23580 - protein, 39 aa, Artificial Sequence
  GFR-binding peptide
  MOD_RES (1), (3), (37), (38): Xaa is C or S
  MOD_RES (15), (16), (17), (18), (19): Xaa is A or G
  MOD_RES (20), (21), (22), (23): Xaa is A or G or is absent
XGXAEVVMDRYKKLXXXXXXXXXFYLISIANLRAPVXXS

SEQ ID NO: 23581 - protein, 42 aa, Artificial Sequence
  GFR-binding peptide
  MOD_RES (2), (36), (37): Xaa is C or S
  MOD_RES (14), (15), (16), (17), (18): Xaa is A or G
  MOD_RES (19), (20), (21), (22): Xaa is A or G or is absent
GXAEVVMDEYKFKXXXXXXXXXLYLISIPELRAPVXXSAPAA

SEQ ID NO: 23582 - protein, 39 aa, Artificial Sequence
  GFR-binding peptide
  MOD_RES (2), (36), (37): Xaa is C or S
  MOD_RES (14), (15), (16), (17), (18): Xaa is A or G
  MOD_RES (19), (20), (21), (22): Xaa is A or G or is absent
GXAKVVMNEYQKYXXXXXXXXXIYLVSIPSLKTPAXXAK

SEQ ID NO: 23583 - protein, 38 aa, Artificial Sequence
  GFR-binding peptide
  MOD_RES (1), (3), (34), (35): Xaa is C or S
XKXSRVIMEYQKYVKPKRGVIYLISIPSLAQPVXXPAA

SEQ ID NO: 23584 - protein, 37 aa, Artificial Sequence
  GFR-binding peptide
  MOD_RES (1), (35), (36): Xaa is C or S
  MOD_RES (13), (14), (15), (16), (17): Xaa is A or G
  MOD_RES (18), (19), (20), (21): Xaa is A or G or is absent
XGEVVMEEYKFKXXXXXXXXXLYLMSIPELETPVXXA

SEQ ID NO: 23585 - protein, 38 aa, Artificial Sequence; identical to SEQ ID NO: 2587
  GFR-binding peptide
  MOD_RES (2), (4), (35), (36): Xaa is C or S

SEQ ID NO: 23586 - protein, 42 aa, Artificial Sequence
  GFR-binding peptide
  MOD_RES (2), (36), (37): Xaa is C or S
  MOD_RES (14), (15), (16), (17), (18): Xaa is A or G
  MOD_RES (19), (20), (21), (22): Xaa is A or G or is absent
GXAEVVMDYHYKLXXXXXXXXXKYLISIPSLRAPVXXSAPAA

SEQ ID NO: 23587 - protein, 41 aa, Artificial Sequence
  GFR-binding peptide
  MOD_RES (2), (4), (36), (37): Xaa is C or S
RXGXAEVVMDYHYKLVVNNAADKYLISIPSLRAPVXXSAPA

SEQ ID NO: 23588 - protein, 41 aa, Artificial Sequence
  GFR-binding peptide
  MOD_RES (2), (4), (38), (39): Xaa is C or S
  MOD_RES (16), (17), (18), (19), (20): Xaa is A or G
  MOD_RES (21), (22), (23), (24): Xaa is A or G or is absent
RXGXGEVVMEEYKFKXXXXXXXXXLYLMSIPELETPVXXAK

SEQ ID NO: 23589 - protein, 38 aa, Artificial Sequence
  GFR-binding peptide
  MOD_RES (2), (34), (35): Xaa is C or S
GXESVAMGYHYKLYTVVGKDKYLISIPSLKTPVXXAKS

SEQ ID NO: 23590 - protein, 38 aa, Artificial Sequence
  GFR-binding peptide
  MOD_RES (32), (33): Xaa is C or S
ESVAMGYHYKLYTVVGKDKYLISIPSLKTPVXXAKSAK

SEQ ID NO: 23591 - protein, 36 aa, Artificial Sequence
  GFR-binding peptide
  MOD_RES (2), (36): Xaa is C or S
  MOD_RES (14), (15), (16), (17), (18): Xaa is A or G
  MOD_RES (19), (20), (21), (22): Xaa is A or G or is absent
GXGEVVMDEYQKYXXXXXXXXXIYLMSIPSLETPVX

SEQ ID NO: 23592 - protein, 37 aa, Artificial Sequence
  GFR-binding peptide
  MOD_RES (2), (4), (36), (37): Xaa is C or S
RXGXGEVVMDEYQKYVVKENEDIYLMSIPSLETPVXX

SEQ ID NO: 23593 - protein, 41 aa, Artificial Sequence
  GFR-binding peptide
  MOD_RES (2), (4), (36), (37): Xaa is C or S
RXGXESVAMGEYKFKYTVVGKDLYLISIPELKTPVXXAKSA

SEQ ID NO: 23594 - protein, 43 aa, Artificial Sequence; identical to SEQ ID NO: 2591
  GFR-binding peptide
  MOD_RES (2), (4), (39), (40): Xaa is C or S
  MOD_RES (17), (18), (19), (20), (21): Xaa is A or G
  MOD_RES (22), (23), (24), (25): Xaa is A or G or is absent

SEQ ID NO: 23595 - protein, 37 aa, Artificial Sequence
  GFR-binding peptide
  MOD_RES (2), (4), (35), (36): Xaa is C or S
SXKXSKVIMEYQKYIKPTKGIIYLISIPSLDQSVXXP

SEQ ID NO: 23596 - protein, 35 aa, Artificial Sequence
  GFR-binding peptide
  MOD_RES (1), (34), (35): Xaa is C or S
  MOD_RES (12), (13), (14), (15), (16): Xaa is A or G
  MOD_RES (17), (18), (19), (20): Xaa is A or G or is absent
XSKVVMEYKFKXXXXXXXXXLYLISIPELDQPVXX

SEQ ID NO: 23597 - protein, 38 aa, Artificial Sequence
  GFR-binding peptide
  MOD_RES (1), (35), (36): Xaa is C or S
  MOD_RES (13), (14), (15), (16), (17): Xaa is A or G
  MOD_RES (18), (19), (20), (21): Xaa is A or G or is absent
XGEVVMDEYQKYXXXXXXXXXIYLMSIPSLETPVXXAK

SEQ ID NO: 23598 - protein, 35 aa, Artificial Sequence
  GFR-binding peptide
  MOD_RES (32), (33): Xaa is C or S
AEVVMDEYKFKVVNNAADLYLISIPELRAPVXXSA

SEQ ID NO: 23599 - protein, 37 aa, Artificial Sequence
  GFR-binding peptide
  MOD_RES (33), (34): Xaa is C or S
  MOD_RES (11), (12), (13), (14), (15): Xaa is A or G
  MOD_RES (16), (17), (18), (19): Xaa is A or G or is absent
SKVIMEYKFKXXXXXXXXXLYLISIPELDQSVXXPSA

SEQ ID NO: 23600 - protein, 39 aa, Artificial Sequence
  GFR-binding peptide
  MOD_RES (34), (35): Xaa is C or S
  MOD_RES (12), (13), (14), (15), (16): Xaa is A or G
  MOD_RES (17), (18), (19), (20): Xaa is A or G or is absent
ESVAMGYHYKLXXXXXXXXXKYLISIPSLKTPVXXAKSA

SEQ ID NO: 23601 - protein, 39 aa, Artificial Sequence
  GFR-binding peptide
  MOD_RES (2), (34), (35): Xaa is C or S
GXSRVVMNEYQKYIVNSSDDIYLVSIPSLKTPAXXPKPV

SEQ ID NO: 23602 - protein, 35 aa, Artificial Sequence
  GFR-binding peptide
  MOD_RES (33), (34): Xaa is C or S
  MOD_RES (11), (12), (13), (14), (15): Xaa is A or G
  MOD_RES (16), (17), (18), (19): Xaa is A or G or is absent
RVVMNEYQKYXXXXXXXXXIYLVSIPSLKTPAXXP

SEQ ID NO: 23603 - protein, 36 aa, Artificial Sequence
  GFR-binding peptide
  MOD_RES (2), (34), (35): Xaa is C or S
GXESVAMGYHYKLYTVVGKDKYLISIPSLKTPVXXA

SEQ ID NO: 23604 - protein, 37 aa, Artificial Sequence
  GFR-binding peptide
  MOD_RES (2), (4), (35), (36): Xaa is C or S
SXKXSKVIMEYKFKIKPTKGILYLISIPELDQSVXXP

SEQ ID NO: 23605 - protein, 35 aa, Artificial Sequence; identical to SEQ ID NO: 2601
  GFR-binding peptide
  MOD_RES (1), (3): Xaa is C or S

SEQ ID NO: 23606 - protein, 36 aa, Artificial Sequence
  GFR-binding peptide
  MOD_RES (32), (32): Xaa is C or S
SRVVMNEYQKYIVNSSDDIYLVSIPSLKTPAXTPKT

SEQ ID NO: 23607 - protein, 41 aa, Artificial Sequence
  GFR-binding peptide
  MOD_RES (2), (4), (36), (37): Xaa is C or S
RXGXAEVVMDEYKFKVVNNAADLYLISIPELRAPVXXSAPA

SEQ ID NO: 23608 - protein, 38 aa, Artificial Sequence
  GFR-binding peptide
  MOD_RES (1), (3), (36), (37): Xaa is C or S
XGXEAVSMGEEYKFKTPVGMDDLYLVSIPELKTPVXXA

SEQ ID NO: 23609 - protein, 36 aa, Artificial Sequence
  GFR-binding peptide
  MOD_RES (2), (35), (36): Xaa is C or S
  MOD_RES (13), (14), (15), (16), (17): Xaa is A or G
  MOD_RES (18), (19), (20), (21): Xaa is A or G or is absent
KXSRVIMEYKFKXXXXXXXXXLYLISIPELAQPVXX

SEQ ID NO: 23610 - protein, 40 aa, Artificial Sequence
  GFR-binding peptide
  MOD_RES (2), (4), (36), (37): Xaa is C or S
RXGXAEVVMDYHYKLVVNNAADKYLISIPSLRAPVXXSAP

SEQ ID NO: 23611 - protein, 34 aa, Artificial Sequence
  GFR-binding peptide
  MOD_RES (32), (33): Xaa is C or S
ARVVMNEYQKYIVNSSDDIYLVSIPSLQTPAXXP

SEQ ID NO: 23612 - protein, 33 aa, Artificial Sequence
  GFR-binding peptide
  MOD_RES (33), (33): Xaa is C or S
  MOD_RES (11), (12), (13), (14), (15): Xaa is A or G
  MOD_RES (16), (17), (18), (19): Xaa is A or G or is absent
EVVMDRYKKLXXXXXXXXXFYLISIANLRAPVX

SEQ ID NO: 23613 - protein, 43 aa, Artificial Sequence; identical to SEQ ID NO: 2607
  GFR-binding peptide
  MOD_RES (1), (3), (37), (38): Xaa is C or S
  MOD_RES (15), (16), (17), (18), (19): Xaa is A or G
  MOD_RES (20), (21), (22), (23): Xaa is A or G or is absent

SEQ ID NO: 23614 - protein, 41 aa, Artificial Sequence
  GFR-binding peptide
  MOD_RES (2), (36), (37): Xaa is C or S
  MOD_RES (14), (15), (16), (17), (18): Xaa is A or G
  MOD_RES (19), (20), (21), (22): Xaa is A or G or is absent
GXGEVVMDEYQKYXXXXXXXXXIYLMSIPSLETPVXXAKPI

SEQ ID NO: 23615 - protein, 38 aa, Artificial Sequence
  GFR-binding peptide
  MOD_RES (2), (36), (37): Xaa is C or S
  MOD_RES (14), (15), (16), (17), (18): Xaa is A or G
  MOD_RES (19), (20), (21), (22): Xaa is A or G or is absent
GXESVAMGEYKFKXXXXXXXXXLYLISIPELKTPVXXA

SEQ ID NO: 23616 - protein, 36 aa, Artificial Sequence; identical to SEQ ID NO: 2609
  GFR-binding peptide
  MOD_RES (2), (34): Xaa is C or S

SEQ ID NO: 23617 - protein, 32 aa, Artificial Sequence; identical to SEQ ID NO: 2610
  GFR-binding peptide
  MOD_RES (11), (12), (13), (14), (15): Xaa is A or G
  MOD_RES (16), (17), (18), (19): Xaa is A or G or is absent

SEQ ID NO: 23618 - protein, 33 aa, Artificial Sequence; identical to SEQ ID NO: 2612
  GFR-binding peptide
  MOD_RES (1), (1): Xaa is C or S
  MOD_RES (12), (13), (14), (15), (16): Xaa is A or G
  MOD_RES (17), (18), (19), (20): Xaa is A or G or is absent

SEQ ID NO: 23619 - protein, 41 aa, Artificial Sequence
  GFR-binding peptide
  MOD_RES (2), (4), (37), (38): Xaa is C or S
RXGXEAVSMGEEYQKYTPVGMDDIYLVSIPSLKTPVXXAKG

SEQ ID NO: 23620 - protein, 35 aa, Artificial Sequence; identical to SEQ ID NO: 2614
  GFR-binding peptide
  MOD_RES (33), (34): Xaa is C or S
  MOD_RES (11), (12), (13), (14), (15): Xaa is A or G
  MOD_RES (16), (17), (18), (19): Xaa is A or G or is absent

SEQ ID NO: 23621 - protein, 35 aa, Artificial Sequence
  GFR-binding peptide
  MOD_RES (33), (34): Xaa is C or S
  MOD_RES (11), (12), (13), (14), (15): Xaa is A or G
  MOD_RES (16), (17), (18), (19): Xaa is A or G or is absent
SRVIMEYKFKXXXXXXXXXLYLISIPELAQPVXXP

SEQ ID NO: 23622 - protein, 36 aa, Artificial Sequence
  GFR-binding peptide
  MOD_RES (2), (4), (36): Xaa is C or S
RXGXAEVVMDEYKFKVVNNAADLYLISIPELRAPVX

SEQ ID NO: 23623 - protein, 30 aa, Artificial Sequence
  GFR-binding peptide
SVAMGYHYKLYTVVGKDKYLISIPSLKTPV

SEQ ID NO: 23624 - protein, 34 aa, Artificial Sequence; identical to SEQ ID NO: 2621
  GFR-binding peptide
  MOD_RES (31), (32): Xaa is C or S

SEQ ID NO: 23625 - protein, 34 aa, Artificial Sequence
  GFR-binding peptide
  MOD_RES (1), (1): Xaa is C or S
  MOD_RES (13), (14), (15), (16), (17): Xaa is A or G
  MOD_RES (18), (19), (20), (21): Xaa is A or G or is absent
XESVAMGEYQKYXXXXXXXXXIYLISIPSLKTPV

SEQ ID NO: 23626 - protein, 42 aa, Artificial Sequence
  GFR-binding peptide
  MOD_RES (2), (4), (37), (38): Xaa is C or S
RXGXEAVSMGEEYQKYTPVGMDDIYLVSIPSLKTPVXXAKGV

SEQ ID NO: 23627 - protein, 37 aa, Artificial Sequence
  GFR-binding peptide
  MOD_RES (1), (35), (36): Xaa is C or S
  MOD_RES (13), (14), (15), (16), (17): Xaa is A or G
  MOD_RES (18), (19), (20), (21): Xaa is A or G or is absent
XESVAMGRYKKLXXXXXXXXXFYLISIANLKTPVXXA

SEQ ID NO: 23628 - protein, 35 aa, Artificial Sequence; identical to SEQ ID NO: 2626
  GFR-binding peptide
  MOD_RES (34), (35): Xaa is C or S
  MOD_RES (12), (13), (14), (15), (16): Xaa is A or G
  MOD_RES (17), (18), (19), (20): Xaa is A or G or is absent

SEQ ID NO: 23629 - protein, 41 aa, Artificial Sequence; identical to SEQ ID NO: 2627
  GFR-binding peptide
  MOD_RES (2), (4), (35), (36): Xaa is C or S

SEQ ID NO: 23630 - protein, 31 aa, Artificial Sequence; identical to SEQ ID NO: 2628
  GFR-binding peptide
  MOD_RES (31), (31): Xaa is C or S

SEQ ID NO: 23631 - protein, 33 aa, Artificial Sequence
  GFR-binding peptide
  MOD_RES (32), (33): Xaa is C or S
AEVVMDYHYKLVVNNAADKYLISIPSLRAPVXX

SEQ ID NO: 23632 - protein, 39 aa, Artificial Sequence
  GFR-binding peptide
  MOD_RES (34), (35): Xaa is C or S
  MOD_RES (12), (13), (14), (15), (16): Xaa is A or G
  MOD_RES (17), (18), (19), (20): Xaa is A or G or is absent
AEVVMDEYQKYXXXXXXXXXIYLISIPSLRAPVXXSAPA

SEQ ID NO: 23633 - protein, 40 aa, Artificial Sequence
  GFR-binding peptide
  MOD_RES (1), (3), (35), (36): Xaa is C or S
XGXESVAMGEYQKYYTVVGKDIYLISIPSLKTPVXXAKSA

SEQ ID NO: 23634 - protein, 39 aa, Artificial Sequence; identical to SEQ ID NO: 2636
  GFR-binding peptide
  MOD_RES (2), (37), (38): Xaa is C or S
  MOD_RES (15), (16), (17), (18), (19): Xaa is A or G
  MOD_RES (20), (21), (22), (23): Xaa is A or G or is absent

SEQ ID NO: 23635 - protein, 31 aa, Artificial Sequence
  GFR-binding peptide
ARVVMNEYKFKIVNSSDDLYLVSIPELQTPA

SEQ ID NO: 23636 - protein, 37 aa, Artificial Sequence
  GFR-binding peptide
  MOD_RES (34), (35): Xaa is C or S
  MOD_RES (12), (13), (14), (15), (16): Xaa is A or G
  MOD_RES (17), (18), (19), (20): Xaa is A or G or is absent
ESVAMGRYKKLXXXXXXXXXFYLISIANLKTPVXXAK

SEQ ID NO: 23637 - protein, 39 aa, Artificial Sequence; identical to SEQ ID NO: 2637
  GFR-binding peptide
  MOD_RES (2), (4), (37), (38): Xaa is C or S
  MOD_RES (15), (16), (17), (18), (19): Xaa is A or G
  MOD_RES (20), (21), (22), (23): Xaa is A or G or is absent

SEQ ID NO: 23638 - protein, 37 aa, Artificial Sequence
  GFR-binding peptide
  MOD_RES (2), (4), (36): Xaa is C or S
HXGXSRVVMNEYQKYIVNSSDDIYLVSIPSLKTPAXT

SEQ ID NO: 23639 - protein, 37 aa, Artificial Sequence
  GFR-binding peptide
  MOD_RES (1), (3), (37): Xaa is C or S
  MOD_RES (15), (16), (17), (18), (19): Xaa is A or G
  MOD_RES (20), (21), (22), (23): Xaa is A or G or is absent
XGXAKVVMNEYQKYXXXXXXXXXIYLVSIPSLKTPAX

SEQ ID NO: 23640 - protein, 34 aa, Artificial Sequence
  GFR-binding peptide
  MOD_RES (31), (32): Xaa is C or S
RVVMNEYKFKIVNSSDDLYLVSIPELKTPAXXPK

SEQ ID NO: 23641 - protein, 37 aa, Artificial Sequence; identical to SEQ ID NO: 2641
  GFR-binding peptide
  MOD_RES (32), (33): Xaa is C or S

SEQ ID NO: 23642 - protein, 38 aa, Artificial Sequence
  GFR-binding peptide
  MOD_RES (2), (4), (38): Xaa is C or S
  MOD_RES (16), (17), (18), (19), (20): Xaa is A or G
  MOD_RES (21), (22), (23), (24): Xaa is A or G or is absent
HXGXAKVVMNEYKFKXXXXXXXXXLYLVSIPELKTPAX

SEQ ID NO: 23643 - protein, 33 aa, Artificial Sequence
  GFR-binding peptide
  MOD_RES (1), (33): Xaa is C or S
XARVVMNEYKFKIVNSSDDLYLVSIPELQTPAX

SEQ ID NO: 23644 - protein, 31 aa, Artificial Sequence
  GFR-binding peptide
ESVAMGRYKKLYTVVGKDFYLISIANLKTPV

SEQ ID NO: 23645 - protein, 37 aa, Artificial Sequence
  GFR-binding peptide
  MOD_RES (32), (33): Xaa is C or S
GEVVMDEYQKYVVKENEDIYLMSIPSLETPVXXAKPI

SEQ ID NO: 23646 - protein, 37 aa, Artificial Sequence; identical to SEQ ID NO: 2642
  GFR-binding peptide
  MOD_RES (31), (32): Xaa is C or S

SEQ ID NO: 23647 - protein, 37 aa, Artificial Sequence
  GFR-binding peptide
  MOD_RES (1), (33), (34): Xaa is C or S
XSRVVMNEYKFKIVNSSDDLYLVSIPELKTPAXXPKP

SEQ ID NO: 23648 - protein, 39 aa, Artificial Sequence
  GFR-binding peptide
  MOD_RES (1), (35), (36): Xaa is C or S
  MOD_RES (13), (14), (15), (16), (17): Xaa is A or G
  MOD_RES (18), (19), (20), (21): Xaa is A or G or is absent
XAKVVMNEYKFKXXXXXXXXXLYLVSIPELKTPAXXAKP

SEQ ID NO: 23649 - protein, 43 aa, Artificial Sequence; identical to SEQ ID NO: 2643
  GFR-binding peptide
  MOD_RES (2), (4), (37), (38): Xaa is C or S
  MOD_RES (15), (16), (17), (18), (19): Xaa is A or G
  MOD_RES (20), (21), (22), (23): Xaa is A or G or is absent

SEQ ID NO: 23650 - protein, 39 aa, Artificial Sequence; identical to SEQ ID NO: 2648
  GFR-binding peptide
  MOD_RES (2), (34), (35): Xaa is C or S

SEQ ID NO: 23651 - protein, 39 aa, Artificial Sequence; identical to SEQ ID NO: 2649
  GFR-binding peptide
  MOD_RES (2), (4), (38), (39): Xaa is C or S
  MOD_RES (16), (17), (18), (19), (20): Xaa is A or G
  MOD_RES (21), (22), (23), (24): Xaa is A or G or is absent

SEQ ID NO: 23652 - protein, 39 aa, Artificial Sequence
  GFR-binding peptide
  MOD_RES (2), (36), (37): Xaa is C or S
  MOD_RES (14), (15), (16), (17), (18): Xaa is A or G
  MOD_RES (19), (20), (21), (22): Xaa is A or G or is absent
GXGEVVMDEYKFKXXXXXXXXXLYLMSIPELETPVXXAK

SEQ ID NO: 23653 - protein, 37 aa, Artificial Sequence; identical to SEQ ID NO: 2651
  GFR-binding peptide
  MOD_RES (1), (36), (37): Xaa is C or S
  MOD_RES (14), (15), (16), (17), (18): Xaa is A or G
  MOD_RES (19), (20), (21), (22): Xaa is A or G or is absent

SEQ ID NO: 23654 - protein, 39 aa, Artificial Sequence; identical to SEQ ID NO: 2653
  GFR-binding peptide
  MOD_RES (34), (34): Xaa is C or S
  MOD_RES (12), (13), (14), (15), (16): Xaa is A or G
  MOD_RES (17), (18), (19), (20): Xaa is A or G or is absent

SEQ ID NO: 23655 - protein, 35 aa, Artificial Sequence
  GFR-binding peptide
  MOD_RES (31), (32): Xaa is C or S
EVVMEEYKFKVVKDYEDLYLMSIPELETPVXXAKP

SEQ ID NO: 23656 - protein, 39 aa, Artificial Sequence
  GFR-binding peptide
  MOD_RES (33), (33): Xaa is C or S
  MOD_RES (11), (12), (13), (14), (15): Xaa is A or G
  MOD_RES (16), (17), (18), (19): Xaa is A or G or is absent
RVVMNEYQKYXXXXXXXXXIYLVSIPSLKTPAXTPKTVH

SEQ ID NO: 23657 - protein, 38 aa, Artificial Sequence
  GFR-binding peptide
  MOD_RES (1), (35), (36): Xaa is C or S
  MOD_RES (13), (14), (15), (16), (17): Xaa is A or G
  MOD_RES (18), (19), (20), (21): Xaa is A or G or is absent
XGEVVMDEYKFKXXXXXXXXXLYLMSIPELETPVXXAK

SEQ ID NO: 23658 - protein, 38 aa, Artificial Sequence; identical to SEQ ID NO: 2658
  GFR-binding peptide
  MOD_RES (1), (3), (37), (38): Xaa is C or S
  MOD_RES (15), (16), (17), (18), (19): Xaa is A or G
  MOD_RES (20), (21), (22), (23): Xaa is A or G or is absent

SEQ ID NO: 23659 - protein, 35 aa, Artificial Sequence; identical to SEQ ID NO: 2659
  GFR-binding peptide
  MOD_RES (2), (4), (35): Xaa is C or S

SEQ ID NO: 23660 - protein, 38 aa, Artificial Sequence; identical to SEQ ID NO: 2662
  GFR-binding peptide
  MOD_RES (1), (3), (37), (38): Xaa is C or S
  MOD_RES (15), (16), (17), (18), (19): Xaa is A or G
  MOD_RES (20), (21), (22), (23): Xaa is A or G or is absent

SEQ ID NO: 23661 - protein, 41 aa, Artificial Sequence
  GFR-binding peptide
  MOD_RES (1), (3), (37), (38): Xaa is C or S
  MOD_RES (15), (16), (17), (18), (19): Xaa is A or G
  MOD_RES (20), (21), (22), (23): Xaa is A or G or is absent
XGXAEVVMDEYKFKXXXXXXXXXLYLISIPELRAPVXXSAP

SEQ ID NO: 23662 - protein, 37 aa, Artificial Sequence; identical to SEQ ID NO: 2663
  GFR-binding peptide
  MOD_RES (33), (34): Xaa is C or S
  MOD_RES (11), (12), (13), (14), (15): Xaa is A or G
  MOD_RES (16), (17), (18), (19): Xaa is A or G or is absent

SEQ ID NO: 23663 - protein, 36 aa, Artificial Sequence; identical to SEQ ID NO: 2664
  GFR-binding peptide
  MOD_RES (2), (36): Xaa is C or S
  MOD_RES (14), (15), (16), (17), (18): Xaa is A or G
  MOD_RES (19), (20), (21), (22): Xaa is A or G or is absent

SEQ ID NO: 23664 - protein, 36 aa, Artificial Sequence
  GFR-binding peptide
  MOD_RES (1), (35), (36): Xaa is C or S
  MOD_RES (13), (14), (15), (16), (17): Xaa is A or G
  MOD_RES (18), (19), (20), (21): Xaa is A or G or is absent
XARVVMNEYQKYXXXXXXXXXIYLVSIPSLQTPAXX

SEQ ID NO: 23665 - protein, 37 aa, Artificial Sequence
  GFR-binding peptide
  MOD_RES (2), (36), (37): Xaa is C or S
  MOD_RES (14), (15), (16), (17), (18): Xaa is A or G
  MOD_RES (19), (20), (21), (22): Xaa is A or G or is absent
GXGEVVMEEYKFKXXXXXXXXXLYLMSIPELETPVXX

SEQ ID NO: 23666 - protein, 42 aa, Artificial Sequence
  GFR-binding peptide
  MOD_RES (2), (4), (38), (39): Xaa is C or S
  MOD_RES (16), (17), (18), (19), (20): Xaa is A or G
  MOD_RES (21), (22), (23), (24): Xaa is A or G or is absent
HXGXSRVVMNEYQKYXXXXXXXXXIYLVSIPSLKTPAXXPKP

SEQ ID NO: 23667 - protein, 39 aa, Artificial Sequence
  GFR-binding peptide
  MOD_RES (33), (34): Xaa is C or S
  MOD_RES (11), (12), (13), (14), (15): Xaa is A or G
  MOD_RES (16), (17), (18), (19): Xaa is A or G or is absent
EVVMDRYKKLXXXXXXXXXFYLISIANLRAPVXXSAPAA

SEQ ID NO: 23668 - protein, 31 aa, Artificial Sequence; identical to SEQ ID NO: 2670
  GFR-binding peptide
  MOD_RES (31), (31): Xaa is C or S

SEQ ID NO: 23669 - protein, 35 aa, Artificial Sequence
  GFR-binding peptide
  MOD_RES (1), (35): Xaa is C or S
  MOD_RES (13), (14), (15), (16), (17): Xaa is A or G
  MOD_RES (18), (19), (20), (21): Xaa is A or G or is absent
XAKVVMNEYKFKXXXXXXXXXLYLVSIPELKTPAX

SEQ ID NO: 23670 - protein, 38 aa, Artificial Sequence; identical to SEQ ID NO: 2671
  GFR-binding peptide
  MOD_RES (35), (36): Xaa is C or S
  MOD_RES (13), (14), (15), (16), (17): Xaa is A or G
  MOD_RES (18), (19), (20), (21): Xaa is A or G or is absent

SEQ ID NO: 23671 - protein, 35 aa, Artificial Sequence
  GFR-binding peptide
  MOD_RES (2), (4): Xaa is C or S
RXGXAEVVMDEYQKYVVNNAADIYLISIPSLRAPV

SEQ ID NO: 23672 - protein, 42 aa, Artificial Sequence
  GFR-binding peptide
  MOD_RES (1), (3), (37), (38): Xaa is C or S
  MOD_RES (15), (16), (17), (18), (19): Xaa is A or G
  MOD_RES (20), (21), (22), (23): Xaa is A or G or is absent
XGXARVVMNEYKFKXXXXXXXXXLYLVSIPELQTPAXXPKPV

SEQ ID NO: 23673 - protein, 38 aa, Artificial Sequence; identical to SEQ ID NO: 2673
  GFR-binding peptide
  MOD_RES (2), (36), (37): Xaa is C or S
  MOD_RES (14), (15), (16), (17), (18): Xaa is A or G
  MOD_RES (19), (20), (21), (22): Xaa is A or G or is absent

SEQ ID NO: 23674 - protein, 33 aa, Artificial Sequence; identical to SEQ ID NO: 2674
  GFR-binding peptide
  MOD_RES (1), (1): Xaa is C or S

SEQ ID NO: 23675 - protein, 38 aa, Artificial Sequence; identical to SEQ ID NO: 2675
  GFR-binding peptide
  MOD_RES (2), (4), (38): Xaa is C or S
  MOD_RES (16), (17), (18), (19), (20): Xaa is A or G
  MOD_RES (21), (22), (23), (24): Xaa is A or G or is absent

SEQ ID NO: 23676 - protein, 35 aa, Artificial Sequence
  GFR-binding peptide
  MOD_RES (2), (4): Xaa is C or S
RXGXAEVVMDEYKFKVVNNAADLYLISIPELRAPV

SEQ ID NO: 23677 - protein, 40 aa, Artificial Sequence
  GFR-binding peptide
  MOD_RES (1), (3), (35), (36): Xaa is C or S
XGXAEVVMDYHYKLVVNNAADKYLISIPSLRAPVXXSAPA

SEQ ID NO: 23678 - protein, 37 aa, Artificial Sequence
  GFR-binding peptide
  MOD_RES (2), (4): Xaa is C or S
  MOD_RES (16), (17), (18), (19), (20): Xaa is A or G
  MOD_RES (21), (22), (23), (24): Xaa is A or G or is absent
HXGXAKVVMNEYKFKXXXXXXXXXLYLVSIPELKTPA

SEQ ID NO: 23679 - protein, 37 aa, Artificial Sequence
  GFR-binding peptide
  MOD_RES (1), (35), (36): Xaa is C or S
  MOD_RES (13), (14), (15), (16), (17): Xaa is A or G
  MOD_RES (18), (19), (20), (21): Xaa is A or G or is absent
XGEVVMEEYQKYXXXXXXXXXIYLMSIPSLETPVXXA

SEQ ID NO: 23680 - protein, 37 aa, Artificial Sequence
  GFR-binding peptide
  MOD_RES (33), (34): Xaa is C or S
  MOD_RES (11), (12), (13), (14), (15): Xaa is A or G
  MOD_RES (16), (17), (18), (19): Xaa is A or G or is absent
RVVMNEYKFKXXXXXXXXXLYLVSIPELKTPAXXPKP

SEQ ID NO: 23681 - protein, 36 aa, Artificial Sequence; identical to SEQ ID NO: 2685
  GFR-binding peptide
  MOD_RES (1), (3), (35): Xaa is C or S

SEQ ID NO: 23682 - protein, 38 aa, Artificial Sequence; identical to SEQ ID NO: 2687
  GFR-binding peptide
  MOD_RES (34), (35): Xaa is C or S
  MOD_RES (12), (13), (14), (15), (16): Xaa is A or G
  MOD_RES (17), (18), (19), (20): Xaa is A or G or is absent

SEQ ID NO: 23683 - protein, 38 aa, Artificial Sequence; identical to SEQ ID NO: 2689
  GFR-binding peptide
  MOD_RES (1), (33), (34): Xaa is C or S

SEQ ID NO: 23684 - protein, 38 aa, Artificial Sequence; identical to SEQ ID NO: 2691
  GFR-binding peptide
  MOD_RES (2), (4), (37), (38): Xaa is C or S
  MOD_RES (15), (16), (17), (18), (19): Xaa is A or G
  MOD_RES (20), (21), (22), (23): Xaa is A or G or is absent

SEQ ID NO: 23685 - protein, 35 aa, Artificial Sequence
  GFR-binding peptide
  MOD_RES (32), (33): Xaa is C or S
SRVVMNEYKFKIVNSSDDLYLVSIPELKTPAXXPK

SEQ ID NO: 23686 - protein, 33 aa, Artificial Sequence
  GFR-binding peptide
  MOD_RES (33), (33): Xaa is C or S
  MOD_RES (11), (12), (13), (14), (15): Xaa is A or G
  MOD_RES (16), (17), (18), (19): Xaa is A or G or is absent
SVAMGEYKFKXXXXXXXXXLYLISIPELKTPVX

SEQ ID NO: 23687 - protein, 40 aa, Artificial Sequence
  GFR-binding peptide
  MOD_RES (2), (37), (38): Xaa is C or S
  MOD_RES (15), (16), (17), (18), (19): Xaa is A or G
  MOD_RES (20), (21), (22), (23): Xaa is A or G or is absent
GXEAVSMGEEYKFKXXXXXXXXXLYLVSIPELKTPVXXAK

SEQ ID NO: 23688 - protein, 38 aa, Artificial Sequence
  GFR-binding peptide
  MOD_RES (2), (34), (35): Xaa is C or S
GXAEVVMDEYKFKVVNNAADLYLISIPELRAPVXXSAP

SEQ ID NO: 23689 - protein, 32 aa, Artificial Sequence; identical to SEQ ID NO: 2694
  GFR-binding peptide
  MOD_RES (31), (32): Xaa is C or S

SEQ ID NO: 23690 - protein, 32 aa, Artificial Sequence
  GFR-binding peptide
  MOD_RES (31), (32): Xaa is C or S
SRVIMEYKFKVKPKRGVLYLISIPELAQPVXX

SEQ ID NO: 23691 - protein, 34 aa, Artificial Sequence
  GFR-binding peptide
  MOD_RES (1), (34): Xaa is C or S
  MOD_RES (12), (13), (14), (15), (16): Xaa is A or G
  MOD_RES (17), (18), (19), (20): Xaa is A or G or is absent
XSKVVMEYKFKXXXXXXXXXLYLISIPELDQPVX

SEQ ID NO: 23692 - protein, 38 aa, Artificial Sequence
  GFR-binding peptide
  MOD_RES (2), (4), (36), (37): Xaa is C or S
RXGXESVAMGYHYKLYTVVGKDKYLISIPSLKTPVXXA

SEQ ID NO: 23693 - protein, 41 aa, Artificial Sequence
  GFR-binding peptide
  MOD_RES (2), (4), (39), (40): Xaa is C or S
  MOD_RES (17), (18), (19), (20), (21): Xaa is A or G
  MOD_RES (22), (23), (24), (25): Xaa is A or G or is absent
RXGXEAVSMGEEYKFKXXXXXXXXXLYLVSIPELKTPVXXA

SEQ ID NO: 23694 - protein, 43 aa, Artificial Sequence
  GFR-binding peptide
  MOD_RES (2), (4), (38), (39): Xaa is C or S
  MOD_RES (16), (17), (18), (19), (20): Xaa is A or G
  MOD_RES (21), (22), (23), (24): Xaa is A or G or is absent
RXGXAEVVMDRYKKLXXXXXXXXXFYLISIANLRAPVXXSAPA

SEQ ID NO: 23695 - protein, 36 aa, Artificial Sequence; identical to SEQ ID NO: 2695
  GFR-binding peptide
  MOD_RES (32), (33): Xaa is C or S

SEQ ID NO: 23696 - protein, 43 aa, Artificial Sequence; identical to SEQ ID NO: 2696
  GFR-binding peptide
  MOD_RES (1), (3), (38), (39): Xaa is C or S
  MOD_RES (16), (17), (18), (19), (20): Xaa is A or G
  MOD_RES (21), (22), (23), (24): Xaa is A or G or is absent

SEQ ID NO: 23697 - protein, 41 aa, Artificial Sequence
  GFR-binding peptide
  MOD_RES (2), (4), (37), (38): Xaa is C or S
RXGXEAVSMGEEYKFKTPVGMDDLYLVSIPELKTPVXXAKG

SEQ ID NO: 23698 - protein, 43 aa, Artificial Sequence
  GFR-binding peptide
  MOD_RES (1), (3), (37), (38): Xaa is C or S
  MOD_RES (15), (16), (17), (18), (19): Xaa is A or G
  MOD_RES (20), (21), (22), (23): Xaa is A or G or is absent
XGXGEVVMDEYKFKXXXXXXXXXLYLMSIPELETPVXXAKPIK

SEQ ID NO: 23699 - protein, 35 aa, Artificial Sequence; identical to SEQ ID NO: 2700
  GFR-binding peptide
  MOD_RES (33), (34): Xaa is C or S
  MOD_RES (11), (12), (13), (14), (15): Xaa is A or G
  MOD_RES (16), (17), (18), (19): Xaa is A or G or is absent

SEQ ID NO: 23700 - protein, 39 aa, Artificial Sequence
  GFR-binding peptide
  MOD_RES (1), (3), (35), (36): Xaa is C or S
XGXESVAMGEYKFKYTVVGKDLYLISIPELKTPVXXAKS

SEQ ID NO: 23701 - protein, 42 aa, Artificial Sequence
  GFR-binding peptide
  MOD_RES (1), (3), (38), (39): Xaa is C or S
  MOD_RES (16), (17), (18), (19), (20): Xaa is A or G
  MOD_RES (21), (22), (23), (24): Xaa is A or G or is absent
XGXEAVSMGEEYKFKXXXXXXXXXLYLVSIPELKTPVXXAKG

SEQ ID NO: 23702 - protein, 34 aa, Artificial Sequence; identical to SEQ ID NO: 2702
  GFR-binding peptide
  MOD_RES (2), (33), (34): Xaa is C or S

SEQ ID NO: 23703 - protein, 30 aa, Artificial Sequence; identical to SEQ ID NO: 2703
  GFR-binding peptide

SEQ ID NO: 23704 - protein, 37 aa, Artificial Sequence
  GFR-binding peptide
  MOD_RES (1), (3), (36), (37): Xaa is C or S
  MOD_RES (14), (15), (16), (17), (18): Xaa is A or G
  MOD_RES (19), (20), (21), (22): Xaa is A or G or is absent
XKXSKVVMEYKFKXXXXXXXXXLYLISIPELDQPVXX

SEQ ID NO: 23705 - protein, 35 aa, Artificial Sequence
  GFR-binding peptide
  MOD_RES (2), (2): Xaa is C or S
  MOD_RES (14), (15), (16), (17), (18): Xaa is A or G
  MOD_RES (19), (20), (21), (22): Xaa is A or G or is absent
GXARVVMNEYKFKXXXXXXXXXLYLVSIPELQTPA

SEQ ID NO: 23706 - protein, 35 aa, Artificial Sequence
  GFR-binding peptide
  MOD_RES (1), (32), (33): Xaa is C or S
XSKVVMEYQKYVKPTRGVIYLISIPSLDQPVXXPS

SEQ ID NO: 23707 - protein, 40 aa, Artificial Sequence
  GFR-binding peptide
  MOD_RES (1), (3), (37), (38): Xaa is C or S
  MOD_RES (15), (16), (17), (18), (19): Xaa is A or G
  MOD_RES (20), (21), (22), (23): Xaa is A or G or is absent
XGXGEVVMEEYKFKXXXXXXXXXLYLMSIPELETPVXXAK

SEQ ID NO: 23708 - protein, 37 aa, Artificial Sequence; identical to SEQ ID NO: 2708
  GFR-binding peptide
  MOD_RES (1), (3), (36), (37): Xaa is C or S
  MOD_RES (14), (15), (16), (17), (18): Xaa is A or G
  MOD_RES (19), (20), (21), (22): Xaa is A or G or is absent

SEQ ID NO: 23709 - protein, 43 aa, Artificial Sequence
  GFR-binding peptide
  MOD_RES (2), (4), (38), (39): Xaa is C or S
  MOD_RES (16), (17), (18), (19), (20): Xaa is A or G
  MOD_RES (21), (22), (23), (24): Xaa is A or G or is absent
RXGXAEVVMDEYKFKXXXXXXXXXLYLISIPELRAPVXXSAPA

SEQ ID NO: 23710 - protein, 34 aa, Artificial Sequence
  GFR-binding peptide
  MOD_RES (32), (33): Xaa is C or S
ESVAMGEYQKYYTVVGKDIYLISIPSLKTPVXXA

SEQ ID NO: 23711 - protein, 37 aa, Artificial Sequence; identical to SEQ ID NO: 2716
  GFR-binding peptide
  MOD_RES (33), (34): Xaa is C or S
  MOD_RES (11), (12), (13), (14), (15): Xaa is A or G
  MOD_RES (16), (17), (18), (19): Xaa is A or G or is absent

SEQ ID NO: 23712 - protein, 33 aa, Artificial Sequence
  GFR-binding peptide
  MOD_RES (2), (33): Xaa is C or S
KXSRVIMEYQKYVKPKRGVIYLISIPSLAQPVX

SEQ ID NO: 23713 - protein, 34 aa, Artificial Sequence; identical to SEQ ID NO: 2717
  GFR-binding peptide
  MOD_RES (31), (31): Xaa is C or S

SEQ ID NO: 23714 - protein, 37 aa, Artificial Sequence
  GFR-binding peptide
  MOD_RES (1), (32), (33): Xaa is C or S
XSRVIMEYKFKVKPKRGVLYLISIPELAQPVXXPAAS

SEQ ID NO: 23715 - protein, 34 aa, Artificial Sequence
  GFR-binding peptide
  MOD_RES (1), (3): Xaa is C or S
XGXARVVMNEYKFKIVNSSDDLYLVSIPELQTPA

SEQ ID NO: 23716 - protein, 43 aa, Artificial Sequence
  GFR-binding peptide
  MOD_RES (1), (3), (37), (38): Xaa is C or S
  MOD_RES (15), (16), (17), (18), (19): Xaa is A or G
  MOD_RES (20), (21), (22), (23): Xaa is A or G or is absent
XGXAEVVMDEYKFKXXXXXXXXXLYLISIPELRAPVXXSAPAA

SEQ ID NO: 23717 - protein, 39 aa, Artificial Sequence; identical to SEQ ID NO: 2725
  GFR-binding peptide
  MOD_RES (2), (4), (37), (38): Xaa is C or S
  MOD_RES (15), (16), (17), (18), (19): Xaa is A or G
  MOD_RES (20), (21), (22), (23): Xaa is A or G or is absent

SEQ ID NO: 23718 - protein, 39 aa, Artificial Sequence
  GFR-binding peptide
  MOD_RES (33), (34): Xaa is C or S
  MOD_RES (11), (12), (13), (14), (15): Xaa is A or G
  MOD_RES (16), (17), (18), (19): Xaa is A or G or is absent
SKVVMEYKFKXXXXXXXXXLYLISIPELDQPVXXPSASA

SEQ ID NO: 23719 - protein, 40 aa, Artificial Sequence
  GFR-binding peptide
  MOD_RES (1), (3), (34), (35): Xaa is C or S
XKXSKVVMEYKFKVKPTRGVLYLISIPELDQPVXXPSASA

SEQ ID NO: 23720 - protein, 37 aa, Artificial Sequence
  GFR-binding peptide
  MOD_RES (33), (34): Xaa is C or S
  MOD_RES (11), (12), (13), (14), (15): Xaa is A or G
  MOD_RES (16), (17), (18), (19): Xaa is A or G or is absent
SRVIMEYQKYXXXXXXXXXIYLISIPSLAQPVXXPAA

SEQ ID NO: 23721 - protein, 36 aa, Artificial Sequence; identical to SEQ ID NO: 2731
  GFR-binding peptide
  MOD_RES (1), (3), (35), (36): Xaa is C or S

SEQ ID NO: 23722 - protein, 35 aa, Artificial Sequence
  GFR-binding peptide
  MOD_RES (1), (3), (35): Xaa is C or S
XGXESVAMGRYKKLYTVVGKDFYLISIANLKTPVX

SEQ ID NO: 23723 - protein, 30 aa, Artificial Sequence
  GFR-binding peptide
EVVMDYHYKLVVNNAADKYLISIPSLRAPV

SEQ ID NO: 23724 - protein, 35 aa, Artificial Sequence
  GFR-binding peptide
  MOD_RES (33), (34): Xaa is C or S
EAVSMGEEYKFKTPVGMDDLYLVSIPELKTPVXXA

SEQ ID NO: 23725 - protein, 36 aa, Artificial Sequence
  GFR-binding peptide
  MOD_RES (31), (32): Xaa is C or S
EVVMDEYKFKVVKENEDLYLMSIPELETPVXXAKPI

SEQ ID NO: 23726 - protein, 35 aa, Artificial Sequence
  GFR-binding peptide
  MOD_RES (2), (2): Xaa is C or S
  MOD_RES (14), (15), (16), (17), (18): Xaa is A or G
  MOD_RES (19), (20), (21), (22): Xaa is A or G or is absent
GXAEVVMDYHYKLXXXXXXXXXKYLISIPSLRAPV

SEQ ID NO: 23727 - protein, 35 aa, Artificial Sequence; identical to SEQ ID NO: 2745
  GFR-binding peptide
  MOD_RES (1), (33), (34): Xaa is C or S

SEQ ID NO: 23728 - protein, 31 aa, Artificial Sequence; identical to SEQ ID NO: 2746
  GFR-binding peptide
  MOD_RES (1), (1): Xaa is C or S

SEQ ID NO: 23729 - protein, 38 aa, Artificial Sequence
  GFR-binding peptide
  MOD_RES (1), (3), (37): Xaa is C or S
  MOD_RES (15), (16), (17), (18), (19): Xaa is A or G
  MOD_RES (20), (21), (22), (23): Xaa is A or G or is absent
XGXSRVVMNEYKFKXXXXXXXXXLYLVSIPELKTPAXT

SEQ ID NO: 23730 - protein, 36 aa, Artificial Sequence
  GFR-binding peptide
  MOD_RES (1), (3), (35), (36): Xaa is C or S
XGXGEVVMDEYKFKVVKENEDLYLMSIPELETPVXX

SEQ ID NO: 23731 - protein, 40 aa, Artificial Sequence
  GFR-binding peptide
  MOD_RES (1), (3), (37), (38): Xaa is C or S
  MOD_RES (15), (16), (17), (18), (19): Xaa is A or G
  MOD_RES (20), (21), (22), (23): Xaa is A or G or is absent
XGXGEVVMDEYKFKXXXXXXXXXLYLMSIPELETPVXXAK

SEQ ID NO: 23732 - protein, 34 aa, Artificial Sequence
  GFR-binding peptide
  MOD_RES (31), (32): Xaa is C or S
EVVMEEYQKYVVKDYEDIYLMSIPSLETPVXXAK

SEQ ID NO: 23733 - protein, 41 aa, Artificial Sequence; identical to SEQ ID NO: 2751
  GFR-binding peptide
  MOD_RES (2), (4), (37), (38): Xaa is C or S
  MOD_RES (15), (16), (17), (18), (19): Xaa is A or G
  MOD_RES (20), (21), (22), (23): Xaa is A or G or is absent

SEQ ID NO: 23734 - protein, 39 aa, Artificial Sequence; identical to SEQ ID NO: 2752
  GFR-binding peptide
  MOD_RES (2), (4), (35), (36): Xaa is C or S

SEQ ID NO: 23735 - protein, 33 aa, Artificial Sequence
  GFR-binding peptide
  MOD_RES (1), (3): Xaa is C or S
XKXSRVIMEYKFKVKPKRGVLYLISIPELAQPV

SEQ ID NO: 23736 - protein, 37 aa, Artificial Sequence
  GFR-binding peptide
  MOD_RES (1), (32), (33): Xaa is C or S
XSRVIMEYQKYVKPKRGVIYLISIPSLAQPVXXPAAS

SEQ ID NO: 23737 - protein, 37 aa, Artificial Sequence; identical to SEQ ID NO: 2756
  GFR-binding peptide
  MOD_RES (2), (35), (36): Xaa is C or S

SEQ ID NO: 23738 - protein, 33 aa, Artificial Sequence; identical to SEQ ID NO: 2757
  GFR-binding peptide
  MOD_RES (1), (33): Xaa is C or S

SEQ ID NO: 23739 - protein, 40 aa, Artificial Sequence
  GFR-binding peptide
  MOD_RES (1), (3), (37), (38): Xaa is C or S
  MOD_RES (15), (16), (17), (18), (19): Xaa is A or G
  MOD_RES (20), (21), (22), (23): Xaa is A or G or is absent
XGXESVAMGEYKFKXXXXXXXXXLYLISIPELKTPVXXAK

SEQ ID NO: 23740 - protein, 33 aa, Artificial Sequence
  GFR-binding peptide
  MOD_RES (1), (33): Xaa is C or S
XGEVVMDEYKFKVVKENEDLYLMSIPELETPVX

SEQ ID NO: 23741 - protein, 35 aa, Artificial Sequence
  GFR-binding peptide
  MOD_RES (31), (32): Xaa is C or S
RVVMNEYKFKIVNSSDDLYLVSIPELQTPAXXPKP

SEQ ID NO: 23742 - protein, 43 aa, Artificial Sequence
  GFR-binding peptide
  MOD_RES (1), (3), (37), (38): Xaa is C or S
  MOD_RES (15), (16), (17), (18), (19): Xaa is A or G
  MOD_RES (20), (21), (22), (23): Xaa is A or G or is absent
XGXESVAMGYHYKLXXXXXXXXXKYLISIPSLKTPVXXAKSAK

SEQ ID NO: 23743 - protein, 40 aa, Artificial Sequence; identical to SEQ ID NO: 2758
  GFR-binding peptide
  MOD_RES (1), (3), (37), (38): Xaa is C or S
  MOD_RES (15), (16), (17), (18), (19): Xaa is A or G
  MOD_RES (20), (21), (22), (23): Xaa is A or G or is absent

SEQ ID NO: 23744 - protein, 44 aa, Artificial Sequence
  GFR-binding peptide
  MOD_RES (2), (4), (39), (40): Xaa is C or S
  MOD_RES (17), (18), (19), (20), (21): Xaa is A or G
  MOD_RES (22), (23), (24), (25): Xaa is A or G or is absent
RXGXEAVSMGEEYKFKXXXXXXXXXLYLVSIPELKTPVXXAKGV

SEQ ID NO: 23745 - protein, 43 aa, Artificial Sequence
  GFR-binding peptide
  MOD_RES (2), (4), (38), (39): Xaa is C or S
  MOD_RES (16), (17), (18), (19), (20): Xaa is A or G
  MOD_RES (21), (22), (23), (24): Xaa is A or G or is absent
RXGXGEVVMDEYQKYXXXXXXXXXIYLMSIPSLETPVXXAKPI

SEQ ID NO: 23746 - protein, 42 aa, Artificial Sequence
  GFR-binding peptide
  MOD_RES (2), (4), (38), (39): Xaa is C or S
  MOD_RES (16), (17), (18), (19), (20): Xaa is A or G
  MOD_RES (21), (22), (23), (24): Xaa is A or G or is absent
HXGXARVVMNEYQKYXXXXXXXXXIYLVSIPSLQTPAXXPKP

SEQ ID NO: 23747 - protein, 37 aa, Artificial Sequence
  GFR-binding peptide
  MOD_RES (1), (34), (35): Xaa is C or S
  MOD_RES (12), (13), (14), (15), (16): Xaa is A or G
  MOD_RES (17), (18), (19), (20): Xaa is A or G or is absent
XSKVIMEYQKYXXXXXXXXXIYLISIPSLDQSVXXPS

SEQ ID NO: 23748 - protein, 34 aa, Artificial Sequence
  GFR-binding peptide
  MOD_RES (33), (34): Xaa is C or S
  MOD_RES (11), (12), (13), (14), (15): Xaa is A or G
  MOD_RES (16), (17), (18), (19): Xaa is A or G or is absent
SRVIMEYQKYXXXXXXXXXIYLISIPSLAQPVXX

SEQ ID NO: 23749 - protein, 37 aa, Artificial Sequence; identical to SEQ ID NO: 2761
  GFR-binding peptide
  MOD_RES (1), (35), (36): Xaa is C or S
  MOD_RES (13), (14), (15), (16), (17): Xaa is A or G
  MOD_RES (18), (19), (20), (21): Xaa is A or G or is absent

SEQ ID NO: 23750 - protein, 37 aa, Artificial Sequence
  GFR-binding peptide
  MOD_RES (34), (35): Xaa is C or S
  MOD_RES (12), (13), (14), (15), (16): Xaa is A or G
  MOD_RES (17), (18), (19), (20): Xaa is A or G or is absent
ARVVMNEYQKYXXXXXXXXXIYLVSIPSLQTPAXXPK

SEQ ID NO: 23751 - protein, 40 aa, Artificial Sequence; identical to SEQ ID NO: 2764
  GFR-binding peptide
  MOD_RES (1), (3), (37): Xaa is C or S
  MOD_RES (15), (16), (17), (18), (19): Xaa is A or G
  MOD_RES (20), (21), (22), (23): Xaa is A or G or is absent

SEQ ID NO: 23752 - protein, 38 aa, Artificial Sequence
  GFR-binding peptide
  MOD_RES (1), (32), (33): Xaa is C or S
XSKVIMEYQKYIKPTKGIIYLISIPSLDQSVXXPSASA

SEQ ID NO: 23753 - protein, 34 aa, Artificial Sequence
  GFR-binding peptide
  MOD_RES (2), (33), (34): Xaa is C or S
KXSRVIMEYQKYVKPKRGVIYLISIPSLAQPVXX

SEQ ID NO: 23754 - protein, 41 aa, Artificial Sequence
  GFR-binding peptide
  MOD_RES (1), (35), (36): Xaa is C or S
  MOD_RES (13), (14), (15), (16), (17): Xaa is A or G
  MOD_RES (18), (19), (20), (21): Xaa is A or G or is absent
XSRVVMNEYKFKXXXXXXXXXLYLVSIPELKTPAXXPKPVY

SEQ ID NO: 23755 - protein, 36 aa, Artificial Sequence
  GFR-binding peptide
  MOD_RES (1), (3), (35), (36): Xaa is C or S
XGXAEVVMDEYQKYVVNNAADIYLISIPSLRAPVXX

SEQ ID NO: 23756 - protein, 43 aa, Artificial Sequence
  GFR-binding peptide
  MOD_RES (2), (4), (38), (39): Xaa is C or S
  MOD_RES (16), (17), (18), (19), (20): Xaa is A or G
  MOD_RES (21), (22), (23), (24): Xaa is A or G or is absent
HXGXSRVVMNEYQKYXXXXXXXXXIYLVSIPSLKTPAXXPKPV

SEQ ID NO: 23757 - protein, 37 aa, Artificial Sequence
  GFR-binding peptide
  MOD_RES (33), (34): Xaa is C or S
  MOD_RES (11), (12), (13), (14), (15): Xaa is A or G
  MOD_RES (16), (17), (18), (19): Xaa is A or G or is absent
EVVMDEYKFKXXXXXXXXXLYLMSIPELETPVXXAKP

SEQ ID NO: 23758 - protein, 37 aa, Artificial Sequence; identical to SEQ ID NO: 2766
  GFR-binding peptide
  MOD_RES (1), (35), (36): Xaa is C or S
  MOD_RES (13), (14), (15), (16), (17): Xaa is A or G
  MOD_RES (18), (19), (20), (21): Xaa is A or G or is absent

SEQ ID NO: 23759 - protein, 34 aa, Artificial Sequence
  GFR-binding peptide
  MOD_RES (34), (34): Xaa is C or S
  MOD_RES (12), (13), (14), (15), (16): Xaa is A or G
  MOD_RES (17), (18), (19), (20): Xaa is A or G or is absent
SRVVMNEYKFKXXXXXXXXXLYLVSIPELKTPAX

SEQ ID NO: 23760 - protein, 39 aa, Artificial Sequence
  GFR-binding peptide
  MOD_RES (2), (4), (36), (37): Xaa is C or S
HXGXARVVMNEYKFKIVNSSDDLYLVSIPELQTPAXXPK

SEQ ID NO: 23761 - protein, 35 aa, Artificial Sequence
  GFR-binding peptide
  MOD_RES (2), (34), (35): Xaa is C or S
GXGEVVMEEYKFKVVKDYEDLYLMSIPELETPVXX

SEQ ID NO: 23762 - protein, 41 aa, Artificial Sequence; identical to SEQ ID NO: 2768
  GFR-binding peptide
  MOD_RES (1), (3), (35), (36): Xaa is C or S

SEQ ID NO: 23763 - protein, 38 aa, Artificial Sequence
  GFR-binding peptide
  MOD_RES (1), (3), (34), (35): Xaa is C or S
XKXSKVIMEYKFKIKPTKGILYLISIPELDQSVXXPSA

SEQ ID NO: 23764 - protein, 40 aa, Artificial Sequence; identical to SEQ ID NO: 2769
  GFR-binding peptide
  MOD_RES (1), (34), (35): Xaa is C or S
  MOD_RES (12), (13), (14), (15), (16): Xaa is A or G
  MOD_RES (17), (18), (19), (20): Xaa is A or G or is absent

SEQ ID NO: 23765 - protein, 33 aa, Artificial Sequence
  GFR-binding peptide
  MOD_RES (12), (13), (14), (15), (16): Xaa is A or G
  MOD_RES (17), (18), (19), (20): Xaa is A or G or is absent
ESVAMGRYKKLXXXXXXXXXFYLISIANLKTPV

SEQ ID NO: 23766 - protein, 44 aa, Artificial Sequence; identical to SEQ ID NO: 2774
  GFR-binding peptide
  MOD_RES (2), (4), (38), (39): Xaa is C or S
  MOD_RES (16), (17), (18), (19), (20): Xaa is A or G
  MOD_RES (21), (22), (23), (24): Xaa is A or G or is absent

SEQ ID NO: 23767 - protein, 38 aa, Artificial Sequence
  GFR-binding peptide
  MOD_RES (33), (34): Xaa is C or S
  MOD_RES (11), (12), (13), (14), (15): Xaa is A or G
  MOD_RES (16), (17), (18), (19): Xaa is A or G or is absent
EVVMDEYQKYXXXXXXXXXIYLISIPSLRAPVXXSAPA

SEQ ID NO: 23768 - protein, 34 aa, Artificial Sequence
  GFR-binding peptide
  MOD_RES (31), (32): Xaa is C or S
EVVMDEYKFKVVNNAADLYLISIPELRAPVXXSA

SEQ ID NO: 23769 - protein, 35 aa, Artificial Sequence; identical to SEQ ID NO: 2777
  GFR-binding peptide
  MOD_RES (2), (35): Xaa is C or S
  MOD_RES (13), (14), (15), (16), (17): Xaa is A or G
  MOD_RES (18), (19), (20), (21): Xaa is A or G or is absent

SEQ ID NO: 23770 - protein, 37 aa, Artificial Sequence; identical to SEQ ID NO: 2780
  GFR-binding peptide
  MOD_RES (1), (34), (35): Xaa is C or S
  MOD_RES (12), (13), (14), (15), (16): Xaa is A or G
  MOD_RES (17), (18), (19), (20): Xaa is A or G or is absent

SEQ ID NO: 23771 - protein, 34 aa, Artificial Sequence
  GFR-binding peptide
  MOD_RES (1), (1): Xaa is C or S
  MOD_RES (13), (14), (15), (16), (17): Xaa is A or G
  MOD_RES (18), (19), (20), (21): Xaa is A or G or is absent
XSRVVMNEYQKYXXXXXXXXXIYLVSIPSLKTPA

SEQ ID NO: 23772 - protein, 34 aa, Artificial Sequence; identical to SEQ ID NO: 2781
  GFR-binding peptide
  MOD_RES (2), (33), (34): Xaa is C or S

SEQ ID NO: 23773 - protein, 42 aa, Artificial Sequence
  GFR-binding peptide
  MOD_RES (2), (4), (36), (37): Xaa is C or S
RXGXAEVVMDEYQKYVVNNAADIYLISIPSLRAPVXXSAPAA

SEQ ID NO: 23774 - protein, 41 aa, Artificial Sequence
  GFR-binding peptide
  MOD_RES (1), (35), (36): Xaa is C or S
  MOD_RES (13), (14), (15), (16), (17): Xaa is A or G
  MOD_RES (18), (19), (20), (21): Xaa is A or G or is absent
XSRVVMNEYQKYXXXXXXXXXIYLVSIPSLKTPAXXPKPVY

SEQ ID NO: 23775 - protein, 32 aa, Artificial Sequence; identical to SEQ ID NO: 2782
  GFR-binding peptide
  MOD_RES (32), (32): Xaa is C or S

SEQ ID NO: 23776 - protein, 37 aa, Artificial Sequence
  GFR-binding peptide
  MOD_RES (2), (4): Xaa is C or S
  MOD_RES (16), (17), (18), (19), (20): Xaa is A or G
  MOD_RES (21), (22), (23), (24): Xaa is A or G or is absent
RXGXAEVVMDYHYKLXXXXXXXXXKYLISIPSLRAPV

SEQ ID NO: 23777 - protein, 39 aa, Artificial Sequence
  GFR-binding peptide
  MOD_RES (34), (35): Xaa is C or S
  MOD_RES (12), (13), (14), (15), (16): Xaa is A or G
  MOD_RES (17), (18), (19), (20): Xaa is A or G or is absent
ESVAMGEYKFKXXXXXXXXXLYLISIPELKTPVXXAKSA

SEQ ID NO: 23778 - protein, 35 aa, Artificial Sequence; identical to SEQ ID NO: 2789
  GFR-binding peptide
  MOD_RES (33), (34): Xaa is C or S
  MOD_RES (11), (12), (13), (14), (15): Xaa is A or G
  MOD_RES (16), (17), (18), (19): Xaa is A or G or is absent

SEQ ID NO: 23779 - protein, 34 aa, Artificial Sequence
  GFR-binding peptide
  MOD_RES (2), (34): Xaa is C or S
GXAKVVMNEYQKYIVNNSSDIYLVSIPSLKTPAX

SEQ ID NO: 23780 - protein, 35 aa, Artificial Sequence; identical to SEQ ID NO: 2790
  GFR-binding peptide
  MOD_RES (2), (4), (35): Xaa is C or S

SEQ ID NO: 23781 - protein, 36 aa, Artificial Sequence; identical to SEQ ID NO: 2792
  GFR-binding peptide
  MOD_RES (32), (33): Xaa is C or S

SEQ ID NO: 23782 - protein, 36 aa, Artificial Sequence
  GFR-binding peptide
  MOD_RES (2), (34), (35): Xaa is C or S
GXSRVVMNEYQKYIVNSSDDIYLVSIPSLKTPAXXP

SEQ ID NO: 23783 - protein, 43 aa, Artificial Sequence; identical to SEQ ID NO: 2795
  GFR-binding peptide
  MOD_RES (2), (4), (38), (39): Xaa is C or S
  MOD_RES (16), (17), (18), (19), (20): Xaa is A or G
  MOD_RES (21), (22), (23), (24): Xaa is A or G or is absent

SEQ ID NO: 23784 - protein, 36 aa, Artificial Sequence
  GFR-binding peptide
  MOD_RES (1), (3), (35), (36): Xaa is C or S
XGXAEVVMDEYKFKVVNNAADLYLISIPELRAPVXX

SEQ ID NO: 23785 - protein, 39 aa, Artificial Sequence; identical to SEQ ID NO: 2798
  GFR-binding peptide
  MOD_RES (1), (33), (34): Xaa is C or S

SEQ ID NO: 23786 - protein, 42 aa, Artificial Sequence; identical to SEQ ID NO: 2799
  GFR-binding peptide
  MOD_RES (1), (3), (37), (38): Xaa is C or S
  MOD_RES (15), (16), (17), (18), (19): Xaa is A or G
  MOD_RES (20), (21), (22), (23): Xaa is A or G or is absent

SEQ ID NO: 23787 - protein, 40 aa, Artificial Sequence
  GFR-binding peptide
  MOD_RES (1), (3), (34), (35): Xaa is C or S
XKXSKVIMEYQKYIKPTKGIIYLISIPSLDQSVXXPSASA

SEQ ID NO: 23788 - protein, 40 aa, Artificial Sequence; identical to SEQ ID NO: 2800
  GFR-binding peptide
  MOD_RES (2), (4), (37), (38): Xaa is C or S
  MOD_RES (15), (16), (17), (18), (19): Xaa is A or G
  MOD_RES (20), (21), (22), (23): Xaa is A or G or is absent

SEQ ID NO: 23789 - protein, 34 aa, Artificial Sequence; identical to SEQ ID NO: 2801
  GFR-binding peptide
  MOD_RES (2), (34): Xaa is C or S

SEQ ID NO: 23790 - protein, 40 aa, Artificial Sequence
  GFR-binding peptide
  MOD_RES (2), (34), (35): Xaa is C or S
GXGEVVMDEYKFKVVKENEDLYLMSIPELETPVXXAKPIK

SEQ ID NO: 23791 - protein, 37 aa, Artificial Sequence; identical to SEQ ID NO: 2802
  GFR-binding peptide
  MOD_RES (33), (34): Xaa is C or S

SEQ ID NO: 23792 - protein, 34 aa, Artificial Sequence; identical to SEQ ID NO: 2804
  GFR-binding peptide
  MOD_RES (1), (33), (34): Xaa is C or S

SEQ ID NO: 23793 - protein, 36 aa, Artificial Sequence; identical to SEQ ID NO: 2805
  GFR-binding peptide
  MOD_RES (2), (33), (34): Xaa is C or S

SEQ ID NO: 23794 - protein, 32 aa, Artificial Sequence
  GFR-binding peptide
  MOD_RES (31), (32): Xaa is C or S
RVVMNEYKFKIVNSSDDLYLVSIPELKTPAXX

SEQ ID NO: 23795 - protein, 41 aa, Artificial Sequence; identical to SEQ ID NO: 2806
  GFR-binding peptide
  MOD_RES (1), (3), (37): Xaa is C or S
  MOD_RES (15), (16), (17), (18), (19): Xaa is A or G
  MOD_RES (20), (21), (22), (23): Xaa is A or G or is absent

SEQ ID NO: 23796 - protein, 40 aa, Artificial Sequence
  GFR-binding peptide
  MOD_RES (2), (4), (36), (37): Xaa is C or S
RXGXGEVVMEEYQKYVVKDYEDIYLMSIPSLETPVXXAKP

SEQ ID NO: 23797 - protein, 36 aa, Artificial Sequence; identical to SEQ ID NO: 2807
  GFR-binding peptide
  MOD_RES (1), (33): Xaa is C or S

SEQ ID NO: 23798 - protein, 35 aa, Artificial Sequence
  GFR-binding peptide
  MOD_RES (33), (34): Xaa is C or S
  MOD_RES (11), (12), (13), (14), (15): Xaa is A or G
  MOD_RES (16), (17), (18), (19): Xaa is A or G or is absent
EVVMDEYKFKXXXXXXXXXLYLISIPELRAPVXXS

SEQ ID NO: 23799 - protein, 37 aa, Artificial Sequence
  GFR-binding peptide
  MOD_RES (2), (35), (36): Xaa is C or S
  MOD_RES (13), (14), (15), (16), (17): Xaa is A or G
  MOD_RES (18), (19), (20), (21): Xaa is A or G or is absent
KXSKVVMEYQKYXXXXXXXXXIYLISIPSLDQPVXXP

SEQ ID NO: 23800 - protein, 36 aa, Artificial Sequence
  GFR-binding peptide
  MOD_RES (31), (32): Xaa is C or S
EVVMDEYQKYVVKENEDIYLMSIPSLETPVXXAKPI

SEQ ID NO: 23801 - protein, 33 aa, Artificial Sequence
  GFR-binding peptide
  MOD_RES (32), (33): Xaa is C or S
GEVVMDEYKFKVVKENEDLYLMSIPELETPVXX

SEQ ID NO: 23802 - protein, 37 aa, Artificial Sequence
  GFR-binding peptide
  MOD_RES (2), (34), (35): Xaa is C or S
GXESVAMGEYKFKYTVVGKDLYLISIPELKTPVXXAK

SEQ ID NO: 23803 - protein, 40 aa, Artificial Sequence; identical to SEQ ID NO: 2809
  GFR-binding peptide
  MOD_RES (1), (35), (36): Xaa is C or S
  MOD_RES (13), (14), (15), (16), (17): Xaa is A or G
  MOD_RES (18), (19), (20), (21): Xaa is A or G or is absent

SEQ ID NO: 23804 - protein, 35 aa, Artificial Sequence; identical to SEQ ID NO: 2810
  GFR-binding peptide
  MOD_RES (32), (33): Xaa is C or S

SEQ ID NO: 23805 - protein, 36 aa, Artificial Sequence; identical to SEQ ID NO: 2811
  GFR-binding peptide
  MOD_RES (2), (36): Xaa is C or S
  MOD_RES (14), (15), (16), (17), (18): Xaa is A or G
  MOD_RES (19), (20), (21), (22): Xaa is A or G or is absent

SEQ ID NO: 23806 - protein, 33 aa, Artificial Sequence; identical to SEQ ID NO: 2812
  GFR-binding peptide
  MOD_RES (1), (1): Xaa is C or S
  MOD_RES (12), (13), (14), (15), (16): Xaa is A or G
  MOD_RES (17), (18), (19), (20): Xaa is A or G or is absent

SEQ ID NO: 23807 - protein, 39 aa, Artificial Sequence
  GFR-binding peptide
  MOD_RES (1), (35), (36): Xaa is C or S
  MOD_RES (13), (14), (15), (16), (17): Xaa is A or G
  MOD_RES (18), (19), (20), (21): Xaa is A or G or is absent
XAEVVMDRYKKLXXXXXXXXXFYLISIANLRAPVXXSAP

SEQ ID NO: 23808 - protein, 40 aa, Artificial Sequence
  GFR-binding peptide
  MOD_RES (2), (36), (37): Xaa is C or S
  MOD_RES (14), (15), (16), (17), (18): Xaa is A or G
  MOD_RES (19), (20), (21), (22): Xaa is A or G or is absent
GXSRVVMNEYKFKXXXXXXXXXLYLVSIPELKTPAXXPKP

SEQ ID NO: 23809 - protein, 33 aa, Artificial Sequence; identical to SEQ ID NO: 2819
  GFR-binding peptide
  MOD_RES (32), (33): Xaa is C or S

SEQ ID NO: 23810 - protein, 42 aa, Artificial Sequence
  GFR-binding peptide
  MOD_RES (1), (3), (36), (37): Xaa is C or S
XGXEAVSMGEEYKFKTPVGMDDLYLVSIPELKTPVXXAKGVK

SEQ ID NO: 23811 - protein, 38 aa, Artificial Sequence
  GFR-binding peptide
  MOD_RES (1), (34), (35): Xaa is C or S
  MOD_RES (12), (13), (14), (15), (16): Xaa is A or G
  MOD_RES (17), (18), (19), (20): Xaa is A or G or is absent
XSKVVMEYQKYXXXXXXXXXIYLISIPSLDQPVXXPSA

SEQ ID NO: 23812 - protein, 36 aa, Artificial Sequence; identical to SEQ ID NO: 2822
  GFR-binding peptide
  MOD_RES (1), (3), (34), (35): Xaa is C or S

SEQ ID NO: 23813 - protein, 39 aa, Artificial Sequence; identical to SEQ ID NO: 2823
  GFR-binding peptide
  MOD_RES (33), (34): Xaa is C or S
  MOD_RES (11), (12), (13), (14), (15): Xaa is A or G
  MOD_RES (16), (17), (18), (19): Xaa is A or G or is absent

SEQ ID NO: 23814 - protein, 38 aa, Artificial Sequence
  GFR-binding peptide
  MOD_RES (33), (34): Xaa is C or S
  MOD_RES (11), (12), (13), (14), (15): Xaa is A or G
  MOD_RES (16), (17), (18), (19): Xaa is A or G or is absent
SVAMGEYQKYXXXXXXXXXIYLISIPSLKTPVXXAKSA

SEQ ID NO: 23815 - protein, 33 aa, Artificial Sequence; identical to SEQ ID NO: 2824
  GFR-binding peptide
  MOD_RES (31), (32): Xaa is C or S

SEQ ID NO: 23816 - protein, 34 aa, Artificial Sequence
  GFR-binding peptide
  MOD_RES (1), (32), (33): Xaa is C or S
XSKVIMEYKFKIKPTKGILYLISIPELDQSVXXP

SEQ ID NO: 23817 - protein, 40 aa, Artificial Sequence; identical to SEQ ID NO: 2825
  GFR-binding peptide
  MOD_RES (1), (35), (36): Xaa is C or S
  MOD_RES (13), (14), (15), (16), (17): Xaa is A or G
  MOD_RES (18), (19), (20), (21): Xaa is A or G or is absent

SEQ ID NO: 23818 - protein, 35 aa, Artificial Sequence
  GFR-binding peptide
  MOD_RES (1), (33), (34): Xaa is C or S
XARVVMNEYQKYIVNSSDDIYLVSIPSLQTPAXXP

SEQ ID NO: 23819 - protein, 32 aa, Artificial Sequence; identical to SEQ ID NO: 2828
  GFR-binding peptide
  MOD_RES (31), (32): Xaa is C or S

SEQ ID NO: 23820 - protein, 38 aa, Artificial Sequence; identical to SEQ ID NO: 2832
  GFR-binding peptide
  MOD_RES (1), (35), (36): Xaa is C or S
  MOD_RES (13), (14), (15), (16), (17): Xaa is A or G
  MOD_RES (18), (19), (20), (21): Xaa is A or G or is absent

SEQ ID NO: 23821 - protein, 38 aa, Artificial Sequence
  GFR-binding peptide
  MOD_RES (2), (36), (37): Xaa is C or S
  MOD_RES (14), (15), (16), (17), (18): Xaa is A or G
  MOD_RES (19), (20), (21), (22): Xaa is A or G or is absent
GXGEVVMEEYQKYXXXXXXXXXIYLMSIPSLETPVXXA

SEQ ID NO: 23822 - protein, 40 aa, Artificial Sequence
  GFR-binding peptide
  MOD_RES (2), (4), (36), (37): Xaa is C or S
HXGXSRVVMNEYQKYIVNSSDDIYLVSIPSLKTPAXXPKP

SEQ ID NO: 23823 - protein, 35 aa, Artificial Sequence
  GFR-binding peptide
  MOD_RES (1), (33), (34): Xaa is C or S
XGEVVMEEYKFKVVKDYEDLYLMSIPELETPVXXA

SEQ ID NO: 23824 - protein, 39 aa, Artificial Sequence; identical to SEQ ID NO: 2834
  GFR-binding peptide
  MOD_RES (2), (4), (36), (37): Xaa is C or S

SEQ ID NO: 23825 - protein, 40 aa, Artificial Sequence
  GFR-binding peptide
  MOD_RES (34), (34): Xaa is C or S
  MOD_RES (12), (13), (14), (15), (16): Xaa is A or G
  MOD_RES (17), (18), (19), (20): Xaa is A or G or is absent
SRVVMNEYQKYXXXXXXXXXIYLVSIPSLKTPAXTPKTVH

SEQ ID NO: 23826 - protein, 34 aa, Artificial Sequence
  GFR-binding peptide
  MOD_RES (2), (34): Xaa is C or S
GXESVAMGYHYKLYTVVGKDKYLISIPSLKTPVX

SEQ ID NO: 23827 - protein, 38 aa, Artificial Sequence
  GFR-binding peptide
  MOD_RES (2), (35), (36): Xaa is C or S
  MOD_RES (13), (14), (15), (16), (17): Xaa is A or G
  MOD_RES (18), (19), (20), (21): Xaa is A or G or is absent
KXSKVIMEYKFKXXXXXXXXXLYLISIPELDQSVXXPS

SEQ ID NO: 23828 - protein, 43 aa, Artificial Sequence
  GFR-binding peptide
  MOD_RES (1), (3), (37), (38): Xaa is C or S
  MOD_RES (15), (16), (17), (18), (19): Xaa is A or G
  MOD_RES (20), (21), (22), (23): Xaa is A or G or is absent
XGXARVVMNEYQKYXXXXXXXXXIYLVSIPSLQTPAXXPKPVT

SEQ ID NO: 23829 - protein, 38 aa, Artificial Sequence; identical to SEQ ID NO: 2840
  GFR-binding peptide
  MOD_RES (1), (3), (36), (37): Xaa is C or S

SEQ ID NO: 23830 - protein, 35 aa, Artificial Sequence
  GFR-binding peptide
  MOD_RES (34), (35): Xaa is C or S
  MOD_RES (12), (13), (14), (15), (16): Xaa is A or G
  MOD_RES (17), (18), (19), (20): Xaa is A or G or is absent
ESVAMGEYQKYXXXXXXXXXIYLISIPSLKTPVXX

SEQ ID NO: 23831 - protein, 34 aa, Artificial Sequence
  GFR-binding peptide
  MOD_RES (13), (14), (15), (16), (17): Xaa is A or G
  MOD_RES (18), (19), (20), (21): Xaa is A or G or is absent
EAVSMGEEYQKYXXXXXXXXXIYLVSIPSLKTPV

SEQ ID NO: 23832 - protein, 39 aa, Artificial Sequence; identical to SEQ ID NO: 2841
  GFR-binding peptide
  MOD_RES (1), (3), (34), (35): Xaa is C or S

SEQ ID NO: 23833 - protein, 33 aa, Artificial Sequence
  GFR-binding peptide
  MOD_RES (33), (33): Xaa is C or S
  MOD_RES (11), (12), (13), (14), (15): Xaa is A or G
  MOD_RES (16), (17), (18), (19): Xaa is A or G or is absent
SRVIMEYKFKXXXXXXXXXLYLISIPELAQPVX

SEQ ID NO: 23834 - protein, 34 aa, Artificial Sequence; identical to SEQ ID NO: 2843
  GFR-binding peptide
  MOD_RES (33), (34): Xaa is C or S
  MOD_RES (11), (12), (13), (14), (15): Xaa is A or G
  MOD_RES (16), (17), (18), (19): Xaa is A or G or is absent

SEQ ID NO: 23835 - protein, 34 aa, Artificial Sequence; identical to SEQ ID NO: 2844
  GFR-binding peptide
  MOD_RES (34), (34): Xaa is C or S
  MOD_RES (12), (13), (14), (15), (16): Xaa is A or G
  MOD_RES (17), (18), (19), (20): Xaa is A or G or is absent

SEQ ID NO: 23836 - protein, 37 aa, Artificial Sequence
  GFR-binding peptide
  MOD_RES (1), (33), (34): Xaa is C or S
XARVVMNEYKFKIVNSSDDLYLVSIPELQTPAXXPKP

SEQ ID NO: 23837 - protein, 38 aa, Artificial Sequence; identical to SEQ ID NO: 2845
  GFR-binding peptide
  MOD_RES (2), (4), (36): Xaa is C or S

SEQ ID NO: 23838 - protein, 34 aa, Artificial Sequence; identical to SEQ ID NO: 2849
  GFR-binding peptide
  MOD_RES (1), (1): Xaa is C or S
  MOD_RES (13), (14), (15), (16), (17): Xaa is A or G
  MOD_RES (18), (19), (20), (21): Xaa is A or G or is absent

SEQ ID NO: 23839 - protein, 40 aa, Artificial Sequence; identical to SEQ ID NO: 2850
  GFR-binding peptide
  MOD_RES (1), (3), (37), (38): Xaa is C or S
  MOD_RES (15), (16), (17), (18), (19): Xaa is A or G
  MOD_RES (20), (21), (22), (23): Xaa is A or G or is absent

SEQ ID NO: 23840 - protein, 39 aa, Artificial Sequence
  GFR-binding peptide
  MOD_RES (33), (34): Xaa is C or S
  MOD_RES (11), (12), (13), (14), (15): Xaa is A or G
  MOD_RES (16), (17), (18), (19): Xaa is A or G or is absent
EVVMDEYKFKXXXXXXXXXLYLMSIPELETPVXXAKPIK

SEQ ID NO: 23841 - protein, 35 aa, Artificial Sequence
  GFR-binding peptide
  MOD_RES (1), (33), (34): Xaa is C or S
XAEVVMDEYQKYVVNNAADIYLISIPSLRAPVXXS

SEQ ID NO: 23842 - protein, 43 aa, Artificial Sequence; identical to SEQ ID NO: 2853
  GFR-binding peptide
  MOD_RES (1), (3), (37), (38): Xaa is C or S
  MOD_RES (15), (16), (17), (18), (19): Xaa is A or G
  MOD_RES (20), (21), (22), (23): Xaa is A or G or is absent

SEQ ID NO: 23843 - protein, 37 aa, Artificial Sequence
  GFR-binding peptide
  MOD_RES (2), (36), (37): Xaa is C or S
  MOD_RES (14), (15), (16), (17), (18): Xaa is A or G
  MOD_RES (19), (20), (21), (22): Xaa is A or G or is absent
GXARVVMNEYQKYXXXXXXXXXIYLVSIPSLQTPAXX

SEQ ID NO: 23844 - protein, 35 aa, Artificial Sequence
  GFR-binding peptide
  MOD_RES (1), (33), (34): Xaa is C or S
XESVAMGEYKFKYTVVGKDLYLISIPELKTPVXXA

SEQ ID NO: 23845 - protein, 36 aa, Artificial Sequence
  GFR-binding peptide
  MOD_RES (1), (32), (33): Xaa is C or S
XSRVIMEYQKYVKPKRGVIYLISIPSLAQPVXXPAA

SEQ ID NO: 23846 - protein, 38 aa, Artificial Sequence; identical to SEQ ID NO: 2855
  GFR-binding peptide
  MOD_RES (2), (4), (36), (37): Xaa is C or S

SEQ ID NO: 23847 - protein, 41 aa, Artificial Sequence
  GFR-binding peptide
  MOD_RES (2), (4), (36), (37): Xaa is C or S
RXGXESVAMGYHYKLYTVVGKDKYLISIPSLKTPVXXAKSA

SEQ ID NO: 23848 - protein, 40 aa, Artificial Sequence
  GFR-binding peptide
  MOD_RES (1), (3), (35), (36): Xaa is C or S
XGXSRVVMNEYQKYIVNSSDDIYLVSIPSLKTPAXXPKPV

SEQ ID NO: 23849 - protein, 37 aa, Artificial Sequence
  GFR-binding peptide
  MOD_RES (2), (35), (36): Xaa is C or S
GXEAVSMGEEYQKYTPVGMDDIYLVSIPSLKTPVXXA

SEQ ID NO: 23850 - protein, 37 aa, Artificial Sequence
  GFR-binding peptide
  MOD_RES (32), (33): Xaa is C or S
ARVVMNEYQKYIVNSSDDIYLVSIPSLQTPAXXPKPV

SEQ ID NO: 23851 - protein, 35 aa, Artificial Sequence
  GFR-binding peptide
  MOD_RES (1), (33), (34): Xaa is C or S
XARVVMNEYKFKIVNSSDDLYLVSIPELQTPAXXP

SEQ ID NO: 23852 - protein, 44 aa, Artificial Sequence; identical to SEQ ID NO: 2864
  GFR-binding peptide
  MOD_RES (2), (4), (38): Xaa is C or S
  MOD_RES (16), (17), (18), (19), (20): Xaa is A or G
  MOD_RES (21), (22), (23), (24): Xaa is A or G or is absent

SEQ ID NO: 23853 - protein, 36 aa, Artificial Sequence; identical to SEQ ID NO: 2865
  GFR-binding peptide
  MOD_RES (2), (35), (36): Xaa is C or S
  MOD_RES (13), (14), (15), (16), (17): Xaa is A or G
  MOD_RES (18), (19), (20), (21): Xaa is A or G or is absent

SEQ ID NO: 23854 - protein, 41 aa, Artificial Sequence
  GFR-binding peptide
  MOD_RES (2), (4), (36), (37): Xaa is C or S
HXGXAKVVMNEYQKYIVNNSSDIYLVSIPSLKTPAXXAKPV

SEQ ID NO: 23855 - protein, 41 aa, Artificial Sequence
  GFR-binding peptide
  MOD_RES (1), (3), (36), (37): Xaa is C or S
  MOD_RES (14), (15), (16), (17), (18): Xaa is A or G
  MOD_RES (19), (20), (21), (22): Xaa is A or G or is absent
XKXSKVVMEYQKYXXXXXXXXXIYLISIPSLDQPVXXPSAS

SEQ ID NO: 23856 - protein, 31 aa, Artificial Sequence
  GFR-binding peptide
  MOD_RES (31), (31): Xaa is C or S
RVVMNEYKFKIVNSSDDLYLVSIPELQTPAX

SEQ ID NO: 23857 - protein, 39 aa, Artificial Sequence; identical to SEQ ID NO: 2870
  GFR-binding peptide
  MOD_RES (1), (34), (35): Xaa is C or S
  MOD_RES (12), (13), (14), (15), (16): Xaa is A or G
  MOD_RES (17), (18), (19), (20): Xaa is A or G or is absent

SEQ ID NO: 23858 - protein, 35 aa, Artificial Sequence; identical to SEQ ID NO: 2871
  GFR-binding peptide
  MOD_RES (1), (34), (35): Xaa is C or S
  MOD_RES (12), (13), (14), (15), (16): Xaa is A or G
  MOD_RES (17), (18), (19), (20): Xaa is A or G or is absent

SEQ ID NO: 23859 - protein, 33 aa, Artificial Sequence; identical to SEQ ID NO: 2872
  GFR-binding peptide
  MOD_RES (33), (33): Xaa is C or S
  MOD_RES (11), (12), (13), (14), (15): Xaa is A or G
  MOD_RES (16), (17), (18), (19): Xaa is A or G or is absent

SEQ ID NO: 23860 - protein, 39 aa, Artificial Sequence
  GFR-binding peptide
  MOD_RES (2), (37), (38): Xaa is C or S
  MOD_RES (15), (16), (17), (18), (19): Xaa is A or G
  MOD_RES (20), (21), (22), (23): Xaa is A or G or is absent
GXEAVSMGEEYQKYXXXXXXXXXIYLVSIPSLKTPVXXA

SEQ ID NO: 23861 - protein, 35 aa, Artificial Sequence
  GFR-binding peptide
  MOD_RES (33), (34): Xaa is C or S
  MOD_RES (11), (12), (13), (14), (15): Xaa is A or G
  MOD_RES (16), (17), (18), (19): Xaa is A or G or is absent
SKVIMEYQKYXXXXXXXXXIYLISIPSLDQSVXXP

SEQ ID NO: 23862 - protein, 34 aa, Artificial Sequence; identical to SEQ ID NO: 2875
  GFR-binding peptide
  MOD_RES (1), (32), (33): Xaa is C or S

SEQ ID NO: 23863 - protein, 37 aa, Artificial Sequence
  GFR-binding peptide
  MOD_RES (31), (32): Xaa is C or S
RVVMNEYKFKIVNSSDDLYLVSIPELQTPAXXPKPVT

SEQ ID NO: 23864 - protein, 39 aa, Artificial Sequence
  GFR-binding peptide
  MOD_RES (1), (33), (34): Xaa is C or S
XESVAMGRYKKLYTVVGKDFYLISIANLKTPVXXAKSAK

SEQ ID NO: 23865 - protein, 34 aa, Artificial Sequence; identical to SEQ ID NO: 2876
  GFR-binding peptide
  MOD_RES (32), (33): Xaa is C or S

SEQ ID NO: 23866 - protein, 42 aa, Artificial Sequence
  GFR-binding peptide
  MOD_RES (2), (4), (38), (39): Xaa is C or S
  MOD_RES (16), (17), (18), (19), (20): Xaa is A or G
  MOD_RES (21), (22), (23), (24): Xaa is A or G or is absent
RXGXAEVVMDRYKKLXXXXXXXXXFYLISIANLRAPVXXSAP

SEQ ID NO: 23867 - protein, 40 aa, Artificial Sequence
  GFR-binding peptide
  MOD_RES (34), (35): Xaa is C or S
  MOD_RES (12), (13), (14), (15), (16): Xaa is A or G
  MOD_RES (17), (18), (19), (20): Xaa is A or G or is absent
AKVVMNEYQKYXXXXXXXXXIYLVSIPSLKTPAXXAKPVA

SEQ ID NO: 23868 - protein, 36 aa, Artificial Sequence
  GFR-binding peptide
  MOD_RES (1), (34), (35): Xaa is C or S
  MOD_RES (12), (13), (14), (15), (16): Xaa is A or G
  MOD_RES (17), (18), (19), (20): Xaa is A or G or is absent
XSKVIMEYQKYXXXXXXXXXIYLISIPSLDQSVXXP

SEQ ID NO: 23869 - protein, 33 aa, Artificial Sequence
  GFR-binding peptide
  MOD_RES (32), (33): Xaa is C or S
SRVVMNEYKFKIVNSSDDLYLVSIPELKTPAXX

SEQ ID NO: 23870 - protein, 39 aa, Artificial Sequence
  GFR-binding peptide
  MOD_RES (1), (3), (34), (35): Xaa is C or S
XKXSKVVMEYKFKVKPTRGVLYLISIPELDQPVXXPSAS

SEQ ID NO: 23871 - protein, 37 aa, Artificial Sequence; identical to SEQ ID NO: 2882
  GFR-binding peptide
  MOD_RES (2), (33), (34): Xaa is C or S

SEQ ID NO: 23872 - protein, 40 aa, Artificial Sequence
  GFR-binding peptide
  MOD_RES (1), (34), (35): Xaa is C or S
  MOD_RES (12), (13), (14), (15), (16): Xaa is A or G
  MOD_RES (17), (18), (19), (20): Xaa is A or G or is absent
XSRVIMEYQKYXXXXXXXXXIYLISIPSLAQPVXXPAASA

SEQ ID NO: 23873 - protein, 37 aa, Artificial Sequence
  GFR-binding peptide
  MOD_RES (32), (33): Xaa is C or S
GEVVMEEYQKYVVKDYEDIYLMSIPSLETPVXXAKPI

SEQ ID NO: 23874 - protein, 37 aa, Artificial Sequence
  GFR-binding peptide
  MOD_RES (31), (32): Xaa is C or S
SKVVMEYKFKVKPTRGVLYLISIPELDQPVXXPSASA

SEQ ID NO: 23875 - protein, 33 aa, Artificial Sequence
  GFR-binding peptide
  MOD_RES (1), (33): Xaa is C or S
XAEVVMDYHYKLVVNNAADKYLISIPSLRAPVX

SEQ ID NO: 23876 - protein, 36 aa, Artificial Sequence
  GFR-binding peptide
  MOD_RES (33), (34): Xaa is C or S
  MOD_RES (11), (12), (13), (14), (15): Xaa is A or G
  MOD_RES (16), (17), (18), (19): Xaa is A or G or is absent
EVVMDEYQKYXXXXXXXXXIYLMSIPSLETPVXXAK

SEQ ID NO: 23877 - protein, 40 aa, Artificial Sequence; identical to SEQ ID NO: 2887
  GFR-binding peptide
  MOD_RES (2), (4), (38), (39): Xaa is C or S
  MOD_RES (16), (17), (18), (19), (20): Xaa is A or G
  MOD_RES (21), (22), (23), (24): Xaa is A or G or is absent

SEQ ID NO: 23878 - protein, 34 aa, Artificial Sequence
  GFR-binding peptide
  MOD_RES (1), (1): Xaa is C or S
  MOD_RES (13), (14), (15), (16), (17): Xaa is A or G
  MOD_RES (18), (19), (20), (21): Xaa is A or G or is absent
XARVVMNEYKFKXXXXXXXXXLYLVSIPELQTPA

SEQ ID NO: 23879 - protein, 34 aa, Artificial Sequence; identical to SEQ ID NO: 2888
  GFR-binding peptide
  MOD_RES (1), (3): Xaa is C or S

SEQ ID NO: 23880 - protein, 38 aa, Artificial Sequence
  GFR-binding peptide
  MOD_RES (2), (4), (36): Xaa is C or S
HXGXSRVVMNEYKFKIVNSSDDLYLVSIPELKTPAXTP

SEQ ID NO: 23881 - protein, 43 aa, Artificial Sequence
  GFR-binding peptide
  MOD_RES (2), (4), (38), (39): Xaa is C or S
  MOD_RES (16), (17), (18), (19), (20): Xaa is A or G
  MOD_RES (21), (22), (23), (24): Xaa is A or G or is absent
RXGXGEVVMEEYQKYXXXXXXXXXIYLMSIPSLETPVXXAKPI

SEQ ID NO: 23882 - protein, 37 aa, Artificial Sequence
  GFR-binding peptide
  MOD_RES (1), (3), (37): Xaa is C or S
  MOD_RES (15), (16), (17), (18), (19): Xaa is A or G
  MOD_RES (20), (21), (22), (23): Xaa is A or G or is absent
XGXARVVMNEYKFKXXXXXXXXXLYLVSIPELQTPAX

SEQ ID NO: 23883 - protein, 41 aa, Artificial Sequence; identical to SEQ ID NO: 2890
  GFR-binding peptide
  MOD_RES (2), (4), (38), (39): Xaa is C or S
  MOD_RES (16), (17), (18), (19), (20): Xaa is A or G
  MOD_RES (21), (22), (23), (24): Xaa is A or G or is absent

SEQ ID NO: 23884 - protein, 37 aa, Artificial Sequence
  GFR-binding peptide
  MOD_RES (1), (35), (36): Xaa is C or S
  MOD_RES (13), (14), (15), (16), (17): Xaa is A or G
  MOD_RES (18), (19), (20), (21): Xaa is A or G or is absent
XGEVVMDEYQKYXXXXXXXXXIYLMSIPSLETPVXXA

SEQ ID NO: 23885 - protein, 37 aa, Artificial Sequence
  GFR-binding peptide
  MOD_RES (1), (3), (34), (35): Xaa is C or S
XKXSRVIMEYKFKVKPKRGVLYLISIPELAQPVXXPA

SEQ ID NO: 23886 - protein, 40 aa, Artificial Sequence
  GFR-binding peptide
  MOD_RES (34), (35): Xaa is C or S
  MOD_RES (12), (13), (14), (15), (16): Xaa is A or G
  MOD_RES (17), (18), (19), (20): Xaa is A or G or is absent
ESVAMGYHYKLXXXXXXXXXKYLISIPSLKTPVXXAKSAK

SEQ ID NO: 23887 - protein, 39 aa, Artificial Sequence; identical to SEQ ID NO: 2893
  GFR-binding peptide
  MOD_RES (2), (35), (36): Xaa is C or S
  MOD_RES (13), (14), (15), (16), (17): Xaa is A or G
  MOD_RES (18), (19), (20), (21): Xaa is A or G or is absent

SEQ ID NO: 23888 - protein, 35 aa, Artificial Sequence
  GFR-binding peptide
  MOD_RES (32), (33): Xaa is C or S
GEVVMEEYQKYVVKDYEDIYLMSIPSLETPVXXAK

SEQ ID NO: 23889 - protein, 37 aa, Artificial Sequence; identical to SEQ ID NO: 2894
  GFR-binding peptide
  MOD_RES (2), (35), (36): Xaa is C or S
  MOD_RES (13), (14), (15), (16), (17): Xaa is A or G
  MOD_RES (18), (19), (20), (21): Xaa is A or G or is absent

SEQ ID NO: 23890 - protein, 39 aa, Artificial Sequence; identical to SEQ ID NO: 2895
  GFR-binding peptide
  MOD_RES (1), (36), (37): Xaa is C or S
  MOD_RES (14), (15), (16), (17), (18): Xaa is A or G
  MOD_RES (19), (20), (21), (22): Xaa is A or G or is absent

SEQ ID NO: 23891 - protein, 40 aa, Artificial Sequence
  GFR-binding peptide
  MOD_RES (2), (36), (37): Xaa is C or S
  MOD_RES (14), (15), (16), (17), (18): Xaa is A or G
  MOD_RES (19), (20), (21), (22): Xaa is A or G or is absent
GXESVAMGEYQKYXXXXXXXXXIYLISIPSLKTPVXXAKS

SEQ ID NO: 23892 - protein, 37 aa, Artificial Sequence; identical to SEQ ID NO: 2896
  GFR-binding peptide
  MOD_RES (2), (4), (35), (36): Xaa is C or S

SEQ ID NO: 23893 - protein, 36 aa, Artificial Sequence; identical to SEQ ID NO: 2897
  GFR-binding peptide
  MOD_RES (1), (35), (36): Xaa is C or S
  MOD_RES (13), (14), (15), (16), (17): Xaa is A or G
  MOD_RES (18), (19), (20), (21): Xaa is A or G or is absent

SEQ ID NO: 23894 - protein, 35 aa, Artificial Sequence
  GFR-binding peptide
  MOD_RES (32), (33): Xaa is C or S
GEVVMDEYKFKVVKENEDLYLMSIPELETPVXXAK

SEQ ID NO: 23895 - protein, 39 aa, Artificial Sequence
  GFR-binding peptide
  MOD_RES (33), (34): Xaa is C or S
  MOD_RES (11), (12), (13), (14), (15): Xaa is A or G
  MOD_RES (16), (17), (18), (19): Xaa is A or G or is absent
SKVIMEYQKYXXXXXXXXXIYLISIPSLDQSVXXPSASA

SEQ ID NO: 23896 - protein, 35 aa, Artificial Sequence
  GFR-binding peptide
  MOD_RES (33), (34): Xaa is C or S
  MOD_RES (11), (12), (13), (14), (15): Xaa is A or G
  MOD_RES (16), (17), (18), (19): Xaa is A or G or is absent
EVVMDEYQKYXXXXXXXXXIYLMSIPSLETPVXXA

SEQ ID NO: 23897 - protein, 35 aa, Artificial Sequence; identical to SEQ ID NO: 2901
  GFR-binding peptide
  MOD_RES (1), (35): Xaa is C or S
  MOD_RES (13), (14), (15), (16), (17): Xaa is A or G
  MOD_RES (18), (19), (20), (21): Xaa is A or G or is absent

SEQ ID NO: 23898 - protein, 37 aa, Artificial Sequence
  GFR-binding peptide
  MOD_RES (1), (3), (37): Xaa is C or S
  MOD_RES (15), (16), (17), (18), (19): Xaa is A or G
  MOD_RES (20), (21), (22), (23): Xaa is A or G or is absent
XGXARVVMNEYQKYXXXXXXXXXIYLVSIPSLQTPAX

SEQ ID NO: 23899 - protein, 36 aa, Artificial Sequence
  GFR-binding peptide
  MOD_RES (2), (36): Xaa is C or S
  MOD_RES (14), (15), (16), (17), (18): Xaa is A or G
  MOD_RES (19), (20), (21), (22): Xaa is A or G or is absent
GXAEVVMDYHYKLXXXXXXXXXKYLISIPSLRAPVX

SEQ ID NO: 23900 - protein, 41 aa, Artificial Sequence
  GFR-binding peptide
  MOD_RES (1), (3), (35), (36): Xaa is C or S
XGXAEVVMDYHYKLVVNNAADKYLISIPSLRAPVXXSAPAA

SEQ ID NO: 23901 - protein, 39 aa, Artificial Sequence
  GFR-binding peptide
  MOD_RES (2), (4), (35), (36): Xaa is C or S
SXKXSKVIMEYKFKIKPTKGILYLISIPELDQSVXXPSA

SEQ ID NO: 23902 - protein, 42 aa, Artificial Sequence
  GFR-binding peptide
  MOD_RES (2), (4), (38), (39): Xaa is C or S
  MOD_RES (16), (17), (18), (19), (20): Xaa is A or G
  MOD_RES (21), (22), (23), (24): Xaa is A or G or is absent
HXGXARVVMNEYKFKXXXXXXXXXLYLVSIPELQTPAXXPKP

SEQ ID NO: 23903 - protein, 38 aa, Artificial Sequence
  GFR-binding peptide
  MOD_RES (33), (34): Xaa is C or S
  MOD_RES (11), (12), (13), (14), (15): Xaa is A or G
  MOD_RES (16), (17), (18), (19): Xaa is A or G or is absent
SKVIMEYKFKXXXXXXXXXLYLISIPELDQSVXXPSAS

SEQ ID NO: 23904 - protein, 31 aa, Artificial Sequence; identical to SEQ ID NO: 2907
  GFR-binding peptide
  MOD_RES (31), (31): Xaa is C or S

SEQ ID NO: 23905 - protein, 38 aa, Artificial Sequence; identical to SEQ ID NO: 2908
  GFR-binding peptide
  MOD_RES (2), (4), (36), (37): Xaa is C or S

SEQ ID NO: 23906 - protein, 34 aa, Artificial Sequence
  GFR-binding peptide
  MOD_RES (1), (33): Xaa is C or S
XSRVVMNEYKFKIVNSSDDLYLVSIPELKTPAXT

SEQ ID NO: 23907 - protein, 36 aa, Artificial Sequence; identical to SEQ ID NO: 2910
  GFR-binding peptide
  MOD_RES (2), (4): Xaa is C or S
  MOD_RES (15), (16), (17), (18), (19): Xaa is A or G
  MOD_RES (20), (21), (22), (23): Xaa is A or G or is absent

SEQ ID NO: 23908 - protein, 39 aa, Artificial Sequence
  GFR-binding peptide
  MOD_RES (2), (36), (37): Xaa is C or S
  MOD_RES (14), (15), (16), (17), (18): Xaa is A or G
  MOD_RES (19), (20), (21), (22): Xaa is A or G or is absent
GXGEVVMEEYKFKXXXXXXXXXLYLMSIPELETPVXXAK

SEQ ID NO: 23909 - protein, 35 aa, Artificial Sequence
  GFR-binding peptide
  MOD_RES (32), (33): Xaa is C or S
GEVVMEEYKFKVVKDYEDLYLMSIPELETPVXXAK

SEQ ID NO: 23910 - protein, 42 aa, Artificial Sequence; identical to SEQ ID NO: 2913
  GFR-binding peptide
  MOD_RES (2), (4), (37), (38): Xaa is C or S
  MOD_RES (15), (16), (17), (18), (19): Xaa is A or G
  MOD_RES (20), (21), (22), (23): Xaa is A or G or is absent

SEQ ID NO: 23911 - protein, 38 aa, Artificial Sequence
  GFR-binding peptide
  MOD_RES (1), (33), (34): Xaa is C or S
XAEVVMDYHYKLVVNNAADKYLISIPSLRAPVXXSAPA

SEQ ID NO: 23912 - protein, 39 aa, Artificial Sequence
  GFR-binding peptide
  MOD_RES (2), (33), (34): Xaa is C or S
KXSRVIMEYQKYVKPKRGVIYLISIPSLAQPVXXPAASA

SEQ ID NO: 23913 - protein, 35 aa, Artificial Sequence
  GFR-binding peptide
  MOD_RES (32), (33): Xaa is C or S
GEVVMDEYQKYVVKENEDIYLMSIPSLETPVXXAK

SEQ ID NO: 23914 - protein, 33 aa, Artificial Sequence; identical to SEQ ID NO: 2917
  GFR-binding peptide
  MOD_RES (33), (33): Xaa is C or S

SEQ ID NO: 23915 - protein, 39 aa, Artificial Sequence
  GFR-binding peptide
  MOD_RES (2), (34), (35): Xaa is C or S
GXAEVVMDEYKFKVVNNAADLYLISIPELRAPVXXSAPA

SEQ ID NO: 23916 - protein, 35 aa, Artificial Sequence; identical to SEQ ID NO: 2918
  GFR-binding peptide
  MOD_RES (33), (34): Xaa is C or S
  MOD_RES (11), (12), (13), (14), (15): Xaa is A or G
  MOD_RES (16), (17), (18), (19): Xaa is A or G or is absent

SEQ ID NO: 23917 - protein, 37 aa, Artificial Sequence
  GFR-binding peptide
  MOD_RES (1), (35), (36): Xaa is C or S
  MOD_RES (13), (14), (15), (16), (17): Xaa is A or G
  MOD_RES (18), (19), (20), (21): Xaa is A or G or is absent
XSRVVMNEYQKYXXXXXXXXXIYLVSIPSLKTPAXXP

SEQ ID NO: 23918 - protein, 37 aa, Artificial Sequence; identical to SEQ ID NO: 2920
  GFR-binding peptide
  MOD_RES (32), (33): Xaa is C or S

SEQ ID NO: 23919 - protein, 40 aa, Artificial Sequence
  GFR-binding peptide
  MOD_RES (2), (4), (36), (37): Xaa is C or S
RXGXESVAMGYHYKLYTVVGKDKYLISIPSLKTPVXXAKS

SEQ ID NO: 23920 - protein, 39 aa, Artificial Sequence; identical to SEQ ID NO: 2922
  GFR-binding peptide
  MOD_RES (2), (4), (38), (39): Xaa is C or S
  MOD_RES (16), (17), (18), (19), (20): Xaa is A or G
  MOD_RES (21), (22), (23), (24): Xaa is A or G or is absent

SEQ ID NO: 23921 - protein, 39 aa, Artificial Sequence
  GFR-binding peptide
  MOD_RES (34), (35): Xaa is C or S
  MOD_RES (12), (13), (14), (15), (16): Xaa is A or G
  MOD_RES (17), (18), (19), (20): Xaa is A or G or is absent
AEVVMDRYKKLXXXXXXXXXFYLISIANLRAPVXXSAPA

SEQ ID NO: 23922 - protein, 37 aa, Artificial Sequence
  GFR-binding peptide
  MOD_RES (2), (4): Xaa is C or S
  MOD_RES (16), (17), (18), (19), (20): Xaa is A or G
  MOD_RES (21), (22), (23), (24): Xaa is A or G or is absent
HXGXAKVVMNEYQKYXXXXXXXXXIYLVSIPSLKTPA

SEQ ID NO: 23923 - protein, 37 aa, Artificial Sequence
  GFR-binding peptide
  MOD_RES (2), (34), (35): Xaa is C or S
GXGEVVMEEYQKYVVKDYEDIYLMSIPSLETPVXXAK

SEQ ID NO: 23924 - protein, 40 aa, Artificial Sequence; identical to SEQ ID NO: 2924
  GFR-binding peptide
  MOD_RES (2), (4), (37), (38): Xaa is C or S
  MOD_RES (15), (16), (17), (18), (19): Xaa is A or G
  MOD_RES (20), (21), (22), (23): Xaa is A or G or is absent

SEQ ID NO: 23925 - protein, 35 aa, Artificial Sequence
  GFR-binding peptide
  MOD_RES (1), (3), (35): Xaa is C or S
XGXGEVVMEEYQKYVVKDYEDIYLMSIPSLETPVX

SEQ ID NO: 23926 - protein, 39 aa, Artificial Sequence; identical to SEQ ID NO: 2926
  GFR-binding peptide
  MOD_RES (2), (36), (37): Xaa is C or S
  MOD_RES (14), (15), (16), (17), (18): Xaa is A or G
  MOD_RES (19), (20), (21), (22): Xaa is A or G or is absent

SEQ ID NO: 23927 - protein, 35 aa, Artificial Sequence
  GFR-binding peptide
  MOD_RES (31), (32): Xaa is C or S
RVVMNEYQKYIVNSSDDIYLVSIPSLQTPAXXPKP

SEQ ID NO: 23928 - protein, 36 aa, Artificial Sequence
  GFR-binding peptide
  MOD_RES (1), (3), (35), (36): Xaa is C or S
XGXAEVVMDRYKKLVVNNAADFYLISIANLRAPVXX

SEQ ID NO: 23929 - protein, 40 aa, Artificial Sequence; identical to SEQ ID NO: 2928
  GFR-binding peptide
  MOD_RES (2), (4), (35), (36): Xaa is C or S

SEQ ID NO: 23930 - protein, 36 aa, Artificial Sequence
  GFR-binding peptide
  MOD_RES (2), (4), (35), (36): Xaa is C or S
SXKXSKVIMEYQKYIKPTKGIIYLISIPSLDQSVXX

SEQ ID NO: 23931 - protein, 41 aa, Artificial Sequence
  GFR-binding peptide
  MOD_RES (2), (36), (37): Xaa is C or S
  MOD_RES (14), (15), (16), (17), (18): Xaa is A or G
  MOD_RES (19), (20), (21), (22): Xaa is A or G or is absent
GXESVAMGEYKFKXXXXXXXXXLYLISIPELKTPVXXAKSA

SEQ ID NO: 23932 - protein, 39 aa, Artificial Sequence
  GFR-binding peptide
  MOD_RES (1), (35): Xaa is C or S
  MOD_RES (13), (14), (15), (16), (17): Xaa is A or G
  MOD_RES (18), (19), (20), (21): Xaa is A or G or is absent
XSRVVMNEYQKYXXXXXXXXXIYLVSIPSLKTPAXTPKT

SEQ ID NO: 23933 - protein, 37 aa, Artificial Sequence; identical to SEQ ID NO: 2931
  GFR-binding peptide
  MOD_RES (2), (4): Xaa is C or S
  MOD_RES (16), (17), (18), (19), (20): Xaa is A or G
  MOD_RES (21), (22), (23), (24): Xaa is A or G or is absent

SEQ ID NO: 23934 - protein, 36 aa, Artificial Sequence
  GFR-binding peptide
  MOD_RES (1), (33), (34): Xaa is C or S
XAEVVMDEYQKYVVNNAADIYLISIPSLRAPVXXSA

SEQ ID NO: 23935 - protein, 36 aa, Artificial Sequence
  GFR-binding peptide
  MOD_RES (1), (3), (35), (36): Xaa is C or S
XGXSRVVMNEYQKYIVNSSDDIYLVSIPSLKTPAXX

SEQ ID NO: 23936 - protein, 37 aa, Artificial Sequence
  GFR-binding peptide
  MOD_RES (2), (4), (35), (36): Xaa is C or S
SXKXSKVVMEYQKYVKPTRGVIYLISIPSLDQPVXXP

SEQ ID NO: 23937 - protein, 39 aa, Artificial Sequence
  GFR-binding peptide
  MOD_RES (1), (3), (37), (38): Xaa is C or S
  MOD_RES (15), (16), (17), (18), (19): Xaa is A or G
  MOD_RES (20), (21), (22), (23): Xaa is A or G or is absent
XGXESVAMGEYQKYXXXXXXXXXIYLISIPSLKTPVXXA

SEQ ID NO: 23938 - protein, 44 aa, Artificial Sequence
  GFR-binding peptide
  MOD_RES (2), (4), (38), (39): Xaa is C or S
  MOD_RES (16), (17), (18), (19), (20): Xaa is A or G
  MOD_RES (21), (22), (23), (24): Xaa is A or G or is absent
RXGXGEVVMDEYQKYXXXXXXXXXIYLMSIPSLETPVXXAKPIK

SEQ ID NO: 23939 - protein, 36 aa, Artificial Sequence; identical to SEQ ID NO: 2936
  GFR-binding peptide
  MOD_RES (34), (35): Xaa is C or S
  MOD_RES (12), (13), (14), (15), (16): Xaa is A or G
  MOD_RES (17), (18), (19), (20): Xaa is A or G or is absent

SEQ ID NO: 23940 - protein, 37 aa, Artificial Sequence; identical to SEQ ID NO: 2938
  GFR-binding peptide
  MOD_RES (1), (33), (34): Xaa is C or S

SEQ ID NO: 23941 - protein, 38 aa, Artificial Sequence; identical to SEQ ID NO: 2940
  GFR-binding peptide
  MOD_RES (2), (34), (35): Xaa is C or S

SEQ ID NO: 23942 - protein, 38 aa, Artificial Sequence; identical to SEQ ID NO: 2941
  GFR-binding peptide
  MOD_RES (34), (35): Xaa is C or S
  MOD_RES (12), (13), (14), (15), (16): Xaa is A or G
  MOD_RES (17), (18), (19), (20): Xaa is A or G or is absent

SEQ ID NO: 23943 - protein, 40 aa, Artificial Sequence; identical to SEQ ID NO: 2942
  GFR-binding peptide
  MOD_RES (2), (4), (38), (39): Xaa is C or S
  MOD_RES (16), (17), (18), (19), (20): Xaa is A or G
  MOD_RES (21), (22), (23), (24): Xaa is A or G or is absent

SEQ ID NO: 23944 - protein, 37 aa, Artificial Sequence
  GFR-binding peptide
  MOD_RES (33), (33): Xaa is C or S
  MOD_RES (11), (12), (13), (14), (15): Xaa is A or G
  MOD_RES (16), (17), (18), (19): Xaa is A or G or is absent
RVVMNEYQKYXXXXXXXXXIYLVSIPSLKTPAXTPKT

SEQ ID NO: 23945 - protein, 34 aa, Artificial Sequence
  GFR-binding peptide
  MOD_RES (2), (2): Xaa is C or S
  MOD_RES (13), (14), (15), (16), (17): Xaa is A or G
  MOD_RES (18), (19), (20), (21): Xaa is A or G or is absent
KXSKVVMEYQKYXXXXXXXXXIYLISIPSLDQPV

SEQ ID NO: 23946 - protein, 37 aa, Artificial Sequence
  GFR-binding peptide
  MOD_RES (1), (3), (35), (36): Xaa is C or S
XGXGEVVMDEYQKYVVKENEDIYLMSIPSLETPVXXA

SEQ ID NO: 23947 - protein, 38 aa, Artificial Sequence; identical to SEQ ID NO: 2945
  GFR-binding peptide
  MOD_RES (2), (4): Xaa is C or S
  MOD_RES (17), (18), (19), (20), (21): Xaa is A or G
  MOD_RES (22), (23), (24), (25): Xaa is A or G or is absent

SEQ ID NO: 23948 - protein, 34 aa, Artificial Sequence; identical to SEQ ID NO: 2947
  GFR-binding peptide
  MOD_RES (1), (1): Xaa is C or S
  MOD_RES (13), (14), (15), (16), (17): Xaa is A or G
  MOD_RES (18), (19), (20), (21): Xaa is A or G or is absent

SEQ ID NO: 23949 - protein, 42 aa, Artificial Sequence
  GFR-binding peptide
  MOD_RES (1), (36), (37): Xaa is C or S
  MOD_RES (14), (15), (16), (17), (18): Xaa is A or G
  MOD_RES (19), (20), (21), (22): Xaa is A or G or is absent
XEAVSMGEEYQKYXXXXXXXXXIYLVSIPSLKTPVXXAKGVK

SEQ ID NO: 23950 - protein, 39 aa, Artificial Sequence
  GFR-binding peptide
  MOD_RES (1), (3), (36), (37): Xaa is C or S
  MOD_RES (14), (15), (16), (17), (18): Xaa is A or G
  MOD_RES (19), (20), (21), (22): Xaa is A or G or is absent
XKXSKVVMEYKFKXXXXXXXXXLYLISIPELDQPVXXPS

SEQ ID NO: 23951 - protein, 34 aa, Artificial Sequence; identical to SEQ ID NO: 2948
  GFR-binding peptide
  MOD_RES (2), (4): Xaa is C or S

SEQ ID NO: 23952 - protein, 39 aa, Artificial Sequence
  GFR-binding peptide
  MOD_RES (1), (3), (38), (39): Xaa is C or S
  MOD_RES (16), (17), (18), (19), (20): Xaa is A or G
  MOD_RES (21), (22), (23), (24): Xaa is A or G or is absent
XGXEAVSMGEEYQKYXXXXXXXXXIYLVSIPSLKTPVXX

SEQ ID NO: 23953 - protein, 43 aa, Artificial Sequence
  GFR-binding peptide
  MOD_RES (2), (4), (37), (38): Xaa is C or S
  MOD_RES (15), (16), (17), (18), (19): Xaa is A or G
  MOD_RES (20), (21), (22), (23): Xaa is A or G or is absent
SXKXSRVIMEYQKYXXXXXXXXXIYLISIPSLAQPVXXPAASA

SEQ ID NO: 23954 - protein, 38 aa, Artificial Sequence; identical to SEQ ID NO: 2952
  GFR-binding peptide
  MOD_RES (1), (34), (35): Xaa is C or S
  MOD_RES (12), (13), (14), (15), (16): Xaa is A or G
  MOD_RES (17), (18), (19), (20): Xaa is A or G or is absent

SEQ ID NO: 23955 - protein, 32 aa, Artificial Sequence; identical to SEQ ID NO: 2953
  GFR-binding peptide
  MOD_RES (11), (12), (13), (14), (15): Xaa is A or G
  MOD_RES (16), (17), (18), (19): Xaa is A or G or is absent

SEQ ID NO: 23956 - protein, 40 aa, Artificial Sequence; identical to SEQ ID NO: 2955
  GFR-binding peptide
  MOD_RES (1), (34), (35): Xaa is C or S
  MOD_RES (12), (13), (14), (15), (16): Xaa is A or G
  MOD_RES (17), (18), (19), (20): Xaa is A or G or is absent

SEQ ID NO: 23957 - protein, 37 aa, Artificial Sequence
  GFR-binding peptide
  MOD_RES (1), (33), (34): Xaa is C or S
XAEVVMDYHYKLVVNNAADKYLISIPSLRAPVXXSAP

SEQ ID NO: 23958 - protein, 41 aa, Artificial Sequence
  GFR-binding peptide
  MOD_RES (2), (4), (37), (38): Xaa is C or S
  MOD_RES (15), (16), (17), (18), (19): Xaa is A or G
  MOD_RES (20), (21), (22), (23): Xaa is A or G or is absent
SXKXSKVVMEYQKYXXXXXXXXXIYLISIPSLDQPVXXPSA

SEQ ID NO: 23959 - protein, 33 aa, Artificial Sequence
  GFR-binding peptide
  MOD_RES (32), (33): Xaa is C or S
GEVVMDEYQKYVVKENEDIYLMSIPSLETPVXX

SEQ ID NO: 23960 - protein, 38 aa, Artificial Sequence
  GFR-binding peptide
  MOD_RES (1), (3), (35): Xaa is C or S
XGXSRVVMNEYKFKIVNSSDDLYLVSIPELKTPAXTPK

SEQ ID NO: 23961 - protein, 38 aa, Artificial Sequence
  GFR-binding peptide
  MOD_RES (1), (35), (36): Xaa is C or S
  MOD_RES (13), (14), (15), (16), (17): Xaa is A or G
  MOD_RES (18), (19), (20), (21): Xaa is A or G or is absent
XAEVVMDEYQKYXXXXXXXXXIYLISIPSLRAPVXXSA

SEQ ID NO: 23962 - protein, 35 aa, Artificial Sequence; identical to SEQ ID NO: 2961
  GFR-binding peptide
  MOD_RES (31), (32): Xaa is C or S

SEQ ID NO: 23963 - protein, 37 aa, Artificial Sequence; identical to SEQ ID NO: 2963
  GFR-binding peptide
  MOD_RES (1), (35): Xaa is C or S
  MOD_RES (13), (14), (15), (16), (17): Xaa is A or G
  MOD_RES (18), (19), (20), (21): Xaa is A or G or is absent

SEQ ID NO: 23964 - protein, 34 aa, Artificial Sequence
  GFR-binding peptide
  MOD_RES (1), (32), (33): Xaa is C or S
XSKVVMEYQKYVKPTRGVIYLISIPSLDQPVXXP

SEQ ID NO: 23965 - protein, 32 aa, Artificial Sequence; identical to SEQ ID NO: 2969
  GFR-binding peptide
  MOD_RES (11), (12), (13), (14), (15): Xaa is A or G
  MOD_RES (16), (17), (18), (19): Xaa is A or G or is absent

SEQ ID NO: 23966 - protein, 33 aa, Artificial Sequence
  GFR-binding peptide
  MOD_RES (2), (2): Xaa is C or S
GXAKVVMNEYKFKIVNNSSDLYLVSIPELKTPA

SEQ ID NO: 23967 - protein, 39 aa, Artificial Sequence
  GFR-binding peptide
  MOD_RES (34), (35): Xaa is C or S
  MOD_RES (12), (13), (14), (15), (16): Xaa is A or G
  MOD_RES (17), (18), (19), (20): Xaa is A or G or is absent
GEVVMEEYQKYXXXXXXXXXIYLMSIPSLETPVXXAKPI

SEQ ID NO: 23968 - protein, 36 aa, Artificial Sequence
  GFR-binding peptide
  MOD_RES (1), (3), (36): Xaa is C or S
  MOD_RES (14), (15), (16), (17), (18): Xaa is A or G
  MOD_RES (19), (20), (21), (22): Xaa is A or G or is absent
XKXSKVIMEYQKYXXXXXXXXXIYLISIPSLDQSVX

SEQ ID NO: 23969 - protein, 32 aa, Artificial Sequence; identical to SEQ ID NO: 2973
  GFR-binding peptide
  MOD_RES (31), (32): Xaa is C or S

SEQ ID NO: 23970 - protein, 39 aa, Artificial Sequence
  GFR-binding peptide
  MOD_RES (1), (3), (37), (38): Xaa is C or S
  MOD_RES (15), (16), (17), (18), (19): Xaa is A or G
  MOD_RES (20), (21), (22), (23): Xaa is A or G or is absent
XGXARVVMNEYQKYXXXXXXXXXIYLVSIPSLQTPAXXP

SEQ ID NO: 23971 - protein, 36 aa, Artificial Sequence
  GFR-binding peptide
  MOD_RES (34), (35): Xaa is C or S
  MOD_RES (12), (13), (14), (15), (16): Xaa is A or G
  MOD_RES (17), (18), (19), (20): Xaa is A or G or is absent
AEVVMDRYKKLXXXXXXXXXFYLISIANLRAPVXXS

SEQ ID NO: 23972 - protein, 42 aa, Artificial Sequence
  GFR-binding peptide
  MOD_RES (1), (3), (38), (39): Xaa is C or S
  MOD_RES (16), (17), (18), (19), (20): Xaa is A or G
  MOD_RES (21), (22), (23), (24): Xaa is A or G or is absent
XGXEAVSMGEEYQKYXXXXXXXXXIYLVSIPSLKTPVXXAKG

SEQ ID NO: 23973 - protein, 40 aa, Artificial Sequence; identical to SEQ ID NO: 2974
  GFR-binding peptide
  MOD_RES (2), (34), (35): Xaa is C or S

SEQ ID NO: 23974 - protein, 37 aa, Artificial Sequence
  GFR-binding peptide
  MOD_RES (1), (3), (36), (37): Xaa is C or S
  MOD_RES (14), (15), (16), (17), (18): Xaa is A or G
  MOD_RES (19), (20), (21), (22): Xaa is A or G or is absent
XKXSRVIMEYKFKXXXXXXXXXLYLISIPELAQPVXX

SEQ ID NO: 23975 - protein, 33 aa, Artificial Sequence; identical to SEQ ID NO: 2975
  GFR-binding peptide
  MOD_RES (33), (33): Xaa is C or S
  MOD_RES (11), (12), (13), (14), (15): Xaa is A or G
  MOD_RES (16), (17), (18), (19): Xaa is A or G or is absent

SEQ ID NO: 23976 - protein, 35 aa, Artificial Sequence; identical to SEQ ID NO: 2977
  GFR-binding peptide
  MOD_RES (33), (34): Xaa is C or S

SEQ ID NO: 23977 - protein, 36 aa, Artificial Sequence; identical to SEQ ID NO: 2978
  GFR-binding peptide
  MOD_RES (33), (34): Xaa is C or S
  MOD_RES (11), (12), (13), (14), (15): Xaa is A or G
  MOD_RES (16), (17), (18), (19): Xaa is A or G or is absent

SEQ ID NO: 23978 - protein, 39 aa, Artificial Sequence
  GFR-binding peptide
  MOD_RES (1), (3), (37), (38): Xaa is C or S
  MOD_RES (15), (16), (17), (18), (19): Xaa is A or G
  MOD_RES (20), (21), (22), (23): Xaa is A or G or is absent
XGXESVAMGEYKFKXXXXXXXXXLYLISIPELKTPVXXA

SEQ ID NO: 23979 - protein, 40 aa, Artificial Sequence; identical to SEQ ID NO: 2980
  GFR-binding peptide
  MOD_RES (34), (35): Xaa is C or S
  MOD_RES (12), (13), (14), (15), (16): Xaa is A or G
  MOD_RES (17), (18), (19), (20): Xaa is A or G or is absent

SEQ ID NO: 23980 - protein, 37 aa, Artificial Sequence
  GFR-binding peptide
  MOD_RES (32), (33): Xaa is C or S
SRVVMNEYQKYIVNSSDDIYLVSIPSLKTPAXXPKPV

SEQ ID NO: 23981 - protein, 37 aa, Artificial Sequence
  GFR-binding peptide
  MOD_RES (32), (33): Xaa is C or S
ARVVMNEYKFKIVNSSDDLYLVSIPELQTPAXXPKPV

SEQ ID NO: 23982 - protein, 40 aa, Artificial Sequence; identical to SEQ ID NO: 2983
  GFR-binding peptide
  MOD_RES (1), (3), (34), (35): Xaa is C or S

SEQ ID NO: 23983 - protein, 34 aa, Artificial Sequence; identical to SEQ ID NO: 2985
  GFR-binding peptide
  MOD_RES (2), (2): Xaa is C or S

SEQ ID NO: 23984 - protein, 33 aa, Artificial Sequence
  GFR-binding peptide
  MOD_RES (1), (32), (33): Xaa is C or S
XSKVIMEYQKYIKPTKGIIYLISIPSLDQSVXX

SEQ ID NO: 23985 - protein, 30 aa, Artificial Sequence; identical to SEQ ID NO: 2986
  GFR-binding peptide

SEQ ID NO: 23986 - protein, 36 aa, Artificial Sequence; identical to SEQ ID NO: 2988
  GFR-binding peptide
  MOD_RES (1), (32), (33): Xaa is C or S

SEQ ID NO: 23987 - protein, 40 aa, Artificial Sequence; identical to SEQ ID NO: 2989
  GFR-binding peptide
  MOD_RES (1), (35), (36): Xaa is C or S
  MOD_RES (13), (14), (15), (16), (17): Xaa is A or G
  MOD_RES (18), (19), (20), (21): Xaa is A or G or is absent

SEQ ID NO: 23988 - protein, 37 aa, Artificial Sequence; identical to SEQ ID NO: 2990
  GFR-binding peptide
  MOD_RES (2), (4): Xaa is C or S
  MOD_RES (16), (17), (18), (19), (20): Xaa is A or G
  MOD_RES (21), (22), (23), (24): Xaa is A or G or is absent

SEQ ID NO: 23989 - protein, 32 aa, Artificial Sequence
  GFR-binding peptide
  MOD_RES (2), (2): Xaa is C or S
KXSRVIMEYQKYVKPKRGVIYLISIPSLAQPV

SEQ ID NO: 23990 - protein, 31 aa, Artificial Sequence
  GFR-binding peptide
  MOD_RES (31), (31): Xaa is C or S
RVVMNEYQKYIVNSSDDIYLVSIPSLQTPAX

SEQ ID NO: 23991 - protein, 40 aa, Artificial Sequence
  GFR-binding peptide
  MOD_RES (2), (34), (35): Xaa is C or S
GXARVVMNEYQKYIVNSSDDIYLVSIPSLQTPAXXPKPVT

SEQ ID NO: 23992 - protein, 36 aa, Artificial Sequence
  GFR-binding peptide
  MOD_RES (33), (34): Xaa is C or S
EAVSMGEEYKFKTPVGMDDLYLVSIPELKTPVXXAK

SEQ ID NO: 23993 - protein, 33 aa, Artificial Sequence; identical to SEQ ID NO: 2995
  GFR-binding peptide
  MOD_RES (1), (32), (33): Xaa is C or S

SEQ ID NO: 23994 - protein, 38 aa, Artificial Sequence; identical to SEQ ID NO: 2996
  GFR-binding peptide
  MOD_RES (33), (34): Xaa is C or S
  MOD_RES (11), (12), (13), (14), (15): Xaa is A or G
  MOD_RES (16), (17), (18), (19): Xaa is A or G or is absent

SEQ ID NO: 23995 - protein, 35 aa, Artificial Sequence
  GFR-binding peptide
  MOD_RES (33), (34): Xaa is C or S
  MOD_RES (11), (12), (13), (14), (15): Xaa is A or G
  MOD_RES (16), (17), (18), (19): Xaa is A or G or is absent
EVVMDYHYKLXXXXXXXXXKYLISIPSLRAPVXXS

SEQ ID NO: 23996 - protein, 37 aa, Artificial Sequence
  GFR-binding peptide
  MOD_RES (2), (34), (35): Xaa is C or S
GXESVAMGRYKKLYTVVGKDFYLISIANLKTPVXXAK

SEQ ID NO: 23997 - protein, 41 aa, Artificial Sequence
  GFR-binding peptide
  MOD_RES (2), (4), (36), (37): Xaa is C or S
HXGXARVVMNEYKFKIVNSSDDLYLVSIPELQTPAXXPKPV

SEQ ID NO: 23998 - protein, 37 aa, Artificial Sequence; identical to SEQ ID NO: 3002
  GFR-binding peptide
  MOD_RES (2), (34), (35): Xaa is C or S

SEQ ID NO: 23999 - protein, 39 aa, Artificial Sequence; identical to SEQ ID NO: 3003
  GFR-binding peptide
  MOD_RES (2), (34), (35): Xaa is C or S

SEQ ID NO: 24000 - protein, 35 aa, Artificial Sequence; identical to SEQ ID NO: 3004
  GFR-binding peptide
  MOD_RES (1), (34), (35): Xaa is C or S
  MOD_RES (12), (13), (14), (15), (16): Xaa is A or G
  MOD_RES (17), (18), (19), (20): Xaa is A or G or is absent

SEQ ID NO: 24001 - protein, 42 aa, Artificial Sequence
  GFR-binding peptide
  MOD_RES (2), (4), (36), (37): Xaa is C or S
HXGXARVVMNEYQKYIVNSSDDIYLVSIPSLQTPAXXPKPVT

SEQ ID NO: 24002 - protein, 36 aa, Artificial Sequence; identical to SEQ ID NO: 3006
  GFR-binding peptide
  MOD_RES (2), (4), (36): Xaa is C or S

SEQ ID NO: 24003 - protein, 41 aa, Artificial Sequence
  GFR-binding peptide
  MOD_RES (2), (36): Xaa is C or S
  MOD_RES (14), (15), (16), (17), (18): Xaa is A or G
  MOD_RES (19), (20), (21), (22): Xaa is A or G or is absent
GXSRVVMNEYKFKXXXXXXXXXLYLVSIPELKTPAXTPKTV

SEQ ID NO: 24004 - protein, 41 aa, Artificial Sequence
  GFR-binding peptide
  MOD_RES (2), (4), (38), (39): Xaa is C or S
  MOD_RES (16), (17), (18), (19), (20): Xaa is A or G
  MOD_RES (21), (22), (23), (24): Xaa is A or G or is absent
RXGXGEVVMDEYKFKXXXXXXXXXLYLMSIPELETPVXXAK

SEQ ID NO: 24005 - protein, 38 aa, Artificial Sequence
  GFR-binding peptide
  MOD_RES (1), (34), (35): Xaa is C or S
  MOD_RES (12), (13), (14), (15), (16): Xaa is A or G
  MOD_RES (17), (18), (19), (20): Xaa is A or G or is absent
XSRVIMEYKFKXXXXXXXXXLYLISIPELAQPVXXPAA

SEQ ID NO: 24006 - protein, 33 aa, Artificial Sequence
  GFR-binding peptide
  MOD_RES (33), (33): Xaa is C or S
  MOD_RES (11), (12), (13), (14), (15): Xaa is A or G
  MOD_RES (16), (17), (18), (19): Xaa is A or G or is absent
EVVMEEYKFKXXXXXXXXXLYLMSIPELETPVX

SEQ ID NO: 24007 - protein, 40 aa, Artificial Sequence
  GFR-binding peptide
  MOD_RES (2), (4), (38), (39): Xaa is C or S
  MOD_RES (16), (17), (18), (19), (20): Xaa is A or G
  MOD_RES (21), (22), (23), (24): Xaa is A or G or is absent
RXGXESVAMGEYQKYXXXXXXXXXIYLISIPSLKTPVXXA

SEQ ID NO: 24008 - protein, 39 aa, Artificial Sequence; identical to SEQ ID NO: 3012
  GFR-binding peptide
  MOD_RES (2), (36), (37): Xaa is C or S
  MOD_RES (14), (15), (16), (17), (18): Xaa is A or G
  MOD_RES (19), (20), (21), (22): Xaa is A or G or is absent

SEQ ID NO: 24009 - protein, 33 aa, Artificial Sequence; identical to SEQ ID NO: 3013
  GFR-binding peptide
  MOD_RES (2), (2): Xaa is C or S

SEQ ID NO: 24010 - protein, 40 aa, Artificial Sequence
  GFR-binding peptide
  MOD_RES (1), (3), (35), (36): Xaa is C or S
XGXARVVMNEYQKYIVNSSDDIYLVSIPSLQTPAXXPKPV

SEQ ID NO: 24011 - protein, 35 aa, Artificial Sequence; identical to SEQ ID NO: 3016
  GFR-binding peptide
  MOD_RES (1), (32), (33): Xaa is C or S

SEQ ID NO: 24012 - protein, 37 aa, Artificial Sequence
  GFR-binding peptide
  MOD_RES (1), (3), (35), (36): Xaa is C or S
XGXESVAMGEYQKYYTVVGKDIYLISIPSLKTPVXXA

SEQ ID NO: 24013 - protein, 39 aa, Artificial Sequence
  GFR-binding peptide
  MOD_RES (2), (4), (38), (39): Xaa is C or S
  MOD_RES (16), (17), (18), (19), (20): Xaa is A or G
  MOD_RES (21), (22), (23), (24): Xaa is A or G or is absent
RXGXESVAMGEYQKYXXXXXXXXXIYLISIPSLKTPVXX

SEQ ID NO: 24014 - protein, 36 aa, Artificial Sequence
  GFR-binding peptide
  MOD_RES (32), (33): Xaa is C or S
AKVVMNEYKFKIVNNSSDLYLVSIPELKTPAXXAKP

SEQ ID NO: 24015 - protein, 37 aa, Artificial Sequence; identical to SEQ ID NO: 3019
  GFR-binding peptide
  MOD_RES (33), (34): Xaa is C or S
  MOD_RES (11), (12), (13), (14), (15): Xaa is A or G
  MOD_RES (16), (17), (18), (19): Xaa is A or G or is absent

SEQ ID NO: 24016 - protein, 34 aa, Artificial Sequence
  GFR-binding peptide
  MOD_RES (2), (2): Xaa is C or S
  MOD_RES (13), (14), (15), (16), (17): Xaa is A or G
  MOD_RES (18), (19), (20), (21): Xaa is A or G or is absent
KXSRVIMEYKFKXXXXXXXXXLYLISIPELAQPV

SEQ ID NO: 24017 - protein, 32 aa, Artificial Sequence
  GFR-binding peptide
  MOD_RES (31), (32): Xaa is C or S
KVVMNEYKFKIVNNSSDLYLVSIPELKTPAXX

SEQ ID NO: 24018 - protein, 39 aa, Artificial Sequence
  GFR-binding peptide
  MOD_RES (1), (33): Xaa is C or S
XSRVVMNEYQKYIVNSSDDIYLVSIPSLKTPAXTPKTVH

SEQ ID NO: 24019 - protein, 39 aa, Artificial Sequence
  GFR-binding peptide
  MOD_RES (34), (35): Xaa is C or S
  MOD_RES (12), (13), (14), (15), (16): Xaa is A or G
  MOD_RES (17), (18), (19), (20): Xaa is A or G or is absent
SRVVMNEYQKYXXXXXXXXXIYLVSIPSLKTPAXXPKPV

SEQ ID NO: 24020 - protein, 36 aa, Artificial Sequence
  GFR-binding peptide
  MOD_RES (31), (32): Xaa is C or S
SKVVMEYKFKVKPTRGVLYLISIPELDQPVXXPSAS

SEQ ID NO: 24021 - protein, 40 aa, Artificial Sequence; identical to SEQ ID NO: 3025
  GFR-binding peptide
  MOD_RES (2), (4), (37), (38): Xaa is C or S
  MOD_RES (15), (16), (17), (18), (19): Xaa is A or G
  MOD_RES (20), (21), (22), (23): Xaa is A or G or is absent

SEQ ID NO: 24022 - protein, 35 aa, Artificial Sequence
  GFR-binding peptide
  MOD_RES (1), (3), (34), (35): Xaa is C or S
XKXSRVIMEYKFKVKPKRGVLYLISIPELAQPVXX

SEQ ID NO: 24023 - protein, 36 aa, Artificial Sequence
  GFR-binding peptide
  MOD_RES (1), (35), (36): Xaa is C or S
  MOD_RES (13), (14), (15), (16), (17): Xaa is A or G
  MOD_RES (18), (19), (20), (21): Xaa is A or G or is absent
XAEVVMDRYKKLXXXXXXXXXFYLISIANLRAPVXX

SEQ ID NO: 24024 - protein, 37 aa, Artificial Sequence
  GFR-binding peptide
  MOD_RES (33), (34): Xaa is C or S
  MOD_RES (11), (12), (13), (14), (15): Xaa is A or G
  MOD_RES (16), (17), (18), (19): Xaa is A or G or is absent
RVVMNEYKFKXXXXXXXXXLYLVSIPELQTPAXXPKP

SEQ ID NO: 24025 - protein, 37 aa, Artificial Sequence
  GFR-binding peptide
  MOD_RES (31), (32): Xaa is C or S
SRVIMEYKFKVKPKRGVLYLISIPELAQPVXXPAASA

SEQ ID NO: 24026 - protein, 38 aa, Artificial Sequence
  GFR-binding peptide
  MOD_RES (1), (3), (37): Xaa is C or S
  MOD_RES (15), (16), (17), (18), (19): Xaa is A or G
  MOD_RES (20), (21), (22), (23): Xaa is A or G or is absent
XGXSRVVMNEYQKYXXXXXXXXXIYLVSIPSLKTPAXT

SEQ ID NO: 24027 - protein, 39 aa, Artificial Sequence
  GFR-binding peptide
  MOD_RES (2), (34): Xaa is C or S
GXSRVVMNEYKFKIVNSSDDLYLVSIPELKTPAXTPKTV

SEQ ID NO: 24028 - protein, 36 aa, Artificial Sequence
  GFR-binding peptide
  MOD_RES (1), (34), (35): Xaa is C or S
  MOD_RES (12), (13), (14), (15), (16): Xaa is A or G
  MOD_RES (17), (18), (19), (20): Xaa is A or G or is absent
XSKVIMEYKFKXXXXXXXXXLYLISIPELDQSVXXP

SEQ ID NO: 24029 - protein, 33 aa, Artificial Sequence
  GFR-binding peptide
  MOD_RES (1), (3): Xaa is C or S
XKXSRVIMEYQKYVKPKRGVIYLISIPSLAQPV

SEQ ID NO: 24030 - protein, 36 aa, Artificial Sequence
  GFR-binding peptide
  MOD_RES (2), (4), (36): Xaa is C or S
HXGXARVVMNEYQKYIVNSSDDIYLVSIPSLQTPAX

SEQ ID NO: 24031 - protein, 35 aa, Artificial Sequence
  GFR-binding peptide
  MOD_RES (2), (2): Xaa is C or S
  MOD_RES (14), (15), (16), (17), (18): Xaa is A or G
  MOD_RES (19), (20), (21), (22): Xaa is A or G or is absent
GXAEVVMDEYKFKXXXXXXXXXLYLISIPELRAPV

SEQ ID NO: 24032 - protein, 41 aa, Artificial Sequence; identical to SEQ ID NO: 3036
  GFR-binding peptide
  MOD_RES (2), (4), (36), (37): Xaa is C or S

SEQ ID NO: 24033 - protein, 37 aa, Artificial Sequence
  GFR-binding peptide
  MOD_RES (1), (3), (35), (36): Xaa is C or S
XGXAEVVMDYHYKLVVNNAADKYLISIPSLRAPVXXS

SEQ ID NO: 24034 - protein, 32 aa, Artificial Sequence
  GFR-binding peptide
  MOD_RES (32), (32): Xaa is C or S
GEVVMDEYQKYVVKENEDIYLMSIPSLETPVX

SEQ ID NO: 24035 - protein, 42 aa, Artificial Sequence
  GFR-binding peptide
  MOD_RES (2), (4), (37), (38): Xaa is C or S
RXGXEAVSMGEEYKFKTPVGMDDLYLVSIPELKTPVXXAKGV

SEQ ID NO: 24036 - protein, 35 aa, Artificial Sequence
  GFR-binding peptide
  MOD_RES (2), (4): Xaa is C or S
RXGXESVAMGYHYKLYTVVGKDKYLISIPSLKTPV

SEQ ID NO: 24037 - protein, 36 aa, Artificial Sequence; identical to SEQ ID NO: 3038
  GFR-binding peptide
  MOD_RES (1), (34), (35): Xaa is C or S
  MOD_RES (12), (13), (14), (15), (16): Xaa is A or G
  MOD_RES (17), (18), (19), (20): Xaa is A or G or is absent

SEQ ID NO: 24038 - protein, 38 aa, Artificial Sequence
  GFR-binding peptide
  MOD_RES (2), (4), (36), (37): Xaa is C or S
RXGXGEVVMDEYKFKVVKENEDLYLMSIPELETPVXXA

SEQ ID NO: 24039 - protein, 35 aa, Artificial Sequence; identical to SEQ ID NO: 3042
  GFR-binding peptide
  MOD_RES (32), (33): Xaa is C or S

SEQ ID NO: 24040 - protein, 35 aa, Artificial Sequence
  GFR-binding peptide
  MOD_RES (2), (4): Xaa is C or S
RXGXAEVVMDYHYKLVVNNAADKYLISIPSLRAPV

SEQ ID NO: 24041 - protein, 34 aa, Artificial Sequence
  GFR-binding peptide
  MOD_RES (1), (32), (33): Xaa is C or S
XSRVIMEYKFKVKPKRGVLYLISIPELAQPVXXP

SEQ ID NO: 24042 - protein, 38 aa, Artificial Sequence
  GFR-binding peptide
  MOD_RES (2), (4), (35), (36): Xaa is C or S
SXKXSRVIMEYQKYVKPKRGVIYLISIPSLAQPVXXPA

SEQ ID NO: 24043 - protein, 32 aa, Artificial Sequence
  GFR-binding peptide
  MOD_RES (32), (32): Xaa is C or S
SRVVMNEYQKYIVNSSDDIYLVSIPSLKTPAX

SEQ ID NO: 24044 - protein, 35 aa, Artificial Sequence; identical to SEQ ID NO: 3047
  GFR-binding peptide
  MOD_RES (35), (35): Xaa is C or S
  MOD_RES (13), (14), (15), (16), (17): Xaa is A or G
  MOD_RES (18), (19), (20), (21): Xaa is A or G or is absent

SEQ ID NO: 24045 - protein, 33 aa, Artificial Sequence
  GFR-binding peptide
  MOD_RES (33), (33): Xaa is C or S
  MOD_RES (11), (12), (13), (14), (15): Xaa is A or G
  MOD_RES (16), (17), (18), (19): Xaa is A or G or is absent
SKVIMEYKFKXXXXXXXXXLYLISIPELDQSVX

SEQ ID NO: 24046 - protein, 39 aa, Artificial Sequence
  GFR-binding peptide
  MOD_RES (33), (34): Xaa is C or S
EAVSMGEEYKFKTPVGMDDLYLVSIPELKTPVXXAKGVK

SEQ ID NO: 24047 - protein, 35 aa, Artificial Sequence; identical to SEQ ID NO: 3048
  GFR-binding peptide
  MOD_RES (34), (35): Xaa is C or S
  MOD_RES (12), (13), (14), (15), (16): Xaa is A or G
  MOD_RES (17), (18), (19), (20): Xaa is A or G or is absent

SEQ ID NO: 24048 - protein, 37 aa, Artificial Sequence
  GFR-binding peptide
  MOD_RES (2), (36), (37): Xaa is C or S
  MOD_RES (14), (15), (16), (17), (18): Xaa is A or G
  MOD_RES (19), (20), (21), (22): Xaa is A or G or is absent
GXGEVVMDEYKFKXXXXXXXXXLYLMSIPELETPVXX

SEQ ID NO: 24049 - protein, 38 aa, Artificial Sequence
  GFR-binding peptide
  MOD_RES (34), (35): Xaa is C or S
  MOD_RES (12), (13), (14), (15), (16): Xaa is A or G
  MOD_RES (17), (18), (19), (20): Xaa is A or G or is absent
GEVVMEEYKFKXXXXXXXXXLYLMSIPELETPVXXAKP

SEQ ID NO: 24050 - protein, 36 aa, Artificial Sequence
  GFR-binding peptide
  MOD_RES (2), (35), (36): Xaa is C or S
  MOD_RES (13), (14), (15), (16), (17): Xaa is A or G
  MOD_RES (18), (19), (20), (21): Xaa is A or G or is absent
KXSKVIMEYQKYXXXXXXXXXIYLISIPSLDQSVXX

SEQ ID NO: 24051 - protein, 33 aa, Artificial Sequence
  GFR-binding peptide
  MOD_RES (32), (33): Xaa is C or S
GEVVMEEYQKYVVKDYEDIYLMSIPSLETPVXX

SEQ ID NO: 24052 - protein, 37 aa, Artificial Sequence
  GFR-binding peptide
  MOD_RES (1), (33), (34): Xaa is C or S
XESVAMGEYQKYYTVVGKDIYLISIPSLKTPVXXAKS

SEQ ID NO: 24053 - protein, 39 aa, Artificial Sequence
  GFR-binding peptide
  MOD_RES (1), (35), (36): Xaa is C or S
  MOD_RES (13), (14), (15), (16), (17): Xaa is A or G
  MOD_RES (18), (19), (20), (21): Xaa is A or G or is absent
XESVAMGEYQKYXXXXXXXXXIYLISIPSLKTPVXXAKS

SEQ ID NO: 24054 - protein, 37 aa, Artificial Sequence
  GFR-binding peptide
  MOD_RES (1), (35): Xaa is C or S
  MOD_RES (13), (14), (15), (16), (17): Xaa is A or G
  MOD_RES (18), (19), (20), (21): Xaa is A or G or is absent
XSRVVMNEYKFKXXXXXXXXXLYLVSIPELKTPAXTP

SEQ ID NO: 24055 - protein, 38 aa, Artificial Sequence; identical to SEQ ID NO: 3054
  GFR-binding peptide
  MOD_RES (1), (3), (36), (37): Xaa is C or S
  MOD_RES (14), (15), (16), (17), (18): Xaa is A or G
  MOD_RES (19), (20), (21), (22): Xaa is A or G or is absent

SEQ ID NO: 24056 - protein, 35 aa, Artificial Sequence
  GFR-binding peptide
  MOD_RES (32), (33): Xaa is C or S
AEVVMDRYKKLVVNNAADFYLISIANLRAPVXXSA

SEQ ID NO: 24057 - protein, 37 aa, Artificial Sequence
  GFR-binding peptide
  MOD_RES (2), (4), (36), (37): Xaa is C or S
RXGXESVAMGEYQKYYTVVGKDIYLISIPSLKTPVXX

SEQ ID NO: 24058 - protein, 33 aa, Artificial Sequence; identical to SEQ ID NO: 3055
  GFR-binding peptide
  MOD_RES (32), (33): Xaa is C or S

SEQ ID NO: 24059 - protein, 38 aa, Artificial Sequence; identical to SEQ ID NO: 3056
  GFR-binding peptide
  MOD_RES (1), (3), (37), (38): Xaa is C or S
  MOD_RES (15), (16), (17), (18), (19): Xaa is A or G
  MOD_RES (20), (21), (22), (23): Xaa is A or G or is absent

SEQ ID NO: 24060 - protein, 37 aa, Artificial Sequence; identical to SEQ ID NO: 3057
  GFR-binding peptide
  MOD_RES (34), (35): Xaa is C or S
  MOD_RES (12), (13), (14), (15), (16): Xaa is A or G
  MOD_RES (17), (18), (19), (20): Xaa is A or G or is absent

SEQ ID NO: 24061 - protein, 40 aa, Artificial Sequence; identical to SEQ ID NO: 3058
  GFR-binding peptide
  MOD_RES (2), (4), (38), (39): Xaa is C or S
  MOD_RES (16), (17), (18), (19), (20): Xaa is A or G
  MOD_RES (21), (22), (23), (24): Xaa is A or G or is absent

SEQ ID NO: 24062 - protein, 33 aa, Artificial Sequence
  GFR-binding peptide
  MOD_RES (32), (33): Xaa is C or S
GEVVMEEYKFKVVKDYEDLYLMSIPELETPVXX

SEQ ID NO: 24063 - protein, 36 aa, Artificial Sequence
  GFR-binding peptide
  MOD_RES (2), (34), (35): Xaa is C or S
GXARVVMNEYQKYIVNSSDDIYLVSIPSLQTPAXXP

SEQ ID NO: 24064 - protein, 37 aa, Artificial Sequence
  GFR-binding peptide
  MOD_RES (2), (35), (36): Xaa is C or S
  MOD_RES (13), (14), (15), (16), (17): Xaa is A or G
  MOD_RES (18), (19), (20), (21): Xaa is A or G or is absent
KXSKVIMEYQKYXXXXXXXXXIYLISIPSLDQSVXXP

SEQ ID NO: 24065 - protein, 32 aa, Artificial Sequence; identical to SEQ ID NO: 3061
  GFR-binding peptide
  MOD_RES (11), (12), (13), (14), (15): Xaa is A or G
  MOD_RES (16), (17), (18), (19): Xaa is A or G or is absent

SEQ ID NO: 24066 - protein, 37 aa, Artificial Sequence; identical to SEQ ID NO: 3062
  GFR-binding peptide
  MOD_RES (33), (34): Xaa is C or S
  MOD_RES (11), (12), (13), (14), (15): Xaa is A or G
  MOD_RES (16), (17), (18), (19): Xaa is A or G or is absent

SEQ ID NO: 24067 - protein, 34 aa, Artificial Sequence
  GFR-binding peptide
  MOD_RES (34), (34): Xaa is C or S
  MOD_RES (12), (13), (14), (15), (16): Xaa is A or G
  MOD_RES (17), (18), (19), (20): Xaa is A or G or is absent
GEVVMEEYKFKXXXXXXXXXLYLMSIPELETPVX

SEQ ID NO: 24068 - protein, 42 aa, Artificial Sequence
  GFR-binding peptide
  MOD_RES (2), (4), (38), (39): Xaa is C or S
  MOD_RES (16), (17), (18), (19), (20): Xaa is A or G
  MOD_RES (21), (22), (23), (24): Xaa is A or G or is absent
RXGXAEVVMDEYQKYXXXXXXXXXIYLISIPSLRAPVXXSAP

SEQ ID NO: 24069 - protein, 40 aa, Artificial Sequence; identical to SEQ ID NO: 3065
  GFR-binding peptide
  MOD_RES (2), (34), (35): Xaa is C or S

SEQ ID NO: 24070 - protein, 40 aa, Artificial Sequence
  GFR-binding peptide
  MOD_RES (2), (4), (36), (37): Xaa is C or S
RXGXAEVVMDEYQKYVVNNAADIYLISIPSLRAPVXXSAP

SEQ ID NO: 24071 - protein, 39 aa, Artificial Sequence; identical to SEQ ID NO: 3066
  GFR-binding peptide
  MOD_RES (2), (33), (34): Xaa is C or S

SEQ ID NO: 24072 - protein, 42 aa, Artificial Sequence
  GFR-binding peptide
  MOD_RES (2), (4), (36), (37): Xaa is C or S
HXGXARVVMNEYKFKIVNSSDDLYLVSIPELQTPAXXPKPVT

SEQ ID NO: 24073 - protein, 35 aa, Artificial Sequence
  GFR-binding peptide
  MOD_RES (2), (35): Xaa is C or S
  MOD_RES (13), (14), (15), (16), (17): Xaa is A or G
  MOD_RES (18), (19), (20), (21): Xaa is A or G or is absent
KXSKVIMEYQKYXXXXXXXXXIYLISIPSLDQSVX

SEQ ID NO: 24074 - protein, 42 aa, Artificial Sequence
  GFR-binding peptide
  MOD_RES (2), (4), (36), (37): Xaa is C or S
HXGXAKVVMNEYKFKIVNNSSDLYLVSIPELKTPAXXAKPVA

SEQ ID NO: 24075 - protein, 38 aa, Artificial Sequence
  GFR-binding peptide
  MOD_RES (2), (4), (36), (37): Xaa is C or S
RXGXESVAMGEYKFKYTVVGKDLYLISIPELKTPVXXA

SEQ ID NO: 24076 - protein, 38 aa, Artificial Sequence
  GFR-binding peptide
  MOD_RES (2), (35), (36): Xaa is C or S
GXEAVSMGEEYQKYTPVGMDDIYLVSIPSLKTPVXXAK

SEQ ID NO: 24077 - protein, 39 aa, Artificial Sequence; identical to SEQ ID NO: 3072
  GFR-binding peptide
  MOD_RES (1), (33), (34): Xaa is C or S

SEQ ID NO: 24078 - protein, 35 aa, Artificial Sequence; identical to SEQ ID NO: 3073
  GFR-binding peptide
  MOD_RES (2), (2): Xaa is C or S
  MOD_RES (14), (15), (16), (17), (18): Xaa is A or G
  MOD_RES (19), (20), (21), (22): Xaa is A or G or is absent

SEQ ID NO: 24079 - protein, 31 aa, Artificial Sequence; identical to SEQ ID NO: 3074
  GFR-binding peptide
  MOD_RES (31), (31): Xaa is C or S

SEQ ID NO: 24080 - protein, 41 aa, Artificial Sequence; identical to SEQ ID NO: 3075
  GFR-binding peptide
  MOD_RES (2), (37), (38): Xaa is C or S
  MOD_RES (15), (16), (17), (18), (19): Xaa is A or G
  MOD_RES (20), (21), (22), (23): Xaa is A or G or is absent

SEQ ID NO: 24081 - protein, 34 aa, Artificial Sequence; identical to SEQ ID NO: 3078
  GFR-binding peptide
  MOD_RES (33), (34): Xaa is C or S
  MOD_RES (11), (12), (13), (14), (15): Xaa is A or G
  MOD_RES (16), (17), (18), (19): Xaa is A or G or is absent

SEQ ID NO: 24082 - protein, 34 aa, Artificial Sequence
  GFR-binding peptide
  MOD_RES (2), (2): Xaa is C or S
  MOD_RES (13), (14), (15), (16), (17): Xaa is A or G
  MOD_RES (18), (19), (20), (21): Xaa is A or G or is absent
KXSKVIMEYQKYXXXXXXXXXIYLISIPSLDQSV

SEQ ID NO: 24083 - protein, 39 aa, Artificial Sequence
  GFR-binding peptide
  MOD_RES (33), (34): Xaa is C or S
  MOD_RES (11), (12), (13), (14), (15): Xaa is A or G
  MOD_RES (16), (17), (18), (19): Xaa is A or G or is absent
KVVMNEYKFKXXXXXXXXXLYLVSIPELKTPAXXAKPVA

SEQ ID NO: 24084 - protein, 35 aa, Artificial Sequence
  GFR-binding peptide
  MOD_RES (2), (4): Xaa is C or S
HXGXARVVMNEYQKYIVNSSDDIYLVSIPSLQTPA

SEQ ID NO: 24085 - protein, 35 aa, Artificial Sequence; identical to SEQ ID NO: 3085
  GFR-binding peptide
  MOD_RES (31), (32): Xaa is C or S

SEQ ID NO: 24086 - protein, 43 aa, Artificial Sequence
  GFR-binding peptide
  MOD_RES (2), (4), (38), (39): Xaa is C or S
  MOD_RES (16), (17), (18), (19), (20): Xaa is A or G
  MOD_RES (21), (22), (23), (24): Xaa is A or G or is absent
RXGXAEVVMDYHYKLXXXXXXXXXKYLISIPSLRAPVXXSAPA

SEQ ID NO: 24087 - protein, 34 aa, Artificial Sequence
  GFR-binding peptide
  MOD_RES (1), (33), (34): Xaa is C or S
XSRVVMNEYKFKIVNSSDDLYLVSIPELKTPAXX

SEQ ID NO: 24088 - protein, 38 aa, Artificial Sequence
  GFR-binding peptide
  MOD_RES (34), (35): Xaa is C or S
  MOD_RES (12), (13), (14), (15), (16): Xaa is A or G
  MOD_RES (17), (18), (19), (20): Xaa is A or G or is absent
ESVAMGEYKFKXXXXXXXXXLYLISIPELKTPVXXAKS

SEQ ID NO: 24089 - protein, 40 aa, Artificial Sequence
  GFR-binding peptide
  MOD_RES (2), (4), (36), (37): Xaa is C or S
RXGXAEVVMDEYKFKVVNNAADLYLISIPELRAPVXXSAP

SEQ ID NO: 24090 - protein, 34 aa, Artificial Sequence; identical to SEQ ID NO: 3087
  GFR-binding peptide
  MOD_RES (1), (32), (33): Xaa is C or S

SEQ ID NO: 24091 - protein, 38 aa, Artificial Sequence; identical to SEQ ID NO: 3088
  GFR-binding peptide
  MOD_RES (1), (32), (33): Xaa is C or S

SEQ ID NO: 24092 - protein, 40 aa, Artificial Sequence
  GFR-binding peptide
  MOD_RES (2), (34), (35): Xaa is C or S
GXGEVVMEEYQKYVVKDYEDIYLMSIPSLETPVXXAKPIS

SEQ ID NO: 24093 - protein, 36 aa, Artificial Sequence
  GFR-binding peptide
  MOD_RES (1), (35), (36): Xaa is C or S
  MOD_RES (13), (14), (15), (16), (17): Xaa is A or G
  MOD_RES (18), (19), (20), (21): Xaa is A or G or is absent
XESVAMGEYQKYXXXXXXXXXIYLISIPSLKTPVXX

SEQ ID NO: 24094 - protein, 40 aa, Artificial Sequence; identical to SEQ ID NO: 3095
  GFR-binding peptide
  MOD_RES (2), (36), (37): Xaa is C or S
  MOD_RES (14), (15), (16), (17), (18): Xaa is A or G
  MOD_RES (19), (20), (21), (22): Xaa is A or G or is absent

SEQ ID NO: 24095 - protein, 38 aa, Artificial Sequence
  GFR-binding peptide
  MOD_RES (2), (4), (36), (37): Xaa is C or S
RXGXGEVVMDEYQKYVVKENEDIYLMSIPSLETPVXXA

SEQ ID NO: 24096 - protein, 32 aa, Artificial Sequence; identical to SEQ ID NO: 3097
  GFR-binding peptide
  MOD_RES (11), (12), (13), (14), (15): Xaa is A or G
  MOD_RES (16), (17), (18), (19): Xaa is A or G or is absent

SEQ ID NO: 24097 - protein, 40 aa, Artificial Sequence
  GFR-binding peptide
  MOD_RES (1), (34), (35): Xaa is C or S
XEAVSMGEEYKFKTPVGMDDLYLVSIPELKTPVXXAKGVK

SEQ ID NO: 24098 - protein, 39 aa, Artificial Sequence; identical to SEQ ID NO: 3098
  GFR-binding peptide
  MOD_RES (2), (35), (36): Xaa is C or S
  MOD_RES (13), (14), (15), (16), (17): Xaa is A or G
  MOD_RES (18), (19), (20), (21): Xaa is A or G or is absent

SEQ ID NO: 24099 - protein, 39 aa, Artificial Sequence
  GFR-binding peptide
  MOD_RES (2), (4), (36), (37): Xaa is C or S
RXGXESVAMGYHYKLYTVVGKDKYLISIPSLKTPVXXAK

SEQ ID NO: 24100 - protein, 38 aa, Artificial Sequence
  GFR-binding peptide
  MOD_RES (2), (37), (38): Xaa is C or S
  MOD_RES (15), (16), (17), (18), (19): Xaa is A or G
  MOD_RES (20), (21), (22), (23): Xaa is A or G or is absent
GXEAVSMGEEYKFKXXXXXXXXXLYLVSIPELKTPVXX

SEQ ID NO: 24101 - protein, 37 aa, Artificial Sequence; identical to SEQ ID NO: 3101
  GFR-binding peptide
  MOD_RES (1), (3), (35), (36): Xaa is C or S

SEQ ID NO: 24102 - protein, 38 aa, Artificial Sequence
  GFR-binding peptide
  MOD_RES (2), (35), (36): Xaa is C or S
  MOD_RES (13), (14), (15), (16), (17): Xaa is A or G
  MOD_RES (18), (19), (20), (21): Xaa is A or G or is absent
KXSKVVMEYKFKXXXXXXXXXLYLISIPELDQPVXXPS

SEQ ID NO: 24103 - protein, 32 aa, Artificial Sequence
  GFR-binding peptide
  MOD_RES (32), (32): Xaa is C or S
SRVVMNEYKFKIVNSSDDLYLVSIPELKTPAX

SEQ ID NO: 24104 - protein, 38 aa, Artificial Sequence
  GFR-binding peptide
  MOD_RES (32), (33): Xaa is C or S
AKVVMNEYQKYIVNNSSDIYLVSIPSLKTPAXXAKPVA

SEQ ID NO: 24105 - protein, 36 aa, Artificial Sequence
  GFR-binding peptide
  MOD_RES (2), (34), (35): Xaa is C or S
GXGEVVMEEYKFKVVKDYEDLYLMSIPELETPVXXA

SEQ ID NO: 24106 - protein, 37 aa, Artificial Sequence
  GFR-binding peptide
  MOD_RES (2), (36), (37): Xaa is C or S
  MOD_RES (14), (15), (16), (17), (18): Xaa is A or G
  MOD_RES (19), (20), (21), (22): Xaa is A or G or is absent
GXAKVVMNEYQKYXXXXXXXXXIYLVSIPSLKTPAXX

SEQ ID NO: 24107 - protein, 37 aa, Artificial Sequence
  GFR-binding peptide
  MOD_RES (33), (34): Xaa is C or S
  MOD_RES (11), (12), (13), (14), (15): Xaa is A or G
  MOD_RES (16), (17), (18), (19): Xaa is A or G or is absent
EVVMDYHYKLXXXXXXXXXKYLISIPSLRAPVXXSAP

SEQ ID NO: 24108 - protein, 40 aa, Artificial Sequence
  GFR-binding peptide
  MOD_RES (2), (36), (37): Xaa is C or S
  MOD_RES (14), (15), (16), (17), (18): Xaa is A or G
  MOD_RES (19), (20), (21), (22): Xaa is A or G or is absent
GXGEVVMEEYQKYXXXXXXXXXIYLMSIPSLETPVXXAKP

SEQ ID NO: 24109 - protein, 38 aa, Artificial Sequence
  GFR-binding peptide
  MOD_RES (1), (34), (35): Xaa is C or S
  MOD_RES (12), (13), (14), (15), (16): Xaa is A or G
  MOD_RES (17), (18), (19), (20): Xaa is A or G or is absent
XSKVVMEYKFKXXXXXXXXXLYLISIPELDQPVXXPSA

SEQ ID NO: 24110 - protein, 36 aa, Artificial Sequence; identical to SEQ ID NO: 3111
  GFR-binding peptide
  MOD_RES (32), (33): Xaa is C or S

SEQ ID NO: 24111 - protein, 40 aa, Artificial Sequence
  GFR-binding peptide
  MOD_RES (1), (3), (34), (35): Xaa is C or S
XKXSKVVMEYQKYVKPTRGVIYLISIPSLDQPVXXPSASA

SEQ ID NO: 24112 - protein, 34 aa, Artificial Sequence
  GFR-binding peptide
  MOD_RES (13), (14), (15), (16), (17): Xaa is A or G
  MOD_RES (18), (19), (20), (21): Xaa is A or G or is absent
EAVSMGEEYKFKXXXXXXXXXLYLVSIPELKTPV

SEQ ID NO: 24113 - protein, 35 aa, Artificial Sequence; identical to SEQ ID NO: 3112
  GFR-binding peptide
  MOD_RES (1), (3): Xaa is C or S
  MOD_RES (14), (15), (16), (17), (18): Xaa is A or G
  MOD_RES (19), (20), (21), (22): Xaa is A or G or is absent

SEQ ID NO: 24114 - protein, 34 aa, Artificial Sequence; identical to SEQ ID NO: 3119
  GFR-binding peptide
  MOD_RES (31), (32): Xaa is C or S

SEQ ID NO: 24115 - protein, 37 aa, Artificial Sequence; identical to SEQ ID NO: 3120
  GFR-binding peptide
  MOD_RES (33), (34): Xaa is C or S
  MOD_RES (11), (12), (13), (14), (15): Xaa is A or G
  MOD_RES (16), (17), (18), (19): Xaa is A or G or is absent

SEQ ID NO: 24116 - protein, 37 aa, Artificial Sequence
  GFR-binding peptide
  MOD_RES (1), (33), (34): Xaa is C or S
XGEVVMEEYKFKVVKDYEDLYLMSIPELETPVXXAKP

SEQ ID NO: 24117 - protein, 34 aa, Artificial Sequence; identical to SEQ ID NO: 3122
  GFR-binding peptide
  MOD_RES (32), (32): Xaa is C or S

SEQ ID NO: 24118 - protein, 37 aa, Artificial Sequence; identical to SEQ ID NO: 3124
  GFR-binding peptide
  MOD_RES (2), (4), (37): Xaa is C or S
  MOD_RES (15), (16), (17), (18), (19): Xaa is A or G
  MOD_RES (20), (21), (22), (23): Xaa is A or G or is absent

SEQ ID NO: 24119 - protein, 36 aa, Artificial Sequence
  GFR-binding peptide
  MOD_RES (31), (32): Xaa is C or S
RVVMNEYKFKIVNSSDDLYLVSIPELKTPAXXPKPV

SEQ ID NO: 24120 - protein, 38 aa, Artificial Sequence; identical to SEQ ID NO: 3126
  GFR-binding peptide
  MOD_RES (1), (34), (35): Xaa is C or S
  MOD_RES (12), (13), (14), (15), (16): Xaa is A or G
  MOD_RES (17), (18), (19), (20): Xaa is A or G or is absent

SEQ ID NO: 24121 - protein, 37 aa, Artificial Sequence
  GFR-binding peptide
  MOD_RES (2), (4), (36), (37): Xaa is C or S
RXGXESVAMGEYKFKYTVVGKDLYLISIPELKTPVXX

SEQ ID NO: 24122 - protein, 36 aa, Artificial Sequence
  GFR-binding peptide
  MOD_RES (2), (4), (35), (36): Xaa is C or S
SXKXSKVVMEYQKYVKPTRGVIYLISIPSLDQPVXX

SEQ ID NO: 24123 - protein, 43 aa, Artificial Sequence
  GFR-binding peptide
  MOD_RES (1), (3), (37), (38): Xaa is C or S
  MOD_RES (15), (16), (17), (18), (19): Xaa is A or G
  MOD_RES (20), (21), (22), (23): Xaa is A or G or is absent
XGXGEVVMEEYKFKXXXXXXXXXLYLMSIPELETPVXXAKPIS

SEQ ID NO: 24124 - protein, 41 aa, Artificial Sequence; identical to SEQ ID NO: 3127
  GFR-binding peptide
  MOD_RES (2), (36): Xaa is C or S
  MOD_RES (14), (15), (16), (17), (18): Xaa is A or G
  MOD_RES (19), (20), (21), (22): Xaa is A or G or is absent

SEQ ID NO: 24125 - protein, 35 aa, Artificial Sequence
  GFR-binding peptide
  MOD_RES (2), (2): Xaa is C or S
  MOD_RES (14), (15), (16), (17), (18): Xaa is A or G
  MOD_RES (19), (20), (21), (22): Xaa is A or G or is absent
GXSRVVMNEYQKYXXXXXXXXXIYLVSIPSLKTPA

SEQ ID NO: 24126 - protein, 40 aa, Artificial Sequence; identical to SEQ ID NO: 3130
  GFR-binding peptide
  MOD_RES (1), (3), (36), (37): Xaa is C or S
  MOD_RES (14), (15), (16), (17), (18): Xaa is A or G
  MOD_RES (19), (20), (21), (22): Xaa is A or G or is absent

SEQ ID NO: 24127 - protein, 37 aa, Artificial Sequence; identical to SEQ ID NO: 3131
  GFR-binding peptide
  MOD_RES (2), (34), (35): Xaa is C or S

SEQ ID NO: 24128 - protein, 38 aa, Artificial Sequence
  GFR-binding peptide
  MOD_RES (2), (4), (36), (37): Xaa is C or S
RXGXESVAMGEYQKYYTVVGKDIYLISIPSLKTPVXXA

SEQ ID NO: 24129 - protein, 35 aa, Artificial Sequence
  GFR-binding peptide
  MOD_RES (1), (3), (34), (35): Xaa is C or S
XKXSRVIMEYQKYVKPKRGVIYLISIPSLAQPVXX

SEQ ID NO: 24130 - protein, 34 aa, Artificial Sequence
  GFR-binding peptide
  MOD_RES (1), (3), (34): Xaa is C or S
XKXSRVIMEYQKYVKPKRGVIYLISIPSLAQPVX

SEQ ID NO: 24131 - protein, 45 aa, Artificial Sequence
  GFR-binding peptide
  MOD_RES (2), (4), (39), (40): Xaa is C or S
  MOD_RES (17), (18), (19), (20), (21): Xaa is A or G
  MOD_RES (22), (23), (24), (25): Xaa is A or G or is absent
RXGXEAVSMGEEYQKYXXXXXXXXXIYLVSIPSLKTPVXXAKGVK

SEQ ID NO: 24132 - protein, 38 aa, Artificial Sequence; identical to SEQ ID NO: 3138
  GFR-binding peptide
  MOD_RES (34), (35): Xaa is C or S
  MOD_RES (12), (13), (14), (15), (16): Xaa is A or G
  MOD_RES (17), (18), (19), (20): Xaa is A or G or is absent

SEQ ID NO: 24133 - protein, 40 aa, Artificial Sequence
  GFR-binding peptide
  MOD_RES (2), (35), (36): Xaa is C or S
GXEAVSMGEEYQKYTPVGMDDIYLVSIPSLKTPVXXAKGV

SEQ ID NO: 24134 - protein, 34 aa, Artificial Sequence
  GFR-binding peptide
  MOD_RES (1), (32), (33): Xaa is C or S
XSKVIMEYQKYIKPTKGIIYLISIPSLDQSVXXP

SEQ ID NO: 24135 - protein, 41 aa, Artificial Sequence
  GFR-binding peptide
  MOD_RES (1), (3), (37), (38): Xaa is C or S
  MOD_RES (15), (16), (17), (18), (19): Xaa is A or G
  MOD_RES (20), (21), (22), (23): Xaa is A or G or is absent
XGXAEVVMDEYQKYXXXXXXXXXIYLISIPSLRAPVXXSAP

SEQ ID NO: 24136 - protein, 38 aa, Artificial Sequence; identical to SEQ ID NO: 3140
  GFR-binding peptide
  MOD_RES (2), (33), (34): Xaa is C or S

SEQ ID NO: 24137 - protein, 37 aa, Artificial Sequence
  GFR-binding peptide
  MOD_RES (33), (34): Xaa is C or S
  MOD_RES (11), (12), (13), (14), (15): Xaa is A or G
  MOD_RES (16), (17), (18), (19): Xaa is A or G or is absent
KVVMNEYKFKXXXXXXXXXLYLVSIPELKTPAXXAKP

SEQ ID NO: 24138 - protein, 34 aa, Artificial Sequence
  GFR-binding peptide
  MOD_RES (1), (3): Xaa is C or S
XGXESVAMGEYKFKYTVVGKDLYLISIPELKTPV

SEQ ID NO: 24139 - protein, 38 aa, Artificial Sequence
  GFR-binding peptide
  MOD_RES (2), (34), (35): Xaa is C or S
GXGEVVMEEYQKYVVKDYEDIYLMSIPSLETPVXXAKP

SEQ ID NO: 24140 - protein, 31 aa, Artificial Sequence; identical to SEQ ID NO: 3149
  GFR-binding peptide
  MOD_RES (31), (31): Xaa is C or S

SEQ ID NO: 24141 - protein, 40 aa, Artificial Sequence
  GFR-binding peptide
  MOD_RES (34), (35): Xaa is C or S
  MOD_RES (12), (13), (14), (15), (16): Xaa is A or G
  MOD_RES (17), (18), (19), (20): Xaa is A or G or is absent
AEVVMDRYKKLXXXXXXXXXFYLISIANLRAPVXXSAPAA

SEQ ID NO: 24142 - protein, 38 aa, Artificial Sequence
  GFR-binding peptide
  MOD_RES (1), (3), (34), (35): Xaa is C or S
XKXSKVVMEYKFKVKPTRGVLYLISIPELDQPVXXPSA

SEQ ID NO: 24143 - protein, 37 aa, Artificial Sequence
  GFR-binding peptide
  MOD_RES (2), (4): Xaa is C or S
  MOD_RES (16), (17), (18), (19), (20): Xaa is A or G
  MOD_RES (21), (22), (23), (24): Xaa is A or G or is absent
HXGXARVVMNEYQKYXXXXXXXXXIYLVSIPSLQTPA

SEQ ID NO: 24144 - protein, 33 aa, Artificial Sequence
  GFR-binding peptide
  MOD_RES (2), (2): Xaa is C or S
GXSRVVMNEYKFKIVNSSDDLYLVSIPELKTPA

SEQ ID NO: 24145 - protein, 39 aa, Artificial Sequence; identical to SEQ ID NO: 3150
  GFR-binding peptide
  MOD_RES (1), (3), (36), (37): Xaa is C or S

SEQ ID NO: 24146 - protein, 38 aa, Artificial Sequence; identical to SEQ ID NO: 3152
  GFR-binding peptide
  MOD_RES (2), (4), (38): Xaa is C or S
  MOD_RES (16), (17), (18), (19), (20): Xaa is A or G
  MOD_RES (21), (22), (23), (24): Xaa is A or G or is absent

SEQ ID NO: 24147 - protein, 38 aa, Artificial Sequence; identical to SEQ ID NO: 3153
  GFR-binding peptide
  MOD_RES (2), (34), (35): Xaa is C or S

SEQ ID NO: 24148 - protein, 38 aa, Artificial Sequence; identical to SEQ ID NO: 3154
  GFR-binding peptide
  MOD_RES (1), (3), (37), (38): Xaa is C or S
  MOD_RES (15), (16), (17), (18), (19): Xaa is A or G
  MOD_RES (20), (21), (22), (23): Xaa is A or G or is absent

SEQ ID NO: 24149 - protein, 40 aa, Artificial Sequence
  GFR-binding peptide
  MOD_RES (2), (36), (37): Xaa is C or S
  MOD_RES (14), (15), (16), (17), (18): Xaa is A or G
  MOD_RES (19), (20), (21), (22): Xaa is A or G or is absent
GXAEVVMDYHYKLXXXXXXXXXKYLISIPSLRAPVXXSAP

SEQ ID NO: 24150 - protein, 38 aa, Artificial Sequence; identical to SEQ ID NO: 3156
  GFR-binding peptide
  MOD_RES (1), (32), (33): Xaa is C or S

SEQ ID NO: 24151 - protein, 38 aa, Artificial Sequence; identical to SEQ ID NO: 3158
  GFR-binding peptide
  MOD_RES (2), (35), (36): Xaa is C or S
  MOD_RES (13), (14), (15), (16), (17): Xaa is A or G
  MOD_RES (18), (19), (20), (21): Xaa is A or G or is absent

SEQ ID NO: 24152 - protein, 42 aa, Artificial Sequence
  GFR-binding peptide
  MOD_RES (2), (4), (36), (37): Xaa is C or S
RXGXESVAMGEYKFKYTVVGKDLYLISIPELKTPVXXAKSAK

SEQ ID NO: 24153 - protein, 37 aa, Artificial Sequence
  GFR-binding peptide
  MOD_RES (1), (35), (36): Xaa is C or S
  MOD_RES (13), (14), (15), (16), (17): Xaa is A or G
  MOD_RES (18), (19), (20), (21): Xaa is A or G or is absent
XESVAMGEYKFKXXXXXXXXXLYLISIPELKTPVXXA

SEQ ID NO: 24154 - protein, 36 aa, Artificial Sequence; identical to SEQ ID NO: 3160
  GFR-binding peptide
  MOD_RES (1), (3): Xaa is C or S
  MOD_RES (15), (16), (17), (18), (19): Xaa is A or G
  MOD_RES (20), (21), (22), (23): Xaa is A or G or is absent

SEQ ID NO: 24155 - protein, 37 aa, Artificial Sequence
  GFR-binding peptide
  MOD_RES (1), (3), (36), (37): Xaa is C or S
XGXEAVSMGEEYQKYTPVGMDDIYLVSIPSLKTPVXX

SEQ ID NO: 24156 - protein, 37 aa, Artificial Sequence; identical to SEQ ID NO: 3163
  GFR-binding peptide
  MOD_RES (33), (34): Xaa is C or S
  MOD_RES (11), (12), (13), (14), (15): Xaa is A or G
  MOD_RES (16), (17), (18), (19): Xaa is A or G or is absent

SEQ ID NO: 24157 - protein, 37 aa, Artificial Sequence
  GFR-binding peptide
  MOD_RES (1), (3), (36), (37): Xaa is C or S
XGXEAVSMGEEYKFKTPVGMDDLYLVSIPELKTPVXX

SEQ ID NO: 24158 - protein, 38 aa, Artificial Sequence
  GFR-binding peptide
  MOD_RES (2), (36), (37): Xaa is C or S
  MOD_RES (14), (15), (16), (17), (18): Xaa is A or G
  MOD_RES (19), (20), (21), (22): Xaa is A or G or is absent
GXAKVVMNEYQKYXXXXXXXXXIYLVSIPSLKTPAXXA

SEQ ID NO: 24159 - protein, 35 aa, Artificial Sequence
  GFR-binding peptide
  MOD_RES (2), (34), (35): Xaa is C or S
GXGEVVMDEYQKYVVKENEDIYLMSIPSLETPVXX

SEQ ID NO: 24160 - protein, 38 aa, Artificial Sequence
  GFR-binding peptide
  MOD_RES (2), (36), (37): Xaa is C or S
  MOD_RES (14), (15), (16), (17), (18): Xaa is A or G
  MOD_RES (19), (20), (21), (22): Xaa is A or G or is absent
GXGEVVMDEYKFKXXXXXXXXXLYLMSIPELETPVXXA

SEQ ID NO: 24161 - protein, 38 aa, Artificial Sequence
  GFR-binding peptide
  MOD_RES (33), (34): Xaa is C or S
  MOD_RES (11), (12), (13), (14), (15): Xaa is A or G
  MOD_RES (16), (17), (18), (19): Xaa is A or G or is absent
SKVVMEYQKYXXXXXXXXXIYLISIPSLDQPVXXPSAS

SEQ ID NO: 24162 - protein, 39 aa, Artificial Sequence
  GFR-binding peptide
  MOD_RES (33), (34): Xaa is C or S
  MOD_RES (11), (12), (13), (14), (15): Xaa is A or G
  MOD_RES (16), (17), (18), (19): Xaa is A or G or is absent
EVVMEEYQKYXXXXXXXXXIYLMSIPSLETPVXXAKPIS

SEQ ID NO: 24163 - protein, 36 aa, Artificial Sequence
  GFR-binding peptide
  MOD_RES (2), (4): Xaa is C or S
  MOD_RES (15), (16), (17), (18), (19): Xaa is A or G
  MOD_RES (20), (21), (22), (23): Xaa is A or G or is absent
SXKXSKVIMEYQKYXXXXXXXXXIYLISIPSLDQSV

SEQ ID NO: 24164 - protein, 37 aa, Artificial Sequence; identical to SEQ ID NO: 3169
  GFR-binding peptide
  MOD_RES (2), (4), (36): Xaa is C or S

SEQ ID NO: 24165 - protein, 35 aa, Artificial Sequence; identical to SEQ ID NO: 3170
  GFR-binding peptide
  MOD_RES (1), (3): Xaa is C or S
  MOD_RES (14), (15), (16), (17), (18): Xaa is A or G
  MOD_RES (19), (20), (21), (22): Xaa is A or G or is absent

SEQ ID NO: 24166 - protein, 36 aa, Artificial Sequence; identical to SEQ ID NO: 3171
  GFR-binding peptide
  MOD_RES (2), (4), (35), (36): Xaa is C or S

SEQ ID NO: 24167 - protein, 32 aa, Artificial Sequence
  GFR-binding peptide
  MOD_RES (32), (32): Xaa is C or S
ARVVMNEYKFKIVNSSDDLYLVSIPELQTPAX

SEQ ID NO: 24168 - protein, 40 aa, Artificial Sequence; identical to SEQ ID NO: 3172
  GFR-binding peptide
  MOD_RES (2), (4), (37), (38): Xaa is C or S

SEQ ID NO: 24169 - protein, 37 aa, Artificial Sequence
  GFR-binding peptide
  MOD_RES (2), (33), (34): Xaa is C or S
KXSKVVMEYKFKVKPTRGVLYLISIPELDQPVXXPSA

SEQ ID NO: 24170 - protein, 33 aa, Artificial Sequence; identical to SEQ ID NO: 3173
  GFR-binding peptide
  MOD_RES (2), (33): Xaa is C or S

SEQ ID NO: 24171 - protein, 34 aa, Artificial Sequence
  GFR-binding peptide
  MOD_RES (1), (33), (34): Xaa is C or S
XESVAMGYHYKLYTVVGKDKYLISIPSLKTPVXX

SEQ ID NO: 24172 - protein, 40 aa, Artificial Sequence
  GFR-binding peptide
  MOD_RES (2), (4), (35), (36): Xaa is C or S
SXKXSRVIMEYQKYVKPKRGVIYLISIPSLAQPVXXPAAS

SEQ ID NO: 24173 - protein, 34 aa, Artificial Sequence; identical to SEQ ID NO: 3180
  GFR-binding peptide
  MOD_RES (2), (34): Xaa is C or S

SEQ ID NO: 24174 - protein, 37 aa, Artificial Sequence; identical to SEQ ID NO: 3181
  GFR-binding peptide
  MOD_RES (2), (4), (36), (37): Xaa is C or S

SEQ ID NO: 24175 - protein, 36 aa, Artificial Sequence; identical to SEQ ID NO: 3182
  GFR-binding peptide
  MOD_RES (1), (34), (35): Xaa is C or S

SEQ ID NO: 24176 - protein, 39 aa, Artificial Sequence
  GFR-binding peptide
  MOD_RES (1), (3), (34), (35): Xaa is C or S
XKXSKVIMEYQKYIKPTKGIIYLISIPSLDQSVXXPSAS

SEQ ID NO: 24177 - protein, 34 aa, Artificial Sequence
  GFR-binding peptide
  MOD_RES (2), (34): Xaa is C or S
GXAEVVMDRYKKLVVNNAADFYLISIANLRAPVX

SEQ ID NO: 24178 - protein, 38 aa, Artificial Sequence
  GFR-binding peptide
  MOD_RES (1), (33), (34): Xaa is C or S
XGEVVMEEYQKYVVKDYEDIYLMSIPSLETPVXXAKPI

SEQ ID NO: 24179 - protein, 34 aa, Artificial Sequence; identical to SEQ ID NO: 3184
  GFR-binding peptide
  MOD_RES (1), (1): Xaa is C or S
  MOD_RES (13), (14), (15), (16), (17): Xaa is A or G
  MOD_RES (18), (19), (20), (21): Xaa is A or G or is absent

SEQ ID NO: 24180 - protein, 36 aa, Artificial Sequence; identical to SEQ ID NO: 3186
  GFR-binding peptide
  MOD_RES (1), (3): Xaa is C or S
  MOD_RES (15), (16), (17), (18), (19): Xaa is A or G
  MOD_RES (20), (21), (22), (23): Xaa is A or G or is absent

SEQ ID NO: 24181 - protein, 36 aa, Artificial Sequence; identical to SEQ ID NO: 3188
  GFR-binding peptide
  MOD_RES (34), (35): Xaa is C or S
  MOD_RES (12), (13), (14), (15), (16): Xaa is A or G
  MOD_RES (17), (18), (19), (20): Xaa is A or G or is absent

SEQ ID NO: 24182 - protein, 36 aa, Artificial Sequence; identical to SEQ ID NO: 3189
  GFR-binding peptide
  MOD_RES (1), (3), (35), (36): Xaa is C or S

SEQ ID NO: 24183 - protein, 42 aa, Artificial Sequence; identical to SEQ ID NO: 3190
  GFR-binding peptide
  MOD_RES (2), (4), (38), (39): Xaa is C or S
  MOD_RES (16), (17), (18), (19), (20): Xaa is A or G
  MOD_RES (21), (22), (23), (24): Xaa is A or G or is absent

SEQ ID NO: 24184 - protein, 41 aa, Artificial Sequence; identical to SEQ ID NO: 3195
  GFR-binding peptide
  MOD_RES (1), (3), (36), (37): Xaa is C or S
  MOD_RES (14), (15), (16), (17), (18): Xaa is A or G
  MOD_RES (19), (20), (21), (22): Xaa is A or G or is absent

SEQ ID NO: 24185 - protein, 34 aa, Artificial Sequence
  GFR-binding peptide
  MOD_RES (1), (3): Xaa is C or S
XGXGEVVMEEYKFKVVKDYEDLYLMSIPELETPV

SEQ ID NO: 24186 - protein, 33 aa, Artificial Sequence
  GFR-binding peptide
  MOD_RES (1), (33): Xaa is C or S
XSRVVMNEYQKYIVNSSDDIYLVSIPSLKTPAX

SEQ ID NO: 24187 - protein, 34 aa, Artificial Sequence
  GFR-binding peptide
  MOD_RES (1), (3): Xaa is C or S
XGXAEVVMDYHYKLVVNNAADKYLISIPSLRAPV

SEQ ID NO: 24188 - protein, 38 aa, Artificial Sequence; identical to SEQ ID NO: 3199
  GFR-binding peptide
  MOD_RES (2), (37), (38): Xaa is C or S
  MOD_RES (15), (16), (17), (18), (19): Xaa is A or G
  MOD_RES (20), (21), (22), (23): Xaa is A or G or is absent

SEQ ID NO: 24189 - protein, 34 aa, Artificial Sequence; identical to SEQ ID NO: 3200
  GFR-binding peptide
  MOD_RES (2), (2): Xaa is C or S
  MOD_RES (13), (14), (15), (16), (17): Xaa is A or G
  MOD_RES (18), (19), (20), (21): Xaa is A or G or is absent

SEQ ID NO: 24190 - protein, 35 aa, Artificial Sequence
  GFR-binding peptide
  MOD_RES (2), (33), (34): Xaa is C or S
KXSRVIMEYQKYVKPKRGVIYLISIPSLAQPVXXP

SEQ ID NO: 24191 - protein, 36 aa, Artificial Sequence; identical to SEQ ID NO: 3202
  GFR-binding peptide
  MOD_RES (2), (33), (34): Xaa is C or S

SEQ ID NO: 24192 - protein, 38 aa, Artificial Sequence; identical to SEQ ID NO: 3203
  GFR-binding peptide
  MOD_RES (33), (34): Xaa is C or S

SEQ ID NO: 24193 - protein, 39 aa, Artificial Sequence
  GFR-binding peptide
  MOD_RES (1), (3), (35), (36): Xaa is C or S
XGXSRVVMNEYQKYIVNSSDDIYLVSIPSLKTPAXXPKP

SEQ ID NO: 24194 - protein, 32 aa, Artificial Sequence
  GFR-binding peptide
  MOD_RES (31), (32): Xaa is C or S
EVVMEEYKFKVVKDYEDLYLMSIPELETPVXX

SEQ ID NO: 24195 - protein, 38 aa, Artificial Sequence
  GFR-binding peptide
  MOD_RES (2), (4), (38): Xaa is C or S
  MOD_RES (16), (17), (18), (19), (20): Xaa is A or G
  MOD_RES (21), (22), (23), (24): Xaa is A or G or is absent
RXGXAEVVMDEYQKYXXXXXXXXXIYLISIPSLRAPVX

SEQ ID NO: 24196 - protein, 40 aa, Artificial Sequence; identical to SEQ ID NO: 3205
  GFR-binding peptide
  MOD_RES (2), (4), (36), (37): Xaa is C or S

SEQ ID NO: 24197 - protein, 39 aa, Artificial Sequence; identical to SEQ ID NO: 3207
  GFR-binding peptide
  MOD_RES (34), (35): Xaa is C or S
  MOD_RES (12), (13), (14), (15), (16): Xaa is A or G
  MOD_RES (17), (18), (19), (20): Xaa is A or G or is absent

SEQ ID NO: 24198 - protein, 34 aa, Artificial Sequence; identical to SEQ ID NO: 3208
  GFR-binding peptide
  MOD_RES (33), (34): Xaa is C or S
  MOD_RES (11), (12), (13), (14), (15): Xaa is A or G
  MOD_RES (16), (17), (18), (19): Xaa is A or G or is absent

SEQ ID NO: 24199 - protein, 39 aa, Artificial Sequence
  GFR-binding peptide
  MOD_RES (2), (35), (36): Xaa is C or S
  MOD_RES (13), (14), (15), (16), (17): Xaa is A or G
  MOD_RES (18), (19), (20), (21): Xaa is A or G or is absent
KXSRVIMEYKFKXXXXXXXXXLYLISIPELAQPVXXPAA

SEQ ID NO: 24200 - protein, 34 aa, Artificial Sequence; identical to SEQ ID NO: 3210
  GFR-binding peptide
  MOD_RES (33), (34): Xaa is C or S

SEQ ID NO: 24201 - protein, 38 aa, Artificial Sequence
  GFR-binding peptide
  MOD_RES (1), (3), (35), (36): Xaa is C or S
XGXARVVMNEYQKYIVNSSDDIYLVSIPSLQTPAXXPK

SEQ ID NO: 24202 - protein, 40 aa, Artificial Sequence
  GFR-binding peptide
  MOD_RES (1), (34), (35): Xaa is C or S
  MOD_RES (12), (13), (14), (15), (16): Xaa is A or G
  MOD_RES (17), (18), (19), (20): Xaa is A or G or is absent
XSKVVMEYQKYXXXXXXXXXIYLISIPSLDQPVXXPSASA

SEQ ID NO: 24203 - protein, 36 aa, Artificial Sequence
  GFR-binding peptide
  MOD_RES (2), (4): Xaa is C or S
  MOD_RES (15), (16), (17), (18), (19): Xaa is A or G
  MOD_RES (20), (21), (22), (23): Xaa is A or G or is absent
SXKXSKVVMEYQKYXXXXXXXXXIYLISIPSLDQPV

SEQ ID NO: 24204 - protein, 41 aa, Artificial Sequence
  GFR-binding peptide
  MOD_RES (2), (4), (38), (39): Xaa is C or S
  MOD_RES (16), (17), (18), (19), (20): Xaa is A or G
  MOD_RES (21), (22), (23), (24): Xaa is A or G or is absent
RXGXESVAMGEYKFKXXXXXXXXXLYLISIPELKTPVXXAK

SEQ ID NO: 24205 - protein, 38 aa, Artificial Sequence
  GFR-binding peptide
  MOD_RES (1), (35), (36): Xaa is C or S
  MOD_RES (13), (14), (15), (16), (17): Xaa is A or G
  MOD_RES (18), (19), (20), (21): Xaa is A or G or is absent
XGEVVMEEYQKYXXXXXXXXXIYLMSIPSLETPVXXAK

SEQ ID NO: 24206 - protein, 38 aa, Artificial Sequence
  GFR-binding peptide
  MOD_RES (1), (3), (36), (37): Xaa is C or S
  MOD_RES (14), (15), (16), (17), (18): Xaa is A or G
  MOD_RES (19), (20), (21), (22): Xaa is A or G or is absent
XKXSKVIMEYKFKXXXXXXXXXLYLISIPELDQSVXXP

SEQ ID NO: 24207 - protein, 34 aa, Artificial Sequence
  GFR-binding peptide
  MOD_RES (2), (4): Xaa is C or S
SXKXSRVIMEYKFKVKPKRGVLYLISIPELAQPV

SEQ ID NO: 24208 - protein, 43 aa, Artificial Sequence; identical to SEQ ID NO: 3213
  GFR-binding peptide
  MOD_RES (2), (37), (38): Xaa is C or S
  MOD_RES (15), (16), (17), (18), (19): Xaa is A or G
  MOD_RES (20), (21), (22), (23): Xaa is A or G or is absent

SEQ ID NO: 24209 - protein, 43 aa, Artificial Sequence; identical to SEQ ID NO: 3214
  GFR-binding peptide
  MOD_RES (2), (4), (37), (38): Xaa is C or S
  MOD_RES (15), (16), (17), (18), (19): Xaa is A or G
  MOD_RES (20), (21), (22), (23): Xaa is A or G or is absent

SEQ ID NO: 24210 - protein, 34 aa, Artificial Sequence; identical to SEQ ID NO: 3216
  GFR-binding peptide
  MOD_RES (34), (34): Xaa is C or S
  MOD_RES (12), (13), (14), (15), (16): Xaa is A or G
  MOD_RES (17), (18), (19), (20): Xaa is A or G or is absent

SEQ ID NO: 24211 - protein, 32 aa, Artificial Sequence
  GFR-binding peptide
  MOD_RES (32), (32): Xaa is C or S
ESVAMGRYKKLYTVVGKDFYLISIANLKTPVX

SEQ ID NO: 24212 - protein, 35 aa, Artificial Sequence; identical to SEQ ID NO: 3218
  GFR-binding peptide
  MOD_RES (1), (34), (35): Xaa is C or S

SEQ ID NO: 24213 - protein, 40 aa, Artificial Sequence; identical to SEQ ID NO: 3219
  GFR-binding peptide
  MOD_RES (1), (3), (35), (36): Xaa is C or S

SEQ ID NO: 24214 - protein, 37 aa, Artificial Sequence; identical to SEQ ID NO: 3223
  GFR-binding peptide
  MOD_RES (2), (4), (36), (37): Xaa is C or S

SEQ ID NO: 24215 - protein, 36 aa, Artificial Sequence
  GFR-binding peptide
  MOD_RES (1), (35), (36): Xaa is C or S
  MOD_RES (13), (14), (15), (16), (17): Xaa is A or G
  MOD_RES (18), (19), (20), (21): Xaa is A or G or is absent
XSRVVMNEYQKYXXXXXXXXXIYLVSIPSLKTPAXX

SEQ ID NO: 24216 - protein, 37 aa, Artificial Sequence
  GFR-binding peptide
  MOD_RES (31), (32): Xaa is C or S
EVVMEEYQKYVVKDYEDIYLMSIPSLETPVXXAKPIS

SEQ ID NO: 24217 - protein, 39 aa, Artificial Sequence
  GFR-binding peptide
  MOD_RES (33), (34): Xaa is C or S
EAVSMGEEYQKYTPVGMDDIYLVSIPSLKTPVXXAKGVK

SEQ ID NO: 24218 - protein, 35 aa, Artificial Sequence
  GFR-binding peptide
  MOD_RES (31), (32): Xaa is C or S
SKVVMEYQKYVKPTRGVIYLISIPSLDQPVXXPSA

SEQ ID NO: 24219 - protein, 39 aa, Artificial Sequence; identical to SEQ ID NO: 3225
  GFR-binding peptide
  MOD_RES (2), (35), (36): Xaa is C or S
  MOD_RES (13), (14), (15), (16), (17): Xaa is A or G
  MOD_RES (18), (19), (20), (21): Xaa is A or G or is absent

SEQ ID NO: 24220 - protein, 32 aa, Artificial Sequence
  GFR-binding peptide
  MOD_RES (32), (32): Xaa is C or S
GEVVMEEYQKYVVKDYEDIYLMSIPSLETPVX

SEQ ID NO: 24221 - protein, 34 aa, Artificial Sequence
  GFR-binding peptide
  MOD_RES (1), (34): Xaa is C or S
XEAVSMGEEYKFKTPVGMDDLYLVSIPELKTPVX

SEQ ID NO: 24222 - protein, 41 aa, Artificial Sequence; identical to SEQ ID NO: 3227
  GFR-binding peptide
  MOD_RES (2), (4), (35), (36): Xaa is C or S

SEQ ID NO: 24223 - protein, 40 aa, Artificial Sequence
  GFR-binding peptide
  MOD_RES (2), (4), (37), (38): Xaa is C or S
  MOD_RES (15), (16), (17), (18), (19): Xaa is A or G
  MOD_RES (20), (21), (22), (23): Xaa is A or G or is absent
SXKXSKVVMEYKFKXXXXXXXXXLYLISIPELDQPVXXPS

SEQ ID NO: 24224 - protein, 42 aa, Artificial Sequence; identical to SEQ ID NO: 3231
  GFR-binding peptide
  MOD_RES (2), (4), (36), (37): Xaa is C or S

SEQ ID NO: 24225 - protein, 39 aa, Artificial Sequence; identical to SEQ ID NO: 3232
  GFR-binding peptide
  MOD_RES (1), (33), (34): Xaa is C or S

SEQ ID NO: 24226 - protein, 35 aa, Artificial Sequence
  GFR-binding peptide
  MOD_RES (1), (33), (34): Xaa is C or S
XGEVVMEEYQKYVVKDYEDIYLMSIPSLETPVXXA

SEQ ID NO: 24227 - protein, 39 aa, Artificial Sequence; identical to SEQ ID NO: 3235
  GFR-binding peptide
  MOD_RES (1), (3), (36), (37): Xaa is C or S
  MOD_RES (14), (15), (16), (17), (18): Xaa is A or G
  MOD_RES (19), (20), (21), (22): Xaa is A or G or is absent

SEQ ID NO: 24228 - protein, 39 aa, Artificial Sequence; identical to SEQ ID NO: 3236
  GFR-binding peptide
  MOD_RES (2), (4), (38): Xaa is C or S
  MOD_RES (16), (17), (18), (19), (20): Xaa is A or G
  MOD_RES (21), (22), (23), (24): Xaa is A or G or is absent

SEQ ID NO: 24229 - protein, 43 aa, Artificial Sequence
  GFR-binding peptide
  MOD_RES (2), (37), (38): Xaa is C or S
  MOD_RES (15), (16), (17), (18), (19): Xaa is A or G
  MOD_RES (20), (21), (22), (23): Xaa is A or G or is absent
GXEAVSMGEEYQKYXXXXXXXXXIYLVSIPSLKTPVXXAKGVK

SEQ ID NO: 24230 - protein, 35 aa, Artificial Sequence
  GFR-binding peptide
  MOD_RES (33), (34): Xaa is C or S
  MOD_RES (11), (12), (13), (14), (15): Xaa is A or G
  MOD_RES (16), (17), (18), (19): Xaa is A or G or is absent
RVVMNEYQKYXXXXXXXXXIYLVSIPSLQTPAXXP

SEQ ID NO: 24231 - protein, 36 aa, Artificial Sequence
  GFR-binding peptide
  MOD_RES (2), (33), (34): Xaa is C or S
KXSRVIMEYQKYVKPKRGVIYLISIPSLAQPVXXPA

SEQ ID NO: 24232 - protein, 35 aa, Artificial Sequence; identical to SEQ ID NO: 3240
  GFR-binding peptide
  MOD_RES (34), (35): Xaa is C or S
  MOD_RES (12), (13), (14), (15), (16): Xaa is A or G
  MOD_RES (17), (18), (19), (20): Xaa is A or G or is absent

SEQ ID NO: 24233 - protein, 40 aa, Artificial Sequence
  GFR-binding peptide
  MOD_RES (1), (3), (37), (38): Xaa is C or S
  MOD_RES (15), (16), (17), (18), (19): Xaa is A or G
  MOD_RES (20), (21), (22), (23): Xaa is A or G or is absent
XGXGEVVMEEYQKYXXXXXXXXXIYLMSIPSLETPVXXAK

SEQ ID NO: 24234 - protein, 31 aa, Artificial Sequence; identical to SEQ ID NO: 3242
  GFR-binding peptide
  MOD_RES (1), (1): Xaa is C or S

SEQ ID NO: 24235 - protein, 39 aa, Artificial Sequence
  GFR-binding peptide
  MOD_RES (2), (36), (37): Xaa is C or S
  MOD_RES (14), (15), (16), (17), (18): Xaa is A or G
  MOD_RES (19), (20), (21), (22): Xaa is A or G or is absent
GXAEVVMDYHYKLXXXXXXXXXKYLISIPSLRAPVXXSA

SEQ ID NO: 24236 - protein, 39 aa, Artificial Sequence
  GFR-binding peptide
  MOD_RES (2), (35), (36): Xaa is C or S
  MOD_RES (13), (14), (15), (16), (17): Xaa is A or G
  MOD_RES (18), (19), (20), (21): Xaa is A or G or is absent
KXSKVIMEYKFKXXXXXXXXXLYLISIPELDQSVXXPSA

SEQ ID NO: 24237 - protein, 36 aa, Artificial Sequence
  GFR-binding peptide
  MOD_RES (2), (4), (36): Xaa is C or S
RXGXESVAMGYHYKLYTVVGKDKYLISIPSLKTPVX

SEQ ID NO: 24238 - protein, 41 aa, Artificial Sequence
  GFR-binding peptide
  MOD_RES (2), (36), (37): Xaa is C or S
  MOD_RES (14), (15), (16), (17), (18): Xaa is A or G
  MOD_RES (19), (20), (21), (22): Xaa is A or G or is absent
GXAEVVMDYHYKLXXXXXXXXXKYLISIPSLRAPVXXSAPA

SEQ ID NO: 24239 - protein, 40 aa, Artificial Sequence; identical to SEQ ID NO: 3247
  GFR-binding peptide
  MOD_RES (2), (4), (38), (39): Xaa is C or S
  MOD_RES (16), (17), (18), (19), (20): Xaa is A or G
  MOD_RES (21), (22), (23), (24): Xaa is A or G or is absent

SEQ ID NO: 24240 - protein, 33 aa, Artificial Sequence; identical to SEQ ID NO: 3250
  GFR-binding peptide
  MOD_RES (31), (32): Xaa is C or S

SEQ ID NO: 24241 - protein, 32 aa, Artificial Sequence; identical to SEQ ID NO: 3253
  GFR-binding peptide
  MOD_RES (1), (1): Xaa is C or S

SEQ ID NO: 24242 - protein, 41 aa, Artificial Sequence; identical to SEQ ID NO: 3255
  GFR-binding peptide
  MOD_RES (1), (3), (37), (38): Xaa is C or S
  MOD_RES (15), (16), (17), (18), (19): Xaa is A or G
  MOD_RES (20), (21), (22), (23): Xaa is A or G or is absent

SEQ ID NO: 24243 - protein, 38 aa, Artificial Sequence
  GFR-binding peptide
  MOD_RES (1), (36), (37): Xaa is C or S
  MOD_RES (14), (15), (16), (17), (18): Xaa is A or G
  MOD_RES (19), (20), (21), (22): Xaa is A or G or is absent
XEAVSMGEEYQKYXXXXXXXXXIYLVSIPSLKTPVXXA

SEQ ID NO: 24244 - protein, 37 aa, Artificial Sequence
  GFR-binding peptide
  MOD_RES (34), (35): Xaa is C or S
  MOD_RES (12), (13), (14), (15), (16): Xaa is A or G
  MOD_RES (17), (18), (19), (20): Xaa is A or G or is absent
AKVVMNEYQKYXXXXXXXXXIYLVSIPSLKTPAXXAK

SEQ ID NO: 24245 - protein, 42 aa, Artificial Sequence
  GFR-binding peptide
  MOD_RES (1), (3), (36), (37): Xaa is C or S
XGXEAVSMGEEYQKYTPVGMDDIYLVSIPSLKTPVXXAKGVK

SEQ ID NO: 24246 - protein, 40 aa, Artificial Sequence
  GFR-binding peptide
  MOD_RES (2), (34), (35): Xaa is C or S
GXESVAMGEYKFKYTVVGKDLYLISIPELKTPVXXAKSAK

SEQ ID NO: 24247 - protein, 35 aa, Artificial Sequence; identical to SEQ ID NO: 3257
  GFR-binding peptide
  MOD_RES (1), (35): Xaa is C or S
  MOD_RES (13), (14), (15), (16), (17): Xaa is A or G
  MOD_RES (18), (19), (20), (21): Xaa is A or G or is absent

SEQ ID NO: 24248 - protein, 38 aa, Artificial Sequence
  GFR-binding peptide
  MOD_RES (1), (33), (34): Xaa is C or S
XGEVVMDEYQKYVVKENEDIYLMSIPSLETPVXXAKPI

SEQ ID NO: 24249 - protein, 37 aa, Artificial Sequence; identical to SEQ ID NO: 3258
  GFR-binding peptide
  MOD_RES (2), (4), (37): Xaa is C or S
  MOD_RES (15), (16), (17), (18), (19): Xaa is A or G
  MOD_RES (20), (21), (22), (23): Xaa is A or G or is absent

SEQ ID NO: 24250 - protein, 42 aa, Artificial Sequence
  GFR-binding peptide
  MOD_RES (2), (4), (39), (40): Xaa is C or S
  MOD_RES (17), (18), (19), (20), (21): Xaa is A or G
  MOD_RES (22), (23), (24), (25): Xaa is A or G or is absent
RXGXEAVSMGEEYKFKXXXXXXXXXLYLVSIPELKTPVXXAK

SEQ ID NO: 24251 - protein, 37 aa, Artificial Sequence
  GFR-binding peptide
  MOD_RES (31), (32): Xaa is C or S
KVVMNEYQKYIVNNSSDIYLVSIPSLKTPAXXAKPVA

SEQ ID NO: 24252 - protein, 39 aa, Artificial Sequence
  GFR-binding peptide
  MOD_RES (1), (3), (34), (35): Xaa is C or S
XKXSKVVMEYQKYVKPTRGVIYLISIPSLDQPVXXPSAS

SEQ ID NO: 24253 - protein, 36 aa, Artificial Sequence; identical to SEQ ID NO: 3263
  GFR-binding peptide
  MOD_RES (1), (33), (34): Xaa is C or S

SEQ ID NO: 24254 - protein, 39 aa, Artificial Sequence
  GFR-binding peptide
  MOD_RES (2), (4), (38), (39): Xaa is C or S
  MOD_RES (16), (17), (18), (19), (20): Xaa is A or G
  MOD_RES (21), (22), (23), (24): Xaa is A or G or is absent
RXGXAEVVMDEYKFKXXXXXXXXXLYLISIPELRAPVXX

SEQ ID NO: 24255 - protein, 36 aa, Artificial Sequence
  GFR-binding peptide
  MOD_RES (33), (34): Xaa is C or S
  MOD_RES (11), (12), (13), (14), (15): Xaa is A or G
  MOD_RES (16), (17), (18), (19): Xaa is A or G or is absent
SVAMGEYQKYXXXXXXXXXIYLISIPSLKTPVXXAK

SEQ ID NO: 24256 - protein, 37 aa, Artificial Sequence
  GFR-binding peptide
  MOD_RES (1), (3), (34), (35): Xaa is C or S
XKXSRVIMEYQKYVKPKRGVIYLISIPSLAQPVXXPA

SEQ ID NO: 24257 - protein, 32 aa, Artificial Sequence
  GFR-binding peptide
  MOD_RES (2), (2): Xaa is C or S
KXSRVIMEYKFKVKPKRGVLYLISIPELAQPV

SEQ ID NO: 24258 - protein, 35 aa, Artificial Sequence
  GFR-binding peptide
  MOD_RES (31), (32): Xaa is C or S
KVVMNEYQKYIVNNSSDIYLVSIPSLKTPAXXAKP

SEQ ID NO: 24259 - protein, 37 aa, Artificial Sequence
  GFR-binding peptide
  MOD_RES (1), (36), (37): Xaa is C or S
  MOD_RES (14), (15), (16), (17), (18): Xaa is A or G
  MOD_RES (19), (20), (21), (22): Xaa is A or G or is absent
XEAVSMGEEYKFKXXXXXXXXXLYLVSIPELKTPVXX

SEQ ID NO: 24260 - protein, 41 aa, Artificial Sequence
  GFR-binding peptide
  MOD_RES (2), (36), (37): Xaa is C or S
  MOD_RES (14), (15), (16), (17), (18): Xaa is A or G
  MOD_RES (19), (20), (21), (22): Xaa is A or G or is absent
GXARVVMNEYQKYXXXXXXXXXIYLVSIPSLQTPAXXPKPV

SEQ ID NO: 24261 - protein, 35 aa, Artificial Sequence; identical to SEQ ID NO: 3270
  GFR-binding peptide
  MOD_RES (2), (4): Xaa is C or S

SEQ ID NO: 24262 - protein, 42 aa, Artificial Sequence
  GFR-binding peptide
  MOD_RES (2), (4), (36), (37): Xaa is C or S
HXGXAKVVMNEYQKYIVNNSSDIYLVSIPSLKTPAXXAKPVA

SEQ ID NO: 24263 - protein, 32 aa, Artificial Sequence
  GFR-binding peptide
  MOD_RES (11), (12), (13), (14), (15): Xaa is A or G
  MOD_RES (16), (17), (18), (19): Xaa is A or G or is absent
SKVVMEYKFKXXXXXXXXXLYLISIPELDQPV

SEQ ID NO: 24264 - protein, 31 aa, Artificial Sequence
  GFR-binding peptide
ESVAMGEYKFKYTVVGKDLYLISIPELKTPV

SEQ ID NO: 24265 - protein, 36 aa, Artificial Sequence
  GFR-binding peptide
  MOD_RES (2), (34), (35): Xaa is C or S
GXAEVVMDYHYKLVVNNAADKYLISIPSLRAPVXXS

SEQ ID NO: 24266 - protein, 42 aa, Artificial Sequence; identical to SEQ ID NO: 3272
  GFR-binding peptide
  MOD_RES (2), (4), (36), (37): Xaa is C or S

SEQ ID NO: 24267 - protein, 33 aa, Artificial Sequence
  GFR-binding peptide
  MOD_RES (1), (33): Xaa is C or S
XESVAMGYHYKLYTVVGKDKYLISIPSLKTPVX

SEQ ID NO: 24268 - protein, 38 aa, Artificial Sequence
  GFR-binding peptide
  MOD_RES (2), (4), (38): Xaa is C or S
  MOD_RES (16), (17), (18), (19), (20): Xaa is A or G
  MOD_RES (21), (22), (23), (24): Xaa is A or G or is absent
HXGXARVVMNEYKFKXXXXXXXXXLYLVSIPELQTPAX

SEQ ID NO: 24269 - protein, 37 aa, Artificial Sequence; identical to SEQ ID NO: 3273
  GFR-binding peptide
  MOD_RES (33), (33): Xaa is C or S
  MOD_RES (11), (12), (13), (14), (15): Xaa is A or G
  MOD_RES (16), (17), (18), (19): Xaa is A or G or is absent

SEQ ID NO: 24270 - protein, 39 aa, Artificial Sequence; identical to SEQ ID NO: 3277
  GFR-binding peptide
  MOD_RES (1), (33), (34): Xaa is C or S

SEQ ID NO: 24271 - protein, 41 aa, Artificial Sequence; identical to SEQ ID NO: 3278
  GFR-binding peptide
  MOD_RES (2), (35), (36): Xaa is C or S

SEQ ID NO: 24272 - protein, 39 aa, Artificial Sequence
  GFR-binding peptide
  MOD_RES (2), (35), (36): Xaa is C or S
GXEAVSMGEEYKFKTPVGMDDLYLVSIPELKTPVXXAKG

SEQ ID NO: 24273 - protein, 34 aa, Artificial Sequence
  GFR-binding peptide
  MOD_RES (1), (32), (33): Xaa is C or S
XSRVIMEYQKYVKPKRGVIYLISIPSLAQPVXXP

SEQ ID NO: 24274 - protein, 33 aa, Artificial Sequence; identical to SEQ ID NO: 3281
  GFR-binding peptide
  MOD_RES (2), (33): Xaa is C or S

SEQ ID NO: 24275 - protein, 42 aa, Artificial Sequence
  GFR-binding peptide
  MOD_RES (2), (36), (37): Xaa is C or S
  MOD_RES (14), (15), (16), (17), (18): Xaa is A or G
  MOD_RES (19), (20), (21), (22): Xaa is A or G or is absent
GXSRVVMNEYQKYXXXXXXXXXIYLVSIPSLKTPAXXPKPVY

SEQ ID NO: 24276 - protein, 35 aa, Artificial Sequence
  GFR-binding peptide
  MOD_RES (31), (32): Xaa is C or S
EVVMDEYKFKVVNNAADLYLISIPELRAPVXXSAP

SEQ ID NO: 24277 - protein, 37 aa, Artificial Sequence
  GFR-binding peptide
  MOD_RES (2), (36), (37): Xaa is C or S
  MOD_RES (14), (15), (16), (17), (18): Xaa is A or G
  MOD_RES (19), (20), (21), (22): Xaa is A or G or is absent
GXESVAMGYHYKLXXXXXXXXXKYLISIPSLKTPVXX

SEQ ID NO: 24278 - protein, 35 aa, Artificial Sequence; identical to SEQ ID NO: 3283
  GFR-binding peptide
  MOD_RES (1), (35): Xaa is C or S
  MOD_RES (13), (14), (15), (16), (17): Xaa is A or G
  MOD_RES (18), (19), (20), (21): Xaa is A or G or is absent

SEQ ID NO: 24279 - protein, 38 aa, Artificial Sequence
  GFR-binding peptide
  MOD_RES (32), (32): Xaa is C or S
SRVVMNEYKFKIVNSSDDLYLVSIPELKTPAXTPKTVH

SEQ ID NO: 24280 - protein, 35 aa, Artificial Sequence; identical to SEQ ID NO: 3286
  GFR-binding peptide
  MOD_RES (1), (3), (34), (35): Xaa is C or S

SEQ ID NO: 24281 - protein, 37 aa, Artificial Sequence
  GFR-binding peptide
  MOD_RES (33), (33): Xaa is C or S
  MOD_RES (11), (12), (13), (14), (15): Xaa is A or G
  MOD_RES (16), (17), (18), (19): Xaa is A or G or is absent
RVVMNEYKFKXXXXXXXXXLYLVSIPELKTPAXTPKT

SEQ ID NO: 24282 - protein, 34 aa, Artificial Sequence
  GFR-binding peptide
  MOD_RES (34), (34): Xaa is C or S
  MOD_RES (12), (13), (14), (15), (16): Xaa is A or G
  MOD_RES (17), (18), (19), (20): Xaa is A or G or is absent
AEVVMDYHYKLXXXXXXXXXKYLISIPSLRAPVX

SEQ ID NO: 24283 - protein, 34 aa, Artificial Sequence
  GFR-binding peptide
  MOD_RES (1), (3): Xaa is C or S
XGXGEVVMEEYQKYVVKDYEDIYLMSIPSLETPV

SEQ ID NO: 24284 - protein, 32 aa, Artificial Sequence; identical to SEQ ID NO: 3291
  GFR-binding peptide
  MOD_RES (1), (1): Xaa is C or S

SEQ ID NO: 24285 - protein, 41 aa, Artificial Sequence; identical to SEQ ID NO: 3292
  GFR-binding peptide
  MOD_RES (1), (3), (36), (37): Xaa is C or S
  MOD_RES (14), (15), (16), (17), (18): Xaa is A or G
  MOD_RES (19), (20), (21), (22): Xaa is A or G or is absent

SEQ ID NO: 24286 - protein, 33 aa, Artificial Sequence; identical to SEQ ID NO: 3294
  GFR-binding peptide
  MOD_RES (2), (33): Xaa is C or S

SEQ ID NO: 24287 - protein, 36 aa, Artificial Sequence; identical to SEQ ID NO: 3296
  GFR-binding peptide
  MOD_RES (1), (35), (36): Xaa is C or S
  MOD_RES (13), (14), (15), (16), (17): Xaa is A or G
  MOD_RES (18), (19), (20), (21): Xaa is A or G or is absent

SEQ ID NO: 24288 - protein, 39 aa, Artificial Sequence
  GFR-binding peptide
  MOD_RES (2), (4), (38), (39): Xaa is C or S
  MOD_RES (16), (17), (18), (19), (20): Xaa is A or G
  MOD_RES (21), (22), (23), (24): Xaa is A or G or is absent
HXGXSRVVMNEYKFKXXXXXXXXXLYLVSIPELKTPAXX

SEQ ID NO: 24289 - protein, 37 aa, Artificial Sequence
  GFR-binding peptide
  MOD_RES (2), (36), (37): Xaa is C or S
  MOD_RES (14), (15), (16), (17), (18): Xaa is A or G
  MOD_RES (19), (20), (21), (22): Xaa is A or G or is absent
GXESVAMGEYKFKXXXXXXXXXLYLISIPELKTPVXX

SEQ ID NO: 24290 - protein, 40 aa, Artificial Sequence
  GFR-binding peptide
  MOD_RES (34), (35): Xaa is C or S
  MOD_RES (12), (13), (14), (15), (16): Xaa is A or G
  MOD_RES (17), (18), (19), (20): Xaa is A or G or is absent
ESVAMGRYKKLXXXXXXXXXFYLISIANLKTPVXXAKSAK

SEQ ID NO: 24291 - protein, 35 aa, Artificial Sequence
  GFR-binding peptide
  MOD_RES (1), (34), (35): Xaa is C or S
  MOD_RES (12), (13), (14), (15), (16): Xaa is A or G
  MOD_RES (17), (18), (19), (20): Xaa is A or G or is absent
XSRVIMEYKFKXXXXXXXXXLYLISIPELAQPVXX

SEQ ID NO: 24292 - protein, 34 aa, Artificial Sequence
  GFR-binding peptide
  MOD_RES (31), (31): Xaa is C or S
RVVMNEYKFKIVNSSDDLYLVSIPELKTPAXTPK

SEQ ID NO: 24293 - protein, 38 aa, Artificial Sequence
  GFR-binding peptide
  MOD_RES (33), (34): Xaa is C or S
  MOD_RES (11), (12), (13), (14), (15): Xaa is A or G
  MOD_RES (16), (17), (18), (19): Xaa is A or G or is absent
KVVMNEYKFKXXXXXXXXXLYLVSIPELKTPAXXAKPV

SEQ ID NO: 24294 - protein, 40 aa, Artificial Sequence
  GFR-binding peptide
  MOD_RES (2), (36), (37): Xaa is C or S
  MOD_RES (14), (15), (16), (17), (18): Xaa is A or G
  MOD_RES (19), (20), (21), (22): Xaa is A or G or is absent
GXESVAMGEYKFKXXXXXXXXXLYLISIPELKTPVXXAKS

SEQ ID NO: 24295 - protein, 39 aa, Artificial Sequence
  GFR-binding peptide
  MOD_RES (2), (4), (36), (37): Xaa is C or S
HXGXARVVMNEYQKYIVNSSDDIYLVSIPSLQTPAXXPK

SEQ ID NO: 24296 - protein, 37 aa, Artificial Sequence
  GFR-binding peptide
  MOD_RES (2), (34), (35): Xaa is C or S
GXSRVVMNEYQKYIVNSSDDIYLVSIPSLKTPAXXPK

SEQ ID NO: 24297 - protein, 34 aa, Artificial Sequence
  GFR-binding peptide
  MOD_RES (34), (34): Xaa is C or S
  MOD_RES (12), (13), (14), (15), (16): Xaa is A or G
  MOD_RES (17), (18), (19), (20): Xaa is A or G or is absent
ESVAMGEYQKYXXXXXXXXXIYLISIPSLKTPVX

SEQ ID NO: 24298 - protein, 39 aa, Artificial Sequence
  GFR-binding peptide
  MOD_RES (1), (34), (35): Xaa is C or S
  MOD_RES (12), (13), (14), (15), (16): Xaa is A or G
  MOD_RES (17), (18), (19), (20): Xaa is A or G or is absent
XSKVIMEYQKYXXXXXXXXXIYLISIPSLDQSVXXPSAS

SEQ ID NO: 24299 - protein, 38 aa, Artificial Sequence
  GFR-binding peptide
  MOD_RES (2), (4), (37), (38): Xaa is C or S
  MOD_RES (15), (16), (17), (18), (19): Xaa is A or G
  MOD_RES (20), (21), (22), (23): Xaa is A or G or is absent
SXKXSRVIMEYKFKXXXXXXXXXLYLISIPELAQPVXX

SEQ ID NO: 24300 - protein, 31 aa, Artificial Sequence; identical to SEQ ID NO: 3305
  GFR-binding peptide
  MOD_RES (31), (31): Xaa is C or S

SEQ ID NO: 24301 - protein, 30 aa, Artificial Sequence
  GFR-binding peptide
SVAMGRYKKLYTVVGKDFYLISIANLKTPV

SEQ ID NO: 24302 - protein, 41 aa, Artificial Sequence; identical to SEQ ID NO: 3308
  GFR-binding peptide
  MOD_RES (2), (4), (38), (39): Xaa is C or S
  MOD_RES (16), (17), (18), (19), (20): Xaa is A or G
  MOD_RES (21), (22), (23), (24): Xaa is A or G or is absent

SEQ ID NO: 24303 - protein, 33 aa, Artificial Sequence
  GFR-binding peptide
  MOD_RES (1), (32), (33): Xaa is C or S
XSKVIMEYKFKIKPTKGILYLISIPELDQSVXX

SEQ ID NO: 24304 - protein, 40 aa, Artificial Sequence; identical to SEQ ID NO: 3312
  GFR-binding peptide
  MOD_RES (1), (35), (36): Xaa is C or S
  MOD_RES (13), (14), (15), (16), (17): Xaa is A or G
  MOD_RES (18), (19), (20), (21): Xaa is A or G or is absent

SEQ ID NO: 24305 - protein, 37 aa, Artificial Sequence; identical to SEQ ID NO: 3315
  GFR-binding peptide
  MOD_RES (32), (33): Xaa is C or S

SEQ ID NO: 24306 - protein, 34 aa, Artificial Sequence; identical to SEQ ID NO: 3316
  GFR-binding peptide
  MOD_RES (2), (2): Xaa is C or S

SEQ ID NO: 24307 - protein, 39 aa, Artificial Sequence
  GFR-binding peptide
  MOD_RES (1), (34), (35): Xaa is C or S
XEAVSMGEEYQKYTPVGMDDIYLVSIPSLKTPVXXAKGV

SEQ ID NO: 24308 - protein, 37 aa, Artificial Sequence
  GFR-binding peptide
  MOD_RES (1), (3), (34), (35): Xaa is C or S
XKXSKVIMEYKFKIKPTKGILYLISIPELDQSVXXPS

SEQ ID NO: 24309 - protein, 35 aa, Artificial Sequence
  GFR-binding peptide
  MOD_RES (33), (34): Xaa is C or S
  MOD_RES (11), (12), (13), (14), (15): Xaa is A or G
  MOD_RES (16), (17), (18), (19): Xaa is A or G or is absent
SVAMGEYKFKXXXXXXXXXLYLISIPELKTPVXXA

SEQ ID NO: 24310 - protein, 35 aa, Artificial Sequence
  GFR-binding peptide
  MOD_RES (33), (34): Xaa is C or S
  MOD_RES (11), (12), (13), (14), (15): Xaa is A or G
  MOD_RES (16), (17), (18), (19): Xaa is A or G or is absent
SKVVMEYKFKXXXXXXXXXLYLISIPELDQPVXXP

SEQ ID NO: 24311 - protein, 38 aa, Artificial Sequence
  GFR-binding peptide
  MOD_RES (2), (36), (37): Xaa is C or S
  MOD_RES (14), (15), (16), (17), (18): Xaa is A or G
  MOD_RES (19), (20), (21), (22): Xaa is A or G or is absent
GXAEVVMDEYQKYXXXXXXXXXIYLISIPSLRAPVXXS

SEQ ID NO: 24312 - protein, 34 aa, Artificial Sequence
  GFR-binding peptide
  MOD_RES (2), (34): Xaa is C or S
GXESVAMGEYKFKYTVVGKDLYLISIPELKTPVX

SEQ ID NO: 24313 - protein, 36 aa, Artificial Sequence
  GFR-binding peptide
  MOD_RES (1), (33), (34): Xaa is C or S
XESVAMGEYKFKYTVVGKDLYLISIPELKTPVXXAK

SEQ ID NO: 24314 - protein, 36 aa, Artificial Sequence
  GFR-binding peptide
  MOD_RES (31), (32): Xaa is C or S
RVVMNEYQKYIVNSSDDIYLVSIPSLQTPAXXPKPV

SEQ ID NO: 24315 - protein, 40 aa, Artificial Sequence
  GFR-binding peptide
  MOD_RES (2), (4), (36): Xaa is C or S
HXGXSRVVMNEYKFKIVNSSDDLYLVSIPELKTPAXTPKT

SEQ ID NO: 24316 - protein, 40 aa, Artificial Sequence; identical to SEQ ID NO: 3321
  GFR-binding peptide
  MOD_RES (1), (3), (37), (38): Xaa is C or S
  MOD_RES (15), (16), (17), (18), (19): Xaa is A or G
  MOD_RES (20), (21), (22), (23): Xaa is A or G or is absent

SEQ ID NO: 24317 - protein, 38 aa, Artificial Sequence
  GFR-binding peptide
  MOD_RES (2), (37), (38): Xaa is C or S
  MOD_RES (15), (16), (17), (18), (19): Xaa is A or G
  MOD_RES (20), (21), (22), (23): Xaa is A or G or is absent
GXEAVSMGEEYQKYXXXXXXXXXIYLVSIPSLKTPVXX

SEQ ID NO: 24318 - protein, 38 aa, Artificial Sequence
  GFR-binding peptide
  MOD_RES (2), (36), (37): Xaa is C or S
  MOD_RES (14), (15), (16), (17), (18): Xaa is A or G
  MOD_RES (19), (20), (21), (22): Xaa is A or G or is absent
GXGEVVMEEYKFKXXXXXXXXXLYLMSIPELETPVXXA

SEQ ID NO: 24319 - protein, 38 aa, Artificial Sequence; identical to SEQ ID NO: 3324
  GFR-binding peptide
  MOD_RES (2), (36), (37): Xaa is C or S
  MOD_RES (14), (15), (16), (17), (18): Xaa is A or G
  MOD_RES (19), (20), (21), (22): Xaa is A or G or is absent

SEQ ID NO: 24320 - protein, 38 aa, Artificial Sequence
  GFR-binding peptide
  MOD_RES (2), (33), (34): Xaa is C or S
KXSKVVMEYKFKVKPTRGVLYLISIPELDQPVXXPSAS

SEQ ID NO: 24321 - protein, 40 aa, Artificial Sequence; identical to SEQ ID NO: 3327
  GFR-binding peptide
  MOD_RES (1), (3), (36), (37): Xaa is C or S
  MOD_RES (14), (15), (16), (17), (18): Xaa is A or G
  MOD_RES (19), (20), (21), (22): Xaa is A or G or is absent

SEQ ID NO: 24322 - protein, 38 aa, Artificial Sequence; identical to SEQ ID NO: 3328
  GFR-binding peptide
  MOD_RES (34), (34): Xaa is C or S
  MOD_RES (12), (13), (14), (15), (16): Xaa is A or G
  MOD_RES (17), (18), (19), (20): Xaa is A or G or is absent

SEQ ID NO: 24323 - protein, 35 aa, Artificial Sequence; identical to SEQ ID NO: 3329
  GFR-binding peptide
  MOD_RES (2), (4): Xaa is C or S

SEQ ID NO: 24324 - protein, 39 aa, Artificial Sequence; identical to SEQ ID NO: 3330
  GFR-binding peptide
  MOD_RES (1), (33), (34): Xaa is C or S

SEQ ID NO: 24325 - protein, 40 aa, Artificial Sequence; identical to SEQ ID NO: 3331
  GFR-binding peptide
  MOD_RES (2), (4), (37), (38): Xaa is C or S
  MOD_RES (15), (16), (17), (18), (19): Xaa is A or G
  MOD_RES (20), (21), (22), (23): Xaa is A or G or is absent

SEQ ID NO: 24326 - protein, 35 aa, Artificial Sequence
  GFR-binding peptide
  MOD_RES (34), (35): Xaa is C or S
  MOD_RES (12), (13), (14), (15), (16): Xaa is A or G
  MOD_RES (17), (18), (19), (20): Xaa is A or G or is absent
AKVVMNEYKFKXXXXXXXXXLYLVSIPELKTPAXX

SEQ ID NO: 24327 - protein, 37 aa, Artificial Sequence; identical to SEQ ID NO: 3340
  GFR-binding peptide
  MOD_RES (2), (4), (37): Xaa is C or S
  MOD_RES (15), (16), (17), (18), (19): Xaa is A or G
  MOD_RES (20), (21), (22), (23): Xaa is A or G or is absent

SEQ ID NO: 24328 - protein, 37 aa, Artificial Sequence; identical to SEQ ID NO: 3341
  GFR-binding peptide
  MOD_RES (2), (35), (36): Xaa is C or S
  MOD_RES (13), (14), (15), (16), (17): Xaa is A or G
  MOD_RES (18), (19), (20), (21): Xaa is A or G or is absent

SEQ ID NO: 24329 - protein, 37 aa, Artificial Sequence; identical to SEQ ID NO: 3342
  GFR-binding peptide
  MOD_RES (1), (32), (33): Xaa is C or S

SEQ ID NO: 24330 - protein, 35 aa, Artificial Sequence
  GFR-binding peptide
  MOD_RES (1), (33), (34): Xaa is C or S
XGEVVMDEYKFKVVKENEDLYLMSIPELETPVXXA

SEQ ID NO: 24331 - protein, 37 aa, Artificial Sequence
  GFR-binding peptide
  MOD_RES (2), (34), (35): Xaa is C or S
GXAKVVMNEYQKYIVNNSSDIYLVSIPSLKTPAXXAK

SEQ ID NO: 24332 - protein, 35 aa, Artificial Sequence
  GFR-binding peptide
  MOD_RES (34), (35): Xaa is C or S
  MOD_RES (12), (13), (14), (15), (16): Xaa is A or G
  MOD_RES (17), (18), (19), (20): Xaa is A or G or is absent
ESVAMGRYKKLXXXXXXXXXFYLISIANLKTPVXX

SEQ ID NO: 24333 - protein, 38 aa, Artificial Sequence
  GFR-binding peptide
  MOD_RES (34), (35): Xaa is C or S
  MOD_RES (12), (13), (14), (15), (16): Xaa is A or G
  MOD_RES (17), (18), (19), (20): Xaa is A or G or is absent
AEVVMDEYKFKXXXXXXXXXLYLISIPELRAPVXXSAP

SEQ ID NO: 24334 - protein, 39 aa, Artificial Sequence
  GFR-binding peptide
  MOD_RES (34), (35): Xaa is C or S
  MOD_RES (12), (13), (14), (15), (16): Xaa is A or G
  MOD_RES (17), (18), (19), (20): Xaa is A or G or is absent
AKVVMNEYQKYXXXXXXXXXIYLVSIPSLKTPAXXAKPV

SEQ ID NO: 24335 - protein, 36 aa, Artificial Sequence; identical to SEQ ID NO: 3353
  GFR-binding peptide
  MOD_RES (2), (34), (35): Xaa is C or S

SEQ ID NO: 24336 - protein, 38 aa, Artificial Sequence; identical to SEQ ID NO: 3355
  GFR-binding peptide
  MOD_RES (2), (4), (37), (38): Xaa is C or S
  MOD_RES (15), (16), (17), (18), (19): Xaa is A or G
  MOD_RES (20), (21), (22), (23): Xaa is A or G or is absent

SEQ ID NO: 24337 - protein, 43 aa, Artificial Sequence; identical to SEQ ID NO: 3356
  GFR-binding peptide
  MOD_RES (1), (3), (37), (38): Xaa is C or S
  MOD_RES (15), (16), (17), (18), (19): Xaa is A or G
  MOD_RES (20), (21), (22), (23): Xaa is A or G or is absent

SEQ ID NO: 24338 - protein, 35 aa, Artificial Sequence
  GFR-binding peptide
  MOD_RES (31), (32): Xaa is C or S
EVVMDRYKKLVVNNAADFYLISIANLRAPVXXSAP

SEQ ID NO: 24339 - protein, 41 aa, Artificial Sequence
  GFR-binding peptide
  MOD_RES (2), (35), (36): Xaa is C or S
  MOD_RES (13), (14), (15), (16), (17): Xaa is A or G
  MOD_RES (18), (19), (20), (21): Xaa is A or G or is absent
KXSRVIMEYQKYXXXXXXXXXIYLISIPSLAQPVXXPAASA

SEQ ID NO: 24340 - protein, 34 aa, Artificial Sequence
  GFR-binding peptide
  MOD_RES (31), (32): Xaa is C or S
EVVMDYHYKLVVNNAADKYLISIPSLRAPVXXSA

SEQ ID NO: 24341 - protein, 34 aa, Artificial Sequence; identical to SEQ ID NO: 3360
  GFR-binding peptide
  MOD_RES (1), (32), (33): Xaa is C or S

SEQ ID NO: 24342 - protein, 39 aa, Artificial Sequence
  GFR-binding peptide
  MOD_RES (1), (33), (34): Xaa is C or S
XAEVVMDRYKKLVVNNAADFYLISIANLRAPVXXSAPAA

SEQ ID NO: 24343 - protein, 36 aa, Artificial Sequence
  GFR-binding peptide
  MOD_RES (2), (4): Xaa is C or S
RXGXEAVSMGEEYKFKTPVGMDDLYLVSIPELKTPV

SEQ ID NO: 24344 - protein, 42 aa, Artificial Sequence; identical to SEQ ID NO: 3362
  GFR-binding peptide
  MOD_RES (2), (4), (37), (38): Xaa is C or S
  MOD_RES (15), (16), (17), (18), (19): Xaa is A or G
  MOD_RES (20), (21), (22), (23): Xaa is A or G or is absent

SEQ ID NO: 24345 - protein, 31 aa, Artificial Sequence; identical to SEQ ID NO: 3363
  GFR-binding peptide

SEQ ID NO: 24346 - protein, 33 aa, Artificial Sequence; identical to SEQ ID NO: 3364
  GFR-binding peptide
  MOD_RES (31), (32): Xaa is C or S

SEQ ID NO: 24347 - protein, 36 aa, Artificial Sequence
  GFR-binding peptide
  MOD_RES (1), (3): Xaa is C or S
  MOD_RES (15), (16), (17), (18), (19): Xaa is A or G
  MOD_RES (20), (21), (22), (23): Xaa is A or G or is absent
XGXGEVVMDEYQKYXXXXXXXXXIYLMSIPSLETPV

SEQ ID NO: 24348 - protein, 40 aa, Artificial Sequence
  GFR-binding peptide
  MOD_RES (2), (36), (37): Xaa is C or S
  MOD_RES (14), (15), (16), (17), (18): Xaa is A or G
  MOD_RES (19), (20), (21), (22): Xaa is A or G or is absent
GXESVAMGYHYKLXXXXXXXXXKYLISIPSLKTPVXXAKS

SEQ ID NO: 24349 - protein, 37 aa, Artificial Sequence; identical to SEQ ID NO: 3368
  GFR-binding peptide
  MOD_RES (2), (4), (36), (37): Xaa is C or S

SEQ ID NO: 24350 - protein, 37 aa, Artificial Sequence; identical to SEQ ID NO: 3369
  GFR-binding peptide
  MOD_RES (2), (4), (36), (37): Xaa is C or S

SEQ ID NO: 24351 - protein, 36 aa, Artificial Sequence; identical to SEQ ID NO: 3370
  GFR-binding peptide
  MOD_RES (1), (35), (36): Xaa is C or S
  MOD_RES (13), (14), (15), (16), (17): Xaa is A or G
  MOD_RES (18), (19), (20), (21): Xaa is A or G or is absent

SEQ ID NO: 24352 - protein, 41 aa, Artificial Sequence
  GFR-binding peptide
  MOD_RES (1), (3), (35), (36): Xaa is C or S
XGXESVAMGRYKKLYTVVGKDFYLISIANLKTPVXXAKSAK

SEQ ID NO: 24353 - protein, 37 aa, Artificial Sequence
  GFR-binding peptide
  MOD_RES (31), (32): Xaa is C or S
EVVMDEYQKYVVKENEDIYLMSIPSLETPVXXAKPIK

SEQ ID NO: 24354 - protein, 37 aa, Artificial Sequence; identical to SEQ ID NO: 3372
  GFR-binding peptide
  MOD_RES (1), (3), (37): Xaa is C or S
  MOD_RES (15), (16), (17), (18), (19): Xaa is A or G
  MOD_RES (20), (21), (22), (23): Xaa is A or G or is absent

SEQ ID NO: 24355 - protein, 39 aa, Artificial Sequence
  GFR-binding peptide
  MOD_RES (1), (35), (36): Xaa is C or S
  MOD_RES (13), (14), (15), (16), (17): Xaa is A or G
  MOD_RES (18), (19), (20), (21): Xaa is A or G or is absent
XAEVVMDEYQKYXXXXXXXXXIYLISIPSLRAPVXXSAP

SEQ ID NO: 24356 - protein, 37 aa, Artificial Sequence; identical to SEQ ID NO: 3373
  GFR-binding peptide
  MOD_RES (1), (3), (34), (35): Xaa is C or S

SEQ ID NO: 24357 - protein, 30 aa, Artificial Sequence
  GFR-binding peptide
SVAMGEYKFKYTVVGKDLYLISIPELKTPV

SEQ ID NO: 24358 - protein, 42 aa, Artificial Sequence; identical to SEQ ID NO: 3378
  GFR-binding peptide
  MOD_RES (1), (3), (37), (38): Xaa is C or S
  MOD_RES (15), (16), (17), (18), (19): Xaa is A or G
  MOD_RES (20), (21), (22), (23): Xaa is A or G or is absent

SEQ ID NO: 24359 - protein, 40 aa, Artificial Sequence; identical to SEQ ID NO: 3379
  GFR-binding peptide
  MOD_RES (2), (34), (35): Xaa is C or S

SEQ ID NO: 24360 - protein, 34 aa, Artificial Sequence
  GFR-binding peptide
  MOD_RES (1), (1): Xaa is C or S
  MOD_RES (13), (14), (15), (16), (17): Xaa is A or G
  MOD_RES (18), (19), (20), (21): Xaa is A or G or is absent
XGEVVMEEYKFKXXXXXXXXXLYLMSIPELETPV

SEQ ID NO: 24361 - protein, 37 aa, Artificial Sequence
  GFR-binding peptide
  MOD_RES (31), (32): Xaa is C or S
SKVIMEYKFKIKPTKGILYLISIPELDQSVXXPSASA

SEQ ID NO: 24362 - protein, 39 aa, Artificial Sequence
  GFR-binding peptide
  MOD_RES (2), (34), (35): Xaa is C or S
GXAEVVMDYHYKLVVNNAADKYLISIPSLRAPVXXSAPA

SEQ ID NO: 24363 - protein, 38 aa, Artificial Sequence
  GFR-binding peptide
  MOD_RES (33), (34): Xaa is C or S
  MOD_RES (11), (12), (13), (14), (15): Xaa is A or G
  MOD_RES (16), (17), (18), (19): Xaa is A or G or is absent
SRVIMEYQKYXXXXXXXXXIYLISIPSLAQPVXXPAAS

SEQ ID NO: 24364 - protein, 32 aa, Artificial Sequence
  GFR-binding peptide
  MOD_RES (11), (12), (13), (14), (15): Xaa is A or G
  MOD_RES (16), (17), (18), (19): Xaa is A or G or is absent
SVAMGEYQKYXXXXXXXXXIYLISIPSLKTPV

SEQ ID NO: 24365 - protein, 36 aa, Artificial Sequence; identical to SEQ ID NO: 3382
  GFR-binding peptide
  MOD_RES (1), (35), (36): Xaa is C or S
  MOD_RES (13), (14), (15), (16), (17): Xaa is A or G
  MOD_RES (18), (19), (20), (21): Xaa is A or G or is absent

SEQ ID NO: 24366 - protein, 37 aa, Artificial Sequence
  GFR-binding peptide
  MOD_RES (33), (34): Xaa is C or S
  MOD_RES (11), (12), (13), (14), (15): Xaa is A or G
  MOD_RES (16), (17), (18), (19): Xaa is A or G or is absent
EVVMEEYQKYXXXXXXXXXIYLMSIPSLETPVXXAKP

SEQ ID NO: 24367 - protein, 36 aa, Artificial Sequence; identical to SEQ ID NO: 3388
  GFR-binding peptide
  MOD_RES (2), (4), (36): Xaa is C or S

SEQ ID NO: 24368 - protein, 38 aa, Artificial Sequence
  GFR-binding peptide
  MOD_RES (33), (34): Xaa is C or S
  MOD_RES (11), (12), (13), (14), (15): Xaa is A or G
  MOD_RES (16), (17), (18), (19): Xaa is A or G or is absent
EVVMDEYKFKXXXXXXXXXLYLISIPELRAPVXXSAPA

SEQ ID NO: 24369 - protein, 33 aa, Artificial Sequence
  GFR-binding peptide
  MOD_RES (33), (33): Xaa is C or S
EAVSMGEEYKFKTPVGMDDLYLVSIPELKTPVX

SEQ ID NO: 24370 - protein, 32 aa, Artificial Sequence
  GFR-binding peptide
  MOD_RES (32), (32): Xaa is C or S
AEVVMDYHYKLVVNNAADKYLISIPSLRAPVX

SEQ ID NO: 24371 - protein, 43 aa, Artificial Sequence
  GFR-binding peptide
  MOD_RES (2), (4), (38), (39): Xaa is C or S
  MOD_RES (16), (17), (18), (19), (20): Xaa is A or G
  MOD_RES (21), (22), (23), (24): Xaa is A or G or is absent
RXGXESVAMGYHYKLXXXXXXXXXKYLISIPSLKTPVXXAKSA

SEQ ID NO: 24372 - protein, 41 aa, Artificial Sequence; identical to SEQ ID NO: 3395
  GFR-binding peptide
  MOD_RES (2), (4), (38), (39): Xaa is C or S
  MOD_RES (16), (17), (18), (19), (20): Xaa is A or G
  MOD_RES (21), (22), (23), (24): Xaa is A or G or is absent

SEQ ID NO: 24373 - protein, 41 aa, Artificial Sequence
  GFR-binding peptide
  MOD_RES (2), (4), (38), (39): Xaa is C or S
  MOD_RES (16), (17), (18), (19), (20): Xaa is A or G
  MOD_RES (21), (22), (23), (24): Xaa is A or G or is absent
HXGXARVVMNEYQKYXXXXXXXXXIYLVSIPSLQTPAXXPK

SEQ ID NO: 24374 - protein, 37 aa, Artificial Sequence; identical to SEQ ID NO: 3399
  GFR-binding peptide
  MOD_RES (1), (34), (35): Xaa is C or S
  MOD_RES (12), (13), (14), (15), (16): Xaa is A or G
  MOD_RES (17), (18), (19), (20): Xaa is A or G or is absent

SEQ ID NO: 24375 - protein, 44 aa, Artificial Sequence
  GFR-binding peptide
  MOD_RES (2), (4), (38): Xaa is C or S
  MOD_RES (16), (17), (18), (19), (20): Xaa is A or G
  MOD_RES (21), (22), (23), (24): Xaa is A or G or is absent
HXGXSRVVMNEYQKYXXXXXXXXXIYLVSIPSLKTPAXTPKTVH

SEQ ID NO: 24376 - protein, 40 aa, Artificial Sequence
  GFR-binding peptide
  MOD_RES (1), (35), (36): Xaa is C or S
  MOD_RES (13), (14), (15), (16), (17): Xaa is A or G
  MOD_RES (18), (19), (20), (21): Xaa is A or G or is absent
XESVAMGEYKFKXXXXXXXXXLYLISIPELKTPVXXAKSA

SEQ ID NO: 24377 - protein, 42 aa, Artificial Sequence
  GFR-binding peptide
  MOD_RES (2), (4), (36), (37): Xaa is C or S
RXGXGEVVMEEYKFKVVKDYEDLYLMSIPELETPVXXAKPIS

SEQ ID NO: 24378 - protein, 35 aa, Artificial Sequence; identical to SEQ ID NO: 3404
  GFR-binding peptide
  MOD_RES (2), (34), (35): Xaa is C or S

SEQ ID NO: 24379 - protein, 42 aa, Artificial Sequence
  GFR-binding peptide
  MOD_RES (2), (4), (38), (39): Xaa is C or S
  MOD_RES (16), (17), (18), (19), (20): Xaa is A or G
  MOD_RES (21), (22), (23), (24): Xaa is A or G or is absent
HXGXAKVVMNEYQKYXXXXXXXXXIYLVSIPSLKTPAXXAKP

SEQ ID NO: 24380 - protein, 44 aa, Artificial Sequence
  GFR-binding peptide
  MOD_RES (2), (4), (38), (39): Xaa is C or S
  MOD_RES (16), (17), (18), (19), (20): Xaa is A or G
  MOD_RES (21), (22), (23), (24): Xaa is A or G or is absent
HXGXAKVVMNEYQKYXXXXXXXXXIYLVSIPSLKTPAXXAKPVA

SEQ ID NO: 24381 - protein, 38 aa, Artificial Sequence
  GFR-binding peptide
  MOD_RES (34), (35): Xaa is C or S
  MOD_RES (12), (13), (14), (15), (16): Xaa is A or G
  MOD_RES (17), (18), (19), (20): Xaa is A or G or is absent
ESVAMGYHYKLXXXXXXXXXKYLISIPSLKTPVXXAKS

SEQ ID NO: 24382 - protein, 38 aa, Artificial Sequence
  GFR-binding peptide
  MOD_RES (34), (35): Xaa is C or S
  MOD_RES (12), (13), (14), (15), (16): Xaa is A or G
  MOD_RES (17), (18), (19), (20): Xaa is A or G or is absent
AEVVMDYHYKLXXXXXXXXXKYLISIPSLRAPVXXSAP

SEQ ID NO: 24383 - protein, 40 aa, Artificial Sequence
  GFR-binding peptide
  MOD_RES (1), (3), (34), (35): Xaa is C or S
XKXSRVIMEYQKYVKPKRGVIYLISIPSLAQPVXXPAASA

SEQ ID NO: 24384 - protein, 36 aa, Artificial Sequence
  GFR-binding peptide
  MOD_RES (2), (35), (36): Xaa is C or S
GXEAVSMGEEYKFKTPVGMDDLYLVSIPELKTPVXX

SEQ ID NO: 24385 - protein, 34 aa, Artificial Sequence
  GFR-binding peptide
  MOD_RES (1), (1): Xaa is C or S
  MOD_RES (13), (14), (15), (16), (17): Xaa is A or G
  MOD_RES (18), (19), (20), (21): Xaa is A or G or is absent
XESVAMGRYKKLXXXXXXXXXFYLISIANLKTPV

SEQ ID NO: 24386 - protein, 43 aa, Artificial Sequence
  GFR-binding peptide
  MOD_RES (2), (4), (38), (39): Xaa is C or S
  MOD_RES (16), (17), (18), (19), (20): Xaa is A or G
  MOD_RES (21), (22), (23), (24): Xaa is A or G or is absent
RXGXESVAMGEYQKYXXXXXXXXXIYLISIPSLKTPVXXAKSA

SEQ ID NO: 24387 - protein, 39 aa, Artificial Sequence; identical to SEQ ID NO: 3406
  GFR-binding peptide
  MOD_RES (2), (34), (35): Xaa is C or S

SEQ ID NO: 24388 - protein, 38 aa, Artificial Sequence
  GFR-binding peptide
  MOD_RES (1), (3), (35), (36): Xaa is C or S
XGXESVAMGYHYKLYTVVGKDKYLISIPSLKTPVXXAK

SEQ ID NO: 24389 - protein, 37 aa, Artificial Sequence
  GFR-binding peptide
  MOD_RES (1), (33), (34): Xaa is C or S
XGEVVMDEYQKYVVKENEDIYLMSIPSLETPVXXAKP

SEQ ID NO: 24390 - protein, 37 aa, Artificial Sequence; identical to SEQ ID NO: 3408
  GFR-binding peptide
  MOD_RES (31), (32): Xaa is C or S

SEQ ID NO: 24391 - protein, 34 aa, Artificial Sequence; identical to SEQ ID NO: 3409
  GFR-binding peptide
  MOD_RES (1), (33): Xaa is C or S

SEQ ID NO: 24392 - protein, 39 aa, Artificial Sequence
  GFR-binding peptide
  MOD_RES (2), (4), (37), (38): Xaa is C or S
  MOD_RES (15), (16), (17), (18), (19): Xaa is A or G
  MOD_RES (20), (21), (22), (23): Xaa is A or G or is absent
SXKXSKVIMEYKFKXXXXXXXXXLYLISIPELDQSVXXP

SEQ ID NO: 24393 - protein, 35 aa, Artificial Sequence; identical to SEQ ID NO: 3410
  GFR-binding peptide
  MOD_RES (2), (2): Xaa is C or S
  MOD_RES (14), (15), (16), (17), (18): Xaa is A or G
  MOD_RES (19), (20), (21), (22): Xaa is A or G or is absent

SEQ ID NO: 24394 - protein, 40 aa, Artificial Sequence; identical to SEQ ID NO: 3411
  GFR-binding peptide
  MOD_RES (1), (34), (35): Xaa is C or S
  MOD_RES (12), (13), (14), (15), (16): Xaa is A or G
  MOD_RES (17), (18), (19), (20): Xaa is A or G or is absent

SEQ ID NO: 24395 - protein, 37 aa, Artificial Sequence
  GFR-binding peptide
  MOD_RES (2), (33), (34): Xaa is C or S
KXSRVIMEYKFKVKPKRGVLYLISIPELAQPVXXPAA

SEQ ID NO: 24396 - protein, 33 aa, Artificial Sequence
  GFR-binding peptide
  MOD_RES (31), (32): Xaa is C or S
RVVMNEYQKYIVNSSDDIYLVSIPSLKTPAXXP

SEQ ID NO: 24397 - protein, 34 aa, Artificial Sequence
  GFR-binding peptide
  MOD_RES (2), (34): Xaa is C or S
GXGEVVMEEYKFKVVKDYEDLYLMSIPELETPVX

SEQ ID NO: 24398 - protein, 38 aa, Artificial Sequence
  GFR-binding peptide
  MOD_RES (1), (33), (34): Xaa is C or S
XGEVVMEEYKFKVVKDYEDLYLMSIPELETPVXXAKPI

SEQ ID NO: 24399 - protein, 38 aa, Artificial Sequence
  GFR-binding peptide
  MOD_RES (1), (3), (36), (37): Xaa is C or S
XGXEAVSMGEEYQKYTPVGMDDIYLVSIPSLKTPVXXA

SEQ ID NO: 24400 - protein, 36 aa, Artificial Sequence; identical to SEQ ID NO: 3418
  GFR-binding peptide
  MOD_RES (33), (34): Xaa is C or S
  MOD_RES (11), (12), (13), (14), (15): Xaa is A or G
  MOD_RES (16), (17), (18), (19): Xaa is A or G or is absent

SEQ ID NO: 24401 - protein, 38 aa, Artificial Sequence
  GFR-binding peptide
  MOD_RES (2), (4), (37), (38): Xaa is C or S
  MOD_RES (15), (16), (17), (18), (19): Xaa is A or G
  MOD_RES (20), (21), (22), (23): Xaa is A or G or is absent
SXKXSRVIMEYQKYXXXXXXXXXIYLISIPSLAQPVXX

SEQ ID NO: 24402 - protein, 35 aa, Artificial Sequence; identical to SEQ ID NO: 3420
  GFR-binding peptide
  MOD_RES (32), (33): Xaa is C or S

SEQ ID NO: 24403 - protein, 31 aa, Artificial Sequence
  GFR-binding peptide
GEVVMDEYQKYVVKENEDIYLMSIPSLETPV

SEQ ID NO: 24404 - protein, 40 aa, Artificial Sequence
  GFR-binding peptide
  MOD_RES (2), (36), (37): Xaa is C or S
  MOD_RES (14), (15), (16), (17), (18): Xaa is A or G
  MOD_RES (19), (20), (21), (22): Xaa is A or G or is absent
GXARVVMNEYQKYXXXXXXXXXIYLVSIPSLQTPAXXPKP

SEQ ID NO: 24405 - protein, 38 aa, Artificial Sequence
  GFR-binding peptide
  MOD_RES (33), (34): Xaa is C or S
  MOD_RES (11), (12), (13), (14), (15): Xaa is A or G
  MOD_RES (16), (17), (18), (19): Xaa is A or G or is absent
RVVMNEYQKYXXXXXXXXXIYLVSIPSLKTPAXXPKPV

SEQ ID NO: 24406 - protein, 31 aa, Artificial Sequence; identical to SEQ ID NO: 3421
  GFR-binding peptide

SEQ ID NO: 24407 - protein, 35 aa, Artificial Sequence
  GFR-binding peptide
  MOD_RES (32), (32): Xaa is C or S
SRVVMNEYKFKIVNSSDDLYLVSIPELKTPAXTPK

SEQ ID NO: 24408 - protein, 37 aa, Artificial Sequence
  GFR-binding peptide
  MOD_RES (2), (4): Xaa is C or S
  MOD_RES (16), (17), (18), (19), (20): Xaa is A or G
  MOD_RES (21), (22), (23), (24): Xaa is A or G or is absent
RXGXESVAMGYHYKLXXXXXXXXXKYLISIPSLKTPV

SEQ ID NO: 24409 - protein, 35 aa, Artificial Sequence
  GFR-binding peptide
  MOD_RES (34), (35): Xaa is C or S
  MOD_RES (12), (13), (14), (15), (16): Xaa is A or G
  MOD_RES (17), (18), (19), (20): Xaa is A or G or is absent
SRVVMNEYKFKXXXXXXXXXLYLVSIPELKTPAXX

SEQ ID NO: 24410 - protein, 39 aa, Artificial Sequence
  GFR-binding peptide
  MOD_RES (2), (36), (37): Xaa is C or S
  MOD_RES (14), (15), (16), (17), (18): Xaa is A or G
  MOD_RES (19), (20), (21), (22): Xaa is A or G or is absent
GXSRVVMNEYQKYXXXXXXXXXIYLVSIPSLKTPAXXPK

SEQ ID NO: 24411 - protein, 36 aa, Artificial Sequence
  GFR-binding peptide
  MOD_RES (2), (36): Xaa is C or S
  MOD_RES (14), (15), (16), (17), (18): Xaa is A or G
  MOD_RES (19), (20), (21), (22): Xaa is A or G or is absent
GXARVVMNEYQKYXXXXXXXXXIYLVSIPSLQTPAX

SEQ ID NO: 24412 - protein, 38 aa, Artificial Sequence
  GFR-binding peptide
  MOD_RES (33), (34): Xaa is C or S
  MOD_RES (11), (12), (13), (14), (15): Xaa is A or G
  MOD_RES (16), (17), (18), (19): Xaa is A or G or is absent
RVVMNEYKFKXXXXXXXXXLYLVSIPELQTPAXXPKPV

SEQ ID NO: 24413 - protein, 36 aa, Artificial Sequence; identical to SEQ ID NO: 3423
  GFR-binding peptide
  MOD_RES (1), (34), (35): Xaa is C or S
  MOD_RES (12), (13), (14), (15), (16): Xaa is A or G
  MOD_RES (17), (18), (19), (20): Xaa is A or G or is absent

SEQ ID NO: 24414 - protein, 38 aa, Artificial Sequence
  GFR-binding peptide
  MOD_RES (34), (35): Xaa is C or S
  MOD_RES (12), (13), (14), (15), (16): Xaa is A or G
  MOD_RES (17), (18), (19), (20): Xaa is A or G or is absent
ESVAMGEYQKYXXXXXXXXXIYLISIPSLKTPVXXAKS

SEQ ID NO: 24415 - protein, 33 aa, Artificial Sequence; identical to SEQ ID NO: 3424
  GFR-binding peptide
  MOD_RES (12), (13), (14), (15), (16): Xaa is A or G
  MOD_RES (17), (18), (19), (20): Xaa is A or G or is absent

SEQ ID NO: 24416 - protein, 35 aa, Artificial Sequence
  GFR-binding peptide
  MOD_RES (2), (4): Xaa is C or S
RXGXGEVVMEEYKFKVVKDYEDLYLMSIPELETPV

SEQ ID NO: 24417 - protein, 35 aa, Artificial Sequence
  GFR-binding peptide
  MOD_RES (1), (35): Xaa is C or S
  MOD_RES (13), (14), (15), (16), (17): Xaa is A or G
  MOD_RES (18), (19), (20), (21): Xaa is A or G or is absent
XSRVVMNEYQKYXXXXXXXXXIYLVSIPSLKTPAX

SEQ ID NO: 24418 - protein, 32 aa, Artificial Sequence
  GFR-binding peptide
  MOD_RES (31), (32): Xaa is C or S
SKVVMEYKFKVKPTRGVLYLISIPELDQPVXX

SEQ ID NO: 24419 - protein, 41 aa, Artificial Sequence
  GFR-binding peptide
  MOD_RES (2), (4), (36), (37): Xaa is C or S
RXGXESVAMGEYQKYYTVVGKDIYLISIPSLKTPVXXAKSA

SEQ ID NO: 24420 - protein, 40 aa, Artificial Sequence; identical to SEQ ID NO: 3426
  GFR-binding peptide
  MOD_RES (2), (4), (36): Xaa is C or S

SEQ ID NO: 24421 - protein, 43 aa, Artificial Sequence; identical to SEQ ID NO: 3427
  GFR-binding peptide
  MOD_RES (2), (4), (38), (39): Xaa is C or S
  MOD_RES (16), (17), (18), (19), (20): Xaa is A or G
  MOD_RES (21), (22), (23), (24): Xaa is A or G or is absent

SEQ ID NO: 24422 - protein, 40 aa, Artificial Sequence; identical to SEQ ID NO: 3428
  GFR-binding peptide
  MOD_RES (2), (35), (36): Xaa is C or S

SEQ ID NO: 24423 - protein, 37 aa, Artificial Sequence; identical to SEQ ID NO: 3430
  GFR-binding peptide
  MOD_RES (1), (33): Xaa is C or S

SEQ ID NO: 24424 - protein, 35 aa, Artificial Sequence
  GFR-binding peptide
  MOD_RES (1), (33), (34): Xaa is C or S
XESVAMGYHYKLYTVVGKDKYLISIPSLKTPVXXA

SEQ ID NO: 24425 - protein, 37 aa, Artificial Sequence
  GFR-binding peptide
  MOD_RES (1), (3): Xaa is C or S
  MOD_RES (16), (17), (18), (19), (20): Xaa is A or G
  MOD_RES (21), (22), (23), (24): Xaa is A or G or is absent
XGXEAVSMGEEYQKYXXXXXXXXXIYLVSIPSLKTPV

SEQ ID NO: 24426 - protein, 37 aa, Artificial Sequence
  GFR-binding peptide
  MOD_RES (2), (4), (37): Xaa is C or S
  MOD_RES (15), (16), (17), (18), (19): Xaa is A or G
  MOD_RES (20), (21), (22), (23): Xaa is A or G or is absent
SXKXSKVIMEYKFKXXXXXXXXXLYLISIPELDQSVX

SEQ ID NO: 24427 - protein, 40 aa, Artificial Sequence
  GFR-binding peptide
  MOD_RES (1), (3), (35), (36): Xaa is C or S
XGXESVAMGRYKKLYTVVGKDFYLISIANLKTPVXXAKSA

SEQ ID NO: 24428 - protein, 40 aa, Artificial Sequence; identical to SEQ ID NO: 3439
  GFR-binding peptide
  MOD_RES (2), (4), (35), (36): Xaa is C or S

SEQ ID NO: 24429 - protein, 38 aa, Artificial Sequence
  GFR-binding peptide
  MOD_RES (2), (34), (35): Xaa is C or S
GXGEVVMDEYQKYVVKENEDIYLMSIPSLETPVXXAKP

SEQ ID NO: 24430 - protein, 40 aa, Artificial Sequence; identical to SEQ ID NO: 3440
  GFR-binding peptide
  MOD_RES (2), (36), (37): Xaa is C or S
  MOD_RES (14), (15), (16), (17), (18): Xaa is A or G
  MOD_RES (19), (20), (21), (22): Xaa is A or G or is absent

SEQ ID NO: 24431 - protein, 37 aa, Artificial Sequence
  GFR-binding peptide
  MOD_RES (1), (35), (36): Xaa is C or S
  MOD_RES (13), (14), (15), (16), (17): Xaa is A or G
  MOD_RES (18), (19), (20), (21): Xaa is A or G or is absent
XESVAMGEYQKYXXXXXXXXXIYLISIPSLKTPVXXA

SEQ ID NO: 24432 - protein, 32 aa, Artificial Sequence; identical to SEQ ID NO: 3446
  GFR-binding peptide
  MOD_RES (11), (12), (13), (14), (15): Xaa is A or G
  MOD_RES (16), (17), (18), (19): Xaa is A or G or is absent

SEQ ID NO: 24433 - protein, 40 aa, Artificial Sequence
  GFR-binding peptide
  MOD_RES (1), (3), (35), (36): Xaa is C or S
XGXAKVVMNEYQKYIVNNSSDIYLVSIPSLKTPAXXAKPV

SEQ ID NO: 24434 - protein, 38 aa, Artificial Sequence
  GFR-binding peptide
  MOD_RES (2), (33), (34): Xaa is C or S
KXSKVIMEYKFKIKPTKGILYLISIPELDQSVXXPSAS

SEQ ID NO: 24435 - protein, 37 aa, Artificial Sequence
  GFR-binding peptide
  MOD_RES (1), (3), (37): Xaa is C or S
  MOD_RES (15), (16), (17), (18), (19): Xaa is A or G
  MOD_RES (20), (21), (22), (23): Xaa is A or G or is absent
XGXESVAMGEYQKYXXXXXXXXXIYLISIPSLKTPVX

SEQ ID NO: 24436 - protein, 33 aa, Artificial Sequence; identical to SEQ ID NO: 3452
  GFR-binding peptide
  MOD_RES (32), (33): Xaa is C or S

SEQ ID NO: 24437 - protein, 43 aa, Artificial Sequence
  GFR-binding peptide
  MOD_RES (2), (4), (38), (39): Xaa is C or S
  MOD_RES (16), (17), (18), (19), (20): Xaa is A or G
  MOD_RES (21), (22), (23), (24): Xaa is A or G or is absent
RXGXGEVVMDEYKFKXXXXXXXXXLYLMSIPELETPVXXAKPI

SEQ ID NO: 24438 - protein, 32 aa, Artificial Sequence
  GFR-binding peptide
  MOD_RES (1), (1): Xaa is C or S
XESVAMGRYKKLYTVVGKDFYLISIANLKTPV

SEQ ID NO: 24439 - protein, 38 aa, Artificial Sequence; identical to SEQ ID NO: 3460
  GFR-binding peptide
  MOD_RES (2), (35), (36): Xaa is C or S
  MOD_RES (13), (14), (15), (16), (17): Xaa is A or G
  MOD_RES (18), (19), (20), (21): Xaa is A or G or is absent

SEQ ID NO: 24440 - protein, 40 aa, Artificial Sequence
  GFR-binding peptide
  MOD_RES (2), (36), (37): Xaa is C or S
  MOD_RES (14), (15), (16), (17), (18): Xaa is A or G
  MOD_RES (19), (20), (21), (22): Xaa is A or G or is absent
GXESVAMGRYKKLXXXXXXXXXFYLISIANLKTPVXXAKS

SEQ ID NO: 24441 - protein, 33 aa, Artificial Sequence
  GFR-binding peptide
  MOD_RES (33), (33): Xaa is C or S
  MOD_RES (11), (12), (13), (14), (15): Xaa is A or G
  MOD_RES (16), (17), (18), (19): Xaa is A or G or is absent
SKVIMEYQKYXXXXXXXXXIYLISIPSLDQSVX

SEQ ID NO: 24442 - protein, 36 aa, Artificial Sequence
  GFR-binding peptide
  MOD_RES (2), (34), (35): Xaa is C or S
GXAEVVMDEYKFKVVNNAADLYLISIPELRAPVXXS

SEQ ID NO: 24443 - protein, 33 aa, Artificial Sequence
  GFR-binding peptide
  MOD_RES (33), (33): Xaa is C or S
  MOD_RES (11), (12), (13), (14), (15): Xaa is A or G
  MOD_RES (16), (17), (18), (19): Xaa is A or G or is absent
EVVMDYHYKLXXXXXXXXXKYLISIPSLRAPVX

SEQ ID NO: 24444 - protein, 41 aa, Artificial Sequence; identical to SEQ ID NO: 3464
  GFR-binding peptide
  MOD_RES (2), (4), (37), (38): Xaa is C or S
  MOD_RES (15), (16), (17), (18), (19): Xaa is A or G
  MOD_RES (20), (21), (22), (23): Xaa is A or G or is absent

SEQ ID NO: 24445 - protein, 34 aa, Artificial Sequence; identical to SEQ ID NO: 3465
  GFR-binding peptide
  MOD_RES (31), (32): Xaa is C or S

SEQ ID NO: 24446 - protein, 41 aa, Artificial Sequence; identical to SEQ ID NO: 3466
  GFR-binding peptide
  MOD_RES (2), (4), (37), (38): Xaa is C or S

SEQ ID NO: 24447 - protein, 36 aa, Artificial Sequence; identical to SEQ ID NO: 3467
  GFR-binding peptide
  MOD_RES (2), (4), (36): Xaa is C or S

SEQ ID NO: 24448 - protein, 39 aa, Artificial Sequence; identical to SEQ ID NO: 3468
  GFR-binding peptide
  MOD_RES (2), (34), (35): Xaa is C or S

SEQ ID NO: 24449 - protein, 32 aa, Artificial Sequence
  GFR-binding peptide
  MOD_RES (11), (12), (13), (14), (15): Xaa is A or G
  MOD_RES (16), (17), (18), (19): Xaa is A or G or is absent
EVVMDEYKFKXXXXXXXXXLYLMSIPELETPV

SEQ ID NO: 24450 - protein, 33 aa, Artificial Sequence; identical to SEQ ID NO: 3471
  GFR-binding peptide
  MOD_RES (2), (2): Xaa is C or S

SEQ ID NO: 24451 - protein, 36 aa, Artificial Sequence
  GFR-binding peptide
  MOD_RES (2), (34): Xaa is C or S
GXSRVVMNEYQKYIVNSSDDIYLVSIPSLKTPAXTP

SEQ ID NO: 24452 - protein, 34 aa, Artificial Sequence
  GFR-binding peptide
  MOD_RES (32), (33): Xaa is C or S
AEVVMDRYKKLVVNNAADFYLISIANLRAPVXXS

SEQ ID NO: 24453 - protein, 32 aa, Artificial Sequence
  GFR-binding peptide
  MOD_RES (1), (1): Xaa is C or S
XESVAMGYHYKLYTVVGKDKYLISIPSLKTPV

SEQ ID NO: 24454 - protein, 39 aa, Artificial Sequence
  GFR-binding peptide
  MOD_RES (1), (3), (35), (36): Xaa is C or S
XGXAEVVMDEYKFKVVNNAADLYLISIPELRAPVXXSAP

SEQ ID NO: 24455 - protein, 37 aa, Artificial Sequence; identical to SEQ ID NO: 3475
  GFR-binding peptide
  MOD_RES (34), (35): Xaa is C or S
  MOD_RES (12), (13), (14), (15), (16): Xaa is A or G
  MOD_RES (17), (18), (19), (20): Xaa is A or G or is absent

SEQ ID NO: 24456 - protein, 33 aa, Artificial Sequence
  GFR-binding peptide
  MOD_RES (12), (13), (14), (15), (16): Xaa is A or G
  MOD_RES (17), (18), (19), (20): Xaa is A or G or is absent
AEVVMDRYKKLXXXXXXXXXFYLISIANLRAPV

SEQ ID NO: 24457 - protein, 42 aa, Artificial Sequence; identical to SEQ ID NO: 3476
  GFR-binding peptide
  MOD_RES (1), (3), (37), (38): Xaa is C or S
  MOD_RES (15), (16), (17), (18), (19): Xaa is A or G
  MOD_RES (20), (21), (22), (23): Xaa is A or G or is absent

SEQ ID NO: 24458 - protein, 37 aa, Artificial Sequence
  GFR-binding peptide
  MOD_RES (33), (34): Xaa is C or S
  MOD_RES (11), (12), (13), (14), (15): Xaa is A or G
  MOD_RES (16), (17), (18), (19): Xaa is A or G or is absent
SVAMGEYKFKXXXXXXXXXLYLISIPELKTPVXXAKS

SEQ ID NO: 24459 - protein, 34 aa, Artificial Sequence; identical to SEQ ID NO: 3477
  GFR-binding peptide
  MOD_RES (2), (4): Xaa is C or S

SEQ ID NO: 24460 - protein, 39 aa, Artificial Sequence; identical to SEQ ID NO: 3478
  GFR-binding peptide
  MOD_RES (1), (3), (35), (36): Xaa is C or S

SEQ ID NO: 24461 - protein, 35 aa, Artificial Sequence; identical to SEQ ID NO: 3480
  GFR-binding peptide
  MOD_RES (33), (34): Xaa is C or S
  MOD_RES (11), (12), (13), (14), (15): Xaa is A or G
  MOD_RES (16), (17), (18), (19): Xaa is A or G or is absent

SEQ ID NO: 24462 - protein, 35 aa, Artificial Sequence; identical to SEQ ID NO: 3481
  GFR-binding peptide
  MOD_RES (31), (32): Xaa is C or S

SEQ ID NO: 24463 - protein, 36 aa, Artificial Sequence
  GFR-binding peptide
  MOD_RES (2), (35), (36): Xaa is C or S
  MOD_RES (13), (14), (15), (16), (17): Xaa is A or G
  MOD_RES (18), (19), (20), (21): Xaa is A or G or is absent
KXSKVIMEYKFKXXXXXXXXXLYLISIPELDQSVXX

SEQ ID NO: 24464 - protein, 36 aa, Artificial Sequence
  GFR-binding peptide
  MOD_RES (1), (33), (34): Xaa is C or S
XAKVVMNEYQKYIVNNSSDIYLVSIPSLKTPAXXAK

SEQ ID NO: 24465 - protein, 34 aa, Artificial Sequence
  GFR-binding peptide
  MOD_RES (2), (2): Xaa is C or S
  MOD_RES (13), (14), (15), (16), (17): Xaa is A or G
  MOD_RES (18), (19), (20), (21): Xaa is A or G or is absent
KXSKVVMEYKFKXXXXXXXXXLYLISIPELDQPV

SEQ ID NO: 24466 - protein, 35 aa, Artificial Sequence; identical to SEQ ID NO: 3485
  GFR-binding peptide
  MOD_RES (2), (34): Xaa is C or S

SEQ ID NO: 24467 - protein, 31 aa, Artificial Sequence
  GFR-binding peptide
  MOD_RES (31), (31): Xaa is C or S
SKVVMEYKFKVKPTRGVLYLISIPELDQPVX

SEQ ID NO: 24468 - protein, 35 aa, Artificial Sequence; identical to SEQ ID NO: 3487
  GFR-binding peptide
  MOD_RES (34), (35): Xaa is C or S
  MOD_RES (12), (13), (14), (15), (16): Xaa is A or G
  MOD_RES (17), (18), (19), (20): Xaa is A or G or is absent

SEQ ID NO: 24469 - protein, 40 aa, Artificial Sequence; identical to SEQ ID NO: 3488
  GFR-binding peptide
  MOD_RES (1), (3), (36), (37): Xaa is C or S
  MOD_RES (14), (15), (16), (17), (18): Xaa is A or G
  MOD_RES (19), (20), (21), (22): Xaa is A or G or is absent

SEQ ID NO: 24470 - protein, 37 aa, Artificial Sequence
  GFR-binding peptide
  MOD_RES (2), (33), (34): Xaa is C or S
KXSKVVMEYQKYVKPTRGVIYLISIPSLDQPVXXPSA

SEQ ID NO: 24471 - protein, 39 aa, Artificial Sequence; identical to SEQ ID NO: 3490
  GFR-binding peptide
  MOD_RES (1), (3), (35), (36): Xaa is C or S

SEQ ID NO: 24472 - protein, 41 aa, Artificial Sequence; identical to SEQ ID NO: 3493
  GFR-binding peptide
  MOD_RES (1), (3), (36), (37): Xaa is C or S
  MOD_RES (14), (15), (16), (17), (18): Xaa is A or G
  MOD_RES (19), (20), (21), (22): Xaa is A or G or is absent

SEQ ID NO: 24473 - protein, 36 aa, Artificial Sequence
  GFR-binding peptide
  MOD_RES (1), (3): Xaa is C or S
  MOD_RES (15), (16), (17), (18), (19): Xaa is A or G
  MOD_RES (20), (21), (22), (23): Xaa is A or G or is absent
XGXGEVVMDEYKFKXXXXXXXXXLYLMSIPELETPV

SEQ ID NO: 24474 - protein, 30 aa, Artificial Sequence; identical to SEQ ID NO: 3495
  GFR-binding peptide

SEQ ID NO: 24475 - protein, 34 aa, Artificial Sequence
  GFR-binding peptide
  MOD_RES (2), (33), (34): Xaa is C or S
KXSKVIMEYQKYIKPTKGIIYLISIPSLDQSVXX

SEQ ID NO: 24476 - protein, 34 aa, Artificial Sequence; identical to SEQ ID NO: 3496
  GFR-binding peptide
  MOD_RES (33), (34): Xaa is C or S
  MOD_RES (11), (12), (13), (14), (15): Xaa is A or G
  MOD_RES (16), (17), (18), (19): Xaa is A or G or is absent

SEQ ID NO: 24477 - protein, 41 aa, Artificial Sequence
  GFR-binding peptide
  MOD_RES (2), (4), (36), (37): Xaa is C or S
HXGXSRVVMNEYQKYIVNSSDDIYLVSIPSLKTPAXXPKPV

SEQ ID NO: 24478 - protein, 42 aa, Artificial Sequence
  GFR-binding peptide
  MOD_RES (1), (3), (37), (38): Xaa is C or S
  MOD_RES (15), (16), (17), (18), (19): Xaa is A or G
  MOD_RES (20), (21), (22), (23): Xaa is A or G or is absent
XGXSRVVMNEYQKYXXXXXXXXXIYLVSIPSLKTPAXXPKPV

SEQ ID NO: 24479 - protein, 32 aa, Artificial Sequence; identical to SEQ ID NO: 3497
  GFR-binding peptide
  MOD_RES (11), (12), (13), (14), (15): Xaa is A or G
  MOD_RES (16), (17), (18), (19): Xaa is A or G or is absent

SEQ ID NO: 24480 - protein, 33 aa, Artificial Sequence; identical to SEQ ID NO: 3498
  GFR-binding peptide
  MOD_RES (33), (33): Xaa is C or S
  MOD_RES (11), (12), (13), (14), (15): Xaa is A or G
  MOD_RES (16), (17), (18), (19): Xaa is A or G or is absent

SEQ ID NO: 24481 - protein, 35 aa, Artificial Sequence
  GFR-binding peptide
  MOD_RES (1), (33), (34): Xaa is C or S
XESVAMGRYKKLYTVVGKDFYLISIANLKTPVXXA

SEQ ID NO: 24482 - protein, 36 aa, Artificial Sequence; identical to SEQ ID NO: 3500
  GFR-binding peptide
  MOD_RES (34), (35): Xaa is C or S
  MOD_RES (12), (13), (14), (15), (16): Xaa is A or G
  MOD_RES (17), (18), (19), (20): Xaa is A or G or is absent

SEQ ID NO: 24483 - protein, 37 aa, Artificial Sequence; identical to SEQ ID NO: 3501
  GFR-binding peptide
  MOD_RES (1), (3), (34), (35): Xaa is C or S

SEQ ID NO: 24484 - protein, 40 aa, Artificial Sequence
  GFR-binding peptide
  MOD_RES (1), (3), (35): Xaa is C or S
XGXSRVVMNEYKFKIVNSSDDLYLVSIPELKTPAXTPKTV

SEQ ID NO: 24485 - protein, 36 aa, Artificial Sequence
  GFR-binding peptide
  MOD_RES (1), (33), (34): Xaa is C or S
XARVVMNEYQKYIVNSSDDIYLVSIPSLQTPAXXPK

SEQ ID NO: 24486 - protein, 37 aa, Artificial Sequence
  GFR-binding peptide
  MOD_RES (1), (3), (37): Xaa is C or S
  MOD_RES (15), (16), (17), (18), (19): Xaa is A or G
  MOD_RES (20), (21), (22), (23): Xaa is A or G or is absent
XGXESVAMGEYKFKXXXXXXXXXLYLISIPELKTPVX

SEQ ID NO: 24487 - protein, 37 aa, Artificial Sequence
  GFR-binding peptide
  MOD_RES (1), (34), (35): Xaa is C or S
  MOD_RES (12), (13), (14), (15), (16): Xaa is A or G
  MOD_RES (17), (18), (19), (20): Xaa is A or G or is absent
XSRVIMEYKFKXXXXXXXXXLYLISIPELAQPVXXPA

SEQ ID NO: 24488 - protein, 35 aa, Artificial Sequence
  GFR-binding peptide
  MOD_RES (2), (4): Xaa is C or S
RXGXGEVVMDEYKFKVVKENEDLYLMSIPELETPV

SEQ ID NO: 24489 - protein, 38 aa, Artificial Sequence; identical to SEQ ID NO: 3505
  GFR-binding peptide
  MOD_RES (1), (3), (34), (35): Xaa is C or S

SEQ ID NO: 24490 - protein, 40 aa, Artificial Sequence
  GFR-binding peptide
  MOD_RES (2), (4), (36), (37): Xaa is C or S
HXGXAKVVMNEYQKYIVNNSSDIYLVSIPSLKTPAXXAKP

SEQ ID NO: 24491 - protein, 40 aa, Artificial Sequence; identical to SEQ ID NO: 3506
  GFR-binding peptide
  MOD_RES (2), (4), (36), (37): Xaa is C or S

SEQ ID NO: 24492 - protein, 34 aa, Artificial Sequence
  GFR-binding peptide
  MOD_RES (2), (33), (34): Xaa is C or S
KXSKVVMEYQKYVKPTRGVIYLISIPSLDQPVXX

SEQ ID NO: 24493 - protein, 42 aa, Artificial Sequence; identical to SEQ ID NO: 3507
  GFR-binding peptide
  MOD_RES (2), (4), (38), (39): Xaa is C or S
  MOD_RES (16), (17), (18), (19), (20): Xaa is A or G
  MOD_RES (21), (22), (23), (24): Xaa is A or G or is absent

SEQ ID NO: 24494 - protein, 35 aa, Artificial Sequence; identical to SEQ ID NO: 3509
  GFR-binding peptide
  MOD_RES (2), (2): Xaa is C or S
  MOD_RES (14), (15), (16), (17), (18): Xaa is A or G
  MOD_RES (19), (20), (21), (22): Xaa is A or G or is absent

SEQ ID NO: 24495 - protein, 43 aa, Artificial Sequence; identical to SEQ ID NO: 3510
  GFR-binding peptide
  MOD_RES (1), (3), (38), (39): Xaa is C or S
  MOD_RES (16), (17), (18), (19), (20): Xaa is A or G
  MOD_RES (21), (22), (23), (24): Xaa is A or G or is absent

SEQ ID NO: 24496 - protein, 39 aa, Artificial Sequence; identical to SEQ ID NO: 3511
  GFR-binding peptide
  MOD_RES (1), (35): Xaa is C or S
  MOD_RES (13), (14), (15), (16), (17): Xaa is A or G
  MOD_RES (18), (19), (20), (21): Xaa is A or G or is absent

SEQ ID NO: 24497 - protein, 36 aa, Artificial Sequence
  GFR-binding peptide
  MOD_RES (1), (3): Xaa is C or S
  MOD_RES (15), (16), (17), (18), (19): Xaa is A or G
  MOD_RES (20), (21), (22), (23): Xaa is A or G or is absent
XGXESVAMGRYKKLXXXXXXXXXFYLISIANLKTPV

SEQ ID NO: 24498 - protein, 39 aa, Artificial Sequence
  GFR-binding peptide
  MOD_RES (1), (35), (36): Xaa is C or S
  MOD_RES (13), (14), (15), (16), (17): Xaa is A or G
  MOD_RES (18), (19), (20), (21): Xaa is A or G or is absent
XESVAMGRYKKLXXXXXXXXXFYLISIANLKTPVXXAKS

SEQ ID NO: 24499 - protein, 34 aa, Artificial Sequence; identical to SEQ ID NO: 3514
  GFR-binding peptide
  MOD_RES (34), (34): Xaa is C or S
  MOD_RES (12), (13), (14), (15), (16): Xaa is A or G
  MOD_RES (17), (18), (19), (20): Xaa is A or G or is absent

SEQ ID NO: 24500 - protein, 37 aa, Artificial Sequence; identical to SEQ ID NO: 3515
  GFR-binding peptide
  MOD_RES (2), (4), (35), (36): Xaa is C or S

SEQ ID NO: 24501 - protein, 37 aa, Artificial Sequence
  GFR-binding peptide
  MOD_RES (1), (35), (36): Xaa is C or S
  MOD_RES (13), (14), (15), (16), (17): Xaa is A or G
  MOD_RES (18), (19), (20), (21): Xaa is A or G or is absent
XAEVVMDEYQKYXXXXXXXXXIYLISIPSLRAPVXXS

SEQ ID NO: 24502 - protein, 35 aa, Artificial Sequence
  GFR-binding peptide
  MOD_RES (2), (34), (35): Xaa is C or S
GXGEVVMDEYKFKVVKENEDLYLMSIPELETPVXX

SEQ ID NO: 24503 - protein, 32 aa, Artificial Sequence; identical to SEQ ID NO: 3520
  GFR-binding peptide
  MOD_RES (1), (1): Xaa is C or S

SEQ ID NO: 24504 - protein, 42 aa, Artificial Sequence
  GFR-binding peptide
  MOD_RES (2), (4), (37), (38): Xaa is C or S
  MOD_RES (15), (16), (17), (18), (19): Xaa is A or G
  MOD_RES (20), (21), (22), (23): Xaa is A or G or is absent
SXKXSKVIMEYQKYXXXXXXXXXIYLISIPSLDQSVXXPSAS

SEQ ID NO: 24505 - protein, 35 aa, Artificial Sequence
  GFR-binding peptide
  MOD_RES (2), (2): Xaa is C or S
  MOD_RES (14), (15), (16), (17), (18): Xaa is A or G
  MOD_RES (19), (20), (21), (22): Xaa is A or G or is absent
GXAKVVMNEYKFKXXXXXXXXXLYLVSIPELKTPA

SEQ ID NO: 24506 - protein, 42 aa, Artificial Sequence; identical to SEQ ID NO: 3521
  GFR-binding peptide
  MOD_RES (2), (4), (36): Xaa is C or S

SEQ ID NO: 24507 - protein, 41 aa, Artificial Sequence; identical to SEQ ID NO: 3522
  GFR-binding peptide
  MOD_RES (2), (4), (37), (38): Xaa is C or S
  MOD_RES (15), (16), (17), (18), (19): Xaa is A or G
  MOD_RES (20), (21), (22), (23): Xaa is A or G or is absent

SEQ ID NO: 24508 - protein, 40 aa, Artificial Sequence; identical to SEQ ID NO: 3523
  GFR-binding peptide
  MOD_RES (2), (34), (35): Xaa is C or S

SEQ ID NO: 24509 - protein, 42 aa, Artificial Sequence
  GFR-binding peptide
  MOD_RES (2), (36), (37): Xaa is C or S
  MOD_RES (14), (15), (16), (17), (18): Xaa is A or G
  MOD_RES (19), (20), (21), (22): Xaa is A or G or is absent
GXESVAMGEYKFKXXXXXXXXXLYLISIPELKTPVXXAKSAK

SEQ ID NO: 24510 - protein, 35 aa, Artificial Sequence
  GFR-binding peptide
  MOD_RES (2), (33), (34): Xaa is C or S
KXSKVVMEYKFKVKPTRGVLYLISIPELDQPVXXP

SEQ ID NO: 24511 - protein, 36 aa, Artificial Sequence
  GFR-binding peptide
  MOD_RES (2), (34), (35): Xaa is C or S
GXAKVVMNEYKFKIVNNSSDLYLVSIPELKTPAXXA

SEQ ID NO: 24512 - protein, 32 aa, Artificial Sequence; identical to SEQ ID NO: 3526
  GFR-binding peptide
  MOD_RES (1), (1): Xaa is C or S

SEQ ID NO: 24513 - protein, 38 aa, Artificial Sequence
  GFR-binding peptide
  MOD_RES (2), (4), (36), (37): Xaa is C or S
RXGXAEVVMDRYKKLVVNNAADFYLISIANLRAPVXXS

SEQ ID NO: 24514 - protein, 32 aa, Artificial Sequence
  GFR-binding peptide
  MOD_RES (1), (1): Xaa is C or S
XSRVVMNEYKFKIVNSSDDLYLVSIPELKTPA

SEQ ID NO: 24515 - protein, 41 aa, Artificial Sequence
  GFR-binding peptide
  MOD_RES (1), (35): Xaa is C or S
  MOD_RES (13), (14), (15), (16), (17): Xaa is A or G
  MOD_RES (18), (19), (20), (21): Xaa is A or G or is absent
XSRVVMNEYKFKXXXXXXXXXLYLVSIPELKTPAXTPKTVH

SEQ ID NO: 24516 - protein, 36 aa, Artificial Sequence; identical to SEQ ID NO: 3527
  GFR-binding peptide
  MOD_RES (1), (3), (34), (35): Xaa is C or S

SEQ ID NO: 24517 - protein, 35 aa, Artificial Sequence
  GFR-binding peptide
  MOD_RES (1), (33), (34): Xaa is C or S
XAEVVMDRYKKLVVNNAADFYLISIANLRAPVXXS

SEQ ID NO: 24518 - protein, 40 aa, Artificial Sequence
  GFR-binding peptide
  MOD_RES (2), (4), (38), (39): Xaa is C or S
  MOD_RES (16), (17), (18), (19), (20): Xaa is A or G
  MOD_RES (21), (22), (23), (24): Xaa is A or G or is absent
RXGXAEVVMDEYQKYXXXXXXXXXIYLISIPSLRAPVXXS

SEQ ID NO: 24519 - protein, 39 aa, Artificial Sequence; identical to SEQ ID NO: 3531
  GFR-binding peptide
  MOD_RES (2), (35), (36): Xaa is C or S

SEQ ID NO: 24520 - protein, 35 aa, Artificial Sequence
  GFR-binding peptide
  MOD_RES (32), (33): Xaa is C or S
ESVAMGYHYKLYTVVGKDKYLISIPSLKTPVXXAK

SEQ ID NO: 24521 - protein, 38 aa, Artificial Sequence; identical to SEQ ID NO: 3532
  GFR-binding peptide
  MOD_RES (34), (35): Xaa is C or S
  MOD_RES (12), (13), (14), (15), (16): Xaa is A or G
  MOD_RES (17), (18), (19), (20): Xaa is A or G or is absent

SEQ ID NO: 24522 - protein, 35 aa, Artificial Sequence; identical to SEQ ID NO: 3534
  GFR-binding peptide
  MOD_RES (1), (34), (35): Xaa is C or S
  MOD_RES (12), (13), (14), (15), (16): Xaa is A or G
  MOD_RES (17), (18), (19), (20): Xaa is A or G or is absent

SEQ ID NO: 24523 - protein, 34 aa, Artificial Sequence
  GFR-binding peptide
  MOD_RES (31), (32): Xaa is C or S
SVAMGRYKKLYTVVGKDFYLISIANLKTPVXXAK

SEQ ID NO: 24524 - protein, 36 aa, Artificial Sequence; identical to SEQ ID NO: 3535
  GFR-binding peptide
  MOD_RES (1), (3), (36): Xaa is C or S
  MOD_RES (14), (15), (16), (17), (18): Xaa is A or G
  MOD_RES (19), (20), (21), (22): Xaa is A or G or is absent

SEQ ID NO: 24525 - protein, 34 aa, Artificial Sequence; identical to SEQ ID NO: 3536
  GFR-binding peptide
  MOD_RES (1), (34): Xaa is C or S
  MOD_RES (12), (13), (14), (15), (16): Xaa is A or G
  MOD_RES (17), (18), (19), (20): Xaa is A or G or is absent

SEQ ID NO: 24526 - protein, 38 aa, Artificial Sequence
  GFR-binding peptide
  MOD_RES (2), (34), (35): Xaa is C or S
GXESVAMGRYKKLYTVVGKDFYLISIANLKTPVXXAKS

SEQ ID NO: 24527 - protein, 39 aa, Artificial Sequence
  GFR-binding peptide
  MOD_RES (1), (33), (34): Xaa is C or S
XGEVVMEEYKFKVVKDYEDLYLMSIPELETPVXXAKPIS

SEQ ID NO: 24528 - protein, 39 aa, Artificial Sequence
  GFR-binding peptide
  MOD_RES (1), (3), (34), (35): Xaa is C or S
XKXSRVIMEYQKYVKPKRGVIYLISIPSLAQPVXXPAAS

SEQ ID NO: 24529 - protein, 36 aa, Artificial Sequence
  GFR-binding peptide
  MOD_RES (1), (3), (35), (36): Xaa is C or S
XGXARVVMNEYQKYIVNSSDDIYLVSIPSLQTPAXX

SEQ ID NO: 24530 - protein, 36 aa, Artificial Sequence
  GFR-binding peptide
  MOD_RES (34), (35): Xaa is C or S
  MOD_RES (12), (13), (14), (15), (16): Xaa is A or G
  MOD_RES (17), (18), (19), (20): Xaa is A or G or is absent
AKVVMNEYQKYXXXXXXXXXIYLVSIPSLKTPAXXA

SEQ ID NO: 24531 - protein, 38 aa, Artificial Sequence
  GFR-binding peptide
  MOD_RES (1), (3), (37), (38): Xaa is C or S
  MOD_RES (15), (16), (17), (18), (19): Xaa is A or G
  MOD_RES (20), (21), (22), (23): Xaa is A or G or is absent
XGXAEVVMDRYKKLXXXXXXXXXFYLISIANLRAPVXX

SEQ ID NO: 24532 - protein, 38 aa, Artificial Sequence
  GFR-binding peptide
  MOD_RES (33), (34): Xaa is C or S
  MOD_RES (11), (12), (13), (14), (15): Xaa is A or G
  MOD_RES (16), (17), (18), (19): Xaa is A or G or is absent
SKVVMEYKFKXXXXXXXXXLYLISIPELDQPVXXPSAS

SEQ ID NO: 24533 - protein, 37 aa, Artificial Sequence
  GFR-binding peptide
  MOD_RES (31), (32): Xaa is C or S
RVVMNEYKFKIVNSSDDLYLVSIPELKTPAXXPKPVY

SEQ ID NO: 24534 - protein, 34 aa, Artificial Sequence
  GFR-binding peptide
  MOD_RES (32), (33): Xaa is C or S
GEVVMEEYKFKVVKDYEDLYLMSIPELETPVXXA

SEQ ID NO: 24535 - protein, 41 aa, Artificial Sequence
  GFR-binding peptide
  MOD_RES (2), (4), (38): Xaa is C or S
  MOD_RES (16), (17), (18), (19), (20): Xaa is A or G
  MOD_RES (21), (22), (23), (24): Xaa is A or G or is absent
HXGXSRVVMNEYQKYXXXXXXXXXIYLVSIPSLKTPAXTPK

SEQ ID NO: 24536 - protein, 40 aa, Artificial Sequence
  GFR-binding peptide
  MOD_RES (2), (36), (37): Xaa is C or S
  MOD_RES (14), (15), (16), (17), (18): Xaa is A or G
  MOD_RES (19), (20), (21), (22): Xaa is A or G or is absent
GXAKVVMNEYQKYXXXXXXXXXIYLVSIPSLKTPAXXAKP

SEQ ID NO: 24537 - protein, 38 aa, Artificial Sequence; identical to SEQ ID NO: 3543
  GFR-binding peptide
  MOD_RES (1), (3), (35), (36): Xaa is C or S

SEQ ID NO: 24538 - protein, 38 aa, Artificial Sequence
  GFR-binding peptide
  MOD_RES (1), (35), (36): Xaa is C or S
  MOD_RES (13), (14), (15), (16), (17): Xaa is A or G
  MOD_RES (18), (19), (20), (21): Xaa is A or G or is absent
XAEVVMDEYKFKXXXXXXXXXLYLISIPELRAPVXXSA

SEQ ID NO: 24539 - protein, 35 aa, Artificial Sequence
  GFR-binding peptide
  MOD_RES (1), (3), (35): Xaa is C or S
XGXSRVVMNEYKFKIVNSSDDLYLVSIPELKTPAX

SEQ ID NO: 24540 - protein, 37 aa, Artificial Sequence
  GFR-binding peptide
  MOD_RES (2), (4), (36), (37): Xaa is C or S
RXGXGEVVMDEYKFKVVKENEDLYLMSIPELETPVXX

SEQ ID NO: 24541 - protein, 32 aa, Artificial Sequence
  GFR-binding peptide
  MOD_RES (32), (32): Xaa is C or S
ESVAMGEYKFKYTVVGKDLYLISIPELKTPVX

SEQ ID NO: 24542 - protein, 33 aa, Artificial Sequence
  GFR-binding peptide
  MOD_RES (2), (2): Xaa is C or S
GXGEVVMEEYKFKVVKDYEDLYLMSIPELETPV

SEQ ID NO: 24543 - protein, 38 aa, Artificial Sequence
  GFR-binding peptide
  MOD_RES (2), (36): Xaa is C or S
  MOD_RES (14), (15), (16), (17), (18): Xaa is A or G
  MOD_RES (19), (20), (21), (22): Xaa is A or G or is absent
GXSRVVMNEYQKYXXXXXXXXXIYLVSIPSLKTPAXTP

SEQ ID NO: 24544 - protein, 42 aa, Artificial Sequence
  GFR-binding peptide
  MOD_RES (2), (36), (37): Xaa is C or S
  MOD_RES (14), (15), (16), (17), (18): Xaa is A or G
  MOD_RES (19), (20), (21), (22): Xaa is A or G or is absent
GXESVAMGYHYKLXXXXXXXXXKYLISIPSLKTPVXXAKSAK

SEQ ID NO: 24545 - protein, 36 aa, Artificial Sequence
  GFR-binding peptide
  MOD_RES (1), (3), (34), (35): Xaa is C or S
XKXSKVVMEYQKYVKPTRGVIYLISIPSLDQPVXXP

SEQ ID NO: 24546 - protein, 36 aa, Artificial Sequence
  GFR-binding peptide
  MOD_RES (1), (3), (35): Xaa is C or S
XGXSRVVMNEYQKYIVNSSDDIYLVSIPSLKTPAXT

SEQ ID NO: 24547 - protein, 34 aa, Artificial Sequence; identical to SEQ ID NO: 3549
  GFR-binding peptide
  MOD_RES (2), (2): Xaa is C or S
  MOD_RES (13), (14), (15), (16), (17): Xaa is A or G
  MOD_RES (18), (19), (20), (21): Xaa is A or G or is absent

SEQ ID NO: 24548 - protein, 35 aa, Artificial Sequence
  GFR-binding peptide
  MOD_RES (2), (4), (35): Xaa is C or S
SXKXSKVVMEYQKYVKPTRGVIYLISIPSLDQPVX

SEQ ID NO: 24549 - protein, 36 aa, Artificial Sequence
  GFR-binding peptide
  MOD_RES (1), (35), (36): Xaa is C or S
  MOD_RES (13), (14), (15), (16), (17): Xaa is A or G
  MOD_RES (18), (19), (20), (21): Xaa is A or G or is absent
XAKVVMNEYQKYXXXXXXXXXIYLVSIPSLKTPAXX

SEQ ID NO: 24550 - protein, 40 aa, Artificial Sequence
  GFR-binding peptide
  MOD_RES (34), (35): Xaa is C or S
  MOD_RES (12), (13), (14), (15), (16): Xaa is A or G
  MOD_RES (17), (18), (19), (20): Xaa is A or G or is absent
AEVVMDEYKFKXXXXXXXXXLYLISIPELRAPVXXSAPAA

SEQ ID NO: 24551 - protein, 40 aa, Artificial Sequence; identical to SEQ ID NO: 3550
  GFR-binding peptide
  MOD_RES (2), (4), (38), (39): Xaa is C or S
  MOD_RES (16), (17), (18), (19), (20): Xaa is A or G
  MOD_RES (21), (22), (23), (24): Xaa is A or G or is absent

SEQ ID NO: 24552 - protein, 37 aa, Artificial Sequence
  GFR-binding peptide
  MOD_RES (34), (35): Xaa is C or S
  MOD_RES (12), (13), (14), (15), (16): Xaa is A or G
  MOD_RES (17), (18), (19), (20): Xaa is A or G or is absent
GEVVMEEYQKYXXXXXXXXXIYLMSIPSLETPVXXAK

SEQ ID NO: 24553 - protein, 34 aa, Artificial Sequence
  GFR-binding peptide
  MOD_RES (32), (33): Xaa is C or S
SRVVMNEYQKYIVNSSDDIYLVSIPSLKTPAXXP

SEQ ID NO: 24554 - protein, 39 aa, Artificial Sequence
  GFR-binding peptide
  MOD_RES (2), (36), (37): Xaa is C or S
  MOD_RES (14), (15), (16), (17), (18): Xaa is A or G
  MOD_RES (19), (20), (21), (22): Xaa is A or G or is absent
GXAEVVMDRYKKLXXXXXXXXXFYLISIANLRAPVXXSA

SEQ ID NO: 24555 - protein, 42 aa, Artificial Sequence
  GFR-binding peptide
  MOD_RES (2), (36), (37): Xaa is C or S
  MOD_RES (14), (15), (16), (17), (18): Xaa is A or G
  MOD_RES (19), (20), (21), (22): Xaa is A or G or is absent
GXGEVVMEEYQKYXXXXXXXXXIYLMSIPSLETPVXXAKPIS

SEQ ID NO: 24556 - protein, 37 aa, Artificial Sequence; identical to SEQ ID NO: 3552
  GFR-binding peptide
  MOD_RES (2), (4), (37): Xaa is C or S

SEQ ID NO: 24557 - protein, 33 aa, Artificial Sequence; identical to SEQ ID NO: 3553
  GFR-binding peptide
  MOD_RES (2), (2): Xaa is C or S

SEQ ID NO: 24558 - protein, 42 aa, Artificial Sequence
  GFR-binding peptide
  MOD_RES (1), (3), (37), (38): Xaa is C or S
  MOD_RES (15), (16), (17), (18), (19): Xaa is A or G
  MOD_RES (20), (21), (22), (23): Xaa is A or G or is absent
XGXSRVVMNEYKFKXXXXXXXXXLYLVSIPELKTPAXXPKPV

SEQ ID NO: 24559 - protein, 40 aa, Artificial Sequence
  GFR-binding peptide
  MOD_RES (1), (3), (37), (38): Xaa is C or S
  MOD_RES (15), (16), (17), (18), (19): Xaa is A or G
  MOD_RES (20), (21), (22), (23): Xaa is A or G or is absent
XGXAEVVMDYHYKLXXXXXXXXXKYLISIPSLRAPVXXSA

SEQ ID NO: 24560 - protein, 40 aa, Artificial Sequence
  GFR-binding peptide
  MOD_RES (2), (34), (35): Xaa is C or S
GXAKVVMNEYKFKIVNNSSDLYLVSIPELKTPAXXAKPVA

SEQ ID NO: 24561 - protein, 35 aa, Artificial Sequence
  GFR-binding peptide
  MOD_RES (1), (33), (34): Xaa is C or S
XAEVVMDYHYKLVVNNAADKYLISIPSLRAPVXXS

SEQ ID NO: 24562 - protein, 38 aa, Artificial Sequence
  GFR-binding peptide
  MOD_RES (2), (34), (35): Xaa is C or S
GXESVAMGEYKFKYTVVGKDLYLISIPELKTPVXXAKS

SEQ ID NO: 24563 - protein, 39 aa, Artificial Sequence; identical to SEQ ID NO: 3556
  GFR-binding peptide
  MOD_RES (2), (33), (34): Xaa is C or S

SEQ ID NO: 24564 - protein, 39 aa, Artificial Sequence
  GFR-binding peptide
  MOD_RES (1), (3), (35), (36): Xaa is C or S
XGXAEVVMDYHYKLVVNNAADKYLISIPSLRAPVXXSAP

SEQ ID NO: 24565 - protein, 35 aa, Artificial Sequence; identical to SEQ ID NO: 3557
  GFR-binding peptide
  MOD_RES (32), (33): Xaa is C or S

SEQ ID NO: 24566 - protein, 42 aa, Artificial Sequence
  GFR-binding peptide
  MOD_RES (1), (3), (37), (38): Xaa is C or S
  MOD_RES (15), (16), (17), (18), (19): Xaa is A or G
  MOD_RES (20), (21), (22), (23): Xaa is A or G or is absent
XGXGEVVMEEYKFKXXXXXXXXXLYLMSIPELETPVXXAKPI

SEQ ID NO: 24567 - protein, 33 aa, Artificial Sequence; identical to SEQ ID NO: 3558
  GFR-binding peptide
  MOD_RES (12), (13), (14), (15), (16): Xaa is A or G
  MOD_RES (17), (18), (19), (20): Xaa is A or G or is absent

SEQ ID NO: 24568 - protein, 35 aa, Artificial Sequence
  GFR-binding peptide
  MOD_RES (34), (35): Xaa is C or S
  MOD_RES (12), (13), (14), (15), (16): Xaa is A or G
  MOD_RES (17), (18), (19), (20): Xaa is A or G or is absent
AEVVMDRYKKLXXXXXXXXXFYLISIANLRAPVXX

SEQ ID NO: 24569 - protein, 38 aa, Artificial Sequence
  GFR-binding peptide
  MOD_RES (2), (4), (38): Xaa is C or S
  MOD_RES (16), (17), (18), (19), (20): Xaa is A or G
  MOD_RES (21), (22), (23), (24): Xaa is A or G or is absent
HXGXSRVVMNEYQKYXXXXXXXXXIYLVSIPSLKTPAX

SEQ ID NO: 24570 - protein, 33 aa, Artificial Sequence; identical to SEQ ID NO: 3561
  GFR-binding peptide
  MOD_RES (1), (33): Xaa is C or S

SEQ ID NO: 24571 - protein, 35 aa, Artificial Sequence; identical to SEQ ID NO: 3562
  GFR-binding peptide
  MOD_RES (2), (4): Xaa is C or S

SEQ ID NO: 24572 - protein, 35 aa, Artificial Sequence
  GFR-binding peptide
  MOD_RES (32), (33): Xaa is C or S
ESVAMGEYQKYYTVVGKDIYLISIPSLKTPVXXAK

SEQ ID NO: 24573 - protein, 36 aa, Artificial Sequence; identical to SEQ ID NO: 3563
  GFR-binding peptide
  MOD_RES (31), (32): Xaa is C or S

SEQ ID NO: 24574 - protein, 36 aa, Artificial Sequence
  GFR-binding peptide
  MOD_RES (1), (36): Xaa is C or S
  MOD_RES (14), (15), (16), (17), (18): Xaa is A or G
  MOD_RES (19), (20), (21), (22): Xaa is A or G or is absent
XEAVSMGEEYKFKXXXXXXXXXLYLVSIPELKTPVX

SEQ ID NO: 24575 - protein, 37 aa, Artificial Sequence
  GFR-binding peptide
  MOD_RES (32), (33): Xaa is C or S
ESVAMGEYKFKYTVVGKDLYLISIPELKTPVXXAKSA

SEQ ID NO: 24576 - protein, 34 aa, Artificial Sequence
  GFR-binding peptide
  MOD_RES (1), (1): Xaa is C or S
  MOD_RES (13), (14), (15), (16), (17): Xaa is A or G
  MOD_RES (18), (19), (20), (21): Xaa is A or G or is absent
XGEVVMDEYQKYXXXXXXXXXIYLMSIPSLETPV

SEQ ID NO: 24577 - protein, 41 aa, Artificial Sequence
  GFR-binding peptide
  MOD_RES (2), (4), (38), (39): Xaa is C or S
  MOD_RES (16), (17), (18), (19), (20): Xaa is A or G
  MOD_RES (21), (22), (23), (24): Xaa is A or G or is absent
RXGXGEVVMDEYQKYXXXXXXXXXIYLMSIPSLETPVXXAK

SEQ ID NO: 24578 - protein, 39 aa, Artificial Sequence
  GFR-binding peptide
  MOD_RES (2), (33), (34): Xaa is C or S
KXSKVIMEYKFKIKPTKGILYLISIPELDQSVXXPSASA

SEQ ID NO: 24579 - protein, 30 aa, Artificial Sequence; identical to SEQ ID NO: 3571
  GFR-binding peptide

SEQ ID NO: 24580 - protein, 38 aa, Artificial Sequence; identical to SEQ ID NO: 3572
  GFR-binding peptide
  MOD_RES (2), (4), (38): Xaa is C or S
  MOD_RES (16), (17), (18), (19), (20): Xaa is A or G
  MOD_RES (21), (22), (23), (24): Xaa is A or G or is absent

SEQ ID NO: 24581 - protein, 38 aa, Artificial Sequence; identical to SEQ ID NO: 3573
  GFR-binding peptide
  MOD_RES (2), (4), (35), (36): Xaa is C or S

SEQ ID NO: 24582 - protein, 40 aa, Artificial Sequence
  GFR-binding peptide
  MOD_RES (2), (34), (35): Xaa is C or S
GXESVAMGRYKKLYTVVGKDFYLISIANLKTPVXXAKSAK

SEQ ID NO: 24583 - protein, 40 aa, Artificial Sequence; identical to SEQ ID NO: 3576
  GFR-binding peptide
  MOD_RES (2), (36), (37): Xaa is C or S
  MOD_RES (14), (15), (16), (17), (18): Xaa is A or G
  MOD_RES (19), (20), (21), (22): Xaa is A or G or is absent

SEQ ID NO: 24584 - protein, 37 aa, Artificial Sequence; identical to SEQ ID NO: 3579
  GFR-binding peptide
  MOD_RES (2), (36), (37): Xaa is C or S
  MOD_RES (14), (15), (16), (17), (18): Xaa is A or G
  MOD_RES (19), (20), (21), (22): Xaa is A or G or is absent

SEQ ID NO: 24585 - protein, 34 aa, Artificial Sequence
  GFR-binding peptide
  MOD_RES (31), (32): Xaa is C or S
SKVIMEYKFKIKPTKGILYLISIPELDQSVXXPS

SEQ ID NO: 24586 - protein, 44 aa, Artificial Sequence
  GFR-binding peptide
  MOD_RES (1), (3), (38), (39): Xaa is C or S
  MOD_RES (16), (17), (18), (19), (20): Xaa is A or G
  MOD_RES (21), (22), (23), (24): Xaa is A or G or is absent
XGXEAVSMGEEYQKYXXXXXXXXXIYLVSIPSLKTPVXXAKGVK

SEQ ID NO: 24587 - protein, 42 aa, Artificial Sequence; identical to SEQ ID NO: 3580
  GFR-binding peptide
  MOD_RES (1), (36), (37): Xaa is C or S
  MOD_RES (14), (15), (16), (17), (18): Xaa is A or G
  MOD_RES (19), (20), (21), (22): Xaa is A or G or is absent

SEQ ID NO: 24588 - protein, 33 aa, Artificial Sequence
  GFR-binding peptide
  MOD_RES (33), (33): Xaa is C or S
  MOD_RES (11), (12), (13), (14), (15): Xaa is A or G
  MOD_RES (16), (17), (18), (19): Xaa is A or G or is absent
EVVMDEYKFKXXXXXXXXXLYLISIPELRAPVX

SEQ ID NO: 24589 - protein, 42 aa, Artificial Sequence
  GFR-binding peptide
  MOD_RES (1), (3), (37), (38): Xaa is C or S
  MOD_RES (15), (16), (17), (18), (19): Xaa is A or G
  MOD_RES (20), (21), (22), (23): Xaa is A or G or is absent
XGXAEVVMDYHYKLXXXXXXXXXKYLISIPSLRAPVXXSAPA

SEQ ID NO: 24590 - protein, 34 aa, Artificial Sequence
  GFR-binding peptide
  MOD_RES (1), (3): Xaa is C or S
XGXARVVMNEYQKYIVNSSDDIYLVSIPSLQTPA

SEQ ID NO: 24591 - protein, 40 aa, Artificial Sequence
  GFR-binding peptide
  MOD_RES (2), (34): Xaa is C or S
GXSRVVMNEYQKYIVNSSDDIYLVSIPSLKTPAXTPKTVH

SEQ ID NO: 24592 - protein, 37 aa, Artificial Sequence; identical to SEQ ID NO: 3582
  GFR-binding peptide
  MOD_RES (34), (35): Xaa is C or S
  MOD_RES (12), (13), (14), (15), (16): Xaa is A or G
  MOD_RES (17), (18), (19), (20): Xaa is A or G or is absent

SEQ ID NO: 24593 - protein, 41 aa, Artificial Sequence
  GFR-binding peptide
  MOD_RES (1), (35), (36): Xaa is C or S
  MOD_RES (13), (14), (15), (16), (17): Xaa is A or G
  MOD_RES (18), (19), (20), (21): Xaa is A or G or is absent
XGEVVMEEYKFKXXXXXXXXXLYLMSIPELETPVXXAKPIS

SEQ ID NO: 24594 - protein, 38 aa, Artificial Sequence
  GFR-binding peptide
  MOD_RES (32), (33): Xaa is C or S
ESVAMGEYQKYYTVVGKDIYLISIPSLKTPVXXAKSAK

SEQ ID NO: 24595 - protein, 36 aa, Artificial Sequence
  GFR-binding peptide
  MOD_RES (33), (34): Xaa is C or S
EAVSMGEEYQKYTPVGMDDIYLVSIPSLKTPVXXAK

SEQ ID NO: 24596 - protein, 34 aa, Artificial Sequence; identical to SEQ ID NO: 3585
  GFR-binding peptide
  MOD_RES (1), (33), (34): Xaa is C or S

SEQ ID NO: 24597 - protein, 36 aa, Artificial Sequence; identical to SEQ ID NO: 3589
  GFR-binding peptide
  MOD_RES (1), (3), (36): Xaa is C or S
  MOD_RES (14), (15), (16), (17), (18): Xaa is A or G
  MOD_RES (19), (20), (21), (22): Xaa is A or G or is absent

SEQ ID NO: 24598 - protein, 39 aa, Artificial Sequence
  GFR-binding peptide
  MOD_RES (2), (4), (36), (37): Xaa is C or S
RXGXESVAMGEYKFKYTVVGKDLYLISIPELKTPVXXAK

SEQ ID NO: 24599 - protein, 41 aa, Artificial Sequence
  GFR-binding peptide
  MOD_RES (1), (35), (36): Xaa is C or S
  MOD_RES (13), (14), (15), (16), (17): Xaa is A or G
  MOD_RES (18), (19), (20), (21): Xaa is A or G or is absent
XARVVMNEYKFKXXXXXXXXXLYLVSIPELQTPAXXPKPVT

SEQ ID NO: 24600 - protein, 40 aa, Artificial Sequence; identical to SEQ ID NO: 3591
  GFR-binding peptide
  MOD_RES (1), (3), (37), (38): Xaa is C or S
  MOD_RES (15), (16), (17), (18), (19): Xaa is A or G
  MOD_RES (20), (21), (22), (23): Xaa is A or G or is absent

SEQ ID NO: 24601 - protein, 40 aa, Artificial Sequence; identical to SEQ ID NO: 3592
  GFR-binding peptide
  MOD_RES (1), (3), (34), (35): Xaa is C or S

SEQ ID NO: 24602 - protein, 41 aa, Artificial Sequence; identical to SEQ ID NO: 3593
  GFR-binding peptide
  MOD_RES (1), (3), (36), (37): Xaa is C or S

SEQ ID NO: 24603 - protein, 39 aa, Artificial Sequence
  GFR-binding peptide
  MOD_RES (2), (4), (37), (38): Xaa is C or S
RXGXEAVSMGEEYQKYTPVGMDDIYLVSIPSLKTPVXXA

SEQ ID NO: 24604 - protein, 40 aa, Artificial Sequence
  GFR-binding peptide
  MOD_RES (1), (3), (38), (39): Xaa is C or S
  MOD_RES (16), (17), (18), (19), (20): Xaa is A or G
  MOD_RES (21), (22), (23), (24): Xaa is A or G or is absent
XGXEAVSMGEEYKFKXXXXXXXXXLYLVSIPELKTPVXXA

SEQ ID NO: 24605 - protein, 35 aa, Artificial Sequence
  GFR-binding peptide
  MOD_RES (2), (34), (35): Xaa is C or S
GXESVAMGEYQKYYTVVGKDIYLISIPSLKTPVXX

SEQ ID NO: 24606 - protein, 41 aa, Artificial Sequence
  GFR-binding peptide
  MOD_RES (1), (35), (36): Xaa is C or S
  MOD_RES (13), (14), (15), (16), (17): Xaa is A or G
  MOD_RES (18), (19), (20), (21): Xaa is A or G or is absent
XGEVVMDEYQKYXXXXXXXXXIYLMSIPSLETPVXXAKPIK

SEQ ID NO: 24607 - protein, 36 aa, Artificial Sequence
  GFR-binding peptide
  MOD_RES (32), (33): Xaa is C or S
ESVAMGRYKKLYTVVGKDFYLISIANLKTPVXXAKS

SEQ ID NO: 24608 - protein, 36 aa, Artificial Sequence; identical to SEQ ID NO: 3597
  GFR-binding peptide
  MOD_RES (1), (3), (35), (36): Xaa is C or S

SEQ ID NO: 24609 - protein, 38 aa, Artificial Sequence
  GFR-binding peptide
  MOD_RES (1), (3), (37), (38): Xaa is C or S
  MOD_RES (15), (16), (17), (18), (19): Xaa is A or G
  MOD_RES (20), (21), (22), (23): Xaa is A or G or is absent
XGXGEVVMDEYKFKXXXXXXXXXLYLMSIPELETPVXX

SEQ ID NO: 24610 - protein, 40 aa, Artificial Sequence
  GFR-binding peptide
  MOD_RES (1), (3), (35): Xaa is C or S
XGXSRVVMNEYQKYIVNSSDDIYLVSIPSLKTPAXTPKTV

SEQ ID NO: 24611 - protein, 37 aa, Artificial Sequence
  GFR-binding peptide
  MOD_RES (1), (3), (34), (35): Xaa is C or S
XKXSKVVMEYKFKVKPTRGVLYLISIPELDQPVXXPS

SEQ ID NO: 24612 - protein, 35 aa, Artificial Sequence
  GFR-binding peptide
  MOD_RES (1), (3), (35): Xaa is C or S
XGXESVAMGEYQKYYTVVGKDIYLISIPSLKTPVX

SEQ ID NO: 24613 - protein, 34 aa, Artificial Sequence
  GFR-binding peptide
  MOD_RES (1), (1): Xaa is C or S
  MOD_RES (13), (14), (15), (16), (17): Xaa is A or G
  MOD_RES (18), (19), (20), (21): Xaa is A or G or is absent
XAEVVMDRYKKLXXXXXXXXXFYLISIANLRAPV

SEQ ID NO: 24614 - protein, 37 aa, Artificial Sequence; identical to SEQ ID NO: 3606
  GFR-binding peptide
  MOD_RES (1), (3), (37): Xaa is C or S
  MOD_RES (15), (16), (17), (18), (19): Xaa is A or G
  MOD_RES (20), (21), (22), (23): Xaa is A or G or is absent

SEQ ID NO: 24615 - protein, 34 aa, Artificial Sequence
  GFR-binding peptide
  MOD_RES (34), (34): Xaa is C or S
  MOD_RES (12), (13), (14), (15), (16): Xaa is A or G
  MOD_RES (17), (18), (19), (20): Xaa is A or G or is absent
ESVAMGRYKKLXXXXXXXXXFYLISIANLKTPVX

SEQ ID NO: 24616 - protein, 38 aa, Artificial Sequence; identical to SEQ ID NO: 3607
  GFR-binding peptide
  MOD_RES (1), (34), (35): Xaa is C or S

SEQ ID NO: 24617 - protein, 39 aa, Artificial Sequence; identical to SEQ ID NO: 3609
  GFR-binding peptide
  MOD_RES (1), (3), (34), (35): Xaa is C or S

SEQ ID NO: 24618 - protein, 33 aa, Artificial Sequence
  GFR-binding peptide
  MOD_RES (12), (13), (14), (15), (16): Xaa is A or G
  MOD_RES (17), (18), (19), (20): Xaa is A or G or is absent
SRVVMNEYKFKXXXXXXXXXLYLVSIPELKTPA

SEQ ID NO: 24619 - protein, 38 aa, Artificial Sequence
  GFR-binding peptide
  MOD_RES (2), (4), (36), (37): Xaa is C or S
RXGXAEVVMDEYKFKVVNNAADLYLISIPELRAPVXXS

SEQ ID NO: 24620 - protein, 36 aa, Artificial Sequence; identical to SEQ ID NO: 3610
  GFR-binding peptide
  MOD_RES (31), (32): Xaa is C or S

SEQ ID NO: 24621 - protein, 39 aa, Artificial Sequence
  GFR-binding peptide
  MOD_RES (2), (4), (35), (36): Xaa is C or S
SXKXSKVVMEYQKYVKPTRGVIYLISIPSLDQPVXXPSA

SEQ ID NO: 24622 - protein, 34 aa, Artificial Sequence; identical to SEQ ID NO: 3615
  GFR-binding peptide
  MOD_RES (31), (32): Xaa is C or S

SEQ ID NO: 24623 - protein, 35 aa, Artificial Sequence
  GFR-binding peptide
  MOD_RES (2), (2): Xaa is C or S
  MOD_RES (14), (15), (16), (17), (18): Xaa is A or G
  MOD_RES (19), (20), (21), (22): Xaa is A or G or is absent
GXGEVVMDEYKFKXXXXXXXXXLYLMSIPELETPV

SEQ ID NO: 24624 - protein, 42 aa, Artificial Sequence; identical to SEQ ID NO: 3617
  GFR-binding peptide
  MOD_RES (2), (4), (36), (37): Xaa is C or S

SEQ ID NO: 24625 - protein, 38 aa, Artificial Sequence
  GFR-binding peptide
  MOD_RES (1), (3), (37), (38): Xaa is C or S
  MOD_RES (15), (16), (17), (18), (19): Xaa is A or G
  MOD_RES (20), (21), (22), (23): Xaa is A or G or is absent
XGXESVAMGRYKKLXXXXXXXXXFYLISIANLKTPVXX

SEQ ID NO: 24626 - protein, 38 aa, Artificial Sequence
  GFR-binding peptide
  MOD_RES (1), (3), (36), (37): Xaa is C or S
  MOD_RES (14), (15), (16), (17), (18): Xaa is A or G
  MOD_RES (19), (20), (21), (22): Xaa is A or G or is absent
XKXSKVVMEYQKYXXXXXXXXXIYLISIPSLDQPVXXP

SEQ ID NO: 24627 - protein, 37 aa, Artificial Sequence
  GFR-binding peptide
  MOD_RES (2), (4), (37): Xaa is C or S
  MOD_RES (15), (16), (17), (18), (19): Xaa is A or G
  MOD_RES (20), (21), (22), (23): Xaa is A or G or is absent
SXKXSKVIMEYQKYXXXXXXXXXIYLISIPSLDQSVX

SEQ ID NO: 24628 - protein, 39 aa, Artificial Sequence; identical to SEQ ID NO: 3620
  GFR-binding peptide
  MOD_RES (2), (4), (36), (37): Xaa is C or S

SEQ ID NO: 24629 - protein, 36 aa, Artificial Sequence
  GFR-binding peptide
  MOD_RES (31), (32): Xaa is C or S
EVVMDRYKKLVVNNAADFYLISIANLRAPVXXSAPA

SEQ ID NO: 24630 - protein, 35 aa, Artificial Sequence; identical to SEQ ID NO: 3622
  GFR-binding peptide
  MOD_RES (2), (35): Xaa is C or S

SEQ ID NO: 24631 - protein, 35 aa, Artificial Sequence
  GFR-binding peptide
  MOD_RES (1), (3), (34), (35): Xaa is C or S
XKXSKVIMEYQKYIKPTKGIIYLISIPSLDQSVXX

SEQ ID NO: 24632 - protein, 43 aa, Artificial Sequence; identical to SEQ ID NO: 3623
  GFR-binding peptide
  MOD_RES (2), (4), (37), (38): Xaa is C or S

SEQ ID NO: 24633 - protein, 37 aa, Artificial Sequence
  GFR-binding peptide
  MOD_RES (33), (34): Xaa is C or S
  MOD_RES (11), (12), (13), (14), (15): Xaa is A or G
  MOD_RES (16), (17), (18), (19): Xaa is A or G or is absent
SVAMGYHYKLXXXXXXXXXKYLISIPSLKTPVXXAKS

SEQ ID NO: 24634 - protein, 40 aa, Artificial Sequence
  GFR-binding peptide
  MOD_RES (1), (35), (36): Xaa is C or S
  MOD_RES (13), (14), (15), (16), (17): Xaa is A or G
  MOD_RES (18), (19), (20), (21): Xaa is A or G or is absent
XSRVVMNEYQKYXXXXXXXXXIYLVSIPSLKTPAXXPKPV

SEQ ID NO: 24635 - protein, 33 aa, Artificial Sequence
  GFR-binding peptide
  MOD_RES (31), (32): Xaa is C or S
RVVMNEYKFKIVNSSDDLYLVSIPELQTPAXXP

SEQ ID NO: 24636 - protein, 33 aa, Artificial Sequence; identical to SEQ ID NO: 3626
  GFR-binding peptide
  MOD_RES (1), (33): Xaa is C or S

SEQ ID NO: 24637 - protein, 37 aa, Artificial Sequence; identical to SEQ ID NO: 3627
  GFR-binding peptide
  MOD_RES (1), (3), (36), (37): Xaa is C or S
  MOD_RES (14), (15), (16), (17), (18): Xaa is A or G
  MOD_RES (19), (20), (21), (22): Xaa is A or G or is absent

SEQ ID NO: 24638 - protein, 43 aa, Artificial Sequence; identical to SEQ ID NO: 3628
  GFR-binding peptide
  MOD_RES (1), (3), (37), (38): Xaa is C or S
  MOD_RES (15), (16), (17), (18), (19): Xaa is A or G
  MOD_RES (20), (21), (22), (23): Xaa is A or G or is absent

SEQ ID NO: 24639 - protein, 40 aa, Artificial Sequence
  GFR-binding peptide
  MOD_RES (2), (36), (37): Xaa is C or S
  MOD_RES (14), (15), (16), (17), (18): Xaa is A or G
  MOD_RES (19), (20), (21), (22): Xaa is A or G or is absent
GXGEVVMDEYQKYXXXXXXXXXIYLMSIPSLETPVXXAKP

SEQ ID NO: 24640 - protein, 37 aa, Artificial Sequence
  GFR-binding peptide
  MOD_RES (1), (33), (34): Xaa is C or S
XARVVMNEYQKYIVNSSDDIYLVSIPSLQTPAXXPKP

SEQ ID NO: 24641 - protein, 38 aa, Artificial Sequence; identical to SEQ ID NO: 3630
  GFR-binding peptide
  MOD_RES (33), (34): Xaa is C or S
  MOD_RES (11), (12), (13), (14), (15): Xaa is A or G
  MOD_RES (16), (17), (18), (19): Xaa is A or G or is absent

SEQ ID NO: 24642 - protein, 34 aa, Artificial Sequence; identical to SEQ ID NO: 3631
  GFR-binding peptide
  MOD_RES (1), (33), (34): Xaa is C or S

SEQ ID NO: 24643 - protein, 39 aa, Artificial Sequence; identical to SEQ ID NO: 3632
  GFR-binding peptide
  MOD_RES (33), (34): Xaa is C or S

SEQ ID NO: 24644 - protein, 38 aa, Artificial Sequence
  GFR-binding peptide
  MOD_RES (33), (34): Xaa is C or S
EAVSMGEEYQKYTPVGMDDIYLVSIPSLKTPVXXAKGV

SEQ ID NO: 24645 - protein, 34 aa, Artificial Sequence
  GFR-binding peptide
  MOD_RES (32), (33): Xaa is C or S
ESVAMGEYKFKYTVVGKDLYLISIPELKTPVXXA

SEQ ID NO: 24646 - protein, 37 aa, Artificial Sequence
  GFR-binding peptide
  MOD_RES (1), (3), (37): Xaa is C or S
  MOD_RES (15), (16), (17), (18), (19): Xaa is A or G
  MOD_RES (20), (21), (22), (23): Xaa is A or G or is absent
XGXSRVVMNEYKFKXXXXXXXXXLYLVSIPELKTPAX

SEQ ID NO: 24647 - protein, 32 aa, Artificial Sequence
  GFR-binding peptide
  MOD_RES (11), (12), (13), (14), (15): Xaa is A or G
  MOD_RES (16), (17), (18), (19): Xaa is A or G or is absent
SVAMGEYKFKXXXXXXXXXLYLISIPELKTPV

SEQ ID NO: 24648 - protein, 37 aa, Artificial Sequence; identical to SEQ ID NO: 3634
  GFR-binding peptide
  MOD_RES (1), (3), (34), (35): Xaa is C or S

SEQ ID NO: 24649 - protein, 35 aa, Artificial Sequence
  GFR-binding peptide
  MOD_RES (1), (3): Xaa is C or S
  MOD_RES (14), (15), (16), (17), (18): Xaa is A or G
  MOD_RES (19), (20), (21), (22): Xaa is A or G or is absent
XKXSRVIMEYQKYXXXXXXXXXIYLISIPSLAQPV

SEQ ID NO: 24650 - protein, 41 aa, Artificial Sequence
  GFR-binding peptide
  MOD_RES (2), (35), (36): Xaa is C or S
  MOD_RES (13), (14), (15), (16), (17): Xaa is A or G
  MOD_RES (18), (19), (20), (21): Xaa is A or G or is absent
KXSRVIMEYKFKXXXXXXXXXLYLISIPELAQPVXXPAASA

SEQ ID NO: 24651 - protein, 31 aa, Artificial Sequence
  GFR-binding peptide
  MOD_RES (1), (1): Xaa is C or S
XSRVIMEYQKYVKPKRGVIYLISIPSLAQPV

SEQ ID NO: 24652 - protein, 40 aa, Artificial Sequence; identical to SEQ ID NO: 3636
  GFR-binding peptide
  MOD_RES (1), (34), (35): Xaa is C or S
  MOD_RES (12), (13), (14), (15), (16): Xaa is A or G
  MOD_RES (17), (18), (19), (20): Xaa is A or G or is absent

SEQ ID NO: 24653 - protein, 34 aa, Artificial Sequence
  GFR-binding peptide
  MOD_RES (34), (34): Xaa is C or S
  MOD_RES (12), (13), (14), (15), (16): Xaa is A or G
  MOD_RES (17), (18), (19), (20): Xaa is A or G or is absent
AKVVMNEYKFKXXXXXXXXXLYLVSIPELKTPAX

SEQ ID NO: 24654 - protein, 35 aa, Artificial Sequence; identical to SEQ ID NO: 3637
  GFR-binding peptide
  MOD_RES (2), (35): Xaa is C or S
  MOD_RES (13), (14), (15), (16), (17): Xaa is A or G
  MOD_RES (18), (19), (20), (21): Xaa is A or G or is absent

SEQ ID NO: 24655 - protein, 34 aa, Artificial Sequence; identical to SEQ ID NO: 3638
  GFR-binding peptide
  MOD_RES (1), (33), (34): Xaa is C or S

SEQ ID NO: 24656 - protein, 36 aa, Artificial Sequence; identical to SEQ ID NO: 3639
  GFR-binding peptide
  MOD_RES (2), (4), (35), (36): Xaa is C or S

SEQ ID NO: 24657 - protein, 37 aa, Artificial Sequence
  GFR-binding peptide
  MOD_RES (2), (4), (37): Xaa is C or S
RXGXEAVSMGEEYQKYTPVGMDDIYLVSIPSLKTPVX

SEQ ID NO: 24658 - protein, 36 aa, Artificial Sequence; identical to SEQ ID NO: 3640
  GFR-binding peptide
  MOD_RES (1), (35), (36): Xaa is C or S
  MOD_RES (13), (14), (15), (16), (17): Xaa is A or G
  MOD_RES (18), (19), (20), (21): Xaa is A or G or is absent

SEQ ID NO: 24659 - protein, 38 aa, Artificial Sequence; identical to SEQ ID NO: 3641
  GFR-binding peptide
  MOD_RES (1), (3), (38): Xaa is C or S
  MOD_RES (16), (17), (18), (19), (20): Xaa is A or G
  MOD_RES (21), (22), (23), (24): Xaa is A or G or is absent

SEQ ID NO: 24660 - protein, 38 aa, Artificial Sequence
  GFR-binding peptide
  MOD_RES (32), (33): Xaa is C or S
GEVVMDEYQKYVVKENEDIYLMSIPSLETPVXXAKPIK

SEQ ID NO: 24661 - protein, 41 aa, Artificial Sequence
  GFR-binding peptide
  MOD_RES (2), (36), (37): Xaa is C or S
  MOD_RES (14), (15), (16), (17), (18): Xaa is A or G
  MOD_RES (19), (20), (21), (22): Xaa is A or G or is absent
GXSRVVMNEYQKYXXXXXXXXXIYLVSIPSLKTPAXXPKPV

SEQ ID NO: 24662 - protein, 38 aa, Artificial Sequence; identical to SEQ ID NO: 3644
  GFR-binding peptide
  MOD_RES (1), (33), (34): Xaa is C or S

SEQ ID NO: 24663 - protein, 32 aa, Artificial Sequence
  GFR-binding peptide
  MOD_RES (31), (32): Xaa is C or S
EVVMEEYQKYVVKDYEDIYLMSIPSLETPVXX

SEQ ID NO: 24664 - protein, 43 aa, Artificial Sequence; identical to SEQ ID NO: 3647
  GFR-binding peptide
  MOD_RES (2), (4), (38), (39): Xaa is C or S
  MOD_RES (16), (17), (18), (19), (20): Xaa is A or G
  MOD_RES (21), (22), (23), (24): Xaa is A or G or is absent

SEQ ID NO: 24665 - protein, 38 aa, Artificial Sequence; identical to SEQ ID NO: 3648
  GFR-binding peptide
  MOD_RES (2), (36), (37): Xaa is C or S
  MOD_RES (14), (15), (16), (17), (18): Xaa is A or G
  MOD_RES (19), (20), (21), (22): Xaa is A or G or is absent

SEQ ID NO: 24666 - protein, 39 aa, Artificial Sequence; identical to SEQ ID NO: 3650
  GFR-binding peptide
  MOD_RES (1), (3), (35): Xaa is C or S

SEQ ID NO: 24667 - protein, 37 aa, Artificial Sequence
  GFR-binding peptide
  MOD_RES (1), (32), (33): Xaa is C or S
XSKVVMEYQKYVKPTRGVIYLISIPSLDQPVXXPSAS

SEQ ID NO: 24668 - protein, 32 aa, Artificial Sequence
  GFR-binding peptide
  MOD_RES (1), (1): Xaa is C or S
XGEVVMEEYQKYVVKDYEDIYLMSIPSLETPV

SEQ ID NO: 24669 - protein, 33 aa, Artificial Sequence
  GFR-binding peptide
  MOD_RES (1), (33): Xaa is C or S
XGEVVMEEYKFKVVKDYEDLYLMSIPELETPVX

SEQ ID NO: 24670 - protein, 33 aa, Artificial Sequence
  GFR-binding peptide
  MOD_RES (31), (32): Xaa is C or S
KVVMNEYKFKIVNNSSDLYLVSIPELKTPAXXA

SEQ ID NO: 24671 - protein, 35 aa, Artificial Sequence; identical to SEQ ID NO: 3651
  GFR-binding peptide
  MOD_RES (1), (3): Xaa is C or S
  MOD_RES (14), (15), (16), (17), (18): Xaa is A or G
  MOD_RES (19), (20), (21), (22): Xaa is A or G or is absent

SEQ ID NO: 24672 - protein, 34 aa, Artificial Sequence
  GFR-binding peptide
  MOD_RES (33), (34): Xaa is C or S
  MOD_RES (11), (12), (13), (14), (15): Xaa is A or G
  MOD_RES (16), (17), (18), (19): Xaa is A or G or is absent
EVVMDEYQKYXXXXXXXXXIYLMSIPSLETPVXX

SEQ ID NO: 24673 - protein, 44 aa, Artificial Sequence; identical to SEQ ID NO: 3654
  GFR-binding peptide
  MOD_RES (1), (3), (38), (39): Xaa is C or S
  MOD_RES (16), (17), (18), (19), (20): Xaa is A or G
  MOD_RES (21), (22), (23), (24): Xaa is A or G or is absent

SEQ ID NO: 24674 - protein, 36 aa, Artificial Sequence
  GFR-binding peptide
  MOD_RES (34), (35): Xaa is C or S
  MOD_RES (12), (13), (14), (15), (16): Xaa is A or G
  MOD_RES (17), (18), (19), (20): Xaa is A or G or is absent
GEVVMEEYKFKXXXXXXXXXLYLMSIPELETPVXXA

SEQ ID NO: 24675 - protein, 39 aa, Artificial Sequence; identical to SEQ ID NO: 3655
  GFR-binding peptide
  MOD_RES (2), (4), (39): Xaa is C or S
  MOD_RES (17), (18), (19), (20), (21): Xaa is A or G
  MOD_RES (22), (23), (24), (25): Xaa is A or G or is absent

SEQ ID NO: 24676 - protein, 42 aa, Artificial Sequence
  GFR-binding peptide
  MOD_RES (2), (4), (38), (39): Xaa is C or S
  MOD_RES (16), (17), (18), (19), (20): Xaa is A or G
  MOD_RES (21), (22), (23), (24): Xaa is A or G or is absent
HXGXSRVVMNEYKFKXXXXXXXXXLYLVSIPELKTPAXXPKP

SEQ ID NO: 24677 - protein, 39 aa, Artificial Sequence
  GFR-binding peptide
  MOD_RES (1), (35), (36): Xaa is C or S
  MOD_RES (13), (14), (15), (16), (17): Xaa is A or G
  MOD_RES (18), (19), (20), (21): Xaa is A or G or is absent
XAEVVMDYHYKLXXXXXXXXXKYLISIPSLRAPVXXSAP

SEQ ID NO: 24678 - protein, 32 aa, Artificial Sequence
  GFR-binding peptide
  MOD_RES (1), (32): Xaa is C or S
XSRVIMEYQKYVKPKRGVIYLISIPSLAQPVX

SEQ ID NO: 24679 - protein, 39 aa, Artificial Sequence; identical to SEQ ID NO: 3659
  GFR-binding peptide
  MOD_RES (1), (3), (34), (35): Xaa is C or S

SEQ ID NO: 24680 - protein, 41 aa, Artificial Sequence
  GFR-binding peptide
  MOD_RES (2), (4), (36), (37): Xaa is C or S
RXGXGEVVMDEYQKYVVKENEDIYLMSIPSLETPVXXAKPI

SEQ ID NO: 24681 - protein, 38 aa, Artificial Sequence
  GFR-binding peptide
  MOD_RES (33), (33): Xaa is C or S
  MOD_RES (11), (12), (13), (14), (15): Xaa is A or G
  MOD_RES (16), (17), (18), (19): Xaa is A or G or is absent
RVVMNEYQKYXXXXXXXXXIYLVSIPSLKTPAXTPKTV

SEQ ID NO: 24682 - protein, 34 aa, Artificial Sequence; identical to SEQ ID NO: 3662
  GFR-binding peptide
  MOD_RES (33), (34): Xaa is C or S
  MOD_RES (11), (12), (13), (14), (15): Xaa is A or G
  MOD_RES (16), (17), (18), (19): Xaa is A or G or is absent

SEQ ID NO: 24683 - protein, 31 aa, Artificial Sequence
  GFR-binding peptide
  MOD_RES (31), (31): Xaa is C or S
EVVMDEYQKYVVKENEDIYLMSIPSLETPVX

SEQ ID NO: 24684 - protein, 40 aa, Artificial Sequence
  GFR-binding peptide
  MOD_RES (2), (34), (35): Xaa is C or S
GXAEVVMDRYKKLVVNNAADFYLISIANLRAPVXXSAPAA

SEQ ID NO: 24685 - protein, 35 aa, Artificial Sequence; identical to SEQ ID NO: 3665
  GFR-binding peptide
  MOD_RES (1), (34), (35): Xaa is C or S
  MOD_RES (12), (13), (14), (15), (16): Xaa is A or G
  MOD_RES (17), (18), (19), (20): Xaa is A or G or is absent

SEQ ID NO: 24686 - protein, 32 aa, Artificial Sequence
  GFR-binding peptide
  MOD_RES (31), (32): Xaa is C or S
EVVMDEYQKYVVKENEDIYLMSIPSLETPVXX

SEQ ID NO: 24687 - protein, 36 aa, Artificial Sequence; identical to SEQ ID NO: 3666
  GFR-binding peptide
  MOD_RES (32), (32): Xaa is C or S

SEQ ID NO: 24688 - protein, 39 aa, Artificial Sequence; identical to SEQ ID NO: 3667
  GFR-binding peptide
  MOD_RES (34), (35): Xaa is C or S
  MOD_RES (12), (13), (14), (15), (16): Xaa is A or G
  MOD_RES (17), (18), (19), (20): Xaa is A or G or is absent

SEQ ID NO: 24689 - protein, 34 aa, Artificial Sequence
  GFR-binding peptide
  MOD_RES (32), (33): Xaa is C or S
ESVAMGYHYKLYTVVGKDKYLISIPSLKTPVXXA

SEQ ID NO: 24690 - protein, 41 aa, Artificial Sequence; identical to SEQ ID NO: 3668
  GFR-binding peptide
  MOD_RES (1), (3), (35), (36): Xaa is C or S

SEQ ID NO: 24691 - protein, 34 aa, Artificial Sequence
  GFR-binding peptide
  MOD_RES (33), (34): Xaa is C or S
EAVSMGEEYQKYTPVGMDDIYLVSIPSLKTPVXX

SEQ ID NO: 24692 - protein, 35 aa, Artificial Sequence
  GFR-binding peptide
  MOD_RES (2), (34), (35): Xaa is C or S
GXARVVMNEYKFKIVNSSDDLYLVSIPELQTPAXX

SEQ ID NO: 24693 - protein, 37 aa, Artificial Sequence; identical to SEQ ID NO: 3673
  GFR-binding peptide
  MOD_RES (1), (3), (37): Xaa is C or S
  MOD_RES (15), (16), (17), (18), (19): Xaa is A or G
  MOD_RES (20), (21), (22), (23): Xaa is A or G or is absent

SEQ ID NO: 24694 - protein, 39 aa, Artificial Sequence; identical to SEQ ID NO: 3677
  GFR-binding peptide
  MOD_RES (1), (3), (37), (38): Xaa is C or S
  MOD_RES (15), (16), (17), (18), (19): Xaa is A or G
  MOD_RES (20), (21), (22), (23): Xaa is A or G or is absent

SEQ ID NO: 24695 - protein, 41 aa, Artificial Sequence; identical to SEQ ID NO: 3678
  GFR-binding peptide
  MOD_RES (1), (3), (37), (38): Xaa is C or S
  MOD_RES (15), (16), (17), (18), (19): Xaa is A or G
  MOD_RES (20), (21), (22), (23): Xaa is A or G or is absent

SEQ ID NO: 24696 - protein, 39 aa, Artificial Sequence
  GFR-binding peptide
  MOD_RES (2), (4), (38), (39): Xaa is C or S
  MOD_RES (16), (17), (18), (19), (20): Xaa is A or G
  MOD_RES (21), (22), (23), (24): Xaa is A or G or is absent
HXGXARVVMNEYQKYXXXXXXXXXIYLVSIPSLQTPAXX

SEQ ID NO: 24697 - protein, 39 aa, Artificial Sequence
  GFR-binding peptide
  MOD_RES (1), (34), (35): Xaa is C or S
  MOD_RES (12), (13), (14), (15), (16): Xaa is A or G
  MOD_RES (17), (18), (19), (20): Xaa is A or G or is absent
XSKVVMEYQKYXXXXXXXXXIYLISIPSLDQPVXXPSAS

SEQ ID NO: 24698 - protein, 39 aa, Artificial Sequence; identical to SEQ ID NO: 3681
  GFR-binding peptide
  MOD_RES (1), (35), (36): Xaa is C or S
  MOD_RES (13), (14), (15), (16), (17): Xaa is A or G
  MOD_RES (18), (19), (20), (21): Xaa is A or G or is absent

SEQ ID NO: 24699 - protein, 34 aa, Artificial Sequence; identical to SEQ ID NO: 3682
  GFR-binding peptide
  MOD_RES (1), (32), (33): Xaa is C or S

SEQ ID NO: 24700 - protein, 37 aa, Artificial Sequence
  GFR-binding peptide
  MOD_RES (33), (34): Xaa is C or S
  MOD_RES (11), (12), (13), (14), (15): Xaa is A or G
  MOD_RES (16), (17), (18), (19): Xaa is A or G or is absent
EVVMEEYKFKXXXXXXXXXLYLMSIPELETPVXXAKP

SEQ ID NO: 24701 - protein, 36 aa, Artificial Sequence
  GFR-binding peptide
  MOD_RES (33), (34): Xaa is C or S
  MOD_RES (11), (12), (13), (14), (15): Xaa is A or G
  MOD_RES (16), (17), (18), (19): Xaa is A or G or is absent
SVAMGRYKKLXXXXXXXXXFYLISIANLKTPVXXAK

SEQ ID NO: 24702 - protein, 38 aa, Artificial Sequence
  GFR-binding peptide
  MOD_RES (2), (4), (35), (36): Xaa is C or S
SXKXSKVIMEYQKYIKPTKGIIYLISIPSLDQSVXXPS

SEQ ID NO: 24703 - protein, 41 aa, Artificial Sequence
  GFR-binding peptide
  MOD_RES (2), (37), (38): Xaa is C or S
  MOD_RES (15), (16), (17), (18), (19): Xaa is A or G
  MOD_RES (20), (21), (22), (23): Xaa is A or G or is absent
GXEAVSMGEEYKFKXXXXXXXXXLYLVSIPELKTPVXXAKG

SEQ ID NO: 24704 - protein, 37 aa, Artificial Sequence; identical to SEQ ID NO: 3686
  GFR-binding peptide
  MOD_RES (33), (34): Xaa is C or S
  MOD_RES (11), (12), (13), (14), (15): Xaa is A or G
  MOD_RES (16), (17), (18), (19): Xaa is A or G or is absent

SEQ ID NO: 24705 - protein, 37 aa, Artificial Sequence
  GFR-binding peptide
  MOD_RES (2), (36), (37): Xaa is C or S
  MOD_RES (14), (15), (16), (17), (18): Xaa is A or G
  MOD_RES (19), (20), (21), (22): Xaa is A or G or is absent
GXSRVVMNEYQKYXXXXXXXXXIYLVSIPSLKTPAXX

SEQ ID NO: 24706 - protein, 38 aa, Artificial Sequence; identical to SEQ ID NO: 3687
  GFR-binding peptide
  MOD_RES (1), (3), (37), (38): Xaa is C or S
  MOD_RES (15), (16), (17), (18), (19): Xaa is A or G
  MOD_RES (20), (21), (22), (23): Xaa is A or G or is absent

SEQ ID NO: 24707 - protein, 33 aa, Artificial Sequence
  GFR-binding peptide
  MOD_RES (31), (32): Xaa is C or S
SVAMGEYQKYYTVVGKDIYLISIPSLKTPVXXA

SEQ ID NO: 24708 - protein, 36 aa, Artificial Sequence
  GFR-binding peptide
  MOD_RES (1), (35), (36): Xaa is C or S
  MOD_RES (13), (14), (15), (16), (17): Xaa is A or G
  MOD_RES (18), (19), (20), (21): Xaa is A or G or is absent
XGEVVMEEYQKYXXXXXXXXXIYLMSIPSLETPVXX

SEQ ID NO: 24709 - protein, 38 aa, Artificial Sequence
  GFR-binding peptide
  MOD_RES (1), (34), (35): Xaa is C or S
  MOD_RES (12), (13), (14), (15), (16): Xaa is A or G
  MOD_RES (17), (18), (19), (20): Xaa is A or G or is absent
XSKVIMEYQKYXXXXXXXXXIYLISIPSLDQSVXXPSA

SEQ ID NO: 24710 - protein, 41 aa, Artificial Sequence; identical to SEQ ID NO: 3690
  GFR-binding peptide
  MOD_RES (1), (35), (36): Xaa is C or S
  MOD_RES (13), (14), (15), (16), (17): Xaa is A or G
  MOD_RES (18), (19), (20), (21): Xaa is A or G or is absent

SEQ ID NO: 24711 - protein, 34 aa, Artificial Sequence; identical to SEQ ID NO: 3692
  GFR-binding peptide
  MOD_RES (2), (34): Xaa is C or S

SEQ ID NO: 24712 - protein, 41 aa, Artificial Sequence
  GFR-binding peptide
  MOD_RES (2), (36), (37): Xaa is C or S
  MOD_RES (14), (15), (16), (17), (18): Xaa is A or G
  MOD_RES (19), (20), (21), (22): Xaa is A or G or is absent
GXESVAMGYHYKLXXXXXXXXXKYLISIPSLKTPVXXAKSA

SEQ ID NO: 24713 - protein, 34 aa, Artificial Sequence; identical to SEQ ID NO: 3696
  GFR-binding peptide
  MOD_RES (1), (33), (34): Xaa is C or S

SEQ ID NO: 24714 - protein, 37 aa, Artificial Sequence; identical to SEQ ID NO: 3697
  GFR-binding peptide
  MOD_RES (31), (32): Xaa is C or S

SEQ ID NO: 24715 - protein, 36 aa, Artificial Sequence; identical to SEQ ID NO: 3698
  GFR-binding peptide
  MOD_RES (1), (36): Xaa is C or S
  MOD_RES (14), (15), (16), (17), (18): Xaa is A or G
  MOD_RES (19), (20), (21), (22): Xaa is A or G or is absent

SEQ ID NO: 24716 - protein, 41 aa, Artificial Sequence; identical to SEQ ID NO: 3699
  GFR-binding peptide
  MOD_RES (2), (4), (37), (38): Xaa is C or S

SEQ ID NO: 24717 - protein, 34 aa, Artificial Sequence
  GFR-binding peptide
  MOD_RES (1), (3), (34): Xaa is C or S
XKXSRVIMEYKFKVKPKRGVLYLISIPELAQPVX

SEQ ID NO: 24718 - protein, 31 aa, Artificial Sequence; identical to SEQ ID NO: 3703
  GFR-binding peptide

SEQ ID NO: 24719 - protein, 36 aa, Artificial Sequence
  GFR-binding peptide
  MOD_RES (32), (32): Xaa is C or S
SRVVMNEYKFKIVNSSDDLYLVSIPELKTPAXTPKT

SEQ ID NO: 24720 - protein, 34 aa, Artificial Sequence
  GFR-binding peptide
  MOD_RES (32), (33): Xaa is C or S
ARVVMNEYKFKIVNSSDDLYLVSIPELQTPAXXP

SEQ ID NO: 24721 - protein, 38 aa, Artificial Sequence
  GFR-binding peptide
  MOD_RES (1), (3), (37), (38): Xaa is C or S
  MOD_RES (15), (16), (17), (18), (19): Xaa is A or G
  MOD_RES (20), (21), (22), (23): Xaa is A or G or is absent
XGXAKVVMNEYKFKXXXXXXXXXLYLVSIPELKTPAXX

SEQ ID NO: 24722 - protein, 33 aa, Artificial Sequence; identical to SEQ ID NO: 3706
  GFR-binding peptide
  MOD_RES (32), (33): Xaa is C or S

SEQ ID NO: 24723 - protein, 38 aa, Artificial Sequence
  GFR-binding peptide
  MOD_RES (1), (3), (38): Xaa is C or S
  MOD_RES (16), (17), (18), (19), (20): Xaa is A or G
  MOD_RES (21), (22), (23), (24): Xaa is A or G or is absent
XGXEAVSMGEEYQKYXXXXXXXXXIYLVSIPSLKTPVX

SEQ ID NO: 24724 - protein, 33 aa, Artificial Sequence
  GFR-binding peptide
  MOD_RES (2), (2): Xaa is C or S
GXAKVVMNEYQKYIVNNSSDIYLVSIPSLKTPA

SEQ ID NO: 24725 - protein, 40 aa, Artificial Sequence
  GFR-binding peptide
  MOD_RES (2), (35), (36): Xaa is C or S
  MOD_RES (13), (14), (15), (16), (17): Xaa is A or G
  MOD_RES (18), (19), (20), (21): Xaa is A or G or is absent
KXSRVIMEYQKYXXXXXXXXXIYLISIPSLAQPVXXPAAS

SEQ ID NO: 24726 - protein, 40 aa, Artificial Sequence
  GFR-binding peptide
  MOD_RES (2), (4), (38), (39): Xaa is C or S
  MOD_RES (16), (17), (18), (19), (20): Xaa is A or G
  MOD_RES (21), (22), (23), (24): Xaa is A or G or is absent
HXGXARVVMNEYQKYXXXXXXXXXIYLVSIPSLQTPAXXP

SEQ ID NO: 24727 - protein, 38 aa, Artificial Sequence
  GFR-binding peptide
  MOD_RES (34), (35): Xaa is C or S
  MOD_RES (12), (13), (14), (15), (16): Xaa is A or G
  MOD_RES (17), (18), (19), (20): Xaa is A or G or is absent
GEVVMDEYKFKXXXXXXXXXLYLMSIPELETPVXXAKP

SEQ ID NO: 24728 - protein, 41 aa, Artificial Sequence
  GFR-binding peptide
  MOD_RES (1), (3), (37), (38): Xaa is C or S
  MOD_RES (15), (16), (17), (18), (19): Xaa is A or G
  MOD_RES (20), (21), (22), (23): Xaa is A or G or is absent
XGXAEVVMDRYKKLXXXXXXXXXFYLISIANLRAPVXXSAP

SEQ ID NO: 24729 - protein, 42 aa, Artificial Sequence; identical to SEQ ID NO: 3709
  GFR-binding peptide
  MOD_RES (2), (4), (39), (40): Xaa is C or S
  MOD_RES (17), (18), (19), (20), (21): Xaa is A or G
  MOD_RES (22), (23), (24), (25): Xaa is A or G or is absent

SEQ ID NO: 24730 - protein, 37 aa, Artificial Sequence; identical to SEQ ID NO: 3710
  GFR-binding peptide
  MOD_RES (2), (4), (36), (37): Xaa is C or S

SEQ ID NO: 24731 - protein, 35 aa, Artificial Sequence
  GFR-binding peptide
  MOD_RES (1), (32), (33): Xaa is C or S
XSRVIMEYKFKVKPKRGVLYLISIPELAQPVXXPA

SEQ ID NO: 24732 - protein, 34 aa, Artificial Sequence
  GFR-binding peptide
  MOD_RES (32), (33): Xaa is C or S
AEVVMDYHYKLVVNNAADKYLISIPSLRAPVXXS

SEQ ID NO: 24733 - protein, 45 aa, Artificial Sequence; identical to SEQ ID NO: 3713
  GFR-binding peptide
  MOD_RES (2), (4), (39), (40): Xaa is C or S
  MOD_RES (17), (18), (19), (20), (21): Xaa is A or G
  MOD_RES (22), (23), (24), (25): Xaa is A or G or is absent

SEQ ID NO: 24734 - protein, 36 aa, Artificial Sequence; identical to SEQ ID NO: 3716
  GFR-binding peptide
  MOD_RES (31), (32): Xaa is C or S

SEQ ID NO: 24735 - protein, 36 aa, Artificial Sequence
  GFR-binding peptide
  MOD_RES (33), (34): Xaa is C or S
  MOD_RES (11), (12), (13), (14), (15): Xaa is A or G
  MOD_RES (16), (17), (18), (19): Xaa is A or G or is absent
EVVMDYHYKLXXXXXXXXXKYLISIPSLRAPVXXSA

SEQ ID NO: 24736 - protein, 32 aa, Artificial Sequence
  GFR-binding peptide
  MOD_RES (2), (2): Xaa is C or S
KXSKVIMEYQKYIKPTKGIIYLISIPSLDQSV

SEQ ID NO: 24737 - protein, 40 aa, Artificial Sequence
  GFR-binding peptide
  MOD_RES (2), (4), (37), (38): Xaa is C or S
  MOD_RES (15), (16), (17), (18), (19): Xaa is A or G
  MOD_RES (20), (21), (22), (23): Xaa is A or G or is absent
SXKXSKVVMEYQKYXXXXXXXXXIYLISIPSLDQPVXXPS

SEQ ID NO: 24738 - protein, 36 aa, Artificial Sequence
  GFR-binding peptide
  MOD_RES (1), (3), (34), (35): Xaa is C or S
XKXSKVIMEYQKYIKPTKGIIYLISIPSLDQSVXXP

SEQ ID NO: 24739 - protein, 35 aa, Artificial Sequence; identical to SEQ ID NO: 3719
  GFR-binding peptide
  MOD_RES (2), (4), (35): Xaa is C or S

SEQ ID NO: 24740 - protein, 39 aa, Artificial Sequence; identical to SEQ ID NO: 3720
  GFR-binding peptide
  MOD_RES (2), (4), (38), (39): Xaa is C or S
  MOD_RES (16), (17), (18), (19), (20): Xaa is A or G
  MOD_RES (21), (22), (23), (24): Xaa is A or G or is absent

SEQ ID NO: 24741 - protein, 37 aa, Artificial Sequence
  GFR-binding peptide
  MOD_RES (33), (34): Xaa is C or S
  MOD_RES (11), (12), (13), (14), (15): Xaa is A or G
  MOD_RES (16), (17), (18), (19): Xaa is A or G or is absent
KVVMNEYQKYXXXXXXXXXIYLVSIPSLKTPAXXAKP

SEQ ID NO: 24742 - protein, 38 aa, Artificial Sequence
  GFR-binding peptide
  MOD_RES (2), (4), (36), (37): Xaa is C or S
HXGXSRVVMNEYQKYIVNSSDDIYLVSIPSLKTPAXXP

SEQ ID NO: 24743 - protein, 39 aa, Artificial Sequence; identical to SEQ ID NO: 3721
  GFR-binding peptide
  MOD_RES (1), (3), (34), (35): Xaa is C or S

SEQ ID NO: 24744 - protein, 39 aa, Artificial Sequence; identical to SEQ ID NO: 3722
  GFR-binding peptide
  MOD_RES (2), (34), (35): Xaa is C or S

SEQ ID NO: 24745 - protein, 38 aa, Artificial Sequence
  GFR-binding peptide
  MOD_RES (1), (32), (33): Xaa is C or S
XSRVIMEYQKYVKPKRGVIYLISIPSLAQPVXXPAASA

SEQ ID NO: 24746 - protein, 39 aa, Artificial Sequence; identical to SEQ ID NO: 3724
  GFR-binding peptide
  MOD_RES (2), (33), (34): Xaa is C or S

SEQ ID NO: 24747 - protein, 36 aa, Artificial Sequence
  GFR-binding peptide
  MOD_RES (31), (32): Xaa is C or S
RVVMNEYQKYIVNSSDDIYLVSIPSLKTPAXXPKPV

SEQ ID NO: 24748 - protein, 40 aa, Artificial Sequence; identical to SEQ ID NO: 3727
  GFR-binding peptide
  MOD_RES (1), (3), (35): Xaa is C or S

SEQ ID NO: 24749 - protein, 38 aa, Artificial Sequence
  GFR-binding peptide
  MOD_RES (32), (33): Xaa is C or S
SRVVMNEYKFKIVNSSDDLYLVSIPELKTPAXXPKPVY

SEQ ID NO: 24750 - protein, 34 aa, Artificial Sequence
  GFR-binding peptide
  MOD_RES (1), (33), (34): Xaa is C or S
XGEVVMEEYKFKVVKDYEDLYLMSIPELETPVXX

SEQ ID NO: 24751 - protein, 36 aa, Artificial Sequence; identical to SEQ ID NO: 3728
  GFR-binding peptide
  MOD_RES (1), (3), (35), (36): Xaa is C or S

SEQ ID NO: 24752 - protein, 42 aa, Artificial Sequence; identical to SEQ ID NO: 3729
  GFR-binding peptide
  MOD_RES (2), (37), (38): Xaa is C or S
  MOD_RES (15), (16), (17), (18), (19): Xaa is A or G
  MOD_RES (20), (21), (22), (23): Xaa is A or G or is absent

SEQ ID NO: 24753 - protein, 34 aa, Artificial Sequence
  GFR-binding peptide
  MOD_RES (1), (1): Xaa is C or S
  MOD_RES (13), (14), (15), (16), (17): Xaa is A or G
  MOD_RES (18), (19), (20), (21): Xaa is A or G or is absent
XAKVVMNEYKFKXXXXXXXXXLYLVSIPELKTPA

SEQ ID NO: 24754 - protein, 38 aa, Artificial Sequence; identical to SEQ ID NO: 3731
  GFR-binding peptide
  MOD_RES (1), (35), (36): Xaa is C or S
  MOD_RES (13), (14), (15), (16), (17): Xaa is A or G
  MOD_RES (18), (19), (20), (21): Xaa is A or G or is absent

SEQ ID NO: 24755 - protein, 34 aa, Artificial Sequence
  GFR-binding peptide
  MOD_RES (33), (34): Xaa is C or S
  MOD_RES (11), (12), (13), (14), (15): Xaa is A or G
  MOD_RES (16), (17), (18), (19): Xaa is A or G or is absent
SKVIMEYQKYXXXXXXXXXIYLISIPSLDQSVXX

SEQ ID NO: 24756 - protein, 37 aa, Artificial Sequence
  GFR-binding peptide
  MOD_RES (1), (32), (33): Xaa is C or S
XSKVIMEYQKYIKPTKGIIYLISIPSLDQSVXXPSAS

SEQ ID NO: 24757 - protein, 39 aa, Artificial Sequence
  GFR-binding peptide
  MOD_RES (1), (3), (35), (36): Xaa is C or S
XGXAKVVMNEYKFKIVNNSSDLYLVSIPELKTPAXXAKP

SEQ ID NO: 24758 - protein, 39 aa, Artificial Sequence; identical to SEQ ID NO: 3732
  GFR-binding peptide
  MOD_RES (33), (34): Xaa is C or S
  MOD_RES (11), (12), (13), (14), (15): Xaa is A or G
  MOD_RES (16), (17), (18), (19): Xaa is A or G or is absent

SEQ ID NO: 24759 - protein, 37 aa, Artificial Sequence; identical to SEQ ID NO: 3733
  GFR-binding peptide
  MOD_RES (2), (36), (37): Xaa is C or S
  MOD_RES (14), (15), (16), (17), (18): Xaa is A or G
  MOD_RES (19), (20), (21), (22): Xaa is A or G or is absent

SEQ ID NO: 24760 - protein, 40 aa, Artificial Sequence; identical to SEQ ID NO: 3735
  GFR-binding peptide
  MOD_RES (2), (36), (37): Xaa is C or S
  MOD_RES (14), (15), (16), (17), (18): Xaa is A or G
  MOD_RES (19), (20), (21), (22): Xaa is A or G or is absent

SEQ ID NO: 24761 - protein, 39 aa, Artificial Sequence
  GFR-binding peptide
  MOD_RES (1), (3), (38), (39): Xaa is C or S
  MOD_RES (16), (17), (18), (19), (20): Xaa is A or G
  MOD_RES (21), (22), (23), (24): Xaa is A or G or is absent
XGXEAVSMGEEYKFKXXXXXXXXXLYLVSIPELKTPVXX

SEQ ID NO: 24762 - protein, 37 aa, Artificial Sequence; identical to SEQ ID NO: 3736
  GFR-binding peptide
  MOD_RES (31), (31): Xaa is C or S

SEQ ID NO: 24763 - protein, 33 aa, Artificial Sequence; identical to SEQ ID NO: 3737
  GFR-binding peptide
  MOD_RES (1), (1): Xaa is C or S

SEQ ID NO: 24764 - protein, 39 aa, Artificial Sequence; identical to SEQ ID NO: 3738
  GFR-binding peptide
  MOD_RES (34), (35): Xaa is C or S
  MOD_RES (12), (13), (14), (15), (16): Xaa is A or G
  MOD_RES (17), (18), (19), (20): Xaa is A or G or is absent

SEQ ID NO: 24765 - protein, 37 aa, Artificial Sequence; identical to SEQ ID NO: 3739
  GFR-binding peptide
  MOD_RES (35), (36): Xaa is C or S
  MOD_RES (13), (14), (15), (16), (17): Xaa is A or G
  MOD_RES (18), (19), (20), (21): Xaa is A or G or is absent

SEQ ID NO: 24766 - protein, 38 aa, Artificial Sequence; identical to SEQ ID NO: 3740
  GFR-binding peptide
  MOD_RES (2), (35), (36): Xaa is C or S

SEQ ID NO: 24767 - protein, 37 aa, Artificial Sequence
  GFR-binding peptide
  MOD_RES (1), (3), (35), (36): Xaa is C or S
XGXAEVVMDEYKFKVVNNAADLYLISIPELRAPVXXS

SEQ ID NO: 24768 - protein, 32 aa, Artificial Sequence
  GFR-binding peptide
  MOD_RES (31), (32): Xaa is C or S
SKVIMEYKFKIKPTKGILYLISIPELDQSVXX

SEQ ID NO: 24769 - protein, 37 aa, Artificial Sequence; identical to SEQ ID NO: 3744
  GFR-binding peptide
  MOD_RES (31), (32): Xaa is C or S

SEQ ID NO: 24770 - protein, 37 aa, Artificial Sequence
  GFR-binding peptide
  MOD_RES (31), (32): Xaa is C or S
SVAMGRYKKLYTVVGKDFYLISIANLKTPVXXAKSAK

SEQ ID NO: 24771 - protein, 38 aa, Artificial Sequence; identical to SEQ ID NO: 3746
  GFR-binding peptide
  MOD_RES (32), (33): Xaa is C or S

SEQ ID NO: 24772 - protein, 41 aa, Artificial Sequence
  GFR-binding peptide
  MOD_RES (1), (3), (37), (38): Xaa is C or S
  MOD_RES (15), (16), (17), (18), (19): Xaa is A or G
  MOD_RES (20), (21), (22), (23): Xaa is A or G or is absent
XGXSRVVMNEYKFKXXXXXXXXXLYLVSIPELKTPAXXPKP

SEQ ID NO: 24773 - protein, 37 aa, Artificial Sequence
  GFR-binding peptide
  MOD_RES (1), (3), (35), (36): Xaa is C or S
XGXSRVVMNEYQKYIVNSSDDIYLVSIPSLKTPAXXP

SEQ ID NO: 24774 - protein, 31 aa, Artificial Sequence
  GFR-binding peptide
AEVVMDRYKKLVVNNAADFYLISIANLRAPV

SEQ ID NO: 24775 - protein, 38 aa, Artificial Sequence; identical to SEQ ID NO: 3748
  GFR-binding peptide
  MOD_RES (35), (36): Xaa is C or S
  MOD_RES (13), (14), (15), (16), (17): Xaa is A or G
  MOD_RES (18), (19), (20), (21): Xaa is A or G or is absent

SEQ ID NO: 24776 - protein, 38 aa, Artificial Sequence
  GFR-binding peptide
  MOD_RES (2), (4), (36), (37): Xaa is C or S
HXGXSRVVMNEYKFKIVNSSDDLYLVSIPELKTPAXXP

SEQ ID NO: 24777 - protein, 33 aa, Artificial Sequence
  GFR-binding peptide
  MOD_RES (1), (1): Xaa is C or S
XEAVSMGEEYKFKTPVGMDDLYLVSIPELKTPV

SEQ ID NO: 24778 - protein, 38 aa, Artificial Sequence
  GFR-binding peptide
  MOD_RES (1), (35), (36): Xaa is C or S
  MOD_RES (13), (14), (15), (16), (17): Xaa is A or G
  MOD_RES (18), (19), (20), (21): Xaa is A or G or is absent
XGEVVMEEYKFKXXXXXXXXXLYLMSIPELETPVXXAK

SEQ ID NO: 24779 - protein, 37 aa, Artificial Sequence; identical to SEQ ID NO: 3749
  GFR-binding peptide
  MOD_RES (2), (4), (37): Xaa is C or S
  MOD_RES (15), (16), (17), (18), (19): Xaa is A or G
  MOD_RES (20), (21), (22), (23): Xaa is A or G or is absent

SEQ ID NO: 24780 - protein, 35 aa, Artificial Sequence
  GFR-binding peptide
  MOD_RES (33), (34): Xaa is C or S
  MOD_RES (11), (12), (13), (14), (15): Xaa is A or G
  MOD_RES (16), (17), (18), (19): Xaa is A or G or is absent
SVAMGRYKKLXXXXXXXXXFYLISIANLKTPVXXA

SEQ ID NO: 24781 - protein, 39 aa, Artificial Sequence; identical to SEQ ID NO: 3750
  GFR-binding peptide
  MOD_RES (1), (3), (34), (35): Xaa is C or S

SEQ ID NO: 24782 - protein, 39 aa, Artificial Sequence
  GFR-binding peptide
  MOD_RES (1), (3), (37): Xaa is C or S
  MOD_RES (15), (16), (17), (18), (19): Xaa is A or G
  MOD_RES (20), (21), (22), (23): Xaa is A or G or is absent
XGXSRVVMNEYQKYXXXXXXXXXIYLVSIPSLKTPAXTP

SEQ ID NO: 24783 - protein, 34 aa, Artificial Sequence; identical to SEQ ID NO: 3753
  GFR-binding peptide
  MOD_RES (1), (3): Xaa is C or S

SEQ ID NO: 24784 - protein, 38 aa, Artificial Sequence; identical to SEQ ID NO: 3755
  GFR-binding peptide
  MOD_RES (2), (36), (37): Xaa is C or S
  MOD_RES (14), (15), (16), (17), (18): Xaa is A or G
  MOD_RES (19), (20), (21), (22): Xaa is A or G or is absent

SEQ ID NO: 24785 - protein, 35 aa, Artificial Sequence
  GFR-binding peptide
  MOD_RES (1), (33), (34): Xaa is C or S
XAEVVMDEYKFKVVNNAADLYLISIPELRAPVXXS

SEQ ID NO: 24786 - protein, 37 aa, Artificial Sequence
  GFR-binding peptide
  MOD_RES (34), (35): Xaa is C or S
  MOD_RES (12), (13), (14), (15), (16): Xaa is A or G
  MOD_RES (17), (18), (19), (20): Xaa is A or G or is absent
ESVAMGEYKFKXXXXXXXXXLYLISIPELKTPVXXAK

SEQ ID NO: 24787 - protein, 40 aa, Artificial Sequence; identical to SEQ ID NO: 3757
  GFR-binding peptide
  MOD_RES (1), (3), (37), (38): Xaa is C or S
  MOD_RES (15), (16), (17), (18), (19): Xaa is A or G
  MOD_RES (20), (21), (22), (23): Xaa is A or G or is absent

SEQ ID NO: 24788 - protein, 37 aa, Artificial Sequence
  GFR-binding peptide
  MOD_RES (32), (33): Xaa is C or S
AEVVMDRYKKLVVNNAADFYLISIANLRAPVXXSAPA

SEQ ID NO: 24789 - protein, 38 aa, Artificial Sequence; identical to SEQ ID NO: 3758
  GFR-binding peptide
  MOD_RES (2), (4), (38): Xaa is C or S
  MOD_RES (16), (17), (18), (19), (20): Xaa is A or G
  MOD_RES (21), (22), (23), (24): Xaa is A or G or is absent

SEQ ID NO: 24790 - protein, 41 aa, Artificial Sequence
  GFR-binding peptide
  MOD_RES (1), (3), (37), (38): Xaa is C or S
  MOD_RES (15), (16), (17), (18), (19): Xaa is A or G
  MOD_RES (20), (21), (22), (23): Xaa is A or G or is absent
XGXSRVVMNEYQKYXXXXXXXXXIYLVSIPSLKTPAXXPKP

SEQ ID NO: 24791 - protein, 37 aa, Artificial Sequence; identical to SEQ ID NO: 3761
  GFR-binding peptide
  MOD_RES (31), (32): Xaa is C or S

SEQ ID NO: 24792 - protein, 35 aa, Artificial Sequence; identical to SEQ ID NO: 3763
  GFR-binding peptide
  MOD_RES (2), (4): Xaa is C or S

SEQ ID NO: 24793 - protein, 41 aa, Artificial Sequence; identical to SEQ ID NO: 3765
  GFR-binding peptide
  MOD_RES (2), (36), (37): Xaa is C or S
  MOD_RES (14), (15), (16), (17), (18): Xaa is A or G
  MOD_RES (19), (20), (21), (22): Xaa is A or G or is absent

SEQ ID NO: 24794 - protein, 35 aa, Artificial Sequence
  GFR-binding peptide
  MOD_RES (35), (35): Xaa is C or S
  MOD_RES (13), (14), (15), (16), (17): Xaa is A or G
  MOD_RES (18), (19), (20), (21): Xaa is A or G or is absent
EAVSMGEEYQKYXXXXXXXXXIYLVSIPSLKTPVX

SEQ ID NO: 24795 - protein, 35 aa, Artificial Sequence; identical to SEQ ID NO: 3767
  GFR-binding peptide
  MOD_RES (2), (35): Xaa is C or S
  MOD_RES (13), (14), (15), (16), (17): Xaa is A or G
  MOD_RES (18), (19), (20), (21): Xaa is A or G or is absent

SEQ ID NO: 24796 - protein, 33 aa, Artificial Sequence
  GFR-binding peptide
  MOD_RES (1), (32), (33): Xaa is C or S
XSRVIMEYQKYVKPKRGVIYLISIPSLAQPVXX

SEQ ID NO: 24797 - protein, 37 aa, Artificial Sequence; identical to SEQ ID NO: 3768
  GFR-binding peptide
  MOD_RES (33), (34): Xaa is C or S
  MOD_RES (11), (12), (13), (14), (15): Xaa is A or G
  MOD_RES (16), (17), (18), (19): Xaa is A or G or is absent

SEQ ID NO: 24798 - protein, 40 aa, Artificial Sequence; identical to SEQ ID NO: 3769
  GFR-binding peptide
  MOD_RES (35), (36): Xaa is C or S
  MOD_RES (13), (14), (15), (16), (17): Xaa is A or G
  MOD_RES (18), (19), (20), (21): Xaa is A or G or is absent

SEQ ID NO: 24799 - protein, 32 aa, Artificial Sequence
  GFR-binding peptide
  MOD_RES (11), (12), (13), (14), (15): Xaa is A or G
  MOD_RES (16), (17), (18), (19): Xaa is A or G or is absent
SKVIMEYQKYXXXXXXXXXIYLISIPSLDQSV

SEQ ID NO: 24800 - protein, 39 aa, Artificial Sequence
  GFR-binding peptide
  MOD_RES (34), (35): Xaa is C or S
  MOD_RES (12), (13), (14), (15), (16): Xaa is A or G
  MOD_RES (17), (18), (19), (20): Xaa is A or G or is absent
AKVVMNEYKFKXXXXXXXXXLYLVSIPELKTPAXXAKPV

SEQ ID NO: 24801 - protein, 42 aa, Artificial Sequence; identical to SEQ ID NO: 3772
  GFR-binding peptide
  MOD_RES (2), (4), (37), (38): Xaa is C or S

SEQ ID NO: 24802 - protein, 38 aa, Artificial Sequence
  GFR-binding peptide
  MOD_RES (2), (4), (38): Xaa is C or S
  MOD_RES (16), (17), (18), (19), (20): Xaa is A or G
  MOD_RES (21), (22), (23), (24): Xaa is A or G or is absent
RXGXGEVVMDEYQKYXXXXXXXXXIYLMSIPSLETPVX

SEQ ID NO: 24803 - protein, 38 aa, Artificial Sequence; identical to SEQ ID NO: 3774
  GFR-binding peptide
  MOD_RES (2), (34), (35): Xaa is C or S

SEQ ID NO: 24804 - protein, 37 aa, Artificial Sequence
  GFR-binding peptide
  MOD_RES (1), (3), (35), (36): Xaa is C or S
XGXARVVMNEYQKYIVNSSDDIYLVSIPSLQTPAXXP

SEQ ID NO: 24805 - protein, 39 aa, Artificial Sequence
  GFR-binding peptide
  MOD_RES (1), (35), (36): Xaa is C or S
  MOD_RES (13), (14), (15), (16), (17): Xaa is A or G
  MOD_RES (18), (19), (20), (21): Xaa is A or G or is absent
XARVVMNEYKFKXXXXXXXXXLYLVSIPELQTPAXXPKP

SEQ ID NO: 24806 - protein, 33 aa, Artificial Sequence
  GFR-binding peptide
  MOD_RES (31), (32): Xaa is C or S
SRVIMEYKFKVKPKRGVLYLISIPELAQPVXXP

SEQ ID NO: 24807 - protein, 36 aa, Artificial Sequence
  GFR-binding peptide
  MOD_RES (2), (4), (35), (36): Xaa is C or S
SXKXSKVVMEYKFKVKPTRGVLYLISIPELDQPVXX

SEQ ID NO: 24808 - protein, 37 aa, Artificial Sequence
  GFR-binding peptide
  MOD_RES (1), (3), (37): Xaa is C or S
  MOD_RES (15), (16), (17), (18), (19): Xaa is A or G
  MOD_RES (20), (21), (22), (23): Xaa is A or G or is absent
XGXAEVVMDEYQKYXXXXXXXXXIYLISIPSLRAPVX

SEQ ID NO: 24809 - protein, 42 aa, Artificial Sequence; identical to SEQ ID NO: 3782
  GFR-binding peptide
  MOD_RES (2), (36), (37): Xaa is C or S
  MOD_RES (14), (15), (16), (17), (18): Xaa is A or G
  MOD_RES (19), (20), (21), (22): Xaa is A or G or is absent

SEQ ID NO: 24810 - protein, 32 aa, Artificial Sequence
  GFR-binding peptide
  MOD_RES (11), (12), (13), (14), (15): Xaa is A or G
  MOD_RES (16), (17), (18), (19): Xaa is A or G or is absent
EVVMDYHYKLXXXXXXXXXKYLISIPSLRAPV

SEQ ID NO: 24811 - protein, 34 aa, Artificial Sequence; identical to SEQ ID NO: 3783
  GFR-binding peptide
  MOD_RES (1), (34): Xaa is C or S

SEQ ID NO: 24812 - protein, 41 aa, Artificial Sequence; identical to SEQ ID NO: 3784
  GFR-binding peptide
  MOD_RES (2), (4), (36), (37): Xaa is C or S

SEQ ID NO: 24813 - protein, 36 aa, Artificial Sequence; identical to SEQ ID NO: 3786
  GFR-binding peptide
  MOD_RES (1), (3): Xaa is C or S
  MOD_RES (15), (16), (17), (18), (19): Xaa is A or G
  MOD_RES (20), (21), (22), (23): Xaa is A or G or is absent

SEQ ID NO: 24814 - protein, 40 aa, Artificial Sequence
  GFR-binding peptide
  MOD_RES (34), (35): Xaa is C or S
  MOD_RES (12), (13), (14), (15), (16): Xaa is A or G
  MOD_RES (17), (18), (19), (20): Xaa is A or G or is absent
AEVVMDYHYKLXXXXXXXXXKYLISIPSLRAPVXXSAPAA

SEQ ID NO: 24815 - protein, 37 aa, Artificial Sequence
  GFR-binding peptide
  MOD_RES (1), (34), (35): Xaa is C or S
  MOD_RES (12), (13), (14), (15), (16): Xaa is A or G
  MOD_RES (17), (18), (19), (20): Xaa is A or G or is absent
XSKVIMEYKFKXXXXXXXXXLYLISIPELDQSVXXPS

SEQ ID NO: 24816 - protein, 35 aa, Artificial Sequence
  GFR-binding peptide
  MOD_RES (2), (4), (35): Xaa is C or S
SXKXSRVIMEYKFKVKPKRGVLYLISIPELAQPVX

SEQ ID NO: 24817 - protein, 39 aa, Artificial Sequence
  GFR-binding peptide
  MOD_RES (2), (35), (36): Xaa is C or S
  MOD_RES (13), (14), (15), (16), (17): Xaa is A or G
  MOD_RES (18), (19), (20), (21): Xaa is A or G or is absent
KXSKVIMEYQKYXXXXXXXXXIYLISIPSLDQSVXXPSA

SEQ ID NO: 24818 - protein, 31 aa, Artificial Sequence
  GFR-binding peptide
AKVVMNEYQKYIVNNSSDIYLVSIPSLKTPA

SEQ ID NO: 24819 - protein, 33 aa, Artificial Sequence
  GFR-binding peptide
  MOD_RES (33), (33): Xaa is C or S
  MOD_RES (11), (12), (13), (14), (15): Xaa is A or G
  MOD_RES (16), (17), (18), (19): Xaa is A or G or is absent
EVVMDEYKFKXXXXXXXXXLYLMSIPELETPVX

SEQ ID NO: 24820 - protein, 37 aa, Artificial Sequence; identical to SEQ ID NO: 3791
  GFR-binding peptide
  MOD_RES (1), (3), (35), (36): Xaa is C or S

SEQ ID NO: 24821 - protein, 38 aa, Artificial Sequence; identical to SEQ ID NO: 3793
  GFR-binding peptide
  MOD_RES (33), (34): Xaa is C or S
  MOD_RES (11), (12), (13), (14), (15): Xaa is A or G
  MOD_RES (16), (17), (18), (19): Xaa is A or G or is absent

SEQ ID NO: 24822 - protein, 37 aa, Artificial Sequence
  GFR-binding peptide
  MOD_RES (1), (3), (35), (36): Xaa is C or S
XGXAKVVMNEYKFKIVNNSSDLYLVSIPELKTPAXXA

SEQ ID NO: 24823 - protein, 41 aa, Artificial Sequence
  GFR-binding peptide
  MOD_RES (1), (3), (36), (37): Xaa is C or S
  MOD_RES (14), (15), (16), (17), (18): Xaa is A or G
  MOD_RES (19), (20), (21), (22): Xaa is A or G or is absent
XKXSRVIMEYQKYXXXXXXXXXIYLISIPSLAQPVXXPAAS

SEQ ID NO: 24824 - protein, 40 aa, Artificial Sequence; identical to SEQ ID NO: 3795
  GFR-binding peptide
  MOD_RES (2), (36), (37): Xaa is C or S
  MOD_RES (14), (15), (16), (17), (18): Xaa is A or G
  MOD_RES (19), (20), (21), (22): Xaa is A or G or is absent

SEQ ID NO: 24825 - protein, 43 aa, Artificial Sequence; identical to SEQ ID NO: 3796
  GFR-binding peptide
  MOD_RES (1), (3), (37), (38): Xaa is C or S
  MOD_RES (15), (16), (17), (18), (19): Xaa is A or G
  MOD_RES (20), (21), (22), (23): Xaa is A or G or is absent

SEQ ID NO: 24826 - protein, 40 aa, Artificial Sequence; identical to SEQ ID NO: 3798
  GFR-binding peptide
  MOD_RES (2), (4), (35), (36): Xaa is C or S

SEQ ID NO: 24827 - protein, 33 aa, Artificial Sequence; identical to SEQ ID NO: 3799
  GFR-binding peptide
  MOD_RES (33), (33): Xaa is C or S
  MOD_RES (11), (12), (13), (14), (15): Xaa is A or G
  MOD_RES (16), (17), (18), (19): Xaa is A or G or is absent

SEQ ID NO: 24828 - protein, 42 aa, Artificial Sequence
  GFR-binding peptide
  MOD_RES (2), (4), (38), (39): Xaa is C or S
  MOD_RES (16), (17), (18), (19), (20): Xaa is A or G
  MOD_RES (21), (22), (23), (24): Xaa is A or G or is absent
RXGXGEVVMEEYQKYXXXXXXXXXIYLMSIPSLETPVXXAKP

SEQ ID NO: 24829 - protein, 34 aa, Artificial Sequence; identical to SEQ ID NO: 3800
  GFR-binding peptide
  MOD_RES (33), (33): Xaa is C or S
  MOD_RES (11), (12), (13), (14), (15): Xaa is A or G
  MOD_RES (16), (17), (18), (19): Xaa is A or G or is absent

SEQ ID NO: 24830 - protein, 34 aa, Artificial Sequence
  GFR-binding peptide
  MOD_RES (1), (1): Xaa is C or S
  MOD_RES (13), (14), (15), (16), (17): Xaa is A or G
  MOD_RES (18), (19), (20), (21): Xaa is A or G or is absent
XESVAMGYHYKLXXXXXXXXXKYLISIPSLKTPV

SEQ ID NO: 24831 - protein, 39 aa, Artificial Sequence; identical to SEQ ID NO: 3801
  GFR-binding peptide
  MOD_RES (33), (34): Xaa is C or S
  MOD_RES (11), (12), (13), (14), (15): Xaa is A or G
  MOD_RES (16), (17), (18), (19): Xaa is A or G or is absent

SEQ ID NO: 24832 - protein, 39 aa, Artificial Sequence
  GFR-binding peptide
  MOD_RES (2), (36), (37): Xaa is C or S
  MOD_RES (14), (15), (16), (17), (18): Xaa is A or G
  MOD_RES (19), (20), (21), (22): Xaa is A or G or is absent
GXESVAMGEYKFKXXXXXXXXXLYLISIPELKTPVXXAK

SEQ ID NO: 24833 - protein, 38 aa, Artificial Sequence
  GFR-binding peptide
  MOD_RES (2), (34), (35): Xaa is C or S
GXAEVVMDYHYKLVVNNAADKYLISIPSLRAPVXXSAP

SEQ ID NO: 24834 - protein, 36 aa, Artificial Sequence
  GFR-binding peptide
  MOD_RES (2), (2): Xaa is C or S
  MOD_RES (15), (16), (17), (18), (19): Xaa is A or G
  MOD_RES (20), (21), (22), (23): Xaa is A or G or is absent
GXEAVSMGEEYKFKXXXXXXXXXLYLVSIPELKTPV

SEQ ID NO: 24835 - protein, 35 aa, Artificial Sequence
  GFR-binding peptide
  MOD_RES (1), (1): Xaa is C or S
  MOD_RES (14), (15), (16), (17), (18): Xaa is A or G
  MOD_RES (19), (20), (21), (22): Xaa is A or G or is absent
XEAVSMGEEYQKYXXXXXXXXXIYLVSIPSLKTPV

SEQ ID NO: 24836 - protein, 36 aa, Artificial Sequence; identical to SEQ ID NO: 3808
  GFR-binding peptide
  MOD_RES (1), (3), (34), (35): Xaa is C or S

SEQ ID NO: 24837 - protein, 39 aa, Artificial Sequence
  GFR-binding peptide
  MOD_RES (2), (4), (36), (37): Xaa is C or S
HXGXSRVVMNEYKFKIVNSSDDLYLVSIPELKTPAXXPK

SEQ ID NO: 24838 - protein, 35 aa, Artificial Sequence; identical to SEQ ID NO: 3809
  GFR-binding peptide
  MOD_RES (1), (34), (35): Xaa is C or S
  MOD_RES (12), (13), (14), (15), (16): Xaa is A or G
  MOD_RES (17), (18), (19), (20): Xaa is A or G or is absent

SEQ ID NO: 24839 - protein, 39 aa, Artificial Sequence
  GFR-binding peptide
  MOD_RES (2), (36), (37): Xaa is C or S
  MOD_RES (14), (15), (16), (17), (18): Xaa is A or G
  MOD_RES (19), (20), (21), (22): Xaa is A or G or is absent
GXESVAMGYHYKLXXXXXXXXXKYLISIPSLKTPVXXAK

SEQ ID NO: 24840 - protein, 35 aa, Artificial Sequence
  GFR-binding peptide
  MOD_RES (2), (35): Xaa is C or S
  MOD_RES (13), (14), (15), (16), (17): Xaa is A or G
  MOD_RES (18), (19), (20), (21): Xaa is A or G or is absent
KXSKVVMEYKFKXXXXXXXXXLYLISIPELDQPVX

SEQ ID NO: 24841 - protein, 36 aa, Artificial Sequence
  GFR-binding peptide
  MOD_RES (1), (32), (33): Xaa is C or S
XSKVIMEYKFKIKPTKGILYLISIPELDQSVXXPSA

SEQ ID NO: 24842 - protein, 40 aa, Artificial Sequence; identical to SEQ ID NO: 3814
  GFR-binding peptide
  MOD_RES (1), (3), (35), (36): Xaa is C or S

SEQ ID NO: 24843 - protein, 41 aa, Artificial Sequence
  GFR-binding peptide
  MOD_RES (1), (36), (37): Xaa is C or S
  MOD_RES (14), (15), (16), (17), (18): Xaa is A or G
  MOD_RES (19), (20), (21), (22): Xaa is A or G or is absent
XEAVSMGEEYQKYXXXXXXXXXIYLVSIPSLKTPVXXAKGV

SEQ ID NO: 24844 - protein, 37 aa, Artificial Sequence; identical to SEQ ID NO: 3815
  GFR-binding peptide
  MOD_RES (34), (35): Xaa is C or S
  MOD_RES (12), (13), (14), (15), (16): Xaa is A or G
  MOD_RES (17), (18), (19), (20): Xaa is A or G or is absent

SEQ ID NO: 24845 - protein, 33 aa, Artificial Sequence
  GFR-binding peptide
  MOD_RES (2), (2): Xaa is C or S
GXAEVVMDEYQKYVVNNAADIYLISIPSLRAPV

SEQ ID NO: 24846 - protein, 41 aa, Artificial Sequence
  GFR-binding peptide
  MOD_RES (1), (3), (35), (36): Xaa is C or S
XGXAKVVMNEYKFKIVNNSSDLYLVSIPELKTPAXXAKPVA

SEQ ID NO: 24847 - protein, 37 aa, Artificial Sequence
  GFR-binding peptide
  MOD_RES (31), (32): Xaa is C or S
EVVMEEYKFKVVKDYEDLYLMSIPELETPVXXAKPIS

SEQ ID NO: 24848 - protein, 40 aa, Artificial Sequence
  GFR-binding peptide
  MOD_RES (1), (3), (35), (36): Xaa is C or S
XGXAEVVMDEYKFKVVNNAADLYLISIPELRAPVXXSAPA

SEQ ID NO: 24849 - protein, 39 aa, Artificial Sequence
  GFR-binding peptide
  MOD_RES (2), (34), (35): Xaa is C or S
GXSRVVMNEYKFKIVNSSDDLYLVSIPELKTPAXXPKPV

SEQ ID NO: 24850 - protein, 40 aa, Artificial Sequence
  GFR-binding peptide
  MOD_RES (2), (4), (36), (37): Xaa is C or S
HXGXARVVMNEYQKYIVNSSDDIYLVSIPSLQTPAXXPKP

SEQ ID NO: 24851 - protein, 37 aa, Artificial Sequence
  GFR-binding peptide
  MOD_RES (1), (35), (36): Xaa is C or S
  MOD_RES (13), (14), (15), (16), (17): Xaa is A or G
  MOD_RES (18), (19), (20), (21): Xaa is A or G or is absent
XAEVVMDEYKFKXXXXXXXXXLYLISIPELRAPVXXS

SEQ ID NO: 24852 - protein, 36 aa, Artificial Sequence
  GFR-binding peptide
  MOD_RES (1), (3), (35), (36): Xaa is C or S
XGXESVAMGEYKFKYTVVGKDLYLISIPELKTPVXX

SEQ ID NO: 24853 - protein, 35 aa, Artificial Sequence; identical to SEQ ID NO: 3820
  GFR-binding peptide
  MOD_RES (2), (33), (34): Xaa is C or S

SEQ ID NO: 24854 - protein, 35 aa, Artificial Sequence
  GFR-binding peptide
  MOD_RES (2), (34), (35): Xaa is C or S
GXAEVVMDYHYKLVVNNAADKYLISIPSLRAPVXX

SEQ ID NO: 24855 - protein, 31 aa, Artificial Sequence; identical to SEQ ID NO: 3821
  GFR-binding peptide

SEQ ID NO: 24856 - protein, 38 aa, Artificial Sequence; identical to SEQ ID NO: 3822
  GFR-binding peptide
  MOD_RES (1), (32), (33): Xaa is C or S

SEQ ID NO: 24857 - protein, 34 aa, Artificial Sequence; identical to SEQ ID NO: 3824
  GFR-binding peptide
  MOD_RES (1), (3): Xaa is C or S

SEQ ID NO: 24858 - protein, 35 aa, Artificial Sequence; identical to SEQ ID NO: 3825
  GFR-binding peptide
  MOD_RES (31), (32): Xaa is C or S

SEQ ID NO: 24859 - protein, 35 aa, Artificial Sequence; identical to SEQ ID NO: 3826
  GFR-binding peptide
  MOD_RES (2), (33), (34): Xaa is C or S

SEQ ID NO: 24860 - protein, 35 aa, Artificial Sequence
  GFR-binding peptide
  MOD_RES (31), (32): Xaa is C or S
EVVMDYHYKLVVNNAADKYLISIPSLRAPVXXSAP

SEQ ID NO: 24861 - protein, 37 aa, Artificial Sequence
  GFR-binding peptide
  MOD_RES (1), (33): Xaa is C or S
XSRVVMNEYKFKIVNSSDDLYLVSIPELKTPAXTPKT

SEQ ID NO: 24862 - protein, 38 aa, Artificial Sequence
  GFR-binding peptide
  MOD_RES (1), (3), (35), (36): Xaa is C or S
XGXESVAMGEYQKYYTVVGKDIYLISIPSLKTPVXXAK

SEQ ID NO: 24863 - protein, 43 aa, Artificial Sequence
  GFR-binding peptide
  MOD_RES (2), (4), (38), (39): Xaa is C or S
  MOD_RES (16), (17), (18), (19), (20): Xaa is A or G
  MOD_RES (21), (22), (23), (24): Xaa is A or G or is absent
HXGXAKVVMNEYKFKXXXXXXXXXLYLVSIPELKTPAXXAKPV

SEQ ID NO: 24864 - protein, 37 aa, Artificial Sequence
  GFR-binding peptide
  MOD_RES (1), (3), (35), (36): Xaa is C or S
XGXESVAMGYHYKLYTVVGKDKYLISIPSLKTPVXXA

SEQ ID NO: 24865 - protein, 36 aa, Artificial Sequence
  GFR-binding peptide
  MOD_RES (1), (3): Xaa is C or S
  MOD_RES (15), (16), (17), (18), (19): Xaa is A or G
  MOD_RES (20), (21), (22), (23): Xaa is A or G or is absent
XGXAKVVMNEYQKYXXXXXXXXXIYLVSIPSLKTPA

SEQ ID NO: 24866 - protein, 35 aa, Artificial Sequence
  GFR-binding peptide
  MOD_RES (31), (31): Xaa is C or S
RVVMNEYQKYIVNSSDDIYLVSIPSLKTPAXTPKT

SEQ ID NO: 24867 - protein, 37 aa, Artificial Sequence; identical to SEQ ID NO: 3828
  GFR-binding peptide
  MOD_RES (33), (34): Xaa is C or S
  MOD_RES (11), (12), (13), (14), (15): Xaa is A or G
  MOD_RES (16), (17), (18), (19): Xaa is A or G or is absent

SEQ ID NO: 24868 - protein, 32 aa, Artificial Sequence; identical to SEQ ID NO: 3829
  GFR-binding peptide
  MOD_RES (1), (1): Xaa is C or S

SEQ ID NO: 24869 - protein, 37 aa, Artificial Sequence
  GFR-binding peptide
  MOD_RES (34), (35): Xaa is C or S
  MOD_RES (12), (13), (14), (15), (16): Xaa is A or G
  MOD_RES (17), (18), (19), (20): Xaa is A or G or is absent
AEVVMDYHYKLXXXXXXXXXKYLISIPSLRAPVXXSA

SEQ ID NO: 24870 - protein, 34 aa, Artificial Sequence
  GFR-binding peptide
  MOD_RES (33), (33): Xaa is C or S
  MOD_RES (11), (12), (13), (14), (15): Xaa is A or G
  MOD_RES (16), (17), (18), (19): Xaa is A or G or is absent
RVVMNEYKFKXXXXXXXXXLYLVSIPELKTPAXT

SEQ ID NO: 24871 - protein, 35 aa, Artificial Sequence; identical to SEQ ID NO: 3831
  GFR-binding peptide
  MOD_RES (2), (34), (35): Xaa is C or S

SEQ ID NO: 24872 - protein, 38 aa, Artificial Sequence
  GFR-binding peptide
  MOD_RES (33), (34): Xaa is C or S
  MOD_RES (11), (12), (13), (14), (15): Xaa is A or G
  MOD_RES (16), (17), (18), (19): Xaa is A or G or is absent
EVVMEEYKFKXXXXXXXXXLYLMSIPELETPVXXAKPI

SEQ ID NO: 24873 - protein, 39 aa, Artificial Sequence
  GFR-binding peptide
  MOD_RES (34), (35): Xaa is C or S
  MOD_RES (12), (13), (14), (15), (16): Xaa is A or G
  MOD_RES (17), (18), (19), (20): Xaa is A or G or is absent
GEVVMDEYQKYXXXXXXXXXIYLMSIPSLETPVXXAKPI

SEQ ID NO: 24874 - protein, 40 aa, Artificial Sequence
  GFR-binding peptide
  MOD_RES (1), (35), (36): Xaa is C or S
  MOD_RES (13), (14), (15), (16), (17): Xaa is A or G
  MOD_RES (18), (19), (20), (21): Xaa is A or G or is absent
XGEVVMEEYKFKXXXXXXXXXLYLMSIPELETPVXXAKPI

SEQ ID NO: 24875 - protein, 40 aa, Artificial Sequence
  GFR-binding peptide
  MOD_RES (1), (3), (35), (36): Xaa is C or S
XGXAKVVMNEYKFKIVNNSSDLYLVSIPELKTPAXXAKPV

SEQ ID NO: 24876 - protein, 36 aa, Artificial Sequence
  GFR-binding peptide
  MOD_RES (31), (32): Xaa is C or S
SKVIMEYQKYIKPTKGIIYLISIPSLDQSVXXPSAS

SEQ ID NO: 24877 - protein, 40 aa, Artificial Sequence
  GFR-binding peptide
  MOD_RES (2), (36): Xaa is C or S
  MOD_RES (14), (15), (16), (17), (18): Xaa is A or G
  MOD_RES (19), (20), (21), (22): Xaa is A or G or is absent
GXSRVVMNEYKFKXXXXXXXXXLYLVSIPELKTPAXTPKT

SEQ ID NO: 24878 - protein, 36 aa, Artificial Sequence; identical to SEQ ID NO: 3833
  GFR-binding peptide
  MOD_RES (1), (35), (36): Xaa is C or S
  MOD_RES (13), (14), (15), (16), (17): Xaa is A or G
  MOD_RES (18), (19), (20), (21): Xaa is A or G or is absent

SEQ ID NO: 24879 - protein, 40 aa, Artificial Sequence
  GFR-binding peptide
  MOD_RES (2), (4), (38), (39): Xaa is C or S
  MOD_RES (16), (17), (18), (19), (20): Xaa is A or G
  MOD_RES (21), (22), (23), (24): Xaa is A or G or is absent
HXGXSRVVMNEYKFKXXXXXXXXXLYLVSIPELKTPAXXP

SEQ ID NO: 24880 - protein, 38 aa, Artificial Sequence; identical to SEQ ID NO: 3836
  GFR-binding peptide
  MOD_RES (33), (34): Xaa is C or S

SEQ ID NO: 24881 - protein, 37 aa, Artificial Sequence
  GFR-binding peptide
  MOD_RES (33), (34): Xaa is C or S
  MOD_RES (11), (12), (13), (14), (15): Xaa is A or G
  MOD_RES (16), (17), (18), (19): Xaa is A or G or is absent
SKVIMEYQKYXXXXXXXXXIYLISIPSLDQSVXXPSA

SEQ ID NO: 24882 - protein, 42 aa, Artificial Sequence
  GFR-binding peptide
  MOD_RES (2), (4), (36), (37): Xaa is C or S
RXGXESVAMGYHYKLYTVVGKDKYLISIPSLKTPVXXAKSAK

SEQ ID NO: 24883 - protein, 41 aa, Artificial Sequence
  GFR-binding peptide
  MOD_RES (2), (35), (36): Xaa is C or S
GXEAVSMGEEYQKYTPVGMDDIYLVSIPSLKTPVXXAKGVK

SEQ ID NO: 24884 - protein, 38 aa, Artificial Sequence; identical to SEQ ID NO: 3839
  GFR-binding peptide
  MOD_RES (1), (33), (34): Xaa is C or S

SEQ ID NO: 24885 - protein, 32 aa, Artificial Sequence
  GFR-binding peptide
  MOD_RES (1), (1): Xaa is C or S
XAEVVMDYHYKLVVNNAADKYLISIPSLRAPV

SEQ ID NO: 24886 - protein, 39 aa, Artificial Sequence
  GFR-binding peptide
  MOD_RES (1), (3), (37), (38): Xaa is C or S
  MOD_RES (15), (16), (17), (18), (19): Xaa is A or G
  MOD_RES (20), (21), (22), (23): Xaa is A or G or is absent
XGXARVVMNEYKFKXXXXXXXXXLYLVSIPELQTPAXXP

SEQ ID NO: 24887 - protein, 38 aa, Artificial Sequence
  GFR-binding peptide
  MOD_RES (1), (3), (37), (38): Xaa is C or S
  MOD_RES (15), (16), (17), (18), (19): Xaa is A or G
  MOD_RES (20), (21), (22), (23): Xaa is A or G or is absent
XGXESVAMGYHYKLXXXXXXXXXKYLISIPSLKTPVXX

SEQ ID NO: 24888 - protein, 39 aa, Artificial Sequence
  GFR-binding peptide
  MOD_RES (2), (33), (34): Xaa is C or S
KXSKVVMEYQKYVKPTRGVIYLISIPSLDQPVXXPSASA

SEQ ID NO: 24889 - protein, 38 aa, Artificial Sequence
  GFR-binding peptide
  MOD_RES (2), (36), (37): Xaa is C or S
  MOD_RES (14), (15), (16), (17), (18): Xaa is A or G
  MOD_RES (19), (20), (21), (22): Xaa is A or G or is absent
GXSRVVMNEYQKYXXXXXXXXXIYLVSIPSLKTPAXXP

SEQ ID NO: 24890 - protein, 42 aa, Artificial Sequence; identical to SEQ ID NO: 3843
  GFR-binding peptide
  MOD_RES (1), (3), (36), (37): Xaa is C or S
  MOD_RES (14), (15), (16), (17), (18): Xaa is A or G
  MOD_RES (19), (20), (21), (22): Xaa is A or G or is absent

SEQ ID NO: 24891 - protein, 40 aa, Artificial Sequence
  GFR-binding peptide
  MOD_RES (1), (3), (37): Xaa is C or S
  MOD_RES (15), (16), (17), (18), (19): Xaa is A or G
  MOD_RES (20), (21), (22), (23): Xaa is A or G or is absent
XGXSRVVMNEYQKYXXXXXXXXXIYLVSIPSLKTPAXTPK

SEQ ID NO: 24892 - protein, 38 aa, Artificial Sequence
  GFR-binding peptide
  MOD_RES (2), (4): Xaa is C or S
  MOD_RES (17), (18), (19), (20), (21): Xaa is A or G
  MOD_RES (22), (23), (24), (25): Xaa is A or G or is absent
RXGXEAVSMGEEYKFKXXXXXXXXXLYLVSIPELKTPV

SEQ ID NO: 24893 - protein, 41 aa, Artificial Sequence
  GFR-binding peptide
  MOD_RES (1), (35), (36): Xaa is C or S
  MOD_RES (13), (14), (15), (16), (17): Xaa is A or G
  MOD_RES (18), (19), (20), (21): Xaa is A or G or is absent
XESVAMGEYKFKXXXXXXXXXLYLISIPELKTPVXXAKSAK

SEQ ID NO: 24894 - protein, 38 aa, Artificial Sequence
  GFR-binding peptide
  MOD_RES (33), (34): Xaa is C or S
  MOD_RES (11), (12), (13), (14), (15): Xaa is A or G
  MOD_RES (16), (17), (18), (19): Xaa is A or G or is absent
SVAMGRYKKLXXXXXXXXXFYLISIANLKTPVXXAKSA

SEQ ID NO: 24895 - protein, 35 aa, Artificial Sequence; identical to SEQ ID NO: 3844
  GFR-binding peptide
  MOD_RES (1), (33): Xaa is C or S

SEQ ID NO: 24896 - protein, 39 aa, Artificial Sequence
  GFR-binding peptide
  MOD_RES (2), (33), (34): Xaa is C or S
KXSKVVMEYKFKVKPTRGVLYLISIPELDQPVXXPSASA

SEQ ID NO: 24897 - protein, 40 aa, Artificial Sequence
  GFR-binding peptide
  MOD_RES (2), (34), (35): Xaa is C or S
GXGEVVMDEYQKYVVKENEDIYLMSIPSLETPVXXAKPIK

SEQ ID NO: 24898 - protein, 38 aa, Artificial Sequence
  GFR-binding peptide
  MOD_RES (1), (32), (33): Xaa is C or S
XSKVVMEYQKYVKPTRGVIYLISIPSLDQPVXXPSASA

SEQ ID NO: 24899 - protein, 38 aa, Artificial Sequence
  GFR-binding peptide
  MOD_RES (1), (35), (36): Xaa is C or S
  MOD_RES (13), (14), (15), (16), (17): Xaa is A or G
  MOD_RES (18), (19), (20), (21): Xaa is A or G or is absent
XESVAMGRYKKLXXXXXXXXXFYLISIANLKTPVXXAK

SEQ ID NO: 24900 - protein, 34 aa, Artificial Sequence; identical to SEQ ID NO: 3846
  GFR-binding peptide
  MOD_RES (2), (33), (34): Xaa is C or S

SEQ ID NO: 24901 - protein, 34 aa, Artificial Sequence
  GFR-binding peptide
  MOD_RES (31), (32): Xaa is C or S
SVAMGYHYKLYTVVGKDKYLISIPSLKTPVXXAK

SEQ ID NO: 24902 - protein, 40 aa, Artificial Sequence
  GFR-binding peptide
  MOD_RES (2), (4), (36): Xaa is C or S
HXGXSRVVMNEYQKYIVNSSDDIYLVSIPSLKTPAXTPKT

SEQ ID NO: 24903 - protein, 39 aa, Artificial Sequence; identical to SEQ ID NO: 3847
  GFR-binding peptide
  MOD_RES (1), (3), (36), (37): Xaa is C or S
  MOD_RES (14), (15), (16), (17), (18): Xaa is A or G
  MOD_RES (19), (20), (21), (22): Xaa is A or G or is absent

SEQ ID NO: 24904 - protein, 36 aa, Artificial Sequence
  GFR-binding peptide
  MOD_RES (2), (36): Xaa is C or S
  MOD_RES (14), (15), (16), (17), (18): Xaa is A or G
  MOD_RES (19), (20), (21), (22): Xaa is A or G or is absent
GXSRVVMNEYKFKXXXXXXXXXLYLVSIPELKTPAX

SEQ ID NO: 24905 - protein, 35 aa, Artificial Sequence
  GFR-binding peptide
  MOD_RES (34), (35): Xaa is C or S
  MOD_RES (12), (13), (14), (15), (16): Xaa is A or G
  MOD_RES (17), (18), (19), (20): Xaa is A or G or is absent
AEVVMDYHYKLXXXXXXXXXKYLISIPSLRAPVXX

SEQ ID NO: 24906 - protein, 42 aa, Artificial Sequence; identical to SEQ ID NO: 3848
  GFR-binding peptide
  MOD_RES (1), (3), (37), (38): Xaa is C or S
  MOD_RES (15), (16), (17), (18), (19): Xaa is A or G
  MOD_RES (20), (21), (22), (23): Xaa is A or G or is absent

SEQ ID NO: 24907 - protein, 36 aa, Artificial Sequence; identical to SEQ ID NO: 3849
  GFR-binding peptide
  MOD_RES (33), (34): Xaa is C or S
  MOD_RES (11), (12), (13), (14), (15): Xaa is A or G
  MOD_RES (16), (17), (18), (19): Xaa is A or G or is absent

SEQ ID NO: 24908 - protein, 31 aa, Artificial Sequence
  GFR-binding peptide
ESVAMGYHYKLYTVVGKDKYLISIPSLKTPV

SEQ ID NO: 24909 - protein, 34 aa, Artificial Sequence
  GFR-binding peptide
  MOD_RES (2), (4): Xaa is C or S
SXKXSRVIMEYQKYVKPKRGVIYLISIPSLAQPV

SEQ ID NO: 24910 - protein, 38 aa, Artificial Sequence
  GFR-binding peptide
  MOD_RES (34), (35): Xaa is C or S
  MOD_RES (12), (13), (14), (15), (16): Xaa is A or G
  MOD_RES (17), (18), (19), (20): Xaa is A or G or is absent
ARVVMNEYKFKXXXXXXXXXLYLVSIPELQTPAXXPKP

SEQ ID NO: 24911 - protein, 44 aa, Artificial Sequence
  GFR-binding peptide
  MOD_RES (2), (4), (38), (39): Xaa is C or S
  MOD_RES (16), (17), (18), (19), (20): Xaa is A or G
  MOD_RES (21), (22), (23), (24): Xaa is A or G or is absent
RXGXGEVVMEEYQKYXXXXXXXXXIYLMSIPSLETPVXXAKPIS

SEQ ID NO: 24912 - protein, 38 aa, Artificial Sequence
  GFR-binding peptide
  MOD_RES (2), (34), (35): Xaa is C or S
GXARVVMNEYQKYIVNSSDDIYLVSIPSLQTPAXXPKP

SEQ ID NO: 24913 - protein, 36 aa, Artificial Sequence
  GFR-binding peptide
  MOD_RES (1), (3), (35), (36): Xaa is C or S
XGXAEVVMDYHYKLVVNNAADKYLISIPSLRAPVXX

SEQ ID NO: 24914 - protein, 43 aa, Artificial Sequence
  GFR-binding peptide
  MOD_RES (1), (3), (37), (38): Xaa is C or S
  MOD_RES (15), (16), (17), (18), (19): Xaa is A or G
  MOD_RES (20), (21), (22), (23): Xaa is A or G or is absent
XGXESVAMGEYQKYXXXXXXXXXIYLISIPSLKTPVXXAKSAK

SEQ ID NO: 24915 - protein, 38 aa, Artificial Sequence
  GFR-binding peptide
  MOD_RES (2), (4), (36), (37): Xaa is C or S
RXGXAEVVMDYHYKLVVNNAADKYLISIPSLRAPVXXS

SEQ ID NO: 24916 - protein, 42 aa, Artificial Sequence
  GFR-binding peptide
  MOD_RES (2), (4), (38), (39): Xaa is C or S
  MOD_RES (16), (17), (18), (19), (20): Xaa is A or G
  MOD_RES (21), (22), (23), (24): Xaa is A or G or is absent
RXGXAEVVMDEYKFKXXXXXXXXXLYLISIPELRAPVXXSAP

SEQ ID NO: 24917 - protein, 37 aa, Artificial Sequence; identical to SEQ ID NO: 3854
  GFR-binding peptide
  MOD_RES (1), (35), (36): Xaa is C or S
  MOD_RES (13), (14), (15), (16), (17): Xaa is A or G
  MOD_RES (18), (19), (20), (21): Xaa is A or G or is absent

SEQ ID NO: 24918 - protein, 36 aa, Artificial Sequence; identical to SEQ ID NO: 3855
  GFR-binding peptide
  MOD_RES (1), (3), (34), (35): Xaa is C or S

SEQ ID NO: 24919 - protein, 31 aa, Artificial Sequence
  GFR-binding peptide
  MOD_RES (1), (1): Xaa is C or S
XSKVVMEYKFKVKPTRGVLYLISIPELDQPV

SEQ ID NO: 24920 - protein, 37 aa, Artificial Sequence; identical to SEQ ID NO: 3856
  GFR-binding peptide
  MOD_RES (2), (34), (35): Xaa is C or S

SEQ ID NO: 24921 - protein, 34 aa, Artificial Sequence
  GFR-binding peptide
  MOD_RES (2), (2): Xaa is C or S
GXEAVSMGEEYQKYTPVGMDDIYLVSIPSLKTPV

SEQ ID NO: 24922 - protein, 38 aa, Artificial Sequence; identical to SEQ ID NO: 3857
  GFR-binding peptide
  MOD_RES (2), (36), (37): Xaa is C or S
  MOD_RES (14), (15), (16), (17), (18): Xaa is A or G
  MOD_RES (19), (20), (21), (22): Xaa is A or G or is absent

SEQ ID NO: 24923 - protein, 35 aa, Artificial Sequence
  GFR-binding peptide
  MOD_RES (2), (34), (35): Xaa is C or S
GXGEVVMEEYQKYVVKDYEDIYLMSIPSLETPVXX

SEQ ID NO: 24924 - protein, 38 aa, Artificial Sequence; identical to SEQ ID NO: 3859
  GFR-binding peptide
  MOD_RES (34), (35): Xaa is C or S
  MOD_RES (12), (13), (14), (15), (16): Xaa is A or G
  MOD_RES (17), (18), (19), (20): Xaa is A or G or is absent

SEQ ID NO: 24925 - protein, 41 aa, Artificial Sequence; identical to SEQ ID NO: 3860
  GFR-binding peptide
  MOD_RES (2), (4), (38), (39): Xaa is C or S
  MOD_RES (16), (17), (18), (19), (20): Xaa is A or G
  MOD_RES (21), (22), (23), (24): Xaa is A or G or is absent

SEQ ID NO: 24926 - protein, 40 aa, Artificial Sequence; identical to SEQ ID NO: 3861
  GFR-binding peptide
  MOD_RES (34), (35): Xaa is C or S
  MOD_RES (12), (13), (14), (15), (16): Xaa is A or G
  MOD_RES (17), (18), (19), (20): Xaa is A or G or is absent

SEQ ID NO: 24927 - protein, 38 aa, Artificial Sequence
  GFR-binding peptide
  MOD_RES (34), (35): Xaa is C or S
  MOD_RES (12), (13), (14), (15), (16): Xaa is A or G
  MOD_RES (17), (18), (19), (20): Xaa is A or G or is absent
GEVVMDEYQKYXXXXXXXXXIYLMSIPSLETPVXXAKP

SEQ ID NO: 24928 - protein, 42 aa, Artificial Sequence; identical to SEQ ID NO: 3864
  GFR-binding peptide
  MOD_RES (2), (36), (37): Xaa is C or S
  MOD_RES (14), (15), (16), (17), (18): Xaa is A or G
  MOD_RES (19), (20), (21), (22): Xaa is A or G or is absent

SEQ ID NO: 24929 - protein, 37 aa, Artificial Sequence
  GFR-binding peptide
  MOD_RES (1), (3), (37): Xaa is C or S
  MOD_RES (15), (16), (17), (18), (19): Xaa is A or G
  MOD_RES (20), (21), (22), (23): Xaa is A or G or is absent
XGXAEVVMDEYKFKXXXXXXXXXLYLISIPELRAPVX

SEQ ID NO: 24930 - protein, 37 aa, Artificial Sequence
  GFR-binding peptide
  MOD_RES (1), (3), (35), (36): Xaa is C or S
XGXESVAMGEYKFKYTVVGKDLYLISIPELKTPVXXA

SEQ ID NO: 24931 - protein, 33 aa, Artificial Sequence
  GFR-binding peptide
  MOD_RES (2), (33): Xaa is C or S
KXSKVIMEYQKYIKPTKGIIYLISIPSLDQSVX

SEQ ID NO: 24932 - protein, 43 aa, Artificial Sequence
  GFR-binding peptide
  MOD_RES (1), (3), (37), (38): Xaa is C or S
  MOD_RES (15), (16), (17), (18), (19): Xaa is A or G
  MOD_RES (20), (21), (22), (23): Xaa is A or G or is absent
XGXESVAMGEYKFKXXXXXXXXXLYLISIPELKTPVXXAKSAK

SEQ ID NO: 24933 - protein, 38 aa, Artificial Sequence
  GFR-binding peptide
  MOD_RES (1), (35), (36): Xaa is C or S
  MOD_RES (13), (14), (15), (16), (17): Xaa is A or G
  MOD_RES (18), (19), (20), (21): Xaa is A or G or is absent
XSRVVMNEYQKYXXXXXXXXXIYLVSIPSLKTPAXXPK

SEQ ID NO: 24934 - protein, 42 aa, Artificial Sequence; identical to SEQ ID NO: 3866
  GFR-binding peptide
  MOD_RES (2), (4), (37), (38): Xaa is C or S
  MOD_RES (15), (16), (17), (18), (19): Xaa is A or G
  MOD_RES (20), (21), (22), (23): Xaa is A or G or is absent

SEQ ID NO: 24935 - protein, 40 aa, Artificial Sequence
  GFR-binding peptide
  MOD_RES (2), (4), (38), (39): Xaa is C or S
  MOD_RES (16), (17), (18), (19), (20): Xaa is A or G
  MOD_RES (21), (22), (23), (24): Xaa is A or G or is absent
RXGXGEVVMDEYKFKXXXXXXXXXLYLMSIPELETPVXXA

SEQ ID NO: 24936 - protein, 40 aa, Artificial Sequence
  GFR-binding peptide
  MOD_RES (2), (4), (39), (40): Xaa is C or S
  MOD_RES (17), (18), (19), (20), (21): Xaa is A or G
  MOD_RES (22), (23), (24), (25): Xaa is A or G or is absent
RXGXEAVSMGEEYKFKXXXXXXXXXLYLVSIPELKTPVXX

SEQ ID NO: 24937 - protein, 36 aa, Artificial Sequence
  GFR-binding peptide
  MOD_RES (32), (33): Xaa is C or S
GEVVMEEYQKYVVKDYEDIYLMSIPSLETPVXXAKP

SEQ ID NO: 24938 - protein, 36 aa, Artificial Sequence
  GFR-binding peptide
  MOD_RES (31), (32): Xaa is C or S
EVVMDYHYKLVVNNAADKYLISIPSLRAPVXXSAPA

SEQ ID NO: 24939 - protein, 38 aa, Artificial Sequence
  GFR-binding peptide
  MOD_RES (1), (35), (36): Xaa is C or S
  MOD_RES (13), (14), (15), (16), (17): Xaa is A or G
  MOD_RES (18), (19), (20), (21): Xaa is A or G or is absent
XAKVVMNEYKFKXXXXXXXXXLYLVSIPELKTPAXXAK

SEQ ID NO: 24940 - protein, 37 aa, Artificial Sequence
  GFR-binding peptide
  MOD_RES (33), (34): Xaa is C or S
  MOD_RES (11), (12), (13), (14), (15): Xaa is A or G
  MOD_RES (16), (17), (18), (19): Xaa is A or G or is absent
RVVMNEYQKYXXXXXXXXXIYLVSIPSLQTPAXXPKP

SEQ ID NO: 24941 - protein, 41 aa, Artificial Sequence; identical to SEQ ID NO: 3872
  GFR-binding peptide
  MOD_RES (2), (36), (37): Xaa is C or S
  MOD_RES (14), (15), (16), (17), (18): Xaa is A or G
  MOD_RES (19), (20), (21), (22): Xaa is A or G or is absent

SEQ ID NO: 24942 - protein, 34 aa, Artificial Sequence
  GFR-binding peptide
  MOD_RES (2), (34): Xaa is C or S
GXAEVVMDEYKFKVVNNAADLYLISIPELRAPVX

SEQ ID NO: 24943 - protein, 37 aa, Artificial Sequence; identical to SEQ ID NO: 3874
  GFR-binding peptide
  MOD_RES (1), (3), (36), (37): Xaa is C or S
  MOD_RES (14), (15), (16), (17), (18): Xaa is A or G
  MOD_RES (19), (20), (21), (22): Xaa is A or G or is absent

SEQ ID NO: 24944 - protein, 31 aa, Artificial Sequence
  GFR-binding peptide
AEVVMDEYQKYVVNNAADIYLISIPSLRAPV

SEQ ID NO: 24945 - protein, 35 aa, Artificial Sequence
  GFR-binding peptide
  MOD_RES (2), (4): Xaa is C or S
HXGXSRVVMNEYKFKIVNSSDDLYLVSIPELKTPA

SEQ ID NO: 24946 - protein, 33 aa, Artificial Sequence
  GFR-binding peptide
  MOD_RES (2), (2): Xaa is C or S
GXESVAMGYHYKLYTVVGKDKYLISIPSLKTPV

SEQ ID NO: 24947 - protein, 36 aa, Artificial Sequence
  GFR-binding peptide
  MOD_RES (32), (33): Xaa is C or S
GEVVMDEYKFKVVKENEDLYLMSIPELETPVXXAKP

SEQ ID NO: 24948 - protein, 36 aa, Artificial Sequence; identical to SEQ ID NO: 3875
  GFR-binding peptide
  MOD_RES (2), (4), (36): Xaa is C or S

SEQ ID NO: 24949 - protein, 37 aa, Artificial Sequence
  GFR-binding peptide
  MOD_RES (34), (35): Xaa is C or S
  MOD_RES (12), (13), (14), (15), (16): Xaa is A or G
  MOD_RES (17), (18), (19), (20): Xaa is A or G or is absent
GEVVMDEYKFKXXXXXXXXXLYLMSIPELETPVXXAK

SEQ ID NO: 24950 - protein, 33 aa, Artificial Sequence; identical to SEQ ID NO: 3877
  GFR-binding peptide
  MOD_RES (32), (33): Xaa is C or S

SEQ ID NO: 24951 - protein, 40 aa, Artificial Sequence
  GFR-binding peptide
  MOD_RES (1), (3), (37): Xaa is C or S
  MOD_RES (15), (16), (17), (18), (19): Xaa is A or G
  MOD_RES (20), (21), (22), (23): Xaa is A or G or is absent
XGXSRVVMNEYKFKXXXXXXXXXLYLVSIPELKTPAXTPK

SEQ ID NO: 24952 - protein, 33 aa, Artificial Sequence
  GFR-binding peptide
  MOD_RES (33), (33): Xaa is C or S
  MOD_RES (11), (12), (13), (14), (15): Xaa is A or G
  MOD_RES (16), (17), (18), (19): Xaa is A or G or is absent
SVAMGYHYKLXXXXXXXXXKYLISIPSLKTPVX

SEQ ID NO: 24953 - protein, 36 aa, Artificial Sequence; identical to SEQ ID NO: 3882
  GFR-binding peptide
  MOD_RES (31), (32): Xaa is C or S

SEQ ID NO: 24954 - protein, 36 aa, Artificial Sequence
  GFR-binding peptide
  MOD_RES (2), (4): Xaa is C or S
  MOD_RES (15), (16), (17), (18), (19): Xaa is A or G
  MOD_RES (20), (21), (22), (23): Xaa is A or G or is absent
SXKXSRVIMEYKFKXXXXXXXXXLYLISIPELAQPV

SEQ ID NO: 24955 - protein, 40 aa, Artificial Sequence; identical to SEQ ID NO: 3884
  GFR-binding peptide
  MOD_RES (1), (3), (37), (38): Xaa is C or S
  MOD_RES (15), (16), (17), (18), (19): Xaa is A or G
  MOD_RES (20), (21), (22), (23): Xaa is A or G or is absent

SEQ ID NO: 24956 - protein, 37 aa, Artificial Sequence
  GFR-binding peptide
  MOD_RES (2), (4): Xaa is C or S
  MOD_RES (16), (17), (18), (19), (20): Xaa is A or G
  MOD_RES (21), (22), (23), (24): Xaa is A or G or is absent
RXGXAEVVMDEYQKYXXXXXXXXXIYLISIPSLRAPV

SEQ ID NO: 24957 - protein, 36 aa, Artificial Sequence
  GFR-binding peptide
  MOD_RES (33), (34): Xaa is C or S
  MOD_RES (11), (12), (13), (14), (15): Xaa is A or G
  MOD_RES (16), (17), (18), (19): Xaa is A or G or is absent
SKVIMEYKFKXXXXXXXXXLYLISIPELDQSVXXPS

SEQ ID NO: 24958 - protein, 33 aa, Artificial Sequence; identical to SEQ ID NO: 3886
  GFR-binding peptide
  MOD_RES (2), (2): Xaa is C or S

SEQ ID NO: 24959 - protein, 39 aa, Artificial Sequence
  GFR-binding peptide
  MOD_RES (1), (36), (37): Xaa is C or S
  MOD_RES (14), (15), (16), (17), (18): Xaa is A or G
  MOD_RES (19), (20), (21), (22): Xaa is A or G or is absent
XEAVSMGEEYKFKXXXXXXXXXLYLVSIPELKTPVXXAK

SEQ ID NO: 24960 - protein, 35 aa, Artificial Sequence
  GFR-binding peptide
  MOD_RES (2), (2): Xaa is C or S
  MOD_RES (14), (15), (16), (17), (18): Xaa is A or G
  MOD_RES (19), (20), (21), (22): Xaa is A or G or is absent
GXESVAMGEYQKYXXXXXXXXXIYLISIPSLKTPV

SEQ ID NO: 24961 - protein, 40 aa, Artificial Sequence; identical to SEQ ID NO: 3887
  GFR-binding peptide
  MOD_RES (35), (36): Xaa is C or S
  MOD_RES (13), (14), (15), (16), (17): Xaa is A or G
  MOD_RES (18), (19), (20), (21): Xaa is A or G or is absent

SEQ ID NO: 24962 - protein, 38 aa, Artificial Sequence; identical to SEQ ID NO: 3888
  GFR-binding peptide
  MOD_RES (1), (3), (34), (35): Xaa is C or S

SEQ ID NO: 24963 - protein, 42 aa, Artificial Sequence
  GFR-binding peptide
  MOD_RES (1), (3), (36), (37): Xaa is C or S
  MOD_RES (14), (15), (16), (17), (18): Xaa is A or G
  MOD_RES (19), (20), (21), (22): Xaa is A or G or is absent
XKXSKVIMEYKFKXXXXXXXXXLYLISIPELDQSVXXPSASA

SEQ ID NO: 24964 - protein, 30 aa, Artificial Sequence
  GFR-binding peptide
EVVMEEYQKYVVKDYEDIYLMSIPSLETPV

SEQ ID NO: 24965 - protein, 37 aa, Artificial Sequence; identical to SEQ ID NO: 3891
  GFR-binding peptide
  MOD_RES (2), (4), (35), (36): Xaa is C or S

SEQ ID NO: 24966 - protein, 37 aa, Artificial Sequence
  GFR-binding peptide
  MOD_RES (2), (34), (35): Xaa is C or S
GXARVVMNEYQKYIVNSSDDIYLVSIPSLQTPAXXPK

SEQ ID NO: 24967 - protein, 39 aa, Artificial Sequence
  GFR-binding peptide
  MOD_RES (2), (4), (35), (36): Xaa is C or S
SXKXSRVIMEYKFKVKPKRGVLYLISIPELAQPVXXPAA

SEQ ID NO: 24968 - protein, 35 aa, Artificial Sequence
  GFR-binding peptide
  MOD_RES (1), (33), (34): Xaa is C or S
XSRVVMNEYKFKIVNSSDDLYLVSIPELKTPAXXP

SEQ ID NO: 24969 - protein, 34 aa, Artificial Sequence; identical to SEQ ID NO: 3894
  GFR-binding peptide
  MOD_RES (33), (34): Xaa is C or S
  MOD_RES (11), (12), (13), (14), (15): Xaa is A or G
  MOD_RES (16), (17), (18), (19): Xaa is A or G or is absent

SEQ ID NO: 24970 - protein, 37 aa, Artificial Sequence
  GFR-binding peptide
  MOD_RES (35), (36): Xaa is C or S
  MOD_RES (13), (14), (15), (16), (17): Xaa is A or G
  MOD_RES (18), (19), (20), (21): Xaa is A or G or is absent
EAVSMGEEYKFKXXXXXXXXXLYLVSIPELKTPVXXA

SEQ ID NO: 24971 - protein, 40 aa, Artificial Sequence
  GFR-binding peptide
  MOD_RES (2), (4), (38): Xaa is C or S
  MOD_RES (16), (17), (18), (19), (20): Xaa is A or G
  MOD_RES (21), (22), (23), (24): Xaa is A or G or is absent
HXGXSRVVMNEYQKYXXXXXXXXXIYLVSIPSLKTPAXTP

SEQ ID NO: 24972 - protein, 34 aa, Artificial Sequence; identical to SEQ ID NO: 3896
  GFR-binding peptide
  MOD_RES (1), (3): Xaa is C or S

SEQ ID NO: 24973 - protein, 38 aa, Artificial Sequence
  GFR-binding peptide
  MOD_RES (2), (35), (36): Xaa is C or S
  MOD_RES (13), (14), (15), (16), (17): Xaa is A or G
  MOD_RES (18), (19), (20), (21): Xaa is A or G or is absent
KXSRVIMEYQKYXXXXXXXXXIYLISIPSLAQPVXXPA

SEQ ID NO: 24974 - protein, 36 aa, Artificial Sequence
  GFR-binding peptide
  MOD_RES (2), (36): Xaa is C or S
  MOD_RES (14), (15), (16), (17), (18): Xaa is A or G
  MOD_RES (19), (20), (21), (22): Xaa is A or G or is absent
GXAEVVMDEYKFKXXXXXXXXXLYLISIPELRAPVX

SEQ ID NO: 24975 - protein, 38 aa, Artificial Sequence
  GFR-binding peptide
  MOD_RES (2), (4), (37), (38): Xaa is C or S
RXGXEAVSMGEEYKFKTPVGMDDLYLVSIPELKTPVXX

SEQ ID NO: 24976 - protein, 42 aa, Artificial Sequence; identical to SEQ ID NO: 3898
  GFR-binding peptide
  MOD_RES (2), (4), (36), (37): Xaa is C or S

SEQ ID NO: 24977 - protein, 35 aa, Artificial Sequence
  GFR-binding peptide
  MOD_RES (2), (4): Xaa is C or S
RXGXGEVVMDEYQKYVVKENEDIYLMSIPSLETPV

SEQ ID NO: 24978 - protein, 44 aa, Artificial Sequence
  GFR-binding peptide
  MOD_RES (2), (4), (38): Xaa is C or S
  MOD_RES (16), (17), (18), (19), (20): Xaa is A or G
  MOD_RES (21), (22), (23), (24): Xaa is A or G or is absent
HXGXSRVVMNEYKFKXXXXXXXXXLYLVSIPELKTPAXTPKTVH

SEQ ID NO: 24979 - protein, 42 aa, Artificial Sequence
  GFR-binding peptide
  MOD_RES (1), (3), (37), (38): Xaa is C or S
  MOD_RES (15), (16), (17), (18), (19): Xaa is A or G
  MOD_RES (20), (21), (22), (23): Xaa is A or G or is absent
XGXESVAMGEYKFKXXXXXXXXXLYLISIPELKTPVXXAKSA

SEQ ID NO: 24980 - protein, 36 aa, Artificial Sequence; identical to SEQ ID NO: 3899
  GFR-binding peptide
  MOD_RES (2), (34), (35): Xaa is C or S

SEQ ID NO: 24981 - protein, 32 aa, Artificial Sequence
  GFR-binding peptide
  MOD_RES (11), (12), (13), (14), (15): Xaa is A or G
  MOD_RES (16), (17), (18), (19): Xaa is A or G or is absent
SVAMGYHYKLXXXXXXXXXKYLISIPSLKTPV

SEQ ID NO: 24982 - protein, 36 aa, Artificial Sequence; identical to SEQ ID NO: 3903
  GFR-binding peptide
  MOD_RES (31), (32): Xaa is C or S

SEQ ID NO: 24983 - protein, 32 aa, Artificial Sequence
  GFR-binding peptide
  MOD_RES (1), (1): Xaa is C or S
XAEVVMDRYKKLVVNNAADFYLISIANLRAPV

SEQ ID NO: 24984 - protein, 40 aa, Artificial Sequence
  GFR-binding peptide
  MOD_RES (2), (4), (37), (38): Xaa is C or S
  MOD_RES (15), (16), (17), (18), (19): Xaa is A or G
  MOD_RES (20), (21), (22), (23): Xaa is A or G or is absent
SXKXSRVIMEYKFKXXXXXXXXXLYLISIPELAQPVXXPA

SEQ ID NO: 24985 - protein, 34 aa, Artificial Sequence; identical to SEQ ID NO: 3904
  GFR-binding peptide
  MOD_RES (1), (33), (34): Xaa is C or S

SEQ ID NO: 24986 - protein, 37 aa, Artificial Sequence
  GFR-binding peptide
  MOD_RES (32), (33): Xaa is C or S
AKVVMNEYKFKIVNNSSDLYLVSIPELKTPAXXAKPV

SEQ ID NO: 24987 - protein, 36 aa, Artificial Sequence
  GFR-binding peptide
  MOD_RES (31), (32): Xaa is C or S
SVAMGEYQKYYTVVGKDIYLISIPSLKTPVXXAKSA

SEQ ID NO: 24988 - protein, 32 aa, Artificial Sequence; identical to SEQ ID NO: 3905
  GFR-binding peptide
  MOD_RES (1), (1): Xaa is C or S

SEQ ID NO: 24989 - protein, 39 aa, Artificial Sequence; identical to SEQ ID NO: 3906
  GFR-binding peptide
  MOD_RES (1), (3), (36), (37): Xaa is C or S
  MOD_RES (14), (15), (16), (17), (18): Xaa is A or G
  MOD_RES (19), (20), (21), (22): Xaa is A or G or is absent

SEQ ID NO: 24990 - protein, 37 aa, Artificial Sequence; identical to SEQ ID NO: 3907
  GFR-binding peptide
  MOD_RES (1), (3), (37): Xaa is C or S
  MOD_RES (15), (16), (17), (18), (19): Xaa is A or G
  MOD_RES (20), (21), (22), (23): Xaa is A or G or is absent

SEQ ID NO: 24991 - protein, 35 aa, Artificial Sequence; identical to SEQ ID NO: 3910
  GFR-binding peptide
  MOD_RES (31), (32): Xaa is C or S

SEQ ID NO: 24992 - protein, 41 aa, Artificial Sequence; identical to SEQ ID NO: 3911
  GFR-binding peptide
  MOD_RES (2), (35), (36): Xaa is C or S
  MOD_RES (13), (14), (15), (16), (17): Xaa is A or G
  MOD_RES (18), (19), (20), (21): Xaa is A or G or is absent

SEQ ID NO: 24993 - protein, 35 aa, Artificial Sequence
  GFR-binding peptide
  MOD_RES (1), (35): Xaa is C or S
  MOD_RES (13), (14), (15), (16), (17): Xaa is A or G
  MOD_RES (18), (19), (20), (21): Xaa is A or G or is absent
XGEVVMDEYQKYXXXXXXXXXIYLMSIPSLETPVX

SEQ ID NO: 24994 - protein, 41 aa, Artificial Sequence; identical to SEQ ID NO: 3912
  GFR-binding peptide
  MOD_RES (2), (35), (36): Xaa is C or S
  MOD_RES (13), (14), (15), (16), (17): Xaa is A or G
  MOD_RES (18), (19), (20), (21): Xaa is A or G or is absent

SEQ ID NO: 24995 - protein, 33 aa, Artificial Sequence; identical to SEQ ID NO: 3913
  GFR-binding peptide
  MOD_RES (31), (32): Xaa is C or S

SEQ ID NO: 24996 - protein, 40 aa, Artificial Sequence; identical to SEQ ID NO: 3914
  GFR-binding peptide
  MOD_RES (2), (35), (36): Xaa is C or S

SEQ ID NO: 24997 - protein, 33 aa, Artificial Sequence
  GFR-binding peptide
  MOD_RES (12), (13), (14), (15), (16): Xaa is A or G
  MOD_RES (17), (18), (19), (20): Xaa is A or G or is absent
AEVVMDEYQKYXXXXXXXXXIYLISIPSLRAPV

SEQ ID NO: 24998 - protein, 39 aa, Artificial Sequence; identical to SEQ ID NO: 3918
  GFR-binding peptide
  MOD_RES (33), (34): Xaa is C or S
  MOD_RES (11), (12), (13), (14), (15): Xaa is A or G
  MOD_RES (16), (17), (18), (19): Xaa is A or G or is absent

SEQ ID NO: 24999 - protein, 34 aa, Artificial Sequence; identical to SEQ ID NO: 3919
  GFR-binding peptide
  MOD_RES (2), (33), (34): Xaa is C or S

SEQ ID NO: 25000 - protein, 34 aa, Artificial Sequence
  GFR-binding peptide
  MOD_RES (33), (34): Xaa is C or S
  MOD_RES (11), (12), (13), (14), (15): Xaa is A or G
  MOD_RES (16), (17), (18), (19): Xaa is A or G or is absent
SKVVMEYKFKXXXXXXXXXLYLISIPELDQPVXX

SEQ ID NO: 25001 - protein, 40 aa, Artificial Sequence; identical to SEQ ID NO: 3926
  GFR-binding peptide
  MOD_RES (2), (4), (38), (39): Xaa is C or S
  MOD_RES (16), (17), (18), (19), (20): Xaa is A or G
  MOD_RES (21), (22), (23), (24): Xaa is A or G or is absent

SEQ ID NO: 25002 - protein, 40 aa, Artificial Sequence
  GFR-binding peptide
  MOD_RES (1), (35), (36): Xaa is C or S
  MOD_RES (13), (14), (15), (16), (17): Xaa is A or G
  MOD_RES (18), (19), (20), (21): Xaa is A or G or is absent
XESVAMGEYQKYXXXXXXXXXIYLISIPSLKTPVXXAKSA

SEQ ID NO: 25003 - protein, 38 aa, Artificial Sequence; identical to SEQ ID NO: 3927
  GFR-binding peptide
  MOD_RES (33), (34): Xaa is C or S
  MOD_RES (11), (12), (13), (14), (15): Xaa is A or G
  MOD_RES (16), (17), (18), (19): Xaa is A or G or is absent

SEQ ID NO: 25004 - protein, 39 aa, Artificial Sequence
  GFR-binding peptide
  MOD_RES (2), (4), (38), (39): Xaa is C or S
  MOD_RES (16), (17), (18), (19), (20): Xaa is A or G
  MOD_RES (21), (22), (23), (24): Xaa is A or G or is absent
RXGXESVAMGYHYKLXXXXXXXXXKYLISIPSLKTPVXX

SEQ ID NO: 25005 - protein, 38 aa, Artificial Sequence
  GFR-binding peptide
  MOD_RES (1), (3), (37), (38): Xaa is C or S
  MOD_RES (15), (16), (17), (18), (19): Xaa is A or G
  MOD_RES (20), (21), (22), (23): Xaa is A or G or is absent
XGXGEVVMDEYQKYXXXXXXXXXIYLMSIPSLETPVXX

SEQ ID NO: 25006 - protein, 32 aa, Artificial Sequence
  GFR-binding peptide
  MOD_RES (11), (12), (13), (14), (15): Xaa is A or G
  MOD_RES (16), (17), (18), (19): Xaa is A or G or is absent
KVVMNEYQKYXXXXXXXXXIYLVSIPSLKTPA

SEQ ID NO: 25007 - protein, 42 aa, Artificial Sequence; identical to SEQ ID NO: 3929
  GFR-binding peptide
  MOD_RES (2), (4), (38): Xaa is C or S
  MOD_RES (16), (17), (18), (19), (20): Xaa is A or G
  MOD_RES (21), (22), (23), (24): Xaa is A or G or is absent

SEQ ID NO: 25008 - protein, 35 aa, Artificial Sequence; identical to SEQ ID NO: 3930
  GFR-binding peptide
  MOD_RES (1), (33), (34): Xaa is C or S

SEQ ID NO: 25009 - protein, 35 aa, Artificial Sequence; identical to SEQ ID NO: 3931
  GFR-binding peptide
  MOD_RES (33), (34): Xaa is C or S
  MOD_RES (11), (12), (13), (14), (15): Xaa is A or G
  MOD_RES (16), (17), (18), (19): Xaa is A or G or is absent

SEQ ID NO: 25010 - protein, 36 aa, Artificial Sequence
  GFR-binding peptide
  MOD_RES (2), (4), (36): Xaa is C or S
RXGXAEVVMDRYKKLVVNNAADFYLISIANLRAPVX

SEQ ID NO: 25011 - protein, 35 aa, Artificial Sequence; identical to SEQ ID NO: 3932
  GFR-binding peptide
  MOD_RES (1), (33), (34): Xaa is C or S

SEQ ID NO: 25012 - protein, 33 aa, Artificial Sequence
  GFR-binding peptide
  MOD_RES (33), (33): Xaa is C or S
  MOD_RES (11), (12), (13), (14), (15): Xaa is A or G
  MOD_RES (16), (17), (18), (19): Xaa is A or G or is absent
KVVMNEYQKYXXXXXXXXXIYLVSIPSLKTPAX

SEQ ID NO: 25013 - protein, 35 aa, Artificial Sequence
  GFR-binding peptide
  MOD_RES (1), (3), (35): Xaa is C or S
XGXAKVVMNEYQKYIVNNSSDIYLVSIPSLKTPAX

SEQ ID NO: 25014 - protein, 32 aa, Artificial Sequence
  GFR-binding peptide
  MOD_RES (11), (12), (13), (14), (15): Xaa is A or G
  MOD_RES (16), (17), (18), (19): Xaa is A or G or is absent
RVVMNEYQKYXXXXXXXXXIYLVSIPSLKTPA

SEQ ID NO: 25015 - protein, 35 aa, Artificial Sequence; identical to SEQ ID NO: 3933
  GFR-binding peptide
  MOD_RES (1), (3), (34), (35): Xaa is C or S

SEQ ID NO: 25016 - protein, 33 aa, Artificial Sequence
  GFR-binding peptide
  MOD_RES (33), (33): Xaa is C or S
  MOD_RES (11), (12), (13), (14), (15): Xaa is A or G
  MOD_RES (16), (17), (18), (19): Xaa is A or G or is absent
RVVMNEYQKYXXXXXXXXXIYLVSIPSLKTPAX

SEQ ID NO: 25017 - protein, 34 aa, Artificial Sequence; identical to SEQ ID NO: 3934
  GFR-binding peptide
  MOD_RES (1), (1): Xaa is C or S
  MOD_RES (13), (14), (15), (16), (17): Xaa is A or G
  MOD_RES (18), (19), (20), (21): Xaa is A or G or is absent

SEQ ID NO: 25018 - protein, 39 aa, Artificial Sequence
  GFR-binding peptide
  MOD_RES (35), (36): Xaa is C or S
  MOD_RES (13), (14), (15), (16), (17): Xaa is A or G
  MOD_RES (18), (19), (20), (21): Xaa is A or G or is absent
EAVSMGEEYQKYXXXXXXXXXIYLVSIPSLKTPVXXAKG

SEQ ID NO: 25019 - protein, 36 aa, Artificial Sequence
  GFR-binding peptide
  MOD_RES (1), (35): Xaa is C or S
  MOD_RES (13), (14), (15), (16), (17): Xaa is A or G
  MOD_RES (18), (19), (20), (21): Xaa is A or G or is absent
XSRVVMNEYKFKXXXXXXXXXLYLVSIPELKTPAXT

SEQ ID NO: 25020 - protein, 33 aa, Artificial Sequence
  GFR-binding peptide
  MOD_RES (12), (13), (14), (15), (16): Xaa is A or G
  MOD_RES (17), (18), (19), (20): Xaa is A or G or is absent
AKVVMNEYKFKXXXXXXXXXLYLVSIPELKTPA

SEQ ID NO: 25021 - protein, 37 aa, Artificial Sequence
  GFR-binding peptide
  MOD_RES (32), (33): Xaa is C or S
AEVVMDEYQKYVVNNAADIYLISIPSLRAPVXXSAPA

SEQ ID NO: 25022 - protein, 33 aa, Artificial Sequence; identical to SEQ ID NO: 3940
  GFR-binding peptide
  MOD_RES (1), (32), (33): Xaa is C or S

SEQ ID NO: 25023 - protein, 39 aa, Artificial Sequence
  GFR-binding peptide
  MOD_RES (34), (35): Xaa is C or S
  MOD_RES (12), (13), (14), (15), (16): Xaa is A or G
  MOD_RES (17), (18), (19), (20): Xaa is A or G or is absent
ESVAMGRYKKLXXXXXXXXXFYLISIANLKTPVXXAKSA

SEQ ID NO: 25024 - protein, 38 aa, Artificial Sequence
  GFR-binding peptide
  MOD_RES (2), (34), (35): Xaa is C or S
GXAEVVMDEYQKYVVNNAADIYLISIPSLRAPVXXSAP

SEQ ID NO: 25025 - protein, 35 aa, Artificial Sequence; identical to SEQ ID NO: 3943
  GFR-binding peptide
  MOD_RES (1), (3), (34), (35): Xaa is C or S

SEQ ID NO: 25026 - protein, 39 aa, Artificial Sequence
  GFR-binding peptide
  MOD_RES (2), (34), (35): Xaa is C or S
GXAKVVMNEYQKYIVNNSSDIYLVSIPSLKTPAXXAKPV

SEQ ID NO: 25027 - protein, 32 aa, Artificial Sequence
  GFR-binding peptide
  MOD_RES (32), (32): Xaa is C or S
AKVVMNEYKFKIVNNSSDLYLVSIPELKTPAX

SEQ ID NO: 25028 - protein, 39 aa, Artificial Sequence
  GFR-binding peptide
  MOD_RES (2), (36): Xaa is C or S
  MOD_RES (14), (15), (16), (17), (18): Xaa is A or G
  MOD_RES (19), (20), (21), (22): Xaa is A or G or is absent
GXSRVVMNEYKFKXXXXXXXXXLYLVSIPELKTPAXTPK

SEQ ID NO: 25029 - protein, 39 aa, Artificial Sequence
  GFR-binding peptide
  MOD_RES (35), (36): Xaa is C or S
  MOD_RES (13), (14), (15), (16), (17): Xaa is A or G
  MOD_RES (18), (19), (20), (21): Xaa is A or G or is absent
EAVSMGEEYKFKXXXXXXXXXLYLVSIPELKTPVXXAKG

SEQ ID NO: 25030 - protein, 37 aa, Artificial Sequence
  GFR-binding peptide
  MOD_RES (31), (31): Xaa is C or S
RVVMNEYKFKIVNSSDDLYLVSIPELKTPAXTPKTVH

SEQ ID NO: 25031 - protein, 39 aa, Artificial Sequence; identical to SEQ ID NO: 3949
  GFR-binding peptide
  MOD_RES (2), (36), (37): Xaa is C or S
  MOD_RES (14), (15), (16), (17), (18): Xaa is A or G
  MOD_RES (19), (20), (21), (22): Xaa is A or G or is absent

SEQ ID NO: 25032 - protein, 34 aa, Artificial Sequence; identical to SEQ ID NO: 3950
  GFR-binding peptide
  MOD_RES (1), (3): Xaa is C or S

SEQ ID NO: 25033 - protein, 40 aa, Artificial Sequence
  GFR-binding peptide
  MOD_RES (2), (37), (38): Xaa is C or S
  MOD_RES (15), (16), (17), (18), (19): Xaa is A or G
  MOD_RES (20), (21), (22), (23): Xaa is A or G or is absent
GXEAVSMGEEYQKYXXXXXXXXXIYLVSIPSLKTPVXXAK

SEQ ID NO: 25034 - protein, 32 aa, Artificial Sequence
  GFR-binding peptide
  MOD_RES (31), (32): Xaa is C or S
SRVIMEYQKYVKPKRGVIYLISIPSLAQPVXX

SEQ ID NO: 25035 - protein, 35 aa, Artificial Sequence
  GFR-binding peptide
  MOD_RES (32), (33): Xaa is C or S
AKVVMNEYQKYIVNNSSDIYLVSIPSLKTPAXXAK

SEQ ID NO: 25036 - protein, 40 aa, Artificial Sequence
  GFR-binding peptide
  MOD_RES (2), (34), (35): Xaa is C or S
GXAEVVMDEYKFKVVNNAADLYLISIPELRAPVXXSAPAA

SEQ ID NO: 25037 - protein, 39 aa, Artificial Sequence; identical to SEQ ID NO: 3955
  GFR-binding peptide
  MOD_RES (2), (4), (36), (37): Xaa is C or S

SEQ ID NO: 25038 - protein, 37 aa, Artificial Sequence; identical to SEQ ID NO: 3957
  GFR-binding peptide
  MOD_RES (2), (4): Xaa is C or S
  MOD_RES (16), (17), (18), (19), (20): Xaa is A or G
  MOD_RES (21), (22), (23), (24): Xaa is A or G or is absent

SEQ ID NO: 25039 - protein, 35 aa, Artificial Sequence
  GFR-binding peptide
  MOD_RES (33), (34): Xaa is C or S
  MOD_RES (11), (12), (13), (14), (15): Xaa is A or G
  MOD_RES (16), (17), (18), (19): Xaa is A or G or is absent
KVVMNEYKFKXXXXXXXXXLYLVSIPELKTPAXXA

SEQ ID NO: 25040 - protein, 40 aa, Artificial Sequence
  GFR-binding peptide
  MOD_RES (2), (4), (35), (36): Xaa is C or S
SXKXSRVIMEYKFKVKPKRGVLYLISIPELAQPVXXPAAS

SEQ ID NO: 25041 - protein, 36 aa, Artificial Sequence
  GFR-binding peptide
  MOD_RES (2), (4), (36): Xaa is C or S
RXGXESVAMGEYKFKYTVVGKDLYLISIPELKTPVX

SEQ ID NO: 25042 - protein, 41 aa, Artificial Sequence; identical to SEQ ID NO: 3958
  GFR-binding peptide
  MOD_RES (1), (3), (35), (36): Xaa is C or S

SEQ ID NO: 25043 - protein, 39 aa, Artificial Sequence
  GFR-binding peptide
  MOD_RES (1), (35), (36): Xaa is C or S
  MOD_RES (13), (14), (15), (16), (17): Xaa is A or G
  MOD_RES (18), (19), (20), (21): Xaa is A or G or is absent
XESVAMGYHYKLXXXXXXXXXKYLISIPSLKTPVXXAKS

SEQ ID NO: 25044 - protein, 39 aa, Artificial Sequence
  GFR-binding peptide
  MOD_RES (1), (3), (37), (38): Xaa is C or S
  MOD_RES (15), (16), (17), (18), (19): Xaa is A or G
  MOD_RES (20), (21), (22), (23): Xaa is A or G or is absent
XGXGEVVMEEYQKYXXXXXXXXXIYLMSIPSLETPVXXA

SEQ ID NO: 25045 - protein, 37 aa, Artificial Sequence; identical to SEQ ID NO: 3963
  GFR-binding peptide
  MOD_RES (2), (34), (35): Xaa is C or S

SEQ ID NO: 25046 - protein, 32 aa, Artificial Sequence
  GFR-binding peptide
  MOD_RES (2), (2): Xaa is C or S
KXSKVVMEYKFKVKPTRGVLYLISIPELDQPV

SEQ ID NO: 25047 - protein, 35 aa, Artificial Sequence; identical to SEQ ID NO: 3966
  GFR-binding peptide
  MOD_RES (1), (35): Xaa is C or S
  MOD_RES (13), (14), (15), (16), (17): Xaa is A or G
  MOD_RES (18), (19), (20), (21): Xaa is A or G or is absent

SEQ ID NO: 25048 - protein, 38 aa, Artificial Sequence
  GFR-binding peptide
  MOD_RES (34), (35): Xaa is C or S
  MOD_RES (12), (13), (14), (15), (16): Xaa is A or G
  MOD_RES (17), (18), (19), (20): Xaa is A or G or is absent
ESVAMGRYKKLXXXXXXXXXFYLISIANLKTPVXXAKS

SEQ ID NO: 25049 - protein, 43 aa, Artificial Sequence
  GFR-binding peptide
  MOD_RES (2), (4), (38), (39): Xaa is C or S
  MOD_RES (16), (17), (18), (19), (20): Xaa is A or G
  MOD_RES (21), (22), (23), (24): Xaa is A or G or is absent
RXGXAEVVMDEYQKYXXXXXXXXXIYLISIPSLRAPVXXSAPA

SEQ ID NO: 25050 - protein, 39 aa, Artificial Sequence
  GFR-binding peptide
  MOD_RES (2), (4), (38), (39): Xaa is C or S
  MOD_RES (16), (17), (18), (19), (20): Xaa is A or G
  MOD_RES (21), (22), (23), (24): Xaa is A or G or is absent
RXGXGEVVMDEYKFKXXXXXXXXXLYLMSIPELETPVXX

SEQ ID NO: 25051 - protein, 36 aa, Artificial Sequence
  GFR-binding peptide
  MOD_RES (31), (32): Xaa is C or S
KVVMNEYKFKIVNNSSDLYLVSIPELKTPAXXAKPV

SEQ ID NO: 25052 - protein, 36 aa, Artificial Sequence
  GFR-binding peptide
  MOD_RES (33), (34): Xaa is C or S
  MOD_RES (11), (12), (13), (14), (15): Xaa is A or G
  MOD_RES (16), (17), (18), (19): Xaa is A or G or is absent
RVVMNEYKFKXXXXXXXXXLYLVSIPELQTPAXXPK

SEQ ID NO: 25053 - protein, 42 aa, Artificial Sequence
  GFR-binding peptide
  MOD_RES (1), (3), (36), (37): Xaa is C or S
  MOD_RES (14), (15), (16), (17), (18): Xaa is A or G
  MOD_RES (19), (20), (21), (22): Xaa is A or G or is absent
XKXSRVIMEYKFKXXXXXXXXXLYLISIPELAQPVXXPAASA

SEQ ID NO: 25054 - protein, 39 aa, Artificial Sequence; identical to SEQ ID NO: 3970
  GFR-binding peptide
  MOD_RES (1), (3), (37), (38): Xaa is C or S
  MOD_RES (15), (16), (17), (18), (19): Xaa is A or G
  MOD_RES (20), (21), (22), (23): Xaa is A or G or is absent

SEQ ID NO: 25055 - protein, 41 aa, Artificial Sequence
  GFR-binding peptide
  MOD_RES (2), (4), (38), (39): Xaa is C or S
  MOD_RES (16), (17), (18), (19), (20): Xaa is A or G
  MOD_RES (21), (22), (23), (24): Xaa is A or G or is absent
RXGXAEVVMDEYQKYXXXXXXXXXIYLISIPSLRAPVXXSA

SEQ ID NO: 25056 - protein, 39 aa, Artificial Sequence
  GFR-binding peptide
  MOD_RES (2), (4), (38), (39): Xaa is C or S
  MOD_RES (16), (17), (18), (19), (20): Xaa is A or G
  MOD_RES (21), (22), (23), (24): Xaa is A or G or is absent
RXGXGEVVMEEYQKYXXXXXXXXXIYLMSIPSLETPVXX

SEQ ID NO: 25057 - protein, 40 aa, Artificial Sequence
  GFR-binding peptide
  MOD_RES (1), (35), (36): Xaa is C or S
  MOD_RES (13), (14), (15), (16), (17): Xaa is A or G
  MOD_RES (18), (19), (20), (21): Xaa is A or G or is absent
XGEVVMDEYQKYXXXXXXXXXIYLMSIPSLETPVXXAKPI

SEQ ID NO: 25058 - protein, 34 aa, Artificial Sequence; identical to SEQ ID NO: 3976
  GFR-binding peptide
  MOD_RES (31), (32): Xaa is C or S

SEQ ID NO: 25059 - protein, 38 aa, Artificial Sequence
  GFR-binding peptide
  MOD_RES (2), (34), (35): Xaa is C or S
GXSRVVMNEYQKYIVNSSDDIYLVSIPSLKTPAXXPKP

SEQ ID NO: 25060 - protein, 40 aa, Artificial Sequence
  GFR-binding peptide
  MOD_RES (1), (36), (37): Xaa is C or S
  MOD_RES (14), (15), (16), (17), (18): Xaa is A or G
  MOD_RES (19), (20), (21), (22): Xaa is A or G or is absent
XEAVSMGEEYQKYXXXXXXXXXIYLVSIPSLKTPVXXAKG

SEQ ID NO: 25061 - protein, 36 aa, Artificial Sequence; identical to SEQ ID NO: 3978
  GFR-binding peptide
  MOD_RES (1), (3), (34), (35): Xaa is C or S

SEQ ID NO: 25062 - protein, 41 aa, Artificial Sequence; identical to SEQ ID NO: 3981
  GFR-binding peptide
  MOD_RES (1), (3), (37), (38): Xaa is C or S
  MOD_RES (15), (16), (17), (18), (19): Xaa is A or G
  MOD_RES (20), (21), (22), (23): Xaa is A or G or is absent

SEQ ID NO: 25063 - protein, 39 aa, Artificial Sequence; identical to SEQ ID NO: 3982
  GFR-binding peptide
  MOD_RES (2), (35), (36): Xaa is C or S
  MOD_RES (13), (14), (15), (16), (17): Xaa is A or G
  MOD_RES (18), (19), (20), (21): Xaa is A or G or is absent

SEQ ID NO: 25064 - protein, 36 aa, Artificial Sequence
  GFR-binding peptide
  MOD_RES (32), (33): Xaa is C or S
ARVVMNEYQKYIVNSSDDIYLVSIPSLQTPAXXPKP

SEQ ID NO: 25065 - protein, 38 aa, Artificial Sequence; identical to SEQ ID NO: 3984
  GFR-binding peptide
  MOD_RES (33), (34): Xaa is C or S
  MOD_RES (11), (12), (13), (14), (15): Xaa is A or G
  MOD_RES (16), (17), (18), (19): Xaa is A or G or is absent

SEQ ID NO: 25066 - protein, 42 aa, Artificial Sequence
  GFR-binding peptide
  MOD_RES (1), (3), (37), (38): Xaa is C or S
  MOD_RES (15), (16), (17), (18), (19): Xaa is A or G
  MOD_RES (20), (21), (22), (23): Xaa is A or G or is absent
XGXESVAMGEYQKYXXXXXXXXXIYLISIPSLKTPVXXAKSA

SEQ ID NO: 25067 - protein, 36 aa, Artificial Sequence; identical to SEQ ID NO: 3985
  GFR-binding peptide
  MOD_RES (1), (34), (35): Xaa is C or S
  MOD_RES (12), (13), (14), (15), (16): Xaa is A or G
  MOD_RES (17), (18), (19), (20): Xaa is A or G or is absent

SEQ ID NO: 25068 - protein, 32 aa, Artificial Sequence; identical to SEQ ID NO: 3987
  GFR-binding peptide
  MOD_RES (32), (32): Xaa is C or S

SEQ ID NO: 25069 - protein, 39 aa, Artificial Sequence
  GFR-binding peptide
  MOD_RES (34), (35): Xaa is C or S
  MOD_RES (12), (13), (14), (15), (16): Xaa is A or G
  MOD_RES (17), (18), (19), (20): Xaa is A or G or is absent
AEVVMDEYKFKXXXXXXXXXLYLISIPELRAPVXXSAPA

SEQ ID NO: 25070 - protein, 33 aa, Artificial Sequence
  GFR-binding peptide
  MOD_RES (2), (33): Xaa is C or S
KXSKVVMEYQKYVKPTRGVIYLISIPSLDQPVX

SEQ ID NO: 25071 - protein, 37 aa, Artificial Sequence
  GFR-binding peptide
  MOD_RES (1), (33), (34): Xaa is C or S
XAKVVMNEYQKYIVNNSSDIYLVSIPSLKTPAXXAKP

SEQ ID NO: 25072 - protein, 34 aa, Artificial Sequence
  GFR-binding peptide
  MOD_RES (2), (33), (34): Xaa is C or S
KXSKVVMEYKFKVKPTRGVLYLISIPELDQPVXX

SEQ ID NO: 25073 - protein, 36 aa, Artificial Sequence
  GFR-binding peptide
  MOD_RES (2), (4): Xaa is C or S
  MOD_RES (15), (16), (17), (18), (19): Xaa is A or G
  MOD_RES (20), (21), (22), (23): Xaa is A or G or is absent
SXKXSRVIMEYQKYXXXXXXXXXIYLISIPSLAQPV

SEQ ID NO: 25074 - protein, 38 aa, Artificial Sequence; identical to SEQ ID NO: 3991
  GFR-binding peptide
  MOD_RES (2), (4), (35), (36): Xaa is C or S

SEQ ID NO: 25075 - protein, 41 aa, Artificial Sequence
  GFR-binding peptide
  MOD_RES (2), (4), (36): Xaa is C or S
HXGXSRVVMNEYKFKIVNSSDDLYLVSIPELKTPAXTPKTV

SEQ ID NO: 25076 - protein, 42 aa, Artificial Sequence
  GFR-binding peptide
  MOD_RES (2), (4), (36), (37): Xaa is C or S
RXGXESVAMGRYKKLYTVVGKDFYLISIANLKTPVXXAKSAK

SEQ ID NO: 25077 - protein, 37 aa, Artificial Sequence
  GFR-binding peptide
  MOD_RES (33), (34): Xaa is C or S
  MOD_RES (11), (12), (13), (14), (15): Xaa is A or G
  MOD_RES (16), (17), (18), (19): Xaa is A or G or is absent
EVVMDEYQKYXXXXXXXXXIYLISIPSLRAPVXXSAP

SEQ ID NO: 25078 - protein, 38 aa, Artificial Sequence
  GFR-binding peptide
  MOD_RES (2), (33), (34): Xaa is C or S
KXSKVIMEYQKYIKPTKGIIYLISIPSLDQSVXXPSAS

SEQ ID NO: 25079 - protein, 36 aa, Artificial Sequence
  GFR-binding peptide
  MOD_RES (1), (3): Xaa is C or S
  MOD_RES (15), (16), (17), (18), (19): Xaa is A or G
  MOD_RES (20), (21), (22), (23): Xaa is A or G or is absent
XGXAEVVMDYHYKLXXXXXXXXXKYLISIPSLRAPV

SEQ ID NO: 25080 - protein, 32 aa, Artificial Sequence; identical to SEQ ID NO: 3995
  GFR-binding peptide
  MOD_RES (32), (32): Xaa is C or S

SEQ ID NO: 25081 - protein, 39 aa, Artificial Sequence
  GFR-binding peptide
  MOD_RES (33), (34): Xaa is C or S
  MOD_RES (11), (12), (13), (14), (15): Xaa is A or G
  MOD_RES (16), (17), (18), (19): Xaa is A or G or is absent
SVAMGEYQKYXXXXXXXXXIYLISIPSLKTPVXXAKSAK

SEQ ID NO: 25082 - protein, 38 aa, Artificial Sequence; identical to SEQ ID NO: 3999
  GFR-binding peptide
  MOD_RES (1), (3), (34), (35): Xaa is C or S

SEQ ID NO: 25083 - protein, 36 aa, Artificial Sequence; identical to SEQ ID NO: 4000
  GFR-binding peptide
  MOD_RES (31), (32): Xaa is C or S

SEQ ID NO: 25084 - protein, 37 aa, Artificial Sequence
  GFR-binding peptide
  MOD_RES (2), (35), (36): Xaa is C or S
  MOD_RES (13), (14), (15), (16), (17): Xaa is A or G
  MOD_RES (18), (19), (20), (21): Xaa is A or G or is absent
KXSRVIMEYQKYXXXXXXXXXIYLISIPSLAQPVXXP

SEQ ID NO: 25085 - protein, 39 aa, Artificial Sequence
  GFR-binding peptide
  MOD_RES (1), (3), (36), (37): Xaa is C or S
XGXEAVSMGEEYKFKTPVGMDDLYLVSIPELKTPVXXAK

SEQ ID NO: 25086 - protein, 37 aa, Artificial Sequence; identical to SEQ ID NO: 4006
  GFR-binding peptide
  MOD_RES (1), (3), (34), (35): Xaa is C or S

SEQ ID NO: 25087 - protein, 39 aa, Artificial Sequence
  GFR-binding peptide
  MOD_RES (2), (34), (35): Xaa is C or S
GXESVAMGRYKKLYTVVGKDFYLISIANLKTPVXXAKSA

SEQ ID NO: 25088 - protein, 36 aa, Artificial Sequence; identical to SEQ ID NO: 4007
  GFR-binding peptide
  MOD_RES (1), (32), (33): Xaa is C or S

SEQ ID NO: 25089 - protein, 34 aa, Artificial Sequence
  GFR-binding peptide
  MOD_RES (31), (32): Xaa is C or S
SKVVMEYKFKVKPTRGVLYLISIPELDQPVXXPS

SEQ ID NO: 25090 - protein, 41 aa, Artificial Sequence; identical to SEQ ID NO: 4010
  GFR-binding peptide
  MOD_RES (2), (4), (39), (40): Xaa is C or S
  MOD_RES (17), (18), (19), (20), (21): Xaa is A or G
  MOD_RES (22), (23), (24), (25): Xaa is A or G or is absent

SEQ ID NO: 25091 - protein, 36 aa, Artificial Sequence; identical to SEQ ID NO: 4011
  GFR-binding peptide
  MOD_RES (2), (34), (35): Xaa is C or S

SEQ ID NO: 25092 - protein, 38 aa, Artificial Sequence; identical to SEQ ID NO: 4012
  GFR-binding peptide
  MOD_RES (2), (33), (34): Xaa is C or S

SEQ ID NO: 25093 - protein, 34 aa, Artificial Sequence
  GFR-binding peptide
  MOD_RES (34), (34): Xaa is C or S
  MOD_RES (12), (13), (14), (15), (16): Xaa is A or G
  MOD_RES (17), (18), (19), (20): Xaa is A or G or is absent
AEVVMDEYQKYXXXXXXXXXIYLISIPSLRAPVX

SEQ ID NO: 25094 - protein, 41 aa, Artificial Sequence
  GFR-binding peptide
  MOD_RES (2), (4), (38), (39): Xaa is C or S
  MOD_RES (16), (17), (18), (19), (20): Xaa is A or G
  MOD_RES (21), (22), (23), (24): Xaa is A or G or is absent
RXGXESVAMGRYKKLXXXXXXXXXFYLISIANLKTPVXXAK

SEQ ID NO: 25095 - protein, 40 aa, Artificial Sequence
  GFR-binding peptide
  MOD_RES (2), (4), (36), (37): Xaa is C or S
HXGXAKVVMNEYKFKIVNNSSDLYLVSIPELKTPAXXAKP

SEQ ID NO: 25096 - protein, 41 aa, Artificial Sequence
  GFR-binding peptide
  MOD_RES (1), (3), (37), (38): Xaa is C or S
  MOD_RES (15), (16), (17), (18), (19): Xaa is A or G
  MOD_RES (20), (21), (22), (23): Xaa is A or G or is absent
XGXESVAMGYHYKLXXXXXXXXXKYLISIPSLKTPVXXAKS

SEQ ID NO: 25097 - protein, 38 aa, Artificial Sequence; identical to SEQ ID NO: 4023
  GFR-binding peptide
  MOD_RES (2), (4), (37), (38): Xaa is C or S

SEQ ID NO: 25098 - protein, 37 aa, Artificial Sequence; identical to SEQ ID NO: 4024
  GFR-binding peptide
  MOD_RES (1), (3), (35), (36): Xaa is C or S

SEQ ID NO: 25099 - protein, 36 aa, Artificial Sequence
  GFR-binding peptide
  MOD_RES (1), (3), (36): Xaa is C or S
XGXEAVSMGEEYKFKTPVGMDDLYLVSIPELKTPVX

SEQ ID NO: 25100 - protein, 39 aa, Artificial Sequence
  GFR-binding peptide
  MOD_RES (2), (34), (35): Xaa is C or S
GXAEVVMDEYQKYVVNNAADIYLISIPSLRAPVXXSAPA

SEQ ID NO: 25101 - protein, 37 aa, Artificial Sequence; identical to SEQ ID NO: 4025
  GFR-binding peptide
  MOD_RES (2), (36), (37): Xaa is C or S
  MOD_RES (14), (15), (16), (17), (18): Xaa is A or G
  MOD_RES (19), (20), (21), (22): Xaa is A or G or is absent

SEQ ID NO: 25102 - protein, 40 aa, Artificial Sequence
  GFR-binding peptide
  MOD_RES (1), (3), (37), (38): Xaa is C or S
  MOD_RES (15), (16), (17), (18), (19): Xaa is A or G
  MOD_RES (20), (21), (22), (23): Xaa is A or G or is absent
XGXESVAMGEYQKYXXXXXXXXXIYLISIPSLKTPVXXAK

SEQ ID NO: 25103 - protein, 33 aa, Artificial Sequence
  GFR-binding peptide
  MOD_RES (31), (32): Xaa is C or S
SKVVMEYQKYVKPTRGVIYLISIPSLDQPVXXP

SEQ ID NO: 25104 - protein, 36 aa, Artificial Sequence; identical to SEQ ID NO: 4029
  GFR-binding peptide
  MOD_RES (33), (34): Xaa is C or S

SEQ ID NO: 25105 - protein, 36 aa, Artificial Sequence
  GFR-binding peptide
  MOD_RES (31), (32): Xaa is C or S
EVVMDEYKFKVVNNAADLYLISIPELRAPVXXSAPA

SEQ ID NO: 25106 - protein, 36 aa, Artificial Sequence; identical to SEQ ID NO: 4030
  GFR-binding peptide
  MOD_RES (1), (36): Xaa is C or S
  MOD_RES (14), (15), (16), (17), (18): Xaa is A or G
  MOD_RES (19), (20), (21), (22): Xaa is A or G or is absent

SEQ ID NO: 25107 - protein, 39 aa, Artificial Sequence
  GFR-binding peptide
  MOD_RES (1), (3), (37), (38): Xaa is C or S
  MOD_RES (15), (16), (17), (18), (19): Xaa is A or G
  MOD_RES (20), (21), (22), (23): Xaa is A or G or is absent
XGXGEVVMEEYKFKXXXXXXXXXLYLMSIPELETPVXXA

SEQ ID NO: 25108 - protein, 41 aa, Artificial Sequence
  GFR-binding peptide
  MOD_RES (2), (4), (36), (37): Xaa is C or S
HXGXSRVVMNEYKFKIVNSSDDLYLVSIPELKTPAXXPKPV

SEQ ID NO: 25109 - protein, 41 aa, Artificial Sequence; identical to SEQ ID NO: 4033
  GFR-binding peptide
  MOD_RES (1), (3), (37), (38): Xaa is C or S
  MOD_RES (15), (16), (17), (18), (19): Xaa is A or G
  MOD_RES (20), (21), (22), (23): Xaa is A or G or is absent

SEQ ID NO: 25110 - protein, 40 aa, Artificial Sequence
  GFR-binding peptide
  MOD_RES (1), (35), (36): Xaa is C or S
  MOD_RES (13), (14), (15), (16), (17): Xaa is A or G
  MOD_RES (18), (19), (20), (21): Xaa is A or G or is absent
XAEVVMDEYKFKXXXXXXXXXLYLISIPELRAPVXXSAPA

SEQ ID NO: 25111 - protein, 33 aa, Artificial Sequence; identical to SEQ ID NO: 4034
  GFR-binding peptide
  MOD_RES (1), (1): Xaa is C or S
  MOD_RES (12), (13), (14), (15), (16): Xaa is A or G
  MOD_RES (17), (18), (19), (20): Xaa is A or G or is absent

SEQ ID NO: 25112 - protein, 40 aa, Artificial Sequence; identical to SEQ ID NO: 4035
  GFR-binding peptide
  MOD_RES (1), (34), (35): Xaa is C or S

SEQ ID NO: 25113 - protein, 35 aa, Artificial Sequence; identical to SEQ ID NO: 4036
  GFR-binding peptide
  MOD_RES (33), (34): Xaa is C or S
  MOD_RES (11), (12), (13), (14), (15): Xaa is A or G
  MOD_RES (16), (17), (18), (19): Xaa is A or G or is absent

SEQ ID NO: 25114 - protein, 37 aa, Artificial Sequence; identical to SEQ ID NO: 4037
  GFR-binding peptide
  MOD_RES (2), (35), (36): Xaa is C or S
  MOD_RES (13), (14), (15), (16), (17): Xaa is A or G
  MOD_RES (18), (19), (20), (21): Xaa is A or G or is absent

SEQ ID NO: 25115 - protein, 39 aa, Artificial Sequence
  GFR-binding peptide
  MOD_RES (1), (34), (35): Xaa is C or S
  MOD_RES (12), (13), (14), (15), (16): Xaa is A or G
  MOD_RES (17), (18), (19), (20): Xaa is A or G or is absent
XSKVIMEYKFKXXXXXXXXXLYLISIPELDQSVXXPSAS

SEQ ID NO: 25116 - protein, 37 aa, Artificial Sequence
  GFR-binding peptide
  MOD_RES (2), (4): Xaa is C or S
  MOD_RES (16), (17), (18), (19), (20): Xaa is A or G
  MOD_RES (21), (22), (23), (24): Xaa is A or G or is absent
HXGXSRVVMNEYQKYXXXXXXXXXIYLVSIPSLKTPA

SEQ ID NO: 25117 - protein, 37 aa, Artificial Sequence
  GFR-binding peptide
  MOD_RES (2), (4), (36), (37): Xaa is C or S
HXGXARVVMNEYKFKIVNSSDDLYLVSIPELQTPAXX

SEQ ID NO: 25118 - protein, 36 aa, Artificial Sequence
  GFR-binding peptide
  MOD_RES (2), (36): Xaa is C or S
  MOD_RES (14), (15), (16), (17), (18): Xaa is A or G
  MOD_RES (19), (20), (21), (22): Xaa is A or G or is absent
GXESVAMGRYKKLXXXXXXXXXFYLISIANLKTPVX

SEQ ID NO: 25119 - protein, 34 aa, Artificial Sequence
  GFR-binding peptide
  MOD_RES (31), (32): Xaa is C or S
SVAMGEYKFKYTVVGKDLYLISIPELKTPVXXAK

SEQ ID NO: 25120 - protein, 38 aa, Artificial Sequence; identical to SEQ ID NO: 4041
  GFR-binding peptide
  MOD_RES (1), (34), (35): Xaa is C or S
  MOD_RES (12), (13), (14), (15), (16): Xaa is A or G
  MOD_RES (17), (18), (19), (20): Xaa is A or G or is absent

SEQ ID NO: 25121 - protein, 39 aa, Artificial Sequence
  GFR-binding peptide
  MOD_RES (1), (3), (35), (36): Xaa is C or S
XGXESVAMGRYKKLYTVVGKDFYLISIANLKTPVXXAKS

SEQ ID NO: 25122 - protein, 36 aa, Artificial Sequence; identical to SEQ ID NO: 4045
  GFR-binding peptide
  MOD_RES (2), (2): Xaa is C or S
  MOD_RES (15), (16), (17), (18), (19): Xaa is A or G
  MOD_RES (20), (21), (22), (23): Xaa is A or G or is absent

SEQ ID NO: 25123 - protein, 33 aa, Artificial Sequence
  GFR-binding peptide
  MOD_RES (31), (32): Xaa is C or S
SKVIMEYQKYIKPTKGIIYLISIPSLDQSVXXP

SEQ ID NO: 25124 - protein, 40 aa, Artificial Sequence; identical to SEQ ID NO: 4050
  GFR-binding peptide
  MOD_RES (2), (35), (36): Xaa is C or S
  MOD_RES (13), (14), (15), (16), (17): Xaa is A or G
  MOD_RES (18), (19), (20), (21): Xaa is A or G or is absent

SEQ ID NO: 25125 - protein, 34 aa, Artificial Sequence
  GFR-binding peptide
  MOD_RES (33), (34): Xaa is C or S
  MOD_RES (11), (12), (13), (14), (15): Xaa is A or G
  MOD_RES (16), (17), (18), (19): Xaa is A or G or is absent
SVAMGEYQKYXXXXXXXXXIYLISIPSLKTPVXX

SEQ ID NO: 25126 - protein, 37 aa, Artificial Sequence
  GFR-binding peptide
  MOD_RES (2), (34), (35): Xaa is C or S
GXAEVVMDYHYKLVVNNAADKYLISIPSLRAPVXXSA

SEQ ID NO: 25127 - protein, 32 aa, Artificial Sequence
  GFR-binding peptide
  MOD_RES (31), (32): Xaa is C or S
SVAMGEYKFKYTVVGKDLYLISIPELKTPVXX

SEQ ID NO: 25128 - protein, 39 aa, Artificial Sequence; identical to SEQ ID NO: 4054
  GFR-binding peptide
  MOD_RES (33), (34): Xaa is C or S
  MOD_RES (11), (12), (13), (14), (15): Xaa is A or G
  MOD_RES (16), (17), (18), (19): Xaa is A or G or is absent

SEQ ID NO: 25129 - protein, 42 aa, Artificial Sequence; identical to SEQ ID NO: 4055
  GFR-binding peptide
  MOD_RES (1), (36), (37): Xaa is C or S
  MOD_RES (14), (15), (16), (17), (18): Xaa is A or G
  MOD_RES (19), (20), (21), (22): Xaa is A or G or is absent

SEQ ID NO: 25130 - protein, 37 aa, Artificial Sequence
  GFR-binding peptide
  MOD_RES (2), (35), (36): Xaa is C or S
  MOD_RES (13), (14), (15), (16), (17): Xaa is A or G
  MOD_RES (18), (19), (20), (21): Xaa is A or G or is absent
KXSKVIMEYKFKXXXXXXXXXLYLISIPELDQSVXXP

SEQ ID NO: 25131 - protein, 38 aa, Artificial Sequence; identical to SEQ ID NO: 4058
  GFR-binding peptide
  MOD_RES (2), (4), (36), (37): Xaa is C or S

SEQ ID NO: 25132 - protein, 39 aa, Artificial Sequence
  GFR-binding peptide
  MOD_RES (1), (35), (36): Xaa is C or S
  MOD_RES (13), (14), (15), (16), (17): Xaa is A or G
  MOD_RES (18), (19), (20), (21): Xaa is A or G or is absent
XGEVVMEEYQKYXXXXXXXXXIYLMSIPSLETPVXXAKP

SEQ ID NO: 25133 - protein, 40 aa, Artificial Sequence
  GFR-binding peptide
  MOD_RES (2), (4), (37), (38): Xaa is C or S
RXGXEAVSMGEEYQKYTPVGMDDIYLVSIPSLKTPVXXAK

SEQ ID NO: 25134 - protein, 40 aa, Artificial Sequence; identical to SEQ ID NO: 4062
  GFR-binding peptide
  MOD_RES (1), (3), (37), (38): Xaa is C or S
  MOD_RES (15), (16), (17), (18), (19): Xaa is A or G
  MOD_RES (20), (21), (22), (23): Xaa is A or G or is absent

SEQ ID NO: 25135 - protein, 36 aa, Artificial Sequence
  GFR-binding peptide
  MOD_RES (34), (35): Xaa is C or S
  MOD_RES (12), (13), (14), (15), (16): Xaa is A or G
  MOD_RES (17), (18), (19), (20): Xaa is A or G or is absent
AKVVMNEYKFKXXXXXXXXXLYLVSIPELKTPAXXA

SEQ ID NO: 25136 - protein, 37 aa, Artificial Sequence
  GFR-binding peptide
  MOD_RES (31), (32): Xaa is C or S
SVAMGYHYKLYTVVGKDKYLISIPSLKTPVXXAKSAK

SEQ ID NO: 25137 - protein, 37 aa, Artificial Sequence; identical to SEQ ID NO: 4063
  GFR-binding peptide
  MOD_RES (1), (34), (35): Xaa is C or S
  MOD_RES (12), (13), (14), (15), (16): Xaa is A or G
  MOD_RES (17), (18), (19), (20): Xaa is A or G or is absent

SEQ ID NO: 25138 - protein, 39 aa, Artificial Sequence
  GFR-binding peptide
  MOD_RES (2), (4), (37), (38): Xaa is C or S
  MOD_RES (15), (16), (17), (18), (19): Xaa is A or G
  MOD_RES (20), (21), (22), (23): Xaa is A or G or is absent
SXKXSRVIMEYQKYXXXXXXXXXIYLISIPSLAQPVXXP

SEQ ID NO: 25139 - protein, 32 aa, Artificial Sequence; identical to SEQ ID NO: 4064
  GFR-binding peptide
  MOD_RES (2), (2): Xaa is C or S

SEQ ID NO: 25140 - protein, 35 aa, Artificial Sequence; identical to SEQ ID NO: 4066
  GFR-binding peptide
  MOD_RES (1), (32), (33): Xaa is C or S

SEQ ID NO: 25141 - protein, 36 aa, Artificial Sequence
  GFR-binding peptide
  MOD_RES (1), (3), (36): Xaa is C or S
XGXEAVSMGEEYQKYTPVGMDDIYLVSIPSLKTPVX

SEQ ID NO: 25142 - protein, 35 aa, Artificial Sequence
  GFR-binding peptide
  MOD_RES (33), (34): Xaa is C or S
  MOD_RES (11), (12), (13), (14), (15): Xaa is A or G
  MOD_RES (16), (17), (18), (19): Xaa is A or G or is absent
EVVMEEYKFKXXXXXXXXXLYLMSIPELETPVXXA

SEQ ID NO: 25143 - protein, 35 aa, Artificial Sequence; identical to SEQ ID NO: 4069
  GFR-binding peptide
  MOD_RES (33), (34): Xaa is C or S
  MOD_RES (11), (12), (13), (14), (15): Xaa is A or G
  MOD_RES (16), (17), (18), (19): Xaa is A or G or is absent

SEQ ID NO: 25144 - protein, 38 aa, Artificial Sequence
  GFR-binding peptide
  MOD_RES (34), (34): Xaa is C or S
  MOD_RES (12), (13), (14), (15), (16): Xaa is A or G
  MOD_RES (17), (18), (19), (20): Xaa is A or G or is absent
SRVVMNEYKFKXXXXXXXXXLYLVSIPELKTPAXTPKT

SEQ ID NO: 25145 - protein, 39 aa, Artificial Sequence
  GFR-binding peptide
  MOD_RES (2), (4), (38): Xaa is C or S
  MOD_RES (16), (17), (18), (19), (20): Xaa is A or G
  MOD_RES (21), (22), (23), (24): Xaa is A or G or is absent
HXGXSRVVMNEYQKYXXXXXXXXXIYLVSIPSLKTPAXT

SEQ ID NO: 25146 - protein, 39 aa, Artificial Sequence; identical to SEQ ID NO: 4073
  GFR-binding peptide
  MOD_RES (1), (35), (36): Xaa is C or S
  MOD_RES (13), (14), (15), (16), (17): Xaa is A or G
  MOD_RES (18), (19), (20), (21): Xaa is A or G or is absent

SEQ ID NO: 25147 - protein, 37 aa, Artificial Sequence
  GFR-binding peptide
  MOD_RES (2), (4): Xaa is C or S
  MOD_RES (16), (17), (18), (19), (20): Xaa is A or G
  MOD_RES (21), (22), (23), (24): Xaa is A or G or is absent
RXGXGEVVMDEYKFKXXXXXXXXXLYLMSIPELETPV

SEQ ID NO: 25148 - protein, 32 aa, Artificial Sequence
  GFR-binding peptide
  MOD_RES (1), (32): Xaa is C or S
XSKVVMEYKFKVKPTRGVLYLISIPELDQPVX

SEQ ID NO: 25149 - protein, 37 aa, Artificial Sequence; identical to SEQ ID NO: 4077
  GFR-binding peptide
  MOD_RES (1), (32), (33): Xaa is C or S

SEQ ID NO: 25150 - protein, 38 aa, Artificial Sequence
  GFR-binding peptide
  MOD_RES (32), (33): Xaa is C or S
AEVVMDYHYKLVVNNAADKYLISIPSLRAPVXXSAPAA

SEQ ID NO: 25151 - protein, 36 aa, Artificial Sequence
  GFR-binding peptide
  MOD_RES (32), (33): Xaa is C or S
SRVVMNEYKFKIVNSSDDLYLVSIPELKTPAXXPKP

SEQ ID NO: 25152 - protein, 33 aa, Artificial Sequence
  GFR-binding peptide
  MOD_RES (2), (2): Xaa is C or S
GXAEVVMDYHYKLVVNNAADKYLISIPSLRAPV

SEQ ID NO: 25153 - protein, 38 aa, Artificial Sequence
  GFR-binding peptide
  MOD_RES (2), (4), (35), (36): Xaa is C or S
SXKXSKVVMEYKFKVKPTRGVLYLISIPELDQPVXXPS

SEQ ID NO: 25154 - protein, 38 aa, Artificial Sequence
  GFR-binding peptide
  MOD_RES (2), (36), (37): Xaa is C or S
  MOD_RES (14), (15), (16), (17), (18): Xaa is A or G
  MOD_RES (19), (20), (21), (22): Xaa is A or G or is absent
GXAEVVMDRYKKLXXXXXXXXXFYLISIANLRAPVXXS

SEQ ID NO: 25155 - protein, 39 aa, Artificial Sequence
  GFR-binding peptide
  MOD_RES (1), (3), (35): Xaa is C or S
XGXSRVVMNEYKFKIVNSSDDLYLVSIPELKTPAXTPKT

SEQ ID NO: 25156 - protein, 36 aa, Artificial Sequence
  GFR-binding peptide
  MOD_RES (33), (34): Xaa is C or S
  MOD_RES (11), (12), (13), (14), (15): Xaa is A or G
  MOD_RES (16), (17), (18), (19): Xaa is A or G or is absent
EVVMDEYKFKXXXXXXXXXLYLISIPELRAPVXXSA

SEQ ID NO: 25157 - protein, 41 aa, Artificial Sequence
  GFR-binding peptide
  MOD_RES (2), (36), (37): Xaa is C or S
  MOD_RES (14), (15), (16), (17), (18): Xaa is A or G
  MOD_RES (19), (20), (21), (22): Xaa is A or G or is absent
GXESVAMGRYKKLXXXXXXXXXFYLISIANLKTPVXXAKSA

SEQ ID NO: 25158 - protein, 34 aa, Artificial Sequence
  GFR-binding peptide
  MOD_RES (32), (32): Xaa is C or S
SRVVMNEYQKYIVNSSDDIYLVSIPSLKTPAXTP

SEQ ID NO: 25159 - protein, 39 aa, Artificial Sequence; identical to SEQ ID NO: 4079
  GFR-binding peptide
  MOD_RES (2), (4), (38), (39): Xaa is C or S
  MOD_RES (16), (17), (18), (19), (20): Xaa is A or G
  MOD_RES (21), (22), (23), (24): Xaa is A or G or is absent

SEQ ID NO: 25160 - protein, 41 aa, Artificial Sequence; identical to SEQ ID NO: 4080
  GFR-binding peptide
  MOD_RES (35), (36): Xaa is C or S
  MOD_RES (13), (14), (15), (16), (17): Xaa is A or G
  MOD_RES (18), (19), (20), (21): Xaa is A or G or is absent

SEQ ID NO: 25161 - protein, 37 aa, Artificial Sequence; identical to SEQ ID NO: 4084
  GFR-binding peptide
  MOD_RES (2), (4): Xaa is C or S
  MOD_RES (16), (17), (18), (19), (20): Xaa is A or G
  MOD_RES (21), (22), (23), (24): Xaa is A or G or is absent

SEQ ID NO: 25162 - protein, 35 aa, Artificial Sequence
  GFR-binding peptide
  MOD_RES (31), (32): Xaa is C or S
EVVMDEYQKYVVKENEDIYLMSIPSLETPVXXAKP

SEQ ID NO: 25163 - protein, 36 aa, Artificial Sequence; identical to SEQ ID NO: 4090
  GFR-binding peptide
  MOD_RES (33), (34): Xaa is C or S
  MOD_RES (11), (12), (13), (14), (15): Xaa is A or G
  MOD_RES (16), (17), (18), (19): Xaa is A or G or is absent

SEQ ID NO: 25164 - protein, 39 aa, Artificial Sequence; identical to SEQ ID NO: 4091
  GFR-binding peptide
  MOD_RES (2), (34): Xaa is C or S

SEQ ID NO: 25165 - protein, 40 aa, Artificial Sequence; identical to SEQ ID NO: 4098
  GFR-binding peptide
  MOD_RES (1), (3), (34), (35): Xaa is C or S

SEQ ID NO: 25166 - protein, 34 aa, Artificial Sequence; identical to SEQ ID NO: 4100
  GFR-binding peptide
  MOD_RES (1), (34): Xaa is C or S
  MOD_RES (12), (13), (14), (15), (16): Xaa is A or G
  MOD_RES (17), (18), (19), (20): Xaa is A or G or is absent

SEQ ID NO: 25167 - protein, 38 aa, Artificial Sequence; identical to SEQ ID NO: 4101
  GFR-binding peptide
  MOD_RES (1), (32), (33): Xaa is C or S

SEQ ID NO: 25168 - protein, 37 aa, Artificial Sequence; identical to SEQ ID NO: 4102
  GFR-binding peptide
  MOD_RES (2), (37): Xaa is C or S
  MOD_RES (15), (16), (17), (18), (19): Xaa is A or G
  MOD_RES (20), (21), (22), (23): Xaa is A or G or is absent

SEQ ID NO: 25169 - protein, 39 aa, Artificial Sequence; identical to SEQ ID NO: 4104
  GFR-binding peptide
  MOD_RES (1), (3), (34), (35): Xaa is C or S

SEQ ID NO: 25170 - protein, 38 aa, Artificial Sequence; identical to SEQ ID NO: 4105
  GFR-binding peptide
  MOD_RES (2), (35), (36): Xaa is C or S

SEQ ID NO: 25171 - protein, 38 aa, Artificial Sequence
  GFR-binding peptide
  MOD_RES (1), (3), (37), (38): Xaa is C or S
  MOD_RES (15), (16), (17), (18), (19): Xaa is A or G
  MOD_RES (20), (21), (22), (23): Xaa is A or G or is absent
XGXAEVVMDYHYKLXXXXXXXXXKYLISIPSLRAPVXX

SEQ ID NO: 25172 - protein, 36 aa, Artificial Sequence
  GFR-binding peptide
  MOD_RES (1), (35), (36): Xaa is C or S
  MOD_RES (13), (14), (15), (16), (17): Xaa is A or G
  MOD_RES (18), (19), (20), (21): Xaa is A or G or is absent
XSRVVMNEYKFKXXXXXXXXXLYLVSIPELKTPAXX

SEQ ID NO: 25173 - protein, 44 aa, Artificial Sequence
  GFR-binding peptide
  MOD_RES (2), (4), (38), (39): Xaa is C or S
  MOD_RES (16), (17), (18), (19), (20): Xaa is A or G
  MOD_RES (21), (22), (23), (24): Xaa is A or G or is absent
HXGXARVVMNEYQKYXXXXXXXXXIYLVSIPSLQTPAXXPKPVT

SEQ ID NO: 25174 - protein, 44 aa, Artificial Sequence
  GFR-binding peptide
  MOD_RES (2), (4), (38), (39): Xaa is C or S
  MOD_RES (16), (17), (18), (19), (20): Xaa is A or G
  MOD_RES (21), (22), (23), (24): Xaa is A or G or is absent
RXGXESVAMGEYQKYXXXXXXXXXIYLISIPSLKTPVXXAKSAK

SEQ ID NO: 25175 - protein, 37 aa, Artificial Sequence; identical to SEQ ID NO: 4110
  GFR-binding peptide
  MOD_RES (1), (34), (35): Xaa is C or S

SEQ ID NO: 25176 - protein, 41 aa, Artificial Sequence; identical to SEQ ID NO: 4111
  GFR-binding peptide
  MOD_RES (2), (36), (37): Xaa is C or S
  MOD_RES (14), (15), (16), (17), (18): Xaa is A or G
  MOD_RES (19), (20), (21), (22): Xaa is A or G or is absent

SEQ ID NO: 25177 - protein, 37 aa, Artificial Sequence
  GFR-binding peptide
  MOD_RES (2), (37): Xaa is C or S
  MOD_RES (15), (16), (17), (18), (19): Xaa is A or G
  MOD_RES (20), (21), (22), (23): Xaa is A or G or is absent
GXEAVSMGEEYQKYXXXXXXXXXIYLVSIPSLKTPVX

SEQ ID NO: 25178 - protein, 38 aa, Artificial Sequence; identical to SEQ ID NO: 4112
  GFR-binding peptide
  MOD_RES (1), (3), (34), (35): Xaa is C or S

SEQ ID NO: 25179 - protein, 37 aa, Artificial Sequence; identical to SEQ ID NO: 4115
  GFR-binding peptide
  MOD_RES (1), (33), (34): Xaa is C or S

SEQ ID NO: 25180 - protein, 35 aa, Artificial Sequence
  GFR-binding peptide
  MOD_RES (34), (35): Xaa is C or S
  MOD_RES (12), (13), (14), (15), (16): Xaa is A or G
  MOD_RES (17), (18), (19), (20): Xaa is A or G or is absent
AEVVMDEYQKYXXXXXXXXXIYLISIPSLRAPVXX

SEQ ID NO: 25181 - protein, 40 aa, Artificial Sequence
  GFR-binding peptide
  MOD_RES (2), (4), (38), (39): Xaa is C or S
  MOD_RES (16), (17), (18), (19), (20): Xaa is A or G
  MOD_RES (21), (22), (23), (24): Xaa is A or G or is absent
RXGXGEVVMEEYQKYXXXXXXXXXIYLMSIPSLETPVXXA

SEQ ID NO: 25182 - protein, 36 aa, Artificial Sequence; identical to SEQ ID NO: 4120
  GFR-binding peptide
  MOD_RES (1), (33), (34): Xaa is C or S

SEQ ID NO: 25183 - protein, 32 aa, Artificial Sequence
  GFR-binding peptide
  MOD_RES (2), (2): Xaa is C or S
KXSKVVMEYQKYVKPTRGVIYLISIPSLDQPV

SEQ ID NO: 25184 - protein, 37 aa, Artificial Sequence; identical to SEQ ID NO: 4124
  GFR-binding peptide
  MOD_RES (2), (4), (36), (37): Xaa is C or S

SEQ ID NO: 25185 - protein, 35 aa, Artificial Sequence; identical to SEQ ID NO: 4125
  GFR-binding peptide
  MOD_RES (1), (32), (33): Xaa is C or S

SEQ ID NO: 25186 - protein, 37 aa, Artificial Sequence
  GFR-binding peptide
  MOD_RES (1), (34), (35): Xaa is C or S
XEAVSMGEEYQKYTPVGMDDIYLVSIPSLKTPVXXAK

SEQ ID NO: 25187 - protein, 38 aa, Artificial Sequence; identical to SEQ ID NO: 4128
  GFR-binding peptide
  MOD_RES (34), (35): Xaa is C or S
  MOD_RES (12), (13), (14), (15), (16): Xaa is A or G
  MOD_RES (17), (18), (19), (20): Xaa is A or G or is absent

SEQ ID NO: 25188 - protein, 37 aa, Artificial Sequence; identical to SEQ ID NO: 4129
  GFR-binding peptide
  MOD_RES (1), (32), (33): Xaa is C or S

SEQ ID NO: 25189 - protein, 37 aa, Artificial Sequence; identical to SEQ ID NO: 4134
  GFR-binding peptide
  MOD_RES (1), (33), (34): Xaa is C or S

SEQ ID NO: 25190 - protein, 35 aa, Artificial Sequence
  GFR-binding peptide
  MOD_RES (2), (34), (35): Xaa is C or S
GXAKVVMNEYQKYIVNNSSDIYLVSIPSLKTPAXX

SEQ ID NO: 25191 - protein, 37 aa, Artificial Sequence; identical to SEQ ID NO: 4136
  GFR-binding peptide
  MOD_RES (2), (36), (37): Xaa is C or S
  MOD_RES (14), (15), (16), (17), (18): Xaa is A or G
  MOD_RES (19), (20), (21), (22): Xaa is A or G or is absent

SEQ ID NO: 25192 - protein, 38 aa, Artificial Sequence; identical to SEQ ID NO: 4137
  GFR-binding peptide
  MOD_RES (2), (34), (35): Xaa is C or S

SEQ ID NO: 25193 - protein, 43 aa, Artificial Sequence
  GFR-binding peptide
  MOD_RES (2), (4), (39), (40): Xaa is C or S
  MOD_RES (17), (18), (19), (20), (21): Xaa is A or G
  MOD_RES (22), (23), (24), (25): Xaa is A or G or is absent
RXGXEAVSMGEEYQKYXXXXXXXXXIYLVSIPSLKTPVXXAKG

SEQ ID NO: 25194 - protein, 31 aa, Artificial Sequence
  GFR-binding peptide
  MOD_RES (31), (31): Xaa is C or S
SVAMGYHYKLYTVVGKDKYLISIPSLKTPVX

SEQ ID NO: 25195 - protein, 37 aa, Artificial Sequence
  GFR-binding peptide
  MOD_RES (1), (35), (36): Xaa is C or S
  MOD_RES (13), (14), (15), (16), (17): Xaa is A or G
  MOD_RES (18), (19), (20), (21): Xaa is A or G or is absent
XSRVVMNEYKFKXXXXXXXXXLYLVSIPELKTPAXXP

SEQ ID NO: 25196 - protein, 40 aa, Artificial Sequence; identical to SEQ ID NO: 4140
  GFR-binding peptide
  MOD_RES (2), (37), (38): Xaa is C or S
  MOD_RES (15), (16), (17), (18), (19): Xaa is A or G
  MOD_RES (20), (21), (22), (23): Xaa is A or G or is absent

SEQ ID NO: 25197 - protein, 37 aa, Artificial Sequence
  GFR-binding peptide
  MOD_RES (31), (32): Xaa is C or S
SVAMGEYKFKYTVVGKDLYLISIPELKTPVXXAKSAK

SEQ ID NO: 25198 - protein, 35 aa, Artificial Sequence
  GFR-binding peptide
  MOD_RES (2), (2): Xaa is C or S
  MOD_RES (14), (15), (16), (17), (18): Xaa is A or G
  MOD_RES (19), (20), (21), (22): Xaa is A or G or is absent
GXAEVVMDRYKKLXXXXXXXXXFYLISIANLRAPV

SEQ ID NO: 25199 - protein, 36 aa, Artificial Sequence
  GFR-binding peptide
  MOD_RES (1), (3), (36): Xaa is C or S
  MOD_RES (14), (15), (16), (17), (18): Xaa is A or G
  MOD_RES (19), (20), (21), (22): Xaa is A or G or is absent
XKXSRVIMEYKFKXXXXXXXXXLYLISIPELAQPVX

SEQ ID NO: 25200 - protein, 38 aa, Artificial Sequence; identical to SEQ ID NO: 4146
  GFR-binding peptide
  MOD_RES (34), (35): Xaa is C or S
  MOD_RES (12), (13), (14), (15), (16): Xaa is A or G
  MOD_RES (17), (18), (19), (20): Xaa is A or G or is absent

SEQ ID NO: 25201 - protein, 37 aa, Artificial Sequence
  GFR-binding peptide
  MOD_RES (2), (4), (36), (37): Xaa is C or S
HXGXARVVMNEYQKYIVNSSDDIYLVSIPSLQTPAXX

SEQ ID NO: 25202 - protein, 35 aa, Artificial Sequence
  GFR-binding peptide
  MOD_RES (1), (3), (35): Xaa is C or S
XGXGEVVMDEYKFKVVKENEDLYLMSIPELETPVX

SEQ ID NO: 25203 - protein, 44 aa, Artificial Sequence
  GFR-binding peptide
  MOD_RES (2), (4), (38), (39): Xaa is C or S
  MOD_RES (16), (17), (18), (19), (20): Xaa is A or G
  MOD_RES (21), (22), (23), (24): Xaa is A or G or is absent
RXGXAEVVMDYHYKLXXXXXXXXXKYLISIPSLRAPVXXSAPAA

SEQ ID NO: 25204 - protein, 37 aa, Artificial Sequence
  GFR-binding peptide
  MOD_RES (2), (33), (34): Xaa is C or S
KXSRVIMEYQKYVKPKRGVIYLISIPSLAQPVXXPAA

SEQ ID NO: 25205 - protein, 38 aa, Artificial Sequence
  GFR-binding peptide
  MOD_RES (2), (4), (38): Xaa is C or S
  MOD_RES (16), (17), (18), (19), (20): Xaa is A or G
  MOD_RES (21), (22), (23), (24): Xaa is A or G or is absent
RXGXAEVVMDYHYKLXXXXXXXXXKYLISIPSLRAPVX

SEQ ID NO: 25206 - protein, 34 aa, Artificial Sequence
  GFR-binding peptide
  MOD_RES (1), (3), (34): Xaa is C or S
XKXSKVVMEYKFKVKPTRGVLYLISIPELDQPVX

SEQ ID NO: 25207 - protein, 32 aa, Artificial Sequence
  GFR-binding peptide
  MOD_RES (31), (32): Xaa is C or S
SVAMGYHYKLYTVVGKDKYLISIPSLKTPVXX

SEQ ID NO: 25208 - protein, 40 aa, Artificial Sequence; identical to SEQ ID NO: 4150
  GFR-binding peptide
  MOD_RES (1), (34), (35): Xaa is C or S
  MOD_RES (12), (13), (14), (15), (16): Xaa is A or G
  MOD_RES (17), (18), (19), (20): Xaa is A or G or is absent

SEQ ID NO: 25209 - protein, 35 aa, Artificial Sequence; identical to SEQ ID NO: 4151
  GFR-binding peptide
  MOD_RES (1), (3), (35): Xaa is C or S

SEQ ID NO: 25210 - protein, 34 aa, Artificial Sequence; identical to SEQ ID NO: 4152
  GFR-binding peptide
  MOD_RES (2), (2): Xaa is C or S
  MOD_RES (13), (14), (15), (16), (17): Xaa is A or G
  MOD_RES (18), (19), (20), (21): Xaa is A or G or is absent

SEQ ID NO: 25211 - protein, 32 aa, Artificial Sequence; identical to SEQ ID NO: 4153
  GFR-binding peptide
  MOD_RES (2), (2): Xaa is C or S

SEQ ID NO: 25212 - protein, 37 aa, Artificial Sequence
  GFR-binding peptide
  MOD_RES (1), (33), (34): Xaa is C or S
XAKVVMNEYKFKIVNNSSDLYLVSIPELKTPAXXAKP

SEQ ID NO: 25213 - protein, 34 aa, Artificial Sequence
  GFR-binding peptide
  MOD_RES (2), (34): Xaa is C or S
GXAKVVMNEYKFKIVNNSSDLYLVSIPELKTPAX

SEQ ID NO: 25214 - protein, 34 aa, Artificial Sequence
  GFR-binding peptide
  MOD_RES (33), (34): Xaa is C or S
  MOD_RES (11), (12), (13), (14), (15): Xaa is A or G
  MOD_RES (16), (17), (18), (19): Xaa is A or G or is absent
RVVMNEYKFKXXXXXXXXXLYLVSIPELQTPAXX

SEQ ID NO: 25215 - protein, 36 aa, Artificial Sequence
  GFR-binding peptide
  MOD_RES (1), (3), (35), (36): Xaa is C or S
XGXESVAMGYHYKLYTVVGKDKYLISIPSLKTPVXX

SEQ ID NO: 25216 - protein, 36 aa, Artificial Sequence
  GFR-binding peptide
  MOD_RES (1), (33), (34): Xaa is C or S
XAKVVMNEYKFKIVNNSSDLYLVSIPELKTPAXXAK

SEQ ID NO: 25217 - protein, 42 aa, Artificial Sequence
  GFR-binding peptide
  MOD_RES (2), (4), (36), (37): Xaa is C or S
RXGXGEVVMEEYQKYVVKDYEDIYLMSIPSLETPVXXAKPIS

SEQ ID NO: 25218 - protein, 33 aa, Artificial Sequence; identical to SEQ ID NO: 4158
  GFR-binding peptide
  MOD_RES (31), (32): Xaa is C or S

SEQ ID NO: 25219 - protein, 38 aa, Artificial Sequence; identical to SEQ ID NO: 4160
  GFR-binding peptide
  MOD_RES (2), (36), (37): Xaa is C or S
  MOD_RES (14), (15), (16), (17), (18): Xaa is A or G
  MOD_RES (19), (20), (21), (22): Xaa is A or G or is absent

SEQ ID NO: 25220 - protein, 36 aa, Artificial Sequence
  GFR-binding peptide
  MOD_RES (1), (3), (35), (36): Xaa is C or S
XGXAKVVMNEYKFKIVNNSSDLYLVSIPELKTPAXX

SEQ ID NO: 25221 - protein, 40 aa, Artificial Sequence; identical to SEQ ID NO: 4161
  GFR-binding peptide
  MOD_RES (2), (34), (35): Xaa is C or S

SEQ ID NO: 25222 - protein, 37 aa, Artificial Sequence; identical to SEQ ID NO: 4162
  GFR-binding peptide
  MOD_RES (2), (4), (36), (37): Xaa is C or S

SEQ ID NO: 25223 - protein, 36 aa, Artificial Sequence
  GFR-binding peptide
  MOD_RES (33), (34): Xaa is C or S
  MOD_RES (11), (12), (13), (14), (15): Xaa is A or G
  MOD_RES (16), (17), (18), (19): Xaa is A or G or is absent
SKVVMEYQKYXXXXXXXXXIYLISIPSLDQPVXXPS

SEQ ID NO: 25224 - protein, 35 aa, Artificial Sequence; identical to SEQ ID NO: 4163
  GFR-binding peptide
  MOD_RES (31), (32): Xaa is C or S

SEQ ID NO: 25225 - protein, 40 aa, Artificial Sequence; identical to SEQ ID NO: 4164
  GFR-binding peptide
  MOD_RES (2), (36): Xaa is C or S
  MOD_RES (14), (15), (16), (17), (18): Xaa is A or G
  MOD_RES (19), (20), (21), (22): Xaa is A or G or is absent

SEQ ID NO: 25226 - protein, 37 aa, Artificial Sequence
  GFR-binding peptide
  MOD_RES (2), (34), (35): Xaa is C or S
GXAEVVMDEYQKYVVNNAADIYLISIPSLRAPVXXSA

SEQ ID NO: 25227 - protein, 41 aa, Artificial Sequence
  GFR-binding peptide
  MOD_RES (1), (3), (35), (36): Xaa is C or S
XGXARVVMNEYKFKIVNSSDDLYLVSIPELQTPAXXPKPVT

SEQ ID NO: 25228 - protein, 34 aa, Artificial Sequence; identical to SEQ ID NO: 4170
  GFR-binding peptide
  MOD_RES (33), (34): Xaa is C or S

SEQ ID NO: 25229 - protein, 35 aa, Artificial Sequence; identical to SEQ ID NO: 4171
  GFR-binding peptide
  MOD_RES (32), (33): Xaa is C or S

SEQ ID NO: 25230 - protein, 34 aa, Artificial Sequence
  GFR-binding peptide
  MOD_RES (1), (3), (34): Xaa is C or S
XKXSKVIMEYKFKIKPTKGILYLISIPELDQSVX

SEQ ID NO: 25231 - protein, 38 aa, Artificial Sequence; identical to SEQ ID NO: 4174
  GFR-binding peptide
  MOD_RES (2), (4), (38): Xaa is C or S
  MOD_RES (16), (17), (18), (19), (20): Xaa is A or G
  MOD_RES (21), (22), (23), (24): Xaa is A or G or is absent

SEQ ID NO: 25232 - protein, 36 aa, Artificial Sequence; identical to SEQ ID NO: 4175
  GFR-binding peptide
  MOD_RES (2), (4): Xaa is C or S

SEQ ID NO: 25233 - protein, 43 aa, Artificial Sequence; identical to SEQ ID NO: 4179
  GFR-binding peptide
  MOD_RES (2), (4), (38), (39): Xaa is C or S
  MOD_RES (16), (17), (18), (19), (20): Xaa is A or G
  MOD_RES (21), (22), (23), (24): Xaa is A or G or is absent

SEQ ID NO: 25234 - protein, 39 aa, Artificial Sequence; identical to SEQ ID NO: 4181
  GFR-binding peptide
  MOD_RES (1), (34), (35): Xaa is C or S
  MOD_RES (12), (13), (14), (15), (16): Xaa is A or G
  MOD_RES (17), (18), (19), (20): Xaa is A or G or is absent

SEQ ID NO: 25235 - protein, 40 aa, Artificial Sequence
  GFR-binding peptide
  MOD_RES (2), (4), (36), (37): Xaa is C or S
RXGXESVAMGEYKFKYTVVGKDLYLISIPELKTPVXXAKS

SEQ ID NO: 25236 - protein, 35 aa, Artificial Sequence; identical to SEQ ID NO: 4183
  GFR-binding peptide
  MOD_RES (1), (33), (34): Xaa is C or S

SEQ ID NO: 25237 - protein, 36 aa, Artificial Sequence
  GFR-binding peptide
  MOD_RES (1), (33), (34): Xaa is C or S
XESVAMGEYQKYYTVVGKDIYLISIPSLKTPVXXAK

SEQ ID NO: 25238 - protein, 38 aa, Artificial Sequence; identical to SEQ ID NO: 4186
  GFR-binding peptide
  MOD_RES (1), (32), (33): Xaa is C or S

SEQ ID NO: 25239 - protein, 44 aa, Artificial Sequence; identical to SEQ ID NO: 4188
  GFR-binding peptide
  MOD_RES (2), (4), (39), (40): Xaa is C or S
  MOD_RES (17), (18), (19), (20), (21): Xaa is A or G
  MOD_RES (22), (23), (24), (25): Xaa is A or G or is absent

SEQ ID NO: 25240 - protein, 33 aa, Artificial Sequence
  GFR-binding peptide
  MOD_RES (32), (33): Xaa is C or S
AKVVMNEYKFKIVNNSSDLYLVSIPELKTPAXX

SEQ ID NO: 25241 - protein, 41 aa, Artificial Sequence
  GFR-binding peptide
  MOD_RES (1), (35), (36): Xaa is C or S
  MOD_RES (13), (14), (15), (16), (17): Xaa is A or G
  MOD_RES (18), (19), (20), (21): Xaa is A or G or is absent
XAEVVMDEYKFKXXXXXXXXXLYLISIPELRAPVXXSAPAA

SEQ ID NO: 25242 - protein, 34 aa, Artificial Sequence; identical to SEQ ID NO: 4189
  GFR-binding peptide
  MOD_RES (32), (33): Xaa is C or S

SEQ ID NO: 25243 - protein, 38 aa, Artificial Sequence
  GFR-binding peptide
  MOD_RES (1), (3), (37), (38): Xaa is C or S
  MOD_RES (15), (16), (17), (18), (19): Xaa is A or G
  MOD_RES (20), (21), (22), (23): Xaa is A or G or is absent
XGXAKVVMNEYQKYXXXXXXXXXIYLVSIPSLKTPAXX

SEQ ID NO: 25244 - protein, 31 aa, Artificial Sequence
  GFR-binding peptide
  MOD_RES (1), (1): Xaa is C or S
XSKVIMEYKFKIKPTKGILYLISIPELDQSV

SEQ ID NO: 25245 - protein, 36 aa, Artificial Sequence; identical to SEQ ID NO: 4191
  GFR-binding peptide
  MOD_RES (31), (32): Xaa is C or S

SEQ ID NO: 25246 - protein, 33 aa, Artificial Sequence
  GFR-binding peptide
  MOD_RES (1), (3): Xaa is C or S
XKXSKVVMEYKFKVKPTRGVLYLISIPELDQPV

SEQ ID NO: 25247 - protein, 41 aa, Artificial Sequence; identical to SEQ ID NO: 4193
  GFR-binding peptide
  MOD_RES (1), (3), (37), (38): Xaa is C or S
  MOD_RES (15), (16), (17), (18), (19): Xaa is A or G
  MOD_RES (20), (21), (22), (23): Xaa is A or G or is absent

SEQ ID NO: 25248 - protein, 37 aa, Artificial Sequence; identical to SEQ ID NO: 4194
  GFR-binding peptide
  MOD_RES (2), (34), (35): Xaa is C or S

SEQ ID NO: 25249 - protein, 42 aa, Artificial Sequence; identical to SEQ ID NO: 4195
  GFR-binding peptide
  MOD_RES (1), (3), (36), (37): Xaa is C or S
  MOD_RES (14), (15), (16), (17), (18): Xaa is A or G
  MOD_RES (19), (20), (21), (22): Xaa is A or G or is absent

SEQ ID NO: 25250 - protein, 37 aa, Artificial Sequence
  GFR-binding peptide
  MOD_RES (1), (35), (36): Xaa is C or S
  MOD_RES (13), (14), (15), (16), (17): Xaa is A or G
  MOD_RES (18), (19), (20), (21): Xaa is A or G or is absent
XGEVVMDEYKFKXXXXXXXXXLYLMSIPELETPVXXA

SEQ ID NO: 25251 - protein, 38 aa, Artificial Sequence
  GFR-binding peptide
  MOD_RES (1), (34), (35): Xaa is C or S
  MOD_RES (12), (13), (14), (15), (16): Xaa is A or G
  MOD_RES (17), (18), (19), (20): Xaa is A or G or is absent
XSKVIMEYKFKXXXXXXXXXLYLISIPELDQSVXXPSA

SEQ ID NO: 25252 - protein, 43 aa, Artificial Sequence
  GFR-binding peptide
  MOD_RES (1), (3), (37), (38): Xaa is C or S
  MOD_RES (15), (16), (17), (18), (19): Xaa is A or G
  MOD_RES (20), (21), (22), (23): Xaa is A or G or is absent
XGXAEVVMDEYQKYXXXXXXXXXIYLISIPSLRAPVXXSAPAA

SEQ ID NO: 25253 - protein, 36 aa, Artificial Sequence
  GFR-binding peptide
  MOD_RES (2), (36): Xaa is C or S
  MOD_RES (14), (15), (16), (17), (18): Xaa is A or G
  MOD_RES (19), (20), (21), (22): Xaa is A or G or is absent
GXGEVVMEEYQKYXXXXXXXXXIYLMSIPSLETPVX

SEQ ID NO: 25254 - protein, 35 aa, Artificial Sequence; identical to SEQ ID NO: 4199
  GFR-binding peptide
  MOD_RES (1), (33), (34): Xaa is C or S

SEQ ID NO: 25255 - protein, 34 aa, Artificial Sequence
  GFR-binding peptide
  MOD_RES (1), (3): Xaa is C or S
XGXGEVVMDEYQKYVVKENEDIYLMSIPSLETPV

SEQ ID NO: 25256 - protein, 41 aa, Artificial Sequence; identical to SEQ ID NO: 4201
  GFR-binding peptide
  MOD_RES (2), (4), (35), (36): Xaa is C or S

SEQ ID NO: 25257 - protein, 32 aa, Artificial Sequence; identical to SEQ ID NO: 4202
  GFR-binding peptide
  MOD_RES (11), (12), (13), (14), (15): Xaa is A or G
  MOD_RES (16), (17), (18), (19): Xaa is A or G or is absent

SEQ ID NO: 25258 - protein, 38 aa, Artificial Sequence
  GFR-binding peptide
  MOD_RES (33), (34): Xaa is C or S
  MOD_RES (11), (12), (13), (14), (15): Xaa is A or G
  MOD_RES (16), (17), (18), (19): Xaa is A or G or is absent
EVVMDYHYKLXXXXXXXXXKYLISIPSLRAPVXXSAPA

SEQ ID NO: 25259 - protein, 44 aa, Artificial Sequence
  GFR-binding peptide
  MOD_RES (2), (4), (38), (39): Xaa is C or S
  MOD_RES (16), (17), (18), (19), (20): Xaa is A or G
  MOD_RES (21), (22), (23), (24): Xaa is A or G or is absent
RXGXGEVVMDEYKFKXXXXXXXXXLYLMSIPELETPVXXAKPIK

SEQ ID NO: 25260 - protein, 37 aa, Artificial Sequence
  GFR-binding peptide
  MOD_RES (2), (4), (35), (36): Xaa is C or S
SXKXSKVVMEYKFKVKPTRGVLYLISIPELDQPVXXP

SEQ ID NO: 25261 - protein, 36 aa, Artificial Sequence
  GFR-binding peptide
  MOD_RES (32), (33): Xaa is C or S
AEVVMDEYKFKVVNNAADLYLISIPELRAPVXXSAP

SEQ ID NO: 25262 - protein, 34 aa, Artificial Sequence; identical to SEQ ID NO: 4204
  GFR-binding peptide
  MOD_RES (31), (32): Xaa is C or S

SEQ ID NO: 25263 - protein, 33 aa, Artificial Sequence
  GFR-binding peptide
  MOD_RES (1), (3): Xaa is C or S
XKXSKVIMEYKFKIKPTKGILYLISIPELDQSV

SEQ ID NO: 25264 - protein, 37 aa, Artificial Sequence; identical to SEQ ID NO: 4205
  GFR-binding peptide
  MOD_RES (1), (3), (37): Xaa is C or S
  MOD_RES (15), (16), (17), (18), (19): Xaa is A or G
  MOD_RES (20), (21), (22), (23): Xaa is A or G or is absent

SEQ ID NO: 25265 - protein, 38 aa, Artificial Sequence; identical to SEQ ID NO: 4207
  GFR-binding peptide
  MOD_RES (2), (36), (37): Xaa is C or S
  MOD_RES (14), (15), (16), (17), (18): Xaa is A or G
  MOD_RES (19), (20), (21), (22): Xaa is A or G or is absent

SEQ ID NO: 25266 - protein, 40 aa, Artificial Sequence
  GFR-binding peptide
  MOD_RES (2), (4), (36), (37): Xaa is C or S
RXGXESVAMGEYQKYYTVVGKDIYLISIPSLKTPVXXAKS

SEQ ID NO: 25267 - protein, 33 aa, Artificial Sequence
  GFR-binding peptide
  MOD_RES (32), (32): Xaa is C or S
SRVVMNEYKFKIVNSSDDLYLVSIPELKTPAXT

SEQ ID NO: 25268 - protein, 32 aa, Artificial Sequence
  GFR-binding peptide
  MOD_RES (1), (32): Xaa is C or S
XSKVIMEYKFKIKPTKGILYLISIPELDQSVX

SEQ ID NO: 25269 - protein, 37 aa, Artificial Sequence
  GFR-binding peptide
  MOD_RES (34), (35): Xaa is C or S
  MOD_RES (12), (13), (14), (15), (16): Xaa is A or G
  MOD_RES (17), (18), (19), (20): Xaa is A or G or is absent
AEVVMDEYKFKXXXXXXXXXLYLISIPELRAPVXXSA

SEQ ID NO: 25270 - protein, 33 aa, Artificial Sequence; identical to SEQ ID NO: 4211
  GFR-binding peptide
  MOD_RES (33), (33): Xaa is C or S
  MOD_RES (11), (12), (13), (14), (15): Xaa is A or G
  MOD_RES (16), (17), (18), (19): Xaa is A or G or is absent

SEQ ID NO: 25271 - protein, 37 aa, Artificial Sequence
  GFR-binding peptide
  MOD_RES (2), (34), (35): Xaa is C or S
GXGEVVMDEYQKYVVKENEDIYLMSIPSLETPVXXAK

SEQ ID NO: 25272 - protein, 33 aa, Artificial Sequence
  GFR-binding peptide
  MOD_RES (2), (33): Xaa is C or S
KXSKVVMEYKFKVKPTRGVLYLISIPELDQPVX

SEQ ID NO: 25273 - protein, 36 aa, Artificial Sequence; identical to SEQ ID NO: 4213
  GFR-binding peptide
  MOD_RES (2), (35), (36): Xaa is C or S
  MOD_RES (13), (14), (15), (16), (17): Xaa is A or G
  MOD_RES (18), (19), (20), (21): Xaa is A or G or is absent

SEQ ID NO: 25274 - protein, 39 aa, Artificial Sequence
  GFR-binding peptide
  MOD_RES (2), (34): Xaa is C or S
GXSRVVMNEYQKYIVNSSDDIYLVSIPSLKTPAXTPKTV

SEQ ID NO: 25275 - protein, 37 aa, Artificial Sequence; identical to SEQ ID NO: 4215
  GFR-binding peptide
  MOD_RES (1), (35), (36): Xaa is C or S
  MOD_RES (13), (14), (15), (16), (17): Xaa is A or G
  MOD_RES (18), (19), (20), (21): Xaa is A or G or is absent

SEQ ID NO: 25276 - protein, 36 aa, Artificial Sequence
  GFR-binding peptide
  MOD_RES (1), (35), (36): Xaa is C or S
  MOD_RES (13), (14), (15), (16), (17): Xaa is A or G
  MOD_RES (18), (19), (20), (21): Xaa is A or G or is absent
XESVAMGEYKFKXXXXXXXXXLYLISIPELKTPVXX

SEQ ID NO: 25277 - protein, 30 aa, Artificial Sequence; identical to SEQ ID NO: 4217
  GFR-binding peptide

SEQ ID NO: 25278 - protein, 32 aa, Artificial Sequence; identical to SEQ ID NO: 4220
  GFR-binding peptide
  MOD_RES (1), (32): Xaa is C or S

SEQ ID NO: 25279 - protein, 31 aa, Artificial Sequence; identical to SEQ ID NO: 4221
  GFR-binding peptide
  MOD_RES (1), (1): Xaa is C or S

SEQ ID NO: 25280 - protein, 37 aa, Artificial Sequence; identical to SEQ ID NO: 4223
  GFR-binding peptide
  MOD_RES (2), (36), (37): Xaa is C or S
  MOD_RES (14), (15), (16), (17), (18): Xaa is A or G
  MOD_RES (19), (20), (21), (22): Xaa is A or G or is absent

SEQ ID NO: 25281 - protein, 36 aa, Artificial Sequence
  GFR-binding peptide
  MOD_RES (1), (3): Xaa is C or S
  MOD_RES (15), (16), (17), (18), (19): Xaa is A or G
  MOD_RES (20), (21), (22), (23): Xaa is A or G or is absent
XGXESVAMGYHYKLXXXXXXXXXKYLISIPSLKTPV

SEQ ID NO: 25282 - protein, 36 aa, Artificial Sequence; identical to SEQ ID NO: 4224
  GFR-binding peptide
  MOD_RES (2), (4), (35), (36): Xaa is C or S

SEQ ID NO: 25283 - protein, 34 aa, Artificial Sequence
  GFR-binding peptide
  MOD_RES (33), (34): Xaa is C or S
  MOD_RES (11), (12), (13), (14), (15): Xaa is A or G
  MOD_RES (16), (17), (18), (19): Xaa is A or G or is absent
EVVMDEYQKYXXXXXXXXXIYLISIPSLRAPVXX

SEQ ID NO: 25284 - protein, 39 aa, Artificial Sequence
  GFR-binding peptide
  MOD_RES (33), (34): Xaa is C or S
  MOD_RES (11), (12), (13), (14), (15): Xaa is A or G
  MOD_RES (16), (17), (18), (19): Xaa is A or G or is absent
EVVMDYHYKLXXXXXXXXXKYLISIPSLRAPVXXSAPAA

SEQ ID NO: 25285 - protein, 40 aa, Artificial Sequence; identical to SEQ ID NO: 4226
  GFR-binding peptide
  MOD_RES (1), (3), (34), (35): Xaa is C or S

SEQ ID NO: 25286 - protein, 38 aa, Artificial Sequence; identical to SEQ ID NO: 4227
  GFR-binding peptide
  MOD_RES (1), (34), (35): Xaa is C or S
  MOD_RES (12), (13), (14), (15), (16): Xaa is A or G
  MOD_RES (17), (18), (19), (20): Xaa is A or G or is absent

SEQ ID NO: 25287 - protein, 39 aa, Artificial Sequence; identical to SEQ ID NO: 4229
  GFR-binding peptide
  MOD_RES (1), (33), (34): Xaa is C or S

SEQ ID NO: 25288 - protein, 37 aa, Artificial Sequence
  GFR-binding peptide
  MOD_RES (2), (4): Xaa is C or S
  MOD_RES (16), (17), (18), (19), (20): Xaa is A or G
  MOD_RES (21), (22), (23), (24): Xaa is A or G or is absent
RXGXESVAMGEYKFKXXXXXXXXXLYLISIPELKTPV

SEQ ID NO: 25289 - protein, 38 aa, Artificial Sequence
  GFR-binding peptide
  MOD_RES (2), (4), (38): Xaa is C or S
  MOD_RES (16), (17), (18), (19), (20): Xaa is A or G
  MOD_RES (21), (22), (23), (24): Xaa is A or G or is absent
RXGXESVAMGRYKKLXXXXXXXXXFYLISIANLKTPVX

SEQ ID NO: 25290 - protein, 37 aa, Artificial Sequence; identical to SEQ ID NO: 4230
  GFR-binding peptide
  MOD_RES (2), (4), (35), (36): Xaa is C or S

SEQ ID NO: 25291 - protein, 35 aa, Artificial Sequence
  GFR-binding peptide
  MOD_RES (31), (32): Xaa is C or S
RVVMNEYQKYIVNSSDDIYLVSIPSLKTPAXXPKP

SEQ ID NO: 25292 - protein, 39 aa, Artificial Sequence
  GFR-binding peptide
  MOD_RES (1), (34), (35): Xaa is C or S
  MOD_RES (12), (13), (14), (15), (16): Xaa is A or G
  MOD_RES (17), (18), (19), (20): Xaa is A or G or is absent
XSRVIMEYKFKXXXXXXXXXLYLISIPELAQPVXXPAAS

SEQ ID NO: 25293 - protein, 40 aa, Artificial Sequence
  GFR-binding peptide
  MOD_RES (34), (35): Xaa is C or S
  MOD_RES (12), (13), (14), (15), (16): Xaa is A or G
  MOD_RES (17), (18), (19), (20): Xaa is A or G or is absent
AKVVMNEYKFKXXXXXXXXXLYLVSIPELKTPAXXAKPVA

SEQ ID NO: 25294 - protein, 35 aa, Artificial Sequence; identical to SEQ ID NO: 4233
  GFR-binding peptide
  MOD_RES (1), (3), (34), (35): Xaa is C or S

SEQ ID NO: 25295 - protein, 42 aa, Artificial Sequence; identical to SEQ ID NO: 4234
  GFR-binding peptide
  MOD_RES (2), (4), (37), (38): Xaa is C or S
  MOD_RES (15), (16), (17), (18), (19): Xaa is A or G
  MOD_RES (20), (21), (22), (23): Xaa is A or G or is absent

SEQ ID NO: 25296 - protein, 38 aa, Artificial Sequence; identical to SEQ ID NO: 4236
  GFR-binding peptide
  MOD_RES (1), (33), (34): Xaa is C or S

SEQ ID NO: 25297 - protein, 41 aa, Artificial Sequence
  GFR-binding peptide
  MOD_RES (2), (4), (38): Xaa is C or S
  MOD_RES (16), (17), (18), (19), (20): Xaa is A or G
  MOD_RES (21), (22), (23), (24): Xaa is A or G or is absent
HXGXSRVVMNEYKFKXXXXXXXXXLYLVSIPELKTPAXTPK

SEQ ID NO: 25298 - protein, 37 aa, Artificial Sequence; identical to SEQ ID NO: 4246
  GFR-binding peptide
  MOD_RES (2), (35), (36): Xaa is C or S
  MOD_RES (13), (14), (15), (16), (17): Xaa is A or G
  MOD_RES (18), (19), (20), (21): Xaa is A or G or is absent

SEQ ID NO: 25299 - protein, 38 aa, Artificial Sequence; identical to SEQ ID NO: 4249
  GFR-binding peptide
  MOD_RES (1), (33): Xaa is C or S

SEQ ID NO: 25300 - protein, 37 aa, Artificial Sequence
  GFR-binding peptide
  MOD_RES (1), (3), (34), (35): Xaa is C or S
XKXSKVIMEYQKYIKPTKGIIYLISIPSLDQSVXXPS

SEQ ID NO: 25301 - protein, 35 aa, Artificial Sequence
  GFR-binding peptide
  MOD_RES (1), (3), (35): Xaa is C or S
XGXAEVVMDRYKKLVVNNAADFYLISIANLRAPVX

SEQ ID NO: 25302 - protein, 35 aa, Artificial Sequence; identical to SEQ ID NO: 4251
  GFR-binding peptide
  MOD_RES (2), (4), (35): Xaa is C or S

SEQ ID NO: 25303 - protein, 34 aa, Artificial Sequence
  GFR-binding peptide
  MOD_RES (1), (33), (34): Xaa is C or S
XAEVVMDRYKKLVVNNAADFYLISIANLRAPVXX

SEQ ID NO: 25304 - protein, 35 aa, Artificial Sequence; identical to SEQ ID NO: 4252
  GFR-binding peptide
  MOD_RES (1), (3), (35): Xaa is C or S

SEQ ID NO: 25305 - protein, 39 aa, Artificial Sequence
  GFR-binding peptide
  MOD_RES (1), (3), (37), (38): Xaa is C or S
  MOD_RES (15), (16), (17), (18), (19): Xaa is A or G
  MOD_RES (20), (21), (22), (23): Xaa is A or G or is absent
XGXESVAMGRYKKLXXXXXXXXXFYLISIANLKTPVXXA

SEQ ID NO: 25306 - protein, 33 aa, Artificial Sequence
  GFR-binding peptide
  MOD_RES (1), (33): Xaa is C or S
XESVAMGEYKFKYTVVGKDLYLISIPELKTPVX

SEQ ID NO: 25307 - protein, 33 aa, Artificial Sequence
  GFR-binding peptide
  MOD_RES (12), (13), (14), (15), (16): Xaa is A or G
  MOD_RES (17), (18), (19), (20): Xaa is A or G or is absent
AEVVMDEYKFKXXXXXXXXXLYLISIPELRAPV

SEQ ID NO: 25308 - protein, 38 aa, Artificial Sequence
  GFR-binding peptide
  MOD_RES (32), (32): Xaa is C or S
SRVVMNEYQKYIVNSSDDIYLVSIPSLKTPAXTPKTVH

SEQ ID NO: 25309 - protein, 37 aa, Artificial Sequence
  GFR-binding peptide
  MOD_RES (1), (35), (36): Xaa is C or S
  MOD_RES (13), (14), (15), (16), (17): Xaa is A or G
  MOD_RES (18), (19), (20), (21): Xaa is A or G or is absent
XAKVVMNEYQKYXXXXXXXXXIYLVSIPSLKTPAXXA

SEQ ID NO: 25310 - protein, 41 aa, Artificial Sequence; identical to SEQ ID NO: 4256
  GFR-binding peptide
  MOD_RES (2), (4), (36), (37): Xaa is C or S

SEQ ID NO: 25311 - protein, 33 aa, Artificial Sequence
  GFR-binding peptide
  MOD_RES (1), (32), (33): Xaa is C or S
XSKVVMEYQKYVKPTRGVIYLISIPSLDQPVXX

SEQ ID NO: 25312 - protein, 32 aa, Artificial Sequence
  GFR-binding peptide
  MOD_RES (11), (12), (13), (14), (15): Xaa is A or G
  MOD_RES (16), (17), (18), (19): Xaa is A or G or is absent
EVVMDRYKKLXXXXXXXXXFYLISIANLRAPV

SEQ ID NO: 25313 - protein, 39 aa, Artificial Sequence; identical to SEQ ID NO: 4258
  GFR-binding peptide
  MOD_RES (34), (35): Xaa is C or S
  MOD_RES (12), (13), (14), (15), (16): Xaa is A or G
  MOD_RES (17), (18), (19), (20): Xaa is A or G or is absent

SEQ ID NO: 25314 - protein, 39 aa, Artificial Sequence
  GFR-binding peptide
  MOD_RES (34), (35): Xaa is C or S
  MOD_RES (12), (13), (14), (15), (16): Xaa is A or G
  MOD_RES (17), (18), (19), (20): Xaa is A or G or is absent
ESVAMGEYQKYXXXXXXXXXIYLISIPSLKTPVXXAKSA

SEQ ID NO: 25315 - protein, 43 aa, Artificial Sequence
  GFR-binding peptide
  MOD_RES (2), (4), (37), (38): Xaa is C or S
  MOD_RES (15), (16), (17), (18), (19): Xaa is A or G
  MOD_RES (20), (21), (22), (23): Xaa is A or G or is absent
SXKXSKVVMEYQKYXXXXXXXXXIYLISIPSLDQPVXXPSASA

SEQ ID NO: 25316 - protein, 40 aa, Artificial Sequence
  GFR-binding peptide
  MOD_RES (2), (4), (38), (39): Xaa is C or S
  MOD_RES (16), (17), (18), (19), (20): Xaa is A or G
  MOD_RES (21), (22), (23), (24): Xaa is A or G or is absent
RXGXAEVVMDEYKFKXXXXXXXXXLYLISIPELRAPVXXS

SEQ ID NO: 25317 - protein, 39 aa, Artificial Sequence; identical to SEQ ID NO: 4262
  GFR-binding peptide
  MOD_RES (33), (33): Xaa is C or S
  MOD_RES (11), (12), (13), (14), (15): Xaa is A or G
  MOD_RES (16), (17), (18), (19): Xaa is A or G or is absent

SEQ ID NO: 25318 - protein, 34 aa, Artificial Sequence; identical to SEQ ID NO: 4264
  GFR-binding peptide
  MOD_RES (1), (3), (34): Xaa is C or S

SEQ ID NO: 25319 - protein, 37 aa, Artificial Sequence
  GFR-binding peptide
  MOD_RES (33), (34): Xaa is C or S
  MOD_RES (11), (12), (13), (14), (15): Xaa is A or G
  MOD_RES (16), (17), (18), (19): Xaa is A or G or is absent
EVVMDEYQKYXXXXXXXXXIYLMSIPSLETPVXXAKP

SEQ ID NO: 25320 - protein, 35 aa, Artificial Sequence
  GFR-binding peptide
  MOD_RES (2), (33), (34): Xaa is C or S
KXSKVIMEYQKYIKPTKGIIYLISIPSLDQSVXXP

SEQ ID NO: 25321 - protein, 33 aa, Artificial Sequence
  GFR-binding peptide
  MOD_RES (12), (13), (14), (15), (16): Xaa is A or G
  MOD_RES (17), (18), (19), (20): Xaa is A or G or is absent
GEVVMDEYQKYXXXXXXXXXIYLMSIPSLETPV

SEQ ID NO: 25322 - protein, 40 aa, Artificial Sequence
  GFR-binding peptide
  MOD_RES (2), (4), (38), (39): Xaa is C or S
  MOD_RES (16), (17), (18), (19), (20): Xaa is A or G
  MOD_RES (21), (22), (23), (24): Xaa is A or G or is absent
RXGXAEVVMDRYKKLXXXXXXXXXFYLISIANLRAPVXXS

SEQ ID NO: 25323 - protein, 42 aa, Artificial Sequence; identical to SEQ ID NO: 4274
  GFR-binding peptide
  MOD_RES (2), (4), (37), (38): Xaa is C or S

SEQ ID NO: 25324 - protein, 38 aa, Artificial Sequence
  GFR-binding peptide
  MOD_RES (2), (34), (35): Xaa is C or S
GXAKVVMNEYKFKIVNNSSDLYLVSIPELKTPAXXAKP

SEQ ID NO: 25325 - protein, 36 aa, Artificial Sequence; identical to SEQ ID NO: 4276
  GFR-binding peptide
  MOD_RES (1), (35): Xaa is C or S
  MOD_RES (13), (14), (15), (16), (17): Xaa is A or G
  MOD_RES (18), (19), (20), (21): Xaa is A or G or is absent

SEQ ID NO: 25326 - protein, 34 aa, Artificial Sequence; identical to SEQ ID NO: 4277
  GFR-binding peptide
  MOD_RES (1), (1): Xaa is C or S
  MOD_RES (13), (14), (15), (16), (17): Xaa is A or G
  MOD_RES (18), (19), (20), (21): Xaa is A or G or is absent

SEQ ID NO: 25327 - protein, 38 aa, Artificial Sequence
  GFR-binding peptide
  MOD_RES (32), (33): Xaa is C or S
SRVVMNEYQKYIVNSSDDIYLVSIPSLKTPAXXPKPVY

SEQ ID NO: 25328 - protein, 33 aa, Artificial Sequence; identical to SEQ ID NO: 4281
  GFR-binding peptide
  MOD_RES (31), (31): Xaa is C or S

SEQ ID NO: 25329 - protein, 34 aa, Artificial Sequence
  GFR-binding peptide
  MOD_RES (1), (3): Xaa is C or S
XGXAEVVMDEYQKYVVNNAADIYLISIPSLRAPV

SEQ ID NO: 25330 - protein, 44 aa, Artificial Sequence; identical to SEQ ID NO: 4282
  GFR-binding peptide
  MOD_RES (2), (4), (38), (39): Xaa is C or S
  MOD_RES (16), (17), (18), (19), (20): Xaa is A or G
  MOD_RES (21), (22), (23), (24): Xaa is A or G or is absent

SEQ ID NO: 25331 - protein, 38 aa, Artificial Sequence
  GFR-binding peptide
  MOD_RES (32), (33): Xaa is C or S
ESVAMGRYKKLYTVVGKDFYLISIANLKTPVXXAKSAK

SEQ ID NO: 25332 - protein, 41 aa, Artificial Sequence
  GFR-binding peptide
  MOD_RES (1), (3), (35), (36): Xaa is C or S
XGXGEVVMEEYQKYVVKDYEDIYLMSIPSLETPVXXAKPIS

SEQ ID NO: 25333 - protein, 32 aa, Artificial Sequence
  GFR-binding peptide
  MOD_RES (1), (1): Xaa is C or S
XARVVMNEYQKYIVNSSDDIYLVSIPSLQTPA

SEQ ID NO: 25334 - protein, 39 aa, Artificial Sequence
  GFR-binding peptide
  MOD_RES (1), (33), (34): Xaa is C or S
XGEVVMDEYKFKVVKENEDLYLMSIPELETPVXXAKPIK

SEQ ID NO: 25335 - protein, 42 aa, Artificial Sequence
  GFR-binding peptide
  MOD_RES (2), (4), (36), (37): Xaa is C or S
RXGXGEVVMDEYQKYVVKENEDIYLMSIPSLETPVXXAKPIK

SEQ ID NO: 25336 - protein, 43 aa, Artificial Sequence; identical to SEQ ID NO: 4288
  GFR-binding peptide
  MOD_RES (1), (3), (37), (38): Xaa is C or S
  MOD_RES (15), (16), (17), (18), (19): Xaa is A or G
  MOD_RES (20), (21), (22), (23): Xaa is A or G or is absent

SEQ ID NO: 25337 - protein, 35 aa, Artificial Sequence
  GFR-binding peptide
  MOD_RES (32), (32): Xaa is C or S
SRVVMNEYQKYIVNSSDDIYLVSIPSLKTPAXTPK

SEQ ID NO: 25338 - protein, 38 aa, Artificial Sequence
  GFR-binding peptide
  MOD_RES (2), (33), (34): Xaa is C or S
KXSKVVMEYQKYVKPTRGVIYLISIPSLDQPVXXPSAS

SEQ ID NO: 25339 - protein, 40 aa, Artificial Sequence; identical to SEQ ID NO: 4290
  GFR-binding peptide
  MOD_RES (2), (35), (36): Xaa is C or S
  MOD_RES (13), (14), (15), (16), (17): Xaa is A or G
  MOD_RES (18), (19), (20), (21): Xaa is A or G or is absent

SEQ ID NO: 25340 - protein, 44 aa, Artificial Sequence
  GFR-binding peptide
  MOD_RES (2), (4), (38), (39): Xaa is C or S
  MOD_RES (16), (17), (18), (19), (20): Xaa is A or G
  MOD_RES (21), (22), (23), (24): Xaa is A or G or is absent
HXGXAKVVMNEYKFKXXXXXXXXXLYLVSIPELKTPAXXAKPVA

SEQ ID NO: 25341 - protein, 37 aa, Artificial Sequence
  GFR-binding peptide
  MOD_RES (33), (34): Xaa is C or S
  MOD_RES (11), (12), (13), (14), (15): Xaa is A or G
  MOD_RES (16), (17), (18), (19): Xaa is A or G or is absent
SKVVMEYKFKXXXXXXXXXLYLISIPELDQPVXXPSA

SEQ ID NO: 25342 - protein, 35 aa, Artificial Sequence
  GFR-binding peptide
  MOD_RES (31), (32): Xaa is C or S
SKVIMEYKFKIKPTKGILYLISIPELDQSVXXPSA

SEQ ID NO: 25343 - protein, 37 aa, Artificial Sequence; identical to SEQ ID NO: 4292
  GFR-binding peptide
  MOD_RES (34), (35): Xaa is C or S
  MOD_RES (12), (13), (14), (15), (16): Xaa is A or G
  MOD_RES (17), (18), (19), (20): Xaa is A or G or is absent

SEQ ID NO: 25344 - protein, 41 aa, Artificial Sequence; identical to SEQ ID NO: 4293
  GFR-binding peptide
  MOD_RES (2), (37), (38): Xaa is C or S
  MOD_RES (15), (16), (17), (18), (19): Xaa is A or G
  MOD_RES (20), (21), (22), (23): Xaa is A or G or is absent

SEQ ID NO: 25345 - protein, 36 aa, Artificial Sequence
  GFR-binding peptide
  MOD_RES (2), (34), (35): Xaa is C or S
GXESVAMGEYKFKYTVVGKDLYLISIPELKTPVXXA

SEQ ID NO: 25346 - protein, 36 aa, Artificial Sequence
  GFR-binding peptide
  MOD_RES (32), (33): Xaa is C or S
ESVAMGEYQKYYTVVGKDIYLISIPSLKTPVXXAKS

SEQ ID NO: 25347 - protein, 38 aa, Artificial Sequence; identical to SEQ ID NO: 4294
  GFR-binding peptide
  MOD_RES (33), (34): Xaa is C or S
  MOD_RES (11), (12), (13), (14), (15): Xaa is A or G
  MOD_RES (16), (17), (18), (19): Xaa is A or G or is absent

SEQ ID NO: 25348 - protein, 33 aa, Artificial Sequence; identical to SEQ ID NO: 4295
  GFR-binding peptide
  MOD_RES (2), (33): Xaa is C or S

SEQ ID NO: 25349 - protein, 40 aa, Artificial Sequence
  GFR-binding peptide
  MOD_RES (1), (3), (35), (36): Xaa is C or S
XGXAEVVMDEYQKYVVNNAADIYLISIPSLRAPVXXSAPA

SEQ ID NO: 25350 - protein, 39 aa, Artificial Sequence; identical to SEQ ID NO: 4297
  GFR-binding peptide
  MOD_RES (2), (4), (38), (39): Xaa is C or S
  MOD_RES (16), (17), (18), (19), (20): Xaa is A or G
  MOD_RES (21), (22), (23), (24): Xaa is A or G or is absent

SEQ ID NO: 25351 - protein, 43 aa, Artificial Sequence
  GFR-binding peptide
  MOD_RES (2), (4), (38), (39): Xaa is C or S
  MOD_RES (16), (17), (18), (19), (20): Xaa is A or G
  MOD_RES (21), (22), (23), (24): Xaa is A or G or is absent
RXGXESVAMGEYKFKXXXXXXXXXLYLISIPELKTPVXXAKSA

SEQ ID NO: 25352 - protein, 38 aa, Artificial Sequence
  GFR-binding peptide
  MOD_RES (1), (3), (34), (35): Xaa is C or S
XKXSKVVMEYQKYVKPTRGVIYLISIPSLDQPVXXPSA

SEQ ID NO: 25353 - protein, 37 aa, Artificial Sequence
  GFR-binding peptide
  MOD_RES (1), (3), (36), (37): Xaa is C or S
  MOD_RES (14), (15), (16), (17), (18): Xaa is A or G
  MOD_RES (19), (20), (21), (22): Xaa is A or G or is absent
XKXSKVIMEYKFKXXXXXXXXXLYLISIPELDQSVXX

SEQ ID NO: 25354 - protein, 33 aa, Artificial Sequence; identical to SEQ ID NO: 4298
  GFR-binding peptide
  MOD_RES (2), (33): Xaa is C or S

SEQ ID NO: 25355 - protein, 37 aa, Artificial Sequence; identical to SEQ ID NO: 4299
  GFR-binding peptide
  MOD_RES (2), (36), (37): Xaa is C or S
  MOD_RES (14), (15), (16), (17), (18): Xaa is A or G
  MOD_RES (19), (20), (21), (22): Xaa is A or G or is absent

SEQ ID NO: 25356 - protein, 33 aa, Artificial Sequence
  GFR-binding peptide
  MOD_RES (2), (2): Xaa is C or S
GXGEVVMEEYQKYVVKDYEDIYLMSIPSLETPV

SEQ ID NO: 25357 - protein, 33 aa, Artificial Sequence
  GFR-binding peptide
  MOD_RES (31), (32): Xaa is C or S
EVVMDEYKFKVVKENEDLYLMSIPELETPVXXA

SEQ ID NO: 25358 - protein, 34 aa, Artificial Sequence
  GFR-binding peptide
  MOD_RES (31), (32): Xaa is C or S
SKVVMEYQKYVKPTRGVIYLISIPSLDQPVXXPS

SEQ ID NO: 25359 - protein, 40 aa, Artificial Sequence; identical to SEQ ID NO: 4301
  GFR-binding peptide
  MOD_RES (2), (34): Xaa is C or S

SEQ ID NO: 25360 - protein, 36 aa, Artificial Sequence; identical to SEQ ID NO: 4302
  GFR-binding peptide
  MOD_RES (34), (35): Xaa is C or S
  MOD_RES (12), (13), (14), (15), (16): Xaa is A or G
  MOD_RES (17), (18), (19), (20): Xaa is A or G or is absent

SEQ ID NO: 25361 - protein, 40 aa, Artificial Sequence; identical to SEQ ID NO: 4305
  GFR-binding peptide
  MOD_RES (2), (4), (36), (37): Xaa is C or S

SEQ ID NO: 25362 - protein, 31 aa, Artificial Sequence
  GFR-binding peptide
  MOD_RES (31), (31): Xaa is C or S
SVAMGEYKFKYTVVGKDLYLISIPELKTPVX

SEQ ID NO: 25363 - protein, 32 aa, Artificial Sequence; identical to SEQ ID NO: 4308
  GFR-binding peptide
  MOD_RES (31), (32): Xaa is C or S

SEQ ID NO: 25364 - protein, 41 aa, Artificial Sequence; identical to SEQ ID NO: 4311
  GFR-binding peptide
  MOD_RES (1), (35), (36): Xaa is C or S
  MOD_RES (13), (14), (15), (16), (17): Xaa is A or G
  MOD_RES (18), (19), (20), (21): Xaa is A or G or is absent

SEQ ID NO: 25365 - protein, 32 aa, Artificial Sequence; identical to SEQ ID NO: 4313
  GFR-binding peptide
  MOD_RES (1), (1): Xaa is C or S

SEQ ID NO: 25366 - protein, 34 aa, Artificial Sequence
  GFR-binding peptide
  MOD_RES (34), (34): Xaa is C or S
  MOD_RES (12), (13), (14), (15), (16): Xaa is A or G
  MOD_RES (17), (18), (19), (20): Xaa is A or G or is absent
SRVVMNEYQKYXXXXXXXXXIYLVSIPSLKTPAX

SEQ ID NO: 25367 - protein, 39 aa, Artificial Sequence
  GFR-binding peptide
  MOD_RES (2), (4), (38), (39): Xaa is C or S
  MOD_RES (16), (17), (18), (19), (20): Xaa is A or G
  MOD_RES (21), (22), (23), (24): Xaa is A or G or is absent
RXGXGEVVMEEYKFKXXXXXXXXXLYLMSIPELETPVXX

SEQ ID NO: 25368 - protein, 38 aa, Artificial Sequence; identical to SEQ ID NO: 4316
  GFR-binding peptide
  MOD_RES (1), (3), (35), (36): Xaa is C or S

SEQ ID NO: 25369 - protein, 42 aa, Artificial Sequence
  GFR-binding peptide
  MOD_RES (2), (4), (38), (39): Xaa is C or S
  MOD_RES (16), (17), (18), (19), (20): Xaa is A or G
  MOD_RES (21), (22), (23), (24): Xaa is A or G or is absent
RXGXGEVVMDEYKFKXXXXXXXXXLYLMSIPELETPVXXAKP

SEQ ID NO: 25370 - protein, 39 aa, Artificial Sequence; identical to SEQ ID NO: 4317
  GFR-binding peptide
  MOD_RES (35), (36): Xaa is C or S
  MOD_RES (13), (14), (15), (16), (17): Xaa is A or G
  MOD_RES (18), (19), (20), (21): Xaa is A or G or is absent

SEQ ID NO: 25371 - protein, 32 aa, Artificial Sequence
  GFR-binding peptide
  MOD_RES (11), (12), (13), (14), (15): Xaa is A or G
  MOD_RES (16), (17), (18), (19): Xaa is A or G or is absent
RVVMNEYQKYXXXXXXXXXIYLVSIPSLQTPA

SEQ ID NO: 25372 - protein, 39 aa, Artificial Sequence
  GFR-binding peptide
  MOD_RES (2), (34), (35): Xaa is C or S
GXARVVMNEYKFKIVNSSDDLYLVSIPELQTPAXXPKPV

SEQ ID NO: 25373 - protein, 41 aa, Artificial Sequence; identical to SEQ ID NO: 4318
  GFR-binding peptide
  MOD_RES (1), (35): Xaa is C or S
  MOD_RES (13), (14), (15), (16), (17): Xaa is A or G
  MOD_RES (18), (19), (20), (21): Xaa is A or G or is absent

SEQ ID NO: 25374 - protein, 38 aa, Artificial Sequence
  GFR-binding peptide
  MOD_RES (1), (35), (36): Xaa is C or S
  MOD_RES (13), (14), (15), (16), (17): Xaa is A or G
  MOD_RES (18), (19), (20), (21): Xaa is A or G or is absent
XESVAMGYHYKLXXXXXXXXXKYLISIPSLKTPVXXAK

SEQ ID NO: 25375 - protein, 38 aa, Artificial Sequence
  GFR-binding peptide
  MOD_RES (2), (4), (36), (37): Xaa is C or S
HXGXARVVMNEYQKYIVNSSDDIYLVSIPSLQTPAXXP

SEQ ID NO: 25376 - protein, 36 aa, Artificial Sequence; identical to SEQ ID NO: 4320
  GFR-binding peptide
  MOD_RES (2), (36): Xaa is C or S
  MOD_RES (14), (15), (16), (17), (18): Xaa is A or G
  MOD_RES (19), (20), (21), (22): Xaa is A or G or is absent

SEQ ID NO: 25377 - protein, 32 aa, Artificial Sequence
  GFR-binding peptide
  MOD_RES (31), (32): Xaa is C or S
RVVMNEYKFKIVNSSDDLYLVSIPELQTPAXX

SEQ ID NO: 25378 - protein, 39 aa, Artificial Sequence
  GFR-binding peptide
  MOD_RES (2), (4), (35), (36): Xaa is C or S
SXKXSRVIMEYQKYVKPKRGVIYLISIPSLAQPVXXPAA

SEQ ID NO: 25379 - protein, 38 aa, Artificial Sequence; identical to SEQ ID NO: 4321
  GFR-binding peptide
  MOD_RES (1), (35): Xaa is C or S
  MOD_RES (13), (14), (15), (16), (17): Xaa is A or G
  MOD_RES (18), (19), (20), (21): Xaa is A or G or is absent

SEQ ID NO: 25380 - protein, 39 aa, Artificial Sequence
  GFR-binding peptide
  MOD_RES (34), (35): Xaa is C or S
  MOD_RES (12), (13), (14), (15), (16): Xaa is A or G
  MOD_RES (17), (18), (19), (20): Xaa is A or G or is absent
ARVVMNEYKFKXXXXXXXXXLYLVSIPELQTPAXXPKPV

SEQ ID NO: 25381 - protein, 40 aa, Artificial Sequence
  GFR-binding peptide
  MOD_RES (1), (34), (35): Xaa is C or S
XEAVSMGEEYQKYTPVGMDDIYLVSIPSLKTPVXXAKGVK

SEQ ID NO: 25382 - protein, 39 aa, Artificial Sequence
  GFR-binding peptide
  MOD_RES (2), (36), (37): Xaa is C or S
  MOD_RES (14), (15), (16), (17), (18): Xaa is A or G
  MOD_RES (19), (20), (21), (22): Xaa is A or G or is absent
GXGEVVMDEYQKYXXXXXXXXXIYLMSIPSLETPVXXAK

SEQ ID NO: 25383 - protein, 38 aa, Artificial Sequence; identical to SEQ ID NO: 4324
  GFR-binding peptide
  MOD_RES (2), (34), (35): Xaa is C or S

SEQ ID NO: 25384 - protein, 37 aa, Artificial Sequence
  GFR-binding peptide
  MOD_RES (1), (33), (34): Xaa is C or S
XESVAMGYHYKLYTVVGKDKYLISIPSLKTPVXXAKS

SEQ ID NO: 25385 - protein, 37 aa, Artificial Sequence; identical to SEQ ID NO: 4325
  GFR-binding peptide
  MOD_RES (31), (32): Xaa is C or S

SEQ ID NO: 25386 - protein, 33 aa, Artificial Sequence; identical to SEQ ID NO: 4326
  GFR-binding peptide
  MOD_RES (31), (32): Xaa is C or S

SEQ ID NO: 25387 - protein, 38 aa, Artificial Sequence
  GFR-binding peptide
  MOD_RES (2), (33), (34): Xaa is C or S
KXSRVIMEYKFKVKPKRGVLYLISIPELAQPVXXPAAS

SEQ ID NO: 25388 - protein, 38 aa, Artificial Sequence; identical to SEQ ID NO: 4328
  GFR-binding peptide
  MOD_RES (1), (3), (36), (37): Xaa is C or S
  MOD_RES (14), (15), (16), (17), (18): Xaa is A or G
  MOD_RES (19), (20), (21), (22): Xaa is A or G or is absent

SEQ ID NO: 25389 - protein, 37 aa, Artificial Sequence
  GFR-binding peptide
  MOD_RES (31), (32): Xaa is C or S
RVVMNEYQKYIVNSSDDIYLVSIPSLKTPAXXPKPVY

SEQ ID NO: 25390 - protein, 38 aa, Artificial Sequence
  GFR-binding peptide
  MOD_RES (33), (34): Xaa is C or S
  MOD_RES (11), (12), (13), (14), (15): Xaa is A or G
  MOD_RES (16), (17), (18), (19): Xaa is A or G or is absent
SVAMGEYKFKXXXXXXXXXLYLISIPELKTPVXXAKSA

SEQ ID NO: 25391 - protein, 38 aa, Artificial Sequence; identical to SEQ ID NO: 4329
  GFR-binding peptide
  MOD_RES (1), (33), (34): Xaa is C or S

SEQ ID NO: 25392 - protein, 37 aa, Artificial Sequence; identical to SEQ ID NO: 4330
  GFR-binding peptide
  MOD_RES (2), (4), (35), (36): Xaa is C or S

SEQ ID NO: 25393 - protein, 35 aa, Artificial Sequence; identical to SEQ ID NO: 4331
  GFR-binding peptide
  MOD_RES (34), (35): Xaa is C or S
  MOD_RES (12), (13), (14), (15), (16): Xaa is A or G
  MOD_RES (17), (18), (19), (20): Xaa is A or G or is absent

SEQ ID NO: 25394 - protein, 39 aa, Artificial Sequence
  GFR-binding peptide
  MOD_RES (34), (35): Xaa is C or S
  MOD_RES (12), (13), (14), (15), (16): Xaa is A or G
  MOD_RES (17), (18), (19), (20): Xaa is A or G or is absent
GEVVMDEYKFKXXXXXXXXXLYLMSIPELETPVXXAKPI

SEQ ID NO: 25395 - protein, 38 aa, Artificial Sequence
  GFR-binding peptide
  MOD_RES (34), (35): Xaa is C or S
  MOD_RES (12), (13), (14), (15), (16): Xaa is A or G
  MOD_RES (17), (18), (19), (20): Xaa is A or G or is absent
ARVVMNEYQKYXXXXXXXXXIYLVSIPSLQTPAXXPKP

SEQ ID NO: 25396 - protein, 37 aa, Artificial Sequence
  GFR-binding peptide
  MOD_RES (34), (35): Xaa is C or S
  MOD_RES (12), (13), (14), (15), (16): Xaa is A or G
  MOD_RES (17), (18), (19), (20): Xaa is A or G or is absent
ARVVMNEYKFKXXXXXXXXXLYLVSIPELQTPAXXPK

SEQ ID NO: 25397 - protein, 35 aa, Artificial Sequence
  GFR-binding peptide
  MOD_RES (1), (35): Xaa is C or S
  MOD_RES (13), (14), (15), (16), (17): Xaa is A or G
  MOD_RES (18), (19), (20), (21): Xaa is A or G or is absent
XGEVVMDEYKFKXXXXXXXXXLYLMSIPELETPVX

SEQ ID NO: 25398 - protein, 33 aa, Artificial Sequence; identical to SEQ ID NO: 4335
  GFR-binding peptide
  MOD_RES (1), (1): Xaa is C or S
  MOD_RES (12), (13), (14), (15), (16): Xaa is A or G
  MOD_RES (17), (18), (19), (20): Xaa is A or G or is absent

SEQ ID NO: 25399 - protein, 36 aa, Artificial Sequence
  GFR-binding peptide
  MOD_RES (1), (33), (34): Xaa is C or S
XGEVVMEEYKFKVVKDYEDLYLMSIPELETPVXXAK

SEQ ID NO: 25400 - protein, 34 aa, Artificial Sequence; identical to SEQ ID NO: 4338
  GFR-binding peptide
  MOD_RES (1), (34): Xaa is C or S
  MOD_RES (12), (13), (14), (15), (16): Xaa is A or G
  MOD_RES (17), (18), (19), (20): Xaa is A or G or is absent

SEQ ID NO: 25401 - protein, 36 aa, Artificial Sequence; identical to SEQ ID NO: 4339
  GFR-binding peptide
  MOD_RES (32), (33): Xaa is C or S

SEQ ID NO: 25402 - protein, 36 aa, Artificial Sequence; identical to SEQ ID NO: 4342
  GFR-binding peptide
  MOD_RES (2), (34), (35): Xaa is C or S

SEQ ID NO: 25403 - protein, 36 aa, Artificial Sequence; identical to SEQ ID NO: 4344
  GFR-binding peptide
  MOD_RES (1), (32), (33): Xaa is C or S

SEQ ID NO: 25404 - protein, 38 aa, Artificial Sequence
  GFR-binding peptide
  MOD_RES (2), (34), (35): Xaa is C or S
GXSRVVMNEYKFKIVNSSDDLYLVSIPELKTPAXXPKP

SEQ ID NO: 25405 - protein, 31 aa, Artificial Sequence
  GFR-binding peptide
AEVVMDYHYKLVVNNAADKYLISIPSLRAPV

SEQ ID NO: 25406 - protein, 40 aa, Artificial Sequence; identical to SEQ ID NO: 4347
  GFR-binding peptide
  MOD_RES (2), (4), (37), (38): Xaa is C or S
  MOD_RES (15), (16), (17), (18), (19): Xaa is A or G
  MOD_RES (20), (21), (22), (23): Xaa is A or G or is absent

SEQ ID NO: 25407 - protein, 31 aa, Artificial Sequence
  GFR-binding peptide
  MOD_RES (31), (31): Xaa is C or S
EVVMDEYKFKVVKENEDLYLMSIPELETPVX

SEQ ID NO: 25408 - protein, 33 aa, Artificial Sequence; identical to SEQ ID NO: 4350
  GFR-binding peptide
  MOD_RES (33), (33): Xaa is C or S
  MOD_RES (11), (12), (13), (14), (15): Xaa is A or G
  MOD_RES (16), (17), (18), (19): Xaa is A or G or is absent

SEQ ID NO: 25409 - protein, 34 aa, Artificial Sequence; identical to SEQ ID NO: 4351
  GFR-binding peptide
  MOD_RES (1), (32), (33): Xaa is C or S

SEQ ID NO: 25410 - protein, 37 aa, Artificial Sequence; identical to SEQ ID NO: 4353
  GFR-binding peptide
  MOD_RES (2), (4), (36), (37): Xaa is C or S

SEQ ID NO: 25411 - protein, 40 aa, Artificial Sequence
  GFR-binding peptide
  MOD_RES (2), (4), (35), (36): Xaa is C or S
SXKXSKVVMEYQKYVKPTRGVIYLISIPSLDQPVXXPSAS

SEQ ID NO: 25412 - protein, 37 aa, Artificial Sequence
  GFR-binding peptide
  MOD_RES (32), (33): Xaa is C or S
AEVVMDYHYKLVVNNAADKYLISIPSLRAPVXXSAPA

SEQ ID NO: 25413 - protein, 37 aa, Artificial Sequence; identical to SEQ ID NO: 4357
  GFR-binding peptide
  MOD_RES (2), (4): Xaa is C or S
  MOD_RES (16), (17), (18), (19), (20): Xaa is A or G
  MOD_RES (21), (22), (23), (24): Xaa is A or G or is absent

SEQ ID NO: 25414 - protein, 39 aa, Artificial Sequence
  GFR-binding peptide
  MOD_RES (33), (34): Xaa is C or S
  MOD_RES (11), (12), (13), (14), (15): Xaa is A or G
  MOD_RES (16), (17), (18), (19): Xaa is A or G or is absent
SRVIMEYQKYXXXXXXXXXIYLISIPSLAQPVXXPAASA

SEQ ID NO: 25415 - protein, 42 aa, Artificial Sequence; identical to SEQ ID NO: 4359
  GFR-binding peptide
  MOD_RES (2), (4), (38), (39): Xaa is C or S
  MOD_RES (16), (17), (18), (19), (20): Xaa is A or G
  MOD_RES (21), (22), (23), (24): Xaa is A or G or is absent

SEQ ID NO: 25416 - protein, 42 aa, Artificial Sequence; identical to SEQ ID NO: 4360
  GFR-binding peptide
  MOD_RES (2), (36), (37): Xaa is C or S
  MOD_RES (14), (15), (16), (17), (18): Xaa is A or G
  MOD_RES (19), (20), (21), (22): Xaa is A or G or is absent

SEQ ID NO: 25417 - protein, 35 aa, Artificial Sequence; identical to SEQ ID NO: 4361
  GFR-binding peptide
  MOD_RES (31), (32): Xaa is C or S

SEQ ID NO: 25418 - protein, 32 aa, Artificial Sequence; identical to SEQ ID NO: 4362
  GFR-binding peptide
  MOD_RES (32), (32): Xaa is C or S

SEQ ID NO: 25419 - protein, 40 aa, Artificial Sequence; identical to SEQ ID NO: 4363
  GFR-binding peptide
  MOD_RES (1), (3), (35), (36): Xaa is C or S

SEQ ID NO: 25420 - protein, 31 aa, Artificial Sequence
  GFR-binding peptide
GEVVMDEYKFKVVKENEDLYLMSIPELETPV

SEQ ID NO: 25421 - protein, 36 aa, Artificial Sequence
  GFR-binding peptide
  MOD_RES (2), (34), (35): Xaa is C or S
GXESVAMGRYKKLYTVVGKDFYLISIANLKTPVXXA

SEQ ID NO: 25422 - protein, 38 aa, Artificial Sequence
  GFR-binding peptide
  MOD_RES (32), (33): Xaa is C or S
ARVVMNEYKFKIVNSSDDLYLVSIPELQTPAXXPKPVT

SEQ ID NO: 25423 - protein, 41 aa, Artificial Sequence
  GFR-binding peptide
  MOD_RES (2), (36), (37): Xaa is C or S
  MOD_RES (14), (15), (16), (17), (18): Xaa is A or G
  MOD_RES (19), (20), (21), (22): Xaa is A or G or is absent
GXGEVVMDEYKFKXXXXXXXXXLYLMSIPELETPVXXAKPI

SEQ ID NO: 25424 - protein, 38 aa, Artificial Sequence
  GFR-binding peptide
  MOD_RES (1), (35), (36): Xaa is C or S
  MOD_RES (13), (14), (15), (16), (17): Xaa is A or G
  MOD_RES (18), (19), (20), (21): Xaa is A or G or is absent
XESVAMGEYQKYXXXXXXXXXIYLISIPSLKTPVXXAK

SEQ ID NO: 25425 - protein, 38 aa, Artificial Sequence
  GFR-binding peptide
  MOD_RES (1), (3), (35), (36): Xaa is C or S
XGXESVAMGRYKKLYTVVGKDFYLISIANLKTPVXXAK

SEQ ID NO: 25426 - protein, 37 aa, Artificial Sequence
  GFR-binding peptide
  MOD_RES (1), (3), (35), (36): Xaa is C or S
XGXAKVVMNEYQKYIVNNSSDIYLVSIPSLKTPAXXA

SEQ ID NO: 25427 - protein, 40 aa, Artificial Sequence
  GFR-binding peptide
  MOD_RES (1), (3), (37), (38): Xaa is C or S
  MOD_RES (15), (16), (17), (18), (19): Xaa is A or G
  MOD_RES (20), (21), (22), (23): Xaa is A or G or is absent
XGXSRVVMNEYKFKXXXXXXXXXLYLVSIPELKTPAXXPK

SEQ ID NO: 25428 - protein, 42 aa, Artificial Sequence
  GFR-binding peptide
  MOD_RES (2), (36), (37): Xaa is C or S
  MOD_RES (14), (15), (16), (17), (18): Xaa is A or G
  MOD_RES (19), (20), (21), (22): Xaa is A or G or is absent
GXAEVVMDEYQKYXXXXXXXXXIYLISIPSLRAPVXXSAPAA

SEQ ID NO: 25429 - protein, 40 aa, Artificial Sequence
  GFR-binding peptide
  MOD_RES (1), (3), (35), (36): Xaa is C or S
XGXGEVVMDEYQKYVVKENEDIYLMSIPSLETPVXXAKPI

SEQ ID NO: 25430 - protein, 42 aa, Artificial Sequence
  GFR-binding peptide
  MOD_RES (2), (4), (36), (37): Xaa is C or S
RXGXAEVVMDRYKKLVVNNAADFYLISIANLRAPVXXSAPAA

SEQ ID NO: 25431 - protein, 31 aa, Artificial Sequence
  GFR-binding peptide
  MOD_RES (31), (31): Xaa is C or S
RVVMNEYQKYIVNSSDDIYLVSIPSLKTPAX

SEQ ID NO: 25432 - protein, 35 aa, Artificial Sequence
  GFR-binding peptide
  MOD_RES (34), (35): Xaa is C or S
  MOD_RES (12), (13), (14), (15), (16): Xaa is A or G
  MOD_RES (17), (18), (19), (20): Xaa is A or G or is absent
ESVAMGEYKFKXXXXXXXXXLYLISIPELKTPVXX

SEQ ID NO: 25433 - protein, 38 aa, Artificial Sequence
  GFR-binding peptide
  MOD_RES (32), (33): Xaa is C or S
ESVAMGEYKFKYTVVGKDLYLISIPELKTPVXXAKSAK

SEQ ID NO: 25434 - protein, 39 aa, Artificial Sequence
  GFR-binding peptide
  MOD_RES (2), (36), (37): Xaa is C or S
  MOD_RES (14), (15), (16), (17), (18): Xaa is A or G
  MOD_RES (19), (20), (21), (22): Xaa is A or G or is absent
GXESVAMGEYQKYXXXXXXXXXIYLISIPSLKTPVXXAK

SEQ ID NO: 25435 - protein, 41 aa, Artificial Sequence
  GFR-binding peptide
  MOD_RES (2), (4), (38), (39): Xaa is C or S
  MOD_RES (16), (17), (18), (19), (20): Xaa is A or G
  MOD_RES (21), (22), (23), (24): Xaa is A or G or is absent
HXGXARVVMNEYKFKXXXXXXXXXLYLVSIPELQTPAXXPK

SEQ ID NO: 25436 - protein, 35 aa, Artificial Sequence; identical to SEQ ID NO: 4372
  GFR-binding peptide
  MOD_RES (35), (35): Xaa is C or S
  MOD_RES (13), (14), (15), (16), (17): Xaa is A or G
  MOD_RES (18), (19), (20), (21): Xaa is A or G or is absent

SEQ ID NO: 25437 - protein, 31 aa, Artificial Sequence
  GFR-binding peptide
  MOD_RES (31), (31): Xaa is C or S
EVVMDEYQKYVVNNAADIYLISIPSLRAPVX

SEQ ID NO: 25438 - protein, 35 aa, Artificial Sequence
  GFR-binding peptide
  MOD_RES (1), (35): Xaa is C or S
  MOD_RES (13), (14), (15), (16), (17): Xaa is A or G
  MOD_RES (18), (19), (20), (21): Xaa is A or G or is absent
XAEVVMDYHYKLXXXXXXXXXKYLISIPSLRAPVX

SEQ ID NO: 25439 - protein, 33 aa, Artificial Sequence
  GFR-binding peptide
  MOD_RES (33), (33): Xaa is C or S
  MOD_RES (11), (12), (13), (14), (15): Xaa is A or G
  MOD_RES (16), (17), (18), (19): Xaa is A or G or is absent
EVVMEEYQKYXXXXXXXXXIYLMSIPSLETPVX

SEQ ID NO: 25440 - protein, 35 aa, Artificial Sequence
  GFR-binding peptide
  MOD_RES (1), (1): Xaa is C or S
  MOD_RES (14), (15), (16), (17), (18): Xaa is A or G
  MOD_RES (19), (20), (21), (22): Xaa is A or G or is absent
XEAVSMGEEYKFKXXXXXXXXXLYLVSIPELKTPV

SEQ ID NO: 25441 - protein, 40 aa, Artificial Sequence; identical to SEQ ID NO: 4376
  GFR-binding peptide
  MOD_RES (2), (34), (35): Xaa is C or S

SEQ ID NO: 25442 - protein, 36 aa, Artificial Sequence
  GFR-binding peptide
  MOD_RES (1), (3), (34), (35): Xaa is C or S
XKXSKVVMEYKFKVKPTRGVLYLISIPELDQPVXXP

SEQ ID NO: 25443 - protein, 40 aa, Artificial Sequence
  GFR-binding peptide
  MOD_RES (1), (3), (34), (35): Xaa is C or S
XKXSRVIMEYKFKVKPKRGVLYLISIPELAQPVXXPAASA

SEQ ID NO: 25444 - protein, 41 aa, Artificial Sequence
  GFR-binding peptide
  MOD_RES (1), (3), (38), (39): Xaa is C or S
  MOD_RES (16), (17), (18), (19), (20): Xaa is A or G
  MOD_RES (21), (22), (23), (24): Xaa is A or G or is absent
XGXEAVSMGEEYQKYXXXXXXXXXIYLVSIPSLKTPVXXAK

SEQ ID NO: 25445 - protein, 36 aa, Artificial Sequence
  GFR-binding peptide
  MOD_RES (1), (3): Xaa is C or S
  MOD_RES (15), (16), (17), (18), (19): Xaa is A or G
  MOD_RES (20), (21), (22), (23): Xaa is A or G or is absent
XGXARVVMNEYKFKXXXXXXXXXLYLVSIPELQTPA

SEQ ID NO: 25446 - protein, 30 aa, Artificial Sequence
  GFR-binding peptide
EVVMDRYKKLVVNNAADFYLISIANLRAPV

SEQ ID NO: 25447 - protein, 41 aa, Artificial Sequence
  GFR-binding peptide
  MOD_RES (2), (35), (36): Xaa is C or S
  MOD_RES (13), (14), (15), (16), (17): Xaa is A or G
  MOD_RES (18), (19), (20), (21): Xaa is A or G or is absent
KXSKVVMEYQKYXXXXXXXXXIYLISIPSLDQPVXXPSASA

SEQ ID NO: 25448 - protein, 36 aa, Artificial Sequence; identical to SEQ ID NO: 4386
  GFR-binding peptide
  MOD_RES (2), (4): Xaa is C or S
  MOD_RES (15), (16), (17), (18), (19): Xaa is A or G
  MOD_RES (20), (21), (22), (23): Xaa is A or G or is absent

SEQ ID NO: 25449 - protein, 36 aa, Artificial Sequence
  GFR-binding peptide
  MOD_RES (1), (3), (35), (36): Xaa is C or S
XGXESVAMGEYQKYYTVVGKDIYLISIPSLKTPVXX

SEQ ID NO: 25450 - protein, 42 aa, Artificial Sequence; identical to SEQ ID NO: 4388
  GFR-binding peptide
  MOD_RES (2), (4), (38), (39): Xaa is C or S
  MOD_RES (16), (17), (18), (19), (20): Xaa is A or G
  MOD_RES (21), (22), (23), (24): Xaa is A or G or is absent

SEQ ID NO: 25451 - protein, 40 aa, Artificial Sequence
  GFR-binding peptide
  MOD_RES (1), (3), (36), (37): Xaa is C or S
XGXEAVSMGEEYKFKTPVGMDDLYLVSIPELKTPVXXAKG

SEQ ID NO: 25452 - protein, 38 aa, Artificial Sequence
  GFR-binding peptide
  MOD_RES (1), (3), (35), (36): Xaa is C or S
XGXAEVVMDEYKFKVVNNAADLYLISIPELRAPVXXSA

SEQ ID NO: 25453 - protein, 37 aa, Artificial Sequence
  GFR-binding peptide
  MOD_RES (2), (36), (37): Xaa is C or S
  MOD_RES (14), (15), (16), (17), (18): Xaa is A or G
  MOD_RES (19), (20), (21), (22): Xaa is A or G or is absent
GXAEVVMDEYKFKXXXXXXXXXLYLISIPELRAPVXX

SEQ ID NO: 25454 - protein, 35 aa, Artificial Sequence
  GFR-binding peptide
  MOD_RES (33), (34): Xaa is C or S
  MOD_RES (11), (12), (13), (14), (15): Xaa is A or G
  MOD_RES (16), (17), (18), (19): Xaa is A or G or is absent
EVVMDEYQKYXXXXXXXXXIYLISIPSLRAPVXXS

SEQ ID NO: 25455 - protein, 33 aa, Artificial Sequence; identical to SEQ ID NO: 4393
  GFR-binding peptide
  MOD_RES (32), (33): Xaa is C or S

SEQ ID NO: 25456 - protein, 40 aa, Artificial Sequence; identical to SEQ ID NO: 4396
  GFR-binding peptide
  MOD_RES (34), (35): Xaa is C or S
  MOD_RES (12), (13), (14), (15), (16): Xaa is A or G
  MOD_RES (17), (18), (19), (20): Xaa is A or G or is absent

SEQ ID NO: 25457 - protein, 35 aa, Artificial Sequence
  GFR-binding peptide
  MOD_RES (33), (33): Xaa is C or S
  MOD_RES (11), (12), (13), (14), (15): Xaa is A or G
  MOD_RES (16), (17), (18), (19): Xaa is A or G or is absent
RVVMNEYQKYXXXXXXXXXIYLVSIPSLKTPAXTP

SEQ ID NO: 25458 - protein, 36 aa, Artificial Sequence
  GFR-binding peptide
  MOD_RES (1), (3): Xaa is C or S
  MOD_RES (15), (16), (17), (18), (19): Xaa is A or G
  MOD_RES (20), (21), (22), (23): Xaa is A or G or is absent
XGXARVVMNEYQKYXXXXXXXXXIYLVSIPSLQTPA

SEQ ID NO: 25459 - protein, 33 aa, Artificial Sequence; identical to SEQ ID NO: 4399
  GFR-binding peptide
  MOD_RES (1), (33): Xaa is C or S

SEQ ID NO: 25460 - protein, 33 aa, Artificial Sequence
  GFR-binding peptide
  MOD_RES (1), (33): Xaa is C or S
XGEVVMEEYQKYVVKDYEDIYLMSIPSLETPVX

SEQ ID NO: 25461 - protein, 34 aa, Artificial Sequence; identical to SEQ ID NO: 4402
  GFR-binding peptide
  MOD_RES (1), (3): Xaa is C or S

SEQ ID NO: 25462 - protein, 34 aa, Artificial Sequence
  GFR-binding peptide
  MOD_RES (2), (4): Xaa is C or S
SXKXSKVVMEYQKYVKPTRGVIYLISIPSLDQPV

SEQ ID NO: 25463 - protein, 39 aa, Artificial Sequence
  GFR-binding peptide
  MOD_RES (34), (35): Xaa is C or S
  MOD_RES (12), (13), (14), (15), (16): Xaa is A or G
  MOD_RES (17), (18), (19), (20): Xaa is A or G or is absent
AEVVMDYHYKLXXXXXXXXXKYLISIPSLRAPVXXSAPA

SEQ ID NO: 25464 - protein, 35 aa, Artificial Sequence; identical to SEQ ID NO: 4404
  GFR-binding peptide
  MOD_RES (1), (1): Xaa is C or S
  MOD_RES (14), (15), (16), (17), (18): Xaa is A or G
  MOD_RES (19), (20), (21), (22): Xaa is A or G or is absent

SEQ ID NO: 25465 - protein, 40 aa, Artificial Sequence; identical to SEQ ID NO: 4406
  GFR-binding peptide
  MOD_RES (2), (4), (36), (37): Xaa is C or S

SEQ ID NO: 25466 - protein, 39 aa, Artificial Sequence
  GFR-binding peptide
  MOD_RES (2), (4), (37), (38): Xaa is C or S
  MOD_RES (15), (16), (17), (18), (19): Xaa is A or G
  MOD_RES (20), (21), (22), (23): Xaa is A or G or is absent
SXKXSRVIMEYKFKXXXXXXXXXLYLISIPELAQPVXXP

SEQ ID NO: 25467 - protein, 43 aa, Artificial Sequence; identical to SEQ ID NO: 4407
  GFR-binding peptide
  MOD_RES (2), (37), (38): Xaa is C or S
  MOD_RES (15), (16), (17), (18), (19): Xaa is A or G
  MOD_RES (20), (21), (22), (23): Xaa is A or G or is absent

SEQ ID NO: 25468 - protein, 34 aa, Artificial Sequence
  GFR-binding peptide
  MOD_RES (32), (33): Xaa is C or S
GEVVMEEYQKYVVKDYEDIYLMSIPSLETPVXXA

SEQ ID NO: 25469 - protein, 42 aa, Artificial Sequence
  GFR-binding peptide
  MOD_RES (2), (37), (38): Xaa is C or S
  MOD_RES (15), (16), (17), (18), (19): Xaa is A or G
  MOD_RES (20), (21), (22), (23): Xaa is A or G or is absent
GXEAVSMGEEYKFKXXXXXXXXXLYLVSIPELKTPVXXAKGV

SEQ ID NO: 25470 - protein, 35 aa, Artificial Sequence
  GFR-binding peptide
  MOD_RES (2), (33), (34): Xaa is C or S
KXSRVIMEYKFKVKPKRGVLYLISIPELAQPVXXP

SEQ ID NO: 25471 - protein, 34 aa, Artificial Sequence; identical to SEQ ID NO: 4409
  GFR-binding peptide
  MOD_RES (2), (34): Xaa is C or S

SEQ ID NO: 25472 - protein, 40 aa, Artificial Sequence
  GFR-binding peptide
  MOD_RES (2), (36), (37): Xaa is C or S
  MOD_RES (14), (15), (16), (17), (18): Xaa is A or G
  MOD_RES (19), (20), (21), (22): Xaa is A or G or is absent
GXSRVVMNEYQKYXXXXXXXXXIYLVSIPSLKTPAXXPKP

SEQ ID NO: 25473 - protein, 38 aa, Artificial Sequence
  GFR-binding peptide
  MOD_RES (2), (34): Xaa is C or S
GXSRVVMNEYKFKIVNSSDDLYLVSIPELKTPAXTPKT

SEQ ID NO: 25474 - protein, 33 aa, Artificial Sequence; identical to SEQ ID NO: 4413
  GFR-binding peptide
  MOD_RES (1), (32), (33): Xaa is C or S

SEQ ID NO: 25475 - protein, 41 aa, Artificial Sequence
  GFR-binding peptide
  MOD_RES (2), (4), (36), (37): Xaa is C or S
RXGXESVAMGRYKKLYTVVGKDFYLISIANLKTPVXXAKSA

SEQ ID NO: 25476 - protein, 35 aa, Artificial Sequence; identical to SEQ ID NO: 4414
  GFR-binding peptide
  MOD_RES (1), (3), (34), (35): Xaa is C or S

SEQ ID NO: 25477 - protein, 35 aa, Artificial Sequence
  GFR-binding peptide
  MOD_RES (2), (2): Xaa is C or S
  MOD_RES (14), (15), (16), (17), (18): Xaa is A or G
  MOD_RES (19), (20), (21), (22): Xaa is A or G or is absent
GXGEVVMEEYKFKXXXXXXXXXLYLMSIPELETPV

SEQ ID NO: 25478 - protein, 31 aa, Artificial Sequence
  GFR-binding peptide
  MOD_RES (31), (31): Xaa is C or S
SRVIMEYQKYVKPKRGVIYLISIPSLAQPVX

SEQ ID NO: 25479 - protein, 35 aa, Artificial Sequence; identical to SEQ ID NO: 4415
  GFR-binding peptide
  MOD_RES (31), (32): Xaa is C or S

SEQ ID NO: 25480 - protein, 37 aa, Artificial Sequence
  GFR-binding peptide
  MOD_RES (2), (4), (37): Xaa is C or S
  MOD_RES (15), (16), (17), (18), (19): Xaa is A or G
  MOD_RES (20), (21), (22), (23): Xaa is A or G or is absent
SXKXSRVIMEYKFKXXXXXXXXXLYLISIPELAQPVX

SEQ ID NO: 25481 - protein, 34 aa, Artificial Sequence
  GFR-binding peptide
  MOD_RES (1), (33), (34): Xaa is C or S
XGEVVMDEYQKYVVKENEDIYLMSIPSLETPVXX

SEQ ID NO: 25482 - protein, 40 aa, Artificial Sequence
  GFR-binding peptide
  MOD_RES (1), (35), (36): Xaa is C or S
  MOD_RES (13), (14), (15), (16), (17): Xaa is A or G
  MOD_RES (18), (19), (20), (21): Xaa is A or G or is absent
XARVVMNEYQKYXXXXXXXXXIYLVSIPSLQTPAXXPKPV

SEQ ID NO: 25483 - protein, 33 aa, Artificial Sequence
  GFR-binding peptide
  MOD_RES (31), (32): Xaa is C or S
SVAMGEYKFKYTVVGKDLYLISIPELKTPVXXA

SEQ ID NO: 25484 - protein, 33 aa, Artificial Sequence; identical to SEQ ID NO: 4417
  GFR-binding peptide
  MOD_RES (31), (32): Xaa is C or S

SEQ ID NO: 25485 - protein, 36 aa, Artificial Sequence; identical to SEQ ID NO: 4418
  GFR-binding peptide
  MOD_RES (2), (35), (36): Xaa is C or S
  MOD_RES (13), (14), (15), (16), (17): Xaa is A or G
  MOD_RES (18), (19), (20), (21): Xaa is A or G or is absent

SEQ ID NO: 25486 - protein, 38 aa, Artificial Sequence
  GFR-binding peptide
  MOD_RES (1), (3), (37), (38): Xaa is C or S
  MOD_RES (15), (16), (17), (18), (19): Xaa is A or G
  MOD_RES (20), (21), (22), (23): Xaa is A or G or is absent
XGXESVAMGEYQKYXXXXXXXXXIYLISIPSLKTPVXX

SEQ ID NO: 25487 - protein, 34 aa, Artificial Sequence
  GFR-binding peptide
  MOD_RES (32), (33): Xaa is C or S
GEVVMDEYQKYVVKENEDIYLMSIPSLETPVXXA

SEQ ID NO: 25488 - protein, 39 aa, Artificial Sequence
  GFR-binding peptide
  MOD_RES (33), (34): Xaa is C or S
  MOD_RES (11), (12), (13), (14), (15): Xaa is A or G
  MOD_RES (16), (17), (18), (19): Xaa is A or G or is absent
SKVIMEYKFKXXXXXXXXXLYLISIPELDQSVXXPSASA

SEQ ID NO: 25489 - protein, 37 aa, Artificial Sequence
  GFR-binding peptide
  MOD_RES (31), (32): Xaa is C or S
SVAMGEYQKYYTVVGKDIYLISIPSLKTPVXXAKSAK

SEQ ID NO: 25490 - protein, 34 aa, Artificial Sequence; identical to SEQ ID NO: 4423
  GFR-binding peptide
  MOD_RES (1), (34): Xaa is C or S
  MOD_RES (12), (13), (14), (15), (16): Xaa is A or G
  MOD_RES (17), (18), (19), (20): Xaa is A or G or is absent

SEQ ID NO: 25491 - protein, 38 aa, Artificial Sequence
  GFR-binding peptide
  MOD_RES (2), (4), (38): Xaa is C or S
  MOD_RES (16), (17), (18), (19), (20): Xaa is A or G
  MOD_RES (21), (22), (23), (24): Xaa is A or G or is absent
RXGXESVAMGEYKFKXXXXXXXXXLYLISIPELKTPVX

SEQ ID NO: 25492 - protein, 41 aa, Artificial Sequence; identical to SEQ ID NO: 4424
  GFR-binding peptide
  MOD_RES (1), (3), (37), (38): Xaa is C or S
  MOD_RES (15), (16), (17), (18), (19): Xaa is A or G
  MOD_RES (20), (21), (22), (23): Xaa is A or G or is absent

SEQ ID NO: 25493 - protein, 36 aa, Artificial Sequence; identical to SEQ ID NO: 4425
  GFR-binding peptide
  MOD_RES (2), (4): Xaa is C or S

SEQ ID NO: 25494 - protein, 34 aa, Artificial Sequence
  GFR-binding peptide
  MOD_RES (31), (32): Xaa is C or S
KVVMNEYKFKIVNNSSDLYLVSIPELKTPAXXAK

SEQ ID NO: 25495 - protein, 38 aa, Artificial Sequence
  GFR-binding peptide
  MOD_RES (2), (4), (35), (36): Xaa is C or S
SXKXSKVIMEYKFKIKPTKGILYLISIPELDQSVXXPS

SEQ ID NO: 25496 - protein, 38 aa, Artificial Sequence; identical to SEQ ID NO: 4428
  GFR-binding peptide
  MOD_RES (2), (33), (34): Xaa is C or S

SEQ ID NO: 25497 - protein, 36 aa, Artificial Sequence; identical to SEQ ID NO: 4429
  GFR-binding peptide
  MOD_RES (1), (34), (35): Xaa is C or S
  MOD_RES (12), (13), (14), (15), (16): Xaa is A or G
  MOD_RES (17), (18), (19), (20): Xaa is A or G or is absent

SEQ ID NO: 25498 - protein, 39 aa, Artificial Sequence
  GFR-binding peptide
  MOD_RES (34), (34): Xaa is C or S
  MOD_RES (12), (13), (14), (15), (16): Xaa is A or G
  MOD_RES (17), (18), (19), (20): Xaa is A or G or is absent
SRVVMNEYQKYXXXXXXXXXIYLVSIPSLKTPAXTPKTV

SEQ ID NO: 25499 - protein, 35 aa, Artificial Sequence
  GFR-binding peptide
  MOD_RES (2), (35): Xaa is C or S
GXEAVSMGEEYQKYTPVGMDDIYLVSIPSLKTPVX

SEQ ID NO: 25500 - protein, 34 aa, Artificial Sequence
  GFR-binding peptide
  MOD_RES (34), (34): Xaa is C or S
  MOD_RES (12), (13), (14), (15), (16): Xaa is A or G
  MOD_RES (17), (18), (19), (20): Xaa is A or G or is absent
AKVVMNEYQKYXXXXXXXXXIYLVSIPSLKTPAX

SEQ ID NO: 25501 - protein, 44 aa, Artificial Sequence
  GFR-binding peptide
  MOD_RES (2), (4), (38), (39): Xaa is C or S
  MOD_RES (16), (17), (18), (19), (20): Xaa is A or G
  MOD_RES (21), (22), (23), (24): Xaa is A or G or is absent
RXGXESVAMGEYKFKXXXXXXXXXLYLISIPELKTPVXXAKSAK

SEQ ID NO: 25502 - protein, 36 aa, Artificial Sequence; identical to SEQ ID NO: 4430
  GFR-binding peptide
  MOD_RES (33), (34): Xaa is C or S
  MOD_RES (11), (12), (13), (14), (15): Xaa is A or G
  MOD_RES (16), (17), (18), (19): Xaa is A or G or is absent

SEQ ID NO: 25503 - protein, 34 aa, Artificial Sequence; identical to SEQ ID NO: 4432
  GFR-binding peptide
  MOD_RES (2), (2): Xaa is C or S
  MOD_RES (13), (14), (15), (16), (17): Xaa is A or G
  MOD_RES (18), (19), (20), (21): Xaa is A or G or is absent

SEQ ID NO: 25504 - protein, 43 aa, Artificial Sequence
  GFR-binding peptide
  MOD_RES (2), (4), (37), (38): Xaa is C or S
RXGXEAVSMGEEYKFKTPVGMDDLYLVSIPELKTPVXXAKGVK

SEQ ID NO: 25505 - protein, 40 aa, Artificial Sequence
  GFR-binding peptide
  MOD_RES (2), (34), (35): Xaa is C or S
GXSRVVMNEYQKYIVNSSDDIYLVSIPSLKTPAXXPKPVY

SEQ ID NO: 25506 - protein, 35 aa, Artificial Sequence; identical to SEQ ID NO: 4434
  GFR-binding peptide
  MOD_RES (2), (34), (35): Xaa is C or S

SEQ ID NO: 25507 - protein, 40 aa, Artificial Sequence
  GFR-binding peptide
  MOD_RES (2), (34), (35): Xaa is C or S
GXESVAMGEYQKYYTVVGKDIYLISIPSLKTPVXXAKSAK

SEQ ID NO: 25508 - protein, 33 aa, Artificial Sequence; identical to SEQ ID NO: 4435
  GFR-binding peptide
  MOD_RES (1), (32), (33): Xaa is C or S

SEQ ID NO: 25509 - protein, 36 aa, Artificial Sequence
  GFR-binding peptide
  MOD_RES (34), (35): Xaa is C or S
  MOD_RES (12), (13), (14), (15), (16): Xaa is A or G
  MOD_RES (17), (18), (19), (20): Xaa is A or G or is absent
GEVVMDEYKFKXXXXXXXXXLYLMSIPELETPVXXA

SEQ ID NO: 25510 - protein, 38 aa, Artificial Sequence; identical to SEQ ID NO: 4437
  GFR-binding peptide
  MOD_RES (1), (3), (36), (37): Xaa is C or S

SEQ ID NO: 25511 - protein, 34 aa, Artificial Sequence
  GFR-binding peptide
  MOD_RES (1), (33), (34): Xaa is C or S
XGEVVMEEYQKYVVKDYEDIYLMSIPSLETPVXX

SEQ ID NO: 25512 - protein, 36 aa, Artificial Sequence; identical to SEQ ID NO: 4439
  GFR-binding peptide
  MOD_RES (32), (33): Xaa is C or S

SEQ ID NO: 25513 - protein, 33 aa, Artificial Sequence
  GFR-binding peptide
  MOD_RES (33), (33): Xaa is C or S
  MOD_RES (11), (12), (13), (14), (15): Xaa is A or G
  MOD_RES (16), (17), (18), (19): Xaa is A or G or is absent
SRVIMEYQKYXXXXXXXXXIYLISIPSLAQPVX

SEQ ID NO: 25514 - protein, 38 aa, Artificial Sequence
  GFR-binding peptide
  MOD_RES (33), (34): Xaa is C or S
  MOD_RES (11), (12), (13), (14), (15): Xaa is A or G
  MOD_RES (16), (17), (18), (19): Xaa is A or G or is absent
SKVIMEYQKYXXXXXXXXXIYLISIPSLDQSVXXPSAS

SEQ ID NO: 25515 - protein, 35 aa, Artificial Sequence
  GFR-binding peptide
  MOD_RES (2), (4): Xaa is C or S
HXGXSRVVMNEYQKYIVNSSDDIYLVSIPSLKTPA

SEQ ID NO: 25516 - protein, 42 aa, Artificial Sequence
  GFR-binding peptide
  MOD_RES (2), (36), (37): Xaa is C or S
  MOD_RES (14), (15), (16), (17), (18): Xaa is A or G
  MOD_RES (19), (20), (21), (22): Xaa is A or G or is absent
GXAEVVMDRYKKLXXXXXXXXXFYLISIANLRAPVXXSAPAA

SEQ ID NO: 25517 - protein, 34 aa, Artificial Sequence; identical to SEQ ID NO: 4441
  GFR-binding peptide
  MOD_RES (1), (34): Xaa is C or S

SEQ ID NO: 25518 - protein, 41 aa, Artificial Sequence
  GFR-binding peptide
  MOD_RES (2), (4), (38), (39): Xaa is C or S
  MOD_RES (16), (17), (18), (19), (20): Xaa is A or G
  MOD_RES (21), (22), (23), (24): Xaa is A or G or is absent
RXGXAEVVMDRYKKLXXXXXXXXXFYLISIANLRAPVXXSA

SEQ ID NO: 25519 - protein, 44 aa, Artificial Sequence
  GFR-binding peptide
  MOD_RES (2), (4), (38), (39): Xaa is C or S
  MOD_RES (16), (17), (18), (19), (20): Xaa is A or G
  MOD_RES (21), (22), (23), (24): Xaa is A or G or is absent
RXGXESVAMGRYKKLXXXXXXXXXFYLISIANLKTPVXXAKSAK

SEQ ID NO: 25520 - protein, 40 aa, Artificial Sequence
  GFR-binding peptide
  MOD_RES (2), (4), (37), (38): Xaa is C or S
  MOD_RES (15), (16), (17), (18), (19): Xaa is A or G
  MOD_RES (20), (21), (22), (23): Xaa is A or G or is absent
SXKXSRVIMEYQKYXXXXXXXXXIYLISIPSLAQPVXXPA

SEQ ID NO: 25521 - protein, 40 aa, Artificial Sequence
  GFR-binding peptide
  MOD_RES (1), (3), (35), (36): Xaa is C or S
XGXESVAMGYHYKLYTVVGKDKYLISIPSLKTPVXXAKSA

SEQ ID NO: 25522 - protein, 35 aa, Artificial Sequence
  GFR-binding peptide
  MOD_RES (1), (3), (35): Xaa is C or S
XGXGEVVMDEYQKYVVKENEDIYLMSIPSLETPVX

SEQ ID NO: 25523 - protein, 41 aa, Artificial Sequence; identical to SEQ ID NO: 4449
  GFR-binding peptide
  MOD_RES (1), (3), (38), (39): Xaa is C or S
  MOD_RES (16), (17), (18), (19), (20): Xaa is A or G
  MOD_RES (21), (22), (23), (24): Xaa is A or G or is absent

SEQ ID NO: 25524 - protein, 44 aa, Artificial Sequence
  GFR-binding peptide
  MOD_RES (2), (4), (38), (39): Xaa is C or S
  MOD_RES (16), (17), (18), (19), (20): Xaa is A or G
  MOD_RES (21), (22), (23), (24): Xaa is A or G or is absent
HXGXSRVVMNEYQKYXXXXXXXXXIYLVSIPSLKTPAXXPKPVY

SEQ ID NO: 25525 - protein, 35 aa, Artificial Sequence; identical to SEQ ID NO: 4451
  GFR-binding peptide
  MOD_RES (33), (34): Xaa is C or S
  MOD_RES (11), (12), (13), (14), (15): Xaa is A or G
  MOD_RES (16), (17), (18), (19): Xaa is A or G or is absent

SEQ ID NO: 25526 - protein, 41 aa, Artificial Sequence
  GFR-binding peptide
  MOD_RES (2), (4), (38), (39): Xaa is C or S
  MOD_RES (16), (17), (18), (19), (20): Xaa is A or G
  MOD_RES (21), (22), (23), (24): Xaa is A or G or is absent
RXGXAEVVMDEYKFKXXXXXXXXXLYLISIPELRAPVXXSA

SEQ ID NO: 25527 - protein, 35 aa, Artificial Sequence
  GFR-binding peptide
  MOD_RES (1), (3): Xaa is C or S
  MOD_RES (14), (15), (16), (17), (18): Xaa is A or G
  MOD_RES (19), (20), (21), (22): Xaa is A or G or is absent
XKXSKVIMEYKFKXXXXXXXXXLYLISIPELDQSV

SEQ ID NO: 25528 - protein, 36 aa, Artificial Sequence
  GFR-binding peptide
  MOD_RES (1), (34), (35): Xaa is C or S
  MOD_RES (12), (13), (14), (15), (16): Xaa is A or G
  MOD_RES (17), (18), (19), (20): Xaa is A or G or is absent
XSKVVMEYKFKXXXXXXXXXLYLISIPELDQPVXXP

SEQ ID NO: 25529 - protein, 39 aa, Artificial Sequence
  GFR-binding peptide
  MOD_RES (1), (35), (36): Xaa is C or S
  MOD_RES (13), (14), (15), (16), (17): Xaa is A or G
  MOD_RES (18), (19), (20), (21): Xaa is A or G or is absent
XGEVVMEEYKFKXXXXXXXXXLYLMSIPELETPVXXAKP

SEQ ID NO: 25530 - protein, 41 aa, Artificial Sequence
  GFR-binding peptide
  MOD_RES (1), (3), (35), (36): Xaa is C or S
XGXESVAMGEYQKYYTVVGKDIYLISIPSLKTPVXXAKSAK

SEQ ID NO: 25531 - protein, 32 aa, Artificial Sequence; identical to SEQ ID NO: 4453
  GFR-binding peptide
  MOD_RES (11), (12), (13), (14), (15): Xaa is A or G
  MOD_RES (16), (17), (18), (19): Xaa is A or G or is absent

SEQ ID NO: 25532 - protein, 41 aa, Artificial Sequence
  GFR-binding peptide
  MOD_RES (2), (36): Xaa is C or S
  MOD_RES (14), (15), (16), (17), (18): Xaa is A or G
  MOD_RES (19), (20), (21), (22): Xaa is A or G or is absent
GXSRVVMNEYQKYXXXXXXXXXIYLVSIPSLKTPAXTPKTV

SEQ ID NO: 25533 - protein, 35 aa, Artificial Sequence
  GFR-binding peptide
  MOD_RES (31), (32): Xaa is C or S
EVVMDEYQKYVVNNAADIYLISIPSLRAPVXXSAP

SEQ ID NO: 25534 - protein, 43 aa, Artificial Sequence; identical to SEQ ID NO: 4454
  GFR-binding peptide
  MOD_RES (2), (4), (37), (38): Xaa is C or S
  MOD_RES (15), (16), (17), (18), (19): Xaa is A or G
  MOD_RES (20), (21), (22), (23): Xaa is A or G or is absent

SEQ ID NO: 25535 - protein, 39 aa, Artificial Sequence
  GFR-binding peptide
  MOD_RES (1), (3), (36), (37): Xaa is C or S
  MOD_RES (14), (15), (16), (17), (18): Xaa is A or G
  MOD_RES (19), (20), (21), (22): Xaa is A or G or is absent
XKXSRVIMEYKFKXXXXXXXXXLYLISIPELAQPVXXPA

SEQ ID NO: 25536 - protein, 38 aa, Artificial Sequence
  GFR-binding peptide
  MOD_RES (1), (3), (36), (37): Xaa is C or S
  MOD_RES (14), (15), (16), (17), (18): Xaa is A or G
  MOD_RES (19), (20), (21), (22): Xaa is A or G or is absent
XKXSRVIMEYQKYXXXXXXXXXIYLISIPSLAQPVXXP

SEQ ID NO: 25537 - protein, 35 aa, Artificial Sequence
  GFR-binding peptide
  MOD_RES (31), (32): Xaa is C or S
SRVIMEYKFKVKPKRGVLYLISIPELAQPVXXPAA

SEQ ID NO: 25538 - protein, 38 aa, Artificial Sequence
  GFR-binding peptide
  MOD_RES (34), (35): Xaa is C or S
  MOD_RES (12), (13), (14), (15), (16): Xaa is A or G
  MOD_RES (17), (18), (19), (20): Xaa is A or G or is absent
GEVVMEEYQKYXXXXXXXXXIYLMSIPSLETPVXXAKP

SEQ ID NO: 25539 - protein, 36 aa, Artificial Sequence; identical to SEQ ID NO: 4459
  GFR-binding peptide
  MOD_RES (2), (4): Xaa is C or S
  MOD_RES (15), (16), (17), (18), (19): Xaa is A or G
  MOD_RES (20), (21), (22), (23): Xaa is A or G or is absent

SEQ ID NO: 25540 - protein, 31 aa, Artificial Sequence
  GFR-binding peptide
  MOD_RES (31), (31): Xaa is C or S
SKVIMEYKFKIKPTKGILYLISIPELDQSVX

SEQ ID NO: 25541 - protein, 32 aa, Artificial Sequence
  GFR-binding peptide
  MOD_RES (11), (12), (13), (14), (15): Xaa is A or G
  MOD_RES (16), (17), (18), (19): Xaa is A or G or is absent
EVVMEEYKFKXXXXXXXXXLYLMSIPELETPV

SEQ ID NO: 25542 - protein, 34 aa, Artificial Sequence
  GFR-binding peptide
  MOD_RES (31), (31): Xaa is C or S
RVVMNEYQKYIVNSSDDIYLVSIPSLKTPAXTPK

SEQ ID NO: 25543 - protein, 36 aa, Artificial Sequence
  GFR-binding peptide
  MOD_RES (33), (34): Xaa is C or S
  MOD_RES (11), (12), (13), (14), (15): Xaa is A or G
  MOD_RES (16), (17), (18), (19): Xaa is A or G or is absent
SKVVMEYKFKXXXXXXXXXLYLISIPELDQPVXXPS

SEQ ID NO: 25544 - protein, 33 aa, Artificial Sequence
  GFR-binding peptide
  MOD_RES (32), (33): Xaa is C or S
AEVVMDEYKFKVVNNAADLYLISIPELRAPVXX

SEQ ID NO: 25545 - protein, 37 aa, Artificial Sequence
  GFR-binding peptide
  MOD_RES (32), (33): Xaa is C or S
ESVAMGYHYKLYTVVGKDKYLISIPSLKTPVXXAKSA

SEQ ID NO: 25546 - protein, 34 aa, Artificial Sequence; identical to SEQ ID NO: 4461
  GFR-binding peptide
  MOD_RES (1), (3), (34): Xaa is C or S

SEQ ID NO: 25547 - protein, 37 aa, Artificial Sequence
  GFR-binding peptide
  MOD_RES (2), (4), (36), (37): Xaa is C or S
HXGXSRVVMNEYKFKIVNSSDDLYLVSIPELKTPAXX

SEQ ID NO: 25548 - protein, 35 aa, Artificial Sequence
  GFR-binding peptide
  MOD_RES (34), (35): Xaa is C or S
  MOD_RES (12), (13), (14), (15), (16): Xaa is A or G
  MOD_RES (17), (18), (19), (20): Xaa is A or G or is absent
ARVVMNEYQKYXXXXXXXXXIYLVSIPSLQTPAXX

SEQ ID NO: 25549 - protein, 38 aa, Artificial Sequence
  GFR-binding peptide
  MOD_RES (32), (33): Xaa is C or S
AEVVMDRYKKLVVNNAADFYLISIANLRAPVXXSAPAA

SEQ ID NO: 25550 - protein, 41 aa, Artificial Sequence
  GFR-binding peptide
  MOD_RES (2), (4), (37), (38): Xaa is C or S
  MOD_RES (15), (16), (17), (18), (19): Xaa is A or G
  MOD_RES (20), (21), (22), (23): Xaa is A or G or is absent
SXKXSKVIMEYKFKXXXXXXXXXLYLISIPELDQSVXXPSA

SEQ ID NO: 25551 - protein, 35 aa, Artificial Sequence; identical to SEQ ID NO: 4464
  GFR-binding peptide
  MOD_RES (1), (33), (34): Xaa is C or S

SEQ ID NO: 25552 - protein, 39 aa, Artificial Sequence
  GFR-binding peptide
  MOD_RES (2), (33), (34): Xaa is C or S
KXSKVIMEYQKYIKPTKGIIYLISIPSLDQSVXXPSASA

SEQ ID NO: 25553 - protein, 41 aa, Artificial Sequence
  GFR-binding peptide
  MOD_RES (2), (4), (36): Xaa is C or S
HXGXSRVVMNEYQKYIVNSSDDIYLVSIPSLKTPAXTPKTV

SEQ ID NO: 25554 - protein, 39 aa, Artificial Sequence
  GFR-binding peptide
  MOD_RES (1), (3), (36), (37): Xaa is C or S
  MOD_RES (14), (15), (16), (17), (18): Xaa is A or G
  MOD_RES (19), (20), (21), (22): Xaa is A or G or is absent
XKXSKVIMEYKFKXXXXXXXXXLYLISIPELDQSVXXPS

SEQ ID NO: 25555 - protein, 35 aa, Artificial Sequence
  GFR-binding peptide
  MOD_RES (1), (34), (35): Xaa is C or S
  MOD_RES (12), (13), (14), (15), (16): Xaa is A or G
  MOD_RES (17), (18), (19), (20): Xaa is A or G or is absent
XSKVIMEYKFKXXXXXXXXXLYLISIPELDQSVXX

SEQ ID NO: 25556 - protein, 38 aa, Artificial Sequence; identical to SEQ ID NO: 4470
  GFR-binding peptide
  MOD_RES (2), (35), (36): Xaa is C or S
  MOD_RES (13), (14), (15), (16), (17): Xaa is A or G
  MOD_RES (18), (19), (20), (21): Xaa is A or G or is absent

SEQ ID NO: 25557 - protein, 39 aa, Artificial Sequence
  GFR-binding peptide
  MOD_RES (1), (33), (34): Xaa is C or S
XAKVVMNEYKFKIVNNSSDLYLVSIPELKTPAXXAKPVA

SEQ ID NO: 25558 - protein, 34 aa, Artificial Sequence
  GFR-binding peptide
  MOD_RES (1), (3): Xaa is C or S
XGXSRVVMNEYQKYIVNSSDDIYLVSIPSLKTPA

SEQ ID NO: 25559 - protein, 40 aa, Artificial Sequence; identical to SEQ ID NO: 4474
  GFR-binding peptide
  MOD_RES (2), (4), (39), (40): Xaa is C or S
  MOD_RES (17), (18), (19), (20), (21): Xaa is A or G
  MOD_RES (22), (23), (24), (25): Xaa is A or G or is absent

SEQ ID NO: 25560 - protein, 42 aa, Artificial Sequence
  GFR-binding peptide
  MOD_RES (2), (4), (38), (39): Xaa is C or S
  MOD_RES (16), (17), (18), (19), (20): Xaa is A or G
  MOD_RES (21), (22), (23), (24): Xaa is A or G or is absent
RXGXGEVVMEEYKFKXXXXXXXXXLYLMSIPELETPVXXAKP

SEQ ID NO: 25561 - protein, 38 aa, Artificial Sequence
  GFR-binding peptide
  MOD_RES (2), (34), (35): Xaa is C or S
GXGEVVMDEYKFKVVKENEDLYLMSIPELETPVXXAKP

SEQ ID NO: 25562 - protein, 39 aa, Artificial Sequence; identical to SEQ ID NO: 4475
  GFR-binding peptide
  MOD_RES (1), (34), (35): Xaa is C or S
  MOD_RES (12), (13), (14), (15), (16): Xaa is A or G
  MOD_RES (17), (18), (19), (20): Xaa is A or G or is absent

SEQ ID NO: 25563 - protein, 32 aa, Artificial Sequence
  GFR-binding peptide
  MOD_RES (31), (32): Xaa is C or S
SVAMGRYKKLYTVVGKDFYLISIANLKTPVXX

SEQ ID NO: 25564 - protein, 36 aa, Artificial Sequence; identical to SEQ ID NO: 4476
  GFR-binding peptide
  MOD_RES (33), (34): Xaa is C or S
  MOD_RES (11), (12), (13), (14), (15): Xaa is A or G
  MOD_RES (16), (17), (18), (19): Xaa is A or G or is absent

SEQ ID NO: 25565 - protein, 33 aa, Artificial Sequence
  GFR-binding peptide
  MOD_RES (1), (3): Xaa is C or S
XKXSKVIMEYQKYIKPTKGIIYLISIPSLDQSV

SEQ ID NO: 25566 - protein, 40 aa, Artificial Sequence
  GFR-binding peptide
  MOD_RES (1), (35), (36): Xaa is C or S
  MOD_RES (13), (14), (15), (16), (17): Xaa is A or G
  MOD_RES (18), (19), (20), (21): Xaa is A or G or is absent
XAKVVMNEYKFKXXXXXXXXXLYLVSIPELKTPAXXAKPV

SEQ ID NO: 25567 - protein, 38 aa, Artificial Sequence; identical to SEQ ID NO: 4477
  GFR-binding peptide
  MOD_RES (2), (4), (38): Xaa is C or S
  MOD_RES (16), (17), (18), (19), (20): Xaa is A or G
  MOD_RES (21), (22), (23), (24): Xaa is A or G or is absent

SEQ ID NO: 25568 - protein, 34 aa, Artificial Sequence
  GFR-binding peptide
  MOD_RES (33), (34): Xaa is C or S
  MOD_RES (11), (12), (13), (14), (15): Xaa is A or G
  MOD_RES (16), (17), (18), (19): Xaa is A or G or is absent
SVAMGEYKFKXXXXXXXXXLYLISIPELKTPVXX

SEQ ID NO: 25569 - protein, 39 aa, Artificial Sequence
  GFR-binding peptide
  MOD_RES (34), (35): Xaa is C or S
  MOD_RES (12), (13), (14), (15), (16): Xaa is A or G
  MOD_RES (17), (18), (19), (20): Xaa is A or G or is absent
SRVVMNEYKFKXXXXXXXXXLYLVSIPELKTPAXXPKPV

SEQ ID NO: 25570 - protein, 34 aa, Artificial Sequence
  GFR-binding peptide
  MOD_RES (1), (3), (34): Xaa is C or S
XKXSKVVMEYQKYVKPTRGVIYLISIPSLDQPVX

SEQ ID NO: 25571 - protein, 42 aa, Artificial Sequence
  GFR-binding peptide
  MOD_RES (2), (4), (38), (39): Xaa is C or S
  MOD_RES (16), (17), (18), (19), (20): Xaa is A or G
  MOD_RES (21), (22), (23), (24): Xaa is A or G or is absent
RXGXESVAMGEYKFKXXXXXXXXXLYLISIPELKTPVXXAKS

SEQ ID NO: 25572 - protein, 40 aa, Artificial Sequence; identical to SEQ ID NO: 4482
  GFR-binding peptide
  MOD_RES (2), (35), (36): Xaa is C or S
  MOD_RES (13), (14), (15), (16), (17): Xaa is A or G
  MOD_RES (18), (19), (20), (21): Xaa is A or G or is absent

SEQ ID NO: 25573 - protein, 39 aa, Artificial Sequence; identical to SEQ ID NO: 4483
  GFR-binding peptide
  MOD_RES (1), (34), (35): Xaa is C or S
  MOD_RES (12), (13), (14), (15), (16): Xaa is A or G
  MOD_RES (17), (18), (19), (20): Xaa is A or G or is absent

SEQ ID NO: 25574 - protein, 39 aa, Artificial Sequence; identical to SEQ ID NO: 4484
  GFR-binding peptide
  MOD_RES (33), (34): Xaa is C or S
  MOD_RES (11), (12), (13), (14), (15): Xaa is A or G
  MOD_RES (16), (17), (18), (19): Xaa is A or G or is absent

SEQ ID NO: 25575 - protein, 37 aa, Artificial Sequence; identical to SEQ ID NO: 4485
  GFR-binding peptide
  MOD_RES (2), (33), (34): Xaa is C or S

SEQ ID NO: 25576 - protein, 40 aa, Artificial Sequence
  GFR-binding peptide
  MOD_RES (2), (4), (35), (36): Xaa is C or S
SXKXSKVIMEYKFKIKPTKGILYLISIPELDQSVXXPSAS

SEQ ID NO: 25577 - protein, 40 aa, Artificial Sequence
  GFR-binding peptide
  MOD_RES (2), (35), (36): Xaa is C or S
  MOD_RES (13), (14), (15), (16), (17): Xaa is A or G
  MOD_RES (18), (19), (20), (21): Xaa is A or G or is absent
KXSKVVMEYQKYXXXXXXXXXIYLISIPSLDQPVXXPSAS

SEQ ID NO: 25578 - protein, 39 aa, Artificial Sequence
  GFR-binding peptide
  MOD_RES (2), (4), (36), (37): Xaa is C or S
HXGXAKVVMNEYQKYIVNNSSDIYLVSIPSLKTPAXXAK

SEQ ID NO: 25579 - protein, 41 aa, Artificial Sequence
  GFR-binding peptide
  MOD_RES (2), (4), (37), (38): Xaa is C or S
  MOD_RES (15), (16), (17), (18), (19): Xaa is A or G
  MOD_RES (20), (21), (22), (23): Xaa is A or G or is absent
SXKXSRVIMEYQKYXXXXXXXXXIYLISIPSLAQPVXXPAA

SEQ ID NO: 25580 - protein, 40 aa, Artificial Sequence
  GFR-binding peptide
  MOD_RES (2), (36), (37): Xaa is C or S
  MOD_RES (14), (15), (16), (17), (18): Xaa is A or G
  MOD_RES (19), (20), (21), (22): Xaa is A or G or is absent
GXAEVVMDRYKKLXXXXXXXXXFYLISIANLRAPVXXSAP

SEQ ID NO: 25581 - protein, 35 aa, Artificial Sequence
  GFR-binding peptide
  MOD_RES (32), (33): Xaa is C or S
ARVVMNEYQKYIVNSSDDIYLVSIPSLQTPAXXPK

SEQ ID NO: 25582 - protein, 35 aa, Artificial Sequence; identical to SEQ ID NO: 4491
  GFR-binding peptide
  MOD_RES (1), (33), (34): Xaa is C or S

SEQ ID NO: 25583 - protein, 41 aa, Artificial Sequence
  GFR-binding peptide
  MOD_RES (1), (3), (36), (37): Xaa is C or S
  MOD_RES (14), (15), (16), (17), (18): Xaa is A or G
  MOD_RES (19), (20), (21), (22): Xaa is A or G or is absent
XKXSKVVMEYKFKXXXXXXXXXLYLISIPELDQPVXXPSAS

SEQ ID NO: 25584 - protein, 38 aa, Artificial Sequence
  GFR-binding peptide
  MOD_RES (2), (36), (37): Xaa is C or S
  MOD_RES (14), (15), (16), (17), (18): Xaa is A or G
  MOD_RES (19), (20), (21), (22): Xaa is A or G or is absent
GXESVAMGRYKKLXXXXXXXXXFYLISIANLKTPVXXA

SEQ ID NO: 25585 - protein, 41 aa, Artificial Sequence; identical to SEQ ID NO: 4493
  GFR-binding peptide
  MOD_RES (1), (3), (35), (36): Xaa is C or S

SEQ ID NO: 25586 - protein, 40 aa, Artificial Sequence
  GFR-binding peptide
  MOD_RES (2), (35), (36): Xaa is C or S
  MOD_RES (13), (14), (15), (16), (17): Xaa is A or G
  MOD_RES (18), (19), (20), (21): Xaa is A or G or is absent
KXSRVIMEYKFKXXXXXXXXXLYLISIPELAQPVXXPAAS

SEQ ID NO: 25587 - protein, 36 aa, Artificial Sequence
  GFR-binding peptide
  MOD_RES (34), (35): Xaa is C or S
  MOD_RES (12), (13), (14), (15), (16): Xaa is A or G
  MOD_RES (17), (18), (19), (20): Xaa is A or G or is absent
AEVVMDYHYKLXXXXXXXXXKYLISIPSLRAPVXXS

SEQ ID NO: 25588 - protein, 42 aa, Artificial Sequence; identical to SEQ ID NO: 4496
  GFR-binding peptide
  MOD_RES (1), (3), (36), (37): Xaa is C or S
  MOD_RES (14), (15), (16), (17), (18): Xaa is A or G
  MOD_RES (19), (20), (21), (22): Xaa is A or G or is absent

SEQ ID NO: 25589 - protein, 35 aa, Artificial Sequence
  GFR-binding peptide
  MOD_RES (32), (33): Xaa is C or S
ESVAMGEYKFKYTVVGKDLYLISIPELKTPVXXAK

SEQ ID NO: 25590 - protein, 41 aa, Artificial Sequence
  GFR-binding peptide
  MOD_RES (1), (35), (36): Xaa is C or S
  MOD_RES (13), (14), (15), (16), (17): Xaa is A or G
  MOD_RES (18), (19), (20), (21): Xaa is A or G or is absent
XARVVMNEYQKYXXXXXXXXXIYLVSIPSLQTPAXXPKPVT

SEQ ID NO: 25591 - protein, 34 aa, Artificial Sequence
  GFR-binding peptide
  MOD_RES (32), (33): Xaa is C or S
SRVVMNEYKFKIVNSSDDLYLVSIPELKTPAXXP

SEQ ID NO: 25592 - protein, 37 aa, Artificial Sequence
  GFR-binding peptide
  MOD_RES (2), (4): Xaa is C or S
  MOD_RES (16), (17), (18), (19), (20): Xaa is A or G
  MOD_RES (21), (22), (23), (24): Xaa is A or G or is absent
RXGXGEVVMEEYQKYXXXXXXXXXIYLMSIPSLETPV

SEQ ID NO: 25593 - protein, 37 aa, Artificial Sequence; identical to SEQ ID NO: 4499
  GFR-binding peptide
  MOD_RES (2), (34), (35): Xaa is C or S

SEQ ID NO: 25594 - protein, 37 aa, Artificial Sequence
  GFR-binding peptide
  MOD_RES (2), (36), (37): Xaa is C or S
  MOD_RES (14), (15), (16), (17), (18): Xaa is A or G
  MOD_RES (19), (20), (21), (22): Xaa is A or G or is absent
GXGEVVMEEYQKYXXXXXXXXXIYLMSIPSLETPVXX

SEQ ID NO: 25595 - protein, 39 aa, Artificial Sequence; identical to SEQ ID NO: 4500
  GFR-binding peptide
  MOD_RES (34), (35): Xaa is C or S
  MOD_RES (12), (13), (14), (15), (16): Xaa is A or G
  MOD_RES (17), (18), (19), (20): Xaa is A or G or is absent

SEQ ID NO: 25596 - protein, 38 aa, Artificial Sequence
  GFR-binding peptide
  MOD_RES (1), (32), (33): Xaa is C or S
XSKVVMEYKFKVKPTRGVLYLISIPELDQPVXXPSASA

SEQ ID NO: 25597 - protein, 34 aa, Artificial Sequence; identical to SEQ ID NO: 4501
  GFR-binding peptide
  MOD_RES (2), (2): Xaa is C or S
  MOD_RES (13), (14), (15), (16), (17): Xaa is A or G
  MOD_RES (18), (19), (20), (21): Xaa is A or G or is absent

SEQ ID NO: 25598 - protein, 37 aa, Artificial Sequence
  GFR-binding peptide
  MOD_RES (32), (33): Xaa is C or S
ESVAMGEYQKYYTVVGKDIYLISIPSLKTPVXXAKSA

SEQ ID NO: 25599 - protein, 35 aa, Artificial Sequence
  GFR-binding peptide
  MOD_RES (2), (34), (35): Xaa is C or S
GXESVAMGEYKFKYTVVGKDLYLISIPELKTPVXX

SEQ ID NO: 25600 - protein, 40 aa, Artificial Sequence
  GFR-binding peptide
  MOD_RES (2), (4), (36), (37): Xaa is C or S
RXGXGEVVMDEYKFKVVKENEDLYLMSIPELETPVXXAKP

SEQ ID NO: 25601 - protein, 39 aa, Artificial Sequence
  GFR-binding peptide
  MOD_RES (1), (34), (35): Xaa is C or S
  MOD_RES (12), (13), (14), (15), (16): Xaa is A or G
  MOD_RES (17), (18), (19), (20): Xaa is A or G or is absent
XSRVIMEYQKYXXXXXXXXXIYLISIPSLAQPVXXPAAS

SEQ ID NO: 25602 - protein, 38 aa, Artificial Sequence
  GFR-binding peptide
  MOD_RES (1), (3), (37), (38): Xaa is C or S
  MOD_RES (15), (16), (17), (18), (19): Xaa is A or G
  MOD_RES (20), (21), (22), (23): Xaa is A or G or is absent
XGXSRVVMNEYQKYXXXXXXXXXIYLVSIPSLKTPAXX

SEQ ID NO: 25603 - protein, 35 aa, Artificial Sequence
  GFR-binding peptide
  MOD_RES (2), (33), (34): Xaa is C or S
KXSKVVMEYQKYVKPTRGVIYLISIPSLDQPVXXP

SEQ ID NO: 25604 - protein, 41 aa, Artificial Sequence
  GFR-binding peptide
  MOD_RES (1), (35): Xaa is C or S
  MOD_RES (13), (14), (15), (16), (17): Xaa is A or G
  MOD_RES (18), (19), (20), (21): Xaa is A or G or is absent
XSRVVMNEYQKYXXXXXXXXXIYLVSIPSLKTPAXTPKTVH

SEQ ID NO: 25605 - protein, 35 aa, Artificial Sequence; identical to SEQ ID NO: 4513
  GFR-binding peptide
  MOD_RES (34), (35): Xaa is C or S
  MOD_RES (12), (13), (14), (15), (16): Xaa is A or G
  MOD_RES (17), (18), (19), (20): Xaa is A or G or is absent

SEQ ID NO: 25606 - protein, 41 aa, Artificial Sequence
  GFR-binding peptide
  MOD_RES (1), (3), (37), (38): Xaa is C or S
  MOD_RES (15), (16), (17), (18), (19): Xaa is A or G
  MOD_RES (20), (21), (22), (23): Xaa is A or G or is absent
XGXAKVVMNEYKFKXXXXXXXXXLYLVSIPELKTPAXXAKP

SEQ ID NO: 25607 - protein, 38 aa, Artificial Sequence
  GFR-binding peptide
  MOD_RES (2), (4), (38): Xaa is C or S
  MOD_RES (16), (17), (18), (19), (20): Xaa is A or G
  MOD_RES (21), (22), (23), (24): Xaa is A or G or is absent
RXGXGEVVMEEYQKYXXXXXXXXXIYLMSIPSLETPVX

SEQ ID NO: 25608 - protein, 37 aa, Artificial Sequence
  GFR-binding peptide
  MOD_RES (2), (4), (37): Xaa is C or S
  MOD_RES (15), (16), (17), (18), (19): Xaa is A or G
  MOD_RES (20), (21), (22), (23): Xaa is A or G or is absent
SXKXSRVIMEYQKYXXXXXXXXXIYLISIPSLAQPVX

SEQ ID NO: 25609 - protein, 35 aa, Artificial Sequence
  GFR-binding peptide
  MOD_RES (2), (34), (35): Xaa is C or S
GXARVVMNEYQKYIVNSSDDIYLVSIPSLQTPAXX

SEQ ID NO: 25610 - protein, 39 aa, Artificial Sequence; identical to SEQ ID NO: 4514
  GFR-binding peptide
  MOD_RES (2), (36), (37): Xaa is C or S
  MOD_RES (14), (15), (16), (17), (18): Xaa is A or G
  MOD_RES (19), (20), (21), (22): Xaa is A or G or is absent

SEQ ID NO: 25611 - protein, 34 aa, Artificial Sequence
  GFR-binding peptide
  MOD_RES (1), (33), (34): Xaa is C or S
XAKVVMNEYQKYIVNNSSDIYLVSIPSLKTPAXX

SEQ ID NO: 25612 - protein, 36 aa, Artificial Sequence
  GFR-binding peptide
  MOD_RES (1), (3): Xaa is C or S
  MOD_RES (15), (16), (17), (18), (19): Xaa is A or G
  MOD_RES (20), (21), (22), (23): Xaa is A or G or is absent
XGXAKVVMNEYKFKXXXXXXXXXLYLVSIPELKTPA

SEQ ID NO: 25613 - protein, 41 aa, Artificial Sequence
  GFR-binding peptide
  MOD_RES (1), (3), (35), (36): Xaa is C or S
XGXESVAMGEYKFKYTVVGKDLYLISIPELKTPVXXAKSAK

SEQ ID NO: 25614 - protein, 36 aa, Artificial Sequence
  GFR-binding peptide
  MOD_RES (2), (36): Xaa is C or S
  MOD_RES (14), (15), (16), (17), (18): Xaa is A or G
  MOD_RES (19), (20), (21), (22): Xaa is A or G or is absent
GXAKVVMNEYQKYXXXXXXXXXIYLVSIPSLKTPAX

SEQ ID NO: 25615 - protein, 35 aa, Artificial Sequence; identical to SEQ ID NO: 4523
  GFR-binding peptide
  MOD_RES (33), (34): Xaa is C or S
  MOD_RES (11), (12), (13), (14), (15): Xaa is A or G
  MOD_RES (16), (17), (18), (19): Xaa is A or G or is absent

SEQ ID NO: 25616 - protein, 38 aa, Artificial Sequence
  GFR-binding peptide
  MOD_RES (1), (35): Xaa is C or S
  MOD_RES (13), (14), (15), (16), (17): Xaa is A or G
  MOD_RES (18), (19), (20), (21): Xaa is A or G or is absent
XSRVVMNEYQKYXXXXXXXXXIYLVSIPSLKTPAXTPK

SEQ ID NO: 25617 - protein, 37 aa, Artificial Sequence; identical to SEQ ID NO: 4527
  GFR-binding peptide
  MOD_RES (1), (3), (37): Xaa is C or S
  MOD_RES (15), (16), (17), (18), (19): Xaa is A or G
  MOD_RES (20), (21), (22), (23): Xaa is A or G or is absent

SEQ ID NO: 25618 - protein, 36 aa, Artificial Sequence
  GFR-binding peptide
  MOD_RES (2), (36): Xaa is C or S
  MOD_RES (14), (15), (16), (17), (18): Xaa is A or G
  MOD_RES (19), (20), (21), (22): Xaa is A or G or is absent
GXGEVVMDEYKFKXXXXXXXXXLYLMSIPELETPVX

SEQ ID NO: 25619 - protein, 34 aa, Artificial Sequence
  GFR-binding peptide
  MOD_RES (34), (34): Xaa is C or S
  MOD_RES (12), (13), (14), (15), (16): Xaa is A or G
  MOD_RES (17), (18), (19), (20): Xaa is A or G or is absent
ARVVMNEYQKYXXXXXXXXXIYLVSIPSLQTPAX

SEQ ID NO: 25620 - protein, 36 aa, Artificial Sequence
  GFR-binding peptide
  MOD_RES (31), (32): Xaa is C or S
RVVMNEYKFKIVNSSDDLYLVSIPELQTPAXXPKPV

SEQ ID NO: 25621 - protein, 38 aa, Artificial Sequence; identical to SEQ ID NO: 4528
  GFR-binding peptide
  MOD_RES (2), (4), (36), (37): Xaa is C or S

SEQ ID NO: 25622 - protein, 39 aa, Artificial Sequence
  GFR-binding peptide
  MOD_RES (33), (34): Xaa is C or S
  MOD_RES (11), (12), (13), (14), (15): Xaa is A or G
  MOD_RES (16), (17), (18), (19): Xaa is A or G or is absent
KVVMNEYQKYXXXXXXXXXIYLVSIPSLKTPAXXAKPVA

SEQ ID NO: 25623 - protein, 36 aa, Artificial Sequence
  GFR-binding peptide
  MOD_RES (1), (33): Xaa is C or S
XSRVVMNEYKFKIVNSSDDLYLVSIPELKTPAXTPK

SEQ ID NO: 25624 - protein, 35 aa, Artificial Sequence
  GFR-binding peptide
  MOD_RES (35), (35): Xaa is C or S
  MOD_RES (13), (14), (15), (16), (17): Xaa is A or G
  MOD_RES (18), (19), (20), (21): Xaa is A or G or is absent
EAVSMGEEYKFKXXXXXXXXXLYLVSIPELKTPVX

SEQ ID NO: 25625 - protein, 39 aa, Artificial Sequence
  GFR-binding peptide
  MOD_RES (2), (4), (37), (38): Xaa is C or S
  MOD_RES (15), (16), (17), (18), (19): Xaa is A or G
  MOD_RES (20), (21), (22), (23): Xaa is A or G or is absent
SXKXSKVVMEYKFKXXXXXXXXXLYLISIPELDQPVXXP

SEQ ID NO: 25626 - protein, 41 aa, Artificial Sequence
  GFR-binding peptide
  MOD_RES (1), (3), (37): Xaa is C or S
  MOD_RES (15), (16), (17), (18), (19): Xaa is A or G
  MOD_RES (20), (21), (22), (23): Xaa is A or G or is absent
XGXSRVVMNEYKFKXXXXXXXXXLYLVSIPELKTPAXTPKT

SEQ ID NO: 25627 - protein, 38 aa, Artificial Sequence
  GFR-binding peptide
  MOD_RES (1), (33), (34): Xaa is C or S
XAEVVMDEYKFKVVNNAADLYLISIPELRAPVXXSAPA

SEQ ID NO: 25628 - protein, 39 aa, Artificial Sequence; identical to SEQ ID NO: 4533
  GFR-binding peptide
  MOD_RES (1), (35), (36): Xaa is C or S
  MOD_RES (13), (14), (15), (16), (17): Xaa is A or G
  MOD_RES (18), (19), (20), (21): Xaa is A or G or is absent

SEQ ID NO: 25629 - protein, 36 aa, Artificial Sequence; identical to SEQ ID NO: 4534
  GFR-binding peptide
  MOD_RES (32), (33): Xaa is C or S

SEQ ID NO: 25630 - protein, 39 aa, Artificial Sequence
  GFR-binding peptide
  MOD_RES (33), (34): Xaa is C or S
  MOD_RES (11), (12), (13), (14), (15): Xaa is A or G
  MOD_RES (16), (17), (18), (19): Xaa is A or G or is absent
EVVMDEYQKYXXXXXXXXXIYLMSIPSLETPVXXAKPIK

SEQ ID NO: 25631 - protein, 38 aa, Artificial Sequence
  GFR-binding peptide
  MOD_RES (1), (3), (35), (36): Xaa is C or S
XGXAKVVMNEYKFKIVNNSSDLYLVSIPELKTPAXXAK

SEQ ID NO: 25632 - protein, 36 aa, Artificial Sequence
  GFR-binding peptide
  MOD_RES (2), (33), (34): Xaa is C or S
KXSKVVMEYQKYVKPTRGVIYLISIPSLDQPVXXPS

SEQ ID NO: 25633 - protein, 35 aa, Artificial Sequence; identical to SEQ ID NO: 4537
  GFR-binding peptide
  MOD_RES (2), (4): Xaa is C or S

SEQ ID NO: 25634 - protein, 34 aa, Artificial Sequence; identical to SEQ ID NO: 4538
  GFR-binding peptide
  MOD_RES (2), (33), (34): Xaa is C or S

SEQ ID NO: 25635 - protein, 34 aa, Artificial Sequence; identical to SEQ ID NO: 4539
  GFR-binding peptide
  MOD_RES (32), (33): Xaa is C or S

SEQ ID NO: 25636 - protein, 34 aa, Artificial Sequence; identical to SEQ ID NO: 4540
  GFR-binding peptide
  MOD_RES (2), (34): Xaa is C or S

SEQ ID NO: 25637 - protein, 37 aa, Artificial Sequence
  GFR-binding peptide
  MOD_RES (2), (4), (36), (37): Xaa is C or S
RXGXAEVVMDRYKKLVVNNAADFYLISIANLRAPVXX

SEQ ID NO: 25638 - protein, 38 aa, Artificial Sequence
  GFR-binding peptide
  MOD_RES (2), (4), (36), (37): Xaa is C or S
HXGXAKVVMNEYKFKIVNNSSDLYLVSIPELKTPAXXA

SEQ ID NO: 25639 - protein, 34 aa, Artificial Sequence
  GFR-binding peptide
  MOD_RES (32), (33): Xaa is C or S
AKVVMNEYQKYIVNNSSDIYLVSIPSLKTPAXXA

SEQ ID NO: 25640 - protein, 36 aa, Artificial Sequence
  GFR-binding peptide
  MOD_RES (1), (32), (33): Xaa is C or S
XSKVIMEYQKYIKPTKGIIYLISIPSLDQSVXXPSA

SEQ ID NO: 25641 - protein, 38 aa, Artificial Sequence
  GFR-binding peptide
  MOD_RES (1), (3), (37), (38): Xaa is C or S
  MOD_RES (15), (16), (17), (18), (19): Xaa is A or G
  MOD_RES (20), (21), (22), (23): Xaa is A or G or is absent
XGXESVAMGEYKFKXXXXXXXXXLYLISIPELKTPVXX

SEQ ID NO: 25642 - protein, 33 aa, Artificial Sequence
  GFR-binding peptide
  MOD_RES (12), (13), (14), (15), (16): Xaa is A or G
  MOD_RES (17), (18), (19), (20): Xaa is A or G or is absent
AEVVMDYHYKLXXXXXXXXXKYLISIPSLRAPV

SEQ ID NO: 25643 - protein, 37 aa, Artificial Sequence
  GFR-binding peptide
  MOD_RES (2), (4), (36), (37): Xaa is C or S
HXGXSRVVMNEYQKYIVNSSDDIYLVSIPSLKTPAXX

SEQ ID NO: 25644 - protein, 39 aa, Artificial Sequence
  GFR-binding peptide
  MOD_RES (1), (3), (35), (36): Xaa is C or S
XGXAEVVMDRYKKLVVNNAADFYLISIANLRAPVXXSAP

SEQ ID NO: 25645 - protein, 39 aa, Artificial Sequence
  GFR-binding peptide
  MOD_RES (2), (34), (35): Xaa is C or S
GXESVAMGEYKFKYTVVGKDLYLISIPELKTPVXXAKSA

SEQ ID NO: 25646 - protein, 34 aa, Artificial Sequence; identical to SEQ ID NO: 4552
  GFR-binding peptide
  MOD_RES (31), (32): Xaa is C or S

SEQ ID NO: 25647 - protein, 40 aa, Artificial Sequence; identical to SEQ ID NO: 4553
  GFR-binding peptide
  MOD_RES (34), (35): Xaa is C or S
  MOD_RES (12), (13), (14), (15), (16): Xaa is A or G
  MOD_RES (17), (18), (19), (20): Xaa is A or G or is absent

SEQ ID NO: 25648 - protein, 36 aa, Artificial Sequence
  GFR-binding peptide
  MOD_RES (34), (35): Xaa is C or S
  MOD_RES (12), (13), (14), (15), (16): Xaa is A or G
  MOD_RES (17), (18), (19), (20): Xaa is A or G or is absent
ESVAMGEYQKYXXXXXXXXXIYLISIPSLKTPVXXA

SEQ ID NO: 25649 - protein, 36 aa, Artificial Sequence; identical to SEQ ID NO: 4556
  GFR-binding peptide
  MOD_RES (1), (33), (34): Xaa is C or S

SEQ ID NO: 25650 - protein, 36 aa, Artificial Sequence
  GFR-binding peptide
  MOD_RES (1), (35), (36): Xaa is C or S
  MOD_RES (13), (14), (15), (16), (17): Xaa is A or G
  MOD_RES (18), (19), (20), (21): Xaa is A or G or is absent
XAEVVMDEYQKYXXXXXXXXXIYLISIPSLRAPVXX

SEQ ID NO: 25651 - protein, 35 aa, Artificial Sequence; identical to SEQ ID NO: 4558
  GFR-binding peptide
  MOD_RES (2), (2): Xaa is C or S
  MOD_RES (14), (15), (16), (17), (18): Xaa is A or G
  MOD_RES (19), (20), (21), (22): Xaa is A or G or is absent

SEQ ID NO: 25652 - protein, 37 aa, Artificial Sequence
  GFR-binding peptide
  MOD_RES (33), (34): Xaa is C or S
EAVSMGEEYQKYTPVGMDDIYLVSIPSLKTPVXXAKG

SEQ ID NO: 25653 - protein, 42 aa, Artificial Sequence
  GFR-binding peptide
  MOD_RES (1), (3), (37), (38): Xaa is C or S
  MOD_RES (15), (16), (17), (18), (19): Xaa is A or G
  MOD_RES (20), (21), (22), (23): Xaa is A or G or is absent
XGXAKVVMNEYQKYXXXXXXXXXIYLVSIPSLKTPAXXAKPV

SEQ ID NO: 25654 - protein, 41 aa, Artificial Sequence
  GFR-binding peptide
  MOD_RES (1), (35), (36): Xaa is C or S
  MOD_RES (13), (14), (15), (16), (17): Xaa is A or G
  MOD_RES (18), (19), (20), (21): Xaa is A or G or is absent
XAKVVMNEYKFKXXXXXXXXXLYLVSIPELKTPAXXAKPVA

SEQ ID NO: 25655 - protein, 37 aa, Artificial Sequence; identical to SEQ ID NO: 4562
  GFR-binding peptide
  MOD_RES (1), (35), (36): Xaa is C or S
  MOD_RES (13), (14), (15), (16), (17): Xaa is A or G
  MOD_RES (18), (19), (20), (21): Xaa is A or G or is absent

SEQ ID NO: 25656 - protein, 40 aa, Artificial Sequence
  GFR-binding peptide
  MOD_RES (1), (35), (36): Xaa is C or S
  MOD_RES (13), (14), (15), (16), (17): Xaa is A or G
  MOD_RES (18), (19), (20), (21): Xaa is A or G or is absent
XAKVVMNEYQKYXXXXXXXXXIYLVSIPSLKTPAXXAKPV

SEQ ID NO: 25657 - protein, 38 aa, Artificial Sequence; identical to SEQ ID NO: 4566
  GFR-binding peptide
  MOD_RES (1), (3), (36), (37): Xaa is C or S
  MOD_RES (14), (15), (16), (17), (18): Xaa is A or G
  MOD_RES (19), (20), (21), (22): Xaa is A or G or is absent

SEQ ID NO: 25658 - protein, 39 aa, Artificial Sequence
  GFR-binding peptide
  MOD_RES (1), (35), (36): Xaa is C or S
  MOD_RES (13), (14), (15), (16), (17): Xaa is A or G
  MOD_RES (18), (19), (20), (21): Xaa is A or G or is absent
XSRVVMNEYKFKXXXXXXXXXLYLVSIPELKTPAXXPKP

SEQ ID NO: 25659 - protein, 39 aa, Artificial Sequence; identical to SEQ ID NO: 4570
  GFR-binding peptide
  MOD_RES (1), (3), (35), (36): Xaa is C or S

SEQ ID NO: 25660 - protein, 35 aa, Artificial Sequence
  GFR-binding peptide
  MOD_RES (2), (34), (35): Xaa is C or S
GXAEVVMDEYQKYVVNNAADIYLISIPSLRAPVXX

SEQ ID NO: 25661 - protein, 34 aa, Artificial Sequence
  GFR-binding peptide
  MOD_RES (33), (34): Xaa is C or S
  MOD_RES (11), (12), (13), (14), (15): Xaa is A or G
  MOD_RES (16), (17), (18), (19): Xaa is A or G or is absent
RVVMNEYQKYXXXXXXXXXIYLVSIPSLQTPAXX

SEQ ID NO: 25662 - protein, 37 aa, Artificial Sequence; identical to SEQ ID NO: 4572
  GFR-binding peptide
  MOD_RES (2), (4): Xaa is C or S
  MOD_RES (16), (17), (18), (19), (20): Xaa is A or G
  MOD_RES (21), (22), (23), (24): Xaa is A or G or is absent

SEQ ID NO: 25663 - protein, 36 aa, Artificial Sequence
  GFR-binding peptide
  MOD_RES (33), (34): Xaa is C or S
  MOD_RES (11), (12), (13), (14), (15): Xaa is A or G
  MOD_RES (16), (17), (18), (19): Xaa is A or G or is absent
KVVMNEYKFKXXXXXXXXXLYLVSIPELKTPAXXAK

SEQ ID NO: 25664 - protein, 33 aa, Artificial Sequence
  GFR-binding peptide
  MOD_RES (1), (3): Xaa is C or S
XKXSKVVMEYQKYVKPTRGVIYLISIPSLDQPV

SEQ ID NO: 25665 - protein, 41 aa, Artificial Sequence; identical to SEQ ID NO: 4575
  GFR-binding peptide
  MOD_RES (1), (3), (35), (36): Xaa is C or S

SEQ ID NO: 25666 - protein, 36 aa, Artificial Sequence
  GFR-binding peptide
  MOD_RES (31), (32): Xaa is C or S
SVAMGYHYKLYTVVGKDKYLISIPSLKTPVXXAKSA

SEQ ID NO: 25667 - protein, 38 aa, Artificial Sequence; identical to SEQ ID NO: 4579
  GFR-binding peptide
  MOD_RES (32), (33): Xaa is C or S

SEQ ID NO: 25668 - protein, 38 aa, Artificial Sequence
  GFR-binding peptide
  MOD_RES (1), (33), (34): Xaa is C or S
XARVVMNEYKFKIVNSSDDLYLVSIPELQTPAXXPKPV

SEQ ID NO: 25669 - protein, 37 aa, Artificial Sequence
  GFR-binding peptide
  MOD_RES (32), (33): Xaa is C or S
GEVVMEEYKFKVVKDYEDLYLMSIPELETPVXXAKPI

SEQ ID NO: 25670 - protein, 42 aa, Artificial Sequence
  GFR-binding peptide
  MOD_RES (2), (4), (38), (39): Xaa is C or S
  MOD_RES (16), (17), (18), (19), (20): Xaa is A or G
  MOD_RES (21), (22), (23), (24): Xaa is A or G or is absent
RXGXESVAMGRYKKLXXXXXXXXXFYLISIANLKTPVXXAKS

SEQ ID NO: 25671 - protein, 41 aa, Artificial Sequence
  GFR-binding peptide
  MOD_RES (2), (4), (36), (37): Xaa is C or S
RXGXGEVVMDEYKFKVVKENEDLYLMSIPELETPVXXAKPI

SEQ ID NO: 25672 - protein, 34 aa, Artificial Sequence
  GFR-binding peptide
  MOD_RES (34), (34): Xaa is C or S
  MOD_RES (12), (13), (14), (15), (16): Xaa is A or G
  MOD_RES (17), (18), (19), (20): Xaa is A or G or is absent
AEVVMDRYKKLXXXXXXXXXFYLISIANLRAPVX

SEQ ID NO: 25673 - protein, 35 aa, Artificial Sequence
  GFR-binding peptide
  MOD_RES (1), (32), (33): Xaa is C or S
XSKVIMEYQKYIKPTKGIIYLISIPSLDQSVXXPS

SEQ ID NO: 25674 - protein, 43 aa, Artificial Sequence
  GFR-binding peptide
  MOD_RES (2), (4), (37), (38): Xaa is C or S
RXGXEAVSMGEEYQKYTPVGMDDIYLVSIPSLKTPVXXAKGVK

SEQ ID NO: 25675 - protein, 38 aa, Artificial Sequence
  GFR-binding peptide
  MOD_RES (2), (4): Xaa is C or S
  MOD_RES (17), (18), (19), (20), (21): Xaa is A or G
  MOD_RES (22), (23), (24), (25): Xaa is A or G or is absent
RXGXEAVSMGEEYQKYXXXXXXXXXIYLVSIPSLKTPV

SEQ ID NO: 25676 - protein, 39 aa, Artificial Sequence
  GFR-binding peptide
  MOD_RES (1), (3), (37), (38): Xaa is C or S
  MOD_RES (15), (16), (17), (18), (19): Xaa is A or G
  MOD_RES (20), (21), (22), (23): Xaa is A or G or is absent
XGXAKVVMNEYQKYXXXXXXXXXIYLVSIPSLKTPAXXA

SEQ ID NO: 25677 - protein, 36 aa, Artificial Sequence
  GFR-binding peptide
  MOD_RES (1), (35), (36): Xaa is C or S
  MOD_RES (13), (14), (15), (16), (17): Xaa is A or G
  MOD_RES (18), (19), (20), (21): Xaa is A or G or is absent
XAEVVMDYHYKLXXXXXXXXXKYLISIPSLRAPVXX

SEQ ID NO: 25678 - protein, 35 aa, Artificial Sequence; identical to SEQ ID NO: 4588
  GFR-binding peptide
  MOD_RES (2), (35): Xaa is C or S
  MOD_RES (13), (14), (15), (16), (17): Xaa is A or G
  MOD_RES (18), (19), (20), (21): Xaa is A or G or is absent

SEQ ID NO: 25679 - protein, 38 aa, Artificial Sequence
  GFR-binding peptide
  MOD_RES (2), (4), (36), (37): Xaa is C or S
RXGXAEVVMDEYQKYVVNNAADIYLISIPSLRAPVXXS

SEQ ID NO: 25680 - protein, 43 aa, Artificial Sequence
  GFR-binding peptide
  MOD_RES (2), (4), (38): Xaa is C or S
  MOD_RES (16), (17), (18), (19), (20): Xaa is A or G
  MOD_RES (21), (22), (23), (24): Xaa is A or G or is absent
HXGXSRVVMNEYQKYXXXXXXXXXIYLVSIPSLKTPAXTPKTV

SEQ ID NO: 25681 - protein, 32 aa, Artificial Sequence
  GFR-binding peptide
  MOD_RES (1), (1): Xaa is C or S
XAEVVMDEYKFKVVNNAADLYLISIPELRAPV

SEQ ID NO: 25682 - protein, 37 aa, Artificial Sequence; identical to SEQ ID NO: 4589
  GFR-binding peptide
  MOD_RES (1), (35), (36): Xaa is C or S
  MOD_RES (13), (14), (15), (16), (17): Xaa is A or G
  MOD_RES (18), (19), (20), (21): Xaa is A or G or is absent

SEQ ID NO: 25683 - protein, 41 aa, Artificial Sequence
  GFR-binding peptide
  MOD_RES (2), (36), (37): Xaa is C or S
  MOD_RES (14), (15), (16), (17), (18): Xaa is A or G
  MOD_RES (19), (20), (21), (22): Xaa is A or G or is absent
GXAEVVMDEYQKYXXXXXXXXXIYLISIPSLRAPVXXSAPA

SEQ ID NO: 25684 - protein, 39 aa, Artificial Sequence
  GFR-binding peptide
  MOD_RES (2), (34), (35): Xaa is C or S
GXGEVVMDEYQKYVVKENEDIYLMSIPSLETPVXXAKPI

SEQ ID NO: 25685 - protein, 37 aa, Artificial Sequence
  GFR-binding peptide
  MOD_RES (1), (33), (34): Xaa is C or S
XAEVVMDEYQKYVVNNAADIYLISIPSLRAPVXXSAP

SEQ ID NO: 25686 - protein, 40 aa, Artificial Sequence
  GFR-binding peptide
  MOD_RES (1), (3), (36), (37): Xaa is C or S
  MOD_RES (14), (15), (16), (17), (18): Xaa is A or G
  MOD_RES (19), (20), (21), (22): Xaa is A or G or is absent
XKXSRVIMEYKFKXXXXXXXXXLYLISIPELAQPVXXPAA

SEQ ID NO: 25687 - protein, 37 aa, Artificial Sequence; identical to SEQ ID NO: 4594
  GFR-binding peptide
  MOD_RES (1), (35), (36): Xaa is C or S
  MOD_RES (13), (14), (15), (16), (17): Xaa is A or G
  MOD_RES (18), (19), (20), (21): Xaa is A or G or is absent

SEQ ID NO: 25688 - protein, 33 aa, Artificial Sequence
  GFR-binding peptide
  MOD_RES (12), (13), (14), (15), (16): Xaa is A or G
  MOD_RES (17), (18), (19), (20): Xaa is A or G or is absent
ESVAMGYHYKLXXXXXXXXXKYLISIPSLKTPV

SEQ ID NO: 25689 - protein, 38 aa, Artificial Sequence
  GFR-binding peptide
  MOD_RES (2), (36), (37): Xaa is C or S
  MOD_RES (14), (15), (16), (17), (18): Xaa is A or G
  MOD_RES (19), (20), (21), (22): Xaa is A or G or is absent
GXARVVMNEYKFKXXXXXXXXXLYLVSIPELQTPAXXP

SEQ ID NO: 25690 - protein, 36 aa, Artificial Sequence; identical to SEQ ID NO: 4597
  GFR-binding peptide
  MOD_RES (33), (34): Xaa is C or S
  MOD_RES (11), (12), (13), (14), (15): Xaa is A or G
  MOD_RES (16), (17), (18), (19): Xaa is A or G or is absent

SEQ ID NO: 25691 - protein, 40 aa, Artificial Sequence
  GFR-binding peptide
  MOD_RES (1), (34), (35): Xaa is C or S
  MOD_RES (12), (13), (14), (15), (16): Xaa is A or G
  MOD_RES (17), (18), (19), (20): Xaa is A or G or is absent
XSKVIMEYKFKXXXXXXXXXLYLISIPELDQSVXXPSASA

SEQ ID NO: 25692 - protein, 41 aa, Artificial Sequence
  GFR-binding peptide
  MOD_RES (2), (35), (36): Xaa is C or S
  MOD_RES (13), (14), (15), (16), (17): Xaa is A or G
  MOD_RES (18), (19), (20), (21): Xaa is A or G or is absent
KXSKVIMEYQKYXXXXXXXXXIYLISIPSLDQSVXXPSASA

SEQ ID NO: 25693 - protein, 40 aa, Artificial Sequence
  GFR-binding peptide
  MOD_RES (2), (34), (35): Xaa is C or S
GXAEVVMDYHYKLVVNNAADKYLISIPSLRAPVXXSAPAA

SEQ ID NO: 25694 - protein, 37 aa, Artificial Sequence
  GFR-binding peptide
  MOD_RES (2), (4), (37): Xaa is C or S
  MOD_RES (15), (16), (17), (18), (19): Xaa is A or G
  MOD_RES (20), (21), (22), (23): Xaa is A or G or is absent
SXKXSKVVMEYQKYXXXXXXXXXIYLISIPSLDQPVX

SEQ ID NO: 25695 - protein, 34 aa, Artificial Sequence; identical to SEQ ID NO: 4601
  GFR-binding peptide
  MOD_RES (1), (3), (34): Xaa is C or S

SEQ ID NO: 25696 - protein, 38 aa, Artificial Sequence; identical to SEQ ID NO: 4602
  GFR-binding peptide
  MOD_RES (1), (35), (36): Xaa is C or S
  MOD_RES (13), (14), (15), (16), (17): Xaa is A or G
  MOD_RES (18), (19), (20), (21): Xaa is A or G or is absent

SEQ ID NO: 25697 - protein, 37 aa, Artificial Sequence
  GFR-binding peptide
  MOD_RES (34), (35): Xaa is C or S
  MOD_RES (12), (13), (14), (15), (16): Xaa is A or G
  MOD_RES (17), (18), (19), (20): Xaa is A or G or is absent
GEVVMDEYQKYXXXXXXXXXIYLMSIPSLETPVXXAK

SEQ ID NO: 25698 - protein, 39 aa, Artificial Sequence; identical to SEQ ID NO: 4606
  GFR-binding peptide
  MOD_RES (2), (34), (35): Xaa is C or S

SEQ ID NO: 25699 - protein, 36 aa, Artificial Sequence; identical to SEQ ID NO: 4607
  GFR-binding peptide
  MOD_RES (2), (4), (35), (36): Xaa is C or S

SEQ ID NO: 25700 - protein, 34 aa, Artificial Sequence; identical to SEQ ID NO: 4610
  GFR-binding peptide
  MOD_RES (31), (32): Xaa is C or S

SEQ ID NO: 25701 - protein, 40 aa, Artificial Sequence
  GFR-binding peptide
  MOD_RES (2), (4), (37), (38): Xaa is C or S
  MOD_RES (15), (16), (17), (18), (19): Xaa is A or G
  MOD_RES (20), (21), (22), (23): Xaa is A or G or is absent
SXKXSKVIMEYQKYXXXXXXXXXIYLISIPSLDQSVXXPS

SEQ ID NO: 25702 - protein, 37 aa, Artificial Sequence
  GFR-binding peptide
  MOD_RES (1), (35), (36): Xaa is C or S
  MOD_RES (13), (14), (15), (16), (17): Xaa is A or G
  MOD_RES (18), (19), (20), (21): Xaa is A or G or is absent
XARVVMNEYQKYXXXXXXXXXIYLVSIPSLQTPAXXP

SEQ ID NO: 25703 - protein, 34 aa, Artificial Sequence
  GFR-binding peptide
  MOD_RES (2), (4): Xaa is C or S
SXKXSKVIMEYKFKIKPTKGILYLISIPELDQSV

SEQ ID NO: 25704 - protein, 35 aa, Artificial Sequence
  GFR-binding peptide
  MOD_RES (2), (34), (35): Xaa is C or S
GXSRVVMNEYKFKIVNSSDDLYLVSIPELKTPAXX

SEQ ID NO: 25705 - protein, 37 aa, Artificial Sequence
  GFR-binding peptide
  MOD_RES (1), (34), (35): Xaa is C or S
  MOD_RES (12), (13), (14), (15), (16): Xaa is A or G
  MOD_RES (17), (18), (19), (20): Xaa is A or G or is absent
XSKVVMEYQKYXXXXXXXXXIYLISIPSLDQPVXXPS

SEQ ID NO: 25706 - protein, 43 aa, Artificial Sequence; identical to SEQ ID NO: 4615
  GFR-binding peptide
  MOD_RES (1), (3), (37): Xaa is C or S
  MOD_RES (15), (16), (17), (18), (19): Xaa is A or G
  MOD_RES (20), (21), (22), (23): Xaa is A or G or is absent

SEQ ID NO: 25707 - protein, 37 aa, Artificial Sequence
  GFR-binding peptide
  MOD_RES (2), (4): Xaa is C or S
  MOD_RES (16), (17), (18), (19), (20): Xaa is A or G
  MOD_RES (21), (22), (23), (24): Xaa is A or G or is absent
RXGXESVAMGRYKKLXXXXXXXXXFYLISIANLKTPV

SEQ ID NO: 25708 - protein, 36 aa, Artificial Sequence
  GFR-binding peptide
  MOD_RES (2), (4), (36): Xaa is C or S
HXGXSRVVMNEYKFKIVNSSDDLYLVSIPELKTPAX

SEQ ID NO: 25709 - protein, 35 aa, Artificial Sequence
  GFR-binding peptide
  MOD_RES (2), (2): Xaa is C or S
  MOD_RES (14), (15), (16), (17), (18): Xaa is A or G
  MOD_RES (19), (20), (21), (22): Xaa is A or G or is absent
GXAKVVMNEYQKYXXXXXXXXXIYLVSIPSLKTPA

SEQ ID NO: 25710 - protein, 40 aa, Artificial Sequence; identical to SEQ ID NO: 4618
  GFR-binding peptide
  MOD_RES (1), (35), (36): Xaa is C or S
  MOD_RES (13), (14), (15), (16), (17): Xaa is A or G
  MOD_RES (18), (19), (20), (21): Xaa is A or G or is absent

SEQ ID NO: 25711 - protein, 33 aa, Artificial Sequence; identical to SEQ ID NO: 4619
  GFR-binding peptide
  MOD_RES (1), (33): Xaa is C or S

SEQ ID NO: 25712 - protein, 37 aa, Artificial Sequence
  GFR-binding peptide
  MOD_RES (1), (3), (37): Xaa is C or S
  MOD_RES (15), (16), (17), (18), (19): Xaa is A or G
  MOD_RES (20), (21), (22), (23): Xaa is A or G or is absent
XGXESVAMGYHYKLXXXXXXXXXKYLISIPSLKTPVX

SEQ ID NO: 25713 - protein, 31 aa, Artificial Sequence
  GFR-binding peptide
  MOD_RES (31), (31): Xaa is C or S
EVVMEEYQKYVVKDYEDIYLMSIPSLETPVX

SEQ ID NO: 25714 - protein, 34 aa, Artificial Sequence
  GFR-binding peptide
  MOD_RES (1), (34): Xaa is C or S
  MOD_RES (12), (13), (14), (15), (16): Xaa is A or G
  MOD_RES (17), (18), (19), (20): Xaa is A or G or is absent
XSRVIMEYKFKXXXXXXXXXLYLISIPELAQPVX

SEQ ID NO: 25715 - protein, 41 aa, Artificial Sequence; identical to SEQ ID NO: 4623
  GFR-binding peptide
  MOD_RES (2), (4), (38), (39): Xaa is C or S
  MOD_RES (16), (17), (18), (19), (20): Xaa is A or G
  MOD_RES (21), (22), (23), (24): Xaa is A or G or is absent

SEQ ID NO: 25716 - protein, 33 aa, Artificial Sequence; identical to SEQ ID NO: 4627
  GFR-binding peptide
  MOD_RES (1), (3): Xaa is C or S

SEQ ID NO: 25717 - protein, 39 aa, Artificial Sequence; identical to SEQ ID NO: 4630
  GFR-binding peptide
  MOD_RES (1), (34), (35): Xaa is C or S
  MOD_RES (12), (13), (14), (15), (16): Xaa is A or G
  MOD_RES (17), (18), (19), (20): Xaa is A or G or is absent

SEQ ID NO: 25718 - protein, 39 aa, Artificial Sequence
  GFR-binding peptide
  MOD_RES (1), (3), (37), (38): Xaa is C or S
  MOD_RES (15), (16), (17), (18), (19): Xaa is A or G
  MOD_RES (20), (21), (22), (23): Xaa is A or G or is absent
XGXAEVVMDYHYKLXXXXXXXXXKYLISIPSLRAPVXXS

SEQ ID NO: 25719 - protein, 42 aa, Artificial Sequence; identical to SEQ ID NO: 4632
  GFR-binding peptide
  MOD_RES (1), (3), (37), (38): Xaa is C or S
  MOD_RES (15), (16), (17), (18), (19): Xaa is A or G
  MOD_RES (20), (21), (22), (23): Xaa is A or G or is absent

SEQ ID NO: 25720 - protein, 41 aa, Artificial Sequence
  GFR-binding peptide
  MOD_RES (2), (36), (37): Xaa is C or S
  MOD_RES (14), (15), (16), (17), (18): Xaa is A or G
  MOD_RES (19), (20), (21), (22): Xaa is A or G or is absent
GXAEVVMDRYKKLXXXXXXXXXFYLISIANLRAPVXXSAPA

SEQ ID NO: 25721 - protein, 34 aa, Artificial Sequence
  GFR-binding peptide
  MOD_RES (33), (34): Xaa is C or S
  MOD_RES (11), (12), (13), (14), (15): Xaa is A or G
  MOD_RES (16), (17), (18), (19): Xaa is A or G or is absent
EVVMDRYKKLXXXXXXXXXFYLISIANLRAPVXX

SEQ ID NO: 25722 - protein, 37 aa, Artificial Sequence
  GFR-binding peptide
  MOD_RES (1), (32), (33): Xaa is C or S
XSKVIMEYKFKIKPTKGILYLISIPELDQSVXXPSAS

SEQ ID NO: 25723 - protein, 35 aa, Artificial Sequence; identical to SEQ ID NO: 4635
  GFR-binding peptide
  MOD_RES (32), (33): Xaa is C or S

SEQ ID NO: 25724 - protein, 39 aa, Artificial Sequence
  GFR-binding peptide
  MOD_RES (1), (35), (36): Xaa is C or S
  MOD_RES (13), (14), (15), (16), (17): Xaa is A or G
  MOD_RES (18), (19), (20), (21): Xaa is A or G or is absent
XGEVVMDEYQKYXXXXXXXXXIYLMSIPSLETPVXXAKP

SEQ ID NO: 25725 - protein, 38 aa, Artificial Sequence; identical to SEQ ID NO: 4636
  GFR-binding peptide
  MOD_RES (33), (33): Xaa is C or S
  MOD_RES (11), (12), (13), (14), (15): Xaa is A or G
  MOD_RES (16), (17), (18), (19): Xaa is A or G or is absent

SEQ ID NO: 25726 - protein, 35 aa, Artificial Sequence
  GFR-binding peptide
  MOD_RES (33), (34): Xaa is C or S
  MOD_RES (11), (12), (13), (14), (15): Xaa is A or G
  MOD_RES (16), (17), (18), (19): Xaa is A or G or is absent
RVVMNEYKFKXXXXXXXXXLYLVSIPELQTPAXXP

SEQ ID NO: 25727 - protein, 39 aa, Artificial Sequence
  GFR-binding peptide
  MOD_RES (2), (36), (37): Xaa is C or S
  MOD_RES (14), (15), (16), (17), (18): Xaa is A or G
  MOD_RES (19), (20), (21), (22): Xaa is A or G or is absent
GXAKVVMNEYKFKXXXXXXXXXLYLVSIPELKTPAXXAK

SEQ ID NO: 25728 - protein, 34 aa, Artificial Sequence
  GFR-binding peptide
  MOD_RES (32), (33): Xaa is C or S
AEVVMDEYQKYVVNNAADIYLISIPSLRAPVXXS

SEQ ID NO: 25729 - protein, 41 aa, Artificial Sequence; identical to SEQ ID NO: 4639
  GFR-binding peptide
  MOD_RES (2), (4), (36), (37): Xaa is C or S

SEQ ID NO: 25730 - protein, 33 aa, Artificial Sequence; identical to SEQ ID NO: 4640
  GFR-binding peptide
  MOD_RES (2), (2): Xaa is C or S

SEQ ID NO: 25731 - protein, 36 aa, Artificial Sequence
  GFR-binding peptide
  MOD_RES (2), (4), (36): Xaa is C or S
HXGXSRVVMNEYQKYIVNSSDDIYLVSIPSLKTPAX

SEQ ID NO: 25732 - protein, 38 aa, Artificial Sequence; identical to SEQ ID NO: 4641
  GFR-binding peptide
  MOD_RES (1), (3), (34), (35): Xaa is C or S

SEQ ID NO: 25733 - protein, 39 aa, Artificial Sequence; identical to SEQ ID NO: 4643
  GFR-binding peptide
  MOD_RES (2), (35), (36): Xaa is C or S
  MOD_RES (13), (14), (15), (16), (17): Xaa is A or G
  MOD_RES (18), (19), (20), (21): Xaa is A or G or is absent

SEQ ID NO: 25734 - protein, 34 aa, Artificial Sequence
  GFR-binding peptide
  MOD_RES (31), (32): Xaa is C or S
EVVMDRYKKLVVNNAADFYLISIANLRAPVXXSA

SEQ ID NO: 25735 - protein, 40 aa, Artificial Sequence; identical to SEQ ID NO: 4644
  GFR-binding peptide
  MOD_RES (1), (3), (35), (36): Xaa is C or S

SEQ ID NO: 25736 - protein, 33 aa, Artificial Sequence
  GFR-binding peptide
  MOD_RES (2), (33): Xaa is C or S
KXSKVIMEYKFKIKPTKGILYLISIPELDQSVX

SEQ ID NO: 25737 - protein, 37 aa, Artificial Sequence
  GFR-binding peptide
  MOD_RES (33), (34): Xaa is C or S
EAVSMGEEYKFKTPVGMDDLYLVSIPELKTPVXXAKG

SEQ ID NO: 25738 - protein, 33 aa, Artificial Sequence
  GFR-binding peptide
  MOD_RES (1), (33): Xaa is C or S
XAEVVMDRYKKLVVNNAADFYLISIANLRAPVX

SEQ ID NO: 25739 - protein, 41 aa, Artificial Sequence
  GFR-binding peptide
  MOD_RES (1), (3), (35), (36): Xaa is C or S
XGXGEVVMEEYKFKVVKDYEDLYLMSIPELETPVXXAKPIS

SEQ ID NO: 25740 - protein, 38 aa, Artificial Sequence; identical to SEQ ID NO: 4649
  GFR-binding peptide
  MOD_RES (1), (3), (34), (35): Xaa is C or S

SEQ ID NO: 25741 - protein, 37 aa, Artificial Sequence; identical to SEQ ID NO: 4651
  GFR-binding peptide
  MOD_RES (32), (32): Xaa is C or S

SEQ ID NO: 25742 - protein, 37 aa, Artificial Sequence
  GFR-binding peptide
  MOD_RES (34), (35): Xaa is C or S
  MOD_RES (12), (13), (14), (15), (16): Xaa is A or G
  MOD_RES (17), (18), (19), (20): Xaa is A or G or is absent
ESVAMGYHYKLXXXXXXXXXKYLISIPSLKTPVXXAK

SEQ ID NO: 25743 - protein, 35 aa, Artificial Sequence; identical to SEQ ID NO: 4652
  GFR-binding peptide
  MOD_RES (33), (34): Xaa is C or S
  MOD_RES (11), (12), (13), (14), (15): Xaa is A or G
  MOD_RES (16), (17), (18), (19): Xaa is A or G or is absent

SEQ ID NO: 25744 - protein, 31 aa, Artificial Sequence
  GFR-binding peptide
  MOD_RES (31), (31): Xaa is C or S
KVVMNEYQKYIVNNSSDIYLVSIPSLKTPAX

SEQ ID NO: 25745 - protein, 37 aa, Artificial Sequence; identical to SEQ ID NO: 4654
  GFR-binding peptide
  MOD_RES (1), (3), (35): Xaa is C or S

SEQ ID NO: 25746 - protein, 31 aa, Artificial Sequence; identical to SEQ ID NO: 4655
  GFR-binding peptide
  MOD_RES (1), (1): Xaa is C or S

SEQ ID NO: 25747 - protein, 38 aa, Artificial Sequence
  GFR-binding peptide
  MOD_RES (1), (3), (37), (38): Xaa is C or S
  MOD_RES (15), (16), (17), (18), (19): Xaa is A or G
  MOD_RES (20), (21), (22), (23): Xaa is A or G or is absent
XGXARVVMNEYKFKXXXXXXXXXLYLVSIPELQTPAXX

SEQ ID NO: 25748 - protein, 33 aa, Artificial Sequence
  GFR-binding peptide
  MOD_RES (1), (33): Xaa is C or S
XAKVVMNEYQKYIVNNSSDIYLVSIPSLKTPAX

SEQ ID NO: 25749 - protein, 36 aa, Artificial Sequence
  GFR-binding peptide
  MOD_RES (1), (35), (36): Xaa is C or S
  MOD_RES (13), (14), (15), (16), (17): Xaa is A or G
  MOD_RES (18), (19), (20), (21): Xaa is A or G or is absent
XESVAMGRYKKLXXXXXXXXXFYLISIANLKTPVXX

SEQ ID NO: 25750 - protein, 37 aa, Artificial Sequence
  GFR-binding peptide
  MOD_RES (34), (35): Xaa is C or S
  MOD_RES (12), (13), (14), (15), (16): Xaa is A or G
  MOD_RES (17), (18), (19), (20): Xaa is A or G or is absent
SRVVMNEYKFKXXXXXXXXXLYLVSIPELKTPAXXPK

SEQ ID NO: 25751 - protein, 38 aa, Artificial Sequence
  GFR-binding peptide
  MOD_RES (33), (34): Xaa is C or S
  MOD_RES (11), (12), (13), (14), (15): Xaa is A or G
  MOD_RES (16), (17), (18), (19): Xaa is A or G or is absent
SVAMGYHYKLXXXXXXXXXKYLISIPSLKTPVXXAKSA

SEQ ID NO: 25752 - protein, 41 aa, Artificial Sequence
  GFR-binding peptide
  MOD_RES (2), (36), (37): Xaa is C or S
  MOD_RES (14), (15), (16), (17), (18): Xaa is A or G
  MOD_RES (19), (20), (21), (22): Xaa is A or G or is absent
GXSRVVMNEYKFKXXXXXXXXXLYLVSIPELKTPAXXPKPV

SEQ ID NO: 25753 - protein, 41 aa, Artificial Sequence
  GFR-binding peptide
  MOD_RES (1), (3), (36), (37): Xaa is C or S
XGXEAVSMGEEYQKYTPVGMDDIYLVSIPSLKTPVXXAKGV

SEQ ID NO: 25754 - protein, 34 aa, Artificial Sequence; identical to SEQ ID NO: 4658
  GFR-binding peptide
  MOD_RES (34), (34): Xaa is C or S
  MOD_RES (12), (13), (14), (15), (16): Xaa is A or G
  MOD_RES (17), (18), (19), (20): Xaa is A or G or is absent

SEQ ID NO: 25755 - protein, 39 aa, Artificial Sequence; identical to SEQ ID NO: 4659
  GFR-binding peptide
  MOD_RES (2), (37), (38): Xaa is C or S
  MOD_RES (15), (16), (17), (18), (19): Xaa is A or G
  MOD_RES (20), (21), (22), (23): Xaa is A or G or is absent

SEQ ID NO: 25756 - protein, 43 aa, Artificial Sequence; identical to SEQ ID NO: 4661
  GFR-binding peptide
  MOD_RES (2), (4), (38): Xaa is C or S
  MOD_RES (16), (17), (18), (19), (20): Xaa is A or G
  MOD_RES (21), (22), (23), (24): Xaa is A or G or is absent

SEQ ID NO: 25757 - protein, 31 aa, Artificial Sequence; identical to SEQ ID NO: 4662
  GFR-binding peptide

SEQ ID NO: 25758 - protein, 38 aa, Artificial Sequence; identical to SEQ ID NO: 4664
  GFR-binding peptide
  MOD_RES (2), (36), (37): Xaa is C or S
  MOD_RES (14), (15), (16), (17), (18): Xaa is A or G
  MOD_RES (19), (20), (21), (22): Xaa is A or G or is absent

SEQ ID NO: 25759 - protein, 40 aa, Artificial Sequence; identical to SEQ ID NO: 4665
  GFR-binding peptide
  MOD_RES (34), (35): Xaa is C or S
  MOD_RES (12), (13), (14), (15), (16): Xaa is A or G
  MOD_RES (17), (18), (19), (20): Xaa is A or G or is absent

SEQ ID NO: 25760 - protein, 38 aa, Artificial Sequence; identical to SEQ ID NO: 4667
  GFR-binding peptide
  MOD_RES (33), (34): Xaa is C or S
  MOD_RES (11), (12), (13), (14), (15): Xaa is A or G
  MOD_RES (16), (17), (18), (19): Xaa is A or G or is absent

SEQ ID NO: 25761 - protein, 41 aa, Artificial Sequence
  GFR-binding peptide
  MOD_RES (2), (4), (38), (39): Xaa is C or S
  MOD_RES (16), (17), (18), (19), (20): Xaa is A or G
  MOD_RES (21), (22), (23), (24): Xaa is A or G or is absent
HXGXSRVVMNEYQKYXXXXXXXXXIYLVSIPSLKTPAXXPK

SEQ ID NO: 25762 - protein, 34 aa, Artificial Sequence
  GFR-binding peptide
  MOD_RES (2), (33), (34): Xaa is C or S
KXSKVIMEYKFKIKPTKGILYLISIPELDQSVXX

SEQ ID NO: 25763 - protein, 37 aa, Artificial Sequence; identical to SEQ ID NO: 4670
  GFR-binding peptide
  MOD_RES (2), (36), (37): Xaa is C or S
  MOD_RES (14), (15), (16), (17), (18): Xaa is A or G
  MOD_RES (19), (20), (21), (22): Xaa is A or G or is absent

SEQ ID NO: 25764 - protein, 39 aa, Artificial Sequence
  GFR-binding peptide
  MOD_RES (1), (34), (35): Xaa is C or S
XEAVSMGEEYKFKTPVGMDDLYLVSIPELKTPVXXAKGV

SEQ ID NO: 25765 - protein, 36 aa, Artificial Sequence
  GFR-binding peptide
  MOD_RES (1), (33), (34): Xaa is C or S
XARVVMNEYKFKIVNSSDDLYLVSIPELQTPAXXPK

SEQ ID NO: 25766 - protein, 36 aa, Artificial Sequence
  GFR-binding peptide
  MOD_RES (1), (33), (34): Xaa is C or S
XGEVVMDEYQKYVVKENEDIYLMSIPSLETPVXXAK

SEQ ID NO: 25767 - protein, 37 aa, Artificial Sequence
  GFR-binding peptide
  MOD_RES (1), (3), (35), (36): Xaa is C or S
XGXARVVMNEYKFKIVNSSDDLYLVSIPELQTPAXXP

SEQ ID NO: 25768 - protein, 38 aa, Artificial Sequence
  GFR-binding peptide
  MOD_RES (2), (34), (35): Xaa is C or S
GXESVAMGEYQKYYTVVGKDIYLISIPSLKTPVXXAKS

SEQ ID NO: 25769 - protein, 37 aa, Artificial Sequence
  GFR-binding peptide
  MOD_RES (32), (32): Xaa is C or S
SRVVMNEYQKYIVNSSDDIYLVSIPSLKTPAXTPKTV

SEQ ID NO: 25770 - protein, 36 aa, Artificial Sequence; identical to SEQ ID NO: 4682
  GFR-binding peptide
  MOD_RES (2), (33), (34): Xaa is C or S

SEQ ID NO: 25771 - protein, 32 aa, Artificial Sequence; identical to SEQ ID NO: 4685
  GFR-binding peptide
  MOD_RES (1), (32): Xaa is C or S

SEQ ID NO: 25772 - protein, 36 aa, Artificial Sequence
  GFR-binding peptide
  MOD_RES (2), (35), (36): Xaa is C or S
GXEAVSMGEEYQKYTPVGMDDIYLVSIPSLKTPVXX

SEQ ID NO: 25773 - protein, 36 aa, Artificial Sequence; identical to SEQ ID NO: 4686
  GFR-binding peptide
  MOD_RES (2), (35), (36): Xaa is C or S
  MOD_RES (13), (14), (15), (16), (17): Xaa is A or G
  MOD_RES (18), (19), (20), (21): Xaa is A or G or is absent

SEQ ID NO: 25774 - protein, 43 aa, Artificial Sequence
  GFR-binding peptide
  MOD_RES (2), (4), (37), (38): Xaa is C or S
  MOD_RES (15), (16), (17), (18), (19): Xaa is A or G
  MOD_RES (20), (21), (22), (23): Xaa is A or G or is absent
SXKXSKVVMEYKFKXXXXXXXXXLYLISIPELDQPVXXPSASA

SEQ ID NO: 25775 - protein, 40 aa, Artificial Sequence
  GFR-binding peptide
  MOD_RES (2), (35), (36): Xaa is C or S
  MOD_RES (13), (14), (15), (16), (17): Xaa is A or G
  MOD_RES (18), (19), (20), (21): Xaa is A or G or is absent
KXSKVIMEYQKYXXXXXXXXXIYLISIPSLDQSVXXPSAS

SEQ ID NO: 25776 - protein, 41 aa, Artificial Sequence
  GFR-binding peptide
  MOD_RES (2), (35), (36): Xaa is C or S
  MOD_RES (13), (14), (15), (16), (17): Xaa is A or G
  MOD_RES (18), (19), (20), (21): Xaa is A or G or is absent
KXSKVIMEYKFKXXXXXXXXXLYLISIPELDQSVXXPSASA

SEQ ID NO: 25777 - protein, 32 aa, Artificial Sequence
  GFR-binding peptide
  MOD_RES (1), (1): Xaa is C or S
XGEVVMDEYQKYVVKENEDIYLMSIPSLETPV

SEQ ID NO: 25778 - protein, 36 aa, Artificial Sequence; identical to SEQ ID NO: 4690
  GFR-binding peptide
  MOD_RES (2), (36): Xaa is C or S
  MOD_RES (14), (15), (16), (17), (18): Xaa is A or G
  MOD_RES (19), (20), (21), (22): Xaa is A or G or is absent

SEQ ID NO: 25779 - protein, 40 aa, Artificial Sequence
  GFR-binding peptide
  MOD_RES (1), (3), (36), (37): Xaa is C or S
  MOD_RES (14), (15), (16), (17), (18): Xaa is A or G
  MOD_RES (19), (20), (21), (22): Xaa is A or G or is absent
XKXSKVIMEYKFKXXXXXXXXXLYLISIPELDQSVXXPSA

SEQ ID NO: 25780 - protein, 40 aa, Artificial Sequence
  GFR-binding peptide
  MOD_RES (2), (4), (38), (39): Xaa is C or S
  MOD_RES (16), (17), (18), (19), (20): Xaa is A or G
  MOD_RES (21), (22), (23), (24): Xaa is A or G or is absent
HXGXAKVVMNEYQKYXXXXXXXXXIYLVSIPSLKTPAXXA

SEQ ID NO: 25781 - protein, 41 aa, Artificial Sequence; identical to SEQ ID NO: 4692
  GFR-binding peptide
  MOD_RES (1), (3), (36), (37): Xaa is C or S

SEQ ID NO: 25782 - protein, 35 aa, Artificial Sequence
  GFR-binding peptide
  MOD_RES (1), (35): Xaa is C or S
  MOD_RES (13), (14), (15), (16), (17): Xaa is A or G
  MOD_RES (18), (19), (20), (21): Xaa is A or G or is absent
XGEVVMEEYKFKXXXXXXXXXLYLMSIPELETPVX

SEQ ID NO: 25783 - protein, 38 aa, Artificial Sequence
  GFR-binding peptide
  MOD_RES (2), (36), (37): Xaa is C or S
  MOD_RES (14), (15), (16), (17), (18): Xaa is A or G
  MOD_RES (19), (20), (21), (22): Xaa is A or G or is absent
GXAKVVMNEYKFKXXXXXXXXXLYLVSIPELKTPAXXA

SEQ ID NO: 25784 - protein, 41 aa, Artificial Sequence; identical to SEQ ID NO: 4694
  GFR-binding peptide
  MOD_RES (2), (36), (37): Xaa is C or S
  MOD_RES (14), (15), (16), (17), (18): Xaa is A or G
  MOD_RES (19), (20), (21), (22): Xaa is A or G or is absent

SEQ ID NO: 25785 - protein, 39 aa, Artificial Sequence; identical to SEQ ID NO: 4698
  GFR-binding peptide
  MOD_RES (1), (33), (34): Xaa is C or S

SEQ ID NO: 25786 - protein, 34 aa, Artificial Sequence; identical to SEQ ID NO: 4699
  GFR-binding peptide
  MOD_RES (2), (33), (34): Xaa is C or S

SEQ ID NO: 25787 - protein, 34 aa, Artificial Sequence
  GFR-binding peptide
  MOD_RES (2), (34): Xaa is C or S
GXAEVVMDEYQKYVVNNAADIYLISIPSLRAPVX

SEQ ID NO: 25788 - protein, 39 aa, Artificial Sequence
  GFR-binding peptide
  MOD_RES (2), (36), (37): Xaa is C or S
  MOD_RES (14), (15), (16), (17), (18): Xaa is A or G
  MOD_RES (19), (20), (21), (22): Xaa is A or G or is absent
GXSRVVMNEYKFKXXXXXXXXXLYLVSIPELKTPAXXPK

SEQ ID NO: 25789 - protein, 36 aa, Artificial Sequence; identical to SEQ ID NO: 4708
  GFR-binding peptide
  MOD_RES (1), (35), (36): Xaa is C or S
  MOD_RES (13), (14), (15), (16), (17): Xaa is A or G
  MOD_RES (18), (19), (20), (21): Xaa is A or G or is absent

SEQ ID NO: 25790 - protein, 36 aa, Artificial Sequence
  GFR-binding peptide
  MOD_RES (2), (4), (36): Xaa is C or S
RXGXGEVVMEEYQKYVVKDYEDIYLMSIPSLETPVX

SEQ ID NO: 25791 - protein, 38 aa, Artificial Sequence; identical to SEQ ID NO: 4711
  GFR-binding peptide
  MOD_RES (2), (4), (35), (36): Xaa is C or S

SEQ ID NO: 25792 - protein, 37 aa, Artificial Sequence
  GFR-binding peptide
  MOD_RES (1), (33): Xaa is C or S
XSRVVMNEYQKYIVNSSDDIYLVSIPSLKTPAXTPKT

SEQ ID NO: 25793 - protein, 34 aa, Artificial Sequence; identical to SEQ ID NO: 4712
  GFR-binding peptide
  MOD_RES (1), (33), (34): Xaa is C or S

SEQ ID NO: 25794 - protein, 42 aa, Artificial Sequence
  GFR-binding peptide
  MOD_RES (1), (3), (36), (37): Xaa is C or S
  MOD_RES (14), (15), (16), (17), (18): Xaa is A or G
  MOD_RES (19), (20), (21), (22): Xaa is A or G or is absent
XKXSKVVMEYKFKXXXXXXXXXLYLISIPELDQPVXXPSASA

SEQ ID NO: 25795 - protein, 37 aa, Artificial Sequence
  GFR-binding peptide
  MOD_RES (32), (33): Xaa is C or S
SRVVMNEYKFKIVNSSDDLYLVSIPELKTPAXXPKPV

SEQ ID NO: 25796 - protein, 38 aa, Artificial Sequence; identical to SEQ ID NO: 4716
  GFR-binding peptide
  MOD_RES (2), (37), (38): Xaa is C or S
  MOD_RES (15), (16), (17), (18), (19): Xaa is A or G
  MOD_RES (20), (21), (22), (23): Xaa is A or G or is absent

SEQ ID NO: 25797 - protein, 35 aa, Artificial Sequence
  GFR-binding peptide
  MOD_RES (2), (4): Xaa is C or S
RXGXESVAMGRYKKLYTVVGKDFYLISIANLKTPV

SEQ ID NO: 25798 - protein, 32 aa, Artificial Sequence
  GFR-binding peptide
  MOD_RES (31), (32): Xaa is C or S
EVVMDRYKKLVVNNAADFYLISIANLRAPVXX

SEQ ID NO: 25799 - protein, 36 aa, Artificial Sequence; identical to SEQ ID NO: 4719
  GFR-binding peptide
  MOD_RES (1), (3), (35), (36): Xaa is C or S

SEQ ID NO: 25800 - protein, 39 aa, Artificial Sequence
  GFR-binding peptide
  MOD_RES (1), (3), (35), (36): Xaa is C or S
XGXAKVVMNEYQKYIVNNSSDIYLVSIPSLKTPAXXAKP

SEQ ID NO: 25801 - protein, 41 aa, Artificial Sequence; identical to SEQ ID NO: 4720
  GFR-binding peptide
  MOD_RES (1), (3), (37), (38): Xaa is C or S
  MOD_RES (15), (16), (17), (18), (19): Xaa is A or G
  MOD_RES (20), (21), (22), (23): Xaa is A or G or is absent

SEQ ID NO: 25802 - protein, 37 aa, Artificial Sequence
  GFR-binding peptide
  MOD_RES (31), (32): Xaa is C or S
EVVMDRYKKLVVNNAADFYLISIANLRAPVXXSAPAA

SEQ ID NO: 25803 - protein, 41 aa, Artificial Sequence
  GFR-binding peptide
  MOD_RES (1), (3), (36), (37): Xaa is C or S
  MOD_RES (14), (15), (16), (17), (18): Xaa is A or G
  MOD_RES (19), (20), (21), (22): Xaa is A or G or is absent
XKXSKVIMEYQKYXXXXXXXXXIYLISIPSLDQSVXXPSAS

SEQ ID NO: 25804 - protein, 37 aa, Artificial Sequence; identical to SEQ ID NO: 4723
  GFR-binding peptide
  MOD_RES (1), (32), (33): Xaa is C or S

SEQ ID NO: 25805 - protein, 33 aa, Artificial Sequence; identical to SEQ ID NO: 4724
  GFR-binding peptide
  MOD_RES (33), (33): Xaa is C or S
  MOD_RES (11), (12), (13), (14), (15): Xaa is A or G
  MOD_RES (16), (17), (18), (19): Xaa is A or G or is absent

SEQ ID NO: 25806 - protein, 37 aa, Artificial Sequence
  GFR-binding peptide
  MOD_RES (1), (3), (35), (36): Xaa is C or S
XGXESVAMGRYKKLYTVVGKDFYLISIANLKTPVXXA

SEQ ID NO: 25807 - protein, 33 aa, Artificial Sequence
  GFR-binding peptide
  MOD_RES (31), (31): Xaa is C or S
RVVMNEYKFKIVNSSDDLYLVSIPELKTPAXTP

SEQ ID NO: 25808 - protein, 39 aa, Artificial Sequence
  GFR-binding peptide
  MOD_RES (1), (3), (37), (38): Xaa is C or S
  MOD_RES (15), (16), (17), (18), (19): Xaa is A or G
  MOD_RES (20), (21), (22), (23): Xaa is A or G or is absent
XGXAKVVMNEYKFKXXXXXXXXXLYLVSIPELKTPAXXA

SEQ ID NO: 25809 - protein, 36 aa, Artificial Sequence
  GFR-binding peptide
  MOD_RES (2), (36): Xaa is C or S
  MOD_RES (14), (15), (16), (17), (18): Xaa is A or G
  MOD_RES (19), (20), (21), (22): Xaa is A or G or is absent
GXAEVVMDRYKKLXXXXXXXXXFYLISIANLRAPVX

SEQ ID NO: 25810 - protein, 34 aa, Artificial Sequence
  GFR-binding peptide
  MOD_RES (1), (3): Xaa is C or S
XGXGEVVMDEYKFKVVKENEDLYLMSIPELETPV

SEQ ID NO: 25811 - protein, 38 aa, Artificial Sequence; identical to SEQ ID NO: 4733
  GFR-binding peptide
  MOD_RES (2), (4), (37), (38): Xaa is C or S
  MOD_RES (15), (16), (17), (18), (19): Xaa is A or G
  MOD_RES (20), (21), (22), (23): Xaa is A or G or is absent

SEQ ID NO: 25812 - protein, 40 aa, Artificial Sequence
  GFR-binding peptide
  MOD_RES (2), (36), (37): Xaa is C or S
  MOD_RES (14), (15), (16), (17), (18): Xaa is A or G
  MOD_RES (19), (20), (21), (22): Xaa is A or G or is absent
GXAEVVMDEYQKYXXXXXXXXXIYLISIPSLRAPVXXSAP

SEQ ID NO: 25813 - protein, 33 aa, Artificial Sequence
  GFR-binding peptide
  MOD_RES (32), (33): Xaa is C or S
ESVAMGRYKKLYTVVGKDFYLISIANLKTPVXX

SEQ ID NO: 25814 - protein, 33 aa, Artificial Sequence; identical to SEQ ID NO: 4734
  GFR-binding peptide
  MOD_RES (31), (32): Xaa is C or S

SEQ ID NO: 25815 - protein, 32 aa, Artificial Sequence; identical to SEQ ID NO: 4735
  GFR-binding peptide
  MOD_RES (31), (32): Xaa is C or S

SEQ ID NO: 25816 - protein, 34 aa, Artificial Sequence; identical to SEQ ID NO: 4737
  GFR-binding peptide
  MOD_RES (1), (3): Xaa is C or S

SEQ ID NO: 25817 - protein, 37 aa, Artificial Sequence
  GFR-binding peptide
  MOD_RES (1), (3), (37): Xaa is C or S
  MOD_RES (15), (16), (17), (18), (19): Xaa is A or G
  MOD_RES (20), (21), (22), (23): Xaa is A or G or is absent
XGXGEVVMEEYKFKXXXXXXXXXLYLMSIPELETPVX

SEQ ID NO: 25818 - protein, 34 aa, Artificial Sequence; identical to SEQ ID NO: 4738
  GFR-binding peptide
  MOD_RES (34), (34): Xaa is C or S
  MOD_RES (12), (13), (14), (15), (16): Xaa is A or G
  MOD_RES (17), (18), (19), (20): Xaa is A or G or is absent

SEQ ID NO: 25819 - protein, 41 aa, Artificial Sequence; identical to SEQ ID NO: 4739
  GFR-binding peptide
  MOD_RES (2), (36), (37): Xaa is C or S
  MOD_RES (14), (15), (16), (17), (18): Xaa is A or G
  MOD_RES (19), (20), (21), (22): Xaa is A or G or is absent

SEQ ID NO: 25820 - protein, 40 aa, Artificial Sequence; identical to SEQ ID NO: 4743
  GFR-binding peptide
  MOD_RES (1), (3), (34), (35): Xaa is C or S

SEQ ID NO: 25821 - protein, 41 aa, Artificial Sequence
  GFR-binding peptide
  MOD_RES (2), (36), (37): Xaa is C or S
  MOD_RES (14), (15), (16), (17), (18): Xaa is A or G
  MOD_RES (19), (20), (21), (22): Xaa is A or G or is absent
GXAKVVMNEYKFKXXXXXXXXXLYLVSIPELKTPAXXAKPV

SEQ ID NO: 25822 - protein, 39 aa, Artificial Sequence
  GFR-binding peptide
  MOD_RES (1), (3), (35), (36): Xaa is C or S
XGXAEVVMDEYQKYVVNNAADIYLISIPSLRAPVXXSAP

SEQ ID NO: 25823 - protein, 36 aa, Artificial Sequence
  GFR-binding peptide
  MOD_RES (2), (4), (35), (36): Xaa is C or S
SXKXSRVIMEYQKYVKPKRGVIYLISIPSLAQPVXX

SEQ ID NO: 25824 - protein, 35 aa, Artificial Sequence
  GFR-binding peptide
  MOD_RES (2), (4), (35): Xaa is C or S
SXKXSKVIMEYKFKIKPTKGILYLISIPELDQSVX

SEQ ID NO: 25825 - protein, 41 aa, Artificial Sequence
  GFR-binding peptide
  MOD_RES (2), (36), (37): Xaa is C or S
  MOD_RES (14), (15), (16), (17), (18): Xaa is A or G
  MOD_RES (19), (20), (21), (22): Xaa is A or G or is absent
GXGEVVMEEYKFKXXXXXXXXXLYLMSIPELETPVXXAKPI

SEQ ID NO: 25826 - protein, 43 aa, Artificial Sequence
  GFR-binding peptide
  MOD_RES (1), (3), (37), (38): Xaa is C or S
  MOD_RES (15), (16), (17), (18), (19): Xaa is A or G
  MOD_RES (20), (21), (22), (23): Xaa is A or G or is absent
XGXAKVVMNEYQKYXXXXXXXXXIYLVSIPSLKTPAXXAKPVA

SEQ ID NO: 25827 - protein, 39 aa, Artificial Sequence
  GFR-binding peptide
  MOD_RES (2), (4), (38), (39): Xaa is C or S
  MOD_RES (16), (17), (18), (19), (20): Xaa is A or G
  MOD_RES (21), (22), (23), (24): Xaa is A or G or is absent
RXGXESVAMGRYKKLXXXXXXXXXFYLISIANLKTPVXX

SEQ ID NO: 25828 - protein, 34 aa, Artificial Sequence; identical to SEQ ID NO: 4750
  GFR-binding peptide
  MOD_RES (33), (34): Xaa is C or S
  MOD_RES (11), (12), (13), (14), (15): Xaa is A or G
  MOD_RES (16), (17), (18), (19): Xaa is A or G or is absent

SEQ ID NO: 25829 - protein, 38 aa, Artificial Sequence
  GFR-binding peptide
  MOD_RES (2), (4), (36), (37): Xaa is C or S
HXGXARVVMNEYKFKIVNSSDDLYLVSIPELQTPAXXP

SEQ ID NO: 25830 - protein, 32 aa, Artificial Sequence
  GFR-binding peptide
  MOD_RES (11), (12), (13), (14), (15): Xaa is A or G
  MOD_RES (16), (17), (18), (19): Xaa is A or G or is absent
EVVMDEYKFKXXXXXXXXXLYLISIPELRAPV

SEQ ID NO: 25831 - protein, 38 aa, Artificial Sequence
  GFR-binding peptide
  MOD_RES (1), (3), (35), (36): Xaa is C or S
XGXAKVVMNEYQKYIVNNSSDIYLVSIPSLKTPAXXAK

SEQ ID NO: 25832 - protein, 39 aa, Artificial Sequence; identical to SEQ ID NO: 4751
  GFR-binding peptide
  MOD_RES (1), (3), (37), (38): Xaa is C or S
  MOD_RES (15), (16), (17), (18), (19): Xaa is A or G
  MOD_RES (20), (21), (22), (23): Xaa is A or G or is absent

SEQ ID NO: 25833 - protein, 37 aa, Artificial Sequence; identical to SEQ ID NO: 4752
  GFR-binding peptide
  MOD_RES (31), (32): Xaa is C or S

SEQ ID NO: 25834 - protein, 39 aa, Artificial Sequence
  GFR-binding peptide
  MOD_RES (2), (33), (34): Xaa is C or S
KXSRVIMEYKFKVKPKRGVLYLISIPELAQPVXXPAASA

SEQ ID NO: 25835 - protein, 33 aa, Artificial Sequence
  GFR-binding peptide
  MOD_RES (31), (32): Xaa is C or S
EVVMEEYKFKVVKDYEDLYLMSIPELETPVXXA

SEQ ID NO: 25836 - protein, 33 aa, Artificial Sequence; identical to SEQ ID NO: 4755
  GFR-binding peptide
  MOD_RES (31), (32): Xaa is C or S

SEQ ID NO: 25837 - protein, 35 aa, Artificial Sequence
  GFR-binding peptide
  MOD_RES (34), (35): Xaa is C or S
  MOD_RES (12), (13), (14), (15), (16): Xaa is A or G
  MOD_RES (17), (18), (19), (20): Xaa is A or G or is absent
AKVVMNEYQKYXXXXXXXXXIYLVSIPSLKTPAXX

SEQ ID NO: 25838 - protein, 36 aa, Artificial Sequence; identical to SEQ ID NO: 4756
  GFR-binding peptide
  MOD_RES (2), (4): Xaa is C or S
  MOD_RES (15), (16), (17), (18), (19): Xaa is A or G
  MOD_RES (20), (21), (22), (23): Xaa is A or G or is absent

SEQ ID NO: 25839 - protein, 37 aa, Artificial Sequence; identical to SEQ ID NO: 4757
  GFR-binding peptide
  MOD_RES (1), (3), (35), (36): Xaa is C or S

SEQ ID NO: 25840 - protein, 38 aa, Artificial Sequence
  GFR-binding peptide
  MOD_RES (1), (3), (37), (38): Xaa is C or S
  MOD_RES (15), (16), (17), (18), (19): Xaa is A or G
  MOD_RES (20), (21), (22), (23): Xaa is A or G or is absent
XGXARVVMNEYQKYXXXXXXXXXIYLVSIPSLQTPAXX

SEQ ID NO: 25841 - protein, 36 aa, Artificial Sequence
  GFR-binding peptide
  MOD_RES (2), (4), (36): Xaa is C or S
RXGXESVAMGRYKKLYTVVGKDFYLISIANLKTPVX

SEQ ID NO: 25842 - protein, 38 aa, Artificial Sequence
  GFR-binding peptide
  MOD_RES (33), (34): Xaa is C or S
  MOD_RES (11), (12), (13), (14), (15): Xaa is A or G
  MOD_RES (16), (17), (18), (19): Xaa is A or G or is absent
EVVMDRYKKLXXXXXXXXXFYLISIANLRAPVXXSAPA

SEQ ID NO: 25843 - protein, 43 aa, Artificial Sequence
  GFR-binding peptide
  MOD_RES (2), (4), (39), (40): Xaa is C or S
  MOD_RES (17), (18), (19), (20), (21): Xaa is A or G
  MOD_RES (22), (23), (24), (25): Xaa is A or G or is absent
RXGXEAVSMGEEYKFKXXXXXXXXXLYLVSIPELKTPVXXAKG

SEQ ID NO: 25844 - protein, 34 aa, Artificial Sequence; identical to SEQ ID NO: 4761
  GFR-binding peptide
  MOD_RES (31), (32): Xaa is C or S

SEQ ID NO: 25845 - protein, 37 aa, Artificial Sequence; identical to SEQ ID NO: 4762
  GFR-binding peptide
  MOD_RES (1), (3), (37): Xaa is C or S
  MOD_RES (15), (16), (17), (18), (19): Xaa is A or G
  MOD_RES (20), (21), (22), (23): Xaa is A or G or is absent

SEQ ID NO: 25846 - protein, 38 aa, Artificial Sequence
  GFR-binding peptide
  MOD_RES (32), (33): Xaa is C or S
GEVVMEEYKFKVVKDYEDLYLMSIPELETPVXXAKPIS

SEQ ID NO: 25847 - protein, 35 aa, Artificial Sequence
  GFR-binding peptide
  MOD_RES (34), (35): Xaa is C or S
  MOD_RES (12), (13), (14), (15), (16): Xaa is A or G
  MOD_RES (17), (18), (19), (20): Xaa is A or G or is absent
SRVVMNEYQKYXXXXXXXXXIYLVSIPSLKTPAXX

SEQ ID NO: 25848 - protein, 42 aa, Artificial Sequence
  GFR-binding peptide
  MOD_RES (2), (4), (38), (39): Xaa is C or S
  MOD_RES (16), (17), (18), (19), (20): Xaa is A or G
  MOD_RES (21), (22), (23), (24): Xaa is A or G or is absent
RXGXESVAMGEYQKYXXXXXXXXXIYLISIPSLKTPVXXAKS

SEQ ID NO: 25849 - protein, 37 aa, Artificial Sequence; identical to SEQ ID NO: 4764
  GFR-binding peptide
  MOD_RES (34), (35): Xaa is C or S
  MOD_RES (12), (13), (14), (15), (16): Xaa is A or G
  MOD_RES (17), (18), (19), (20): Xaa is A or G or is absent

SEQ ID NO: 25850 - protein, 38 aa, Artificial Sequence
  GFR-binding peptide
  MOD_RES (1), (3), (35), (36): Xaa is C or S
XGXAEVVMDEYQKYVVNNAADIYLISIPSLRAPVXXSA

SEQ ID NO: 25851 - protein, 38 aa, Artificial Sequence
  GFR-binding peptide
  MOD_RES (2), (34), (35): Xaa is C or S
GXARVVMNEYKFKIVNSSDDLYLVSIPELQTPAXXPKP

SEQ ID NO: 25852 - protein, 38 aa, Artificial Sequence; identical to SEQ ID NO: 4767
  GFR-binding peptide
  MOD_RES (32), (33): Xaa is C or S

SEQ ID NO: 25853 - protein, 40 aa, Artificial Sequence
  GFR-binding peptide
  MOD_RES (2), (35), (36): Xaa is C or S
  MOD_RES (13), (14), (15), (16), (17): Xaa is A or G
  MOD_RES (18), (19), (20), (21): Xaa is A or G or is absent
KXSKVIMEYKFKXXXXXXXXXLYLISIPELDQSVXXPSAS

SEQ ID NO: 25854 - protein, 39 aa, Artificial Sequence; identical to SEQ ID NO: 4768
  GFR-binding peptide
  MOD_RES (2), (36): Xaa is C or S
  MOD_RES (14), (15), (16), (17), (18): Xaa is A or G
  MOD_RES (19), (20), (21), (22): Xaa is A or G or is absent

SEQ ID NO: 25855 - protein, 33 aa, Artificial Sequence
  GFR-binding peptide
  MOD_RES (2), (2): Xaa is C or S
GXARVVMNEYKFKIVNSSDDLYLVSIPELQTPA

SEQ ID NO: 25856 - protein, 32 aa, Artificial Sequence
  GFR-binding peptide
  MOD_RES (32), (32): Xaa is C or S
AEVVMDEYQKYVVNNAADIYLISIPSLRAPVX

SEQ ID NO: 25857 - protein, 36 aa, Artificial Sequence
  GFR-binding peptide
  MOD_RES (1), (34), (35): Xaa is C or S
XEAVSMGEEYQKYTPVGMDDIYLVSIPSLKTPVXXA

SEQ ID NO: 25858 - protein, 38 aa, Artificial Sequence
  GFR-binding peptide
  MOD_RES (1), (33), (34): Xaa is C or S
XSRVVMNEYQKYIVNSSDDIYLVSIPSLKTPAXXPKPV

SEQ ID NO: 25859 - protein, 37 aa, Artificial Sequence; identical to SEQ ID NO: 4772
  GFR-binding peptide
  MOD_RES (34), (35): Xaa is C or S
  MOD_RES (12), (13), (14), (15), (16): Xaa is A or G
  MOD_RES (17), (18), (19), (20): Xaa is A or G or is absent

SEQ ID NO: 25860 - protein, 33 aa, Artificial Sequence; identical to SEQ ID NO: 4775
  GFR-binding peptide
  MOD_RES (1), (3): Xaa is C or S

SEQ ID NO: 25861 - protein, 41 aa, Artificial Sequence
  GFR-binding peptide
  MOD_RES (2), (4), (38), (39): Xaa is C or S
  MOD_RES (16), (17), (18), (19), (20): Xaa is A or G
  MOD_RES (21), (22), (23), (24): Xaa is A or G or is absent
HXGXAKVVMNEYKFKXXXXXXXXXLYLVSIPELKTPAXXAK

SEQ ID NO: 25862 - protein, 40 aa, Artificial Sequence; identical to SEQ ID NO: 4777
  GFR-binding peptide
  MOD_RES (2), (4), (35), (36): Xaa is C or S

SEQ ID NO: 25863 - protein, 40 aa, Artificial Sequence
  GFR-binding peptide
  MOD_RES (2), (4), (38): Xaa is C or S
  MOD_RES (16), (17), (18), (19), (20): Xaa is A or G
  MOD_RES (21), (22), (23), (24): Xaa is A or G or is absent
HXGXSRVVMNEYKFKXXXXXXXXXLYLVSIPELKTPAXTP

SEQ ID NO: 25864 - protein, 35 aa, Artificial Sequence
  GFR-binding peptide
  MOD_RES (33), (34): Xaa is C or S
  MOD_RES (11), (12), (13), (14), (15): Xaa is A or G
  MOD_RES (16), (17), (18), (19): Xaa is A or G or is absent
RVVMNEYKFKXXXXXXXXXLYLVSIPELKTPAXXP

SEQ ID NO: 25865 - protein, 35 aa, Artificial Sequence; identical to SEQ ID NO: 4780
  GFR-binding peptide
  MOD_RES (32), (32): Xaa is C or S

SEQ ID NO: 25866 - protein, 33 aa, Artificial Sequence
  GFR-binding peptide
  MOD_RES (32), (33): Xaa is C or S
ARVVMNEYQKYIVNSSDDIYLVSIPSLQTPAXX

SEQ ID NO: 25867 - protein, 34 aa, Artificial Sequence
  GFR-binding peptide
  MOD_RES (1), (3): Xaa is C or S
XGXAEVVMDEYKFKVVNNAADLYLISIPELRAPV

SEQ ID NO: 25868 - protein, 32 aa, Artificial Sequence
  GFR-binding peptide
  MOD_RES (32), (32): Xaa is C or S
GEVVMEEYKFKVVKDYEDLYLMSIPELETPVX

SEQ ID NO: 25869 - protein, 36 aa, Artificial Sequence; identical to SEQ ID NO: 4788
  GFR-binding peptide
  MOD_RES (34), (34): Xaa is C or S
  MOD_RES (12), (13), (14), (15), (16): Xaa is A or G
  MOD_RES (17), (18), (19), (20): Xaa is A or G or is absent

SEQ ID NO: 25870 - protein, 35 aa, Artificial Sequence; identical to SEQ ID NO: 4789
  GFR-binding peptide
  MOD_RES (1), (35): Xaa is C or S
  MOD_RES (13), (14), (15), (16), (17): Xaa is A or G
  MOD_RES (18), (19), (20), (21): Xaa is A or G or is absent

SEQ ID NO: 25871 - protein, 35 aa, Artificial Sequence; identical to SEQ ID NO: 4790
  GFR-binding peptide
  MOD_RES (1), (34), (35): Xaa is C or S
  MOD_RES (12), (13), (14), (15), (16): Xaa is A or G
  MOD_RES (17), (18), (19), (20): Xaa is A or G or is absent

SEQ ID NO: 25872 - protein, 42 aa, Artificial Sequence; identical to SEQ ID NO: 4792
  GFR-binding peptide
  MOD_RES (2), (4), (36), (37): Xaa is C or S

SEQ ID NO: 25873 - protein, 42 aa, Artificial Sequence
  GFR-binding peptide
  MOD_RES (2), (36), (37): Xaa is C or S
  MOD_RES (14), (15), (16), (17), (18): Xaa is A or G
  MOD_RES (19), (20), (21), (22): Xaa is A or G or is absent
GXAKVVMNEYKFKXXXXXXXXXLYLVSIPELKTPAXXAKPVA

SEQ ID NO: 25874 - protein, 38 aa, Artificial Sequence
  GFR-binding peptide
  MOD_RES (34), (35): Xaa is C or S
  MOD_RES (12), (13), (14), (15), (16): Xaa is A or G
  MOD_RES (17), (18), (19), (20): Xaa is A or G or is absent
AEVVMDEYQKYXXXXXXXXXIYLISIPSLRAPVXXSAP

SEQ ID NO: 25875 - protein, 42 aa, Artificial Sequence
  GFR-binding peptide
  MOD_RES (2), (4), (38): Xaa is C or S
  MOD_RES (16), (17), (18), (19), (20): Xaa is A or G
  MOD_RES (21), (22), (23), (24): Xaa is A or G or is absent
HXGXSRVVMNEYQKYXXXXXXXXXIYLVSIPSLKTPAXTPKT

SEQ ID NO: 25876 - protein, 38 aa, Artificial Sequence
  GFR-binding peptide
  MOD_RES (2), (4), (38): Xaa is C or S
  MOD_RES (16), (17), (18), (19), (20): Xaa is A or G
  MOD_RES (21), (22), (23), (24): Xaa is A or G or is absent
RXGXGEVVMEEYKFKXXXXXXXXXLYLMSIPELETPVX

SEQ ID NO: 25877 - protein, 39 aa, Artificial Sequence
  GFR-binding peptide
  MOD_RES (33), (34): Xaa is C or S
  MOD_RES (11), (12), (13), (14), (15): Xaa is A or G
  MOD_RES (16), (17), (18), (19): Xaa is A or G or is absent
SKVVMEYQKYXXXXXXXXXIYLISIPSLDQPVXXPSASA

SEQ ID NO: 25878 - protein, 40 aa, Artificial Sequence
  GFR-binding peptide
  MOD_RES (1), (3), (36), (37): Xaa is C or S
XGXEAVSMGEEYQKYTPVGMDDIYLVSIPSLKTPVXXAKG

SEQ ID NO: 25879 - protein, 33 aa, Artificial Sequence; identical to SEQ ID NO: 4800
  GFR-binding peptide
  MOD_RES (33), (33): Xaa is C or S
  MOD_RES (11), (12), (13), (14), (15): Xaa is A or G
  MOD_RES (16), (17), (18), (19): Xaa is A or G or is absent

SEQ ID NO: 25880 - protein, 38 aa, Artificial Sequence
  GFR-binding peptide
  MOD_RES (1), (3), (34), (35): Xaa is C or S
XKXSKVIMEYQKYIKPTKGIIYLISIPSLDQSVXXPSA

SEQ ID NO: 25881 - protein, 33 aa, Artificial Sequence; identical to SEQ ID NO: 4803
  GFR-binding peptide
  MOD_RES (1), (3): Xaa is C or S

SEQ ID NO: 25882 - protein, 34 aa, Artificial Sequence
  GFR-binding peptide
  MOD_RES (1), (34): Xaa is C or S
  MOD_RES (12), (13), (14), (15), (16): Xaa is A or G
  MOD_RES (17), (18), (19), (20): Xaa is A or G or is absent
XSKVIMEYKFKXXXXXXXXXLYLISIPELDQSVX

SEQ ID NO: 25883 - protein, 36 aa, Artificial Sequence
  GFR-binding peptide
  MOD_RES (34), (35): Xaa is C or S
  MOD_RES (12), (13), (14), (15), (16): Xaa is A or G
  MOD_RES (17), (18), (19), (20): Xaa is A or G or is absent
SRVVMNEYQKYXXXXXXXXXIYLVSIPSLKTPAXXP

SEQ ID NO: 25884 - protein, 40 aa, Artificial Sequence; identical to SEQ ID NO: 4806
  GFR-binding peptide
  MOD_RES (2), (4), (39), (40): Xaa is C or S
  MOD_RES (17), (18), (19), (20), (21): Xaa is A or G
  MOD_RES (22), (23), (24), (25): Xaa is A or G or is absent

SEQ ID NO: 25885 - protein, 39 aa, Artificial Sequence; identical to SEQ ID NO: 4807
  GFR-binding peptide
  MOD_RES (1), (3), (37), (38): Xaa is C or S
  MOD_RES (15), (16), (17), (18), (19): Xaa is A or G
  MOD_RES (20), (21), (22), (23): Xaa is A or G or is absent

SEQ ID NO: 25886 - protein, 34 aa, Artificial Sequence
  GFR-binding peptide
  MOD_RES (2), (4): Xaa is C or S
SXKXSKVIMEYQKYIKPTKGIIYLISIPSLDQSV

SEQ ID NO: 25887 - protein, 41 aa, Artificial Sequence; identical to SEQ ID NO: 4808
  GFR-binding peptide
  MOD_RES (1), (3), (36), (37): Xaa is C or S
  MOD_RES (14), (15), (16), (17), (18): Xaa is A or G
  MOD_RES (19), (20), (21), (22): Xaa is A or G or is absent

SEQ ID NO: 25888 - protein, 41 aa, Artificial Sequence; identical to SEQ ID NO: 4810
  GFR-binding peptide
  MOD_RES (2), (36), (37): Xaa is C or S
  MOD_RES (14), (15), (16), (17), (18): Xaa is A or G
  MOD_RES (19), (20), (21), (22): Xaa is A or G or is absent

SEQ ID NO: 25889 - protein, 39 aa, Artificial Sequence; identical to SEQ ID NO: 4811
  GFR-binding peptide
  MOD_RES (2), (4), (35), (36): Xaa is C or S

SEQ ID NO: 25890 - protein, 39 aa, Artificial Sequence
  GFR-binding peptide
  MOD_RES (2), (36), (37): Xaa is C or S
  MOD_RES (14), (15), (16), (17), (18): Xaa is A or G
  MOD_RES (19), (20), (21), (22): Xaa is A or G or is absent
GXESVAMGRYKKLXXXXXXXXXFYLISIANLKTPVXXAK

SEQ ID NO: 25891 - protein, 37 aa, Artificial Sequence; identical to SEQ ID NO: 4813
  GFR-binding peptide
  MOD_RES (1), (3), (35), (36): Xaa is C or S

SEQ ID NO: 25892 - protein, 37 aa, Artificial Sequence
  GFR-binding peptide
  MOD_RES (1), (34), (35): Xaa is C or S
  MOD_RES (12), (13), (14), (15), (16): Xaa is A or G
  MOD_RES (17), (18), (19), (20): Xaa is A or G or is absent
XSKVVMEYKFKXXXXXXXXXLYLISIPELDQPVXXPS

SEQ ID NO: 25893 - protein, 39 aa, Artificial Sequence
  GFR-binding peptide
  MOD_RES (2), (36), (37): Xaa is C or S
  MOD_RES (14), (15), (16), (17), (18): Xaa is A or G
  MOD_RES (19), (20), (21), (22): Xaa is A or G or is absent
GXAEVVMDEYQKYXXXXXXXXXIYLISIPSLRAPVXXSA

SEQ ID NO: 25894 - protein, 37 aa, Artificial Sequence
  GFR-binding peptide
  MOD_RES (35), (36): Xaa is C or S
  MOD_RES (13), (14), (15), (16), (17): Xaa is A or G
  MOD_RES (18), (19), (20), (21): Xaa is A or G or is absent
EAVSMGEEYQKYXXXXXXXXXIYLVSIPSLKTPVXXA

SEQ ID NO: 25895 - protein, 36 aa, Artificial Sequence
  GFR-binding peptide
  MOD_RES (1), (3), (36): Xaa is C or S
  MOD_RES (14), (15), (16), (17), (18): Xaa is A or G
  MOD_RES (19), (20), (21), (22): Xaa is A or G or is absent
XKXSKVVMEYQKYXXXXXXXXXIYLISIPSLDQPVX

SEQ ID NO: 25896 - protein, 41 aa, Artificial Sequence
  GFR-binding peptide
  MOD_RES (1), (35), (36): Xaa is C or S
  MOD_RES (13), (14), (15), (16), (17): Xaa is A or G
  MOD_RES (18), (19), (20), (21): Xaa is A or G or is absent
XAEVVMDEYQKYXXXXXXXXXIYLISIPSLRAPVXXSAPAA

SEQ ID NO: 25897 - protein, 40 aa, Artificial Sequence
  GFR-binding peptide
  MOD_RES (2), (36), (37): Xaa is C or S
  MOD_RES (14), (15), (16), (17), (18): Xaa is A or G
  MOD_RES (19), (20), (21), (22): Xaa is A or G or is absent
GXGEVVMEEYKFKXXXXXXXXXLYLMSIPELETPVXXAKP

SEQ ID NO: 25898 - protein, 33 aa, Artificial Sequence; identical to SEQ ID NO: 4817
  GFR-binding peptide
  MOD_RES (12), (13), (14), (15), (16): Xaa is A or G
  MOD_RES (17), (18), (19), (20): Xaa is A or G or is absent

SEQ ID NO: 25899 - protein, 37 aa, Artificial Sequence
  GFR-binding peptide
  MOD_RES (2), (4): Xaa is C or S
  MOD_RES (16), (17), (18), (19), (20): Xaa is A or G
  MOD_RES (21), (22), (23), (24): Xaa is A or G or is absent
RXGXAEVVMDEYKFKXXXXXXXXXLYLISIPELRAPV

SEQ ID NO: 25900 - protein, 41 aa, Artificial Sequence
  GFR-binding peptide
  MOD_RES (1), (3), (35), (36): Xaa is C or S
XGXAEVVMDEYKFKVVNNAADLYLISIPELRAPVXXSAPAA

SEQ ID NO: 25901 - protein, 40 aa, Artificial Sequence; identical to SEQ ID NO: 4821
  GFR-binding peptide
  MOD_RES (2), (4), (38): Xaa is C or S
  MOD_RES (16), (17), (18), (19), (20): Xaa is A or G
  MOD_RES (21), (22), (23), (24): Xaa is A or G or is absent

SEQ ID NO: 25902 - protein, 37 aa, Artificial Sequence; identical to SEQ ID NO: 4822
  GFR-binding peptide
  MOD_RES (1), (33), (34): Xaa is C or S

SEQ ID NO: 25903 - protein, 40 aa, Artificial Sequence; identical to SEQ ID NO: 4824
  GFR-binding peptide
  MOD_RES (1), (36), (37): Xaa is C or S
  MOD_RES (14), (15), (16), (17), (18): Xaa is A or G
  MOD_RES (19), (20), (21), (22): Xaa is A or G or is absent

SEQ ID NO: 25904 - protein, 37 aa, Artificial Sequence; identical to SEQ ID NO: 4825
  GFR-binding peptide
  MOD_RES (32), (33): Xaa is C or S

SEQ ID NO: 25905 - protein, 39 aa, Artificial Sequence; identical to SEQ ID NO: 4826
  GFR-binding peptide
  MOD_RES (2), (35), (36): Xaa is C or S

SEQ ID NO: 25906 - protein, 33 aa, Artificial Sequence; identical to SEQ ID NO: 4827
  GFR-binding peptide
  MOD_RES (1), (32), (33): Xaa is C or S

SEQ ID NO: 25907 - protein, 37 aa, Artificial Sequence; identical to SEQ ID NO: 4828
  GFR-binding peptide
  MOD_RES (31), (32): Xaa is C or S

SEQ ID NO: 25908 - protein, 36 aa, Artificial Sequence; identical to SEQ ID NO: 4829
  GFR-binding peptide
  MOD_RES (2), (34), (35): Xaa is C or S

SEQ ID NO: 25909 - protein, 35 aa, Artificial Sequence; identical to SEQ ID NO: 4835
  GFR-binding peptide
  MOD_RES (1), (3), (34), (35): Xaa is C or S

SEQ ID NO: 25910 - protein, 40 aa, Artificial Sequence
  GFR-binding peptide
  MOD_RES (1), (35), (36): Xaa is C or S
  MOD_RES (13), (14), (15), (16), (17): Xaa is A or G
  MOD_RES (18), (19), (20), (21): Xaa is A or G or is absent
XARVVMNEYKFKXXXXXXXXXLYLVSIPELQTPAXXPKPV

SEQ ID NO: 25911 - protein, 38 aa, Artificial Sequence; identical to SEQ ID NO: 4837
  GFR-binding peptide
  MOD_RES (2), (4), (37), (38): Xaa is C or S
  MOD_RES (15), (16), (17), (18), (19): Xaa is A or G
  MOD_RES (20), (21), (22), (23): Xaa is A or G or is absent

SEQ ID NO: 25912 - protein, 38 aa, Artificial Sequence
  GFR-binding peptide
  MOD_RES (1), (33), (34): Xaa is C or S
XSRVVMNEYKFKIVNSSDDLYLVSIPELKTPAXXPKPV

SEQ ID NO: 25913 - protein, 34 aa, Artificial Sequence
  GFR-binding peptide
  MOD_RES (1), (3): Xaa is C or S
XGXSRVVMNEYKFKIVNSSDDLYLVSIPELKTPA

SEQ ID NO: 25914 - protein, 32 aa, Artificial Sequence
  GFR-binding peptide
  MOD_RES (31), (32): Xaa is C or S
RVVMNEYQKYIVNSSDDIYLVSIPSLQTPAXX

SEQ ID NO: 25915 - protein, 32 aa, Artificial Sequence
  GFR-binding peptide
  MOD_RES (32), (32): Xaa is C or S
ARVVMNEYQKYIVNSSDDIYLVSIPSLQTPAX

SEQ ID NO: 25916 - protein, 38 aa, Artificial Sequence
  GFR-binding peptide
  MOD_RES (2), (36): Xaa is C or S
  MOD_RES (14), (15), (16), (17), (18): Xaa is A or G
  MOD_RES (19), (20), (21), (22): Xaa is A or G or is absent
GXSRVVMNEYKFKXXXXXXXXXLYLVSIPELKTPAXTP

SEQ ID NO: 25917 - protein, 39 aa, Artificial Sequence
  GFR-binding peptide
  MOD_RES (2), (34), (35): Xaa is C or S
GXGEVVMEEYQKYVVKDYEDIYLMSIPSLETPVXXAKPI

SEQ ID NO: 25918 - protein, 38 aa, Artificial Sequence; identical to SEQ ID NO: 4845
  GFR-binding peptide
  MOD_RES (2), (4), (36), (37): Xaa is C or S

SEQ ID NO: 25919 - protein, 36 aa, Artificial Sequence; identical to SEQ ID NO: 4847
  GFR-binding peptide
  MOD_RES (33), (34): Xaa is C or S
  MOD_RES (11), (12), (13), (14), (15): Xaa is A or G
  MOD_RES (16), (17), (18), (19): Xaa is A or G or is absent

SEQ ID NO: 25920 - protein, 31 aa, Artificial Sequence
  GFR-binding peptide
GEVVMEEYQKYVVKDYEDIYLMSIPSLETPV

SEQ ID NO: 25921 - protein, 35 aa, Artificial Sequence
  GFR-binding peptide
  MOD_RES (2), (4): Xaa is C or S
HXGXAKVVMNEYKFKIVNNSSDLYLVSIPELKTPA

SEQ ID NO: 25922 - protein, 41 aa, Artificial Sequence
  GFR-binding peptide
  MOD_RES (1), (3), (37), (38): Xaa is C or S
  MOD_RES (15), (16), (17), (18), (19): Xaa is A or G
  MOD_RES (20), (21), (22), (23): Xaa is A or G or is absent
XGXESVAMGEYKFKXXXXXXXXXLYLISIPELKTPVXXAKS

SEQ ID NO: 25923 - protein, 36 aa, Artificial Sequence
  GFR-binding peptide
  MOD_RES (1), (3): Xaa is C or S
  MOD_RES (15), (16), (17), (18), (19): Xaa is A or G
  MOD_RES (20), (21), (22), (23): Xaa is A or G or is absent
XGXESVAMGEYKFKXXXXXXXXXLYLISIPELKTPV

SEQ ID NO: 25924 - protein, 36 aa, Artificial Sequence
  GFR-binding peptide
  MOD_RES (1), (3): Xaa is C or S
  MOD_RES (15), (16), (17), (18), (19): Xaa is A or G
  MOD_RES (20), (21), (22), (23): Xaa is A or G or is absent
XGXAEVVMDRYKKLXXXXXXXXXFYLISIANLRAPV

SEQ ID NO: 25925 - protein, 32 aa, Artificial Sequence; identical to SEQ ID NO: 4852
  GFR-binding peptide
  MOD_RES (32), (32): Xaa is C or S

SEQ ID NO: 25926 - protein, 40 aa, Artificial Sequence
  GFR-binding peptide
  MOD_RES (2), (4), (38), (39): Xaa is C or S
  MOD_RES (16), (17), (18), (19), (20): Xaa is A or G
  MOD_RES (21), (22), (23), (24): Xaa is A or G or is absent
RXGXGEVVMEEYKFKXXXXXXXXXLYLMSIPELETPVXXA

SEQ ID NO: 25927 - protein, 38 aa, Artificial Sequence
  GFR-binding peptide
  MOD_RES (1), (33), (34): Xaa is C or S
XAEVVMDRYKKLVVNNAADFYLISIANLRAPVXXSAPA

SEQ ID NO: 25928 - protein, 36 aa, Artificial Sequence; identical to SEQ ID NO: 4856
  GFR-binding peptide
  MOD_RES (33), (33): Xaa is C or S
  MOD_RES (11), (12), (13), (14), (15): Xaa is A or G
  MOD_RES (16), (17), (18), (19): Xaa is A or G or is absent

SEQ ID NO: 25929 - protein, 35 aa, Artificial Sequence
  GFR-binding peptide
  MOD_RES (34), (35): Xaa is C or S
  MOD_RES (12), (13), (14), (15), (16): Xaa is A or G
  MOD_RES (17), (18), (19), (20): Xaa is A or G or is absent
AEVVMDEYKFKXXXXXXXXXLYLISIPELRAPVXX

SEQ ID NO: 25930 - protein, 36 aa, Artificial Sequence; identical to SEQ ID NO: 4859
  GFR-binding peptide
  MOD_RES (33), (34): Xaa is C or S
  MOD_RES (11), (12), (13), (14), (15): Xaa is A or G
  MOD_RES (16), (17), (18), (19): Xaa is A or G or is absent

SEQ ID NO: 25931 - protein, 41 aa, Artificial Sequence; identical to SEQ ID NO: 4860
  GFR-binding peptide
  MOD_RES (1), (35), (36): Xaa is C or S
  MOD_RES (13), (14), (15), (16), (17): Xaa is A or G
  MOD_RES (18), (19), (20), (21): Xaa is A or G or is absent

SEQ ID NO: 25932 - protein, 32 aa, Artificial Sequence; identical to SEQ ID NO: 4862
  GFR-binding peptide
  MOD_RES (32), (32): Xaa is C or S

SEQ ID NO: 25933 - protein, 37 aa, Artificial Sequence
  GFR-binding peptide
  MOD_RES (2), (34), (35): Xaa is C or S
GXESVAMGEYQKYYTVVGKDIYLISIPSLKTPVXXAK

SEQ ID NO: 25934 - protein, 39 aa, Artificial Sequence; identical to SEQ ID NO: 4866
  GFR-binding peptide
  MOD_RES (1), (35), (36): Xaa is C or S
  MOD_RES (13), (14), (15), (16), (17): Xaa is A or G
  MOD_RES (18), (19), (20), (21): Xaa is A or G or is absent

SEQ ID NO: 25935 - protein, 37 aa, Artificial Sequence; identical to SEQ ID NO: 4867
  GFR-binding peptide
  MOD_RES (2), (4): Xaa is C or S
  MOD_RES (16), (17), (18), (19), (20): Xaa is A or G
  MOD_RES (21), (22), (23), (24): Xaa is A or G or is absent

SEQ ID NO: 25936 - protein, 36 aa, Artificial Sequence
  GFR-binding peptide
  MOD_RES (1), (3), (35): Xaa is C or S
XGXSRVVMNEYKFKIVNSSDDLYLVSIPELKTPAXT

SEQ ID NO: 25937 - protein, 36 aa, Artificial Sequence; identical to SEQ ID NO: 4869
  GFR-binding peptide
  MOD_RES (1), (3), (36): Xaa is C or S

SEQ ID NO: 25938 - protein, 40 aa, Artificial Sequence
  GFR-binding peptide
  MOD_RES (1), (35), (36): Xaa is C or S
  MOD_RES (13), (14), (15), (16), (17): Xaa is A or G
  MOD_RES (18), (19), (20), (21): Xaa is A or G or is absent
XESVAMGYHYKLXXXXXXXXXKYLISIPSLKTPVXXAKSA

SEQ ID NO: 25939 - protein, 40 aa, Artificial Sequence; identical to SEQ ID NO: 4870
  GFR-binding peptide
  MOD_RES (2), (34), (35): Xaa is C or S

SEQ ID NO: 25940 - protein, 38 aa, Artificial Sequence
  GFR-binding peptide
  MOD_RES (1), (3), (37), (38): Xaa is C or S
  MOD_RES (15), (16), (17), (18), (19): Xaa is A or G
  MOD_RES (20), (21), (22), (23): Xaa is A or G or is absent
XGXGEVVMEEYQKYXXXXXXXXXIYLMSIPSLETPVXX

SEQ ID NO: 25941 - protein, 39 aa, Artificial Sequence
  GFR-binding peptide
  MOD_RES (33), (34): Xaa is C or S
  MOD_RES (11), (12), (13), (14), (15): Xaa is A or G
  MOD_RES (16), (17), (18), (19): Xaa is A or G or is absent
RVVMNEYKFKXXXXXXXXXLYLVSIPELKTPAXXPKPVY

SEQ ID NO: 25942 - protein, 30 aa, Artificial Sequence
  GFR-binding peptide
RVVMNEYKFKIVNSSDDLYLVSIPELQTPA

SEQ ID NO: 25943 - protein, 31 aa, Artificial Sequence
  GFR-binding peptide
GEVVMEEYKFKVVKDYEDLYLMSIPELETPV

SEQ ID NO: 25944 - protein, 37 aa, Artificial Sequence
  GFR-binding peptide
  MOD_RES (1), (35), (36): Xaa is C or S
  MOD_RES (13), (14), (15), (16), (17): Xaa is A or G
  MOD_RES (18), (19), (20), (21): Xaa is A or G or is absent
XAKVVMNEYKFKXXXXXXXXXLYLVSIPELKTPAXXA

SEQ ID NO: 25945 - protein, 35 aa, Artificial Sequence
  GFR-binding peptide
  MOD_RES (2), (4): Xaa is C or S
HXGXARVVMNEYKFKIVNSSDDLYLVSIPELQTPA

SEQ ID NO: 25946 - protein, 41 aa, Artificial Sequence
  GFR-binding peptide
  MOD_RES (2), (4), (36), (37): Xaa is C or S
RXGXAEVVMDRYKKLVVNNAADFYLISIANLRAPVXXSAPA

SEQ ID NO: 25947 - protein, 34 aa, Artificial Sequence; identical to SEQ ID NO: 4873
  GFR-binding peptide
  MOD_RES (31), (32): Xaa is C or S

SEQ ID NO: 25948 - protein, 31 aa, Artificial Sequence
  GFR-binding peptide
  MOD_RES (31), (31): Xaa is C or S
SVAMGEYQKYYTVVGKDIYLISIPSLKTPVX

SEQ ID NO: 25949 - protein, 33 aa, Artificial Sequence
  GFR-binding peptide
  MOD_RES (33), (33): Xaa is C or S
  MOD_RES (11), (12), (13), (14), (15): Xaa is A or G
  MOD_RES (16), (17), (18), (19): Xaa is A or G or is absent
RVVMNEYKFKXXXXXXXXXLYLVSIPELQTPAX

SEQ ID NO: 25950 - protein, 35 aa, Artificial Sequence
  GFR-binding peptide
  MOD_RES (1), (3), (34), (35): Xaa is C or S
XKXSKVVMEYQKYVKPTRGVIYLISIPSLDQPVXX

SEQ ID NO: 25951 - protein, 36 aa, Artificial Sequence
  GFR-binding peptide
  MOD_RES (2), (33), (34): Xaa is C or S
KXSRVIMEYKFKVKPKRGVLYLISIPELAQPVXXPA

SEQ ID NO: 25952 - protein, 44 aa, Artificial Sequence
  GFR-binding peptide
  MOD_RES (2), (4), (38), (39): Xaa is C or S
  MOD_RES (16), (17), (18), (19), (20): Xaa is A or G
  MOD_RES (21), (22), (23), (24): Xaa is A or G or is absent
RXGXGEVVMEEYKFKXXXXXXXXXLYLMSIPELETPVXXAKPIS

SEQ ID NO: 25953 - protein, 39 aa, Artificial Sequence
  GFR-binding peptide
  MOD_RES (1), (33), (34): Xaa is C or S
XGEVVMEEYQKYVVKDYEDIYLMSIPSLETPVXXAKPIS

SEQ ID NO: 25954 - protein, 35 aa, Artificial Sequence; identical to SEQ ID NO: 4875
  GFR-binding peptide
  MOD_RES (1), (3): Xaa is C or S
  MOD_RES (14), (15), (16), (17), (18): Xaa is A or G
  MOD_RES (19), (20), (21), (22): Xaa is A or G or is absent

SEQ ID NO: 25955 - protein, 38 aa, Artificial Sequence
  GFR-binding peptide
  MOD_RES (2), (36), (37): Xaa is C or S
  MOD_RES (14), (15), (16), (17), (18): Xaa is A or G
  MOD_RES (19), (20), (21), (22): Xaa is A or G or is absent
GXAEVVMDYHYKLXXXXXXXXXKYLISIPSLRAPVXXS

SEQ ID NO: 25956 - protein, 41 aa, Artificial Sequence; identical to SEQ ID NO: 4876
  GFR-binding peptide
  MOD_RES (1), (3), (35), (36): Xaa is C or S

SEQ ID NO: 25957 - protein, 36 aa, Artificial Sequence; identical to SEQ ID NO: 4877
  GFR-binding peptide
  MOD_RES (31), (32): Xaa is C or S

SEQ ID NO: 25958 - protein, 40 aa, Artificial Sequence; identical to SEQ ID NO: 4878
  GFR-binding peptide
  MOD_RES (2), (4), (36), (37): Xaa is C or S

SEQ ID NO: 25959 - protein, 37 aa, Artificial Sequence
  GFR-binding peptide
  MOD_RES (2), (36): Xaa is C or S
  MOD_RES (14), (15), (16), (17), (18): Xaa is A or G
  MOD_RES (19), (20), (21), (22): Xaa is A or G or is absent
GXSRVVMNEYQKYXXXXXXXXXIYLVSIPSLKTPAXT

SEQ ID NO: 25960 - protein, 39 aa, Artificial Sequence
  GFR-binding peptide
  MOD_RES (1), (3), (37): Xaa is C or S
  MOD_RES (15), (16), (17), (18), (19): Xaa is A or G
  MOD_RES (20), (21), (22), (23): Xaa is A or G or is absent
XGXSRVVMNEYKFKXXXXXXXXXLYLVSIPELKTPAXTP

SEQ ID NO: 25961 - protein, 39 aa, Artificial Sequence; identical to SEQ ID NO: 4885
  GFR-binding peptide
  MOD_RES (2), (4), (36), (37): Xaa is C or S

SEQ ID NO: 25962 - protein, 41 aa, Artificial Sequence
  GFR-binding peptide
  MOD_RES (1), (3), (37), (38): Xaa is C or S
  MOD_RES (15), (16), (17), (18), (19): Xaa is A or G
  MOD_RES (20), (21), (22), (23): Xaa is A or G or is absent
XGXAKVVMNEYQKYXXXXXXXXXIYLVSIPSLKTPAXXAKP

SEQ ID NO: 25963 - protein, 35 aa, Artificial Sequence
  GFR-binding peptide
  MOD_RES (33), (34): Xaa is C or S
  MOD_RES (11), (12), (13), (14), (15): Xaa is A or G
  MOD_RES (16), (17), (18), (19): Xaa is A or G or is absent
SKVVMEYQKYXXXXXXXXXIYLISIPSLDQPVXXP

SEQ ID NO: 25964 - protein, 35 aa, Artificial Sequence
  GFR-binding peptide
  MOD_RES (2), (4): Xaa is C or S
RXGXGEVVMEEYQKYVVKDYEDIYLMSIPSLETPV

SEQ ID NO: 25965 - protein, 33 aa, Artificial Sequence
  GFR-binding peptide
  MOD_RES (33), (33): Xaa is C or S
EAVSMGEEYQKYTPVGMDDIYLVSIPSLKTPVX

SEQ ID NO: 25966 - protein, 34 aa, Artificial Sequence
  GFR-binding peptide
  MOD_RES (34), (34): Xaa is C or S
  MOD_RES (12), (13), (14), (15), (16): Xaa is A or G
  MOD_RES (17), (18), (19), (20): Xaa is A or G or is absent
ESVAMGYHYKLXXXXXXXXXKYLISIPSLKTPVX

SEQ ID NO: 25967 - protein, 34 aa, Artificial Sequence; identical to SEQ ID NO: 4887
  GFR-binding peptide
  MOD_RES (32), (33): Xaa is C or S

SEQ ID NO: 25968 - protein, 37 aa, Artificial Sequence; identical to SEQ ID NO: 4889
  GFR-binding peptide
  MOD_RES (1), (3), (37): Xaa is C or S
  MOD_RES (15), (16), (17), (18), (19): Xaa is A or G
  MOD_RES (20), (21), (22), (23): Xaa is A or G or is absent

SEQ ID NO: 25969 - protein, 39 aa, Artificial Sequence
  GFR-binding peptide
  MOD_RES (2), (4), (38): Xaa is C or S
  MOD_RES (16), (17), (18), (19), (20): Xaa is A or G
  MOD_RES (21), (22), (23), (24): Xaa is A or G or is absent
HXGXSRVVMNEYKFKXXXXXXXXXLYLVSIPELKTPAXT

SEQ ID NO: 25970 - protein, 33 aa, Artificial Sequence
  GFR-binding peptide
  MOD_RES (32), (33): Xaa is C or S
ARVVMNEYKFKIVNSSDDLYLVSIPELQTPAXX

SEQ ID NO: 25971 - protein, 33 aa, Artificial Sequence
  GFR-binding peptide
  MOD_RES (31), (32): Xaa is C or S
RVVMNEYQKYIVNSSDDIYLVSIPSLQTPAXXP

SEQ ID NO: 25972 - protein, 38 aa, Artificial Sequence
  GFR-binding peptide
  MOD_RES (32), (33): Xaa is C or S
AKVVMNEYKFKIVNNSSDLYLVSIPELKTPAXXAKPVA

SEQ ID NO: 25973 - protein, 34 aa, Artificial Sequence
  GFR-binding peptide
  MOD_RES (1), (34): Xaa is C or S
  MOD_RES (12), (13), (14), (15), (16): Xaa is A or G
  MOD_RES (17), (18), (19), (20): Xaa is A or G or is absent
XSKVIMEYQKYXXXXXXXXXIYLISIPSLDQSVX

SEQ ID NO: 25974 - protein, 34 aa, Artificial Sequence
  GFR-binding peptide
  MOD_RES (1), (1): Xaa is C or S
  MOD_RES (13), (14), (15), (16), (17): Xaa is A or G
  MOD_RES (18), (19), (20), (21): Xaa is A or G or is absent
XAEVVMDEYKFKXXXXXXXXXLYLISIPELRAPV

SEQ ID NO: 25975 - protein, 36 aa, Artificial Sequence
  GFR-binding peptide
  MOD_RES (31), (32): Xaa is C or S
SKVIMEYKFKIKPTKGILYLISIPELDQSVXXPSAS

SEQ ID NO: 25976 - protein, 31 aa, Artificial Sequence; identical to SEQ ID NO: 4894
  GFR-binding peptide
  MOD_RES (31), (31): Xaa is C or S

SEQ ID NO: 25977 - protein, 37 aa, Artificial Sequence; identical to SEQ ID NO: 4895
  GFR-binding peptide
  MOD_RES (1), (3), (34), (35): Xaa is C or S

SEQ ID NO: 25978 - protein, 38 aa, Artificial Sequence
  GFR-binding peptide
  MOD_RES (1), (3), (37), (38): Xaa is C or S
  MOD_RES (15), (16), (17), (18), (19): Xaa is A or G
  MOD_RES (20), (21), (22), (23): Xaa is A or G or is absent
XGXAEVVMDEYKFKXXXXXXXXXLYLISIPELRAPVXX

SEQ ID NO: 25979 - protein, 41 aa, Artificial Sequence
  GFR-binding peptide
  MOD_RES (2), (4), (38), (39): Xaa is C or S
  MOD_RES (16), (17), (18), (19), (20): Xaa is A or G
  MOD_RES (21), (22), (23), (24): Xaa is A or G or is absent
HXGXSRVVMNEYKFKXXXXXXXXXLYLVSIPELKTPAXXPK

SEQ ID NO: 25980 - protein, 35 aa, Artificial Sequence
  GFR-binding peptide
  MOD_RES (34), (35): Xaa is C or S
  MOD_RES (12), (13), (14), (15), (16): Xaa is A or G
  MOD_RES (17), (18), (19), (20): Xaa is A or G or is absent
GEVVMDEYQKYXXXXXXXXXIYLMSIPSLETPVXX

SEQ ID NO: 25981 - protein, 41 aa, Artificial Sequence
  GFR-binding peptide
  MOD_RES (1), (3), (37), (38): Xaa is C or S
  MOD_RES (15), (16), (17), (18), (19): Xaa is A or G
  MOD_RES (20), (21), (22), (23): Xaa is A or G or is absent
XGXAEVVMDYHYKLXXXXXXXXXKYLISIPSLRAPVXXSAP

SEQ ID NO: 25982 - protein, 39 aa, Artificial Sequence; identical to SEQ ID NO: 4897
  GFR-binding peptide
  MOD_RES (2), (4), (37), (38): Xaa is C or S
  MOD_RES (15), (16), (17), (18), (19): Xaa is A or G
  MOD_RES (20), (21), (22), (23): Xaa is A or G or is absent

SEQ ID NO: 25983 - protein, 35 aa, Artificial Sequence; identical to SEQ ID NO: 4899
  GFR-binding peptide
  MOD_RES (2), (35): Xaa is C or S
  MOD_RES (13), (14), (15), (16), (17): Xaa is A or G
  MOD_RES (18), (19), (20), (21): Xaa is A or G or is absent

SEQ ID NO: 25984 - protein, 35 aa, Artificial Sequence
  GFR-binding peptide
  MOD_RES (1), (34), (35): Xaa is C or S
  MOD_RES (12), (13), (14), (15), (16): Xaa is A or G
  MOD_RES (17), (18), (19), (20): Xaa is A or G or is absent
XSRVIMEYQKYXXXXXXXXXIYLISIPSLAQPVXX

SEQ ID NO: 25985 - protein, 37 aa, Artificial Sequence
  GFR-binding peptide
  MOD_RES (1), (33), (34): Xaa is C or S
XAEVVMDRYKKLVVNNAADFYLISIANLRAPVXXSAP

SEQ ID NO: 25986 - protein, 41 aa, Artificial Sequence
  GFR-binding peptide
  MOD_RES (1), (35), (36): Xaa is C or S
  MOD_RES (13), (14), (15), (16), (17): Xaa is A or G
  MOD_RES (18), (19), (20), (21): Xaa is A or G or is absent
XAKVVMNEYQKYXXXXXXXXXIYLVSIPSLKTPAXXAKPVA

SEQ ID NO: 25987 - protein, 34 aa, Artificial Sequence; identical to SEQ ID NO: 4900
  GFR-binding peptide
  MOD_RES (32), (33): Xaa is C or S

SEQ ID NO: 25988 - protein, 34 aa, Artificial Sequence; identical to SEQ ID NO: 4901
  GFR-binding peptide
  MOD_RES (1), (3): Xaa is C or S

SEQ ID NO: 25989 - protein, 38 aa, Artificial Sequence; identical to SEQ ID NO: 4903
  GFR-binding peptide
  MOD_RES (32), (32): Xaa is C or S

SEQ ID NO: 25990 - protein, 42 aa, Artificial Sequence; identical to SEQ ID NO: 4904
  GFR-binding peptide
  MOD_RES (2), (36), (37): Xaa is C or S
  MOD_RES (14), (15), (16), (17), (18): Xaa is A or G
  MOD_RES (19), (20), (21), (22): Xaa is A or G or is absent

SEQ ID NO: 25991 - protein, 35 aa, Artificial Sequence
  GFR-binding peptide
  MOD_RES (31), (31): Xaa is C or S
RVVMNEYKFKIVNSSDDLYLVSIPELKTPAXTPKT

SEQ ID NO: 25992 - protein, 37 aa, Artificial Sequence
  GFR-binding peptide
  MOD_RES (2), (34), (35): Xaa is C or S
GXGEVVMDEYKFKVVKENEDLYLMSIPELETPVXXAK

SEQ ID NO: 25993 - protein, 33 aa, Artificial Sequence
  GFR-binding peptide
  MOD_RES (32), (33): Xaa is C or S
SRVVMNEYQKYIVNSSDDIYLVSIPSLKTPAXX

SEQ ID NO: 25994 - protein, 36 aa, Artificial Sequence
  GFR-binding peptide
  MOD_RES (34), (34): Xaa is C or S
  MOD_RES (12), (13), (14), (15), (16): Xaa is A or G
  MOD_RES (17), (18), (19), (20): Xaa is A or G or is absent
SRVVMNEYKFKXXXXXXXXXLYLVSIPELKTPAXTP

SEQ ID NO: 25995 - protein, 35 aa, Artificial Sequence
  GFR-binding peptide
  MOD_RES (1), (35): Xaa is C or S
  MOD_RES (13), (14), (15), (16), (17): Xaa is A or G
  MOD_RES (18), (19), (20), (21): Xaa is A or G or is absent
XESVAMGRYKKLXXXXXXXXXFYLISIANLKTPVX

SEQ ID NO: 25996 - protein, 38 aa, Artificial Sequence; identical to SEQ ID NO: 4907
  GFR-binding peptide
  MOD_RES (2), (4), (38): Xaa is C or S
  MOD_RES (16), (17), (18), (19), (20): Xaa is A or G
  MOD_RES (21), (22), (23), (24): Xaa is A or G or is absent

SEQ ID NO: 25997 - protein, 40 aa, Artificial Sequence; identical to SEQ ID NO: 4908
  GFR-binding peptide
  MOD_RES (2), (36), (37): Xaa is C or S
  MOD_RES (14), (15), (16), (17), (18): Xaa is A or G
  MOD_RES (19), (20), (21), (22): Xaa is A or G or is absent

SEQ ID NO: 25998 - protein, 36 aa, Artificial Sequence
  GFR-binding peptide
  MOD_RES (2), (36): Xaa is C or S
  MOD_RES (14), (15), (16), (17), (18): Xaa is A or G
  MOD_RES (19), (20), (21), (22): Xaa is A or G or is absent
GXESVAMGYHYKLXXXXXXXXXKYLISIPSLKTPVX

SEQ ID NO: 25999 - protein, 32 aa, Artificial Sequence
  GFR-binding peptide
  MOD_RES (1), (1): Xaa is C or S
XGEVVMDEYKFKVVKENEDLYLMSIPELETPV

SEQ ID NO: 26000 - protein, 41 aa, Artificial Sequence
  GFR-binding peptide
  MOD_RES (2), (4), (38), (39): Xaa is C or S
  MOD_RES (16), (17), (18), (19), (20): Xaa is A or G
  MOD_RES (21), (22), (23), (24): Xaa is A or G or is absent
RXGXESVAMGYHYKLXXXXXXXXXKYLISIPSLKTPVXXAK

SEQ ID NO: 26001 - protein, 33 aa, Artificial Sequence
  GFR-binding peptide
  MOD_RES (1), (1): Xaa is C or S
  MOD_RES (12), (13), (14), (15), (16): Xaa is A or G
  MOD_RES (17), (18), (19), (20): Xaa is A or G or is absent
XSKVVMEYKFKXXXXXXXXXLYLISIPELDQPV

SEQ ID NO: 26002 - protein, 44 aa, Artificial Sequence
  GFR-binding peptide
  MOD_RES (2), (4), (38), (39): Xaa is C or S
  MOD_RES (16), (17), (18), (19), (20): Xaa is A or G
  MOD_RES (21), (22), (23), (24): Xaa is A or G or is absent
RXGXAEVVMDRYKKLXXXXXXXXXFYLISIANLRAPVXXSAPAA

SEQ ID NO: 26003 - protein, 37 aa, Artificial Sequence
  GFR-binding peptide
  MOD_RES (2), (35), (36): Xaa is C or S
  MOD_RES (13), (14), (15), (16), (17): Xaa is A or G
  MOD_RES (18), (19), (20), (21): Xaa is A or G or is absent
KXSRVIMEYKFKXXXXXXXXXLYLISIPELAQPVXXP

SEQ ID NO: 26004 - protein, 39 aa, Artificial Sequence
  GFR-binding peptide
  MOD_RES (2), (36), (37): Xaa is C or S
  MOD_RES (14), (15), (16), (17), (18): Xaa is A or G
  MOD_RES (19), (20), (21), (22): Xaa is A or G or is absent
GXARVVMNEYKFKXXXXXXXXXLYLVSIPELQTPAXXPK

SEQ ID NO: 26005 - protein, 35 aa, Artificial Sequence
  GFR-binding peptide
  MOD_RES (34), (35): Xaa is C or S
  MOD_RES (12), (13), (14), (15), (16): Xaa is A or G
  MOD_RES (17), (18), (19), (20): Xaa is A or G or is absent
ESVAMGYHYKLXXXXXXXXXKYLISIPSLKTPVXX

SEQ ID NO: 26006 - protein, 39 aa, Artificial Sequence; identical to SEQ ID NO: 4915
  GFR-binding peptide
  MOD_RES (2), (33), (34): Xaa is C or S

SEQ ID NO: 26007 - protein, 41 aa, Artificial Sequence; identical to SEQ ID NO: 4916
  GFR-binding peptide
  MOD_RES (2), (4), (35), (36): Xaa is C or S

SEQ ID NO: 26008 - protein, 38 aa, Artificial Sequence; identical to SEQ ID NO: 4918
  GFR-binding peptide
  MOD_RES (2), (35), (36): Xaa is C or S
  MOD_RES (13), (14), (15), (16), (17): Xaa is A or G
  MOD_RES (18), (19), (20), (21): Xaa is A or G or is absent

SEQ ID NO: 26009 - protein, 33 aa, Artificial Sequence
  GFR-binding peptide
  MOD_RES (33), (33): Xaa is C or S
  MOD_RES (11), (12), (13), (14), (15): Xaa is A or G
  MOD_RES (16), (17), (18), (19): Xaa is A or G or is absent
EVVMDEYQKYXXXXXXXXXIYLISIPSLRAPVX

SEQ ID NO: 26010 - protein, 43 aa, Artificial Sequence
  GFR-binding peptide
  MOD_RES (2), (4), (38): Xaa is C or S
  MOD_RES (16), (17), (18), (19), (20): Xaa is A or G
  MOD_RES (21), (22), (23), (24): Xaa is A or G or is absent
HXGXSRVVMNEYKFKXXXXXXXXXLYLVSIPELKTPAXTPKTV

SEQ ID NO: 26011 - protein, 35 aa, Artificial Sequence
  GFR-binding peptide
  MOD_RES (31), (32): Xaa is C or S
SKVIMEYQKYIKPTKGIIYLISIPSLDQSVXXPSA

SEQ ID NO: 26012 - protein, 39 aa, Artificial Sequence; identical to SEQ ID NO: 4920
  GFR-binding peptide
  MOD_RES (2), (4), (38), (39): Xaa is C or S
  MOD_RES (16), (17), (18), (19), (20): Xaa is A or G
  MOD_RES (21), (22), (23), (24): Xaa is A or G or is absent

SEQ ID NO: 26013 - protein, 38 aa, Artificial Sequence; identical to SEQ ID NO: 4921
  GFR-binding peptide
  MOD_RES (1), (3), (37): Xaa is C or S
  MOD_RES (15), (16), (17), (18), (19): Xaa is A or G
  MOD_RES (20), (21), (22), (23): Xaa is A or G or is absent

SEQ ID NO: 26014 - protein, 38 aa, Artificial Sequence
  GFR-binding peptide
  MOD_RES (1), (33), (34): Xaa is C or S
XGEVVMDEYKFKVVKENEDLYLMSIPELETPVXXAKPI

SEQ ID NO: 26015 - protein, 35 aa, Artificial Sequence; identical to SEQ ID NO: 4923
  GFR-binding peptide
  MOD_RES (1), (35): Xaa is C or S
  MOD_RES (13), (14), (15), (16), (17): Xaa is A or G
  MOD_RES (18), (19), (20), (21): Xaa is A or G or is absent

SEQ ID NO: 26016 - protein, 36 aa, Artificial Sequence; identical to SEQ ID NO: 4924
  GFR-binding peptide
  MOD_RES (31), (32): Xaa is C or S

SEQ ID NO: 26017 - protein, 37 aa, Artificial Sequence
  GFR-binding peptide
  MOD_RES (33), (34): Xaa is C or S
  MOD_RES (11), (12), (13), (14), (15): Xaa is A or G
  MOD_RES (16), (17), (18), (19): Xaa is A or G or is absent
SVAMGRYKKLXXXXXXXXXFYLISIANLKTPVXXAKS

SEQ ID NO: 26018 - protein, 32 aa, Artificial Sequence
  GFR-binding peptide
  MOD_RES (32), (32): Xaa is C or S
AEVVMDEYKFKVVNNAADLYLISIPELRAPVX

SEQ ID NO: 26019 - protein, 38 aa, Artificial Sequence; identical to SEQ ID NO: 4926
  GFR-binding peptide
  MOD_RES (33), (34): Xaa is C or S
  MOD_RES (11), (12), (13), (14), (15): Xaa is A or G
  MOD_RES (16), (17), (18), (19): Xaa is A or G or is absent

SEQ ID NO: 26020 - protein, 40 aa, Artificial Sequence; identical to SEQ ID NO: 4927
  GFR-binding peptide
  MOD_RES (1), (35), (36): Xaa is C or S
  MOD_RES (13), (14), (15), (16), (17): Xaa is A or G
  MOD_RES (18), (19), (20), (21): Xaa is A or G or is absent

SEQ ID NO: 26021 - protein, 35 aa, Artificial Sequence
  GFR-binding peptide
  MOD_RES (1), (35): Xaa is C or S
  MOD_RES (13), (14), (15), (16), (17): Xaa is A or G
  MOD_RES (18), (19), (20), (21): Xaa is A or G or is absent
XAEVVMDEYKFKXXXXXXXXXLYLISIPELRAPVX

SEQ ID NO: 26022 - protein, 42 aa, Artificial Sequence
  GFR-binding peptide
  MOD_RES (2), (4), (37), (38): Xaa is C or S
  MOD_RES (15), (16), (17), (18), (19): Xaa is A or G
  MOD_RES (20), (21), (22), (23): Xaa is A or G or is absent
SXKXSKVVMEYQKYXXXXXXXXXIYLISIPSLDQPVXXPSAS

SEQ ID NO: 26023 - protein, 36 aa, Artificial Sequence
  GFR-binding peptide
  MOD_RES (1), (33), (34): Xaa is C or S
XGEVVMDEYKFKVVKENEDLYLMSIPELETPVXXAK

SEQ ID NO: 26024 - protein, 38 aa, Artificial Sequence
  GFR-binding peptide
  MOD_RES (2), (4), (38): Xaa is C or S
  MOD_RES (16), (17), (18), (19), (20): Xaa is A or G
  MOD_RES (21), (22), (23), (24): Xaa is A or G or is absent
RXGXAEVVMDRYKKLXXXXXXXXXFYLISIANLRAPVX

SEQ ID NO: 26025 - protein, 40 aa, Artificial Sequence
  GFR-binding peptide
  MOD_RES (34), (35): Xaa is C or S
  MOD_RES (12), (13), (14), (15), (16): Xaa is A or G
  MOD_RES (17), (18), (19), (20): Xaa is A or G or is absent
GEVVMDEYQKYXXXXXXXXXIYLMSIPSLETPVXXAKPIK

SEQ ID NO: 26026 - protein, 32 aa, Artificial Sequence
  GFR-binding peptide
  MOD_RES (1), (1): Xaa is C or S
XGEVVMEEYKFKVVKDYEDLYLMSIPELETPV

SEQ ID NO: 26027 - protein, 38 aa, Artificial Sequence; identical to SEQ ID NO: 4934
  GFR-binding peptide
  MOD_RES (1), (3), (38): Xaa is C or S
  MOD_RES (16), (17), (18), (19), (20): Xaa is A or G
  MOD_RES (21), (22), (23), (24): Xaa is A or G or is absent

SEQ ID NO: 26028 - protein, 37 aa, Artificial Sequence
  GFR-binding peptide
  MOD_RES (1), (3), (37): Xaa is C or S
  MOD_RES (15), (16), (17), (18), (19): Xaa is A or G
  MOD_RES (20), (21), (22), (23): Xaa is A or G or is absent
XGXGEVVMEEYQKYXXXXXXXXXIYLMSIPSLETPVX

SEQ ID NO: 26029 - protein, 36 aa, Artificial Sequence; identical to SEQ ID NO: 4935
  GFR-binding peptide
  MOD_RES (1), (3): Xaa is C or S
  MOD_RES (15), (16), (17), (18), (19): Xaa is A or G
  MOD_RES (20), (21), (22), (23): Xaa is A or G or is absent

SEQ ID NO: 26030 - protein, 38 aa, Artificial Sequence; identical to SEQ ID NO: 4937
  GFR-binding peptide
  MOD_RES (1), (3), (37), (38): Xaa is C or S
  MOD_RES (15), (16), (17), (18), (19): Xaa is A or G
  MOD_RES (20), (21), (22), (23): Xaa is A or G or is absent

SEQ ID NO: 26031 - protein, 37 aa, Artificial Sequence; identical to SEQ ID NO: 4938
  GFR-binding peptide
  MOD_RES (2), (4), (37): Xaa is C or S
  MOD_RES (15), (16), (17), (18), (19): Xaa is A or G
  MOD_RES (20), (21), (22), (23): Xaa is A or G or is absent

SEQ ID NO: 26032 - protein, 36 aa, Artificial Sequence
  GFR-binding peptide
  MOD_RES (1), (33), (34): Xaa is C or S
XSRVVMNEYKFKIVNSSDDLYLVSIPELKTPAXXPK

SEQ ID NO: 26033 - protein, 40 aa, Artificial Sequence; identical to SEQ ID NO: 4942
  GFR-binding peptide
  MOD_RES (2), (36), (37): Xaa is C or S
  MOD_RES (14), (15), (16), (17), (18): Xaa is A or G
  MOD_RES (19), (20), (21), (22): Xaa is A or G or is absent

SEQ ID NO: 26034 - protein, 35 aa, Artificial Sequence; identical to SEQ ID NO: 4945
  GFR-binding peptide
  MOD_RES (1), (33), (34): Xaa is C or S

SEQ ID NO: 26035 - protein, 41 aa, Artificial Sequence; identical to SEQ ID NO: 4946
  GFR-binding peptide
  MOD_RES (35), (36): Xaa is C or S
  MOD_RES (13), (14), (15), (16), (17): Xaa is A or G
  MOD_RES (18), (19), (20), (21): Xaa is A or G or is absent

SEQ ID NO: 26036 - protein, 32 aa, Artificial Sequence
  GFR-binding peptide
  MOD_RES (2), (2): Xaa is C or S
KXSKVIMEYKFKIKPTKGILYLISIPELDQSV

SEQ ID NO: 26037 - protein, 36 aa, Artificial Sequence
  GFR-binding peptide
  MOD_RES (1), (33), (34): Xaa is C or S
XESVAMGYHYKLYTVVGKDKYLISIPSLKTPVXXAK

SEQ ID NO: 26038 - protein, 34 aa, Artificial Sequence
  GFR-binding peptide
  MOD_RES (1), (3): Xaa is C or S
XGXESVAMGYHYKLYTVVGKDKYLISIPSLKTPV

SEQ ID NO: 26039 - protein, 33 aa, Artificial Sequence
  GFR-binding peptide
  MOD_RES (1), (32), (33): Xaa is C or S
XSKVVMEYKFKVKPTRGVLYLISIPELDQPVXX

SEQ ID NO: 26040 - protein, 33 aa, Artificial Sequence
  GFR-binding peptide
  MOD_RES (2), (33): Xaa is C or S
KXSRVIMEYKFKVKPKRGVLYLISIPELAQPVX

SEQ ID NO: 26041 - protein, 35 aa, Artificial Sequence
  GFR-binding peptide
  MOD_RES (31), (32): Xaa is C or S
RVVMNEYKFKIVNSSDDLYLVSIPELKTPAXXPKP

SEQ ID NO: 26042 - protein, 37 aa, Artificial Sequence
  GFR-binding peptide
  MOD_RES (2), (4), (37): Xaa is C or S
  MOD_RES (15), (16), (17), (18), (19): Xaa is A or G
  MOD_RES (20), (21), (22), (23): Xaa is A or G or is absent
SXKXSKVVMEYKFKXXXXXXXXXLYLISIPELDQPVX

SEQ ID NO: 26043 - protein, 44 aa, Artificial Sequence
  GFR-binding peptide
  MOD_RES (2), (4), (38), (39): Xaa is C or S
  MOD_RES (16), (17), (18), (19), (20): Xaa is A or G
  MOD_RES (21), (22), (23), (24): Xaa is A or G or is absent
RXGXAEVVMDEYQKYXXXXXXXXXIYLISIPSLRAPVXXSAPAA

SEQ ID NO: 26044 - protein, 35 aa, Artificial Sequence
  GFR-binding peptide
  MOD_RES (33), (34): Xaa is C or S
  MOD_RES (11), (12), (13), (14), (15): Xaa is A or G
  MOD_RES (16), (17), (18), (19): Xaa is A or G or is absent
SRVIMEYQKYXXXXXXXXXIYLISIPSLAQPVXXP

SEQ ID NO: 26045 - protein, 38 aa, Artificial Sequence; identical to SEQ ID NO: 4952
  GFR-binding peptide
  MOD_RES (1), (3), (35): Xaa is C or S

SEQ ID NO: 26046 - protein, 39 aa, Artificial Sequence
  GFR-binding peptide
  MOD_RES (1), (33), (34): Xaa is C or S
XARVVMNEYKFKIVNSSDDLYLVSIPELQTPAXXPKPVT

SEQ ID NO: 26047 - protein, 40 aa, Artificial Sequence
  GFR-binding peptide
  MOD_RES (1), (3), (37), (38): Xaa is C or S
  MOD_RES (15), (16), (17), (18), (19): Xaa is A or G
  MOD_RES (20), (21), (22), (23): Xaa is A or G or is absent
XGXSRVVMNEYQKYXXXXXXXXXIYLVSIPSLKTPAXXPK

SEQ ID NO: 26048 - protein, 39 aa, Artificial Sequence
  GFR-binding peptide
  MOD_RES (2), (4), (37), (38): Xaa is C or S
RXGXEAVSMGEEYKFKTPVGMDDLYLVSIPELKTPVXXA

SEQ ID NO: 26049 - protein, 37 aa, Artificial Sequence
  GFR-binding peptide
  MOD_RES (34), (35): Xaa is C or S
  MOD_RES (12), (13), (14), (15), (16): Xaa is A or G
  MOD_RES (17), (18), (19), (20): Xaa is A or G or is absent
GEVVMEEYKFKXXXXXXXXXLYLMSIPELETPVXXAK

SEQ ID NO: 26050 - protein, 43 aa, Artificial Sequence
  GFR-binding peptide
  MOD_RES (2), (37), (38): Xaa is C or S
  MOD_RES (15), (16), (17), (18), (19): Xaa is A or G
  MOD_RES (20), (21), (22), (23): Xaa is A or G or is absent
GXEAVSMGEEYKFKXXXXXXXXXLYLVSIPELKTPVXXAKGVK

SEQ ID NO: 26051 - protein, 34 aa, Artificial Sequence
  GFR-binding peptide
  MOD_RES (1), (33), (34): Xaa is C or S
XSRVVMNEYQKYIVNSSDDIYLVSIPSLKTPAXX

SEQ ID NO: 26052 - protein, 34 aa, Artificial Sequence
  GFR-binding peptide
  MOD_RES (31), (32): Xaa is C or S
SRVIMEYQKYVKPKRGVIYLISIPSLAQPVXXPA

SEQ ID NO: 26053 - protein, 37 aa, Artificial Sequence; identical to SEQ ID NO: 4955
  GFR-binding peptide
  MOD_RES (2), (34), (35): Xaa is C or S

SEQ ID NO: 26054 - protein, 33 aa, Artificial Sequence
  GFR-binding peptide
  MOD_RES (31), (32): Xaa is C or S
EVVMDEYQKYVVNNAADIYLISIPSLRAPVXXS

SEQ ID NO: 26055 - protein, 36 aa, Artificial Sequence; identical to SEQ ID NO: 4956
  GFR-binding peptide
  MOD_RES (2), (34), (35): Xaa is C or S

SEQ ID NO: 26056 - protein, 34 aa, Artificial Sequence; identical to SEQ ID NO: 4958
  GFR-binding peptide
  MOD_RES (2), (4): Xaa is C or S

SEQ ID NO: 26057 - protein, 36 aa, Artificial Sequence; identical to SEQ ID NO: 4961
  GFR-binding peptide
  MOD_RES (33), (34): Xaa is C or S
  MOD_RES (11), (12), (13), (14), (15): Xaa is A or G
  MOD_RES (16), (17), (18), (19): Xaa is A or G or is absent

SEQ ID NO: 26058 - protein, 32 aa, Artificial Sequence; identical to SEQ ID NO: 4963
  GFR-binding peptide
  MOD_RES (11), (12), (13), (14), (15): Xaa is A or G
  MOD_RES (16), (17), (18), (19): Xaa is A or G or is absent

SEQ ID NO: 26059 - protein, 38 aa, Artificial Sequence; identical to SEQ ID NO: 4964
  GFR-binding peptide
  MOD_RES (34), (35): Xaa is C or S
  MOD_RES (12), (13), (14), (15), (16): Xaa is A or G
  MOD_RES (17), (18), (19), (20): Xaa is A or G or is absent

SEQ ID NO: 26060 - protein, 33 aa, Artificial Sequence
  GFR-binding peptide
  MOD_RES (31), (32): Xaa is C or S
EVVMEEYQKYVVKDYEDIYLMSIPSLETPVXXA

SEQ ID NO: 26061 - protein, 39 aa, Artificial Sequence
  GFR-binding peptide
  MOD_RES (2), (36), (37): Xaa is C or S
  MOD_RES (14), (15), (16), (17), (18): Xaa is A or G
  MOD_RES (19), (20), (21), (22): Xaa is A or G or is absent
GXGEVVMEEYQKYXXXXXXXXXIYLMSIPSLETPVXXAK

SEQ ID NO: 26062 - protein, 40 aa, Artificial Sequence
  GFR-binding peptide
  MOD_RES (2), (4), (37), (38): Xaa is C or S
  MOD_RES (15), (16), (17), (18), (19): Xaa is A or G
  MOD_RES (20), (21), (22), (23): Xaa is A or G or is absent
SXKXSKVIMEYKFKXXXXXXXXXLYLISIPELDQSVXXPS

SEQ ID NO: 26063 - protein, 39 aa, Artificial Sequence
  GFR-binding peptide
  MOD_RES (2), (35), (36): Xaa is C or S
  MOD_RES (13), (14), (15), (16), (17): Xaa is A or G
  MOD_RES (18), (19), (20), (21): Xaa is A or G or is absent
KXSKVVMEYKFKXXXXXXXXXLYLISIPELDQPVXXPSA

SEQ ID NO: 26064 - protein, 37 aa, Artificial Sequence
  GFR-binding peptide
  MOD_RES (1), (3), (35), (36): Xaa is C or S
XGXGEVVMEEYQKYVVKDYEDIYLMSIPSLETPVXXA

SEQ ID NO: 26065 - protein, 36 aa, Artificial Sequence; identical to SEQ ID NO: 4973
  GFR-binding peptide
  MOD_RES (2), (4), (36): Xaa is C or S

SEQ ID NO: 26066 - protein, 35 aa, Artificial Sequence; identical to SEQ ID NO: 4976
  GFR-binding peptide
  MOD_RES (2), (2): Xaa is C or S
  MOD_RES (14), (15), (16), (17), (18): Xaa is A or G
  MOD_RES (19), (20), (21), (22): Xaa is A or G or is absent

SEQ ID NO: 26067 - protein, 37 aa, Artificial Sequence
  GFR-binding peptide
  MOD_RES (2), (34), (35): Xaa is C or S
GXARVVMNEYKFKIVNSSDDLYLVSIPELQTPAXXPK

SEQ ID NO: 26068 - protein, 32 aa, Artificial Sequence; identical to SEQ ID NO: 4978
  GFR-binding peptide
  MOD_RES (11), (12), (13), (14), (15): Xaa is A or G
  MOD_RES (16), (17), (18), (19): Xaa is A or G or is absent

SEQ ID NO: 26069 - protein, 36 aa, Artificial Sequence
  GFR-binding peptide
  MOD_RES (34), (35): Xaa is C or S
  MOD_RES (12), (13), (14), (15), (16): Xaa is A or G
  MOD_RES (17), (18), (19), (20): Xaa is A or G or is absent
ESVAMGRYKKLXXXXXXXXXFYLISIANLKTPVXXA

SEQ ID NO: 26070 - protein, 38 aa, Artificial Sequence; identical to SEQ ID NO: 4980
  GFR-binding peptide
  MOD_RES (32), (33): Xaa is C or S

SEQ ID NO: 26071 - protein, 43 aa, Artificial Sequence; identical to SEQ ID NO: 4981
  GFR-binding peptide
  MOD_RES (1), (3), (37), (38): Xaa is C or S
  MOD_RES (15), (16), (17), (18), (19): Xaa is A or G
  MOD_RES (20), (21), (22), (23): Xaa is A or G or is absent

SEQ ID NO: 26072 - protein, 37 aa, Artificial Sequence
  GFR-binding peptide
  MOD_RES (2), (4), (35), (36): Xaa is C or S
SXKXSRVIMEYQKYVKPKRGVIYLISIPSLAQPVXXP

SEQ ID NO: 26073 - protein, 40 aa, Artificial Sequence
  GFR-binding peptide
  MOD_RES (2), (36), (37): Xaa is C or S
  MOD_RES (14), (15), (16), (17), (18): Xaa is A or G
  MOD_RES (19), (20), (21), (22): Xaa is A or G or is absent
GXARVVMNEYKFKXXXXXXXXXLYLVSIPELQTPAXXPKP

SEQ ID NO: 26074 - protein, 40 aa, Artificial Sequence; identical to SEQ ID NO: 4982
  GFR-binding peptide
  MOD_RES (34), (34): Xaa is C or S
  MOD_RES (12), (13), (14), (15), (16): Xaa is A or G
  MOD_RES (17), (18), (19), (20): Xaa is A or G or is absent

SEQ ID NO: 26075 - protein, 35 aa, Artificial Sequence
  GFR-binding peptide
  MOD_RES (33), (34): Xaa is C or S
  MOD_RES (11), (12), (13), (14), (15): Xaa is A or G
  MOD_RES (16), (17), (18), (19): Xaa is A or G or is absent
EVVMDEYKFKXXXXXXXXXLYLMSIPELETPVXXA

SEQ ID NO: 26076 - protein, 34 aa, Artificial Sequence
  GFR-binding peptide
  MOD_RES (1), (1): Xaa is C or S
  MOD_RES (13), (14), (15), (16), (17): Xaa is A or G
  MOD_RES (18), (19), (20), (21): Xaa is A or G or is absent
XGEVVMDEYKFKXXXXXXXXXLYLMSIPELETPV

SEQ ID NO: 26077 - protein, 38 aa, Artificial Sequence; identical to SEQ ID NO: 4985
  GFR-binding peptide
  MOD_RES (2), (4), (35), (36): Xaa is C or S

SEQ ID NO: 26078 - protein, 35 aa, Artificial Sequence
  GFR-binding peptide
  MOD_RES (1), (3), (35): Xaa is C or S
XGXAEVVMDEYQKYVVNNAADIYLISIPSLRAPVX

SEQ ID NO: 26079 - protein, 43 aa, Artificial Sequence
  GFR-binding peptide
  MOD_RES (2), (4), (38), (39): Xaa is C or S
  MOD_RES (16), (17), (18), (19), (20): Xaa is A or G
  MOD_RES (21), (22), (23), (24): Xaa is A or G or is absent
HXGXAKVVMNEYQKYXXXXXXXXXIYLVSIPSLKTPAXXAKPV

SEQ ID NO: 26080 - protein, 39 aa, Artificial Sequence; identical to SEQ ID NO: 4987
  GFR-binding peptide
  MOD_RES (2), (36), (37): Xaa is C or S
  MOD_RES (14), (15), (16), (17), (18): Xaa is A or G
  MOD_RES (19), (20), (21), (22): Xaa is A or G or is absent

SEQ ID NO: 26081 - protein, 38 aa, Artificial Sequence
  GFR-binding peptide
  MOD_RES (34), (35): Xaa is C or S
  MOD_RES (12), (13), (14), (15), (16): Xaa is A or G
  MOD_RES (17), (18), (19), (20): Xaa is A or G or is absent
AEVVMDRYKKLXXXXXXXXXFYLISIANLRAPVXXSAP

SEQ ID NO: 26082 - protein, 36 aa, Artificial Sequence; identical to SEQ ID NO: 4988
  GFR-binding peptide
  MOD_RES (35), (36): Xaa is C or S
  MOD_RES (13), (14), (15), (16), (17): Xaa is A or G
  MOD_RES (18), (19), (20), (21): Xaa is A or G or is absent

SEQ ID NO: 26083 - protein, 36 aa, Artificial Sequence
  GFR-binding peptide
  MOD_RES (32), (33): Xaa is C or S
AKVVMNEYQKYIVNNSSDIYLVSIPSLKTPAXXAKP

SEQ ID NO: 26084 - protein, 32 aa, Artificial Sequence
  GFR-binding peptide
  MOD_RES (11), (12), (13), (14), (15): Xaa is A or G
  MOD_RES (16), (17), (18), (19): Xaa is A or G or is absent
SRVIMEYKFKXXXXXXXXXLYLISIPELAQPV

SEQ ID NO: 26085 - protein, 42 aa, Artificial Sequence
  GFR-binding peptide
  MOD_RES (2), (4), (37), (38): Xaa is C or S
  MOD_RES (15), (16), (17), (18), (19): Xaa is A or G
  MOD_RES (20), (21), (22), (23): Xaa is A or G or is absent
SXKXSKVVMEYKFKXXXXXXXXXLYLISIPELDQPVXXPSAS

SEQ ID NO: 26086 - protein, 42 aa, Artificial Sequence
  GFR-binding peptide
  MOD_RES (1), (36), (37): Xaa is C or S
  MOD_RES (14), (15), (16), (17), (18): Xaa is A or G
  MOD_RES (19), (20), (21), (22): Xaa is A or G or is absent
XEAVSMGEEYKFKXXXXXXXXXLYLVSIPELKTPVXXAKGVK

SEQ ID NO: 26087 - protein, 38 aa, Artificial Sequence
  GFR-binding peptide
  MOD_RES (1), (35), (36): Xaa is C or S
  MOD_RES (13), (14), (15), (16), (17): Xaa is A or G
  MOD_RES (18), (19), (20), (21): Xaa is A or G or is absent
XARVVMNEYKFKXXXXXXXXXLYLVSIPELQTPAXXPK

SEQ ID NO: 26088 - protein, 34 aa, Artificial Sequence
  GFR-binding peptide
  MOD_RES (33), (34): Xaa is C or S
  MOD_RES (11), (12), (13), (14), (15): Xaa is A or G
  MOD_RES (16), (17), (18), (19): Xaa is A or G or is absent
SVAMGYHYKLXXXXXXXXXKYLISIPSLKTPVXX

SEQ ID NO: 26089 - protein, 38 aa, Artificial Sequence; identical to SEQ ID NO: 4991
  GFR-binding peptide
  MOD_RES (2), (33), (34): Xaa is C or S

SEQ ID NO: 26090 - protein, 43 aa, Artificial Sequence; identical to SEQ ID NO: 4995
  GFR-binding peptide
  MOD_RES (1), (3), (37), (38): Xaa is C or S
  MOD_RES (15), (16), (17), (18), (19): Xaa is A or G
  MOD_RES (20), (21), (22), (23): Xaa is A or G or is absent

SEQ ID NO: 26091 - protein, 32 aa, Artificial Sequence
  GFR-binding peptide
  MOD_RES (32), (32): Xaa is C or S
ESVAMGEYQKYYTVVGKDIYLISIPSLKTPVX

SEQ ID NO: 26092 - protein, 41 aa, Artificial Sequence
  GFR-binding peptide
  MOD_RES (1), (3), (37): Xaa is C or S
  MOD_RES (15), (16), (17), (18), (19): Xaa is A or G
  MOD_RES (20), (21), (22), (23): Xaa is A or G or is absent
XGXSRVVMNEYQKYXXXXXXXXXIYLVSIPSLKTPAXTPKT

SEQ ID NO: 26093 - protein, 33 aa, Artificial Sequence
  GFR-binding peptide
  MOD_RES (1), (33): Xaa is C or S
XESVAMGRYKKLYTVVGKDFYLISIANLKTPVX

SEQ ID NO: 26094 - protein, 35 aa, Artificial Sequence; identical to SEQ ID NO: 5000
  GFR-binding peptide
  MOD_RES (2), (34), (35): Xaa is C or S

SEQ ID NO: 26095 - protein, 34 aa, Artificial Sequence
  GFR-binding peptide
  MOD_RES (34), (34): Xaa is C or S
  MOD_RES (12), (13), (14), (15), (16): Xaa is A or G
  MOD_RES (17), (18), (19), (20): Xaa is A or G or is absent
AEVVMDEYKFKXXXXXXXXXLYLISIPELRAPVX

SEQ ID NO: 26096 - protein, 31 aa, Artificial Sequence; identical to SEQ ID NO: 5002
  GFR-binding peptide
  MOD_RES (31), (31): Xaa is C or S

SEQ ID NO: 26097 - protein, 41 aa, Artificial Sequence; identical to SEQ ID NO: 5003
  GFR-binding peptide
  MOD_RES (2), (35), (36): Xaa is C or S

SEQ ID NO: 26098 - protein, 39 aa, Artificial Sequence; identical to SEQ ID NO: 5004
  GFR-binding peptide
  MOD_RES (1), (3), (35), (36): Xaa is C or S

SEQ ID NO: 26099 - protein, 37 aa, Artificial Sequence; identical to SEQ ID NO: 5006
  GFR-binding peptide
  MOD_RES (1), (3), (34), (35): Xaa is C or S

SEQ ID NO: 26100 - protein, 32 aa, Artificial Sequence
  GFR-binding peptide
  MOD_RES (1), (1): Xaa is C or S
XSRVVMNEYQKYIVNSSDDIYLVSIPSLKTPA

SEQ ID NO: 26101 - protein, 36 aa, Artificial Sequence
  GFR-binding peptide
  MOD_RES (33), (34): Xaa is C or S
  MOD_RES (11), (12), (13), (14), (15): Xaa is A or G
  MOD_RES (16), (17), (18), (19): Xaa is A or G or is absent
EVVMDRYKKLXXXXXXXXXFYLISIANLRAPVXXSA

SEQ ID NO: 26102 - protein, 36 aa, Artificial Sequence
  GFR-binding peptide
  MOD_RES (2), (34): Xaa is C or S
GXSRVVMNEYKFKIVNSSDDLYLVSIPELKTPAXTP

SEQ ID NO: 26103 - protein, 41 aa, Artificial Sequence
  GFR-binding peptide
  MOD_RES (1), (3), (35), (36): Xaa is C or S
XGXARVVMNEYQKYIVNSSDDIYLVSIPSLQTPAXXPKPVT

SEQ ID NO: 26104 - protein, 37 aa, Artificial Sequence; identical to SEQ ID NO: 5012
  GFR-binding peptide
  MOD_RES (1), (32), (33): Xaa is C or S

SEQ ID NO: 26105 - protein, 39 aa, Artificial Sequence
  GFR-binding peptide
  MOD_RES (1), (33): Xaa is C or S
XSRVVMNEYKFKIVNSSDDLYLVSIPELKTPAXTPKTVH

SEQ ID NO: 26106 - protein, 37 aa, Artificial Sequence; identical to SEQ ID NO: 5014
  GFR-binding peptide
  MOD_RES (31), (32): Xaa is C or S

SEQ ID NO: 26107 - protein, 39 aa, Artificial Sequence; identical to SEQ ID NO: 5016
  GFR-binding peptide
  MOD_RES (1), (35), (36): Xaa is C or S
  MOD_RES (13), (14), (15), (16), (17): Xaa is A or G
  MOD_RES (18), (19), (20), (21): Xaa is A or G or is absent

SEQ ID NO: 26108 - protein, 37 aa, Artificial Sequence
  GFR-binding peptide
  MOD_RES (2), (36), (37): Xaa is C or S
  MOD_RES (14), (15), (16), (17), (18): Xaa is A or G
  MOD_RES (19), (20), (21), (22): Xaa is A or G or is absent
GXARVVMNEYKFKXXXXXXXXXLYLVSIPELQTPAXX

SEQ ID NO: 26109 - protein, 43 aa, Artificial Sequence
  GFR-binding peptide
  MOD_RES (2), (4), (38), (39): Xaa is C or S
  MOD_RES (16), (17), (18), (19), (20): Xaa is A or G
  MOD_RES (21), (22), (23), (24): Xaa is A or G or is absent
RXGXESVAMGRYKKLXXXXXXXXXFYLISIANLKTPVXXAKSA

SEQ ID NO: 26110 - protein, 37 aa, Artificial Sequence
  GFR-binding peptide
  MOD_RES (2), (36), (37): Xaa is C or S
  MOD_RES (14), (15), (16), (17), (18): Xaa is A or G
  MOD_RES (19), (20), (21), (22): Xaa is A or G or is absent
GXAKVVMNEYKFKXXXXXXXXXLYLVSIPELKTPAXX

SEQ ID NO: 26111 - protein, 40 aa, Artificial Sequence
  GFR-binding peptide
  MOD_RES (2), (4), (36), (37): Xaa is C or S
RXGXESVAMGRYKKLYTVVGKDFYLISIANLKTPVXXAKS

SEQ ID NO: 26112 - protein, 40 aa, Artificial Sequence; identical to SEQ ID NO: 5021
  GFR-binding peptide
  MOD_RES (2), (36), (37): Xaa is C or S
  MOD_RES (14), (15), (16), (17), (18): Xaa is A or G
  MOD_RES (19), (20), (21), (22): Xaa is A or G or is absent

SEQ ID NO: 26113 - protein, 34 aa, Artificial Sequence
  GFR-binding peptide
  MOD_RES (2), (34): Xaa is C or S
GXESVAMGEYQKYYTVVGKDIYLISIPSLKTPVX

SEQ ID NO: 26114 - protein, 34 aa, Artificial Sequence
  GFR-binding peptide
  MOD_RES (1), (1): Xaa is C or S
  MOD_RES (13), (14), (15), (16), (17): Xaa is A or G
  MOD_RES (18), (19), (20), (21): Xaa is A or G or is absent
XAEVVMDYHYKLXXXXXXXXXKYLISIPSLRAPV

SEQ ID NO: 26115 - protein, 38 aa, Artificial Sequence
  GFR-binding peptide
  MOD_RES (34), (35): Xaa is C or S
  MOD_RES (12), (13), (14), (15), (16): Xaa is A or G
  MOD_RES (17), (18), (19), (20): Xaa is A or G or is absent
SRVVMNEYQKYXXXXXXXXXIYLVSIPSLKTPAXXPKP

SEQ ID NO: 26116 - protein, 36 aa, Artificial Sequence; identical to SEQ ID NO: 5025
  GFR-binding peptide
  MOD_RES (2), (35), (36): Xaa is C or S
  MOD_RES (13), (14), (15), (16), (17): Xaa is A or G
  MOD_RES (18), (19), (20), (21): Xaa is A or G or is absent

SEQ ID NO: 26117 - protein, 32 aa, Artificial Sequence
  GFR-binding peptide
  MOD_RES (32), (32): Xaa is C or S
GEVVMDEYKFKVVKENEDLYLMSIPELETPVX

SEQ ID NO: 26118 - protein, 39 aa, Artificial Sequence
  GFR-binding peptide
  MOD_RES (1), (3), (35), (36): Xaa is C or S
XGXARVVMNEYQKYIVNSSDDIYLVSIPSLQTPAXXPKP

SEQ ID NO: 26119 - protein, 33 aa, Artificial Sequence; identical to SEQ ID NO: 5026
  GFR-binding peptide
  MOD_RES (32), (32): Xaa is C or S

SEQ ID NO: 26120 - protein, 33 aa, Artificial Sequence; identical to SEQ ID NO: 5027
  GFR-binding peptide
  MOD_RES (31), (32): Xaa is C or S

SEQ ID NO: 26121 - protein, 38 aa, Artificial Sequence
  GFR-binding peptide
  MOD_RES (34), (34): Xaa is C or S
  MOD_RES (12), (13), (14), (15), (16): Xaa is A or G
  MOD_RES (17), (18), (19), (20): Xaa is A or G or is absent
SRVVMNEYQKYXXXXXXXXXIYLVSIPSLKTPAXTPKT

SEQ ID NO: 26122 - protein, 36 aa, Artificial Sequence; identical to SEQ ID NO: 5031
  GFR-binding peptide
  MOD_RES (1), (34), (35): Xaa is C or S

SEQ ID NO: 26123 - protein, 36 aa, Artificial Sequence
  GFR-binding peptide
  MOD_RES (2), (4), (36): Xaa is C or S
HXGXAKVVMNEYQKYIVNNSSDIYLVSIPSLKTPAX

SEQ ID NO: 26124 - protein, 41 aa, Artificial Sequence; identical to SEQ ID NO: 5035
  GFR-binding peptide
  MOD_RES (2), (4), (38), (39): Xaa is C or S
  MOD_RES (16), (17), (18), (19), (20): Xaa is A or G
  MOD_RES (21), (22), (23), (24): Xaa is A or G or is absent

SEQ ID NO: 26125 - protein, 34 aa, Artificial Sequence
  GFR-binding peptide
  MOD_RES (2), (34): Xaa is C or S
GXSRVVMNEYQKYIVNSSDDIYLVSIPSLKTPAX

SEQ ID NO: 26126 - protein, 34 aa, Artificial Sequence
  GFR-binding peptide
  MOD_RES (2), (34): Xaa is C or S
GXAEVVMDYHYKLVVNNAADKYLISIPSLRAPVX

SEQ ID NO: 26127 - protein, 30 aa, Artificial Sequence
  GFR-binding peptide
EVVMDEYQKYVVKENEDIYLMSIPSLETPV

SEQ ID NO: 26128 - protein, 37 aa, Artificial Sequence; identical to SEQ ID NO: 5037
  GFR-binding peptide
  MOD_RES (31), (32): Xaa is C or S

SEQ ID NO: 26129 - protein, 35 aa, Artificial Sequence; identical to SEQ ID NO: 5038
  GFR-binding peptide
  MOD_RES (1), (3), (35): Xaa is C or S

SEQ ID NO: 26130 - protein, 36 aa, Artificial Sequence
  GFR-binding peptide
  MOD_RES (2), (4), (36): Xaa is C or S
HXGXAKVVMNEYKFKIVNNSSDLYLVSIPELKTPAX

SEQ ID NO: 26131 - protein, 38 aa, Artificial Sequence; identical to SEQ ID NO: 5040
  GFR-binding peptide
  MOD_RES (2), (4), (37), (38): Xaa is C or S

SEQ ID NO: 26132 - protein, 32 aa, Artificial Sequence
  GFR-binding peptide
  MOD_RES (31), (31): Xaa is C or S
RVVMNEYQKYIVNSSDDIYLVSIPSLKTPAXT

SEQ ID NO: 26133 - protein, 39 aa, Artificial Sequence; identical to SEQ ID NO: 5043
  GFR-binding peptide
  MOD_RES (1), (3), (37), (38): Xaa is C or S
  MOD_RES (15), (16), (17), (18), (19): Xaa is A or G
  MOD_RES (20), (21), (22), (23): Xaa is A or G or is absent

SEQ ID NO: 26134 - protein, 37 aa, Artificial Sequence; identical to SEQ ID NO: 5044
  GFR-binding peptide
  MOD_RES (32), (33): Xaa is C or S

SEQ ID NO: 26135 - protein, 42 aa, Artificial Sequence
  GFR-binding peptide
  MOD_RES (2), (36), (37): Xaa is C or S
  MOD_RES (14), (15), (16), (17), (18): Xaa is A or G
  MOD_RES (19), (20), (21), (22): Xaa is A or G or is absent
GXARVVMNEYKFKXXXXXXXXXLYLVSIPELQTPAXXPKPVT

SEQ ID NO: 26136 - protein, 39 aa, Artificial Sequence
  GFR-binding peptide
  MOD_RES (1), (3), (35), (36): Xaa is C or S
XGXESVAMGYHYKLYTVVGKDKYLISIPSLKTPVXXAKS

SEQ ID NO: 26137 - protein, 37 aa, Artificial Sequence
  GFR-binding peptide
  MOD_RES (1), (35), (36): Xaa is C or S
  MOD_RES (13), (14), (15), (16), (17): Xaa is A or G
  MOD_RES (18), (19), (20), (21): Xaa is A or G or is absent
XESVAMGYHYKLXXXXXXXXXKYLISIPSLKTPVXXA

SEQ ID NO: 26138 - protein, 38 aa, Artificial Sequence
  GFR-binding peptide
  MOD_RES (32), (33): Xaa is C or S
AEVVMDEYQKYVVNNAADIYLISIPSLRAPVXXSAPAA

SEQ ID NO: 26139 - protein, 42 aa, Artificial Sequence
  GFR-binding peptide
  MOD_RES (1), (3), (37), (38): Xaa is C or S
  MOD_RES (15), (16), (17), (18), (19): Xaa is A or G
  MOD_RES (20), (21), (22), (23): Xaa is A or G or is absent
XGXAEVVMDRYKKLXXXXXXXXXFYLISIANLRAPVXXSAPA

SEQ ID NO: 26140 - protein, 39 aa, Artificial Sequence; identical to SEQ ID NO: 5047
  GFR-binding peptide
  MOD_RES (34), (35): Xaa is C or S
  MOD_RES (12), (13), (14), (15), (16): Xaa is A or G
  MOD_RES (17), (18), (19), (20): Xaa is A or G or is absent

SEQ ID NO: 26141 - protein, 38 aa, Artificial Sequence
  GFR-binding peptide
  MOD_RES (1), (35), (36): Xaa is C or S
  MOD_RES (13), (14), (15), (16), (17): Xaa is A or G
  MOD_RES (18), (19), (20), (21): Xaa is A or G or is absent
XAKVVMNEYQKYXXXXXXXXXIYLVSIPSLKTPAXXAK

SEQ ID NO: 26142 - protein, 40 aa, Artificial Sequence
  GFR-binding peptide
  MOD_RES (1), (3), (35), (36): Xaa is C or S
XGXGEVVMDEYKFKVVKENEDLYLMSIPELETPVXXAKPI

SEQ ID NO: 26143 - protein, 39 aa, Artificial Sequence
  GFR-binding peptide
  MOD_RES (2), (4), (37), (38): Xaa is C or S
  MOD_RES (15), (16), (17), (18), (19): Xaa is A or G
  MOD_RES (20), (21), (22), (23): Xaa is A or G or is absent
SXKXSKVIMEYQKYXXXXXXXXXIYLISIPSLDQSVXXP

SEQ ID NO: 26144 - protein, 34 aa, Artificial Sequence
  GFR-binding peptide
  MOD_RES (31), (32): Xaa is C or S
EVVMEEYKFKVVKDYEDLYLMSIPELETPVXXAK

SEQ ID NO: 26145 - protein, 41 aa, Artificial Sequence; identical to SEQ ID NO: 5051
  GFR-binding peptide
  MOD_RES (2), (4), (37), (38): Xaa is C or S
  MOD_RES (15), (16), (17), (18), (19): Xaa is A or G
  MOD_RES (20), (21), (22), (23): Xaa is A or G or is absent

SEQ ID NO: 26146 - protein, 39 aa, Artificial Sequence; identical to SEQ ID NO: 5052
  GFR-binding peptide
  MOD_RES (2), (4), (38), (39): Xaa is C or S
  MOD_RES (16), (17), (18), (19), (20): Xaa is A or G
  MOD_RES (21), (22), (23), (24): Xaa is A or G or is absent

SEQ ID NO: 26147 - protein, 41 aa, Artificial Sequence
  GFR-binding peptide
  MOD_RES (2), (4), (37), (38): Xaa is C or S
  MOD_RES (15), (16), (17), (18), (19): Xaa is A or G
  MOD_RES (20), (21), (22), (23): Xaa is A or G or is absent
SXKXSRVIMEYKFKXXXXXXXXXLYLISIPELAQPVXXPAA

SEQ ID NO: 26148 - protein, 36 aa, Artificial Sequence
  GFR-binding peptide
  MOD_RES (32), (33): Xaa is C or S
AEVVMDYHYKLVVNNAADKYLISIPSLRAPVXXSAP

SEQ ID NO: 26149 - protein, 32 aa, Artificial Sequence
  GFR-binding peptide
EAVSMGEEYKFKTPVGMDDLYLVSIPELKTPV

SEQ ID NO: 26150 - protein, 38 aa, Artificial Sequence
  GFR-binding peptide
  MOD_RES (2), (4), (37), (38): Xaa is C or S
  MOD_RES (15), (16), (17), (18), (19): Xaa is A or G
  MOD_RES (20), (21), (22), (23): Xaa is A or G or is absent
SXKXSKVVMEYQKYXXXXXXXXXIYLISIPSLDQPVXX

SEQ ID NO: 26151 - protein, 35 aa, Artificial Sequence
  GFR-binding peptide
  MOD_RES (34), (34): Xaa is C or S
  MOD_RES (12), (13), (14), (15), (16): Xaa is A or G
  MOD_RES (17), (18), (19), (20): Xaa is A or G or is absent
SRVVMNEYKFKXXXXXXXXXLYLVSIPELKTPAXT

SEQ ID NO: 26152 - protein, 40 aa, Artificial Sequence
  GFR-binding peptide
  MOD_RES (1), (3), (36), (37): Xaa is C or S
  MOD_RES (14), (15), (16), (17), (18): Xaa is A or G
  MOD_RES (19), (20), (21), (22): Xaa is A or G or is absent
XKXSKVVMEYQKYXXXXXXXXXIYLISIPSLDQPVXXPSA

SEQ ID NO: 26153 - protein, 33 aa, Artificial Sequence
  GFR-binding peptide
  MOD_RES (33), (33): Xaa is C or S
  MOD_RES (11), (12), (13), (14), (15): Xaa is A or G
  MOD_RES (16), (17), (18), (19): Xaa is A or G or is absent
SVAMGEYQKYXXXXXXXXXIYLISIPSLKTPVX

SEQ ID NO: 26154 - protein, 35 aa, Artificial Sequence
  GFR-binding peptide
  MOD_RES (1), (3): Xaa is C or S
  MOD_RES (14), (15), (16), (17), (18): Xaa is A or G
  MOD_RES (19), (20), (21), (22): Xaa is A or G or is absent
XKXSKVVMEYQKYXXXXXXXXXIYLISIPSLDQPV

SEQ ID NO: 26155 - protein, 39 aa, Artificial Sequence; identical to SEQ ID NO: 5058
  GFR-binding peptide
  MOD_RES (2), (36), (37): Xaa is C or S
  MOD_RES (14), (15), (16), (17), (18): Xaa is A or G
  MOD_RES (19), (20), (21), (22): Xaa is A or G or is absent

SEQ ID NO: 26156 - protein, 36 aa, Artificial Sequence
  GFR-binding peptide
  MOD_RES (1), (35): Xaa is C or S
  MOD_RES (13), (14), (15), (16), (17): Xaa is A or G
  MOD_RES (18), (19), (20), (21): Xaa is A or G or is absent
XSRVVMNEYQKYXXXXXXXXXIYLVSIPSLKTPAXT

SEQ ID NO: 26157 - protein, 33 aa, Artificial Sequence
  GFR-binding peptide
  MOD_RES (2), (2): Xaa is C or S
GXAEVVMDEYKFKVVNNAADLYLISIPELRAPV

SEQ ID NO: 26158 - protein, 41 aa, Artificial Sequence
  GFR-binding peptide
  MOD_RES (2), (4), (37), (38): Xaa is C or S
  MOD_RES (15), (16), (17), (18), (19): Xaa is A or G
  MOD_RES (20), (21), (22), (23): Xaa is A or G or is absent
SXKXSKVIMEYQKYXXXXXXXXXIYLISIPSLDQSVXXPSA

SEQ ID NO: 26159 - protein, 34 aa, Artificial Sequence
  GFR-binding peptide
  MOD_RES (2), (34): Xaa is C or S
GXARVVMNEYQKYIVNSSDDIYLVSIPSLQTPAX

SEQ ID NO: 26160 - protein, 36 aa, Artificial Sequence; identical to SEQ ID NO: 5060
  GFR-binding peptide
  MOD_RES (31), (32): Xaa is C or S

SEQ ID NO: 26161 - protein, 43 aa, Artificial Sequence
  GFR-binding peptide
  MOD_RES (1), (3), (37), (38): Xaa is C or S
  MOD_RES (15), (16), (17), (18), (19): Xaa is A or G
  MOD_RES (20), (21), (22), (23): Xaa is A or G or is absent
XGXAKVVMNEYKFKXXXXXXXXXLYLVSIPELKTPAXXAKPVA

SEQ ID NO: 26162 - protein, 36 aa, Artificial Sequence; identical to SEQ ID NO: 5063
  GFR-binding peptide
  MOD_RES (2), (35), (36): Xaa is C or S

SEQ ID NO: 26163 - protein, 35 aa, Artificial Sequence
  GFR-binding peptide
  MOD_RES (1), (33): Xaa is C or S
XSRVVMNEYKFKIVNSSDDLYLVSIPELKTPAXTP

SEQ ID NO: 26164 - protein, 42 aa, Artificial Sequence
  GFR-binding peptide
  MOD_RES (2), (36), (37): Xaa is C or S
  MOD_RES (14), (15), (16), (17), (18): Xaa is A or G
  MOD_RES (19), (20), (21), (22): Xaa is A or G or is absent
GXARVVMNEYQKYXXXXXXXXXIYLVSIPSLQTPAXXPKPVT

SEQ ID NO: 26165 - protein, 40 aa, Artificial Sequence
  GFR-binding peptide
  MOD_RES (1), (35), (36): Xaa is C or S
  MOD_RES (13), (14), (15), (16), (17): Xaa is A or G
  MOD_RES (18), (19), (20), (21): Xaa is A or G or is absent
XAEVVMDEYQKYXXXXXXXXXIYLISIPSLRAPVXXSAPA

SEQ ID NO: 26166 - protein, 38 aa, Artificial Sequence
  GFR-binding peptide
  MOD_RES (34), (35): Xaa is C or S
  MOD_RES (12), (13), (14), (15), (16): Xaa is A or G
  MOD_RES (17), (18), (19), (20): Xaa is A or G or is absent
AKVVMNEYQKYXXXXXXXXXIYLVSIPSLKTPAXXAKP

SEQ ID NO: 26167 - protein, 36 aa, Artificial Sequence; identical to SEQ ID NO: 5066
  GFR-binding peptide
  MOD_RES (31), (32): Xaa is C or S

SEQ ID NO: 26168 - protein, 34 aa, Artificial Sequence
  GFR-binding peptide
  MOD_RES (2), (34): Xaa is C or S
GXGEVVMDEYKFKVVKENEDLYLMSIPELETPVX

SEQ ID NO: 26169 - protein, 42 aa, Artificial Sequence
  GFR-binding peptide
  MOD_RES (2), (4), (36), (37): Xaa is C or S
HXGXSRVVMNEYQKYIVNSSDDIYLVSIPSLKTPAXXPKPVY

SEQ ID NO: 26170 - protein, 39 aa, Artificial Sequence
  GFR-binding peptide
  MOD_RES (1), (34), (35): Xaa is C or S
  MOD_RES (12), (13), (14), (15), (16): Xaa is A or G
  MOD_RES (17), (18), (19), (20): Xaa is A or G or is absent
XSKVVMEYKFKXXXXXXXXXLYLISIPELDQPVXXPSAS

SEQ ID NO: 26171 - protein, 33 aa, Artificial Sequence
  GFR-binding peptide
  MOD_RES (31), (32): Xaa is C or S
KVVMNEYQKYIVNNSSDIYLVSIPSLKTPAXXA

SEQ ID NO: 26172 - protein, 36 aa, Artificial Sequence; identical to SEQ ID NO: 5069
  GFR-binding peptide
  MOD_RES (1), (33), (34): Xaa is C or S

SEQ ID NO: 26173 - protein, 37 aa, Artificial Sequence
  GFR-binding peptide
  MOD_RES (2), (35), (36): Xaa is C or S
GXEAVSMGEEYKFKTPVGMDDLYLVSIPELKTPVXXA

SEQ ID NO: 26174 - protein, 41 aa, Artificial Sequence; identical to SEQ ID NO: 5070
  GFR-binding peptide
  MOD_RES (1), (36), (37): Xaa is C or S
  MOD_RES (14), (15), (16), (17), (18): Xaa is A or G
  MOD_RES (19), (20), (21), (22): Xaa is A or G or is absent

SEQ ID NO: 26175 - protein, 35 aa, Artificial Sequence; identical to SEQ ID NO: 5072
  GFR-binding peptide
  MOD_RES (31), (31): Xaa is C or S

SEQ ID NO: 26176 - protein, 35 aa, Artificial Sequence
  GFR-binding peptide
  MOD_RES (31), (32): Xaa is C or S
EVVMEEYQKYVVKDYEDIYLMSIPSLETPVXXAKP

SEQ ID NO: 26177 - protein, 35 aa, Artificial Sequence
  GFR-binding peptide
  MOD_RES (32), (33): Xaa is C or S
ESVAMGRYKKLYTVVGKDFYLISIANLKTPVXXAK

SEQ ID NO: 26178 - protein, 34 aa, Artificial Sequence
  GFR-binding peptide
  MOD_RES (33), (34): Xaa is C or S
  MOD_RES (11), (12), (13), (14), (15): Xaa is A or G
  MOD_RES (16), (17), (18), (19): Xaa is A or G or is absent
EVVMDYHYKLXXXXXXXXXKYLISIPSLRAPVXX

SEQ ID NO: 26179 - protein, 39 aa, Artificial Sequence
  GFR-binding peptide
  MOD_RES (2), (4), (38), (39): Xaa is C or S
  MOD_RES (16), (17), (18), (19), (20): Xaa is A or G
  MOD_RES (21), (22), (23), (24): Xaa is A or G or is absent
HXGXAKVVMNEYQKYXXXXXXXXXIYLVSIPSLKTPAXX

SEQ ID NO: 26180 - protein, 36 aa, Artificial Sequence; identical to SEQ ID NO: 5076
  GFR-binding peptide
  MOD_RES (2), (34), (35): Xaa is C or S

SEQ ID NO: 26181 - protein, 37 aa, Artificial Sequence
  GFR-binding peptide
  MOD_RES (1), (3): Xaa is C or S
  MOD_RES (16), (17), (18), (19), (20): Xaa is A or G
  MOD_RES (21), (22), (23), (24): Xaa is A or G or is absent
XGXEAVSMGEEYKFKXXXXXXXXXLYLVSIPELKTPV

SEQ ID NO: 26182 - protein, 37 aa, Artificial Sequence
  GFR-binding peptide
  MOD_RES (2), (36), (37): Xaa is C or S
  MOD_RES (14), (15), (16), (17), (18): Xaa is A or G
  MOD_RES (19), (20), (21), (22): Xaa is A or G or is absent
GXGEVVMDEYQKYXXXXXXXXXIYLMSIPSLETPVXX

SEQ ID NO: 26183 - protein, 35 aa, Artificial Sequence
  GFR-binding peptide
  MOD_RES (2), (2): Xaa is C or S
  MOD_RES (14), (15), (16), (17), (18): Xaa is A or G
  MOD_RES (19), (20), (21), (22): Xaa is A or G or is absent
GXAEVVMDEYQKYXXXXXXXXXIYLISIPSLRAPV

SEQ ID NO: 26184 - protein, 35 aa, Artificial Sequence
  GFR-binding peptide
  MOD_RES (2), (4): Xaa is C or S
HXGXAKVVMNEYQKYIVNNSSDIYLVSIPSLKTPA

SEQ ID NO: 26185 - protein, 38 aa, Artificial Sequence
  GFR-binding peptide
  MOD_RES (1), (34), (35): Xaa is C or S
XEAVSMGEEYKFKTPVGMDDLYLVSIPELKTPVXXAKG

SEQ ID NO: 26186 - protein, 38 aa, Artificial Sequence; identical to SEQ ID NO: 5081
  GFR-binding peptide
  MOD_RES (32), (33): Xaa is C or S

SEQ ID NO: 26187 - protein, 37 aa, Artificial Sequence; identical to SEQ ID NO: 5083
  GFR-binding peptide
  MOD_RES (31), (32): Xaa is C or S

SEQ ID NO: 26188 - protein, 33 aa, Artificial Sequence
  GFR-binding peptide
  MOD_RES (32), (33): Xaa is C or S
ESVAMGEYQKYYTVVGKDIYLISIPSLKTPVXX

SEQ ID NO: 26189 - protein, 34 aa, Artificial Sequence
  GFR-binding peptide
  MOD_RES (1), (33), (34): Xaa is C or S
XESVAMGRYKKLYTVVGKDFYLISIANLKTPVXX

SEQ ID NO: 26190 - protein, 38 aa, Artificial Sequence; identical to SEQ ID NO: 5084
  GFR-binding peptide
  MOD_RES (2), (36): Xaa is C or S
  MOD_RES (14), (15), (16), (17), (18): Xaa is A or G
  MOD_RES (19), (20), (21), (22): Xaa is A or G or is absent

SEQ ID NO: 26191 - protein, 35 aa, Artificial Sequence; identical to SEQ ID NO: 5085
  GFR-binding peptide
  MOD_RES (1), (3), (35): Xaa is C or S

SEQ ID NO: 26192 - protein, 35 aa, Artificial Sequence
  GFR-binding peptide
  MOD_RES (2), (33), (34): Xaa is C or S
KXSKVIMEYKFKIKPTKGILYLISIPELDQSVXXP

SEQ ID NO: 26193 - protein, 33 aa, Artificial Sequence
  GFR-binding peptide
  MOD_RES (32), (33): Xaa is C or S
ESVAMGEYKFKYTVVGKDLYLISIPELKTPVXX

SEQ ID NO: 26194 - protein, 41 aa, Artificial Sequence; identical to SEQ ID NO: 5090
  GFR-binding peptide
  MOD_RES (2), (36), (37): Xaa is C or S
  MOD_RES (14), (15), (16), (17), (18): Xaa is A or G
  MOD_RES (19), (20), (21), (22): Xaa is A or G or is absent

SEQ ID NO: 26195 - protein, 42 aa, Artificial Sequence
  GFR-binding peptide
  MOD_RES (2), (4), (37), (38): Xaa is C or S
  MOD_RES (15), (16), (17), (18), (19): Xaa is A or G
  MOD_RES (20), (21), (22), (23): Xaa is A or G or is absent
SXKXSKVIMEYKFKXXXXXXXXXLYLISIPELDQSVXXPSAS

SEQ ID NO: 26196 - protein, 38 aa, Artificial Sequence; identical to SEQ ID NO: 5094
  GFR-binding peptide
  MOD_RES (33), (34): Xaa is C or S
  MOD_RES (11), (12), (13), (14), (15): Xaa is A or G
  MOD_RES (16), (17), (18), (19): Xaa is A or G or is absent

SEQ ID NO: 26197 - protein, 36 aa, Artificial Sequence
  GFR-binding peptide
  MOD_RES (2), (36): Xaa is C or S
  MOD_RES (14), (15), (16), (17), (18): Xaa is A or G
  MOD_RES (19), (20), (21), (22): Xaa is A or G or is absent
GXESVAMGEYKFKXXXXXXXXXLYLISIPELKTPVX

SEQ ID NO: 26198 - protein, 38 aa, Artificial Sequence
  GFR-binding peptide
  MOD_RES (1), (33), (34): Xaa is C or S
XESVAMGEYQKYYTVVGKDIYLISIPSLKTPVXXAKSA

SEQ ID NO: 26199 - protein, 36 aa, Artificial Sequence; identical to SEQ ID NO: 5098
  GFR-binding peptide
  MOD_RES (1), (32), (33): Xaa is C or S

SEQ ID NO: 26200 - protein, 38 aa, Artificial Sequence
  GFR-binding peptide
  MOD_RES (2), (33), (34): Xaa is C or S
KXSRVIMEYQKYVKPKRGVIYLISIPSLAQPVXXPAAS

SEQ ID NO: 26201 - protein, 37 aa, Artificial Sequence; identical to SEQ ID NO: 5101
  GFR-binding peptide
  MOD_RES (2), (4), (36), (37): Xaa is C or S

SEQ ID NO: 26202 - protein, 31 aa, Artificial Sequence
  GFR-binding peptide
  MOD_RES (31), (31): Xaa is C or S
EVVMEEYKFKVVKDYEDLYLMSIPELETPVX

SEQ ID NO: 26203 - protein, 38 aa, Artificial Sequence; identical to SEQ ID NO: 5102
  GFR-binding peptide
  MOD_RES (1), (35), (36): Xaa is C or S
  MOD_RES (13), (14), (15), (16), (17): Xaa is A or G
  MOD_RES (18), (19), (20), (21): Xaa is A or G or is absent

SEQ ID NO: 26204 - protein, 41 aa, Artificial Sequence
  GFR-binding peptide
  MOD_RES (1), (35), (36): Xaa is C or S
  MOD_RES (13), (14), (15), (16), (17): Xaa is A or G
  MOD_RES (18), (19), (20), (21): Xaa is A or G or is absent
XESVAMGEYQKYXXXXXXXXXIYLISIPSLKTPVXXAKSAK

SEQ ID NO: 26205 - protein, 39 aa, Artificial Sequence
  GFR-binding peptide
  MOD_RES (33), (34): Xaa is C or S
  MOD_RES (11), (12), (13), (14), (15): Xaa is A or G
  MOD_RES (16), (17), (18), (19): Xaa is A or G or is absent
SVAMGYHYKLXXXXXXXXXKYLISIPSLKTPVXXAKSAK

SEQ ID NO: 26206 - protein, 38 aa, Artificial Sequence; identical to SEQ ID NO: 5103
  GFR-binding peptide
  MOD_RES (33), (34): Xaa is C or S
  MOD_RES (11), (12), (13), (14), (15): Xaa is A or G
  MOD_RES (16), (17), (18), (19): Xaa is A or G or is absent

SEQ ID NO: 26207 - protein, 30 aa, Artificial Sequence; identical to SEQ ID NO: 5105
  GFR-binding peptide

SEQ ID NO: 26208 - protein, 33 aa, Artificial Sequence
  GFR-binding peptide
  MOD_RES (31), (32): Xaa is C or S
RVVMNEYKFKIVNSSDDLYLVSIPELKTPAXXP

SEQ ID NO: 26209 - protein, 39 aa, Artificial Sequence
  GFR-binding peptide
  MOD_RES (1), (3), (35), (36): Xaa is C or S
XGXGEVVMDEYKFKVVKENEDLYLMSIPELETPVXXAKP

SEQ ID NO: 26210 - protein, 36 aa, Artificial Sequence
  GFR-binding peptide
  MOD_RES (2), (34), (35): Xaa is C or S
GXAEVVMDRYKKLVVNNAADFYLISIANLRAPVXXS

SEQ ID NO: 26211 - protein, 35 aa, Artificial Sequence
  GFR-binding peptide
  MOD_RES (1), (34), (35): Xaa is C or S
XEAVSMGEEYQKYTPVGMDDIYLVSIPSLKTPVXX

SEQ ID NO: 26212 - protein, 34 aa, Artificial Sequence
  GFR-binding peptide
  MOD_RES (31), (32): Xaa is C or S
RVVMNEYKFKIVNSSDDLYLVSIPELQTPAXXPK

SEQ ID NO: 26213 - protein, 34 aa, Artificial Sequence; identical to SEQ ID NO: 5111
  GFR-binding peptide
  MOD_RES (2), (34): Xaa is C or S

SEQ ID NO: 26214 - protein, 35 aa, Artificial Sequence; identical to SEQ ID NO: 5113
  GFR-binding peptide
  MOD_RES (1), (3): Xaa is C or S

SEQ ID NO: 26215 - protein, 31 aa, Artificial Sequence
  GFR-binding peptide
  MOD_RES (31), (31): Xaa is C or S
RVVMNEYKFKIVNSSDDLYLVSIPELKTPAX

SEQ ID NO: 26216 - protein, 38 aa, Artificial Sequence
  GFR-binding peptide
  MOD_RES (2), (36), (37): Xaa is C or S
  MOD_RES (14), (15), (16), (17), (18): Xaa is A or G
  MOD_RES (19), (20), (21), (22): Xaa is A or G or is absent
GXAEVVMDEYKFKXXXXXXXXXLYLISIPELRAPVXXS

SEQ ID NO: 26217 - protein, 35 aa, Artificial Sequence; identical to SEQ ID NO: 5116
  GFR-binding peptide
  MOD_RES (32), (33): Xaa is C or S

SEQ ID NO: 26218 - protein, 32 aa, Artificial Sequence; identical to SEQ ID NO: 5117
  GFR-binding peptide
  MOD_RES (31), (32): Xaa is C or S

SEQ ID NO: 26219 - protein, 36 aa, Artificial Sequence
  GFR-binding peptide
  MOD_RES (33), (33): Xaa is C or S
  MOD_RES (11), (12), (13), (14), (15): Xaa is A or G
  MOD_RES (16), (17), (18), (19): Xaa is A or G or is absent
RVVMNEYKFKXXXXXXXXXLYLVSIPELKTPAXTPK

SEQ ID NO: 26220 - protein, 33 aa, Artificial Sequence; identical to SEQ ID NO: 5119
  GFR-binding peptide
  MOD_RES (1), (3): Xaa is C or S

SEQ ID NO: 26221 - protein, 41 aa, Artificial Sequence; identical to SEQ ID NO: 5120
  GFR-binding peptide
  MOD_RES (2), (4), (36), (37): Xaa is C or S

SEQ ID NO: 26222 - protein, 34 aa, Artificial Sequence
  GFR-binding peptide
  MOD_RES (31), (32): Xaa is C or S
SKVIMEYQKYIKPTKGIIYLISIPSLDQSVXXPS

SEQ ID NO: 26223 - protein, 40 aa, Artificial Sequence
  GFR-binding peptide
  MOD_RES (34), (35): Xaa is C or S
  MOD_RES (12), (13), (14), (15), (16): Xaa is A or G
  MOD_RES (17), (18), (19), (20): Xaa is A or G or is absent
ARVVMNEYKFKXXXXXXXXXLYLVSIPELQTPAXXPKPVT

SEQ ID NO: 26224 - protein, 36 aa, Artificial Sequence; identical to SEQ ID NO: 5122
  GFR-binding peptide
  MOD_RES (33), (34): Xaa is C or S
  MOD_RES (11), (12), (13), (14), (15): Xaa is A or G
  MOD_RES (16), (17), (18), (19): Xaa is A or G or is absent

SEQ ID NO: 26225 - protein, 39 aa, Artificial Sequence
  GFR-binding peptide
  MOD_RES (2), (4), (36), (37): Xaa is C or S
RXGXAEVVMDRYKKLVVNNAADFYLISIANLRAPVXXSA

SEQ ID NO: 26226 - protein, 34 aa, Artificial Sequence; identical to SEQ ID NO: 5124
  GFR-binding peptide
  MOD_RES (33), (34): Xaa is C or S
  MOD_RES (11), (12), (13), (14), (15): Xaa is A or G
  MOD_RES (16), (17), (18), (19): Xaa is A or G or is absent

SEQ ID NO: 26227 - protein, 36 aa, Artificial Sequence
  GFR-binding peptide
  MOD_RES (1), (35), (36): Xaa is C or S
  MOD_RES (13), (14), (15), (16), (17): Xaa is A or G
  MOD_RES (18), (19), (20), (21): Xaa is A or G or is absent
XGEVVMDEYKFKXXXXXXXXXLYLMSIPELETPVXX

SEQ ID NO: 26228 - protein, 36 aa, Artificial Sequence
  GFR-binding peptide
  MOD_RES (33), (34): Xaa is C or S
  MOD_RES (11), (12), (13), (14), (15): Xaa is A or G
  MOD_RES (16), (17), (18), (19): Xaa is A or G or is absent
SRVIMEYKFKXXXXXXXXXLYLISIPELAQPVXXPA

SEQ ID NO: 26229 - protein, 40 aa, Artificial Sequence
  GFR-binding peptide
  MOD_RES (34), (35): Xaa is C or S
  MOD_RES (12), (13), (14), (15), (16): Xaa is A or G
  MOD_RES (17), (18), (19), (20): Xaa is A or G or is absent
GEVVMEEYQKYXXXXXXXXXIYLMSIPSLETPVXXAKPIS

SEQ ID NO: 26230 - protein, 37 aa, Artificial Sequence
  GFR-binding peptide
  MOD_RES (2), (4): Xaa is C or S
  MOD_RES (16), (17), (18), (19), (20): Xaa is A or G
  MOD_RES (21), (22), (23), (24): Xaa is A or G or is absent
RXGXGEVVMDEYQKYXXXXXXXXXIYLMSIPSLETPV

SEQ ID NO: 26231 - protein, 37 aa, Artificial Sequence; identical to SEQ ID NO: 5128
  GFR-binding peptide
  MOD_RES (34), (35): Xaa is C or S
  MOD_RES (12), (13), (14), (15), (16): Xaa is A or G
  MOD_RES (17), (18), (19), (20): Xaa is A or G or is absent

SEQ ID NO: 26232 - protein, 39 aa, Artificial Sequence
  GFR-binding peptide
  MOD_RES (1), (33), (34): Xaa is C or S
XARVVMNEYQKYIVNSSDDIYLVSIPSLQTPAXXPKPVT

SEQ ID NO: 26233 - protein, 44 aa, Artificial Sequence; identical to SEQ ID NO: 5130
  GFR-binding peptide
  MOD_RES (2), (4), (38), (39): Xaa is C or S
  MOD_RES (16), (17), (18), (19), (20): Xaa is A or G
  MOD_RES (21), (22), (23), (24): Xaa is A or G or is absent

SEQ ID NO: 26234 - protein, 42 aa, Artificial Sequence; identical to SEQ ID NO: 5131
  GFR-binding peptide
  MOD_RES (2), (4), (37), (38): Xaa is C or S
  MOD_RES (15), (16), (17), (18), (19): Xaa is A or G
  MOD_RES (20), (21), (22), (23): Xaa is A or G or is absent

SEQ ID NO: 26235 - protein, 39 aa, Artificial Sequence
  GFR-binding peptide
  MOD_RES (33), (34): Xaa is C or S
  MOD_RES (11), (12), (13), (14), (15): Xaa is A or G
  MOD_RES (16), (17), (18), (19): Xaa is A or G or is absent
EVVMDEYQKYXXXXXXXXXIYLISIPSLRAPVXXSAPAA

SEQ ID NO: 26236 - protein, 33 aa, Artificial Sequence; identical to SEQ ID NO: 5135
  GFR-binding peptide
  MOD_RES (1), (1): Xaa is C or S
  MOD_RES (12), (13), (14), (15), (16): Xaa is A or G
  MOD_RES (17), (18), (19), (20): Xaa is A or G or is absent

SEQ ID NO: 26237 - protein, 37 aa, Artificial Sequence
  GFR-binding peptide
  MOD_RES (31), (32): Xaa is C or S
EVVMDEYKFKVVKENEDLYLMSIPELETPVXXAKPIK

SEQ ID NO: 26238 - protein, 40 aa, Artificial Sequence
  GFR-binding peptide
  MOD_RES (2), (4), (38), (39): Xaa is C or S
  MOD_RES (16), (17), (18), (19), (20): Xaa is A or G
  MOD_RES (21), (22), (23), (24): Xaa is A or G or is absent
RXGXESVAMGRYKKLXXXXXXXXXFYLISIANLKTPVXXA

SEQ ID NO: 26239 - protein, 36 aa, Artificial Sequence
  GFR-binding peptide
  MOD_RES (1), (33), (34): Xaa is C or S
XSRVVMNEYQKYIVNSSDDIYLVSIPSLKTPAXXPK

SEQ ID NO: 26240 - protein, 38 aa, Artificial Sequence; identical to SEQ ID NO: 5139
  GFR-binding peptide
  MOD_RES (2), (34), (35): Xaa is C or S

SEQ ID NO: 26241 - protein, 36 aa, Artificial Sequence
  GFR-binding peptide
  MOD_RES (2), (35), (36): Xaa is C or S
  MOD_RES (13), (14), (15), (16), (17): Xaa is A or G
  MOD_RES (18), (19), (20), (21): Xaa is A or G or is absent
KXSKVVMEYQKYXXXXXXXXXIYLISIPSLDQPVXX

SEQ ID NO: 26242 - protein, 33 aa, Artificial Sequence; identical to SEQ ID NO: 5140
  GFR-binding peptide
  MOD_RES (12), (13), (14), (15), (16): Xaa is A or G
  MOD_RES (17), (18), (19), (20): Xaa is A or G or is absent

SEQ ID NO: 26243 - protein, 32 aa, Artificial Sequence; identical to SEQ ID NO: 5141
  GFR-binding peptide
  MOD_RES (1), (1): Xaa is C or S

SEQ ID NO: 26244 - protein, 39 aa, Artificial Sequence
  GFR-binding peptide
  MOD_RES (1), (33), (34): Xaa is C or S
XESVAMGYHYKLYTVVGKDKYLISIPSLKTPVXXAKSAK

SEQ ID NO: 26245 - protein, 38 aa, Artificial Sequence
  GFR-binding peptide
  MOD_RES (1), (3), (35), (36): Xaa is C or S
XGXESVAMGEYKFKYTVVGKDLYLISIPELKTPVXXAK

SEQ ID NO: 26246 - protein, 36 aa, Artificial Sequence
  GFR-binding peptide
  MOD_RES (2), (34), (35): Xaa is C or S
GXAEVVMDEYQKYVVNNAADIYLISIPSLRAPVXXS

SEQ ID NO: 26247 - protein, 41 aa, Artificial Sequence
  GFR-binding peptide
  MOD_RES (1), (3), (35): Xaa is C or S
XGXSRVVMNEYQKYIVNSSDDIYLVSIPSLKTPAXTPKTVH

SEQ ID NO: 26248 - protein, 38 aa, Artificial Sequence
  GFR-binding peptide
  MOD_RES (1), (3), (35), (36): Xaa is C or S
XGXGEVVMEEYKFKVVKDYEDLYLMSIPELETPVXXAK

SEQ ID NO: 26249 - protein, 39 aa, Artificial Sequence
  GFR-binding peptide
  MOD_RES (1), (3), (36), (37): Xaa is C or S
  MOD_RES (14), (15), (16), (17), (18): Xaa is A or G
  MOD_RES (19), (20), (21), (22): Xaa is A or G or is absent
XKXSKVVMEYQKYXXXXXXXXXIYLISIPSLDQPVXXPS

SEQ ID NO: 26250 - protein, 32 aa, Artificial Sequence; identical to SEQ ID NO: 5144
  GFR-binding peptide
  MOD_RES (1), (32): Xaa is C or S

SEQ ID NO: 26251 - protein, 41 aa, Artificial Sequence
  GFR-binding peptide
  MOD_RES (2), (4), (38), (39): Xaa is C or S
  MOD_RES (16), (17), (18), (19), (20): Xaa is A or G
  MOD_RES (21), (22), (23), (24): Xaa is A or G or is absent
RXGXAEVVMDYHYKLXXXXXXXXXKYLISIPSLRAPVXXSA

SEQ ID NO: 26252 - protein, 33 aa, Artificial Sequence
  GFR-binding peptide
  MOD_RES (12), (13), (14), (15), (16): Xaa is A or G
  MOD_RES (17), (18), (19), (20): Xaa is A or G or is absent
GEVVMEEYKFKXXXXXXXXXLYLMSIPELETPV

SEQ ID NO: 26253 - protein, 39 aa, Artificial Sequence
  GFR-binding peptide
  MOD_RES (2), (4), (37), (38): Xaa is C or S
  MOD_RES (15), (16), (17), (18), (19): Xaa is A or G
  MOD_RES (20), (21), (22), (23): Xaa is A or G or is absent
SXKXSKVVMEYQKYXXXXXXXXXIYLISIPSLDQPVXXP

SEQ ID NO: 26254 - protein, 39 aa, Artificial Sequence; identical to SEQ ID NO: 5147
  GFR-binding peptide
  MOD_RES (1), (33), (34): Xaa is C or S

SEQ ID NO: 26255 - protein, 36 aa, Artificial Sequence
  GFR-binding peptide
  MOD_RES (35), (36): Xaa is C or S
  MOD_RES (13), (14), (15), (16), (17): Xaa is A or G
  MOD_RES (18), (19), (20), (21): Xaa is A or G or is absent
EAVSMGEEYQKYXXXXXXXXXIYLVSIPSLKTPVXX

SEQ ID NO: 26256 - protein, 36 aa, Artificial Sequence
  GFR-binding peptide
  MOD_RES (2), (4), (36): Xaa is C or S
HXGXARVVMNEYKFKIVNSSDDLYLVSIPELQTPAX

SEQ ID NO: 26257 - protein, 36 aa, Artificial Sequence; identical to SEQ ID NO: 5148
  GFR-binding peptide
  MOD_RES (2), (4), (35), (36): Xaa is C or S

SEQ ID NO: 26258 - protein, 37 aa, Artificial Sequence
  GFR-binding peptide
  MOD_RES (33), (34): Xaa is C or S
  MOD_RES (11), (12), (13), (14), (15): Xaa is A or G
  MOD_RES (16), (17), (18), (19): Xaa is A or G or is absent
SRVIMEYKFKXXXXXXXXXLYLISIPELAQPVXXPAA

SEQ ID NO: 26259 - protein, 34 aa, Artificial Sequence
  GFR-binding peptide
  MOD_RES (2), (4): Xaa is C or S
SXKXSKVVMEYKFKVKPTRGVLYLISIPELDQPV

SEQ ID NO: 26260 - protein, 34 aa, Artificial Sequence
  GFR-binding peptide
  MOD_RES (33), (34): Xaa is C or S
  MOD_RES (11), (12), (13), (14), (15): Xaa is A or G
  MOD_RES (16), (17), (18), (19): Xaa is A or G or is absent
EVVMDEYKFKXXXXXXXXXLYLMSIPELETPVXX

SEQ ID NO: 26261 - protein, 44 aa, Artificial Sequence
  GFR-binding peptide
  MOD_RES (2), (4), (38), (39): Xaa is C or S
  MOD_RES (16), (17), (18), (19), (20): Xaa is A or G
  MOD_RES (21), (22), (23), (24): Xaa is A or G or is absent
RXGXESVAMGYHYKLXXXXXXXXXKYLISIPSLKTPVXXAKSAK

SEQ ID NO: 26262 - protein, 37 aa, Artificial Sequence
  GFR-binding peptide
  MOD_RES (2), (4): Xaa is C or S
  MOD_RES (16), (17), (18), (19), (20): Xaa is A or G
  MOD_RES (21), (22), (23), (24): Xaa is A or G or is absent
HXGXSRVVMNEYKFKXXXXXXXXXLYLVSIPELKTPA

SEQ ID NO: 26263 - protein, 36 aa, Artificial Sequence; identical to SEQ ID NO: 5154
  GFR-binding peptide
  MOD_RES (2), (34), (35): Xaa is C or S

SEQ ID NO: 26264 - protein, 38 aa, Artificial Sequence
  GFR-binding peptide
  MOD_RES (2), (4), (35), (36): Xaa is C or S
SXKXSKVVMEYQKYVKPTRGVIYLISIPSLDQPVXXPS

SEQ ID NO: 26265 - protein, 40 aa, Artificial Sequence
  GFR-binding peptide
  MOD_RES (34), (35): Xaa is C or S
  MOD_RES (12), (13), (14), (15), (16): Xaa is A or G
  MOD_RES (17), (18), (19), (20): Xaa is A or G or is absent
ESVAMGEYQKYXXXXXXXXXIYLISIPSLKTPVXXAKSAK

SEQ ID NO: 26266 - protein, 35 aa, Artificial Sequence; identical to SEQ ID NO: 5158
  GFR-binding peptide
  MOD_RES (1), (3), (35): Xaa is C or S

SEQ ID NO: 26267 - protein, 39 aa, Artificial Sequence
  GFR-binding peptide
  MOD_RES (1), (33), (34): Xaa is C or S
XAEVVMDYHYKLVVNNAADKYLISIPSLRAPVXXSAPAA

SEQ ID NO: 26268 - protein, 35 aa, Artificial Sequence; identical to SEQ ID NO: 5161
  GFR-binding peptide
  MOD_RES (2), (4): Xaa is C or S

SEQ ID NO: 26269 - protein, 36 aa, Artificial Sequence
  GFR-binding peptide
  MOD_RES (1), (3), (35), (36): Xaa is C or S
XGXESVAMGRYKKLYTVVGKDFYLISIANLKTPVXX

SEQ ID NO: 26270 - protein, 41 aa, Artificial Sequence; identical to SEQ ID NO: 5162
  GFR-binding peptide
  MOD_RES (2), (4), (36): Xaa is C or S

SEQ ID NO: 26271 - protein, 39 aa, Artificial Sequence
  GFR-binding peptide
  MOD_RES (2), (34), (35): Xaa is C or S
GXAKVVMNEYKFKIVNNSSDLYLVSIPELKTPAXXAKPV

SEQ ID NO: 26272 - protein, 37 aa, Artificial Sequence
  GFR-binding peptide
  MOD_RES (2), (34), (35): Xaa is C or S
GXSRVVMNEYKFKIVNSSDDLYLVSIPELKTPAXXPK

SEQ ID NO: 26273 - protein, 38 aa, Artificial Sequence
  GFR-binding peptide
  MOD_RES (2), (36), (37): Xaa is C or S
  MOD_RES (14), (15), (16), (17), (18): Xaa is A or G
  MOD_RES (19), (20), (21), (22): Xaa is A or G or is absent
GXGEVVMDEYQKYXXXXXXXXXIYLMSIPSLETPVXXA

SEQ ID NO: 26274 - protein, 42 aa, Artificial Sequence
  GFR-binding peptide
  MOD_RES (2), (4), (36), (37): Xaa is C or S
HXGXSRVVMNEYKFKIVNSSDDLYLVSIPELKTPAXXPKPVY

SEQ ID NO: 26275 - protein, 38 aa, Artificial Sequence
  GFR-binding peptide
  MOD_RES (2), (4), (38): Xaa is C or S
  MOD_RES (16), (17), (18), (19), (20): Xaa is A or G
  MOD_RES (21), (22), (23), (24): Xaa is A or G or is absent
RXGXESVAMGYHYKLXXXXXXXXXKYLISIPSLKTPVX

SEQ ID NO: 26276 - protein, 37 aa, Artificial Sequence; identical to SEQ ID NO: 5168
  GFR-binding peptide
  MOD_RES (34), (35): Xaa is C or S
  MOD_RES (12), (13), (14), (15), (16): Xaa is A or G
  MOD_RES (17), (18), (19), (20): Xaa is A or G or is absent

SEQ ID NO: 26277 - protein, 36 aa, Artificial Sequence
  GFR-binding peptide
  MOD_RES (1), (3), (36): Xaa is C or S
  MOD_RES (14), (15), (16), (17), (18): Xaa is A or G
  MOD_RES (19), (20), (21), (22): Xaa is A or G or is absent
XKXSKVIMEYKFKXXXXXXXXXLYLISIPELDQSVX

SEQ ID NO: 26278 - protein, 34 aa, Artificial Sequence
  GFR-binding peptide
  MOD_RES (33), (34): Xaa is C or S
  MOD_RES (11), (12), (13), (14), (15): Xaa is A or G
  MOD_RES (16), (17), (18), (19): Xaa is A or G or is absent
KVVMNEYQKYXXXXXXXXXIYLVSIPSLKTPAXX

SEQ ID NO: 26279 - protein, 36 aa, Artificial Sequence; identical to SEQ ID NO: 5169
  GFR-binding peptide
  MOD_RES (1), (35), (36): Xaa is C or S
  MOD_RES (13), (14), (15), (16), (17): Xaa is A or G
  MOD_RES (18), (19), (20), (21): Xaa is A or G or is absent

SEQ ID NO: 26280 - protein, 32 aa, Artificial Sequence; identical to SEQ ID NO: 5171
  GFR-binding peptide
  MOD_RES (31), (32): Xaa is C or S

SEQ ID NO: 26281 - protein, 35 aa, Artificial Sequence; identical to SEQ ID NO: 5174
  GFR-binding peptide
  MOD_RES (2), (34), (35): Xaa is C or S

SEQ ID NO: 26282 - protein, 34 aa, Artificial Sequence
  GFR-binding peptide
  MOD_RES (33), (34): Xaa is C or S
  MOD_RES (11), (12), (13), (14), (15): Xaa is A or G
  MOD_RES (16), (17), (18), (19): Xaa is A or G or is absent
RVVMNEYQKYXXXXXXXXXIYLVSIPSLKTPAXX

SEQ ID NO: 26283 - protein, 34 aa, Artificial Sequence; identical to SEQ ID NO: 5175
  GFR-binding peptide
  MOD_RES (1), (3), (34): Xaa is C or S

SEQ ID NO: 26284 - protein, 38 aa, Artificial Sequence
  GFR-binding peptide
  MOD_RES (1), (36), (37): Xaa is C or S
  MOD_RES (14), (15), (16), (17), (18): Xaa is A or G
  MOD_RES (19), (20), (21), (22): Xaa is A or G or is absent
XEAVSMGEEYKFKXXXXXXXXXLYLVSIPELKTPVXXA

SEQ ID NO: 26285 - protein, 34 aa, Artificial Sequence; identical to SEQ ID NO: 5177
  GFR-binding peptide
  MOD_RES (33), (34): Xaa is C or S
  MOD_RES (11), (12), (13), (14), (15): Xaa is A or G
  MOD_RES (16), (17), (18), (19): Xaa is A or G or is absent

SEQ ID NO: 26286 - protein, 38 aa, Artificial Sequence
  GFR-binding peptide
  MOD_RES (2), (4), (38): Xaa is C or S
  MOD_RES (16), (17), (18), (19), (20): Xaa is A or G
  MOD_RES (21), (22), (23), (24): Xaa is A or G or is absent
RXGXGEVVMDEYKFKXXXXXXXXXLYLMSIPELETPVX

SEQ ID NO: 26287 - protein, 37 aa, Artificial Sequence
  GFR-binding peptide
  MOD_RES (1), (36), (37): Xaa is C or S
  MOD_RES (14), (15), (16), (17), (18): Xaa is A or G
  MOD_RES (19), (20), (21), (22): Xaa is A or G or is absent
XEAVSMGEEYQKYXXXXXXXXXIYLVSIPSLKTPVXX

SEQ ID NO: 26288 - protein, 35 aa, Artificial Sequence
  GFR-binding peptide
  MOD_RES (31), (32): Xaa is C or S
SVAMGEYQKYYTVVGKDIYLISIPSLKTPVXXAKS

SEQ ID NO: 26289 - protein, 41 aa, Artificial Sequence
  GFR-binding peptide
  MOD_RES (2), (36), (37): Xaa is C or S
  MOD_RES (14), (15), (16), (17), (18): Xaa is A or G
  MOD_RES (19), (20), (21), (22): Xaa is A or G or is absent
GXARVVMNEYKFKXXXXXXXXXLYLVSIPELQTPAXXPKPV

SEQ ID NO: 26290 - protein, 37 aa, Artificial Sequence; identical to SEQ ID NO: 5179
  GFR-binding peptide
  MOD_RES (33), (34): Xaa is C or S
  MOD_RES (11), (12), (13), (14), (15): Xaa is A or G
  MOD_RES (16), (17), (18), (19): Xaa is A or G or is absent

SEQ ID NO: 26291 - protein, 33 aa, Artificial Sequence; identical to SEQ ID NO: 5180
  GFR-binding peptide
  MOD_RES (12), (13), (14), (15), (16): Xaa is A or G
  MOD_RES (17), (18), (19), (20): Xaa is A or G or is absent

SEQ ID NO: 26292 - protein, 37 aa, Artificial Sequence
  GFR-binding peptide
  MOD_RES (1), (3), (37): Xaa is C or S
  MOD_RES (15), (16), (17), (18), (19): Xaa is A or G
  MOD_RES (20), (21), (22), (23): Xaa is A or G or is absent
XGXSRVVMNEYQKYXXXXXXXXXIYLVSIPSLKTPAX

SEQ ID NO: 26293 - protein, 39 aa, Artificial Sequence
  GFR-binding peptide
  MOD_RES (2), (4), (39): Xaa is C or S
  MOD_RES (17), (18), (19), (20), (21): Xaa is A or G
  MOD_RES (22), (23), (24), (25): Xaa is A or G or is absent
RXGXEAVSMGEEYQKYXXXXXXXXXIYLVSIPSLKTPVX

SEQ ID NO: 26294 - protein, 38 aa, Artificial Sequence
  GFR-binding peptide
  MOD_RES (32), (33): Xaa is C or S
AEVVMDEYKFKVVNNAADLYLISIPELRAPVXXSAPAA

SEQ ID NO: 26295 - protein, 38 aa, Artificial Sequence; identical to SEQ ID NO: 5182
  GFR-binding peptide
  MOD_RES (1), (32), (33): Xaa is C or S

SEQ ID NO: 26296 - protein, 42 aa, Artificial Sequence
  GFR-binding peptide
  MOD_RES (1), (3), (37), (38): Xaa is C or S
  MOD_RES (15), (16), (17), (18), (19): Xaa is A or G
  MOD_RES (20), (21), (22), (23): Xaa is A or G or is absent
XGXGEVVMEEYQKYXXXXXXXXXIYLMSIPSLETPVXXAKPI

SEQ ID NO: 26297 - protein, 35 aa, Artificial Sequence; identical to SEQ ID NO: 5184
  GFR-binding peptide
  MOD_RES (1), (34), (35): Xaa is C or S

SEQ ID NO: 26298 - protein, 36 aa, Artificial Sequence; identical to SEQ ID NO: 5185
  GFR-binding peptide
  MOD_RES (2), (33), (34): Xaa is C or S

SEQ ID NO: 26299 - protein, 38 aa, Artificial Sequence; identical to SEQ ID NO: 5186
  GFR-binding peptide
  MOD_RES (1), (35), (36): Xaa is C or S
  MOD_RES (13), (14), (15), (16), (17): Xaa is A or G
  MOD_RES (18), (19), (20), (21): Xaa is A or G or is absent

SEQ ID NO: 26300 - protein, 37 aa, Artificial Sequence; identical to SEQ ID NO: 5187
  GFR-binding peptide
  MOD_RES (1), (32), (33): Xaa is C or S

SEQ ID NO: 26301 - protein, 33 aa, Artificial Sequence
  GFR-binding peptide
  MOD_RES (33), (33): Xaa is C or S
  MOD_RES (11), (12), (13), (14), (15): Xaa is A or G
  MOD_RES (16), (17), (18), (19): Xaa is A or G or is absent
SKVVMEYKFKXXXXXXXXXLYLISIPELDQPVX

SEQ ID NO: 26302 - protein, 44 aa, Artificial Sequence; identical to SEQ ID NO: 5189
  GFR-binding peptide
  MOD_RES (2), (4), (38), (39): Xaa is C or S
  MOD_RES (16), (17), (18), (19), (20): Xaa is A or G
  MOD_RES (21), (22), (23), (24): Xaa is A or G or is absent

SEQ ID NO: 26303 - protein, 36 aa, Artificial Sequence
  GFR-binding peptide
  MOD_RES (1), (3), (34), (35): Xaa is C or S
XKXSRVIMEYQKYVKPKRGVIYLISIPSLAQPVXXP

SEQ ID NO: 26304 - protein, 42 aa, Artificial Sequence; identical to SEQ ID NO: 5194
  GFR-binding peptide
  MOD_RES (2), (4), (38), (39): Xaa is C or S
  MOD_RES (16), (17), (18), (19), (20): Xaa is A or G
  MOD_RES (21), (22), (23), (24): Xaa is A or G or is absent

SEQ ID NO: 26305 - protein, 35 aa, Artificial Sequence; identical to SEQ ID NO: 5195
  GFR-binding peptide
  MOD_RES (1), (32), (33): Xaa is C or S

SEQ ID NO: 26306 - protein, 39 aa, Artificial Sequence; identical to SEQ ID NO: 5197
  GFR-binding peptide
  MOD_RES (1), (3), (37), (38): Xaa is C or S
  MOD_RES (15), (16), (17), (18), (19): Xaa is A or G
  MOD_RES (20), (21), (22), (23): Xaa is A or G or is absent

SEQ ID NO: 26307 - protein, 40 aa, Artificial Sequence
  GFR-binding peptide
  MOD_RES (2), (4), (36), (37): Xaa is C or S
HXGXSRVVMNEYKFKIVNSSDDLYLVSIPELKTPAXXPKP

SEQ ID NO: 26308 - protein, 36 aa, Artificial Sequence; identical to SEQ ID NO: 5198
  GFR-binding peptide
  MOD_RES (32), (33): Xaa is C or S

SEQ ID NO: 26309 - protein, 34 aa, Artificial Sequence
  GFR-binding peptide
  MOD_RES (2), (34): Xaa is C or S
GXESVAMGRYKKLYTVVGKDFYLISIANLKTPVX

SEQ ID NO: 26310 - protein, 33 aa, Artificial Sequence
  GFR-binding peptide
  MOD_RES (31), (32): Xaa is C or S
EVVMDEYKFKVVNNAADLYLISIPELRAPVXXS

SEQ ID NO: 26311 - protein, 41 aa, Artificial Sequence; identical to SEQ ID NO: 5199
  GFR-binding peptide
  MOD_RES (1), (3), (35): Xaa is C or S

SEQ ID NO: 26312 - protein, 38 aa, Artificial Sequence; identical to SEQ ID NO: 5200
  GFR-binding peptide
  MOD_RES (1), (33), (34): Xaa is C or S

SEQ ID NO: 26313 - protein, 36 aa, Artificial Sequence; identical to SEQ ID NO: 5201
  GFR-binding peptide
  MOD_RES (33), (34): Xaa is C or S

SEQ ID NO: 26314 - protein, 37 aa, Artificial Sequence
  GFR-binding peptide
  MOD_RES (1), (34), (35): Xaa is C or S
XEAVSMGEEYKFKTPVGMDDLYLVSIPELKTPVXXAK

SEQ ID NO: 26315 - protein, 41 aa, Artificial Sequence
  GFR-binding peptide
  MOD_RES (35), (36): Xaa is C or S
  MOD_RES (13), (14), (15), (16), (17): Xaa is A or G
  MOD_RES (18), (19), (20), (21): Xaa is A or G or is absent
EAVSMGEEYKFKXXXXXXXXXLYLVSIPELKTPVXXAKGVK

SEQ ID NO: 26316 - protein, 37 aa, Artificial Sequence
  GFR-binding peptide
  MOD_RES (1), (3), (36), (37): Xaa is C or S
  MOD_RES (14), (15), (16), (17), (18): Xaa is A or G
  MOD_RES (19), (20), (21), (22): Xaa is A or G or is absent
XKXSRVIMEYQKYXXXXXXXXXIYLISIPSLAQPVXX

SEQ ID NO: 26317 - protein, 31 aa, Artificial Sequence; identical to SEQ ID NO: 5207
  GFR-binding peptide
  MOD_RES (1), (1): Xaa is C or S

SEQ ID NO: 26318 - protein, 39 aa, Artificial Sequence
  GFR-binding peptide
  MOD_RES (1), (33), (34): Xaa is C or S
XGEVVMDEYQKYVVKENEDIYLMSIPSLETPVXXAKPIK

SEQ ID NO: 26319 - protein, 40 aa, Artificial Sequence; identical to SEQ ID NO: 5212
  GFR-binding peptide
  MOD_RES (34), (35): Xaa is C or S
  MOD_RES (12), (13), (14), (15), (16): Xaa is A or G
  MOD_RES (17), (18), (19), (20): Xaa is A or G or is absent

SEQ ID NO: 26320 - protein, 41 aa, Artificial Sequence
  GFR-binding peptide
  MOD_RES (2), (36), (37): Xaa is C or S
  MOD_RES (14), (15), (16), (17), (18): Xaa is A or G
  MOD_RES (19), (20), (21), (22): Xaa is A or G or is absent
GXESVAMGEYQKYXXXXXXXXXIYLISIPSLKTPVXXAKSA

SEQ ID NO: 26321 - protein, 35 aa, Artificial Sequence; identical to SEQ ID NO: 5215
  GFR-binding peptide
  MOD_RES (34), (34): Xaa is C or S
  MOD_RES (12), (13), (14), (15), (16): Xaa is A or G
  MOD_RES (17), (18), (19), (20): Xaa is A or G or is absent

SEQ ID NO: 26322 - protein, 33 aa, Artificial Sequence
  GFR-binding peptide
  MOD_RES (33), (33): Xaa is C or S
  MOD_RES (11), (12), (13), (14), (15): Xaa is A or G
  MOD_RES (16), (17), (18), (19): Xaa is A or G or is absent
RVVMNEYKFKXXXXXXXXXLYLVSIPELKTPAX

SEQ ID NO: 26323 - protein, 31 aa, Artificial Sequence
  GFR-binding peptide
  MOD_RES (31), (31): Xaa is C or S
SKVIMEYQKYIKPTKGIIYLISIPSLDQSVX

SEQ ID NO: 26324 - protein, 33 aa, Artificial Sequence
  GFR-binding peptide
  MOD_RES (33), (33): Xaa is C or S
  MOD_RES (11), (12), (13), (14), (15): Xaa is A or G
  MOD_RES (16), (17), (18), (19): Xaa is A or G or is absent
KVVMNEYKFKXXXXXXXXXLYLVSIPELKTPAX

SEQ ID NO: 26325 - protein, 33 aa, Artificial Sequence
  GFR-binding peptide
  MOD_RES (12), (13), (14), (15), (16): Xaa is A or G
  MOD_RES (17), (18), (19), (20): Xaa is A or G or is absent
AKVVMNEYQKYXXXXXXXXXIYLVSIPSLKTPA

SEQ ID NO: 26326 - protein, 37 aa, Artificial Sequence; identical to SEQ ID NO: 5217
  GFR-binding peptide
  MOD_RES (1), (3), (36), (37): Xaa is C or S
  MOD_RES (14), (15), (16), (17), (18): Xaa is A or G
  MOD_RES (19), (20), (21), (22): Xaa is A or G or is absent

SEQ ID NO: 26327 - protein, 36 aa, Artificial Sequence
  GFR-binding peptide
  MOD_RES (1), (33), (34): Xaa is C or S
XAEVVMDYHYKLVVNNAADKYLISIPSLRAPVXXSA

SEQ ID NO: 26328 - protein, 36 aa, Artificial Sequence
  GFR-binding peptide
  MOD_RES (31), (32): Xaa is C or S
KVVMNEYQKYIVNNSSDIYLVSIPSLKTPAXXAKPV

SEQ ID NO: 26329 - protein, 35 aa, Artificial Sequence; identical to SEQ ID NO: 5219
  GFR-binding peptide
  MOD_RES (2), (34), (35): Xaa is C or S

SEQ ID NO: 26330 - protein, 42 aa, Artificial Sequence
  GFR-binding peptide
  MOD_RES (1), (3), (37): Xaa is C or S
  MOD_RES (15), (16), (17), (18), (19): Xaa is A or G
  MOD_RES (20), (21), (22), (23): Xaa is A or G or is absent
XGXSRVVMNEYKFKXXXXXXXXXLYLVSIPELKTPAXTPKTV

SEQ ID NO: 26331 - protein, 37 aa, Artificial Sequence; identical to SEQ ID NO: 5221
  GFR-binding peptide
  MOD_RES (2), (35), (36): Xaa is C or S
  MOD_RES (13), (14), (15), (16), (17): Xaa is A or G
  MOD_RES (18), (19), (20), (21): Xaa is A or G or is absent

SEQ ID NO: 26332 - protein, 36 aa, Artificial Sequence
  GFR-binding peptide
  MOD_RES (31), (32): Xaa is C or S
SVAMGRYKKLYTVVGKDFYLISIANLKTPVXXAKSA

SEQ ID NO: 26333 - protein, 35 aa, Artificial Sequence
  GFR-binding peptide
  MOD_RES (2), (35): Xaa is C or S
  MOD_RES (13), (14), (15), (16), (17): Xaa is A or G
  MOD_RES (18), (19), (20), (21): Xaa is A or G or is absent
KXSKVVMEYQKYXXXXXXXXXIYLISIPSLDQPVX

SEQ ID NO: 26334 - protein, 37 aa, Artificial Sequence; identical to SEQ ID NO: 5223
  GFR-binding peptide
  MOD_RES (31), (32): Xaa is C or S

SEQ ID NO: 26335 - protein, 36 aa, Artificial Sequence
  GFR-binding peptide
  MOD_RES (1), (3), (35), (36): Xaa is C or S
XGXAKVVMNEYQKYIVNNSSDIYLVSIPSLKTPAXX

SEQ ID NO: 26336 - protein, 42 aa, Artificial Sequence; identical to SEQ ID NO: 5224
  GFR-binding peptide
  MOD_RES (2), (37), (38): Xaa is C or S
  MOD_RES (15), (16), (17), (18), (19): Xaa is A or G
  MOD_RES (20), (21), (22), (23): Xaa is A or G or is absent

SEQ ID NO: 26337 - protein, 36 aa, Artificial Sequence
  GFR-binding peptide
  MOD_RES (2), (34), (35): Xaa is C or S
GXGEVVMDEYKFKVVKENEDLYLMSIPELETPVXXA

SEQ ID NO: 26338 - protein, 41 aa, Artificial Sequence; identical to SEQ ID NO: 5227
  GFR-binding peptide
  MOD_RES (1), (36), (37): Xaa is C or S
  MOD_RES (14), (15), (16), (17), (18): Xaa is A or G
  MOD_RES (19), (20), (21), (22): Xaa is A or G or is absent

SEQ ID NO: 26339 - protein, 35 aa, Artificial Sequence
  GFR-binding peptide
  MOD_RES (2), (34), (35): Xaa is C or S
GXAEVVMDRYKKLVVNNAADFYLISIANLRAPVXX

SEQ ID NO: 26340 - protein, 39 aa, Artificial Sequence
  GFR-binding peptide
  MOD_RES (1), (3), (35), (36): Xaa is C or S
XGXGEVVMEEYKFKVVKDYEDLYLMSIPELETPVXXAKP

SEQ ID NO: 26341 - protein, 33 aa, Artificial Sequence
  GFR-binding peptide
  MOD_RES (33), (33): Xaa is C or S
  MOD_RES (11), (12), (13), (14), (15): Xaa is A or G
  MOD_RES (16), (17), (18), (19): Xaa is A or G or is absent
SKVVMEYQKYXXXXXXXXXIYLISIPSLDQPVX

SEQ ID NO: 26342 - protein, 37 aa, Artificial Sequence
  GFR-binding peptide
  MOD_RES (2), (36), (37): Xaa is C or S
  MOD_RES (14), (15), (16), (17), (18): Xaa is A or G
  MOD_RES (19), (20), (21), (22): Xaa is A or G or is absent
GXSRVVMNEYKFKXXXXXXXXXLYLVSIPELKTPAXX

SEQ ID NO: 26343 - protein, 34 aa, Artificial Sequence; identical to SEQ ID NO: 5231
  GFR-binding peptide
  MOD_RES (1), (1): Xaa is C or S
  MOD_RES (13), (14), (15), (16), (17): Xaa is A or G
  MOD_RES (18), (19), (20), (21): Xaa is A or G or is absent

SEQ ID NO: 26344 - protein, 35 aa, Artificial Sequence
  GFR-binding peptide
  MOD_RES (2), (34), (35): Xaa is C or S
GXAKVVMNEYKFKIVNNSSDLYLVSIPELKTPAXX

SEQ ID NO: 26345 - protein, 35 aa, Artificial Sequence
  GFR-binding peptide
  MOD_RES (2), (34), (35): Xaa is C or S
GXAEVVMDEYKFKVVNNAADLYLISIPELRAPVXX

SEQ ID NO: 26346 - protein, 41 aa, Artificial Sequence
  GFR-binding peptide
  MOD_RES (2), (4), (38), (39): Xaa is C or S
  MOD_RES (16), (17), (18), (19), (20): Xaa is A or G
  MOD_RES (21), (22), (23), (24): Xaa is A or G or is absent
RXGXGEVVMEEYQKYXXXXXXXXXIYLMSIPSLETPVXXAK

SEQ ID NO: 26347 - protein, 35 aa, Artificial Sequence
  GFR-binding peptide
  MOD_RES (1), (3), (35): Xaa is C or S
XGXESVAMGEYKFKYTVVGKDLYLISIPELKTPVX

SEQ ID NO: 26348 - protein, 35 aa, Artificial Sequence; identical to SEQ ID NO: 5236
  GFR-binding peptide
  MOD_RES (2), (4), (35): Xaa is C or S

SEQ ID NO: 26349 - protein, 35 aa, Artificial Sequence
  GFR-binding peptide
  MOD_RES (2), (34), (35): Xaa is C or S
GXSRVVMNEYQKYIVNSSDDIYLVSIPSLKTPAXX

SEQ ID NO: 26350 - protein, 39 aa, Artificial Sequence
  GFR-binding peptide
  MOD_RES (2), (34), (35): Xaa is C or S
GXARVVMNEYQKYIVNSSDDIYLVSIPSLQTPAXXPKPV

SEQ ID NO: 26351 - protein, 36 aa, Artificial Sequence
  GFR-binding peptide
  MOD_RES (31), (32): Xaa is C or S
SRVIMEYKFKVKPKRGVLYLISIPELAQPVXXPAAS

SEQ ID NO: 26352 - protein, 31 aa, Artificial Sequence
  GFR-binding peptide
  MOD_RES (31), (31): Xaa is C or S
KVVMNEYKFKIVNNSSDLYLVSIPELKTPAX

SEQ ID NO: 26353 - protein, 35 aa, Artificial Sequence
  GFR-binding peptide
  MOD_RES (1), (3), (35): Xaa is C or S
XGXAEVVMDYHYKLVVNNAADKYLISIPSLRAPVX

SEQ ID NO: 26354 - protein, 32 aa, Artificial Sequence
  GFR-binding peptide
EAVSMGEEYQKYTPVGMDDIYLVSIPSLKTPV

SEQ ID NO: 26355 - protein, 42 aa, Artificial Sequence
  GFR-binding peptide
  MOD_RES (1), (3), (37), (38): Xaa is C or S
  MOD_RES (15), (16), (17), (18), (19): Xaa is A or G
  MOD_RES (20), (21), (22), (23): Xaa is A or G or is absent
XGXGEVVMDEYQKYXXXXXXXXXIYLMSIPSLETPVXXAKPI

SEQ ID NO: 26356 - protein, 42 aa, Artificial Sequence
  GFR-binding peptide
  MOD_RES (2), (4), (39), (40): Xaa is C or S
  MOD_RES (17), (18), (19), (20), (21): Xaa is A or G
  MOD_RES (22), (23), (24), (25): Xaa is A or G or is absent
RXGXEAVSMGEEYQKYXXXXXXXXXIYLVSIPSLKTPVXXAK

SEQ ID NO: 26357 - protein, 36 aa, Artificial Sequence
  GFR-binding peptide
  MOD_RES (2), (4), (36): Xaa is C or S
RXGXGEVVMEEYKFKVVKDYEDLYLMSIPELETPVX

SEQ ID NO: 26358 - protein, 43 aa, Artificial Sequence
  GFR-binding peptide
  MOD_RES (1), (3), (37), (38): Xaa is C or S
  MOD_RES (15), (16), (17), (18), (19): Xaa is A or G
  MOD_RES (20), (21), (22), (23): Xaa is A or G or is absent
XGXAEVVMDRYKKLXXXXXXXXXFYLISIANLRAPVXXSAPAA

SEQ ID NO: 26359 - protein, 34 aa, Artificial Sequence
  GFR-binding peptide
  MOD_RES (33), (34): Xaa is C or S
  MOD_RES (11), (12), (13), (14), (15): Xaa is A or G
  MOD_RES (16), (17), (18), (19): Xaa is A or G or is absent
SKVVMEYQKYXXXXXXXXXIYLISIPSLDQPVXX

SEQ ID NO: 26360 - protein, 34 aa, Artificial Sequence; identical to SEQ ID NO: 5240
  GFR-binding peptide
  MOD_RES (1), (3), (34): Xaa is C or S

SEQ ID NO: 26361 - protein, 36 aa, Artificial Sequence
  GFR-binding peptide
  MOD_RES (33), (34): Xaa is C or S
  MOD_RES (11), (12), (13), (14), (15): Xaa is A or G
  MOD_RES (16), (17), (18), (19): Xaa is A or G or is absent
SVAMGYHYKLXXXXXXXXXKYLISIPSLKTPVXXAK

SEQ ID NO: 26362 - protein, 41 aa, Artificial Sequence; identical to SEQ ID NO: 5242
  GFR-binding peptide
  MOD_RES (2), (35), (36): Xaa is C or S
  MOD_RES (13), (14), (15), (16), (17): Xaa is A or G
  MOD_RES (18), (19), (20), (21): Xaa is A or G or is absent

SEQ ID NO: 26363 - protein, 38 aa, Artificial Sequence; identical to SEQ ID NO: 5243
  GFR-binding peptide
  MOD_RES (33), (34): Xaa is C or S
  MOD_RES (11), (12), (13), (14), (15): Xaa is A or G
  MOD_RES (16), (17), (18), (19): Xaa is A or G or is absent

SEQ ID NO: 26364 - protein, 32 aa, Artificial Sequence
  GFR-binding peptide
  MOD_RES (31), (32): Xaa is C or S
SVAMGEYQKYYTVVGKDIYLISIPSLKTPVXX

SEQ ID NO: 26365 - protein, 34 aa, Artificial Sequence
  GFR-binding peptide
  MOD_RES (32), (33): Xaa is C or S
ESVAMGRYKKLYTVVGKDFYLISIANLKTPVXXA

SEQ ID NO: 26366 - protein, 39 aa, Artificial Sequence
  GFR-binding peptide
  MOD_RES (34), (35): Xaa is C or S
  MOD_RES (12), (13), (14), (15), (16): Xaa is A or G
  MOD_RES (17), (18), (19), (20): Xaa is A or G or is absent
GEVVMEEYKFKXXXXXXXXXLYLMSIPELETPVXXAKPI

SEQ ID NO: 26367 - protein, 36 aa, Artificial Sequence
  GFR-binding peptide
  MOD_RES (2), (34), (35): Xaa is C or S
GXESVAMGEYQKYYTVVGKDIYLISIPSLKTPVXXA

SEQ ID NO: 26368 - protein, 38 aa, Artificial Sequence
  GFR-binding peptide
  MOD_RES (1), (33), (34): Xaa is C or S
XESVAMGEYKFKYTVVGKDLYLISIPELKTPVXXAKSA

SEQ ID NO: 26369 - protein, 41 aa, Artificial Sequence
  GFR-binding peptide
  MOD_RES (2), (36), (37): Xaa is C or S
  MOD_RES (14), (15), (16), (17), (18): Xaa is A or G
  MOD_RES (19), (20), (21), (22): Xaa is A or G or is absent
GXGEVVMEEYQKYXXXXXXXXXIYLMSIPSLETPVXXAKPI

SEQ ID NO: 26370 - protein, 39 aa, Artificial Sequence
  GFR-binding peptide
  MOD_RES (2), (4), (38), (39): Xaa is C or S
  MOD_RES (16), (17), (18), (19), (20): Xaa is A or G
  MOD_RES (21), (22), (23), (24): Xaa is A or G or is absent
RXGXGEVVMDEYQKYXXXXXXXXXIYLMSIPSLETPVXX

SEQ ID NO: 26371 - protein, 39 aa, Artificial Sequence; identical to SEQ ID NO: 5249
  GFR-binding peptide
  MOD_RES (2), (4), (37), (38): Xaa is C or S

SEQ ID NO: 26372 - protein, 35 aa, Artificial Sequence
  GFR-binding peptide
  MOD_RES (31), (32): Xaa is C or S
SRVIMEYQKYVKPKRGVIYLISIPSLAQPVXXPAA

SEQ ID NO: 26373 - protein, 38 aa, Artificial Sequence; identical to SEQ ID NO: 5250
  GFR-binding peptide
  MOD_RES (1), (3), (35), (36): Xaa is C or S

SEQ ID NO: 26374 - protein, 45 aa, Artificial Sequence; identical to SEQ ID NO: 5252
  GFR-binding peptide
  MOD_RES (2), (4), (39), (40): Xaa is C or S
  MOD_RES (17), (18), (19), (20), (21): Xaa is A or G
  MOD_RES (22), (23), (24), (25): Xaa is A or G or is absent

SEQ ID NO: 26375 - protein, 37 aa, Artificial Sequence; identical to SEQ ID NO: 5253
  GFR-binding peptide
  MOD_RES (1), (34), (35): Xaa is C or S

SEQ ID NO: 26376 - protein, 36 aa, Artificial Sequence; identical to SEQ ID NO: 5254
  GFR-binding peptide
  MOD_RES (2), (4), (36): Xaa is C or S

SEQ ID NO: 26377 - protein, 33 aa, Artificial Sequence; identical to SEQ ID NO: 5255
  GFR-binding peptide
  MOD_RES (33), (33): Xaa is C or S
  MOD_RES (11), (12), (13), (14), (15): Xaa is A or G
  MOD_RES (16), (17), (18), (19): Xaa is A or G or is absent

SEQ ID NO: 26378 - protein, 40 aa, Artificial Sequence; identical to SEQ ID NO: 5256
  GFR-binding peptide
  MOD_RES (1), (3), (35), (36): Xaa is C or S

SEQ ID NO: 26379 - protein, 34 aa, Artificial Sequence
  GFR-binding peptide
  MOD_RES (33), (34): Xaa is C or S
  MOD_RES (11), (12), (13), (14), (15): Xaa is A or G
  MOD_RES (16), (17), (18), (19): Xaa is A or G or is absent
RVVMNEYKFKXXXXXXXXXLYLVSIPELKTPAXX

SEQ ID NO: 26380 - protein, 39 aa, Artificial Sequence
  GFR-binding peptide
  MOD_RES (33), (34): Xaa is C or S
  MOD_RES (11), (12), (13), (14), (15): Xaa is A or G
  MOD_RES (16), (17), (18), (19): Xaa is A or G or is absent
RVVMNEYQKYXXXXXXXXXIYLVSIPSLKTPAXXPKPVY

SEQ ID NO: 26381 - protein, 35 aa, Artificial Sequence
  GFR-binding peptide
  MOD_RES (1), (33): Xaa is C or S
XSRVVMNEYQKYIVNSSDDIYLVSIPSLKTPAXTP

SEQ ID NO: 26382 - protein, 39 aa, Artificial Sequence
  GFR-binding peptide
  MOD_RES (1), (33), (34): Xaa is C or S
XSRVVMNEYKFKIVNSSDDLYLVSIPELKTPAXXPKPVY

SEQ ID NO: 26383 - protein, 41 aa, Artificial Sequence
  GFR-binding peptide
  MOD_RES (1), (3), (35): Xaa is C or S
XGXSRVVMNEYKFKIVNSSDDLYLVSIPELKTPAXTPKTVH

SEQ ID NO: 26384 - protein, 35 aa, Artificial Sequence
  GFR-binding peptide
  MOD_RES (1), (35): Xaa is C or S
  MOD_RES (13), (14), (15), (16), (17): Xaa is A or G
  MOD_RES (18), (19), (20), (21): Xaa is A or G or is absent
XGEVVMEEYQKYXXXXXXXXXIYLMSIPSLETPVX

SEQ ID NO: 26385 - protein, 32 aa, Artificial Sequence; identical to SEQ ID NO: 5263
  GFR-binding peptide
  MOD_RES (11), (12), (13), (14), (15): Xaa is A or G
  MOD_RES (16), (17), (18), (19): Xaa is A or G or is absent

SEQ ID NO: 26386 - protein, 41 aa, Artificial Sequence
  GFR-binding peptide
  MOD_RES (1), (3), (37), (38): Xaa is C or S
  MOD_RES (15), (16), (17), (18), (19): Xaa is A or G
  MOD_RES (20), (21), (22), (23): Xaa is A or G or is absent
XGXGEVVMDEYQKYXXXXXXXXXIYLMSIPSLETPVXXAKP

SEQ ID NO: 26387 - protein, 32 aa, Artificial Sequence; identical to SEQ ID NO: 5264
  GFR-binding peptide
  MOD_RES (2), (2): Xaa is C or S

SEQ ID NO: 26388 - protein, 39 aa, Artificial Sequence; identical to SEQ ID NO: 5265
  GFR-binding peptide
  MOD_RES (1), (3), (36), (37): Xaa is C or S
  MOD_RES (14), (15), (16), (17), (18): Xaa is A or G
  MOD_RES (19), (20), (21), (22): Xaa is A or G or is absent

SEQ ID NO: 26389 - protein, 40 aa, Artificial Sequence; identical to SEQ ID NO: 5268
  GFR-binding peptide
  MOD_RES (34), (35): Xaa is C or S
  MOD_RES (12), (13), (14), (15), (16): Xaa is A or G
  MOD_RES (17), (18), (19), (20): Xaa is A or G or is absent

SEQ ID NO: 26390 - protein, 37 aa, Artificial Sequence; identical to SEQ ID NO: 5269
  GFR-binding peptide
  MOD_RES (35), (36): Xaa is C or S
  MOD_RES (13), (14), (15), (16), (17): Xaa is A or G
  MOD_RES (18), (19), (20), (21): Xaa is A or G or is absent

SEQ ID NO: 26391 - protein, 40 aa, Artificial Sequence
  GFR-binding peptide
  MOD_RES (34), (35): Xaa is C or S
  MOD_RES (12), (13), (14), (15), (16): Xaa is A or G
  MOD_RES (17), (18), (19), (20): Xaa is A or G or is absent
SRVVMNEYQKYXXXXXXXXXIYLVSIPSLKTPAXXPKPVY

SEQ ID NO: 26392 - protein, 35 aa, Artificial Sequence
  GFR-binding peptide
  MOD_RES (2), (2): Xaa is C or S
  MOD_RES (14), (15), (16), (17), (18): Xaa is A or G
  MOD_RES (19), (20), (21), (22): Xaa is A or G or is absent
GXESVAMGEYKFKXXXXXXXXXLYLISIPELKTPV

SEQ ID NO: 26393 - protein, 37 aa, Artificial Sequence
  GFR-binding peptide
  MOD_RES (1), (32), (33): Xaa is C or S
XSKVVMEYKFKVKPTRGVLYLISIPELDQPVXXPSAS

SEQ ID NO: 26394 - protein, 39 aa, Artificial Sequence
  GFR-binding peptide
  MOD_RES (1), (36), (37): Xaa is C or S
  MOD_RES (14), (15), (16), (17), (18): Xaa is A or G
  MOD_RES (19), (20), (21), (22): Xaa is A or G or is absent
XEAVSMGEEYQKYXXXXXXXXXIYLVSIPSLKTPVXXAK

SEQ ID NO: 26395 - protein, 34 aa, Artificial Sequence
  GFR-binding peptide
  MOD_RES (32), (33): Xaa is C or S
GEVVMDEYKFKVVKENEDLYLMSIPELETPVXXA

SEQ ID NO: 26396 - protein, 38 aa, Artificial Sequence
  GFR-binding peptide
  MOD_RES (33), (34): Xaa is C or S
  MOD_RES (11), (12), (13), (14), (15): Xaa is A or G
  MOD_RES (16), (17), (18), (19): Xaa is A or G or is absent
EVVMDEYQKYXXXXXXXXXIYLMSIPSLETPVXXAKPI

SEQ ID NO: 26397 - protein, 37 aa, Artificial Sequence
  GFR-binding peptide
  MOD_RES (1), (3), (35), (36): Xaa is C or S
XGXSRVVMNEYKFKIVNSSDDLYLVSIPELKTPAXXP

SEQ ID NO: 26398 - protein, 43 aa, Artificial Sequence
  GFR-binding peptide
  MOD_RES (1), (3), (38), (39): Xaa is C or S
  MOD_RES (16), (17), (18), (19), (20): Xaa is A or G
  MOD_RES (21), (22), (23), (24): Xaa is A or G or is absent
XGXEAVSMGEEYQKYXXXXXXXXXIYLVSIPSLKTPVXXAKGV

SEQ ID NO: 26399 - protein, 41 aa, Artificial Sequence
  GFR-binding peptide
  MOD_RES (1), (36), (37): Xaa is C or S
  MOD_RES (14), (15), (16), (17), (18): Xaa is A or G
  MOD_RES (19), (20), (21), (22): Xaa is A or G or is absent
XEAVSMGEEYKFKXXXXXXXXXLYLVSIPELKTPVXXAKGV

SEQ ID NO: 26400 - protein, 38 aa, Artificial Sequence; identical to SEQ ID NO: 5280
  GFR-binding peptide
  MOD_RES (1), (35), (36): Xaa is C or S
  MOD_RES (13), (14), (15), (16), (17): Xaa is A or G
  MOD_RES (18), (19), (20), (21): Xaa is A or G or is absent

SEQ ID NO: 26401 - protein, 33 aa, Artificial Sequence
  GFR-binding peptide
  MOD_RES (1), (33): Xaa is C or S
XARVVMNEYQKYIVNSSDDIYLVSIPSLQTPAX

SEQ ID NO: 26402 - protein, 36 aa, Artificial Sequence
  GFR-binding peptide
  MOD_RES (31), (32): Xaa is C or S
SVAMGEYKFKYTVVGKDLYLISIPELKTPVXXAKSA

SEQ ID NO: 26403 - protein, 34 aa, Artificial Sequence
  GFR-binding peptide
  MOD_RES (31), (32): Xaa is C or S
KVVMNEYQKYIVNNSSDIYLVSIPSLKTPAXXAK

SEQ ID NO: 26404 - protein, 37 aa, Artificial Sequence
  GFR-binding peptide
  MOD_RES (1), (3), (35), (36): Xaa is C or S
XGXAEVVMDEYQKYVVNNAADIYLISIPSLRAPVXXS

SEQ ID NO: 26405 - protein, 39 aa, Artificial Sequence; identical to SEQ ID NO: 5284
  GFR-binding peptide
  MOD_RES (2), (34), (35): Xaa is C or S

SEQ ID NO: 26406 - protein, 38 aa, Artificial Sequence
  GFR-binding peptide
  MOD_RES (1), (3), (36), (37): Xaa is C or S
  MOD_RES (14), (15), (16), (17), (18): Xaa is A or G
  MOD_RES (19), (20), (21), (22): Xaa is A or G or is absent
XKXSKVVMEYKFKXXXXXXXXXLYLISIPELDQPVXXP

SEQ ID NO: 26407 - protein, 40 aa, Artificial Sequence; identical to SEQ ID NO: 5287
  GFR-binding peptide
  MOD_RES (2), (4), (37), (38): Xaa is C or S

SEQ ID NO: 26408 - protein, 34 aa, Artificial Sequence
  GFR-binding peptide
  MOD_RES (33), (33): Xaa is C or S
  MOD_RES (11), (12), (13), (14), (15): Xaa is A or G
  MOD_RES (16), (17), (18), (19): Xaa is A or G or is absent
RVVMNEYQKYXXXXXXXXXIYLVSIPSLKTPAXT

SEQ ID NO: 26409 - protein, 35 aa, Artificial Sequence; identical to SEQ ID NO: 5290
  GFR-binding peptide
  MOD_RES (1), (3), (35): Xaa is C or S

SEQ ID NO: 26410 - protein, 34 aa, Artificial Sequence
  GFR-binding peptide
  MOD_RES (32), (33): Xaa is C or S
AEVVMDEYKFKVVNNAADLYLISIPELRAPVXXS

SEQ ID NO: 26411 - protein, 39 aa, Artificial Sequence
  GFR-binding peptide
  MOD_RES (1), (3), (34), (35): Xaa is C or S
XKXSKVIMEYKFKIKPTKGILYLISIPELDQSVXXPSAS

SEQ ID NO: 26412 - protein, 33 aa, Artificial Sequence; identical to SEQ ID NO: 5291
  GFR-binding peptide
  MOD_RES (31), (32): Xaa is C or S

SEQ ID NO: 26413 - protein, 40 aa, Artificial Sequence; identical to SEQ ID NO: 5292
  GFR-binding peptide
  MOD_RES (2), (4), (37), (38): Xaa is C or S
  MOD_RES (15), (16), (17), (18), (19): Xaa is A or G
  MOD_RES (20), (21), (22), (23): Xaa is A or G or is absent

SEQ ID NO: 26414 - protein, 32 aa, Artificial Sequence; identical to SEQ ID NO: 5295
  GFR-binding peptide
  MOD_RES (31), (32): Xaa is C or S

SEQ ID NO: 26415 - protein, 33 aa, Artificial Sequence
  GFR-binding peptide
  MOD_RES (2), (2): Xaa is C or S
GXESVAMGEYKFKYTVVGKDLYLISIPELKTPV

SEQ ID NO: 26416 - protein, 35 aa, Artificial Sequence; identical to SEQ ID NO: 5296
  GFR-binding peptide
  MOD_RES (34), (35): Xaa is C or S
  MOD_RES (12), (13), (14), (15), (16): Xaa is A or G
  MOD_RES (17), (18), (19), (20): Xaa is A or G or is absent

SEQ ID NO: 26417 - protein, 40 aa, Artificial Sequence
  GFR-binding peptide
  MOD_RES (1), (3), (37), (38): Xaa is C or S
  MOD_RES (15), (16), (17), (18), (19): Xaa is A or G
  MOD_RES (20), (21), (22), (23): Xaa is A or G or is absent
XGXARVVMNEYKFKXXXXXXXXXLYLVSIPELQTPAXXPK

SEQ ID NO: 26418 - protein, 42 aa, Artificial Sequence
  GFR-binding peptide
  MOD_RES (1), (3), (37): Xaa is C or S
  MOD_RES (15), (16), (17), (18), (19): Xaa is A or G
  MOD_RES (20), (21), (22), (23): Xaa is A or G or is absent
XGXSRVVMNEYQKYXXXXXXXXXIYLVSIPSLKTPAXTPKTV

SEQ ID NO: 26419 - protein, 36 aa, Artificial Sequence
  GFR-binding peptide
  MOD_RES (1), (33), (34): Xaa is C or S
XAEVVMDRYKKLVVNNAADFYLISIANLRAPVXXSA

SEQ ID NO: 26420 - protein, 37 aa, Artificial Sequence; identical to SEQ ID NO: 5298
  GFR-binding peptide
  MOD_RES (32), (33): Xaa is C or S

SEQ ID NO: 26421 - protein, 35 aa, Artificial Sequence
  GFR-binding peptide
  MOD_RES (2), (2): Xaa is C or S
  MOD_RES (14), (15), (16), (17), (18): Xaa is A or G
  MOD_RES (19), (20), (21), (22): Xaa is A or G or is absent
GXSRVVMNEYKFKXXXXXXXXXLYLVSIPELKTPA

SEQ ID NO: 26422 - protein, 35 aa, Artificial Sequence
  GFR-binding peptide
  MOD_RES (2), (4), (35): Xaa is C or S
SXKXSRVIMEYQKYVKPKRGVIYLISIPSLAQPVX

SEQ ID NO: 26423 - protein, 40 aa, Artificial Sequence; identical to SEQ ID NO: 5299
  GFR-binding peptide
  MOD_RES (1), (3), (37), (38): Xaa is C or S
  MOD_RES (15), (16), (17), (18), (19): Xaa is A or G
  MOD_RES (20), (21), (22), (23): Xaa is A or G or is absent

SEQ ID NO: 26424 - protein, 35 aa, Artificial Sequence; identical to SEQ ID NO: 5301
  GFR-binding peptide
  MOD_RES (2), (4): Xaa is C or S

SEQ ID NO: 26425 - protein, 39 aa, Artificial Sequence; identical to SEQ ID NO: 5302
  GFR-binding peptide
  MOD_RES (2), (4), (37), (38): Xaa is C or S
  MOD_RES (15), (16), (17), (18), (19): Xaa is A or G
  MOD_RES (20), (21), (22), (23): Xaa is A or G or is absent

SEQ ID NO: 26426 - protein, 36 aa, Artificial Sequence; identical to SEQ ID NO: 5304
  GFR-binding peptide
  MOD_RES (31), (32): Xaa is C or S

SEQ ID NO: 26427 - protein, 41 aa, Artificial Sequence; identical to SEQ ID NO: 5305
  GFR-binding peptide
  MOD_RES (2), (4), (37), (38): Xaa is C or S
  MOD_RES (15), (16), (17), (18), (19): Xaa is A or G
  MOD_RES (20), (21), (22), (23): Xaa is A or G or is absent

SEQ ID NO: 26428 - protein, 33 aa, Artificial Sequence; identical to SEQ ID NO: 5307
  GFR-binding peptide
  MOD_RES (32), (33): Xaa is C or S

SEQ ID NO: 26429 - protein, 31 aa, Artificial Sequence; identical to SEQ ID NO: 5308
  GFR-binding peptide
  MOD_RES (31), (31): Xaa is C or S

SEQ ID NO: 26430 - protein, 32 aa, Artificial Sequence
  GFR-binding peptide
  MOD_RES (1), (1): Xaa is C or S
XARVVMNEYKFKIVNSSDDLYLVSIPELQTPA

SEQ ID NO: 26431 - protein, 35 aa, Artificial Sequence
  GFR-binding peptide
  MOD_RES (1), (3), (35): Xaa is C or S
XGXAEVVMDEYKFKVVNNAADLYLISIPELRAPVX

SEQ ID NO: 26432 - protein, 44 aa, Artificial Sequence; identical to SEQ ID NO: 5309
  GFR-binding peptide
  MOD_RES (2), (4), (39), (40): Xaa is C or S
  MOD_RES (17), (18), (19), (20), (21): Xaa is A or G
  MOD_RES (22), (23), (24), (25): Xaa is A or G or is absent

SEQ ID NO: 26433 - protein, 39 aa, Artificial Sequence; identical to SEQ ID NO: 5310
  GFR-binding peptide
  MOD_RES (2), (4), (36), (37): Xaa is C or S

SEQ ID NO: 26434 - protein, 34 aa, Artificial Sequence
  GFR-binding peptide
  MOD_RES (31), (32): Xaa is C or S
SRVIMEYKFKVKPKRGVLYLISIPELAQPVXXPA

SEQ ID NO: 26435 - protein, 44 aa, Artificial Sequence; identical to SEQ ID NO: 5311
  GFR-binding peptide
  MOD_RES (2), (4), (38), (39): Xaa is C or S
  MOD_RES (16), (17), (18), (19), (20): Xaa is A or G
  MOD_RES (21), (22), (23), (24): Xaa is A or G or is absent

SEQ ID NO: 26436 - protein, 38 aa, Artificial Sequence; identical to SEQ ID NO: 5313
  GFR-binding peptide
  MOD_RES (1), (33), (34): Xaa is C or S

SEQ ID NO: 26437 - protein, 32 aa, Artificial Sequence; identical to SEQ ID NO: 5314
  GFR-binding peptide
  MOD_RES (2), (2): Xaa is C or S

SEQ ID NO: 26438 - protein, 36 aa, Artificial Sequence
  GFR-binding peptide
  MOD_RES (2), (4), (35), (36): Xaa is C or S
SXKXSRVIMEYKFKVKPKRGVLYLISIPELAQPVXX

SEQ ID NO: 26439 - protein, 38 aa, Artificial Sequence; identical to SEQ ID NO: 5316
  GFR-binding peptide
  MOD_RES (2), (33), (34): Xaa is C or S

SEQ ID NO: 26440 - protein, 36 aa, Artificial Sequence
  GFR-binding peptide
  MOD_RES (1), (3): Xaa is C or S
  MOD_RES (15), (16), (17), (18), (19): Xaa is A or G
  MOD_RES (20), (21), (22), (23): Xaa is A or G or is absent
XGXAEVVMDEYKFKXXXXXXXXXLYLISIPELRAPV

SEQ ID NO: 26441 - protein, 42 aa, Artificial Sequence; identical to SEQ ID NO: 5317
  GFR-binding peptide
  MOD_RES (2), (4), (38), (39): Xaa is C or S
  MOD_RES (16), (17), (18), (19), (20): Xaa is A or G
  MOD_RES (21), (22), (23), (24): Xaa is A or G or is absent

SEQ ID NO: 26442 - protein, 34 aa, Artificial Sequence
  GFR-binding peptide
  MOD_RES (33), (34): Xaa is C or S
EAVSMGEEYKFKTPVGMDDLYLVSIPELKTPVXX

SEQ ID NO: 26443 - protein, 39 aa, Artificial Sequence
  GFR-binding peptide
  MOD_RES (2), (36), (37): Xaa is C or S
  MOD_RES (14), (15), (16), (17), (18): Xaa is A or G
  MOD_RES (19), (20), (21), (22): Xaa is A or G or is absent
GXAEVVMDEYKFKXXXXXXXXXLYLISIPELRAPVXXSA

SEQ ID NO: 26444 - protein, 39 aa, Artificial Sequence
  GFR-binding peptide
  MOD_RES (2), (4), (36), (37): Xaa is C or S
RXGXGEVVMEEYQKYVVKDYEDIYLMSIPSLETPVXXAK

SEQ ID NO: 26445 - protein, 38 aa, Artificial Sequence
  GFR-binding peptide
  MOD_RES (1), (3), (35): Xaa is C or S
XGXSRVVMNEYQKYIVNSSDDIYLVSIPSLKTPAXTPK

SEQ ID NO: 26446 - protein, 31 aa, Artificial Sequence
  GFR-binding peptide
ESVAMGEYQKYYTVVGKDIYLISIPSLKTPV

SEQ ID NO: 26447 - protein, 35 aa, Artificial Sequence
  GFR-binding peptide
  MOD_RES (2), (2): Xaa is C or S
  MOD_RES (14), (15), (16), (17), (18): Xaa is A or G
  MOD_RES (19), (20), (21), (22): Xaa is A or G or is absent
GXESVAMGRYKKLXXXXXXXXXFYLISIANLKTPV

SEQ ID NO: 26448 - protein, 39 aa, Artificial Sequence; identical to SEQ ID NO: 5323
  GFR-binding peptide
  MOD_RES (2), (4), (39): Xaa is C or S
  MOD_RES (17), (18), (19), (20), (21): Xaa is A or G
  MOD_RES (22), (23), (24), (25): Xaa is A or G or is absent

SEQ ID NO: 26449 - protein, 33 aa, Artificial Sequence; identical to SEQ ID NO: 5325
  GFR-binding peptide
  MOD_RES (1), (33): Xaa is C or S

SEQ ID NO: 26450 - protein, 33 aa, Artificial Sequence
  GFR-binding peptide
  MOD_RES (12), (13), (14), (15), (16): Xaa is A or G
  MOD_RES (17), (18), (19), (20): Xaa is A or G or is absent
SRVVMNEYQKYXXXXXXXXXIYLVSIPSLKTPA

SEQ ID NO: 26451 - protein, 40 aa, Artificial Sequence
  GFR-binding peptide
  MOD_RES (1), (35), (36): Xaa is C or S
  MOD_RES (13), (14), (15), (16), (17): Xaa is A or G
  MOD_RES (18), (19), (20), (21): Xaa is A or G or is absent
XGEVVMEEYQKYXXXXXXXXXIYLMSIPSLETPVXXAKPI

SEQ ID NO: 26452 - protein, 33 aa, Artificial Sequence; identical to SEQ ID NO: 5330
  GFR-binding peptide
  MOD_RES (1), (33): Xaa is C or S

SEQ ID NO: 26453 - protein, 38 aa, Artificial Sequence
  GFR-binding peptide
  MOD_RES (32), (33): Xaa is C or S
ARVVMNEYQKYIVNSSDDIYLVSIPSLQTPAXXPKPVT

SEQ ID NO: 26454 - protein, 41 aa, Artificial Sequence; identical to SEQ ID NO: 5331
  GFR-binding peptide
  MOD_RES (1), (3), (37), (38): Xaa is C or S
  MOD_RES (15), (16), (17), (18), (19): Xaa is A or G
  MOD_RES (20), (21), (22), (23): Xaa is A or G or is absent

SEQ ID NO: 26455 - protein, 35 aa, Artificial Sequence
  GFR-binding peptide
  MOD_RES (31), (32): Xaa is C or S
EVVMDEYKFKVVKENEDLYLMSIPELETPVXXAKP

SEQ ID NO: 26456 - protein, 36 aa, Artificial Sequence
  GFR-binding peptide
  MOD_RES (1), (3): Xaa is C or S
  MOD_RES (15), (16), (17), (18), (19): Xaa is A or G
  MOD_RES (20), (21), (22), (23): Xaa is A or G or is absent
XGXGEVVMEEYKFKXXXXXXXXXLYLMSIPELETPV

SEQ ID NO: 26457 - protein, 32 aa, Artificial Sequence
  GFR-binding peptide
  MOD_RES (1), (32): Xaa is C or S
XSRVIMEYKFKVKPKRGVLYLISIPELAQPVX

SEQ ID NO: 26458 - protein, 36 aa, Artificial Sequence; identical to SEQ ID NO: 5334
  GFR-binding peptide
  MOD_RES (34), (35): Xaa is C or S
  MOD_RES (12), (13), (14), (15), (16): Xaa is A or G
  MOD_RES (17), (18), (19), (20): Xaa is A or G or is absent

SEQ ID NO: 26459 - protein, 39 aa, Artificial Sequence
  GFR-binding peptide
  MOD_RES (2), (37), (38): Xaa is C or S
  MOD_RES (15), (16), (17), (18), (19): Xaa is A or G
  MOD_RES (20), (21), (22), (23): Xaa is A or G or is absent
GXEAVSMGEEYKFKXXXXXXXXXLYLVSIPELKTPVXXA

SEQ ID NO: 26460 - protein, 31 aa, Artificial Sequence
  GFR-binding peptide
SRVVMNEYKFKIVNSSDDLYLVSIPELKTPA

SEQ ID NO: 26461 - protein, 37 aa, Artificial Sequence
  GFR-binding peptide
  MOD_RES (1), (33), (34): Xaa is C or S
XSRVVMNEYQKYIVNSSDDIYLVSIPSLKTPAXXPKP

SEQ ID NO: 26462 - protein, 36 aa, Artificial Sequence
  GFR-binding peptide
  MOD_RES (34), (35): Xaa is C or S
  MOD_RES (12), (13), (14), (15), (16): Xaa is A or G
  MOD_RES (17), (18), (19), (20): Xaa is A or G or is absent
GEVVMEEYQKYXXXXXXXXXIYLMSIPSLETPVXXA

SEQ ID NO: 26463 - protein, 34 aa, Artificial Sequence
  GFR-binding peptide
  MOD_RES (34), (34): Xaa is C or S
  MOD_RES (12), (13), (14), (15), (16): Xaa is A or G
  MOD_RES (17), (18), (19), (20): Xaa is A or G or is absent
GEVVMDEYQKYXXXXXXXXXIYLMSIPSLETPVX

SEQ ID NO: 26464 - protein, 31 aa, Artificial Sequence; identical to SEQ ID NO: 5336
  GFR-binding peptide
  MOD_RES (31), (31): Xaa is C or S

SEQ ID NO: 26465 - protein, 42 aa, Artificial Sequence
  GFR-binding peptide
  MOD_RES (2), (36), (37): Xaa is C or S
  MOD_RES (14), (15), (16), (17), (18): Xaa is A or G
  MOD_RES (19), (20), (21), (22): Xaa is A or G or is absent
GXESVAMGEYQKYXXXXXXXXXIYLISIPSLKTPVXXAKSAK

SEQ ID NO: 26466 - protein, 38 aa, Artificial Sequence; identical to SEQ ID NO: 5338
  GFR-binding peptide
  MOD_RES (1), (3), (35), (36): Xaa is C or S

SEQ ID NO: 26467 - protein, 38 aa, Artificial Sequence
  GFR-binding peptide
  MOD_RES (2), (34), (35): Xaa is C or S
GXAKVVMNEYQKYIVNNSSDIYLVSIPSLKTPAXXAKP

SEQ ID NO: 26468 - protein, 40 aa, Artificial Sequence
  GFR-binding peptide
  MOD_RES (2), (34), (35): Xaa is C or S
GXESVAMGYHYKLYTVVGKDKYLISIPSLKTPVXXAKSAK

SEQ ID NO: 26469 - protein, 39 aa, Artificial Sequence; identical to SEQ ID NO: 5342
  GFR-binding peptide
  MOD_RES (2), (4), (36): Xaa is C or S

SEQ ID NO: 26470 - protein, 32 aa, Artificial Sequence; identical to SEQ ID NO: 5345
  GFR-binding peptide
  MOD_RES (31), (32): Xaa is C or S

SEQ ID NO: 26471 - protein, 39 aa, Artificial Sequence
  GFR-binding peptide
  MOD_RES (1), (35), (36): Xaa is C or S
  MOD_RES (13), (14), (15), (16), (17): Xaa is A or G
  MOD_RES (18), (19), (20), (21): Xaa is A or G or is absent
XGEVVMDEYKFKXXXXXXXXXLYLMSIPELETPVXXAKP

SEQ ID NO: 26472 - protein, 33 aa, Artificial Sequence
  GFR-binding peptide
  MOD_RES (12), (13), (14), (15), (16): Xaa is A or G
  MOD_RES (17), (18), (19), (20): Xaa is A or G or is absent
GEVVMEEYQKYXXXXXXXXXIYLMSIPSLETPV

SEQ ID NO: 26473 - protein, 37 aa, Artificial Sequence
  GFR-binding peptide
  MOD_RES (2), (34), (35): Xaa is C or S
GXESVAMGYHYKLYTVVGKDKYLISIPSLKTPVXXAK

SEQ ID NO: 26474 - protein, 33 aa, Artificial Sequence; identical to SEQ ID NO: 5346
  GFR-binding peptide
  MOD_RES (32), (33): Xaa is C or S

SEQ ID NO: 26475 - protein, 32 aa, Artificial Sequence; identical to SEQ ID NO: 5347
  GFR-binding peptide
  MOD_RES (31), (32): Xaa is C or S

SEQ ID NO: 26476 - protein, 39 aa, Artificial Sequence; identical to SEQ ID NO: 5348
  GFR-binding peptide
  MOD_RES (1), (3), (35), (36): Xaa is C or S

SEQ ID NO: 26477 - protein, 32 aa, Artificial Sequence
  GFR-binding peptide
  MOD_RES (31), (32): Xaa is C or S
EVVMDYHYKLVVNNAADKYLISIPSLRAPVXX

SEQ ID NO: 26478 - protein, 44 aa, Artificial Sequence; identical to SEQ ID NO: 5349
  GFR-binding peptide
  MOD_RES (2), (4), (38), (39): Xaa is C or S
  MOD_RES (16), (17), (18), (19), (20): Xaa is A or G
  MOD_RES (21), (22), (23), (24): Xaa is A or G or is absent

SEQ ID NO: 26479 - protein, 33 aa, Artificial Sequence
  GFR-binding peptide
  MOD_RES (1), (33): Xaa is C or S
XESVAMGEYQKYYTVVGKDIYLISIPSLKTPVX

SEQ ID NO: 26480 - protein, 33 aa, Artificial Sequence; identical to SEQ ID NO: 5351
  GFR-binding peptide
  MOD_RES (31), (32): Xaa is C or S

SEQ ID NO: 26481 - protein, 40 aa, Artificial Sequence; identical to SEQ ID NO: 5355
  GFR-binding peptide
  MOD_RES (1), (35), (36): Xaa is C or S
  MOD_RES (13), (14), (15), (16), (17): Xaa is A or G
  MOD_RES (18), (19), (20), (21): Xaa is A or G or is absent

SEQ ID NO: 26482 - protein, 42 aa, Artificial Sequence
  GFR-binding peptide
  MOD_RES (1), (3), (36), (37): Xaa is C or S
  MOD_RES (14), (15), (16), (17), (18): Xaa is A or G
  MOD_RES (19), (20), (21), (22): Xaa is A or G or is absent
XKXSKVVMEYQKYXXXXXXXXXIYLISIPSLDQPVXXPSASA

SEQ ID NO: 26483 - protein, 40 aa, Artificial Sequence
  GFR-binding peptide
  MOD_RES (34), (34): Xaa is C or S
  MOD_RES (12), (13), (14), (15), (16): Xaa is A or G
  MOD_RES (17), (18), (19), (20): Xaa is A or G or is absent
SRVVMNEYKFKXXXXXXXXXLYLVSIPELKTPAXTPKTVH

SEQ ID NO: 26484 - protein, 41 aa, Artificial Sequence; identical to SEQ ID NO: 5357
  GFR-binding peptide
  MOD_RES (1), (3), (35), (36): Xaa is C or S

SEQ ID NO: 26485 - protein, 36 aa, Artificial Sequence; identical to SEQ ID NO: 5359
  GFR-binding peptide
  MOD_RES (33), (34): Xaa is C or S
  MOD_RES (11), (12), (13), (14), (15): Xaa is A or G
  MOD_RES (16), (17), (18), (19): Xaa is A or G or is absent

SEQ ID NO: 26486 - protein, 35 aa, Artificial Sequence; identical to SEQ ID NO: 5361
  GFR-binding peptide
  MOD_RES (32), (33): Xaa is C or S

SEQ ID NO: 26487 - protein, 41 aa, Artificial Sequence
  GFR-binding peptide
  MOD_RES (1), (3), (37), (38): Xaa is C or S
  MOD_RES (15), (16), (17), (18), (19): Xaa is A or G
  MOD_RES (20), (21), (22), (23): Xaa is A or G or is absent
XGXGEVVMDEYKFKXXXXXXXXXLYLMSIPELETPVXXAKP

SEQ ID NO: 26488 - protein, 35 aa, Artificial Sequence; identical to SEQ ID NO: 5362
  GFR-binding peptide
  MOD_RES (31), (32): Xaa is C or S

SEQ ID NO: 26489 - protein, 40 aa, Artificial Sequence
  GFR-binding peptide
  MOD_RES (1), (3), (37), (38): Xaa is C or S
  MOD_RES (15), (16), (17), (18), (19): Xaa is A or G
  MOD_RES (20), (21), (22), (23): Xaa is A or G or is absent
XGXESVAMGYHYKLXXXXXXXXXKYLISIPSLKTPVXXAK

SEQ ID NO: 26490 - protein, 32 aa, Artificial Sequence
  GFR-binding peptide
  MOD_RES (11), (12), (13), (14), (15): Xaa is A or G
  MOD_RES (16), (17), (18), (19): Xaa is A or G or is absent
SKVIMEYKFKXXXXXXXXXLYLISIPELDQSV

SEQ ID NO: 26491 - protein, 38 aa, Artificial Sequence
  GFR-binding peptide
  MOD_RES (1), (3), (34), (35): Xaa is C or S
XKXSRVIMEYKFKVKPKRGVLYLISIPELAQPVXXPAA

SEQ ID NO: 26492 - protein, 37 aa, Artificial Sequence
  GFR-binding peptide
  MOD_RES (31), (32): Xaa is C or S
EVVMDYHYKLVVNNAADKYLISIPSLRAPVXXSAPAA

SEQ ID NO: 26493 - protein, 35 aa, Artificial Sequence; identical to SEQ ID NO: 5364
  GFR-binding peptide
  MOD_RES (2), (35): Xaa is C or S

SEQ ID NO: 26494 - protein, 32 aa, Artificial Sequence
  GFR-binding peptide
  MOD_RES (1), (1): Xaa is C or S
XAEVVMDEYQKYVVNNAADIYLISIPSLRAPV

SEQ ID NO: 26495 - protein, 37 aa, Artificial Sequence
  GFR-binding peptide
  MOD_RES (1), (35), (36): Xaa is C or S
  MOD_RES (13), (14), (15), (16), (17): Xaa is A or G
  MOD_RES (18), (19), (20), (21): Xaa is A or G or is absent
XAEVVMDYHYKLXXXXXXXXXKYLISIPSLRAPVXXS

SEQ ID NO: 26496 - protein, 41 aa, Artificial Sequence; identical to SEQ ID NO: 5365
  GFR-binding peptide
  MOD_RES (1), (35), (36): Xaa is C or S
  MOD_RES (13), (14), (15), (16), (17): Xaa is A or G
  MOD_RES (18), (19), (20), (21): Xaa is A or G or is absent

SEQ ID NO: 26497 - protein, 38 aa, Artificial Sequence
  GFR-binding peptide
  MOD_RES (1), (3), (36), (37): Xaa is C or S
  MOD_RES (14), (15), (16), (17), (18): Xaa is A or G
  MOD_RES (19), (20), (21), (22): Xaa is A or G or is absent
XKXSKVIMEYQKYXXXXXXXXXIYLISIPSLDQSVXXP

SEQ ID NO: 26498 - protein, 39 aa, Artificial Sequence
  GFR-binding peptide
  MOD_RES (2), (35), (36): Xaa is C or S
  MOD_RES (13), (14), (15), (16), (17): Xaa is A or G
  MOD_RES (18), (19), (20), (21): Xaa is A or G or is absent
KXSKVVMEYQKYXXXXXXXXXIYLISIPSLDQPVXXPSA

SEQ ID NO: 26499 - protein, 37 aa, Artificial Sequence
  GFR-binding peptide
  MOD_RES (2), (36), (37): Xaa is C or S
  MOD_RES (14), (15), (16), (17), (18): Xaa is A or G
  MOD_RES (19), (20), (21), (22): Xaa is A or G or is absent
GXESVAMGRYKKLXXXXXXXXXFYLISIANLKTPVXX

SEQ ID NO: 26500 - protein, 35 aa, Artificial Sequence; identical to SEQ ID NO: 5369
  GFR-binding peptide
  MOD_RES (33), (34): Xaa is C or S

SEQ ID NO: 26501 - protein, 33 aa, Artificial Sequence; identical to SEQ ID NO: 5370
  GFR-binding peptide
  MOD_RES (1), (33): Xaa is C or S

SEQ ID NO: 26502 - protein, 40 aa, Artificial Sequence; identical to SEQ ID NO: 5371
  GFR-binding peptide
  MOD_RES (34), (35): Xaa is C or S
  MOD_RES (12), (13), (14), (15), (16): Xaa is A or G
  MOD_RES (17), (18), (19), (20): Xaa is A or G or is absent

SEQ ID NO: 26503 - protein, 39 aa, Artificial Sequence
  GFR-binding peptide
  MOD_RES (2), (34), (35): Xaa is C or S
GXESVAMGEYQKYYTVVGKDIYLISIPSLKTPVXXAKSA

SEQ ID NO: 26504 - protein, 33 aa, Artificial Sequence
  GFR-binding peptide
  MOD_RES (1), (33): Xaa is C or S
XAKVVMNEYKFKIVNNSSDLYLVSIPELKTPAX

SEQ ID NO: 26505 - protein, 42 aa, Artificial Sequence
  GFR-binding peptide
  MOD_RES (2), (36), (37): Xaa is C or S
  MOD_RES (14), (15), (16), (17), (18): Xaa is A or G
  MOD_RES (19), (20), (21), (22): Xaa is A or G or is absent
GXGEVVMEEYKFKXXXXXXXXXLYLMSIPELETPVXXAKPIS

SEQ ID NO: 26506 - protein, 40 aa, Artificial Sequence
  GFR-binding peptide
  MOD_RES (1), (34), (35): Xaa is C or S
  MOD_RES (12), (13), (14), (15), (16): Xaa is A or G
  MOD_RES (17), (18), (19), (20): Xaa is A or G or is absent
XSRVIMEYKFKXXXXXXXXXLYLISIPELAQPVXXPAASA

SEQ ID NO: 26507 - protein, 36 aa, Artificial Sequence; identical to SEQ ID NO: 5375
  GFR-binding peptide
  MOD_RES (1), (3): Xaa is C or S
  MOD_RES (15), (16), (17), (18), (19): Xaa is A or G
  MOD_RES (20), (21), (22), (23): Xaa is A or G or is absent

SEQ ID NO: 26508 - protein, 36 aa, Artificial Sequence; identical to SEQ ID NO: 5376
  GFR-binding peptide
  MOD_RES (1), (3), (36): Xaa is C or S
  MOD_RES (14), (15), (16), (17), (18): Xaa is A or G
  MOD_RES (19), (20), (21), (22): Xaa is A or G or is absent

SEQ ID NO: 26509 - protein, 36 aa, Artificial Sequence; identical to SEQ ID NO: 5378
  GFR-binding peptide
  MOD_RES (2), (4): Xaa is C or S
  MOD_RES (15), (16), (17), (18), (19): Xaa is A or G
  MOD_RES (20), (21), (22), (23): Xaa is A or G or is absent

SEQ ID NO: 26510 - protein, 36 aa, Artificial Sequence
  GFR-binding peptide
  MOD_RES (33), (34): Xaa is C or S
  MOD_RES (11), (12), (13), (14), (15): Xaa is A or G
  MOD_RES (16), (17), (18), (19): Xaa is A or G or is absent
SKVIMEYQKYXXXXXXXXXIYLISIPSLDQSVXXPS

SEQ ID NO: 26511 - protein, 35 aa, Artificial Sequence
  GFR-binding peptide
  MOD_RES (31), (32): Xaa is C or S
SVAMGRYKKLYTVVGKDFYLISIANLKTPVXXAKS

SEQ ID NO: 26512 - protein, 39 aa, Artificial Sequence; identical to SEQ ID NO: 5379
  GFR-binding peptide
  MOD_RES (1), (3), (36), (37): Xaa is C or S
  MOD_RES (14), (15), (16), (17), (18): Xaa is A or G
  MOD_RES (19), (20), (21), (22): Xaa is A or G or is absent

SEQ ID NO: 26513 - protein, 32 aa, Artificial Sequence; identical to SEQ ID NO: 5380
  GFR-binding peptide

SEQ ID NO: 26514 - protein, 43 aa, Artificial Sequence
  GFR-binding peptide
  MOD_RES (2), (4), (38), (39): Xaa is C or S
  MOD_RES (16), (17), (18), (19), (20): Xaa is A or G
  MOD_RES (21), (22), (23), (24): Xaa is A or G or is absent
HXGXSRVVMNEYKFKXXXXXXXXXLYLVSIPELKTPAXXPKPV

SEQ ID NO: 26515 - protein, 37 aa, Artificial Sequence; identical to SEQ ID NO: 5383
  GFR-binding peptide
  MOD_RES (2), (34), (35): Xaa is C or S

SEQ ID NO: 26516 - protein, 34 aa, Artificial Sequence; identical to SEQ ID NO: 5385
  GFR-binding peptide
  MOD_RES (1), (1): Xaa is C or S
  MOD_RES (13), (14), (15), (16), (17): Xaa is A or G
  MOD_RES (18), (19), (20), (21): Xaa is A or G or is absent

SEQ ID NO: 26517 - protein, 34 aa, Artificial Sequence
  GFR-binding peptide
  MOD_RES (1), (1): Xaa is C or S
  MOD_RES (13), (14), (15), (16), (17): Xaa is A or G
  MOD_RES (18), (19), (20), (21): Xaa is A or G or is absent
XARVVMNEYQKYXXXXXXXXXIYLVSIPSLQTPA

SEQ ID NO: 26518 - protein, 34 aa, Artificial Sequence
  GFR-binding peptide
  MOD_RES (1), (1): Xaa is C or S
  MOD_RES (13), (14), (15), (16), (17): Xaa is A or G
  MOD_RES (18), (19), (20), (21): Xaa is A or G or is absent
XSRVVMNEYKFKXXXXXXXXXLYLVSIPELKTPA

SEQ ID NO: 26519 - protein, 35 aa, Artificial Sequence; identical to SEQ ID NO: 5388
  GFR-binding peptide
  MOD_RES (2), (35): Xaa is C or S
  MOD_RES (13), (14), (15), (16), (17): Xaa is A or G
  MOD_RES (18), (19), (20), (21): Xaa is A or G or is absent

SEQ ID NO: 26520 - protein, 43 aa, Artificial Sequence; identical to SEQ ID NO: 5393
  GFR-binding peptide
  MOD_RES (2), (4), (38), (39): Xaa is C or S
  MOD_RES (16), (17), (18), (19), (20): Xaa is A or G
  MOD_RES (21), (22), (23), (24): Xaa is A or G or is absent

SEQ ID NO: 26521 - protein, 42 aa, Artificial Sequence; identical to SEQ ID NO: 5396
  GFR-binding peptide
  MOD_RES (2), (36), (37): Xaa is C or S
  MOD_RES (14), (15), (16), (17), (18): Xaa is A or G
  MOD_RES (19), (20), (21), (22): Xaa is A or G or is absent

SEQ ID NO: 26522 - protein, 39 aa, Artificial Sequence
  GFR-binding peptide
  MOD_RES (2), (4), (36), (37): Xaa is C or S
HXGXAKVVMNEYKFKIVNNSSDLYLVSIPELKTPAXXAK

SEQ ID NO: 26523 - protein, 40 aa, Artificial Sequence; identical to SEQ ID NO: 5400
  GFR-binding peptide
  MOD_RES (1), (35), (36): Xaa is C or S
  MOD_RES (13), (14), (15), (16), (17): Xaa is A or G
  MOD_RES (18), (19), (20), (21): Xaa is A or G or is absent

SEQ ID NO: 26524 - protein, 36 aa, Artificial Sequence
  GFR-binding peptide
  MOD_RES (32), (33): Xaa is C or S
ESVAMGEYKFKYTVVGKDLYLISIPELKTPVXXAKS

SEQ ID NO: 26525 - protein, 33 aa, Artificial Sequence
  GFR-binding peptide
  MOD_RES (2), (2): Xaa is C or S
GXESVAMGRYKKLYTVVGKDFYLISIANLKTPV

SEQ ID NO: 26526 - protein, 39 aa, Artificial Sequence
  GFR-binding peptide
  MOD_RES (1), (3), (35): Xaa is C or S
XGXSRVVMNEYQKYIVNSSDDIYLVSIPSLKTPAXTPKT

SEQ ID NO: 26527 - protein, 40 aa, Artificial Sequence
  GFR-binding peptide
  MOD_RES (1), (3), (37), (38): Xaa is C or S
  MOD_RES (15), (16), (17), (18), (19): Xaa is A or G
  MOD_RES (20), (21), (22), (23): Xaa is A or G or is absent
XGXAKVVMNEYKFKXXXXXXXXXLYLVSIPELKTPAXXAK

SEQ ID NO: 26528 - protein, 37 aa, Artificial Sequence; identical to SEQ ID NO: 5404
  GFR-binding peptide
  MOD_RES (2), (4), (35), (36): Xaa is C or S

SEQ ID NO: 26529 - protein, 37 aa, Artificial Sequence
  GFR-binding peptide
  MOD_RES (2), (4), (36), (37): Xaa is C or S
RXGXGEVVMEEYKFKVVKDYEDLYLMSIPELETPVXX

SEQ ID NO: 26530 - protein, 35 aa, Artificial Sequence
  GFR-binding peptide
  MOD_RES (32), (33): Xaa is C or S
AEVVMDEYQKYVVNNAADIYLISIPSLRAPVXXSA

SEQ ID NO: 26531 - protein, 37 aa, Artificial Sequence
  GFR-binding peptide
  MOD_RES (1), (34), (35): Xaa is C or S
  MOD_RES (12), (13), (14), (15), (16): Xaa is A or G
  MOD_RES (17), (18), (19), (20): Xaa is A or G or is absent
XSRVIMEYQKYXXXXXXXXXIYLISIPSLAQPVXXPA

SEQ ID NO: 26532 - protein, 44 aa, Artificial Sequence
  GFR-binding peptide
  MOD_RES (2), (4), (38), (39): Xaa is C or S
  MOD_RES (16), (17), (18), (19), (20): Xaa is A or G
  MOD_RES (21), (22), (23), (24): Xaa is A or G or is absent
HXGXARVVMNEYKFKXXXXXXXXXLYLVSIPELQTPAXXPKPVT

SEQ ID NO: 26533 - protein, 36 aa, Artificial Sequence
  GFR-binding peptide
  MOD_RES (1), (3), (35), (36): Xaa is C or S
XGXGEVVMEEYQKYVVKDYEDIYLMSIPSLETPVXX

SEQ ID NO: 26534 - protein, 36 aa, Artificial Sequence
  GFR-binding peptide
  MOD_RES (1), (3), (36): Xaa is C or S
  MOD_RES (14), (15), (16), (17), (18): Xaa is A or G
  MOD_RES (19), (20), (21), (22): Xaa is A or G or is absent
XKXSRVIMEYQKYXXXXXXXXXIYLISIPSLAQPVX

SEQ ID NO: 26535 - protein, 35 aa, Artificial Sequence; identical to SEQ ID NO: 5409
  GFR-binding peptide
  MOD_RES (32), (33): Xaa is C or S

SEQ ID NO: 26536 - protein, 39 aa, Artificial Sequence; identical to SEQ ID NO: 5411
  GFR-binding peptide
  MOD_RES (1), (3), (36), (37): Xaa is C or S
  MOD_RES (14), (15), (16), (17), (18): Xaa is A or G
  MOD_RES (19), (20), (21), (22): Xaa is A or G or is absent

SEQ ID NO: 26537 - protein, 38 aa, Artificial Sequence; identical to SEQ ID NO: 5412
  GFR-binding peptide
  MOD_RES (2), (35), (36): Xaa is C or S
  MOD_RES (13), (14), (15), (16), (17): Xaa is A or G
  MOD_RES (18), (19), (20), (21): Xaa is A or G or is absent

SEQ ID NO: 26538 - protein, 35 aa, Artificial Sequence; identical to SEQ ID NO: 5413
  GFR-binding peptide
  MOD_RES (1), (35): Xaa is C or S
  MOD_RES (13), (14), (15), (16), (17): Xaa is A or G
  MOD_RES (18), (19), (20), (21): Xaa is A or G or is absent

SEQ ID NO: 26539 - protein, 34 aa, Artificial Sequence
  GFR-binding peptide
  MOD_RES (2), (33), (34): Xaa is C or S
KXSRVIMEYKFKVKPKRGVLYLISIPELAQPVXX

SEQ ID NO: 26540 - protein, 35 aa, Artificial Sequence
  GFR-binding peptide
  MOD_RES (1), (3), (35): Xaa is C or S
XGXSRVVMNEYQKYIVNSSDDIYLVSIPSLKTPAX

SEQ ID NO: 26541 - protein, 39 aa, Artificial Sequence; identical to SEQ ID NO: 5415
  GFR-binding peptide
  MOD_RES (2), (4), (35), (36): Xaa is C or S

SEQ ID NO: 26542 - protein, 40 aa, Artificial Sequence
  GFR-binding peptide
  MOD_RES (2), (4), (38), (39): Xaa is C or S
  MOD_RES (16), (17), (18), (19), (20): Xaa is A or G
  MOD_RES (21), (22), (23), (24): Xaa is A or G or is absent
RXGXAEVVMDYHYKLXXXXXXXXXKYLISIPSLRAPVXXS

SEQ ID NO: 26543 - protein, 38 aa, Artificial Sequence; identical to SEQ ID NO: 5416
  GFR-binding peptide
  MOD_RES (2), (36), (37): Xaa is C or S
  MOD_RES (14), (15), (16), (17), (18): Xaa is A or G
  MOD_RES (19), (20), (21), (22): Xaa is A or G or is absent

SEQ ID NO: 26544 - protein, 42 aa, Artificial Sequence
  GFR-binding peptide
  MOD_RES (2), (36), (37): Xaa is C or S
  MOD_RES (14), (15), (16), (17), (18): Xaa is A or G
  MOD_RES (19), (20), (21), (22): Xaa is A or G or is absent
GXESVAMGRYKKLXXXXXXXXXFYLISIANLKTPVXXAKSAK

SEQ ID NO: 26545 - protein, 35 aa, Artificial Sequence
  GFR-binding peptide
  MOD_RES (33), (34): Xaa is C or S
  MOD_RES (11), (12), (13), (14), (15): Xaa is A or G
  MOD_RES (16), (17), (18), (19): Xaa is A or G or is absent
SVAMGYHYKLXXXXXXXXXKYLISIPSLKTPVXXA

SEQ ID NO: 26546 - protein, 36 aa, Artificial Sequence; identical to SEQ ID NO: 5418
  GFR-binding peptide
  MOD_RES (1), (3), (36): Xaa is C or S
  MOD_RES (14), (15), (16), (17), (18): Xaa is A or G
  MOD_RES (19), (20), (21), (22): Xaa is A or G or is absent

SEQ ID NO: 26547 - protein, 37 aa, Artificial Sequence
  GFR-binding peptide
  MOD_RES (2), (4): Xaa is C or S
  MOD_RES (16), (17), (18), (19), (20): Xaa is A or G
  MOD_RES (21), (22), (23), (24): Xaa is A or G or is absent
RXGXESVAMGEYQKYXXXXXXXXXIYLISIPSLKTPV

SEQ ID NO: 26548 - protein, 35 aa, Artificial Sequence
  GFR-binding peptide
  MOD_RES (34), (35): Xaa is C or S
  MOD_RES (12), (13), (14), (15), (16): Xaa is A or G
  MOD_RES (17), (18), (19), (20): Xaa is A or G or is absent
GEVVMEEYKFKXXXXXXXXXLYLMSIPELETPVXX

SEQ ID NO: 26549 - protein, 35 aa, Artificial Sequence
  GFR-binding peptide
  MOD_RES (2), (4), (35): Xaa is C or S
SXKXSKVVMEYKFKVKPTRGVLYLISIPELDQPVX

SEQ ID NO: 26550 - protein, 31 aa, Artificial Sequence; identical to SEQ ID NO: 5422
  GFR-binding peptide
  MOD_RES (31), (31): Xaa is C or S

SEQ ID NO: 26551 - protein, 32 aa, Artificial Sequence
  GFR-binding peptide
  MOD_RES (11), (12), (13), (14), (15): Xaa is A or G
  MOD_RES (16), (17), (18), (19): Xaa is A or G or is absent
EVVMDEYQKYXXXXXXXXXIYLMSIPSLETPV

SEQ ID NO: 26552 - protein, 39 aa, Artificial Sequence; identical to SEQ ID NO: 5430
  GFR-binding peptide
  MOD_RES (1), (3), (35), (36): Xaa is C or S

SEQ ID NO: 26553 - protein, 40 aa, Artificial Sequence
  GFR-binding peptide
  MOD_RES (2), (35), (36): Xaa is C or S
GXEAVSMGEEYKFKTPVGMDDLYLVSIPELKTPVXXAKGV

SEQ ID NO: 26554 - protein, 43 aa, Artificial Sequence
  GFR-binding peptide
  MOD_RES (1), (3), (37), (38): Xaa is C or S
  MOD_RES (15), (16), (17), (18), (19): Xaa is A or G
  MOD_RES (20), (21), (22), (23): Xaa is A or G or is absent
XGXESVAMGRYKKLXXXXXXXXXFYLISIANLKTPVXXAKSAK

SEQ ID NO: 26555 - protein, 33 aa, Artificial Sequence; identical to SEQ ID NO: 5433
  GFR-binding peptide
  MOD_RES (33), (33): Xaa is C or S
  MOD_RES (11), (12), (13), (14), (15): Xaa is A or G
  MOD_RES (16), (17), (18), (19): Xaa is A or G or is absent

SEQ ID NO: 26556 - protein, 37 aa, Artificial Sequence
  GFR-binding peptide
  MOD_RES (2), (33), (34): Xaa is C or S
KXSKVIMEYQKYIKPTKGIIYLISIPSLDQSVXXPSA

SEQ ID NO: 26557 - protein, 33 aa, Artificial Sequence; identical to SEQ ID NO: 5437
  GFR-binding peptide
  MOD_RES (33), (33): Xaa is C or S
  MOD_RES (11), (12), (13), (14), (15): Xaa is A or G
  MOD_RES (16), (17), (18), (19): Xaa is A or G or is absent

SEQ ID NO: 26558 - protein, 33 aa, Artificial Sequence
  GFR-binding peptide
  MOD_RES (33), (33): Xaa is C or S
  MOD_RES (11), (12), (13), (14), (15): Xaa is A or G
  MOD_RES (16), (17), (18), (19): Xaa is A or G or is absent
EVVMDEYQKYXXXXXXXXXIYLMSIPSLETPVX

SEQ ID NO: 26559 - protein, 39 aa, Artificial Sequence
  GFR-binding peptide
  MOD_RES (1), (33), (34): Xaa is C or S
XESVAMGEYQKYYTVVGKDIYLISIPSLKTPVXXAKSAK

SEQ ID NO: 26560 - protein, 41 aa, Artificial Sequence
  GFR-binding peptide
  MOD_RES (1), (3), (37), (38): Xaa is C or S
  MOD_RES (15), (16), (17), (18), (19): Xaa is A or G
  MOD_RES (20), (21), (22), (23): Xaa is A or G or is absent
XGXGEVVMEEYKFKXXXXXXXXXLYLMSIPELETPVXXAKP

SEQ ID NO: 26561 - protein, 40 aa, Artificial Sequence; identical to SEQ ID NO: 5446
  GFR-binding peptide
  MOD_RES (1), (34), (35): Xaa is C or S
  MOD_RES (12), (13), (14), (15), (16): Xaa is A or G
  MOD_RES (17), (18), (19), (20): Xaa is A or G or is absent

SEQ ID NO: 26562 - protein, 35 aa, Artificial Sequence; identical to SEQ ID NO: 5448
  GFR-binding peptide
  MOD_RES (1), (3): Xaa is C or S
  MOD_RES (14), (15), (16), (17), (18): Xaa is A or G
  MOD_RES (19), (20), (21), (22): Xaa is A or G or is absent

SEQ ID NO: 26563 - protein, 34 aa, Artificial Sequence; identical to SEQ ID NO: 5449
  GFR-binding peptide
  MOD_RES (2), (34): Xaa is C or S

SEQ ID NO: 26564 - protein, 33 aa, Artificial Sequence
  GFR-binding peptide
  MOD_RES (31), (31): Xaa is C or S
RVVMNEYQKYIVNSSDDIYLVSIPSLKTPAXTP

SEQ ID NO: 26565 - protein, 39 aa, Artificial Sequence
  GFR-binding peptide
  MOD_RES (33), (34): Xaa is C or S
  MOD_RES (11), (12), (13), (14), (15): Xaa is A or G
  MOD_RES (16), (17), (18), (19): Xaa is A or G or is absent
EVVMEEYKFKXXXXXXXXXLYLMSIPELETPVXXAKPIS

SEQ ID NO: 26566 - protein, 33 aa, Artificial Sequence; identical to SEQ ID NO: 5451
  GFR-binding peptide
  MOD_RES (12), (13), (14), (15), (16): Xaa is A or G
  MOD_RES (17), (18), (19), (20): Xaa is A or G or is absent

SEQ ID NO: 26567 - protein, 43 aa, Artificial Sequence
  GFR-binding peptide
  MOD_RES (1), (3), (37), (38): Xaa is C or S
  MOD_RES (15), (16), (17), (18), (19): Xaa is A or G
  MOD_RES (20), (21), (22), (23): Xaa is A or G or is absent
XGXGEVVMEEYQKYXXXXXXXXXIYLMSIPSLETPVXXAKPIS

SEQ ID NO: 26568 - protein, 39 aa, Artificial Sequence
  GFR-binding peptide
  MOD_RES (2), (34), (35): Xaa is C or S
GXGEVVMEEYKFKVVKDYEDLYLMSIPELETPVXXAKPI

SEQ ID NO: 26569 - protein, 31 aa, Artificial Sequence; identical to SEQ ID NO: 5457
  GFR-binding peptide
  MOD_RES (1), (1): Xaa is C or S

SEQ ID NO: 26570 - protein, 37 aa, Artificial Sequence
  GFR-binding peptide
  MOD_RES (2), (4), (36): Xaa is C or S
HXGXSRVVMNEYKFKIVNSSDDLYLVSIPELKTPAXT

SEQ ID NO: 26571 - protein, 36 aa, Artificial Sequence
  GFR-binding peptide
  MOD_RES (2), (36): Xaa is C or S
  MOD_RES (14), (15), (16), (17), (18): Xaa is A or G
  MOD_RES (19), (20), (21), (22): Xaa is A or G or is absent
GXARVVMNEYKFKXXXXXXXXXLYLVSIPELQTPAX

SEQ ID NO: 26572 - protein, 39 aa, Artificial Sequence
  GFR-binding peptide
  MOD_RES (2), (4), (36), (37): Xaa is C or S
RXGXGEVVMDEYQKYVVKENEDIYLMSIPSLETPVXXAK

SEQ ID NO: 26573 - protein, 38 aa, Artificial Sequence
  GFR-binding peptide
  MOD_RES (2), (4), (36), (37): Xaa is C or S
HXGXAKVVMNEYQKYIVNNSSDIYLVSIPSLKTPAXXA

SEQ ID NO: 26574 - protein, 35 aa, Artificial Sequence
  GFR-binding peptide
  MOD_RES (32), (33): Xaa is C or S
ARVVMNEYKFKIVNSSDDLYLVSIPELQTPAXXPK

SEQ ID NO: 26575 - protein, 35 aa, Artificial Sequence
  GFR-binding peptide
  MOD_RES (31), (32): Xaa is C or S
SVAMGEYKFKYTVVGKDLYLISIPELKTPVXXAKS

SEQ ID NO: 26576 - protein, 36 aa, Artificial Sequence
  GFR-binding peptide
  MOD_RES (33), (33): Xaa is C or S
  MOD_RES (11), (12), (13), (14), (15): Xaa is A or G
  MOD_RES (16), (17), (18), (19): Xaa is A or G or is absent
RVVMNEYQKYXXXXXXXXXIYLVSIPSLKTPAXTPK

SEQ ID NO: 26577 - protein, 33 aa, Artificial Sequence
  GFR-binding peptide
  MOD_RES (1), (1): Xaa is C or S
  MOD_RES (12), (13), (14), (15), (16): Xaa is A or G
  MOD_RES (17), (18), (19), (20): Xaa is A or G or is absent
XSKVIMEYQKYXXXXXXXXXIYLISIPSLDQSV

SEQ ID NO: 26578 - protein, 34 aa, Artificial Sequence
  GFR-binding peptide
  MOD_RES (1), (33), (34): Xaa is C or S
XAKVVMNEYKFKIVNNSSDLYLVSIPELKTPAXX

SEQ ID NO: 26579 - protein, 43 aa, Artificial Sequence; identical to SEQ ID NO: 5466
  GFR-binding peptide
  MOD_RES (2), (4), (37), (38): Xaa is C or S
  MOD_RES (15), (16), (17), (18), (19): Xaa is A or G
  MOD_RES (20), (21), (22), (23): Xaa is A or G or is absent

SEQ ID NO: 26580 - protein, 41 aa, Artificial Sequence; identical to SEQ ID NO: 5467
  GFR-binding peptide
  MOD_RES (2), (35), (36): Xaa is C or S
  MOD_RES (13), (14), (15), (16), (17): Xaa is A or G
  MOD_RES (18), (19), (20), (21): Xaa is A or G or is absent

SEQ ID NO: 26581 - protein, 31 aa, Artificial Sequence; identical to SEQ ID NO: 5468
  GFR-binding peptide
  MOD_RES (31), (31): Xaa is C or S

SEQ ID NO: 26582 - protein, 36 aa, Artificial Sequence
  GFR-binding peptide
  MOD_RES (1), (35), (36): Xaa is C or S
  MOD_RES (13), (14), (15), (16), (17): Xaa is A or G
  MOD_RES (18), (19), (20), (21): Xaa is A or G or is absent
XAEVVMDEYKFKXXXXXXXXXLYLISIPELRAPVXX

SEQ ID NO: 26583 - protein, 37 aa, Artificial Sequence
  GFR-binding peptide
  MOD_RES (32), (32): Xaa is C or S
SRVVMNEYKFKIVNSSDDLYLVSIPELKTPAXTPKTV

SEQ ID NO: 26584 - protein, 39 aa, Artificial Sequence; identical to SEQ ID NO: 5471
  GFR-binding peptide
  MOD_RES (1), (36), (37): Xaa is C or S
  MOD_RES (14), (15), (16), (17), (18): Xaa is A or G
  MOD_RES (19), (20), (21), (22): Xaa is A or G or is absent

SEQ ID NO: 26585 - protein, 34 aa, Artificial Sequence
  GFR-binding peptide
  MOD_RES (33), (34): Xaa is C or S
  MOD_RES (11), (12), (13), (14), (15): Xaa is A or G
  MOD_RES (16), (17), (18), (19): Xaa is A or G or is absent
SVAMGRYKKLXXXXXXXXXFYLISIANLKTPVXX

SEQ ID NO: 26586 - protein, 34 aa, Artificial Sequence
  GFR-binding peptide
  MOD_RES (1), (1): Xaa is C or S
  MOD_RES (13), (14), (15), (16), (17): Xaa is A or G
  MOD_RES (18), (19), (20), (21): Xaa is A or G or is absent
XAKVVMNEYQKYXXXXXXXXXIYLVSIPSLKTPA

SEQ ID NO: 26587 - protein, 35 aa, Artificial Sequence
  GFR-binding peptide
  MOD_RES (32), (33): Xaa is C or S
AKVVMNEYKFKIVNNSSDLYLVSIPELKTPAXXAK

SEQ ID NO: 26588 - protein, 44 aa, Artificial Sequence; identical to SEQ ID NO: 5477
  GFR-binding peptide
  MOD_RES (2), (4), (38), (39): Xaa is C or S
  MOD_RES (16), (17), (18), (19), (20): Xaa is A or G
  MOD_RES (21), (22), (23), (24): Xaa is A or G or is absent

SEQ ID NO: 26589 - protein, 39 aa, Artificial Sequence
  GFR-binding peptide
  MOD_RES (1), (3), (37), (38): Xaa is C or S
  MOD_RES (15), (16), (17), (18), (19): Xaa is A or G
  MOD_RES (20), (21), (22), (23): Xaa is A or G or is absent
XGXAEVVMDEYKFKXXXXXXXXXLYLISIPELRAPVXXS

SEQ ID NO: 26590 - protein, 40 aa, Artificial Sequence
  GFR-binding peptide
  MOD_RES (2), (36), (37): Xaa is C or S
  MOD_RES (14), (15), (16), (17), (18): Xaa is A or G
  MOD_RES (19), (20), (21), (22): Xaa is A or G or is absent
GXGEVVMDEYKFKXXXXXXXXXLYLMSIPELETPVXXAKP

SEQ ID NO: 26591 - protein, 34 aa, Artificial Sequence; identical to SEQ ID NO: 5483
  GFR-binding peptide
  MOD_RES (2), (34): Xaa is C or S

SEQ ID NO: 26592 - protein, 39 aa, Artificial Sequence; identical to SEQ ID NO: 5484
  GFR-binding peptide
  MOD_RES (2), (35), (36): Xaa is C or S
  MOD_RES (13), (14), (15), (16), (17): Xaa is A or G
  MOD_RES (18), (19), (20), (21): Xaa is A or G or is absent

SEQ ID NO: 26593 - protein, 36 aa, Artificial Sequence
  GFR-binding peptide
  MOD_RES (31), (32): Xaa is C or S
EVVMEEYKFKVVKDYEDLYLMSIPELETPVXXAKPI

SEQ ID NO: 26594 - protein, 36 aa, Artificial Sequence
  GFR-binding peptide
  MOD_RES (1), (3): Xaa is C or S
  MOD_RES (15), (16), (17), (18), (19): Xaa is A or G
  MOD_RES (20), (21), (22), (23): Xaa is A or G or is absent
XGXGEVVMEEYQKYXXXXXXXXXIYLMSIPSLETPV

SEQ ID NO: 26595 - protein, 36 aa, Artificial Sequence; identical to SEQ ID NO: 5489
  GFR-binding peptide
  MOD_RES (31), (32): Xaa is C or S

SEQ ID NO: 26596 - protein, 38 aa, Artificial Sequence
  GFR-binding peptide
  MOD_RES (1), (33), (34): Xaa is C or S
XESVAMGRYKKLYTVVGKDFYLISIANLKTPVXXAKSA

SEQ ID NO: 26597 - protein, 37 aa, Artificial Sequence
  GFR-binding peptide
  MOD_RES (1), (33), (34): Xaa is C or S
XGEVVMEEYQKYVVKDYEDIYLMSIPSLETPVXXAKP

SEQ ID NO: 26598 - protein, 34 aa, Artificial Sequence; identical to SEQ ID NO: 5493
  GFR-binding peptide
  MOD_RES (1), (3): Xaa is C or S

SEQ ID NO: 26599 - protein, 34 aa, Artificial Sequence
  GFR-binding peptide
  MOD_RES (1), (3): Xaa is C or S
XGXESVAMGRYKKLYTVVGKDFYLISIANLKTPV

SEQ ID NO: 26600 - protein, 41 aa, Artificial Sequence
  GFR-binding peptide
  MOD_RES (1), (3), (37), (38): Xaa is C or S
  MOD_RES (15), (16), (17), (18), (19): Xaa is A or G
  MOD_RES (20), (21), (22), (23): Xaa is A or G or is absent
XGXGEVVMEEYQKYXXXXXXXXXIYLMSIPSLETPVXXAKP

SEQ ID NO: 26601 - protein, 35 aa, Artificial Sequence
  GFR-binding peptide
  MOD_RES (1), (32), (33): Xaa is C or S
XSRVIMEYQKYVKPKRGVIYLISIPSLAQPVXXPA

SEQ ID NO: 26602 - protein, 39 aa, Artificial Sequence; identical to SEQ ID NO: 5501
  GFR-binding peptide
  MOD_RES (1), (35), (36): Xaa is C or S
  MOD_RES (13), (14), (15), (16), (17): Xaa is A or G
  MOD_RES (18), (19), (20), (21): Xaa is A or G or is absent

SEQ ID NO: 26603 - protein, 38 aa, Artificial Sequence
  GFR-binding peptide
  MOD_RES (1), (33), (34): Xaa is C or S
XAEVVMDEYQKYVVNNAADIYLISIPSLRAPVXXSAPA

SEQ ID NO: 26604 - protein, 44 aa, Artificial Sequence
  GFR-binding peptide
  MOD_RES (2), (4), (39), (40): Xaa is C or S
  MOD_RES (17), (18), (19), (20), (21): Xaa is A or G
  MOD_RES (22), (23), (24), (25): Xaa is A or G or is absent
RXGXEAVSMGEEYQKYXXXXXXXXXIYLVSIPSLKTPVXXAKGV

SEQ ID NO: 26605 - protein, 34 aa, Artificial Sequence
  GFR-binding peptide
  MOD_RES (2), (34): Xaa is C or S
GXSRVVMNEYKFKIVNSSDDLYLVSIPELKTPAX

SEQ ID NO: 26606 - protein, 40 aa, Artificial Sequence; identical to SEQ ID NO: 5502
  GFR-binding peptide
  MOD_RES (1), (3), (38), (39): Xaa is C or S
  MOD_RES (16), (17), (18), (19), (20): Xaa is A or G
  MOD_RES (21), (22), (23), (24): Xaa is A or G or is absent

SEQ ID NO: 26607 - protein, 35 aa, Artificial Sequence; identical to SEQ ID NO: 5503
  GFR-binding peptide
  MOD_RES (2), (2): Xaa is C or S
  MOD_RES (14), (15), (16), (17), (18): Xaa is A or G
  MOD_RES (19), (20), (21), (22): Xaa is A or G or is absent

SEQ ID NO: 26608 - protein, 37 aa, Artificial Sequence; identical to SEQ ID NO: 5504
  GFR-binding peptide
  MOD_RES (1), (33), (34): Xaa is C or S

SEQ ID NO: 26609 - protein, 34 aa, Artificial Sequence
  GFR-binding peptide
  MOD_RES (1), (32), (33): Xaa is C or S
XSKVVMEYKFKVKPTRGVLYLISIPELDQPVXXP

SEQ ID NO: 26610 - protein, 38 aa, Artificial Sequence
  GFR-binding peptide
  MOD_RES (2), (4), (37), (38): Xaa is C or S
  MOD_RES (15), (16), (17), (18), (19): Xaa is A or G
  MOD_RES (20), (21), (22), (23): Xaa is A or G or is absent
SXKXSKVVMEYKFKXXXXXXXXXLYLISIPELDQPVXX

SEQ ID NO: 26611 - protein, 40 aa, Artificial Sequence; identical to SEQ ID NO: 5507
  GFR-binding peptide
  MOD_RES (1), (3), (36), (37): Xaa is C or S
  MOD_RES (14), (15), (16), (17), (18): Xaa is A or G
  MOD_RES (19), (20), (21), (22): Xaa is A or G or is absent

SEQ ID NO: 26612 - protein, 36 aa, Artificial Sequence
  GFR-binding peptide
  MOD_RES (2), (36): Xaa is C or S
  MOD_RES (14), (15), (16), (17), (18): Xaa is A or G
  MOD_RES (19), (20), (21), (22): Xaa is A or G or is absent
GXAEVVMDEYQKYXXXXXXXXXIYLISIPSLRAPVX

SEQ ID NO: 26613 - protein, 37 aa, Artificial Sequence
  GFR-binding peptide
  MOD_RES (34), (34): Xaa is C or S
  MOD_RES (12), (13), (14), (15), (16): Xaa is A or G
  MOD_RES (17), (18), (19), (20): Xaa is A or G or is absent
SRVVMNEYKFKXXXXXXXXXLYLVSIPELKTPAXTPK

SEQ ID NO: 26614 - protein, 42 aa, Artificial Sequence
  GFR-binding peptide
  MOD_RES (2), (4), (38), (39): Xaa is C or S
  MOD_RES (16), (17), (18), (19), (20): Xaa is A or G
  MOD_RES (21), (22), (23), (24): Xaa is A or G or is absent
RXGXGEVVMDEYQKYXXXXXXXXXIYLMSIPSLETPVXXAKP

SEQ ID NO: 26615 - protein, 41 aa, Artificial Sequence; identical to SEQ ID NO: 5509
  GFR-binding peptide
  MOD_RES (1), (35), (36): Xaa is C or S
  MOD_RES (13), (14), (15), (16), (17): Xaa is A or G
  MOD_RES (18), (19), (20), (21): Xaa is A or G or is absent

SEQ ID NO: 26616 - protein, 36 aa, Artificial Sequence
  GFR-binding peptide
  MOD_RES (1), (33), (34): Xaa is C or S
XESVAMGRYKKLYTVVGKDFYLISIANLKTPVXXAK

SEQ ID NO: 26617 - protein, 38 aa, Artificial Sequence
  GFR-binding peptide
  MOD_RES (35), (36): Xaa is C or S
  MOD_RES (13), (14), (15), (16), (17): Xaa is A or G
  MOD_RES (18), (19), (20), (21): Xaa is A or G or is absent
EAVSMGEEYKFKXXXXXXXXXLYLVSIPELKTPVXXAK

SEQ ID NO: 26618 - protein, 34 aa, Artificial Sequence; identical to SEQ ID NO: 5510
  GFR-binding peptide
  MOD_RES (32), (33): Xaa is C or S

SEQ ID NO: 26619 - protein, 38 aa, Artificial Sequence
  GFR-binding peptide
  MOD_RES (1), (35): Xaa is C or S
  MOD_RES (13), (14), (15), (16), (17): Xaa is A or G
  MOD_RES (18), (19), (20), (21): Xaa is A or G or is absent
XSRVVMNEYKFKXXXXXXXXXLYLVSIPELKTPAXTPK

SEQ ID NO: 26620 - protein, 35 aa, Artificial Sequence; identical to SEQ ID NO: 5512
  GFR-binding peptide
  MOD_RES (2), (4): Xaa is C or S

SEQ ID NO: 26621 - protein, 33 aa, Artificial Sequence
  GFR-binding peptide
  MOD_RES (31), (32): Xaa is C or S
SVAMGYHYKLYTVVGKDKYLISIPSLKTPVXXA

SEQ ID NO: 26622 - protein, 42 aa, Artificial Sequence; identical to SEQ ID NO: 5516
  GFR-binding peptide
  MOD_RES (2), (36), (37): Xaa is C or S
  MOD_RES (14), (15), (16), (17), (18): Xaa is A or G
  MOD_RES (19), (20), (21), (22): Xaa is A or G or is absent

SEQ ID NO: 26623 - protein, 36 aa, Artificial Sequence
  GFR-binding peptide
  MOD_RES (1), (3), (35), (36): Xaa is C or S
XGXGEVVMDEYQKYVVKENEDIYLMSIPSLETPVXX

SEQ ID NO: 26624 - protein, 33 aa, Artificial Sequence
  GFR-binding peptide
  MOD_RES (1), (33): Xaa is C or S
XAEVVMDEYKFKVVNNAADLYLISIPELRAPVX

SEQ ID NO: 26625 - protein, 32 aa, Artificial Sequence; identical to SEQ ID NO: 5517
  GFR-binding peptide
  MOD_RES (31), (32): Xaa is C or S

SEQ ID NO: 26626 - protein, 33 aa, Artificial Sequence
  GFR-binding peptide
  MOD_RES (1), (1): Xaa is C or S
  MOD_RES (12), (13), (14), (15), (16): Xaa is A or G
  MOD_RES (17), (18), (19), (20): Xaa is A or G or is absent
XSKVVMEYQKYXXXXXXXXXIYLISIPSLDQPV

SEQ ID NO: 26627 - protein, 43 aa, Artificial Sequence
  GFR-binding peptide
  MOD_RES (2), (4), (38), (39): Xaa is C or S
  MOD_RES (16), (17), (18), (19), (20): Xaa is A or G
  MOD_RES (21), (22), (23), (24): Xaa is A or G or is absent
RXGXGEVVMEEYKFKXXXXXXXXXLYLMSIPELETPVXXAKPI

SEQ ID NO: 26628 - protein, 38 aa, Artificial Sequence
  GFR-binding peptide
  MOD_RES (1), (33), (34): Xaa is C or S
XARVVMNEYQKYIVNSSDDIYLVSIPSLQTPAXXPKPV

SEQ ID NO: 26629 - protein, 32 aa, Artificial Sequence
  GFR-binding peptide
  MOD_RES (11), (12), (13), (14), (15): Xaa is A or G
  MOD_RES (16), (17), (18), (19): Xaa is A or G or is absent
RVVMNEYKFKXXXXXXXXXLYLVSIPELKTPA

SEQ ID NO: 26630 - protein, 39 aa, Artificial Sequence; identical to SEQ ID NO: 5522
  GFR-binding peptide
  MOD_RES (1), (3), (36), (37): Xaa is C or S

SEQ ID NO: 26631 - protein, 38 aa, Artificial Sequence
  GFR-binding peptide
  MOD_RES (2), (35), (36): Xaa is C or S
GXEAVSMGEEYKFKTPVGMDDLYLVSIPELKTPVXXAK

SEQ ID NO: 26632 - protein, 32 aa, Artificial Sequence
  GFR-binding peptide
  MOD_RES (11), (12), (13), (14), (15): Xaa is A or G
  MOD_RES (16), (17), (18), (19): Xaa is A or G or is absent
KVVMNEYKFKXXXXXXXXXLYLVSIPELKTPA

SEQ ID NO: 26633 - protein, 34 aa, Artificial Sequence
  GFR-binding peptide
  MOD_RES (1), (33), (34): Xaa is C or S
XESVAMGEYQKYYTVVGKDIYLISIPSLKTPVXX

SEQ ID NO: 26634 - protein, 31 aa, Artificial Sequence
  GFR-binding peptide
  MOD_RES (31), (31): Xaa is C or S
SRVIMEYKFKVKPKRGVLYLISIPELAQPVX

SEQ ID NO: 26635 - protein, 36 aa, Artificial Sequence
  GFR-binding peptide
  MOD_RES (1), (3), (34), (35): Xaa is C or S
XKXSRVIMEYKFKVKPKRGVLYLISIPELAQPVXXP

SEQ ID NO: 26636 - protein, 38 aa, Artificial Sequence
  GFR-binding peptide
  MOD_RES (2), (36), (37): Xaa is C or S
  MOD_RES (14), (15), (16), (17), (18): Xaa is A or G
  MOD_RES (19), (20), (21), (22): Xaa is A or G or is absent
GXARVVMNEYQKYXXXXXXXXXIYLVSIPSLQTPAXXP

SEQ ID NO: 26637 - protein, 42 aa, Artificial Sequence
  GFR-binding peptide
  MOD_RES (2), (36): Xaa is C or S
  MOD_RES (14), (15), (16), (17), (18): Xaa is A or G
  MOD_RES (19), (20), (21), (22): Xaa is A or G or is absent
GXSRVVMNEYKFKXXXXXXXXXLYLVSIPELKTPAXTPKTVH

SEQ ID NO: 26638 - protein, 31 aa, Artificial Sequence
  GFR-binding peptide
  MOD_RES (1), (1): Xaa is C or S
XSRVIMEYKFKVKPKRGVLYLISIPELAQPV

SEQ ID NO: 26639 - protein, 32 aa, Artificial Sequence; identical to SEQ ID NO: 5528
  GFR-binding peptide
  MOD_RES (31), (32): Xaa is C or S

SEQ ID NO: 26640 - protein, 33 aa, Artificial Sequence
  GFR-binding peptide
  MOD_RES (1), (32), (33): Xaa is C or S
XSRVIMEYKFKVKPKRGVLYLISIPELAQPVXX

SEQ ID NO: 26641 - protein, 37 aa, Artificial Sequence
  GFR-binding peptide
  MOD_RES (33), (34): Xaa is C or S
  MOD_RES (11), (12), (13), (14), (15): Xaa is A or G
  MOD_RES (16), (17), (18), (19): Xaa is A or G or is absent
SVAMGEYQKYXXXXXXXXXIYLISIPSLKTPVXXAKS

SEQ ID NO: 26642 - protein, 39 aa, Artificial Sequence
  GFR-binding peptide
  MOD_RES (33), (34): Xaa is C or S
  MOD_RES (11), (12), (13), (14), (15): Xaa is A or G
  MOD_RES (16), (17), (18), (19): Xaa is A or G or is absent
SVAMGRYKKLXXXXXXXXXFYLISIANLKTPVXXAKSAK

SEQ ID NO: 26643 - protein, 38 aa, Artificial Sequence
  GFR-binding peptide
  MOD_RES (33), (34): Xaa is C or S
  MOD_RES (11), (12), (13), (14), (15): Xaa is A or G
  MOD_RES (16), (17), (18), (19): Xaa is A or G or is absent
RVVMNEYKFKXXXXXXXXXLYLVSIPELKTPAXXPKPV

SEQ ID NO: 26644 - protein, 41 aa, Artificial Sequence
  GFR-binding peptide
  MOD_RES (2), (37), (38): Xaa is C or S
  MOD_RES (15), (16), (17), (18), (19): Xaa is A or G
  MOD_RES (20), (21), (22), (23): Xaa is A or G or is absent
GXEAVSMGEEYQKYXXXXXXXXXIYLVSIPSLKTPVXXAKG

SEQ ID NO: 26645 - protein, 32 aa, Artificial Sequence; identical to SEQ ID NO: 5533
  GFR-binding peptide
  MOD_RES (1), (32): Xaa is C or S

SEQ ID NO: 26646 - protein, 43 aa, Artificial Sequence
  GFR-binding peptide
  MOD_RES (2), (4), (37), (38): Xaa is C or S
  MOD_RES (15), (16), (17), (18), (19): Xaa is A or G
  MOD_RES (20), (21), (22), (23): Xaa is A or G or is absent
SXKXSKVIMEYKFKXXXXXXXXXLYLISIPELDQSVXXPSASA

SEQ ID NO: 26647 - protein, 41 aa, Artificial Sequence
  GFR-binding peptide
  MOD_RES (2), (4), (37), (38): Xaa is C or S
  MOD_RES (15), (16), (17), (18), (19): Xaa is A or G
  MOD_RES (20), (21), (22), (23): Xaa is A or G or is absent
SXKXSKVVMEYKFKXXXXXXXXXLYLISIPELDQPVXXPSA

SEQ ID NO: 26648 - protein, 38 aa, Artificial Sequence
  GFR-binding peptide
  MOD_RES (34), (35): Xaa is C or S
  MOD_RES (12), (13), (14), (15), (16): Xaa is A or G
  MOD_RES (17), (18), (19), (20): Xaa is A or G or is absent
SRVVMNEYKFKXXXXXXXXXLYLVSIPELKTPAXXPKP

SEQ ID NO: 26649 - protein, 35 aa, Artificial Sequence
  GFR-binding peptide
  MOD_RES (33), (34): Xaa is C or S
  MOD_RES (11), (12), (13), (14), (15): Xaa is A or G
  MOD_RES (16), (17), (18), (19): Xaa is A or G or is absent
SKVIMEYKFKXXXXXXXXXLYLISIPELDQSVXXP

SEQ ID NO: 26650 - protein, 35 aa, Artificial Sequence; identical to SEQ ID NO: 5540
  GFR-binding peptide
  MOD_RES (2), (2): Xaa is C or S
  MOD_RES (14), (15), (16), (17), (18): Xaa is A or G
  MOD_RES (19), (20), (21), (22): Xaa is A or G or is absent

SEQ ID NO: 26651 - protein, 39 aa, Artificial Sequence
  GFR-binding peptide
  MOD_RES (33), (34): Xaa is C or S
  MOD_RES (11), (12), (13), (14), (15): Xaa is A or G
  MOD_RES (16), (17), (18), (19): Xaa is A or G or is absent
SVAMGEYKFKXXXXXXXXXLYLISIPELKTPVXXAKSAK

SEQ ID NO: 26652 - protein, 35 aa, Artificial Sequence; identical to SEQ ID NO: 5542
  GFR-binding peptide
  MOD_RES (31), (32): Xaa is C or S

SEQ ID NO: 26653 - protein, 39 aa, Artificial Sequence
  GFR-binding peptide
  MOD_RES (2), (4), (36), (37): Xaa is C or S
RXGXGEVVMDEYKFKVVKENEDLYLMSIPELETPVXXAK

SEQ ID NO: 26654 - protein, 43 aa, Artificial Sequence
  GFR-binding peptide
  MOD_RES (2), (4), (38), (39): Xaa is C or S
  MOD_RES (16), (17), (18), (19), (20): Xaa is A or G
  MOD_RES (21), (22), (23), (24): Xaa is A or G or is absent
HXGXARVVMNEYQKYXXXXXXXXXIYLVSIPSLQTPAXXPKPV

SEQ ID NO: 26655 - protein, 34 aa, Artificial Sequence
  GFR-binding peptide
  MOD_RES (1), (3), (34): Xaa is C or S
XKXSKVIMEYQKYIKPTKGIIYLISIPSLDQSVX

SEQ ID NO: 26656 - protein, 34 aa, Artificial Sequence
  GFR-binding peptide
  MOD_RES (1), (3): Xaa is C or S
XGXAKVVMNEYKFKIVNNSSDLYLVSIPELKTPA

SEQ ID NO: 26657 - protein, 40 aa, Artificial Sequence; identical to SEQ ID NO: 5544
  GFR-binding peptide
  MOD_RES (1), (3), (37), (38): Xaa is C or S
  MOD_RES (15), (16), (17), (18), (19): Xaa is A or G
  MOD_RES (20), (21), (22), (23): Xaa is A or G or is absent

SEQ ID NO: 26658 - protein, 35 aa, Artificial Sequence; identical to SEQ ID NO: 5545
  GFR-binding peptide
  MOD_RES (33), (34): Xaa is C or S
  MOD_RES (11), (12), (13), (14), (15): Xaa is A or G
  MOD_RES (16), (17), (18), (19): Xaa is A or G or is absent

SEQ ID NO: 26659 - protein, 38 aa, Artificial Sequence
  GFR-binding peptide
  MOD_RES (33), (34): Xaa is C or S
  MOD_RES (11), (12), (13), (14), (15): Xaa is A or G
  MOD_RES (16), (17), (18), (19): Xaa is A or G or is absent
EVVMDEYKFKXXXXXXXXXLYLMSIPELETPVXXAKPI

SEQ ID NO: 26660 - protein, 39 aa, Artificial Sequence; identical to SEQ ID NO: 5549
  GFR-binding peptide
  MOD_RES (33), (34): Xaa is C or S
  MOD_RES (11), (12), (13), (14), (15): Xaa is A or G
  MOD_RES (16), (17), (18), (19): Xaa is A or G or is absent

SEQ ID NO: 26661 - protein, 41 aa, Artificial Sequence
  GFR-binding peptide
  MOD_RES (2), (4), (36), (37): Xaa is C or S
RXGXGEVVMEEYQKYVVKDYEDIYLMSIPSLETPVXXAKPI

SEQ ID NO: 26662 - protein, 40 aa, Artificial Sequence
  GFR-binding peptide
  MOD_RES (2), (35), (36): Xaa is C or S
  MOD_RES (13), (14), (15), (16), (17): Xaa is A or G
  MOD_RES (18), (19), (20), (21): Xaa is A or G or is absent
KXSKVVMEYKFKXXXXXXXXXLYLISIPELDQPVXXPSAS

SEQ ID NO: 26663 - protein, 34 aa, Artificial Sequence; identical to SEQ ID NO: 5551
  GFR-binding peptide
  MOD_RES (2), (4): Xaa is C or S

SEQ ID NO: 26664 - protein, 41 aa, Artificial Sequence; identical to SEQ ID NO: 5552
  GFR-binding peptide
  MOD_RES (2), (4), (38): Xaa is C or S
  MOD_RES (16), (17), (18), (19), (20): Xaa is A or G
  MOD_RES (21), (22), (23), (24): Xaa is A or G or is absent

SEQ ID NO: 26665 - protein, 36 aa, Artificial Sequence
  GFR-binding peptide
  MOD_RES (32), (33): Xaa is C or S
AEVVMDRYKKLVVNNAADFYLISIANLRAPVXXSAP

SEQ ID NO: 26666 - protein, 37 aa, Artificial Sequence
  GFR-binding peptide
  MOD_RES (2), (4): Xaa is C or S
  MOD_RES (16), (17), (18), (19), (20): Xaa is A or G
  MOD_RES (21), (22), (23), (24): Xaa is A or G or is absent
RXGXAEVVMDRYKKLXXXXXXXXXFYLISIANLRAPV

SEQ ID NO: 26667 - protein, 40 aa, Artificial Sequence
  GFR-binding peptide
  MOD_RES (2), (4), (36), (37): Xaa is C or S
RXGXGEVVMDEYQKYVVKENEDIYLMSIPSLETPVXXAKP

SEQ ID NO: 26668 - protein, 32 aa, Artificial Sequence
  GFR-binding peptide
  MOD_RES (32), (32): Xaa is C or S
AEVVMDRYKKLVVNNAADFYLISIANLRAPVX

SEQ ID NO: 26669 - protein, 37 aa, Artificial Sequence; identical to SEQ ID NO: 5554
  GFR-binding peptide
  MOD_RES (1), (3), (35), (36): Xaa is C or S

SEQ ID NO: 26670 - protein, 33 aa, Artificial Sequence
  GFR-binding peptide
  MOD_RES (12), (13), (14), (15), (16): Xaa is A or G
  MOD_RES (17), (18), (19), (20): Xaa is A or G or is absent
ARVVMNEYQKYXXXXXXXXXIYLVSIPSLQTPA

SEQ ID NO: 26671 - protein, 36 aa, Artificial Sequence
  GFR-binding peptide
  MOD_RES (2), (33), (34): Xaa is C or S
KXSKVIMEYKFKIKPTKGILYLISIPELDQSVXXPS

SEQ ID NO: 26672 - protein, 37 aa, Artificial Sequence
  GFR-binding peptide
  MOD_RES (1), (33), (34): Xaa is C or S
XAEVVMDEYKFKVVNNAADLYLISIPELRAPVXXSAP

SEQ ID NO: 26673 - protein, 38 aa, Artificial Sequence
  GFR-binding peptide
  MOD_RES (1), (33), (34): Xaa is C or S
XESVAMGYHYKLYTVVGKDKYLISIPSLKTPVXXAKSA

SEQ ID NO: 26674 - protein, 35 aa, Artificial Sequence; identical to SEQ ID NO: 5557
  GFR-binding peptide
  MOD_RES (1), (35): Xaa is C or S
  MOD_RES (13), (14), (15), (16), (17): Xaa is A or G
  MOD_RES (18), (19), (20), (21): Xaa is A or G or is absent

SEQ ID NO: 26675 - protein, 37 aa, Artificial Sequence; identical to SEQ ID NO: 5558
  GFR-binding peptide
  MOD_RES (1), (3): Xaa is C or S
  MOD_RES (16), (17), (18), (19), (20): Xaa is A or G
  MOD_RES (21), (22), (23), (24): Xaa is A or G or is absent

SEQ ID NO: 26676 - protein, 42 aa, Artificial Sequence; identical to SEQ ID NO: 5559
  GFR-binding peptide
  MOD_RES (2), (4), (39), (40): Xaa is C or S
  MOD_RES (17), (18), (19), (20), (21): Xaa is A or G
  MOD_RES (22), (23), (24), (25): Xaa is A or G or is absent

SEQ ID NO: 26677 - protein, 40 aa, Artificial Sequence; identical to SEQ ID NO: 5561
  GFR-binding peptide
  MOD_RES (1), (3), (35), (36): Xaa is C or S

SEQ ID NO: 26678 - protein, 36 aa, Artificial Sequence; identical to SEQ ID NO: 5563
  GFR-binding peptide
  MOD_RES (2), (36): Xaa is C or S
  MOD_RES (14), (15), (16), (17), (18): Xaa is A or G
  MOD_RES (19), (20), (21), (22): Xaa is A or G or is absent

SEQ ID NO: 26679 - protein, 33 aa, Artificial Sequence
  GFR-binding peptide
  MOD_RES (32), (33): Xaa is C or S
AEVVMDEYQKYVVNNAADIYLISIPSLRAPVXX

SEQ ID NO: 26680 - protein, 38 aa, Artificial Sequence; identical to SEQ ID NO: 5566
  GFR-binding peptide
  MOD_RES (1), (36), (37): Xaa is C or S
  MOD_RES (14), (15), (16), (17), (18): Xaa is A or G
  MOD_RES (19), (20), (21), (22): Xaa is A or G or is absent

SEQ ID NO: 26681 - protein, 33 aa, Artificial Sequence
  GFR-binding peptide
  MOD_RES (1), (1): Xaa is C or S
XEAVSMGEEYQKYTPVGMDDIYLVSIPSLKTPV

SEQ ID NO: 26682 - protein, 39 aa, Artificial Sequence; identical to SEQ ID NO: 5569
  GFR-binding peptide
  MOD_RES (1), (3), (37), (38): Xaa is C or S
  MOD_RES (15), (16), (17), (18), (19): Xaa is A or G
  MOD_RES (20), (21), (22), (23): Xaa is A or G or is absent

SEQ ID NO: 26683 - protein, 36 aa, Artificial Sequence
  GFR-binding peptide
  MOD_RES (1), (36): Xaa is C or S
  MOD_RES (14), (15), (16), (17), (18): Xaa is A or G
  MOD_RES (19), (20), (21), (22): Xaa is A or G or is absent
XEAVSMGEEYQKYXXXXXXXXXIYLVSIPSLKTPVX

SEQ ID NO: 26684 - protein, 33 aa, Artificial Sequence; identical to SEQ ID NO: 5571
  GFR-binding peptide
  MOD_RES (12), (13), (14), (15), (16): Xaa is A or G
  MOD_RES (17), (18), (19), (20): Xaa is A or G or is absent

SEQ ID NO: 26685 - protein, 36 aa, Artificial Sequence; identical to SEQ ID NO: 5573
  GFR-binding peptide
  MOD_RES (34), (35): Xaa is C or S
  MOD_RES (12), (13), (14), (15), (16): Xaa is A or G
  MOD_RES (17), (18), (19), (20): Xaa is A or G or is absent

SEQ ID NO: 26686 - protein, 36 aa, Artificial Sequence; identical to SEQ ID NO: 5574
  GFR-binding peptide
  MOD_RES (35), (36): Xaa is C or S
  MOD_RES (13), (14), (15), (16), (17): Xaa is A or G
  MOD_RES (18), (19), (20), (21): Xaa is A or G or is absent

SEQ ID NO: 26687 - protein, 42 aa, Artificial Sequence; identical to SEQ ID NO: 5575
  GFR-binding peptide
  MOD_RES (1), (3), (37), (38): Xaa is C or S
  MOD_RES (15), (16), (17), (18), (19): Xaa is A or G
  MOD_RES (20), (21), (22), (23): Xaa is A or G or is absent

SEQ ID NO: 26688 - protein, 33 aa, Artificial Sequence
  GFR-binding peptide
  MOD_RES (12), (13), (14), (15), (16): Xaa is A or G
  MOD_RES (17), (18), (19), (20): Xaa is A or G or is absent
ARVVMNEYKFKXXXXXXXXXLYLVSIPELQTPA

SEQ ID NO: 26689 - protein, 34 aa, Artificial Sequence; identical to SEQ ID NO: 5577
  GFR-binding peptide
  MOD_RES (33), (34): Xaa is C or S
  MOD_RES (11), (12), (13), (14), (15): Xaa is A or G
  MOD_RES (16), (17), (18), (19): Xaa is A or G or is absent

SEQ ID NO: 26690 - protein, 38 aa, Artificial Sequence; identical to SEQ ID NO: 5578
  GFR-binding peptide
  MOD_RES (1), (3), (37), (38): Xaa is C or S
  MOD_RES (15), (16), (17), (18), (19): Xaa is A or G
  MOD_RES (20), (21), (22), (23): Xaa is A or G or is absent

SEQ ID NO: 26691 - protein, 34 aa, Artificial Sequence; identical to SEQ ID NO: 5579
  GFR-binding peptide
  MOD_RES (1), (32), (33): Xaa is C or S

SEQ ID NO: 26692 - protein, 40 aa, Artificial Sequence; identical to SEQ ID NO: 5580
  GFR-binding peptide
  MOD_RES (2), (35), (36): Xaa is C or S
  MOD_RES (13), (14), (15), (16), (17): Xaa is A or G
  MOD_RES (18), (19), (20), (21): Xaa is A or G or is absent

SEQ ID NO: 26693 - protein, 39 aa, Artificial Sequence; identical to SEQ ID NO: 5581
  GFR-binding peptide
  MOD_RES (2), (4), (38), (39): Xaa is C or S
  MOD_RES (16), (17), (18), (19), (20): Xaa is A or G
  MOD_RES (21), (22), (23), (24): Xaa is A or G or is absent

SEQ ID NO: 26694 - protein, 35 aa, Artificial Sequence
  GFR-binding peptide
  MOD_RES (32), (33): Xaa is C or S
SRVVMNEYQKYIVNSSDDIYLVSIPSLKTPAXXPK

SEQ ID NO: 26695 - protein, 35 aa, Artificial Sequence
  GFR-binding peptide
  MOD_RES (33), (34): Xaa is C or S
EAVSMGEEYQKYTPVGMDDIYLVSIPSLKTPVXXA

SEQ ID NO: 26696 - protein, 37 aa, Artificial Sequence
  GFR-binding peptide
  MOD_RES (1), (3), (35), (36): Xaa is C or S
XGXGEVVMEEYKFKVVKDYEDLYLMSIPELETPVXXA

SEQ ID NO: 26697 - protein, 37 aa, Artificial Sequence; identical to SEQ ID NO: 5586
  GFR-binding peptide
  MOD_RES (2), (35), (36): Xaa is C or S
  MOD_RES (13), (14), (15), (16), (17): Xaa is A or G
  MOD_RES (18), (19), (20), (21): Xaa is A or G or is absent

SEQ ID NO: 26698 - protein, 37 aa, Artificial Sequence; identical to SEQ ID NO: 5589
  GFR-binding peptide
  MOD_RES (1), (3), (36), (37): Xaa is C or S
  MOD_RES (14), (15), (16), (17), (18): Xaa is A or G
  MOD_RES (19), (20), (21), (22): Xaa is A or G or is absent

SEQ ID NO: 26699 - protein, 33 aa, Artificial Sequence; identical to SEQ ID NO: 5590
  GFR-binding peptide
  MOD_RES (1), (33): Xaa is C or S

SEQ ID NO: 26700 - protein, 41 aa, Artificial Sequence; identical to SEQ ID NO: 5591
  GFR-binding peptide
  MOD_RES (1), (3), (36), (37): Xaa is C or S
  MOD_RES (14), (15), (16), (17), (18): Xaa is A or G
  MOD_RES (19), (20), (21), (22): Xaa is A or G or is absent

SEQ ID NO: 26701 - protein, 39 aa, Artificial Sequence; identical to SEQ ID NO: 5593
  GFR-binding peptide
  MOD_RES (1), (3), (37), (38): Xaa is C or S
  MOD_RES (15), (16), (17), (18), (19): Xaa is A or G
  MOD_RES (20), (21), (22), (23): Xaa is A or G or is absent

SEQ ID NO: 26702 - protein, 41 aa, Artificial Sequence
  GFR-binding peptide
  MOD_RES (1), (3), (36), (37): Xaa is C or S
XGXEAVSMGEEYKFKTPVGMDDLYLVSIPELKTPVXXAKGV

SEQ ID NO: 26703 - protein, 39 aa, Artificial Sequence
  GFR-binding peptide
  MOD_RES (1), (35), (36): Xaa is C or S
  MOD_RES (13), (14), (15), (16), (17): Xaa is A or G
  MOD_RES (18), (19), (20), (21): Xaa is A or G or is absent
XSRVVMNEYQKYXXXXXXXXXIYLVSIPSLKTPAXXPKP

SEQ ID NO: 26704 - protein, 42 aa, Artificial Sequence
  GFR-binding peptide
  MOD_RES (2), (4), (36): Xaa is C or S
HXGXSRVVMNEYKFKIVNSSDDLYLVSIPELKTPAXTPKTVH

SEQ ID NO: 26705 - protein, 42 aa, Artificial Sequence
  GFR-binding peptide
  MOD_RES (2), (4), (36): Xaa is C or S
HXGXSRVVMNEYQKYIVNSSDDIYLVSIPSLKTPAXTPKTVH

SEQ ID NO: 26706 - protein, 30 aa, Artificial Sequence
  GFR-binding peptide
EVVMDEYQKYVVNNAADIYLISIPSLRAPV

SEQ ID NO: 26707 - protein, 40 aa, Artificial Sequence
  GFR-binding peptide
  MOD_RES (1), (3), (37), (38): Xaa is C or S
  MOD_RES (15), (16), (17), (18), (19): Xaa is A or G
  MOD_RES (20), (21), (22), (23): Xaa is A or G or is absent
XGXARVVMNEYQKYXXXXXXXXXIYLVSIPSLQTPAXXPK

SEQ ID NO: 26708 - protein, 37 aa, Artificial Sequence; identical to SEQ ID NO: 5596
  GFR-binding peptide
  MOD_RES (1), (34), (35): Xaa is C or S
  MOD_RES (12), (13), (14), (15), (16): Xaa is A or G
  MOD_RES (17), (18), (19), (20): Xaa is A or G or is absent

SEQ ID NO: 26709 - protein, 41 aa, Artificial Sequence; identical to SEQ ID NO: 5597
  GFR-binding peptide
  MOD_RES (1), (3), (38), (39): Xaa is C or S
  MOD_RES (16), (17), (18), (19), (20): Xaa is A or G
  MOD_RES (21), (22), (23), (24): Xaa is A or G or is absent

SEQ ID NO: 26710 - protein, 33 aa, Artificial Sequence; identical to SEQ ID NO: 5599
  GFR-binding peptide
  MOD_RES (33), (33): Xaa is C or S
  MOD_RES (11), (12), (13), (14), (15): Xaa is A or G
  MOD_RES (16), (17), (18), (19): Xaa is A or G or is absent

SEQ ID NO: 26711 - protein, 39 aa, Artificial Sequence; identical to SEQ ID NO: 5600
  GFR-binding peptide
  MOD_RES (2), (4), (36), (37): Xaa is C or S

SEQ ID NO: 26712 - protein, 40 aa, Artificial Sequence
  GFR-binding peptide
  MOD_RES (2), (4), (35), (36): Xaa is C or S
SXKXSKVIMEYQKYIKPTKGIIYLISIPSLDQSVXXPSAS

SEQ ID NO: 26713 - protein, 43 aa, Artificial Sequence; identical to SEQ ID NO: 5602
  GFR-binding peptide
  MOD_RES (1), (3), (37), (38): Xaa is C or S
  MOD_RES (15), (16), (17), (18), (19): Xaa is A or G
  MOD_RES (20), (21), (22), (23): Xaa is A or G or is absent

SEQ ID NO: 26714 - protein, 42 aa, Artificial Sequence
  GFR-binding peptide
  MOD_RES (2), (36), (37): Xaa is C or S
  MOD_RES (14), (15), (16), (17), (18): Xaa is A or G
  MOD_RES (19), (20), (21), (22): Xaa is A or G or is absent
GXSRVVMNEYKFKXXXXXXXXXLYLVSIPELKTPAXXPKPVY

SEQ ID NO: 26715 - protein, 38 aa, Artificial Sequence
  GFR-binding peptide
  MOD_RES (1), (33): Xaa is C or S
XSRVVMNEYQKYIVNSSDDIYLVSIPSLKTPAXTPKTV

SEQ ID NO: 26716 - protein, 30 aa, Artificial Sequence
  GFR-binding peptide
RVVMNEYQKYIVNSSDDIYLVSIPSLKTPA

SEQ ID NO: 26717 - protein, 36 aa, Artificial Sequence; identical to SEQ ID NO: 5605
  GFR-binding peptide
  MOD_RES (1), (3), (36): Xaa is C or S
  MOD_RES (14), (15), (16), (17), (18): Xaa is A or G
  MOD_RES (19), (20), (21), (22): Xaa is A or G or is absent

SEQ ID NO: 26718 - protein, 39 aa, Artificial Sequence
  GFR-binding peptide
  MOD_RES (2), (4), (35), (36): Xaa is C or S
SXKXSKVVMEYKFKVKPTRGVLYLISIPELDQPVXXPSA

SEQ ID NO: 26719 - protein, 38 aa, Artificial Sequence; identical to SEQ ID NO: 5607
  GFR-binding peptide
  MOD_RES (2), (33), (34): Xaa is C or S

SEQ ID NO: 26720 - protein, 41 aa, Artificial Sequence
  GFR-binding peptide
  MOD_RES (1), (35), (36): Xaa is C or S
  MOD_RES (13), (14), (15), (16), (17): Xaa is A or G
  MOD_RES (18), (19), (20), (21): Xaa is A or G or is absent
XAEVVMDRYKKLXXXXXXXXXFYLISIANLRAPVXXSAPAA

SEQ ID NO: 26721 - protein, 38 aa, Artificial Sequence
  GFR-binding peptide
  MOD_RES (33), (34): Xaa is C or S
EAVSMGEEYKFKTPVGMDDLYLVSIPELKTPVXXAKGV

SEQ ID NO: 26722 - protein, 40 aa, Artificial Sequence
  GFR-binding peptide
  MOD_RES (2), (34), (35): Xaa is C or S
GXSRVVMNEYKFKIVNSSDDLYLVSIPELKTPAXXPKPVY

SEQ ID NO: 26723 - protein, 36 aa, Artificial Sequence; identical to SEQ ID NO: 5609
  GFR-binding peptide
  MOD_RES (2), (4), (36): Xaa is C or S

SEQ ID NO: 26724 - protein, 31 aa, Artificial Sequence
  GFR-binding peptide
AEVVMDEYKFKVVNNAADLYLISIPELRAPV

SEQ ID NO: 26725 - protein, 37 aa, Artificial Sequence; identical to SEQ ID NO: 5610
  GFR-binding peptide
  MOD_RES (2), (33), (34): Xaa is C or S

SEQ ID NO: 26726 - protein, 41 aa, Artificial Sequence; identical to SEQ ID NO: 5612
  GFR-binding peptide
  MOD_RES (1), (35), (36): Xaa is C or S
  MOD_RES (13), (14), (15), (16), (17): Xaa is A or G
  MOD_RES (18), (19), (20), (21): Xaa is A or G or is absent

SEQ ID NO: 26727 - protein, 34 aa, Artificial Sequence; identical to SEQ ID NO: 5613
  GFR-binding peptide
  MOD_RES (31), (32): Xaa is C or S

SEQ ID NO: 26728 - protein, 37 aa, Artificial Sequence; identical to SEQ ID NO: 5614
  GFR-binding peptide
  MOD_RES (31), (32): Xaa is C or S

SEQ ID NO: 26729 - protein, 34 aa, Artificial Sequence
  GFR-binding peptide
  MOD_RES (1), (3): Xaa is C or S
XGXAKVVMNEYQKYIVNNSSDIYLVSIPSLKTPA

SEQ ID NO: 26730 - protein, 35 aa, Artificial Sequence
  GFR-binding peptide
  MOD_RES (1), (35): Xaa is C or S
  MOD_RES (13), (14), (15), (16), (17): Xaa is A or G
  MOD_RES (18), (19), (20), (21): Xaa is A or G or is absent
XAKVVMNEYQKYXXXXXXXXXIYLVSIPSLKTPAX

SEQ ID NO: 26731 - protein, 44 aa, Artificial Sequence
  GFR-binding peptide
  MOD_RES (2), (4), (38), (39): Xaa is C or S
  MOD_RES (16), (17), (18), (19), (20): Xaa is A or G
  MOD_RES (21), (22), (23), (24): Xaa is A or G or is absent
HXGXSRVVMNEYKFKXXXXXXXXXLYLVSIPELKTPAXXPKPVY

SEQ ID NO: 26732 - protein, 37 aa, Artificial Sequence; identical to SEQ ID NO: 5618
  GFR-binding peptide
  MOD_RES (33), (34): Xaa is C or S
  MOD_RES (11), (12), (13), (14), (15): Xaa is A or G
  MOD_RES (16), (17), (18), (19): Xaa is A or G or is absent

SEQ ID NO: 26733 - protein, 36 aa, Artificial Sequence
  GFR-binding peptide
  MOD_RES (2), (4): Xaa is C or S
  MOD_RES (15), (16), (17), (18), (19): Xaa is A or G
  MOD_RES (20), (21), (22), (23): Xaa is A or G or is absent
SXKXSKVVMEYKFKXXXXXXXXXLYLISIPELDQPV

SEQ ID NO: 26734 - protein, 32 aa, Artificial Sequence
  GFR-binding peptide
  MOD_RES (11), (12), (13), (14), (15): Xaa is A or G
  MOD_RES (16), (17), (18), (19): Xaa is A or G or is absent
SKVVMEYQKYXXXXXXXXXIYLISIPSLDQPV

SEQ ID NO: 26735 - protein, 41 aa, Artificial Sequence; identical to SEQ ID NO: 5621
  GFR-binding peptide
  MOD_RES (2), (35), (36): Xaa is C or S
  MOD_RES (13), (14), (15), (16), (17): Xaa is A or G
  MOD_RES (18), (19), (20), (21): Xaa is A or G or is absent

SEQ ID NO: 26736 - protein, 33 aa, Artificial Sequence
  GFR-binding peptide
  MOD_RES (2), (2): Xaa is C or S
GXGEVVMDEYQKYVVKENEDIYLMSIPSLETPV

SEQ ID NO: 26737 - protein, 32 aa, Artificial Sequence
  GFR-binding peptide
  MOD_RES (11), (12), (13), (14), (15): Xaa is A or G
  MOD_RES (16), (17), (18), (19): Xaa is A or G or is absent
SVAMGRYKKLXXXXXXXXXFYLISIANLKTPV

SEQ ID NO: 26738 - protein, 34 aa, Artificial Sequence
  GFR-binding peptide
  MOD_RES (1), (33), (34): Xaa is C or S
XGEVVMDEYKFKVVKENEDLYLMSIPELETPVXX

SEQ ID NO: 26739 - protein, 36 aa, Artificial Sequence
  GFR-binding peptide
  MOD_RES (1), (32), (33): Xaa is C or S
XSRVIMEYKFKVKPKRGVLYLISIPELAQPVXXPAA

SEQ ID NO: 26740 - protein, 34 aa, Artificial Sequence
  GFR-binding peptide
  MOD_RES (31), (32): Xaa is C or S
RVVMNEYQKYIVNSSDDIYLVSIPSLQTPAXXPK

SEQ ID NO: 26741 - protein, 34 aa, Artificial Sequence
  GFR-binding peptide
  MOD_RES (33), (34): Xaa is C or S
  MOD_RES (11), (12), (13), (14), (15): Xaa is A or G
  MOD_RES (16), (17), (18), (19): Xaa is A or G or is absent
EVVMDEYKFKXXXXXXXXXLYLISIPELRAPVXX

SEQ ID NO: 26742 - protein, 36 aa, Artificial Sequence
  GFR-binding peptide
  MOD_RES (1), (33), (34): Xaa is C or S
XGEVVMEEYQKYVVKDYEDIYLMSIPSLETPVXXAK

SEQ ID NO: 26743 - protein, 41 aa, Artificial Sequence; identical to SEQ ID NO: 5622
  GFR-binding peptide
  MOD_RES (1), (3), (36), (37): Xaa is C or S
  MOD_RES (14), (15), (16), (17), (18): Xaa is A or G
  MOD_RES (19), (20), (21), (22): Xaa is A or G or is absent

SEQ ID NO: 26744 - protein, 39 aa, Artificial Sequence
  GFR-binding peptide
  MOD_RES (1), (3), (37), (38): Xaa is C or S
  MOD_RES (15), (16), (17), (18), (19): Xaa is A or G
  MOD_RES (20), (21), (22), (23): Xaa is A or G or is absent
XGXESVAMGYHYKLXXXXXXXXXKYLISIPSLKTPVXXA

SEQ ID NO: 26745 - protein, 33 aa, Artificial Sequence
  GFR-binding peptide
  MOD_RES (33), (33): Xaa is C or S
  MOD_RES (11), (12), (13), (14), (15): Xaa is A or G
  MOD_RES (16), (17), (18), (19): Xaa is A or G or is absent
SVAMGRYKKLXXXXXXXXXFYLISIANLKTPVX

SEQ ID NO: 26746 - protein, 40 aa, Artificial Sequence; identical to SEQ ID NO: 5627
  GFR-binding peptide
  MOD_RES (2), (4), (38), (39): Xaa is C or S
  MOD_RES (16), (17), (18), (19), (20): Xaa is A or G
  MOD_RES (21), (22), (23), (24): Xaa is A or G or is absent

SEQ ID NO: 26747 - protein, 38 aa, Artificial Sequence
  GFR-binding peptide
  MOD_RES (1), (35), (36): Xaa is C or S
  MOD_RES (13), (14), (15), (16), (17): Xaa is A or G
  MOD_RES (18), (19), (20), (21): Xaa is A or G or is absent
XESVAMGEYKFKXXXXXXXXXLYLISIPELKTPVXXAK

SEQ ID NO: 26748 - protein, 34 aa, Artificial Sequence
  GFR-binding peptide
  MOD_RES (33), (34): Xaa is C or S
  MOD_RES (11), (12), (13), (14), (15): Xaa is A or G
  MOD_RES (16), (17), (18), (19): Xaa is A or G or is absent
KVVMNEYKFKXXXXXXXXXLYLVSIPELKTPAXX

SEQ ID NO: 26749 - protein, 41 aa, Artificial Sequence; identical to SEQ ID NO: 5629
  GFR-binding peptide
  MOD_RES (2), (4), (35), (36): Xaa is C or S

SEQ ID NO: 26750 - protein, 35 aa, Artificial Sequence; identical to SEQ ID NO: 5630
  GFR-binding peptide
  MOD_RES (33), (34): Xaa is C or S
  MOD_RES (11), (12), (13), (14), (15): Xaa is A or G
  MOD_RES (16), (17), (18), (19): Xaa is A or G or is absent

SEQ ID NO: 26751 - protein, 38 aa, Artificial Sequence
  GFR-binding peptide
  MOD_RES (1), (32), (33): Xaa is C or S
XSRVIMEYKFKVKPKRGVLYLISIPELAQPVXXPAASA

SEQ ID NO: 26752 - protein, 36 aa, Artificial Sequence
  GFR-binding peptide
  MOD_RES (1), (3): Xaa is C or S
  MOD_RES (15), (16), (17), (18), (19): Xaa is A or G
  MOD_RES (20), (21), (22), (23): Xaa is A or G or is absent
XGXSRVVMNEYQKYXXXXXXXXXIYLVSIPSLKTPA

SEQ ID NO: 26753 - protein, 39 aa, Artificial Sequence; identical to SEQ ID NO: 5632
  GFR-binding peptide
  MOD_RES (2), (4), (35), (36): Xaa is C or S

SEQ ID NO: 26754 - protein, 36 aa, Artificial Sequence
  GFR-binding peptide
  MOD_RES (2), (4), (36): Xaa is C or S
RXGXGEVVMDEYKFKVVKENEDLYLMSIPELETPVX

SEQ ID NO: 26755 - protein, 34 aa, Artificial Sequence
  GFR-binding peptide
  MOD_RES (32), (33): Xaa is C or S
AKVVMNEYKFKIVNNSSDLYLVSIPELKTPAXXA

SEQ ID NO: 26756 - protein, 34 aa, Artificial Sequence; identical to SEQ ID NO: 5636
  GFR-binding peptide
  MOD_RES (1), (1): Xaa is C or S
  MOD_RES (13), (14), (15), (16), (17): Xaa is A or G
  MOD_RES (18), (19), (20), (21): Xaa is A or G or is absent

SEQ ID NO: 26757 - protein, 40 aa, Artificial Sequence
  GFR-binding peptide
  MOD_RES (2), (4), (38), (39): Xaa is C or S
  MOD_RES (16), (17), (18), (19), (20): Xaa is A or G
  MOD_RES (21), (22), (23), (24): Xaa is A or G or is absent
RXGXGEVVMDEYQKYXXXXXXXXXIYLMSIPSLETPVXXA

SEQ ID NO: 26758 - protein, 36 aa, Artificial Sequence
  GFR-binding peptide
  MOD_RES (1), (3): Xaa is C or S
  MOD_RES (15), (16), (17), (18), (19): Xaa is A or G
  MOD_RES (20), (21), (22), (23): Xaa is A or G or is absent
XGXAEVVMDEYQKYXXXXXXXXXIYLISIPSLRAPV

SEQ ID NO: 26759 - protein, 37 aa, Artificial Sequence; identical to SEQ ID NO: 5638
  GFR-binding peptide
  MOD_RES (33), (34): Xaa is C or S
  MOD_RES (11), (12), (13), (14), (15): Xaa is A or G
  MOD_RES (16), (17), (18), (19): Xaa is A or G or is absent

SEQ ID NO: 26760 - protein, 40 aa, Artificial Sequence
  GFR-binding peptide
  MOD_RES (1), (3), (34), (35): Xaa is C or S
XKXSKVIMEYKFKIKPTKGILYLISIPELDQSVXXPSASA

SEQ ID NO: 26761 - protein, 36 aa, Artificial Sequence
  GFR-binding peptide
  MOD_RES (33), (34): Xaa is C or S
  MOD_RES (11), (12), (13), (14), (15): Xaa is A or G
  MOD_RES (16), (17), (18), (19): Xaa is A or G or is absent
SVAMGEYKFKXXXXXXXXXLYLISIPELKTPVXXAK

SEQ ID NO: 26762 - protein, 42 aa, Artificial Sequence
  GFR-binding peptide
  MOD_RES (2), (4), (38): Xaa is C or S
  MOD_RES (16), (17), (18), (19), (20): Xaa is A or G
  MOD_RES (21), (22), (23), (24): Xaa is A or G or is absent
HXGXSRVVMNEYKFKXXXXXXXXXLYLVSIPELKTPAXTPKT

SEQ ID NO: 26763 - protein, 41 aa, Artificial Sequence
  GFR-binding peptide
  MOD_RES (1), (3), (38), (39): Xaa is C or S
  MOD_RES (16), (17), (18), (19), (20): Xaa is A or G
  MOD_RES (21), (22), (23), (24): Xaa is A or G or is absent
XGXEAVSMGEEYKFKXXXXXXXXXLYLVSIPELKTPVXXAK

SEQ ID NO: 26764 - protein, 37 aa, Artificial Sequence
  GFR-binding peptide
  MOD_RES (1), (3), (37): Xaa is C or S
  MOD_RES (15), (16), (17), (18), (19): Xaa is A or G
  MOD_RES (20), (21), (22), (23): Xaa is A or G or is absent
XGXAEVVMDYHYKLXXXXXXXXXKYLISIPSLRAPVX

SEQ ID NO: 26765 - protein, 41 aa, Artificial Sequence
  GFR-binding peptide
  MOD_RES (1), (3), (35), (36): Xaa is C or S
XGXAKVVMNEYQKYIVNNSSDIYLVSIPSLKTPAXXAKPVA

SEQ ID NO: 26766 - protein, 40 aa, Artificial Sequence; identical to SEQ ID NO: 5640
  GFR-binding peptide
  MOD_RES (1), (3), (35), (36): Xaa is C or S

SEQ ID NO: 26767 - protein, 38 aa, Artificial Sequence
  GFR-binding peptide
  MOD_RES (1), (35), (36): Xaa is C or S
  MOD_RES (13), (14), (15), (16), (17): Xaa is A or G
  MOD_RES (18), (19), (20), (21): Xaa is A or G or is absent
XSRVVMNEYKFKXXXXXXXXXLYLVSIPELKTPAXXPK

SEQ ID NO: 26768 - protein, 42 aa, Artificial Sequence
  GFR-binding peptide
  MOD_RES (1), (3), (37), (38): Xaa is C or S
  MOD_RES (15), (16), (17), (18), (19): Xaa is A or G
  MOD_RES (20), (21), (22), (23): Xaa is A or G or is absent
XGXESVAMGYHYKLXXXXXXXXXKYLISIPSLKTPVXXAKSA

SEQ ID NO: 26769 - protein, 35 aa, Artificial Sequence
  GFR-binding peptide
  MOD_RES (2), (34): Xaa is C or S
GXSRVVMNEYKFKIVNSSDDLYLVSIPELKTPAXT

SEQ ID NO: 26770 - protein, 40 aa, Artificial Sequence
  GFR-binding peptide
  MOD_RES (2), (36), (37): Xaa is C or S
  MOD_RES (14), (15), (16), (17), (18): Xaa is A or G
  MOD_RES (19), (20), (21), (22): Xaa is A or G or is absent
GXAKVVMNEYKFKXXXXXXXXXLYLVSIPELKTPAXXAKP

SEQ ID NO: 26771 - protein, 34 aa, Artificial Sequence; identical to SEQ ID NO: 5642
  GFR-binding peptide
  MOD_RES (31), (32): Xaa is C or S

SEQ ID NO: 26772 - protein, 36 aa, Artificial Sequence
  GFR-binding peptide
  MOD_RES (1), (32), (33): Xaa is C or S
XSKVVMEYQKYVKPTRGVIYLISIPSLDQPVXXPSA

SEQ ID NO: 26773 - protein, 39 aa, Artificial Sequence; identical to SEQ ID NO: 5645
  GFR-binding peptide
  MOD_RES (33), (34): Xaa is C or S
  MOD_RES (11), (12), (13), (14), (15): Xaa is A or G
  MOD_RES (16), (17), (18), (19): Xaa is A or G or is absent

SEQ ID NO: 26774 - protein, 34 aa, Artificial Sequence; identical to SEQ ID NO: 5646
  GFR-binding peptide
  MOD_RES (33), (34): Xaa is C or S
  MOD_RES (11), (12), (13), (14), (15): Xaa is A or G
  MOD_RES (16), (17), (18), (19): Xaa is A or G or is absent

SEQ ID NO: 26775 - protein, 44 aa, Artificial Sequence; identical to SEQ ID NO: 5647
  GFR-binding peptide
  MOD_RES (2), (4), (38), (39): Xaa is C or S
  MOD_RES (16), (17), (18), (19), (20): Xaa is A or G
  MOD_RES (21), (22), (23), (24): Xaa is A or G or is absent

SEQ ID NO: 26776 - protein, 42 aa, Artificial Sequence
  GFR-binding peptide
  MOD_RES (1), (3), (37), (38): Xaa is C or S
  MOD_RES (15), (16), (17), (18), (19): Xaa is A or G
  MOD_RES (20), (21), (22), (23): Xaa is A or G or is absent
XGXGEVVMDEYKFKXXXXXXXXXLYLMSIPELETPVXXAKPI

SEQ ID NO: 26777 - protein, 35 aa, Artificial Sequence
  GFR-binding peptide
  MOD_RES (1), (32), (33): Xaa is C or S
XSKVIMEYKFKIKPTKGILYLISIPELDQSVXXPS

SEQ ID NO: 26778 - protein, 31 aa, Artificial Sequence
  GFR-binding peptide
  MOD_RES (31), (31): Xaa is C or S
EVVMDRYKKLVVNNAADFYLISIANLRAPVX

SEQ ID NO: 26779 - protein, 39 aa, Artificial Sequence; identical to SEQ ID NO: 5651
  GFR-binding peptide
  MOD_RES (1), (3), (38), (39): Xaa is C or S
  MOD_RES (16), (17), (18), (19), (20): Xaa is A or G
  MOD_RES (21), (22), (23), (24): Xaa is A or G or is absent

SEQ ID NO: 26780 - protein, 40 aa, Artificial Sequence
  GFR-binding peptide
  MOD_RES (1), (35), (36): Xaa is C or S
  MOD_RES (13), (14), (15), (16), (17): Xaa is A or G
  MOD_RES (18), (19), (20), (21): Xaa is A or G or is absent
XAEVVMDRYKKLXXXXXXXXXFYLISIANLRAPVXXSAPA

SEQ ID NO: 26781 - protein, 36 aa, Artificial Sequence; identical to SEQ ID NO: 5653
  GFR-binding peptide
  MOD_RES (31), (32): Xaa is C or S

SEQ ID NO: 26782 - protein, 42 aa, Artificial Sequence; identical to SEQ ID NO: 5655
  GFR-binding peptide
  MOD_RES (1), (3), (36), (37): Xaa is C or S
  MOD_RES (14), (15), (16), (17), (18): Xaa is A or G
  MOD_RES (19), (20), (21), (22): Xaa is A or G or is absent

SEQ ID NO: 26783 - protein, 33 aa, Artificial Sequence
  GFR-binding peptide
  MOD_RES (31), (32): Xaa is C or S
SKVIMEYKFKIKPTKGILYLISIPELDQSVXXP

SEQ ID NO: 26784 - protein, 40 aa, Artificial Sequence
  GFR-binding peptide
  MOD_RES (1), (3), (35), (36): Xaa is C or S
XGXAEVVMDRYKKLVVNNAADFYLISIANLRAPVXXSAPA

SEQ ID NO: 26785 - protein, 42 aa, Artificial Sequence
  GFR-binding peptide
  MOD_RES (2), (37), (38): Xaa is C or S
  MOD_RES (15), (16), (17), (18), (19): Xaa is A or G
  MOD_RES (20), (21), (22), (23): Xaa is A or G or is absent
GXEAVSMGEEYQKYXXXXXXXXXIYLVSIPSLKTPVXXAKGV

SEQ ID NO: 26786 - protein, 37 aa, Artificial Sequence
  GFR-binding peptide
  MOD_RES (1), (35), (36): Xaa is C or S
  MOD_RES (13), (14), (15), (16), (17): Xaa is A or G
  MOD_RES (18), (19), (20), (21): Xaa is A or G or is absent
XARVVMNEYKFKXXXXXXXXXLYLVSIPELQTPAXXP

SEQ ID NO: 26787 - protein, 43 aa, Artificial Sequence; identical to SEQ ID NO: 5656
  GFR-binding peptide
  MOD_RES (2), (4), (37), (38): Xaa is C or S
  MOD_RES (15), (16), (17), (18), (19): Xaa is A or G
  MOD_RES (20), (21), (22), (23): Xaa is A or G or is absent

SEQ ID NO: 26788 - protein, 33 aa, Artificial Sequence; identical to SEQ ID NO: 5657
  GFR-binding peptide
  MOD_RES (1), (3): Xaa is C or S

SEQ ID NO: 26789 - protein, 39 aa, Artificial Sequence
  GFR-binding peptide
  MOD_RES (2), (4), (36), (37): Xaa is C or S
RXGXESVAMGRYKKLYTVVGKDFYLISIANLKTPVXXAK

SEQ ID NO: 26790 - protein, 40 aa, Artificial Sequence
  GFR-binding peptide
  MOD_RES (2), (34), (35): Xaa is C or S
GXAEVVMDEYQKYVVNNAADIYLISIPSLRAPVXXSAPAA

SEQ ID NO: 26791 - protein, 35 aa, Artificial Sequence
  GFR-binding peptide
  MOD_RES (1), (3), (35): Xaa is C or S
XGXESVAMGYHYKLYTVVGKDKYLISIPSLKTPVX

SEQ ID NO: 26792 - protein, 30 aa, Artificial Sequence
  GFR-binding peptide
EVVMDEYKFKVVKENEDLYLMSIPELETPV

SEQ ID NO: 26793 - protein, 36 aa, Artificial Sequence
  GFR-binding peptide
  MOD_RES (1), (33), (34): Xaa is C or S
XAEVVMDEYKFKVVNNAADLYLISIPELRAPVXXSA

SEQ ID NO: 26794 - protein, 41 aa, Artificial Sequence; identical to SEQ ID NO: 5660
  GFR-binding peptide
  MOD_RES (2), (4), (36), (37): Xaa is C or S

SEQ ID NO: 26795 - protein, 38 aa, Artificial Sequence
  GFR-binding peptide
  MOD_RES (32), (33): Xaa is C or S
GEVVMEEYQKYVVKDYEDIYLMSIPSLETPVXXAKPIS

SEQ ID NO: 26796 - protein, 38 aa, Artificial Sequence
  GFR-binding peptide
  MOD_RES (1), (3), (35), (36): Xaa is C or S
XGXAEVVMDRYKKLVVNNAADFYLISIANLRAPVXXSA

SEQ ID NO: 26797 - protein, 37 aa, Artificial Sequence
  GFR-binding peptide
  MOD_RES (1), (3), (35), (36): Xaa is C or S
XGXGEVVMDEYKFKVVKENEDLYLMSIPELETPVXXA

SEQ ID NO: 26798 - protein, 41 aa, Artificial Sequence; identical to SEQ ID NO: 5664
  GFR-binding peptide
  MOD_RES (2), (4), (38), (39): Xaa is C or S
  MOD_RES (16), (17), (18), (19), (20): Xaa is A or G
  MOD_RES (21), (22), (23), (24): Xaa is A or G or is absent

SEQ ID NO: 26799 - protein, 35 aa, Artificial Sequence; identical to SEQ ID NO: 5665
  GFR-binding peptide
  MOD_RES (1), (35): Xaa is C or S
  MOD_RES (13), (14), (15), (16), (17): Xaa is A or G
  MOD_RES (18), (19), (20), (21): Xaa is A or G or is absent

SEQ ID NO: 26800 - protein, 39 aa, Artificial Sequence; identical to SEQ ID NO: 5668
  GFR-binding peptide
  MOD_RES (2), (4), (37), (38): Xaa is C or S
  MOD_RES (15), (16), (17), (18), (19): Xaa is A or G
  MOD_RES (20), (21), (22), (23): Xaa is A or G or is absent

SEQ ID NO: 26801 - protein, 39 aa, Artificial Sequence
  GFR-binding peptide
  MOD_RES (1), (3), (37), (38): Xaa is C or S
  MOD_RES (15), (16), (17), (18), (19): Xaa is A or G
  MOD_RES (20), (21), (22), (23): Xaa is A or G or is absent
XGXSRVVMNEYQKYXXXXXXXXXIYLVSIPSLKTPAXXP

SEQ ID NO: 26802 - protein, 36 aa, Artificial Sequence; identical to SEQ ID NO: 5670
  GFR-binding peptide
  MOD_RES (33), (34): Xaa is C or S
  MOD_RES (11), (12), (13), (14), (15): Xaa is A or G
  MOD_RES (16), (17), (18), (19): Xaa is A or G or is absent

SEQ ID NO: 26803 - protein, 39 aa, Artificial Sequence
  GFR-binding peptide
  MOD_RES (1), (35), (36): Xaa is C or S
  MOD_RES (13), (14), (15), (16), (17): Xaa is A or G
  MOD_RES (18), (19), (20), (21): Xaa is A or G or is absent
XAEVVMDEYKFKXXXXXXXXXLYLISIPELRAPVXXSAP

SEQ ID NO: 26804 - protein, 31 aa, Artificial Sequence
  GFR-binding peptide
ARVVMNEYQKYIVNSSDDIYLVSIPSLQTPA

SEQ ID NO: 26805 - protein, 37 aa, Artificial Sequence; identical to SEQ ID NO: 5671
  GFR-binding peptide
  MOD_RES (1), (34), (35): Xaa is C or S
  MOD_RES (12), (13), (14), (15), (16): Xaa is A or G
  MOD_RES (17), (18), (19), (20): Xaa is A or G or is absent

SEQ ID NO: 26806 - protein, 40 aa, Artificial Sequence
  GFR-binding peptide
  MOD_RES (34), (35): Xaa is C or S
  MOD_RES (12), (13), (14), (15), (16): Xaa is A or G
  MOD_RES (17), (18), (19), (20): Xaa is A or G or is absent
GEVVMDEYKFKXXXXXXXXXLYLMSIPELETPVXXAKPIK

SEQ ID NO: 26807 - protein, 35 aa, Artificial Sequence; identical to SEQ ID NO: 5679
  GFR-binding peptide
  MOD_RES (1), (3), (35): Xaa is C or S

SEQ ID NO: 26808 - protein, 39 aa, Artificial Sequence; identical to SEQ ID NO: 5680
  GFR-binding peptide
  MOD_RES (34), (35): Xaa is C or S
  MOD_RES (12), (13), (14), (15), (16): Xaa is A or G
  MOD_RES (17), (18), (19), (20): Xaa is A or G or is absent

SEQ ID NO: 26809 - protein, 37 aa, Artificial Sequence
  GFR-binding peptide
  MOD_RES (32), (33): Xaa is C or S
GEVVMDEYKFKVVKENEDLYLMSIPELETPVXXAKPI

SEQ ID NO: 26810 - protein, 40 aa, Artificial Sequence; identical to SEQ ID NO: 5681
  GFR-binding peptide
  MOD_RES (2), (36), (37): Xaa is C or S
  MOD_RES (14), (15), (16), (17), (18): Xaa is A or G
  MOD_RES (19), (20), (21), (22): Xaa is A or G or is absent

SEQ ID NO: 26811 - protein, 37 aa, Artificial Sequence; identical to SEQ ID NO: 5682
  GFR-binding peptide
  MOD_RES (1), (3), (36), (37): Xaa is C or S
  MOD_RES (14), (15), (16), (17), (18): Xaa is A or G
  MOD_RES (19), (20), (21), (22): Xaa is A or G or is absent

SEQ ID NO: 26812 - protein, 41 aa, Artificial Sequence
  GFR-binding peptide
  MOD_RES (1), (3), (37), (38): Xaa is C or S
  MOD_RES (15), (16), (17), (18), (19): Xaa is A or G
  MOD_RES (20), (21), (22), (23): Xaa is A or G or is absent
XGXESVAMGEYQKYXXXXXXXXXIYLISIPSLKTPVXXAKS

SEQ ID NO: 26813 - protein, 37 aa, Artificial Sequence; identical to SEQ ID NO: 5683
  GFR-binding peptide
  MOD_RES (2), (34), (35): Xaa is C or S

SEQ ID NO: 26814 - protein, 36 aa, Artificial Sequence; identical to SEQ ID NO: 5685
  GFR-binding peptide
  MOD_RES (1), (3): Xaa is C or S
  MOD_RES (15), (16), (17), (18), (19): Xaa is A or G
  MOD_RES (20), (21), (22), (23): Xaa is A or G or is absent

SEQ ID NO: 26815 - protein, 35 aa, Artificial Sequence; identical to SEQ ID NO: 5688
  GFR-binding peptide
  MOD_RES (1), (32), (33): Xaa is C or S

SEQ ID NO: 26816 - protein, 34 aa, Artificial Sequence
  GFR-binding peptide
  MOD_RES (1), (33), (34): Xaa is C or S
XARVVMNEYQKYIVNSSDDIYLVSIPSLQTPAXX

SEQ ID NO: 26817 - protein, 37 aa, Artificial Sequence
  GFR-binding peptide
  MOD_RES (2), (4): Xaa is C or S
  MOD_RES (16), (17), (18), (19), (20): Xaa is A or G
  MOD_RES (21), (22), (23), (24): Xaa is A or G or is absent
RXGXGEVVMEEYKFKXXXXXXXXXLYLMSIPELETPV

SEQ ID NO: 26818 - protein, 35 aa, Artificial Sequence; identical to SEQ ID NO: 5691
  GFR-binding peptide
  MOD_RES (2), (33), (34): Xaa is C or S

SEQ ID NO: 26819 - protein, 34 aa, Artificial Sequence
  GFR-binding peptide
  MOD_RES (34), (34): Xaa is C or S
  MOD_RES (12), (13), (14), (15), (16): Xaa is A or G
  MOD_RES (17), (18), (19), (20): Xaa is A or G or is absent
ESVAMGEYKFKXXXXXXXXXLYLISIPELKTPVX

SEQ ID NO: 26820 - protein, 35 aa, Artificial Sequence
  GFR-binding peptide
  MOD_RES (2), (2): Xaa is C or S
  MOD_RES (14), (15), (16), (17), (18): Xaa is A or G
  MOD_RES (19), (20), (21), (22): Xaa is A or G or is absent
GXARVVMNEYQKYXXXXXXXXXIYLVSIPSLQTPA

SEQ ID NO: 26821 - protein, 31 aa, Artificial Sequence
  GFR-binding peptide
AKVVMNEYKFKIVNNSSDLYLVSIPELKTPA

SEQ ID NO: 26822 - protein, 38 aa, Artificial Sequence
  GFR-binding peptide
  MOD_RES (2), (34), (35): Xaa is C or S
GXGEVVMEEYKFKVVKDYEDLYLMSIPELETPVXXAKP

SEQ ID NO: 26823 - protein, 38 aa, Artificial Sequence; identical to SEQ ID NO: 5698
  GFR-binding peptide
  MOD_RES (1), (3), (37), (38): Xaa is C or S
  MOD_RES (15), (16), (17), (18), (19): Xaa is A or G
  MOD_RES (20), (21), (22), (23): Xaa is A or G or is absent

SEQ ID NO: 26824 - protein, 38 aa, Artificial Sequence
  GFR-binding peptide
  MOD_RES (33), (34): Xaa is C or S
  MOD_RES (11), (12), (13), (14), (15): Xaa is A or G
  MOD_RES (16), (17), (18), (19): Xaa is A or G or is absent
RVVMNEYQKYXXXXXXXXXIYLVSIPSLQTPAXXPKPV

SEQ ID NO: 26825 - protein, 31 aa, Artificial Sequence; identical to SEQ ID NO: 5701
  GFR-binding peptide

SEQ ID NO: 26826 - protein, 39 aa, Artificial Sequence; identical to SEQ ID NO: 5702
  GFR-binding peptide
  MOD_RES (2), (36), (37): Xaa is C or S
  MOD_RES (14), (15), (16), (17), (18): Xaa is A or G
  MOD_RES (19), (20), (21), (22): Xaa is A or G or is absent

SEQ ID NO: 26827 - protein, 41 aa, Artificial Sequence
  GFR-binding peptide
  MOD_RES (1), (35), (36): Xaa is C or S
  MOD_RES (13), (14), (15), (16), (17): Xaa is A or G
  MOD_RES (18), (19), (20), (21): Xaa is A or G or is absent
XESVAMGRYKKLXXXXXXXXXFYLISIANLKTPVXXAKSAK

SEQ ID NO: 26828 - protein, 40 aa, Artificial Sequence
  GFR-binding peptide
  MOD_RES (34), (35): Xaa is C or S
  MOD_RES (12), (13), (14), (15), (16): Xaa is A or G
  MOD_RES (17), (18), (19), (20): Xaa is A or G or is absent
SRVVMNEYKFKXXXXXXXXXLYLVSIPELKTPAXXPKPVY

SEQ ID NO: 26829 - protein, 35 aa, Artificial Sequence
  GFR-binding peptide
  MOD_RES (2), (4): Xaa is C or S
RXGXAEVVMDRYKKLVVNNAADFYLISIANLRAPV

SEQ ID NO: 26830 - protein, 41 aa, Artificial Sequence; identical to SEQ ID NO: 5706
  GFR-binding peptide
  MOD_RES (2), (4), (37), (38): Xaa is C or S
  MOD_RES (15), (16), (17), (18), (19): Xaa is A or G
  MOD_RES (20), (21), (22), (23): Xaa is A or G or is absent

SEQ ID NO: 26831 - protein, 38 aa, Artificial Sequence; identical to SEQ ID NO: 5707
  GFR-binding peptide
  MOD_RES (2), (4), (35), (36): Xaa is C or S

SEQ ID NO: 26832 - protein, 38 aa, Artificial Sequence
  GFR-binding peptide
  MOD_RES (2), (4), (38): Xaa is C or S
  MOD_RES (16), (17), (18), (19), (20): Xaa is A or G
  MOD_RES (21), (22), (23), (24): Xaa is A or G or is absent
RXGXAEVVMDEYKFKXXXXXXXXXLYLISIPELRAPVX

SEQ ID NO: 26833 - protein, 34 aa, Artificial Sequence
  GFR-binding peptide
  MOD_RES (2), (34): Xaa is C or S
GXARVVMNEYKFKIVNSSDDLYLVSIPELQTPAX

SEQ ID NO: 26834 - protein, 37 aa, Artificial Sequence
  GFR-binding peptide
  MOD_RES (1), (3), (36), (37): Xaa is C or S
  MOD_RES (14), (15), (16), (17), (18): Xaa is A or G
  MOD_RES (19), (20), (21), (22): Xaa is A or G or is absent
XKXSKVVMEYQKYXXXXXXXXXIYLISIPSLDQPVXX

SEQ ID NO: 26835 - protein, 38 aa, Artificial Sequence
  GFR-binding peptide
  MOD_RES (1), (3), (37), (38): Xaa is C or S
  MOD_RES (15), (16), (17), (18), (19): Xaa is A or G
  MOD_RES (20), (21), (22), (23): Xaa is A or G or is absent
XGXGEVVMEEYKFKXXXXXXXXXLYLMSIPELETPVXX

SEQ ID NO: 26836 - protein, 37 aa, Artificial Sequence
  GFR-binding peptide
  MOD_RES (31), (32): Xaa is C or S
KVVMNEYKFKIVNNSSDLYLVSIPELKTPAXXAKPVA

SEQ ID NO: 26837 - protein, 39 aa, Artificial Sequence; identical to SEQ ID NO: 5712
  GFR-binding peptide
  MOD_RES (2), (34), (35): Xaa is C or S

SEQ ID NO: 26838 - protein, 36 aa, Artificial Sequence; identical to SEQ ID NO: 5713
  GFR-binding peptide
  MOD_RES (2), (4): Xaa is C or S
  MOD_RES (15), (16), (17), (18), (19): Xaa is A or G
  MOD_RES (20), (21), (22), (23): Xaa is A or G or is absent

SEQ ID NO: 26839 - protein, 37 aa, Artificial Sequence; identical to SEQ ID NO: 5715
  GFR-binding peptide
  MOD_RES (1), (33), (34): Xaa is C or S

SEQ ID NO: 26840 - protein, 37 aa, Artificial Sequence
  GFR-binding peptide
  MOD_RES (2), (4), (37): Xaa is C or S
RXGXEAVSMGEEYKFKTPVGMDDLYLVSIPELKTPVX

SEQ ID NO: 26841 - protein, 36 aa, Artificial Sequence; identical to SEQ ID NO: 5716
  GFR-binding peptide
  MOD_RES (1), (3), (35), (36): Xaa is C or S

SEQ ID NO: 26842 - protein, 41 aa, Artificial Sequence; identical to SEQ ID NO: 5717
  GFR-binding peptide
  MOD_RES (2), (4), (39), (40): Xaa is C or S
  MOD_RES (17), (18), (19), (20), (21): Xaa is A or G
  MOD_RES (22), (23), (24), (25): Xaa is A or G or is absent

SEQ ID NO: 26843 - protein, 38 aa, Artificial Sequence
  GFR-binding peptide
  MOD_RES (1), (32), (33): Xaa is C or S
XSKVIMEYKFKIKPTKGILYLISIPELDQSVXXPSASA

SEQ ID NO: 26844 - protein, 31 aa, Artificial Sequence
  GFR-binding peptide
  MOD_RES (31), (31): Xaa is C or S
SKVVMEYQKYVKPTRGVIYLISIPSLDQPVX

SEQ ID NO: 26845 - protein, 36 aa, Artificial Sequence
  GFR-binding peptide
  MOD_RES (2), (4): Xaa is C or S
RXGXEAVSMGEEYQKYTPVGMDDIYLVSIPSLKTPV

SEQ ID NO: 26846 - protein, 35 aa, Artificial Sequence; identical to SEQ ID NO: 5719
  GFR-binding peptide
  MOD_RES (31), (32): Xaa is C or S

SEQ ID NO: 26847 - protein, 38 aa, Artificial Sequence; identical to SEQ ID NO: 5721
  GFR-binding peptide
  MOD_RES (1), (35), (36): Xaa is C or S
  MOD_RES (13), (14), (15), (16), (17): Xaa is A or G
  MOD_RES (18), (19), (20), (21): Xaa is A or G or is absent

SEQ ID NO: 26848 - protein, 44 aa, Artificial Sequence
  GFR-binding peptide
  MOD_RES (2), (4), (38), (39): Xaa is C or S
  MOD_RES (16), (17), (18), (19), (20): Xaa is A or G
  MOD_RES (21), (22), (23), (24): Xaa is A or G or is absent
RXGXAEVVMDEYKFKXXXXXXXXXLYLISIPELRAPVXXSAPAA

SEQ ID NO: 26849 - protein, 36 aa, Artificial Sequence
  GFR-binding peptide
  MOD_RES (32), (33): Xaa is C or S
ESVAMGYHYKLYTVVGKDKYLISIPSLKTPVXXAKS

SEQ ID NO: 26850 - protein, 37 aa, Artificial Sequence
  GFR-binding peptide
  MOD_RES (1), (35), (36): Xaa is C or S
  MOD_RES (13), (14), (15), (16), (17): Xaa is A or G
  MOD_RES (18), (19), (20), (21): Xaa is A or G or is absent
XAEVVMDRYKKLXXXXXXXXXFYLISIANLRAPVXXS

SEQ ID NO: 26851 - protein, 32 aa, Artificial Sequence
  GFR-binding peptide
  MOD_RES (31), (31): Xaa is C or S
RVVMNEYKFKIVNSSDDLYLVSIPELKTPAXT

SEQ ID NO: 26852 - protein, 39 aa, Artificial Sequence
  GFR-binding peptide
  MOD_RES (2), (4), (38), (39): Xaa is C or S
  MOD_RES (16), (17), (18), (19), (20): Xaa is A or G
  MOD_RES (21), (22), (23), (24): Xaa is A or G or is absent
RXGXESVAMGEYKFKXXXXXXXXXLYLISIPELKTPVXX

SEQ ID NO: 26853 - protein, 31 aa, Artificial Sequence; identical to SEQ ID NO: 5727
  GFR-binding peptide
  MOD_RES (31), (31): Xaa is C or S

SEQ ID NO: 26854 - protein, 35 aa, Artificial Sequence; identical to SEQ ID NO: 5728
  GFR-binding peptide
  MOD_RES (34), (35): Xaa is C or S
  MOD_RES (12), (13), (14), (15), (16): Xaa is A or G
  MOD_RES (17), (18), (19), (20): Xaa is A or G or is absent

SEQ ID NO: 26855 - protein, 36 aa, Artificial Sequence
  GFR-binding peptide
  MOD_RES (1), (34), (35): Xaa is C or S
  MOD_RES (12), (13), (14), (15), (16): Xaa is A or G
  MOD_RES (17), (18), (19), (20): Xaa is A or G or is absent
XSKVVMEYQKYXXXXXXXXXIYLISIPSLDQPVXXP

SEQ ID NO: 26856 - protein, 40 aa, Artificial Sequence
  GFR-binding peptide
  MOD_RES (1), (3), (37), (38): Xaa is C or S
  MOD_RES (15), (16), (17), (18), (19): Xaa is A or G
  MOD_RES (20), (21), (22), (23): Xaa is A or G or is absent
XGXESVAMGRYKKLXXXXXXXXXFYLISIANLKTPVXXAK

SEQ ID NO: 26857 - protein, 34 aa, Artificial Sequence
  GFR-binding peptide
  MOD_RES (1), (33): Xaa is C or S
XSRVVMNEYQKYIVNSSDDIYLVSIPSLKTPAXT

SEQ ID NO: 26858 - protein, 34 aa, Artificial Sequence; identical to SEQ ID NO: 5729
  GFR-binding peptide
  MOD_RES (1), (33), (34): Xaa is C or S

SEQ ID NO: 26859 - protein, 39 aa, Artificial Sequence; identical to SEQ ID NO: 5730
  GFR-binding peptide
  MOD_RES (33), (34): Xaa is C or S
  MOD_RES (11), (12), (13), (14), (15): Xaa is A or G
  MOD_RES (16), (17), (18), (19): Xaa is A or G or is absent

SEQ ID NO: 26860 - protein, 31 aa, Artificial Sequence
  GFR-binding peptide
  MOD_RES (31), (31): Xaa is C or S
EVVMDYHYKLVVNNAADKYLISIPSLRAPVX

SEQ ID NO: 26861 - protein, 41 aa, Artificial Sequence; identical to SEQ ID NO: 5731
  GFR-binding peptide
  MOD_RES (1), (3), (35), (36): Xaa is C or S

SEQ ID NO: 26862 - protein, 39 aa, Artificial Sequence; identical to SEQ ID NO: 5733
  GFR-binding peptide
  MOD_RES (2), (4), (35), (36): Xaa is C or S

SEQ ID NO: 26863 - protein, 38 aa, Artificial Sequence; identical to SEQ ID NO: 5734
  GFR-binding peptide
  MOD_RES (2), (4), (36), (37): Xaa is C or S

SEQ ID NO: 26864 - protein, 36 aa, Artificial Sequence
  GFR-binding peptide
  MOD_RES (2), (35), (36): Xaa is C or S
  MOD_RES (13), (14), (15), (16), (17): Xaa is A or G
  MOD_RES (18), (19), (20), (21): Xaa is A or G or is absent
KXSKVVMEYKFKXXXXXXXXXLYLISIPELDQPVXX

SEQ ID NO: 26865 - protein, 39 aa, Artificial Sequence
  GFR-binding peptide
  MOD_RES (2), (4), (39): Xaa is C or S
  MOD_RES (17), (18), (19), (20), (21): Xaa is A or G
  MOD_RES (22), (23), (24), (25): Xaa is A or G or is absent
RXGXEAVSMGEEYKFKXXXXXXXXXLYLVSIPELKTPVX

SEQ ID NO: 26866 - protein, 40 aa, Artificial Sequence
  GFR-binding peptide
  MOD_RES (1), (3), (37), (38): Xaa is C or S
  MOD_RES (15), (16), (17), (18), (19): Xaa is A or G
  MOD_RES (20), (21), (22), (23): Xaa is A or G or is absent
XGXAEVVMDEYQKYXXXXXXXXXIYLISIPSLRAPVXXSA

SEQ ID NO: 26867 - protein, 42 aa, Artificial Sequence; identical to SEQ ID NO: 5735
  GFR-binding peptide
  MOD_RES (2), (4), (38), (39): Xaa is C or S
  MOD_RES (16), (17), (18), (19), (20): Xaa is A or G
  MOD_RES (21), (22), (23), (24): Xaa is A or G or is absent

SEQ ID NO: 26868 - protein, 33 aa, Artificial Sequence; identical to SEQ ID NO: 5736
  GFR-binding peptide
  MOD_RES (2), (2): Xaa is C or S

SEQ ID NO: 26869 - protein, 37 aa, Artificial Sequence
  GFR-binding peptide
  MOD_RES (32), (33): Xaa is C or S
AKVVMNEYQKYIVNNSSDIYLVSIPSLKTPAXXAKPV

SEQ ID NO: 26870 - protein, 42 aa, Artificial Sequence; identical to SEQ ID NO: 5737
  GFR-binding peptide
  MOD_RES (1), (3), (36), (37): Xaa is C or S

SEQ ID NO: 26871 - protein, 39 aa, Artificial Sequence
  GFR-binding peptide
  MOD_RES (2), (4), (36), (37): Xaa is C or S
RXGXGEVVMEEYKFKVVKDYEDLYLMSIPELETPVXXAK

SEQ ID NO: 26872 - protein, 36 aa, Artificial Sequence
  GFR-binding peptide
  MOD_RES (33), (34): Xaa is C or S
  MOD_RES (11), (12), (13), (14), (15): Xaa is A or G
  MOD_RES (16), (17), (18), (19): Xaa is A or G or is absent
EVVMEEYQKYXXXXXXXXXIYLMSIPSLETPVXXAK

SEQ ID NO: 26873 - protein, 35 aa, Artificial Sequence
  GFR-binding peptide
  MOD_RES (1), (3): Xaa is C or S
  MOD_RES (14), (15), (16), (17), (18): Xaa is A or G
  MOD_RES (19), (20), (21), (22): Xaa is A or G or is absent
XKXSRVIMEYKFKXXXXXXXXXLYLISIPELAQPV

SEQ ID NO: 26874 - protein, 40 aa, Artificial Sequence
  GFR-binding peptide
  MOD_RES (34), (35): Xaa is C or S
  MOD_RES (12), (13), (14), (15), (16): Xaa is A or G
  MOD_RES (17), (18), (19), (20): Xaa is A or G or is absent
ARVVMNEYQKYXXXXXXXXXIYLVSIPSLQTPAXXPKPVT

SEQ ID NO: 26875 - protein, 38 aa, Artificial Sequence
  GFR-binding peptide
  MOD_RES (2), (4), (38): Xaa is C or S
  MOD_RES (16), (17), (18), (19), (20): Xaa is A or G
  MOD_RES (21), (22), (23), (24): Xaa is A or G or is absent
HXGXSRVVMNEYKFKXXXXXXXXXLYLVSIPELKTPAX

SEQ ID NO: 26876 - protein, 35 aa, Artificial Sequence; identical to SEQ ID NO: 5742
  GFR-binding peptide
  MOD_RES (2), (4): Xaa is C or S

SEQ ID NO: 26877 - protein, 38 aa, Artificial Sequence
  GFR-binding peptide
  MOD_RES (2), (4), (38): Xaa is C or S
  MOD_RES (16), (17), (18), (19), (20): Xaa is A or G
  MOD_RES (21), (22), (23), (24): Xaa is A or G or is absent
HXGXAKVVMNEYQKYXXXXXXXXXIYLVSIPSLKTPAX

SEQ ID NO: 26878 - protein, 36 aa, Artificial Sequence
  GFR-binding peptide
  MOD_RES (1), (34), (35): Xaa is C or S
XEAVSMGEEYKFKTPVGMDDLYLVSIPELKTPVXXA

SEQ ID NO: 26879 - protein, 32 aa, Artificial Sequence; identical to SEQ ID NO: 5746
  GFR-binding peptide
  MOD_RES (11), (12), (13), (14), (15): Xaa is A or G
  MOD_RES (16), (17), (18), (19): Xaa is A or G or is absent

SEQ ID NO: 26880 - protein, 37 aa, Artificial Sequence; identical to SEQ ID NO: 5749
  GFR-binding peptide
  MOD_RES (1), (3), (35), (36): Xaa is C or S

SEQ ID NO: 26881 - protein, 42 aa, Artificial Sequence
  GFR-binding peptide
  MOD_RES (2), (4), (37), (38): Xaa is C or S
  MOD_RES (15), (16), (17), (18), (19): Xaa is A or G
  MOD_RES (20), (21), (22), (23): Xaa is A or G or is absent
SXKXSRVIMEYKFKXXXXXXXXXLYLISIPELAQPVXXPAAS

SEQ ID NO: 26882 - protein, 39 aa, Artificial Sequence; identical to SEQ ID NO: 5750
  GFR-binding peptide
  MOD_RES (1), (35), (36): Xaa is C or S
  MOD_RES (13), (14), (15), (16), (17): Xaa is A or G
  MOD_RES (18), (19), (20), (21): Xaa is A or G or is absent

SEQ ID NO: 26883 - protein, 37 aa, Artificial Sequence
  GFR-binding peptide
  MOD_RES (32), (33): Xaa is C or S
AEVVMDEYKFKVVNNAADLYLISIPELRAPVXXSAPA

SEQ ID NO: 26884 - protein, 38 aa, Artificial Sequence; identical to SEQ ID NO: 5753
  GFR-binding peptide
  MOD_RES (2), (4), (37), (38): Xaa is C or S
  MOD_RES (15), (16), (17), (18), (19): Xaa is A or G
  MOD_RES (20), (21), (22), (23): Xaa is A or G or is absent

SEQ ID NO: 26885 - protein, 34 aa, Artificial Sequence; identical to SEQ ID NO: 5754
  GFR-binding peptide
  MOD_RES (31), (32): Xaa is C or S

SEQ ID NO: 26886 - protein, 34 aa, Artificial Sequence; identical to SEQ ID NO: 5755
  GFR-binding peptide
  MOD_RES (34), (34): Xaa is C or S
  MOD_RES (12), (13), (14), (15), (16): Xaa is A or G
  MOD_RES (17), (18), (19), (20): Xaa is A or G or is absent

SEQ ID NO: 26887 - protein, 33 aa, Artificial Sequence
  GFR-binding peptide
  MOD_RES (12), (13), (14), (15), (16): Xaa is A or G
  MOD_RES (17), (18), (19), (20): Xaa is A or G or is absent
GEVVMDEYKFKXXXXXXXXXLYLMSIPELETPV

SEQ ID NO: 26888 - protein, 36 aa, Artificial Sequence
  GFR-binding peptide
  MOD_RES (35), (36): Xaa is C or S
  MOD_RES (13), (14), (15), (16), (17): Xaa is A or G
  MOD_RES (18), (19), (20), (21): Xaa is A or G or is absent
EAVSMGEEYKFKXXXXXXXXXLYLVSIPELKTPVXX

SEQ ID NO: 26889 - protein, 39 aa, Artificial Sequence
  GFR-binding peptide
  MOD_RES (34), (35): Xaa is C or S
  MOD_RES (12), (13), (14), (15), (16): Xaa is A or G
  MOD_RES (17), (18), (19), (20): Xaa is A or G or is absent
ARVVMNEYQKYXXXXXXXXXIYLVSIPSLQTPAXXPKPV

SEQ ID NO: 26890 - protein, 37 aa, Artificial Sequence; identical to SEQ ID NO: 5758
  GFR-binding peptide
  MOD_RES (1), (3): Xaa is C or S
  MOD_RES (16), (17), (18), (19), (20): Xaa is A or G
  MOD_RES (21), (22), (23), (24): Xaa is A or G or is absent

SEQ ID NO: 26891 - protein, 38 aa, Artificial Sequence; identical to SEQ ID NO: 5759
  GFR-binding peptide
  MOD_RES (1), (35), (36): Xaa is C or S
  MOD_RES (13), (14), (15), (16), (17): Xaa is A or G
  MOD_RES (18), (19), (20), (21): Xaa is A or G or is absent

SEQ ID NO: 26892 - protein, 42 aa, Artificial Sequence; identical to SEQ ID NO: 5761
  GFR-binding peptide
  MOD_RES (1), (3), (37), (38): Xaa is C or S
  MOD_RES (15), (16), (17), (18), (19): Xaa is A or G
  MOD_RES (20), (21), (22), (23): Xaa is A or G or is absent

SEQ ID NO: 26893 - protein, 36 aa, Artificial Sequence
  GFR-binding peptide
  MOD_RES (1), (35), (36): Xaa is C or S
  MOD_RES (13), (14), (15), (16), (17): Xaa is A or G
  MOD_RES (18), (19), (20), (21): Xaa is A or G or is absent
XGEVVMEEYKFKXXXXXXXXXLYLMSIPELETPVXX

SEQ ID NO: 26894 - protein, 35 aa, Artificial Sequence
  GFR-binding peptide
  MOD_RES (33), (34): Xaa is C or S
  MOD_RES (11), (12), (13), (14), (15): Xaa is A or G
  MOD_RES (16), (17), (18), (19): Xaa is A or G or is absent
EVVMEEYQKYXXXXXXXXXIYLMSIPSLETPVXXA

SEQ ID NO: 26895 - protein, 43 aa, Artificial Sequence
  GFR-binding peptide
  MOD_RES (1), (3), (37), (38): Xaa is C or S
  MOD_RES (15), (16), (17), (18), (19): Xaa is A or G
  MOD_RES (20), (21), (22), (23): Xaa is A or G or is absent
XGXARVVMNEYKFKXXXXXXXXXLYLVSIPELQTPAXXPKPVT

SEQ ID NO: 26896 - protein, 33 aa, Artificial Sequence
  GFR-binding peptide
  MOD_RES (2), (2): Xaa is C or S
GXARVVMNEYQKYIVNSSDDIYLVSIPSLQTPA

SEQ ID NO: 26897 - protein, 37 aa, Artificial Sequence
  GFR-binding peptide
  MOD_RES (2), (4), (36), (37): Xaa is C or S
RXGXGEVVMEEYQKYVVKDYEDIYLMSIPSLETPVXX

SEQ ID NO: 26898 - protein, 40 aa, Artificial Sequence
  GFR-binding peptide
  MOD_RES (2), (34), (35): Xaa is C or S
GXAKVVMNEYQKYIVNNSSDIYLVSIPSLKTPAXXAKPVA

SEQ ID NO: 26899 - protein, 39 aa, Artificial Sequence
  GFR-binding peptide
  MOD_RES (33), (34): Xaa is C or S
  MOD_RES (11), (12), (13), (14), (15): Xaa is A or G
  MOD_RES (16), (17), (18), (19): Xaa is A or G or is absent
SRVIMEYKFKXXXXXXXXXLYLISIPELAQPVXXPAASA

SEQ ID NO: 26900 - protein, 34 aa, Artificial Sequence
  GFR-binding peptide
  MOD_RES (1), (33), (34): Xaa is C or S
XARVVMNEYKFKIVNSSDDLYLVSIPELQTPAXX

SEQ ID NO: 26901 - protein, 39 aa, Artificial Sequence
  GFR-binding peptide
  MOD_RES (2), (34), (35): Xaa is C or S
GXAEVVMDRYKKLVVNNAADFYLISIANLRAPVXXSAPA

SEQ ID NO: 26902 - protein, 35 aa, Artificial Sequence
  GFR-binding peptide
  MOD_RES (1), (33), (34): Xaa is C or S
XAKVVMNEYKFKIVNNSSDLYLVSIPELKTPAXXA

SEQ ID NO: 26903 - protein, 37 aa, Artificial Sequence
  GFR-binding peptide
  MOD_RES (2), (36), (37): Xaa is C or S
  MOD_RES (14), (15), (16), (17), (18): Xaa is A or G
  MOD_RES (19), (20), (21), (22): Xaa is A or G or is absent
GXESVAMGEYQKYXXXXXXXXXIYLISIPSLKTPVXX

SEQ ID NO: 26904 - protein, 42 aa, Artificial Sequence
  GFR-binding peptide
  MOD_RES (2), (4), (36), (37): Xaa is C or S
RXGXGEVVMDEYKFKVVKENEDLYLMSIPELETPVXXAKPIK

SEQ ID NO: 26905 - protein, 30 aa, Artificial Sequence
  GFR-binding peptide
EVVMEEYKFKVVKDYEDLYLMSIPELETPV

SEQ ID NO: 26906 - protein, 36 aa, Artificial Sequence
  GFR-binding peptide
  MOD_RES (2), (33), (34): Xaa is C or S
KXSKVVMEYKFKVKPTRGVLYLISIPELDQPVXXPS

SEQ ID NO: 26907 - protein, 39 aa, Artificial Sequence
  GFR-binding peptide
  MOD_RES (1), (3), (36), (37): Xaa is C or S
  MOD_RES (14), (15), (16), (17), (18): Xaa is A or G
  MOD_RES (19), (20), (21), (22): Xaa is A or G or is absent
XKXSKVIMEYQKYXXXXXXXXXIYLISIPSLDQSVXXPS

SEQ ID NO: 26908 - protein, 36 aa, Artificial Sequence; identical to SEQ ID NO: 5768
  GFR-binding peptide
  MOD_RES (1), (32), (33): Xaa is C or S

SEQ ID NO: 26909 - protein, 34 aa, Artificial Sequence; identical to SEQ ID NO: 5769
  GFR-binding peptide
  MOD_RES (1), (33), (34): Xaa is C or S

SEQ ID NO: 26910 - protein, 41 aa, Artificial Sequence
  GFR-binding peptide
  MOD_RES (2), (4), (38), (39): Xaa is C or S
  MOD_RES (16), (17), (18), (19), (20): Xaa is A or G
  MOD_RES (21), (22), (23), (24): Xaa is A or G or is absent
RXGXESVAMGEYQKYXXXXXXXXXIYLISIPSLKTPVXXAK

SEQ ID NO: 26911 - protein, 37 aa, Artificial Sequence; identical to SEQ ID NO: 5771
  GFR-binding peptide
  MOD_RES (2), (33), (34): Xaa is C or S

SEQ ID NO: 26912 - protein, 36 aa, Artificial Sequence; identical to SEQ ID NO: 5774
  GFR-binding peptide
  MOD_RES (2), (35), (36): Xaa is C or S

SEQ ID NO: 26913 - protein, 39 aa, Artificial Sequence; identical to SEQ ID NO: 5776
  GFR-binding peptide
  MOD_RES (2), (4), (37), (38): Xaa is C or S

SEQ ID NO: 26914 - protein, 36 aa, Artificial Sequence
  GFR-binding peptide
  MOD_RES (1), (3): Xaa is C or S
  MOD_RES (15), (16), (17), (18), (19): Xaa is A or G
  MOD_RES (20), (21), (22), (23): Xaa is A or G or is absent
XGXESVAMGEYQKYXXXXXXXXXIYLISIPSLKTPV

SEQ ID NO: 26915 - protein, 35 aa, Artificial Sequence
  GFR-binding peptide
  MOD_RES (2), (2): Xaa is C or S
  MOD_RES (14), (15), (16), (17), (18): Xaa is A or G
  MOD_RES (19), (20), (21), (22): Xaa is A or G or is absent
GXGEVVMDEYQKYXXXXXXXXXIYLMSIPSLETPV

SEQ ID NO: 26916 - protein, 36 aa, Artificial Sequence
  GFR-binding peptide
  MOD_RES (1), (34), (35): Xaa is C or S
  MOD_RES (12), (13), (14), (15), (16): Xaa is A or G
  MOD_RES (17), (18), (19), (20): Xaa is A or G or is absent
XSRVIMEYKFKXXXXXXXXXLYLISIPELAQPVXXP

SEQ ID NO: 26917 - protein, 37 aa, Artificial Sequence
  GFR-binding peptide
  MOD_RES (1), (3), (36), (37): Xaa is C or S
  MOD_RES (14), (15), (16), (17), (18): Xaa is A or G
  MOD_RES (19), (20), (21), (22): Xaa is A or G or is absent
XKXSKVIMEYQKYXXXXXXXXXIYLISIPSLDQSVXX

SEQ ID NO: 26918 - protein, 35 aa, Artificial Sequence; identical to SEQ ID NO: 5780
  GFR-binding peptide
  MOD_RES (2), (33), (34): Xaa is C or S

SEQ ID NO: 26919 - protein, 36 aa, Artificial Sequence; identical to SEQ ID NO: 5782
  GFR-binding peptide
  MOD_RES (2), (36): Xaa is C or S
  MOD_RES (14), (15), (16), (17), (18): Xaa is A or G
  MOD_RES (19), (20), (21), (22): Xaa is A or G or is absent

SEQ ID NO: 26920 - protein, 32 aa, Artificial Sequence; identical to SEQ ID NO: 5783
  GFR-binding peptide
  MOD_RES (1), (32): Xaa is C or S

SEQ ID NO: 26921 - protein, 36 aa, Artificial Sequence
  GFR-binding peptide
  MOD_RES (1), (3), (35), (36): Xaa is C or S
XGXGEVVMEEYKFKVVKDYEDLYLMSIPELETPVXX

SEQ ID NO: 26922 - protein, 38 aa, Artificial Sequence
  GFR-binding peptide
  MOD_RES (1), (3), (35), (36): Xaa is C or S
XGXGEVVMEEYQKYVVKDYEDIYLMSIPSLETPVXXAK

SEQ ID NO: 26923 - protein, 37 aa, Artificial Sequence
  GFR-binding peptide
  MOD_RES (31), (31): Xaa is C or S
RVVMNEYQKYIVNSSDDIYLVSIPSLKTPAXTPKTVH

SEQ ID NO: 26924 - protein, 36 aa, Artificial Sequence; identical to SEQ ID NO: 5788
  GFR-binding peptide
  MOD_RES (34), (35): Xaa is C or S
  MOD_RES (12), (13), (14), (15), (16): Xaa is A or G
  MOD_RES (17), (18), (19), (20): Xaa is A or G or is absent

SEQ ID NO: 26925 - protein, 34 aa, Artificial Sequence
  GFR-binding peptide
  MOD_RES (2), (2): Xaa is C or S
GXEAVSMGEEYKFKTPVGMDDLYLVSIPELKTPV

SEQ ID NO: 26926 - protein, 35 aa, Artificial Sequence
  GFR-binding peptide
  MOD_RES (1), (33), (34): Xaa is C or S
XAKVVMNEYQKYIVNNSSDIYLVSIPSLKTPAXXA

SEQ ID NO: 26927 - protein, 33 aa, Artificial Sequence
  GFR-binding peptide
  MOD_RES (1), (1): Xaa is C or S
  MOD_RES (12), (13), (14), (15), (16): Xaa is A or G
  MOD_RES (17), (18), (19), (20): Xaa is A or G or is absent
XSKVIMEYKFKXXXXXXXXXLYLISIPELDQSV

SEQ ID NO: 26928 - protein, 38 aa, Artificial Sequence
  GFR-binding peptide
  MOD_RES (2), (4), (35), (36): Xaa is C or S
SXKXSRVIMEYKFKVKPKRGVLYLISIPELAQPVXXPA

SEQ ID NO: 26929 - protein, 39 aa, Artificial Sequence; identical to SEQ ID NO: 5794
  GFR-binding peptide
  MOD_RES (33), (34): Xaa is C or S

SEQ ID NO: 26930 - protein, 35 aa, Artificial Sequence
  GFR-binding peptide
  MOD_RES (1), (33), (34): Xaa is C or S
XESVAMGEYQKYYTVVGKDIYLISIPSLKTPVXXA

SEQ ID NO: 26931 - protein, 35 aa, Artificial Sequence
  GFR-binding peptide
  MOD_RES (31), (32): Xaa is C or S
SKVVMEYKFKVKPTRGVLYLISIPELDQPVXXPSA

SEQ ID NO: 26932 - protein, 34 aa, Artificial Sequence; identical to SEQ ID NO: 5796
  GFR-binding peptide
  MOD_RES (33), (34): Xaa is C or S
  MOD_RES (11), (12), (13), (14), (15): Xaa is A or G
  MOD_RES (16), (17), (18), (19): Xaa is A or G or is absent

SEQ ID NO: 26933 - protein, 37 aa, Artificial Sequence
  GFR-binding peptide
  MOD_RES (34), (35): Xaa is C or S
  MOD_RES (12), (13), (14), (15), (16): Xaa is A or G
  MOD_RES (17), (18), (19), (20): Xaa is A or G or is absent
AKVVMNEYKFKXXXXXXXXXLYLVSIPELKTPAXXAK

SEQ ID NO: 26934 - protein, 42 aa, Artificial Sequence
  GFR-binding peptide
  MOD_RES (2), (4), (38), (39): Xaa is C or S
  MOD_RES (16), (17), (18), (19), (20): Xaa is A or G
  MOD_RES (21), (22), (23), (24): Xaa is A or G or is absent
RXGXAEVVMDYHYKLXXXXXXXXXKYLISIPSLRAPVXXSAP

SEQ ID NO: 26935 - protein, 41 aa, Artificial Sequence
  GFR-binding peptide
  MOD_RES (1), (3), (37), (38): Xaa is C or S
  MOD_RES (15), (16), (17), (18), (19): Xaa is A or G
  MOD_RES (20), (21), (22), (23): Xaa is A or G or is absent
XGXARVVMNEYQKYXXXXXXXXXIYLVSIPSLQTPAXXPKP

SEQ ID NO: 26936 - protein, 32 aa, Artificial Sequence
  GFR-binding peptide
  MOD_RES (1), (1): Xaa is C or S
XAKVVMNEYQKYIVNNSSDIYLVSIPSLKTPA

SEQ ID NO: 26937 - protein, 34 aa, Artificial Sequence
  GFR-binding peptide
  MOD_RES (31), (32): Xaa is C or S
EVVMDEYKFKVVKENEDLYLMSIPELETPVXXAK

SEQ ID NO: 26938 - protein, 32 aa, Artificial Sequence
  GFR-binding peptide
  MOD_RES (32), (32): Xaa is C or S
AKVVMNEYQKYIVNNSSDIYLVSIPSLKTPAX

SEQ ID NO: 26939 - protein, 43 aa, Artificial Sequence
  GFR-binding peptide
  MOD_RES (1), (3), (37), (38): Xaa is C or S
  MOD_RES (15), (16), (17), (18), (19): Xaa is A or G
  MOD_RES (20), (21), (22), (23): Xaa is A or G or is absent
XGXAEVVMDYHYKLXXXXXXXXXKYLISIPSLRAPVXXSAPAA

SEQ ID NO: 26940 - protein, 37 aa, Artificial Sequence
  GFR-binding peptide
  MOD_RES (1), (3), (37): Xaa is C or S
  MOD_RES (15), (16), (17), (18), (19): Xaa is A or G
  MOD_RES (20), (21), (22), (23): Xaa is A or G or is absent
XGXGEVVMDEYQKYXXXXXXXXXIYLMSIPSLETPVX

SEQ ID NO: 26941 - protein, 38 aa, Artificial Sequence; identical to SEQ ID NO: 5808
  GFR-binding peptide
  MOD_RES (1), (3), (36), (37): Xaa is C or S
  MOD_RES (14), (15), (16), (17), (18): Xaa is A or G
  MOD_RES (19), (20), (21), (22): Xaa is A or G or is absent

SEQ ID NO: 26942 - protein, 37 aa, Artificial Sequence; identical to SEQ ID NO: 5809
  GFR-binding peptide
  MOD_RES (34), (34): Xaa is C or S
  MOD_RES (12), (13), (14), (15), (16): Xaa is A or G
  MOD_RES (17), (18), (19), (20): Xaa is A or G or is absent

SEQ ID NO: 26943 - protein, 40 aa, Artificial Sequence
  GFR-binding peptide
  MOD_RES (1), (3), (37), (38): Xaa is C or S
  MOD_RES (15), (16), (17), (18), (19): Xaa is A or G
  MOD_RES (20), (21), (22), (23): Xaa is A or G or is absent
XGXAEVVMDEYKFKXXXXXXXXXLYLISIPELRAPVXXSA

SEQ ID NO: 26944 - protein, 30 aa, Artificial Sequence; identical to SEQ ID NO: 5814
  GFR-binding peptide

SEQ ID NO: 26945 - protein, 37 aa, Artificial Sequence
  GFR-binding peptide
  MOD_RES (1), (3), (34), (35): Xaa is C or S
XKXSKVVMEYQKYVKPTRGVIYLISIPSLDQPVXXPS

SEQ ID NO: 26946 - protein, 38 aa, Artificial Sequence
  GFR-binding peptide
  MOD_RES (33), (34): Xaa is C or S
  MOD_RES (11), (12), (13), (14), (15): Xaa is A or G
  MOD_RES (16), (17), (18), (19): Xaa is A or G or is absent
KVVMNEYQKYXXXXXXXXXIYLVSIPSLKTPAXXAKPV

SEQ ID NO: 26947 - protein, 38 aa, Artificial Sequence; identical to SEQ ID NO: 5817
  GFR-binding peptide
  MOD_RES (32), (33): Xaa is C or S

SEQ ID NO: 26948 - protein, 31 aa, Artificial Sequence; identical to SEQ ID NO: 5819
  GFR-binding peptide

SEQ ID NO: 26949 - protein, 34 aa, Artificial Sequence
  GFR-binding peptide
  MOD_RES (1), (1): Xaa is C or S
  MOD_RES (13), (14), (15), (16), (17): Xaa is A or G
  MOD_RES (18), (19), (20), (21): Xaa is A or G or is absent
XGEVVMEEYQKYXXXXXXXXXIYLMSIPSLETPV

SEQ ID NO: 26950 - protein, 36 aa, Artificial Sequence
  GFR-binding peptide
  MOD_RES (32), (33): Xaa is C or S
GEVVMDEYQKYVVKENEDIYLMSIPSLETPVXXAKP

SEQ ID NO: 26951 - protein, 40 aa, Artificial Sequence; identical to SEQ ID NO: 5825
  GFR-binding peptide
  MOD_RES (2), (4), (36), (37): Xaa is C or S

SEQ ID NO: 26952 - protein, 34 aa, Artificial Sequence; identical to SEQ ID NO: 5826
  GFR-binding peptide
  MOD_RES (32), (33): Xaa is C or S

SEQ ID NO: 26953 - protein, 38 aa, Artificial Sequence; identical to SEQ ID NO: 5827
  GFR-binding peptide
  MOD_RES (33), (34): Xaa is C or S
  MOD_RES (11), (12), (13), (14), (15): Xaa is A or G
  MOD_RES (16), (17), (18), (19): Xaa is A or G or is absent

SEQ ID NO: 26954 - protein, 40 aa, Artificial Sequence; identical to SEQ ID NO: 5828
  GFR-binding peptide
  MOD_RES (1), (35): Xaa is C or S
  MOD_RES (13), (14), (15), (16), (17): Xaa is A or G
  MOD_RES (18), (19), (20), (21): Xaa is A or G or is absent

SEQ ID NO: 26955 - protein, 35 aa, Artificial Sequence
  GFR-binding peptide
  MOD_RES (1), (35): Xaa is C or S
  MOD_RES (13), (14), (15), (16), (17): Xaa is A or G
  MOD_RES (18), (19), (20), (21): Xaa is A or G or is absent
XSRVVMNEYKFKXXXXXXXXXLYLVSIPELKTPAX

SEQ ID NO: 26956 - protein, 38 aa, Artificial Sequence; identical to SEQ ID NO: 5830
  GFR-binding peptide
  MOD_RES (2), (4), (36), (37): Xaa is C or S

SEQ ID NO: 26957 - protein, 36 aa, Artificial Sequence; identical to SEQ ID NO: 5831
  GFR-binding peptide
  MOD_RES (2), (2): Xaa is C or S
  MOD_RES (15), (16), (17), (18), (19): Xaa is A or G
  MOD_RES (20), (21), (22), (23): Xaa is A or G or is absent

SEQ ID NO: 26958 - protein, 36 aa, Artificial Sequence; identical to SEQ ID NO: 5833
  GFR-binding peptide
  MOD_RES (33), (34): Xaa is C or S
  MOD_RES (11), (12), (13), (14), (15): Xaa is A or G
  MOD_RES (16), (17), (18), (19): Xaa is A or G or is absent

SEQ ID NO: 26959 - protein, 38 aa, Artificial Sequence
  GFR-binding peptide
  MOD_RES (2), (36), (37): Xaa is C or S
  MOD_RES (14), (15), (16), (17), (18): Xaa is A or G
  MOD_RES (19), (20), (21), (22): Xaa is A or G or is absent
GXESVAMGEYQKYXXXXXXXXXIYLISIPSLKTPVXXA

SEQ ID NO: 26960 - protein, 35 aa, Artificial Sequence
  GFR-binding peptide
  MOD_RES (32), (33): Xaa is C or S
AEVVMDYHYKLVVNNAADKYLISIPSLRAPVXXSA

SEQ ID NO: 26961 - protein, 39 aa, Artificial Sequence
  GFR-binding peptide
  MOD_RES (1), (3), (35), (36): Xaa is C or S
XGXGEVVMEEYQKYVVKDYEDIYLMSIPSLETPVXXAKP

SEQ ID NO: 26962 - protein, 41 aa, Artificial Sequence
  GFR-binding peptide
  MOD_RES (1), (3), (35), (36): Xaa is C or S
XGXAEVVMDRYKKLVVNNAADFYLISIANLRAPVXXSAPAA

SEQ ID NO: 26963 - protein, 39 aa, Artificial Sequence; identical to SEQ ID NO: 5837
  GFR-binding peptide
  MOD_RES (1), (33): Xaa is C or S

SEQ ID NO: 26964 - protein, 39 aa, Artificial Sequence; identical to SEQ ID NO: 5838
  GFR-binding peptide
  MOD_RES (2), (4), (36), (37): Xaa is C or S

SEQ ID NO: 26965 - protein, 43 aa, Artificial Sequence
  GFR-binding peptide
  MOD_RES (1), (3), (37): Xaa is C or S
  MOD_RES (15), (16), (17), (18), (19): Xaa is A or G
  MOD_RES (20), (21), (22), (23): Xaa is A or G or is absent
XGXSRVVMNEYKFKXXXXXXXXXLYLVSIPELKTPAXTPKTVH

SEQ ID NO: 26966 - protein, 38 aa, Artificial Sequence
  GFR-binding peptide
  MOD_RES (1), (3), (37), (38): Xaa is C or S
  MOD_RES (15), (16), (17), (18), (19): Xaa is A or G
  MOD_RES (20), (21), (22), (23): Xaa is A or G or is absent
XGXSRVVMNEYKFKXXXXXXXXXLYLVSIPELKTPAXX

SEQ ID NO: 26967 - protein, 36 aa, Artificial Sequence; identical to SEQ ID NO: 5841
  GFR-binding peptide
  MOD_RES (2), (33), (34): Xaa is C or S

SEQ ID NO: 26968 - protein, 37 aa, Artificial Sequence
  GFR-binding peptide
  MOD_RES (34), (34): Xaa is C or S
  MOD_RES (12), (13), (14), (15), (16): Xaa is A or G
  MOD_RES (17), (18), (19), (20): Xaa is A or G or is absent
SRVVMNEYQKYXXXXXXXXXIYLVSIPSLKTPAXTPK

SEQ ID NO: 26969 - protein, 36 aa, Artificial Sequence
  GFR-binding peptide
  MOD_RES (1), (3), (35), (36): Xaa is C or S
XGXARVVMNEYKFKIVNSSDDLYLVSIPELQTPAXX

SEQ ID NO: 26970 - protein, 36 aa, Artificial Sequence; identical to SEQ ID NO: 5844
  GFR-binding peptide
  MOD_RES (1), (3), (35), (36): Xaa is C or S

SEQ ID NO: 26971 - protein, 40 aa, Artificial Sequence; identical to SEQ ID NO: 5845
  GFR-binding peptide
  MOD_RES (1), (36), (37): Xaa is C or S
  MOD_RES (14), (15), (16), (17), (18): Xaa is A or G
  MOD_RES (19), (20), (21), (22): Xaa is A or G or is absent

SEQ ID NO: 26972 - protein, 40 aa, Artificial Sequence
  GFR-binding peptide
  MOD_RES (34), (35): Xaa is C or S
  MOD_RES (12), (13), (14), (15), (16): Xaa is A or G
  MOD_RES (17), (18), (19), (20): Xaa is A or G or is absent
GEVVMEEYKFKXXXXXXXXXLYLMSIPELETPVXXAKPIS

SEQ ID NO: 26973 - protein, 35 aa, Artificial Sequence; identical to SEQ ID NO: 5848
  GFR-binding peptide
  MOD_RES (2), (33), (34): Xaa is C or S

SEQ ID NO: 26974 - protein, 39 aa, Artificial Sequence; identical to SEQ ID NO: 5849
  GFR-binding peptide
  MOD_RES (2), (34), (35): Xaa is C or S

SEQ ID NO: 26975 - protein, 34 aa, Artificial Sequence; identical to SEQ ID NO: 5851
  GFR-binding peptide
  MOD_RES (34), (34): Xaa is C or S
  MOD_RES (12), (13), (14), (15), (16): Xaa is A or G
  MOD_RES (17), (18), (19), (20): Xaa is A or G or is absent

SEQ ID NO: 26976 - protein, 42 aa, Artificial Sequence
  GFR-binding peptide
  MOD_RES (2), (4), (38), (39): Xaa is C or S
  MOD_RES (16), (17), (18), (19), (20): Xaa is A or G
  MOD_RES (21), (22), (23), (24): Xaa is A or G or is absent
RXGXESVAMGYHYKLXXXXXXXXXKYLISIPSLKTPVXXAKS

SEQ ID NO: 26977 - protein, 42 aa, Artificial Sequence
  GFR-binding peptide
  MOD_RES (1), (3), (37), (38): Xaa is C or S
  MOD_RES (15), (16), (17), (18), (19): Xaa is A or G
  MOD_RES (20), (21), (22), (23): Xaa is A or G or is absent
XGXAKVVMNEYKFKXXXXXXXXXLYLVSIPELKTPAXXAKPV

SEQ ID NO: 26978 - protein, 38 aa, Artificial Sequence; identical to SEQ ID NO: 5852
  GFR-binding peptide
  MOD_RES (33), (34): Xaa is C or S
  MOD_RES (11), (12), (13), (14), (15): Xaa is A or G
  MOD_RES (16), (17), (18), (19): Xaa is A or G or is absent

SEQ ID NO: 26979 - protein, 35 aa, Artificial Sequence
  GFR-binding peptide
  MOD_RES (1), (35): Xaa is C or S
  MOD_RES (13), (14), (15), (16), (17): Xaa is A or G
  MOD_RES (18), (19), (20), (21): Xaa is A or G or is absent
XARVVMNEYQKYXXXXXXXXXIYLVSIPSLQTPAX

SEQ ID NO: 26980 - protein, 37 aa, Artificial Sequence; identical to SEQ ID NO: 5853
  GFR-binding peptide
  MOD_RES (32), (33): Xaa is C or S

SEQ ID NO: 26981 - protein, 38 aa, Artificial Sequence; identical to SEQ ID NO: 5854
  GFR-binding peptide
  MOD_RES (33), (34): Xaa is C or S
  MOD_RES (11), (12), (13), (14), (15): Xaa is A or G
  MOD_RES (16), (17), (18), (19): Xaa is A or G or is absent

SEQ ID NO: 26982 - protein, 39 aa, Artificial Sequence; identical to SEQ ID NO: 5856
  GFR-binding peptide
  MOD_RES (2), (33), (34): Xaa is C or S

SEQ ID NO: 26983 - protein, 39 aa, Artificial Sequence
  GFR-binding peptide
  MOD_RES (1), (3), (36), (37): Xaa is C or S
  MOD_RES (14), (15), (16), (17), (18): Xaa is A or G
  MOD_RES (19), (20), (21), (22): Xaa is A or G or is absent
XKXSRVIMEYQKYXXXXXXXXXIYLISIPSLAQPVXXPA

SEQ ID NO: 26984 - protein, 33 aa, Artificial Sequence; identical to SEQ ID NO: 5857
  GFR-binding peptide
  MOD_RES (33), (33): Xaa is C or S

SEQ ID NO: 26985 - protein, 38 aa, Artificial Sequence
  GFR-binding peptide
  MOD_RES (1), (3), (37), (38): Xaa is C or S
  MOD_RES (15), (16), (17), (18), (19): Xaa is A or G
  MOD_RES (20), (21), (22), (23): Xaa is A or G or is absent
XGXAEVVMDEYQKYXXXXXXXXXIYLISIPSLRAPVXX

SEQ ID NO: 26986 - protein, 37 aa, Artificial Sequence
  GFR-binding peptide
  MOD_RES (32), (33): Xaa is C or S
ESVAMGRYKKLYTVVGKDFYLISIANLKTPVXXAKSA

SEQ ID NO: 26987 - protein, 35 aa, Artificial Sequence; identical to SEQ ID NO: 5859
  GFR-binding peptide
  MOD_RES (2), (34), (35): Xaa is C or S

SEQ ID NO: 26988 - protein, 35 aa, Artificial Sequence
  GFR-binding peptide
  MOD_RES (1), (3), (34), (35): Xaa is C or S
XKXSKVVMEYKFKVKPTRGVLYLISIPELDQPVXX

SEQ ID NO: 26989 - protein, 41 aa, Artificial Sequence; identical to SEQ ID NO: 5860
  GFR-binding peptide
  MOD_RES (2), (4), (38), (39): Xaa is C or S
  MOD_RES (16), (17), (18), (19), (20): Xaa is A or G
  MOD_RES (21), (22), (23), (24): Xaa is A or G or is absent

SEQ ID NO: 26990 - protein, 37 aa, Artificial Sequence; identical to SEQ ID NO: 5861
  GFR-binding peptide
  MOD_RES (31), (32): Xaa is C or S

SEQ ID NO: 26991 - protein, 36 aa, Artificial Sequence; identical to SEQ ID NO: 5866
  GFR-binding peptide
  MOD_RES (2), (35), (36): Xaa is C or S
  MOD_RES (13), (14), (15), (16), (17): Xaa is A or G
  MOD_RES (18), (19), (20), (21): Xaa is A or G or is absent

SEQ ID NO: 26992 - protein, 31 aa, Artificial Sequence; identical to SEQ ID NO: 5867
  GFR-binding peptide

SEQ ID NO: 26993 - protein, 37 aa, Artificial Sequence
  GFR-binding peptide
  MOD_RES (33), (34): Xaa is C or S
  MOD_RES (11), (12), (13), (14), (15): Xaa is A or G
  MOD_RES (16), (17), (18), (19): Xaa is A or G or is absent
EVVMDRYKKLXXXXXXXXXFYLISIANLRAPVXXSAP

SEQ ID NO: 26994 - protein, 40 aa, Artificial Sequence; identical to SEQ ID NO: 5868
  GFR-binding peptide
  MOD_RES (2), (4), (38), (39): Xaa is C or S
  MOD_RES (16), (17), (18), (19), (20): Xaa is A or G
  MOD_RES (21), (22), (23), (24): Xaa is A or G or is absent

SEQ ID NO: 26995 - protein, 40 aa, Artificial Sequence
  GFR-binding peptide
  MOD_RES (1), (35), (36): Xaa is C or S
  MOD_RES (13), (14), (15), (16), (17): Xaa is A or G
  MOD_RES (18), (19), (20), (21): Xaa is A or G or is absent
XSRVVMNEYKFKXXXXXXXXXLYLVSIPELKTPAXXPKPV

SEQ ID NO: 26996 - protein, 37 aa, Artificial Sequence
  GFR-binding peptide
  MOD_RES (2), (37): Xaa is C or S
  MOD_RES (15), (16), (17), (18), (19): Xaa is A or G
  MOD_RES (20), (21), (22), (23): Xaa is A or G or is absent
GXEAVSMGEEYKFKXXXXXXXXXLYLVSIPELKTPVX

SEQ ID NO: 26997 - protein, 33 aa, Artificial Sequence
  GFR-binding peptide
  MOD_RES (31), (32): Xaa is C or S
EVVMDYHYKLVVNNAADKYLISIPSLRAPVXXS

SEQ ID NO: 26998 - protein, 40 aa, Artificial Sequence; identical to SEQ ID NO: 5870
  GFR-binding peptide
  MOD_RES (2), (34), (35): Xaa is C or S

SEQ ID NO: 26999 - protein, 37 aa, Artificial Sequence; identical to SEQ ID NO: 5871
  GFR-binding peptide
  MOD_RES (1), (33), (34): Xaa is C or S

SEQ ID NO: 27000 - protein, 32 aa, Artificial Sequence; identical to SEQ ID NO: 5873
  GFR-binding peptide
  MOD_RES (31), (32): Xaa is C or S

SEQ ID NO: 27001 - protein, 30 aa, Artificial Sequence
  GFR-binding peptide
KVVMNEYQKYIVNNSSDIYLVSIPSLKTPA

SEQ ID NO: 27002 - protein, 35 aa, Artificial Sequence
  GFR-binding peptide
  MOD_RES (1), (35): Xaa is C or S
  MOD_RES (13), (14), (15), (16), (17): Xaa is A or G
  MOD_RES (18), (19), (20), (21): Xaa is A or G or is absent
XESVAMGEYKFKXXXXXXXXXLYLISIPELKTPVX

SEQ ID NO: 27003 - protein, 35 aa, Artificial Sequence
  GFR-binding peptide
  MOD_RES (33), (34): Xaa is C or S
  MOD_RES (11), (12), (13), (14), (15): Xaa is A or G
  MOD_RES (16), (17), (18), (19): Xaa is A or G or is absent
SVAMGEYQKYXXXXXXXXXIYLISIPSLKTPVXXA

SEQ ID NO: 27004 - protein, 39 aa, Artificial Sequence; identical to SEQ ID NO: 5877
  GFR-binding peptide
  MOD_RES (1), (3), (38), (39): Xaa is C or S
  MOD_RES (16), (17), (18), (19), (20): Xaa is A or G
  MOD_RES (21), (22), (23), (24): Xaa is A or G or is absent

SEQ ID NO: 27005 - protein, 32 aa, Artificial Sequence
  GFR-binding peptide
  MOD_RES (32), (32): Xaa is C or S
ESVAMGYHYKLYTVVGKDKYLISIPSLKTPVX

SEQ ID NO: 27006 - protein, 34 aa, Artificial Sequence; identical to SEQ ID NO: 5878
  GFR-binding peptide
  MOD_RES (1), (1): Xaa is C or S
  MOD_RES (13), (14), (15), (16), (17): Xaa is A or G
  MOD_RES (18), (19), (20), (21): Xaa is A or G or is absent

SEQ ID NO: 27007 - protein, 37 aa, Artificial Sequence
  GFR-binding peptide
  MOD_RES (31), (32): Xaa is C or S
RVVMNEYQKYIVNSSDDIYLVSIPSLQTPAXXPKPVT

SEQ ID NO: 27008 - protein, 43 aa, Artificial Sequence; identical to SEQ ID NO: 5882
  GFR-binding peptide
  MOD_RES (2), (4), (37), (38): Xaa is C or S
  MOD_RES (15), (16), (17), (18), (19): Xaa is A or G
  MOD_RES (20), (21), (22), (23): Xaa is A or G or is absent

SEQ ID NO: 27009 - protein, 41 aa, Artificial Sequence; identical to SEQ ID NO: 5883
  GFR-binding peptide
  MOD_RES (2), (4), (35), (36): Xaa is C or S

SEQ ID NO: 27010 - protein, 35 aa, Artificial Sequence; identical to SEQ ID NO: 5885
  GFR-binding peptide
  MOD_RES (2), (34), (35): Xaa is C or S

SEQ ID NO: 27011 - protein, 36 aa, Artificial Sequence; identical to SEQ ID NO: 5886
  GFR-binding peptide
  MOD_RES (2), (4), (36): Xaa is C or S

SEQ ID NO: 27012 - protein, 42 aa, Artificial Sequence; identical to SEQ ID NO: 5887
  GFR-binding peptide
  MOD_RES (2), (36): Xaa is C or S
  MOD_RES (14), (15), (16), (17), (18): Xaa is A or G
  MOD_RES (19), (20), (21), (22): Xaa is A or G or is absent

SEQ ID NO: 27013 - protein, 41 aa, Artificial Sequence
  GFR-binding peptide
  MOD_RES (2), (35), (36): Xaa is C or S
  MOD_RES (13), (14), (15), (16), (17): Xaa is A or G
  MOD_RES (18), (19), (20), (21): Xaa is A or G or is absent
KXSKVVMEYKFKXXXXXXXXXLYLISIPELDQPVXXPSASA

SEQ ID NO: 27014 - protein, 39 aa, Artificial Sequence
  GFR-binding peptide
  MOD_RES (33), (34): Xaa is C or S
  MOD_RES (11), (12), (13), (14), (15): Xaa is A or G
  MOD_RES (16), (17), (18), (19): Xaa is A or G or is absent
RVVMNEYQKYXXXXXXXXXIYLVSIPSLQTPAXXPKPVT

SEQ ID NO: 27015 - protein, 36 aa, Artificial Sequence
  GFR-binding peptide
  MOD_RES (1), (35), (36): Xaa is C or S
  MOD_RES (13), (14), (15), (16), (17): Xaa is A or G
  MOD_RES (18), (19), (20), (21): Xaa is A or G or is absent
XAKVVMNEYKFKXXXXXXXXXLYLVSIPELKTPAXX

SEQ ID NO: 27016 - protein, 44 aa, Artificial Sequence; identical to SEQ ID NO: 5895
  GFR-binding peptide
  MOD_RES (2), (4), (38), (39): Xaa is C or S
  MOD_RES (16), (17), (18), (19), (20): Xaa is A or G
  MOD_RES (21), (22), (23), (24): Xaa is A or G or is absent

SEQ ID NO: 27017 - protein, 38 aa, Artificial Sequence
  GFR-binding peptide
  MOD_RES (1), (33): Xaa is C or S
XSRVVMNEYKFKIVNSSDDLYLVSIPELKTPAXTPKTV

SEQ ID NO: 27018 - protein, 34 aa, Artificial Sequence; identical to SEQ ID NO: 5897
  GFR-binding peptide
  MOD_RES (2), (2): Xaa is C or S
  MOD_RES (13), (14), (15), (16), (17): Xaa is A or G
  MOD_RES (18), (19), (20), (21): Xaa is A or G or is absent

SEQ ID NO: 27019 - protein, 31 aa, Artificial Sequence; identical to SEQ ID NO: 5898
  GFR-binding peptide

SEQ ID NO: 27020 - protein, 32 aa, Artificial Sequence
  GFR-binding peptide
  MOD_RES (31), (32): Xaa is C or S
EVVMDEYKFKVVKENEDLYLMSIPELETPVXX

SEQ ID NO: 27021 - protein, 40 aa, Artificial Sequence; identical to SEQ ID NO: 5900
  GFR-binding peptide
  MOD_RES (2), (37), (38): Xaa is C or S
  MOD_RES (15), (16), (17), (18), (19): Xaa is A or G
  MOD_RES (20), (21), (22), (23): Xaa is A or G or is absent

SEQ ID NO: 27022 - protein, 42 aa, Artificial Sequence; identical to SEQ ID NO: 5901
  GFR-binding peptide
  MOD_RES (2), (4), (38), (39): Xaa is C or S
  MOD_RES (16), (17), (18), (19), (20): Xaa is A or G
  MOD_RES (21), (22), (23), (24): Xaa is A or G or is absent

SEQ ID NO: 27023 - protein, 34 aa, Artificial Sequence
  GFR-binding peptide
  MOD_RES (1), (33), (34): Xaa is C or S
XAEVVMDEYKFKVVNNAADLYLISIPELRAPVXX

SEQ ID NO: 27024 - protein, 39 aa, Artificial Sequence; identical to SEQ ID NO: 5904
  GFR-binding peptide
  MOD_RES (2), (4), (37), (38): Xaa is C or S
  MOD_RES (15), (16), (17), (18), (19): Xaa is A or G
  MOD_RES (20), (21), (22), (23): Xaa is A or G or is absent

SEQ ID NO: 27025 - protein, 39 aa, Artificial Sequence; identical to SEQ ID NO: 5907
  GFR-binding peptide
  MOD_RES (2), (4), (36), (37): Xaa is C or S

SEQ ID NO: 27026 - protein, 37 aa, Artificial Sequence
  GFR-binding peptide
  MOD_RES (2), (4), (36), (37): Xaa is C or S
RXGXESVAMGRYKKLYTVVGKDFYLISIANLKTPVXX

SEQ ID NO: 27027 - protein, 36 aa, Artificial Sequence; identical to SEQ ID NO: 5908
  GFR-binding peptide
  MOD_RES (2), (33), (34): Xaa is C or S

SEQ ID NO: 27028 - protein, 36 aa, Artificial Sequence
  GFR-binding peptide
  MOD_RES (31), (31): Xaa is C or S
RVVMNEYKFKIVNSSDDLYLVSIPELKTPAXTPKTV

SEQ ID NO: 27029 - protein, 40 aa, Artificial Sequence; identical to SEQ ID NO: 5912
  GFR-binding peptide
  MOD_RES (2), (4), (38), (39): Xaa is C or S
  MOD_RES (16), (17), (18), (19), (20): Xaa is A or G
  MOD_RES (21), (22), (23), (24): Xaa is A or G or is absent

SEQ ID NO: 27030 - protein, 36 aa, Artificial Sequence; identical to SEQ ID NO: 5913
  GFR-binding peptide
  MOD_RES (34), (35): Xaa is C or S
  MOD_RES (12), (13), (14), (15), (16): Xaa is A or G
  MOD_RES (17), (18), (19), (20): Xaa is A or G or is absent

SEQ ID NO: 27031 - protein, 30 aa, Artificial Sequence; identical to SEQ ID NO: 5914
  GFR-binding peptide

SEQ ID NO: 27032 - protein, 33 aa, Artificial Sequence
  GFR-binding peptide
  MOD_RES (1), (33): Xaa is C or S
XGEVVMDEYQKYVVKENEDIYLMSIPSLETPVX

SEQ ID NO: 27033 - protein, 33 aa, Artificial Sequence
  GFR-binding peptide
  MOD_RES (31), (32): Xaa is C or S
SRVIMEYQKYVKPKRGVIYLISIPSLAQPVXXP

SEQ ID NO: 27034 - protein, 39 aa, Artificial Sequence
  GFR-binding peptide
  MOD_RES (2), (34), (35): Xaa is C or S
GXGEVVMDEYKFKVVKENEDLYLMSIPELETPVXXAKPI

SEQ ID NO: 27035 - protein, 38 aa, Artificial Sequence
  GFR-binding peptide
  MOD_RES (1), (34), (35): Xaa is C or S
XEAVSMGEEYQKYTPVGMDDIYLVSIPSLKTPVXXAKG

SEQ ID NO: 27036 - protein, 38 aa, Artificial Sequence; identical to SEQ ID NO: 5916
  GFR-binding peptide
  MOD_RES (32), (33): Xaa is C or S

SEQ ID NO: 27037 - protein, 42 aa, Artificial Sequence
  GFR-binding peptide
  MOD_RES (2), (36), (37): Xaa is C or S
  MOD_RES (14), (15), (16), (17), (18): Xaa is A or G
  MOD_RES (19), (20), (21), (22): Xaa is A or G or is absent
GXGEVVMDEYQKYXXXXXXXXXIYLMSIPSLETPVXXAKPIK

SEQ ID NO: 27038 - protein, 40 aa, Artificial Sequence; identical to SEQ ID NO: 5918
  GFR-binding peptide
  MOD_RES (2), (4), (35), (36): Xaa is C or S

SEQ ID NO: 27039 - protein, 38 aa, Artificial Sequence
  GFR-binding peptide
  MOD_RES (1), (3), (38): Xaa is C or S
  MOD_RES (16), (17), (18), (19), (20): Xaa is A or G
  MOD_RES (21), (22), (23), (24): Xaa is A or G or is absent
XGXEAVSMGEEYKFKXXXXXXXXXLYLVSIPELKTPVX

SEQ ID NO: 27040 - protein, 41 aa, Artificial Sequence
  GFR-binding peptide
  MOD_RES (1), (3), (35), (36): Xaa is C or S
XGXGEVVMDEYKFKVVKENEDLYLMSIPELETPVXXAKPIK

SEQ ID NO: 27041 - protein, 35 aa, Artificial Sequence
  GFR-binding peptide
  MOD_RES (2), (34), (35): Xaa is C or S
GXESVAMGRYKKLYTVVGKDFYLISIANLKTPVXX

SEQ ID NO: 27042 - protein, 34 aa, Artificial Sequence; identical to SEQ ID NO: 5925
  GFR-binding peptide
  MOD_RES (2), (34): Xaa is C or S

SEQ ID NO: 27043 - protein, 39 aa, Artificial Sequence; identical to SEQ ID NO: 5926
  GFR-binding peptide
  MOD_RES (2), (33), (34): Xaa is C or S

SEQ ID NO: 27044 - protein, 37 aa, Artificial Sequence; identical to SEQ ID NO: 5928
  GFR-binding peptide
  MOD_RES (1), (3), (36), (37): Xaa is C or S

SEQ ID NO: 27045 - protein, 37 aa, Artificial Sequence
  GFR-binding peptide
  MOD_RES (1), (3), (37): Xaa is C or S
  MOD_RES (15), (16), (17), (18), (19): Xaa is A or G
  MOD_RES (20), (21), (22), (23): Xaa is A or G or is absent
XGXAKVVMNEYKFKXXXXXXXXXLYLVSIPELKTPAX

SEQ ID NO: 27046 - protein, 37 aa, Artificial Sequence
  GFR-binding peptide
  MOD_RES (2), (4), (36), (37): Xaa is C or S
HXGXAKVVMNEYKFKIVNNSSDLYLVSIPELKTPAXX

SEQ ID NO: 27047 - protein, 36 aa, Artificial Sequence
  GFR-binding peptide
  MOD_RES (34), (35): Xaa is C or S
  MOD_RES (12), (13), (14), (15), (16): Xaa is A or G
  MOD_RES (17), (18), (19), (20): Xaa is A or G or is absent
GEVVMDEYQKYXXXXXXXXXIYLMSIPSLETPVXXA

SEQ ID NO: 27048 - protein, 33 aa, Artificial Sequence
  GFR-binding peptide
  MOD_RES (2), (2): Xaa is C or S
GXSRVVMNEYQKYIVNSSDDIYLVSIPSLKTPA

SEQ ID NO: 27049 - protein, 32 aa, Artificial Sequence
  GFR-binding peptide
  MOD_RES (1), (32): Xaa is C or S
XSKVIMEYQKYIKPTKGIIYLISIPSLDQSVX

SEQ ID NO: 27050 - protein, 43 aa, Artificial Sequence
  GFR-binding peptide
  MOD_RES (1), (3), (37), (38): Xaa is C or S
  MOD_RES (15), (16), (17), (18), (19): Xaa is A or G
  MOD_RES (20), (21), (22), (23): Xaa is A or G or is absent
XGXGEVVMDEYQKYXXXXXXXXXIYLMSIPSLETPVXXAKPIK

SEQ ID NO: 27051 - protein, 37 aa, Artificial Sequence; identical to SEQ ID NO: 5931
  GFR-binding peptide
  MOD_RES (2), (37): Xaa is C or S
  MOD_RES (15), (16), (17), (18), (19): Xaa is A or G
  MOD_RES (20), (21), (22), (23): Xaa is A or G or is absent

SEQ ID NO: 27052 - protein, 41 aa, Artificial Sequence; identical to SEQ ID NO: 5932
  GFR-binding peptide
  MOD_RES (2), (4), (36), (37): Xaa is C or S

SEQ ID NO: 27053 - protein, 34 aa, Artificial Sequence
  GFR-binding peptide
  MOD_RES (2), (2): Xaa is C or S
  MOD_RES (13), (14), (15), (16), (17): Xaa is A or G
  MOD_RES (18), (19), (20), (21): Xaa is A or G or is absent
KXSKVIMEYKFKXXXXXXXXXLYLISIPELDQSV

SEQ ID NO: 27054 - protein, 40 aa, Artificial Sequence; identical to SEQ ID NO: 5934
  GFR-binding peptide
  MOD_RES (1), (34), (35): Xaa is C or S

SEQ ID NO: 27055 - protein, 37 aa, Artificial Sequence; identical to SEQ ID NO: 5936
  GFR-binding peptide
  MOD_RES (1), (36), (37): Xaa is C or S
  MOD_RES (14), (15), (16), (17), (18): Xaa is A or G
  MOD_RES (19), (20), (21), (22): Xaa is A or G or is absent

SEQ ID NO: 27056 - protein, 32 aa, Artificial Sequence; identical to SEQ ID NO: 5937
  GFR-binding peptide
  MOD_RES (32), (32): Xaa is C or S

SEQ ID NO: 27057 - protein, 39 aa, Artificial Sequence; identical to SEQ ID NO: 5938
  GFR-binding peptide
  MOD_RES (33), (34): Xaa is C or S
  MOD_RES (11), (12), (13), (14), (15): Xaa is A or G
  MOD_RES (16), (17), (18), (19): Xaa is A or G or is absent

SEQ ID NO: 27058 - protein, 34 aa, Artificial Sequence
  GFR-binding peptide
  MOD_RES (2), (34): Xaa is C or S
GXGEVVMDEYQKYVVKENEDIYLMSIPSLETPVX

SEQ ID NO: 27059 - protein, 34 aa, Artificial Sequence; identical to SEQ ID NO: 5940
  GFR-binding peptide
  MOD_RES (1), (3), (34): Xaa is C or S

SEQ ID NO: 27060 - protein, 36 aa, Artificial Sequence
  GFR-binding peptide
  MOD_RES (32), (33): Xaa is C or S
ARVVMNEYKFKIVNSSDDLYLVSIPELQTPAXXPKP

SEQ ID NO: 27061 - protein, 36 aa, Artificial Sequence
  GFR-binding peptide
  MOD_RES (34), (35): Xaa is C or S
  MOD_RES (12), (13), (14), (15), (16): Xaa is A or G
  MOD_RES (17), (18), (19), (20): Xaa is A or G or is absent
ARVVMNEYQKYXXXXXXXXXIYLVSIPSLQTPAXXP

SEQ ID NO: 27062 - protein, 40 aa, Artificial Sequence; identical to SEQ ID NO: 5943
  GFR-binding peptide
  MOD_RES (2), (35), (36): Xaa is C or S
  MOD_RES (13), (14), (15), (16), (17): Xaa is A or G
  MOD_RES (18), (19), (20), (21): Xaa is A or G or is absent

SEQ ID NO: 27063 - protein, 36 aa, Artificial Sequence; identical to SEQ ID NO: 5946
  GFR-binding peptide
  MOD_RES (2), (4), (36): Xaa is C or S

SEQ ID NO: 27064 - protein, 39 aa, Artificial Sequence
  GFR-binding peptide
  MOD_RES (2), (4), (35), (36): Xaa is C or S
SXKXSKVIMEYQKYIKPTKGIIYLISIPSLDQSVXXPSA

SEQ ID NO: 27065 - protein, 37 aa, Artificial Sequence
  GFR-binding peptide
  MOD_RES (1), (3), (37): Xaa is C or S
  MOD_RES (15), (16), (17), (18), (19): Xaa is A or G
  MOD_RES (20), (21), (22), (23): Xaa is A or G or is absent
XGXGEVVMDEYKFKXXXXXXXXXLYLMSIPELETPVX

SEQ ID NO: 27066 - protein, 37 aa, Artificial Sequence; identical to SEQ ID NO: 5952
  GFR-binding peptide
  MOD_RES (1), (35), (36): Xaa is C or S
  MOD_RES (13), (14), (15), (16), (17): Xaa is A or G
  MOD_RES (18), (19), (20), (21): Xaa is A or G or is absent

SEQ ID NO: 27067 - protein, 36 aa, Artificial Sequence; identical to SEQ ID NO: 5953
  GFR-binding peptide
  MOD_RES (2), (36): Xaa is C or S
  MOD_RES (14), (15), (16), (17), (18): Xaa is A or G
  MOD_RES (19), (20), (21), (22): Xaa is A or G or is absent

SEQ ID NO: 27068 - protein, 33 aa, Artificial Sequence; identical to SEQ ID NO: 5954
  GFR-binding peptide
  MOD_RES (12), (13), (14), (15), (16): Xaa is A or G
  MOD_RES (17), (18), (19), (20): Xaa is A or G or is absent

SEQ ID NO: 27069 - protein, 39 aa, Artificial Sequence
  GFR-binding peptide
  MOD_RES (1), (3), (35), (36): Xaa is C or S
XGXSRVVMNEYKFKIVNSSDDLYLVSIPELKTPAXXPKP

SEQ ID NO: 27070 - protein, 38 aa, Artificial Sequence
  GFR-binding peptide
  MOD_RES (1), (33), (34): Xaa is C or S
XAKVVMNEYKFKIVNNSSDLYLVSIPELKTPAXXAKPV

SEQ ID NO: 27071 - protein, 37 aa, Artificial Sequence; identical to SEQ ID NO: 5955
  GFR-binding peptide
  MOD_RES (33), (34): Xaa is C or S

SEQ ID NO: 27072 - protein, 41 aa, Artificial Sequence
  GFR-binding peptide
  MOD_RES (1), (3), (37), (38): Xaa is C or S
  MOD_RES (15), (16), (17), (18), (19): Xaa is A or G
  MOD_RES (20), (21), (22), (23): Xaa is A or G or is absent
XGXARVVMNEYKFKXXXXXXXXXLYLVSIPELQTPAXXPKP

SEQ ID NO: 27073 - protein, 36 aa, Artificial Sequence
  GFR-binding peptide
  MOD_RES (1), (35), (36): Xaa is C or S
  MOD_RES (13), (14), (15), (16), (17): Xaa is A or G
  MOD_RES (18), (19), (20), (21): Xaa is A or G or is absent
XGEVVMDEYQKYXXXXXXXXXIYLMSIPSLETPVXX

SEQ ID NO: 27074 - protein, 37 aa, Artificial Sequence
  GFR-binding peptide
  MOD_RES (33), (34): Xaa is C or S
  MOD_RES (11), (12), (13), (14), (15): Xaa is A or G
  MOD_RES (16), (17), (18), (19): Xaa is A or G or is absent
RVVMNEYQKYXXXXXXXXXIYLVSIPSLKTPAXXPKP

SEQ ID NO: 27075 - protein, 33 aa, Artificial Sequence; identical to SEQ ID NO: 5957
  GFR-binding peptide
  MOD_RES (33), (33): Xaa is C or S
  MOD_RES (11), (12), (13), (14), (15): Xaa is A or G
  MOD_RES (16), (17), (18), (19): Xaa is A or G or is absent

SEQ ID NO: 27076 - protein, 33 aa, Artificial Sequence
  GFR-binding peptide
  MOD_RES (1), (33): Xaa is C or S
XAEVVMDEYQKYVVNNAADIYLISIPSLRAPVX

SEQ ID NO: 27077 - protein, 41 aa, Artificial Sequence
  GFR-binding peptide
  MOD_RES (1), (35), (36): Xaa is C or S
  MOD_RES (13), (14), (15), (16), (17): Xaa is A or G
  MOD_RES (18), (19), (20), (21): Xaa is A or G or is absent
XAEVVMDYHYKLXXXXXXXXXKYLISIPSLRAPVXXSAPAA

SEQ ID NO: 27078 - protein, 38 aa, Artificial Sequence
  GFR-binding peptide
  MOD_RES (1), (35), (36): Xaa is C or S
  MOD_RES (13), (14), (15), (16), (17): Xaa is A or G
  MOD_RES (18), (19), (20), (21): Xaa is A or G or is absent
XAEVVMDRYKKLXXXXXXXXXFYLISIANLRAPVXXSA

SEQ ID NO: 27079 - protein, 38 aa, Artificial Sequence; identical to SEQ ID NO: 5964
  GFR-binding peptide
  MOD_RES (2), (34), (35): Xaa is C or S

SEQ ID NO: 27080 - protein, 42 aa, Artificial Sequence
  GFR-binding peptide
  MOD_RES (1), (3), (36), (37): Xaa is C or S
  MOD_RES (14), (15), (16), (17), (18): Xaa is A or G
  MOD_RES (19), (20), (21), (22): Xaa is A or G or is absent
XKXSRVIMEYQKYXXXXXXXXXIYLISIPSLAQPVXXPAASA

SEQ ID NO: 27081 - protein, 38 aa, Artificial Sequence; identical to SEQ ID NO: 5965
  GFR-binding peptide
  MOD_RES (1), (34), (35): Xaa is C or S
  MOD_RES (12), (13), (14), (15), (16): Xaa is A or G
  MOD_RES (17), (18), (19), (20): Xaa is A or G or is absent

SEQ ID NO: 27082 - protein, 34 aa, Artificial Sequence; identical to SEQ ID NO: 5966
  GFR-binding peptide
  MOD_RES (31), (32): Xaa is C or S

SEQ ID NO: 27083 - protein, 41 aa, Artificial Sequence; identical to SEQ ID NO: 5967
  GFR-binding peptide
  MOD_RES (1), (35), (36): Xaa is C or S
  MOD_RES (13), (14), (15), (16), (17): Xaa is A or G
  MOD_RES (18), (19), (20), (21): Xaa is A or G or is absent

SEQ ID NO: 27084 - protein, 37 aa, Artificial Sequence; identical to SEQ ID NO: 5968
  GFR-binding peptide
  MOD_RES (33), (34): Xaa is C or S
  MOD_RES (11), (12), (13), (14), (15): Xaa is A or G
  MOD_RES (16), (17), (18), (19): Xaa is A or G or is absent

SEQ ID NO: 27085 - protein, 39 aa, Artificial Sequence
  GFR-binding peptide
  MOD_RES (2), (4), (36): Xaa is C or S
HXGXSRVVMNEYKFKIVNSSDDLYLVSIPELKTPAXTPK

SEQ ID NO: 27086 - protein, 38 aa, Artificial Sequence; identical to SEQ ID NO: 5971
  GFR-binding peptide
  MOD_RES (32), (33): Xaa is C or S

SEQ ID NO: 27087 - protein, 32 aa, Artificial Sequence; identical to SEQ ID NO: 5972
  GFR-binding peptide
  MOD_RES (2), (2): Xaa is C or S

SEQ ID NO: 27088 - protein, 39 aa, Artificial Sequence; identical to SEQ ID NO: 5973
  GFR-binding peptide
  MOD_RES (1), (34), (35): Xaa is C or S

SEQ ID NO: 27089 - protein, 39 aa, Artificial Sequence
  GFR-binding peptide
  MOD_RES (1), (35): Xaa is C or S
  MOD_RES (13), (14), (15), (16), (17): Xaa is A or G
  MOD_RES (18), (19), (20), (21): Xaa is A or G or is absent
XSRVVMNEYKFKXXXXXXXXXLYLVSIPELKTPAXTPKT

SEQ ID NO: 27090 - protein, 40 aa, Artificial Sequence
  GFR-binding peptide
  MOD_RES (2), (4), (38), (39): Xaa is C or S
  MOD_RES (16), (17), (18), (19), (20): Xaa is A or G
  MOD_RES (21), (22), (23), (24): Xaa is A or G or is absent
HXGXAKVVMNEYKFKXXXXXXXXXLYLVSIPELKTPAXXA

SEQ ID NO: 27091 - protein, 30 aa, Artificial Sequence; identical to SEQ ID NO: 5976
  GFR-binding peptide

SEQ ID NO: 27092 - protein, 37 aa, Artificial Sequence; identical to SEQ ID NO: 5978
  GFR-binding peptide
  MOD_RES (1), (3), (35), (36): Xaa is C or S

SEQ ID NO: 27093 - protein, 36 aa, Artificial Sequence; identical to SEQ ID NO: 5980
  GFR-binding peptide
  MOD_RES (2), (36): Xaa is C or S
  MOD_RES (14), (15), (16), (17), (18): Xaa is A or G
  MOD_RES (19), (20), (21), (22): Xaa is A or G or is absent

SEQ ID NO: 27094 - protein, 40 aa, Artificial Sequence; identical to SEQ ID NO: 5981
  GFR-binding peptide
  MOD_RES (1), (35), (36): Xaa is C or S
  MOD_RES (13), (14), (15), (16), (17): Xaa is A or G
  MOD_RES (18), (19), (20), (21): Xaa is A or G or is absent

SEQ ID NO: 27095 - protein, 34 aa, Artificial Sequence
  GFR-binding peptide
  MOD_RES (34), (34): Xaa is C or S
  MOD_RES (12), (13), (14), (15), (16): Xaa is A or G
  MOD_RES (17), (18), (19), (20): Xaa is A or G or is absent
GEVVMEEYQKYXXXXXXXXXIYLMSIPSLETPVX

SEQ ID NO: 27096 - protein, 32 aa, Artificial Sequence; identical to SEQ ID NO: 5983
  GFR-binding peptide
  MOD_RES (11), (12), (13), (14), (15): Xaa is A or G
  MOD_RES (16), (17), (18), (19): Xaa is A or G or is absent

SEQ ID NO: 27097 - protein, 35 aa, Artificial Sequence
  GFR-binding peptide
  MOD_RES (33), (33): Xaa is C or S
  MOD_RES (11), (12), (13), (14), (15): Xaa is A or G
  MOD_RES (16), (17), (18), (19): Xaa is A or G or is absent
RVVMNEYKFKXXXXXXXXXLYLVSIPELKTPAXTP

SEQ ID NO: 27098 - protein, 42 aa, Artificial Sequence; identical to SEQ ID NO: 5986
  GFR-binding peptide
  MOD_RES (1), (3), (36), (37): Xaa is C or S
  MOD_RES (14), (15), (16), (17), (18): Xaa is A or G
  MOD_RES (19), (20), (21), (22): Xaa is A or G or is absent

SEQ ID NO: 27099 - protein, 37 aa, Artificial Sequence
  GFR-binding peptide
  MOD_RES (1), (3), (35), (36): Xaa is C or S
XGXAEVVMDRYKKLVVNNAADFYLISIANLRAPVXXS

SEQ ID NO: 27100 - protein, 40 aa, Artificial Sequence
  GFR-binding peptide
  MOD_RES (1), (3), (37), (38): Xaa is C or S
  MOD_RES (15), (16), (17), (18), (19): Xaa is A or G
  MOD_RES (20), (21), (22), (23): Xaa is A or G or is absent
XGXGEVVMDEYQKYXXXXXXXXXIYLMSIPSLETPVXXAK

SEQ ID NO: 27101 - protein, 34 aa, Artificial Sequence
  GFR-binding peptide
  MOD_RES (1), (34): Xaa is C or S
XEAVSMGEEYQKYTPVGMDDIYLVSIPSLKTPVX

SEQ ID NO: 27102 - protein, 37 aa, Artificial Sequence; identical to SEQ ID NO: 5991
  GFR-binding peptide
  MOD_RES (1), (33), (34): Xaa is C or S

SEQ ID NO: 27103 - protein, 35 aa, Artificial Sequence; identical to SEQ ID NO: 5992
  GFR-binding peptide
  MOD_RES (31), (32): Xaa is C or S

SEQ ID NO: 27104 - protein, 33 aa, Artificial Sequence; identical to SEQ ID NO: 5993
  GFR-binding peptide
  MOD_RES (32), (33): Xaa is C or S

SEQ ID NO: 27105 - protein, 39 aa, Artificial Sequence; identical to SEQ ID NO: 5994
  GFR-binding peptide
  MOD_RES (1), (3), (35), (36): Xaa is C or S

SEQ ID NO: 27106 - protein, 33 aa, Artificial Sequence
  GFR-binding peptide
  MOD_RES (2), (2): Xaa is C or S
GXAEVVMDRYKKLVVNNAADFYLISIANLRAPV

SEQ ID NO: 27107 - protein, 33 aa, Artificial Sequence
  GFR-binding peptide
  MOD_RES (31), (32): Xaa is C or S
EVVMDEYQKYVVKENEDIYLMSIPSLETPVXXA

SEQ ID NO: 27108 - protein, 35 aa, Artificial Sequence; identical to SEQ ID NO: 5996
  GFR-binding peptide
  MOD_RES (33), (34): Xaa is C or S
  MOD_RES (11), (12), (13), (14), (15): Xaa is A or G
  MOD_RES (16), (17), (18), (19): Xaa is A or G or is absent

SEQ ID NO: 27109 - protein, 36 aa, Artificial Sequence; identical to SEQ ID NO: 5997
  GFR-binding peptide
  MOD_RES (1), (33), (34): Xaa is C or S

SEQ ID NO: 27110 - protein, 35 aa, Artificial Sequence
  GFR-binding peptide
  MOD_RES (1), (3): Xaa is C or S
XGXEAVSMGEEYKFKTPVGMDDLYLVSIPELKTPV

SEQ ID NO: 27111 - protein, 32 aa, Artificial Sequence
  GFR-binding peptide
  MOD_RES (1), (1): Xaa is C or S
XESVAMGEYQKYYTVVGKDIYLISIPSLKTPV

SEQ ID NO: 27112 - protein, 38 aa, Artificial Sequence
  GFR-binding peptide
  MOD_RES (1), (33), (34): Xaa is C or S
XAKVVMNEYQKYIVNNSSDIYLVSIPSLKTPAXXAKPV

SEQ ID NO: 27113 - protein, 35 aa, Artificial Sequence
  GFR-binding peptide
  MOD_RES (2), (35): Xaa is C or S
  MOD_RES (13), (14), (15), (16), (17): Xaa is A or G
  MOD_RES (18), (19), (20), (21): Xaa is A or G or is absent
KXSRVIMEYQKYXXXXXXXXXIYLISIPSLAQPVX

SEQ ID NO: 27114 - protein, 36 aa, Artificial Sequence
  GFR-binding peptide
  MOD_RES (1), (34), (35): Xaa is C or S
  MOD_RES (12), (13), (14), (15), (16): Xaa is A or G
  MOD_RES (17), (18), (19), (20): Xaa is A or G or is absent
XSRVIMEYQKYXXXXXXXXXIYLISIPSLAQPVXXP

SEQ ID NO: 27115 - protein, 34 aa, Artificial Sequence
  GFR-binding peptide
  MOD_RES (33), (34): Xaa is C or S
  MOD_RES (11), (12), (13), (14), (15): Xaa is A or G
  MOD_RES (16), (17), (18), (19): Xaa is A or G or is absent
SKVIMEYKFKXXXXXXXXXLYLISIPELDQSVXX

SEQ ID NO: 27116 - protein, 41 aa, Artificial Sequence; identical to SEQ ID NO: 6000
  GFR-binding peptide
  MOD_RES (2), (36), (37): Xaa is C or S
  MOD_RES (14), (15), (16), (17), (18): Xaa is A or G
  MOD_RES (19), (20), (21), (22): Xaa is A or G or is absent

SEQ ID NO: 27117 - protein, 38 aa, Artificial Sequence
  GFR-binding peptide
  MOD_RES (2), (36), (37): Xaa is C or S
  MOD_RES (14), (15), (16), (17), (18): Xaa is A or G
  MOD_RES (19), (20), (21), (22): Xaa is A or G or is absent
GXSRVVMNEYKFKXXXXXXXXXLYLVSIPELKTPAXXP

SEQ ID NO: 27118 - protein, 36 aa, Artificial Sequence
  GFR-binding peptide
  MOD_RES (32), (33): Xaa is C or S
AEVVMDEYQKYVVNNAADIYLISIPSLRAPVXXSAP

SEQ ID NO: 27119 - protein, 39 aa, Artificial Sequence; identical to SEQ ID NO: 6004
  GFR-binding peptide
  MOD_RES (1), (34), (35): Xaa is C or S
  MOD_RES (12), (13), (14), (15), (16): Xaa is A or G
  MOD_RES (17), (18), (19), (20): Xaa is A or G or is absent

SEQ ID NO: 27120 - protein, 40 aa, Artificial Sequence
  GFR-binding peptide
  MOD_RES (1), (3), (37), (38): Xaa is C or S
  MOD_RES (15), (16), (17), (18), (19): Xaa is A or G
  MOD_RES (20), (21), (22), (23): Xaa is A or G or is absent
XGXAKVVMNEYQKYXXXXXXXXXIYLVSIPSLKTPAXXAK

SEQ ID NO: 27121 - protein, 39 aa, Artificial Sequence
  GFR-binding peptide
  MOD_RES (1), (3), (34), (35): Xaa is C or S
XKXSRVIMEYKFKVKPKRGVLYLISIPELAQPVXXPAAS

SEQ ID NO: 27122 - protein, 33 aa, Artificial Sequence
  GFR-binding peptide
  MOD_RES (32), (32): Xaa is C or S
SRVVMNEYQKYIVNSSDDIYLVSIPSLKTPAXT

SEQ ID NO: 27123 - protein, 42 aa, Artificial Sequence; identical to SEQ ID NO: 6005
  GFR-binding peptide
  MOD_RES (2), (36), (37): Xaa is C or S
  MOD_RES (14), (15), (16), (17), (18): Xaa is A or G
  MOD_RES (19), (20), (21), (22): Xaa is A or G or is absent

SEQ ID NO: 27124 - protein, 33 aa, Artificial Sequence
  GFR-binding peptide
  MOD_RES (33), (33): Xaa is C or S
  MOD_RES (11), (12), (13), (14), (15): Xaa is A or G
  MOD_RES (16), (17), (18), (19): Xaa is A or G or is absent
RVVMNEYQKYXXXXXXXXXIYLVSIPSLQTPAX

SEQ ID NO: 27125 - protein, 32 aa, Artificial Sequence
  GFR-binding peptide
  MOD_RES (1), (1): Xaa is C or S
XAKVVMNEYKFKIVNNSSDLYLVSIPELKTPA

SEQ ID NO: 27126 - protein, 38 aa, Artificial Sequence
  GFR-binding peptide
  MOD_RES (2), (4), (38): Xaa is C or S
  MOD_RES (16), (17), (18), (19), (20): Xaa is A or G
  MOD_RES (21), (22), (23), (24): Xaa is A or G or is absent
RXGXESVAMGEYQKYXXXXXXXXXIYLISIPSLKTPVX

SEQ ID NO: 27127 - protein, 39 aa, Artificial Sequence
  GFR-binding peptide
  MOD_RES (1), (3), (35), (36): Xaa is C or S
XGXARVVMNEYKFKIVNSSDDLYLVSIPELQTPAXXPKP

SEQ ID NO: 27128 - protein, 35 aa, Artificial Sequence
  GFR-binding peptide
  MOD_RES (31), (32): Xaa is C or S
SVAMGYHYKLYTVVGKDKYLISIPSLKTPVXXAKS

SEQ ID NO: 27129 - protein, 37 aa, Artificial Sequence
  GFR-binding peptide
  MOD_RES (2), (34), (35): Xaa is C or S
GXAKVVMNEYKFKIVNNSSDLYLVSIPELKTPAXXAK

SEQ ID NO: 27130 - protein, 38 aa, Artificial Sequence
  GFR-binding peptide
  MOD_RES (1), (3), (35), (36): Xaa is C or S
XGXARVVMNEYKFKIVNSSDDLYLVSIPELQTPAXXPK

SEQ ID NO: 27131 - protein, 35 aa, Artificial Sequence; identical to SEQ ID NO: 6013
  GFR-binding peptide
  MOD_RES (34), (35): Xaa is C or S
  MOD_RES (12), (13), (14), (15), (16): Xaa is A or G
  MOD_RES (17), (18), (19), (20): Xaa is A or G or is absent

SEQ ID NO: 27132 - protein, 40 aa, Artificial Sequence; identical to SEQ ID NO: 6014
  GFR-binding peptide
  MOD_RES (1), (3), (36), (37): Xaa is C or S
  MOD_RES (14), (15), (16), (17), (18): Xaa is A or G
  MOD_RES (19), (20), (21), (22): Xaa is A or G or is absent

SEQ ID NO: 27133 - protein, 40 aa, Artificial Sequence
  GFR-binding peptide
  MOD_RES (2), (34), (35): Xaa is C or S
GXGEVVMEEYKFKVVKDYEDLYLMSIPELETPVXXAKPIS

SEQ ID NO: 27134 - protein, 36 aa, Artificial Sequence
  GFR-binding peptide
  MOD_RES (1), (3), (34), (35): Xaa is C or S
XKXSKVIMEYKFKIKPTKGILYLISIPELDQSVXXP

SEQ ID NO: 27135 - protein, 36 aa, Artificial Sequence; identical to SEQ ID NO: 6017
  GFR-binding peptide
  MOD_RES (2), (4), (35), (36): Xaa is C or S

SEQ ID NO: 27136 - protein, 34 aa, Artificial Sequence
  GFR-binding peptide
  MOD_RES (34), (34): Xaa is C or S
  MOD_RES (12), (13), (14), (15), (16): Xaa is A or G
  MOD_RES (17), (18), (19), (20): Xaa is A or G or is absent
ARVVMNEYKFKXXXXXXXXXLYLVSIPELQTPAX

SEQ ID NO: 27137 - protein, 36 aa, Artificial Sequence
  GFR-binding peptide
  MOD_RES (2), (34), (35): Xaa is C or S
GXARVVMNEYKFKIVNSSDDLYLVSIPELQTPAXXP

SEQ ID NO: 27138 - protein, 39 aa, Artificial Sequence; identical to SEQ ID NO: 6018
  GFR-binding peptide
  MOD_RES (1), (35), (36): Xaa is C or S
  MOD_RES (13), (14), (15), (16), (17): Xaa is A or G
  MOD_RES (18), (19), (20), (21): Xaa is A or G or is absent

SEQ ID NO: 27139 - protein, 33 aa, Artificial Sequence
  GFR-binding peptide
  MOD_RES (32), (33): Xaa is C or S
AKVVMNEYQKYIVNNSSDIYLVSIPSLKTPAXX

SEQ ID NO: 27140 - protein, 39 aa, Artificial Sequence
  GFR-binding peptide
  MOD_RES (2), (4), (38), (39): Xaa is C or S
  MOD_RES (16), (17), (18), (19), (20): Xaa is A or G
  MOD_RES (21), (22), (23), (24): Xaa is A or G or is absent
HXGXAKVVMNEYKFKXXXXXXXXXLYLVSIPELKTPAXX

SEQ ID NO: 27141 - protein, 36 aa, Artificial Sequence
  GFR-binding peptide
  MOD_RES (2), (33), (34): Xaa is C or S
KXSKVIMEYQKYIKPTKGIIYLISIPSLDQSVXXPS

SEQ ID NO: 27142 - protein, 37 aa, Artificial Sequence
  GFR-binding peptide
  MOD_RES (2), (4): Xaa is C or S
  MOD_RES (16), (17), (18), (19), (20): Xaa is A or G
  MOD_RES (21), (22), (23), (24): Xaa is A or G or is absent
HXGXARVVMNEYKFKXXXXXXXXXLYLVSIPELQTPA

SEQ ID NO: 27143 - protein, 37 aa, Artificial Sequence
  GFR-binding peptide
  MOD_RES (2), (36), (37): Xaa is C or S
  MOD_RES (14), (15), (16), (17), (18): Xaa is A or G
  MOD_RES (19), (20), (21), (22): Xaa is A or G or is absent
GXAEVVMDYHYKLXXXXXXXXXKYLISIPSLRAPVXX

SEQ ID NO: 27144 - protein, 35 aa, Artificial Sequence
  GFR-binding peptide
  MOD_RES (2), (35): Xaa is C or S
GXEAVSMGEEYKFKTPVGMDDLYLVSIPELKTPVX

SEQ ID NO: 27145 - protein, 32 aa, Artificial Sequence
  GFR-binding peptide
  MOD_RES (1), (1): Xaa is C or S
XESVAMGEYKFKYTVVGKDLYLISIPELKTPV

SEQ ID NO: 27146 - protein, 35 aa, Artificial Sequence
  GFR-binding peptide
  MOD_RES (2), (4), (35): Xaa is C or S
SXKXSKVIMEYQKYIKPTKGIIYLISIPSLDQSVX

SEQ ID NO: 27147 - protein, 36 aa, Artificial Sequence; identical to SEQ ID NO: 6025
  GFR-binding peptide
  MOD_RES (32), (33): Xaa is C or S

SEQ ID NO: 27148 - protein, 43 aa, Artificial Sequence
  GFR-binding peptide
  MOD_RES (1), (3), (37): Xaa is C or S
  MOD_RES (15), (16), (17), (18), (19): Xaa is A or G
  MOD_RES (20), (21), (22), (23): Xaa is A or G or is absent
XGXSRVVMNEYQKYXXXXXXXXXIYLVSIPSLKTPAXTPKTVH

SEQ ID NO: 27149 - protein, 39 aa, Artificial Sequence; identical to SEQ ID NO: 6026
  GFR-binding peptide
  MOD_RES (1), (3), (37): Xaa is C or S
  MOD_RES (15), (16), (17), (18), (19): Xaa is A or G
  MOD_RES (20), (21), (22), (23): Xaa is A or G or is absent

SEQ ID NO: 27150 - protein, 36 aa, Artificial Sequence
  GFR-binding peptide
  MOD_RES (32), (33): Xaa is C or S
GEVVMEEYKFKVVKDYEDLYLMSIPELETPVXXAKP

SEQ ID NO: 27151 - protein, 33 aa, Artificial Sequence; identical to SEQ ID NO: 6027
  GFR-binding peptide
  MOD_RES (2), (2): Xaa is C or S

SEQ ID NO: 27152 - protein, 37 aa, Artificial Sequence
  GFR-binding peptide
  MOD_RES (2), (34): Xaa is C or S
GXSRVVMNEYQKYIVNSSDDIYLVSIPSLKTPAXTPK

SEQ ID NO: 27153 - protein, 32 aa, Artificial Sequence
  GFR-binding peptide
  MOD_RES (31), (32): Xaa is C or S
SKVIMEYQKYIKPTKGIIYLISIPSLDQSVXX

SEQ ID NO: 27154 - protein, 36 aa, Artificial Sequence
  GFR-binding peptide
  MOD_RES (33), (34): Xaa is C or S
  MOD_RES (11), (12), (13), (14), (15): Xaa is A or G
  MOD_RES (16), (17), (18), (19): Xaa is A or G or is absent
RVVMNEYKFKXXXXXXXXXLYLVSIPELKTPAXXPK

SEQ ID NO: 27155 - protein, 36 aa, Artificial Sequence
  GFR-binding peptide
  MOD_RES (2), (34), (35): Xaa is C or S
GXSRVVMNEYKFKIVNSSDDLYLVSIPELKTPAXXP

SEQ ID NO: 27156 - protein, 36 aa, Artificial Sequence
  GFR-binding peptide
  MOD_RES (2), (34), (35): Xaa is C or S
GXGEVVMEEYQKYVVKDYEDIYLMSIPSLETPVXXA

SEQ ID NO: 27157 - protein, 42 aa, Artificial Sequence; identical to SEQ ID NO: 6036
  GFR-binding peptide
  MOD_RES (1), (3), (38), (39): Xaa is C or S
  MOD_RES (16), (17), (18), (19), (20): Xaa is A or G
  MOD_RES (21), (22), (23), (24): Xaa is A or G or is absent

SEQ ID NO: 27158 - protein, 34 aa, Artificial Sequence; identical to SEQ ID NO: 6037
  GFR-binding peptide
  MOD_RES (34), (34): Xaa is C or S
  MOD_RES (12), (13), (14), (15), (16): Xaa is A or G
  MOD_RES (17), (18), (19), (20): Xaa is A or G or is absent

SEQ ID NO: 27159 - protein, 37 aa, Artificial Sequence; identical to SEQ ID NO: 6039
  GFR-binding peptide
  MOD_RES (2), (4): Xaa is C or S
  MOD_RES (16), (17), (18), (19), (20): Xaa is A or G
  MOD_RES (21), (22), (23), (24): Xaa is A or G or is absent

SEQ ID NO: 27160 - protein, 39 aa, Artificial Sequence; identical to SEQ ID NO: 6040
  GFR-binding peptide
  MOD_RES (1), (3), (37), (38): Xaa is C or S
  MOD_RES (15), (16), (17), (18), (19): Xaa is A or G
  MOD_RES (20), (21), (22), (23): Xaa is A or G or is absent

SEQ ID NO: 27161 - protein, 41 aa, Artificial Sequence; identical to SEQ ID NO: 6041
  GFR-binding peptide
  MOD_RES (2), (4), (36), (37): Xaa is C or S

SEQ ID NO: 27162 - protein, 41 aa, Artificial Sequence
  GFR-binding peptide
  MOD_RES (35), (36): Xaa is C or S
  MOD_RES (13), (14), (15), (16), (17): Xaa is A or G
  MOD_RES (18), (19), (20), (21): Xaa is A or G or is absent
EAVSMGEEYQKYXXXXXXXXXIYLVSIPSLKTPVXXAKGVK

SEQ ID NO: 27163 - protein, 35 aa, Artificial Sequence
  GFR-binding peptide
  MOD_RES (1), (35): Xaa is C or S
  MOD_RES (13), (14), (15), (16), (17): Xaa is A or G
  MOD_RES (18), (19), (20), (21): Xaa is A or G or is absent
XAEVVMDEYQKYXXXXXXXXXIYLISIPSLRAPVX

SEQ ID NO: 27164 - protein, 32 aa, Artificial Sequence; identical to SEQ ID NO: 6044
  GFR-binding peptide
  MOD_RES (2), (2): Xaa is C or S

SEQ ID NO: 27165 - protein, 42 aa, Artificial Sequence; identical to SEQ ID NO: 6046
  GFR-binding peptide
  MOD_RES (1), (3), (36), (37): Xaa is C or S
  MOD_RES (14), (15), (16), (17), (18): Xaa is A or G
  MOD_RES (19), (20), (21), (22): Xaa is A or G or is absent

SEQ ID NO: 27166 - protein, 36 aa, Artificial Sequence
  GFR-binding peptide
  MOD_RES (2), (2): Xaa is C or S
  MOD_RES (15), (16), (17), (18), (19): Xaa is A or G
  MOD_RES (20), (21), (22), (23): Xaa is A or G or is absent
GXEAVSMGEEYQKYXXXXXXXXXIYLVSIPSLKTPV

SEQ ID NO: 27167 - protein, 36 aa, Artificial Sequence
  GFR-binding peptide
  MOD_RES (1), (33): Xaa is C or S
XSRVVMNEYQKYIVNSSDDIYLVSIPSLKTPAXTPK

SEQ ID NO: 27168 - protein, 39 aa, Artificial Sequence
  GFR-binding peptide
  MOD_RES (1), (3), (35), (36): Xaa is C or S
XGXGEVVMDEYQKYVVKENEDIYLMSIPSLETPVXXAKP

SEQ ID NO: 27169 - protein, 41 aa, Artificial Sequence; identical to SEQ ID NO: 6049
  GFR-binding peptide
  MOD_RES (1), (35), (36): Xaa is C or S
  MOD_RES (13), (14), (15), (16), (17): Xaa is A or G
  MOD_RES (18), (19), (20), (21): Xaa is A or G or is absent

SEQ ID NO: 27170 - protein, 39 aa, Artificial Sequence
  GFR-binding peptide
  MOD_RES (1), (33), (34): Xaa is C or S
XAKVVMNEYQKYIVNNSSDIYLVSIPSLKTPAXXAKPVA

SEQ ID NO: 27171 - protein, 33 aa, Artificial Sequence
  GFR-binding peptide
  MOD_RES (32), (33): Xaa is C or S
AEVVMDRYKKLVVNNAADFYLISIANLRAPVXX

SEQ ID NO: 27172 - protein, 35 aa, Artificial Sequence
  GFR-binding peptide
  MOD_RES (34), (35): Xaa is C or S
  MOD_RES (12), (13), (14), (15), (16): Xaa is A or G
  MOD_RES (17), (18), (19), (20): Xaa is A or G or is absent
ARVVMNEYKFKXXXXXXXXXLYLVSIPELQTPAXX

SEQ ID NO: 27173 - protein, 35 aa, Artificial Sequence; identical to SEQ ID NO: 6054
  GFR-binding peptide
  MOD_RES (31), (32): Xaa is C or S

SEQ ID NO: 27174 - protein, 39 aa, Artificial Sequence
  GFR-binding peptide
  MOD_RES (2), (34), (35): Xaa is C or S
GXESVAMGYHYKLYTVVGKDKYLISIPSLKTPVXXAKSA

SEQ ID NO: 27175 - protein, 36 aa, Artificial Sequence; identical to SEQ ID NO: 6055
  GFR-binding peptide
  MOD_RES (1), (33), (34): Xaa is C or S

SEQ ID NO: 27176 - protein, 42 aa, Artificial Sequence
  GFR-binding peptide
  MOD_RES (1), (3), (36), (37): Xaa is C or S
  MOD_RES (14), (15), (16), (17), (18): Xaa is A or G
  MOD_RES (19), (20), (21), (22): Xaa is A or G or is absent
XKXSKVIMEYQKYXXXXXXXXXIYLISIPSLDQSVXXPSASA

SEQ ID NO: 27177 - protein, 43 aa, Artificial Sequence; identical to SEQ ID NO: 6056
  GFR-binding peptide
  MOD_RES (2), (4), (38), (39): Xaa is C or S
  MOD_RES (16), (17), (18), (19), (20): Xaa is A or G
  MOD_RES (21), (22), (23), (24): Xaa is A or G or is absent

SEQ ID NO: 27178 - protein, 38 aa, Artificial Sequence
  GFR-binding peptide
  MOD_RES (33), (33): Xaa is C or S
  MOD_RES (11), (12), (13), (14), (15): Xaa is A or G
  MOD_RES (16), (17), (18), (19): Xaa is A or G or is absent
RVVMNEYKFKXXXXXXXXXLYLVSIPELKTPAXTPKTV

SEQ ID NO: 27179 - protein, 37 aa, Artificial Sequence
  GFR-binding peptide
  MOD_RES (2), (4), (36), (37): Xaa is C or S
RXGXESVAMGYHYKLYTVVGKDKYLISIPSLKTPVXX

SEQ ID NO: 27180 - protein, 37 aa, Artificial Sequence; identical to SEQ ID NO: 6058
  GFR-binding peptide
  MOD_RES (1), (35), (36): Xaa is C or S
  MOD_RES (13), (14), (15), (16), (17): Xaa is A or G
  MOD_RES (18), (19), (20), (21): Xaa is A or G or is absent

SEQ ID NO: 27181 - protein, 40 aa, Artificial Sequence
  GFR-binding peptide
  MOD_RES (2), (34): Xaa is C or S
GXSRVVMNEYKFKIVNSSDDLYLVSIPELKTPAXTPKTVH

SEQ ID NO: 27182 - protein, 35 aa, Artificial Sequence
  GFR-binding peptide
  MOD_RES (34), (34): Xaa is C or S
  MOD_RES (12), (13), (14), (15), (16): Xaa is A or G
  MOD_RES (17), (18), (19), (20): Xaa is A or G or is absent
SRVVMNEYQKYXXXXXXXXXIYLVSIPSLKTPAXT

SEQ ID NO: 27183 - protein, 35 aa, Artificial Sequence
  GFR-binding peptide
  MOD_RES (1), (3): Xaa is C or S
XGXEAVSMGEEYQKYTPVGMDDIYLVSIPSLKTPV

SEQ ID NO: 27184 - protein, 38 aa, Artificial Sequence
  GFR-binding peptide
  MOD_RES (33), (34): Xaa is C or S
  MOD_RES (11), (12), (13), (14), (15): Xaa is A or G
  MOD_RES (16), (17), (18), (19): Xaa is A or G or is absent
SRVIMEYKFKXXXXXXXXXLYLISIPELAQPVXXPAAS

SEQ ID NO: 27185 - protein, 35 aa, Artificial Sequence; identical to SEQ ID NO: 6060
  GFR-binding peptide
  MOD_RES (2), (33), (34): Xaa is C or S

SEQ ID NO: 27186 - protein, 34 aa, Artificial Sequence
  GFR-binding peptide
  MOD_RES (1), (1): Xaa is C or S
  MOD_RES (13), (14), (15), (16), (17): Xaa is A or G
  MOD_RES (18), (19), (20), (21): Xaa is A or G or is absent
XAEVVMDEYQKYXXXXXXXXXIYLISIPSLRAPV

SEQ ID NO: 27187 - protein, 35 aa, Artificial Sequence
  GFR-binding peptide
  MOD_RES (2), (4): Xaa is C or S
RXGXESVAMGEYKFKYTVVGKDLYLISIPELKTPV

SEQ ID NO: 27188 - protein, 34 aa, Artificial Sequence
  GFR-binding peptide
  MOD_RES (1), (33), (34): Xaa is C or S
XESVAMGEYKFKYTVVGKDLYLISIPELKTPVXX

SEQ ID NO: 27189 - protein, 37 aa, Artificial Sequence; identical to SEQ ID NO: 6062
  GFR-binding peptide
  MOD_RES (2), (35), (36): Xaa is C or S

SEQ ID NO: 27190 - protein, 39 aa, Artificial Sequence
  GFR-binding peptide
  MOD_RES (1), (33), (34): Xaa is C or S
XSRVVMNEYQKYIVNSSDDIYLVSIPSLKTPAXXPKPVY

SEQ ID NO: 27191 - protein, 39 aa, Artificial Sequence
  GFR-binding peptide
  MOD_RES (1), (3), (37), (38): Xaa is C or S
  MOD_RES (15), (16), (17), (18), (19): Xaa is A or G
  MOD_RES (20), (21), (22), (23): Xaa is A or G or is absent
XGXAEVVMDEYQKYXXXXXXXXXIYLISIPSLRAPVXXS

SEQ ID NO: 27192 - protein, 36 aa, Artificial Sequence
  GFR-binding peptide
  MOD_RES (2), (34), (35): Xaa is C or S
GXAKVVMNEYQKYIVNNSSDIYLVSIPSLKTPAXXA

SEQ ID NO: 27193 - protein, 38 aa, Artificial Sequence; identical to SEQ ID NO: 6066
  GFR-binding peptide
  MOD_RES (1), (3), (35), (36): Xaa is C or S

SEQ ID NO: 27194 - protein, 31 aa, Artificial Sequence
  GFR-binding peptide
  MOD_RES (31), (31): Xaa is C or S
EVVMDEYKFKVVNNAADLYLISIPELRAPVX

SEQ ID NO: 27195 - protein, 36 aa, Artificial Sequence
  GFR-binding peptide
  MOD_RES (34), (35): Xaa is C or S
  MOD_RES (12), (13), (14), (15), (16): Xaa is A or G
  MOD_RES (17), (18), (19), (20): Xaa is A or G or is absent
AEVVMDEYKFKXXXXXXXXXLYLISIPELRAPVXXS

SEQ ID NO: 27196 - protein, 33 aa, Artificial Sequence; identical to SEQ ID NO: 6069
  GFR-binding peptide
  MOD_RES (1), (32), (33): Xaa is C or S

SEQ ID NO: 27197 - protein, 36 aa, Artificial Sequence; identical to SEQ ID NO: 6073
  GFR-binding peptide
  MOD_RES (2), (36): Xaa is C or S
  MOD_RES (14), (15), (16), (17), (18): Xaa is A or G
  MOD_RES (19), (20), (21), (22): Xaa is A or G or is absent

SEQ ID NO: 27198 - protein, 40 aa, Artificial Sequence
  GFR-binding peptide
  MOD_RES (1), (34), (35): Xaa is C or S
  MOD_RES (12), (13), (14), (15), (16): Xaa is A or G
  MOD_RES (17), (18), (19), (20): Xaa is A or G or is absent
XSKVIMEYQKYXXXXXXXXXIYLISIPSLDQSVXXPSASA

SEQ ID NO: 27199 - protein, 34 aa, Artificial Sequence
  GFR-binding peptide
  MOD_RES (1), (34): Xaa is C or S
  MOD_RES (12), (13), (14), (15), (16): Xaa is A or G
  MOD_RES (17), (18), (19), (20): Xaa is A or G or is absent
XSKVVMEYQKYXXXXXXXXXIYLISIPSLDQPVX

SEQ ID NO: 27200 - protein, 36 aa, Artificial Sequence; identical to SEQ ID NO: 6077
  GFR-binding peptide
  MOD_RES (1), (3), (35), (36): Xaa is C or S

SEQ ID NO: 27201 - protein, 41 aa, Artificial Sequence
  GFR-binding peptide
  MOD_RES (1), (35), (36): Xaa is C or S
  MOD_RES (13), (14), (15), (16), (17): Xaa is A or G
  MOD_RES (18), (19), (20), (21): Xaa is A or G or is absent
XESVAMGYHYKLXXXXXXXXXKYLISIPSLKTPVXXAKSAK

SEQ ID NO: 27202 - protein, 36 aa, Artificial Sequence; identical to SEQ ID NO: 6078
  GFR-binding peptide
  MOD_RES (31), (32): Xaa is C or S

SEQ ID NO: 27203 - protein, 38 aa, Artificial Sequence; identical to SEQ ID NO: 6079
  GFR-binding peptide
  MOD_RES (2), (34), (35): Xaa is C or S

SEQ ID NO: 27204 - protein, 38 aa, Artificial Sequence; identical to SEQ ID NO: 6081
  GFR-binding peptide
  MOD_RES (1), (35), (36): Xaa is C or S
  MOD_RES (13), (14), (15), (16), (17): Xaa is A or G
  MOD_RES (18), (19), (20), (21): Xaa is A or G or is absent

SEQ ID NO: 27205 - protein, 40 aa, Artificial Sequence
  GFR-binding peptide
  MOD_RES (1), (3), (35), (36): Xaa is C or S
XGXARVVMNEYKFKIVNSSDDLYLVSIPELQTPAXXPKPV

SEQ ID NO: 27206 - protein, 34 aa, Artificial Sequence
  GFR-binding peptide
  MOD_RES (33), (34): Xaa is C or S
  MOD_RES (11), (12), (13), (14), (15): Xaa is A or G
  MOD_RES (16), (17), (18), (19): Xaa is A or G or is absent
EVVMEEYKFKXXXXXXXXXLYLMSIPELETPVXX

SEQ ID NO: 27207 - protein, 35 aa, Artificial Sequence
  GFR-binding peptide
  MOD_RES (1), (3), (35): Xaa is C or S
XGXARVVMNEYQKYIVNSSDDIYLVSIPSLQTPAX

SEQ ID NO: 27208 - protein, 41 aa, Artificial Sequence; identical to SEQ ID NO: 6085
  GFR-binding peptide
  MOD_RES (2), (35), (36): Xaa is C or S
  MOD_RES (13), (14), (15), (16), (17): Xaa is A or G
  MOD_RES (18), (19), (20), (21): Xaa is A or G or is absent

SEQ ID NO: 27209 - protein, 34 aa, Artificial Sequence
  GFR-binding peptide
  MOD_RES (34), (34): Xaa is C or S
  MOD_RES (12), (13), (14), (15), (16): Xaa is A or G
  MOD_RES (17), (18), (19), (20): Xaa is A or G or is absent
GEVVMDEYKFKXXXXXXXXXLYLMSIPELETPVX

SEQ ID NO: 27210 - protein, 37 aa, Artificial Sequence; identical to SEQ ID NO: 6086
  GFR-binding peptide
  MOD_RES (33), (34): Xaa is C or S
  MOD_RES (11), (12), (13), (14), (15): Xaa is A or G
  MOD_RES (16), (17), (18), (19): Xaa is A or G or is absent

SEQ ID NO: 27211 - protein, 40 aa, Artificial Sequence
  GFR-binding peptide
  MOD_RES (2), (4), (38), (39): Xaa is C or S
  MOD_RES (16), (17), (18), (19), (20): Xaa is A or G
  MOD_RES (21), (22), (23), (24): Xaa is A or G or is absent
RXGXESVAMGEYKFKXXXXXXXXXLYLISIPELKTPVXXA

SEQ ID NO: 27212 - protein, 34 aa, Artificial Sequence
  GFR-binding peptide
  MOD_RES (1), (33), (34): Xaa is C or S
XAEVVMDEYQKYVVNNAADIYLISIPSLRAPVXX

SEQ ID NO: 27213 - protein, 42 aa, Artificial Sequence; identical to SEQ ID NO: 6088
  GFR-binding peptide
  MOD_RES (1), (3), (36), (37): Xaa is C or S

SEQ ID NO: 27214 - protein, 41 aa, Artificial Sequence
  GFR-binding peptide
  MOD_RES (2), (4), (38), (39): Xaa is C or S
  MOD_RES (16), (17), (18), (19), (20): Xaa is A or G
  MOD_RES (21), (22), (23), (24): Xaa is A or G or is absent
HXGXAKVVMNEYQKYXXXXXXXXXIYLVSIPSLKTPAXXAK

SEQ ID NO: 27215 - protein, 40 aa, Artificial Sequence
  GFR-binding peptide
  MOD_RES (1), (36), (37): Xaa is C or S
  MOD_RES (14), (15), (16), (17), (18): Xaa is A or G
  MOD_RES (19), (20), (21), (22): Xaa is A or G or is absent
XEAVSMGEEYKFKXXXXXXXXXLYLVSIPELKTPVXXAKG

SEQ ID NO: 27216 - protein, 30 aa, Artificial Sequence; identical to SEQ ID NO: 6091
  GFR-binding peptide

SEQ ID NO: 27217 - protein, 40 aa, Artificial Sequence; identical to SEQ ID NO: 6092
  GFR-binding peptide
  MOD_RES (34), (35): Xaa is C or S
  MOD_RES (12), (13), (14), (15), (16): Xaa is A or G
  MOD_RES (17), (18), (19), (20): Xaa is A or G or is absent

SEQ ID NO: 27218 - protein, 31 aa, Artificial Sequence; identical to SEQ ID NO: 6093
  GFR-binding peptide
  MOD_RES (31), (31): Xaa is C or S

SEQ ID NO: 27219 - protein, 34 aa, Artificial Sequence; identical to SEQ ID NO: 6095
  GFR-binding peptide
  MOD_RES (13), (14), (15), (16), (17): Xaa is A or G
  MOD_RES (18), (19), (20), (21): Xaa is A or G or is absent

SEQ ID NO: 27220 - protein, 32 aa, Artificial Sequence
  GFR-binding peptide
  MOD_RES (31), (32): Xaa is C or S
EVVMDEYKFKVVNNAADLYLISIPELRAPVXX

SEQ ID NO: 27221 - protein, 35 aa, Artificial Sequence
  GFR-binding peptide
  MOD_RES (2), (4): Xaa is C or S
RXGXESVAMGEYQKYYTVVGKDIYLISIPSLKTPV

SEQ ID NO: 27222 - protein, 44 aa, Artificial Sequence; identical to SEQ ID NO: 6096
  GFR-binding peptide
  MOD_RES (2), (4), (38), (39): Xaa is C or S
  MOD_RES (16), (17), (18), (19), (20): Xaa is A or G
  MOD_RES (21), (22), (23), (24): Xaa is A or G or is absent

SEQ ID NO: 27223 - protein, 35 aa, Artificial Sequence; identical to SEQ ID NO: 6097
  GFR-binding peptide
  MOD_RES (33), (34): Xaa is C or S
  MOD_RES (11), (12), (13), (14), (15): Xaa is A or G
  MOD_RES (16), (17), (18), (19): Xaa is A or G or is absent

SEQ ID NO: 27224 - protein, 39 aa, Artificial Sequence; identical to SEQ ID NO: 6098
  GFR-binding peptide
  MOD_RES (34), (35): Xaa is C or S
  MOD_RES (12), (13), (14), (15), (16): Xaa is A or G
  MOD_RES (17), (18), (19), (20): Xaa is A or G or is absent

SEQ ID NO: 27225 - protein, 39 aa, Artificial Sequence
  GFR-binding peptide
  MOD_RES (1), (3), (37), (38): Xaa is C or S
  MOD_RES (15), (16), (17), (18), (19): Xaa is A or G
  MOD_RES (20), (21), (22), (23): Xaa is A or G or is absent
XGXSRVVMNEYKFKXXXXXXXXXLYLVSIPELKTPAXXP

SEQ ID NO: 27226 - protein, 37 aa, Artificial Sequence; identical to SEQ ID NO: 6099
  GFR-binding peptide
  MOD_RES (33), (34): Xaa is C or S
  MOD_RES (11), (12), (13), (14), (15): Xaa is A or G
  MOD_RES (16), (17), (18), (19): Xaa is A or G or is absent

SEQ ID NO: 27227 - protein, 38 aa, Artificial Sequence
  GFR-binding peptide
  MOD_RES (1), (3), (36), (37): Xaa is C or S
  MOD_RES (14), (15), (16), (17), (18): Xaa is A or G
  MOD_RES (19), (20), (21), (22): Xaa is A or G or is absent
XKXSRVIMEYKFKXXXXXXXXXLYLISIPELAQPVXXP

SEQ ID NO: 27228 - protein, 33 aa, Artificial Sequence
  GFR-binding peptide
  MOD_RES (12), (13), (14), (15), (16): Xaa is A or G
  MOD_RES (17), (18), (19), (20): Xaa is A or G or is absent
ESVAMGEYKFKXXXXXXXXXLYLISIPELKTPV

SEQ ID NO: 27229 - protein, 36 aa, Artificial Sequence
  GFR-binding peptide
  MOD_RES (33), (34): Xaa is C or S
  MOD_RES (11), (12), (13), (14), (15): Xaa is A or G
  MOD_RES (16), (17), (18), (19): Xaa is A or G or is absent
EVVMDEYKFKXXXXXXXXXLYLMSIPELETPVXXAK

SEQ ID NO: 27230 - protein, 38 aa, Artificial Sequence
  GFR-binding peptide
  MOD_RES (2), (4), (36), (37): Xaa is C or S
RXGXESVAMGRYKKLYTVVGKDFYLISIANLKTPVXXA

SEQ ID NO: 27231 - protein, 37 aa, Artificial Sequence
  GFR-binding peptide
  MOD_RES (2), (4), (35), (36): Xaa is C or S
SXKXSRVIMEYKFKVKPKRGVLYLISIPELAQPVXXP

SEQ ID NO: 27232 - protein, 39 aa, Artificial Sequence
  GFR-binding peptide
  MOD_RES (2), (4), (36), (37): Xaa is C or S
RXGXAEVVMDEYKFKVVNNAADLYLISIPELRAPVXXSA

SEQ ID NO: 27233 - protein, 38 aa, Artificial Sequence; identical to SEQ ID NO: 6102
  GFR-binding peptide
  MOD_RES (1), (36), (37): Xaa is C or S
  MOD_RES (14), (15), (16), (17), (18): Xaa is A or G
  MOD_RES (19), (20), (21), (22): Xaa is A or G or is absent

SEQ ID NO: 27234 - protein, 34 aa, Artificial Sequence
  GFR-binding peptide
  MOD_RES (33), (34): Xaa is C or S
  MOD_RES (11), (12), (13), (14), (15): Xaa is A or G
  MOD_RES (16), (17), (18), (19): Xaa is A or G or is absent
SRVIMEYKFKXXXXXXXXXLYLISIPELAQPVXX

SEQ ID NO: 27235 - protein, 35 aa, Artificial Sequence
  GFR-binding peptide
  MOD_RES (2), (2): Xaa is C or S
  MOD_RES (14), (15), (16), (17), (18): Xaa is A or G
  MOD_RES (19), (20), (21), (22): Xaa is A or G or is absent
GXESVAMGYHYKLXXXXXXXXXKYLISIPSLKTPV

SEQ ID NO: 27236 - protein, 40 aa, Artificial Sequence; identical to SEQ ID NO: 6103
  GFR-binding peptide
  MOD_RES (1), (3), (36), (37): Xaa is C or S

SEQ ID NO: 27237 - protein, 37 aa, Artificial Sequence; identical to SEQ ID NO: 6104
  GFR-binding peptide
  MOD_RES (2), (34): Xaa is C or S

SEQ ID NO: 27238 - protein, 33 aa, Artificial Sequence; identical to SEQ ID NO: 6105
  GFR-binding peptide
  MOD_RES (1), (3): Xaa is C or S

SEQ ID NO: 27239 - protein, 39 aa, Artificial Sequence
  GFR-binding peptide
  MOD_RES (1), (33), (34): Xaa is C or S
XAEVVMDEYKFKVVNNAADLYLISIPELRAPVXXSAPAA

SEQ ID NO: 27240 - protein, 39 aa, Artificial Sequence; identical to SEQ ID NO: 6107
  GFR-binding peptide
  MOD_RES (33), (34): Xaa is C or S
  MOD_RES (11), (12), (13), (14), (15): Xaa is A or G
  MOD_RES (16), (17), (18), (19): Xaa is A or G or is absent

SEQ ID NO: 27241 - protein, 35 aa, Artificial Sequence; identical to SEQ ID NO: 6108
  GFR-binding peptide
  MOD_RES (1), (3), (35): Xaa is C or S

SEQ ID NO: 27242 - protein, 40 aa, Artificial Sequence; identical to SEQ ID NO: 6109
  GFR-binding peptide
  MOD_RES (2), (35), (36): Xaa is C or S
  MOD_RES (13), (14), (15), (16), (17): Xaa is A or G
  MOD_RES (18), (19), (20), (21): Xaa is A or G or is absent

SEQ ID NO: 27243 - protein, 31 aa, Artificial Sequence
  GFR-binding peptide
  MOD_RES (1), (1): Xaa is C or S
XSKVVMEYQKYVKPTRGVIYLISIPSLDQPV

SEQ ID NO: 27244 - protein, 45 aa, Artificial Sequence
  GFR-binding peptide
  MOD_RES (2), (4), (39), (40): Xaa is C or S
  MOD_RES (17), (18), (19), (20), (21): Xaa is A or G
  MOD_RES (22), (23), (24), (25): Xaa is A or G or is absent
RXGXEAVSMGEEYKFKXXXXXXXXXLYLVSIPELKTPVXXAKGVK

SEQ ID NO: 27245 - protein, 32 aa, Artificial Sequence
  GFR-binding peptide
  MOD_RES (31), (32): Xaa is C or S
SKVVMEYQKYVKPTRGVIYLISIPSLDQPVXX

SEQ ID NO: 27246 - protein, 42 aa, Artificial Sequence; identical to SEQ ID NO: 6115
  GFR-binding peptide
  MOD_RES (2), (36), (37): Xaa is C or S
  MOD_RES (14), (15), (16), (17), (18): Xaa is A or G
  MOD_RES (19), (20), (21), (22): Xaa is A or G or is absent

SEQ ID NO: 27247 - protein, 35 aa, Artificial Sequence
  GFR-binding peptide
  MOD_RES (34), (35): Xaa is C or S
  MOD_RES (12), (13), (14), (15), (16): Xaa is A or G
  MOD_RES (17), (18), (19), (20): Xaa is A or G or is absent
GEVVMEEYQKYXXXXXXXXXIYLMSIPSLETPVXX

SEQ ID NO: 27248 - protein, 43 aa, Artificial Sequence
  GFR-binding peptide
  MOD_RES (2), (4), (37), (38): Xaa is C or S
  MOD_RES (15), (16), (17), (18), (19): Xaa is A or G
  MOD_RES (20), (21), (22), (23): Xaa is A or G or is absent
SXKXSKVIMEYQKYXXXXXXXXXIYLISIPSLDQSVXXPSASA

SEQ ID NO: 27249 - protein, 34 aa, Artificial Sequence; identical to SEQ ID NO: 6120
  GFR-binding peptide
  MOD_RES (32), (33): Xaa is C or S

SEQ ID NO: 27250 - protein, 34 aa, Artificial Sequence; identical to SEQ ID NO: 6121
  GFR-binding peptide
  MOD_RES (33), (34): Xaa is C or S
  MOD_RES (11), (12), (13), (14), (15): Xaa is A or G
  MOD_RES (16), (17), (18), (19): Xaa is A or G or is absent

SEQ ID NO: 27251 - protein, 39 aa, Artificial Sequence
  GFR-binding peptide
  MOD_RES (2), (4), (36): Xaa is C or S
HXGXSRVVMNEYQKYIVNSSDDIYLVSIPSLKTPAXTPK

SEQ ID NO: 27252 - protein, 33 aa, Artificial Sequence
  GFR-binding peptide
  MOD_RES (31), (32): Xaa is C or S
EVVMDRYKKLVVNNAADFYLISIANLRAPVXXS

SEQ ID NO: 27253 - protein, 37 aa, Artificial Sequence; identical to SEQ ID NO: 6123
  GFR-binding peptide
  MOD_RES (1), (33), (34): Xaa is C or S

SEQ ID NO: 27254 - protein, 37 aa, Artificial Sequence; identical to SEQ ID NO: 6124
  GFR-binding peptide
  MOD_RES (2), (36), (37): Xaa is C or S
  MOD_RES (14), (15), (16), (17), (18): Xaa is A or G
  MOD_RES (19), (20), (21), (22): Xaa is A or G or is absent

SEQ ID NO: 27255 - protein, 38 aa, Artificial Sequence
  GFR-binding peptide
  MOD_RES (35), (36): Xaa is C or S
  MOD_RES (13), (14), (15), (16), (17): Xaa is A or G
  MOD_RES (18), (19), (20), (21): Xaa is A or G or is absent
EAVSMGEEYQKYXXXXXXXXXIYLVSIPSLKTPVXXAK

SEQ ID NO: 27256 - protein, 38 aa, Artificial Sequence; identical to SEQ ID NO: 6125
  GFR-binding peptide
  MOD_RES (1), (3), (35), (36): Xaa is C or S

SEQ ID NO: 27257 - protein, 34 aa, Artificial Sequence
  GFR-binding peptide
  MOD_RES (2), (2): Xaa is C or S
  MOD_RES (13), (14), (15), (16), (17): Xaa is A or G
  MOD_RES (18), (19), (20), (21): Xaa is A or G or is absent
KXSRVIMEYQKYXXXXXXXXXIYLISIPSLAQPV

SEQ ID NO: 27258 - protein, 34 aa, Artificial Sequence; identical to SEQ ID NO: 6127
  GFR-binding peptide
  MOD_RES (33), (34): Xaa is C or S
  MOD_RES (11), (12), (13), (14), (15): Xaa is A or G
  MOD_RES (16), (17), (18), (19): Xaa is A or G or is absent

SEQ ID NO: 27259 - protein, 38 aa, Artificial Sequence; identical to SEQ ID NO: 6128
  GFR-binding peptide
  MOD_RES (2), (34): Xaa is C or S

SEQ ID NO: 27260 - protein, 39 aa, Artificial Sequence
  GFR-binding peptide
  MOD_RES (34), (34): Xaa is C or S
  MOD_RES (12), (13), (14), (15), (16): Xaa is A or G
  MOD_RES (17), (18), (19), (20): Xaa is A or G or is absent
SRVVMNEYKFKXXXXXXXXXLYLVSIPELKTPAXTPKTV

SEQ ID NO: 27261 - protein, 44 aa, Artificial Sequence; identical to SEQ ID NO: 6130
  GFR-binding peptide
  MOD_RES (2), (4), (38): Xaa is C or S
  MOD_RES (16), (17), (18), (19), (20): Xaa is A or G
  MOD_RES (21), (22), (23), (24): Xaa is A or G or is absent

SEQ ID NO: 27262 - protein, 31 aa, Artificial Sequence
  GFR-binding peptide
  MOD_RES (1), (1): Xaa is C or S
XSKVIMEYQKYIKPTKGIIYLISIPSLDQSV

SEQ ID NO: 27263 - protein, 40 aa, Artificial Sequence; identical to SEQ ID NO: 6134
  GFR-binding peptide
  MOD_RES (2), (34), (35): Xaa is C or S

SEQ ID NO: 27264 - protein, 33 aa, Artificial Sequence; identical to SEQ ID NO: 6135
  GFR-binding peptide
  MOD_RES (12), (13), (14), (15), (16): Xaa is A or G
  MOD_RES (17), (18), (19), (20): Xaa is A or G or is absent

SEQ ID NO: 27265 - protein, 36 aa, Artificial Sequence
  GFR-binding peptide
  MOD_RES (34), (35): Xaa is C or S
  MOD_RES (12), (13), (14), (15), (16): Xaa is A or G
  MOD_RES (17), (18), (19), (20): Xaa is A or G or is absent
ESVAMGYHYKLXXXXXXXXXKYLISIPSLKTPVXXA

SEQ ID NO: 27266 - protein, 36 aa, Artificial Sequence
  GFR-binding peptide
  MOD_RES (1), (3), (35), (36): Xaa is C or S
XGXSRVVMNEYKFKIVNSSDDLYLVSIPELKTPAXX

SEQ ID NO: 27267 - protein, 41 aa, Artificial Sequence
  GFR-binding peptide
  MOD_RES (2), (35), (36): Xaa is C or S
GXEAVSMGEEYKFKTPVGMDDLYLVSIPELKTPVXXAKGVK

SEQ ID NO: 27268 - protein, 38 aa, Artificial Sequence
  GFR-binding peptide
  MOD_RES (1), (35), (36): Xaa is C or S
  MOD_RES (13), (14), (15), (16), (17): Xaa is A or G
  MOD_RES (18), (19), (20), (21): Xaa is A or G or is absent
XARVVMNEYQKYXXXXXXXXXIYLVSIPSLQTPAXXPK

SEQ ID NO: 27269 - protein, 40 aa, Artificial Sequence
  GFR-binding peptide
  MOD_RES (2), (4), (37), (38): Xaa is C or S
RXGXEAVSMGEEYKFKTPVGMDDLYLVSIPELKTPVXXAK

SEQ ID NO: 27270 - protein, 41 aa, Artificial Sequence
  GFR-binding peptide
  MOD_RES (1), (3), (35), (36): Xaa is C or S
XGXAEVVMDEYQKYVVNNAADIYLISIPSLRAPVXXSAPAA

SEQ ID NO: 27271 - protein, 39 aa, Artificial Sequence
  GFR-binding peptide
  MOD_RES (2), (35), (36): Xaa is C or S
GXEAVSMGEEYQKYTPVGMDDIYLVSIPSLKTPVXXAKG

SEQ ID NO: 27272 - protein, 35 aa, Artificial Sequence
  GFR-binding peptide
  MOD_RES (2), (35): Xaa is C or S
  MOD_RES (13), (14), (15), (16), (17): Xaa is A or G
  MOD_RES (18), (19), (20), (21): Xaa is A or G or is absent
KXSKVIMEYKFKXXXXXXXXXLYLISIPELDQSVX

SEQ ID NO: 27273 - protein, 35 aa, Artificial Sequence
  GFR-binding peptide
  MOD_RES (1), (34), (35): Xaa is C or S
  MOD_RES (12), (13), (14), (15), (16): Xaa is A or G
  MOD_RES (17), (18), (19), (20): Xaa is A or G or is absent
XSKVIMEYQKYXXXXXXXXXIYLISIPSLDQSVXX

SEQ ID NO: 27274 - protein, 40 aa, Artificial Sequence; identical to SEQ ID NO: 6144
  GFR-binding peptide
  MOD_RES (1), (3), (36), (37): Xaa is C or S
  MOD_RES (14), (15), (16), (17), (18): Xaa is A or G
  MOD_RES (19), (20), (21), (22): Xaa is A or G or is absent

SEQ ID NO: 27275 - protein, 37 aa, Artificial Sequence
  GFR-binding peptide
  MOD_RES (31), (32): Xaa is C or S
EVVMDEYKFKVVNNAADLYLISIPELRAPVXXSAPAA

SEQ ID NO: 27276 - protein, 37 aa, Artificial Sequence; identical to SEQ ID NO: 6146
  GFR-binding peptide
  MOD_RES (2), (33), (34): Xaa is C or S

SEQ ID NO: 27277 - protein, 42 aa, Artificial Sequence
  GFR-binding peptide
  MOD_RES (2), (4), (38), (39): Xaa is C or S
  MOD_RES (16), (17), (18), (19), (20): Xaa is A or G
  MOD_RES (21), (22), (23), (24): Xaa is A or G or is absent
HXGXAKVVMNEYKFKXXXXXXXXXLYLVSIPELKTPAXXAKP

SEQ ID NO: 27278 - protein, 34 aa, Artificial Sequence; identical to SEQ ID NO: 6150
  GFR-binding peptide
  MOD_RES (33), (34): Xaa is C or S
  MOD_RES (11), (12), (13), (14), (15): Xaa is A or G
  MOD_RES (16), (17), (18), (19): Xaa is A or G or is absent

SEQ ID NO: 27279 - protein, 41 aa, Artificial Sequence
  GFR-binding peptide
  MOD_RES (1), (3), (35), (36): Xaa is C or S
XGXSRVVMNEYKFKIVNSSDDLYLVSIPELKTPAXXPKPVY

SEQ ID NO: 27280 - protein, 36 aa, Artificial Sequence
  GFR-binding peptide
  MOD_RES (1), (3): Xaa is C or S
  MOD_RES (15), (16), (17), (18), (19): Xaa is A or G
  MOD_RES (20), (21), (22), (23): Xaa is A or G or is absent
XGXSRVVMNEYKFKXXXXXXXXXLYLVSIPELKTPA

SEQ ID NO: 27281 - protein, 38 aa, Artificial Sequence
  GFR-binding peptide
  MOD_RES (2), (4), (36), (37): Xaa is C or S
RXGXGEVVMEEYQKYVVKDYEDIYLMSIPSLETPVXXA

SEQ ID NO: 27282 - protein, 39 aa, Artificial Sequence
  GFR-binding peptide
  MOD_RES (1), (33), (34): Xaa is C or S
XESVAMGEYKFKYTVVGKDLYLISIPELKTPVXXAKSAK

SEQ ID NO: 27283 - protein, 37 aa, Artificial Sequence; identical to SEQ ID NO: 6152
  GFR-binding peptide
  MOD_RES (1), (34), (35): Xaa is C or S
  MOD_RES (12), (13), (14), (15), (16): Xaa is A or G
  MOD_RES (17), (18), (19), (20): Xaa is A or G or is absent

SEQ ID NO: 27284 - protein, 37 aa, Artificial Sequence
  GFR-binding peptide
  MOD_RES (33), (34): Xaa is C or S
  MOD_RES (11), (12), (13), (14), (15): Xaa is A or G
  MOD_RES (16), (17), (18), (19): Xaa is A or G or is absent
SKVVMEYQKYXXXXXXXXXIYLISIPSLDQPVXXPSA

SEQ ID NO: 27285 - protein, 40 aa, Artificial Sequence
  GFR-binding peptide
  MOD_RES (1), (35), (36): Xaa is C or S
  MOD_RES (13), (14), (15), (16), (17): Xaa is A or G
  MOD_RES (18), (19), (20), (21): Xaa is A or G or is absent
XAEVVMDYHYKLXXXXXXXXXKYLISIPSLRAPVXXSAPA

SEQ ID NO: 27286 - protein, 38 aa, Artificial Sequence
  GFR-binding peptide
  MOD_RES (1), (3), (35), (36): Xaa is C or S
XGXGEVVMDEYQKYVVKENEDIYLMSIPSLETPVXXAK

SEQ ID NO: 27287 - protein, 39 aa, Artificial Sequence
  GFR-binding peptide
  MOD_RES (33), (33): Xaa is C or S
  MOD_RES (11), (12), (13), (14), (15): Xaa is A or G
  MOD_RES (16), (17), (18), (19): Xaa is A or G or is absent
RVVMNEYKFKXXXXXXXXXLYLVSIPELKTPAXTPKTVH

SEQ ID NO: 27288 - protein, 42 aa, Artificial Sequence
  GFR-binding peptide
  MOD_RES (1), (3), (37), (38): Xaa is C or S
  MOD_RES (15), (16), (17), (18), (19): Xaa is A or G
  MOD_RES (20), (21), (22), (23): Xaa is A or G or is absent
XGXARVVMNEYQKYXXXXXXXXXIYLVSIPSLQTPAXXPKPV

SEQ ID NO: 27289 - protein, 36 aa, Artificial Sequence; identical to SEQ ID NO: 6154
  GFR-binding peptide
  MOD_RES (1), (3): Xaa is C or S
  MOD_RES (15), (16), (17), (18), (19): Xaa is A or G
  MOD_RES (20), (21), (22), (23): Xaa is A or G or is absent

SEQ ID NO: 27290 - protein, 40 aa, Artificial Sequence
  GFR-binding peptide
  MOD_RES (2), (4), (36), (37): Xaa is C or S
RXGXAEVVMDRYKKLVVNNAADFYLISIANLRAPVXXSAP

SEQ ID NO: 27291 - protein, 33 aa, Artificial Sequence
  GFR-binding peptide
  MOD_RES (32), (33): Xaa is C or S
ESVAMGYHYKLYTVVGKDKYLISIPSLKTPVXX

SEQ ID NO: 27292 - protein, 38 aa, Artificial Sequence
  GFR-binding peptide
  MOD_RES (2), (4), (36), (37): Xaa is C or S
RXGXGEVVMEEYKFKVVKDYEDLYLMSIPELETPVXXA

SEQ ID NO: 27293 - protein, 38 aa, Artificial Sequence; identical to SEQ ID NO: 6159
  GFR-binding peptide
  MOD_RES (2), (4), (38): Xaa is C or S
  MOD_RES (16), (17), (18), (19), (20): Xaa is A or G
  MOD_RES (21), (22), (23), (24): Xaa is A or G or is absent

SEQ ID NO: 27294 - protein, 37 aa, Artificial Sequence
  GFR-binding peptide
  MOD_RES (2), (4), (36), (37): Xaa is C or S
HXGXAKVVMNEYQKYIVNNSSDIYLVSIPSLKTPAXX

SEQ ID NO: 27295 - protein, 38 aa, Artificial Sequence
  GFR-binding peptide
  MOD_RES (2), (4), (37), (38): Xaa is C or S
RXGXEAVSMGEEYQKYTPVGMDDIYLVSIPSLKTPVXX

SEQ ID NO: 27296 - protein, 37 aa, Artificial Sequence; identical to SEQ ID NO: 6160
  GFR-binding peptide
  MOD_RES (2), (4), (37): Xaa is C or S
  MOD_RES (15), (16), (17), (18), (19): Xaa is A or G
  MOD_RES (20), (21), (22), (23): Xaa is A or G or is absent

SEQ ID NO: 27297 - protein, 36 aa, Artificial Sequence
  GFR-binding peptide
  MOD_RES (32), (33): Xaa is C or S
SRVVMNEYQKYIVNSSDDIYLVSIPSLKTPAXXPKP

SEQ ID NO: 27298 - protein, 39 aa, Artificial Sequence
  GFR-binding peptide
  MOD_RES (2), (4), (38), (39): Xaa is C or S
  MOD_RES (16), (17), (18), (19), (20): Xaa is A or G
  MOD_RES (21), (22), (23), (24): Xaa is A or G or is absent
RXGXAEVVMDRYKKLXXXXXXXXXFYLISIANLRAPVXX

SEQ ID NO: 27299 - protein, 34 aa, Artificial Sequence
  GFR-binding peptide
  MOD_RES (1), (3): Xaa is C or S
XGXAEVVMDRYKKLVVNNAADFYLISIANLRAPV

SEQ ID NO: 27300 - protein, 34 aa, Artificial Sequence
  GFR-binding peptide
  MOD_RES (31), (32): Xaa is C or S
RVVMNEYQKYIVNSSDDIYLVSIPSLKTPAXXPK

SEQ ID NO: 27301 - protein, 30 aa, Artificial Sequence
  GFR-binding peptide
RVVMNEYQKYIVNSSDDIYLVSIPSLQTPA

SEQ ID NO: 27302 - protein, 40 aa, Artificial Sequence
  GFR-binding peptide
  MOD_RES (2), (34), (35): Xaa is C or S
GXARVVMNEYKFKIVNSSDDLYLVSIPELQTPAXXPKPVT

SEQ ID NO: 27303 - protein, 36 aa, Artificial Sequence; identical to SEQ ID NO: 6163
  GFR-binding peptide
  MOD_RES (31), (31): Xaa is C or S

SEQ ID NO: 27304 - protein, 42 aa, Artificial Sequence
  GFR-binding peptide
  MOD_RES (2), (4), (37), (38): Xaa is C or S
  MOD_RES (15), (16), (17), (18), (19): Xaa is A or G
  MOD_RES (20), (21), (22), (23): Xaa is A or G or is absent
SXKXSRVIMEYQKYXXXXXXXXXIYLISIPSLAQPVXXPAAS

SEQ ID NO: 27305 - protein, 34 aa, Artificial Sequence
  GFR-binding peptide
  MOD_RES (32), (32): Xaa is C or S
SRVVMNEYKFKIVNSSDDLYLVSIPELKTPAXTP

SEQ ID NO: 27306 - protein, 38 aa, Artificial Sequence
  GFR-binding peptide
  MOD_RES (2), (34): Xaa is C or S
GXSRVVMNEYQKYIVNSSDDIYLVSIPSLKTPAXTPKT

SEQ ID NO: 27307 - protein, 36 aa, Artificial Sequence; identical to SEQ ID NO: 6172
  GFR-binding peptide
  MOD_RES (2), (34), (35): Xaa is C or S

SEQ ID NO: 27308 - protein, 35 aa, Artificial Sequence; identical to SEQ ID NO: 6174
  GFR-binding peptide
  MOD_RES (2), (4), (35): Xaa is C or S

SEQ ID NO: 27309 - protein, 36 aa, Artificial Sequence; identical to SEQ ID NO: 6175
  GFR-binding peptide
  MOD_RES (1), (34), (35): Xaa is C or S
  MOD_RES (12), (13), (14), (15), (16): Xaa is A or G
  MOD_RES (17), (18), (19), (20): Xaa is A or G or is absent

SEQ ID NO: 27310 - protein, 36 aa, Artificial Sequence; identical to SEQ ID NO: 6176
  GFR-binding peptide
  MOD_RES (1), (35), (36): Xaa is C or S
  MOD_RES (13), (14), (15), (16), (17): Xaa is A or G
  MOD_RES (18), (19), (20), (21): Xaa is A or G or is absent

SEQ ID NO: 27311 - protein, 39 aa, Artificial Sequence; identical to SEQ ID NO: 6177
  GFR-binding peptide
  MOD_RES (2), (4), (36), (37): Xaa is C or S

SEQ ID NO: 27312 - protein, 38 aa, Artificial Sequence
  GFR-binding peptide
  MOD_RES (2), (35), (36): Xaa is C or S
  MOD_RES (13), (14), (15), (16), (17): Xaa is A or G
  MOD_RES (18), (19), (20), (21): Xaa is A or G or is absent
KXSKVVMEYQKYXXXXXXXXXIYLISIPSLDQPVXXPS

SEQ ID NO: 27313 - protein, 36 aa, Artificial Sequence
  GFR-binding peptide
  MOD_RES (2), (36): Xaa is C or S
  MOD_RES (14), (15), (16), (17), (18): Xaa is A or G
  MOD_RES (19), (20), (21), (22): Xaa is A or G or is absent
GXGEVVMEEYKFKXXXXXXXXXLYLMSIPELETPVX

SEQ ID NO: 27314 - protein, 40 aa, Artificial Sequence
  GFR-binding peptide
  MOD_RES (2), (4), (35), (36): Xaa is C or S
SXKXSKVVMEYKFKVKPTRGVLYLISIPELDQPVXXPSAS

SEQ ID NO: 27315 - protein, 37 aa, Artificial Sequence
  GFR-binding peptide
  MOD_RES (31), (32): Xaa is C or S
SKVIMEYQKYIKPTKGIIYLISIPSLDQSVXXPSASA

SEQ ID NO: 27316 - protein, 37 aa, Artificial Sequence
  GFR-binding peptide
  MOD_RES (2), (34), (35): Xaa is C or S
GXGEVVMEEYKFKVVKDYEDLYLMSIPELETPVXXAK

SEQ ID NO: 27317 - protein, 33 aa, Artificial Sequence; identical to SEQ ID NO: 6179
  GFR-binding peptide
  MOD_RES (31), (32): Xaa is C or S

SEQ ID NO: 27318 - protein, 34 aa, Artificial Sequence
  GFR-binding peptide
  MOD_RES (1), (34): Xaa is C or S
  MOD_RES (12), (13), (14), (15), (16): Xaa is A or G
  MOD_RES (17), (18), (19), (20): Xaa is A or G or is absent
XSRVIMEYQKYXXXXXXXXXIYLISIPSLAQPVX

SEQ ID NO: 27319 - protein, 39 aa, Artificial Sequence
  GFR-binding peptide
  MOD_RES (2), (4), (36), (37): Xaa is C or S
RXGXAEVVMDEYQKYVVNNAADIYLISIPSLRAPVXXSA

SEQ ID NO: 27320 - protein, 38 aa, Artificial Sequence; identical to SEQ ID NO: 6181
  GFR-binding peptide
  MOD_RES (6), (7): Xaa is C or S

SEQ ID NO: 27321 - protein, 40 aa, Artificial Sequence
  GFR-binding peptide
  MOD_RES (2), (3), (38), (40): Xaa is C or S
  MOD_RES (17), (18), (19), (20), (21): Xaa is A or G
  MOD_RES (22), (23), (24), (25): Xaa is A or G or is absent
AXXVPTKLSPISVLYIXXXXXXXXXYKQYEEGMSVAEXGX

SEQ ID NO: 27322 - protein, 34 aa, Artificial Sequence; identical to SEQ ID NO: 6184
  GFR-binding peptide
  MOD_RES (14), (15), (16), (17), (18): Xaa is A or G
  MOD_RES (19), (20), (21), (22): Xaa is A or G or is absent

SEQ ID NO: 27323 - protein, 42 aa, Artificial Sequence; identical to SEQ ID NO: 6186
  GFR-binding peptide
  MOD_RES (4), (5), (40), (42): Xaa is C or S
  MOD_RES (19), (20), (21), (22), (23): Xaa is A or G
  MOD_RES (24), (25), (26), (27): Xaa is A or G or is absent

SEQ ID NO: 27324 - protein, 36 aa, Artificial Sequence
  GFR-binding peptide
  MOD_RES (1), (35): Xaa is C or S
  MOD_RES (15), (16), (17), (18), (19): Xaa is A or G
  MOD_RES (20), (21), (22), (23): Xaa is A or G or is absent
XVPTKLSPISILYIXXXXXXXXXYKQYEGMAVSEXG

SEQ ID NO: 27325 - protein, 35 aa, Artificial Sequence
  GFR-binding peptide
  MOD_RES (2), (3), (35): Xaa is C or S
AXXVPTELSPISMLYIDENEKVVYKQYEDMVVEGX

SEQ ID NO: 27326 - protein, 33 aa, Artificial Sequence; identical to SEQ ID NO: 6189
  GFR-binding peptide
  MOD_RES (32), (32): Xaa is C or S

SEQ ID NO: 27327 - protein, 38 aa, Artificial Sequence; identical to SEQ ID NO: 6190
  GFR-binding peptide
  MOD_RES (2), (3), (36), (38): Xaa is C or S
  MOD_RES (17), (18), (19), (20), (21): Xaa is A or G
  MOD_RES (22), (23), (24), (25): Xaa is A or G or is absent

SEQ ID NO: 27328 - protein, 40 aa, Artificial Sequence
  GFR-binding peptide
  MOD_RES (4), (5), (37), (39): Xaa is C or S
PKAXXVPTELEPISMLYLDEYDKVVKFKYEEMVVEGXGXR

SEQ ID NO: 27329 - protein, 41 aa, Artificial Sequence
  GFR-binding peptide
  MOD_RES (2), (3), (38), (40): Xaa is C or S
  MOD_RES (17), (18), (19), (20), (21): Xaa is A or G
  MOD_RES (22), (23), (24), (25): Xaa is A or G or is absent
AXXVPTKLSPISVLYIXXXXXXXXXYKQYEEGMSVAEXGXR

SEQ ID NO: 27330 - protein, 36 aa, Artificial Sequence; identical to SEQ ID NO: 6192
  GFR-binding peptide
  MOD_RES (3), (4), (36): Xaa is C or S

SEQ ID NO: 27331 - protein, 32 aa, Artificial Sequence; identical to SEQ ID NO: 6193
  GFR-binding peptide
  MOD_RES (1), (32): Xaa is C or S

SEQ ID NO: 27332 - protein, 32 aa, Artificial Sequence
  GFR-binding peptide
  MOD_RES (1), (2): Xaa is C or S
XXAPTKLSPISVLYIDSSNNVIYKQYENMVVK

SEQ ID NO: 27333 - protein, 40 aa, Artificial Sequence
  GFR-binding peptide
  MOD_RES (1), (2), (37), (39): Xaa is C or S
  MOD_RES (16), (17), (18), (19), (20): Xaa is A or G
  MOD_RES (21), (22), (23), (24): Xaa is A or G or is absent
XXVPTKLSPISVLYIXXXXXXXXXYKQYEEGMSVAEXGXR

SEQ ID NO: 27334 - protein, 33 aa, Artificial Sequence
  GFR-binding peptide
  MOD_RES (2), (3): Xaa is C or S
PXXVPQDLEPISILYLVGRTPKVKFKYEMVVKS

SEQ ID NO: 27335 - protein, 35 aa, Artificial Sequence; identical to SEQ ID NO: 6199
  GFR-binding peptide
  MOD_RES (4), (5): Xaa is C or S

SEQ ID NO: 27336 - protein, 42 aa, Artificial Sequence; identical to SEQ ID NO: 6200
  GFR-binding peptide
  MOD_RES (5), (6), (40), (42): Xaa is C or S
  MOD_RES (20), (21), (22), (23), (24): Xaa is A or G
  MOD_RES (25), (26), (27), (28): Xaa is A or G or is absent

SEQ ID NO: 27337 - protein, 40 aa, Artificial Sequence
  GFR-binding peptide
  MOD_RES (4), (5), (38), (40): Xaa is C or S
  MOD_RES (19), (20), (21), (22), (23): Xaa is A or G
  MOD_RES (24), (25), (26), (27): Xaa is A or G or is absent
ASPXXVPQDLEPISILYLXXXXXXXXXKFKYEMVVKSXKX

SEQ ID NO: 27338 - protein, 33 aa, Artificial Sequence
  GFR-binding peptide
  MOD_RES (33), (33): Xaa is C or S
  MOD_RES (14), (15), (16), (17), (18): Xaa is A or G
  MOD_RES (19), (20), (21), (22): Xaa is A or G or is absent
VPQALSPISILYIXXXXXXXXXYKQYEMIVRSX

SEQ ID NO: 27339 - protein, 39 aa, Artificial Sequence
  GFR-binding peptide
  MOD_RES (4), (38): Xaa is C or S
  MOD_RES (18), (19), (20), (21), (22): Xaa is A or G
  MOD_RES (23), (24), (25), (26): Xaa is A or G or is absent
KPTXAPTKLSPISVLYIXXXXXXXXXYKQYENMVVRSXG

SEQ ID NO: 27340 - protein, 38 aa, Artificial Sequence; identical to SEQ ID NO: 6203
  GFR-binding peptide
  MOD_RES (1), (2), (35), (37): Xaa is C or S
  MOD_RES (16), (17), (18), (19), (20): Xaa is A or G
  MOD_RES (21), (22), (23), (24): Xaa is A or G or is absent

SEQ ID NO: 27341 - protein, 37 aa, Artificial Sequence
  GFR-binding peptide
  MOD_RES (4), (5), (36): Xaa is C or S
ASPXXVSQDLEPISILYLIGKTPKIKFKYEMIVKSXK

SEQ ID NO: 27342 - protein, 40 aa, Artificial Sequence
  GFR-binding peptide
  MOD_RES (4), (5), (37), (39): Xaa is C or S
PKPXXAPTQLEPISVLYLDDSSNVIKFKYENMVVRAXGXH

SEQ ID NO: 27343 - protein, 36 aa, Artificial Sequence
  GFR-binding peptide
  MOD_RES (3), (4): Xaa is C or S
  MOD_RES (18), (19), (20), (21), (22): Xaa is A or G
  MOD_RES (23), (24), (25), (26): Xaa is A or G or is absent
KAXXAPTKLSPISVLYIXXXXXXXXXYKQYENMVVK

SEQ ID NO: 27344 - protein, 42 aa, Artificial Sequence
  GFR-binding peptide
  MOD_RES (5), (6), (40), (42): Xaa is C or S
  MOD_RES (20), (21), (22), (23), (24): Xaa is A or G
  MOD_RES (25), (26), (27), (28): Xaa is A or G or is absent
APASXXVPARLSPISILYIXXXXXXXXXYKQYEDMVVEAXGX

SEQ ID NO: 27345 - protein, 36 aa, Artificial Sequence
  GFR-binding peptide
  MOD_RES (5), (6): Xaa is C or S
IPKAXXVPTELSPISMLYIDEYDKVVYKQYEEMVVE

SEQ ID NO: 27346 - protein, 38 aa, Artificial Sequence
  GFR-binding peptide
  MOD_RES (5), (6): Xaa is C or S
  MOD_RES (20), (21), (22), (23), (24): Xaa is A or G
  MOD_RES (25), (26), (27), (28): Xaa is A or G or is absent
IPKAXXVPTELSPISMLYIXXXXXXXXXYKQYEEMVVE

SEQ ID NO: 27347 - protein, 39 aa, Artificial Sequence; identical to SEQ ID NO: 6208
  GFR-binding peptide
  MOD_RES (4), (5), (37), (39): Xaa is C or S

SEQ ID NO: 27348 - protein, 34 aa, Artificial Sequence
  GFR-binding peptide
  MOD_RES (1), (2), (34): Xaa is C or S
XXVPARLSPISILYKDAANNVVLKYHYDMVVEAX

SEQ ID NO: 27349 - protein, 35 aa, Artificial Sequence
  GFR-binding peptide
  MOD_RES (1), (35): Xaa is C or S
  MOD_RES (15), (16), (17), (18), (19): Xaa is A or G
  MOD_RES (20), (21), (22), (23): Xaa is A or G or is absent
XAPTQLEPISVLYLXXXXXXXXXKFKYENMVVRAX

SEQ ID NO: 27350 - protein, 35 aa, Artificial Sequence
  GFR-binding peptide
  MOD_RES (2), (3): Xaa is C or S
  MOD_RES (17), (18), (19), (20), (21): Xaa is A or G
  MOD_RES (22), (23), (24), (25): Xaa is A or G or is absent
SXXVPARLNAISILYFXXXXXXXXXLKKYRDMVVE

SEQ ID NO: 27351 - protein, 32 aa, Artificial Sequence; identical to SEQ ID NO: 6210
  GFR-binding peptide
  MOD_RES (1), (2): Xaa is C or S

SEQ ID NO: 27352 - protein, 41 aa, Artificial Sequence; identical to SEQ ID NO: 6212
  GFR-binding peptide
  MOD_RES (6), (7), (41): Xaa is C or S
  MOD_RES (21), (22), (23), (24), (25): Xaa is A or G
  MOD_RES (26), (27), (28), (29): Xaa is A or G or is absent

SEQ ID NO: 27353 - protein, 36 aa, Artificial Sequence
  GFR-binding peptide
  MOD_RES (1), (2), (36): Xaa is C or S
  MOD_RES (16), (17), (18), (19), (20): Xaa is A or G
  MOD_RES (21), (22), (23), (24): Xaa is A or G or is absent
XXVPTKLSPISILYKXXXXXXXXXLKYHYGMAVSEX

SEQ ID NO: 27354 - protein, 35 aa, Artificial Sequence
  GFR-binding peptide
  MOD_RES (1), (33), (35): Xaa is C or S
XVPTELEPISMLYLDEYDKVVKFKYEEMVVEGXGX

SEQ ID NO: 27355 - protein, 30 aa, Artificial Sequence; identical to SEQ ID NO: 6216
  GFR-binding peptide

SEQ ID NO: 27356 - protein, 43 aa, Artificial Sequence; identical to SEQ ID NO: 6217
  GFR-binding peptide
  MOD_RES (5), (6), (40), (42): Xaa is C or S
  MOD_RES (20), (21), (22), (23), (24): Xaa is A or G
  MOD_RES (25), (26), (27), (28): Xaa is A or G or is absent

SEQ ID NO: 27357 - protein, 32 aa, Artificial Sequence; identical to SEQ ID NO: 6220
  GFR-binding peptide
  MOD_RES (1), (1): Xaa is C or S

SEQ ID NO: 27358 - protein, 35 aa, Artificial Sequence
  GFR-binding peptide
  MOD_RES (33), (35): Xaa is C or S
  MOD_RES (14), (15), (16), (17), (18): Xaa is A or G
  MOD_RES (19), (20), (21), (22): Xaa is A or G or is absent
VPQDLEPISILYLXXXXXXXXXKFKYEMVVKSXKX

SEQ ID NO: 27359 - protein, 31 aa, Artificial Sequence
  GFR-binding peptide
  MOD_RES (1), (1): Xaa is C or S
XVPTKLNAISILYFDKGVVTYLKKYRGMAVS

SEQ ID NO: 27360 - protein, 40 aa, Artificial Sequence
  GFR-binding peptide
  MOD_RES (5), (6), (40): Xaa is C or S
  MOD_RES (20), (21), (22), (23), (24): Xaa is A or G
  MOD_RES (25), (26), (27), (28): Xaa is A or G or is absent
ASKAXXVPTKLNAISILYFXXXXXXXXXLKKYRGMAVSEX

SEQ ID NO: 27361 - protein, 32 aa, Artificial Sequence; identical to SEQ ID NO: 6225
  GFR-binding peptide
  MOD_RES (32), (32): Xaa is C or S

SEQ ID NO: 27362 - protein, 34 aa, Artificial Sequence
  GFR-binding peptide
  MOD_RES (1), (33): Xaa is C or S
XVPTELSPISMLYIDEYDKVVYKQYEEMVVEGXG

SEQ ID NO: 27363 - protein, 37 aa, Artificial Sequence; identical to SEQ ID NO: 6230
  GFR-binding peptide
  MOD_RES (34), (36): Xaa is C or S
  MOD_RES (14), (15), (16), (17), (18): Xaa is A or G
  MOD_RES (19), (20), (21), (22): Xaa is A or G or is absent

SEQ ID NO: 27364 - protein, 30 aa, Artificial Sequence
  GFR-binding peptide
APTKLEPISVLYLDSSNNVIKFKYENMVVK

SEQ ID NO: 27365 - protein, 34 aa, Artificial Sequence; identical to SEQ ID NO: 6233
  GFR-binding peptide
  MOD_RES (1), (34): Xaa is C or S
  MOD_RES (15), (16), (17), (18), (19): Xaa is A or G
  MOD_RES (20), (21), (22), (23): Xaa is A or G or is absent

SEQ ID NO: 27366 - protein, 37 aa, Artificial Sequence
  GFR-binding peptide
  MOD_RES (3), (4): Xaa is C or S
  MOD_RES (18), (19), (20), (21), (22): Xaa is A or G
  MOD_RES (23), (24), (25), (26): Xaa is A or G or is absent
KAXXVPTKLSPISILYIXXXXXXXXXYKQYEGMAVSE

SEQ ID NO: 27367 - protein, 36 aa, Artificial Sequence
  GFR-binding peptide
  MOD_RES (5), (6): Xaa is C or S
SASPXXVPQDLSPISILYIVGRTPKVYKQYEMVVKS

SEQ ID NO: 27368 - protein, 35 aa, Artificial Sequence
  GFR-binding peptide
  MOD_RES (1), (2): Xaa is C or S
  MOD_RES (16), (17), (18), (19), (20): Xaa is A or G
  MOD_RES (21), (22), (23), (24): Xaa is A or G or is absent
XXVPTELEPISMLYLXXXXXXXXXKFKYEDMVVEG

SEQ ID NO: 27369 - protein, 40 aa, Artificial Sequence
  GFR-binding peptide
  MOD_RES (5), (6): Xaa is C or S
  MOD_RES (20), (21), (22), (23), (24): Xaa is A or G
  MOD_RES (25), (26), (27), (28): Xaa is A or G or is absent
VGKAXXVPTKLEPISVLYLXXXXXXXXXKFKYEEGMSVAE

SEQ ID NO: 27370 - protein, 38 aa, Artificial Sequence
  GFR-binding peptide
  MOD_RES (3), (35), (37): Xaa is C or S
PTXAPTKLSPISVLYIDDSSNVIYKQYENMVVRSXGXH

SEQ ID NO: 27371 - protein, 42 aa, Artificial Sequence; identical to SEQ ID NO: 6234
  GFR-binding peptide
  MOD_RES (5), (6), (39), (41): Xaa is C or S
  MOD_RES (20), (21), (22), (23), (24): Xaa is A or G
  MOD_RES (25), (26), (27), (28): Xaa is A or G or is absent

SEQ ID NO: 27372 - protein, 37 aa, Artificial Sequence
  GFR-binding peptide
  MOD_RES (6), (7): Xaa is C or S
ASAAPXXVPQALSPISILYIVGRKPKVYKQYEMIVRS

SEQ ID NO: 27373 - protein, 38 aa, Artificial Sequence
  GFR-binding peptide
  MOD_RES (1), (35), (37): Xaa is C or S
  MOD_RES (15), (16), (17), (18), (19): Xaa is A or G
  MOD_RES (20), (21), (22), (23): Xaa is A or G or is absent
XAPTQLSPISVLYIXXXXXXXXXYKQYENMVVRAXGXH

SEQ ID NO: 27374 - protein, 41 aa, Artificial Sequence
  GFR-binding peptide
  MOD_RES (6), (7), (39), (41): Xaa is C or S
YVPKPXXAPTKLSPISVLYIDDSSNVIYKQYENMVVRSXGX

SEQ ID NO: 27375 - protein, 33 aa, Artificial Sequence; identical to SEQ ID NO: 6236
  GFR-binding peptide
  MOD_RES (33), (33): Xaa is C or S
  MOD_RES (14), (15), (16), (17), (18): Xaa is A or G
  MOD_RES (19), (20), (21), (22): Xaa is A or G or is absent

SEQ ID NO: 27376 - protein, 32 aa, Artificial Sequence
  GFR-binding peptide
  MOD_RES (1), (32): Xaa is C or S
XVPQDLSPISILYIVGRTPKVYKQYEMVVKSX

SEQ ID NO: 27377 - protein, 40 aa, Artificial Sequence
  GFR-binding peptide
  MOD_RES (5), (6), (38), (40): Xaa is C or S
VPKPXXAPTKLEPISVLYLDDSSNVIKFKYENMVVRSXGX

SEQ ID NO: 27378 - protein, 40 aa, Artificial Sequence; identical to SEQ ID NO: 6239
  GFR-binding peptide
  MOD_RES (4), (5), (38), (40): Xaa is C or S

SEQ ID NO: 27379 - protein, 37 aa, Artificial Sequence
  GFR-binding peptide
  MOD_RES (4), (5), (37): Xaa is C or S
SKAXXVPTKLNAISILYFDKGVVTYLKKYRGMAVSEX

SEQ ID NO: 27380 - protein, 36 aa, Artificial Sequence; identical to SEQ ID NO: 6240
  GFR-binding peptide
  MOD_RES (34), (36): Xaa is C or S
  MOD_RES (14), (15), (16), (17), (18): Xaa is A or G
  MOD_RES (19), (20), (21), (22): Xaa is A or G or is absent

SEQ ID NO: 27381 - protein, 43 aa, Artificial Sequence
  GFR-binding peptide
  MOD_RES (5), (6), (40), (42): Xaa is C or S
  MOD_RES (20), (21), (22), (23), (24): Xaa is A or G
  MOD_RES (25), (26), (27), (28): Xaa is A or G or is absent
VPKPXXAPTQLEPISVLYLXXXXXXXXXKFKYENMVVRAXGXH

SEQ ID NO: 27382 - protein, 42 aa, Artificial Sequence
  GFR-binding peptide
  MOD_RES (6), (7), (39), (41): Xaa is C or S
AAPASXXVPARLSPISILYKDAANNVVLKYHYDMVVEAXGXR

SEQ ID NO: 27383 - protein, 37 aa, Artificial Sequence
  GFR-binding peptide
  MOD_RES (2), (3), (36): Xaa is C or S
  MOD_RES (17), (18), (19), (20), (21): Xaa is A or G
  MOD_RES (22), (23), (24), (25): Xaa is A or G or is absent
PXXVPQDLEPISILYLXXXXXXXXXKFKYEMVVKSXK

SEQ ID NO: 27384 - protein, 39 aa, Artificial Sequence; identical to SEQ ID NO: 6246
  GFR-binding peptide
  MOD_RES (6), (7): Xaa is C or S
  MOD_RES (21), (22), (23), (24), (25): Xaa is A or G
  MOD_RES (26), (27), (28), (29): Xaa is A or G or is absent

SEQ ID NO: 27385 - protein, 41 aa, Artificial Sequence
  GFR-binding peptide
  MOD_RES (6), (7), (39), (41): Xaa is C or S
KIPKAXXVPTELSPISMLYIDENEKVVYKQYEDMVVEGXGX

SEQ ID NO: 27386 - protein, 37 aa, Artificial Sequence
  GFR-binding peptide
  MOD_RES (3), (4), (36): Xaa is C or S
ASXXVPARLEPISILYLDAANNVVKFKYEDMVVEAXG

SEQ ID NO: 27387 - protein, 36 aa, Artificial Sequence
  GFR-binding peptide
  MOD_RES (1), (35): Xaa is C or S
  MOD_RES (15), (16), (17), (18), (19): Xaa is A or G
  MOD_RES (20), (21), (22), (23): Xaa is A or G or is absent
XAPTKLSPISVLYIXXXXXXXXXYKQYENMVVRSXG

SEQ ID NO: 27388 - protein, 42 aa, Artificial Sequence
  GFR-binding peptide
  MOD_RES (6), (7), (41): Xaa is C or S
  MOD_RES (21), (22), (23), (24), (25): Xaa is A or G
  MOD_RES (26), (27), (28), (29): Xaa is A or G or is absent
AVPKAXXAPTKLSPISVLYIXXXXXXXXXYKQYENMVVKAXG

SEQ ID NO: 27389 - protein, 36 aa, Artificial Sequence
  GFR-binding peptide
  MOD_RES (6), (6): Xaa is C or S
VTKPTXAPTKLSPISVLYIDDSSNVIYKQYENMVVR

SEQ ID NO: 27390 - protein, 37 aa, Artificial Sequence
  GFR-binding peptide
  MOD_RES (4), (5), (37): Xaa is C or S
PKAXXVPTELEPISMLYLDENEKVVKFKYEDMVVEGX

SEQ ID NO: 27391 - protein, 36 aa, Artificial Sequence
  GFR-binding peptide
  MOD_RES (1), (34), (36): Xaa is C or S
  MOD_RES (15), (16), (17), (18), (19): Xaa is A or G
  MOD_RES (20), (21), (22), (23): Xaa is A or G or is absent
XVPQDLEPISILYLXXXXXXXXXKFKYEMVVKSXKX

SEQ ID NO: 27392 - protein, 43 aa, Artificial Sequence; identical to SEQ ID NO: 6253
  GFR-binding peptide
  MOD_RES (5), (6), (40), (42): Xaa is C or S
  MOD_RES (20), (21), (22), (23), (24): Xaa is A or G
  MOD_RES (25), (26), (27), (28): Xaa is A or G or is absent

SEQ ID NO: 27393 - protein, 36 aa, Artificial Sequence
  GFR-binding peptide
  MOD_RES (2), (3): Xaa is C or S
  MOD_RES (17), (18), (19), (20), (21): Xaa is A or G
  MOD_RES (22), (23), (24), (25): Xaa is A or G or is absent
PXXAPTKLEPISVLYLXXXXXXXXXKFKYENMVVRS

SEQ ID NO: 27394 - protein, 33 aa, Artificial Sequence; identical to SEQ ID NO: 6255
  GFR-binding peptide
  MOD_RES (1), (32): Xaa is C or S

SEQ ID NO: 27395 - protein, 35 aa, Artificial Sequence
  GFR-binding peptide
  MOD_RES (3), (4), (35): Xaa is C or S
SPXXVPQDLEPISILYLVGRTPKVKFKYEMVVKSX

SEQ ID NO: 27396 - protein, 36 aa, Artificial Sequence
  GFR-binding peptide
  MOD_RES (2), (3): Xaa is C or S
  MOD_RES (17), (18), (19), (20), (21): Xaa is A or G
  MOD_RES (22), (23), (24), (25): Xaa is A or G or is absent
SXXVPARLSPISILYIXXXXXXXXXYKQYEDMVVEA

SEQ ID NO: 27397 - protein, 34 aa, Artificial Sequence; identical to SEQ ID NO: 6259
  GFR-binding peptide
  MOD_RES (1), (34): Xaa is C or S
  MOD_RES (15), (16), (17), (18), (19): Xaa is A or G
  MOD_RES (20), (21), (22), (23): Xaa is A or G or is absent

SEQ ID NO: 27398 - protein, 43 aa, Artificial Sequence; identical to SEQ ID NO: 6260
  GFR-binding peptide
  MOD_RES (5), (6), (40), (42): Xaa is C or S
  MOD_RES (20), (21), (22), (23), (24): Xaa is A or G
  MOD_RES (25), (26), (27), (28): Xaa is A or G or is absent

SEQ ID NO: 27399 - protein, 33 aa, Artificial Sequence; identical to SEQ ID NO: 6261
  GFR-binding peptide
  MOD_RES (1), (1): Xaa is C or S
  MOD_RES (15), (16), (17), (18), (19): Xaa is A or G
  MOD_RES (20), (21), (22), (23): Xaa is A or G or is absent

SEQ ID NO: 27400 - protein, 38 aa, Artificial Sequence; identical to SEQ ID NO: 6262
  GFR-binding peptide
  MOD_RES (4), (5), (38): Xaa is C or S
  MOD_RES (19), (20), (21), (22), (23): Xaa is A or G
  MOD_RES (24), (25), (26), (27): Xaa is A or G or is absent

SEQ ID NO: 27401 - protein, 36 aa, Artificial Sequence
  GFR-binding peptide
  MOD_RES (1), (2), (36): Xaa is C or S
  MOD_RES (16), (17), (18), (19), (20): Xaa is A or G
  MOD_RES (21), (22), (23), (24): Xaa is A or G or is absent
XXAPTQLEPISVLYLXXXXXXXXXKFKYENMVVRAX

SEQ ID NO: 27402 - protein, 37 aa, Artificial Sequence; identical to SEQ ID NO: 6263
  GFR-binding peptide
  MOD_RES (1), (35), (37): Xaa is C or S
  MOD_RES (15), (16), (17), (18), (19): Xaa is A or G
  MOD_RES (20), (21), (22), (23): Xaa is A or G or is absent

SEQ ID NO: 27403 - protein, 41 aa, Artificial Sequence
  GFR-binding peptide
  MOD_RES (5), (6), (38), (40): Xaa is C or S
VPKAXXAPTKLEPISVLYLDSSNNVIKFKYENMVVKAXGXH

SEQ ID NO: 27404 - protein, 39 aa, Artificial Sequence; identical to SEQ ID NO: 6266
  GFR-binding peptide
  MOD_RES (6), (7): Xaa is C or S
  MOD_RES (21), (22), (23), (24), (25): Xaa is A or G
  MOD_RES (26), (27), (28), (29): Xaa is A or G or is absent

SEQ ID NO: 27405 - protein, 39 aa, Artificial Sequence
  GFR-binding peptide
  MOD_RES (6), (7): Xaa is C or S
  MOD_RES (21), (22), (23), (24), (25): Xaa is A or G
  MOD_RES (26), (27), (28), (29): Xaa is A or G or is absent
AAPASXXVPARLEPISILYLXXXXXXXXXKFKYEDMVVE

SEQ ID NO: 27406 - protein, 33 aa, Artificial Sequence
  GFR-binding peptide
  MOD_RES (1), (33): Xaa is C or S
XAPTKLEPISVLYLDDSSNVIKFKYENMVVRSX

SEQ ID NO: 27407 - protein, 36 aa, Artificial Sequence
  GFR-binding peptide
  MOD_RES (1), (2), (33), (35): Xaa is C or S
XXVSQDLEPISILYLIGKTPKIKFKYEMIVKSXKXS

SEQ ID NO: 27408 - protein, 37 aa, Artificial Sequence; identical to SEQ ID NO: 6272
  GFR-binding peptide
  MOD_RES (5), (6): Xaa is C or S

SEQ ID NO: 27409 - protein, 38 aa, Artificial Sequence; identical to SEQ ID NO: 6276
  GFR-binding peptide
  MOD_RES (5), (6), (38): Xaa is C or S

SEQ ID NO: 27410 - protein, 33 aa, Artificial Sequence
  GFR-binding peptide
  MOD_RES (32), (32): Xaa is C or S
VPTKLSPISILYIDKGVVTYYKQYEGMAVSEXG

SEQ ID NO: 27411 - protein, 38 aa, Artificial Sequence; identical to SEQ ID NO: 6281
  GFR-binding peptide
  MOD_RES (1), (2), (36), (38): Xaa is C or S
  MOD_RES (16), (17), (18), (19), (20): Xaa is A or G
  MOD_RES (21), (22), (23), (24): Xaa is A or G or is absent

SEQ ID NO: 27412 - protein, 39 aa, Artificial Sequence; identical to SEQ ID NO: 6282
  GFR-binding peptide
  MOD_RES (3), (4), (38): Xaa is C or S
  MOD_RES (18), (19), (20), (21), (22): Xaa is A or G
  MOD_RES (23), (24), (25), (26): Xaa is A or G or is absent

SEQ ID NO: 27413 - protein, 42 aa, Artificial Sequence; identical to SEQ ID NO: 6284
  GFR-binding peptide
  MOD_RES (6), (7), (41): Xaa is C or S
  MOD_RES (21), (22), (23), (24), (25): Xaa is A or G
  MOD_RES (26), (27), (28), (29): Xaa is A or G or is absent

SEQ ID NO: 27414 - protein, 38 aa, Artificial Sequence
  GFR-binding peptide
  MOD_RES (6), (7): Xaa is C or S
KIPKAXXVPTELEPISMLYLDENEKVVKFKYEDMVVEG

SEQ ID NO: 27415 - protein, 37 aa, Artificial Sequence; identical to SEQ ID NO: 6285
  GFR-binding peptide
  MOD_RES (6), (7): Xaa is C or S

SEQ ID NO: 27416 - protein, 36 aa, Artificial Sequence; identical to SEQ ID NO: 6286
  GFR-binding peptide
  MOD_RES (2), (3), (34), (36): Xaa is C or S

SEQ ID NO: 27417 - protein, 38 aa, Artificial Sequence
  GFR-binding peptide
  MOD_RES (4), (5): Xaa is C or S
  MOD_RES (19), (20), (21), (22), (23): Xaa is A or G
  MOD_RES (24), (25), (26), (27): Xaa is A or G or is absent
PKAXXAPTKLEPISVLYLXXXXXXXXXKFKYENMVVKA

SEQ ID NO: 27418 - protein, 44 aa, Artificial Sequence; identical to SEQ ID NO: 6288
  GFR-binding peptide
  MOD_RES (6), (7), (42), (44): Xaa is C or S
  MOD_RES (21), (22), (23), (24), (25): Xaa is A or G
  MOD_RES (26), (27), (28), (29): Xaa is A or G or is absent

SEQ ID NO: 27419 - protein, 38 aa, Artificial Sequence
  GFR-binding peptide
  MOD_RES (3), (4), (36), (38): Xaa is C or S
KAXXVPTELEPISMLYLDENEKVVKFKYEDMVVEGXGX

SEQ ID NO: 27420 - protein, 35 aa, Artificial Sequence; identical to SEQ ID NO: 6290
  GFR-binding peptide
  MOD_RES (3), (4), (35): Xaa is C or S

SEQ ID NO: 27421 - protein, 40 aa, Artificial Sequence; identical to SEQ ID NO: 6291
  GFR-binding peptide
  MOD_RES (2), (3), (38), (40): Xaa is C or S
  MOD_RES (17), (18), (19), (20), (21): Xaa is A or G
  MOD_RES (22), (23), (24), (25): Xaa is A or G or is absent

SEQ ID NO: 27422 - protein, 35 aa, Artificial Sequence; identical to SEQ ID NO: 6293
  GFR-binding peptide
  MOD_RES (1), (33), (35): Xaa is C or S

SEQ ID NO: 27423 - protein, 41 aa, Artificial Sequence; identical to SEQ ID NO: 6294
  GFR-binding peptide
  MOD_RES (5), (6), (40): Xaa is C or S
  MOD_RES (20), (21), (22), (23), (24): Xaa is A or G
  MOD_RES (25), (26), (27), (28): Xaa is A or G or is absent

SEQ ID NO: 27424 - protein, 39 aa, Artificial Sequence
  GFR-binding peptide
  MOD_RES (3), (4), (36), (38): Xaa is C or S
KPXXAPTKLSPISVLYIDDSSNVIYKQYENMVVRSXGXH

SEQ ID NO: 27425 - protein, 41 aa, Artificial Sequence
  GFR-binding peptide
  MOD_RES (6), (7), (39), (41): Xaa is C or S
KASKAXXVPTKLSPISILYKDKGVVTYLKYHYGMAVSEXGX

SEQ ID NO: 27426 - protein, 44 aa, Artificial Sequence
  GFR-binding peptide
  MOD_RES (6), (7), (42), (44): Xaa is C or S
  MOD_RES (21), (22), (23), (24), (25): Xaa is A or G
  MOD_RES (26), (27), (28), (29): Xaa is A or G or is absent
KVGKAXXVPTKLEPISVLYLXXXXXXXXXKFKYEEGMSVAEXGX

SEQ ID NO: 27427 - protein, 35 aa, Artificial Sequence
  GFR-binding peptide
  MOD_RES (1), (33), (35): Xaa is C or S
XAPTKLEPISVLYLDSSNNVIKFKYENMVVKAXGX

SEQ ID NO: 27428 - protein, 36 aa, Artificial Sequence; identical to SEQ ID NO: 6298
  GFR-binding peptide
  MOD_RES (2), (3), (36): Xaa is C or S
  MOD_RES (17), (18), (19), (20), (21): Xaa is A or G
  MOD_RES (22), (23), (24), (25): Xaa is A or G or is absent

SEQ ID NO: 27429 - protein, 36 aa, Artificial Sequence
  GFR-binding peptide
  MOD_RES (3), (4): Xaa is C or S
  MOD_RES (18), (19), (20), (21), (22): Xaa is A or G
  MOD_RES (23), (24), (25), (26): Xaa is A or G or is absent
KAXXVPTELEPISMLYLXXXXXXXXXKFKYEEMVVE

SEQ ID NO: 27430 - protein, 36 aa, Artificial Sequence
  GFR-binding peptide
  MOD_RES (3), (4): Xaa is C or S
  MOD_RES (18), (19), (20), (21), (22): Xaa is A or G
  MOD_RES (23), (24), (25), (26): Xaa is A or G or is absent
APXXVPQALSPISILYIXXXXXXXXXYKQYEMIVRS

SEQ ID NO: 27431 - protein, 36 aa, Artificial Sequence
  GFR-binding peptide
  MOD_RES (2), (3): Xaa is C or S
  MOD_RES (17), (18), (19), (20), (21): Xaa is A or G
  MOD_RES (22), (23), (24), (25): Xaa is A or G or is absent
AXXVPTKLEPISILYLXXXXXXXXXKFKYEGMAVSE

SEQ ID NO: 27432 - protein, 39 aa, Artificial Sequence
  GFR-binding peptide
  MOD_RES (4), (5), (39): Xaa is C or S
  MOD_RES (19), (20), (21), (22), (23): Xaa is A or G
  MOD_RES (24), (25), (26), (27): Xaa is A or G or is absent
PKPXXAPTQLSPISVLYIXXXXXXXXXYKQYENMVVRAX

SEQ ID NO: 27433 - protein, 34 aa, Artificial Sequence
  GFR-binding peptide
  MOD_RES (32), (34): Xaa is C or S
VPTKLSPISILYIDKGVVTYYKQYEGMAVSEXGX

SEQ ID NO: 27434 - protein, 35 aa, Artificial Sequence
  GFR-binding peptide
  MOD_RES (1), (2), (35): Xaa is C or S
  MOD_RES (16), (17), (18), (19), (20): Xaa is A or G
  MOD_RES (21), (22), (23), (24): Xaa is A or G or is absent
XXVPQDLSPISILYIXXXXXXXXXYKQYEMVVKSX

SEQ ID NO: 27435 - protein, 36 aa, Artificial Sequence
  GFR-binding peptide
  MOD_RES (2), (3), (35): Xaa is C or S
AXXVPTELSPISMLYIDENEKVVYKQYEDMVVEGXG

SEQ ID NO: 27436 - protein, 41 aa, Artificial Sequence; identical to SEQ ID NO: 6301
  GFR-binding peptide
  MOD_RES (6), (7), (39), (41): Xaa is C or S

SEQ ID NO: 27437 - protein, 38 aa, Artificial Sequence; identical to SEQ ID NO: 6302
  GFR-binding peptide
  MOD_RES (2), (3), (35), (37): Xaa is C or S

SEQ ID NO: 27438 - protein, 38 aa, Artificial Sequence
  GFR-binding peptide
  MOD_RES (4), (5), (38): Xaa is C or S
  MOD_RES (19), (20), (21), (22), (23): Xaa is A or G
  MOD_RES (24), (25), (26), (27): Xaa is A or G or is absent
AAPXXVPQALSPISILYIXXXXXXXXXYKQYEMIVRSX

SEQ ID NO: 27439 - protein, 40 aa, Artificial Sequence; identical to SEQ ID NO: 6305
  GFR-binding peptide
  MOD_RES (4), (5), (37), (39): Xaa is C or S

SEQ ID NO: 27440 - protein, 39 aa, Artificial Sequence; identical to SEQ ID NO: 6306
  GFR-binding peptide
  MOD_RES (1), (2), (36), (38): Xaa is C or S
  MOD_RES (16), (17), (18), (19), (20): Xaa is A or G
  MOD_RES (21), (22), (23), (24): Xaa is A or G or is absent

SEQ ID NO: 27441 - protein, 39 aa, Artificial Sequence
  GFR-binding peptide
  MOD_RES (4), (5), (38): Xaa is C or S
  MOD_RES (19), (20), (21), (22), (23): Xaa is A or G
  MOD_RES (24), (25), (26), (27): Xaa is A or G or is absent
AAPXXVPQALSPISILYIXXXXXXXXXYKQYEMIVRSXK

SEQ ID NO: 27442 - protein, 38 aa, Artificial Sequence; identical to SEQ ID NO: 6307
  GFR-binding peptide
  MOD_RES (5), (6): Xaa is C or S
  MOD_RES (20), (21), (22), (23), (24): Xaa is A or G
  MOD_RES (25), (26), (27), (28): Xaa is A or G or is absent

SEQ ID NO: 27443 - protein, 32 aa, Artificial Sequence
  GFR-binding peptide
  MOD_RES (14), (15), (16), (17), (18): Xaa is A or G
  MOD_RES (19), (20), (21), (22): Xaa is A or G or is absent
VPARLSPISILYIXXXXXXXXXYKQYEDMVVE

SEQ ID NO: 27444 - protein, 34 aa, Artificial Sequence; identical to SEQ ID NO: 6310
  GFR-binding peptide
  MOD_RES (3), (4): Xaa is C or S

SEQ ID NO: 27445 - protein, 31 aa, Artificial Sequence
  GFR-binding peptide
APTKLSPISVLYIDDSSNVIYKQYENMVVRS

SEQ ID NO: 27446 - protein, 38 aa, Artificial Sequence; identical to SEQ ID NO: 6311
  GFR-binding peptide
  MOD_RES (2), (3), (35), (37): Xaa is C or S

SEQ ID NO: 27447 - protein, 39 aa, Artificial Sequence
  GFR-binding peptide
  MOD_RES (1), (2), (36), (38): Xaa is C or S
  MOD_RES (16), (17), (18), (19), (20): Xaa is A or G
  MOD_RES (21), (22), (23), (24): Xaa is A or G or is absent
XXVPARLSPISILYIXXXXXXXXXYKQYEDMVVEAXGXR

SEQ ID NO: 27448 - protein, 42 aa, Artificial Sequence
  GFR-binding peptide
  MOD_RES (5), (6), (40), (42): Xaa is C or S
  MOD_RES (20), (21), (22), (23), (24): Xaa is A or G
  MOD_RES (25), (26), (27), (28): Xaa is A or G or is absent
APASXXVPARLEPISILYLXXXXXXXXXKFKYEDMVVEAXGX

SEQ ID NO: 27449 - protein, 35 aa, Artificial Sequence
  GFR-binding peptide
  MOD_RES (1), (35): Xaa is C or S
  MOD_RES (15), (16), (17), (18), (19): Xaa is A or G
  MOD_RES (20), (21), (22), (23): Xaa is A or G or is absent
XVPTKLSPISILYIXXXXXXXXXYKQYEGMAVSEX

SEQ ID NO: 27450 - protein, 40 aa, Artificial Sequence
  GFR-binding peptide
  MOD_RES (5), (6), (38), (40): Xaa is C or S
IPKAXXVPTELEPISMLYLDEYDKVVKFKYEEMVVEGXGX

SEQ ID NO: 27451 - protein, 39 aa, Artificial Sequence; identical to SEQ ID NO: 6314
  GFR-binding peptide
  MOD_RES (4), (5), (37), (39): Xaa is C or S

SEQ ID NO: 27452 - protein, 38 aa, Artificial Sequence
  GFR-binding peptide
  MOD_RES (1), (2), (35), (37): Xaa is C or S
  MOD_RES (16), (17), (18), (19), (20): Xaa is A or G
  MOD_RES (21), (22), (23), (24): Xaa is A or G or is absent
XXVSQDLEPISILYLXXXXXXXXXKFKYEMIVKSXKXS

SEQ ID NO: 27453 - protein, 34 aa, Artificial Sequence
  GFR-binding peptide
  MOD_RES (3), (4): Xaa is C or S
KAXXVPTELSPISMLYIDENEKVVYKQYEDMVVE

SEQ ID NO: 27454 - protein, 37 aa, Artificial Sequence
  GFR-binding peptide
  MOD_RES (3), (4), (36): Xaa is C or S
ASXXVPARLNAISILYFDAANNVVLKKYRDMVVEAXG

SEQ ID NO: 27455 - protein, 37 aa, Artificial Sequence
  GFR-binding peptide
  MOD_RES (1), (2), (34), (36): Xaa is C or S
XXVPARLSPISILYKDAANNVVLKYHYDMVVEAXGXR

SEQ ID NO: 27456 - protein, 38 aa, Artificial Sequence; identical to SEQ ID NO: 6316
  GFR-binding peptide
  MOD_RES (5), (6), (38): Xaa is C or S

SEQ ID NO: 27457 - protein, 36 aa, Artificial Sequence; identical to SEQ ID NO: 6317
  GFR-binding peptide
  MOD_RES (4), (5), (36): Xaa is C or S

SEQ ID NO: 27458 - protein, 40 aa, Artificial Sequence; identical to SEQ ID NO: 6319
  GFR-binding peptide
  MOD_RES (4), (5), (37), (39): Xaa is C or S

SEQ ID NO: 27459 - protein, 38 aa, Artificial Sequence
  GFR-binding peptide
  MOD_RES (4), (5), (37): Xaa is C or S
PASXXVPARLNAISILYFDAANNVVLKKYRDMVVEAXG

SEQ ID NO: 27460 - protein, 40 aa, Artificial Sequence
  GFR-binding peptide
  MOD_RES (5), (39): Xaa is C or S
  MOD_RES (19), (20), (21), (22), (23): Xaa is A or G
  MOD_RES (24), (25), (26), (27): Xaa is A or G or is absent
TKPTXAPTKLSPISVLYIXXXXXXXXXYKQYENMVVRSXG

SEQ ID NO: 27461 - protein, 35 aa, Artificial Sequence; identical to SEQ ID NO: 6325
  GFR-binding peptide
  MOD_RES (34), (34): Xaa is C or S
  MOD_RES (14), (15), (16), (17), (18): Xaa is A or G
  MOD_RES (19), (20), (21), (22): Xaa is A or G or is absent

SEQ ID NO: 27462 - protein, 41 aa, Artificial Sequence
  GFR-binding peptide
  MOD_RES (5), (6), (38), (40): Xaa is C or S
IPKAXXVPTELEPISMLYLDEYDKVVKFKYEEMVVEGXGXR

SEQ ID NO: 27463 - protein, 41 aa, Artificial Sequence
  GFR-binding peptide
  MOD_RES (5), (6), (39), (41): Xaa is C or S
  MOD_RES (20), (21), (22), (23), (24): Xaa is A or G
  MOD_RES (25), (26), (27), (28): Xaa is A or G or is absent
SAAPXXVPQALEPISILYLXXXXXXXXXKFKYEMIVRSXKX

SEQ ID NO: 27464 - protein, 39 aa, Artificial Sequence
  GFR-binding peptide
  MOD_RES (2), (3), (37), (39): Xaa is C or S
  MOD_RES (17), (18), (19), (20), (21): Xaa is A or G
  MOD_RES (22), (23), (24), (25): Xaa is A or G or is absent
AXXVPTELSPISMLYIXXXXXXXXXYKQYEDMVVEGXGX

SEQ ID NO: 27465 - protein, 37 aa, Artificial Sequence
  GFR-binding peptide
  MOD_RES (3), (4): Xaa is C or S
  MOD_RES (18), (19), (20), (21), (22): Xaa is A or G
  MOD_RES (23), (24), (25), (26): Xaa is A or G or is absent
KPXXAPTKLSPISVLYIXXXXXXXXXYKQYENMVVRS

SEQ ID NO: 27466 - protein, 36 aa, Artificial Sequence; identical to SEQ ID NO: 6326
  GFR-binding peptide
  MOD_RES (3), (4), (36): Xaa is C or S

SEQ ID NO: 27467 - protein, 38 aa, Artificial Sequence
  GFR-binding peptide
  MOD_RES (3), (4), (36), (38): Xaa is C or S
KPXXAPTKLSPISVLYIDDSSNVIYKQYENMVVRSXGX

SEQ ID NO: 27468 - protein, 32 aa, Artificial Sequence; identical to SEQ ID NO: 6327
  GFR-binding peptide
  MOD_RES (1), (1): Xaa is C or S

SEQ ID NO: 27469 - protein, 35 aa, Artificial Sequence
  GFR-binding peptide
  MOD_RES (1), (34): Xaa is C or S
  MOD_RES (15), (16), (17), (18), (19): Xaa is A or G
  MOD_RES (20), (21), (22), (23): Xaa is A or G or is absent
XVPQALEPISILYLXXXXXXXXXKFKYEMIVRSXK

SEQ ID NO: 27470 - protein, 40 aa, Artificial Sequence
  GFR-binding peptide
  MOD_RES (4), (5), (39): Xaa is C or S
  MOD_RES (19), (20), (21), (22), (23): Xaa is A or G
  MOD_RES (24), (25), (26), (27): Xaa is A or G or is absent
PASXXVPARLEPISILYLXXXXXXXXXKFKYEDMVVEAXG

SEQ ID NO: 27471 - protein, 33 aa, Artificial Sequence
  GFR-binding peptide
  MOD_RES (2), (3): Xaa is C or S
AXXVPTKLNAISILYFDKGVVTYLKKYRGMAVS

SEQ ID NO: 27472 - protein, 37 aa, Artificial Sequence; identical to SEQ ID NO: 6332
  GFR-binding peptide
  MOD_RES (1), (2), (36): Xaa is C or S
  MOD_RES (16), (17), (18), (19), (20): Xaa is A or G
  MOD_RES (21), (22), (23), (24): Xaa is A or G or is absent

SEQ ID NO: 27473 - protein, 32 aa, Artificial Sequence
  GFR-binding peptide
  MOD_RES (14), (15), (16), (17), (18): Xaa is A or G
  MOD_RES (19), (20), (21), (22): Xaa is A or G or is absent
VPTELSPISMLYIXXXXXXXXXYKQYEEMVVE

SEQ ID NO: 27474 - protein, 43 aa, Artificial Sequence
  GFR-binding peptide
  MOD_RES (6), (7), (41), (43): Xaa is C or S
  MOD_RES (21), (22), (23), (24), (25): Xaa is A or G
  MOD_RES (26), (27), (28), (29): Xaa is A or G or is absent
YVPKPXXAPTKLEPISVLYLXXXXXXXXXKFKYENMVVRSXGX

SEQ ID NO: 27475 - protein, 33 aa, Artificial Sequence; identical to SEQ ID NO: 6338
  GFR-binding peptide
  MOD_RES (2), (3): Xaa is C or S

SEQ ID NO: 27476 - protein, 38 aa, Artificial Sequence
  GFR-binding peptide
  MOD_RES (3), (4), (38): Xaa is C or S
  MOD_RES (18), (19), (20), (21), (22): Xaa is A or G
  MOD_RES (23), (24), (25), (26): Xaa is A or G or is absent
ASXXVPARLSPISILYKXXXXXXXXXLKYHYDMVVEAX

SEQ ID NO: 27477 - protein, 37 aa, Artificial Sequence
  GFR-binding peptide
  MOD_RES (4), (5): Xaa is C or S
  MOD_RES (19), (20), (21), (22), (23): Xaa is A or G
  MOD_RES (24), (25), (26), (27): Xaa is A or G or is absent
PASXXVPARLEPISILYLXXXXXXXXXKFKYEDMVVE

SEQ ID NO: 27478 - protein, 36 aa, Artificial Sequence
  GFR-binding peptide
  MOD_RES (1), (35): Xaa is C or S
  MOD_RES (15), (16), (17), (18), (19): Xaa is A or G
  MOD_RES (20), (21), (22), (23): Xaa is A or G or is absent
XAPTKLEPISVLYLXXXXXXXXXKFKYENMVVKAXG

SEQ ID NO: 27479 - protein, 35 aa, Artificial Sequence
  GFR-binding peptide
  MOD_RES (1), (2), (34): Xaa is C or S
XXVPTKLSPISILYKDKGVVTYLKYHYGMAVSEXG

SEQ ID NO: 27480 - protein, 37 aa, Artificial Sequence; identical to SEQ ID NO: 6344
  GFR-binding peptide
  MOD_RES (2), (36): Xaa is C or S
  MOD_RES (16), (17), (18), (19), (20): Xaa is A or G
  MOD_RES (21), (22), (23), (24): Xaa is A or G or is absent

SEQ ID NO: 27481 - protein, 39 aa, Artificial Sequence
  GFR-binding peptide
  MOD_RES (4), (5), (39): Xaa is C or S
  MOD_RES (19), (20), (21), (22), (23): Xaa is A or G
  MOD_RES (24), (25), (26), (27): Xaa is A or G or is absent
SKAXXVPTKLEPISILYLXXXXXXXXXKFKYEGMAVSEX

SEQ ID NO: 27482 - protein, 37 aa, Artificial Sequence
  GFR-binding peptide
  MOD_RES (2), (36): Xaa is C or S
  MOD_RES (16), (17), (18), (19), (20): Xaa is A or G
  MOD_RES (21), (22), (23), (24): Xaa is A or G or is absent
TXAPTKLEPISVLYLXXXXXXXXXKFKYENMVVRSXG

SEQ ID NO: 27483 - protein, 41 aa, Artificial Sequence
  GFR-binding peptide
  MOD_RES (5), (6), (38), (40): Xaa is C or S
VPKPXXAPTQLSPISVLYIDDSSNVIYKQYENMVVRAXGXH

SEQ ID NO: 27484 - protein, 41 aa, Artificial Sequence
  GFR-binding peptide
  MOD_RES (5), (6), (40): Xaa is C or S
  MOD_RES (20), (21), (22), (23), (24): Xaa is A or G
  MOD_RES (25), (26), (27), (28): Xaa is A or G or is absent
VPKAXXAPTKLSPISVLYIXXXXXXXXXYKQYENMVVKAXG

SEQ ID NO: 27485 - protein, 36 aa, Artificial Sequence
  GFR-binding peptide
  MOD_RES (3), (4): Xaa is C or S
  MOD_RES (18), (19), (20), (21), (22): Xaa is A or G
  MOD_RES (23), (24), (25), (26): Xaa is A or G or is absent
KPXXAPTQLSPISVLYIXXXXXXXXXYKQYENMVVR

SEQ ID NO: 27486 - protein, 31 aa, Artificial Sequence; identical to SEQ ID NO: 6347
  GFR-binding peptide
  MOD_RES (1), (1): Xaa is C or S

SEQ ID NO: 27487 - protein, 35 aa, Artificial Sequence
  GFR-binding peptide
  MOD_RES (2), (3): Xaa is C or S
  MOD_RES (17), (18), (19), (20), (21): Xaa is A or G
  MOD_RES (22), (23), (24), (25): Xaa is A or G or is absent
AXXAPTKLSPISVLYIXXXXXXXXXYKQYENMVVK

SEQ ID NO: 27488 - protein, 37 aa, Artificial Sequence
  GFR-binding peptide
  MOD_RES (3), (35), (37): Xaa is C or S
PTXAPTKLEPISVLYLDDSSNVIKFKYENMVVRSXGX

SEQ ID NO: 27489 - protein, 35 aa, Artificial Sequence; identical to SEQ ID NO: 6350
  GFR-binding peptide
  MOD_RES (34), (34): Xaa is C or S
  MOD_RES (14), (15), (16), (17), (18): Xaa is A or G
  MOD_RES (19), (20), (21), (22): Xaa is A or G or is absent

SEQ ID NO: 27490 - protein, 33 aa, Artificial Sequence
  GFR-binding peptide
  MOD_RES (14), (15), (16), (17), (18): Xaa is A or G
  MOD_RES (19), (20), (21), (22): Xaa is A or G or is absent
VPTKLSPISILYIXXXXXXXXXYKQYEGMAVSE

SEQ ID NO: 27491 - protein, 40 aa, Artificial Sequence; identical to SEQ ID NO: 6352
  GFR-binding peptide
  MOD_RES (4), (5), (37), (39): Xaa is C or S

SEQ ID NO: 27492 - protein, 33 aa, Artificial Sequence; identical to SEQ ID NO: 6355
  GFR-binding peptide
  MOD_RES (1), (1): Xaa is C or S
  MOD_RES (15), (16), (17), (18), (19): Xaa is A or G
  MOD_RES (20), (21), (22), (23): Xaa is A or G or is absent

SEQ ID NO: 27493 - protein, 40 aa, Artificial Sequence
  GFR-binding peptide
  MOD_RES (4), (5), (38), (40): Xaa is C or S
  MOD_RES (19), (20), (21), (22), (23): Xaa is A or G
  MOD_RES (24), (25), (26), (27): Xaa is A or G or is absent
AAPXXVPQALSPISILYIXXXXXXXXXYKQYEMIVRSXKX

SEQ ID NO: 27494 - protein, 41 aa, Artificial Sequence
  GFR-binding peptide
  MOD_RES (4), (5), (39), (41): Xaa is C or S
  MOD_RES (19), (20), (21), (22), (23): Xaa is A or G
  MOD_RES (24), (25), (26), (27): Xaa is A or G or is absent
SKAXXVPTKLNAISILYFXXXXXXXXXLKKYRGMAVSEXGX

SEQ ID NO: 27495 - protein, 39 aa, Artificial Sequence; identical to SEQ ID NO: 6356
  GFR-binding peptide
  MOD_RES (6), (7): Xaa is C or S
  MOD_RES (21), (22), (23), (24), (25): Xaa is A or G
  MOD_RES (26), (27), (28), (29): Xaa is A or G or is absent

SEQ ID NO: 27496 - protein, 39 aa, Artificial Sequence
  GFR-binding peptide
  MOD_RES (3), (4), (37), (39): Xaa is C or S
KAXXVPTKLSPISVLYIDDMGVPTYKQYEEGMSVAEXGX

SEQ ID NO: 27497 - protein, 40 aa, Artificial Sequence
  GFR-binding peptide
  MOD_RES (5), (6), (40): Xaa is C or S
  MOD_RES (20), (21), (22), (23), (24): Xaa is A or G
  MOD_RES (25), (26), (27), (28): Xaa is A or G or is absent
IPKAXXVPTELEPISMLYLXXXXXXXXXKFKYEDMVVEGX

SEQ ID NO: 27498 - protein, 39 aa, Artificial Sequence
  GFR-binding peptide
  MOD_RES (6), (7): Xaa is C or S
  MOD_RES (21), (22), (23), (24), (25): Xaa is A or G
  MOD_RES (26), (27), (28), (29): Xaa is A or G or is absent
TVPKPXXAPTQLEPISVLYLXXXXXXXXXKFKYENMVVR

SEQ ID NO: 27499 - protein, 42 aa, Artificial Sequence
  GFR-binding peptide
  MOD_RES (5), (6), (40), (42): Xaa is C or S
  MOD_RES (20), (21), (22), (23), (24): Xaa is A or G
  MOD_RES (25), (26), (27), (28): Xaa is A or G or is absent
ASKAXXVPTKLNAISILYFXXXXXXXXXLKKYRGMAVSEXGX

SEQ ID NO: 27500 - protein, 42 aa, Artificial Sequence
  GFR-binding peptide
  MOD_RES (6), (7), (41): Xaa is C or S
  MOD_RES (21), (22), (23), (24), (25): Xaa is A or G
  MOD_RES (26), (27), (28), (29): Xaa is A or G or is absent
KIPKAXXVPTELEPISMLYLXXXXXXXXXKFKYEDMVVEGXG

SEQ ID NO: 27501 - protein, 37 aa, Artificial Sequence
  GFR-binding peptide
  MOD_RES (1), (35), (37): Xaa is C or S
  MOD_RES (15), (16), (17), (18), (19): Xaa is A or G
  MOD_RES (20), (21), (22), (23): Xaa is A or G or is absent
XVPTKLNAISILYFXXXXXXXXXLKKYRGMAVSEXGX

SEQ ID NO: 27502 - protein, 40 aa, Artificial Sequence
  GFR-binding peptide
  MOD_RES (3), (4), (38), (40): Xaa is C or S
  MOD_RES (18), (19), (20), (21), (22): Xaa is A or G
  MOD_RES (23), (24), (25), (26): Xaa is A or G or is absent
ASXXVPARLNAISILYFXXXXXXXXXLKKYRDMVVEAXGX

SEQ ID NO: 27503 - protein, 39 aa, Artificial Sequence; identical to SEQ ID NO: 6365
  GFR-binding peptide
  MOD_RES (6), (7): Xaa is C or S
  MOD_RES (21), (22), (23), (24), (25): Xaa is A or G
  MOD_RES (26), (27), (28), (29): Xaa is A or G or is absent

SEQ ID NO: 27504 - protein, 32 aa, Artificial Sequence; identical to SEQ ID NO: 6367
  GFR-binding peptide
  MOD_RES (14), (15), (16), (17), (18): Xaa is A or G
  MOD_RES (19), (20), (21), (22): Xaa is A or G or is absent

SEQ ID NO: 27505 - protein, 37 aa, Artificial Sequence; identical to SEQ ID NO: 6369
  GFR-binding peptide
  MOD_RES (5), (6): Xaa is C or S

SEQ ID NO: 27506 - protein, 43 aa, Artificial Sequence; identical to SEQ ID NO: 6370
  GFR-binding peptide
  MOD_RES (4), (5), (40), (42): Xaa is C or S
  MOD_RES (19), (20), (21), (22), (23): Xaa is A or G
  MOD_RES (24), (25), (26), (27): Xaa is A or G or is absent

SEQ ID NO: 27507 - protein, 35 aa, Artificial Sequence
  GFR-binding peptide
  MOD_RES (34), (34): Xaa is C or S
  MOD_RES (14), (15), (16), (17), (18): Xaa is A or G
  MOD_RES (19), (20), (21), (22): Xaa is A or G or is absent
VPTELSPISMLYIXXXXXXXXXYKQYEEMVVEGXG

SEQ ID NO: 27508 - protein, 40 aa, Artificial Sequence; identical to SEQ ID NO: 6372
  GFR-binding peptide
  MOD_RES (6), (7), (38), (40): Xaa is C or S

SEQ ID NO: 27509 - protein, 39 aa, Artificial Sequence; identical to SEQ ID NO: 6373
  GFR-binding peptide
  MOD_RES (3), (4), (38): Xaa is C or S
  MOD_RES (18), (19), (20), (21), (22): Xaa is A or G
  MOD_RES (23), (24), (25), (26): Xaa is A or G or is absent

SEQ ID NO: 27510 - protein, 38 aa, Artificial Sequence; identical to SEQ ID NO: 6374
  GFR-binding peptide
  MOD_RES (35), (37): Xaa is C or S
  MOD_RES (14), (15), (16), (17), (18): Xaa is A or G
  MOD_RES (19), (20), (21), (22): Xaa is A or G or is absent

SEQ ID NO: 27511 - protein, 35 aa, Artificial Sequence; identical to SEQ ID NO: 6375
  GFR-binding peptide
  MOD_RES (4), (5): Xaa is C or S

SEQ ID NO: 27512 - protein, 35 aa, Artificial Sequence
  GFR-binding peptide
  MOD_RES (2), (34): Xaa is C or S
TXAPTKLSPISVLYIDDSSNVIYKQYENMVVRSXG

SEQ ID NO: 27513 - protein, 38 aa, Artificial Sequence
  GFR-binding peptide
  MOD_RES (2), (3), (37): Xaa is C or S
  MOD_RES (17), (18), (19), (20), (21): Xaa is A or G
  MOD_RES (22), (23), (24), (25): Xaa is A or G or is absent
AXXVPTKLSPISILYKXXXXXXXXXLKYHYGMAVSEXG

SEQ ID NO: 27514 - protein, 35 aa, Artificial Sequence
  GFR-binding peptide
  MOD_RES (1), (35): Xaa is C or S
  MOD_RES (15), (16), (17), (18), (19): Xaa is A or G
  MOD_RES (20), (21), (22), (23): Xaa is A or G or is absent
XVPTKLSPISILYKXXXXXXXXXLKYHYGMAVSEX

SEQ ID NO: 27515 - protein, 36 aa, Artificial Sequence; identical to SEQ ID NO: 6376
  GFR-binding peptide
  MOD_RES (3), (4): Xaa is C or S
  MOD_RES (18), (19), (20), (21), (22): Xaa is A or G
  MOD_RES (23), (24), (25), (26): Xaa is A or G or is absent

SEQ ID NO: 27516 - protein, 37 aa, Artificial Sequence; identical to SEQ ID NO: 6377
  GFR-binding peptide
  MOD_RES (2), (3), (35), (37): Xaa is C or S

SEQ ID NO: 27517 - protein, 35 aa, Artificial Sequence; identical to SEQ ID NO: 6378
  GFR-binding peptide
  MOD_RES (35), (35): Xaa is C or S
  MOD_RES (14), (15), (16), (17), (18): Xaa is A or G
  MOD_RES (19), (20), (21), (22): Xaa is A or G or is absent

SEQ ID NO: 27518 - protein, 39 aa, Artificial Sequence
  GFR-binding peptide
  MOD_RES (2), (3), (37), (39): Xaa is C or S
  MOD_RES (17), (18), (19), (20), (21): Xaa is A or G
  MOD_RES (22), (23), (24), (25): Xaa is A or G or is absent
AXXVPTELEPISMLYLXXXXXXXXXKFKYEDMVVEGXGX

SEQ ID NO: 27519 - protein, 40 aa, Artificial Sequence
  GFR-binding peptide
  MOD_RES (4), (5), (38), (40): Xaa is C or S
  MOD_RES (19), (20), (21), (22), (23): Xaa is A or G
  MOD_RES (24), (25), (26), (27): Xaa is A or G or is absent
ASPXXVSQDLSPISILYIXXXXXXXXXYKQYEMIVKSXKX

SEQ ID NO: 27520 - protein, 33 aa, Artificial Sequence
  GFR-binding peptide
  MOD_RES (32), (32): Xaa is C or S
VPTELEPISMLYLDENEKVVKFKYEDMVVEGXG

SEQ ID NO: 27521 - protein, 39 aa, Artificial Sequence; identical to SEQ ID NO: 6381
  GFR-binding peptide
  MOD_RES (4), (5), (36), (38): Xaa is C or S

SEQ ID NO: 27522 - protein, 38 aa, Artificial Sequence
  GFR-binding peptide
  MOD_RES (3), (4), (37): Xaa is C or S
  MOD_RES (18), (19), (20), (21), (22): Xaa is A or G
  MOD_RES (23), (24), (25), (26): Xaa is A or G or is absent
SPXXVSQDLSPISILYIXXXXXXXXXYKQYEMIVKSXK

SEQ ID NO: 27523 - protein, 39 aa, Artificial Sequence; identical to SEQ ID NO: 6383
  GFR-binding peptide
  MOD_RES (5), (6): Xaa is C or S
  MOD_RES (20), (21), (22), (23), (24): Xaa is A or G
  MOD_RES (25), (26), (27), (28): Xaa is A or G or is absent

SEQ ID NO: 27524 - protein, 40 aa, Artificial Sequence; identical to SEQ ID NO: 6385
  GFR-binding peptide
  MOD_RES (5), (6), (37), (39): Xaa is C or S

SEQ ID NO: 27525 - protein, 37 aa, Artificial Sequence
  GFR-binding peptide
  MOD_RES (6), (7): Xaa is C or S
ASASPXXVPQDLSPISILYIVGRTPKVYKQYEMVVKS

SEQ ID NO: 27526 - protein, 39 aa, Artificial Sequence
  GFR-binding peptide
  MOD_RES (1), (2), (36), (38): Xaa is C or S
  MOD_RES (16), (17), (18), (19), (20): Xaa is A or G
  MOD_RES (21), (22), (23), (24): Xaa is A or G or is absent
XXVPARLSPISILYKXXXXXXXXXLKYHYDMVVEAXGXR

SEQ ID NO: 27527 - protein, 32 aa, Artificial Sequence
  GFR-binding peptide
  MOD_RES (1), (2): Xaa is C or S
XXAPTKLSPISVLYIDDSSNVIYKQYENMVVR

SEQ ID NO: 27528 - protein, 30 aa, Artificial Sequence
  GFR-binding peptide
APTKLEPISVLYLDDSSNVIKFKYENMVVR

SEQ ID NO: 27529 - protein, 43 aa, Artificial Sequence
  GFR-binding peptide
  MOD_RES (6), (7), (41), (43): Xaa is C or S
  MOD_RES (21), (22), (23), (24), (25): Xaa is A or G
  MOD_RES (26), (27), (28), (29): Xaa is A or G or is absent
YVPKPXXAPTKLSPISVLYIXXXXXXXXXYKQYENMVVRSXGX

SEQ ID NO: 27530 - protein, 38 aa, Artificial Sequence; identical to SEQ ID NO: 6390
  GFR-binding peptide
  MOD_RES (4), (5): Xaa is C or S
  MOD_RES (19), (20), (21), (22), (23): Xaa is A or G
  MOD_RES (24), (25), (26), (27): Xaa is A or G or is absent

SEQ ID NO: 27531 - protein, 38 aa, Artificial Sequence; identical to SEQ ID NO: 6391
  GFR-binding peptide
  MOD_RES (4), (5), (37): Xaa is C or S

SEQ ID NO: 27532 - protein, 38 aa, Artificial Sequence
  GFR-binding peptide
  MOD_RES (1), (2), (35), (37): Xaa is C or S
  MOD_RES (16), (17), (18), (19), (20): Xaa is A or G
  MOD_RES (21), (22), (23), (24): Xaa is A or G or is absent
XXVSQDLSPISILYIXXXXXXXXXYKQYEMIVKSXKXS

SEQ ID NO: 27533 - protein, 39 aa, Artificial Sequence
  GFR-binding peptide
  MOD_RES (4), (5), (37), (39): Xaa is C or S
SKAXXVPTKLSPISILYIDKGVVTYYKQYEGMAVSEXGX

SEQ ID NO: 27534 - protein, 34 aa, Artificial Sequence; identical to SEQ ID NO: 6396
  GFR-binding peptide
  MOD_RES (31), (33): Xaa is C or S

SEQ ID NO: 27535 - protein, 40 aa, Artificial Sequence
  GFR-binding peptide
  MOD_RES (5), (6): Xaa is C or S
  MOD_RES (20), (21), (22), (23), (24): Xaa is A or G
  MOD_RES (25), (26), (27), (28): Xaa is A or G or is absent
VGKAXXVPTKLSPISVLYIXXXXXXXXXYKQYEEGMSVAE

SEQ ID NO: 27536 - protein, 37 aa, Artificial Sequence
  GFR-binding peptide
  MOD_RES (1), (2), (36): Xaa is C or S
  MOD_RES (16), (17), (18), (19), (20): Xaa is A or G
  MOD_RES (21), (22), (23), (24): Xaa is A or G or is absent
XXVPARLNAISILYFXXXXXXXXXLKKYRDMVVEAXG

SEQ ID NO: 27537 - protein, 39 aa, Artificial Sequence
  GFR-binding peptide
  MOD_RES (4), (5), (39): Xaa is C or S
  MOD_RES (19), (20), (21), (22), (23): Xaa is A or G
  MOD_RES (24), (25), (26), (27): Xaa is A or G or is absent
PKAXXAPTKLSPISVLYIXXXXXXXXXYKQYENMVVKAX

SEQ ID NO: 27538 - protein, 38 aa, Artificial Sequence; identical to SEQ ID NO: 6398
  GFR-binding peptide
  MOD_RES (1), (35), (37): Xaa is C or S
  MOD_RES (15), (16), (17), (18), (19): Xaa is A or G
  MOD_RES (20), (21), (22), (23): Xaa is A or G or is absent

SEQ ID NO: 27539 - protein, 38 aa, Artificial Sequence; identical to SEQ ID NO: 6399
  GFR-binding peptide
  MOD_RES (3), (4), (37): Xaa is C or S
  MOD_RES (18), (19), (20), (21), (22): Xaa is A or G
  MOD_RES (23), (24), (25), (26): Xaa is A or G or is absent

SEQ ID NO: 27540 - protein, 35 aa, Artificial Sequence
  GFR-binding peptide
  MOD_RES (1), (33), (35): Xaa is C or S
XAPTQLEPISVLYLDDSSNVIKFKYENMVVRAXGX

SEQ ID NO: 27541 - protein, 37 aa, Artificial Sequence
  GFR-binding peptide
  MOD_RES (1), (2), (36): Xaa is C or S
  MOD_RES (16), (17), (18), (19), (20): Xaa is A or G
  MOD_RES (21), (22), (23), (24): Xaa is A or G or is absent
XXVPARLSPISILYIXXXXXXXXXYKQYEDMVVEAXG

SEQ ID NO: 27542 - protein, 32 aa, Artificial Sequence; identical to SEQ ID NO: 6400
  GFR-binding peptide
  MOD_RES (2), (2): Xaa is C or S

SEQ ID NO: 27543 - protein, 35 aa, Artificial Sequence; identical to SEQ ID NO: 6402
  GFR-binding peptide
  MOD_RES (3), (3): Xaa is C or S
  MOD_RES (17), (18), (19), (20), (21): Xaa is A or G
  MOD_RES (22), (23), (24), (25): Xaa is A or G or is absent

SEQ ID NO: 27544 - protein, 38 aa, Artificial Sequence
  GFR-binding peptide
  MOD_RES (3), (4), (37): Xaa is C or S
  MOD_RES (18), (19), (20), (21), (22): Xaa is A or G
  MOD_RES (23), (24), (25), (26): Xaa is A or G or is absent
APXXVPQALEPISILYLXXXXXXXXXKFKYEMIVRSXK

SEQ ID NO: 27545 - protein, 34 aa, Artificial Sequence
  GFR-binding peptide
  MOD_RES (3), (4): Xaa is C or S
KAXXVPTKLSPISILYIDKGVVTYYKQYEGMAVS

SEQ ID NO: 27546 - protein, 34 aa, Artificial Sequence
  GFR-binding peptide
  MOD_RES (34), (34): Xaa is C or S
  MOD_RES (14), (15), (16), (17), (18): Xaa is A or G
  MOD_RES (19), (20), (21), (22): Xaa is A or G or is absent
VPTKLEPISILYLXXXXXXXXXKFKYEGMAVSEX

SEQ ID NO: 27547 - protein, 39 aa, Artificial Sequence
  GFR-binding peptide
  MOD_RES (1), (2), (36), (38): Xaa is C or S
  MOD_RES (16), (17), (18), (19), (20): Xaa is A or G
  MOD_RES (21), (22), (23), (24): Xaa is A or G or is absent
XXAPTQLEPISVLYLXXXXXXXXXKFKYENMVVRAXGXH

SEQ ID NO: 27548 - protein, 35 aa, Artificial Sequence
  GFR-binding peptide
  MOD_RES (1), (2), (35): Xaa is C or S
XXVPTKLEPISVLYLDDMGVPTKFKYEEGMSVAEX

SEQ ID NO: 27549 - protein, 39 aa, Artificial Sequence; identical to SEQ ID NO: 6406
  GFR-binding peptide
  MOD_RES (6), (7), (39): Xaa is C or S

SEQ ID NO: 27550 - protein, 38 aa, Artificial Sequence; identical to SEQ ID NO: 6407
  GFR-binding peptide
  MOD_RES (3), (4), (36), (38): Xaa is C or S

SEQ ID NO: 27551 - protein, 39 aa, Artificial Sequence; identical to SEQ ID NO: 6408
  GFR-binding peptide
  MOD_RES (4), (5): Xaa is C or S
  MOD_RES (19), (20), (21), (22), (23): Xaa is A or G
  MOD_RES (24), (25), (26), (27): Xaa is A or G or is absent

SEQ ID NO: 27552 - protein, 37 aa, Artificial Sequence
  GFR-binding peptide
  MOD_RES (3), (4): Xaa is C or S
  MOD_RES (18), (19), (20), (21), (22): Xaa is A or G
  MOD_RES (23), (24), (25), (26): Xaa is A or G or is absent
ASXXVPARLSPISILYIXXXXXXXXXYKQYEDMVVEA

SEQ ID NO: 27553 - protein, 42 aa, Artificial Sequence; identical to SEQ ID NO: 6410
  GFR-binding peptide
  MOD_RES (6), (40), (42): Xaa is C or S
  MOD_RES (20), (21), (22), (23), (24): Xaa is A or G
  MOD_RES (25), (26), (27), (28): Xaa is A or G or is absent

SEQ ID NO: 27554 - protein, 41 aa, Artificial Sequence
  GFR-binding peptide
  MOD_RES (5), (6), (39), (41): Xaa is C or S
  MOD_RES (20), (21), (22), (23), (24): Xaa is A or G
  MOD_RES (25), (26), (27), (28): Xaa is A or G or is absent
SASPXXVSQDLEPISILYLXXXXXXXXXKFKYEMIVKSXKX

SEQ ID NO: 27555 - protein, 32 aa, Artificial Sequence
  GFR-binding peptide
  MOD_RES (14), (15), (16), (17), (18): Xaa is A or G
  MOD_RES (19), (20), (21), (22): Xaa is A or G or is absent
VPQALSPISILYIXXXXXXXXXYKQYEMIVRS

SEQ ID NO: 27556 - protein, 39 aa, Artificial Sequence
  GFR-binding peptide
  MOD_RES (3), (4), (38): Xaa is C or S
  MOD_RES (18), (19), (20), (21), (22): Xaa is A or G
  MOD_RES (23), (24), (25), (26): Xaa is A or G or is absent
KPXXAPTQLSPISVLYIXXXXXXXXXYKQYENMVVRAXG

SEQ ID NO: 27557 - protein, 34 aa, Artificial Sequence; identical to SEQ ID NO: 6414
  GFR-binding peptide
  MOD_RES (1), (1): Xaa is C or S
  MOD_RES (15), (16), (17), (18), (19): Xaa is A or G
  MOD_RES (20), (21), (22), (23): Xaa is A or G or is absent

SEQ ID NO: 27558 - protein, 40 aa, Artificial Sequence
  GFR-binding peptide
  MOD_RES (6), (7): Xaa is C or S
  MOD_RES (21), (22), (23), (24), (25): Xaa is A or G
  MOD_RES (26), (27), (28), (29): Xaa is A or G or is absent
KASKAXXVPTKLEPISILYLXXXXXXXXXKFKYEGMAVSE

SEQ ID NO: 27559 - protein, 40 aa, Artificial Sequence
  GFR-binding peptide
  MOD_RES (6), (40): Xaa is C or S
  MOD_RES (20), (21), (22), (23), (24): Xaa is A or G
  MOD_RES (25), (26), (27), (28): Xaa is A or G or is absent
VTKPTXAPTKLSPISVLYIXXXXXXXXXYKQYENMVVRSX

SEQ ID NO: 27560 - protein, 36 aa, Artificial Sequence
  GFR-binding peptide
  MOD_RES (3), (3): Xaa is C or S
  MOD_RES (17), (18), (19), (20), (21): Xaa is A or G
  MOD_RES (22), (23), (24), (25): Xaa is A or G or is absent
PTXAPTKLSPISVLYIXXXXXXXXXYKQYENMVVRS

SEQ ID NO: 27561 - protein, 33 aa, Artificial Sequence
  GFR-binding peptide
  MOD_RES (33), (33): Xaa is C or S
  MOD_RES (14), (15), (16), (17), (18): Xaa is A or G
  MOD_RES (19), (20), (21), (22): Xaa is A or G or is absent
VPQALEPISILYLXXXXXXXXXKFKYEMIVRSX

SEQ ID NO: 27562 - protein, 38 aa, Artificial Sequence
  GFR-binding peptide
  MOD_RES (3), (4), (36), (38): Xaa is C or S
ASXXVPARLSPISILYKDAANNVVLKYHYDMVVEAXGX

SEQ ID NO: 27563 - protein, 40 aa, Artificial Sequence
  GFR-binding peptide
  MOD_RES (2), (3), (37), (39): Xaa is C or S
  MOD_RES (17), (18), (19), (20), (21): Xaa is A or G
  MOD_RES (22), (23), (24), (25): Xaa is A or G or is absent
PXXAPTKLSPISVLYIXXXXXXXXXYKQYENMVVRSXGXH

SEQ ID NO: 27564 - protein, 37 aa, Artificial Sequence
  GFR-binding peptide
  MOD_RES (1), (2), (34), (36): Xaa is C or S
XXVPARLEPISILYLDAANNVVKFKYEDMVVEAXGXR

SEQ ID NO: 27565 - protein, 36 aa, Artificial Sequence; identical to SEQ ID NO: 6422
  GFR-binding peptide
  MOD_RES (3), (4), (36): Xaa is C or S

SEQ ID NO: 27566 - protein, 40 aa, Artificial Sequence
  GFR-binding peptide
  MOD_RES (6), (7): Xaa is C or S
  MOD_RES (21), (22), (23), (24), (25): Xaa is A or G
  MOD_RES (26), (27), (28), (29): Xaa is A or G or is absent
AAPASXXVPARLSPISILYIXXXXXXXXXYKQYEDMVVEA

SEQ ID NO: 27567 - protein, 41 aa, Artificial Sequence
  GFR-binding peptide
  MOD_RES (6), (7), (41): Xaa is C or S
  MOD_RES (21), (22), (23), (24), (25): Xaa is A or G
  MOD_RES (26), (27), (28), (29): Xaa is A or G or is absent
KIPKAXXVPTELEPISMLYLXXXXXXXXXKFKYEDMVVEGX

SEQ ID NO: 27568 - protein, 36 aa, Artificial Sequence; identical to SEQ ID NO: 6425
  GFR-binding peptide
  MOD_RES (2), (3): Xaa is C or S
  MOD_RES (17), (18), (19), (20), (21): Xaa is A or G
  MOD_RES (22), (23), (24), (25): Xaa is A or G or is absent

SEQ ID NO: 27569 - protein, 35 aa, Artificial Sequence
  GFR-binding peptide
  MOD_RES (1), (2), (33), (35): Xaa is C or S
XXVSQDLEPISILYLIGKTPKIKFKYEMIVKSXKX

SEQ ID NO: 27570 - protein, 38 aa, Artificial Sequence
  GFR-binding peptide
  MOD_RES (3), (4), (36), (38): Xaa is C or S
KPXXAPTKLEPISVLYLDDSSNVIKFKYENMVVRSXGX

SEQ ID NO: 27571 - protein, 36 aa, Artificial Sequence
  GFR-binding peptide
  MOD_RES (1), (2), (35): Xaa is C or S
  MOD_RES (16), (17), (18), (19), (20): Xaa is A or G
  MOD_RES (21), (22), (23), (24): Xaa is A or G or is absent
XXVPQALSPISILYIXXXXXXXXXYKQYEMIVRSXK

SEQ ID NO: 27572 - protein, 43 aa, Artificial Sequence
  GFR-binding peptide
  MOD_RES (6), (7), (40), (42): Xaa is C or S
  MOD_RES (21), (22), (23), (24), (25): Xaa is A or G
  MOD_RES (26), (27), (28), (29): Xaa is A or G or is absent
ASAAPXXVPQALEPISILYLXXXXXXXXXKFKYEMIVRSXKXS

SEQ ID NO: 27573 - protein, 33 aa, Artificial Sequence; identical to SEQ ID NO: 6430
  GFR-binding peptide
  MOD_RES (32), (32): Xaa is C or S

SEQ ID NO: 27574 - protein, 41 aa, Artificial Sequence
  GFR-binding peptide
  MOD_RES (5), (6), (40): Xaa is C or S
  MOD_RES (20), (21), (22), (23), (24): Xaa is A or G
  MOD_RES (25), (26), (27), (28): Xaa is A or G or is absent
APASXXVPARLEPISILYLXXXXXXXXXKFKYEDMVVEAXG

SEQ ID NO: 27575 - protein, 36 aa, Artificial Sequence
  GFR-binding peptide
  MOD_RES (3), (4): Xaa is C or S
  MOD_RES (18), (19), (20), (21), (22): Xaa is A or G
  MOD_RES (23), (24), (25), (26): Xaa is A or G or is absent
KPXXAPTKLSPISVLYIXXXXXXXXXYKQYENMVVR

SEQ ID NO: 27576 - protein, 36 aa, Artificial Sequence; identical to SEQ ID NO: 6431
  GFR-binding peptide
  MOD_RES (1), (2), (34), (36): Xaa is C or S

SEQ ID NO: 27577 - protein, 35 aa, Artificial Sequence
  GFR-binding peptide
  MOD_RES (33), (35): Xaa is C or S
  MOD_RES (14), (15), (16), (17), (18): Xaa is A or G
  MOD_RES (19), (20), (21), (22): Xaa is A or G or is absent
VSQDLSPISILYIXXXXXXXXXYKQYEMIVKSXKX

SEQ ID NO: 27578 - protein, 36 aa, Artificial Sequence
  GFR-binding peptide
  MOD_RES (4), (5), (36): Xaa is C or S
ASPXXVPQDLEPISILYLVGRTPKVKFKYEMVVKSX

SEQ ID NO: 27579 - protein, 37 aa, Artificial Sequence; identical to SEQ ID NO: 6432
  GFR-binding peptide
  MOD_RES (4), (5), (36): Xaa is C or S

SEQ ID NO: 27580 - protein, 41 aa, Artificial Sequence; identical to SEQ ID NO: 6435
  GFR-binding peptide
  MOD_RES (4), (5), (39), (41): Xaa is C or S
  MOD_RES (19), (20), (21), (22), (23): Xaa is A or G
  MOD_RES (24), (25), (26), (27): Xaa is A or G or is absent

SEQ ID NO: 27581 - protein, 41 aa, Artificial Sequence; identical to SEQ ID NO: 6436
  GFR-binding peptide
  MOD_RES (5), (6), (38), (40): Xaa is C or S

SEQ ID NO: 27582 - protein, 35 aa, Artificial Sequence
  GFR-binding peptide
  MOD_RES (4), (5): Xaa is C or S
PKAXXAPTKLEPISVLYLDSSNNVIKFKYENMVVK

SEQ ID NO: 27583 - protein, 40 aa, Artificial Sequence
  GFR-binding peptide
  MOD_RES (2), (3), (37), (39): Xaa is C or S
  MOD_RES (17), (18), (19), (20), (21): Xaa is A or G
  MOD_RES (22), (23), (24), (25): Xaa is A or G or is absent
PXXAPTQLEPISVLYLXXXXXXXXXKFKYENMVVRAXGXH

SEQ ID NO: 27584 - protein, 36 aa, Artificial Sequence
  GFR-binding peptide
  MOD_RES (1), (33), (35): Xaa is C or S
XVPARLSPISILYKDAANNVVLKYHYDMVVEAXGXR

SEQ ID NO: 27585 - protein, 36 aa, Artificial Sequence
  GFR-binding peptide
  MOD_RES (5), (6): Xaa is C or S
SAAPXXVPQALSPISILYIVGRKPKVYKQYEMIVRS

SEQ ID NO: 27586 - protein, 40 aa, Artificial Sequence
  GFR-binding peptide
  MOD_RES (5), (6), (38), (40): Xaa is C or S
IPKAXXVPTELSPISMLYIDEYDKVVYKQYEEMVVEGXGX

SEQ ID NO: 27587 - protein, 42 aa, Artificial Sequence
  GFR-binding peptide
  MOD_RES (7), (41): Xaa is C or S
  MOD_RES (21), (22), (23), (24), (25): Xaa is A or G
  MOD_RES (26), (27), (28), (29): Xaa is A or G or is absent
HVTKPTXAPTKLSPISVLYIXXXXXXXXXYKQYENMVVRSXG

SEQ ID NO: 27588 - protein, 41 aa, Artificial Sequence; identical to SEQ ID NO: 6443
  GFR-binding peptide
  MOD_RES (3), (4), (38), (40): Xaa is C or S
  MOD_RES (18), (19), (20), (21), (22): Xaa is A or G
  MOD_RES (23), (24), (25), (26): Xaa is A or G or is absent

SEQ ID NO: 27589 - protein, 35 aa, Artificial Sequence; identical to SEQ ID NO: 6444
  GFR-binding peptide
  MOD_RES (1), (2), (34): Xaa is C or S

SEQ ID NO: 27590 - protein, 40 aa, Artificial Sequence
  GFR-binding peptide
  MOD_RES (6), (40): Xaa is C or S
  MOD_RES (20), (21), (22), (23), (24): Xaa is A or G
  MOD_RES (25), (26), (27), (28): Xaa is A or G or is absent
VTKPTXAPTKLEPISVLYLXXXXXXXXXKFKYENMVVRSX

SEQ ID NO: 27591 - protein, 36 aa, Artificial Sequence; identical to SEQ ID NO: 6445
  GFR-binding peptide
  MOD_RES (4), (5): Xaa is C or S

SEQ ID NO: 27592 - protein, 33 aa, Artificial Sequence; identical to SEQ ID NO: 6446
  GFR-binding peptide
  MOD_RES (2), (3): Xaa is C or S

SEQ ID NO: 27593 - protein, 43 aa, Artificial Sequence
  GFR-binding peptide
  MOD_RES (5), (6), (41), (43): Xaa is C or S
  MOD_RES (20), (21), (22), (23), (24): Xaa is A or G
  MOD_RES (25), (26), (27), (28): Xaa is A or G or is absent
VGKAXXVPTKLEPISVLYLXXXXXXXXXKFKYEEGMSVAEXGX

SEQ ID NO: 27594 - protein, 36 aa, Artificial Sequence
  GFR-binding peptide
  MOD_RES (33), (35): Xaa is C or S
  MOD_RES (14), (15), (16), (17), (18): Xaa is A or G
  MOD_RES (19), (20), (21), (22): Xaa is A or G or is absent
VSQDLEPISILYLXXXXXXXXXKFKYEMIVKSXKXS

SEQ ID NO: 27595 - protein, 37 aa, Artificial Sequence
  GFR-binding peptide
  MOD_RES (3), (35), (37): Xaa is C or S
PTXAPTKLSPISVLYIDDSSNVIYKQYENMVVRSXGX

SEQ ID NO: 27596 - protein, 35 aa, Artificial Sequence; identical to SEQ ID NO: 6447
  GFR-binding peptide
  MOD_RES (33), (35): Xaa is C or S
  MOD_RES (14), (15), (16), (17), (18): Xaa is A or G
  MOD_RES (19), (20), (21), (22): Xaa is A or G or is absent

SEQ ID NO: 27597 - protein, 34 aa, Artificial Sequence; identical to SEQ ID NO: 6449
  GFR-binding peptide
  MOD_RES (31), (33): Xaa is C or S

SEQ ID NO: 27598 - protein, 37 aa, Artificial Sequence
  GFR-binding peptide
  MOD_RES (4), (36): Xaa is C or S
KPTXAPTKLEPISVLYLDDSSNVIKFKYENMVVRSXG

SEQ ID NO: 27599 - protein, 34 aa, Artificial Sequence
  GFR-binding peptide
  MOD_RES (1), (2): Xaa is C or S
  MOD_RES (16), (17), (18), (19), (20): Xaa is A or G
  MOD_RES (21), (22), (23), (24): Xaa is A or G or is absent
XXVPTELSPISMLYIXXXXXXXXXYKQYEEMVVE

SEQ ID NO: 27600 - protein, 38 aa, Artificial Sequence; identical to SEQ ID NO: 6452
  GFR-binding peptide
  MOD_RES (3), (4), (36), (38): Xaa is C or S

SEQ ID NO: 27601 - protein, 36 aa, Artificial Sequence
  GFR-binding peptide
  MOD_RES (1), (33), (35): Xaa is C or S
XVPTELSPISMLYIDENEKVVYKQYEDMVVEGXGXR

SEQ ID NO: 27602 - protein, 36 aa, Artificial Sequence
  GFR-binding peptide
  MOD_RES (2), (3): Xaa is C or S
  MOD_RES (17), (18), (19), (20), (21): Xaa is A or G
  MOD_RES (22), (23), (24), (25): Xaa is A or G or is absent
PXXAPTQLEPISVLYLXXXXXXXXXKFKYENMVVRA

SEQ ID NO: 27603 - protein, 39 aa, Artificial Sequence
  GFR-binding peptide
  MOD_RES (3), (4), (36), (38): Xaa is C or S
KAXXVPTKLSPISILYIDKGVVTYYKQYEGMAVSEXGXR

SEQ ID NO: 27604 - protein, 40 aa, Artificial Sequence; identical to SEQ ID NO: 6454
  GFR-binding peptide
  MOD_RES (5), (6), (38), (40): Xaa is C or S

SEQ ID NO: 27605 - protein, 35 aa, Artificial Sequence
  GFR-binding peptide
  MOD_RES (2), (3), (35): Xaa is C or S
PXXAPTKLSPISVLYIDDSSNVIYKQYENMVVRSX

SEQ ID NO: 27606 - protein, 36 aa, Artificial Sequence; identical to SEQ ID NO: 6455
  GFR-binding peptide
  MOD_RES (1), (34), (36): Xaa is C or S
  MOD_RES (15), (16), (17), (18), (19): Xaa is A or G
  MOD_RES (20), (21), (22), (23): Xaa is A or G or is absent

SEQ ID NO: 27607 - protein, 40 aa, Artificial Sequence
  GFR-binding peptide
  MOD_RES (2), (3), (37), (39): Xaa is C or S
  MOD_RES (17), (18), (19), (20), (21): Xaa is A or G
  MOD_RES (22), (23), (24), (25): Xaa is A or G or is absent
AXXVPTKLSPISILYKXXXXXXXXXLKYHYGMAVSEXGXR

SEQ ID NO: 27608 - protein, 34 aa, Artificial Sequence; identical to SEQ ID NO: 6456
  GFR-binding peptide
  MOD_RES (2), (3): Xaa is C or S

SEQ ID NO: 27609 - protein, 39 aa, Artificial Sequence
  GFR-binding peptide
  MOD_RES (1), (2), (36), (38): Xaa is C or S
  MOD_RES (16), (17), (18), (19), (20): Xaa is A or G
  MOD_RES (21), (22), (23), (24): Xaa is A or G or is absent
XXAPTKLSPISVLYIXXXXXXXXXYKQYENMVVRSXGXH

SEQ ID NO: 27610 - protein, 35 aa, Artificial Sequence; identical to SEQ ID NO: 6458
  GFR-binding peptide
  MOD_RES (2), (3), (35): Xaa is C or S

SEQ ID NO: 27611 - protein, 39 aa, Artificial Sequence
  GFR-binding peptide
  MOD_RES (3), (4), (36), (38): Xaa is C or S
ASXXVPARLSPISILYKDAANNVVLKYHYDMVVEAXGXR

SEQ ID NO: 27612 - protein, 37 aa, Artificial Sequence
  GFR-binding peptide
  MOD_RES (1), (35), (37): Xaa is C or S
  MOD_RES (15), (16), (17), (18), (19): Xaa is A or G
  MOD_RES (20), (21), (22), (23): Xaa is A or G or is absent
XVPARLNAISILYFXXXXXXXXXLKKYRDMVVEAXGX

SEQ ID NO: 27613 - protein, 41 aa, Artificial Sequence
  GFR-binding peptide
  MOD_RES (6), (7), (41): Xaa is C or S
  MOD_RES (21), (22), (23), (24), (25): Xaa is A or G
  MOD_RES (26), (27), (28), (29): Xaa is A or G or is absent
SIPKAXXVPTELSPISMLYIXXXXXXXXXYKQYEEMVVEGX

SEQ ID NO: 27614 - protein, 37 aa, Artificial Sequence
  GFR-binding peptide
  MOD_RES (3), (37): Xaa is C or S
  MOD_RES (17), (18), (19), (20), (21): Xaa is A or G
  MOD_RES (22), (23), (24), (25): Xaa is A or G or is absent
PTXAPTKLSPISVLYIXXXXXXXXXYKQYENMVVRSX

SEQ ID NO: 27615 - protein, 36 aa, Artificial Sequence
  GFR-binding peptide
  MOD_RES (1), (33), (35): Xaa is C or S
XVPTKLSPISILYIDKGVVTYYKQYEGMAVSEXGXR

SEQ ID NO: 27616 - protein, 40 aa, Artificial Sequence
  GFR-binding peptide
  MOD_RES (6), (7), (40): Xaa is C or S
  MOD_RES (21), (22), (23), (24), (25): Xaa is A or G
  MOD_RES (26), (27), (28), (29): Xaa is A or G or is absent
ASASPXXVPQDLEPISILYLXXXXXXXXXKFKYEMVVKSX

SEQ ID NO: 27617 - protein, 32 aa, Artificial Sequence
  GFR-binding peptide
  MOD_RES (14), (15), (16), (17), (18): Xaa is A or G
  MOD_RES (19), (20), (21), (22): Xaa is A or G or is absent
APTQLEPISVLYLXXXXXXXXXKFKYENMVVR

SEQ ID NO: 27618 - protein, 39 aa, Artificial Sequence; identical to SEQ ID NO: 6464
  GFR-binding peptide
  MOD_RES (4), (5), (39): Xaa is C or S
  MOD_RES (19), (20), (21), (22), (23): Xaa is A or G
  MOD_RES (24), (25), (26), (27): Xaa is A or G or is absent

SEQ ID NO: 27619 - protein, 36 aa, Artificial Sequence
  GFR-binding peptide
  MOD_RES (3), (4): Xaa is C or S
  MOD_RES (18), (19), (20), (21), (22): Xaa is A or G
  MOD_RES (23), (24), (25), (26): Xaa is A or G or is absent
ASXXVPARLSPISILYIXXXXXXXXXYKQYEDMVVE

SEQ ID NO: 27620 - protein, 37 aa, Artificial Sequence
  GFR-binding peptide
  MOD_RES (3), (4): Xaa is C or S
  MOD_RES (18), (19), (20), (21), (22): Xaa is A or G
  MOD_RES (23), (24), (25), (26): Xaa is A or G or is absent
ASXXVPARLNAISILYFXXXXXXXXXLKKYRDMVVEA

SEQ ID NO: 27621 - protein, 42 aa, Artificial Sequence; identical to SEQ ID NO: 6466
  GFR-binding peptide
  MOD_RES (4), (5), (39), (41): Xaa is C or S
  MOD_RES (19), (20), (21), (22), (23): Xaa is A or G
  MOD_RES (24), (25), (26), (27): Xaa is A or G or is absent

SEQ ID NO: 27622 - protein, 38 aa, Artificial Sequence; identical to SEQ ID NO: 6467
  GFR-binding peptide
  MOD_RES (2), (3), (36), (38): Xaa is C or S
  MOD_RES (17), (18), (19), (20), (21): Xaa is A or G
  MOD_RES (22), (23), (24), (25): Xaa is A or G or is absent

SEQ ID NO: 27623 - protein, 42 aa, Artificial Sequence; identical to SEQ ID NO: 6469
  GFR-binding peptide
  MOD_RES (5), (6), (40), (42): Xaa is C or S
  MOD_RES (20), (21), (22), (23), (24): Xaa is A or G
  MOD_RES (25), (26), (27), (28): Xaa is A or G or is absent

SEQ ID NO: 27624 - protein, 35 aa, Artificial Sequence
  GFR-binding peptide
  MOD_RES (1), (35): Xaa is C or S
  MOD_RES (15), (16), (17), (18), (19): Xaa is A or G
  MOD_RES (20), (21), (22), (23): Xaa is A or G or is absent
XVPARLNAISILYFXXXXXXXXXLKKYRDMVVEAX

SEQ ID NO: 27625 - protein, 36 aa, Artificial Sequence; identical to SEQ ID NO: 6470
  GFR-binding peptide
  MOD_RES (34), (36): Xaa is C or S
  MOD_RES (14), (15), (16), (17), (18): Xaa is A or G
  MOD_RES (19), (20), (21), (22): Xaa is A or G or is absent

SEQ ID NO: 27626 - protein, 39 aa, Artificial Sequence
  GFR-binding peptide
  MOD_RES (2), (3), (37), (39): Xaa is C or S
  MOD_RES (17), (18), (19), (20), (21): Xaa is A or G
  MOD_RES (22), (23), (24), (25): Xaa is A or G or is absent
SXXVPARLNAISILYFXXXXXXXXXLKKYRDMVVEAXGX

SEQ ID NO: 27627 - protein, 42 aa, Artificial Sequence
  GFR-binding peptide
  MOD_RES (6), (7), (41): Xaa is C or S
  MOD_RES (21), (22), (23), (24), (25): Xaa is A or G
  MOD_RES (26), (27), (28), (29): Xaa is A or G or is absent
AAPASXXVPARLEPISILYLXXXXXXXXXKFKYEDMVVEAXG

SEQ ID NO: 27628 - protein, 39 aa, Artificial Sequence
  GFR-binding peptide
  MOD_RES (3), (4), (38): Xaa is C or S
  MOD_RES (18), (19), (20), (21), (22): Xaa is A or G
  MOD_RES (23), (24), (25), (26): Xaa is A or G or is absent
KAXXAPTKLSPISVLYIXXXXXXXXXYKQYENMVVKAXG

SEQ ID NO: 27629 - protein, 38 aa, Artificial Sequence
  GFR-binding peptide
  MOD_RES (4), (5), (36), (38): Xaa is C or S
AAPXXVPQALSPISILYIVGRKPKVYKQYEMIVRSXKX

SEQ ID NO: 27630 - protein, 37 aa, Artificial Sequence
  GFR-binding peptide
  MOD_RES (2), (3), (37): Xaa is C or S
  MOD_RES (17), (18), (19), (20), (21): Xaa is A or G
  MOD_RES (22), (23), (24), (25): Xaa is A or G or is absent
AXXVPTELEPISMLYLXXXXXXXXXKFKYEEMVVEGX

SEQ ID NO: 27631 - protein, 38 aa, Artificial Sequence; identical to SEQ ID NO: 6475
  GFR-binding peptide
  MOD_RES (3), (4), (35), (37): Xaa is C or S

SEQ ID NO: 27632 - protein, 42 aa, Artificial Sequence
  GFR-binding peptide
  MOD_RES (6), (7), (41): Xaa is C or S
  MOD_RES (21), (22), (23), (24), (25): Xaa is A or G
  MOD_RES (26), (27), (28), (29): Xaa is A or G or is absent
AAPASXXVPARLSPISILYKXXXXXXXXXLKYHYDMVVEAXG

SEQ ID NO: 27633 - protein, 41 aa, Artificial Sequence
  GFR-binding peptide
  MOD_RES (5), (6), (38), (40): Xaa is C or S
APASXXVPARLSPISILYKDAANNVVLKYHYDMVVEAXGXR

SEQ ID NO: 27634 - protein, 41 aa, Artificial Sequence
  GFR-binding peptide
  MOD_RES (3), (4), (38), (40): Xaa is C or S
  MOD_RES (18), (19), (20), (21), (22): Xaa is A or G
  MOD_RES (23), (24), (25), (26): Xaa is A or G or is absent
KAXXVPTELEPISMLYLXXXXXXXXXKFKYEEMVVEGXGXR

SEQ ID NO: 27635 - protein, 38 aa, Artificial Sequence
  GFR-binding peptide
  MOD_RES (4), (5), (37): Xaa is C or S
SKAXXVPTKLSPISILYKDKGVVTYLKYHYGMAVSEXG

SEQ ID NO: 27636 - protein, 38 aa, Artificial Sequence
  GFR-binding peptide
  MOD_RES (6), (7): Xaa is C or S
KASKAXXVPTKLSPISILYKDKGVVTYLKYHYGMAVSE

SEQ ID NO: 27637 - protein, 36 aa, Artificial Sequence
  GFR-binding peptide
  MOD_RES (1), (35): Xaa is C or S
  MOD_RES (15), (16), (17), (18), (19): Xaa is A or G
  MOD_RES (20), (21), (22), (23): Xaa is A or G or is absent
XVPTELSPISMLYIXXXXXXXXXYKQYEDMVVEGXG

SEQ ID NO: 27638 - protein, 37 aa, Artificial Sequence
  GFR-binding peptide
  MOD_RES (1), (2), (34), (36): Xaa is C or S
XXVPTELSPISMLYIDENEKVVYKQYEDMVVEGXGXR

SEQ ID NO: 27639 - protein, 43 aa, Artificial Sequence; identical to SEQ ID NO: 6479
  GFR-binding peptide
  MOD_RES (4), (5), (40), (42): Xaa is C or S
  MOD_RES (19), (20), (21), (22), (23): Xaa is A or G
  MOD_RES (24), (25), (26), (27): Xaa is A or G or is absent

SEQ ID NO: 27640 - protein, 37 aa, Artificial Sequence
  GFR-binding peptide
  MOD_RES (2), (3), (34), (36): Xaa is C or S
PXXVSQDLSPISILYIIGKTPKIYKQYEMIVKSXKXS

SEQ ID NO: 27641 - protein, 35 aa, Artificial Sequence
  GFR-binding peptide
  MOD_RES (1), (2), (35): Xaa is C or S
  MOD_RES (16), (17), (18), (19), (20): Xaa is A or G
  MOD_RES (21), (22), (23), (24): Xaa is A or G or is absent
XXVPQDLEPISILYLXXXXXXXXXKFKYEMVVKSX

SEQ ID NO: 27642 - protein, 38 aa, Artificial Sequence
  GFR-binding peptide
  MOD_RES (3), (4), (38): Xaa is C or S
  MOD_RES (18), (19), (20), (21), (22): Xaa is A or G
  MOD_RES (23), (24), (25), (26): Xaa is A or G or is absent
KAXXVPTELSPISMLYIXXXXXXXXXYKQYEDMVVEGX

SEQ ID NO: 27643 - protein, 35 aa, Artificial Sequence
  GFR-binding peptide
  MOD_RES (3), (4): Xaa is C or S
ASXXVPARLEPISILYLDAANNVVKFKYEDMVVEA

SEQ ID NO: 27644 - protein, 37 aa, Artificial Sequence
  GFR-binding peptide
  MOD_RES (4), (5): Xaa is C or S
  MOD_RES (19), (20), (21), (22), (23): Xaa is A or G
  MOD_RES (24), (25), (26), (27): Xaa is A or G or is absent
ASPXXVSQDLEPISILYLXXXXXXXXXKFKYEMIVKS

SEQ ID NO: 27645 - protein, 39 aa, Artificial Sequence
  GFR-binding peptide
  MOD_RES (5), (6): Xaa is C or S
  MOD_RES (20), (21), (22), (23), (24): Xaa is A or G
  MOD_RES (25), (26), (27), (28): Xaa is A or G or is absent
ASKAXXVPTKLSPISILYKXXXXXXXXXLKYHYGMAVSE

SEQ ID NO: 27646 - protein, 39 aa, Artificial Sequence
  GFR-binding peptide
  MOD_RES (5), (6), (38): Xaa is C or S
VPKPXXAPTKLSPISVLYIDDSSNVIYKQYENMVVRSXG

SEQ ID NO: 27647 - protein, 35 aa, Artificial Sequence
  GFR-binding peptide
  MOD_RES (2), (3): Xaa is C or S
  MOD_RES (17), (18), (19), (20), (21): Xaa is A or G
  MOD_RES (22), (23), (24), (25): Xaa is A or G or is absent
PXXAPTKLSPISVLYIXXXXXXXXXYKQYENMVVR

SEQ ID NO: 27648 - protein, 36 aa, Artificial Sequence
  GFR-binding peptide
  MOD_RES (2), (3), (35): Xaa is C or S
AXXVPTKLSPISILYKDKGVVTYLKYHYGMAVSEXG

SEQ ID NO: 27649 - protein, 37 aa, Artificial Sequence
  GFR-binding peptide
  MOD_RES (2), (3), (34), (36): Xaa is C or S
PXXVSQDLEPISILYLIGKTPKIKFKYEMIVKSXKXS

SEQ ID NO: 27650 - protein, 36 aa, Artificial Sequence
  GFR-binding peptide
  MOD_RES (5), (5): Xaa is C or S
TKPTXAPTKLSPISVLYIDDSSNVIYKQYENMVVRS

SEQ ID NO: 27651 - protein, 41 aa, Artificial Sequence
  GFR-binding peptide
  MOD_RES (5), (6), (38), (40): Xaa is C or S
APASXXVPARLEPISILYLDAANNVVKFKYEDMVVEAXGXR

SEQ ID NO: 27652 - protein, 38 aa, Artificial Sequence
  GFR-binding peptide
  MOD_RES (2), (3), (36), (38): Xaa is C or S
AXXVPTKLEPISVLYLDDMGVPTKFKYEEGMSVAEXGX

SEQ ID NO: 27653 - protein, 36 aa, Artificial Sequence
  GFR-binding peptide
  MOD_RES (1), (2), (35): Xaa is C or S
  MOD_RES (16), (17), (18), (19), (20): Xaa is A or G
  MOD_RES (21), (22), (23), (24): Xaa is A or G or is absent
XXVPQALEPISILYLXXXXXXXXXKFKYEMIVRSXK

SEQ ID NO: 27654 - protein, 40 aa, Artificial Sequence
  GFR-binding peptide
  MOD_RES (4), (5), (37), (39): Xaa is C or S
PASXXVPARLSPISILYKDAANNVVLKYHYDMVVEAXGXR

SEQ ID NO: 27655 - protein, 34 aa, Artificial Sequence
  GFR-binding peptide
  MOD_RES (2), (3): Xaa is C or S
PXXAPTQLSPISVLYIDDSSNVIYKQYENMVVRA

SEQ ID NO: 27656 - protein, 33 aa, Artificial Sequence
  GFR-binding peptide
  MOD_RES (1), (1): Xaa is C or S
  MOD_RES (15), (16), (17), (18), (19): Xaa is A or G
  MOD_RES (20), (21), (22), (23): Xaa is A or G or is absent
XVPARLNAISILYFXXXXXXXXXLKKYRDMVVE

SEQ ID NO: 27657 - protein, 43 aa, Artificial Sequence; identical to SEQ ID NO: 6493
  GFR-binding peptide
  MOD_RES (6), (7), (41), (43): Xaa is C or S
  MOD_RES (21), (22), (23), (24), (25): Xaa is A or G
  MOD_RES (26), (27), (28), (29): Xaa is A or G or is absent

SEQ ID NO: 27658 - protein, 41 aa, Artificial Sequence
  GFR-binding peptide
  MOD_RES (5), (6), (40): Xaa is C or S
  MOD_RES (20), (21), (22), (23), (24): Xaa is A or G
  MOD_RES (25), (26), (27), (28): Xaa is A or G or is absent
IPKAXXVPTELSPISMLYIXXXXXXXXXYKQYEDMVVEGXG

SEQ ID NO: 27659 - protein, 38 aa, Artificial Sequence
  GFR-binding peptide
  MOD_RES (2), (3), (37): Xaa is C or S
  MOD_RES (17), (18), (19), (20), (21): Xaa is A or G
  MOD_RES (22), (23), (24), (25): Xaa is A or G or is absent
AXXVPTKLEPISILYLXXXXXXXXXKFKYEGMAVSEXG

SEQ ID NO: 27660 - protein, 36 aa, Artificial Sequence; identical to SEQ ID NO: 6495
  GFR-binding peptide
  MOD_RES (3), (35): Xaa is C or S

SEQ ID NO: 27661 - protein, 32 aa, Artificial Sequence; identical to SEQ ID NO: 6496
  GFR-binding peptide
  MOD_RES (14), (15), (16), (17), (18): Xaa is A or G
  MOD_RES (19), (20), (21), (22): Xaa is A or G or is absent

SEQ ID NO: 27662 - protein, 33 aa, Artificial Sequence; identical to SEQ ID NO: 6498
  GFR-binding peptide
  MOD_RES (33), (33): Xaa is C or S
  MOD_RES (14), (15), (16), (17), (18): Xaa is A or G
  MOD_RES (19), (20), (21), (22): Xaa is A or G or is absent

SEQ ID NO: 27663 - protein, 41 aa, Artificial Sequence
  GFR-binding peptide
  MOD_RES (4), (5), (38), (40): Xaa is C or S
GKAXXVPTKLSPISVLYIDDMGVPTYKQYEEGMSVAEXGXR

SEQ ID NO: 27664 - protein, 35 aa, Artificial Sequence; identical to SEQ ID NO: 6500
  GFR-binding peptide
  MOD_RES (2), (3): Xaa is C or S
  MOD_RES (17), (18), (19), (20), (21): Xaa is A or G
  MOD_RES (22), (23), (24), (25): Xaa is A or G or is absent

SEQ ID NO: 27665 - protein, 35 aa, Artificial Sequence
  GFR-binding peptide
  MOD_RES (2), (3): Xaa is C or S
  MOD_RES (17), (18), (19), (20), (21): Xaa is A or G
  MOD_RES (22), (23), (24), (25): Xaa is A or G or is absent
PXXVPQALEPISILYLXXXXXXXXXKFKYEMIVRS

SEQ ID NO: 27666 - protein, 36 aa, Artificial Sequence
  GFR-binding peptide
  MOD_RES (1), (33), (35): Xaa is C or S
XVPARLEPISILYLDAANNVVKFKYEDMVVEAXGXR

SEQ ID NO: 27667 - protein, 30 aa, Artificial Sequence
  GFR-binding peptide
VPTKLSPISILYKDKGVVTYLKYHYGMAVS

SEQ ID NO: 27668 - protein, 34 aa, Artificial Sequence
  GFR-binding peptide
  MOD_RES (34), (34): Xaa is C or S
  MOD_RES (14), (15), (16), (17), (18): Xaa is A or G
  MOD_RES (19), (20), (21), (22): Xaa is A or G or is absent
VPTKLSPISILYIXXXXXXXXXYKQYEGMAVSEX

SEQ ID NO: 27669 - protein, 42 aa, Artificial Sequence
  GFR-binding peptide
  MOD_RES (5), (6), (39), (41): Xaa is C or S
VGKAXXVPTKLSPISVLYIDDMGVPTYKQYEEGMSVAEXGXR

SEQ ID NO: 27670 - protein, 37 aa, Artificial Sequence
  GFR-binding peptide
  MOD_RES (2), (3), (37): Xaa is C or S
  MOD_RES (17), (18), (19), (20), (21): Xaa is A or G
  MOD_RES (22), (23), (24), (25): Xaa is A or G or is absent
AXXVPTKLNAISILYFXXXXXXXXXLKKYRGMAVSEX

SEQ ID NO: 27671 - protein, 35 aa, Artificial Sequence; identical to SEQ ID NO: 6511
  GFR-binding peptide
  MOD_RES (1), (2): Xaa is C or S
  MOD_RES (16), (17), (18), (19), (20): Xaa is A or G
  MOD_RES (21), (22), (23), (24): Xaa is A or G or is absent

SEQ ID NO: 27672 - protein, 41 aa, Artificial Sequence; identical to SEQ ID NO: 6512
  GFR-binding peptide
  MOD_RES (6), (7), (38), (40): Xaa is C or S

SEQ ID NO: 27673 - protein, 31 aa, Artificial Sequence; identical to SEQ ID NO: 6513
  GFR-binding peptide
  MOD_RES (1), (1): Xaa is C or S

SEQ ID NO: 27674 - protein, 33 aa, Artificial Sequence
  GFR-binding peptide
  MOD_RES (1), (2): Xaa is C or S
XXVPARLSPISILYKDAANNVVLKYHYDMVVEA

SEQ ID NO: 27675 - protein, 39 aa, Artificial Sequence
  GFR-binding peptide
  MOD_RES (5), (6): Xaa is C or S
  MOD_RES (20), (21), (22), (23), (24): Xaa is A or G
  MOD_RES (25), (26), (27), (28): Xaa is A or G or is absent
APASXXVPARLSPISILYIXXXXXXXXXYKQYEDMVVEA

SEQ ID NO: 27676 - protein, 40 aa, Artificial Sequence
  GFR-binding peptide
  MOD_RES (5), (6), (38), (40): Xaa is C or S
ASKAXXVPTKLSPISILYIDKGVVTYYKQYEGMAVSEXGX

SEQ ID NO: 27677 - protein, 39 aa, Artificial Sequence; identical to SEQ ID NO: 6520
  GFR-binding peptide
  MOD_RES (2), (3), (38): Xaa is C or S
  MOD_RES (17), (18), (19), (20), (21): Xaa is A or G
  MOD_RES (22), (23), (24), (25): Xaa is A or G or is absent

SEQ ID NO: 27678 - protein, 31 aa, Artificial Sequence
  GFR-binding peptide
APTQLEPISVLYLDDSSNVIKFKYENMVVRA

SEQ ID NO: 27679 - protein, 37 aa, Artificial Sequence
  GFR-binding peptide
  MOD_RES (3), (4): Xaa is C or S
  MOD_RES (18), (19), (20), (21), (22): Xaa is A or G
  MOD_RES (23), (24), (25), (26): Xaa is A or G or is absent
KAXXVPTKLNAISILYFXXXXXXXXXLKKYRGMAVSE

SEQ ID NO: 27680 - protein, 39 aa, Artificial Sequence; identical to SEQ ID NO: 6521
  GFR-binding peptide
  MOD_RES (2), (3), (36), (38): Xaa is C or S
  MOD_RES (17), (18), (19), (20), (21): Xaa is A or G
  MOD_RES (22), (23), (24), (25): Xaa is A or G or is absent

SEQ ID NO: 27681 - protein, 37 aa, Artificial Sequence
  GFR-binding peptide
  MOD_RES (2), (34), (36): Xaa is C or S
TXAPTKLSPISVLYIDDSSNVIYKQYENMVVRSXGXH

SEQ ID NO: 27682 - protein, 37 aa, Artificial Sequence
  GFR-binding peptide
  MOD_RES (1), (35), (37): Xaa is C or S
  MOD_RES (15), (16), (17), (18), (19): Xaa is A or G
  MOD_RES (20), (21), (22), (23): Xaa is A or G or is absent
XAPTKLSPISVLYIXXXXXXXXXYKQYENMVVKAXGX

SEQ ID NO: 27683 - protein, 34 aa, Artificial Sequence
  GFR-binding peptide
  MOD_RES (3), (4): Xaa is C or S
KPXXAPTKLEPISVLYLDDSSNVIKFKYENMVVR

SEQ ID NO: 27684 - protein, 37 aa, Artificial Sequence; identical to SEQ ID NO: 6525
  GFR-binding peptide
  MOD_RES (5), (6): Xaa is C or S

SEQ ID NO: 27685 - protein, 38 aa, Artificial Sequence
  GFR-binding peptide
  MOD_RES (1), (35), (37): Xaa is C or S
  MOD_RES (15), (16), (17), (18), (19): Xaa is A or G
  MOD_RES (20), (21), (22), (23): Xaa is A or G or is absent
XAPTKLEPISVLYLXXXXXXXXXKFKYENMVVKAXGXH

SEQ ID NO: 27686 - protein, 33 aa, Artificial Sequence
  GFR-binding peptide
  MOD_RES (1), (33): Xaa is C or S
XAPTQLEPISVLYLDDSSNVIKFKYENMVVRAX

SEQ ID NO: 27687 - protein, 31 aa, Artificial Sequence
  GFR-binding peptide
VPTKLNAISILYFDKGVVTYLKKYRGMAVSE

SEQ ID NO: 27688 - protein, 37 aa, Artificial Sequence
  GFR-binding peptide
  MOD_RES (5), (6): Xaa is C or S
IPKAXXVPTELSPISMLYIDENEKVVYKQYEDMVVEG

SEQ ID NO: 27689 - protein, 37 aa, Artificial Sequence; identical to SEQ ID NO: 6526
  GFR-binding peptide
  MOD_RES (6), (7): Xaa is C or S

SEQ ID NO: 27690 - protein, 37 aa, Artificial Sequence
  GFR-binding peptide
  MOD_RES (4), (5), (37): Xaa is C or S
PKPXXAPTKLEPISVLYLDDSSNVIKFKYENMVVRSX

SEQ ID NO: 27691 - protein, 39 aa, Artificial Sequence
  GFR-binding peptide
  MOD_RES (4), (5), (39): Xaa is C or S
  MOD_RES (19), (20), (21), (22), (23): Xaa is A or G
  MOD_RES (24), (25), (26), (27): Xaa is A or G or is absent
PKAXXAPTKLEPISVLYLXXXXXXXXXKFKYENMVVKAX

SEQ ID NO: 27692 - protein, 43 aa, Artificial Sequence; identical to SEQ ID NO: 6527
  GFR-binding peptide
  MOD_RES (6), (7), (40), (42): Xaa is C or S
  MOD_RES (21), (22), (23), (24), (25): Xaa is A or G
  MOD_RES (26), (27), (28), (29): Xaa is A or G or is absent

SEQ ID NO: 27693 - protein, 39 aa, Artificial Sequence; identical to SEQ ID NO: 6532
  GFR-binding peptide
  MOD_RES (5), (6), (38): Xaa is C or S

SEQ ID NO: 27694 - protein, 39 aa, Artificial Sequence; identical to SEQ ID NO: 6533
  GFR-binding peptide
  MOD_RES (1), (2), (36), (38): Xaa is C or S
  MOD_RES (16), (17), (18), (19), (20): Xaa is A or G
  MOD_RES (21), (22), (23), (24): Xaa is A or G or is absent

SEQ ID NO: 27695 - protein, 39 aa, Artificial Sequence
  GFR-binding peptide
  MOD_RES (3), (4), (38): Xaa is C or S
  MOD_RES (18), (19), (20), (21), (22): Xaa is A or G
  MOD_RES (23), (24), (25), (26): Xaa is A or G or is absent
KAXXVPTELEPISMLYLXXXXXXXXXKFKYEDMVVEGXG

SEQ ID NO: 27696 - protein, 37 aa, Artificial Sequence; identical to SEQ ID NO: 6534
  GFR-binding peptide
  MOD_RES (1), (2), (37): Xaa is C or S
  MOD_RES (16), (17), (18), (19), (20): Xaa is A or G
  MOD_RES (21), (22), (23), (24): Xaa is A or G or is absent

SEQ ID NO: 27697 - protein, 39 aa, Artificial Sequence; identical to SEQ ID NO: 6536
  GFR-binding peptide
  MOD_RES (6), (6): Xaa is C or S
  MOD_RES (20), (21), (22), (23), (24): Xaa is A or G
  MOD_RES (25), (26), (27), (28): Xaa is A or G or is absent

SEQ ID NO: 27698 - protein, 35 aa, Artificial Sequence
  GFR-binding peptide
  MOD_RES (4), (5): Xaa is C or S
PKAXXVPTELEPISMLYLDEYDKVVKFKYEEMVVE

SEQ ID NO: 27699 - protein, 39 aa, Artificial Sequence
  GFR-binding peptide
  MOD_RES (7), (7): Xaa is C or S
  MOD_RES (21), (22), (23), (24), (25): Xaa is A or G
  MOD_RES (26), (27), (28), (29): Xaa is A or G or is absent
HVTKPTXAPTKLSPISVLYIXXXXXXXXXYKQYENMVVR

SEQ ID NO: 27700 - protein, 38 aa, Artificial Sequence
  GFR-binding peptide
  MOD_RES (3), (4), (38): Xaa is C or S
  MOD_RES (18), (19), (20), (21), (22): Xaa is A or G
  MOD_RES (23), (24), (25), (26): Xaa is A or G or is absent
KAXXVPTELEPISMLYLXXXXXXXXXKFKYEDMVVEGX

SEQ ID NO: 27701 - protein, 38 aa, Artificial Sequence; identical to SEQ ID NO: 6541
  GFR-binding peptide
  MOD_RES (1), (2), (36), (38): Xaa is C or S
  MOD_RES (16), (17), (18), (19), (20): Xaa is A or G
  MOD_RES (21), (22), (23), (24): Xaa is A or G or is absent

SEQ ID NO: 27702 - protein, 35 aa, Artificial Sequence; identical to SEQ ID NO: 6542
  GFR-binding peptide
  MOD_RES (1), (32), (34): Xaa is C or S

SEQ ID NO: 27703 - protein, 38 aa, Artificial Sequence; identical to SEQ ID NO: 6545
  GFR-binding peptide
  MOD_RES (1), (2), (36), (38): Xaa is C or S
  MOD_RES (16), (17), (18), (19), (20): Xaa is A or G
  MOD_RES (21), (22), (23), (24): Xaa is A or G or is absent

SEQ ID NO: 27704 - protein, 41 aa, Artificial Sequence
  GFR-binding peptide
  MOD_RES (4), (5), (39), (41): Xaa is C or S
  MOD_RES (19), (20), (21), (22), (23): Xaa is A or G
  MOD_RES (24), (25), (26), (27): Xaa is A or G or is absent
PASXXVPARLEPISILYLXXXXXXXXXKFKYEDMVVEAXGX

SEQ ID NO: 27705 - protein, 37 aa, Artificial Sequence; identical to SEQ ID NO: 6546
  GFR-binding peptide
  MOD_RES (4), (5): Xaa is C or S
  MOD_RES (19), (20), (21), (22), (23): Xaa is A or G
  MOD_RES (24), (25), (26), (27): Xaa is A or G or is absent

SEQ ID NO: 27706 - protein, 36 aa, Artificial Sequence; identical to SEQ ID NO: 6547
  GFR-binding peptide
  MOD_RES (1), (35): Xaa is C or S
  MOD_RES (15), (16), (17), (18), (19): Xaa is A or G
  MOD_RES (20), (21), (22), (23): Xaa is A or G or is absent

SEQ ID NO: 27707 - protein, 36 aa, Artificial Sequence
  GFR-binding peptide
  MOD_RES (1), (2), (36): Xaa is C or S
  MOD_RES (16), (17), (18), (19), (20): Xaa is A or G
  MOD_RES (21), (22), (23), (24): Xaa is A or G or is absent
XXAPTQLSPISVLYIXXXXXXXXXYKQYENMVVRAX

SEQ ID NO: 27708 - protein, 37 aa, Artificial Sequence
  GFR-binding peptide
  MOD_RES (1), (2), (36): Xaa is C or S
  MOD_RES (16), (17), (18), (19), (20): Xaa is A or G
  MOD_RES (21), (22), (23), (24): Xaa is A or G or is absent
XXVPTELEPISMLYLXXXXXXXXXKFKYEEMVVEGXG

SEQ ID NO: 27709 - protein, 42 aa, Artificial Sequence
  GFR-binding peptide
  MOD_RES (4), (5), (39), (41): Xaa is C or S
  MOD_RES (19), (20), (21), (22), (23): Xaa is A or G
  MOD_RES (24), (25), (26), (27): Xaa is A or G or is absent
PKPXXAPTKLSPISVLYIXXXXXXXXXYKQYENMVVRSXGXH

SEQ ID NO: 27710 - protein, 39 aa, Artificial Sequence
  GFR-binding peptide
  MOD_RES (6), (7): Xaa is C or S
  MOD_RES (21), (22), (23), (24), (25): Xaa is A or G
  MOD_RES (26), (27), (28), (29): Xaa is A or G or is absent
AAPASXXVPARLNAISILYFXXXXXXXXXLKKYRDMVVE

SEQ ID NO: 27711 - protein, 31 aa, Artificial Sequence; identical to SEQ ID NO: 6553
  GFR-binding peptide
  MOD_RES (1), (1): Xaa is C or S

SEQ ID NO: 27712 - protein, 35 aa, Artificial Sequence
  GFR-binding peptide
  MOD_RES (1), (35): Xaa is C or S
  MOD_RES (15), (16), (17), (18), (19): Xaa is A or G
  MOD_RES (20), (21), (22), (23): Xaa is A or G or is absent
XAPTKLEPISVLYLXXXXXXXXXKFKYENMVVKAX

SEQ ID NO: 27713 - protein, 38 aa, Artificial Sequence; identical to SEQ ID NO: 6554
  GFR-binding peptide
  MOD_RES (3), (4): Xaa is C or S
  MOD_RES (18), (19), (20), (21), (22): Xaa is A or G
  MOD_RES (23), (24), (25), (26): Xaa is A or G or is absent

SEQ ID NO: 27714 - protein, 42 aa, Artificial Sequence
  GFR-binding peptide
  MOD_RES (5), (6), (40), (42): Xaa is C or S
  MOD_RES (20), (21), (22), (23), (24): Xaa is A or G
  MOD_RES (25), (26), (27), (28): Xaa is A or G or is absent
VPKPXXAPTQLEPISVLYLXXXXXXXXXKFKYENMVVRAXGX

SEQ ID NO: 27715 - protein, 38 aa, Artificial Sequence; identical to SEQ ID NO: 6555
  GFR-binding peptide
  MOD_RES (2), (3), (37): Xaa is C or S
  MOD_RES (17), (18), (19), (20), (21): Xaa is A or G
  MOD_RES (22), (23), (24), (25): Xaa is A or G or is absent

SEQ ID NO: 27716 - protein, 38 aa, Artificial Sequence; identical to SEQ ID NO: 6556
  GFR-binding peptide
  MOD_RES (1), (35), (37): Xaa is C or S
  MOD_RES (15), (16), (17), (18), (19): Xaa is A or G
  MOD_RES (20), (21), (22), (23): Xaa is A or G or is absent

SEQ ID NO: 27717 - protein, 35 aa, Artificial Sequence
  GFR-binding peptide
  MOD_RES (32), (34): Xaa is C or S
VPARLEPISILYLDAANNVVKFKYEDMVVEAXGXR

SEQ ID NO: 27718 - protein, 40 aa, Artificial Sequence
  GFR-binding peptide
  MOD_RES (5), (6), (38), (40): Xaa is C or S
APASXXVPARLSPISILYKDAANNVVLKYHYDMVVEAXGX

SEQ ID NO: 27719 - protein, 37 aa, Artificial Sequence
  GFR-binding peptide
  MOD_RES (34), (36): Xaa is C or S
  MOD_RES (14), (15), (16), (17), (18): Xaa is A or G
  MOD_RES (19), (20), (21), (22): Xaa is A or G or is absent
APTKLEPISVLYLXXXXXXXXXKFKYENMVVKAXGXH

SEQ ID NO: 27720 - protein, 37 aa, Artificial Sequence
  GFR-binding peptide
  MOD_RES (2), (3), (37): Xaa is C or S
  MOD_RES (17), (18), (19), (20), (21): Xaa is A or G
  MOD_RES (22), (23), (24), (25): Xaa is A or G or is absent
AXXVPTELSPISMLYIXXXXXXXXXYKQYEEMVVEGX

SEQ ID NO: 27721 - protein, 37 aa, Artificial Sequence
  GFR-binding peptide
  MOD_RES (4), (5): Xaa is C or S
  MOD_RES (19), (20), (21), (22), (23): Xaa is A or G
  MOD_RES (24), (25), (26), (27): Xaa is A or G or is absent
PKPXXAPTKLEPISVLYLXXXXXXXXXKFKYENMVVR

SEQ ID NO: 27722 - protein, 36 aa, Artificial Sequence; identical to SEQ ID NO: 6564
  GFR-binding peptide
  MOD_RES (2), (34), (36): Xaa is C or S

SEQ ID NO: 27723 - protein, 38 aa, Artificial Sequence; identical to SEQ ID NO: 6566
  GFR-binding peptide
  MOD_RES (4), (5): Xaa is C or S
  MOD_RES (19), (20), (21), (22), (23): Xaa is A or G
  MOD_RES (24), (25), (26), (27): Xaa is A or G or is absent

SEQ ID NO: 27724 - protein, 38 aa, Artificial Sequence; identical to SEQ ID NO: 6567
  GFR-binding peptide
  MOD_RES (5), (6), (38): Xaa is C or S

SEQ ID NO: 27725 - protein, 38 aa, Artificial Sequence; identical to SEQ ID NO: 6568
  GFR-binding peptide
  MOD_RES (1), (2), (35), (37): Xaa is C or S
  MOD_RES (16), (17), (18), (19), (20): Xaa is A or G
  MOD_RES (21), (22), (23), (24): Xaa is A or G or is absent

SEQ ID NO: 27726 - protein, 35 aa, Artificial Sequence
  GFR-binding peptide
  MOD_RES (3), (4): Xaa is C or S
KPXXAPTKLEPISVLYLDDSSNVIKFKYENMVVRS

SEQ ID NO: 27727 - protein, 33 aa, Artificial Sequence
  GFR-binding peptide
  MOD_RES (1), (1): Xaa is C or S
  MOD_RES (15), (16), (17), (18), (19): Xaa is A or G
  MOD_RES (20), (21), (22), (23): Xaa is A or G or is absent
XVPTKLEPISILYLXXXXXXXXXKFKYEGMAVS

SEQ ID NO: 27728 - protein, 40 aa, Artificial Sequence
  GFR-binding peptide
  MOD_RES (3), (4), (39): Xaa is C or S
  MOD_RES (18), (19), (20), (21), (22): Xaa is A or G
  MOD_RES (23), (24), (25), (26): Xaa is A or G or is absent
KAXXVPTKLEPISVLYLXXXXXXXXXKFKYEEGMSVAEXG

SEQ ID NO: 27729 - protein, 38 aa, Artificial Sequence
  GFR-binding peptide
  MOD_RES (4), (5), (37): Xaa is C or S
PASXXVPARLEPISILYLDAANNVVKFKYEDMVVEAXG

SEQ ID NO: 27730 - protein, 32 aa, Artificial Sequence; identical to SEQ ID NO: 6571
  GFR-binding peptide
  MOD_RES (1), (2): Xaa is C or S

SEQ ID NO: 27731 - protein, 32 aa, Artificial Sequence
  GFR-binding peptide
  MOD_RES (1), (2): Xaa is C or S
XXVPQALEPISILYLVGRKPKVKFKYEMIVRS

SEQ ID NO: 27732 - protein, 34 aa, Artificial Sequence
  GFR-binding peptide
  MOD_RES (1), (34): Xaa is C or S
  MOD_RES (15), (16), (17), (18), (19): Xaa is A or G
  MOD_RES (20), (21), (22), (23): Xaa is A or G or is absent
XVPQDLEPISILYLXXXXXXXXXKFKYEMVVKSX

SEQ ID NO: 27733 - protein, 38 aa, Artificial Sequence
  GFR-binding peptide
  MOD_RES (2), (3), (35), (37): Xaa is C or S
AXXVPTKLSPISILYKDKGVVTYLKYHYGMAVSEXGXR

SEQ ID NO: 27734 - protein, 41 aa, Artificial Sequence
  GFR-binding peptide
  MOD_RES (2), (3), (38), (40): Xaa is C or S
  MOD_RES (17), (18), (19), (20), (21): Xaa is A or G
  MOD_RES (22), (23), (24), (25): Xaa is A or G or is absent
AXXVPTKLEPISVLYLXXXXXXXXXKFKYEEGMSVAEXGXR

SEQ ID NO: 27735 - protein, 43 aa, Artificial Sequence
  GFR-binding peptide
  MOD_RES (5), (6), (40), (42): Xaa is C or S
  MOD_RES (20), (21), (22), (23), (24): Xaa is A or G
  MOD_RES (25), (26), (27), (28): Xaa is A or G or is absent
APASXXVPARLNAISILYFXXXXXXXXXLKKYRDMVVEAXGXR

SEQ ID NO: 27736 - protein, 36 aa, Artificial Sequence; identical to SEQ ID NO: 6572
  GFR-binding peptide
  MOD_RES (4), (5): Xaa is C or S

SEQ ID NO: 27737 - protein, 43 aa, Artificial Sequence; identical to SEQ ID NO: 6573
  GFR-binding peptide
  MOD_RES (5), (6), (41), (43): Xaa is C or S
  MOD_RES (20), (21), (22), (23), (24): Xaa is A or G
  MOD_RES (25), (26), (27), (28): Xaa is A or G or is absent

SEQ ID NO: 27738 - protein, 41 aa, Artificial Sequence
  GFR-binding peptide
  MOD_RES (4), (5), (38), (40): Xaa is C or S
GKAXXVPTKLEPISVLYLDDMGVPTKFKYEEGMSVAEXGXR

SEQ ID NO: 27739 - protein, 43 aa, Artificial Sequence
  GFR-binding peptide
  MOD_RES (6), (7), (41), (43): Xaa is C or S
  MOD_RES (21), (22), (23), (24), (25): Xaa is A or G
  MOD_RES (26), (27), (28), (29): Xaa is A or G or is absent
KIPKAXXVPTELEPISMLYLXXXXXXXXXKFKYEDMVVEGXGX

SEQ ID NO: 27740 - protein, 35 aa, Artificial Sequence; identical to SEQ ID NO: 6577
  GFR-binding peptide
  MOD_RES (2), (3): Xaa is C or S
  MOD_RES (17), (18), (19), (20), (21): Xaa is A or G
  MOD_RES (22), (23), (24), (25): Xaa is A or G or is absent

SEQ ID NO: 27741 - protein, 42 aa, Artificial Sequence
  GFR-binding peptide
  MOD_RES (4), (5), (40), (42): Xaa is C or S
  MOD_RES (19), (20), (21), (22), (23): Xaa is A or G
  MOD_RES (24), (25), (26), (27): Xaa is A or G or is absent
GKAXXVPTKLEPISVLYLXXXXXXXXXKFKYEEGMSVAEXGX

SEQ ID NO: 27742 - protein, 34 aa, Artificial Sequence; identical to SEQ ID NO: 6579
  GFR-binding peptide
  MOD_RES (1), (2), (33): Xaa is C or S

SEQ ID NO: 27743 - protein, 30 aa, Artificial Sequence; identical to SEQ ID NO: 6580
  GFR-binding peptide

SEQ ID NO: 27744 - protein, 37 aa, Artificial Sequence
  GFR-binding peptide
  MOD_RES (1), (2), (35), (37): Xaa is C or S
  MOD_RES (16), (17), (18), (19), (20): Xaa is A or G
  MOD_RES (21), (22), (23), (24): Xaa is A or G or is absent
XXVPQDLEPISILYLXXXXXXXXXKFKYEMVVKSXKX

SEQ ID NO: 27745 - protein, 35 aa, Artificial Sequence
  GFR-binding peptide
  MOD_RES (34), (34): Xaa is C or S
  MOD_RES (14), (15), (16), (17), (18): Xaa is A or G
  MOD_RES (19), (20), (21), (22): Xaa is A or G or is absent
APTQLEPISVLYLXXXXXXXXXKFKYENMVVRAXG

SEQ ID NO: 27746 - protein, 35 aa, Artificial Sequence
  GFR-binding peptide
  MOD_RES (3), (4), (35): Xaa is C or S
SPXXVPQDLSPISILYIVGRTPKVYKQYEMVVKSX

SEQ ID NO: 27747 - protein, 40 aa, Artificial Sequence
  GFR-binding peptide
  MOD_RES (3), (4), (38), (40): Xaa is C or S
  MOD_RES (18), (19), (20), (21), (22): Xaa is A or G
  MOD_RES (23), (24), (25), (26): Xaa is A or G or is absent
KAXXVPTELEPISMLYLXXXXXXXXXKFKYEEMVVEGXGX

SEQ ID NO: 27748 - protein, 37 aa, Artificial Sequence; identical to SEQ ID NO: 6584
  GFR-binding peptide
  MOD_RES (1), (2), (35), (37): Xaa is C or S
  MOD_RES (16), (17), (18), (19), (20): Xaa is A or G
  MOD_RES (21), (22), (23), (24): Xaa is A or G or is absent

SEQ ID NO: 27749 - protein, 43 aa, Artificial Sequence
  GFR-binding peptide
  MOD_RES (5), (6), (40), (42): Xaa is C or S
  MOD_RES (20), (21), (22), (23), (24): Xaa is A or G
  MOD_RES (25), (26), (27), (28): Xaa is A or G or is absent
APASXXVPARLEPISILYLXXXXXXXXXKFKYEDMVVEAXGXR

SEQ ID NO: 27750 - protein, 34 aa, Artificial Sequence
  GFR-binding peptide
  MOD_RES (2), (3): Xaa is C or S
AXXVPTKLSPISILYIDKGVVTYYKQYEGMAVSE

SEQ ID NO: 27751 - protein, 37 aa, Artificial Sequence; identical to SEQ ID NO: 6591
  GFR-binding peptide
  MOD_RES (4), (5): Xaa is C or S
  MOD_RES (19), (20), (21), (22), (23): Xaa is A or G
  MOD_RES (24), (25), (26), (27): Xaa is A or G or is absent

SEQ ID NO: 27752 - protein, 33 aa, Artificial Sequence
  GFR-binding peptide
  MOD_RES (1), (32): Xaa is C or S
XVPQALSPISILYIVGRKPKVYKQYEMIVRSXK

SEQ ID NO: 27753 - protein, 34 aa, Artificial Sequence; identical to SEQ ID NO: 6592
  GFR-binding peptide
  MOD_RES (4), (4): Xaa is C or S

SEQ ID NO: 27754 - protein, 37 aa, Artificial Sequence
  GFR-binding peptide
  MOD_RES (5), (6), (37): Xaa is C or S
SAAPXXVPQALEPISILYLVGRKPKVKFKYEMIVRSX

SEQ ID NO: 27755 - protein, 34 aa, Artificial Sequence
  GFR-binding peptide
  MOD_RES (32), (34): Xaa is C or S
APTQLEPISVLYLDDSSNVIKFKYENMVVRAXGX

SEQ ID NO: 27756 - protein, 43 aa, Artificial Sequence
  GFR-binding peptide
  MOD_RES (6), (7), (41), (43): Xaa is C or S
  MOD_RES (21), (22), (23), (24), (25): Xaa is A or G
  MOD_RES (26), (27), (28), (29): Xaa is A or G or is absent
AAPASXXVPARLEPISILYLXXXXXXXXXKFKYEDMVVEAXGX

SEQ ID NO: 27757 - protein, 39 aa, Artificial Sequence; identical to SEQ ID NO: 6599
  GFR-binding peptide
  MOD_RES (2), (3), (36), (38): Xaa is C or S
  MOD_RES (17), (18), (19), (20), (21): Xaa is A or G
  MOD_RES (22), (23), (24), (25): Xaa is A or G or is absent

SEQ ID NO: 27758 - protein, 39 aa, Artificial Sequence
  GFR-binding peptide
  MOD_RES (6), (7): Xaa is C or S
  MOD_RES (21), (22), (23), (24), (25): Xaa is A or G
  MOD_RES (26), (27), (28), (29): Xaa is A or G or is absent
ASASPXXVPQDLEPISILYLXXXXXXXXXKFKYEMVVKS

SEQ ID NO: 27759 - protein, 40 aa, Artificial Sequence
  GFR-binding peptide
  MOD_RES (6), (7), (38), (40): Xaa is C or S
ASASPXXVPQDLEPISILYLVGRTPKVKFKYEMVVKSXKX

SEQ ID NO: 27760 - protein, 37 aa, Artificial Sequence
  GFR-binding peptide
  MOD_RES (4), (5): Xaa is C or S
  MOD_RES (19), (20), (21), (22), (23): Xaa is A or G
  MOD_RES (24), (25), (26), (27): Xaa is A or G or is absent
AAPXXVPQALSPISILYIXXXXXXXXXYKQYEMIVRS

SEQ ID NO: 27761 - protein, 36 aa, Artificial Sequence; identical to SEQ ID NO: 6605
  GFR-binding peptide
  MOD_RES (1), (2), (34), (36): Xaa is C or S

SEQ ID NO: 27762 - protein, 35 aa, Artificial Sequence
  GFR-binding peptide
  MOD_RES (1), (33), (35): Xaa is C or S
XVPTKLNAISILYFDKGVVTYLKKYRGMAVSEXGX

SEQ ID NO: 27763 - protein, 30 aa, Artificial Sequence
  GFR-binding peptide
VPARLSPISILYKDAANNVVLKYHYDMVVE

SEQ ID NO: 27764 - protein, 35 aa, Artificial Sequence
  GFR-binding peptide
  MOD_RES (2), (3): Xaa is C or S
AXXVPTKLEPISVLYLDDMGVPTKFKYEEGMSVAE

SEQ ID NO: 27765 - protein, 36 aa, Artificial Sequence
  GFR-binding peptide
  MOD_RES (5), (6): Xaa is C or S
IPKAXXVPTELEPISMLYLDENEKVVKFKYEDMVVE

SEQ ID NO: 27766 - protein, 35 aa, Artificial Sequence
  GFR-binding peptide
  MOD_RES (34), (34): Xaa is C or S
  MOD_RES (14), (15), (16), (17), (18): Xaa is A or G
  MOD_RES (19), (20), (21), (22): Xaa is A or G or is absent
VPARLSPISILYKXXXXXXXXXLKYHYDMVVEAXG

SEQ ID NO: 27767 - protein, 35 aa, Artificial Sequence; identical to SEQ ID NO: 6615
  GFR-binding peptide
  MOD_RES (2), (3), (35): Xaa is C or S

SEQ ID NO: 27768 - protein, 31 aa, Artificial Sequence; identical to SEQ ID NO: 6616
  GFR-binding peptide
  MOD_RES (31), (31): Xaa is C or S

SEQ ID NO: 27769 - protein, 38 aa, Artificial Sequence
  GFR-binding peptide
  MOD_RES (2), (36), (38): Xaa is C or S
  MOD_RES (16), (17), (18), (19), (20): Xaa is A or G
  MOD_RES (21), (22), (23), (24): Xaa is A or G or is absent
TXAPTKLEPISVLYLXXXXXXXXXKFKYENMVVRSXGX

SEQ ID NO: 27770 - protein, 36 aa, Artificial Sequence
  GFR-binding peptide
  MOD_RES (1), (2), (34), (36): Xaa is C or S
XXVPTELEPISMLYLDENEKVVKFKYEDMVVEGXGX

SEQ ID NO: 27771 - protein, 40 aa, Artificial Sequence
  GFR-binding peptide
  MOD_RES (3), (4), (38), (40): Xaa is C or S
  MOD_RES (18), (19), (20), (21), (22): Xaa is A or G
  MOD_RES (23), (24), (25), (26): Xaa is A or G or is absent
KAXXVPTELEPISMLYLXXXXXXXXXKFKYEDMVVEGXGX

SEQ ID NO: 27772 - protein, 34 aa, Artificial Sequence
  GFR-binding peptide
  MOD_RES (3), (4): Xaa is C or S
KAXXVPTELSPISMLYIDEYDKVVYKQYEEMVVE

SEQ ID NO: 27773 - protein, 41 aa, Artificial Sequence; identical to SEQ ID NO: 6621
  GFR-binding peptide
  MOD_RES (4), (5), (38), (40): Xaa is C or S
  MOD_RES (19), (20), (21), (22), (23): Xaa is A or G
  MOD_RES (24), (25), (26), (27): Xaa is A or G or is absent

SEQ ID NO: 27774 - protein, 39 aa, Artificial Sequence; identical to SEQ ID NO: 6622
  GFR-binding peptide
  MOD_RES (4), (5), (36), (38): Xaa is C or S

SEQ ID NO: 27775 - protein, 33 aa, Artificial Sequence
  GFR-binding peptide
  MOD_RES (31), (33): Xaa is C or S
VPQALEPISILYLVGRKPKVKFKYEMIVRSXKX

SEQ ID NO: 27776 - protein, 37 aa, Artificial Sequence
  GFR-binding peptide
  MOD_RES (5), (6), (37): Xaa is C or S
SAAPXXVPQALSPISILYIVGRKPKVYKQYEMIVRSX

SEQ ID NO: 27777 - protein, 37 aa, Artificial Sequence; identical to SEQ ID NO: 6625
  GFR-binding peptide
  MOD_RES (2), (3), (36): Xaa is C or S

SEQ ID NO: 27778 - protein, 40 aa, Artificial Sequence
  GFR-binding peptide
  MOD_RES (3), (4), (38), (40): Xaa is C or S
  MOD_RES (18), (19), (20), (21), (22): Xaa is A or G
  MOD_RES (23), (24), (25), (26): Xaa is A or G or is absent
KAXXVPTKLEPISILYLXXXXXXXXXKFKYEGMAVSEXGX

SEQ ID NO: 27779 - protein, 33 aa, Artificial Sequence
  GFR-binding peptide
  MOD_RES (1), (33): Xaa is C or S
XVPTELEPISMLYLDENEKVVKFKYEDMVVEGX

SEQ ID NO: 27780 - protein, 35 aa, Artificial Sequence
  GFR-binding peptide
  MOD_RES (4), (5): Xaa is C or S
PKPXXAPTQLEPISVLYLDDSSNVIKFKYENMVVR

SEQ ID NO: 27781 - protein, 43 aa, Artificial Sequence
  GFR-binding peptide
  MOD_RES (6), (7), (41), (43): Xaa is C or S
  MOD_RES (21), (22), (23), (24), (25): Xaa is A or G
  MOD_RES (26), (27), (28), (29): Xaa is A or G or is absent
KASKAXXVPTKLSPISILYKXXXXXXXXXLKYHYGMAVSEXGX

SEQ ID NO: 27782 - protein, 40 aa, Artificial Sequence; identical to SEQ ID NO: 6626
  GFR-binding peptide
  MOD_RES (3), (4), (38), (40): Xaa is C or S
  MOD_RES (18), (19), (20), (21), (22): Xaa is A or G
  MOD_RES (23), (24), (25), (26): Xaa is A or G or is absent

SEQ ID NO: 27783 - protein, 44 aa, Artificial Sequence
  GFR-binding peptide
  MOD_RES (5), (6), (41), (43): Xaa is C or S
  MOD_RES (20), (21), (22), (23), (24): Xaa is A or G
  MOD_RES (25), (26), (27), (28): Xaa is A or G or is absent
VGKAXXVPTKLEPISVLYLXXXXXXXXXKFKYEEGMSVAEXGXR

SEQ ID NO: 27784 - protein, 43 aa, Artificial Sequence
  GFR-binding peptide
  MOD_RES (5), (6), (40), (42): Xaa is C or S
  MOD_RES (20), (21), (22), (23), (24): Xaa is A or G
  MOD_RES (25), (26), (27), (28): Xaa is A or G or is absent
IPKAXXVPTELSPISMLYIXXXXXXXXXYKQYEDMVVEGXGXR

SEQ ID NO: 27785 - protein, 42 aa, Artificial Sequence
  GFR-binding peptide
  MOD_RES (4), (5), (39), (41): Xaa is C or S
  MOD_RES (19), (20), (21), (22), (23): Xaa is A or G
  MOD_RES (24), (25), (26), (27): Xaa is A or G or is absent
PKPXXAPTQLSPISVLYIXXXXXXXXXYKQYENMVVRAXGXH

SEQ ID NO: 27786 - protein, 37 aa, Artificial Sequence
  GFR-binding peptide
  MOD_RES (3), (4), (37): Xaa is C or S
  MOD_RES (18), (19), (20), (21), (22): Xaa is A or G
  MOD_RES (23), (24), (25), (26): Xaa is A or G or is absent
SPXXVSQDLSPISILYIXXXXXXXXXYKQYEMIVKSX

SEQ ID NO: 27787 - protein, 34 aa, Artificial Sequence
  GFR-binding peptide
  MOD_RES (1), (2): Xaa is C or S
  MOD_RES (16), (17), (18), (19), (20): Xaa is A or G
  MOD_RES (21), (22), (23), (24): Xaa is A or G or is absent
XXVPQALSPISILYIXXXXXXXXXYKQYEMIVRS

SEQ ID NO: 27788 - protein, 37 aa, Artificial Sequence; identical to SEQ ID NO: 6628
  GFR-binding peptide
  MOD_RES (2), (3), (37): Xaa is C or S
  MOD_RES (17), (18), (19), (20), (21): Xaa is A or G
  MOD_RES (22), (23), (24), (25): Xaa is A or G or is absent

SEQ ID NO: 27789 - protein, 37 aa, Artificial Sequence
  GFR-binding peptide
  MOD_RES (3), (4): Xaa is C or S
  MOD_RES (18), (19), (20), (21), (22): Xaa is A or G
  MOD_RES (23), (24), (25), (26): Xaa is A or G or is absent
KPXXAPTQLSPISVLYIXXXXXXXXXYKQYENMVVRA

SEQ ID NO: 27790 - protein, 40 aa, Artificial Sequence; identical to SEQ ID NO: 6630
  GFR-binding peptide
  MOD_RES (4), (38), (40): Xaa is C or S
  MOD_RES (18), (19), (20), (21), (22): Xaa is A or G
  MOD_RES (23), (24), (25), (26): Xaa is A or G or is absent

SEQ ID NO: 27791 - protein, 38 aa, Artificial Sequence
  GFR-binding peptide
  MOD_RES (6), (7), (38): Xaa is C or S
ASASPXXVSQDLSPISILYIIGKTPKIYKQYEMIVKSX

SEQ ID NO: 27792 - protein, 34 aa, Artificial Sequence
  GFR-binding peptide
  MOD_RES (1), (2), (33): Xaa is C or S
XXVPQALSPISILYIVGRKPKVYKQYEMIVRSXK

SEQ ID NO: 27793 - protein, 41 aa, Artificial Sequence
  GFR-binding peptide
  MOD_RES (6), (7), (41): Xaa is C or S
  MOD_RES (21), (22), (23), (24), (25): Xaa is A or G
  MOD_RES (26), (27), (28), (29): Xaa is A or G or is absent
YVPKPXXAPTKLEPISVLYLXXXXXXXXXKFKYENMVVRSX

SEQ ID NO: 27794 - protein, 43 aa, Artificial Sequence
  GFR-binding peptide
  MOD_RES (5), (6), (40), (42): Xaa is C or S
  MOD_RES (20), (21), (22), (23), (24): Xaa is A or G
  MOD_RES (25), (26), (27), (28): Xaa is A or G or is absent
VPKPXXAPTKLSPISVLYIXXXXXXXXXYKQYENMVVRSXGXH

SEQ ID NO: 27795 - protein, 37 aa, Artificial Sequence
  GFR-binding peptide
  MOD_RES (4), (5): Xaa is C or S
  MOD_RES (19), (20), (21), (22), (23): Xaa is A or G
  MOD_RES (24), (25), (26), (27): Xaa is A or G or is absent
PKAXXVPTELEPISMLYLXXXXXXXXXKFKYEDMVVE

SEQ ID NO: 27796 - protein, 37 aa, Artificial Sequence; identical to SEQ ID NO: 6632
  GFR-binding peptide
  MOD_RES (2), (3), (37): Xaa is C or S
  MOD_RES (17), (18), (19), (20), (21): Xaa is A or G
  MOD_RES (22), (23), (24), (25): Xaa is A or G or is absent

SEQ ID NO: 27797 - protein, 34 aa, Artificial Sequence
  GFR-binding peptide
  MOD_RES (1), (1): Xaa is C or S
  MOD_RES (15), (16), (17), (18), (19): Xaa is A or G
  MOD_RES (20), (21), (22), (23): Xaa is A or G or is absent
XAPTKLEPISVLYLXXXXXXXXXKFKYENMVVRS

SEQ ID NO: 27798 - protein, 39 aa, Artificial Sequence
  GFR-binding peptide
  MOD_RES (3), (4), (36), (38): Xaa is C or S
KPXXAPTQLEPISVLYLDDSSNVIKFKYENMVVRAXGXH

SEQ ID NO: 27799 - protein, 35 aa, Artificial Sequence
  GFR-binding peptide
  MOD_RES (1), (2), (34): Xaa is C or S
XXVPTELEPISMLYLDEYDKVVKFKYEEMVVEGXG

SEQ ID NO: 27800 - protein, 41 aa, Artificial Sequence; identical to SEQ ID NO: 6634
  GFR-binding peptide
  MOD_RES (6), (7), (39), (41): Xaa is C or S

SEQ ID NO: 27801 - protein, 38 aa, Artificial Sequence
  GFR-binding peptide
  MOD_RES (4), (5), (36), (38): Xaa is C or S
ASPXXVSQDLEPISILYLIGKTPKIKFKYEMIVKSXKX

SEQ ID NO: 27802 - protein, 40 aa, Artificial Sequence; identical to SEQ ID NO: 6635
  GFR-binding peptide
  MOD_RES (6), (7), (40): Xaa is C or S
  MOD_RES (21), (22), (23), (24), (25): Xaa is A or G
  MOD_RES (26), (27), (28), (29): Xaa is A or G or is absent

SEQ ID NO: 27803 - protein, 33 aa, Artificial Sequence
  GFR-binding peptide
  MOD_RES (14), (15), (16), (17), (18): Xaa is A or G
  MOD_RES (19), (20), (21), (22): Xaa is A or G or is absent
VPTKLNAISILYFXXXXXXXXXLKKYRGMAVSE

SEQ ID NO: 27804 - protein, 44 aa, Artificial Sequence; identical to SEQ ID NO: 6639
  GFR-binding peptide
  MOD_RES (6), (7), (41), (43): Xaa is C or S
  MOD_RES (21), (22), (23), (24), (25): Xaa is A or G
  MOD_RES (26), (27), (28), (29): Xaa is A or G or is absent

SEQ ID NO: 27805 - protein, 38 aa, Artificial Sequence
  GFR-binding peptide
  MOD_RES (5), (6): Xaa is C or S
  MOD_RES (20), (21), (22), (23), (24): Xaa is A or G
  MOD_RES (25), (26), (27), (28): Xaa is A or G or is absent
APASXXVPARLSPISILYIXXXXXXXXXYKQYEDMVVE

SEQ ID NO: 27806 - protein, 34 aa, Artificial Sequence
  GFR-binding peptide
  MOD_RES (3), (4): Xaa is C or S
ASXXVPARLEPISILYLDAANNVVKFKYEDMVVE

SEQ ID NO: 27807 - protein, 35 aa, Artificial Sequence; identical to SEQ ID NO: 6642
  GFR-binding peptide
  MOD_RES (1), (34): Xaa is C or S
  MOD_RES (15), (16), (17), (18), (19): Xaa is A or G
  MOD_RES (20), (21), (22), (23): Xaa is A or G or is absent

SEQ ID NO: 27808 - protein, 37 aa, Artificial Sequence; identical to SEQ ID NO: 6645
  GFR-binding peptide
  MOD_RES (3), (4), (37): Xaa is C or S
  MOD_RES (18), (19), (20), (21), (22): Xaa is A or G
  MOD_RES (23), (24), (25), (26): Xaa is A or G or is absent

SEQ ID NO: 27809 - protein, 34 aa, Artificial Sequence
  GFR-binding peptide
  MOD_RES (34), (34): Xaa is C or S
  MOD_RES (14), (15), (16), (17), (18): Xaa is A or G
  MOD_RES (19), (20), (21), (22): Xaa is A or G or is absent
APTKLSPISVLYIXXXXXXXXXYKQYENMVVRSX

SEQ ID NO: 27810 - protein, 34 aa, Artificial Sequence; identical to SEQ ID NO: 6646
  GFR-binding peptide
  MOD_RES (1), (2), (33): Xaa is C or S

SEQ ID NO: 27811 - protein, 41 aa, Artificial Sequence
  GFR-binding peptide
  MOD_RES (6), (7), (41): Xaa is C or S
  MOD_RES (21), (22), (23), (24), (25): Xaa is A or G
  MOD_RES (26), (27), (28), (29): Xaa is A or G or is absent
YVPKPXXAPTKLSPISVLYIXXXXXXXXXYKQYENMVVRSX

SEQ ID NO: 27812 - protein, 37 aa, Artificial Sequence
  GFR-binding peptide
  MOD_RES (34), (36): Xaa is C or S
  MOD_RES (14), (15), (16), (17), (18): Xaa is A or G
  MOD_RES (19), (20), (21), (22): Xaa is A or G or is absent
VPARLSPISILYKXXXXXXXXXLKYHYDMVVEAXGXR

SEQ ID NO: 27813 - protein, 39 aa, Artificial Sequence
  GFR-binding peptide
  MOD_RES (5), (6): Xaa is C or S
  MOD_RES (20), (21), (22), (23), (24): Xaa is A or G
  MOD_RES (25), (26), (27), (28): Xaa is A or G or is absent
ASKAXXVPTKLEPISILYLXXXXXXXXXKFKYEGMAVSE

SEQ ID NO: 27814 - protein, 35 aa, Artificial Sequence; identical to SEQ ID NO: 6652
  GFR-binding peptide
  MOD_RES (2), (3): Xaa is C or S
  MOD_RES (17), (18), (19), (20), (21): Xaa is A or G
  MOD_RES (22), (23), (24), (25): Xaa is A or G or is absent

SEQ ID NO: 27815 - protein, 34 aa, Artificial Sequence
  GFR-binding peptide
  MOD_RES (1), (33): Xaa is C or S
XAPTKLSPISVLYIDSSNNVIYKQYENMVVKAXG

SEQ ID NO: 27816 - protein, 35 aa, Artificial Sequence; identical to SEQ ID NO: 6653
  GFR-binding peptide
  MOD_RES (1), (32), (34): Xaa is C or S

SEQ ID NO: 27817 - protein, 36 aa, Artificial Sequence; identical to SEQ ID NO: 6655
  GFR-binding peptide
  MOD_RES (4), (5): Xaa is C or S

SEQ ID NO: 27818 - protein, 36 aa, Artificial Sequence
  GFR-binding peptide
  MOD_RES (2), (3), (35): Xaa is C or S
PXXAPTKLSPISVLYIDDSSNVIYKQYENMVVRSXG

SEQ ID NO: 27819 - protein, 43 aa, Artificial Sequence; identical to SEQ ID NO: 6658
  GFR-binding peptide
  MOD_RES (5), (6), (40), (42): Xaa is C or S
  MOD_RES (20), (21), (22), (23), (24): Xaa is A or G
  MOD_RES (25), (26), (27), (28): Xaa is A or G or is absent

SEQ ID NO: 27820 - protein, 36 aa, Artificial Sequence
  GFR-binding peptide
  MOD_RES (1), (2), (34), (36): Xaa is C or S
XXVPARLEPISILYLDAANNVVKFKYEDMVVEAXGX

SEQ ID NO: 27821 - protein, 39 aa, Artificial Sequence; identical to SEQ ID NO: 6661
  GFR-binding peptide
  MOD_RES (6), (7), (39): Xaa is C or S

SEQ ID NO: 27822 - protein, 42 aa, Artificial Sequence; identical to SEQ ID NO: 6662
  GFR-binding peptide
  MOD_RES (5), (6), (40), (42): Xaa is C or S
  MOD_RES (20), (21), (22), (23), (24): Xaa is A or G
  MOD_RES (25), (26), (27), (28): Xaa is A or G or is absent

SEQ ID NO: 27823 - protein, 40 aa, Artificial Sequence
  GFR-binding peptide
  MOD_RES (6), (7), (38), (40): Xaa is C or S
ASASPXXVSQDLSPISILYIIGKTPKIYKQYEMIVKSXKX

SEQ ID NO: 27824 - protein, 40 aa, Artificial Sequence; identical to SEQ ID NO: 6663
  GFR-binding peptide
  MOD_RES (3), (4), (37), (39): Xaa is C or S
  MOD_RES (18), (19), (20), (21), (22): Xaa is A or G
  MOD_RES (23), (24), (25), (26): Xaa is A or G or is absent

SEQ ID NO: 27825 - protein, 40 aa, Artificial Sequence
  GFR-binding peptide
  MOD_RES (6), (7), (39): Xaa is C or S
KIPKAXXVPTELEPISMLYLDENEKVVKFKYEDMVVEGXG

SEQ ID NO: 27826 - protein, 37 aa, Artificial Sequence; identical to SEQ ID NO: 6664
  GFR-binding peptide
  MOD_RES (4), (5): Xaa is C or S

SEQ ID NO: 27827 - protein, 34 aa, Artificial Sequence; identical to SEQ ID NO: 6665
  GFR-binding peptide
  MOD_RES (1), (2), (34): Xaa is C or S

SEQ ID NO: 27828 - protein, 36 aa, Artificial Sequence; identical to SEQ ID NO: 6666
  GFR-binding peptide
  MOD_RES (3), (4), (35): Xaa is C or S

SEQ ID NO: 27829 - protein, 32 aa, Artificial Sequence
  GFR-binding peptide
  MOD_RES (1), (2): Xaa is C or S
XXAPTKLEPISVLYLDDSSNVIKFKYENMVVR

SEQ ID NO: 27830 - protein, 41 aa, Artificial Sequence; identical to SEQ ID NO: 6667
  GFR-binding peptide
  MOD_RES (5), (39), (41): Xaa is C or S
  MOD_RES (19), (20), (21), (22), (23): Xaa is A or G
  MOD_RES (24), (25), (26), (27): Xaa is A or G or is absent

SEQ ID NO: 27831 - protein, 40 aa, Artificial Sequence
  GFR-binding peptide
  MOD_RES (4), (5), (37), (39): Xaa is C or S
PKAXXVPTELSPISMLYIDEYDKVVYKQYEEMVVEGXGXR

SEQ ID NO: 27832 - protein, 36 aa, Artificial Sequence; identical to SEQ ID NO: 6668
  GFR-binding peptide
  MOD_RES (4), (36): Xaa is C or S

SEQ ID NO: 27833 - protein, 35 aa, Artificial Sequence
  GFR-binding peptide
  MOD_RES (2), (3): Xaa is C or S
  MOD_RES (17), (18), (19), (20), (21): Xaa is A or G
  MOD_RES (22), (23), (24), (25): Xaa is A or G or is absent
SXXVPARLEPISILYLXXXXXXXXXKFKYEDMVVE

SEQ ID NO: 27834 - protein, 37 aa, Artificial Sequence
  GFR-binding peptide
  MOD_RES (2), (3), (36): Xaa is C or S
  MOD_RES (17), (18), (19), (20), (21): Xaa is A or G
  MOD_RES (22), (23), (24), (25): Xaa is A or G or is absent
PXXVPQDLSPISILYIXXXXXXXXXYKQYEMVVKSXK

SEQ ID NO: 27835 - protein, 36 aa, Artificial Sequence
  GFR-binding peptide
  MOD_RES (5), (6): Xaa is C or S
IPKAXXVPTELSPISMLYIDENEKVVYKQYEDMVVE

SEQ ID NO: 27836 - protein, 33 aa, Artificial Sequence
  GFR-binding peptide
  MOD_RES (1), (2): Xaa is C or S
XXVPTELEPISMLYLDENEKVVKFKYEDMVVEG

SEQ ID NO: 27837 - protein, 40 aa, Artificial Sequence; identical to SEQ ID NO: 6669
  GFR-binding peptide
  MOD_RES (5), (6), (40): Xaa is C or S
  MOD_RES (20), (21), (22), (23), (24): Xaa is A or G
  MOD_RES (25), (26), (27), (28): Xaa is A or G or is absent

SEQ ID NO: 27838 - protein, 35 aa, Artificial Sequence; identical to SEQ ID NO: 6670
  GFR-binding peptide
  MOD_RES (3), (4): Xaa is C or S

SEQ ID NO: 27839 - protein, 36 aa, Artificial Sequence; identical to SEQ ID NO: 6671
  GFR-binding peptide
  MOD_RES (1), (35): Xaa is C or S
  MOD_RES (15), (16), (17), (18), (19): Xaa is A or G
  MOD_RES (20), (21), (22), (23): Xaa is A or G or is absent

SEQ ID NO: 27840 - protein, 33 aa, Artificial Sequence; identical to SEQ ID NO: 6672
  GFR-binding peptide
  MOD_RES (33), (33): Xaa is C or S
  MOD_RES (14), (15), (16), (17), (18): Xaa is A or G
  MOD_RES (19), (20), (21), (22): Xaa is A or G or is absent

SEQ ID NO: 27841 - protein, 39 aa, Artificial Sequence
  GFR-binding peptide
  MOD_RES (4), (5), (39): Xaa is C or S
  MOD_RES (19), (20), (21), (22), (23): Xaa is A or G
  MOD_RES (24), (25), (26), (27): Xaa is A or G or is absent
PASXXVPARLNAISILYFXXXXXXXXXLKKYRDMVVEAX

SEQ ID NO: 27842 - protein, 40 aa, Artificial Sequence
  GFR-binding peptide
  MOD_RES (4), (5), (39): Xaa is C or S
  MOD_RES (19), (20), (21), (22), (23): Xaa is A or G
  MOD_RES (24), (25), (26), (27): Xaa is A or G or is absent
PKPXXAPTKLEPISVLYLXXXXXXXXXKFKYENMVVRSXG

SEQ ID NO: 27843 - protein, 33 aa, Artificial Sequence; identical to SEQ ID NO: 6679
  GFR-binding peptide
  MOD_RES (1), (2): Xaa is C or S

SEQ ID NO: 27844 - protein, 42 aa, Artificial Sequence
  GFR-binding peptide
  MOD_RES (6), (7), (40), (42): Xaa is C or S
KVGKAXXVPTKLEPISVLYLDDMGVPTKFKYEEGMSVAEXGX

SEQ ID NO: 27845 - protein, 38 aa, Artificial Sequence
  GFR-binding peptide
  MOD_RES (4), (5), (38): Xaa is C or S
  MOD_RES (19), (20), (21), (22), (23): Xaa is A or G
  MOD_RES (24), (25), (26), (27): Xaa is A or G or is absent
ASPXXVPQDLSPISILYIXXXXXXXXXYKQYEMVVKSX

SEQ ID NO: 27846 - protein, 36 aa, Artificial Sequence; identical to SEQ ID NO: 6682
  GFR-binding peptide
  MOD_RES (2), (3), (34), (36): Xaa is C or S

SEQ ID NO: 27847 - protein, 39 aa, Artificial Sequence; identical to SEQ ID NO: 6683
  GFR-binding peptide
  MOD_RES (6), (7): Xaa is C or S
  MOD_RES (21), (22), (23), (24), (25): Xaa is A or G
  MOD_RES (26), (27), (28), (29): Xaa is A or G or is absent

SEQ ID NO: 27848 - protein, 38 aa, Artificial Sequence
  GFR-binding peptide
  MOD_RES (5), (6): Xaa is C or S
  MOD_RES (20), (21), (22), (23), (24): Xaa is A or G
  MOD_RES (25), (26), (27), (28): Xaa is A or G or is absent
ASKAXXVPTKLSPISILYIXXXXXXXXXYKQYEGMAVS

SEQ ID NO: 27849 - protein, 33 aa, Artificial Sequence; identical to SEQ ID NO: 6684
  GFR-binding peptide
  MOD_RES (2), (3): Xaa is C or S

SEQ ID NO: 27850 - protein, 34 aa, Artificial Sequence
  GFR-binding peptide
  MOD_RES (2), (3), (34): Xaa is C or S
PXXVSQDLEPISILYLIGKTPKIKFKYEMIVKSX

SEQ ID NO: 27851 - protein, 40 aa, Artificial Sequence; identical to SEQ ID NO: 6685
  GFR-binding peptide
  MOD_RES (5), (6), (40): Xaa is C or S
  MOD_RES (20), (21), (22), (23), (24): Xaa is A or G
  MOD_RES (25), (26), (27), (28): Xaa is A or G or is absent

SEQ ID NO: 27852 - protein, 35 aa, Artificial Sequence
  GFR-binding peptide
  MOD_RES (2), (3), (35): Xaa is C or S
PXXAPTQLSPISVLYIDDSSNVIYKQYENMVVRAX

SEQ ID NO: 27853 - protein, 32 aa, Artificial Sequence; identical to SEQ ID NO: 6688
  GFR-binding peptide
  MOD_RES (1), (2): Xaa is C or S

SEQ ID NO: 27854 - protein, 38 aa, Artificial Sequence; identical to SEQ ID NO: 6692
  GFR-binding peptide
  MOD_RES (3), (4), (38): Xaa is C or S
  MOD_RES (18), (19), (20), (21), (22): Xaa is A or G
  MOD_RES (23), (24), (25), (26): Xaa is A or G or is absent

SEQ ID NO: 27855 - protein, 38 aa, Artificial Sequence
  GFR-binding peptide
  MOD_RES (2), (3), (37): Xaa is C or S
  MOD_RES (17), (18), (19), (20), (21): Xaa is A or G
  MOD_RES (22), (23), (24), (25): Xaa is A or G or is absent
AXXVPTELSPISMLYIXXXXXXXXXYKQYEEMVVEGXG

SEQ ID NO: 27856 - protein, 40 aa, Artificial Sequence
  GFR-binding peptide
  MOD_RES (4), (5), (37), (39): Xaa is C or S
PKPXXAPTKLSPISVLYIDDSSNVIYKQYENMVVRSXGXH

SEQ ID NO: 27857 - protein, 35 aa, Artificial Sequence
  GFR-binding peptide
  MOD_RES (2), (3), (35): Xaa is C or S
AXXVPTELEPISMLYLDEYDKVVKFKYEEMVVEGX

SEQ ID NO: 27858 - protein, 39 aa, Artificial Sequence; identical to SEQ ID NO: 6694
  GFR-binding peptide
  MOD_RES (3), (4), (36), (38): Xaa is C or S

SEQ ID NO: 27859 - protein, 40 aa, Artificial Sequence
  GFR-binding peptide
  MOD_RES (7), (7): Xaa is C or S
  MOD_RES (21), (22), (23), (24), (25): Xaa is A or G
  MOD_RES (26), (27), (28), (29): Xaa is A or G or is absent
HVTKPTXAPTKLSPISVLYIXXXXXXXXXYKQYENMVVRS

SEQ ID NO: 27860 - protein, 34 aa, Artificial Sequence
  GFR-binding peptide
  MOD_RES (1), (33): Xaa is C or S
XVPTKLSPISILYKDKGVVTYLKYHYGMAVSEXG

SEQ ID NO: 27861 - protein, 38 aa, Artificial Sequence
  GFR-binding peptide
  MOD_RES (3), (4), (37): Xaa is C or S
  MOD_RES (18), (19), (20), (21), (22): Xaa is A or G
  MOD_RES (23), (24), (25), (26): Xaa is A or G or is absent
SPXXVSQDLEPISILYLXXXXXXXXXKFKYEMIVKSXK

SEQ ID NO: 27862 - protein, 43 aa, Artificial Sequence
  GFR-binding peptide
  MOD_RES (6), (7), (41), (43): Xaa is C or S
  MOD_RES (21), (22), (23), (24), (25): Xaa is A or G
  MOD_RES (26), (27), (28), (29): Xaa is A or G or is absent
TVPKPXXAPTQLSPISVLYIXXXXXXXXXYKQYENMVVRAXGX

SEQ ID NO: 27863 - protein, 35 aa, Artificial Sequence
  GFR-binding peptide
  MOD_RES (1), (2): Xaa is C or S
  MOD_RES (16), (17), (18), (19), (20): Xaa is A or G
  MOD_RES (21), (22), (23), (24): Xaa is A or G or is absent
XXVPTKLSPISILYIXXXXXXXXXYKQYEGMAVSE

SEQ ID NO: 27864 - protein, 34 aa, Artificial Sequence
  GFR-binding peptide
  MOD_RES (14), (15), (16), (17), (18): Xaa is A or G
  MOD_RES (19), (20), (21), (22): Xaa is A or G or is absent
VPTKLSPISVLYIXXXXXXXXXYKQYEEGMSVAE

SEQ ID NO: 27865 - protein, 39 aa, Artificial Sequence; identical to SEQ ID NO: 6699
  GFR-binding peptide
  MOD_RES (5), (6), (37), (39): Xaa is C or S

SEQ ID NO: 27866 - protein, 33 aa, Artificial Sequence
  GFR-binding peptide
  MOD_RES (1), (1): Xaa is C or S
  MOD_RES (15), (16), (17), (18), (19): Xaa is A or G
  MOD_RES (20), (21), (22), (23): Xaa is A or G or is absent
XVPQALEPISILYLXXXXXXXXXKFKYEMIVRS

SEQ ID NO: 27867 - protein, 34 aa, Artificial Sequence; identical to SEQ ID NO: 6701
  GFR-binding peptide
  MOD_RES (1), (2): Xaa is C or S
  MOD_RES (16), (17), (18), (19), (20): Xaa is A or G
  MOD_RES (21), (22), (23), (24): Xaa is A or G or is absent

SEQ ID NO: 27868 - protein, 34 aa, Artificial Sequence; identical to SEQ ID NO: 6702
  GFR-binding peptide
  MOD_RES (1), (1): Xaa is C or S
  MOD_RES (15), (16), (17), (18), (19): Xaa is A or G
  MOD_RES (20), (21), (22), (23): Xaa is A or G or is absent

SEQ ID NO: 27869 - protein, 37 aa, Artificial Sequence
  GFR-binding peptide
  MOD_RES (4), (5), (37): Xaa is C or S
PKPXXAPTQLEPISVLYLDDSSNVIKFKYENMVVRAX

SEQ ID NO: 27870 - protein, 38 aa, Artificial Sequence; identical to SEQ ID NO: 6703
  GFR-binding peptide
  MOD_RES (3), (35), (37): Xaa is C or S

SEQ ID NO: 27871 - protein, 34 aa, Artificial Sequence; identical to SEQ ID NO: 6707
  GFR-binding peptide
  MOD_RES (34), (34): Xaa is C or S
  MOD_RES (14), (15), (16), (17), (18): Xaa is A or G
  MOD_RES (19), (20), (21), (22): Xaa is A or G or is absent

SEQ ID NO: 27872 - protein, 40 aa, Artificial Sequence; identical to SEQ ID NO: 6708
  GFR-binding peptide
  MOD_RES (3), (4), (38), (40): Xaa is C or S
  MOD_RES (18), (19), (20), (21), (22): Xaa is A or G
  MOD_RES (23), (24), (25), (26): Xaa is A or G or is absent

SEQ ID NO: 27873 - protein, 39 aa, Artificial Sequence
  GFR-binding peptide
  MOD_RES (6), (7): Xaa is C or S
  MOD_RES (21), (22), (23), (24), (25): Xaa is A or G
  MOD_RES (26), (27), (28), (29): Xaa is A or G or is absent
KIPKAXXVPTELEPISMLYLXXXXXXXXXKFKYEDMVVE

SEQ ID NO: 27874 - protein, 43 aa, Artificial Sequence; identical to SEQ ID NO: 6711
  GFR-binding peptide
  MOD_RES (6), (7), (41), (43): Xaa is C or S
  MOD_RES (21), (22), (23), (24), (25): Xaa is A or G
  MOD_RES (26), (27), (28), (29): Xaa is A or G or is absent

SEQ ID NO: 27875 - protein, 37 aa, Artificial Sequence
  GFR-binding peptide
  MOD_RES (1), (2), (36): Xaa is C or S
  MOD_RES (16), (17), (18), (19), (20): Xaa is A or G
  MOD_RES (21), (22), (23), (24): Xaa is A or G or is absent
XXAPTQLSPISVLYIXXXXXXXXXYKQYENMVVRAXG

SEQ ID NO: 27876 - protein, 36 aa, Artificial Sequence
  GFR-binding peptide
  MOD_RES (4), (5), (36): Xaa is C or S
AAPXXVPQALSPISILYIVGRKPKVYKQYEMIVRSX

SEQ ID NO: 27877 - protein, 38 aa, Artificial Sequence; identical to SEQ ID NO: 6713
  GFR-binding peptide
  MOD_RES (2), (3), (35), (37): Xaa is C or S

SEQ ID NO: 27878 - protein, 41 aa, Artificial Sequence
  GFR-binding peptide
  MOD_RES (5), (6), (38), (40): Xaa is C or S
ASKAXXVPTKLSPISILYKDKGVVTYLKYHYGMAVSEXGXR

SEQ ID NO: 27879 - protein, 40 aa, Artificial Sequence
  GFR-binding peptide
  MOD_RES (5), (6), (38), (40): Xaa is C or S
VPKPXXAPTKLSPISVLYIDDSSNVIYKQYENMVVRSXGX

SEQ ID NO: 27880 - protein, 37 aa, Artificial Sequence
  GFR-binding peptide
  MOD_RES (2), (3), (36): Xaa is C or S
AXXVPTKLSPISVLYIDDMGVPTYKQYEEGMSVAEXG

SEQ ID NO: 27881 - protein, 37 aa, Artificial Sequence
  GFR-binding peptide
  MOD_RES (5), (6): Xaa is C or S
VPKPXXAPTQLSPISVLYIDDSSNVIYKQYENMVVRA

SEQ ID NO: 27882 - protein, 35 aa, Artificial Sequence
  GFR-binding peptide
  MOD_RES (2), (3), (35): Xaa is C or S
PXXAPTQLEPISVLYLDDSSNVIKFKYENMVVRAX

SEQ ID NO: 27883 - protein, 44 aa, Artificial Sequence; identical to SEQ ID NO: 6720
  GFR-binding peptide
  MOD_RES (7), (41), (43): Xaa is C or S
  MOD_RES (21), (22), (23), (24), (25): Xaa is A or G
  MOD_RES (26), (27), (28), (29): Xaa is A or G or is absent

SEQ ID NO: 27884 - protein, 36 aa, Artificial Sequence; identical to SEQ ID NO: 6721
  GFR-binding peptide
  MOD_RES (1), (2), (35): Xaa is C or S
  MOD_RES (16), (17), (18), (19), (20): Xaa is A or G
  MOD_RES (21), (22), (23), (24): Xaa is A or G or is absent

SEQ ID NO: 27885 - protein, 41 aa, Artificial Sequence
  GFR-binding peptide
  MOD_RES (5), (6), (38), (40): Xaa is C or S
VPKAXXAPTKLSPISVLYIDSSNNVIYKQYENMVVKAXGXH

SEQ ID NO: 27886 - protein, 41 aa, Artificial Sequence
  GFR-binding peptide
  MOD_RES (5), (6), (39), (41): Xaa is C or S
  MOD_RES (20), (21), (22), (23), (24): Xaa is A or G
  MOD_RES (25), (26), (27), (28): Xaa is A or G or is absent
SASPXXVPQDLSPISILYIXXXXXXXXXYKQYEMVVKSXKX

SEQ ID NO: 27887 - protein, 31 aa, Artificial Sequence
  GFR-binding peptide
  MOD_RES (1), (1): Xaa is C or S
XAPTQLEPISVLYLDDSSNVIKFKYENMVVR

SEQ ID NO: 27888 - protein, 39 aa, Artificial Sequence; identical to SEQ ID NO: 6726
  GFR-binding peptide
  MOD_RES (5), (6), (39): Xaa is C or S
  MOD_RES (20), (21), (22), (23), (24): Xaa is A or G
  MOD_RES (25), (26), (27), (28): Xaa is A or G or is absent

SEQ ID NO: 27889 - protein, 35 aa, Artificial Sequence; identical to SEQ ID NO: 6727
  GFR-binding peptide
  MOD_RES (1), (2), (35): Xaa is C or S
  MOD_RES (16), (17), (18), (19), (20): Xaa is A or G
  MOD_RES (21), (22), (23), (24): Xaa is A or G or is absent

SEQ ID NO: 27890 - protein, 33 aa, Artificial Sequence; identical to SEQ ID NO: 6728
  GFR-binding peptide
  MOD_RES (1), (1): Xaa is C or S
  MOD_RES (15), (16), (17), (18), (19): Xaa is A or G
  MOD_RES (20), (21), (22), (23): Xaa is A or G or is absent

SEQ ID NO: 27891 - protein, 39 aa, Artificial Sequence
  GFR-binding peptide
  MOD_RES (2), (3), (38): Xaa is C or S
  MOD_RES (17), (18), (19), (20), (21): Xaa is A or G
  MOD_RES (22), (23), (24), (25): Xaa is A or G or is absent
AXXVPTKLSPISVLYIXXXXXXXXXYKQYEEGMSVAEXG

SEQ ID NO: 27892 - protein, 35 aa, Artificial Sequence
  GFR-binding peptide
  MOD_RES (2), (3): Xaa is C or S
  MOD_RES (17), (18), (19), (20), (21): Xaa is A or G
  MOD_RES (22), (23), (24), (25): Xaa is A or G or is absent
PXXVSQDLSPISILYIXXXXXXXXXYKQYEMIVKS

SEQ ID NO: 27893 - protein, 34 aa, Artificial Sequence; identical to SEQ ID NO: 6731
  GFR-binding peptide
  MOD_RES (2), (3), (34): Xaa is C or S

SEQ ID NO: 27894 - protein, 37 aa, Artificial Sequence
  GFR-binding peptide
  MOD_RES (6), (7): Xaa is C or S
TVPKPXXAPTQLEPISVLYLDDSSNVIKFKYENMVVR

SEQ ID NO: 27895 - protein, 39 aa, Artificial Sequence
  GFR-binding peptide
  MOD_RES (6), (7), (39): Xaa is C or S
KASKAXXVPTKLNAISILYFDKGVVTYLKKYRGMAVSEX

SEQ ID NO: 27896 - protein, 34 aa, Artificial Sequence; identical to SEQ ID NO: 6732
  GFR-binding peptide
  MOD_RES (2), (3): Xaa is C or S

SEQ ID NO: 27897 - protein, 42 aa, Artificial Sequence
  GFR-binding peptide
  MOD_RES (4), (5), (39), (41): Xaa is C or S
  MOD_RES (19), (20), (21), (22), (23): Xaa is A or G
  MOD_RES (24), (25), (26), (27): Xaa is A or G or is absent
PASXXVPARLNAISILYFXXXXXXXXXLKKYRDMVVEAXGXR

SEQ ID NO: 27898 - protein, 40 aa, Artificial Sequence
  GFR-binding peptide
  MOD_RES (6), (7): Xaa is C or S
  MOD_RES (21), (22), (23), (24), (25): Xaa is A or G
  MOD_RES (26), (27), (28), (29): Xaa is A or G or is absent
AVPKAXXAPTKLSPISVLYIXXXXXXXXXYKQYENMVVKA

SEQ ID NO: 27899 - protein, 36 aa, Artificial Sequence
  GFR-binding peptide
  MOD_RES (2), (3), (36): Xaa is C or S
  MOD_RES (17), (18), (19), (20), (21): Xaa is A or G
  MOD_RES (22), (23), (24), (25): Xaa is A or G or is absent
PXXVSQDLSPISILYIXXXXXXXXXYKQYEMIVKSX

SEQ ID NO: 27900 - protein, 33 aa, Artificial Sequence
  GFR-binding peptide
  MOD_RES (1), (2): Xaa is C or S
XXAPTKLEPISVLYLDDSSNVIKFKYENMVVRS

SEQ ID NO: 27901 - protein, 39 aa, Artificial Sequence
  GFR-binding peptide
  MOD_RES (5), (6), (37), (39): Xaa is C or S
SASPXXVPQDLEPISILYLVGRTPKVKFKYEMVVKSXKX

SEQ ID NO: 27902 - protein, 37 aa, Artificial Sequence; identical to SEQ ID NO: 6738
  GFR-binding peptide
  MOD_RES (4), (5), (36): Xaa is C or S

SEQ ID NO: 27903 - protein, 40 aa, Artificial Sequence
  GFR-binding peptide
  MOD_RES (6), (7), (40): Xaa is C or S
  MOD_RES (21), (22), (23), (24), (25): Xaa is A or G
  MOD_RES (26), (27), (28), (29): Xaa is A or G or is absent
ASAAPXXVPQALSPISILYIXXXXXXXXXYKQYEMIVRSX

SEQ ID NO: 27904 - protein, 37 aa, Artificial Sequence
  GFR-binding peptide
  MOD_RES (5), (6): Xaa is C or S
IPKAXXVPTELSPISMLYIDEYDKVVYKQYEEMVVEG

SEQ ID NO: 27905 - protein, 37 aa, Artificial Sequence
  GFR-binding peptide
  MOD_RES (6), (7): Xaa is C or S
ASASPXXVPQDLEPISILYLVGRTPKVKFKYEMVVKS

SEQ ID NO: 27906 - protein, 33 aa, Artificial Sequence
  GFR-binding peptide
  MOD_RES (1), (33): Xaa is C or S
XVPARLSPISILYKDAANNVVLKYHYDMVVEAX

SEQ ID NO: 27907 - protein, 36 aa, Artificial Sequence
  GFR-binding peptide
  MOD_RES (3), (4): Xaa is C or S
  MOD_RES (18), (19), (20), (21), (22): Xaa is A or G
  MOD_RES (23), (24), (25), (26): Xaa is A or G or is absent
KAXXVPTELSPISMLYIXXXXXXXXXYKQYEDMVVE

SEQ ID NO: 27908 - protein, 40 aa, Artificial Sequence; identical to SEQ ID NO: 6742
  GFR-binding peptide
  MOD_RES (2), (3), (37), (39): Xaa is C or S
  MOD_RES (17), (18), (19), (20), (21): Xaa is A or G
  MOD_RES (22), (23), (24), (25): Xaa is A or G or is absent

SEQ ID NO: 27909 - protein, 34 aa, Artificial Sequence
  GFR-binding peptide
  MOD_RES (34), (34): Xaa is C or S
  MOD_RES (14), (15), (16), (17), (18): Xaa is A or G
  MOD_RES (19), (20), (21), (22): Xaa is A or G or is absent
APTQLEPISVLYLXXXXXXXXXKFKYENMVVRAX

SEQ ID NO: 27910 - protein, 34 aa, Artificial Sequence; identical to SEQ ID NO: 6743
  GFR-binding peptide
  MOD_RES (32), (34): Xaa is C or S

SEQ ID NO: 27911 - protein, 38 aa, Artificial Sequence
  GFR-binding peptide
  MOD_RES (3), (35), (37): Xaa is C or S
PTXAPTKLEPISVLYLDDSSNVIKFKYENMVVRSXGXH

SEQ ID NO: 27912 - protein, 43 aa, Artificial Sequence
  GFR-binding peptide
  MOD_RES (5), (6), (40), (42): Xaa is C or S
  MOD_RES (20), (21), (22), (23), (24): Xaa is A or G
  MOD_RES (25), (26), (27), (28): Xaa is A or G or is absent
IPKAXXVPTELSPISMLYIXXXXXXXXXYKQYEEMVVEGXGXR

SEQ ID NO: 27913 - protein, 37 aa, Artificial Sequence
  GFR-binding peptide
  MOD_RES (1), (35), (37): Xaa is C or S
  MOD_RES (15), (16), (17), (18), (19): Xaa is A or G
  MOD_RES (20), (21), (22), (23): Xaa is A or G or is absent
XAPTQLEPISVLYLXXXXXXXXXKFKYENMVVRAXGX

SEQ ID NO: 27914 - protein, 41 aa, Artificial Sequence; identical to SEQ ID NO: 6744
  GFR-binding peptide
  MOD_RES (3), (4), (38), (40): Xaa is C or S
  MOD_RES (18), (19), (20), (21), (22): Xaa is A or G
  MOD_RES (23), (24), (25), (26): Xaa is A or G or is absent

SEQ ID NO: 27915 - protein, 37 aa, Artificial Sequence
  GFR-binding peptide
  MOD_RES (2), (3), (37): Xaa is C or S
  MOD_RES (17), (18), (19), (20), (21): Xaa is A or G
  MOD_RES (22), (23), (24), (25): Xaa is A or G or is absent
AXXVPTELSPISMLYIXXXXXXXXXYKQYEDMVVEGX

SEQ ID NO: 27916 - protein, 37 aa, Artificial Sequence
  GFR-binding peptide
  MOD_RES (3), (4), (35), (37): Xaa is C or S
APXXVPQALEPISILYLVGRKPKVKFKYEMIVRSXKX

SEQ ID NO: 27917 - protein, 40 aa, Artificial Sequence
  GFR-binding peptide
  MOD_RES (6), (7): Xaa is C or S
  MOD_RES (21), (22), (23), (24), (25): Xaa is A or G
  MOD_RES (26), (27), (28), (29): Xaa is A or G or is absent
KASKAXXVPTKLSPISILYKXXXXXXXXXLKYHYGMAVSE

SEQ ID NO: 27918 - protein, 39 aa, Artificial Sequence; identical to SEQ ID NO: 6747
  GFR-binding peptide
  MOD_RES (4), (5), (38): Xaa is C or S
  MOD_RES (19), (20), (21), (22), (23): Xaa is A or G
  MOD_RES (24), (25), (26), (27): Xaa is A or G or is absent

SEQ ID NO: 27919 - protein, 35 aa, Artificial Sequence
  GFR-binding peptide
  MOD_RES (3), (4): Xaa is C or S
KAXXVPTELSPISMLYIDEYDKVVYKQYEEMVVEG

SEQ ID NO: 27920 - protein, 37 aa, Artificial Sequence; identical to SEQ ID NO: 6748
  GFR-binding peptide
  MOD_RES (2), (3), (36): Xaa is C or S
  MOD_RES (17), (18), (19), (20), (21): Xaa is A or G
  MOD_RES (22), (23), (24), (25): Xaa is A or G or is absent

SEQ ID NO: 27921 - protein, 39 aa, Artificial Sequence; identical to SEQ ID NO: 6749
  GFR-binding peptide
  MOD_RES (3), (4), (39): Xaa is C or S
  MOD_RES (18), (19), (20), (21), (22): Xaa is A or G
  MOD_RES (23), (24), (25), (26): Xaa is A or G or is absent

SEQ ID NO: 27922 - protein, 40 aa, Artificial Sequence
  GFR-binding peptide
  MOD_RES (4), (5), (39): Xaa is C or S
  MOD_RES (19), (20), (21), (22), (23): Xaa is A or G
  MOD_RES (24), (25), (26), (27): Xaa is A or G or is absent
SKAXXVPTKLSPISILYIXXXXXXXXXYKQYEGMAVSEXG

SEQ ID NO: 27923 - protein, 37 aa, Artificial Sequence; identical to SEQ ID NO: 6750
  GFR-binding peptide
  MOD_RES (2), (3), (34), (36): Xaa is C or S

SEQ ID NO: 27924 - protein, 36 aa, Artificial Sequence; identical to SEQ ID NO: 6751
  GFR-binding peptide
  MOD_RES (1), (2), (36): Xaa is C or S
  MOD_RES (16), (17), (18), (19), (20): Xaa is A or G
  MOD_RES (21), (22), (23), (24): Xaa is A or G or is absent

SEQ ID NO: 27925 - protein, 35 aa, Artificial Sequence
  GFR-binding peptide
  MOD_RES (3), (4): Xaa is C or S
KAXXVPTELEPISMLYLDENEKVVKFKYEDMVVEG

SEQ ID NO: 27926 - protein, 39 aa, Artificial Sequence
  GFR-binding peptide
  MOD_RES (6), (7): Xaa is C or S
  MOD_RES (21), (22), (23), (24), (25): Xaa is A or G
  MOD_RES (26), (27), (28), (29): Xaa is A or G or is absent
ASASPXXVSQDLSPISILYIXXXXXXXXXYKQYEMIVKS

SEQ ID NO: 27927 - protein, 35 aa, Artificial Sequence
  GFR-binding peptide
  MOD_RES (2), (3): Xaa is C or S
  MOD_RES (17), (18), (19), (20), (21): Xaa is A or G
  MOD_RES (22), (23), (24), (25): Xaa is A or G or is absent
AXXVPTELSPISMLYIXXXXXXXXXYKQYEDMVVE

SEQ ID NO: 27928 - protein, 35 aa, Artificial Sequence; identical to SEQ ID NO: 6754
  GFR-binding peptide
  MOD_RES (1), (35): Xaa is C or S
  MOD_RES (15), (16), (17), (18), (19): Xaa is A or G
  MOD_RES (20), (21), (22), (23): Xaa is A or G or is absent

SEQ ID NO: 27929 - protein, 37 aa, Artificial Sequence
  GFR-binding peptide
  MOD_RES (1), (35), (37): Xaa is C or S
  MOD_RES (15), (16), (17), (18), (19): Xaa is A or G
  MOD_RES (20), (21), (22), (23): Xaa is A or G or is absent
XAPTQLSPISVLYIXXXXXXXXXYKQYENMVVRAXGX

SEQ ID NO: 27930 - protein, 36 aa, Artificial Sequence
  GFR-binding peptide
  MOD_RES (1), (35): Xaa is C or S
  MOD_RES (15), (16), (17), (18), (19): Xaa is A or G
  MOD_RES (20), (21), (22), (23): Xaa is A or G or is absent
XVPARLSPISILYKXXXXXXXXXLKYHYDMVVEAXG

SEQ ID NO: 27931 - protein, 41 aa, Artificial Sequence
  GFR-binding peptide
  MOD_RES (6), (7), (39), (41): Xaa is C or S
AAPASXXVPARLSPISILYKDAANNVVLKYHYDMVVEAXGX

SEQ ID NO: 27932 - protein, 39 aa, Artificial Sequence
  GFR-binding peptide
  MOD_RES (4), (5), (36), (38): Xaa is C or S
ASPXXVSQDLEPISILYLIGKTPKIKFKYEMIVKSXKXS

SEQ ID NO: 27933 - protein, 42 aa, Artificial Sequence
  GFR-binding peptide
  MOD_RES (4), (5), (39), (41): Xaa is C or S
  MOD_RES (19), (20), (21), (22), (23): Xaa is A or G
  MOD_RES (24), (25), (26), (27): Xaa is A or G or is absent
PKPXXAPTQLEPISVLYLXXXXXXXXXKFKYENMVVRAXGXH

SEQ ID NO: 27934 - protein, 38 aa, Artificial Sequence
  GFR-binding peptide
  MOD_RES (5), (6): Xaa is C or S
  MOD_RES (20), (21), (22), (23), (24): Xaa is A or G
  MOD_RES (25), (26), (27), (28): Xaa is A or G or is absent
SASPXXVSQDLEPISILYLXXXXXXXXXKFKYEMIVKS

SEQ ID NO: 27935 - protein, 31 aa, Artificial Sequence; identical to SEQ ID NO: 6759
  GFR-binding peptide
  MOD_RES (1), (1): Xaa is C or S

SEQ ID NO: 27936 - protein, 38 aa, Artificial Sequence; identical to SEQ ID NO: 6760
  GFR-binding peptide
  MOD_RES (2), (3), (35), (37): Xaa is C or S

SEQ ID NO: 27937 - protein, 34 aa, Artificial Sequence
  GFR-binding peptide
  MOD_RES (2), (34): Xaa is C or S
TXAPTKLEPISVLYLDDSSNVIKFKYENMVVRSX

SEQ ID NO: 27938 - protein, 36 aa, Artificial Sequence; identical to SEQ ID NO: 6762
  GFR-binding peptide
  MOD_RES (33), (35): Xaa is C or S
  MOD_RES (14), (15), (16), (17), (18): Xaa is A or G
  MOD_RES (19), (20), (21), (22): Xaa is A or G or is absent

SEQ ID NO: 27939 - protein, 39 aa, Artificial Sequence
  GFR-binding peptide
  MOD_RES (3), (4), (38): Xaa is C or S
  MOD_RES (18), (19), (20), (21), (22): Xaa is A or G
  MOD_RES (23), (24), (25), (26): Xaa is A or G or is absent
KAXXVPTELEPISMLYLXXXXXXXXXKFKYEEMVVEGXG

SEQ ID NO: 27940 - protein, 35 aa, Artificial Sequence
  GFR-binding peptide
  MOD_RES (3), (4): Xaa is C or S
KAXXVPTELEPISMLYLDEYDKVVKFKYEEMVVEG

SEQ ID NO: 27941 - protein, 42 aa, Artificial Sequence; identical to SEQ ID NO: 6765
  GFR-binding peptide
  MOD_RES (5), (6), (39), (41): Xaa is C or S
  MOD_RES (20), (21), (22), (23), (24): Xaa is A or G
  MOD_RES (25), (26), (27), (28): Xaa is A or G or is absent

SEQ ID NO: 27942 - protein, 38 aa, Artificial Sequence
  GFR-binding peptide
  MOD_RES (5), (6), (38): Xaa is C or S
APASXXVPARLSPISILYKDAANNVVLKYHYDMVVEAX

SEQ ID NO: 27943 - protein, 39 aa, Artificial Sequence
  GFR-binding peptide
  MOD_RES (6), (7), (38): Xaa is C or S
ASAAPXXVPQALSPISILYIVGRKPKVYKQYEMIVRSXK

SEQ ID NO: 27944 - protein, 35 aa, Artificial Sequence
  GFR-binding peptide
  MOD_RES (3), (4): Xaa is C or S
KAXXVPTELSPISMLYIDENEKVVYKQYEDMVVEG

SEQ ID NO: 27945 - protein, 33 aa, Artificial Sequence; identical to SEQ ID NO: 6769
  GFR-binding peptide
  MOD_RES (1), (1): Xaa is C or S

SEQ ID NO: 27946 - protein, 39 aa, Artificial Sequence
  GFR-binding peptide
  MOD_RES (5), (6), (38): Xaa is C or S
APASXXVPARLEPISILYLDAANNVVKFKYEDMVVEAXG

SEQ ID NO: 27947 - protein, 35 aa, Artificial Sequence; identical to SEQ ID NO: 6770
  GFR-binding peptide
  MOD_RES (2), (3): Xaa is C or S
  MOD_RES (17), (18), (19), (20), (21): Xaa is A or G
  MOD_RES (22), (23), (24), (25): Xaa is A or G or is absent

SEQ ID NO: 27948 - protein, 37 aa, Artificial Sequence
  GFR-binding peptide
  MOD_RES (2), (3), (37): Xaa is C or S
  MOD_RES (17), (18), (19), (20), (21): Xaa is A or G
  MOD_RES (22), (23), (24), (25): Xaa is A or G or is absent
PXXAPTKLSPISVLYIXXXXXXXXXYKQYENMVVRSX

SEQ ID NO: 27949 - protein, 40 aa, Artificial Sequence
  GFR-binding peptide
  MOD_RES (4), (5), (37), (39): Xaa is C or S
SKAXXVPTKLSPISILYKDKGVVTYLKYHYGMAVSEXGXR

SEQ ID NO: 27950 - protein, 39 aa, Artificial Sequence; identical to SEQ ID NO: 6773
  GFR-binding peptide
  MOD_RES (1), (2), (36), (38): Xaa is C or S
  MOD_RES (16), (17), (18), (19), (20): Xaa is A or G
  MOD_RES (21), (22), (23), (24): Xaa is A or G or is absent

SEQ ID NO: 27951 - protein, 39 aa, Artificial Sequence
  GFR-binding peptide
  MOD_RES (5), (6): Xaa is C or S
  MOD_RES (20), (21), (22), (23), (24): Xaa is A or G
  MOD_RES (25), (26), (27), (28): Xaa is A or G or is absent
APASXXVPARLNAISILYFXXXXXXXXXLKKYRDMVVEA

SEQ ID NO: 27952 - protein, 37 aa, Artificial Sequence
  GFR-binding peptide
  MOD_RES (34), (36): Xaa is C or S
  MOD_RES (14), (15), (16), (17), (18): Xaa is A or G
  MOD_RES (19), (20), (21), (22): Xaa is A or G or is absent
APTKLSPISVLYIXXXXXXXXXYKQYENMVVKAXGXH

SEQ ID NO: 27953 - protein, 37 aa, Artificial Sequence
  GFR-binding peptide
  MOD_RES (3), (4), (36): Xaa is C or S
KAXXVPTELSPISMLYIDEYDKVVYKQYEEMVVEGXG

SEQ ID NO: 27954 - protein, 40 aa, Artificial Sequence; identical to SEQ ID NO: 6775
  GFR-binding peptide
  MOD_RES (3), (4), (37), (39): Xaa is C or S
  MOD_RES (18), (19), (20), (21), (22): Xaa is A or G
  MOD_RES (23), (24), (25), (26): Xaa is A or G or is absent

SEQ ID NO: 27955 - protein, 35 aa, Artificial Sequence
  GFR-binding peptide
  MOD_RES (1), (33), (35): Xaa is C or S
XVPTELSPISMLYIDEYDKVVYKQYEEMVVEGXGX

SEQ ID NO: 27956 - protein, 39 aa, Artificial Sequence; identical to SEQ ID NO: 6777
  GFR-binding peptide
  MOD_RES (3), (4), (38): Xaa is C or S
  MOD_RES (18), (19), (20), (21), (22): Xaa is A or G
  MOD_RES (23), (24), (25), (26): Xaa is A or G or is absent

SEQ ID NO: 27957 - protein, 35 aa, Artificial Sequence
  GFR-binding peptide
  MOD_RES (4), (5): Xaa is C or S
PKPXXAPTQLSPISVLYIDDSSNVIYKQYENMVVR

SEQ ID NO: 27958 - protein, 36 aa, Artificial Sequence
  GFR-binding peptide
  MOD_RES (1), (2), (34), (36): Xaa is C or S
XXVPARLNAISILYFDAANNVVLKKYRDMVVEAXGX

SEQ ID NO: 27959 - protein, 40 aa, Artificial Sequence; identical to SEQ ID NO: 6779
  GFR-binding peptide
  MOD_RES (5), (6), (37), (39): Xaa is C or S

SEQ ID NO: 27960 - protein, 36 aa, Artificial Sequence
  GFR-binding peptide
  MOD_RES (1), (2), (33), (35): Xaa is C or S
XXVSQDLSPISILYIIGKTPKIYKQYEMIVKSXKXS

SEQ ID NO: 27961 - protein, 41 aa, Artificial Sequence
  GFR-binding peptide
  MOD_RES (5), (6), (40): Xaa is C or S
  MOD_RES (20), (21), (22), (23), (24): Xaa is A or G
  MOD_RES (25), (26), (27), (28): Xaa is A or G or is absent
ASKAXXVPTKLEPISILYLXXXXXXXXXKFKYEGMAVSEXG

SEQ ID NO: 27962 - protein, 39 aa, Artificial Sequence
  GFR-binding peptide
  MOD_RES (5), (39): Xaa is C or S
  MOD_RES (19), (20), (21), (22), (23): Xaa is A or G
  MOD_RES (24), (25), (26), (27): Xaa is A or G or is absent
TKPTXAPTKLSPISVLYIXXXXXXXXXYKQYENMVVRSX

SEQ ID NO: 27963 - protein, 37 aa, Artificial Sequence; identical to SEQ ID NO: 6782
  GFR-binding peptide
  MOD_RES (34), (36): Xaa is C or S
  MOD_RES (14), (15), (16), (17), (18): Xaa is A or G
  MOD_RES (19), (20), (21), (22): Xaa is A or G or is absent

SEQ ID NO: 27964 - protein, 36 aa, Artificial Sequence
  GFR-binding peptide
  MOD_RES (1), (2), (34), (36): Xaa is C or S
XXAPTKLSPISVLYIDDSSNVIYKQYENMVVRSXGX

SEQ ID NO: 27965 - protein, 37 aa, Artificial Sequence
  GFR-binding peptide
  MOD_RES (2), (3), (34), (36): Xaa is C or S
PXXVPQDLSPISILYIVGRTPKVYKQYEMVVKSXKXS

SEQ ID NO: 27966 - protein, 39 aa, Artificial Sequence
  GFR-binding peptide
  MOD_RES (2), (3), (37), (39): Xaa is C or S
  MOD_RES (17), (18), (19), (20), (21): Xaa is A or G
  MOD_RES (22), (23), (24), (25): Xaa is A or G or is absent
AXXVPTKLSPISILYIXXXXXXXXXYKQYEGMAVSEXGX

SEQ ID NO: 27967 - protein, 44 aa, Artificial Sequence
  GFR-binding peptide
  MOD_RES (6), (7), (41), (43): Xaa is C or S
  MOD_RES (21), (22), (23), (24), (25): Xaa is A or G
  MOD_RES (26), (27), (28), (29): Xaa is A or G or is absent
KIPKAXXVPTELSPISMLYIXXXXXXXXXYKQYEDMVVEGXGXR

SEQ ID NO: 27968 - protein, 36 aa, Artificial Sequence; identical to SEQ ID NO: 6787
  GFR-binding peptide
  MOD_RES (2), (3): Xaa is C or S
  MOD_RES (17), (18), (19), (20), (21): Xaa is A or G
  MOD_RES (22), (23), (24), (25): Xaa is A or G or is absent

SEQ ID NO: 27969 - protein, 37 aa, Artificial Sequence; identical to SEQ ID NO: 6789
  GFR-binding peptide
  MOD_RES (4), (5), (37): Xaa is C or S

SEQ ID NO: 27970 - protein, 38 aa, Artificial Sequence; identical to SEQ ID NO: 6791
  GFR-binding peptide
  MOD_RES (4), (5), (37): Xaa is C or S

SEQ ID NO: 27971 - protein, 38 aa, Artificial Sequence; identical to SEQ ID NO: 6792
  GFR-binding peptide
  MOD_RES (4), (5): Xaa is C or S
  MOD_RES (19), (20), (21), (22), (23): Xaa is A or G
  MOD_RES (24), (25), (26), (27): Xaa is A or G or is absent

SEQ ID NO: 27972 - protein, 40 aa, Artificial Sequence; identical to SEQ ID NO: 6793
  GFR-binding peptide
  MOD_RES (2), (3), (37), (39): Xaa is C or S
  MOD_RES (17), (18), (19), (20), (21): Xaa is A or G
  MOD_RES (22), (23), (24), (25): Xaa is A or G or is absent

SEQ ID NO: 27973 - protein, 37 aa, Artificial Sequence
  GFR-binding peptide
  MOD_RES (5), (5): Xaa is C or S
  MOD_RES (19), (20), (21), (22), (23): Xaa is A or G
  MOD_RES (24), (25), (26), (27): Xaa is A or G or is absent
TKPTXAPTKLSPISVLYIXXXXXXXXXYKQYENMVVR

SEQ ID NO: 27974 - protein, 34 aa, Artificial Sequence
  GFR-binding peptide
  MOD_RES (33), (33): Xaa is C or S
  MOD_RES (14), (15), (16), (17), (18): Xaa is A or G
  MOD_RES (19), (20), (21), (22): Xaa is A or G or is absent
VPQDLSPISILYIXXXXXXXXXYKQYEMVVKSXK

SEQ ID NO: 27975 - protein, 37 aa, Artificial Sequence
  GFR-binding peptide
  MOD_RES (2), (3), (35), (37): Xaa is C or S
AXXVPTELSPISMLYIDENEKVVYKQYEDMVVEGXGX

SEQ ID NO: 27976 - protein, 38 aa, Artificial Sequence; identical to SEQ ID NO: 6796
  GFR-binding peptide
  MOD_RES (35), (37): Xaa is C or S
  MOD_RES (14), (15), (16), (17), (18): Xaa is A or G
  MOD_RES (19), (20), (21), (22): Xaa is A or G or is absent

SEQ ID NO: 27977 - protein, 34 aa, Artificial Sequence; identical to SEQ ID NO: 6797
  GFR-binding peptide
  MOD_RES (34), (34): Xaa is C or S
  MOD_RES (14), (15), (16), (17), (18): Xaa is A or G
  MOD_RES (19), (20), (21), (22): Xaa is A or G or is absent

SEQ ID NO: 27978 - protein, 42 aa, Artificial Sequence
  GFR-binding peptide
  MOD_RES (6), (7), (42): Xaa is C or S
  MOD_RES (21), (22), (23), (24), (25): Xaa is A or G
  MOD_RES (26), (27), (28), (29): Xaa is A or G or is absent
KVGKAXXVPTKLSPISVLYIXXXXXXXXXYKQYEEGMSVAEX

SEQ ID NO: 27979 - protein, 39 aa, Artificial Sequence
  GFR-binding peptide
  MOD_RES (3), (4), (37), (39): Xaa is C or S
  MOD_RES (18), (19), (20), (21), (22): Xaa is A or G
  MOD_RES (23), (24), (25), (26): Xaa is A or G or is absent
SPXXVPQDLEPISILYLXXXXXXXXXKFKYEMVVKSXKX

SEQ ID NO: 27980 - protein, 34 aa, Artificial Sequence; identical to SEQ ID NO: 6798
  GFR-binding peptide
  MOD_RES (31), (33): Xaa is C or S

SEQ ID NO: 27981 - protein, 39 aa, Artificial Sequence
  GFR-binding peptide
  MOD_RES (1), (2), (37), (39): Xaa is C or S
  MOD_RES (16), (17), (18), (19), (20): Xaa is A or G
  MOD_RES (21), (22), (23), (24): Xaa is A or G or is absent
XXVPTKLSPISVLYIXXXXXXXXXYKQYEEGMSVAEXGX

SEQ ID NO: 27982 - protein, 43 aa, Artificial Sequence
  GFR-binding peptide
  MOD_RES (6), (7), (40), (42): Xaa is C or S
  MOD_RES (21), (22), (23), (24), (25): Xaa is A or G
  MOD_RES (26), (27), (28), (29): Xaa is A or G or is absent
ASAAPXXVPQALSPISILYIXXXXXXXXXYKQYEMIVRSXKXS

SEQ ID NO: 27983 - protein, 38 aa, Artificial Sequence; identical to SEQ ID NO: 6801
  GFR-binding peptide
  MOD_RES (4), (5), (38): Xaa is C or S
  MOD_RES (19), (20), (21), (22), (23): Xaa is A or G
  MOD_RES (24), (25), (26), (27): Xaa is A or G or is absent

SEQ ID NO: 27984 - protein, 32 aa, Artificial Sequence; identical to SEQ ID NO: 6802
  GFR-binding peptide
  MOD_RES (14), (15), (16), (17), (18): Xaa is A or G
  MOD_RES (19), (20), (21), (22): Xaa is A or G or is absent

SEQ ID NO: 27985 - protein, 40 aa, Artificial Sequence; identical to SEQ ID NO: 6804
  GFR-binding peptide
  MOD_RES (6), (7), (40): Xaa is C or S
  MOD_RES (21), (22), (23), (24), (25): Xaa is A or G
  MOD_RES (26), (27), (28), (29): Xaa is A or G or is absent

SEQ ID NO: 27986 - protein, 37 aa, Artificial Sequence
  GFR-binding peptide
  MOD_RES (4), (5), (37): Xaa is C or S
PASXXVPARLSPISILYKDAANNVVLKYHYDMVVEAX

SEQ ID NO: 27987 - protein, 41 aa, Artificial Sequence
  GFR-binding peptide
  MOD_RES (4), (5), (38), (40): Xaa is C or S
  MOD_RES (19), (20), (21), (22), (23): Xaa is A or G
  MOD_RES (24), (25), (26), (27): Xaa is A or G or is absent
ASPXXVPQDLSPISILYIXXXXXXXXXYKQYEMVVKSXKXS

SEQ ID NO: 27988 - protein, 33 aa, Artificial Sequence
  GFR-binding peptide
  MOD_RES (1), (2): Xaa is C or S
XXVPTELSPISMLYIDENEKVVYKQYEDMVVEG

SEQ ID NO: 27989 - protein, 38 aa, Artificial Sequence
  GFR-binding peptide
  MOD_RES (4), (36), (38): Xaa is C or S
KPTXAPTKLEPISVLYLDDSSNVIKFKYENMVVRSXGX

SEQ ID NO: 27990 - protein, 38 aa, Artificial Sequence
  GFR-binding peptide
  MOD_RES (3), (4), (38): Xaa is C or S
  MOD_RES (18), (19), (20), (21), (22): Xaa is A or G
  MOD_RES (23), (24), (25), (26): Xaa is A or G or is absent
ASXXVPARLSPISILYIXXXXXXXXXYKQYEDMVVEAX

SEQ ID NO: 27991 - protein, 35 aa, Artificial Sequence; identical to SEQ ID NO: 6810
  GFR-binding peptide
  MOD_RES (4), (5): Xaa is C or S

SEQ ID NO: 27992 - protein, 37 aa, Artificial Sequence; identical to SEQ ID NO: 6812
  GFR-binding peptide
  MOD_RES (3), (37): Xaa is C or S
  MOD_RES (17), (18), (19), (20), (21): Xaa is A or G
  MOD_RES (22), (23), (24), (25): Xaa is A or G or is absent

SEQ ID NO: 27993 - protein, 34 aa, Artificial Sequence
  GFR-binding peptide
  MOD_RES (2), (3), (34): Xaa is C or S
PXXVPQDLSPISILYIVGRTPKVYKQYEMVVKSX

SEQ ID NO: 27994 - protein, 32 aa, Artificial Sequence; identical to SEQ ID NO: 6818
  GFR-binding peptide
  MOD_RES (14), (15), (16), (17), (18): Xaa is A or G
  MOD_RES (19), (20), (21), (22): Xaa is A or G or is absent

SEQ ID NO: 27995 - protein, 33 aa, Artificial Sequence
  GFR-binding peptide
  MOD_RES (32), (32): Xaa is C or S
APTKLEPISVLYLDSSNNVIKFKYENMVVKAXG

SEQ ID NO: 27996 - protein, 39 aa, Artificial Sequence
  GFR-binding peptide
  MOD_RES (5), (6): Xaa is C or S
  MOD_RES (20), (21), (22), (23), (24): Xaa is A or G
  MOD_RES (25), (26), (27), (28): Xaa is A or G or is absent
IPKAXXVPTELSPISMLYIXXXXXXXXXYKQYEEMVVEG

SEQ ID NO: 27997 - protein, 36 aa, Artificial Sequence
  GFR-binding peptide
  MOD_RES (1), (34), (36): Xaa is C or S
  MOD_RES (15), (16), (17), (18), (19): Xaa is A or G
  MOD_RES (20), (21), (22), (23): Xaa is A or G or is absent
XVSQDLSPISILYIXXXXXXXXXYKQYEMIVKSXKX

SEQ ID NO: 27998 - protein, 32 aa, Artificial Sequence; identical to SEQ ID NO: 6822
  GFR-binding peptide
  MOD_RES (1), (2): Xaa is C or S

SEQ ID NO: 27999 - protein, 39 aa, Artificial Sequence
  GFR-binding peptide
  MOD_RES (2), (3), (37), (39): Xaa is C or S
  MOD_RES (17), (18), (19), (20), (21): Xaa is A or G
  MOD_RES (22), (23), (24), (25): Xaa is A or G or is absent
PXXAPTQLSPISVLYIXXXXXXXXXYKQYENMVVRAXGX

SEQ ID NO: 28000 - protein, 36 aa, Artificial Sequence
  GFR-binding peptide
  MOD_RES (2), (3): Xaa is C or S
  MOD_RES (17), (18), (19), (20), (21): Xaa is A or G
  MOD_RES (22), (23), (24), (25): Xaa is A or G or is absent
SXXVPARLNAISILYFXXXXXXXXXLKKYRDMVVEA

SEQ ID NO: 28001 - protein, 42 aa, Artificial Sequence
  GFR-binding peptide
  MOD_RES (4), (5), (40), (42): Xaa is C or S
  MOD_RES (19), (20), (21), (22), (23): Xaa is A or G
  MOD_RES (24), (25), (26), (27): Xaa is A or G or is absent
GKAXXVPTKLSPISVLYIXXXXXXXXXYKQYEEGMSVAEXGX

SEQ ID NO: 28002 - protein, 40 aa, Artificial Sequence; identical to SEQ ID NO: 6823
  GFR-binding peptide
  MOD_RES (6), (7), (39): Xaa is C or S

SEQ ID NO: 28003 - protein, 37 aa, Artificial Sequence
  GFR-binding peptide
  MOD_RES (1), (2), (35), (37): Xaa is C or S
  MOD_RES (16), (17), (18), (19), (20): Xaa is A or G
  MOD_RES (21), (22), (23), (24): Xaa is A or G or is absent
XXVPQALEPISILYLXXXXXXXXXKFKYEMIVRSXKX

SEQ ID NO: 28004 - protein, 33 aa, Artificial Sequence; identical to SEQ ID NO: 6824
  GFR-binding peptide
  MOD_RES (1), (1): Xaa is C or S
  MOD_RES (15), (16), (17), (18), (19): Xaa is A or G
  MOD_RES (20), (21), (22), (23): Xaa is A or G or is absent

SEQ ID NO: 28005 - protein, 36 aa, Artificial Sequence; identical to SEQ ID NO: 6826
  GFR-binding peptide
  MOD_RES (3), (4): Xaa is C or S
  MOD_RES (18), (19), (20), (21), (22): Xaa is A or G
  MOD_RES (23), (24), (25), (26): Xaa is A or G or is absent

SEQ ID NO: 28006 - protein, 39 aa, Artificial Sequence
  GFR-binding peptide
  MOD_RES (2), (3), (37), (39): Xaa is C or S
  MOD_RES (17), (18), (19), (20), (21): Xaa is A or G
  MOD_RES (22), (23), (24), (25): Xaa is A or G or is absent
AXXVPTKLEPISILYLXXXXXXXXXKFKYEGMAVSEXGX

SEQ ID NO: 28007 - protein, 40 aa, Artificial Sequence; identical to SEQ ID NO: 6828
  GFR-binding peptide
  MOD_RES (6), (7): Xaa is C or S
  MOD_RES (21), (22), (23), (24), (25): Xaa is A or G
  MOD_RES (26), (27), (28), (29): Xaa is A or G or is absent

SEQ ID NO: 28008 - protein, 37 aa, Artificial Sequence
  GFR-binding peptide
  MOD_RES (5), (6): Xaa is C or S
VPKPXXAPTKLSPISVLYIDDSSNVIYKQYENMVVRS

SEQ ID NO: 28009 - protein, 37 aa, Artificial Sequence
  GFR-binding peptide
  MOD_RES (5), (6): Xaa is C or S
VPKPXXAPTQLEPISVLYLDDSSNVIKFKYENMVVRA

SEQ ID NO: 28010 - protein, 40 aa, Artificial Sequence; identical to SEQ ID NO: 6831
  GFR-binding peptide
  MOD_RES (6), (7), (38), (40): Xaa is C or S

SEQ ID NO: 28011 - protein, 33 aa, Artificial Sequence
  GFR-binding peptide
  MOD_RES (1), (2), (33): Xaa is C or S
XXVSQDLSPISILYIIGKTPKIYKQYEMIVKSX

SEQ ID NO: 28012 - protein, 36 aa, Artificial Sequence; identical to SEQ ID NO: 6833
  GFR-binding peptide
  MOD_RES (4), (5), (36): Xaa is C or S

SEQ ID NO: 28013 - protein, 40 aa, Artificial Sequence; identical to SEQ ID NO: 6834
  GFR-binding peptide
  MOD_RES (5), (6), (40): Xaa is C or S
  MOD_RES (20), (21), (22), (23), (24): Xaa is A or G
  MOD_RES (25), (26), (27), (28): Xaa is A or G or is absent

SEQ ID NO: 28014 - protein, 37 aa, Artificial Sequence; identical to SEQ ID NO: 6835
  GFR-binding peptide
  MOD_RES (34), (36): Xaa is C or S
  MOD_RES (14), (15), (16), (17), (18): Xaa is A or G
  MOD_RES (19), (20), (21), (22): Xaa is A or G or is absent

SEQ ID NO: 28015 - protein, 32 aa, Artificial Sequence
  GFR-binding peptide
  MOD_RES (31), (31): Xaa is C or S
VPQALSPISILYIVGRKPKVYKQYEMIVRSXK

SEQ ID NO: 28016 - protein, 31 aa, Artificial Sequence
  GFR-binding peptide
  MOD_RES (1), (1): Xaa is C or S
XAPTQLSPISVLYIDDSSNVIYKQYENMVVR

SEQ ID NO: 28017 - protein, 40 aa, Artificial Sequence
  GFR-binding peptide
  MOD_RES (6), (7), (39): Xaa is C or S
TVPKPXXAPTQLSPISVLYIDDSSNVIYKQYENMVVRAXG

SEQ ID NO: 28018 - protein, 36 aa, Artificial Sequence
  GFR-binding peptide
  MOD_RES (3), (4): Xaa is C or S
KAXXVPTKLEPISVLYLDDMGVPTKFKYEEGMSVAE

SEQ ID NO: 28019 - protein, 33 aa, Artificial Sequence; identical to SEQ ID NO: 6840
  GFR-binding peptide
  MOD_RES (1), (2), (33): Xaa is C or S

SEQ ID NO: 28020 - protein, 38 aa, Artificial Sequence; identical to SEQ ID NO: 6841
  GFR-binding peptide
  MOD_RES (5), (6): Xaa is C or S
  MOD_RES (20), (21), (22), (23), (24): Xaa is A or G
  MOD_RES (25), (26), (27), (28): Xaa is A or G or is absent

SEQ ID NO: 28021 - protein, 35 aa, Artificial Sequence
  GFR-binding peptide
  MOD_RES (2), (3): Xaa is C or S
  MOD_RES (17), (18), (19), (20), (21): Xaa is A or G
  MOD_RES (22), (23), (24), (25): Xaa is A or G or is absent
SXXVPARLSPISILYKXXXXXXXXXLKYHYDMVVE

SEQ ID NO: 28022 - protein, 37 aa, Artificial Sequence
  GFR-binding peptide
  MOD_RES (3), (4), (36): Xaa is C or S
KAXXVPTKLNAISILYFDKGVVTYLKKYRGMAVSEXG

SEQ ID NO: 28023 - protein, 41 aa, Artificial Sequence
  GFR-binding peptide
  MOD_RES (5), (6), (38), (40): Xaa is C or S
VPKPXXAPTQLEPISVLYLDDSSNVIKFKYENMVVRAXGXH

SEQ ID NO: 28024 - protein, 37 aa, Artificial Sequence; identical to SEQ ID NO: 6847
  GFR-binding peptide
  MOD_RES (3), (4), (36): Xaa is C or S

SEQ ID NO: 28025 - protein, 39 aa, Artificial Sequence; identical to SEQ ID NO: 6848
  GFR-binding peptide
  MOD_RES (5), (6), (38): Xaa is C or S

SEQ ID NO: 28026 - protein, 35 aa, Artificial Sequence; identical to SEQ ID NO: 6849
  GFR-binding peptide
  MOD_RES (1), (2), (35): Xaa is C or S
  MOD_RES (16), (17), (18), (19), (20): Xaa is A or G
  MOD_RES (21), (22), (23), (24): Xaa is A or G or is absent

SEQ ID NO: 28027 - protein, 42 aa, Artificial Sequence
  GFR-binding peptide
  MOD_RES (6), (7), (39), (41): Xaa is C or S
TVPKPXXAPTQLSPISVLYIDDSSNVIYKQYENMVVRAXGXH

SEQ ID NO: 28028 - protein, 36 aa, Artificial Sequence; identical to SEQ ID NO: 6851
  GFR-binding peptide
  MOD_RES (1), (33), (35): Xaa is C or S

SEQ ID NO: 28029 - protein, 41 aa, Artificial Sequence
  GFR-binding peptide
  MOD_RES (6), (40): Xaa is C or S
  MOD_RES (20), (21), (22), (23), (24): Xaa is A or G
  MOD_RES (25), (26), (27), (28): Xaa is A or G or is absent
VTKPTXAPTKLEPISVLYLXXXXXXXXXKFKYENMVVRSXG

SEQ ID NO: 28030 - protein, 41 aa, Artificial Sequence
  GFR-binding peptide
  MOD_RES (3), (4), (38), (40): Xaa is C or S
  MOD_RES (18), (19), (20), (21), (22): Xaa is A or G
  MOD_RES (23), (24), (25), (26): Xaa is A or G or is absent
KAXXVPTELEPISMLYLXXXXXXXXXKFKYEDMVVEGXGXR

SEQ ID NO: 28031 - protein, 38 aa, Artificial Sequence
  GFR-binding peptide
  MOD_RES (4), (5), (38): Xaa is C or S
  MOD_RES (19), (20), (21), (22), (23): Xaa is A or G
  MOD_RES (24), (25), (26), (27): Xaa is A or G or is absent
AAPXXVPQALEPISILYLXXXXXXXXXKFKYEMIVRSX

SEQ ID NO: 28032 - protein, 33 aa, Artificial Sequence
  GFR-binding peptide
  MOD_RES (1), (1): Xaa is C or S
  MOD_RES (15), (16), (17), (18), (19): Xaa is A or G
  MOD_RES (20), (21), (22), (23): Xaa is A or G or is absent
XVPTELEPISMLYLXXXXXXXXXKFKYEEMVVE

SEQ ID NO: 28033 - protein, 40 aa, Artificial Sequence
  GFR-binding peptide
  MOD_RES (2), (3), (37), (39): Xaa is C or S
  MOD_RES (17), (18), (19), (20), (21): Xaa is A or G
  MOD_RES (22), (23), (24), (25): Xaa is A or G or is absent
AXXVPTKLSPISILYIXXXXXXXXXYKQYEGMAVSEXGXR

SEQ ID NO: 28034 - protein, 39 aa, Artificial Sequence; identical to SEQ ID NO: 6856
  GFR-binding peptide
  MOD_RES (3), (4), (38): Xaa is C or S
  MOD_RES (18), (19), (20), (21), (22): Xaa is A or G
  MOD_RES (23), (24), (25), (26): Xaa is A or G or is absent

SEQ ID NO: 28035 - protein, 33 aa, Artificial Sequence; identical to SEQ ID NO: 6857
  GFR-binding peptide
  MOD_RES (32), (32): Xaa is C or S

SEQ ID NO: 28036 - protein, 40 aa, Artificial Sequence
  GFR-binding peptide
  MOD_RES (5), (6), (38), (40): Xaa is C or S
VPKPXXAPTQLSPISVLYIDDSSNVIYKQYENMVVRAXGX

SEQ ID NO: 28037 - protein, 35 aa, Artificial Sequence; identical to SEQ ID NO: 6860
  GFR-binding peptide
  MOD_RES (3), (4), (35): Xaa is C or S

SEQ ID NO: 28038 - protein, 37 aa, Artificial Sequence
  GFR-binding peptide
  MOD_RES (2), (3), (35), (37): Xaa is C or S
AXXVPTKLSPISILYIDKGVVTYYKQYEGMAVSEXGX

SEQ ID NO: 28039 - protein, 39 aa, Artificial Sequence
  GFR-binding peptide
  MOD_RES (1), (2), (36), (38): Xaa is C or S
  MOD_RES (16), (17), (18), (19), (20): Xaa is A or G
  MOD_RES (21), (22), (23), (24): Xaa is A or G or is absent
XXVPTKLSPISILYIXXXXXXXXXYKQYEGMAVSEXGXR

SEQ ID NO: 28040 - protein, 36 aa, Artificial Sequence
  GFR-binding peptide
  MOD_RES (4), (5): Xaa is C or S
PKAXXAPTKLEPISVLYLDSSNNVIKFKYENMVVKA

SEQ ID NO: 28041 - protein, 37 aa, Artificial Sequence; identical to SEQ ID NO: 6863
  GFR-binding peptide
  MOD_RES (4), (5): Xaa is C or S
  MOD_RES (19), (20), (21), (22), (23): Xaa is A or G
  MOD_RES (24), (25), (26), (27): Xaa is A or G or is absent

SEQ ID NO: 28042 - protein, 34 aa, Artificial Sequence
  GFR-binding peptide
  MOD_RES (33), (33): Xaa is C or S
  MOD_RES (14), (15), (16), (17), (18): Xaa is A or G
  MOD_RES (19), (20), (21), (22): Xaa is A or G or is absent
VPQALEPISILYLXXXXXXXXXKFKYEMIVRSXK

SEQ ID NO: 28043 - protein, 32 aa, Artificial Sequence
  GFR-binding peptide
  MOD_RES (1), (2): Xaa is C or S
XXAPTKLEPISVLYLDSSNNVIKFKYENMVVK

SEQ ID NO: 28044 - protein, 39 aa, Artificial Sequence
  GFR-binding peptide
  MOD_RES (7), (39): Xaa is C or S
HVTKPTXAPTKLSPISVLYIDDSSNVIYKQYENMVVRSX

SEQ ID NO: 28045 - protein, 39 aa, Artificial Sequence
  GFR-binding peptide
  MOD_RES (5), (6): Xaa is C or S
  MOD_RES (20), (21), (22), (23), (24): Xaa is A or G
  MOD_RES (25), (26), (27), (28): Xaa is A or G or is absent
VPKPXXAPTKLSPISVLYIXXXXXXXXXYKQYENMVVRS

SEQ ID NO: 28046 - protein, 36 aa, Artificial Sequence
  GFR-binding peptide
  MOD_RES (5), (6): Xaa is C or S
SASPXXVPQDLEPISILYLVGRTPKVKFKYEMVVKS

SEQ ID NO: 28047 - protein, 40 aa, Artificial Sequence; identical to SEQ ID NO: 6869
  GFR-binding peptide
  MOD_RES (3), (4), (37), (39): Xaa is C or S
  MOD_RES (18), (19), (20), (21), (22): Xaa is A or G
  MOD_RES (23), (24), (25), (26): Xaa is A or G or is absent

SEQ ID NO: 28048 - protein, 35 aa, Artificial Sequence
  GFR-binding peptide
  MOD_RES (1), (2), (33), (35): Xaa is C or S
XXVPQALEPISILYLVGRKPKVKFKYEMIVRSXKX

SEQ ID NO: 28049 - protein, 36 aa, Artificial Sequence
  GFR-binding peptide
  MOD_RES (1), (2), (36): Xaa is C or S
  MOD_RES (16), (17), (18), (19), (20): Xaa is A or G
  MOD_RES (21), (22), (23), (24): Xaa is A or G or is absent
XXVPARLNAISILYFXXXXXXXXXLKKYRDMVVEAX

SEQ ID NO: 28050 - protein, 37 aa, Artificial Sequence
  GFR-binding peptide
  MOD_RES (4), (5): Xaa is C or S
  MOD_RES (19), (20), (21), (22), (23): Xaa is A or G
  MOD_RES (24), (25), (26), (27): Xaa is A or G or is absent
PKPXXAPTQLEPISVLYLXXXXXXXXXKFKYENMVVR

SEQ ID NO: 28051 - protein, 37 aa, Artificial Sequence
  GFR-binding peptide
  MOD_RES (6), (7): Xaa is C or S
ASAAPXXVPQALEPISILYLVGRKPKVKFKYEMIVRS

SEQ ID NO: 28052 - protein, 38 aa, Artificial Sequence
  GFR-binding peptide
  MOD_RES (2), (36), (38): Xaa is C or S
  MOD_RES (16), (17), (18), (19), (20): Xaa is A or G
  MOD_RES (21), (22), (23), (24): Xaa is A or G or is absent
TXAPTKLSPISVLYIXXXXXXXXXYKQYENMVVRSXGX

SEQ ID NO: 28053 - protein, 39 aa, Artificial Sequence
  GFR-binding peptide
  MOD_RES (6), (38): Xaa is C or S
VTKPTXAPTKLEPISVLYLDDSSNVIKFKYENMVVRSXG

SEQ ID NO: 28054 - protein, 36 aa, Artificial Sequence
  GFR-binding peptide
  MOD_RES (2), (3), (36): Xaa is C or S
  MOD_RES (17), (18), (19), (20), (21): Xaa is A or G
  MOD_RES (22), (23), (24), (25): Xaa is A or G or is absent
PXXVSQDLEPISILYLXXXXXXXXXKFKYEMIVKSX

SEQ ID NO: 28055 - protein, 33 aa, Artificial Sequence
  GFR-binding peptide
  MOD_RES (31), (33): Xaa is C or S
VPQALSPISILYIVGRKPKVYKQYEMIVRSXKX

SEQ ID NO: 28056 - protein, 36 aa, Artificial Sequence
  GFR-binding peptide
  MOD_RES (1), (33), (35): Xaa is C or S
XAPTQLSPISVLYIDDSSNVIYKQYENMVVRAXGXH

SEQ ID NO: 28057 - protein, 35 aa, Artificial Sequence
  GFR-binding peptide
  MOD_RES (34), (34): Xaa is C or S
  MOD_RES (14), (15), (16), (17), (18): Xaa is A or G
  MOD_RES (19), (20), (21), (22): Xaa is A or G or is absent
VPARLEPISILYLXXXXXXXXXKFKYEDMVVEAXG

SEQ ID NO: 28058 - protein, 41 aa, Artificial Sequence; identical to SEQ ID NO: 6880
  GFR-binding peptide
  MOD_RES (5), (6), (38), (40): Xaa is C or S

SEQ ID NO: 28059 - protein, 37 aa, Artificial Sequence
  GFR-binding peptide
  MOD_RES (2), (3), (35), (37): Xaa is C or S
SXXVPARLSPISILYKDAANNVVLKYHYDMVVEAXGX

SEQ ID NO: 28060 - protein, 32 aa, Artificial Sequence
  GFR-binding peptide
  MOD_RES (1), (1): Xaa is C or S
XVPTELSPISMLYIDENEKVVYKQYEDMVVEG

SEQ ID NO: 28061 - protein, 42 aa, Artificial Sequence
  GFR-binding peptide
  MOD_RES (5), (6), (39), (41): Xaa is C or S
VGKAXXVPTKLEPISVLYLDDMGVPTKFKYEEGMSVAEXGXR

SEQ ID NO: 28062 - protein, 35 aa, Artificial Sequence
  GFR-binding peptide
  MOD_RES (32), (34): Xaa is C or S
VPTKLSPISILYKDKGVVTYLKYHYGMAVSEXGXR

SEQ ID NO: 28063 - protein, 36 aa, Artificial Sequence; identical to SEQ ID NO: 6882
  GFR-binding peptide
  MOD_RES (2), (3), (36): Xaa is C or S
  MOD_RES (17), (18), (19), (20), (21): Xaa is A or G
  MOD_RES (22), (23), (24), (25): Xaa is A or G or is absent

SEQ ID NO: 28064 - protein, 38 aa, Artificial Sequence
  GFR-binding peptide
  MOD_RES (2), (3), (35), (37): Xaa is C or S
AXXVPTELEPISMLYLDENEKVVKFKYEDMVVEGXGXR

SEQ ID NO: 28065 - protein, 35 aa, Artificial Sequence; identical to SEQ ID NO: 6886
  GFR-binding peptide
  MOD_RES (3), (4): Xaa is C or S

SEQ ID NO: 28066 - protein, 35 aa, Artificial Sequence
  GFR-binding peptide
  MOD_RES (32), (34): Xaa is C or S
VPARLSPISILYKDAANNVVLKYHYDMVVEAXGXR

SEQ ID NO: 28067 - protein, 34 aa, Artificial Sequence
  GFR-binding peptide
  MOD_RES (2), (3), (34): Xaa is C or S
PXXVPQALEPISILYLVGRKPKVKFKYEMIVRSX

SEQ ID NO: 28068 - protein, 38 aa, Artificial Sequence
  GFR-binding peptide
  MOD_RES (3), (4), (35), (37): Xaa is C or S
APXXVPQALSPISILYIVGRKPKVYKQYEMIVRSXKXS

SEQ ID NO: 28069 - protein, 32 aa, Artificial Sequence
  GFR-binding peptide
  MOD_RES (1), (1): Xaa is C or S
XAPTKLSPISVLYIDDSSNVIYKQYENMVVRS

SEQ ID NO: 28070 - protein, 35 aa, Artificial Sequence; identical to SEQ ID NO: 6891
  GFR-binding peptide
  MOD_RES (1), (1): Xaa is C or S
  MOD_RES (15), (16), (17), (18), (19): Xaa is A or G
  MOD_RES (20), (21), (22), (23): Xaa is A or G or is absent

SEQ ID NO: 28071 - protein, 33 aa, Artificial Sequence
  GFR-binding peptide
  MOD_RES (1), (1): Xaa is C or S
  MOD_RES (15), (16), (17), (18), (19): Xaa is A or G
  MOD_RES (20), (21), (22), (23): Xaa is A or G or is absent
XVSQDLEPISILYLXXXXXXXXXKFKYEMIVKS

SEQ ID NO: 28072 - protein, 39 aa, Artificial Sequence
  GFR-binding peptide
  MOD_RES (6), (7): Xaa is C or S
KVGKAXXVPTKLEPISVLYLDDMGVPTKFKYEEGMSVAE

SEQ ID NO: 28073 - protein, 35 aa, Artificial Sequence; identical to SEQ ID NO: 6892
  GFR-binding peptide
  MOD_RES (1), (2): Xaa is C or S
  MOD_RES (16), (17), (18), (19), (20): Xaa is A or G
  MOD_RES (21), (22), (23), (24): Xaa is A or G or is absent

SEQ ID NO: 28074 - protein, 37 aa, Artificial Sequence
  GFR-binding peptide
  MOD_RES (1), (2), (36): Xaa is C or S
  MOD_RES (16), (17), (18), (19), (20): Xaa is A or G
  MOD_RES (21), (22), (23), (24): Xaa is A or G or is absent
XXVPTELEPISMLYLXXXXXXXXXKFKYEDMVVEGXG

SEQ ID NO: 28075 - protein, 38 aa, Artificial Sequence
  GFR-binding peptide
  MOD_RES (4), (5): Xaa is C or S
  MOD_RES (19), (20), (21), (22), (23): Xaa is A or G
  MOD_RES (24), (25), (26), (27): Xaa is A or G or is absent
PKAXXVPTELEPISMLYLXXXXXXXXXKFKYEEMVVEG

SEQ ID NO: 28076 - protein, 36 aa, Artificial Sequence
  GFR-binding peptide
  MOD_RES (1), (2), (35): Xaa is C or S
  MOD_RES (16), (17), (18), (19), (20): Xaa is A or G
  MOD_RES (21), (22), (23), (24): Xaa is A or G or is absent
XXVSQDLSPISILYIXXXXXXXXXYKQYEMIVKSXK

SEQ ID NO: 28077 - protein, 33 aa, Artificial Sequence
  GFR-binding peptide
  MOD_RES (1), (2): Xaa is C or S
XXVPTELSPISMLYIDEYDKVVYKQYEEMVVEG

SEQ ID NO: 28078 - protein, 37 aa, Artificial Sequence
  GFR-binding peptide
  MOD_RES (4), (5), (37): Xaa is C or S
SKAXXVPTKLSPISILYIDKGVVTYYKQYEGMAVSEX

SEQ ID NO: 28079 - protein, 39 aa, Artificial Sequence
  GFR-binding peptide
  MOD_RES (4), (5), (39): Xaa is C or S
  MOD_RES (19), (20), (21), (22), (23): Xaa is A or G
  MOD_RES (24), (25), (26), (27): Xaa is A or G or is absent
SKAXXVPTKLSPISILYIXXXXXXXXXYKQYEGMAVSEX

SEQ ID NO: 28080 - protein, 37 aa, Artificial Sequence
  GFR-binding peptide
  MOD_RES (3), (37): Xaa is C or S
  MOD_RES (17), (18), (19), (20), (21): Xaa is A or G
  MOD_RES (22), (23), (24), (25): Xaa is A or G or is absent
PTXAPTKLEPISVLYLXXXXXXXXXKFKYENMVVRSX

SEQ ID NO: 28081 - protein, 38 aa, Artificial Sequence; identical to SEQ ID NO: 6898
  GFR-binding peptide
  MOD_RES (2), (3), (36), (38): Xaa is C or S
  MOD_RES (17), (18), (19), (20), (21): Xaa is A or G
  MOD_RES (22), (23), (24), (25): Xaa is A or G or is absent

SEQ ID NO: 28082 - protein, 35 aa, Artificial Sequence
  GFR-binding peptide
  MOD_RES (3), (4): Xaa is C or S
ASXXVPARLNAISILYFDAANNVVLKKYRDMVVEA

SEQ ID NO: 28083 - protein, 37 aa, Artificial Sequence
  GFR-binding peptide
  MOD_RES (1), (2), (34), (36): Xaa is C or S
XXVPTKLSPISILYIDKGVVTYYKQYEGMAVSEXGXR

SEQ ID NO: 28084 - protein, 33 aa, Artificial Sequence; identical to SEQ ID NO: 6899
  GFR-binding peptide
  MOD_RES (1), (2): Xaa is C or S

SEQ ID NO: 28085 - protein, 38 aa, Artificial Sequence; identical to SEQ ID NO: 6900
  GFR-binding peptide
  MOD_RES (1), (2), (36), (38): Xaa is C or S
  MOD_RES (16), (17), (18), (19), (20): Xaa is A or G
  MOD_RES (21), (22), (23), (24): Xaa is A or G or is absent

SEQ ID NO: 28086 - protein, 37 aa, Artificial Sequence; identical to SEQ ID NO: 6901
  GFR-binding peptide
  MOD_RES (3), (4): Xaa is C or S
  MOD_RES (18), (19), (20), (21), (22): Xaa is A or G
  MOD_RES (23), (24), (25), (26): Xaa is A or G or is absent

SEQ ID NO: 28087 - protein, 40 aa, Artificial Sequence; identical to SEQ ID NO: 6902
  GFR-binding peptide
  MOD_RES (2), (3), (37), (39): Xaa is C or S
  MOD_RES (17), (18), (19), (20), (21): Xaa is A or G
  MOD_RES (22), (23), (24), (25): Xaa is A or G or is absent

SEQ ID NO: 28088 - protein, 33 aa, Artificial Sequence
  GFR-binding peptide
  MOD_RES (1), (2): Xaa is C or S
XXVPTELEPISMLYLDEYDKVVKFKYEEMVVEG

SEQ ID NO: 28089 - protein, 36 aa, Artificial Sequence
  GFR-binding peptide
  MOD_RES (2), (3), (35): Xaa is C or S
PXXAPTQLSPISVLYIDDSSNVIYKQYENMVVRAXG

SEQ ID NO: 28090 - protein, 37 aa, Artificial Sequence
  GFR-binding peptide
  MOD_RES (2), (3), (36): Xaa is C or S
  MOD_RES (17), (18), (19), (20), (21): Xaa is A or G
  MOD_RES (22), (23), (24), (25): Xaa is A or G or is absent
PXXVSQDLSPISILYIXXXXXXXXXYKQYEMIVKSXK

SEQ ID NO: 28091 - protein, 32 aa, Artificial Sequence; identical to SEQ ID NO: 6905
  GFR-binding peptide
  MOD_RES (14), (15), (16), (17), (18): Xaa is A or G
  MOD_RES (19), (20), (21), (22): Xaa is A or G or is absent

SEQ ID NO: 28092 - protein, 37 aa, Artificial Sequence; identical to SEQ ID NO: 6906
  GFR-binding peptide
  MOD_RES (4), (5): Xaa is C or S
  MOD_RES (19), (20), (21), (22), (23): Xaa is A or G
  MOD_RES (24), (25), (26), (27): Xaa is A or G or is absent

SEQ ID NO: 28093 - protein, 34 aa, Artificial Sequence
  GFR-binding peptide
  MOD_RES (1), (1): Xaa is C or S
  MOD_RES (15), (16), (17), (18), (19): Xaa is A or G
  MOD_RES (20), (21), (22), (23): Xaa is A or G or is absent
XVPTELEPISMLYLXXXXXXXXXKFKYEEMVVEG

SEQ ID NO: 28094 - protein, 42 aa, Artificial Sequence
  GFR-binding peptide
  MOD_RES (4), (5), (39), (41): Xaa is C or S
  MOD_RES (19), (20), (21), (22), (23): Xaa is A or G
  MOD_RES (24), (25), (26), (27): Xaa is A or G or is absent
PASXXVPARLSPISILYIXXXXXXXXXYKQYEDMVVEAXGXR

SEQ ID NO: 28095 - protein, 40 aa, Artificial Sequence; identical to SEQ ID NO: 6908
  GFR-binding peptide
  MOD_RES (6), (7), (39): Xaa is C or S

SEQ ID NO: 28096 - protein, 39 aa, Artificial Sequence; identical to SEQ ID NO: 6909
  GFR-binding peptide
  MOD_RES (6), (7), (38): Xaa is C or S

SEQ ID NO: 28097 - protein, 42 aa, Artificial Sequence
  GFR-binding peptide
  MOD_RES (6), (7), (39), (41): Xaa is C or S
TVPKPXXAPTQLEPISVLYLDDSSNVIKFKYENMVVRAXGXH

SEQ ID NO: 28098 - protein, 35 aa, Artificial Sequence
  GFR-binding peptide
  MOD_RES (1), (34): Xaa is C or S
  MOD_RES (15), (16), (17), (18), (19): Xaa is A or G
  MOD_RES (20), (21), (22), (23): Xaa is A or G or is absent
XVSQDLSPISILYIXXXXXXXXXYKQYEMIVKSXK

SEQ ID NO: 28099 - protein, 42 aa, Artificial Sequence
  GFR-binding peptide
  MOD_RES (6), (7), (39), (41): Xaa is C or S
AVPKAXXAPTKLEPISVLYLDSSNNVIKFKYENMVVKAXGXH

SEQ ID NO: 28100 - protein, 38 aa, Artificial Sequence
  GFR-binding peptide
  MOD_RES (3), (4), (37): Xaa is C or S
KAXXVPTKLSPISVLYIDDMGVPTYKQYEEGMSVAEXG

SEQ ID NO: 28101 - protein, 39 aa, Artificial Sequence; identical to SEQ ID NO: 6914
  GFR-binding peptide
  MOD_RES (6), (7), (39): Xaa is C or S

SEQ ID NO: 28102 - protein, 35 aa, Artificial Sequence; identical to SEQ ID NO: 6915
  GFR-binding peptide
  MOD_RES (34), (34): Xaa is C or S
  MOD_RES (14), (15), (16), (17), (18): Xaa is A or G
  MOD_RES (19), (20), (21), (22): Xaa is A or G or is absent

SEQ ID NO: 28103 - protein, 31 aa, Artificial Sequence; identical to SEQ ID NO: 6916
  GFR-binding peptide
  MOD_RES (1), (1): Xaa is C or S

SEQ ID NO: 28104 - protein, 41 aa, Artificial Sequence; identical to SEQ ID NO: 6917
  GFR-binding peptide
  MOD_RES (4), (5), (40): Xaa is C or S
  MOD_RES (19), (20), (21), (22), (23): Xaa is A or G
  MOD_RES (24), (25), (26), (27): Xaa is A or G or is absent

SEQ ID NO: 28105 - protein, 34 aa, Artificial Sequence; identical to SEQ ID NO: 6920
  GFR-binding peptide
  MOD_RES (1), (2): Xaa is C or S
  MOD_RES (16), (17), (18), (19), (20): Xaa is A or G
  MOD_RES (21), (22), (23), (24): Xaa is A or G or is absent

SEQ ID NO: 28106 - protein, 34 aa, Artificial Sequence
  GFR-binding peptide
  MOD_RES (33), (33): Xaa is C or S
  MOD_RES (14), (15), (16), (17), (18): Xaa is A or G
  MOD_RES (19), (20), (21), (22): Xaa is A or G or is absent
VSQDLSPISILYIXXXXXXXXXYKQYEMIVKSXK

SEQ ID NO: 28107 - protein, 39 aa, Artificial Sequence
  GFR-binding peptide
  MOD_RES (6), (7): Xaa is C or S
  MOD_RES (21), (22), (23), (24), (25): Xaa is A or G
  MOD_RES (26), (27), (28), (29): Xaa is A or G or is absent
AVPKAXXAPTKLEPISVLYLXXXXXXXXXKFKYENMVVK

SEQ ID NO: 28108 - protein, 35 aa, Artificial Sequence
  GFR-binding peptide
  MOD_RES (32), (34): Xaa is C or S
APTQLSPISVLYIDDSSNVIYKQYENMVVRAXGXH

SEQ ID NO: 28109 - protein, 35 aa, Artificial Sequence; identical to SEQ ID NO: 6927
  GFR-binding peptide
  MOD_RES (4), (5): Xaa is C or S

SEQ ID NO: 28110 - protein, 43 aa, Artificial Sequence
  GFR-binding peptide
  MOD_RES (5), (6), (40), (42): Xaa is C or S
  MOD_RES (20), (21), (22), (23), (24): Xaa is A or G
  MOD_RES (25), (26), (27), (28): Xaa is A or G or is absent
APASXXVPARLSPISILYKXXXXXXXXXLKYHYDMVVEAXGXR

SEQ ID NO: 28111 - protein, 34 aa, Artificial Sequence
  GFR-binding peptide
  MOD_RES (1), (2), (34): Xaa is C or S
XXAPTKLEPISVLYLDDSSNVIKFKYENMVVRSX

SEQ ID NO: 28112 - protein, 38 aa, Artificial Sequence
  GFR-binding peptide
  MOD_RES (4), (5): Xaa is C or S
  MOD_RES (19), (20), (21), (22), (23): Xaa is A or G
  MOD_RES (24), (25), (26), (27): Xaa is A or G or is absent
SKAXXVPTKLEPISILYLXXXXXXXXXKFKYEGMAVSE

SEQ ID NO: 28113 - protein, 40 aa, Artificial Sequence
  GFR-binding peptide
  MOD_RES (4), (5), (37), (39): Xaa is C or S
PASXXVPARLEPISILYLDAANNVVKFKYEDMVVEAXGXR

SEQ ID NO: 28114 - protein, 34 aa, Artificial Sequence; identical to SEQ ID NO: 6929
  GFR-binding peptide
  MOD_RES (2), (3), (34): Xaa is C or S

SEQ ID NO: 28115 - protein, 38 aa, Artificial Sequence; identical to SEQ ID NO: 6930
  GFR-binding peptide
  MOD_RES (6), (7), (38): Xaa is C or S

SEQ ID NO: 28116 - protein, 40 aa, Artificial Sequence
  GFR-binding peptide
  MOD_RES (6), (7), (39): Xaa is C or S
SIPKAXXVPTELSPISMLYIDEYDKVVYKQYEEMVVEGXG

SEQ ID NO: 28117 - protein, 36 aa, Artificial Sequence
  GFR-binding peptide
  MOD_RES (1), (2), (36): Xaa is C or S
  MOD_RES (16), (17), (18), (19), (20): Xaa is A or G
  MOD_RES (21), (22), (23), (24): Xaa is A or G or is absent
XXVPTKLSPISILYIXXXXXXXXXYKQYEGMAVSEX

SEQ ID NO: 28118 - protein, 40 aa, Artificial Sequence; identical to SEQ ID NO: 6937
  GFR-binding peptide
  MOD_RES (4), (5), (39): Xaa is C or S
  MOD_RES (19), (20), (21), (22), (23): Xaa is A or G
  MOD_RES (24), (25), (26), (27): Xaa is A or G or is absent

SEQ ID NO: 28119 - protein, 38 aa, Artificial Sequence
  GFR-binding peptide
  MOD_RES (2), (3), (35), (37): Xaa is C or S
AXXVPTELSPISMLYIDENEKVVYKQYEDMVVEGXGXR

SEQ ID NO: 28120 - protein, 32 aa, Artificial Sequence; identical to SEQ ID NO: 6938
  GFR-binding peptide
  MOD_RES (14), (15), (16), (17), (18): Xaa is A or G
  MOD_RES (19), (20), (21), (22): Xaa is A or G or is absent

SEQ ID NO: 28121 - protein, 40 aa, Artificial Sequence
  GFR-binding peptide
  MOD_RES (6), (7), (40): Xaa is C or S
KVGKAXXVPTKLEPISVLYLDDMGVPTKFKYEEGMSVAEX

SEQ ID NO: 28122 - protein, 39 aa, Artificial Sequence; identical to SEQ ID NO: 6939
  GFR-binding peptide
  MOD_RES (4), (5), (38): Xaa is C or S
  MOD_RES (19), (20), (21), (22), (23): Xaa is A or G
  MOD_RES (24), (25), (26), (27): Xaa is A or G or is absent

SEQ ID NO: 28123 - protein, 39 aa, Artificial Sequence
  GFR-binding peptide
  MOD_RES (3), (4), (36), (38): Xaa is C or S
KAXXVPTKLSPISILYKDKGVVTYLKYHYGMAVSEXGXR

SEQ ID NO: 28124 - protein, 38 aa, Artificial Sequence
  GFR-binding peptide
  MOD_RES (1), (2), (37): Xaa is C or S
  MOD_RES (16), (17), (18), (19), (20): Xaa is A or G
  MOD_RES (21), (22), (23), (24): Xaa is A or G or is absent
XXVPTKLEPISVLYLXXXXXXXXXKFKYEEGMSVAEXG

SEQ ID NO: 28125 - protein, 37 aa, Artificial Sequence; identical to SEQ ID NO: 6941
  GFR-binding peptide
  MOD_RES (2), (3), (35), (37): Xaa is C or S

SEQ ID NO: 28126 - protein, 38 aa, Artificial Sequence
  GFR-binding peptide
  MOD_RES (3), (4), (37): Xaa is C or S
  MOD_RES (18), (19), (20), (21), (22): Xaa is A or G
  MOD_RES (23), (24), (25), (26): Xaa is A or G or is absent
SPXXVPQDLEPISILYLXXXXXXXXXKFKYEMVVKSXK

SEQ ID NO: 28127 - protein, 32 aa, Artificial Sequence
  GFR-binding peptide
  MOD_RES (1), (1): Xaa is C or S
XAPTKLEPISVLYLDDSSNVIKFKYENMVVRS

SEQ ID NO: 28128 - protein, 38 aa, Artificial Sequence
  GFR-binding peptide
  MOD_RES (6), (7): Xaa is C or S
AVPKAXXAPTKLSPISVLYIDSSNNVIYKQYENMVVKA

SEQ ID NO: 28129 - protein, 36 aa, Artificial Sequence
  GFR-binding peptide
  MOD_RES (2), (3), (35): Xaa is C or S
AXXVPTELEPISMLYLDEYDKVVKFKYEEMVVEGXG

SEQ ID NO: 28130 - protein, 37 aa, Artificial Sequence
  GFR-binding peptide
  MOD_RES (1), (2), (36): Xaa is C or S
  MOD_RES (16), (17), (18), (19), (20): Xaa is A or G
  MOD_RES (21), (22), (23), (24): Xaa is A or G or is absent
XXAPTKLSPISVLYIXXXXXXXXXYKQYENMVVKAXG

SEQ ID NO: 28131 - protein, 37 aa, Artificial Sequence
  GFR-binding peptide
  MOD_RES (4), (5): Xaa is C or S
  MOD_RES (19), (20), (21), (22), (23): Xaa is A or G
  MOD_RES (24), (25), (26), (27): Xaa is A or G or is absent
PASXXVPARLSPISILYKXXXXXXXXXLKYHYDMVVE

SEQ ID NO: 28132 - protein, 40 aa, Artificial Sequence
  GFR-binding peptide
  MOD_RES (4), (5), (39): Xaa is C or S
  MOD_RES (19), (20), (21), (22), (23): Xaa is A or G
  MOD_RES (24), (25), (26), (27): Xaa is A or G or is absent
PKAXXVPTELSPISMLYIXXXXXXXXXYKQYEEMVVEGXG

SEQ ID NO: 28133 - protein, 38 aa, Artificial Sequence
  GFR-binding peptide
  MOD_RES (4), (5), (38): Xaa is C or S
  MOD_RES (19), (20), (21), (22), (23): Xaa is A or G
  MOD_RES (24), (25), (26), (27): Xaa is A or G or is absent
ASPXXVPQDLEPISILYLXXXXXXXXXKFKYEMVVKSX

SEQ ID NO: 28134 - protein, 36 aa, Artificial Sequence; identical to SEQ ID NO: 6949
  GFR-binding peptide
  MOD_RES (4), (5): Xaa is C or S

SEQ ID NO: 28135 - protein, 40 aa, Artificial Sequence
  GFR-binding peptide
  MOD_RES (6), (7), (38), (40): Xaa is C or S
ASASPXXVPQDLSPISILYIVGRTPKVYKQYEMVVKSXKX

SEQ ID NO: 28136 - protein, 34 aa, Artificial Sequence
  GFR-binding peptide
  MOD_RES (14), (15), (16), (17), (18): Xaa is A or G
  MOD_RES (19), (20), (21), (22): Xaa is A or G or is absent
VPTKLEPISVLYLXXXXXXXXXKFKYEEGMSVAE

SEQ ID NO: 28137 - protein, 35 aa, Artificial Sequence; identical to SEQ ID NO: 6950
  GFR-binding peptide
  MOD_RES (33), (35): Xaa is C or S
  MOD_RES (14), (15), (16), (17), (18): Xaa is A or G
  MOD_RES (19), (20), (21), (22): Xaa is A or G or is absent

SEQ ID NO: 28138 - protein, 34 aa, Artificial Sequence; identical to SEQ ID NO: 6956
  GFR-binding peptide
  MOD_RES (3), (4): Xaa is C or S

SEQ ID NO: 28139 - protein, 37 aa, Artificial Sequence; identical to SEQ ID NO: 6957
  GFR-binding peptide
  MOD_RES (4), (5): Xaa is C or S
  MOD_RES (19), (20), (21), (22), (23): Xaa is A or G
  MOD_RES (24), (25), (26), (27): Xaa is A or G or is absent

SEQ ID NO: 28140 - protein, 37 aa, Artificial Sequence
  GFR-binding peptide
  MOD_RES (4), (5), (37): Xaa is C or S
PKAXXVPTELEPISMLYLDEYDKVVKFKYEEMVVEGX

SEQ ID NO: 28141 - protein, 34 aa, Artificial Sequence; identical to SEQ ID NO: 6959
  GFR-binding peptide
  MOD_RES (3), (3): Xaa is C or S

SEQ ID NO: 28142 - protein, 37 aa, Artificial Sequence; identical to SEQ ID NO: 6961
  GFR-binding peptide
  MOD_RES (1), (34), (36): Xaa is C or S
  MOD_RES (15), (16), (17), (18), (19): Xaa is A or G
  MOD_RES (20), (21), (22), (23): Xaa is A or G or is absent

SEQ ID NO: 28143 - protein, 36 aa, Artificial Sequence
  GFR-binding peptide
  MOD_RES (5), (6): Xaa is C or S
VPKPXXAPTKLEPISVLYLDDSSNVIKFKYENMVVR

SEQ ID NO: 28144 - protein, 38 aa, Artificial Sequence; identical to SEQ ID NO: 6963
  GFR-binding peptide
  MOD_RES (4), (5), (38): Xaa is C or S
  MOD_RES (19), (20), (21), (22), (23): Xaa is A or G
  MOD_RES (24), (25), (26), (27): Xaa is A or G or is absent

SEQ ID NO: 28145 - protein, 36 aa, Artificial Sequence
  GFR-binding peptide
  MOD_RES (1), (2), (33), (35): Xaa is C or S
XXVPQDLSPISILYIVGRTPKVYKQYEMVVKSXKXS

SEQ ID NO: 28146 - protein, 43 aa, Artificial Sequence
  GFR-binding peptide
  MOD_RES (6), (7), (41), (43): Xaa is C or S
  MOD_RES (21), (22), (23), (24), (25): Xaa is A or G
  MOD_RES (26), (27), (28), (29): Xaa is A or G or is absent
SIPKAXXVPTELEPISMLYLXXXXXXXXXKFKYEEMVVEGXGX

SEQ ID NO: 28147 - protein, 41 aa, Artificial Sequence; identical to SEQ ID NO: 6964
  GFR-binding peptide
  MOD_RES (6), (40): Xaa is C or S
  MOD_RES (20), (21), (22), (23), (24): Xaa is A or G
  MOD_RES (25), (26), (27), (28): Xaa is A or G or is absent

SEQ ID NO: 28148 - protein, 35 aa, Artificial Sequence
  GFR-binding peptide
  MOD_RES (34), (34): Xaa is C or S
  MOD_RES (14), (15), (16), (17), (18): Xaa is A or G
  MOD_RES (19), (20), (21), (22): Xaa is A or G or is absent
APTKLSPISVLYIXXXXXXXXXYKQYENMVVRSXG

SEQ ID NO: 28149 - protein, 40 aa, Artificial Sequence; identical to SEQ ID NO: 6967
  GFR-binding peptide
  MOD_RES (4), (5), (38), (40): Xaa is C or S
  MOD_RES (19), (20), (21), (22), (23): Xaa is A or G
  MOD_RES (24), (25), (26), (27): Xaa is A or G or is absent

SEQ ID NO: 28150 - protein, 37 aa, Artificial Sequence; identical to SEQ ID NO: 6968
  GFR-binding peptide
  MOD_RES (3), (4), (36): Xaa is C or S

SEQ ID NO: 28151 - protein, 38 aa, Artificial Sequence
  GFR-binding peptide
  MOD_RES (2), (3), (35), (37): Xaa is C or S
AXXVPTKLSPISILYIDKGVVTYYKQYEGMAVSEXGXR

SEQ ID NO: 28152 - protein, 35 aa, Artificial Sequence
  GFR-binding peptide
  MOD_RES (1), (2), (33), (35): Xaa is C or S
XXVPQALSPISILYIVGRKPKVYKQYEMIVRSXKX

SEQ ID NO: 28153 - protein, 34 aa, Artificial Sequence
  GFR-binding peptide
  MOD_RES (1), (32), (34): Xaa is C or S
XVPQALSPISILYIVGRKPKVYKQYEMIVRSXKX

SEQ ID NO: 28154 - protein, 45 aa, Artificial Sequence
  GFR-binding peptide
  MOD_RES (6), (7), (42), (44): Xaa is C or S
  MOD_RES (21), (22), (23), (24), (25): Xaa is A or G
  MOD_RES (26), (27), (28), (29): Xaa is A or G or is absent
KVGKAXXVPTKLSPISVLYIXXXXXXXXXYKQYEEGMSVAEXGXR

SEQ ID NO: 28155 - protein, 38 aa, Artificial Sequence; identical to SEQ ID NO: 6975
  GFR-binding peptide
  MOD_RES (4), (5): Xaa is C or S
  MOD_RES (19), (20), (21), (22), (23): Xaa is A or G
  MOD_RES (24), (25), (26), (27): Xaa is A or G or is absent

SEQ ID NO: 28156 - protein, 40 aa, Artificial Sequence
  GFR-binding peptide
  MOD_RES (5), (6), (39): Xaa is C or S
VGKAXXVPTKLSPISVLYIDDMGVPTYKQYEEGMSVAEXG

SEQ ID NO: 28157 - protein, 34 aa, Artificial Sequence
  GFR-binding peptide
  MOD_RES (2), (3), (34): Xaa is C or S
PXXVSQDLSPISILYIIGKTPKIYKQYEMIVKSX

SEQ ID NO: 28158 - protein, 41 aa, Artificial Sequence
  GFR-binding peptide
  MOD_RES (4), (5), (39), (41): Xaa is C or S
  MOD_RES (19), (20), (21), (22), (23): Xaa is A or G
  MOD_RES (24), (25), (26), (27): Xaa is A or G or is absent
PASXXVPARLSPISILYIXXXXXXXXXYKQYEDMVVEAXGX

SEQ ID NO: 28159 - protein, 38 aa, Artificial Sequence; identical to SEQ ID NO: 6977
  GFR-binding peptide
  MOD_RES (5), (6), (37): Xaa is C or S

SEQ ID NO: 28160 - protein, 37 aa, Artificial Sequence
  GFR-binding peptide
  MOD_RES (4), (5): Xaa is C or S
  MOD_RES (19), (20), (21), (22), (23): Xaa is A or G
  MOD_RES (24), (25), (26), (27): Xaa is A or G or is absent
PKAXXAPTKLEPISVLYLXXXXXXXXXKFKYENMVVK

SEQ ID NO: 28161 - protein, 38 aa, Artificial Sequence
  GFR-binding peptide
  MOD_RES (4), (5), (37): Xaa is C or S
PKAXXVPTELSPISMLYIDEYDKVVYKQYEEMVVEGXG

SEQ ID NO: 28162 - protein, 31 aa, Artificial Sequence; identical to SEQ ID NO: 6986
  GFR-binding peptide
  MOD_RES (1), (1): Xaa is C or S

SEQ ID NO: 28163 - protein, 40 aa, Artificial Sequence
  GFR-binding peptide
  MOD_RES (6), (7): Xaa is C or S
  MOD_RES (21), (22), (23), (24), (25): Xaa is A or G
  MOD_RES (26), (27), (28), (29): Xaa is A or G or is absent
AAPASXXVPARLNAISILYFXXXXXXXXXLKKYRDMVVEA

SEQ ID NO: 28164 - protein, 38 aa, Artificial Sequence
  GFR-binding peptide
  MOD_RES (4), (5), (36), (38): Xaa is C or S
ASPXXVPQDLEPISILYLVGRTPKVKFKYEMVVKSXKX

SEQ ID NO: 28165 - protein, 37 aa, Artificial Sequence
  GFR-binding peptide
  MOD_RES (34), (36): Xaa is C or S
  MOD_RES (14), (15), (16), (17), (18): Xaa is A or G
  MOD_RES (19), (20), (21), (22): Xaa is A or G or is absent
APTQLSPISVLYIXXXXXXXXXYKQYENMVVRAXGXH

SEQ ID NO: 28166 - protein, 33 aa, Artificial Sequence
  GFR-binding peptide
  MOD_RES (32), (32): Xaa is C or S
APTKLEPISVLYLDDSSNVIKFKYENMVVRSXG

SEQ ID NO: 28167 - protein, 38 aa, Artificial Sequence; identical to SEQ ID NO: 6988
  GFR-binding peptide
  MOD_RES (1), (35), (37): Xaa is C or S
  MOD_RES (15), (16), (17), (18), (19): Xaa is A or G
  MOD_RES (20), (21), (22), (23): Xaa is A or G or is absent

SEQ ID NO: 28168 - protein, 38 aa, Artificial Sequence; identical to SEQ ID NO: 6989
  GFR-binding peptide
  MOD_RES (4), (5), (37): Xaa is C or S

SEQ ID NO: 28169 - protein, 38 aa, Artificial Sequence; identical to SEQ ID NO: 6990
  GFR-binding peptide
  MOD_RES (1), (2), (36), (38): Xaa is C or S
  MOD_RES (16), (17), (18), (19), (20): Xaa is A or G
  MOD_RES (21), (22), (23), (24): Xaa is A or G or is absent

SEQ ID NO: 28170 - protein, 40 aa, Artificial Sequence
  GFR-binding peptide
  MOD_RES (4), (5), (39): Xaa is C or S
  MOD_RES (19), (20), (21), (22), (23): Xaa is A or G
  MOD_RES (24), (25), (26), (27): Xaa is A or G or is absent
PASXXVPARLSPISILYKXXXXXXXXXLKYHYDMVVEAXG

SEQ ID NO: 28171 - protein, 38 aa, Artificial Sequence; identical to SEQ ID NO: 6992
  GFR-binding peptide
  MOD_RES (6), (7), (38): Xaa is C or S

SEQ ID NO: 28172 - protein, 38 aa, Artificial Sequence; identical to SEQ ID NO: 6994
  GFR-binding peptide
  MOD_RES (3), (4), (37): Xaa is C or S
  MOD_RES (18), (19), (20), (21), (22): Xaa is A or G
  MOD_RES (23), (24), (25), (26): Xaa is A or G or is absent

SEQ ID NO: 28173 - protein, 37 aa, Artificial Sequence
  GFR-binding peptide
  MOD_RES (2), (3), (37): Xaa is C or S
  MOD_RES (17), (18), (19), (20), (21): Xaa is A or G
  MOD_RES (22), (23), (24), (25): Xaa is A or G or is absent
AXXVPTKLEPISILYLXXXXXXXXXKFKYEGMAVSEX

SEQ ID NO: 28174 - protein, 36 aa, Artificial Sequence; identical to SEQ ID NO: 6996
  GFR-binding peptide
  MOD_RES (34), (36): Xaa is C or S
  MOD_RES (14), (15), (16), (17), (18): Xaa is A or G
  MOD_RES (19), (20), (21), (22): Xaa is A or G or is absent

SEQ ID NO: 28175 - protein, 37 aa, Artificial Sequence
  GFR-binding peptide
  MOD_RES (1), (2), (35), (37): Xaa is C or S
XXVPTKLSPISVLYIDDMGVPTYKQYEEGMSVAEXGX

SEQ ID NO: 28176 - protein, 37 aa, Artificial Sequence; identical to SEQ ID NO: 6999
  GFR-binding peptide
  MOD_RES (4), (5): Xaa is C or S
  MOD_RES (19), (20), (21), (22), (23): Xaa is A or G
  MOD_RES (24), (25), (26), (27): Xaa is A or G or is absent

SEQ ID NO: 28177 - protein, 37 aa, Artificial Sequence
  GFR-binding peptide
  MOD_RES (1), (2), (35), (37): Xaa is C or S
XXVPTKLEPISVLYLDDMGVPTKFKYEEGMSVAEXGX

SEQ ID NO: 28178 - protein, 38 aa, Artificial Sequence
  GFR-binding peptide
  MOD_RES (2), (3), (37): Xaa is C or S
  MOD_RES (17), (18), (19), (20), (21): Xaa is A or G
  MOD_RES (22), (23), (24), (25): Xaa is A or G or is absent
AXXAPTKLSPISVLYIXXXXXXXXXYKQYENMVVKAXG

SEQ ID NO: 28179 - protein, 35 aa, Artificial Sequence
  GFR-binding peptide
  MOD_RES (1), (2), (34): Xaa is C or S
XXVPTELSPISMLYIDENEKVVYKQYEDMVVEGXG

SEQ ID NO: 28180 - protein, 38 aa, Artificial Sequence
  GFR-binding peptide
  MOD_RES (2), (3), (37): Xaa is C or S
  MOD_RES (17), (18), (19), (20), (21): Xaa is A or G
  MOD_RES (22), (23), (24), (25): Xaa is A or G or is absent
AXXVPTELEPISMLYLXXXXXXXXXKFKYEDMVVEGXG

SEQ ID NO: 28181 - protein, 38 aa, Artificial Sequence
  GFR-binding peptide
  MOD_RES (5), (6): Xaa is C or S
  MOD_RES (20), (21), (22), (23), (24): Xaa is A or G
  MOD_RES (25), (26), (27), (28): Xaa is A or G or is absent
SASPXXVPQDLSPISILYIXXXXXXXXXYKQYEMVVKS

SEQ ID NO: 28182 - protein, 39 aa, Artificial Sequence
  GFR-binding peptide
  MOD_RES (6), (7): Xaa is C or S
  MOD_RES (21), (22), (23), (24), (25): Xaa is A or G
  MOD_RES (26), (27), (28), (29): Xaa is A or G or is absent
SIPKAXXVPTELSPISMLYIXXXXXXXXXYKQYEEMVVE

SEQ ID NO: 28183 - protein, 36 aa, Artificial Sequence
  GFR-binding peptide
  MOD_RES (33), (35): Xaa is C or S
  MOD_RES (14), (15), (16), (17), (18): Xaa is A or G
  MOD_RES (19), (20), (21), (22): Xaa is A or G or is absent
VSQDLSPISILYIXXXXXXXXXYKQYEMIVKSXKXS

SEQ ID NO: 28184 - protein, 37 aa, Artificial Sequence; identical to SEQ ID NO: 7005
  GFR-binding peptide
  MOD_RES (2), (34), (36): Xaa is C or S

SEQ ID NO: 28185 - protein, 35 aa, Artificial Sequence; identical to SEQ ID NO: 7006
  GFR-binding peptide
  MOD_RES (33), (35): Xaa is C or S
  MOD_RES (14), (15), (16), (17), (18): Xaa is A or G
  MOD_RES (19), (20), (21), (22): Xaa is A or G or is absent

SEQ ID NO: 28186 - protein, 36 aa, Artificial Sequence; identical to SEQ ID NO: 7007
  GFR-binding peptide
  MOD_RES (1), (2), (33), (35): Xaa is C or S

SEQ ID NO: 28187 - protein, 32 aa, Artificial Sequence
  GFR-binding peptide
  MOD_RES (1), (1): Xaa is C or S
XAPTQLEPISVLYLDDSSNVIKFKYENMVVRA

SEQ ID NO: 28188 - protein, 40 aa, Artificial Sequence; identical to SEQ ID NO: 7008
  GFR-binding peptide
  MOD_RES (3), (4), (37), (39): Xaa is C or S

SEQ ID NO: 28189 - protein, 37 aa, Artificial Sequence
  GFR-binding peptide
  MOD_RES (4), (5), (36): Xaa is C or S
ASPXXVPQDLEPISILYLVGRTPKVKFKYEMVVKSXK

SEQ ID NO: 28190 - protein, 33 aa, Artificial Sequence; identical to SEQ ID NO: 7009
  GFR-binding peptide
  MOD_RES (1), (32): Xaa is C or S

SEQ ID NO: 28191 - protein, 34 aa, Artificial Sequence
  GFR-binding peptide
  MOD_RES (1), (2), (34): Xaa is C or S
XXVPTKLSPISILYKDKGVVTYLKYHYGMAVSEX

SEQ ID NO: 28192 - protein, 40 aa, Artificial Sequence
  GFR-binding peptide
  MOD_RES (5), (6), (37), (39): Xaa is C or S
SAAPXXVPQALSPISILYIVGRKPKVYKQYEMIVRSXKXS

SEQ ID NO: 28193 - protein, 34 aa, Artificial Sequence; identical to SEQ ID NO: 7016
  GFR-binding peptide
  MOD_RES (1), (33): Xaa is C or S

SEQ ID NO: 28194 - protein, 37 aa, Artificial Sequence; identical to SEQ ID NO: 7017
  GFR-binding peptide
  MOD_RES (1), (2), (34), (36): Xaa is C or S

SEQ ID NO: 28195 - protein, 36 aa, Artificial Sequence; identical to SEQ ID NO: 7018
  GFR-binding peptide
  MOD_RES (2), (3), (36): Xaa is C or S

SEQ ID NO: 28196 - protein, 39 aa, Artificial Sequence
  GFR-binding peptide
  MOD_RES (5), (6), (37), (39): Xaa is C or S
SASPXXVSQDLSPISILYIIGKTPKIYKQYEMIVKSXKX

SEQ ID NO: 28197 - protein, 34 aa, Artificial Sequence
  GFR-binding peptide
  MOD_RES (1), (33): Xaa is C or S
XVPARLNAISILYFDAANNVVLKKYRDMVVEAXG

SEQ ID NO: 28198 - protein, 38 aa, Artificial Sequence
  GFR-binding peptide
  MOD_RES (5), (6), (38): Xaa is C or S
IPKAXXVPTELSPISMLYIDEYDKVVYKQYEEMVVEGX

SEQ ID NO: 28199 - protein, 34 aa, Artificial Sequence; identical to SEQ ID NO: 7020
  GFR-binding peptide
  MOD_RES (34), (34): Xaa is C or S
  MOD_RES (14), (15), (16), (17), (18): Xaa is A or G
  MOD_RES (19), (20), (21), (22): Xaa is A or G or is absent

SEQ ID NO: 28200 - protein, 36 aa, Artificial Sequence; identical to SEQ ID NO: 7022
  GFR-binding peptide
  MOD_RES (34), (36): Xaa is C or S
  MOD_RES (14), (15), (16), (17), (18): Xaa is A or G
  MOD_RES (19), (20), (21), (22): Xaa is A or G or is absent

SEQ ID NO: 28201 - protein, 36 aa, Artificial Sequence; identical to SEQ ID NO: 7024
  GFR-binding peptide
  MOD_RES (2), (3): Xaa is C or S
  MOD_RES (17), (18), (19), (20), (21): Xaa is A or G
  MOD_RES (22), (23), (24), (25): Xaa is A or G or is absent

SEQ ID NO: 28202 - protein, 36 aa, Artificial Sequence; identical to SEQ ID NO: 7025
  GFR-binding peptide
  MOD_RES (1), (2), (34), (36): Xaa is C or S

SEQ ID NO: 28203 - protein, 42 aa, Artificial Sequence; identical to SEQ ID NO: 7026
  GFR-binding peptide
  MOD_RES (4), (5), (39), (41): Xaa is C or S
  MOD_RES (19), (20), (21), (22), (23): Xaa is A or G
  MOD_RES (24), (25), (26), (27): Xaa is A or G or is absent

SEQ ID NO: 28204 - protein, 41 aa, Artificial Sequence; identical to SEQ ID NO: 7031
  GFR-binding peptide
  MOD_RES (5), (6), (39), (41): Xaa is C or S
  MOD_RES (20), (21), (22), (23), (24): Xaa is A or G
  MOD_RES (25), (26), (27), (28): Xaa is A or G or is absent

SEQ ID NO: 28205 - protein, 34 aa, Artificial Sequence
  GFR-binding peptide
  MOD_RES (32), (34): Xaa is C or S
VPTELEPISMLYLDEYDKVVKFKYEEMVVEGXGX

SEQ ID NO: 28206 - protein, 33 aa, Artificial Sequence
  GFR-binding peptide
  MOD_RES (1), (33): Xaa is C or S
XAPTKLSPISVLYIDDSSNVIYKQYENMVVRSX

SEQ ID NO: 28207 - protein, 34 aa, Artificial Sequence
  GFR-binding peptide
  MOD_RES (32), (34): Xaa is C or S
VPARLSPISILYKDAANNVVLKYHYDMVVEAXGX

SEQ ID NO: 28208 - protein, 38 aa, Artificial Sequence; identical to SEQ ID NO: 7035
  GFR-binding peptide
  MOD_RES (1), (2), (37): Xaa is C or S
  MOD_RES (16), (17), (18), (19), (20): Xaa is A or G
  MOD_RES (21), (22), (23), (24): Xaa is A or G or is absent

SEQ ID NO: 28209 - protein, 34 aa, Artificial Sequence; identical to SEQ ID NO: 7036
  GFR-binding peptide
  MOD_RES (33), (33): Xaa is C or S
  MOD_RES (14), (15), (16), (17), (18): Xaa is A or G
  MOD_RES (19), (20), (21), (22): Xaa is A or G or is absent

SEQ ID NO: 28210 - protein, 35 aa, Artificial Sequence
  GFR-binding peptide
  MOD_RES (2), (3), (34): Xaa is C or S
PXXVPQALSPISILYIVGRKPKVYKQYEMIVRSXK

SEQ ID NO: 28211 - protein, 36 aa, Artificial Sequence; identical to SEQ ID NO: 7038
  GFR-binding peptide
  MOD_RES (3), (4), (35): Xaa is C or S

SEQ ID NO: 28212 - protein, 38 aa, Artificial Sequence; identical to SEQ ID NO: 7039
  GFR-binding peptide
  MOD_RES (5), (6): Xaa is C or S

SEQ ID NO: 28213 - protein, 39 aa, Artificial Sequence
  GFR-binding peptide
  MOD_RES (4), (5), (37), (39): Xaa is C or S
PKPXXAPTKLSPISVLYIDDSSNVIYKQYENMVVRSXGX

SEQ ID NO: 28214 - protein, 32 aa, Artificial Sequence
  GFR-binding peptide
  MOD_RES (1), (2): Xaa is C or S
XXVPTELEPISMLYLDEYDKVVKFKYEEMVVE

SEQ ID NO: 28215 - protein, 38 aa, Artificial Sequence
  GFR-binding peptide
  MOD_RES (1), (35), (37): Xaa is C or S
  MOD_RES (15), (16), (17), (18), (19): Xaa is A or G
  MOD_RES (20), (21), (22), (23): Xaa is A or G or is absent
XVPARLSPISILYIXXXXXXXXXYKQYEDMVVEAXGXR

SEQ ID NO: 28216 - protein, 40 aa, Artificial Sequence; identical to SEQ ID NO: 7041
  GFR-binding peptide
  MOD_RES (4), (5), (37), (39): Xaa is C or S

SEQ ID NO: 28217 - protein, 39 aa, Artificial Sequence; identical to SEQ ID NO: 7043
  GFR-binding peptide
  MOD_RES (5), (6): Xaa is C or S
  MOD_RES (20), (21), (22), (23), (24): Xaa is A or G
  MOD_RES (25), (26), (27), (28): Xaa is A or G or is absent

SEQ ID NO: 28218 - protein, 34 aa, Artificial Sequence; identical to SEQ ID NO: 7044
  GFR-binding peptide
  MOD_RES (1), (2): Xaa is C or S
  MOD_RES (16), (17), (18), (19), (20): Xaa is A or G
  MOD_RES (21), (22), (23), (24): Xaa is A or G or is absent

SEQ ID NO: 28219 - protein, 39 aa, Artificial Sequence
  GFR-binding peptide
  MOD_RES (4), (5), (38): Xaa is C or S
  MOD_RES (19), (20), (21), (22), (23): Xaa is A or G
  MOD_RES (24), (25), (26), (27): Xaa is A or G or is absent
AAPXXVPQALEPISILYLXXXXXXXXXKFKYEMIVRSXK

SEQ ID NO: 28220 - protein, 38 aa, Artificial Sequence
  GFR-binding peptide
  MOD_RES (3), (4), (36), (38): Xaa is C or S
KPXXAPTQLSPISVLYIDDSSNVIYKQYENMVVRAXGX

SEQ ID NO: 28221 - protein, 40 aa, Artificial Sequence
  GFR-binding peptide
  MOD_RES (6), (7), (40): Xaa is C or S
  MOD_RES (21), (22), (23), (24), (25): Xaa is A or G
  MOD_RES (26), (27), (28), (29): Xaa is A or G or is absent
ASASPXXVPQDLSPISILYIXXXXXXXXXYKQYEMVVKSX

SEQ ID NO: 28222 - protein, 36 aa, Artificial Sequence
  GFR-binding peptide
  MOD_RES (33), (35): Xaa is C or S
  MOD_RES (14), (15), (16), (17), (18): Xaa is A or G
  MOD_RES (19), (20), (21), (22): Xaa is A or G or is absent
VPQDLSPISILYIXXXXXXXXXYKQYEMVVKSXKXS

SEQ ID NO: 28223 - protein, 41 aa, Artificial Sequence
  GFR-binding peptide
  MOD_RES (3), (4), (38), (40): Xaa is C or S
  MOD_RES (18), (19), (20), (21), (22): Xaa is A or G
  MOD_RES (23), (24), (25), (26): Xaa is A or G or is absent
KAXXVPTKLEPISILYLXXXXXXXXXKFKYEGMAVSEXGXR

SEQ ID NO: 28224 - protein, 38 aa, Artificial Sequence
  GFR-binding peptide
  MOD_RES (3), (4), (38): Xaa is C or S
  MOD_RES (18), (19), (20), (21), (22): Xaa is A or G
  MOD_RES (23), (24), (25), (26): Xaa is A or G or is absent
KAXXVPTELSPISMLYIXXXXXXXXXYKQYEEMVVEGX

SEQ ID NO: 28225 - protein, 38 aa, Artificial Sequence
  GFR-binding peptide
  MOD_RES (2), (3), (36), (38): Xaa is C or S
  MOD_RES (17), (18), (19), (20), (21): Xaa is A or G
  MOD_RES (22), (23), (24), (25): Xaa is A or G or is absent
PXXVSQDLEPISILYLXXXXXXXXXKFKYEMIVKSXKX

SEQ ID NO: 28226 - protein, 34 aa, Artificial Sequence
  GFR-binding peptide
  MOD_RES (31), (33): Xaa is C or S
VPQALEPISILYLVGRKPKVKFKYEMIVRSXKXS

SEQ ID NO: 28227 - protein, 43 aa, Artificial Sequence; identical to SEQ ID NO: 7048
  GFR-binding peptide
  MOD_RES (6), (7), (42): Xaa is C or S
  MOD_RES (21), (22), (23), (24), (25): Xaa is A or G
  MOD_RES (26), (27), (28), (29): Xaa is A or G or is absent

SEQ ID NO: 28228 - protein, 43 aa, Artificial Sequence; identical to SEQ ID NO: 7049
  GFR-binding peptide
  MOD_RES (6), (7), (40), (42): Xaa is C or S
  MOD_RES (21), (22), (23), (24), (25): Xaa is A or G
  MOD_RES (26), (27), (28), (29): Xaa is A or G or is absent

SEQ ID NO: 28229 - protein, 34 aa, Artificial Sequence; identical to SEQ ID NO: 7050
  GFR-binding peptide
  MOD_RES (1), (1): Xaa is C or S
  MOD_RES (15), (16), (17), (18), (19): Xaa is A or G
  MOD_RES (20), (21), (22), (23): Xaa is A or G or is absent

SEQ ID NO: 28230 - protein, 32 aa, Artificial Sequence
  GFR-binding peptide
  MOD_RES (1), (1): Xaa is C or S
XVPTKLNAISILYFDKGVVTYLKKYRGMAVSE

SEQ ID NO: 28231 - protein, 35 aa, Artificial Sequence; identical to SEQ ID NO: 7052
  GFR-binding peptide
  MOD_RES (1), (2), (35): Xaa is C or S

SEQ ID NO: 28232 - protein, 40 aa, Artificial Sequence; identical to SEQ ID NO: 7053
  GFR-binding peptide
  MOD_RES (5), (6), (38), (40): Xaa is C or S

SEQ ID NO: 28233 - protein, 36 aa, Artificial Sequence
  GFR-binding peptide
  MOD_RES (1), (2), (36): Xaa is C or S
  MOD_RES (16), (17), (18), (19), (20): Xaa is A or G
  MOD_RES (21), (22), (23), (24): Xaa is A or G or is absent
XXAPTKLSPISVLYIXXXXXXXXXYKQYENMVVRSX

SEQ ID NO: 28234 - protein, 37 aa, Artificial Sequence
  GFR-binding peptide
  MOD_RES (6), (7): Xaa is C or S
SIPKAXXVPTELSPISMLYIDEYDKVVYKQYEEMVVE

SEQ ID NO: 28235 - protein, 39 aa, Artificial Sequence
  GFR-binding peptide
  MOD_RES (6), (7): Xaa is C or S
KVGKAXXVPTKLSPISVLYIDDMGVPTYKQYEEGMSVAE

SEQ ID NO: 28236 - protein, 35 aa, Artificial Sequence
  GFR-binding peptide
  MOD_RES (4), (5): Xaa is C or S
ASPXXVPQDLSPISILYIVGRTPKVYKQYEMVVKS

SEQ ID NO: 28237 - protein, 39 aa, Artificial Sequence; identical to SEQ ID NO: 7057
  GFR-binding peptide
  MOD_RES (4), (5), (38): Xaa is C or S
  MOD_RES (19), (20), (21), (22), (23): Xaa is A or G
  MOD_RES (24), (25), (26), (27): Xaa is A or G or is absent

SEQ ID NO: 28238 - protein, 32 aa, Artificial Sequence
  GFR-binding peptide
  MOD_RES (1), (1): Xaa is C or S
XVPTELSPISMLYIDEYDKVVYKQYEEMVVEG

SEQ ID NO: 28239 - protein, 34 aa, Artificial Sequence
  GFR-binding peptide
  MOD_RES (1), (34): Xaa is C or S
XVPTKLEPISVLYLDDMGVPTKFKYEEGMSVAEX

SEQ ID NO: 28240 - protein, 41 aa, Artificial Sequence; identical to SEQ ID NO: 7059
  GFR-binding peptide
  MOD_RES (6), (7), (38), (40): Xaa is C or S

SEQ ID NO: 28241 - protein, 40 aa, Artificial Sequence
  GFR-binding peptide
  MOD_RES (3), (4), (37), (39): Xaa is C or S
  MOD_RES (18), (19), (20), (21), (22): Xaa is A or G
  MOD_RES (23), (24), (25), (26): Xaa is A or G or is absent
SPXXVPQDLEPISILYLXXXXXXXXXKFKYEMVVKSXKXS

SEQ ID NO: 28242 - protein, 42 aa, Artificial Sequence; identical to SEQ ID NO: 7063
  GFR-binding peptide
  MOD_RES (6), (7), (39), (41): Xaa is C or S

SEQ ID NO: 28243 - protein, 39 aa, Artificial Sequence; identical to SEQ ID NO: 7064
  GFR-binding peptide
  MOD_RES (6), (7), (39): Xaa is C or S

SEQ ID NO: 28244 - protein, 35 aa, Artificial Sequence
  GFR-binding peptide
  MOD_RES (2), (3), (35): Xaa is C or S
AXXVPTELSPISMLYIDEYDKVVYKQYEEMVVEGX

SEQ ID NO: 28245 - protein, 39 aa, Artificial Sequence; identical to SEQ ID NO: 7067
  GFR-binding peptide
  MOD_RES (3), (4), (37), (39): Xaa is C or S
  MOD_RES (18), (19), (20), (21), (22): Xaa is A or G
  MOD_RES (23), (24), (25), (26): Xaa is A or G or is absent

SEQ ID NO: 28246 - protein, 39 aa, Artificial Sequence; identical to SEQ ID NO: 7068
  GFR-binding peptide
  MOD_RES (2), (36), (38): Xaa is C or S
  MOD_RES (16), (17), (18), (19), (20): Xaa is A or G
  MOD_RES (21), (22), (23), (24): Xaa is A or G or is absent

SEQ ID NO: 28247 - protein, 43 aa, Artificial Sequence
  GFR-binding peptide
  MOD_RES (6), (7), (42): Xaa is C or S
  MOD_RES (21), (22), (23), (24), (25): Xaa is A or G
  MOD_RES (26), (27), (28), (29): Xaa is A or G or is absent
KVGKAXXVPTKLSPISVLYIXXXXXXXXXYKQYEEGMSVAEXG

SEQ ID NO: 28248 - protein, 35 aa, Artificial Sequence
  GFR-binding peptide
  MOD_RES (2), (3): Xaa is C or S
  MOD_RES (17), (18), (19), (20), (21): Xaa is A or G
  MOD_RES (22), (23), (24), (25): Xaa is A or G or is absent
PXXAPTQLSPISVLYIXXXXXXXXXYKQYENMVVR

SEQ ID NO: 28249 - protein, 36 aa, Artificial Sequence
  GFR-binding peptide
  MOD_RES (3), (4), (35): Xaa is C or S
APXXVPQALSPISILYIVGRKPKVYKQYEMIVRSXK

SEQ ID NO: 28250 - protein, 35 aa, Artificial Sequence; identical to SEQ ID NO: 7072
  GFR-binding peptide
  MOD_RES (1), (2): Xaa is C or S
  MOD_RES (16), (17), (18), (19), (20): Xaa is A or G
  MOD_RES (21), (22), (23), (24): Xaa is A or G or is absent

SEQ ID NO: 28251 - protein, 40 aa, Artificial Sequence
  GFR-binding peptide
  MOD_RES (3), (4), (38), (40): Xaa is C or S
  MOD_RES (18), (19), (20), (21), (22): Xaa is A or G
  MOD_RES (23), (24), (25), (26): Xaa is A or G or is absent
KAXXVPTELSPISMLYIXXXXXXXXXYKQYEEMVVEGXGX

SEQ ID NO: 28252 - protein, 31 aa, Artificial Sequence; identical to SEQ ID NO: 7074
  GFR-binding peptide
  MOD_RES (31), (31): Xaa is C or S

SEQ ID NO: 28253 - protein, 39 aa, Artificial Sequence
  GFR-binding peptide
  MOD_RES (3), (4), (38): Xaa is C or S
  MOD_RES (18), (19), (20), (21), (22): Xaa is A or G
  MOD_RES (23), (24), (25), (26): Xaa is A or G or is absent
ASXXVPARLSPISILYKXXXXXXXXXLKYHYDMVVEAXG

SEQ ID NO: 28254 - protein, 39 aa, Artificial Sequence
  GFR-binding peptide
  MOD_RES (4), (5), (38): Xaa is C or S
  MOD_RES (19), (20), (21), (22), (23): Xaa is A or G
  MOD_RES (24), (25), (26), (27): Xaa is A or G or is absent
ASPXXVSQDLEPISILYLXXXXXXXXXKFKYEMIVKSXK

SEQ ID NO: 28255 - protein, 36 aa, Artificial Sequence
  GFR-binding peptide
  MOD_RES (1), (33), (35): Xaa is C or S
XVPTKLSPISILYKDKGVVTYLKYHYGMAVSEXGXR

SEQ ID NO: 28256 - protein, 41 aa, Artificial Sequence
  GFR-binding peptide
  MOD_RES (5), (6), (40): Xaa is C or S
  MOD_RES (20), (21), (22), (23), (24): Xaa is A or G
  MOD_RES (25), (26), (27), (28): Xaa is A or G or is absent
APASXXVPARLSPISILYKXXXXXXXXXLKYHYDMVVEAXG

SEQ ID NO: 28257 - protein, 40 aa, Artificial Sequence; identical to SEQ ID NO: 7079
  GFR-binding peptide
  MOD_RES (2), (3), (37), (39): Xaa is C or S
  MOD_RES (17), (18), (19), (20), (21): Xaa is A or G
  MOD_RES (22), (23), (24), (25): Xaa is A or G or is absent

SEQ ID NO: 28258 - protein, 33 aa, Artificial Sequence; identical to SEQ ID NO: 7082
  GFR-binding peptide
  MOD_RES (2), (3): Xaa is C or S

SEQ ID NO: 28259 - protein, 32 aa, Artificial Sequence; identical to SEQ ID NO: 7085
  GFR-binding peptide
  MOD_RES (32), (32): Xaa is C or S

SEQ ID NO: 28260 - protein, 41 aa, Artificial Sequence; identical to SEQ ID NO: 7086
  GFR-binding peptide
  MOD_RES (4), (5), (39), (41): Xaa is C or S
  MOD_RES (19), (20), (21), (22), (23): Xaa is A or G
  MOD_RES (24), (25), (26), (27): Xaa is A or G or is absent

SEQ ID NO: 28261 - protein, 38 aa, Artificial Sequence
  GFR-binding peptide
  MOD_RES (2), (3), (38): Xaa is C or S
  MOD_RES (17), (18), (19), (20), (21): Xaa is A or G
  MOD_RES (22), (23), (24), (25): Xaa is A or G or is absent
AXXVPTKLSPISVLYIXXXXXXXXXYKQYEEGMSVAEX

SEQ ID NO: 28262 - protein, 37 aa, Artificial Sequence
  GFR-binding peptide
  MOD_RES (3), (4): Xaa is C or S
  MOD_RES (18), (19), (20), (21), (22): Xaa is A or G
  MOD_RES (23), (24), (25), (26): Xaa is A or G or is absent
KAXXAPTKLSPISVLYIXXXXXXXXXYKQYENMVVKA

SEQ ID NO: 28263 - protein, 42 aa, Artificial Sequence
  GFR-binding peptide
  MOD_RES (6), (7), (40), (42): Xaa is C or S
KVGKAXXVPTKLSPISVLYIDDMGVPTYKQYEEGMSVAEXGX

SEQ ID NO: 28264 - protein, 35 aa, Artificial Sequence; identical to SEQ ID NO: 7088
  GFR-binding peptide
  MOD_RES (1), (35): Xaa is C or S
  MOD_RES (15), (16), (17), (18), (19): Xaa is A or G
  MOD_RES (20), (21), (22), (23): Xaa is A or G or is absent

SEQ ID NO: 28265 - protein, 38 aa, Artificial Sequence
  GFR-binding peptide
  MOD_RES (5), (6), (38): Xaa is C or S
IPKAXXVPTELSPISMLYIDENEKVVYKQYEDMVVEGX

SEQ ID NO: 28266 - protein, 37 aa, Artificial Sequence; identical to SEQ ID NO: 7089
  GFR-binding peptide
  MOD_RES (1), (34), (36): Xaa is C or S
  MOD_RES (15), (16), (17), (18), (19): Xaa is A or G
  MOD_RES (20), (21), (22), (23): Xaa is A or G or is absent

SEQ ID NO: 28267 - protein, 42 aa, Artificial Sequence
  GFR-binding peptide
  MOD_RES (3), (4), (39), (41): Xaa is C or S
  MOD_RES (18), (19), (20), (21), (22): Xaa is A or G
  MOD_RES (23), (24), (25), (26): Xaa is A or G or is absent
KAXXVPTKLEPISVLYLXXXXXXXXXKFKYEEGMSVAEXGXR

SEQ ID NO: 28268 - protein, 37 aa, Artificial Sequence
  GFR-binding peptide
  MOD_RES (6), (7): Xaa is C or S
AVPKAXXAPTKLSPISVLYIDSSNNVIYKQYENMVVK

SEQ ID NO: 28269 - protein, 39 aa, Artificial Sequence
  GFR-binding peptide
  MOD_RES (5), (6), (37), (39): Xaa is C or S
SASPXXVPQDLSPISILYIVGRTPKVYKQYEMVVKSXKX

SEQ ID NO: 28270 - protein, 36 aa, Artificial Sequence; identical to SEQ ID NO: 7093
  GFR-binding peptide
  MOD_RES (3), (4), (36): Xaa is C or S

SEQ ID NO: 28271 - protein, 39 aa, Artificial Sequence
  GFR-binding peptide
  MOD_RES (1), (2), (36), (38): Xaa is C or S
  MOD_RES (16), (17), (18), (19), (20): Xaa is A or G
  MOD_RES (21), (22), (23), (24): Xaa is A or G or is absent
XXVPARLEPISILYLXXXXXXXXXKFKYEDMVVEAXGXR

SEQ ID NO: 28272 - protein, 36 aa, Artificial Sequence
  GFR-binding peptide
  MOD_RES (3), (4): Xaa is C or S
  MOD_RES (18), (19), (20), (21), (22): Xaa is A or G
  MOD_RES (23), (24), (25), (26): Xaa is A or G or is absent
KAXXVPTKLSPISILYIXXXXXXXXXYKQYEGMAVS

SEQ ID NO: 28273 - protein, 37 aa, Artificial Sequence
  GFR-binding peptide
  MOD_RES (3), (4), (35), (37): Xaa is C or S
APXXVPQALSPISILYIVGRKPKVYKQYEMIVRSXKX

SEQ ID NO: 28274 - protein, 32 aa, Artificial Sequence
  GFR-binding peptide
  MOD_RES (31), (31): Xaa is C or S
VPQALEPISILYLVGRKPKVKFKYEMIVRSXK

SEQ ID NO: 28275 - protein, 35 aa, Artificial Sequence
  GFR-binding peptide
  MOD_RES (4), (5): Xaa is C or S
PKAXXAPTKLSPISVLYIDSSNNVIYKQYENMVVK

SEQ ID NO: 28276 - protein, 37 aa, Artificial Sequence
  GFR-binding peptide
  MOD_RES (1), (2), (37): Xaa is C or S
  MOD_RES (16), (17), (18), (19), (20): Xaa is A or G
  MOD_RES (21), (22), (23), (24): Xaa is A or G or is absent
XXVPTKLEPISVLYLXXXXXXXXXKFKYEEGMSVAEX

SEQ ID NO: 28277 - protein, 41 aa, Artificial Sequence
  GFR-binding peptide
  MOD_RES (5), (6), (40): Xaa is C or S
  MOD_RES (20), (21), (22), (23), (24): Xaa is A or G
  MOD_RES (25), (26), (27), (28): Xaa is A or G or is absent
VPKPXXAPTQLSPISVLYIXXXXXXXXXYKQYENMVVRAXG

SEQ ID NO: 28278 - protein, 35 aa, Artificial Sequence; identical to SEQ ID NO: 7100
  GFR-binding peptide
  MOD_RES (32), (34): Xaa is C or S

SEQ ID NO: 28279 - protein, 42 aa, Artificial Sequence
  GFR-binding peptide
  MOD_RES (6), (7), (39), (41): Xaa is C or S
AVPKAXXAPTKLSPISVLYIDSSNNVIYKQYENMVVKAXGXH

SEQ ID NO: 28280 - protein, 32 aa, Artificial Sequence
  GFR-binding peptide
  MOD_RES (14), (15), (16), (17), (18): Xaa is A or G
  MOD_RES (19), (20), (21), (22): Xaa is A or G or is absent
VPQDLEPISILYLXXXXXXXXXKFKYEMVVKS

SEQ ID NO: 28281 - protein, 36 aa, Artificial Sequence
  GFR-binding peptide
  MOD_RES (2), (3), (35): Xaa is C or S
SXXVPARLSPISILYKDAANNVVLKYHYDMVVEAXG

SEQ ID NO: 28282 - protein, 42 aa, Artificial Sequence; identical to SEQ ID NO: 7102
  GFR-binding peptide
  MOD_RES (6), (7), (39), (41): Xaa is C or S

SEQ ID NO: 28283 - protein, 33 aa, Artificial Sequence
  GFR-binding peptide
  MOD_RES (1), (33): Xaa is C or S
XVPTKLSPISILYKDKGVVTYLKYHYGMAVSEX

SEQ ID NO: 28284 - protein, 38 aa, Artificial Sequence
  GFR-binding peptide
  MOD_RES (1), (35), (37): Xaa is C or S
  MOD_RES (15), (16), (17), (18), (19): Xaa is A or G
  MOD_RES (20), (21), (22), (23): Xaa is A or G or is absent
XAPTQLEPISVLYLXXXXXXXXXKFKYENMVVRAXGXH

SEQ ID NO: 28285 - protein, 37 aa, Artificial Sequence; identical to SEQ ID NO: 7103
  GFR-binding peptide
  MOD_RES (5), (5): Xaa is C or S
  MOD_RES (19), (20), (21), (22), (23): Xaa is A or G
  MOD_RES (24), (25), (26), (27): Xaa is A or G or is absent

SEQ ID NO: 28286 - protein, 39 aa, Artificial Sequence; identical to SEQ ID NO: 7107
  GFR-binding peptide
  MOD_RES (6), (7), (39): Xaa is C or S

SEQ ID NO: 28287 - protein, 41 aa, Artificial Sequence; identical to SEQ ID NO: 7108
  GFR-binding peptide
  MOD_RES (6), (7), (40): Xaa is C or S

SEQ ID NO: 28288 - protein, 39 aa, Artificial Sequence
  GFR-binding peptide
  MOD_RES (4), (5), (38): Xaa is C or S
GKAXXVPTKLEPISVLYLDDMGVPTKFKYEEGMSVAEXG

SEQ ID NO: 28289 - protein, 34 aa, Artificial Sequence
  GFR-binding peptide
  MOD_RES (2), (3), (34): Xaa is C or S
PXXVPQALSPISILYIVGRKPKVYKQYEMIVRSX

SEQ ID NO: 28290 - protein, 33 aa, Artificial Sequence; identical to SEQ ID NO: 7110
  GFR-binding peptide
  MOD_RES (1), (32): Xaa is C or S

SEQ ID NO: 28291 - protein, 42 aa, Artificial Sequence
  GFR-binding peptide
  MOD_RES (6), (7), (41): Xaa is C or S
  MOD_RES (21), (22), (23), (24), (25): Xaa is A or G
  MOD_RES (26), (27), (28), (29): Xaa is A or G or is absent
YVPKPXXAPTKLSPISVLYIXXXXXXXXXYKQYENMVVRSXG

SEQ ID NO: 28292 - protein, 35 aa, Artificial Sequence
  GFR-binding peptide
  MOD_RES (4), (5): Xaa is C or S
PASXXVPARLEPISILYLDAANNVVKFKYEDMVVE

SEQ ID NO: 28293 - protein, 37 aa, Artificial Sequence
  GFR-binding peptide
  MOD_RES (1), (2), (36): Xaa is C or S
  MOD_RES (16), (17), (18), (19), (20): Xaa is A or G
  MOD_RES (21), (22), (23), (24): Xaa is A or G or is absent
XXVPTKLSPISILYKXXXXXXXXXLKYHYGMAVSEXG

SEQ ID NO: 28294 - protein, 35 aa, Artificial Sequence; identical to SEQ ID NO: 7112
  GFR-binding peptide
  MOD_RES (1), (35): Xaa is C or S
  MOD_RES (15), (16), (17), (18), (19): Xaa is A or G
  MOD_RES (20), (21), (22), (23): Xaa is A or G or is absent

SEQ ID NO: 28295 - protein, 38 aa, Artificial Sequence
  GFR-binding peptide
  MOD_RES (7), (7): Xaa is C or S
HVTKPTXAPTKLEPISVLYLDDSSNVIKFKYENMVVRS

SEQ ID NO: 28296 - protein, 35 aa, Artificial Sequence; identical to SEQ ID NO: 7115
  GFR-binding peptide
  MOD_RES (1), (2), (33), (35): Xaa is C or S

SEQ ID NO: 28297 - protein, 37 aa, Artificial Sequence
  GFR-binding peptide
  MOD_RES (5), (5): Xaa is C or S
  MOD_RES (19), (20), (21), (22), (23): Xaa is A or G
  MOD_RES (24), (25), (26), (27): Xaa is A or G or is absent
TKPTXAPTKLEPISVLYLXXXXXXXXXKFKYENMVVR

SEQ ID NO: 28298 - protein, 34 aa, Artificial Sequence
  GFR-binding peptide
  MOD_RES (1), (1): Xaa is C or S
  MOD_RES (15), (16), (17), (18), (19): Xaa is A or G
  MOD_RES (20), (21), (22), (23): Xaa is A or G or is absent
XVPARLSPISILYKXXXXXXXXXLKYHYDMVVEA

SEQ ID NO: 28299 - protein, 34 aa, Artificial Sequence
  GFR-binding peptide
  MOD_RES (32), (34): Xaa is C or S
VPTELSPISMLYIDEYDKVVYKQYEEMVVEGXGX

SEQ ID NO: 28300 - protein, 32 aa, Artificial Sequence; identical to SEQ ID NO: 7120
  GFR-binding peptide
  MOD_RES (32), (32): Xaa is C or S

SEQ ID NO: 28301 - protein, 41 aa, Artificial Sequence; identical to SEQ ID NO: 7121
  GFR-binding peptide
  MOD_RES (5), (6), (39), (41): Xaa is C or S
  MOD_RES (20), (21), (22), (23), (24): Xaa is A or G
  MOD_RES (25), (26), (27), (28): Xaa is A or G or is absent

SEQ ID NO: 28302 - protein, 33 aa, Artificial Sequence; identical to SEQ ID NO: 7123
  GFR-binding peptide
  MOD_RES (1), (32): Xaa is C or S

SEQ ID NO: 28303 - protein, 36 aa, Artificial Sequence; identical to SEQ ID NO: 7125
  GFR-binding peptide
  MOD_RES (1), (2), (36): Xaa is C or S
  MOD_RES (16), (17), (18), (19), (20): Xaa is A or G
  MOD_RES (21), (22), (23), (24): Xaa is A or G or is absent

SEQ ID NO: 28304 - protein, 39 aa, Artificial Sequence
  GFR-binding peptide
  MOD_RES (1), (2), (36), (38): Xaa is C or S
  MOD_RES (16), (17), (18), (19), (20): Xaa is A or G
  MOD_RES (21), (22), (23), (24): Xaa is A or G or is absent
XXAPTKLEPISVLYLXXXXXXXXXKFKYENMVVRSXGXH

SEQ ID NO: 28305 - protein, 37 aa, Artificial Sequence
  GFR-binding peptide
  MOD_RES (1), (2), (36): Xaa is C or S
  MOD_RES (16), (17), (18), (19), (20): Xaa is A or G
  MOD_RES (21), (22), (23), (24): Xaa is A or G or is absent
XXVPTKLEPISILYLXXXXXXXXXKFKYEGMAVSEXG

SEQ ID NO: 28306 - protein, 40 aa, Artificial Sequence
  GFR-binding peptide
  MOD_RES (6), (7): Xaa is C or S
  MOD_RES (21), (22), (23), (24), (25): Xaa is A or G
  MOD_RES (26), (27), (28), (29): Xaa is A or G or is absent
KASKAXXVPTKLNAISILYFXXXXXXXXXLKKYRGMAVSE

SEQ ID NO: 28307 - protein, 35 aa, Artificial Sequence
  GFR-binding peptide
  MOD_RES (1), (2), (35): Xaa is C or S
  MOD_RES (16), (17), (18), (19), (20): Xaa is A or G
  MOD_RES (21), (22), (23), (24): Xaa is A or G or is absent
XXVPQALEPISILYLXXXXXXXXXKFKYEMIVRSX

SEQ ID NO: 28308 - protein, 34 aa, Artificial Sequence
  GFR-binding peptide
  MOD_RES (4), (4): Xaa is C or S
KPTXAPTKLEPISVLYLDDSSNVIKFKYENMVVR

SEQ ID NO: 28309 - protein, 38 aa, Artificial Sequence
  GFR-binding peptide
  MOD_RES (5), (6): Xaa is C or S
  MOD_RES (20), (21), (22), (23), (24): Xaa is A or G
  MOD_RES (25), (26), (27), (28): Xaa is A or G or is absent
VPKAXXAPTKLEPISVLYLXXXXXXXXXKFKYENMVVK

SEQ ID NO: 28310 - protein, 40 aa, Artificial Sequence
  GFR-binding peptide
  MOD_RES (4), (5), (39): Xaa is C or S
  MOD_RES (19), (20), (21), (22), (23): Xaa is A or G
  MOD_RES (24), (25), (26), (27): Xaa is A or G or is absent
SKAXXVPTKLEPISILYLXXXXXXXXXKFKYEGMAVSEXG

SEQ ID NO: 28311 - protein, 39 aa, Artificial Sequence
  GFR-binding peptide
  MOD_RES (3), (4), (36), (38): Xaa is C or S
KPXXAPTQLSPISVLYIDDSSNVIYKQYENMVVRAXGXH

SEQ ID NO: 28312 - protein, 37 aa, Artificial Sequence
  GFR-binding peptide
  MOD_RES (3), (4), (36): Xaa is C or S
KPXXAPTKLSPISVLYIDDSSNVIYKQYENMVVRSXG

SEQ ID NO: 28313 - protein, 34 aa, Artificial Sequence
  GFR-binding peptide
  MOD_RES (1), (1): Xaa is C or S
  MOD_RES (15), (16), (17), (18), (19): Xaa is A or G
  MOD_RES (20), (21), (22), (23): Xaa is A or G or is absent
XVPTKLSPISILYIXXXXXXXXXYKQYEGMAVSE

SEQ ID NO: 28314 - protein, 39 aa, Artificial Sequence
  GFR-binding peptide
  MOD_RES (5), (6), (39): Xaa is C or S
  MOD_RES (20), (21), (22), (23), (24): Xaa is A or G
  MOD_RES (25), (26), (27), (28): Xaa is A or G or is absent
SASPXXVSQDLSPISILYIXXXXXXXXXYKQYEMIVKSX

SEQ ID NO: 28315 - protein, 38 aa, Artificial Sequence
  GFR-binding peptide
  MOD_RES (1), (2), (35), (37): Xaa is C or S
  MOD_RES (16), (17), (18), (19), (20): Xaa is A or G
  MOD_RES (21), (22), (23), (24): Xaa is A or G or is absent
XXVPQALEPISILYLXXXXXXXXXKFKYEMIVRSXKXS

SEQ ID NO: 28316 - protein, 31 aa, Artificial Sequence; identical to SEQ ID NO: 7134
  GFR-binding peptide
  MOD_RES (1), (1): Xaa is C or S

SEQ ID NO: 28317 - protein, 30 aa, Artificial Sequence
  GFR-binding peptide
VPTKLNAISILYFDKGVVTYLKKYRGMAVS

SEQ ID NO: 28318 - protein, 41 aa, Artificial Sequence; identical to SEQ ID NO: 7137
  GFR-binding peptide
  MOD_RES (3), (4), (38), (40): Xaa is C or S
  MOD_RES (18), (19), (20), (21), (22): Xaa is A or G
  MOD_RES (23), (24), (25), (26): Xaa is A or G or is absent

SEQ ID NO: 28319 - protein, 33 aa, Artificial Sequence
  GFR-binding peptide
  MOD_RES (1), (2), (33): Xaa is C or S
XXVSQDLEPISILYLIGKTPKIKFKYEMIVKSX

SEQ ID NO: 28320 - protein, 40 aa, Artificial Sequence; identical to SEQ ID NO: 7141
  GFR-binding peptide
  MOD_RES (5), (6), (40): Xaa is C or S
  MOD_RES (20), (21), (22), (23), (24): Xaa is A or G
  MOD_RES (25), (26), (27), (28): Xaa is A or G or is absent

SEQ ID NO: 28321 - protein, 37 aa, Artificial Sequence; identical to SEQ ID NO: 7144
  GFR-binding peptide
  MOD_RES (5), (6): Xaa is C or S

SEQ ID NO: 28322 - protein, 34 aa, Artificial Sequence; identical to SEQ ID NO: 7145
  GFR-binding peptide
  MOD_RES (33), (33): Xaa is C or S

SEQ ID NO: 28323 - protein, 39 aa, Artificial Sequence
  GFR-binding peptide
  MOD_RES (5), (6), (39): Xaa is C or S
VGKAXXVPTKLSPISVLYIDDMGVPTYKQYEEGMSVAEX

SEQ ID NO: 28324 - protein, 37 aa, Artificial Sequence
  GFR-binding peptide
  MOD_RES (3), (4), (35), (37): Xaa is C or S
SPXXVSQDLEPISILYLIGKTPKIKFKYEMIVKSXKX

SEQ ID NO: 28325 - protein, 35 aa, Artificial Sequence
  GFR-binding peptide
  MOD_RES (2), (3): Xaa is C or S
  MOD_RES (17), (18), (19), (20), (21): Xaa is A or G
  MOD_RES (22), (23), (24), (25): Xaa is A or G or is absent
AXXVPTKLEPISILYLXXXXXXXXXKFKYEGMAVS

SEQ ID NO: 28326 - protein, 35 aa, Artificial Sequence
  GFR-binding peptide
  MOD_RES (2), (3): Xaa is C or S
  MOD_RES (17), (18), (19), (20), (21): Xaa is A or G
  MOD_RES (22), (23), (24), (25): Xaa is A or G or is absent
PXXVPQDLEPISILYLXXXXXXXXXKFKYEMVVKS

SEQ ID NO: 28327 - protein, 38 aa, Artificial Sequence
  GFR-binding peptide
  MOD_RES (2), (3), (37): Xaa is C or S
  MOD_RES (17), (18), (19), (20), (21): Xaa is A or G
  MOD_RES (22), (23), (24), (25): Xaa is A or G or is absent
SXXVPARLSPISILYIXXXXXXXXXYKQYEDMVVEAXG

SEQ ID NO: 28328 - protein, 36 aa, Artificial Sequence
  GFR-binding peptide
  MOD_RES (5), (6): Xaa is C or S
VPKPXXAPTQLSPISVLYIDDSSNVIYKQYENMVVR

SEQ ID NO: 28329 - protein, 40 aa, Artificial Sequence
  GFR-binding peptide
  MOD_RES (5), (37), (39): Xaa is C or S
TKPTXAPTKLEPISVLYLDDSSNVIKFKYENMVVRSXGXH

SEQ ID NO: 28330 - protein, 40 aa, Artificial Sequence; identical to SEQ ID NO: 7150
  GFR-binding peptide
  MOD_RES (3), (4), (38), (40): Xaa is C or S
  MOD_RES (18), (19), (20), (21), (22): Xaa is A or G
  MOD_RES (23), (24), (25), (26): Xaa is A or G or is absent

SEQ ID NO: 28331 - protein, 38 aa, Artificial Sequence
  GFR-binding peptide
  MOD_RES (1), (2), (37): Xaa is C or S
  MOD_RES (16), (17), (18), (19), (20): Xaa is A or G
  MOD_RES (21), (22), (23), (24): Xaa is A or G or is absent
XXVPTKLSPISVLYIXXXXXXXXXYKQYEEGMSVAEXG

SEQ ID NO: 28332 - protein, 38 aa, Artificial Sequence
  GFR-binding peptide
  MOD_RES (2), (3), (37): Xaa is C or S
  MOD_RES (17), (18), (19), (20), (21): Xaa is A or G
  MOD_RES (22), (23), (24), (25): Xaa is A or G or is absent
AXXVPTELEPISMLYLXXXXXXXXXKFKYEEMVVEGXG

SEQ ID NO: 28333 - protein, 38 aa, Artificial Sequence; identical to SEQ ID NO: 7153
  GFR-binding peptide
  MOD_RES (2), (3), (37): Xaa is C or S
  MOD_RES (17), (18), (19), (20), (21): Xaa is A or G
  MOD_RES (22), (23), (24), (25): Xaa is A or G or is absent

SEQ ID NO: 28334 - protein, 38 aa, Artificial Sequence
  GFR-binding peptide
  MOD_RES (5), (6), (37): Xaa is C or S
SASPXXVPQDLEPISILYLVGRTPKVKFKYEMVVKSXK

SEQ ID NO: 28335 - protein, 40 aa, Artificial Sequence; identical to SEQ ID NO: 7156
  GFR-binding peptide
  MOD_RES (4), (5), (38), (40): Xaa is C or S
  MOD_RES (19), (20), (21), (22), (23): Xaa is A or G
  MOD_RES (24), (25), (26), (27): Xaa is A or G or is absent

SEQ ID NO: 28336 - protein, 38 aa, Artificial Sequence; identical to SEQ ID NO: 7157
  GFR-binding peptide
  MOD_RES (5), (5): Xaa is C or S
  MOD_RES (19), (20), (21), (22), (23): Xaa is A or G
  MOD_RES (24), (25), (26), (27): Xaa is A or G or is absent

SEQ ID NO: 28337 - protein, 35 aa, Artificial Sequence; identical to SEQ ID NO: 7158
  GFR-binding peptide
  MOD_RES (32), (34): Xaa is C or S

SEQ ID NO: 28338 - protein, 39 aa, Artificial Sequence; identical to SEQ ID NO: 7159
  GFR-binding peptide
  MOD_RES (6), (7), (39): Xaa is C or S

SEQ ID NO: 28339 - protein, 40 aa, Artificial Sequence; identical to SEQ ID NO: 7160
  GFR-binding peptide
  MOD_RES (3), (4), (37), (39): Xaa is C or S
  MOD_RES (18), (19), (20), (21), (22): Xaa is A or G
  MOD_RES (23), (24), (25), (26): Xaa is A or G or is absent

SEQ ID NO: 28340 - protein, 35 aa, Artificial Sequence
  GFR-binding peptide
  MOD_RES (1), (2): Xaa is C or S
  MOD_RES (16), (17), (18), (19), (20): Xaa is A or G
  MOD_RES (21), (22), (23), (24): Xaa is A or G or is absent
XXAPTKLEPISVLYLXXXXXXXXXKFKYENMVVKA

SEQ ID NO: 28341 - protein, 37 aa, Artificial Sequence; identical to SEQ ID NO: 7169
  GFR-binding peptide
  MOD_RES (1), (34), (36): Xaa is C or S
  MOD_RES (15), (16), (17), (18), (19): Xaa is A or G
  MOD_RES (20), (21), (22), (23): Xaa is A or G or is absent

SEQ ID NO: 28342 - protein, 37 aa, Artificial Sequence; identical to SEQ ID NO: 7170
  GFR-binding peptide
  MOD_RES (2), (3), (36): Xaa is C or S
  MOD_RES (17), (18), (19), (20), (21): Xaa is A or G
  MOD_RES (22), (23), (24), (25): Xaa is A or G or is absent

SEQ ID NO: 28343 - protein, 37 aa, Artificial Sequence; identical to SEQ ID NO: 7171
  GFR-binding peptide
  MOD_RES (5), (6), (37): Xaa is C or S

SEQ ID NO: 28344 - protein, 35 aa, Artificial Sequence
  GFR-binding peptide
  MOD_RES (2), (3), (35): Xaa is C or S
AXXVPTELEPISMLYLDENEKVVKFKYEDMVVEGX

SEQ ID NO: 28345 - protein, 37 aa, Artificial Sequence
  GFR-binding peptide
  MOD_RES (3), (4), (36): Xaa is C or S
KAXXAPTKLSPISVLYIDSSNNVIYKQYENMVVKAXG

SEQ ID NO: 28346 - protein, 35 aa, Artificial Sequence
  GFR-binding peptide
  MOD_RES (1), (2): Xaa is C or S
  MOD_RES (16), (17), (18), (19), (20): Xaa is A or G
  MOD_RES (21), (22), (23), (24): Xaa is A or G or is absent
XXVPTKLNAISILYFXXXXXXXXXLKKYRGMAVSE

SEQ ID NO: 28347 - protein, 38 aa, Artificial Sequence
  GFR-binding peptide
  MOD_RES (4), (5): Xaa is C or S
  MOD_RES (19), (20), (21), (22), (23): Xaa is A or G
  MOD_RES (24), (25), (26), (27): Xaa is A or G or is absent
PASXXVPARLEPISILYLXXXXXXXXXKFKYEDMVVEA

SEQ ID NO: 28348 - protein, 39 aa, Artificial Sequence
  GFR-binding peptide
  MOD_RES (5), (6): Xaa is C or S
  MOD_RES (20), (21), (22), (23), (24): Xaa is A or G
  MOD_RES (25), (26), (27), (28): Xaa is A or G or is absent
VPKAXXAPTKLSPISVLYIXXXXXXXXXYKQYENMVVKA

SEQ ID NO: 28349 - protein, 36 aa, Artificial Sequence; identical to SEQ ID NO: 7182
  GFR-binding peptide
  MOD_RES (2), (3), (35): Xaa is C or S

SEQ ID NO: 28350 - protein, 38 aa, Artificial Sequence; identical to SEQ ID NO: 7184
  GFR-binding peptide
  MOD_RES (1), (2), (35), (37): Xaa is C or S
  MOD_RES (16), (17), (18), (19), (20): Xaa is A or G
  MOD_RES (21), (22), (23), (24): Xaa is A or G or is absent

SEQ ID NO: 28351 - protein, 43 aa, Artificial Sequence; identical to SEQ ID NO: 7185
  GFR-binding peptide
  MOD_RES (6), (7), (41), (43): Xaa is C or S
  MOD_RES (21), (22), (23), (24), (25): Xaa is A or G
  MOD_RES (26), (27), (28), (29): Xaa is A or G or is absent

SEQ ID NO: 28352 - protein, 35 aa, Artificial Sequence
  GFR-binding peptide
  MOD_RES (4), (5): Xaa is C or S
PASXXVPARLNAISILYFDAANNVVLKKYRDMVVE

SEQ ID NO: 28353 - protein, 41 aa, Artificial Sequence
  GFR-binding peptide
  MOD_RES (6), (7), (40): Xaa is C or S
  MOD_RES (21), (22), (23), (24), (25): Xaa is A or G
  MOD_RES (26), (27), (28), (29): Xaa is A or G or is absent
ASAAPXXVPQALSPISILYIXXXXXXXXXYKQYEMIVRSXK

SEQ ID NO: 28354 - protein, 34 aa, Artificial Sequence
  GFR-binding peptide
  MOD_RES (3), (4): Xaa is C or S
ASXXVPARLSPISILYKDAANNVVLKYHYDMVVE

SEQ ID NO: 28355 - protein, 34 aa, Artificial Sequence; identical to SEQ ID NO: 7189
  GFR-binding peptide
  MOD_RES (2), (3), (34): Xaa is C or S

SEQ ID NO: 28356 - protein, 39 aa, Artificial Sequence
  GFR-binding peptide
  MOD_RES (6), (7), (39): Xaa is C or S
AAPASXXVPARLNAISILYFDAANNVVLKKYRDMVVEAX

SEQ ID NO: 28357 - protein, 36 aa, Artificial Sequence
  GFR-binding peptide
  MOD_RES (33), (35): Xaa is C or S
VPTKLEPISVLYLDDMGVPTKFKYEEGMSVAEXGXR

SEQ ID NO: 28358 - protein, 42 aa, Artificial Sequence; identical to SEQ ID NO: 7191
  GFR-binding peptide
  MOD_RES (5), (6), (39), (41): Xaa is C or S
  MOD_RES (20), (21), (22), (23), (24): Xaa is A or G
  MOD_RES (25), (26), (27), (28): Xaa is A or G or is absent

SEQ ID NO: 28359 - protein, 31 aa, Artificial Sequence; identical to SEQ ID NO: 7192
  GFR-binding peptide

SEQ ID NO: 28360 - protein, 33 aa, Artificial Sequence; identical to SEQ ID NO: 7193
  GFR-binding peptide
  MOD_RES (2), (3): Xaa is C or S

SEQ ID NO: 28361 - protein, 36 aa, Artificial Sequence
  GFR-binding peptide
  MOD_RES (34), (36): Xaa is C or S
  MOD_RES (14), (15), (16), (17), (18): Xaa is A or G
  MOD_RES (19), (20), (21), (22): Xaa is A or G or is absent
VPTELSPISMLYIXXXXXXXXXYKQYEDMVVEGXGX

SEQ ID NO: 28362 - protein, 40 aa, Artificial Sequence
  GFR-binding peptide
  MOD_RES (4), (5), (39): Xaa is C or S
  MOD_RES (19), (20), (21), (22), (23): Xaa is A or G
  MOD_RES (24), (25), (26), (27): Xaa is A or G or is absent
SKAXXVPTKLSPISILYKXXXXXXXXXLKYHYGMAVSEXG

SEQ ID NO: 28363 - protein, 37 aa, Artificial Sequence; identical to SEQ ID NO: 7195
  GFR-binding peptide
  MOD_RES (1), (2), (34), (36): Xaa is C or S

SEQ ID NO: 28364 - protein, 37 aa, Artificial Sequence; identical to SEQ ID NO: 7196
  GFR-binding peptide
  MOD_RES (1), (2), (34), (36): Xaa is C or S

SEQ ID NO: 28365 - protein, 36 aa, Artificial Sequence; identical to SEQ ID NO: 7197
  GFR-binding peptide
  MOD_RES (1), (2), (36): Xaa is C or S
  MOD_RES (16), (17), (18), (19), (20): Xaa is A or G
  MOD_RES (21), (22), (23), (24): Xaa is A or G or is absent

SEQ ID NO: 28366 - protein, 41 aa, Artificial Sequence
  GFR-binding peptide
  MOD_RES (6), (7), (39), (41): Xaa is C or S
KASKAXXVPTKLNAISILYFDKGVVTYLKKYRGMAVSEXGX

SEQ ID NO: 28367 - protein, 37 aa, Artificial Sequence
  GFR-binding peptide
  MOD_RES (6), (7): Xaa is C or S
KIPKAXXVPTELSPISMLYIDENEKVVYKQYEDMVVE

SEQ ID NO: 28368 - protein, 37 aa, Artificial Sequence; identical to SEQ ID NO: 7199
  GFR-binding peptide
  MOD_RES (1), (35), (37): Xaa is C or S
  MOD_RES (15), (16), (17), (18), (19): Xaa is A or G
  MOD_RES (20), (21), (22), (23): Xaa is A or G or is absent

SEQ ID NO: 28369 - protein, 39 aa, Artificial Sequence
  GFR-binding peptide
  MOD_RES (4), (5), (39): Xaa is C or S
  MOD_RES (19), (20), (21), (22), (23): Xaa is A or G
  MOD_RES (24), (25), (26), (27): Xaa is A or G or is absent
PASXXVPARLSPISILYIXXXXXXXXXYKQYEDMVVEAX

SEQ ID NO: 28370 - protein, 37 aa, Artificial Sequence; identical to SEQ ID NO: 7200
  GFR-binding peptide
  MOD_RES (3), (4), (35), (37): Xaa is C or S

SEQ ID NO: 28371 - protein, 42 aa, Artificial Sequence; identical to SEQ ID NO: 7204
  GFR-binding peptide
  MOD_RES (5), (6), (40), (42): Xaa is C or S
  MOD_RES (20), (21), (22), (23), (24): Xaa is A or G
  MOD_RES (25), (26), (27), (28): Xaa is A or G or is absent

SEQ ID NO: 28372 - protein, 40 aa, Artificial Sequence; identical to SEQ ID NO: 7205
  GFR-binding peptide
  MOD_RES (6), (7), (39): Xaa is C or S

SEQ ID NO: 28373 - protein, 34 aa, Artificial Sequence
  GFR-binding peptide
  MOD_RES (34), (34): Xaa is C or S
  MOD_RES (14), (15), (16), (17), (18): Xaa is A or G
  MOD_RES (19), (20), (21), (22): Xaa is A or G or is absent
VPTELEPISMLYLXXXXXXXXXKFKYEEMVVEGX

SEQ ID NO: 28374 - protein, 37 aa, Artificial Sequence
  GFR-binding peptide
  MOD_RES (6), (7): Xaa is C or S
ASASPXXVSQDLEPISILYLIGKTPKIKFKYEMIVKS

SEQ ID NO: 28375 - protein, 39 aa, Artificial Sequence
  GFR-binding peptide
  MOD_RES (5), (6), (38): Xaa is C or S
APASXXVPARLSPISILYKDAANNVVLKYHYDMVVEAXG

SEQ ID NO: 28376 - protein, 38 aa, Artificial Sequence
  GFR-binding peptide
  MOD_RES (5), (6): Xaa is C or S
  MOD_RES (20), (21), (22), (23), (24): Xaa is A or G
  MOD_RES (25), (26), (27), (28): Xaa is A or G or is absent
SAAPXXVPQALSPISILYIXXXXXXXXXYKQYEMIVRS

SEQ ID NO: 28377 - protein, 32 aa, Artificial Sequence
  GFR-binding peptide
  MOD_RES (14), (15), (16), (17), (18): Xaa is A or G
  MOD_RES (19), (20), (21), (22): Xaa is A or G or is absent
VPTKLSPISILYIXXXXXXXXXYKQYEGMAVS

SEQ ID NO: 28378 - protein, 36 aa, Artificial Sequence; identical to SEQ ID NO: 7208
  GFR-binding peptide
  MOD_RES (1), (2), (36): Xaa is C or S
  MOD_RES (16), (17), (18), (19), (20): Xaa is A or G
  MOD_RES (21), (22), (23), (24): Xaa is A or G or is absent

SEQ ID NO: 28379 - protein, 37 aa, Artificial Sequence
  GFR-binding peptide
  MOD_RES (4), (5): Xaa is C or S
  MOD_RES (19), (20), (21), (22), (23): Xaa is A or G
  MOD_RES (24), (25), (26), (27): Xaa is A or G or is absent
PKAXXVPTELSPISMLYIXXXXXXXXXYKQYEEMVVE

SEQ ID NO: 28380 - protein, 36 aa, Artificial Sequence; identical to SEQ ID NO: 7214
  GFR-binding peptide
  MOD_RES (1), (33), (35): Xaa is C or S

SEQ ID NO: 28381 - protein, 38 aa, Artificial Sequence
  GFR-binding peptide
  MOD_RES (5), (6): Xaa is C or S
  MOD_RES (20), (21), (22), (23), (24): Xaa is A or G
  MOD_RES (25), (26), (27), (28): Xaa is A or G or is absent
APASXXVPARLEPISILYLXXXXXXXXXKFKYEDMVVE

SEQ ID NO: 28382 - protein, 33 aa, Artificial Sequence
  GFR-binding peptide
  MOD_RES (1), (1): Xaa is C or S
XVPTKLEPISVLYLDDMGVPTKFKYEEGMSVAE

SEQ ID NO: 28383 - protein, 32 aa, Artificial Sequence
  GFR-binding peptide
  MOD_RES (1), (1): Xaa is C or S
XVPARLSPISILYKDAANNVVLKYHYDMVVEA

SEQ ID NO: 28384 - protein, 43 aa, Artificial Sequence
  GFR-binding peptide
  MOD_RES (5), (6), (40), (42): Xaa is C or S
  MOD_RES (20), (21), (22), (23), (24): Xaa is A or G
  MOD_RES (25), (26), (27), (28): Xaa is A or G or is absent
ASKAXXVPTKLSPISILYKXXXXXXXXXLKYHYGMAVSEXGXR

SEQ ID NO: 28385 - protein, 41 aa, Artificial Sequence; identical to SEQ ID NO: 7220
  GFR-binding peptide
  MOD_RES (3), (4), (38), (40): Xaa is C or S
  MOD_RES (18), (19), (20), (21), (22): Xaa is A or G
  MOD_RES (23), (24), (25), (26): Xaa is A or G or is absent

SEQ ID NO: 28386 - protein, 41 aa, Artificial Sequence
  GFR-binding peptide
  MOD_RES (3), (4), (38), (40): Xaa is C or S
  MOD_RES (18), (19), (20), (21), (22): Xaa is A or G
  MOD_RES (23), (24), (25), (26): Xaa is A or G or is absent
KPXXAPTQLSPISVLYIXXXXXXXXXYKQYENMVVRAXGXH

SEQ ID NO: 28387 - protein, 37 aa, Artificial Sequence; identical to SEQ ID NO: 7224
  GFR-binding peptide
  MOD_RES (3), (4), (37): Xaa is C or S
  MOD_RES (18), (19), (20), (21), (22): Xaa is A or G
  MOD_RES (23), (24), (25), (26): Xaa is A or G or is absent

SEQ ID NO: 28388 - protein, 44 aa, Artificial Sequence
  GFR-binding peptide
  MOD_RES (7), (41), (43): Xaa is C or S
  MOD_RES (21), (22), (23), (24), (25): Xaa is A or G
  MOD_RES (26), (27), (28), (29): Xaa is A or G or is absent
HVTKPTXAPTKLSPISVLYIXXXXXXXXXYKQYENMVVRSXGXH

SEQ ID NO: 28389 - protein, 40 aa, Artificial Sequence
  GFR-binding peptide
  MOD_RES (5), (6), (40): Xaa is C or S
  MOD_RES (20), (21), (22), (23), (24): Xaa is A or G
  MOD_RES (25), (26), (27), (28): Xaa is A or G or is absent
ASKAXXVPTKLEPISILYLXXXXXXXXXKFKYEGMAVSEX

SEQ ID NO: 28390 - protein, 42 aa, Artificial Sequence
  GFR-binding peptide
  MOD_RES (6), (7), (39), (41): Xaa is C or S
SIPKAXXVPTELEPISMLYLDEYDKVVKFKYEEMVVEGXGXR

SEQ ID NO: 28391 - protein, 42 aa, Artificial Sequence
  GFR-binding peptide
  MOD_RES (4), (5), (39), (41): Xaa is C or S
  MOD_RES (19), (20), (21), (22), (23): Xaa is A or G
  MOD_RES (24), (25), (26), (27): Xaa is A or G or is absent
PKAXXAPTKLSPISVLYIXXXXXXXXXYKQYENMVVKAXGXH

SEQ ID NO: 28392 - protein, 44 aa, Artificial Sequence
  GFR-binding peptide
  MOD_RES (6), (7), (41), (43): Xaa is C or S
  MOD_RES (21), (22), (23), (24), (25): Xaa is A or G
  MOD_RES (26), (27), (28), (29): Xaa is A or G or is absent
AVPKAXXAPTKLSPISVLYIXXXXXXXXXYKQYENMVVKAXGXH

SEQ ID NO: 28393 - protein, 38 aa, Artificial Sequence
  GFR-binding peptide
  MOD_RES (4), (5): Xaa is C or S
  MOD_RES (19), (20), (21), (22), (23): Xaa is A or G
  MOD_RES (24), (25), (26), (27): Xaa is A or G or is absent
SKAXXVPTKLSPISILYKXXXXXXXXXLKYHYGMAVSE

SEQ ID NO: 28394 - protein, 38 aa, Artificial Sequence
  GFR-binding peptide
  MOD_RES (4), (5): Xaa is C or S
  MOD_RES (19), (20), (21), (22), (23): Xaa is A or G
  MOD_RES (24), (25), (26), (27): Xaa is A or G or is absent
PASXXVPARLSPISILYKXXXXXXXXXLKYHYDMVVEA

SEQ ID NO: 28395 - protein, 40 aa, Artificial Sequence
  GFR-binding peptide
  MOD_RES (6), (7), (38), (40): Xaa is C or S
ASAAPXXVPQALSPISILYIVGRKPKVYKQYEMIVRSXKX

SEQ ID NO: 28396 - protein, 36 aa, Artificial Sequence
  GFR-binding peptide
  MOD_RES (1), (2), (35): Xaa is C or S
XXVPTKLEPISVLYLDDMGVPTKFKYEEGMSVAEXG

SEQ ID NO: 28397 - protein, 34 aa, Artificial Sequence
  GFR-binding peptide
  MOD_RES (34), (34): Xaa is C or S
  MOD_RES (14), (15), (16), (17), (18): Xaa is A or G
  MOD_RES (19), (20), (21), (22): Xaa is A or G or is absent
VPTKLNAISILYFXXXXXXXXXLKKYRGMAVSEX

SEQ ID NO: 28398 - protein, 43 aa, Artificial Sequence
  GFR-binding peptide
  MOD_RES (5), (6), (40), (42): Xaa is C or S
  MOD_RES (20), (21), (22), (23), (24): Xaa is A or G
  MOD_RES (25), (26), (27), (28): Xaa is A or G or is absent
ASKAXXVPTKLSPISILYIXXXXXXXXXYKQYEGMAVSEXGXR

SEQ ID NO: 28399 - protein, 39 aa, Artificial Sequence; identical to SEQ ID NO: 7229
  GFR-binding peptide
  MOD_RES (5), (6), (38): Xaa is C or S

SEQ ID NO: 28400 - protein, 38 aa, Artificial Sequence
  GFR-binding peptide
  MOD_RES (3), (4), (36), (38): Xaa is C or S
KAXXVPTKLSPISILYKDKGVVTYLKYHYGMAVSEXGX

SEQ ID NO: 28401 - protein, 37 aa, Artificial Sequence
  GFR-binding peptide
  MOD_RES (4), (5), (37): Xaa is C or S
PKAXXVPTELSPISMLYIDENEKVVYKQYEDMVVEGX

SEQ ID NO: 28402 - protein, 37 aa, Artificial Sequence; identical to SEQ ID NO: 7231
  GFR-binding peptide
  MOD_RES (6), (7): Xaa is C or S

SEQ ID NO: 28403 - protein, 34 aa, Artificial Sequence; identical to SEQ ID NO: 7232
  GFR-binding peptide
  MOD_RES (2), (34): Xaa is C or S

SEQ ID NO: 28404 - protein, 39 aa, Artificial Sequence
  GFR-binding peptide
  MOD_RES (2), (3), (36), (38): Xaa is C or S
  MOD_RES (17), (18), (19), (20), (21): Xaa is A or G
  MOD_RES (22), (23), (24), (25): Xaa is A or G or is absent
PXXVSQDLEPISILYLXXXXXXXXXKFKYEMIVKSXKXS

SEQ ID NO: 28405 - protein, 35 aa, Artificial Sequence; identical to SEQ ID NO: 7233
  GFR-binding peptide
  MOD_RES (34), (34): Xaa is C or S
  MOD_RES (14), (15), (16), (17), (18): Xaa is A or G
  MOD_RES (19), (20), (21), (22): Xaa is A or G or is absent

SEQ ID NO: 28406 - protein, 40 aa, Artificial Sequence; identical to SEQ ID NO: 7234
  GFR-binding peptide
  MOD_RES (6), (7), (40): Xaa is C or S
  MOD_RES (21), (22), (23), (24), (25): Xaa is A or G
  MOD_RES (26), (27), (28), (29): Xaa is A or G or is absent

SEQ ID NO: 28407 - protein, 37 aa, Artificial Sequence
  GFR-binding peptide
  MOD_RES (4), (5), (36): Xaa is C or S
AAPXXVPQALEPISILYLVGRKPKVKFKYEMIVRSXK

SEQ ID NO: 28408 - protein, 33 aa, Artificial Sequence
  GFR-binding peptide
  MOD_RES (2), (3): Xaa is C or S
PXXAPTKLSPISVLYIDDSSNVIYKQYENMVVR

SEQ ID NO: 28409 - protein, 34 aa, Artificial Sequence
  GFR-binding peptide
  MOD_RES (1), (33): Xaa is C or S
XVPTELEPISMLYLDEYDKVVKFKYEEMVVEGXG

SEQ ID NO: 28410 - protein, 38 aa, Artificial Sequence
  GFR-binding peptide
  MOD_RES (5), (6), (38): Xaa is C or S
IPKAXXVPTELEPISMLYLDEYDKVVKFKYEEMVVEGX

SEQ ID NO: 28411 - protein, 38 aa, Artificial Sequence
  GFR-binding peptide
  MOD_RES (2), (3), (36), (38): Xaa is C or S
AXXVPTKLSPISVLYIDDMGVPTYKQYEEGMSVAEXGX

SEQ ID NO: 28412 - protein, 36 aa, Artificial Sequence; identical to SEQ ID NO: 7239
  GFR-binding peptide
  MOD_RES (3), (4): Xaa is C or S
  MOD_RES (18), (19), (20), (21), (22): Xaa is A or G
  MOD_RES (23), (24), (25), (26): Xaa is A or G or is absent

SEQ ID NO: 28413 - protein, 38 aa, Artificial Sequence
  GFR-binding peptide
  MOD_RES (1), (2), (35), (37): Xaa is C or S
  MOD_RES (16), (17), (18), (19), (20): Xaa is A or G
  MOD_RES (21), (22), (23), (24): Xaa is A or G or is absent
XXVPQALSPISILYIXXXXXXXXXYKQYEMIVRSXKXS

SEQ ID NO: 28414 - protein, 35 aa, Artificial Sequence; identical to SEQ ID NO: 7241
  GFR-binding peptide
  MOD_RES (3), (4): Xaa is C or S

SEQ ID NO: 28415 - protein, 31 aa, Artificial Sequence
  GFR-binding peptide
VPTELSPISMLYIDENEKVVYKQYEDMVVEG

SEQ ID NO: 28416 - protein, 40 aa, Artificial Sequence
  GFR-binding peptide
  MOD_RES (4), (5), (39): Xaa is C or S
  MOD_RES (19), (20), (21), (22), (23): Xaa is A or G
  MOD_RES (24), (25), (26), (27): Xaa is A or G or is absent
PKPXXAPTQLSPISVLYIXXXXXXXXXYKQYENMVVRAXG

SEQ ID NO: 28417 - protein, 38 aa, Artificial Sequence
  GFR-binding peptide
  MOD_RES (5), (6): Xaa is C or S
  MOD_RES (20), (21), (22), (23), (24): Xaa is A or G
  MOD_RES (25), (26), (27), (28): Xaa is A or G or is absent
VPKPXXAPTKLSPISVLYIXXXXXXXXXYKQYENMVVR

SEQ ID NO: 28418 - protein, 31 aa, Artificial Sequence; identical to SEQ ID NO: 7242
  GFR-binding peptide

SEQ ID NO: 28419 - protein, 35 aa, Artificial Sequence
  GFR-binding peptide
  MOD_RES (4), (4): Xaa is C or S
KPTXAPTKLEPISVLYLDDSSNVIKFKYENMVVRS

SEQ ID NO: 28420 - protein, 37 aa, Artificial Sequence
  GFR-binding peptide
  MOD_RES (34), (36): Xaa is C or S
  MOD_RES (14), (15), (16), (17), (18): Xaa is A or G
  MOD_RES (19), (20), (21), (22): Xaa is A or G or is absent
VPTKLSPISILYKXXXXXXXXXLKYHYGMAVSEXGXR

SEQ ID NO: 28421 - protein, 35 aa, Artificial Sequence
  GFR-binding peptide
  MOD_RES (1), (2): Xaa is C or S
  MOD_RES (16), (17), (18), (19), (20): Xaa is A or G
  MOD_RES (21), (22), (23), (24): Xaa is A or G or is absent
XXAPTKLEPISVLYLXXXXXXXXXKFKYENMVVRS

SEQ ID NO: 28422 - protein, 39 aa, Artificial Sequence
  GFR-binding peptide
  MOD_RES (3), (4), (38): Xaa is C or S
  MOD_RES (18), (19), (20), (21), (22): Xaa is A or G
  MOD_RES (23), (24), (25), (26): Xaa is A or G or is absent
KPXXAPTKLSPISVLYIXXXXXXXXXYKQYENMVVRSXG

SEQ ID NO: 28423 - protein, 36 aa, Artificial Sequence
  GFR-binding peptide
  MOD_RES (1), (35): Xaa is C or S
  MOD_RES (15), (16), (17), (18), (19): Xaa is A or G
  MOD_RES (20), (21), (22), (23): Xaa is A or G or is absent
XAPTQLSPISVLYIXXXXXXXXXYKQYENMVVRAXG

SEQ ID NO: 28424 - protein, 38 aa, Artificial Sequence
  GFR-binding peptide
  MOD_RES (5), (6): Xaa is C or S
  MOD_RES (20), (21), (22), (23), (24): Xaa is A or G
  MOD_RES (25), (26), (27), (28): Xaa is A or G or is absent
VPKPXXAPTQLEPISVLYLXXXXXXXXXKFKYENMVVR

SEQ ID NO: 28425 - protein, 36 aa, Artificial Sequence; identical to SEQ ID NO: 7244
  GFR-binding peptide
  MOD_RES (2), (3), (36): Xaa is C or S
  MOD_RES (17), (18), (19), (20), (21): Xaa is A or G
  MOD_RES (22), (23), (24), (25): Xaa is A or G or is absent

SEQ ID NO: 28426 - protein, 38 aa, Artificial Sequence
  GFR-binding peptide
  MOD_RES (4), (5): Xaa is C or S
  MOD_RES (19), (20), (21), (22), (23): Xaa is A or G
  MOD_RES (24), (25), (26), (27): Xaa is A or G or is absent
SKAXXVPTKLSPISILYIXXXXXXXXXYKQYEGMAVSE

SEQ ID NO: 28427 - protein, 33 aa, Artificial Sequence; identical to SEQ ID NO: 7245
  GFR-binding peptide
  MOD_RES (14), (15), (16), (17), (18): Xaa is A or G
  MOD_RES (19), (20), (21), (22): Xaa is A or G or is absent

SEQ ID NO: 28428 - protein, 35 aa, Artificial Sequence
  GFR-binding peptide
  MOD_RES (32), (34): Xaa is C or S
VPTELEPISMLYLDEYDKVVKFKYEEMVVEGXGXR

SEQ ID NO: 28429 - protein, 35 aa, Artificial Sequence
  GFR-binding peptide
  MOD_RES (1), (35): Xaa is C or S
  MOD_RES (15), (16), (17), (18), (19): Xaa is A or G
  MOD_RES (20), (21), (22), (23): Xaa is A or G or is absent
XAPTKLSPISVLYIXXXXXXXXXYKQYENMVVRSX

SEQ ID NO: 28430 - protein, 32 aa, Artificial Sequence
  GFR-binding peptide
  MOD_RES (1), (2): Xaa is C or S
XXVPQDLEPISILYLVGRTPKVKFKYEMVVKS

SEQ ID NO: 28431 - protein, 41 aa, Artificial Sequence
  GFR-binding peptide
  MOD_RES (5), (6), (38), (40): Xaa is C or S
ASKAXXVPTKLSPISILYIDKGVVTYYKQYEGMAVSEXGXR

SEQ ID NO: 28432 - protein, 40 aa, Artificial Sequence; identical to SEQ ID NO: 7247
  GFR-binding peptide
  MOD_RES (5), (37), (39): Xaa is C or S

SEQ ID NO: 28433 - protein, 43 aa, Artificial Sequence; identical to SEQ ID NO: 7248
  GFR-binding peptide
  MOD_RES (5), (6), (40), (42): Xaa is C or S
  MOD_RES (20), (21), (22), (23), (24): Xaa is A or G
  MOD_RES (25), (26), (27), (28): Xaa is A or G or is absent

SEQ ID NO: 28434 - protein, 37 aa, Artificial Sequence; identical to SEQ ID NO: 7250
  GFR-binding peptide
  MOD_RES (5), (37): Xaa is C or S

SEQ ID NO: 28435 - protein, 35 aa, Artificial Sequence
  GFR-binding peptide
  MOD_RES (2), (3), (35): Xaa is C or S
AXXVPTKLSPISILYKDKGVVTYLKYHYGMAVSEX

SEQ ID NO: 28436 - protein, 37 aa, Artificial Sequence
  GFR-binding peptide
  MOD_RES (35), (37): Xaa is C or S
  MOD_RES (14), (15), (16), (17), (18): Xaa is A or G
  MOD_RES (19), (20), (21), (22): Xaa is A or G or is absent
VPTKLSPISVLYIXXXXXXXXXYKQYEEGMSVAEXGX

SEQ ID NO: 28437 - protein, 37 aa, Artificial Sequence
  GFR-binding peptide
  MOD_RES (1), (34), (36): Xaa is C or S
  MOD_RES (15), (16), (17), (18), (19): Xaa is A or G
  MOD_RES (20), (21), (22), (23): Xaa is A or G or is absent
XVSQDLEPISILYLXXXXXXXXXKFKYEMIVKSXKXS

SEQ ID NO: 28438 - protein, 40 aa, Artificial Sequence
  GFR-binding peptide
  MOD_RES (5), (6), (38), (40): Xaa is C or S
ASKAXXVPTKLNAISILYFDKGVVTYLKKYRGMAVSEXGX

SEQ ID NO: 28439 - protein, 40 aa, Artificial Sequence; identical to SEQ ID NO: 7256
  GFR-binding peptide
  MOD_RES (5), (6), (37), (39): Xaa is C or S

SEQ ID NO: 28440 - protein, 38 aa, Artificial Sequence
  GFR-binding peptide
  MOD_RES (4), (5), (37): Xaa is C or S
PKAXXVPTELSPISMLYIDENEKVVYKQYEDMVVEGXG

SEQ ID NO: 28441 - protein, 40 aa, Artificial Sequence; identical to SEQ ID NO: 7257
  GFR-binding peptide
  MOD_RES (4), (5), (39): Xaa is C or S
  MOD_RES (19), (20), (21), (22), (23): Xaa is A or G
  MOD_RES (24), (25), (26), (27): Xaa is A or G or is absent

SEQ ID NO: 28442 - protein, 37 aa, Artificial Sequence
  GFR-binding peptide
  MOD_RES (2), (3), (37): Xaa is C or S
  MOD_RES (17), (18), (19), (20), (21): Xaa is A or G
  MOD_RES (22), (23), (24), (25): Xaa is A or G or is absent
AXXVPTKLSPISILYIXXXXXXXXXYKQYEGMAVSEX

SEQ ID NO: 28443 - protein, 32 aa, Artificial Sequence; identical to SEQ ID NO: 7261
  GFR-binding peptide
  MOD_RES (14), (15), (16), (17), (18): Xaa is A or G
  MOD_RES (19), (20), (21), (22): Xaa is A or G or is absent

SEQ ID NO: 28444 - protein, 40 aa, Artificial Sequence
  GFR-binding peptide
  MOD_RES (5), (6), (38), (40): Xaa is C or S
VPKAXXAPTKLSPISVLYIDSSNNVIYKQYENMVVKAXGX

SEQ ID NO: 28445 - protein, 38 aa, Artificial Sequence
  GFR-binding peptide
  MOD_RES (5), (6), (37): Xaa is C or S
SASPXXVSQDLEPISILYLIGKTPKIKFKYEMIVKSXK

SEQ ID NO: 28446 - protein, 37 aa, Artificial Sequence
  GFR-binding peptide
  MOD_RES (1), (35), (37): Xaa is C or S
  MOD_RES (15), (16), (17), (18), (19): Xaa is A or G
  MOD_RES (20), (21), (22), (23): Xaa is A or G or is absent
XVPTKLSPISILYIXXXXXXXXXYKQYEGMAVSEXGX

SEQ ID NO: 28447 - protein, 33 aa, Artificial Sequence; identical to SEQ ID NO: 7267
  GFR-binding peptide
  MOD_RES (1), (2): Xaa is C or S

SEQ ID NO: 28448 - protein, 43 aa, Artificial Sequence
  GFR-binding peptide
  MOD_RES (5), (6), (40), (42): Xaa is C or S
  MOD_RES (20), (21), (22), (23), (24): Xaa is A or G
  MOD_RES (25), (26), (27), (28): Xaa is A or G or is absent
IPKAXXVPTELEPISMLYLXXXXXXXXXKFKYEDMVVEGXGXR

SEQ ID NO: 28449 - protein, 32 aa, Artificial Sequence
  GFR-binding peptide
  MOD_RES (32), (32): Xaa is C or S
VPTKLNAISILYFDKGVVTYLKKYRGMAVSEX

SEQ ID NO: 28450 - protein, 38 aa, Artificial Sequence; identical to SEQ ID NO: 7275
  GFR-binding peptide
  MOD_RES (3), (4), (37): Xaa is C or S
  MOD_RES (18), (19), (20), (21), (22): Xaa is A or G
  MOD_RES (23), (24), (25), (26): Xaa is A or G or is absent

SEQ ID NO: 28451 - protein, 40 aa, Artificial Sequence
  GFR-binding peptide
  MOD_RES (4), (5), (39): Xaa is C or S
  MOD_RES (19), (20), (21), (22), (23): Xaa is A or G
  MOD_RES (24), (25), (26), (27): Xaa is A or G or is absent
SKAXXVPTKLNAISILYFXXXXXXXXXLKKYRGMAVSEXG

SEQ ID NO: 28452 - protein, 33 aa, Artificial Sequence
  GFR-binding peptide
  MOD_RES (1), (1): Xaa is C or S
  MOD_RES (15), (16), (17), (18), (19): Xaa is A or G
  MOD_RES (20), (21), (22), (23): Xaa is A or G or is absent
XVSQDLSPISILYIXXXXXXXXXYKQYEMIVKS

SEQ ID NO: 28453 - protein, 36 aa, Artificial Sequence
  GFR-binding peptide
  MOD_RES (2), (3), (35): Xaa is C or S
SXXVPARLEPISILYLDAANNVVKFKYEDMVVEAXG

SEQ ID NO: 28454 - protein, 33 aa, Artificial Sequence
  GFR-binding peptide
  MOD_RES (1), (1): Xaa is C or S
  MOD_RES (15), (16), (17), (18), (19): Xaa is A or G
  MOD_RES (20), (21), (22), (23): Xaa is A or G or is absent
XVPARLSPISILYKXXXXXXXXXLKYHYDMVVE

SEQ ID NO: 28455 - protein, 41 aa, Artificial Sequence; identical to SEQ ID NO: 7278
  GFR-binding peptide
  MOD_RES (4), (5), (38), (40): Xaa is C or S
  MOD_RES (19), (20), (21), (22), (23): Xaa is A or G
  MOD_RES (24), (25), (26), (27): Xaa is A or G or is absent

SEQ ID NO: 28456 - protein, 34 aa, Artificial Sequence; identical to SEQ ID NO: 7279
  GFR-binding peptide
  MOD_RES (3), (4): Xaa is C or S

SEQ ID NO: 28457 - protein, 36 aa, Artificial Sequence; identical to SEQ ID NO: 7280
  GFR-binding peptide
  MOD_RES (1), (33), (35): Xaa is C or S

SEQ ID NO: 28458 - protein, 39 aa, Artificial Sequence; identical to SEQ ID NO: 7281
  GFR-binding peptide
  MOD_RES (5), (6), (38): Xaa is C or S

SEQ ID NO: 28459 - protein, 32 aa, Artificial Sequence
  GFR-binding peptide
  MOD_RES (14), (15), (16), (17), (18): Xaa is A or G
  MOD_RES (19), (20), (21), (22): Xaa is A or G or is absent
VPTELEPISMLYLXXXXXXXXXKFKYEDMVVE

SEQ ID NO: 28460 - protein, 33 aa, Artificial Sequence; identical to SEQ ID NO: 7284
  GFR-binding peptide
  MOD_RES (32), (32): Xaa is C or S

SEQ ID NO: 28461 - protein, 36 aa, Artificial Sequence
  GFR-binding peptide
  MOD_RES (3), (35): Xaa is C or S
PTXAPTKLSPISVLYIDDSSNVIYKQYENMVVRSXG

SEQ ID NO: 28462 - protein, 34 aa, Artificial Sequence
  GFR-binding peptide
  MOD_RES (2), (3): Xaa is C or S
SXXVPARLNAISILYFDAANNVVLKKYRDMVVEA

SEQ ID NO: 28463 - protein, 32 aa, Artificial Sequence
  GFR-binding peptide
  MOD_RES (32), (32): Xaa is C or S
VPTKLSPISILYKDKGVVTYLKYHYGMAVSEX

SEQ ID NO: 28464 - protein, 39 aa, Artificial Sequence
  GFR-binding peptide
  MOD_RES (4), (5), (37), (39): Xaa is C or S
PASXXVPARLEPISILYLDAANNVVKFKYEDMVVEAXGX

SEQ ID NO: 28465 - protein, 37 aa, Artificial Sequence; identical to SEQ ID NO: 7287
  GFR-binding peptide
  MOD_RES (3), (4): Xaa is C or S
  MOD_RES (18), (19), (20), (21), (22): Xaa is A or G
  MOD_RES (23), (24), (25), (26): Xaa is A or G or is absent

SEQ ID NO: 28466 - protein, 33 aa, Artificial Sequence
  GFR-binding peptide
  MOD_RES (14), (15), (16), (17), (18): Xaa is A or G
  MOD_RES (19), (20), (21), (22): Xaa is A or G or is absent
VPARLNAISILYFXXXXXXXXXLKKYRDMVVEA

SEQ ID NO: 28467 - protein, 42 aa, Artificial Sequence; identical to SEQ ID NO: 7288
  GFR-binding peptide
  MOD_RES (5), (6), (40), (42): Xaa is C or S
  MOD_RES (20), (21), (22), (23), (24): Xaa is A or G
  MOD_RES (25), (26), (27), (28): Xaa is A or G or is absent

SEQ ID NO: 28468 - protein, 37 aa, Artificial Sequence
  GFR-binding peptide
  MOD_RES (4), (5): Xaa is C or S
  MOD_RES (19), (20), (21), (22), (23): Xaa is A or G
  MOD_RES (24), (25), (26), (27): Xaa is A or G or is absent
SKAXXVPTKLEPISILYLXXXXXXXXXKFKYEGMAVS

SEQ ID NO: 28469 - protein, 34 aa, Artificial Sequence; identical to SEQ ID NO: 7289
  GFR-binding peptide
  MOD_RES (31), (33): Xaa is C or S

SEQ ID NO: 28470 - protein, 39 aa, Artificial Sequence; identical to SEQ ID NO: 7290
  GFR-binding peptide
  MOD_RES (4), (5), (37), (39): Xaa is C or S

SEQ ID NO: 28471 - protein, 35 aa, Artificial Sequence; identical to SEQ ID NO: 7292
  GFR-binding peptide
  MOD_RES (2), (3): Xaa is C or S
  MOD_RES (17), (18), (19), (20), (21): Xaa is A or G
  MOD_RES (22), (23), (24), (25): Xaa is A or G or is absent

SEQ ID NO: 28472 - protein, 35 aa, Artificial Sequence; identical to SEQ ID NO: 7293
  GFR-binding peptide
  MOD_RES (4), (5): Xaa is C or S

SEQ ID NO: 28473 - protein, 36 aa, Artificial Sequence
  GFR-binding peptide
  MOD_RES (1), (2), (35): Xaa is C or S
  MOD_RES (16), (17), (18), (19), (20): Xaa is A or G
  MOD_RES (21), (22), (23), (24): Xaa is A or G or is absent
XXVSQDLEPISILYLXXXXXXXXXKFKYEMIVKSXK

SEQ ID NO: 28474 - protein, 36 aa, Artificial Sequence
  GFR-binding peptide
  MOD_RES (3), (4), (36): Xaa is C or S
KAXXAPTKLSPISVLYIDSSNNVIYKQYENMVVKAX

SEQ ID NO: 28475 - protein, 34 aa, Artificial Sequence
  GFR-binding peptide
  MOD_RES (33), (33): Xaa is C or S
  MOD_RES (14), (15), (16), (17), (18): Xaa is A or G
  MOD_RES (19), (20), (21), (22): Xaa is A or G or is absent
VPQDLEPISILYLXXXXXXXXXKFKYEMVVKSXK

SEQ ID NO: 28476 - protein, 35 aa, Artificial Sequence; identical to SEQ ID NO: 7296
  GFR-binding peptide
  MOD_RES (2), (34): Xaa is C or S

SEQ ID NO: 28477 - protein, 31 aa, Artificial Sequence
  GFR-binding peptide
  MOD_RES (1), (1): Xaa is C or S
XVPQDLEPISILYLVGRTPKVKFKYEMVVKS

SEQ ID NO: 28478 - protein, 35 aa, Artificial Sequence; identical to SEQ ID NO: 7297
  GFR-binding peptide
  MOD_RES (1), (2): Xaa is C or S
  MOD_RES (16), (17), (18), (19), (20): Xaa is A or G
  MOD_RES (21), (22), (23), (24): Xaa is A or G or is absent

SEQ ID NO: 28479 - protein, 40 aa, Artificial Sequence; identical to SEQ ID NO: 7298
  GFR-binding peptide
  MOD_RES (4), (5), (38), (40): Xaa is C or S
  MOD_RES (19), (20), (21), (22), (23): Xaa is A or G
  MOD_RES (24), (25), (26), (27): Xaa is A or G or is absent

SEQ ID NO: 28480 - protein, 37 aa, Artificial Sequence
  GFR-binding peptide
  MOD_RES (4), (5), (36): Xaa is C or S
ASPXXVPQDLSPISILYIVGRTPKVYKQYEMVVKSXK

SEQ ID NO: 28481 - protein, 41 aa, Artificial Sequence; identical to SEQ ID NO: 7302
  GFR-binding peptide
  MOD_RES (5), (6), (39), (41): Xaa is C or S
  MOD_RES (20), (21), (22), (23), (24): Xaa is A or G
  MOD_RES (25), (26), (27), (28): Xaa is A or G or is absent

SEQ ID NO: 28482 - protein, 36 aa, Artificial Sequence
  GFR-binding peptide
  MOD_RES (34), (36): Xaa is C or S
  MOD_RES (14), (15), (16), (17), (18): Xaa is A or G
  MOD_RES (19), (20), (21), (22): Xaa is A or G or is absent
VPTELEPISMLYLXXXXXXXXXKFKYEDMVVEGXGX

SEQ ID NO: 28483 - protein, 30 aa, Artificial Sequence; identical to SEQ ID NO: 7304
  GFR-binding peptide

SEQ ID NO: 28484 - protein, 34 aa, Artificial Sequence
  GFR-binding peptide
  MOD_RES (1), (2), (33): Xaa is C or S
XXVSQDLSPISILYIIGKTPKIYKQYEMIVKSXK

SEQ ID NO: 28485 - protein, 34 aa, Artificial Sequence; identical to SEQ ID NO: 7305
  GFR-binding peptide
  MOD_RES (1), (2): Xaa is C or S
  MOD_RES (16), (17), (18), (19), (20): Xaa is A or G
  MOD_RES (21), (22), (23), (24): Xaa is A or G or is absent

SEQ ID NO: 28486 - protein, 41 aa, Artificial Sequence
  GFR-binding peptide
  MOD_RES (5), (6), (38), (40): Xaa is C or S
VPKPXXAPTKLSPISVLYIDDSSNVIYKQYENMVVRSXGXH

SEQ ID NO: 28487 - protein, 42 aa, Artificial Sequence
  GFR-binding peptide
  MOD_RES (5), (6), (40), (42): Xaa is C or S
  MOD_RES (20), (21), (22), (23), (24): Xaa is A or G
  MOD_RES (25), (26), (27), (28): Xaa is A or G or is absent
VPKPXXAPTKLSPISVLYIXXXXXXXXXYKQYENMVVRSXGX

SEQ ID NO: 28488 - protein, 32 aa, Artificial Sequence; identical to SEQ ID NO: 7306
  GFR-binding peptide
  MOD_RES (14), (15), (16), (17), (18): Xaa is A or G
  MOD_RES (19), (20), (21), (22): Xaa is A or G or is absent

SEQ ID NO: 28489 - protein, 33 aa, Artificial Sequence; identical to SEQ ID NO: 7307
  GFR-binding peptide
  MOD_RES (1), (1): Xaa is C or S
  MOD_RES (15), (16), (17), (18), (19): Xaa is A or G
  MOD_RES (20), (21), (22), (23): Xaa is A or G or is absent

SEQ ID NO: 28490 - protein, 35 aa, Artificial Sequence
  GFR-binding peptide
  MOD_RES (2), (3), (35): Xaa is C or S
AXXVPTKLNAISILYFDKGVVTYLKKYRGMAVSEX

SEQ ID NO: 28491 - protein, 36 aa, Artificial Sequence; identical to SEQ ID NO: 7309
  GFR-binding peptide
  MOD_RES (2), (3): Xaa is C or S
  MOD_RES (17), (18), (19), (20), (21): Xaa is A or G
  MOD_RES (22), (23), (24), (25): Xaa is A or G or is absent

SEQ ID NO: 28492 - protein, 37 aa, Artificial Sequence; identical to SEQ ID NO: 7310
  GFR-binding peptide
  MOD_RES (3), (4), (35), (37): Xaa is C or S

SEQ ID NO: 28493 - protein, 40 aa, Artificial Sequence
  GFR-binding peptide
  MOD_RES (6), (38), (40): Xaa is C or S
VTKPTXAPTKLEPISVLYLDDSSNVIKFKYENMVVRSXGX

SEQ ID NO: 28494 - protein, 36 aa, Artificial Sequence
  GFR-binding peptide
  MOD_RES (3), (4), (36): Xaa is C or S
KPXXAPTQLSPISVLYIDDSSNVIYKQYENMVVRAX

SEQ ID NO: 28495 - protein, 37 aa, Artificial Sequence
  GFR-binding peptide
  MOD_RES (1), (35), (37): Xaa is C or S
  MOD_RES (15), (16), (17), (18), (19): Xaa is A or G
  MOD_RES (20), (21), (22), (23): Xaa is A or G or is absent
XVPTKLEPISILYLXXXXXXXXXKFKYEGMAVSEXGX

SEQ ID NO: 28496 - protein, 37 aa, Artificial Sequence
  GFR-binding peptide
  MOD_RES (3), (4), (37): Xaa is C or S
  MOD_RES (18), (19), (20), (21), (22): Xaa is A or G
  MOD_RES (23), (24), (25), (26): Xaa is A or G or is absent
APXXVPQALEPISILYLXXXXXXXXXKFKYEMIVRSX

SEQ ID NO: 28497 - protein, 35 aa, Artificial Sequence
  GFR-binding peptide
  MOD_RES (32), (34): Xaa is C or S
VPTELEPISMLYLDENEKVVKFKYEDMVVEGXGXR

SEQ ID NO: 28498 - protein, 38 aa, Artificial Sequence; identical to SEQ ID NO: 7312
  GFR-binding peptide
  MOD_RES (4), (5), (36), (38): Xaa is C or S

SEQ ID NO: 28499 - protein, 40 aa, Artificial Sequence
  GFR-binding peptide
  MOD_RES (4), (5), (37), (39): Xaa is C or S
PKAXXAPTKLSPISVLYIDSSNNVIYKQYENMVVKAXGXH

SEQ ID NO: 28500 - protein, 40 aa, Artificial Sequence; identical to SEQ ID NO: 7313
  GFR-binding peptide
  MOD_RES (4), (5), (37), (39): Xaa is C or S

SEQ ID NO: 28501 - protein, 34 aa, Artificial Sequence
  GFR-binding peptide
  MOD_RES (1), (2), (33): Xaa is C or S
XXVPQDLSPISILYIVGRTPKVYKQYEMVVKSXK

SEQ ID NO: 28502 - protein, 42 aa, Artificial Sequence; identical to SEQ ID NO: 7314
  GFR-binding peptide
  MOD_RES (4), (5), (39), (41): Xaa is C or S
  MOD_RES (19), (20), (21), (22), (23): Xaa is A or G
  MOD_RES (24), (25), (26), (27): Xaa is A or G or is absent

SEQ ID NO: 28503 - protein, 35 aa, Artificial Sequence; identical to SEQ ID NO: 7316
  GFR-binding peptide
  MOD_RES (34), (34): Xaa is C or S
  MOD_RES (14), (15), (16), (17), (18): Xaa is A or G
  MOD_RES (19), (20), (21), (22): Xaa is A or G or is absent

SEQ ID NO: 28504 - protein, 43 aa, Artificial Sequence; identical to SEQ ID NO: 7317
  GFR-binding peptide
  MOD_RES (5), (6), (41), (43): Xaa is C or S
  MOD_RES (20), (21), (22), (23), (24): Xaa is A or G
  MOD_RES (25), (26), (27), (28): Xaa is A or G or is absent

SEQ ID NO: 28505 - protein, 39 aa, Artificial Sequence; identical to SEQ ID NO: 7318
  GFR-binding peptide
  MOD_RES (5), (39): Xaa is C or S
  MOD_RES (19), (20), (21), (22), (23): Xaa is A or G
  MOD_RES (24), (25), (26), (27): Xaa is A or G or is absent

SEQ ID NO: 28506 - protein, 36 aa, Artificial Sequence
  GFR-binding peptide
  MOD_RES (34), (36): Xaa is C or S
  MOD_RES (14), (15), (16), (17), (18): Xaa is A or G
  MOD_RES (19), (20), (21), (22): Xaa is A or G or is absent
VPTKLNAISILYFXXXXXXXXXLKKYRGMAVSEXGX

SEQ ID NO: 28507 - protein, 39 aa, Artificial Sequence
  GFR-binding peptide
  MOD_RES (4), (5), (39): Xaa is C or S
  MOD_RES (19), (20), (21), (22), (23): Xaa is A or G
  MOD_RES (24), (25), (26), (27): Xaa is A or G or is absent
SKAXXVPTKLNAISILYFXXXXXXXXXLKKYRGMAVSEX

SEQ ID NO: 28508 - protein, 34 aa, Artificial Sequence; identical to SEQ ID NO: 7321
  GFR-binding peptide
  MOD_RES (1), (1): Xaa is C or S
  MOD_RES (15), (16), (17), (18), (19): Xaa is A or G
  MOD_RES (20), (21), (22), (23): Xaa is A or G or is absent

SEQ ID NO: 28509 - protein, 37 aa, Artificial Sequence; identical to SEQ ID NO: 7322
  GFR-binding peptide
  MOD_RES (2), (3), (34), (36): Xaa is C or S

SEQ ID NO: 28510 - protein, 37 aa, Artificial Sequence
  GFR-binding peptide
  MOD_RES (2), (3), (37): Xaa is C or S
  MOD_RES (17), (18), (19), (20), (21): Xaa is A or G
  MOD_RES (22), (23), (24), (25): Xaa is A or G or is absent
SXXVPARLSPISILYIXXXXXXXXXYKQYEDMVVEAX

SEQ ID NO: 28511 - protein, 35 aa, Artificial Sequence
  GFR-binding peptide
  MOD_RES (1), (2), (34): Xaa is C or S
XXVPTELEPISMLYLDENEKVVKFKYEDMVVEGXG

SEQ ID NO: 28512 - protein, 42 aa, Artificial Sequence
  GFR-binding peptide
  MOD_RES (5), (6), (39), (41): Xaa is C or S
  MOD_RES (20), (21), (22), (23), (24): Xaa is A or G
  MOD_RES (25), (26), (27), (28): Xaa is A or G or is absent
SASPXXVSQDLSPISILYIXXXXXXXXXYKQYEMIVKSXKXS

SEQ ID NO: 28513 - protein, 35 aa, Artificial Sequence
  GFR-binding peptide
  MOD_RES (34), (34): Xaa is C or S
  MOD_RES (14), (15), (16), (17), (18): Xaa is A or G
  MOD_RES (19), (20), (21), (22): Xaa is A or G or is absent
APTKLEPISVLYLXXXXXXXXXKFKYENMVVKAXG

SEQ ID NO: 28514 - protein, 41 aa, Artificial Sequence; identical to SEQ ID NO: 7327
  GFR-binding peptide
  MOD_RES (4), (5), (38), (40): Xaa is C or S
  MOD_RES (19), (20), (21), (22), (23): Xaa is A or G
  MOD_RES (24), (25), (26), (27): Xaa is A or G or is absent

SEQ ID NO: 28515 - protein, 40 aa, Artificial Sequence; identical to SEQ ID NO: 7328
  GFR-binding peptide
  MOD_RES (6), (7), (39): Xaa is C or S

SEQ ID NO: 28516 - protein, 42 aa, Artificial Sequence
  GFR-binding peptide
  MOD_RES (6), (7), (41): Xaa is C or S
  MOD_RES (21), (22), (23), (24), (25): Xaa is A or G
  MOD_RES (26), (27), (28), (29): Xaa is A or G or is absent
KASKAXXVPTKLEPISILYLXXXXXXXXXKFKYEGMAVSEXG

SEQ ID NO: 28517 - protein, 35 aa, Artificial Sequence
  GFR-binding peptide
  MOD_RES (2), (3), (34): Xaa is C or S
PXXVPQDLEPISILYLVGRTPKVKFKYEMVVKSXK

SEQ ID NO: 28518 - protein, 36 aa, Artificial Sequence
  GFR-binding peptide
  MOD_RES (2), (3), (35): Xaa is C or S
AXXAPTKLEPISVLYLDSSNNVIKFKYENMVVKAXG

SEQ ID NO: 28519 - protein, 32 aa, Artificial Sequence; identical to SEQ ID NO: 7331
  GFR-binding peptide
  MOD_RES (32), (32): Xaa is C or S

SEQ ID NO: 28520 - protein, 38 aa, Artificial Sequence
  GFR-binding peptide
  MOD_RES (2), (3), (35), (37): Xaa is C or S
SXXVPARLNAISILYFDAANNVVLKKYRDMVVEAXGXR

SEQ ID NO: 28521 - protein, 32 aa, Artificial Sequence
  GFR-binding peptide
  MOD_RES (32), (32): Xaa is C or S
APTKLEPISVLYLDDSSNVIKFKYENMVVRSX

SEQ ID NO: 28522 - protein, 41 aa, Artificial Sequence
  GFR-binding peptide
  MOD_RES (7), (41): Xaa is C or S
  MOD_RES (21), (22), (23), (24), (25): Xaa is A or G
  MOD_RES (26), (27), (28), (29): Xaa is A or G or is absent
HVTKPTXAPTKLEPISVLYLXXXXXXXXXKFKYENMVVRSX

SEQ ID NO: 28523 - protein, 36 aa, Artificial Sequence; identical to SEQ ID NO: 7332
  GFR-binding peptide
  MOD_RES (2), (3), (34), (36): Xaa is C or S

SEQ ID NO: 28524 - protein, 35 aa, Artificial Sequence
  GFR-binding peptide
  MOD_RES (2), (3), (35): Xaa is C or S
SXXVPARLNAISILYFDAANNVVLKKYRDMVVEAX

SEQ ID NO: 28525 - protein, 40 aa, Artificial Sequence
  GFR-binding peptide
  MOD_RES (2), (3), (37), (39): Xaa is C or S
  MOD_RES (17), (18), (19), (20), (21): Xaa is A or G
  MOD_RES (22), (23), (24), (25): Xaa is A or G or is absent
SXXVPARLSPISILYIXXXXXXXXXYKQYEDMVVEAXGXR

SEQ ID NO: 28526 - protein, 35 aa, Artificial Sequence
  GFR-binding peptide
  MOD_RES (3), (4): Xaa is C or S
KAXXVPTKLSPISILYKDKGVVTYLKYHYGMAVSE

SEQ ID NO: 28527 - protein, 38 aa, Artificial Sequence; identical to SEQ ID NO: 7336
  GFR-binding peptide
  MOD_RES (4), (5): Xaa is C or S
  MOD_RES (19), (20), (21), (22), (23): Xaa is A or G
  MOD_RES (24), (25), (26), (27): Xaa is A or G or is absent

SEQ ID NO: 28528 - protein, 35 aa, Artificial Sequence; identical to SEQ ID NO: 7338
  GFR-binding peptide
  MOD_RES (1), (2), (35): Xaa is C or S
  MOD_RES (16), (17), (18), (19), (20): Xaa is A or G
  MOD_RES (21), (22), (23), (24): Xaa is A or G or is absent

SEQ ID NO: 28529 - protein, 34 aa, Artificial Sequence
  GFR-binding peptide
  MOD_RES (3), (4): Xaa is C or S
KAXXVPTKLNAISILYFDKGVVTYLKKYRGMAVS

SEQ ID NO: 28530 - protein, 36 aa, Artificial Sequence; identical to SEQ ID NO: 7339
  GFR-binding peptide
  MOD_RES (1), (34), (36): Xaa is C or S
  MOD_RES (15), (16), (17), (18), (19): Xaa is A or G
  MOD_RES (20), (21), (22), (23): Xaa is A or G or is absent

SEQ ID NO: 28531 - protein, 34 aa, Artificial Sequence; identical to SEQ ID NO: 7340
  GFR-binding peptide
  MOD_RES (1), (34): Xaa is C or S
  MOD_RES (15), (16), (17), (18), (19): Xaa is A or G
  MOD_RES (20), (21), (22), (23): Xaa is A or G or is absent

SEQ ID NO: 28532 - protein, 38 aa, Artificial Sequence
  GFR-binding peptide
  MOD_RES (4), (5), (37): Xaa is C or S
SKAXXVPTKLNAISILYFDKGVVTYLKKYRGMAVSEXG

SEQ ID NO: 28533 - protein, 39 aa, Artificial Sequence
  GFR-binding peptide
  MOD_RES (6), (7), (39): Xaa is C or S
SIPKAXXVPTELEPISMLYLDEYDKVVKFKYEEMVVEGX

SEQ ID NO: 28534 - protein, 39 aa, Artificial Sequence
  GFR-binding peptide
  MOD_RES (5), (6), (37), (39): Xaa is C or S
SAAPXXVPQALSPISILYIVGRKPKVYKQYEMIVRSXKX

SEQ ID NO: 28535 - protein, 36 aa, Artificial Sequence
  GFR-binding peptide
  MOD_RES (1), (2), (34), (36): Xaa is C or S
XXAPTQLSPISVLYIDDSSNVIYKQYENMVVRAXGX

SEQ ID NO: 28536 - protein, 36 aa, Artificial Sequence
  GFR-binding peptide
  MOD_RES (2), (3): Xaa is C or S
  MOD_RES (17), (18), (19), (20), (21): Xaa is A or G
  MOD_RES (22), (23), (24), (25): Xaa is A or G or is absent
AXXAPTKLSPISVLYIXXXXXXXXXYKQYENMVVKA

SEQ ID NO: 28537 - protein, 38 aa, Artificial Sequence
  GFR-binding peptide
  MOD_RES (1), (2), (36), (38): Xaa is C or S
  MOD_RES (16), (17), (18), (19), (20): Xaa is A or G
  MOD_RES (21), (22), (23), (24): Xaa is A or G or is absent
XXVPARLNAISILYFXXXXXXXXXLKKYRDMVVEAXGX

SEQ ID NO: 28538 - protein, 38 aa, Artificial Sequence
  GFR-binding peptide
  MOD_RES (5), (6): Xaa is C or S
  MOD_RES (20), (21), (22), (23), (24): Xaa is A or G
  MOD_RES (25), (26), (27), (28): Xaa is A or G or is absent
SASPXXVPQDLEPISILYLXXXXXXXXXKFKYEMVVKS

SEQ ID NO: 28539 - protein, 37 aa, Artificial Sequence
  GFR-binding peptide
  MOD_RES (6), (7): Xaa is C or S
YVPKPXXAPTKLEPISVLYLDDSSNVIKFKYENMVVR

SEQ ID NO: 28540 - protein, 34 aa, Artificial Sequence
  GFR-binding peptide
  MOD_RES (2), (3): Xaa is C or S
AXXVPTELEPISMLYLDEYDKVVKFKYEEMVVEG

SEQ ID NO: 28541 - protein, 41 aa, Artificial Sequence
  GFR-binding peptide
  MOD_RES (4), (38), (40): Xaa is C or S
  MOD_RES (18), (19), (20), (21), (22): Xaa is A or G
  MOD_RES (23), (24), (25), (26): Xaa is A or G or is absent
KPTXAPTKLSPISVLYIXXXXXXXXXYKQYENMVVRSXGXH

SEQ ID NO: 28542 - protein, 40 aa, Artificial Sequence
  GFR-binding peptide
  MOD_RES (4), (5), (39): Xaa is C or S
  MOD_RES (19), (20), (21), (22), (23): Xaa is A or G
  MOD_RES (24), (25), (26), (27): Xaa is A or G or is absent
PKAXXAPTKLSPISVLYIXXXXXXXXXYKQYENMVVKAXG

SEQ ID NO: 28543 - protein, 38 aa, Artificial Sequence; identical to SEQ ID NO: 7347
  GFR-binding peptide
  MOD_RES (3), (4), (36), (38): Xaa is C or S

SEQ ID NO: 28544 - protein, 38 aa, Artificial Sequence
  GFR-binding peptide
  MOD_RES (3), (4), (38): Xaa is C or S
  MOD_RES (18), (19), (20), (21), (22): Xaa is A or G
  MOD_RES (23), (24), (25), (26): Xaa is A or G or is absent
ASXXVPARLEPISILYLXXXXXXXXXKFKYEDMVVEAX

SEQ ID NO: 28545 - protein, 35 aa, Artificial Sequence
  GFR-binding peptide
  MOD_RES (1), (33), (35): Xaa is C or S
XAPTKLEPISVLYLDDSSNVIKFKYENMVVRSXGX

SEQ ID NO: 28546 - protein, 37 aa, Artificial Sequence
  GFR-binding peptide
  MOD_RES (1), (2), (34), (36): Xaa is C or S
XXVPTELEPISMLYLDENEKVVKFKYEDMVVEGXGXR

SEQ ID NO: 28547 - protein, 33 aa, Artificial Sequence
  GFR-binding peptide
  MOD_RES (32), (32): Xaa is C or S
VPTELEPISMLYLDEYDKVVKFKYEEMVVEGXG

SEQ ID NO: 28548 - protein, 38 aa, Artificial Sequence
  GFR-binding peptide
  MOD_RES (3), (37): Xaa is C or S
  MOD_RES (17), (18), (19), (20), (21): Xaa is A or G
  MOD_RES (22), (23), (24), (25): Xaa is A or G or is absent
PTXAPTKLSPISVLYIXXXXXXXXXYKQYENMVVRSXG

SEQ ID NO: 28549 - protein, 42 aa, Artificial Sequence
  GFR-binding peptide
  MOD_RES (6), (7), (41): Xaa is C or S
  MOD_RES (21), (22), (23), (24), (25): Xaa is A or G
  MOD_RES (26), (27), (28), (29): Xaa is A or G or is absent
KASKAXXVPTKLSPISILYKXXXXXXXXXLKYHYGMAVSEXG

SEQ ID NO: 28550 - protein, 36 aa, Artificial Sequence
  GFR-binding peptide
  MOD_RES (2), (3), (34), (36): Xaa is C or S
PXXVPQDLSPISILYIVGRTPKVYKQYEMVVKSXKX

SEQ ID NO: 28551 - protein, 36 aa, Artificial Sequence
  GFR-binding peptide
  MOD_RES (2), (34), (36): Xaa is C or S
TXAPTKLSPISVLYIDDSSNVIYKQYENMVVRSXGX

SEQ ID NO: 28552 - protein, 34 aa, Artificial Sequence; identical to SEQ ID NO: 7352
  GFR-binding peptide
  MOD_RES (33), (33): Xaa is C or S
  MOD_RES (14), (15), (16), (17), (18): Xaa is A or G
  MOD_RES (19), (20), (21), (22): Xaa is A or G or is absent

SEQ ID NO: 28553 - protein, 35 aa, Artificial Sequence
  GFR-binding peptide
  MOD_RES (1), (32), (34): Xaa is C or S
XVPQDLSPISILYIVGRTPKVYKQYEMVVKSXKXS

SEQ ID NO: 28554 - protein, 36 aa, Artificial Sequence
  GFR-binding peptide
  MOD_RES (1), (2), (36): Xaa is C or S
  MOD_RES (16), (17), (18), (19), (20): Xaa is A or G
  MOD_RES (21), (22), (23), (24): Xaa is A or G or is absent
XXAPTKLSPISVLYIXXXXXXXXXYKQYENMVVKAX

SEQ ID NO: 28555 - protein, 40 aa, Artificial Sequence
  GFR-binding peptide
  MOD_RES (6), (7): Xaa is C or S
  MOD_RES (21), (22), (23), (24), (25): Xaa is A or G
  MOD_RES (26), (27), (28), (29): Xaa is A or G or is absent
AAPASXXVPARLEPISILYLXXXXXXXXXKFKYEDMVVEA

SEQ ID NO: 28556 - protein, 40 aa, Artificial Sequence; identical to SEQ ID NO: 7353
  GFR-binding peptide
  MOD_RES (2), (3), (37), (39): Xaa is C or S
  MOD_RES (17), (18), (19), (20), (21): Xaa is A or G
  MOD_RES (22), (23), (24), (25): Xaa is A or G or is absent

SEQ ID NO: 28557 - protein, 37 aa, Artificial Sequence
  GFR-binding peptide
  MOD_RES (3), (4): Xaa is C or S
  MOD_RES (18), (19), (20), (21), (22): Xaa is A or G
  MOD_RES (23), (24), (25), (26): Xaa is A or G or is absent
KAXXVPTELSPISMLYIXXXXXXXXXYKQYEEMVVEG

SEQ ID NO: 28558 - protein, 34 aa, Artificial Sequence
  GFR-binding peptide
  MOD_RES (2), (3): Xaa is C or S
PXXAPTKLSPISVLYIDDSSNVIYKQYENMVVRS

SEQ ID NO: 28559 - protein, 39 aa, Artificial Sequence
  GFR-binding peptide
  MOD_RES (3), (4), (38): Xaa is C or S
  MOD_RES (18), (19), (20), (21), (22): Xaa is A or G
  MOD_RES (23), (24), (25), (26): Xaa is A or G or is absent
ASXXVPARLNAISILYFXXXXXXXXXLKKYRDMVVEAXG

SEQ ID NO: 28560 - protein, 42 aa, Artificial Sequence
  GFR-binding peptide
  MOD_RES (6), (7), (41): Xaa is C or S
  MOD_RES (21), (22), (23), (24), (25): Xaa is A or G
  MOD_RES (26), (27), (28), (29): Xaa is A or G or is absent
SIPKAXXVPTELSPISMLYIXXXXXXXXXYKQYEEMVVEGXG

SEQ ID NO: 28561 - protein, 37 aa, Artificial Sequence; identical to SEQ ID NO: 7355
  GFR-binding peptide
  MOD_RES (1), (34), (36): Xaa is C or S

SEQ ID NO: 28562 - protein, 33 aa, Artificial Sequence; identical to SEQ ID NO: 7356
  GFR-binding peptide
  MOD_RES (32), (32): Xaa is C or S

SEQ ID NO: 28563 - protein, 42 aa, Artificial Sequence
  GFR-binding peptide
  MOD_RES (5), (6), (40), (42): Xaa is C or S
  MOD_RES (20), (21), (22), (23), (24): Xaa is A or G
  MOD_RES (25), (26), (27), (28): Xaa is A or G or is absent
VPKPXXAPTKLEPISVLYLXXXXXXXXXKFKYENMVVRSXGX

SEQ ID NO: 28564 - protein, 40 aa, Artificial Sequence
  GFR-binding peptide
  MOD_RES (3), (4), (38), (40): Xaa is C or S
  MOD_RES (18), (19), (20), (21), (22): Xaa is A or G
  MOD_RES (23), (24), (25), (26): Xaa is A or G or is absent
ASXXVPARLSPISILYKXXXXXXXXXLKYHYDMVVEAXGX

SEQ ID NO: 28565 - protein, 40 aa, Artificial Sequence
  GFR-binding peptide
  MOD_RES (6), (7), (39): Xaa is C or S
AVPKAXXAPTKLEPISVLYLDSSNNVIKFKYENMVVKAXG

SEQ ID NO: 28566 - protein, 35 aa, Artificial Sequence
  GFR-binding peptide
  MOD_RES (2), (3), (35): Xaa is C or S
SXXVPARLSPISILYKDAANNVVLKYHYDMVVEAX

SEQ ID NO: 28567 - protein, 39 aa, Artificial Sequence; identical to SEQ ID NO: 7359
  GFR-binding peptide
  MOD_RES (6), (7), (38): Xaa is C or S

SEQ ID NO: 28568 - protein, 39 aa, Artificial Sequence
  GFR-binding peptide
  MOD_RES (4), (5), (37), (39): Xaa is C or S
PASXXVPARLSPISILYKDAANNVVLKYHYDMVVEAXGX

SEQ ID NO: 28569 - protein, 35 aa, Artificial Sequence; identical to SEQ ID NO: 7360
  GFR-binding peptide
  MOD_RES (3), (4): Xaa is C or S

SEQ ID NO: 28570 - protein, 42 aa, Artificial Sequence
  GFR-binding peptide
  MOD_RES (5), (6), (40), (42): Xaa is C or S
  MOD_RES (20), (21), (22), (23), (24): Xaa is A or G
  MOD_RES (25), (26), (27), (28): Xaa is A or G or is absent
IPKAXXVPTELEPISMLYLXXXXXXXXXKFKYEEMVVEGXGX

SEQ ID NO: 28571 - protein, 33 aa, Artificial Sequence; identical to SEQ ID NO: 7361
  GFR-binding peptide
  MOD_RES (14), (15), (16), (17), (18): Xaa is A or G
  MOD_RES (19), (20), (21), (22): Xaa is A or G or is absent

SEQ ID NO: 28572 - protein, 35 aa, Artificial Sequence
  GFR-binding peptide
  MOD_RES (1), (2): Xaa is C or S
  MOD_RES (16), (17), (18), (19), (20): Xaa is A or G
  MOD_RES (21), (22), (23), (24): Xaa is A or G or is absent
XXVPARLNAISILYFXXXXXXXXXLKKYRDMVVEA

SEQ ID NO: 28573 - protein, 38 aa, Artificial Sequence
  GFR-binding peptide
  MOD_RES (1), (35), (37): Xaa is C or S
  MOD_RES (15), (16), (17), (18), (19): Xaa is A or G
  MOD_RES (20), (21), (22), (23): Xaa is A or G or is absent
XAPTKLSPISVLYIXXXXXXXXXYKQYENMVVRSXGXH

SEQ ID NO: 28574 - protein, 33 aa, Artificial Sequence; identical to SEQ ID NO: 7364
  GFR-binding peptide
  MOD_RES (1), (33): Xaa is C or S

SEQ ID NO: 28575 - protein, 35 aa, Artificial Sequence; identical to SEQ ID NO: 7365
  GFR-binding peptide
  MOD_RES (32), (34): Xaa is C or S

SEQ ID NO: 28576 - protein, 35 aa, Artificial Sequence
  GFR-binding peptide
  MOD_RES (3), (4): Xaa is C or S
KAXXVPTKLSPISILYIDKGVVTYYKQYEGMAVSE

SEQ ID NO: 28577 - protein, 36 aa, Artificial Sequence; identical to SEQ ID NO: 7366
  GFR-binding peptide
  MOD_RES (5), (6): Xaa is C or S

SEQ ID NO: 28578 - protein, 36 aa, Artificial Sequence
  GFR-binding peptide
  MOD_RES (1), (36): Xaa is C or S
  MOD_RES (15), (16), (17), (18), (19): Xaa is A or G
  MOD_RES (20), (21), (22), (23): Xaa is A or G or is absent
XVPTKLEPISVLYLXXXXXXXXXKFKYEEGMSVAEX

SEQ ID NO: 28579 - protein, 34 aa, Artificial Sequence
  GFR-binding peptide
  MOD_RES (34), (34): Xaa is C or S
  MOD_RES (14), (15), (16), (17), (18): Xaa is A or G
  MOD_RES (19), (20), (21), (22): Xaa is A or G or is absent
VPTELSPISMLYIXXXXXXXXXYKQYEDMVVEGX

SEQ ID NO: 28580 - protein, 41 aa, Artificial Sequence
  GFR-binding peptide
  MOD_RES (3), (4), (38), (40): Xaa is C or S
  MOD_RES (18), (19), (20), (21), (22): Xaa is A or G
  MOD_RES (23), (24), (25), (26): Xaa is A or G or is absent
KAXXVPTELSPISMLYIXXXXXXXXXYKQYEDMVVEGXGXR

SEQ ID NO: 28581 - protein, 39 aa, Artificial Sequence
  GFR-binding peptide
  MOD_RES (6), (7), (38): Xaa is C or S
ASASPXXVSQDLEPISILYLIGKTPKIKFKYEMIVKSXK

SEQ ID NO: 28582 - protein, 30 aa, Artificial Sequence; identical to SEQ ID NO: 7373
  GFR-binding peptide

SEQ ID NO: 28583 - protein, 38 aa, Artificial Sequence; identical to SEQ ID NO: 7374
  GFR-binding peptide
  MOD_RES (1), (35), (37): Xaa is C or S
  MOD_RES (15), (16), (17), (18), (19): Xaa is A or G
  MOD_RES (20), (21), (22), (23): Xaa is A or G or is absent

SEQ ID NO: 28584 - protein, 38 aa, Artificial Sequence; identical to SEQ ID NO: 7375
  GFR-binding peptide
  MOD_RES (3), (4), (35), (37): Xaa is C or S

SEQ ID NO: 28585 - protein, 40 aa, Artificial Sequence
  GFR-binding peptide
  MOD_RES (6), (7), (39): Xaa is C or S
KASKAXXVPTKLNAISILYFDKGVVTYLKKYRGMAVSEXG

SEQ ID NO: 28586 - protein, 40 aa, Artificial Sequence; identical to SEQ ID NO: 7378
  GFR-binding peptide
  MOD_RES (4), (5), (39): Xaa is C or S
  MOD_RES (19), (20), (21), (22), (23): Xaa is A or G
  MOD_RES (24), (25), (26), (27): Xaa is A or G or is absent

SEQ ID NO: 28587 - protein, 37 aa, Artificial Sequence; identical to SEQ ID NO: 7381
  GFR-binding peptide
  MOD_RES (1), (2), (36): Xaa is C or S
  MOD_RES (16), (17), (18), (19), (20): Xaa is A or G
  MOD_RES (21), (22), (23), (24): Xaa is A or G or is absent

SEQ ID NO: 28588 - protein, 34 aa, Artificial Sequence
  GFR-binding peptide
  MOD_RES (3), (4): Xaa is C or S
SPXXVSQDLEPISILYLIGKTPKIKFKYEMIVKS

SEQ ID NO: 28589 - protein, 44 aa, Artificial Sequence
  GFR-binding peptide
  MOD_RES (6), (7), (42), (44): Xaa is C or S
  MOD_RES (21), (22), (23), (24), (25): Xaa is A or G
  MOD_RES (26), (27), (28), (29): Xaa is A or G or is absent
KVGKAXXVPTKLSPISVLYIXXXXXXXXXYKQYEEGMSVAEXGX

SEQ ID NO: 28590 - protein, 42 aa, Artificial Sequence; identical to SEQ ID NO: 7382
  GFR-binding peptide
  MOD_RES (6), (7), (42): Xaa is C or S
  MOD_RES (21), (22), (23), (24), (25): Xaa is A or G
  MOD_RES (26), (27), (28), (29): Xaa is A or G or is absent

SEQ ID NO: 28591 - protein, 33 aa, Artificial Sequence
  GFR-binding peptide
  MOD_RES (1), (1): Xaa is C or S
  MOD_RES (15), (16), (17), (18), (19): Xaa is A or G
  MOD_RES (20), (21), (22), (23): Xaa is A or G or is absent
XVPARLEPISILYLXXXXXXXXXKFKYEDMVVE

SEQ ID NO: 28592 - protein, 42 aa, Artificial Sequence
  GFR-binding peptide
  MOD_RES (5), (6), (40), (42): Xaa is C or S
  MOD_RES (20), (21), (22), (23), (24): Xaa is A or G
  MOD_RES (25), (26), (27), (28): Xaa is A or G or is absent
APASXXVPARLSPISILYKXXXXXXXXXLKYHYDMVVEAXGX

SEQ ID NO: 28593 - protein, 34 aa, Artificial Sequence
  GFR-binding peptide
  MOD_RES (32), (34): Xaa is C or S
APTQLSPISVLYIDDSSNVIYKQYENMVVRAXGX

SEQ ID NO: 28594 - protein, 40 aa, Artificial Sequence
  GFR-binding peptide
  MOD_RES (7), (39): Xaa is C or S
HVTKPTXAPTKLSPISVLYIDDSSNVIYKQYENMVVRSXG

SEQ ID NO: 28595 - protein, 37 aa, Artificial Sequence; identical to SEQ ID NO: 7383
  GFR-binding peptide
  MOD_RES (3), (4): Xaa is C or S
  MOD_RES (18), (19), (20), (21), (22): Xaa is A or G
  MOD_RES (23), (24), (25), (26): Xaa is A or G or is absent

SEQ ID NO: 28596 - protein, 41 aa, Artificial Sequence
  GFR-binding peptide
  MOD_RES (6), (7), (41): Xaa is C or S
  MOD_RES (21), (22), (23), (24), (25): Xaa is A or G
  MOD_RES (26), (27), (28), (29): Xaa is A or G or is absent
SIPKAXXVPTELEPISMLYLXXXXXXXXXKFKYEEMVVEGX

SEQ ID NO: 28597 - protein, 38 aa, Artificial Sequence
  GFR-binding peptide
  MOD_RES (6), (7): Xaa is C or S
KASKAXXVPTKLSPISILYIDKGVVTYYKQYEGMAVSE

SEQ ID NO: 28598 - protein, 36 aa, Artificial Sequence
  GFR-binding peptide
  MOD_RES (3), (4): Xaa is C or S
KAXXVPTKLSPISVLYIDDMGVPTYKQYEEGMSVAE

SEQ ID NO: 28599 - protein, 34 aa, Artificial Sequence; identical to SEQ ID NO: 7386
  GFR-binding peptide
  MOD_RES (1), (2), (34): Xaa is C or S

SEQ ID NO: 28600 - protein, 36 aa, Artificial Sequence; identical to SEQ ID NO: 7390
  GFR-binding peptide
  MOD_RES (1), (34), (36): Xaa is C or S
  MOD_RES (15), (16), (17), (18), (19): Xaa is A or G
  MOD_RES (20), (21), (22), (23): Xaa is A or G or is absent

SEQ ID NO: 28601 - protein, 41 aa, Artificial Sequence
  GFR-binding peptide
  MOD_RES (6), (7), (41): Xaa is C or S
  MOD_RES (21), (22), (23), (24), (25): Xaa is A or G
  MOD_RES (26), (27), (28), (29): Xaa is A or G or is absent
TVPKPXXAPTQLEPISVLYLXXXXXXXXXKFKYENMVVRAX

SEQ ID NO: 28602 - protein, 40 aa, Artificial Sequence; identical to SEQ ID NO: 7392
  GFR-binding peptide
  MOD_RES (3), (4), (38), (40): Xaa is C or S
  MOD_RES (18), (19), (20), (21), (22): Xaa is A or G
  MOD_RES (23), (24), (25), (26): Xaa is A or G or is absent

SEQ ID NO: 28603 - protein, 40 aa, Artificial Sequence; identical to SEQ ID NO: 7393
  GFR-binding peptide
  MOD_RES (6), (7), (38), (40): Xaa is C or S

SEQ ID NO: 28604 - protein, 41 aa, Artificial Sequence; identical to SEQ ID NO: 7394
  GFR-binding peptide
  MOD_RES (5), (6), (39), (41): Xaa is C or S

SEQ ID NO: 28605 - protein, 39 aa, Artificial Sequence
  GFR-binding peptide
  MOD_RES (2), (3), (36), (38): Xaa is C or S
AXXVPTKLSPISVLYIDDMGVPTYKQYEEGMSVAEXGXR

SEQ ID NO: 28606 - protein, 40 aa, Artificial Sequence
  GFR-binding peptide
  MOD_RES (2), (3), (38), (40): Xaa is C or S
  MOD_RES (17), (18), (19), (20), (21): Xaa is A or G
  MOD_RES (22), (23), (24), (25): Xaa is A or G or is absent
AXXVPTKLEPISVLYLXXXXXXXXXKFKYEEGMSVAEXGX

SEQ ID NO: 28607 - protein, 35 aa, Artificial Sequence
  GFR-binding peptide
  MOD_RES (1), (2), (34): Xaa is C or S
XXVPTKLSPISILYIDKGVVTYYKQYEGMAVSEXG

SEQ ID NO: 28608 - protein, 41 aa, Artificial Sequence
  GFR-binding peptide
  MOD_RES (6), (7), (41): Xaa is C or S
  MOD_RES (21), (22), (23), (24), (25): Xaa is A or G
  MOD_RES (26), (27), (28), (29): Xaa is A or G or is absent
KIPKAXXVPTELSPISMLYIXXXXXXXXXYKQYEDMVVEGX

SEQ ID NO: 28609 - protein, 36 aa, Artificial Sequence
  GFR-binding peptide
  MOD_RES (4), (5): Xaa is C or S
SKAXXVPTKLNAISILYFDKGVVTYLKKYRGMAVSE

SEQ ID NO: 28610 - protein, 36 aa, Artificial Sequence; identical to SEQ ID NO: 7398
  GFR-binding peptide
  MOD_RES (1), (2), (34), (36): Xaa is C or S

SEQ ID NO: 28611 - protein, 38 aa, Artificial Sequence
  GFR-binding peptide
  MOD_RES (1), (2), (36), (38): Xaa is C or S
  MOD_RES (16), (17), (18), (19), (20): Xaa is A or G
  MOD_RES (21), (22), (23), (24): Xaa is A or G or is absent
XXVPTELEPISMLYLXXXXXXXXXKFKYEDMVVEGXGX

SEQ ID NO: 28612 - protein, 40 aa, Artificial Sequence
  GFR-binding peptide
  MOD_RES (6), (38), (40): Xaa is C or S
VTKPTXAPTKLSPISVLYIDDSSNVIYKQYENMVVRSXGX

SEQ ID NO: 28613 - protein, 37 aa, Artificial Sequence
  GFR-binding peptide
  MOD_RES (3), (4), (35), (37): Xaa is C or S
SPXXVPQDLEPISILYLVGRTPKVKFKYEMVVKSXKX

SEQ ID NO: 28614 - protein, 35 aa, Artificial Sequence
  GFR-binding peptide
  MOD_RES (1), (33), (35): Xaa is C or S
XVPTKLSPISILYIDKGVVTYYKQYEGMAVSEXGX

SEQ ID NO: 28615 - protein, 34 aa, Artificial Sequence
  GFR-binding peptide
  MOD_RES (34), (34): Xaa is C or S
  MOD_RES (14), (15), (16), (17), (18): Xaa is A or G
  MOD_RES (19), (20), (21), (22): Xaa is A or G or is absent
VPARLNAISILYFXXXXXXXXXLKKYRDMVVEAX

SEQ ID NO: 28616 - protein, 37 aa, Artificial Sequence; identical to SEQ ID NO: 7406
  GFR-binding peptide
  MOD_RES (1), (35), (37): Xaa is C or S
  MOD_RES (15), (16), (17), (18), (19): Xaa is A or G
  MOD_RES (20), (21), (22), (23): Xaa is A or G or is absent

SEQ ID NO: 28617 - protein, 34 aa, Artificial Sequence
  GFR-binding peptide
  MOD_RES (1), (1): Xaa is C or S
  MOD_RES (15), (16), (17), (18), (19): Xaa is A or G
  MOD_RES (20), (21), (22), (23): Xaa is A or G or is absent
XVPTKLNAISILYFXXXXXXXXXLKKYRGMAVSE

SEQ ID NO: 28618 - protein, 38 aa, Artificial Sequence; identical to SEQ ID NO: 7407
  GFR-binding peptide
  MOD_RES (4), (5), (38): Xaa is C or S

SEQ ID NO: 28619 - protein, 39 aa, Artificial Sequence; identical to SEQ ID NO: 7408
  GFR-binding peptide
  MOD_RES (5), (6), (37), (39): Xaa is C or S

SEQ ID NO: 28620 - protein, 33 aa, Artificial Sequence
  GFR-binding peptide
  MOD_RES (14), (15), (16), (17), (18): Xaa is A or G
  MOD_RES (19), (20), (21), (22): Xaa is A or G or is absent
APTKLEPISVLYLXXXXXXXXXKFKYENMVVRS

SEQ ID NO: 28621 - protein, 38 aa, Artificial Sequence
  GFR-binding peptide
  MOD_RES (2), (3), (35), (37): Xaa is C or S
SXXVPARLEPISILYLDAANNVVKFKYEDMVVEAXGXR

SEQ ID NO: 28622 - protein, 36 aa, Artificial Sequence; identical to SEQ ID NO: 7409
  GFR-binding peptide
  MOD_RES (5), (6): Xaa is C or S

SEQ ID NO: 28623 - protein, 39 aa, Artificial Sequence
  GFR-binding peptide
  MOD_RES (4), (5), (36), (38): Xaa is C or S
ASPXXVPQDLSPISILYIVGRTPKVYKQYEMVVKSXKXS

SEQ ID NO: 28624 - protein, 34 aa, Artificial Sequence; identical to SEQ ID NO: 7413
  GFR-binding peptide
  MOD_RES (3), (4): Xaa is C or S

SEQ ID NO: 28625 - protein, 35 aa, Artificial Sequence
  GFR-binding peptide
  MOD_RES (34), (34): Xaa is C or S
  MOD_RES (14), (15), (16), (17), (18): Xaa is A or G
  MOD_RES (19), (20), (21), (22): Xaa is A or G or is absent
VPTELEPISMLYLXXXXXXXXXKFKYEDMVVEGXG

SEQ ID NO: 28626 - protein, 42 aa, Artificial Sequence; identical to SEQ ID NO: 7415
  GFR-binding peptide
  MOD_RES (6), (7), (39), (41): Xaa is C or S

SEQ ID NO: 28627 - protein, 38 aa, Artificial Sequence
  GFR-binding peptide
  MOD_RES (1), (2), (36), (38): Xaa is C or S
  MOD_RES (16), (17), (18), (19), (20): Xaa is A or G
  MOD_RES (21), (22), (23), (24): Xaa is A or G or is absent
XXVPTKLNAISILYFXXXXXXXXXLKKYRGMAVSEXGX

SEQ ID NO: 28628 - protein, 38 aa, Artificial Sequence
  GFR-binding peptide
  MOD_RES (2), (3), (36), (38): Xaa is C or S
  MOD_RES (17), (18), (19), (20), (21): Xaa is A or G
  MOD_RES (22), (23), (24), (25): Xaa is A or G or is absent
PXXVPQDLSPISILYIXXXXXXXXXYKQYEMVVKSXKX

SEQ ID NO: 28629 - protein, 37 aa, Artificial Sequence
  GFR-binding peptide
  MOD_RES (1), (34), (36): Xaa is C or S
  MOD_RES (15), (16), (17), (18), (19): Xaa is A or G
  MOD_RES (20), (21), (22), (23): Xaa is A or G or is absent
XVSQDLSPISILYIXXXXXXXXXYKQYEMIVKSXKXS

SEQ ID NO: 28630 - protein, 39 aa, Artificial Sequence; identical to SEQ ID NO: 7418
  GFR-binding peptide
  MOD_RES (3), (4), (36), (38): Xaa is C or S

SEQ ID NO: 28631 - protein, 36 aa, Artificial Sequence
  GFR-binding peptide
  MOD_RES (5), (6): Xaa is C or S
APASXXVPARLNAISILYFDAANNVVLKKYRDMVVE

SEQ ID NO: 28632 - protein, 35 aa, Artificial Sequence; identical to SEQ ID NO: 7420
  GFR-binding peptide
  MOD_RES (1), (34): Xaa is C or S

SEQ ID NO: 28633 - protein, 35 aa, Artificial Sequence
  GFR-binding peptide
  MOD_RES (1), (2), (33), (35): Xaa is C or S
XXVSQDLSPISILYIIGKTPKIYKQYEMIVKSXKX

SEQ ID NO: 28634 - protein, 37 aa, Artificial Sequence
  GFR-binding peptide
  MOD_RES (4), (5): Xaa is C or S
  MOD_RES (19), (20), (21), (22), (23): Xaa is A or G
  MOD_RES (24), (25), (26), (27): Xaa is A or G or is absent
SKAXXVPTKLSPISILYKXXXXXXXXXLKYHYGMAVS

SEQ ID NO: 28635 - protein, 40 aa, Artificial Sequence
  GFR-binding peptide
  MOD_RES (5), (6), (40): Xaa is C or S
  MOD_RES (20), (21), (22), (23), (24): Xaa is A or G
  MOD_RES (25), (26), (27), (28): Xaa is A or G or is absent
VPKPXXAPTKLSPISVLYIXXXXXXXXXYKQYENMVVRSX

SEQ ID NO: 28636 - protein, 33 aa, Artificial Sequence
  GFR-binding peptide
  MOD_RES (2), (3): Xaa is C or S
PXXAPTQLEPISVLYLDDSSNVIKFKYENMVVR

SEQ ID NO: 28637 - protein, 33 aa, Artificial Sequence; identical to SEQ ID NO: 7423
  GFR-binding peptide
  MOD_RES (1), (33): Xaa is C or S

SEQ ID NO: 28638 - protein, 37 aa, Artificial Sequence; identical to SEQ ID NO: 7424
  GFR-binding peptide
  MOD_RES (1), (2), (35), (37): Xaa is C or S
  MOD_RES (16), (17), (18), (19), (20): Xaa is A or G
  MOD_RES (21), (22), (23), (24): Xaa is A or G or is absent

SEQ ID NO: 28639 - protein, 43 aa, Artificial Sequence; identical to SEQ ID NO: 7425
  GFR-binding peptide
  MOD_RES (6), (7), (41), (43): Xaa is C or S
  MOD_RES (21), (22), (23), (24), (25): Xaa is A or G
  MOD_RES (26), (27), (28), (29): Xaa is A or G or is absent

SEQ ID NO: 28640 - protein, 40 aa, Artificial Sequence
  GFR-binding peptide
  MOD_RES (4), (5), (39): Xaa is C or S
  MOD_RES (19), (20), (21), (22), (23): Xaa is A or G
  MOD_RES (24), (25), (26), (27): Xaa is A or G or is absent
PKAXXVPTELSPISMLYIXXXXXXXXXYKQYEDMVVEGXG

SEQ ID NO: 28641 - protein, 37 aa, Artificial Sequence
  GFR-binding peptide
  MOD_RES (4), (5), (37): Xaa is C or S
PKPXXAPTQLSPISVLYIDDSSNVIYKQYENMVVRAX

SEQ ID NO: 28642 - protein, 38 aa, Artificial Sequence; identical to SEQ ID NO: 7427
  GFR-binding peptide
  MOD_RES (5), (6): Xaa is C or S
  MOD_RES (20), (21), (22), (23), (24): Xaa is A or G
  MOD_RES (25), (26), (27), (28): Xaa is A or G or is absent

SEQ ID NO: 28643 - protein, 34 aa, Artificial Sequence; identical to SEQ ID NO: 7428
  GFR-binding peptide
  MOD_RES (1), (2), (34): Xaa is C or S

SEQ ID NO: 28644 - protein, 39 aa, Artificial Sequence; identical to SEQ ID NO: 7429
  GFR-binding peptide
  MOD_RES (6), (7): Xaa is C or S

SEQ ID NO: 28645 - protein, 38 aa, Artificial Sequence
  GFR-binding peptide
  MOD_RES (5), (6): Xaa is C or S
VGKAXXVPTKLSPISVLYIDDMGVPTYKQYEEGMSVAE

SEQ ID NO: 28646 - protein, 37 aa, Artificial Sequence
  GFR-binding peptide
  MOD_RES (1), (35), (37): Xaa is C or S
  MOD_RES (15), (16), (17), (18), (19): Xaa is A or G
  MOD_RES (20), (21), (22), (23): Xaa is A or G or is absent
XAPTKLEPISVLYLXXXXXXXXXKFKYENMVVRSXGX

SEQ ID NO: 28647 - protein, 32 aa, Artificial Sequence
  GFR-binding peptide
  MOD_RES (14), (15), (16), (17), (18): Xaa is A or G
  MOD_RES (19), (20), (21), (22): Xaa is A or G or is absent
VPTKLEPISILYLXXXXXXXXXKFKYEGMAVS

SEQ ID NO: 28648 - protein, 37 aa, Artificial Sequence; identical to SEQ ID NO: 7431
  GFR-binding peptide
  MOD_RES (3), (4), (35), (37): Xaa is C or S

SEQ ID NO: 28649 - protein, 35 aa, Artificial Sequence
  GFR-binding peptide
  MOD_RES (33), (35): Xaa is C or S
  MOD_RES (14), (15), (16), (17), (18): Xaa is A or G
  MOD_RES (19), (20), (21), (22): Xaa is A or G or is absent
VPQALSPISILYIXXXXXXXXXYKQYEMIVRSXKX

SEQ ID NO: 28650 - protein, 41 aa, Artificial Sequence
  GFR-binding peptide
  MOD_RES (6), (7), (40): Xaa is C or S
  MOD_RES (21), (22), (23), (24), (25): Xaa is A or G
  MOD_RES (26), (27), (28), (29): Xaa is A or G or is absent
ASAAPXXVPQALEPISILYLXXXXXXXXXKFKYEMIVRSXK

SEQ ID NO: 28651 - protein, 31 aa, Artificial Sequence
  GFR-binding peptide
  MOD_RES (31), (31): Xaa is C or S
VPQALSPISILYIVGRKPKVYKQYEMIVRSX

SEQ ID NO: 28652 - protein, 40 aa, Artificial Sequence; identical to SEQ ID NO: 7433
  GFR-binding peptide
  MOD_RES (6), (7), (40): Xaa is C or S
  MOD_RES (21), (22), (23), (24), (25): Xaa is A or G
  MOD_RES (26), (27), (28), (29): Xaa is A or G or is absent

SEQ ID NO: 28653 - protein, 34 aa, Artificial Sequence
  GFR-binding peptide
  MOD_RES (1), (1): Xaa is C or S
  MOD_RES (15), (16), (17), (18), (19): Xaa is A or G
  MOD_RES (20), (21), (22), (23): Xaa is A or G or is absent
XAPTKLEPISVLYLXXXXXXXXXKFKYENMVVKA

SEQ ID NO: 28654 - protein, 35 aa, Artificial Sequence; identical to SEQ ID NO: 7434
  GFR-binding peptide
  MOD_RES (1), (34): Xaa is C or S
  MOD_RES (15), (16), (17), (18), (19): Xaa is A or G
  MOD_RES (20), (21), (22), (23): Xaa is A or G or is absent

SEQ ID NO: 28655 - protein, 34 aa, Artificial Sequence; identical to SEQ ID NO: 7435
  GFR-binding peptide
  MOD_RES (1), (2), (34): Xaa is C or S

SEQ ID NO: 28656 - protein, 36 aa, Artificial Sequence; identical to SEQ ID NO: 7436
  GFR-binding peptide
  MOD_RES (1), (2), (33), (35): Xaa is C or S

SEQ ID NO: 28657 - protein, 37 aa, Artificial Sequence
  GFR-binding peptide
  MOD_RES (1), (34), (36): Xaa is C or S
XVPTKLSPISVLYIDDMGVPTYKQYEEGMSVAEXGXR

SEQ ID NO: 28658 - protein, 36 aa, Artificial Sequence; identical to SEQ ID NO: 7437
  GFR-binding peptide
  MOD_RES (1), (2), (36): Xaa is C or S
  MOD_RES (16), (17), (18), (19), (20): Xaa is A or G
  MOD_RES (21), (22), (23), (24): Xaa is A or G or is absent

SEQ ID NO: 28659 - protein, 38 aa, Artificial Sequence; identical to SEQ ID NO: 7438
  GFR-binding peptide
  MOD_RES (1), (36), (38): Xaa is C or S
  MOD_RES (15), (16), (17), (18), (19): Xaa is A or G
  MOD_RES (20), (21), (22), (23): Xaa is A or G or is absent

SEQ ID NO: 28660 - protein, 38 aa, Artificial Sequence
  GFR-binding peptide
  MOD_RES (6), (7): Xaa is C or S
KIPKAXXVPTELSPISMLYIDENEKVVYKQYEDMVVEG

SEQ ID NO: 28661 - protein, 41 aa, Artificial Sequence
  GFR-binding peptide
  MOD_RES (5), (6), (40): Xaa is C or S
  MOD_RES (20), (21), (22), (23), (24): Xaa is A or G
  MOD_RES (25), (26), (27), (28): Xaa is A or G or is absent
VPKPXXAPTKLSPISVLYIXXXXXXXXXYKQYENMVVRSXG

SEQ ID NO: 28662 - protein, 38 aa, Artificial Sequence; identical to SEQ ID NO: 7441
  GFR-binding peptide
  MOD_RES (5), (6), (38): Xaa is C or S

SEQ ID NO: 28663 - protein, 32 aa, Artificial Sequence
  GFR-binding peptide
  MOD_RES (1), (2): Xaa is C or S
XXVPTELSPISMLYIDEYDKVVYKQYEEMVVE

SEQ ID NO: 28664 - protein, 43 aa, Artificial Sequence; identical to SEQ ID NO: 7444
  GFR-binding peptide
  MOD_RES (5), (6), (40), (42): Xaa is C or S
  MOD_RES (20), (21), (22), (23), (24): Xaa is A or G
  MOD_RES (25), (26), (27), (28): Xaa is A or G or is absent

SEQ ID NO: 28665 - protein, 38 aa, Artificial Sequence; identical to SEQ ID NO: 7445
  GFR-binding peptide
  MOD_RES (2), (3), (37): Xaa is C or S
  MOD_RES (17), (18), (19), (20), (21): Xaa is A or G
  MOD_RES (22), (23), (24), (25): Xaa is A or G or is absent

SEQ ID NO: 28666 - protein, 39 aa, Artificial Sequence; identical to SEQ ID NO: 7447
  GFR-binding peptide
  MOD_RES (5), (37), (39): Xaa is C or S

SEQ ID NO: 28667 - protein, 37 aa, Artificial Sequence
  GFR-binding peptide
  MOD_RES (5), (6), (37): Xaa is C or S
SASPXXVPQDLSPISILYIVGRTPKVYKQYEMVVKSX

SEQ ID NO: 28668 - protein, 32 aa, Artificial Sequence
  GFR-binding peptide
  MOD_RES (32), (32): Xaa is C or S
VPTELSPISMLYIDEYDKVVYKQYEEMVVEGX

SEQ ID NO: 28669 - protein, 33 aa, Artificial Sequence
  GFR-binding peptide
  MOD_RES (1), (33): Xaa is C or S
XVPTELEPISMLYLDEYDKVVKFKYEEMVVEGX

SEQ ID NO: 28670 - protein, 33 aa, Artificial Sequence
  GFR-binding peptide
  MOD_RES (2), (3): Xaa is C or S
AXXAPTKLEPISVLYLDSSNNVIKFKYENMVVK

SEQ ID NO: 28671 - protein, 35 aa, Artificial Sequence; identical to SEQ ID NO: 7448
  GFR-binding peptide
  MOD_RES (33), (35): Xaa is C or S
  MOD_RES (14), (15), (16), (17), (18): Xaa is A or G
  MOD_RES (19), (20), (21), (22): Xaa is A or G or is absent

SEQ ID NO: 28672 - protein, 34 aa, Artificial Sequence
  GFR-binding peptide
  MOD_RES (1), (2): Xaa is C or S
  MOD_RES (16), (17), (18), (19), (20): Xaa is A or G
  MOD_RES (21), (22), (23), (24): Xaa is A or G or is absent
XXVPTELSPISMLYIXXXXXXXXXYKQYEDMVVE

SEQ ID NO: 28673 - protein, 44 aa, Artificial Sequence; identical to SEQ ID NO: 7449
  GFR-binding peptide
  MOD_RES (6), (7), (42), (44): Xaa is C or S
  MOD_RES (21), (22), (23), (24), (25): Xaa is A or G
  MOD_RES (26), (27), (28), (29): Xaa is A or G or is absent

SEQ ID NO: 28674 - protein, 36 aa, Artificial Sequence
  GFR-binding peptide
  MOD_RES (2), (3): Xaa is C or S
  MOD_RES (17), (18), (19), (20), (21): Xaa is A or G
  MOD_RES (22), (23), (24), (25): Xaa is A or G or is absent
AXXVPTELEPISMLYLXXXXXXXXXKFKYEEMVVEG

SEQ ID NO: 28675 - protein, 39 aa, Artificial Sequence; identical to SEQ ID NO: 7450
  GFR-binding peptide
  MOD_RES (1), (36), (38): Xaa is C or S
  MOD_RES (15), (16), (17), (18), (19): Xaa is A or G
  MOD_RES (20), (21), (22), (23): Xaa is A or G or is absent

SEQ ID NO: 28676 - protein, 42 aa, Artificial Sequence
  GFR-binding peptide
  MOD_RES (4), (5), (39), (41): Xaa is C or S
  MOD_RES (19), (20), (21), (22), (23): Xaa is A or G
  MOD_RES (24), (25), (26), (27): Xaa is A or G or is absent
PKPXXAPTKLEPISVLYLXXXXXXXXXKFKYENMVVRSXGXH

SEQ ID NO: 28677 - protein, 39 aa, Artificial Sequence
  GFR-binding peptide
  MOD_RES (4), (5), (39): Xaa is C or S
  MOD_RES (19), (20), (21), (22), (23): Xaa is A or G
  MOD_RES (24), (25), (26), (27): Xaa is A or G or is absent
PASXXVPARLSPISILYKXXXXXXXXXLKYHYDMVVEAX

SEQ ID NO: 28678 - protein, 32 aa, Artificial Sequence
  GFR-binding peptide
  MOD_RES (1), (32): Xaa is C or S
XVPQALSPISILYIVGRKPKVYKQYEMIVRSX

SEQ ID NO: 28679 - protein, 39 aa, Artificial Sequence; identical to SEQ ID NO: 7453
  GFR-binding peptide
  MOD_RES (5), (6), (37), (39): Xaa is C or S

SEQ ID NO: 28680 - protein, 41 aa, Artificial Sequence
  GFR-binding peptide
  MOD_RES (5), (6), (38), (40): Xaa is C or S
IPKAXXVPTELSPISMLYIDENEKVVYKQYEDMVVEGXGXR

SEQ ID NO: 28681 - protein, 38 aa, Artificial Sequence
  GFR-binding peptide
  MOD_RES (6), (6): Xaa is C or S
  MOD_RES (20), (21), (22), (23), (24): Xaa is A or G
  MOD_RES (25), (26), (27), (28): Xaa is A or G or is absent
VTKPTXAPTKLSPISVLYIXXXXXXXXXYKQYENMVVR

SEQ ID NO: 28682 - protein, 34 aa, Artificial Sequence; identical to SEQ ID NO: 7456
  GFR-binding peptide
  MOD_RES (1), (2): Xaa is C or S
  MOD_RES (16), (17), (18), (19), (20): Xaa is A or G
  MOD_RES (21), (22), (23), (24): Xaa is A or G or is absent

SEQ ID NO: 28683 - protein, 31 aa, Artificial Sequence
  GFR-binding peptide
  MOD_RES (1), (1): Xaa is C or S
XVPTELSPISMLYIDENEKVVYKQYEDMVVE

SEQ ID NO: 28684 - protein, 40 aa, Artificial Sequence
  GFR-binding peptide
  MOD_RES (6), (7), (39): Xaa is C or S
AAPASXXVPARLNAISILYFDAANNVVLKKYRDMVVEAXG

SEQ ID NO: 28685 - protein, 35 aa, Artificial Sequence; identical to SEQ ID NO: 7459
  GFR-binding peptide
  MOD_RES (1), (2), (35): Xaa is C or S
  MOD_RES (16), (17), (18), (19), (20): Xaa is A or G
  MOD_RES (21), (22), (23), (24): Xaa is A or G or is absent

SEQ ID NO: 28686 - protein, 32 aa, Artificial Sequence
  GFR-binding peptide
  MOD_RES (1), (2): Xaa is C or S
XXVPTELSPISMLYIDENEKVVYKQYEDMVVE

SEQ ID NO: 28687 - protein, 36 aa, Artificial Sequence; identical to SEQ ID NO: 7460
  GFR-binding peptide
  MOD_RES (5), (5): Xaa is C or S

SEQ ID NO: 28688 - protein, 39 aa, Artificial Sequence; identical to SEQ ID NO: 7461
  GFR-binding peptide
  MOD_RES (5), (6): Xaa is C or S
  MOD_RES (20), (21), (22), (23), (24): Xaa is A or G
  MOD_RES (25), (26), (27), (28): Xaa is A or G or is absent

SEQ ID NO: 28689 - protein, 34 aa, Artificial Sequence
  GFR-binding peptide
  MOD_RES (2), (3): Xaa is C or S
AXXVPTKLSPISILYKDKGVVTYLKYHYGMAVSE

SEQ ID NO: 28690 - protein, 41 aa, Artificial Sequence; identical to SEQ ID NO: 7462
  GFR-binding peptide
  MOD_RES (6), (7), (39), (41): Xaa is C or S

SEQ ID NO: 28691 - protein, 34 aa, Artificial Sequence
  GFR-binding peptide
  MOD_RES (1), (2): Xaa is C or S
XXVPTKLSPISVLYIDDMGVPTYKQYEEGMSVAE

SEQ ID NO: 28692 - protein, 35 aa, Artificial Sequence
  GFR-binding peptide
  MOD_RES (1), (2), (34): Xaa is C or S
XXAPTQLEPISVLYLDDSSNVIKFKYENMVVRAXG

SEQ ID NO: 28693 - protein, 37 aa, Artificial Sequence; identical to SEQ ID NO: 7466
  GFR-binding peptide
  MOD_RES (1), (35), (37): Xaa is C or S
  MOD_RES (15), (16), (17), (18), (19): Xaa is A or G
  MOD_RES (20), (21), (22), (23): Xaa is A or G or is absent

SEQ ID NO: 28694 - protein, 39 aa, Artificial Sequence; identical to SEQ ID NO: 7470
  GFR-binding peptide
  MOD_RES (2), (3), (37), (39): Xaa is C or S
  MOD_RES (17), (18), (19), (20), (21): Xaa is A or G
  MOD_RES (22), (23), (24), (25): Xaa is A or G or is absent

SEQ ID NO: 28695 - protein, 41 aa, Artificial Sequence; identical to SEQ ID NO: 7471
  GFR-binding peptide
  MOD_RES (4), (5), (39), (41): Xaa is C or S
  MOD_RES (19), (20), (21), (22), (23): Xaa is A or G
  MOD_RES (24), (25), (26), (27): Xaa is A or G or is absent

SEQ ID NO: 28696 - protein, 39 aa, Artificial Sequence
  GFR-binding peptide
  MOD_RES (1), (2), (36), (38): Xaa is C or S
  MOD_RES (16), (17), (18), (19), (20): Xaa is A or G
  MOD_RES (21), (22), (23), (24): Xaa is A or G or is absent
XXAPTQLSPISVLYIXXXXXXXXXYKQYENMVVRAXGXH

SEQ ID NO: 28697 - protein, 39 aa, Artificial Sequence
  GFR-binding peptide
  MOD_RES (5), (6), (39): Xaa is C or S
  MOD_RES (20), (21), (22), (23), (24): Xaa is A or G
  MOD_RES (25), (26), (27), (28): Xaa is A or G or is absent
SASPXXVPQDLSPISILYIXXXXXXXXXYKQYEMVVKSX

SEQ ID NO: 28698 - protein, 39 aa, Artificial Sequence; identical to SEQ ID NO: 7474
  GFR-binding peptide
  MOD_RES (4), (5), (39): Xaa is C or S
  MOD_RES (19), (20), (21), (22), (23): Xaa is A or G
  MOD_RES (24), (25), (26), (27): Xaa is A or G or is absent

SEQ ID NO: 28699 - protein, 34 aa, Artificial Sequence; identical to SEQ ID NO: 7475
  GFR-binding peptide
  MOD_RES (2), (3), (34): Xaa is C or S

SEQ ID NO: 28700 - protein, 37 aa, Artificial Sequence
  GFR-binding peptide
  MOD_RES (4), (5): Xaa is C or S
  MOD_RES (19), (20), (21), (22), (23): Xaa is A or G
  MOD_RES (24), (25), (26), (27): Xaa is A or G or is absent
PKAXXVPTELEPISMLYLXXXXXXXXXKFKYEEMVVE

SEQ ID NO: 28701 - protein, 36 aa, Artificial Sequence
  GFR-binding peptide
  MOD_RES (3), (4): Xaa is C or S
  MOD_RES (18), (19), (20), (21), (22): Xaa is A or G
  MOD_RES (23), (24), (25), (26): Xaa is A or G or is absent
KAXXVPTKLNAISILYFXXXXXXXXXLKKYRGMAVS

SEQ ID NO: 28702 - protein, 38 aa, Artificial Sequence
  GFR-binding peptide
  MOD_RES (3), (4), (35), (37): Xaa is C or S
SPXXVSQDLSPISILYIIGKTPKIYKQYEMIVKSXKXS

SEQ ID NO: 28703 - protein, 41 aa, Artificial Sequence
  GFR-binding peptide
  MOD_RES (4), (5), (40): Xaa is C or S
  MOD_RES (19), (20), (21), (22), (23): Xaa is A or G
  MOD_RES (24), (25), (26), (27): Xaa is A or G or is absent
GKAXXVPTKLEPISVLYLXXXXXXXXXKFKYEEGMSVAEXG

SEQ ID NO: 28704 - protein, 37 aa, Artificial Sequence; identical to SEQ ID NO: 7479
  GFR-binding peptide
  MOD_RES (4), (5): Xaa is C or S
  MOD_RES (19), (20), (21), (22), (23): Xaa is A or G
  MOD_RES (24), (25), (26), (27): Xaa is A or G or is absent

SEQ ID NO: 28705 - protein, 37 aa, Artificial Sequence
  GFR-binding peptide
  MOD_RES (1), (2), (36): Xaa is C or S
  MOD_RES (16), (17), (18), (19), (20): Xaa is A or G
  MOD_RES (21), (22), (23), (24): Xaa is A or G or is absent
XXAPTKLSPISVLYIXXXXXXXXXYKQYENMVVRSXG

SEQ ID NO: 28706 - protein, 38 aa, Artificial Sequence; identical to SEQ ID NO: 7480
  GFR-binding peptide
  MOD_RES (1), (2), (36), (38): Xaa is C or S
  MOD_RES (16), (17), (18), (19), (20): Xaa is A or G
  MOD_RES (21), (22), (23), (24): Xaa is A or G or is absent

SEQ ID NO: 28707 - protein, 33 aa, Artificial Sequence
  GFR-binding peptide
  MOD_RES (2), (3): Xaa is C or S
AXXVPTKLSPISILYIDKGVVTYYKQYEGMAVS

SEQ ID NO: 28708 - protein, 36 aa, Artificial Sequence
  GFR-binding peptide
  MOD_RES (1), (2), (36): Xaa is C or S
  MOD_RES (16), (17), (18), (19), (20): Xaa is A or G
  MOD_RES (21), (22), (23), (24): Xaa is A or G or is absent
XXVPTELSPISMLYIXXXXXXXXXYKQYEEMVVEGX

SEQ ID NO: 28709 - protein, 38 aa, Artificial Sequence
  GFR-binding peptide
  MOD_RES (4), (5), (38): Xaa is C or S
  MOD_RES (19), (20), (21), (22), (23): Xaa is A or G
  MOD_RES (24), (25), (26), (27): Xaa is A or G or is absent
ASPXXVSQDLSPISILYIXXXXXXXXXYKQYEMIVKSX

SEQ ID NO: 28710 - protein, 41 aa, Artificial Sequence; identical to SEQ ID NO: 7483
  GFR-binding peptide
  MOD_RES (6), (7), (41): Xaa is C or S
  MOD_RES (21), (22), (23), (24), (25): Xaa is A or G
  MOD_RES (26), (27), (28), (29): Xaa is A or G or is absent

SEQ ID NO: 28711 - protein, 34 aa, Artificial Sequence; identical to SEQ ID NO: 7485
  GFR-binding peptide
  MOD_RES (1), (33): Xaa is C or S

SEQ ID NO: 28712 - protein, 41 aa, Artificial Sequence
  GFR-binding peptide
  MOD_RES (5), (6), (40): Xaa is C or S
  MOD_RES (20), (21), (22), (23), (24): Xaa is A or G
  MOD_RES (25), (26), (27), (28): Xaa is A or G or is absent
ASKAXXVPTKLSPISILYKXXXXXXXXXLKYHYGMAVSEXG

SEQ ID NO: 28713 - protein, 37 aa, Artificial Sequence; identical to SEQ ID NO: 7489
  GFR-binding peptide
  MOD_RES (6), (7): Xaa is C or S

SEQ ID NO: 28714 - protein, 36 aa, Artificial Sequence; identical to SEQ ID NO: 7490
  GFR-binding peptide
  MOD_RES (1), (36): Xaa is C or S
  MOD_RES (15), (16), (17), (18), (19): Xaa is A or G
  MOD_RES (20), (21), (22), (23): Xaa is A or G or is absent

SEQ ID NO: 28715 - protein, 41 aa, Artificial Sequence; identical to SEQ ID NO: 7491
  GFR-binding peptide
  MOD_RES (4), (5), (38), (40): Xaa is C or S

SEQ ID NO: 28716 - protein, 34 aa, Artificial Sequence
  GFR-binding peptide
  MOD_RES (1), (32), (34): Xaa is C or S
XVPQALEPISILYLVGRKPKVKFKYEMIVRSXKX

SEQ ID NO: 28717 - protein, 31 aa, Artificial Sequence; identical to SEQ ID NO: 7495
  GFR-binding peptide

SEQ ID NO: 28718 - protein, 36 aa, Artificial Sequence
  GFR-binding peptide
  MOD_RES (5), (5): Xaa is C or S
TKPTXAPTKLEPISVLYLDDSSNVIKFKYENMVVRS

SEQ ID NO: 28719 - protein, 34 aa, Artificial Sequence
  GFR-binding peptide
  MOD_RES (2), (3): Xaa is C or S
PXXAPTQLEPISVLYLDDSSNVIKFKYENMVVRA

SEQ ID NO: 28720 - protein, 38 aa, Artificial Sequence
  GFR-binding peptide
  MOD_RES (1), (2), (36), (38): Xaa is C or S
  MOD_RES (16), (17), (18), (19), (20): Xaa is A or G
  MOD_RES (21), (22), (23), (24): Xaa is A or G or is absent
XXAPTKLEPISVLYLXXXXXXXXXKFKYENMVVKAXGX

SEQ ID NO: 28721 - protein, 33 aa, Artificial Sequence; identical to SEQ ID NO: 7497
  GFR-binding peptide
  MOD_RES (1), (2): Xaa is C or S

SEQ ID NO: 28722 - protein, 38 aa, Artificial Sequence
  GFR-binding peptide
  MOD_RES (1), (36), (38): Xaa is C or S
  MOD_RES (15), (16), (17), (18), (19): Xaa is A or G
  MOD_RES (20), (21), (22), (23): Xaa is A or G or is absent
XVPTKLSPISVLYIXXXXXXXXXYKQYEEGMSVAEXGX

SEQ ID NO: 28723 - protein, 33 aa, Artificial Sequence
  GFR-binding peptide
  MOD_RES (32), (32): Xaa is C or S
APTKLSPISVLYIDSSNNVIYKQYENMVVKAXG

SEQ ID NO: 28724 - protein, 40 aa, Artificial Sequence
  GFR-binding peptide
  MOD_RES (5), (6), (39): Xaa is C or S
  MOD_RES (20), (21), (22), (23), (24): Xaa is A or G
  MOD_RES (25), (26), (27), (28): Xaa is A or G or is absent
SAAPXXVPQALSPISILYIXXXXXXXXXYKQYEMIVRSXK

SEQ ID NO: 28725 - protein, 40 aa, Artificial Sequence
  GFR-binding peptide
  MOD_RES (2), (3), (37), (39): Xaa is C or S
  MOD_RES (17), (18), (19), (20), (21): Xaa is A or G
  MOD_RES (22), (23), (24), (25): Xaa is A or G or is absent
PXXAPTQLSPISVLYIXXXXXXXXXYKQYENMVVRAXGXH

SEQ ID NO: 28726 - protein, 38 aa, Artificial Sequence
  GFR-binding peptide
  MOD_RES (4), (5): Xaa is C or S
  MOD_RES (19), (20), (21), (22), (23): Xaa is A or G
  MOD_RES (24), (25), (26), (27): Xaa is A or G or is absent
PKAXXVPTELEPISMLYLXXXXXXXXXKFKYEDMVVEG

SEQ ID NO: 28727 - protein, 41 aa, Artificial Sequence
  GFR-binding peptide
  MOD_RES (4), (5), (39), (41): Xaa is C or S
  MOD_RES (19), (20), (21), (22), (23): Xaa is A or G
  MOD_RES (24), (25), (26), (27): Xaa is A or G or is absent
PASXXVPARLNAISILYFXXXXXXXXXLKKYRDMVVEAXGX

SEQ ID NO: 28728 - protein, 42 aa, Artificial Sequence; identical to SEQ ID NO: 7500
  GFR-binding peptide
  MOD_RES (3), (4), (39), (41): Xaa is C or S
  MOD_RES (18), (19), (20), (21), (22): Xaa is A or G
  MOD_RES (23), (24), (25), (26): Xaa is A or G or is absent

SEQ ID NO: 28729 - protein, 37 aa, Artificial Sequence; identical to SEQ ID NO: 7501
  GFR-binding peptide
  MOD_RES (1), (2), (34), (36): Xaa is C or S

SEQ ID NO: 28730 - protein, 35 aa, Artificial Sequence
  GFR-binding peptide
  MOD_RES (3), (4), (35): Xaa is C or S
APXXVPQALEPISILYLVGRKPKVKFKYEMIVRSX

SEQ ID NO: 28731 - protein, 34 aa, Artificial Sequence
  GFR-binding peptide
  MOD_RES (2), (3): Xaa is C or S
SXXVPARLSPISILYKDAANNVVLKYHYDMVVEA

SEQ ID NO: 28732 - protein, 45 aa, Artificial Sequence; identical to SEQ ID NO: 7504
  GFR-binding peptide
  MOD_RES (6), (7), (42), (44): Xaa is C or S
  MOD_RES (21), (22), (23), (24), (25): Xaa is A or G
  MOD_RES (26), (27), (28), (29): Xaa is A or G or is absent

SEQ ID NO: 28733 - protein, 36 aa, Artificial Sequence; identical to SEQ ID NO: 7507
  GFR-binding peptide
  MOD_RES (5), (6): Xaa is C or S

SEQ ID NO: 28734 - protein, 36 aa, Artificial Sequence
  GFR-binding peptide
  MOD_RES (3), (4): Xaa is C or S
  MOD_RES (18), (19), (20), (21), (22): Xaa is A or G
  MOD_RES (23), (24), (25), (26): Xaa is A or G or is absent
ASXXVPARLSPISILYKXXXXXXXXXLKYHYDMVVE

SEQ ID NO: 28735 - protein, 32 aa, Artificial Sequence
  GFR-binding peptide
  MOD_RES (31), (31): Xaa is C or S
VSQDLSPISILYIIGKTPKIYKQYEMIVKSXK

SEQ ID NO: 28736 - protein, 40 aa, Artificial Sequence
  GFR-binding peptide
  MOD_RES (3), (4), (37), (39): Xaa is C or S
  MOD_RES (18), (19), (20), (21), (22): Xaa is A or G
  MOD_RES (23), (24), (25), (26): Xaa is A or G or is absent
SPXXVPQDLSPISILYIXXXXXXXXXYKQYEMVVKSXKXS

SEQ ID NO: 28737 - protein, 36 aa, Artificial Sequence
  GFR-binding peptide
  MOD_RES (2), (3), (34), (36): Xaa is C or S
PXXVSQDLSPISILYIIGKTPKIYKQYEMIVKSXKX

SEQ ID NO: 28738 - protein, 35 aa, Artificial Sequence; identical to SEQ ID NO: 7510
  GFR-binding peptide
  MOD_RES (1), (32), (34): Xaa is C or S

SEQ ID NO: 28739 - protein, 39 aa, Artificial Sequence; identical to SEQ ID NO: 7511
  GFR-binding peptide
  MOD_RES (1), (2), (36), (38): Xaa is C or S
  MOD_RES (16), (17), (18), (19), (20): Xaa is A or G
  MOD_RES (21), (22), (23), (24): Xaa is A or G or is absent

SEQ ID NO: 28740 - protein, 37 aa, Artificial Sequence
  GFR-binding peptide
  MOD_RES (4), (5): Xaa is C or S
  MOD_RES (19), (20), (21), (22), (23): Xaa is A or G
  MOD_RES (24), (25), (26), (27): Xaa is A or G or is absent
PKAXXAPTKLSPISVLYIXXXXXXXXXYKQYENMVVK

SEQ ID NO: 28741 - protein, 38 aa, Artificial Sequence
  GFR-binding peptide
  MOD_RES (2), (3), (35), (37): Xaa is C or S
PXXAPTKLSPISVLYIDDSSNVIYKQYENMVVRSXGXH

SEQ ID NO: 28742 - protein, 39 aa, Artificial Sequence; identical to SEQ ID NO: 7512
  GFR-binding peptide
  MOD_RES (5), (6), (37), (39): Xaa is C or S

SEQ ID NO: 28743 - protein, 39 aa, Artificial Sequence; identical to SEQ ID NO: 7513
  GFR-binding peptide
  MOD_RES (5), (6), (38): Xaa is C or S

SEQ ID NO: 28744 - protein, 38 aa, Artificial Sequence
  GFR-binding peptide
  MOD_RES (6), (7), (38): Xaa is C or S
ASAAPXXVPQALSPISILYIVGRKPKVYKQYEMIVRSX

SEQ ID NO: 28745 - protein, 39 aa, Artificial Sequence; identical to SEQ ID NO: 7515
  GFR-binding peptide
  MOD_RES (6), (7), (38): Xaa is C or S

SEQ ID NO: 28746 - protein, 36 aa, Artificial Sequence
  GFR-binding peptide
  MOD_RES (5), (6): Xaa is C or S
VPKPXXAPTKLSPISVLYIDDSSNVIYKQYENMVVR

SEQ ID NO: 28747 - protein, 40 aa, Artificial Sequence; identical to SEQ ID NO: 7518
  GFR-binding peptide
  MOD_RES (6), (38), (40): Xaa is C or S

SEQ ID NO: 28748 - protein, 38 aa, Artificial Sequence
  GFR-binding peptide
  MOD_RES (6), (7): Xaa is C or S
YVPKPXXAPTKLEPISVLYLDDSSNVIKFKYENMVVRS

SEQ ID NO: 28749 - protein, 34 aa, Artificial Sequence
  GFR-binding peptide
  MOD_RES (1), (2), (34): Xaa is C or S
XXVPTELEPISMLYLDEYDKVVKFKYEEMVVEGX

SEQ ID NO: 28750 - protein, 42 aa, Artificial Sequence; identical to SEQ ID NO: 7519
  GFR-binding peptide
  MOD_RES (5), (6), (41): Xaa is C or S
  MOD_RES (20), (21), (22), (23), (24): Xaa is A or G
  MOD_RES (25), (26), (27), (28): Xaa is A or G or is absent

SEQ ID NO: 28751 - protein, 34 aa, Artificial Sequence
  GFR-binding peptide
  MOD_RES (34), (34): Xaa is C or S
  MOD_RES (14), (15), (16), (17), (18): Xaa is A or G
  MOD_RES (19), (20), (21), (22): Xaa is A or G or is absent
APTKLEPISVLYLXXXXXXXXXKFKYENMVVKAX

SEQ ID NO: 28752 - protein, 38 aa, Artificial Sequence; identical to SEQ ID NO: 7521
  GFR-binding peptide
  MOD_RES (3), (4), (38): Xaa is C or S
  MOD_RES (18), (19), (20), (21), (22): Xaa is A or G
  MOD_RES (23), (24), (25), (26): Xaa is A or G or is absent

SEQ ID NO: 28753 - protein, 34 aa, Artificial Sequence
  GFR-binding peptide
  MOD_RES (1), (2): Xaa is C or S
  MOD_RES (16), (17), (18), (19), (20): Xaa is A or G
  MOD_RES (21), (22), (23), (24): Xaa is A or G or is absent
XXVSQDLSPISILYIXXXXXXXXXYKQYEMIVKS

SEQ ID NO: 28754 - protein, 37 aa, Artificial Sequence
  GFR-binding peptide
  MOD_RES (5), (6), (37): Xaa is C or S
SASPXXVSQDLSPISILYIIGKTPKIYKQYEMIVKSX

SEQ ID NO: 28755 - protein, 39 aa, Artificial Sequence
  GFR-binding peptide
  MOD_RES (4), (5), (37), (39): Xaa is C or S
PKAXXAPTKLEPISVLYLDSSNNVIKFKYENMVVKAXGX

SEQ ID NO: 28756 - protein, 39 aa, Artificial Sequence; identical to SEQ ID NO: 7522
  GFR-binding peptide
  MOD_RES (6), (7): Xaa is C or S
  MOD_RES (21), (22), (23), (24), (25): Xaa is A or G
  MOD_RES (26), (27), (28), (29): Xaa is A or G or is absent

SEQ ID NO: 28757 - protein, 37 aa, Artificial Sequence; identical to SEQ ID NO: 7523
  GFR-binding peptide
  MOD_RES (1), (2), (36): Xaa is C or S
  MOD_RES (16), (17), (18), (19), (20): Xaa is A or G
  MOD_RES (21), (22), (23), (24): Xaa is A or G or is absent

SEQ ID NO: 28758 - protein, 40 aa, Artificial Sequence; identical to SEQ ID NO: 7524
  GFR-binding peptide
  MOD_RES (4), (5), (39): Xaa is C or S
  MOD_RES (19), (20), (21), (22), (23): Xaa is A or G
  MOD_RES (24), (25), (26), (27): Xaa is A or G or is absent

SEQ ID NO: 28759 - protein, 39 aa, Artificial Sequence
  GFR-binding peptide
  MOD_RES (1), (2), (37), (39): Xaa is C or S
  MOD_RES (16), (17), (18), (19), (20): Xaa is A or G
  MOD_RES (21), (22), (23), (24): Xaa is A or G or is absent
XXVPTKLEPISVLYLXXXXXXXXXKFKYEEGMSVAEXGX

SEQ ID NO: 28760 - protein, 37 aa, Artificial Sequence; identical to SEQ ID NO: 7525
  GFR-binding peptide
  MOD_RES (7), (7): Xaa is C or S

SEQ ID NO: 28761 - protein, 33 aa, Artificial Sequence; identical to SEQ ID NO: 7526
  GFR-binding peptide
  MOD_RES (33), (33): Xaa is C or S

SEQ ID NO: 28762 - protein, 39 aa, Artificial Sequence; identical to SEQ ID NO: 7527
  GFR-binding peptide
  MOD_RES (5), (6): Xaa is C or S
  MOD_RES (20), (21), (22), (23), (24): Xaa is A or G
  MOD_RES (25), (26), (27), (28): Xaa is A or G or is absent

SEQ ID NO: 28763 - protein, 37 aa, Artificial Sequence; identical to SEQ ID NO: 7528
  GFR-binding peptide
  MOD_RES (2), (3): Xaa is C or S
  MOD_RES (17), (18), (19), (20), (21): Xaa is A or G
  MOD_RES (22), (23), (24), (25): Xaa is A or G or is absent

SEQ ID NO: 28764 - protein, 37 aa, Artificial Sequence
  GFR-binding peptide
  MOD_RES (2), (3), (35), (37): Xaa is C or S
SXXVPARLEPISILYLDAANNVVKFKYEDMVVEAXGX

SEQ ID NO: 28765 - protein, 32 aa, Artificial Sequence
  GFR-binding peptide
  MOD_RES (1), (2): Xaa is C or S
XXVSQDLEPISILYLIGKTPKIKFKYEMIVKS

SEQ ID NO: 28766 - protein, 37 aa, Artificial Sequence; identical to SEQ ID NO: 7532
  GFR-binding peptide
  MOD_RES (6), (7): Xaa is C or S

SEQ ID NO: 28767 - protein, 37 aa, Artificial Sequence
  GFR-binding peptide
  MOD_RES (6), (7): Xaa is C or S
KASKAXXVPTKLNAISILYFDKGVVTYLKKYRGMAVS

SEQ ID NO: 28768 - protein, 38 aa, Artificial Sequence; identical to SEQ ID NO: 7534
  GFR-binding peptide
  MOD_RES (6), (7): Xaa is C or S

SEQ ID NO: 28769 - protein, 41 aa, Artificial Sequence
  GFR-binding peptide
  MOD_RES (4), (5), (39), (41): Xaa is C or S
  MOD_RES (19), (20), (21), (22), (23): Xaa is A or G
  MOD_RES (24), (25), (26), (27): Xaa is A or G or is absent
PKPXXAPTKLEPISVLYLXXXXXXXXXKFKYENMVVRSXGX

SEQ ID NO: 28770 - protein, 37 aa, Artificial Sequence
  GFR-binding peptide
  MOD_RES (2), (3), (35), (37): Xaa is C or S
PXXAPTKLSPISVLYIDDSSNVIYKQYENMVVRSXGX

SEQ ID NO: 28771 - protein, 31 aa, Artificial Sequence
  GFR-binding peptide
VPARLNAISILYFDAANNVVLKKYRDMVVEA

SEQ ID NO: 28772 - protein, 38 aa, Artificial Sequence; identical to SEQ ID NO: 7536
  GFR-binding peptide
  MOD_RES (3), (4): Xaa is C or S
  MOD_RES (18), (19), (20), (21), (22): Xaa is A or G
  MOD_RES (23), (24), (25), (26): Xaa is A or G or is absent

SEQ ID NO: 28773 - protein, 38 aa, Artificial Sequence
  GFR-binding peptide
  MOD_RES (2), (3), (35), (37): Xaa is C or S
PXXAPTKLEPISVLYLDDSSNVIKFKYENMVVRSXGXH

SEQ ID NO: 28774 - protein, 33 aa, Artificial Sequence
  GFR-binding peptide
  MOD_RES (33), (33): Xaa is C or S
VPTKLEPISVLYLDDMGVPTKFKYEEGMSVAEX

SEQ ID NO: 28775 - protein, 38 aa, Artificial Sequence
  GFR-binding peptide
  MOD_RES (3), (4), (38): Xaa is C or S
  MOD_RES (18), (19), (20), (21), (22): Xaa is A or G
  MOD_RES (23), (24), (25), (26): Xaa is A or G or is absent
KAXXVPTELEPISMLYLXXXXXXXXXKFKYEEMVVEGX

SEQ ID NO: 28776 - protein, 37 aa, Artificial Sequence; identical to SEQ ID NO: 7537
  GFR-binding peptide
  MOD_RES (1), (34), (36): Xaa is C or S
  MOD_RES (15), (16), (17), (18), (19): Xaa is A or G
  MOD_RES (20), (21), (22), (23): Xaa is A or G or is absent

SEQ ID NO: 28777 - protein, 35 aa, Artificial Sequence
  GFR-binding peptide
  MOD_RES (2), (3): Xaa is C or S
  MOD_RES (17), (18), (19), (20), (21): Xaa is A or G
  MOD_RES (22), (23), (24), (25): Xaa is A or G or is absent
AXXVPTKLNAISILYFXXXXXXXXXLKKYRGMAVS

SEQ ID NO: 28778 - protein, 39 aa, Artificial Sequence; identical to SEQ ID NO: 7538
  GFR-binding peptide
  MOD_RES (5), (6), (37), (39): Xaa is C or S

SEQ ID NO: 28779 - protein, 39 aa, Artificial Sequence
  GFR-binding peptide
  MOD_RES (3), (37), (39): Xaa is C or S
  MOD_RES (17), (18), (19), (20), (21): Xaa is A or G
  MOD_RES (22), (23), (24), (25): Xaa is A or G or is absent
PTXAPTKLSPISVLYIXXXXXXXXXYKQYENMVVRSXGX

SEQ ID NO: 28780 - protein, 34 aa, Artificial Sequence; identical to SEQ ID NO: 7541
  GFR-binding peptide
  MOD_RES (32), (34): Xaa is C or S

SEQ ID NO: 28781 - protein, 38 aa, Artificial Sequence; identical to SEQ ID NO: 7543
  GFR-binding peptide
  MOD_RES (2), (3), (37): Xaa is C or S
  MOD_RES (17), (18), (19), (20), (21): Xaa is A or G
  MOD_RES (22), (23), (24), (25): Xaa is A or G or is absent

SEQ ID NO: 28782 - protein, 35 aa, Artificial Sequence
  GFR-binding peptide
  MOD_RES (2), (3), (35): Xaa is C or S
SXXVPARLEPISILYLDAANNVVKFKYEDMVVEAX

SEQ ID NO: 28783 - protein, 37 aa, Artificial Sequence
  GFR-binding peptide
  MOD_RES (3), (4): Xaa is C or S
  MOD_RES (18), (19), (20), (21), (22): Xaa is A or G
  MOD_RES (23), (24), (25), (26): Xaa is A or G or is absent
KAXXVPTKLEPISILYLXXXXXXXXXKFKYEGMAVSE

SEQ ID NO: 28784 - protein, 40 aa, Artificial Sequence; identical to SEQ ID NO: 7545
  GFR-binding peptide
  MOD_RES (3), (4), (38), (40): Xaa is C or S
  MOD_RES (18), (19), (20), (21), (22): Xaa is A or G
  MOD_RES (23), (24), (25), (26): Xaa is A or G or is absent

SEQ ID NO: 28785 - protein, 37 aa, Artificial Sequence
  GFR-binding peptide
  MOD_RES (5), (6): Xaa is C or S
APASXXVPARLNAISILYFDAANNVVLKKYRDMVVEA

SEQ ID NO: 28786 - protein, 38 aa, Artificial Sequence; identical to SEQ ID NO: 7546
  GFR-binding peptide
  MOD_RES (1), (35), (37): Xaa is C or S
  MOD_RES (15), (16), (17), (18), (19): Xaa is A or G
  MOD_RES (20), (21), (22), (23): Xaa is A or G or is absent

SEQ ID NO: 28787 - protein, 41 aa, Artificial Sequence
  GFR-binding peptide
  MOD_RES (4), (5), (39), (41): Xaa is C or S
  MOD_RES (19), (20), (21), (22), (23): Xaa is A or G
  MOD_RES (24), (25), (26), (27): Xaa is A or G or is absent
PKPXXAPTKLSPISVLYIXXXXXXXXXYKQYENMVVRSXGX

SEQ ID NO: 28788 - protein, 37 aa, Artificial Sequence; identical to SEQ ID NO: 7549
  GFR-binding peptide
  MOD_RES (6), (7): Xaa is C or S

SEQ ID NO: 28789 - protein, 35 aa, Artificial Sequence; identical to SEQ ID NO: 7551
  GFR-binding peptide
  MOD_RES (32), (34): Xaa is C or S

SEQ ID NO: 28790 - protein, 41 aa, Artificial Sequence; identical to SEQ ID NO: 7553
  GFR-binding peptide
  MOD_RES (5), (6), (40): Xaa is C or S
  MOD_RES (20), (21), (22), (23), (24): Xaa is A or G
  MOD_RES (25), (26), (27), (28): Xaa is A or G or is absent

SEQ ID NO: 28791 - protein, 35 aa, Artificial Sequence
  GFR-binding peptide
  MOD_RES (1), (1): Xaa is C or S
  MOD_RES (15), (16), (17), (18), (19): Xaa is A or G
  MOD_RES (20), (21), (22), (23): Xaa is A or G or is absent
XVPTKLSPISVLYIXXXXXXXXXYKQYEEGMSVAE

SEQ ID NO: 28792 - protein, 35 aa, Artificial Sequence; identical to SEQ ID NO: 7555
  GFR-binding peptide
  MOD_RES (1), (34): Xaa is C or S
  MOD_RES (15), (16), (17), (18), (19): Xaa is A or G
  MOD_RES (20), (21), (22), (23): Xaa is A or G or is absent

SEQ ID NO: 28793 - protein, 33 aa, Artificial Sequence
  GFR-binding peptide
  MOD_RES (1), (2), (33): Xaa is C or S
XXVPQALSPISILYIVGRKPKVYKQYEMIVRSX

SEQ ID NO: 28794 - protein, 37 aa, Artificial Sequence; identical to SEQ ID NO: 7556
  GFR-binding peptide
  MOD_RES (4), (5): Xaa is C or S
  MOD_RES (19), (20), (21), (22), (23): Xaa is A or G
  MOD_RES (24), (25), (26), (27): Xaa is A or G or is absent

SEQ ID NO: 28795 - protein, 40 aa, Artificial Sequence; identical to SEQ ID NO: 7557
  GFR-binding peptide
  MOD_RES (5), (6): Xaa is C or S
  MOD_RES (20), (21), (22), (23), (24): Xaa is A or G
  MOD_RES (25), (26), (27), (28): Xaa is A or G or is absent

SEQ ID NO: 28796 - protein, 32 aa, Artificial Sequence
  GFR-binding peptide
  MOD_RES (14), (15), (16), (17), (18): Xaa is A or G
  MOD_RES (19), (20), (21), (22): Xaa is A or G or is absent
VSQDLSPISILYIXXXXXXXXXYKQYEMIVKS

SEQ ID NO: 28797 - protein, 39 aa, Artificial Sequence
  GFR-binding peptide
  MOD_RES (5), (6): Xaa is C or S
  MOD_RES (20), (21), (22), (23), (24): Xaa is A or G
  MOD_RES (25), (26), (27), (28): Xaa is A or G or is absent
VPKAXXAPTKLEPISVLYLXXXXXXXXXKFKYENMVVKA

SEQ ID NO: 28798 - protein, 38 aa, Artificial Sequence
  GFR-binding peptide
  MOD_RES (1), (35), (37): Xaa is C or S
  MOD_RES (15), (16), (17), (18), (19): Xaa is A or G
  MOD_RES (20), (21), (22), (23): Xaa is A or G or is absent
XVPTELSPISMLYIXXXXXXXXXYKQYEDMVVEGXGXR

SEQ ID NO: 28799 - protein, 38 aa, Artificial Sequence; identical to SEQ ID NO: 7561
  GFR-binding peptide
  MOD_RES (4), (5), (37): Xaa is C or S

SEQ ID NO: 28800 - protein, 37 aa, Artificial Sequence
  GFR-binding peptide
  MOD_RES (2), (3), (35), (37): Xaa is C or S
PXXAPTQLSPISVLYIDDSSNVIYKQYENMVVRAXGX

SEQ ID NO: 28801 - protein, 39 aa, Artificial Sequence
  GFR-binding peptide
  MOD_RES (4), (5), (39): Xaa is C or S
  MOD_RES (19), (20), (21), (22), (23): Xaa is A or G
  MOD_RES (24), (25), (26), (27): Xaa is A or G or is absent
PKPXXAPTQLEPISVLYLXXXXXXXXXKFKYENMVVRAX

SEQ ID NO: 28802 - protein, 33 aa, Artificial Sequence
  GFR-binding peptide
  MOD_RES (2), (3): Xaa is C or S
PXXVPQALEPISILYLVGRKPKVKFKYEMIVRS

SEQ ID NO: 28803 - protein, 36 aa, Artificial Sequence
  GFR-binding peptide
  MOD_RES (1), (2), (33), (35): Xaa is C or S
XXVPQDLEPISILYLVGRTPKVKFKYEMVVKSXKXS

SEQ ID NO: 28804 - protein, 37 aa, Artificial Sequence
  GFR-binding peptide
  MOD_RES (1), (35), (37): Xaa is C or S
  MOD_RES (15), (16), (17), (18), (19): Xaa is A or G
  MOD_RES (20), (21), (22), (23): Xaa is A or G or is absent
XVPARLSPISILYIXXXXXXXXXYKQYEDMVVEAXGX

SEQ ID NO: 28805 - protein, 42 aa, Artificial Sequence; identical to SEQ ID NO: 7568
  GFR-binding peptide
  MOD_RES (6), (7), (41): Xaa is C or S
  MOD_RES (21), (22), (23), (24), (25): Xaa is A or G
  MOD_RES (26), (27), (28), (29): Xaa is A or G or is absent

SEQ ID NO: 28806 - protein, 32 aa, Artificial Sequence
  GFR-binding peptide
  MOD_RES (14), (15), (16), (17), (18): Xaa is A or G
  MOD_RES (19), (20), (21), (22): Xaa is A or G or is absent
VPARLSPISILYKXXXXXXXXXLKYHYDMVVE

SEQ ID NO: 28807 - protein, 34 aa, Artificial Sequence; identical to SEQ ID NO: 7569
  GFR-binding peptide
  MOD_RES (1), (34): Xaa is C or S

SEQ ID NO: 28808 - protein, 41 aa, Artificial Sequence; identical to SEQ ID NO: 7570
  GFR-binding peptide
  MOD_RES (5), (6), (38), (40): Xaa is C or S

SEQ ID NO: 28809 - protein, 36 aa, Artificial Sequence; identical to SEQ ID NO: 7572
  GFR-binding peptide
  MOD_RES (34), (36): Xaa is C or S
  MOD_RES (14), (15), (16), (17), (18): Xaa is A or G
  MOD_RES (19), (20), (21), (22): Xaa is A or G or is absent

SEQ ID NO: 28810 - protein, 40 aa, Artificial Sequence
  GFR-binding peptide
  MOD_RES (6), (7): Xaa is C or S
  MOD_RES (21), (22), (23), (24), (25): Xaa is A or G
  MOD_RES (26), (27), (28), (29): Xaa is A or G or is absent
AAPASXXVPARLSPISILYKXXXXXXXXXLKYHYDMVVEA

SEQ ID NO: 28811 - protein, 37 aa, Artificial Sequence
  GFR-binding peptide
  MOD_RES (3), (4), (37): Xaa is C or S
  MOD_RES (18), (19), (20), (21), (22): Xaa is A or G
  MOD_RES (23), (24), (25), (26): Xaa is A or G or is absent
SPXXVSQDLEPISILYLXXXXXXXXXKFKYEMIVKSX

SEQ ID NO: 28812 - protein, 35 aa, Artificial Sequence
  GFR-binding peptide
  MOD_RES (1), (32), (34): Xaa is C or S
XVPQALEPISILYLVGRKPKVKFKYEMIVRSXKXS

SEQ ID NO: 28813 - protein, 39 aa, Artificial Sequence
  GFR-binding peptide
  MOD_RES (4), (5), (38): Xaa is C or S
  MOD_RES (19), (20), (21), (22), (23): Xaa is A or G
  MOD_RES (24), (25), (26), (27): Xaa is A or G or is absent
ASPXXVSQDLSPISILYIXXXXXXXXXYKQYEMIVKSXK

SEQ ID NO: 28814 - protein, 31 aa, Artificial Sequence
  GFR-binding peptide
APTKLSPISVLYIDSSNNVIYKQYENMVVKA

SEQ ID NO: 28815 - protein, 33 aa, Artificial Sequence
  GFR-binding peptide
  MOD_RES (1), (1): Xaa is C or S
  MOD_RES (15), (16), (17), (18), (19): Xaa is A or G
  MOD_RES (20), (21), (22), (23): Xaa is A or G or is absent
XVPTELEPISMLYLXXXXXXXXXKFKYEDMVVE

SEQ ID NO: 28816 - protein, 37 aa, Artificial Sequence; identical to SEQ ID NO: 7576
  GFR-binding peptide
  MOD_RES (2), (3), (35), (37): Xaa is C or S

SEQ ID NO: 28817 - protein, 38 aa, Artificial Sequence; identical to SEQ ID NO: 7578
  GFR-binding peptide
  MOD_RES (5), (6): Xaa is C or S
  MOD_RES (20), (21), (22), (23), (24): Xaa is A or G
  MOD_RES (25), (26), (27), (28): Xaa is A or G or is absent

SEQ ID NO: 28818 - protein, 37 aa, Artificial Sequence
  GFR-binding peptide
  MOD_RES (2), (3), (35), (37): Xaa is C or S
AXXAPTKLEPISVLYLDSSNNVIKFKYENMVVKAXGX

SEQ ID NO: 28819 - protein, 41 aa, Artificial Sequence
  GFR-binding peptide
  MOD_RES (5), (6), (39), (41): Xaa is C or S
  MOD_RES (20), (21), (22), (23), (24): Xaa is A or G
  MOD_RES (25), (26), (27), (28): Xaa is A or G or is absent
SAAPXXVPQALSPISILYIXXXXXXXXXYKQYEMIVRSXKX

SEQ ID NO: 28820 - protein, 40 aa, Artificial Sequence; identical to SEQ ID NO: 7580
  GFR-binding peptide
  MOD_RES (4), (5), (39): Xaa is C or S
  MOD_RES (19), (20), (21), (22), (23): Xaa is A or G
  MOD_RES (24), (25), (26), (27): Xaa is A or G or is absent

SEQ ID NO: 28821 - protein, 43 aa, Artificial Sequence; identical to SEQ ID NO: 7581
  GFR-binding peptide
  MOD_RES (6), (7), (41), (43): Xaa is C or S
  MOD_RES (21), (22), (23), (24), (25): Xaa is A or G
  MOD_RES (26), (27), (28), (29): Xaa is A or G or is absent

SEQ ID NO: 28822 - protein, 40 aa, Artificial Sequence; identical to SEQ ID NO: 7582
  GFR-binding peptide
  MOD_RES (5), (6), (37), (39): Xaa is C or S

SEQ ID NO: 28823 - protein, 33 aa, Artificial Sequence; identical to SEQ ID NO: 7583
  GFR-binding peptide
  MOD_RES (1), (1): Xaa is C or S
  MOD_RES (15), (16), (17), (18), (19): Xaa is A or G
  MOD_RES (20), (21), (22), (23): Xaa is A or G or is absent

SEQ ID NO: 28824 - protein, 42 aa, Artificial Sequence
  GFR-binding peptide
  MOD_RES (4), (5), (39), (41): Xaa is C or S
  MOD_RES (19), (20), (21), (22), (23): Xaa is A or G
  MOD_RES (24), (25), (26), (27): Xaa is A or G or is absent
PKAXXVPTELSPISMLYIXXXXXXXXXYKQYEEMVVEGXGXR

SEQ ID NO: 28825 - protein, 34 aa, Artificial Sequence; identical to SEQ ID NO: 7584
  GFR-binding peptide
  MOD_RES (2), (2): Xaa is C or S
  MOD_RES (16), (17), (18), (19), (20): Xaa is A or G
  MOD_RES (21), (22), (23), (24): Xaa is A or G or is absent

SEQ ID NO: 28826 - protein, 34 aa, Artificial Sequence
  GFR-binding peptide
  MOD_RES (34), (34): Xaa is C or S
  MOD_RES (14), (15), (16), (17), (18): Xaa is A or G
  MOD_RES (19), (20), (21), (22): Xaa is A or G or is absent
VPTKLSPISILYKXXXXXXXXXLKYHYGMAVSEX

SEQ ID NO: 28827 - protein, 39 aa, Artificial Sequence; identical to SEQ ID NO: 7585
  GFR-binding peptide
  MOD_RES (6), (7): Xaa is C or S
  MOD_RES (21), (22), (23), (24), (25): Xaa is A or G
  MOD_RES (26), (27), (28), (29): Xaa is A or G or is absent

SEQ ID NO: 28828 - protein, 39 aa, Artificial Sequence
  GFR-binding peptide
  MOD_RES (3), (4), (38): Xaa is C or S
  MOD_RES (18), (19), (20), (21), (22): Xaa is A or G
  MOD_RES (23), (24), (25), (26): Xaa is A or G or is absent
KAXXVPTKLEPISILYLXXXXXXXXXKFKYEGMAVSEXG

SEQ ID NO: 28829 - protein, 38 aa, Artificial Sequence
  GFR-binding peptide
  MOD_RES (4), (5), (37): Xaa is C or S
PASXXVPARLSPISILYKDAANNVVLKYHYDMVVEAXG

SEQ ID NO: 28830 - protein, 36 aa, Artificial Sequence
  GFR-binding peptide
  MOD_RES (35), (35): Xaa is C or S
  MOD_RES (14), (15), (16), (17), (18): Xaa is A or G
  MOD_RES (19), (20), (21), (22): Xaa is A or G or is absent
VPTKLEPISVLYLXXXXXXXXXKFKYEEGMSVAEXG

SEQ ID NO: 28831 - protein, 35 aa, Artificial Sequence
  GFR-binding peptide
  MOD_RES (35), (35): Xaa is C or S
  MOD_RES (14), (15), (16), (17), (18): Xaa is A or G
  MOD_RES (19), (20), (21), (22): Xaa is A or G or is absent
VPTKLSPISVLYIXXXXXXXXXYKQYEEGMSVAEX

SEQ ID NO: 28832 - protein, 36 aa, Artificial Sequence; identical to SEQ ID NO: 7591
  GFR-binding peptide
  MOD_RES (2), (3), (34), (36): Xaa is C or S

SEQ ID NO: 28833 - protein, 39 aa, Artificial Sequence
  GFR-binding peptide
  MOD_RES (3), (4), (36), (38): Xaa is C or S
KPXXAPTKLEPISVLYLDDSSNVIKFKYENMVVRSXGXH

SEQ ID NO: 28834 - protein, 35 aa, Artificial Sequence; identical to SEQ ID NO: 7592
  GFR-binding peptide
  MOD_RES (1), (2), (35): Xaa is C or S
  MOD_RES (16), (17), (18), (19), (20): Xaa is A or G
  MOD_RES (21), (22), (23), (24): Xaa is A or G or is absent

SEQ ID NO: 28835 - protein, 39 aa, Artificial Sequence
  GFR-binding peptide
  MOD_RES (3), (4), (38): Xaa is C or S
  MOD_RES (18), (19), (20), (21), (22): Xaa is A or G
  MOD_RES (23), (24), (25), (26): Xaa is A or G or is absent
KAXXVPTKLSPISILYKXXXXXXXXXLKYHYGMAVSEXG

SEQ ID NO: 28836 - protein, 35 aa, Artificial Sequence
  GFR-binding peptide
  MOD_RES (1), (34): Xaa is C or S
  MOD_RES (15), (16), (17), (18), (19): Xaa is A or G
  MOD_RES (20), (21), (22), (23): Xaa is A or G or is absent
XVPQDLEPISILYLXXXXXXXXXKFKYEMVVKSXK

SEQ ID NO: 28837 - protein, 36 aa, Artificial Sequence
  GFR-binding peptide
  MOD_RES (4), (5), (36): Xaa is C or S
ASPXXVSQDLEPISILYLIGKTPKIKFKYEMIVKSX

SEQ ID NO: 28838 - protein, 40 aa, Artificial Sequence; identical to SEQ ID NO: 7597
  GFR-binding peptide
  MOD_RES (5), (6), (38), (40): Xaa is C or S

SEQ ID NO: 28839 - protein, 41 aa, Artificial Sequence
  GFR-binding peptide
  MOD_RES (5), (6), (41): Xaa is C or S
  MOD_RES (20), (21), (22), (23), (24): Xaa is A or G
  MOD_RES (25), (26), (27), (28): Xaa is A or G or is absent
VGKAXXVPTKLSPISVLYIXXXXXXXXXYKQYEEGMSVAEX

SEQ ID NO: 28840 - protein, 37 aa, Artificial Sequence; identical to SEQ ID NO: 7598
  GFR-binding peptide
  MOD_RES (3), (4): Xaa is C or S
  MOD_RES (18), (19), (20), (21), (22): Xaa is A or G
  MOD_RES (23), (24), (25), (26): Xaa is A or G or is absent

SEQ ID NO: 28841 - protein, 41 aa, Artificial Sequence
  GFR-binding peptide
  MOD_RES (6), (7), (39), (41): Xaa is C or S
AVPKAXXAPTKLEPISVLYLDSSNNVIKFKYENMVVKAXGX

SEQ ID NO: 28842 - protein, 37 aa, Artificial Sequence
  GFR-binding peptide
  MOD_RES (6), (7): Xaa is C or S
SIPKAXXVPTELEPISMLYLDEYDKVVKFKYEEMVVE

SEQ ID NO: 28843 - protein, 40 aa, Artificial Sequence
  GFR-binding peptide
  MOD_RES (5), (6), (38), (40): Xaa is C or S
APASXXVPARLEPISILYLDAANNVVKFKYEDMVVEAXGX

SEQ ID NO: 28844 - protein, 39 aa, Artificial Sequence
  GFR-binding peptide
  MOD_RES (5), (6), (38): Xaa is C or S
VPKPXXAPTKLEPISVLYLDDSSNVIKFKYENMVVRSXG

SEQ ID NO: 28845 - protein, 40 aa, Artificial Sequence
  GFR-binding peptide
  MOD_RES (4), (5), (37), (39): Xaa is C or S
PKPXXAPTQLSPISVLYIDDSSNVIYKQYENMVVRAXGXH

SEQ ID NO: 28846 - protein, 37 aa, Artificial Sequence
  GFR-binding peptide
  MOD_RES (2), (3), (37): Xaa is C or S
  MOD_RES (17), (18), (19), (20), (21): Xaa is A or G
  MOD_RES (22), (23), (24), (25): Xaa is A or G or is absent
SXXVPARLEPISILYLXXXXXXXXXKFKYEDMVVEAX

SEQ ID NO: 28847 - protein, 35 aa, Artificial Sequence; identical to SEQ ID NO: 7603
  GFR-binding peptide
  MOD_RES (2), (3), (34): Xaa is C or S

SEQ ID NO: 28848 - protein, 35 aa, Artificial Sequence
  GFR-binding peptide
  MOD_RES (1), (2), (34): Xaa is C or S
XXVPARLSPISILYKDAANNVVLKYHYDMVVEAXG

SEQ ID NO: 28849 - protein, 31 aa, Artificial Sequence; identical to SEQ ID NO: 7604
  GFR-binding peptide

SEQ ID NO: 28850 - protein, 38 aa, Artificial Sequence; identical to SEQ ID NO: 7605
  GFR-binding peptide
  MOD_RES (6), (7), (38): Xaa is C or S

SEQ ID NO: 28851 - protein, 34 aa, Artificial Sequence; identical to SEQ ID NO: 7606
  GFR-binding peptide
  MOD_RES (32), (34): Xaa is C or S

SEQ ID NO: 28852 - protein, 35 aa, Artificial Sequence; identical to SEQ ID NO: 7607
  GFR-binding peptide
  MOD_RES (4), (5): Xaa is C or S

SEQ ID NO: 28853 - protein, 35 aa, Artificial Sequence; identical to SEQ ID NO: 7608
  GFR-binding peptide
  MOD_RES (2), (3), (34): Xaa is C or S

SEQ ID NO: 28854 - protein, 35 aa, Artificial Sequence
  GFR-binding peptide
  MOD_RES (4), (5): Xaa is C or S
PASXXVPARLSPISILYKDAANNVVLKYHYDMVVE

SEQ ID NO: 28855 - protein, 37 aa, Artificial Sequence
  GFR-binding peptide
  MOD_RES (5), (37): Xaa is C or S
TKPTXAPTKLEPISVLYLDDSSNVIKFKYENMVVRSX

SEQ ID NO: 28856 - protein, 38 aa, Artificial Sequence
  GFR-binding peptide
  MOD_RES (3), (4), (36), (38): Xaa is C or S
KAXXVPTKLSPISILYIDKGVVTYYKQYEGMAVSEXGX

SEQ ID NO: 28857 - protein, 43 aa, Artificial Sequence
  GFR-binding peptide
  MOD_RES (5), (6), (40), (42): Xaa is C or S
  MOD_RES (20), (21), (22), (23), (24): Xaa is A or G
  MOD_RES (25), (26), (27), (28): Xaa is A or G or is absent
VPKAXXAPTKLEPISVLYLXXXXXXXXXKFKYENMVVKAXGXH

SEQ ID NO: 28858 - protein, 37 aa, Artificial Sequence
  GFR-binding peptide
  MOD_RES (2), (3), (35), (37): Xaa is C or S
AXXVPTKLSPISILYKDKGVVTYLKYHYGMAVSEXGX

SEQ ID NO: 28859 - protein, 36 aa, Artificial Sequence
  GFR-binding peptide
  MOD_RES (34), (36): Xaa is C or S
  MOD_RES (14), (15), (16), (17), (18): Xaa is A or G
  MOD_RES (19), (20), (21), (22): Xaa is A or G or is absent
APTKLSPISVLYIXXXXXXXXXYKQYENMVVKAXGX

SEQ ID NO: 28860 - protein, 35 aa, Artificial Sequence
  GFR-binding peptide
  MOD_RES (5), (5): Xaa is C or S
TKPTXAPTKLSPISVLYIDDSSNVIYKQYENMVVR

SEQ ID NO: 28861 - protein, 37 aa, Artificial Sequence; identical to SEQ ID NO: 7610
  GFR-binding peptide
  MOD_RES (4), (5): Xaa is C or S
  MOD_RES (19), (20), (21), (22), (23): Xaa is A or G
  MOD_RES (24), (25), (26), (27): Xaa is A or G or is absent

SEQ ID NO: 28862 - protein, 32 aa, Artificial Sequence; identical to SEQ ID NO: 7611
  GFR-binding peptide
  MOD_RES (32), (32): Xaa is C or S

SEQ ID NO: 28863 - protein, 37 aa, Artificial Sequence
  GFR-binding peptide
  MOD_RES (3), (4): Xaa is C or S
  MOD_RES (18), (19), (20), (21), (22): Xaa is A or G
  MOD_RES (23), (24), (25), (26): Xaa is A or G or is absent
ASXXVPARLSPISILYKXXXXXXXXXLKYHYDMVVEA

SEQ ID NO: 28864 - protein, 34 aa, Artificial Sequence
  GFR-binding peptide
  MOD_RES (2), (2): Xaa is C or S
  MOD_RES (16), (17), (18), (19), (20): Xaa is A or G
  MOD_RES (21), (22), (23), (24): Xaa is A or G or is absent
TXAPTKLEPISVLYLXXXXXXXXXKFKYENMVVR

SEQ ID NO: 28865 - protein, 35 aa, Artificial Sequence; identical to SEQ ID NO: 7613
  GFR-binding peptide
  MOD_RES (1), (2), (34): Xaa is C or S

SEQ ID NO: 28866 - protein, 38 aa, Artificial Sequence
  GFR-binding peptide
  MOD_RES (5), (6): Xaa is C or S
  MOD_RES (20), (21), (22), (23), (24): Xaa is A or G
  MOD_RES (25), (26), (27), (28): Xaa is A or G or is absent
IPKAXXVPTELEPISMLYLXXXXXXXXXKFKYEEMVVE

SEQ ID NO: 28867 - protein, 39 aa, Artificial Sequence
  GFR-binding peptide
  MOD_RES (5), (6): Xaa is C or S
  MOD_RES (20), (21), (22), (23), (24): Xaa is A or G
  MOD_RES (25), (26), (27), (28): Xaa is A or G or is absent
IPKAXXVPTELSPISMLYIXXXXXXXXXYKQYEDMVVEG

SEQ ID NO: 28868 - protein, 40 aa, Artificial Sequence
  GFR-binding peptide
  MOD_RES (5), (6), (40): Xaa is C or S
  MOD_RES (20), (21), (22), (23), (24): Xaa is A or G
  MOD_RES (25), (26), (27), (28): Xaa is A or G or is absent
IPKAXXVPTELEPISMLYLXXXXXXXXXKFKYEEMVVEGX

SEQ ID NO: 28869 - protein, 40 aa, Artificial Sequence
  GFR-binding peptide
  MOD_RES (5), (6), (38), (40): Xaa is C or S
VPKAXXAPTKLEPISVLYLDSSNNVIKFKYENMVVKAXGX

SEQ ID NO: 28870 - protein, 36 aa, Artificial Sequence
  GFR-binding peptide
  MOD_RES (5), (6): Xaa is C or S
SASPXXVSQDLSPISILYIIGKTPKIYKQYEMIVKS

SEQ ID NO: 28871 - protein, 40 aa, Artificial Sequence
  GFR-binding peptide
  MOD_RES (5), (39): Xaa is C or S
  MOD_RES (19), (20), (21), (22), (23): Xaa is A or G
  MOD_RES (24), (25), (26), (27): Xaa is A or G or is absent
TKPTXAPTKLEPISVLYLXXXXXXXXXKFKYENMVVRSXG

SEQ ID NO: 28872 - protein, 36 aa, Artificial Sequence; identical to SEQ ID NO: 7615
  GFR-binding peptide
  MOD_RES (1), (2), (36): Xaa is C or S
  MOD_RES (16), (17), (18), (19), (20): Xaa is A or G
  MOD_RES (21), (22), (23), (24): Xaa is A or G or is absent

SEQ ID NO: 28873 - protein, 40 aa, Artificial Sequence
  GFR-binding peptide
  MOD_RES (2), (3), (37), (39): Xaa is C or S
  MOD_RES (17), (18), (19), (20), (21): Xaa is A or G
  MOD_RES (22), (23), (24), (25): Xaa is A or G or is absent
PXXAPTKLEPISVLYLXXXXXXXXXKFKYENMVVRSXGXH

SEQ ID NO: 28874 - protein, 37 aa, Artificial Sequence
  GFR-binding peptide
  MOD_RES (4), (5): Xaa is C or S
  MOD_RES (19), (20), (21), (22), (23): Xaa is A or G
  MOD_RES (24), (25), (26), (27): Xaa is A or G or is absent
ASPXXVSQDLSPISILYIXXXXXXXXXYKQYEMIVKS

SEQ ID NO: 28875 - protein, 42 aa, Artificial Sequence
  GFR-binding peptide
  MOD_RES (6), (7), (39), (41): Xaa is C or S
KASKAXXVPTKLSPISILYKDKGVVTYLKYHYGMAVSEXGXR

SEQ ID NO: 28876 - protein, 41 aa, Artificial Sequence
  GFR-binding peptide
  MOD_RES (6), (7), (40): Xaa is C or S
KVGKAXXVPTKLSPISVLYIDDMGVPTYKQYEEGMSVAEXG

SEQ ID NO: 28877 - protein, 38 aa, Artificial Sequence; identical to SEQ ID NO: 7619
  GFR-binding peptide
  MOD_RES (5), (6), (38): Xaa is C or S

SEQ ID NO: 28878 - protein, 32 aa, Artificial Sequence
  GFR-binding peptide
  MOD_RES (32), (32): Xaa is C or S
VPARLSPISILYKDAANNVVLKYHYDMVVEAX

SEQ ID NO: 28879 - protein, 39 aa, Artificial Sequence
  GFR-binding peptide
  MOD_RES (2), (3), (37), (39): Xaa is C or S
  MOD_RES (17), (18), (19), (20), (21): Xaa is A or G
  MOD_RES (22), (23), (24), (25): Xaa is A or G or is absent
PXXAPTQLEPISVLYLXXXXXXXXXKFKYENMVVRAXGX

SEQ ID NO: 28880 - protein, 38 aa, Artificial Sequence
  GFR-binding peptide
  MOD_RES (1), (2), (36), (38): Xaa is C or S
  MOD_RES (16), (17), (18), (19), (20): Xaa is A or G
  MOD_RES (21), (22), (23), (24): Xaa is A or G or is absent
XXVPTKLSPISILYKXXXXXXXXXLKYHYGMAVSEXGX

SEQ ID NO: 28881 - protein, 39 aa, Artificial Sequence
  GFR-binding peptide
  MOD_RES (6), (7), (38): Xaa is C or S
ASASPXXVPQDLSPISILYIVGRTPKVYKQYEMVVKSXK

SEQ ID NO: 28882 - protein, 38 aa, Artificial Sequence
  GFR-binding peptide
  MOD_RES (2), (3), (37): Xaa is C or S
  MOD_RES (17), (18), (19), (20), (21): Xaa is A or G
  MOD_RES (22), (23), (24), (25): Xaa is A or G or is absent
PXXAPTKLSPISVLYIXXXXXXXXXYKQYENMVVRSXG

SEQ ID NO: 28883 - protein, 42 aa, Artificial Sequence; identical to SEQ ID NO: 7623
  GFR-binding peptide
  MOD_RES (6), (7), (40), (42): Xaa is C or S
  MOD_RES (21), (22), (23), (24), (25): Xaa is A or G
  MOD_RES (26), (27), (28), (29): Xaa is A or G or is absent

SEQ ID NO: 28884 - protein, 40 aa, Artificial Sequence
  GFR-binding peptide
  MOD_RES (4), (38), (40): Xaa is C or S
  MOD_RES (18), (19), (20), (21), (22): Xaa is A or G
  MOD_RES (23), (24), (25), (26): Xaa is A or G or is absent
KPTXAPTKLSPISVLYIXXXXXXXXXYKQYENMVVRSXGX

SEQ ID NO: 28885 - protein, 38 aa, Artificial Sequence
  GFR-binding peptide
  MOD_RES (35), (37): Xaa is C or S
  MOD_RES (14), (15), (16), (17), (18): Xaa is A or G
  MOD_RES (19), (20), (21), (22): Xaa is A or G or is absent
VPTKLEPISVLYLXXXXXXXXXKFKYEEGMSVAEXGXR

SEQ ID NO: 28886 - protein, 41 aa, Artificial Sequence
  GFR-binding peptide
  MOD_RES (6), (7), (41): Xaa is C or S
  MOD_RES (21), (22), (23), (24), (25): Xaa is A or G
  MOD_RES (26), (27), (28), (29): Xaa is A or G or is absent
KASKAXXVPTKLEPISILYLXXXXXXXXXKFKYEGMAVSEX

SEQ ID NO: 28887 - protein, 38 aa, Artificial Sequence
  GFR-binding peptide
  MOD_RES (5), (6): Xaa is C or S
  MOD_RES (20), (21), (22), (23), (24): Xaa is A or G
  MOD_RES (25), (26), (27), (28): Xaa is A or G or is absent
ASKAXXVPTKLNAISILYFXXXXXXXXXLKKYRGMAVS

SEQ ID NO: 28888 - protein, 35 aa, Artificial Sequence; identical to SEQ ID NO: 7624
  GFR-binding peptide
  MOD_RES (3), (35): Xaa is C or S

SEQ ID NO: 28889 - protein, 39 aa, Artificial Sequence
  GFR-binding peptide
  MOD_RES (6), (7), (38): Xaa is C or S
ASASPXXVPQDLEPISILYLVGRTPKVKFKYEMVVKSXK

SEQ ID NO: 28890 - protein, 40 aa, Artificial Sequence
  GFR-binding peptide
  MOD_RES (6), (7), (39): Xaa is C or S
KIPKAXXVPTELSPISMLYIDENEKVVYKQYEDMVVEGXG

SEQ ID NO: 28891 - protein, 38 aa, Artificial Sequence
  GFR-binding peptide
  MOD_RES (6), (7), (38): Xaa is C or S
ASASPXXVPQDLSPISILYIVGRTPKVYKQYEMVVKSX

SEQ ID NO: 28892 - protein, 38 aa, Artificial Sequence
  GFR-binding peptide
  MOD_RES (3), (4), (38): Xaa is C or S
  MOD_RES (18), (19), (20), (21), (22): Xaa is A or G
  MOD_RES (23), (24), (25), (26): Xaa is A or G or is absent
KAXXVPTKLNAISILYFXXXXXXXXXLKKYRGMAVSEX

SEQ ID NO: 28893 - protein, 34 aa, Artificial Sequence; identical to SEQ ID NO: 7626
  GFR-binding peptide
  MOD_RES (1), (2), (33): Xaa is C or S

SEQ ID NO: 28894 - protein, 34 aa, Artificial Sequence
  GFR-binding peptide
  MOD_RES (3), (4): Xaa is C or S
KAXXVPTKLSPISILYKDKGVVTYLKYHYGMAVS

SEQ ID NO: 28895 - protein, 40 aa, Artificial Sequence
  GFR-binding peptide
  MOD_RES (5), (37), (39): Xaa is C or S
TKPTXAPTKLSPISVLYIDDSSNVIYKQYENMVVRSXGXH

SEQ ID NO: 28896 - protein, 39 aa, Artificial Sequence; identical to SEQ ID NO: 7627
  GFR-binding peptide
  MOD_RES (3), (4), (37), (39): Xaa is C or S
  MOD_RES (18), (19), (20), (21), (22): Xaa is A or G
  MOD_RES (23), (24), (25), (26): Xaa is A or G or is absent

SEQ ID NO: 28897 - protein, 36 aa, Artificial Sequence
  GFR-binding peptide
  MOD_RES (1), (35): Xaa is C or S
  MOD_RES (15), (16), (17), (18), (19): Xaa is A or G
  MOD_RES (20), (21), (22), (23): Xaa is A or G or is absent
XAPTKLEPISVLYLXXXXXXXXXKFKYENMVVRSXG

SEQ ID NO: 28898 - protein, 35 aa, Artificial Sequence
  GFR-binding peptide
  MOD_RES (1), (2): Xaa is C or S
  MOD_RES (16), (17), (18), (19), (20): Xaa is A or G
  MOD_RES (21), (22), (23), (24): Xaa is A or G or is absent
XXVPARLSPISILYKXXXXXXXXXLKYHYDMVVEA

SEQ ID NO: 28899 - protein, 42 aa, Artificial Sequence; identical to SEQ ID NO: 7628
  GFR-binding peptide
  MOD_RES (5), (6), (40), (42): Xaa is C or S
  MOD_RES (20), (21), (22), (23), (24): Xaa is A or G
  MOD_RES (25), (26), (27), (28): Xaa is A or G or is absent

SEQ ID NO: 28900 - protein, 36 aa, Artificial Sequence; identical to SEQ ID NO: 7629
  GFR-binding peptide
  MOD_RES (3), (4): Xaa is C or S
  MOD_RES (18), (19), (20), (21), (22): Xaa is A or G
  MOD_RES (23), (24), (25), (26): Xaa is A or G or is absent

SEQ ID NO: 28901 - protein, 31 aa, Artificial Sequence
  GFR-binding peptide
VPTKLSPISILYKDKGVVTYLKYHYGMAVSE

SEQ ID NO: 28902 - protein, 34 aa, Artificial Sequence
  GFR-binding peptide
  MOD_RES (31), (33): Xaa is C or S
VPQALSPISILYIVGRKPKVYKQYEMIVRSXKXS

SEQ ID NO: 28903 - protein, 38 aa, Artificial Sequence
  GFR-binding peptide
  MOD_RES (4), (5): Xaa is C or S
  MOD_RES (19), (20), (21), (22), (23): Xaa is A or G
  MOD_RES (24), (25), (26), (27): Xaa is A or G or is absent
PKPXXAPTQLEPISVLYLXXXXXXXXXKFKYENMVVRA

SEQ ID NO: 28904 - protein, 44 aa, Artificial Sequence
  GFR-binding peptide
  MOD_RES (6), (7), (41), (43): Xaa is C or S
  MOD_RES (21), (22), (23), (24), (25): Xaa is A or G
  MOD_RES (26), (27), (28), (29): Xaa is A or G or is absent
SIPKAXXVPTELSPISMLYIXXXXXXXXXYKQYEEMVVEGXGXR

SEQ ID NO: 28905 - protein, 38 aa, Artificial Sequence
  GFR-binding peptide
  MOD_RES (4), (5), (37): Xaa is C or S
PKPXXAPTQLSPISVLYIDDSSNVIYKQYENMVVRAXG

SEQ ID NO: 28906 - protein, 36 aa, Artificial Sequence
  GFR-binding peptide
  MOD_RES (1), (2), (34), (36): Xaa is C or S
XXVPARLSPISILYKDAANNVVLKYHYDMVVEAXGX

SEQ ID NO: 28907 - protein, 43 aa, Artificial Sequence
  GFR-binding peptide
  MOD_RES (6), (7), (41), (43): Xaa is C or S
  MOD_RES (21), (22), (23), (24), (25): Xaa is A or G
  MOD_RES (26), (27), (28), (29): Xaa is A or G or is absent
KASKAXXVPTKLSPISILYIXXXXXXXXXYKQYEGMAVSEXGX

SEQ ID NO: 28908 - protein, 38 aa, Artificial Sequence
  GFR-binding peptide
  MOD_RES (2), (3), (35), (37): Xaa is C or S
SXXVPARLSPISILYKDAANNVVLKYHYDMVVEAXGXR

SEQ ID NO: 28909 - protein, 42 aa, Artificial Sequence
  GFR-binding peptide
  MOD_RES (4), (5), (39), (41): Xaa is C or S
  MOD_RES (19), (20), (21), (22), (23): Xaa is A or G
  MOD_RES (24), (25), (26), (27): Xaa is A or G or is absent
PASXXVPARLEPISILYLXXXXXXXXXKFKYEDMVVEAXGXR

SEQ ID NO: 28910 - protein, 37 aa, Artificial Sequence; identical to SEQ ID NO: 7634
  GFR-binding peptide
  MOD_RES (2), (3), (37): Xaa is C or S
  MOD_RES (17), (18), (19), (20), (21): Xaa is A or G
  MOD_RES (22), (23), (24), (25): Xaa is A or G or is absent

SEQ ID NO: 28911 - protein, 36 aa, Artificial Sequence; identical to SEQ ID NO: 7635
  GFR-binding peptide
  MOD_RES (2), (3), (34), (36): Xaa is C or S

SEQ ID NO: 28912 - protein, 31 aa, Artificial Sequence
  GFR-binding peptide
  MOD_RES (31), (31): Xaa is C or S
VPQDLEPISILYLVGRTPKVKFKYEMVVKSX

SEQ ID NO: 28913 - protein, 37 aa, Artificial Sequence; identical to SEQ ID NO: 7636
  GFR-binding peptide
  MOD_RES (3), (4), (36): Xaa is C or S

SEQ ID NO: 28914 - protein, 34 aa, Artificial Sequence
  GFR-binding peptide
  MOD_RES (33), (33): Xaa is C or S
VPTKLSPISVLYIDDMGVPTYKQYEEGMSVAEXG

SEQ ID NO: 28915 - protein, 38 aa, Artificial Sequence; identical to SEQ ID NO: 7637
  GFR-binding peptide
  MOD_RES (2), (3), (37): Xaa is C or S
  MOD_RES (17), (18), (19), (20), (21): Xaa is A or G
  MOD_RES (22), (23), (24), (25): Xaa is A or G or is absent

SEQ ID NO: 28916 - protein, 35 aa, Artificial Sequence
  GFR-binding peptide
  MOD_RES (1), (2), (34): Xaa is C or S
XXVPTELSPISMLYIDEYDKVVYKQYEEMVVEGXG

SEQ ID NO: 28917 - protein, 38 aa, Artificial Sequence; identical to SEQ ID NO: 7639
  GFR-binding peptide
  MOD_RES (4), (5): Xaa is C or S
  MOD_RES (19), (20), (21), (22), (23): Xaa is A or G
  MOD_RES (24), (25), (26), (27): Xaa is A or G or is absent

SEQ ID NO: 28918 - protein, 41 aa, Artificial Sequence; identical to SEQ ID NO: 7640
  GFR-binding peptide
  MOD_RES (3), (4), (38), (40): Xaa is C or S
  MOD_RES (18), (19), (20), (21), (22): Xaa is A or G
  MOD_RES (23), (24), (25), (26): Xaa is A or G or is absent

SEQ ID NO: 28919 - protein, 40 aa, Artificial Sequence; identical to SEQ ID NO: 7641
  GFR-binding peptide
  MOD_RES (6), (7): Xaa is C or S
  MOD_RES (21), (22), (23), (24), (25): Xaa is A or G
  MOD_RES (26), (27), (28), (29): Xaa is A or G or is absent

SEQ ID NO: 28920 - protein, 38 aa, Artificial Sequence
  GFR-binding peptide
  MOD_RES (4), (5): Xaa is C or S
  MOD_RES (19), (20), (21), (22), (23): Xaa is A or G
  MOD_RES (24), (25), (26), (27): Xaa is A or G or is absent
PKAXXVPTELSPISMLYIXXXXXXXXXYKQYEDMVVEG

SEQ ID NO: 28921 - protein, 42 aa, Artificial Sequence; identical to SEQ ID NO: 7643
  GFR-binding peptide
  MOD_RES (6), (7), (41): Xaa is C or S
  MOD_RES (21), (22), (23), (24), (25): Xaa is A or G
  MOD_RES (26), (27), (28), (29): Xaa is A or G or is absent

SEQ ID NO: 28922 - protein, 37 aa, Artificial Sequence
  GFR-binding peptide
  MOD_RES (1), (35), (37): Xaa is C or S
  MOD_RES (15), (16), (17), (18), (19): Xaa is A or G
  MOD_RES (20), (21), (22), (23): Xaa is A or G or is absent
XVPARLEPISILYLXXXXXXXXXKFKYEDMVVEAXGX

SEQ ID NO: 28923 - protein, 33 aa, Artificial Sequence
  GFR-binding peptide
  MOD_RES (1), (32): Xaa is C or S
XVSQDLSPISILYIIGKTPKIYKQYEMIVKSXK

SEQ ID NO: 28924 - protein, 43 aa, Artificial Sequence
  GFR-binding peptide
  MOD_RES (6), (7), (41), (43): Xaa is C or S
  MOD_RES (21), (22), (23), (24), (25): Xaa is A or G
  MOD_RES (26), (27), (28), (29): Xaa is A or G or is absent
KASKAXXVPTKLEPISILYLXXXXXXXXXKFKYEGMAVSEXGX

SEQ ID NO: 28925 - protein, 38 aa, Artificial Sequence
  GFR-binding peptide
  MOD_RES (3), (4), (38): Xaa is C or S
  MOD_RES (18), (19), (20), (21), (22): Xaa is A or G
  MOD_RES (23), (24), (25), (26): Xaa is A or G or is absent
KPXXAPTKLSPISVLYIXXXXXXXXXYKQYENMVVRSX

SEQ ID NO: 28926 - protein, 42 aa, Artificial Sequence; identical to SEQ ID NO: 7645
  GFR-binding peptide
  MOD_RES (5), (6), (39), (41): Xaa is C or S
  MOD_RES (20), (21), (22), (23), (24): Xaa is A or G
  MOD_RES (25), (26), (27), (28): Xaa is A or G or is absent

SEQ ID NO: 28927 - protein, 40 aa, Artificial Sequence
  GFR-binding peptide
  MOD_RES (2), (3), (37), (39): Xaa is C or S
  MOD_RES (17), (18), (19), (20), (21): Xaa is A or G
  MOD_RES (22), (23), (24), (25): Xaa is A or G or is absent
AXXVPTELEPISMLYLXXXXXXXXXKFKYEDMVVEGXGXR

SEQ ID NO: 28928 - protein, 40 aa, Artificial Sequence
  GFR-binding peptide
  MOD_RES (1), (2), (37), (39): Xaa is C or S
  MOD_RES (16), (17), (18), (19), (20): Xaa is A or G
  MOD_RES (21), (22), (23), (24): Xaa is A or G or is absent
XXVPTKLEPISVLYLXXXXXXXXXKFKYEEGMSVAEXGXR

SEQ ID NO: 28929 - protein, 36 aa, Artificial Sequence
  GFR-binding peptide
  MOD_RES (4), (5): Xaa is C or S
PKAXXVPTELSPISMLYIDEYDKVVYKQYEEMVVEG

SEQ ID NO: 28930 - protein, 36 aa, Artificial Sequence
  GFR-binding peptide
  MOD_RES (5), (6): Xaa is C or S
APASXXVPARLSPISILYKDAANNVVLKYHYDMVVE

SEQ ID NO: 28931 - protein, 38 aa, Artificial Sequence
  GFR-binding peptide
  MOD_RES (3), (4), (38): Xaa is C or S
  MOD_RES (18), (19), (20), (21), (22): Xaa is A or G
  MOD_RES (23), (24), (25), (26): Xaa is A or G or is absent
KAXXAPTKLEPISVLYLXXXXXXXXXKFKYENMVVKAX

SEQ ID NO: 28932 - protein, 37 aa, Artificial Sequence
  GFR-binding peptide
  MOD_RES (4), (5): Xaa is C or S
  MOD_RES (19), (20), (21), (22), (23): Xaa is A or G
  MOD_RES (24), (25), (26), (27): Xaa is A or G or is absent
PKPXXAPTQLSPISVLYIXXXXXXXXXYKQYENMVVR

SEQ ID NO: 28933 - protein, 41 aa, Artificial Sequence; identical to SEQ ID NO: 7651
  GFR-binding peptide
  MOD_RES (5), (6), (40): Xaa is C or S
  MOD_RES (20), (21), (22), (23), (24): Xaa is A or G
  MOD_RES (25), (26), (27), (28): Xaa is A or G or is absent

SEQ ID NO: 28934 - protein, 34 aa, Artificial Sequence
  GFR-binding peptide
  MOD_RES (1), (33): Xaa is C or S
XVPARLEPISILYLDAANNVVKFKYEDMVVEAXG

SEQ ID NO: 28935 - protein, 37 aa, Artificial Sequence; identical to SEQ ID NO: 7653
  GFR-binding peptide
  MOD_RES (1), (2), (35), (37): Xaa is C or S
  MOD_RES (16), (17), (18), (19), (20): Xaa is A or G
  MOD_RES (21), (22), (23), (24): Xaa is A or G or is absent

SEQ ID NO: 28936 - protein, 35 aa, Artificial Sequence
  GFR-binding peptide
  MOD_RES (32), (34): Xaa is C or S
APTKLEPISVLYLDDSSNVIKFKYENMVVRSXGXH

SEQ ID NO: 28937 - protein, 33 aa, Artificial Sequence
  GFR-binding peptide
  MOD_RES (32), (32): Xaa is C or S
VPTKLSPISILYKDKGVVTYLKYHYGMAVSEXG

SEQ ID NO: 28938 - protein, 36 aa, Artificial Sequence
  GFR-binding peptide
  MOD_RES (4), (5): Xaa is C or S
PKAXXVPTELEPISMLYLDENEKVVKFKYEDMVVEG

SEQ ID NO: 28939 - protein, 37 aa, Artificial Sequence
  GFR-binding peptide
  MOD_RES (3), (4): Xaa is C or S
  MOD_RES (18), (19), (20), (21), (22): Xaa is A or G
  MOD_RES (23), (24), (25), (26): Xaa is A or G or is absent
KAXXVPTELEPISMLYLXXXXXXXXXKFKYEDMVVEG

SEQ ID NO: 28940 - protein, 40 aa, Artificial Sequence
  GFR-binding peptide
  MOD_RES (4), (38), (40): Xaa is C or S
  MOD_RES (18), (19), (20), (21), (22): Xaa is A or G
  MOD_RES (23), (24), (25), (26): Xaa is A or G or is absent
KPTXAPTKLEPISVLYLXXXXXXXXXKFKYENMVVRSXGX

SEQ ID NO: 28941 - protein, 33 aa, Artificial Sequence
  GFR-binding peptide
  MOD_RES (1), (1): Xaa is C or S
  MOD_RES (15), (16), (17), (18), (19): Xaa is A or G
  MOD_RES (20), (21), (22), (23): Xaa is A or G or is absent
XVPTKLSPISILYKXXXXXXXXXLKYHYGMAVS

SEQ ID NO: 28942 - protein, 36 aa, Artificial Sequence; identical to SEQ ID NO: 7658
  GFR-binding peptide
  MOD_RES (5), (6): Xaa is C or S

SEQ ID NO: 28943 - protein, 36 aa, Artificial Sequence
  GFR-binding peptide
  MOD_RES (33), (35): Xaa is C or S
  MOD_RES (14), (15), (16), (17), (18): Xaa is A or G
  MOD_RES (19), (20), (21), (22): Xaa is A or G or is absent
VPQALEPISILYLXXXXXXXXXKFKYEMIVRSXKXS

SEQ ID NO: 28944 - protein, 40 aa, Artificial Sequence; identical to SEQ ID NO: 7660
  GFR-binding peptide
  MOD_RES (3), (4), (38), (40): Xaa is C or S
  MOD_RES (18), (19), (20), (21), (22): Xaa is A or G
  MOD_RES (23), (24), (25), (26): Xaa is A or G or is absent

SEQ ID NO: 28945 - protein, 37 aa, Artificial Sequence
  GFR-binding peptide
  MOD_RES (34), (36): Xaa is C or S
  MOD_RES (14), (15), (16), (17), (18): Xaa is A or G
  MOD_RES (19), (20), (21), (22): Xaa is A or G or is absent
VPARLSPISILYIXXXXXXXXXYKQYEDMVVEAXGXR

SEQ ID NO: 28946 - protein, 36 aa, Artificial Sequence
  GFR-binding peptide
  MOD_RES (3), (4): Xaa is C or S
  MOD_RES (18), (19), (20), (21), (22): Xaa is A or G
  MOD_RES (23), (24), (25), (26): Xaa is A or G or is absent
SPXXVSQDLEPISILYLXXXXXXXXXKFKYEMIVKS

SEQ ID NO: 28947 - protein, 39 aa, Artificial Sequence
  GFR-binding peptide
  MOD_RES (3), (4), (39): Xaa is C or S
  MOD_RES (18), (19), (20), (21), (22): Xaa is A or G
  MOD_RES (23), (24), (25), (26): Xaa is A or G or is absent
KAXXVPTKLEPISVLYLXXXXXXXXXKFKYEEGMSVAEX

SEQ ID NO: 28948 - protein, 35 aa, Artificial Sequence
  GFR-binding peptide
  MOD_RES (34), (34): Xaa is C or S
  MOD_RES (14), (15), (16), (17), (18): Xaa is A or G
  MOD_RES (19), (20), (21), (22): Xaa is A or G or is absent
VPTKLSPISILYIXXXXXXXXXYKQYEGMAVSEXG

SEQ ID NO: 28949 - protein, 40 aa, Artificial Sequence; identical to SEQ ID NO: 7662
  GFR-binding peptide
  MOD_RES (5), (6): Xaa is C or S
  MOD_RES (20), (21), (22), (23), (24): Xaa is A or G
  MOD_RES (25), (26), (27), (28): Xaa is A or G or is absent

SEQ ID NO: 28950 - protein, 38 aa, Artificial Sequence; identical to SEQ ID NO: 7663
  GFR-binding peptide
  MOD_RES (4), (5), (36), (38): Xaa is C or S

SEQ ID NO: 28951 - protein, 42 aa, Artificial Sequence
  GFR-binding peptide
  MOD_RES (6), (7), (40), (42): Xaa is C or S
  MOD_RES (21), (22), (23), (24), (25): Xaa is A or G
  MOD_RES (26), (27), (28), (29): Xaa is A or G or is absent
ASASPXXVSQDLEPISILYLXXXXXXXXXKFKYEMIVKSXKX

SEQ ID NO: 28952 - protein, 30 aa, Artificial Sequence
  GFR-binding peptide
VPTELSPISMLYIDEYDKVVYKQYEEMVVE

SEQ ID NO: 28953 - protein, 37 aa, Artificial Sequence; identical to SEQ ID NO: 7666
  GFR-binding peptide
  MOD_RES (2), (3), (34), (36): Xaa is C or S

SEQ ID NO: 28954 - protein, 37 aa, Artificial Sequence
  GFR-binding peptide
  MOD_RES (3), (4), (36): Xaa is C or S
KPXXAPTQLSPISVLYIDDSSNVIYKQYENMVVRAXG

SEQ ID NO: 28955 - protein, 39 aa, Artificial Sequence
  GFR-binding peptide
  MOD_RES (4), (5), (36), (38): Xaa is C or S
AAPXXVPQALEPISILYLVGRKPKVKFKYEMIVRSXKXS

SEQ ID NO: 28956 - protein, 35 aa, Artificial Sequence
  GFR-binding peptide
  MOD_RES (2), (3), (35): Xaa is C or S
PXXAPTKLEPISVLYLDDSSNVIKFKYENMVVRSX

SEQ ID NO: 28957 - protein, 34 aa, Artificial Sequence; identical to SEQ ID NO: 7669
  GFR-binding peptide
  MOD_RES (1), (2): Xaa is C or S
  MOD_RES (16), (17), (18), (19), (20): Xaa is A or G
  MOD_RES (21), (22), (23), (24): Xaa is A or G or is absent

SEQ ID NO: 28958 - protein, 37 aa, Artificial Sequence
  GFR-binding peptide
  MOD_RES (2), (3): Xaa is C or S
  MOD_RES (17), (18), (19), (20), (21): Xaa is A or G
  MOD_RES (22), (23), (24), (25): Xaa is A or G or is absent
AXXVPTKLEPISVLYLXXXXXXXXXKFKYEEGMSVAE

SEQ ID NO: 28959 - protein, 40 aa, Artificial Sequence
  GFR-binding peptide
  MOD_RES (3), (37), (39): Xaa is C or S
  MOD_RES (17), (18), (19), (20), (21): Xaa is A or G
  MOD_RES (22), (23), (24), (25): Xaa is A or G or is absent
PTXAPTKLSPISVLYIXXXXXXXXXYKQYENMVVRSXGXH

SEQ ID NO: 28960 - protein, 34 aa, Artificial Sequence; identical to SEQ ID NO: 7671
  GFR-binding peptide
  MOD_RES (32), (34): Xaa is C or S

SEQ ID NO: 28961 - protein, 38 aa, Artificial Sequence
  GFR-binding peptide
  MOD_RES (3), (4), (37): Xaa is C or S
  MOD_RES (18), (19), (20), (21), (22): Xaa is A or G
  MOD_RES (23), (24), (25), (26): Xaa is A or G or is absent
APXXVPQALSPISILYIXXXXXXXXXYKQYEMIVRSXK

SEQ ID NO: 28962 - protein, 36 aa, Artificial Sequence
  GFR-binding peptide
  MOD_RES (1), (35): Xaa is C or S
  MOD_RES (15), (16), (17), (18), (19): Xaa is A or G
  MOD_RES (20), (21), (22), (23): Xaa is A or G or is absent
XVPARLEPISILYLXXXXXXXXXKFKYEDMVVEAXG

SEQ ID NO: 28963 - protein, 38 aa, Artificial Sequence
  GFR-binding peptide
  MOD_RES (1), (2), (35), (37): Xaa is C or S
XXVPTKLEPISVLYLDDMGVPTKFKYEEGMSVAEXGXR

SEQ ID NO: 28964 - protein, 35 aa, Artificial Sequence
  GFR-binding peptide
  MOD_RES (32), (34): Xaa is C or S
VPTELSPISMLYIDENEKVVYKQYEDMVVEGXGXR

SEQ ID NO: 28965 - protein, 44 aa, Artificial Sequence
  GFR-binding peptide
  MOD_RES (7), (41), (43): Xaa is C or S
  MOD_RES (21), (22), (23), (24), (25): Xaa is A or G
  MOD_RES (26), (27), (28), (29): Xaa is A or G or is absent
HVTKPTXAPTKLEPISVLYLXXXXXXXXXKFKYENMVVRSXGXH

SEQ ID NO: 28966 - protein, 42 aa, Artificial Sequence
  GFR-binding peptide
  MOD_RES (5), (6), (40), (42): Xaa is C or S
  MOD_RES (20), (21), (22), (23), (24): Xaa is A or G
  MOD_RES (25), (26), (27), (28): Xaa is A or G or is absent
ASKAXXVPTKLEPISILYLXXXXXXXXXKFKYEGMAVSEXGX

SEQ ID NO: 28967 - protein, 36 aa, Artificial Sequence; identical to SEQ ID NO: 7673
  GFR-binding peptide
  MOD_RES (2), (3), (35): Xaa is C or S

SEQ ID NO: 28968 - protein, 32 aa, Artificial Sequence
  GFR-binding peptide
  MOD_RES (14), (15), (16), (17), (18): Xaa is A or G
  MOD_RES (19), (20), (21), (22): Xaa is A or G or is absent
VPTKLSPISILYKXXXXXXXXXLKYHYGMAVS

SEQ ID NO: 28969 - protein, 36 aa, Artificial Sequence; identical to SEQ ID NO: 7676
  GFR-binding peptide
  MOD_RES (5), (6): Xaa is C or S

SEQ ID NO: 28970 - protein, 32 aa, Artificial Sequence
  GFR-binding peptide
  MOD_RES (32), (32): Xaa is C or S
VPARLNAISILYFDAANNVVLKKYRDMVVEAX

SEQ ID NO: 28971 - protein, 40 aa, Artificial Sequence
  GFR-binding peptide
  MOD_RES (3), (4), (37), (39): Xaa is C or S
  MOD_RES (18), (19), (20), (21), (22): Xaa is A or G
  MOD_RES (23), (24), (25), (26): Xaa is A or G or is absent
APXXVPQALEPISILYLXXXXXXXXXKFKYEMIVRSXKXS

SEQ ID NO: 28972 - protein, 34 aa, Artificial Sequence; identical to SEQ ID NO: 7677
  GFR-binding peptide
  MOD_RES (1), (2), (34): Xaa is C or S

SEQ ID NO: 28973 - protein, 37 aa, Artificial Sequence
  GFR-binding peptide
  MOD_RES (5), (6): Xaa is C or S
VPKAXXAPTKLEPISVLYLDSSNNVIKFKYENMVVKA

SEQ ID NO: 28974 - protein, 36 aa, Artificial Sequence
  GFR-binding peptide
  MOD_RES (5), (6): Xaa is C or S
ASKAXXVPTKLSPISILYIDKGVVTYYKQYEGMAVS

SEQ ID NO: 28975 - protein, 32 aa, Artificial Sequence; identical to SEQ ID NO: 7678
  GFR-binding peptide
  MOD_RES (32), (32): Xaa is C or S

SEQ ID NO: 28976 - protein, 39 aa, Artificial Sequence; identical to SEQ ID NO: 7679
  GFR-binding peptide
  MOD_RES (3), (4), (37), (39): Xaa is C or S
  MOD_RES (18), (19), (20), (21), (22): Xaa is A or G
  MOD_RES (23), (24), (25), (26): Xaa is A or G or is absent

SEQ ID NO: 28977 - protein, 37 aa, Artificial Sequence; identical to SEQ ID NO: 7680
  GFR-binding peptide
  MOD_RES (1), (35), (37): Xaa is C or S
  MOD_RES (15), (16), (17), (18), (19): Xaa is A or G
  MOD_RES (20), (21), (22), (23): Xaa is A or G or is absent

SEQ ID NO: 28978 - protein, 35 aa, Artificial Sequence; identical to SEQ ID NO: 7682
  GFR-binding peptide
  MOD_RES (4), (5): Xaa is C or S

SEQ ID NO: 28979 - protein, 41 aa, Artificial Sequence; identical to SEQ ID NO: 7683
  GFR-binding peptide
  MOD_RES (6), (7), (40): Xaa is C or S
  MOD_RES (21), (22), (23), (24), (25): Xaa is A or G
  MOD_RES (26), (27), (28), (29): Xaa is A or G or is absent

SEQ ID NO: 28980 - protein, 35 aa, Artificial Sequence
  GFR-binding peptide
  MOD_RES (1), (35): Xaa is C or S
  MOD_RES (15), (16), (17), (18), (19): Xaa is A or G
  MOD_RES (20), (21), (22), (23): Xaa is A or G or is absent
XVPTELSPISMLYIXXXXXXXXXYKQYEDMVVEGX

SEQ ID NO: 28981 - protein, 41 aa, Artificial Sequence; identical to SEQ ID NO: 7684
  GFR-binding peptide
  MOD_RES (6), (7), (40): Xaa is C or S
  MOD_RES (21), (22), (23), (24), (25): Xaa is A or G
  MOD_RES (26), (27), (28), (29): Xaa is A or G or is absent

SEQ ID NO: 28982 - protein, 33 aa, Artificial Sequence; identical to SEQ ID NO: 7685
  GFR-binding peptide
  MOD_RES (2), (3): Xaa is C or S

SEQ ID NO: 28983 - protein, 40 aa, Artificial Sequence; identical to SEQ ID NO: 7686
  GFR-binding peptide
  MOD_RES (5), (6), (39): Xaa is C or S

SEQ ID NO: 28984 - protein, 33 aa, Artificial Sequence
  GFR-binding peptide
  MOD_RES (14), (15), (16), (17), (18): Xaa is A or G
  MOD_RES (19), (20), (21), (22): Xaa is A or G or is absent
VPARLSPISILYIXXXXXXXXXYKQYEDMVVEA

SEQ ID NO: 28985 - protein, 39 aa, Artificial Sequence; identical to SEQ ID NO: 7690
  GFR-binding peptide
  MOD_RES (6), (7): Xaa is C or S
  MOD_RES (21), (22), (23), (24), (25): Xaa is A or G
  MOD_RES (26), (27), (28), (29): Xaa is A or G or is absent

SEQ ID NO: 28986 - protein, 34 aa, Artificial Sequence; identical to SEQ ID NO: 7691
  GFR-binding peptide
  MOD_RES (1), (2), (33): Xaa is C or S

SEQ ID NO: 28987 - protein, 34 aa, Artificial Sequence
  GFR-binding peptide
  MOD_RES (1), (2): Xaa is C or S
  MOD_RES (16), (17), (18), (19), (20): Xaa is A or G
  MOD_RES (21), (22), (23), (24): Xaa is A or G or is absent
XXVPQDLEPISILYLXXXXXXXXXKFKYEMVVKS

SEQ ID NO: 28988 - protein, 40 aa, Artificial Sequence; identical to SEQ ID NO: 7697
  GFR-binding peptide
  MOD_RES (2), (3), (37), (39): Xaa is C or S
  MOD_RES (17), (18), (19), (20), (21): Xaa is A or G
  MOD_RES (22), (23), (24), (25): Xaa is A or G or is absent

SEQ ID NO: 28989 - protein, 40 aa, Artificial Sequence
  GFR-binding peptide
  MOD_RES (5), (6), (40): Xaa is C or S
  MOD_RES (20), (21), (22), (23), (24): Xaa is A or G
  MOD_RES (25), (26), (27), (28): Xaa is A or G or is absent
ASKAXXVPTKLSPISILYIXXXXXXXXXYKQYEGMAVSEX

SEQ ID NO: 28990 - protein, 38 aa, Artificial Sequence; identical to SEQ ID NO: 7698
  GFR-binding peptide
  MOD_RES (5), (6): Xaa is C or S
  MOD_RES (20), (21), (22), (23), (24): Xaa is A or G
  MOD_RES (25), (26), (27), (28): Xaa is A or G or is absent

SEQ ID NO: 28991 - protein, 39 aa, Artificial Sequence
  GFR-binding peptide
  MOD_RES (1), (2), (36), (38): Xaa is C or S
  MOD_RES (16), (17), (18), (19), (20): Xaa is A or G
  MOD_RES (21), (22), (23), (24): Xaa is A or G or is absent
XXVPTKLSPISILYKXXXXXXXXXLKYHYGMAVSEXGXR

SEQ ID NO: 28992 - protein, 38 aa, Artificial Sequence
  GFR-binding peptide
  MOD_RES (1), (2), (36), (38): Xaa is C or S
  MOD_RES (16), (17), (18), (19), (20): Xaa is A or G
  MOD_RES (21), (22), (23), (24): Xaa is A or G or is absent
XXVPTELSPISMLYIXXXXXXXXXYKQYEDMVVEGXGX

SEQ ID NO: 28993 - protein, 32 aa, Artificial Sequence
  GFR-binding peptide
  MOD_RES (14), (15), (16), (17), (18): Xaa is A or G
  MOD_RES (19), (20), (21), (22): Xaa is A or G or is absent
APTKLSPISVLYIXXXXXXXXXYKQYENMVVK

SEQ ID NO: 28994 - protein, 42 aa, Artificial Sequence; identical to SEQ ID NO: 7700
  GFR-binding peptide
  MOD_RES (5), (39), (41): Xaa is C or S
  MOD_RES (19), (20), (21), (22), (23): Xaa is A or G
  MOD_RES (24), (25), (26), (27): Xaa is A or G or is absent

SEQ ID NO: 28995 - protein, 35 aa, Artificial Sequence; identical to SEQ ID NO: 7701
  GFR-binding peptide
  MOD_RES (2), (3), (35): Xaa is C or S

SEQ ID NO: 28996 - protein, 35 aa, Artificial Sequence; identical to SEQ ID NO: 7702
  GFR-binding peptide
  MOD_RES (2), (3): Xaa is C or S
  MOD_RES (17), (18), (19), (20), (21): Xaa is A or G
  MOD_RES (22), (23), (24), (25): Xaa is A or G or is absent

SEQ ID NO: 28997 - protein, 36 aa, Artificial Sequence
  GFR-binding peptide
  MOD_RES (1), (33), (35): Xaa is C or S
XVPARLNAISILYFDAANNVVLKKYRDMVVEAXGXR

SEQ ID NO: 28998 - protein, 35 aa, Artificial Sequence; identical to SEQ ID NO: 7703
  GFR-binding peptide
  MOD_RES (2), (3), (35): Xaa is C or S

SEQ ID NO: 28999 - protein, 33 aa, Artificial Sequence
  GFR-binding peptide
  MOD_RES (1), (1): Xaa is C or S
  MOD_RES (15), (16), (17), (18), (19): Xaa is A or G
  MOD_RES (20), (21), (22), (23): Xaa is A or G or is absent
XAPTKLSPISVLYIXXXXXXXXXYKQYENMVVK

SEQ ID NO: 29000 - protein, 35 aa, Artificial Sequence
  GFR-binding peptide
  MOD_RES (1), (33), (35): Xaa is C or S
XAPTKLSPISVLYIDSSNNVIYKQYENMVVKAXGX

SEQ ID NO: 29001 - protein, 32 aa, Artificial Sequence
  GFR-binding peptide
  MOD_RES (14), (15), (16), (17), (18): Xaa is A or G
  MOD_RES (19), (20), (21), (22): Xaa is A or G or is absent
APTKLSPISVLYIXXXXXXXXXYKQYENMVVR

SEQ ID NO: 29002 - protein, 35 aa, Artificial Sequence; identical to SEQ ID NO: 7704
  GFR-binding peptide
  MOD_RES (1), (2), (33), (35): Xaa is C or S

SEQ ID NO: 29003 - protein, 33 aa, Artificial Sequence
  GFR-binding peptide
  MOD_RES (1), (1): Xaa is C or S
  MOD_RES (15), (16), (17), (18), (19): Xaa is A or G
  MOD_RES (20), (21), (22), (23): Xaa is A or G or is absent
XAPTKLSPISVLYIXXXXXXXXXYKQYENMVVR

SEQ ID NO: 29004 - protein, 34 aa, Artificial Sequence; identical to SEQ ID NO: 7705
  GFR-binding peptide
  MOD_RES (34), (34): Xaa is C or S
  MOD_RES (14), (15), (16), (17), (18): Xaa is A or G
  MOD_RES (19), (20), (21), (22): Xaa is A or G or is absent

SEQ ID NO: 29005 - protein, 39 aa, Artificial Sequence
  GFR-binding peptide
  MOD_RES (4), (5): Xaa is C or S
  MOD_RES (19), (20), (21), (22), (23): Xaa is A or G
  MOD_RES (24), (25), (26), (27): Xaa is A or G or is absent
GKAXXVPTKLSPISVLYIXXXXXXXXXYKQYEEGMSVAE

SEQ ID NO: 29006 - protein, 36 aa, Artificial Sequence
  GFR-binding peptide
  MOD_RES (2), (36): Xaa is C or S
  MOD_RES (16), (17), (18), (19), (20): Xaa is A or G
  MOD_RES (21), (22), (23), (24): Xaa is A or G or is absent
TXAPTKLEPISVLYLXXXXXXXXXKFKYENMVVRSX

SEQ ID NO: 29007 - protein, 33 aa, Artificial Sequence
  GFR-binding peptide
  MOD_RES (14), (15), (16), (17), (18): Xaa is A or G
  MOD_RES (19), (20), (21), (22): Xaa is A or G or is absent
APTKLEPISVLYLXXXXXXXXXKFKYENMVVKA

SEQ ID NO: 29008 - protein, 33 aa, Artificial Sequence; identical to SEQ ID NO: 7711
  GFR-binding peptide
  MOD_RES (1), (2), (33): Xaa is C or S

SEQ ID NO: 29009 - protein, 39 aa, Artificial Sequence
  GFR-binding peptide
  MOD_RES (5), (6): Xaa is C or S
  MOD_RES (20), (21), (22), (23), (24): Xaa is A or G
  MOD_RES (25), (26), (27), (28): Xaa is A or G or is absent
ASKAXXVPTKLNAISILYFXXXXXXXXXLKKYRGMAVSE

SEQ ID NO: 29010 - protein, 35 aa, Artificial Sequence; identical to SEQ ID NO: 7714
  GFR-binding peptide
  MOD_RES (1), (2), (33), (35): Xaa is C or S

SEQ ID NO: 29011 - protein, 39 aa, Artificial Sequence
  GFR-binding peptide
  MOD_RES (5), (6), (38): Xaa is C or S
VPKAXXAPTKLSPISVLYIDSSNNVIYKQYENMVVKAXG

SEQ ID NO: 29012 - protein, 32 aa, Artificial Sequence
  GFR-binding peptide
  MOD_RES (1), (1): Xaa is C or S
XAPTKLEPISVLYLDSSNNVIKFKYENMVVKA

SEQ ID NO: 29013 - protein, 39 aa, Artificial Sequence
  GFR-binding peptide
  MOD_RES (4), (38): Xaa is C or S
  MOD_RES (18), (19), (20), (21), (22): Xaa is A or G
  MOD_RES (23), (24), (25), (26): Xaa is A or G or is absent
KPTXAPTKLEPISVLYLXXXXXXXXXKFKYENMVVRSXG

SEQ ID NO: 29014 - protein, 39 aa, Artificial Sequence
  GFR-binding peptide
  MOD_RES (4), (5): Xaa is C or S
  MOD_RES (19), (20), (21), (22), (23): Xaa is A or G
  MOD_RES (24), (25), (26), (27): Xaa is A or G or is absent
GKAXXVPTKLEPISVLYLXXXXXXXXXKFKYEEGMSVAE

SEQ ID NO: 29015 - protein, 37 aa, Artificial Sequence
  GFR-binding peptide
  MOD_RES (7), (7): Xaa is C or S
HVTKPTXAPTKLEPISVLYLDDSSNVIKFKYENMVVR

SEQ ID NO: 29016 - protein, 39 aa, Artificial Sequence; identical to SEQ ID NO: 7720
  GFR-binding peptide
  MOD_RES (3), (4), (38): Xaa is C or S
  MOD_RES (18), (19), (20), (21), (22): Xaa is A or G
  MOD_RES (23), (24), (25), (26): Xaa is A or G or is absent

SEQ ID NO: 29017 - protein, 34 aa, Artificial Sequence; identical to SEQ ID NO: 7721
  GFR-binding peptide
  MOD_RES (32), (34): Xaa is C or S

SEQ ID NO: 29018 - protein, 40 aa, Artificial Sequence
  GFR-binding peptide
  MOD_RES (3), (4), (39): Xaa is C or S
  MOD_RES (18), (19), (20), (21), (22): Xaa is A or G
  MOD_RES (23), (24), (25), (26): Xaa is A or G or is absent
KAXXVPTKLSPISVLYIXXXXXXXXXYKQYEEGMSVAEXG

SEQ ID NO: 29019 - protein, 32 aa, Artificial Sequence
  GFR-binding peptide
  MOD_RES (1), (2): Xaa is C or S
XXVPQALSPISILYIVGRKPKVYKQYEMIVRS

SEQ ID NO: 29020 - protein, 35 aa, Artificial Sequence
  GFR-binding peptide
  MOD_RES (3), (4): Xaa is C or S
KAXXAPTKLSPISVLYIDSSNNVIYKQYENMVVKA

SEQ ID NO: 29021 - protein, 40 aa, Artificial Sequence
  GFR-binding peptide
  MOD_RES (6), (7), (39): Xaa is C or S
AAPASXXVPARLEPISILYLDAANNVVKFKYEDMVVEAXG

SEQ ID NO: 29022 - protein, 39 aa, Artificial Sequence; identical to SEQ ID NO: 7726
  GFR-binding peptide
  MOD_RES (3), (4), (36), (38): Xaa is C or S

SEQ ID NO: 29023 - protein, 37 aa, Artificial Sequence; identical to SEQ ID NO: 7728
  GFR-binding peptide
  MOD_RES (34), (36): Xaa is C or S
  MOD_RES (14), (15), (16), (17), (18): Xaa is A or G
  MOD_RES (19), (20), (21), (22): Xaa is A or G or is absent

SEQ ID NO: 29024 - protein, 35 aa, Artificial Sequence
  GFR-binding peptide
  MOD_RES (2), (3): Xaa is C or S
  MOD_RES (17), (18), (19), (20), (21): Xaa is A or G
  MOD_RES (22), (23), (24), (25): Xaa is A or G or is absent
AXXAPTKLEPISVLYLXXXXXXXXXKFKYENMVVK

SEQ ID NO: 29025 - protein, 40 aa, Artificial Sequence
  GFR-binding peptide
  MOD_RES (5), (6), (37), (39): Xaa is C or S
SAAPXXVPQALEPISILYLVGRKPKVKFKYEMIVRSXKXS

SEQ ID NO: 29026 - protein, 41 aa, Artificial Sequence; identical to SEQ ID NO: 7729
  GFR-binding peptide
  MOD_RES (6), (7), (39), (41): Xaa is C or S

SEQ ID NO: 29027 - protein, 39 aa, Artificial Sequence
  GFR-binding peptide
  MOD_RES (4), (5), (39): Xaa is C or S
  MOD_RES (19), (20), (21), (22), (23): Xaa is A or G
  MOD_RES (24), (25), (26), (27): Xaa is A or G or is absent
SKAXXVPTKLSPISILYKXXXXXXXXXLKYHYGMAVSEX

SEQ ID NO: 29028 - protein, 39 aa, Artificial Sequence
  GFR-binding peptide
  MOD_RES (2), (3), (37), (39): Xaa is C or S
  MOD_RES (17), (18), (19), (20), (21): Xaa is A or G
  MOD_RES (22), (23), (24), (25): Xaa is A or G or is absent
AXXVPTELSPISMLYIXXXXXXXXXYKQYEEMVVEGXGX

SEQ ID NO: 29029 - protein, 37 aa, Artificial Sequence; identical to SEQ ID NO: 7733
  GFR-binding peptide
  MOD_RES (3), (4), (36): Xaa is C or S

SEQ ID NO: 29030 - protein, 32 aa, Artificial Sequence
  GFR-binding peptide
  MOD_RES (31), (31): Xaa is C or S
VPQDLEPISILYLVGRTPKVKFKYEMVVKSXK

SEQ ID NO: 29031 - protein, 35 aa, Artificial Sequence; identical to SEQ ID NO: 7736
  GFR-binding peptide
  MOD_RES (1), (35): Xaa is C or S
  MOD_RES (15), (16), (17), (18), (19): Xaa is A or G
  MOD_RES (20), (21), (22), (23): Xaa is A or G or is absent

SEQ ID NO: 29032 - protein, 38 aa, Artificial Sequence
  GFR-binding peptide
  MOD_RES (4), (5): Xaa is C or S
  MOD_RES (19), (20), (21), (22), (23): Xaa is A or G
  MOD_RES (24), (25), (26), (27): Xaa is A or G or is absent
SKAXXVPTKLNAISILYFXXXXXXXXXLKKYRGMAVSE

SEQ ID NO: 29033 - protein, 43 aa, Artificial Sequence
  GFR-binding peptide
  MOD_RES (5), (6), (40), (42): Xaa is C or S
  MOD_RES (20), (21), (22), (23), (24): Xaa is A or G
  MOD_RES (25), (26), (27), (28): Xaa is A or G or is absent
APASXXVPARLSPISILYIXXXXXXXXXYKQYEDMVVEAXGXR

SEQ ID NO: 29034 - protein, 39 aa, Artificial Sequence
  GFR-binding peptide
  MOD_RES (1), (2), (36), (38): Xaa is C or S
  MOD_RES (16), (17), (18), (19), (20): Xaa is A or G
  MOD_RES (21), (22), (23), (24): Xaa is A or G or is absent
XXVPTELEPISMLYLXXXXXXXXXKFKYEDMVVEGXGXR

SEQ ID NO: 29035 - protein, 36 aa, Artificial Sequence
  GFR-binding peptide
  MOD_RES (5), (6): Xaa is C or S
VPKAXXAPTKLEPISVLYLDSSNNVIKFKYENMVVK

SEQ ID NO: 29036 - protein, 36 aa, Artificial Sequence
  GFR-binding peptide
  MOD_RES (3), (4): Xaa is C or S
  MOD_RES (18), (19), (20), (21), (22): Xaa is A or G
  MOD_RES (23), (24), (25), (26): Xaa is A or G or is absent
KPXXAPTQLEPISVLYLXXXXXXXXXKFKYENMVVR

SEQ ID NO: 29037 - protein, 42 aa, Artificial Sequence
  GFR-binding peptide
  MOD_RES (6), (7), (40), (42): Xaa is C or S
  MOD_RES (21), (22), (23), (24), (25): Xaa is A or G
  MOD_RES (26), (27), (28), (29): Xaa is A or G or is absent
ASAAPXXVPQALEPISILYLXXXXXXXXXKFKYEMIVRSXKX

SEQ ID NO: 29038 - protein, 39 aa, Artificial Sequence; identical to SEQ ID NO: 7738
  GFR-binding peptide
  MOD_RES (2), (3), (37), (39): Xaa is C or S
  MOD_RES (17), (18), (19), (20), (21): Xaa is A or G
  MOD_RES (22), (23), (24), (25): Xaa is A or G or is absent

SEQ ID NO: 29039 - protein, 41 aa, Artificial Sequence
  GFR-binding peptide
  MOD_RES (3), (4), (38), (40): Xaa is C or S
  MOD_RES (18), (19), (20), (21), (22): Xaa is A or G
  MOD_RES (23), (24), (25), (26): Xaa is A or G or is absent
ASXXVPARLSPISILYIXXXXXXXXXYKQYEDMVVEAXGXR

SEQ ID NO: 29040 - protein, 39 aa, Artificial Sequence
  GFR-binding peptide
  MOD_RES (1), (2), (36), (38): Xaa is C or S
  MOD_RES (16), (17), (18), (19), (20): Xaa is A or G
  MOD_RES (21), (22), (23), (24): Xaa is A or G or is absent
XXVPTELSPISMLYIXXXXXXXXXYKQYEEMVVEGXGXR

SEQ ID NO: 29041 - protein, 40 aa, Artificial Sequence
  GFR-binding peptide
  MOD_RES (5), (6), (40): Xaa is C or S
  MOD_RES (20), (21), (22), (23), (24): Xaa is A or G
  MOD_RES (25), (26), (27), (28): Xaa is A or G or is absent
IPKAXXVPTELSPISMLYIXXXXXXXXXYKQYEDMVVEGX

SEQ ID NO: 29042 - protein, 34 aa, Artificial Sequence; identical to SEQ ID NO: 7743
  GFR-binding peptide
  MOD_RES (3), (4): Xaa is C or S

SEQ ID NO: 29043 - protein, 38 aa, Artificial Sequence
  GFR-binding peptide
  MOD_RES (4), (5), (37): Xaa is C or S
PKPXXAPTKLSPISVLYIDDSSNVIYKQYENMVVRSXG

SEQ ID NO: 29044 - protein, 40 aa, Artificial Sequence
  GFR-binding peptide
  MOD_RES (4), (5), (40): Xaa is C or S
  MOD_RES (19), (20), (21), (22), (23): Xaa is A or G
  MOD_RES (24), (25), (26), (27): Xaa is A or G or is absent
GKAXXVPTKLSPISVLYIXXXXXXXXXYKQYEEGMSVAEX

SEQ ID NO: 29045 - protein, 36 aa, Artificial Sequence; identical to SEQ ID NO: 7745
  GFR-binding peptide
  MOD_RES (2), (3), (34), (36): Xaa is C or S

SEQ ID NO: 29046 - protein, 41 aa, Artificial Sequence; identical to SEQ ID NO: 7748
  GFR-binding peptide
  MOD_RES (4), (5), (39), (41): Xaa is C or S
  MOD_RES (19), (20), (21), (22), (23): Xaa is A or G
  MOD_RES (24), (25), (26), (27): Xaa is A or G or is absent

SEQ ID NO: 29047 - protein, 39 aa, Artificial Sequence; identical to SEQ ID NO: 7749
  GFR-binding peptide
  MOD_RES (4), (5), (38): Xaa is C or S
  MOD_RES (19), (20), (21), (22), (23): Xaa is A or G
  MOD_RES (24), (25), (26), (27): Xaa is A or G or is absent

SEQ ID NO: 29048 - protein, 36 aa, Artificial Sequence
  GFR-binding peptide
  MOD_RES (4), (5): Xaa is C or S
PKPXXAPTQLSPISVLYIDDSSNVIYKQYENMVVRA

SEQ ID NO: 29049 - protein, 38 aa, Artificial Sequence; identical to SEQ ID NO: 7751
  GFR-binding peptide
  MOD_RES (5), (6): Xaa is C or S
  MOD_RES (20), (21), (22), (23), (24): Xaa is A or G
  MOD_RES (25), (26), (27), (28): Xaa is A or G or is absent

SEQ ID NO: 29050 - protein, 42 aa, Artificial Sequence
  GFR-binding peptide
  MOD_RES (5), (6), (40), (42): Xaa is C or S
  MOD_RES (20), (21), (22), (23), (24): Xaa is A or G
  MOD_RES (25), (26), (27), (28): Xaa is A or G or is absent
ASKAXXVPTKLSPISILYIXXXXXXXXXYKQYEGMAVSEXGX

SEQ ID NO: 29051 - protein, 36 aa, Artificial Sequence; identical to SEQ ID NO: 7752
  GFR-binding peptide
  MOD_RES (2), (3), (36): Xaa is C or S
  MOD_RES (17), (18), (19), (20), (21): Xaa is A or G
  MOD_RES (22), (23), (24), (25): Xaa is A or G or is absent

SEQ ID NO: 29052 - protein, 32 aa, Artificial Sequence; identical to SEQ ID NO: 7753
  GFR-binding peptide
  MOD_RES (1), (1): Xaa is C or S

SEQ ID NO: 29053 - protein, 39 aa, Artificial Sequence
  GFR-binding peptide
  MOD_RES (5), (6): Xaa is C or S
  MOD_RES (20), (21), (22), (23), (24): Xaa is A or G
  MOD_RES (25), (26), (27), (28): Xaa is A or G or is absent
APASXXVPARLEPISILYLXXXXXXXXXKFKYEDMVVEA

SEQ ID NO: 29054 - protein, 33 aa, Artificial Sequence
  GFR-binding peptide
  MOD_RES (1), (32): Xaa is C or S
XVPQDLSPISILYIVGRTPKVYKQYEMVVKSXK

SEQ ID NO: 29055 - protein, 37 aa, Artificial Sequence
  GFR-binding peptide
  MOD_RES (4), (5), (37): Xaa is C or S
PKAXXAPTKLSPISVLYIDSSNNVIYKQYENMVVKAX

SEQ ID NO: 29056 - protein, 34 aa, Artificial Sequence
  GFR-binding peptide
  MOD_RES (1), (2), (33): Xaa is C or S
XXVPQDLEPISILYLVGRTPKVKFKYEMVVKSXK

SEQ ID NO: 29057 - protein, 36 aa, Artificial Sequence
  GFR-binding peptide
  MOD_RES (33), (35): Xaa is C or S
  MOD_RES (14), (15), (16), (17), (18): Xaa is A or G
  MOD_RES (19), (20), (21), (22): Xaa is A or G or is absent
VPQALSPISILYIXXXXXXXXXYKQYEMIVRSXKXS

SEQ ID NO: 29058 - protein, 38 aa, Artificial Sequence; identical to SEQ ID NO: 7757
  GFR-binding peptide
  MOD_RES (3), (4), (35), (37): Xaa is C or S

SEQ ID NO: 29059 - protein, 41 aa, Artificial Sequence
  GFR-binding peptide
  MOD_RES (6), (38), (40): Xaa is C or S
VTKPTXAPTKLEPISVLYLDDSSNVIKFKYENMVVRSXGXH

SEQ ID NO: 29060 - protein, 42 aa, Artificial Sequence
  GFR-binding peptide
  MOD_RES (6), (7), (39), (41): Xaa is C or S
KASKAXXVPTKLNAISILYFDKGVVTYLKKYRGMAVSEXGXR

SEQ ID NO: 29061 - protein, 37 aa, Artificial Sequence
  GFR-binding peptide
  MOD_RES (4), (5): Xaa is C or S
  MOD_RES (19), (20), (21), (22), (23): Xaa is A or G
  MOD_RES (24), (25), (26), (27): Xaa is A or G or is absent
PASXXVPARLSPISILYIXXXXXXXXXYKQYEDMVVE

SEQ ID NO: 29062 - protein, 38 aa, Artificial Sequence
  GFR-binding peptide
  MOD_RES (5), (6), (37): Xaa is C or S
SASPXXVSQDLSPISILYIIGKTPKIYKQYEMIVKSXK

SEQ ID NO: 29063 - protein, 36 aa, Artificial Sequence
  GFR-binding peptide
  MOD_RES (34), (36): Xaa is C or S
  MOD_RES (14), (15), (16), (17), (18): Xaa is A or G
  MOD_RES (19), (20), (21), (22): Xaa is A or G or is absent
VPARLSPISILYKXXXXXXXXXLKYHYDMVVEAXGX

SEQ ID NO: 29064 - protein, 32 aa, Artificial Sequence; identical to SEQ ID NO: 7761
  GFR-binding peptide
  MOD_RES (1), (1): Xaa is C or S

SEQ ID NO: 29065 - protein, 39 aa, Artificial Sequence
  GFR-binding peptide
  MOD_RES (6), (7): Xaa is C or S
  MOD_RES (21), (22), (23), (24), (25): Xaa is A or G
  MOD_RES (26), (27), (28), (29): Xaa is A or G or is absent
KASKAXXVPTKLSPISILYIXXXXXXXXXYKQYEGMAVS

SEQ ID NO: 29066 - protein, 38 aa, Artificial Sequence; identical to SEQ ID NO: 7764
  GFR-binding peptide
  MOD_RES (4), (5), (36), (38): Xaa is C or S

SEQ ID NO: 29067 - protein, 37 aa, Artificial Sequence
  GFR-binding peptide
  MOD_RES (2), (3), (36): Xaa is C or S
  MOD_RES (17), (18), (19), (20), (21): Xaa is A or G
  MOD_RES (22), (23), (24), (25): Xaa is A or G or is absent
PXXVPQALSPISILYIXXXXXXXXXYKQYEMIVRSXK

SEQ ID NO: 29068 - protein, 39 aa, Artificial Sequence
  GFR-binding peptide
  MOD_RES (3), (4), (37), (39): Xaa is C or S
KAXXVPTKLEPISVLYLDDMGVPTKFKYEEGMSVAEXGX

SEQ ID NO: 29069 - protein, 37 aa, Artificial Sequence; identical to SEQ ID NO: 7770
  GFR-binding peptide
  MOD_RES (3), (4), (35), (37): Xaa is C or S

SEQ ID NO: 29070 - protein, 39 aa, Artificial Sequence
  GFR-binding peptide
  MOD_RES (5), (6), (38): Xaa is C or S
ASKAXXVPTKLNAISILYFDKGVVTYLKKYRGMAVSEXG

SEQ ID NO: 29071 - protein, 36 aa, Artificial Sequence; identical to SEQ ID NO: 7771
  GFR-binding peptide
  MOD_RES (4), (5), (36): Xaa is C or S

SEQ ID NO: 29072 - protein, 34 aa, Artificial Sequence
  GFR-binding peptide
  MOD_RES (3), (4): Xaa is C or S
SPXXVPQDLEPISILYLVGRTPKVKFKYEMVVKS

SEQ ID NO: 29073 - protein, 41 aa, Artificial Sequence; identical to SEQ ID NO: 7774
  GFR-binding peptide
  MOD_RES (2), (3), (38), (40): Xaa is C or S
  MOD_RES (17), (18), (19), (20), (21): Xaa is A or G
  MOD_RES (22), (23), (24), (25): Xaa is A or G or is absent

SEQ ID NO: 29074 - protein, 36 aa, Artificial Sequence; identical to SEQ ID NO: 7775
  GFR-binding peptide
  MOD_RES (2), (3), (35): Xaa is C or S

SEQ ID NO: 29075 - protein, 38 aa, Artificial Sequence; identical to SEQ ID NO: 7776
  GFR-binding peptide
  MOD_RES (5), (6), (37): Xaa is C or S

SEQ ID NO: 29076 - protein, 34 aa, Artificial Sequence
  GFR-binding peptide
  MOD_RES (1), (1): Xaa is C or S
  MOD_RES (15), (16), (17), (18), (19): Xaa is A or G
  MOD_RES (20), (21), (22), (23): Xaa is A or G or is absent
XVPARLSPISILYIXXXXXXXXXYKQYEDMVVEA

SEQ ID NO: 29077 - protein, 41 aa, Artificial Sequence
  GFR-binding peptide
  MOD_RES (3), (4), (38), (40): Xaa is C or S
  MOD_RES (18), (19), (20), (21), (22): Xaa is A or G
  MOD_RES (23), (24), (25), (26): Xaa is A or G or is absent
KAXXVPTKLNAISILYFXXXXXXXXXLKKYRGMAVSEXGXR

SEQ ID NO: 29078 - protein, 40 aa, Artificial Sequence
  GFR-binding peptide
  MOD_RES (4), (5), (37), (39): Xaa is C or S
PKAXXAPTKLEPISVLYLDSSNNVIKFKYENMVVKAXGXH

SEQ ID NO: 29079 - protein, 41 aa, Artificial Sequence
  GFR-binding peptide
  MOD_RES (4), (5), (39), (41): Xaa is C or S
  MOD_RES (19), (20), (21), (22), (23): Xaa is A or G
  MOD_RES (24), (25), (26), (27): Xaa is A or G or is absent
SKAXXVPTKLSPISILYKXXXXXXXXXLKYHYGMAVSEXGX

SEQ ID NO: 29080 - protein, 36 aa, Artificial Sequence
  GFR-binding peptide
  MOD_RES (1), (34), (36): Xaa is C or S
XVPTKLEPISVLYLDDMGVPTKFKYEEGMSVAEXGX

SEQ ID NO: 29081 - protein, 37 aa, Artificial Sequence; identical to SEQ ID NO: 7787
  GFR-binding peptide
  MOD_RES (1), (2), (36): Xaa is C or S
  MOD_RES (16), (17), (18), (19), (20): Xaa is A or G
  MOD_RES (21), (22), (23), (24): Xaa is A or G or is absent

SEQ ID NO: 29082 - protein, 40 aa, Artificial Sequence
  GFR-binding peptide
  MOD_RES (3), (4), (38), (40): Xaa is C or S
  MOD_RES (18), (19), (20), (21), (22): Xaa is A or G
  MOD_RES (23), (24), (25), (26): Xaa is A or G or is absent
KAXXVPTKLSPISILYIXXXXXXXXXYKQYEGMAVSEXGX

SEQ ID NO: 29083 - protein, 33 aa, Artificial Sequence
  GFR-binding peptide
  MOD_RES (2), (3): Xaa is C or S
PXXVPQDLSPISILYIVGRTPKVYKQYEMVVKS

SEQ ID NO: 29084 - protein, 36 aa, Artificial Sequence
  GFR-binding peptide
  MOD_RES (5), (6): Xaa is C or S
APASXXVPARLEPISILYLDAANNVVKFKYEDMVVE

SEQ ID NO: 29085 - protein, 36 aa, Artificial Sequence; identical to SEQ ID NO: 7790
  GFR-binding peptide
  MOD_RES (1), (36): Xaa is C or S
  MOD_RES (15), (16), (17), (18), (19): Xaa is A or G
  MOD_RES (20), (21), (22), (23): Xaa is A or G or is absent

SEQ ID NO: 29086 - protein, 39 aa, Artificial Sequence
  GFR-binding peptide
  MOD_RES (2), (3), (37), (39): Xaa is C or S
  MOD_RES (17), (18), (19), (20), (21): Xaa is A or G
  MOD_RES (22), (23), (24), (25): Xaa is A or G or is absent
AXXVPTELEPISMLYLXXXXXXXXXKFKYEEMVVEGXGX

SEQ ID NO: 29087 - protein, 41 aa, Artificial Sequence
  GFR-binding peptide
  MOD_RES (5), (6), (38), (40): Xaa is C or S
VPKPXXAPTKLEPISVLYLDDSSNVIKFKYENMVVRSXGXH

SEQ ID NO: 29088 - protein, 41 aa, Artificial Sequence; identical to SEQ ID NO: 7793
  GFR-binding peptide
  MOD_RES (4), (5), (39), (41): Xaa is C or S
  MOD_RES (19), (20), (21), (22), (23): Xaa is A or G
  MOD_RES (24), (25), (26), (27): Xaa is A or G or is absent

SEQ ID NO: 29089 - protein, 40 aa, Artificial Sequence
  GFR-binding peptide
  MOD_RES (5), (6), (40): Xaa is C or S
  MOD_RES (20), (21), (22), (23), (24): Xaa is A or G
  MOD_RES (25), (26), (27), (28): Xaa is A or G or is absent
APASXXVPARLEPISILYLXXXXXXXXXKFKYEDMVVEAX

SEQ ID NO: 29090 - protein, 33 aa, Artificial Sequence; identical to SEQ ID NO: 7794
  GFR-binding peptide
  MOD_RES (33), (33): Xaa is C or S
  MOD_RES (14), (15), (16), (17), (18): Xaa is A or G
  MOD_RES (19), (20), (21), (22): Xaa is A or G or is absent

SEQ ID NO: 29091 - protein, 35 aa, Artificial Sequence; identical to SEQ ID NO: 7795
  GFR-binding peptide
  MOD_RES (2), (3): Xaa is C or S
  MOD_RES (17), (18), (19), (20), (21): Xaa is A or G
  MOD_RES (22), (23), (24), (25): Xaa is A or G or is absent

SEQ ID NO: 29092 - protein, 37 aa, Artificial Sequence; identical to SEQ ID NO: 7796
  GFR-binding peptide
  MOD_RES (2), (3), (36): Xaa is C or S
  MOD_RES (17), (18), (19), (20), (21): Xaa is A or G
  MOD_RES (22), (23), (24), (25): Xaa is A or G or is absent

SEQ ID NO: 29093 - protein, 39 aa, Artificial Sequence
  GFR-binding peptide
  MOD_RES (5), (6), (39): Xaa is C or S
  MOD_RES (20), (21), (22), (23), (24): Xaa is A or G
  MOD_RES (25), (26), (27), (28): Xaa is A or G or is absent
SASPXXVSQDLEPISILYLXXXXXXXXXKFKYEMIVKSX

SEQ ID NO: 29094 - protein, 37 aa, Artificial Sequence
  GFR-binding peptide
  MOD_RES (34), (36): Xaa is C or S
  MOD_RES (14), (15), (16), (17), (18): Xaa is A or G
  MOD_RES (19), (20), (21), (22): Xaa is A or G or is absent
APTKLSPISVLYIXXXXXXXXXYKQYENMVVRSXGXH

SEQ ID NO: 29095 - protein, 37 aa, Artificial Sequence
  GFR-binding peptide
  MOD_RES (1), (2), (34), (36): Xaa is C or S
XXAPTQLEPISVLYLDDSSNVIKFKYENMVVRAXGXH

SEQ ID NO: 29096 - protein, 36 aa, Artificial Sequence
  GFR-binding peptide
  MOD_RES (1), (35): Xaa is C or S
  MOD_RES (15), (16), (17), (18), (19): Xaa is A or G
  MOD_RES (20), (21), (22), (23): Xaa is A or G or is absent
XVPTKLNAISILYFXXXXXXXXXLKKYRGMAVSEXG

SEQ ID NO: 29097 - protein, 38 aa, Artificial Sequence; identical to SEQ ID NO: 7800
  GFR-binding peptide
  MOD_RES (4), (5), (38): Xaa is C or S
  MOD_RES (19), (20), (21), (22), (23): Xaa is A or G
  MOD_RES (24), (25), (26), (27): Xaa is A or G or is absent

SEQ ID NO: 29098 - protein, 39 aa, Artificial Sequence
  GFR-binding peptide
  MOD_RES (4), (5), (37), (39): Xaa is C or S
SKAXXVPTKLNAISILYFDKGVVTYLKKYRGMAVSEXGX

SEQ ID NO: 29099 - protein, 36 aa, Artificial Sequence; identical to SEQ ID NO: 7804
  GFR-binding peptide
  MOD_RES (35), (35): Xaa is C or S
  MOD_RES (14), (15), (16), (17), (18): Xaa is A or G
  MOD_RES (19), (20), (21), (22): Xaa is A or G or is absent

SEQ ID NO: 29100 - protein, 33 aa, Artificial Sequence
  GFR-binding peptide
  MOD_RES (2), (3): Xaa is C or S
PXXVSQDLSPISILYIIGKTPKIYKQYEMIVKS

SEQ ID NO: 29101 - protein, 40 aa, Artificial Sequence; identical to SEQ ID NO: 7809
  GFR-binding peptide
  MOD_RES (5), (6), (39): Xaa is C or S
  MOD_RES (20), (21), (22), (23), (24): Xaa is A or G
  MOD_RES (25), (26), (27), (28): Xaa is A or G or is absent

SEQ ID NO: 29102 - protein, 34 aa, Artificial Sequence
  GFR-binding peptide
  MOD_RES (1), (2): Xaa is C or S
  MOD_RES (16), (17), (18), (19), (20): Xaa is A or G
  MOD_RES (21), (22), (23), (24): Xaa is A or G or is absent
XXVPTKLSPISILYIXXXXXXXXXYKQYEGMAVS

SEQ ID NO: 29103 - protein, 37 aa, Artificial Sequence
  GFR-binding peptide
  MOD_RES (3), (4), (36): Xaa is C or S
ASXXVPARLSPISILYKDAANNVVLKYHYDMVVEAXG

SEQ ID NO: 29104 - protein, 39 aa, Artificial Sequence; identical to SEQ ID NO: 7813
  GFR-binding peptide
  MOD_RES (6), (7): Xaa is C or S
  MOD_RES (21), (22), (23), (24), (25): Xaa is A or G
  MOD_RES (26), (27), (28), (29): Xaa is A or G or is absent

SEQ ID NO: 29105 - protein, 42 aa, Artificial Sequence; identical to SEQ ID NO: 7814
  GFR-binding peptide
  MOD_RES (6), (7), (42): Xaa is C or S
  MOD_RES (21), (22), (23), (24), (25): Xaa is A or G
  MOD_RES (26), (27), (28), (29): Xaa is A or G or is absent

SEQ ID NO: 29106 - protein, 37 aa, Artificial Sequence
  GFR-binding peptide
  MOD_RES (2), (3), (36): Xaa is C or S
  MOD_RES (17), (18), (19), (20), (21): Xaa is A or G
  MOD_RES (22), (23), (24), (25): Xaa is A or G or is absent
PXXVSQDLEPISILYLXXXXXXXXXKFKYEMIVKSXK

SEQ ID NO: 29107 - protein, 38 aa, Artificial Sequence; identical to SEQ ID NO: 7817
  GFR-binding peptide
  MOD_RES (2), (3), (35), (37): Xaa is C or S

SEQ ID NO: 29108 - protein, 39 aa, Artificial Sequence
  GFR-binding peptide
  MOD_RES (4), (5), (39): Xaa is C or S
  MOD_RES (19), (20), (21), (22), (23): Xaa is A or G
  MOD_RES (24), (25), (26), (27): Xaa is A or G or is absent
PKAXXVPTELSPISMLYIXXXXXXXXXYKQYEEMVVEGX

SEQ ID NO: 29109 - protein, 40 aa, Artificial Sequence
  GFR-binding peptide
  MOD_RES (3), (4), (37), (39): Xaa is C or S
KAXXVPTKLSPISVLYIDDMGVPTYKQYEEGMSVAEXGXR

SEQ ID NO: 29110 - protein, 40 aa, Artificial Sequence; identical to SEQ ID NO: 7821
  GFR-binding peptide
  MOD_RES (3), (4), (38), (40): Xaa is C or S
  MOD_RES (18), (19), (20), (21), (22): Xaa is A or G
  MOD_RES (23), (24), (25), (26): Xaa is A or G or is absent

SEQ ID NO: 29111 - protein, 36 aa, Artificial Sequence
  GFR-binding peptide
  MOD_RES (2), (3): Xaa is C or S
  MOD_RES (17), (18), (19), (20), (21): Xaa is A or G
  MOD_RES (22), (23), (24), (25): Xaa is A or G or is absent
AXXAPTKLEPISVLYLXXXXXXXXXKFKYENMVVKA

SEQ ID NO: 29112 - protein, 37 aa, Artificial Sequence
  GFR-binding peptide
  MOD_RES (6), (7): Xaa is C or S
KASKAXXVPTKLSPISILYKDKGVVTYLKYHYGMAVS

SEQ ID NO: 29113 - protein, 37 aa, Artificial Sequence; identical to SEQ ID NO: 7822
  GFR-binding peptide
  MOD_RES (3), (4), (37): Xaa is C or S
  MOD_RES (18), (19), (20), (21), (22): Xaa is A or G
  MOD_RES (23), (24), (25), (26): Xaa is A or G or is absent

SEQ ID NO: 29114 - protein, 39 aa, Artificial Sequence
  GFR-binding peptide
  MOD_RES (2), (3), (36), (38): Xaa is C or S
  MOD_RES (17), (18), (19), (20), (21): Xaa is A or G
  MOD_RES (22), (23), (24), (25): Xaa is A or G or is absent
PXXVPQALSPISILYIXXXXXXXXXYKQYEMIVRSXKXS

SEQ ID NO: 29115 - protein, 32 aa, Artificial Sequence; identical to SEQ ID NO: 7823
  GFR-binding peptide
  MOD_RES (31), (31): Xaa is C or S

SEQ ID NO: 29116 - protein, 35 aa, Artificial Sequence; identical to SEQ ID NO: 7825
  GFR-binding peptide
  MOD_RES (3), (4), (35): Xaa is C or S

SEQ ID NO: 29117 - protein, 36 aa, Artificial Sequence
  GFR-binding peptide
  MOD_RES (1), (34), (36): Xaa is C or S
XVPTKLSPISVLYIDDMGVPTYKQYEEGMSVAEXGX

SEQ ID NO: 29118 - protein, 35 aa, Artificial Sequence
  GFR-binding peptide
  MOD_RES (2), (3): Xaa is C or S
  MOD_RES (17), (18), (19), (20), (21): Xaa is A or G
  MOD_RES (22), (23), (24), (25): Xaa is A or G or is absent
AXXVPTELEPISMLYLXXXXXXXXXKFKYEEMVVE

SEQ ID NO: 29119 - protein, 35 aa, Artificial Sequence; identical to SEQ ID NO: 7828
  GFR-binding peptide
  MOD_RES (2), (3): Xaa is C or S
  MOD_RES (17), (18), (19), (20), (21): Xaa is A or G
  MOD_RES (22), (23), (24), (25): Xaa is A or G or is absent

SEQ ID NO: 29120 - protein, 38 aa, Artificial Sequence
  GFR-binding peptide
  MOD_RES (5), (5): Xaa is C or S
  MOD_RES (19), (20), (21), (22), (23): Xaa is A or G
  MOD_RES (24), (25), (26), (27): Xaa is A or G or is absent
TKPTXAPTKLEPISVLYLXXXXXXXXXKFKYENMVVRS

SEQ ID NO: 29121 - protein, 39 aa, Artificial Sequence
  GFR-binding peptide
  MOD_RES (2), (36), (38): Xaa is C or S
  MOD_RES (16), (17), (18), (19), (20): Xaa is A or G
  MOD_RES (21), (22), (23), (24): Xaa is A or G or is absent
TXAPTKLSPISVLYIXXXXXXXXXYKQYENMVVRSXGXH

SEQ ID NO: 29122 - protein, 39 aa, Artificial Sequence; identical to SEQ ID NO: 7832
  GFR-binding peptide
  MOD_RES (4), (5), (39): Xaa is C or S
  MOD_RES (19), (20), (21), (22), (23): Xaa is A or G
  MOD_RES (24), (25), (26), (27): Xaa is A or G or is absent

SEQ ID NO: 29123 - protein, 37 aa, Artificial Sequence
  GFR-binding peptide
  MOD_RES (34), (36): Xaa is C or S
  MOD_RES (14), (15), (16), (17), (18): Xaa is A or G
  MOD_RES (19), (20), (21), (22): Xaa is A or G or is absent
VPTELEPISMLYLXXXXXXXXXKFKYEDMVVEGXGXR

SEQ ID NO: 29124 - protein, 32 aa, Artificial Sequence
  GFR-binding peptide
  MOD_RES (1), (32): Xaa is C or S
XVPQDLEPISILYLVGRTPKVKFKYEMVVKSX

SEQ ID NO: 29125 - protein, 37 aa, Artificial Sequence; identical to SEQ ID NO: 7835
  GFR-binding peptide
  MOD_RES (5), (6), (37): Xaa is C or S

SEQ ID NO: 29126 - protein, 38 aa, Artificial Sequence
  GFR-binding peptide
  MOD_RES (6), (7): Xaa is C or S
AAPASXXVPARLSPISILYKDAANNVVLKYHYDMVVEA

SEQ ID NO: 29127 - protein, 36 aa, Artificial Sequence
  GFR-binding peptide
  MOD_RES (4), (5): Xaa is C or S
PKPXXAPTKLEPISVLYLDDSSNVIKFKYENMVVRS

SEQ ID NO: 29128 - protein, 33 aa, Artificial Sequence
  GFR-binding peptide
  MOD_RES (32), (32): Xaa is C or S
VPARLSPISILYKDAANNVVLKYHYDMVVEAXG

SEQ ID NO: 29129 - protein, 38 aa, Artificial Sequence
  GFR-binding peptide
  MOD_RES (3), (4), (35), (37): Xaa is C or S
SPXXVPQDLEPISILYLVGRTPKVKFKYEMVVKSXKXS

SEQ ID NO: 29130 - protein, 38 aa, Artificial Sequence
  GFR-binding peptide
  MOD_RES (2), (3), (37): Xaa is C or S
  MOD_RES (17), (18), (19), (20), (21): Xaa is A or G
  MOD_RES (22), (23), (24), (25): Xaa is A or G or is absent
SXXVPARLNAISILYFXXXXXXXXXLKKYRDMVVEAXG

SEQ ID NO: 29131 - protein, 39 aa, Artificial Sequence
  GFR-binding peptide
  MOD_RES (5), (37), (39): Xaa is C or S
TKPTXAPTKLEPISVLYLDDSSNVIKFKYENMVVRSXGX

SEQ ID NO: 29132 - protein, 36 aa, Artificial Sequence
  GFR-binding peptide
  MOD_RES (3), (4): Xaa is C or S
  MOD_RES (18), (19), (20), (21), (22): Xaa is A or G
  MOD_RES (23), (24), (25), (26): Xaa is A or G or is absent
ASXXVPARLEPISILYLXXXXXXXXXKFKYEDMVVE

SEQ ID NO: 29133 - protein, 41 aa, Artificial Sequence
  GFR-binding peptide
  MOD_RES (5), (6), (40): Xaa is C or S
  MOD_RES (20), (21), (22), (23), (24): Xaa is A or G
  MOD_RES (25), (26), (27), (28): Xaa is A or G or is absent
ASKAXXVPTKLNAISILYFXXXXXXXXXLKKYRGMAVSEXG

SEQ ID NO: 29134 - protein, 34 aa, Artificial Sequence
  GFR-binding peptide
  MOD_RES (3), (3): Xaa is C or S
PTXAPTKLSPISVLYIDDSSNVIYKQYENMVVRS

SEQ ID NO: 29135 - protein, 39 aa, Artificial Sequence; identical to SEQ ID NO: 7837
  GFR-binding peptide
  MOD_RES (1), (2), (36), (38): Xaa is C or S
  MOD_RES (16), (17), (18), (19), (20): Xaa is A or G
  MOD_RES (21), (22), (23), (24): Xaa is A or G or is absent

SEQ ID NO: 29136 - protein, 41 aa, Artificial Sequence; identical to SEQ ID NO: 7838
  GFR-binding peptide
  MOD_RES (6), (7): Xaa is C or S
  MOD_RES (21), (22), (23), (24), (25): Xaa is A or G
  MOD_RES (26), (27), (28), (29): Xaa is A or G or is absent

SEQ ID NO: 29137 - protein, 37 aa, Artificial Sequence; identical to SEQ ID NO: 7841
  GFR-binding peptide
  MOD_RES (34), (36): Xaa is C or S
  MOD_RES (14), (15), (16), (17), (18): Xaa is A or G
  MOD_RES (19), (20), (21), (22): Xaa is A or G or is absent

SEQ ID NO: 29138 - protein, 35 aa, Artificial Sequence
  GFR-binding peptide
  MOD_RES (4), (5): Xaa is C or S
PKAXXVPTELSPISMLYIDENEKVVYKQYEDMVVE

SEQ ID NO: 29139 - protein, 36 aa, Artificial Sequence; identical to SEQ ID NO: 7847
  GFR-binding peptide
  MOD_RES (3), (4): Xaa is C or S
  MOD_RES (18), (19), (20), (21), (22): Xaa is A or G
  MOD_RES (23), (24), (25), (26): Xaa is A or G or is absent

SEQ ID NO: 29140 - protein, 39 aa, Artificial Sequence; identical to SEQ ID NO: 7848
  GFR-binding peptide
  MOD_RES (6), (38): Xaa is C or S

SEQ ID NO: 29141 - protein, 40 aa, Artificial Sequence; identical to SEQ ID NO: 7854
  GFR-binding peptide
  MOD_RES (6), (7), (38), (40): Xaa is C or S

SEQ ID NO: 29142 - protein, 34 aa, Artificial Sequence; identical to SEQ ID NO: 7856
  GFR-binding peptide
  MOD_RES (1), (34): Xaa is C or S
  MOD_RES (15), (16), (17), (18), (19): Xaa is A or G
  MOD_RES (20), (21), (22), (23): Xaa is A or G or is absent

SEQ ID NO: 29143 - protein, 38 aa, Artificial Sequence; identical to SEQ ID NO: 7857
  GFR-binding peptide
  MOD_RES (6), (7), (38): Xaa is C or S

SEQ ID NO: 29144 - protein, 37 aa, Artificial Sequence; identical to SEQ ID NO: 7858
  GFR-binding peptide
  MOD_RES (1), (36): Xaa is C or S
  MOD_RES (15), (16), (17), (18), (19): Xaa is A or G
  MOD_RES (20), (21), (22), (23): Xaa is A or G or is absent

SEQ ID NO: 29145 - protein, 39 aa, Artificial Sequence; identical to SEQ ID NO: 7860
  GFR-binding peptide
  MOD_RES (5), (6), (37), (39): Xaa is C or S

SEQ ID NO: 29146 - protein, 38 aa, Artificial Sequence; identical to SEQ ID NO: 7861
  GFR-binding peptide
  MOD_RES (3), (4), (37): Xaa is C or S

SEQ ID NO: 29147 - protein, 38 aa, Artificial Sequence
  GFR-binding peptide
  MOD_RES (1), (2), (36), (38): Xaa is C or S
  MOD_RES (16), (17), (18), (19), (20): Xaa is A or G
  MOD_RES (21), (22), (23), (24): Xaa is A or G or is absent
XXVPARLSPISILYKXXXXXXXXXLKYHYDMVVEAXGX

SEQ ID NO: 29148 - protein, 36 aa, Artificial Sequence
  GFR-binding peptide
  MOD_RES (1), (2), (36): Xaa is C or S
  MOD_RES (16), (17), (18), (19), (20): Xaa is A or G
  MOD_RES (21), (22), (23), (24): Xaa is A or G or is absent
XXAPTKLEPISVLYLXXXXXXXXXKFKYENMVVRSX

SEQ ID NO: 29149 - protein, 44 aa, Artificial Sequence
  GFR-binding peptide
  MOD_RES (6), (7), (41), (43): Xaa is C or S
  MOD_RES (21), (22), (23), (24), (25): Xaa is A or G
  MOD_RES (26), (27), (28), (29): Xaa is A or G or is absent
TVPKPXXAPTQLSPISVLYIXXXXXXXXXYKQYENMVVRAXGXH

SEQ ID NO: 29150 - protein, 44 aa, Artificial Sequence
  GFR-binding peptide
  MOD_RES (6), (7), (41), (43): Xaa is C or S
  MOD_RES (21), (22), (23), (24), (25): Xaa is A or G
  MOD_RES (26), (27), (28), (29): Xaa is A or G or is absent
KASKAXXVPTKLSPISILYIXXXXXXXXXYKQYEGMAVSEXGXR

SEQ ID NO: 29151 - protein, 41 aa, Artificial Sequence; identical to SEQ ID NO: 7866
  GFR-binding peptide
  MOD_RES (5), (6), (40): Xaa is C or S
  MOD_RES (20), (21), (22), (23), (24): Xaa is A or G
  MOD_RES (25), (26), (27), (28): Xaa is A or G or is absent

SEQ ID NO: 29152 - protein, 37 aa, Artificial Sequence
  GFR-binding peptide
  MOD_RES (1), (36): Xaa is C or S
  MOD_RES (15), (16), (17), (18), (19): Xaa is A or G
  MOD_RES (20), (21), (22), (23): Xaa is A or G or is absent
XVPTKLSPISVLYIXXXXXXXXXYKQYEEGMSVAEXG

SEQ ID NO: 29153 - protein, 38 aa, Artificial Sequence; identical to SEQ ID NO: 7867
  GFR-binding peptide
  MOD_RES (4), (5), (36), (38): Xaa is C or S

SEQ ID NO: 29154 - protein, 37 aa, Artificial Sequence; identical to SEQ ID NO: 7870
  GFR-binding peptide
  MOD_RES (4), (5), (37): Xaa is C or S

SEQ ID NO: 29155 - protein, 35 aa, Artificial Sequence
  GFR-binding peptide
  MOD_RES (1), (2): Xaa is C or S
  MOD_RES (16), (17), (18), (19), (20): Xaa is A or G
  MOD_RES (21), (22), (23), (24): Xaa is A or G or is absent
XXVPARLSPISILYIXXXXXXXXXYKQYEDMVVEA

SEQ ID NO: 29156 - protein, 40 aa, Artificial Sequence
  GFR-binding peptide
  MOD_RES (2), (3), (37), (39): Xaa is C or S
  MOD_RES (17), (18), (19), (20), (21): Xaa is A or G
  MOD_RES (22), (23), (24), (25): Xaa is A or G or is absent
AXXVPTELSPISMLYIXXXXXXXXXYKQYEEMVVEGXGXR

SEQ ID NO: 29157 - protein, 36 aa, Artificial Sequence; identical to SEQ ID NO: 7875
  GFR-binding peptide
  MOD_RES (3), (4), (36): Xaa is C or S

SEQ ID NO: 29158 - protein, 32 aa, Artificial Sequence
  GFR-binding peptide
  MOD_RES (31), (31): Xaa is C or S
VPQDLSPISILYIVGRTPKVYKQYEMVVKSXK

SEQ ID NO: 29159 - protein, 37 aa, Artificial Sequence; identical to SEQ ID NO: 7879
  GFR-binding peptide
  MOD_RES (1), (2), (34), (36): Xaa is C or S

SEQ ID NO: 29160 - protein, 35 aa, Artificial Sequence; identical to SEQ ID NO: 7880
  GFR-binding peptide
  MOD_RES (3), (4), (35): Xaa is C or S

SEQ ID NO: 29161 - protein, 37 aa, Artificial Sequence
  GFR-binding peptide
  MOD_RES (3), (4), (37): Xaa is C or S
KAXXVPTKLSPISVLYIDDMGVPTYKQYEEGMSVAEX

SEQ ID NO: 29162 - protein, 38 aa, Artificial Sequence; identical to SEQ ID NO: 7883
  GFR-binding peptide
  MOD_RES (4), (5): Xaa is C or S
  MOD_RES (19), (20), (21), (22), (23): Xaa is A or G
  MOD_RES (24), (25), (26), (27): Xaa is A or G or is absent

SEQ ID NO: 29163 - protein, 37 aa, Artificial Sequence; identical to SEQ ID NO: 7884
  GFR-binding peptide
  MOD_RES (5), (6), (37): Xaa is C or S

SEQ ID NO: 29164 - protein, 37 aa, Artificial Sequence; identical to SEQ ID NO: 7888
  GFR-binding peptide
  MOD_RES (4), (5), (37): Xaa is C or S

SEQ ID NO: 29165 - protein, 35 aa, Artificial Sequence
  GFR-binding peptide
  MOD_RES (1), (2), (34): Xaa is C or S
XXAPTKLSPISVLYIDSSNNVIYKQYENMVVKAXG

SEQ ID NO: 29166 - protein, 37 aa, Artificial Sequence; identical to SEQ ID NO: 7890
  GFR-binding peptide
  MOD_RES (1), (2), (36): Xaa is C or S
  MOD_RES (16), (17), (18), (19), (20): Xaa is A or G
  MOD_RES (21), (22), (23), (24): Xaa is A or G or is absent

SEQ ID NO: 29167 - protein, 38 aa, Artificial Sequence; identical to SEQ ID NO: 7891
  GFR-binding peptide
  MOD_RES (4), (5), (37): Xaa is C or S

SEQ ID NO: 29168 - protein, 43 aa, Artificial Sequence
  GFR-binding peptide
  MOD_RES (4), (5), (40), (42): Xaa is C or S
  MOD_RES (19), (20), (21), (22), (23): Xaa is A or G
  MOD_RES (24), (25), (26), (27): Xaa is A or G or is absent
GKAXXVPTKLSPISVLYIXXXXXXXXXYKQYEEGMSVAEXGXR

SEQ ID NO: 29169 - protein, 31 aa, Artificial Sequence
  GFR-binding peptide
  MOD_RES (1), (1): Xaa is C or S
XVPTKLSPISILYKDKGVVTYLKYHYGMAVS

SEQ ID NO: 29170 - protein, 37 aa, Artificial Sequence
  GFR-binding peptide
  MOD_RES (2), (3), (37): Xaa is C or S
  MOD_RES (17), (18), (19), (20), (21): Xaa is A or G
  MOD_RES (22), (23), (24), (25): Xaa is A or G or is absent
PXXAPTKLEPISVLYLXXXXXXXXXKFKYENMVVRSX

SEQ ID NO: 29171 - protein, 40 aa, Artificial Sequence; identical to SEQ ID NO: 7894
  GFR-binding peptide
  MOD_RES (3), (4), (39): Xaa is C or S
  MOD_RES (18), (19), (20), (21), (22): Xaa is A or G
  MOD_RES (23), (24), (25), (26): Xaa is A or G or is absent

SEQ ID NO: 29172 - protein, 35 aa, Artificial Sequence
  GFR-binding peptide
  MOD_RES (34), (34): Xaa is C or S
  MOD_RES (14), (15), (16), (17), (18): Xaa is A or G
  MOD_RES (19), (20), (21), (22): Xaa is A or G or is absent
VPARLNAISILYFXXXXXXXXXLKKYRDMVVEAXG

SEQ ID NO: 29173 - protein, 36 aa, Artificial Sequence
  GFR-binding peptide
  MOD_RES (1), (34), (36): Xaa is C or S
  MOD_RES (15), (16), (17), (18), (19): Xaa is A or G
  MOD_RES (20), (21), (22), (23): Xaa is A or G or is absent
XVPQALEPISILYLXXXXXXXXXKFKYEMIVRSXKX

SEQ ID NO: 29174 - protein, 38 aa, Artificial Sequence; identical to SEQ ID NO: 7900
  GFR-binding peptide
  MOD_RES (4), (5): Xaa is C or S
  MOD_RES (19), (20), (21), (22), (23): Xaa is A or G
  MOD_RES (24), (25), (26), (27): Xaa is A or G or is absent

SEQ ID NO: 29175 - protein, 37 aa, Artificial Sequence
  GFR-binding peptide
  MOD_RES (1), (2), (34), (36): Xaa is C or S
XXAPTQLSPISVLYIDDSSNVIYKQYENMVVRAXGXH

SEQ ID NO: 29176 - protein, 35 aa, Artificial Sequence
  GFR-binding peptide
  MOD_RES (1), (33), (35): Xaa is C or S
XVPTELEPISMLYLDENEKVVKFKYEDMVVEGXGX

SEQ ID NO: 29177 - protein, 44 aa, Artificial Sequence
  GFR-binding peptide
  MOD_RES (6), (7), (41), (43): Xaa is C or S
  MOD_RES (21), (22), (23), (24), (25): Xaa is A or G
  MOD_RES (26), (27), (28), (29): Xaa is A or G or is absent
AAPASXXVPARLSPISILYKXXXXXXXXXLKYHYDMVVEAXGXR

SEQ ID NO: 29178 - protein, 37 aa, Artificial Sequence
  GFR-binding peptide
  MOD_RES (4), (5), (36): Xaa is C or S
AAPXXVPQALSPISILYIVGRKPKVYKQYEMIVRSXK

SEQ ID NO: 29179 - protein, 38 aa, Artificial Sequence
  GFR-binding peptide
  MOD_RES (1), (35), (37): Xaa is C or S
  MOD_RES (15), (16), (17), (18), (19): Xaa is A or G
  MOD_RES (20), (21), (22), (23): Xaa is A or G or is absent
XVPARLSPISILYKXXXXXXXXXLKYHYDMVVEAXGXR

SEQ ID NO: 29180 - protein, 34 aa, Artificial Sequence
  GFR-binding peptide
  MOD_RES (1), (32), (34): Xaa is C or S
XVPQDLEPISILYLVGRTPKVKFKYEMVVKSXKX

SEQ ID NO: 29181 - protein, 32 aa, Artificial Sequence
  GFR-binding peptide
  MOD_RES (1), (2): Xaa is C or S
XXVPTKLSPISILYKDKGVVTYLKYHYGMAVS

SEQ ID NO: 29182 - protein, 40 aa, Artificial Sequence; identical to SEQ ID NO: 7904
  GFR-binding peptide
  MOD_RES (6), (7), (40): Xaa is C or S
  MOD_RES (21), (22), (23), (24), (25): Xaa is A or G
  MOD_RES (26), (27), (28), (29): Xaa is A or G or is absent

SEQ ID NO: 29183 - protein, 35 aa, Artificial Sequence; identical to SEQ ID NO: 7905
  GFR-binding peptide
  MOD_RES (1), (33), (35): Xaa is C or S

SEQ ID NO: 29184 - protein, 34 aa, Artificial Sequence; identical to SEQ ID NO: 7906
  GFR-binding peptide
  MOD_RES (33), (33): Xaa is C or S
  MOD_RES (14), (15), (16), (17), (18): Xaa is A or G
  MOD_RES (19), (20), (21), (22): Xaa is A or G or is absent

SEQ ID NO: 29185 - protein, 32 aa, Artificial Sequence; identical to SEQ ID NO: 7907
  GFR-binding peptide
  MOD_RES (31), (31): Xaa is C or S

SEQ ID NO: 29186 - protein, 37 aa, Artificial Sequence
  GFR-binding peptide
  MOD_RES (4), (5), (37): Xaa is C or S
PKAXXAPTKLEPISVLYLDSSNNVIKFKYENMVVKAX

SEQ ID NO: 29187 - protein, 34 aa, Artificial Sequence
  GFR-binding peptide
  MOD_RES (1), (33): Xaa is C or S
XAPTKLEPISVLYLDSSNNVIKFKYENMVVKAXG

SEQ ID NO: 29188 - protein, 34 aa, Artificial Sequence
  GFR-binding peptide
  MOD_RES (1), (2): Xaa is C or S
  MOD_RES (16), (17), (18), (19), (20): Xaa is A or G
  MOD_RES (21), (22), (23), (24): Xaa is A or G or is absent
XXAPTQLEPISVLYLXXXXXXXXXKFKYENMVVR

SEQ ID NO: 29189 - protein, 36 aa, Artificial Sequence
  GFR-binding peptide
  MOD_RES (1), (2), (34), (36): Xaa is C or S
XXVPTKLSPISILYKDKGVVTYLKYHYGMAVSEXGX

SEQ ID NO: 29190 - protein, 36 aa, Artificial Sequence
  GFR-binding peptide
  MOD_RES (3), (4), (36): Xaa is C or S
KAXXAPTKLEPISVLYLDSSNNVIKFKYENMVVKAX

SEQ ID NO: 29191 - protein, 42 aa, Artificial Sequence
  GFR-binding peptide
  MOD_RES (6), (7), (39), (41): Xaa is C or S
SIPKAXXVPTELSPISMLYIDEYDKVVYKQYEEMVVEGXGXR

SEQ ID NO: 29192 - protein, 38 aa, Artificial Sequence; identical to SEQ ID NO: 7912
  GFR-binding peptide
  MOD_RES (2), (3), (37): Xaa is C or S
  MOD_RES (17), (18), (19), (20), (21): Xaa is A or G
  MOD_RES (22), (23), (24), (25): Xaa is A or G or is absent

SEQ ID NO: 29193 - protein, 36 aa, Artificial Sequence
  GFR-binding peptide
  MOD_RES (1), (2), (34), (36): Xaa is C or S
XXAPTKLEPISVLYLDSSNNVIKFKYENMVVKAXGX

SEQ ID NO: 29194 - protein, 40 aa, Artificial Sequence; identical to SEQ ID NO: 7913
  GFR-binding peptide
  MOD_RES (6), (7), (39): Xaa is C or S

SEQ ID NO: 29195 - protein, 37 aa, Artificial Sequence; identical to SEQ ID NO: 7914
  GFR-binding peptide
  MOD_RES (1), (2), (34), (36): Xaa is C or S

SEQ ID NO: 29196 - protein, 36 aa, Artificial Sequence
  GFR-binding peptide
  MOD_RES (3), (4): Xaa is C or S
  MOD_RES (18), (19), (20), (21), (22): Xaa is A or G
  MOD_RES (23), (24), (25), (26): Xaa is A or G or is absent
SPXXVPQDLSPISILYIXXXXXXXXXYKQYEMVVKS

SEQ ID NO: 29197 - protein, 35 aa, Artificial Sequence; identical to SEQ ID NO: 7915
  GFR-binding peptide
  MOD_RES (4), (5): Xaa is C or S

SEQ ID NO: 29198 - protein, 40 aa, Artificial Sequence; identical to SEQ ID NO: 7916
  GFR-binding peptide
  MOD_RES (5), (39): Xaa is C or S
  MOD_RES (19), (20), (21), (22), (23): Xaa is A or G
  MOD_RES (24), (25), (26), (27): Xaa is A or G or is absent

SEQ ID NO: 29199 - protein, 41 aa, Artificial Sequence
  GFR-binding peptide
  MOD_RES (6), (7), (39), (41): Xaa is C or S
TVPKPXXAPTQLEPISVLYLDDSSNVIKFKYENMVVRAXGX

SEQ ID NO: 29200 - protein, 34 aa, Artificial Sequence; identical to SEQ ID NO: 7922
  GFR-binding peptide
  MOD_RES (1), (2): Xaa is C or S

SEQ ID NO: 29201 - protein, 35 aa, Artificial Sequence; identical to SEQ ID NO: 7923
  GFR-binding peptide
  MOD_RES (3), (4): Xaa is C or S

SEQ ID NO: 29202 - protein, 34 aa, Artificial Sequence
  GFR-binding peptide
  MOD_RES (1), (32), (34): Xaa is C or S
XVSQDLEPISILYLIGKTPKIKFKYEMIVKSXKX

SEQ ID NO: 29203 - protein, 38 aa, Artificial Sequence; identical to SEQ ID NO: 7925
  GFR-binding peptide
  MOD_RES (1), (35), (37): Xaa is C or S
  MOD_RES (15), (16), (17), (18), (19): Xaa is A or G
  MOD_RES (20), (21), (22), (23): Xaa is A or G or is absent

SEQ ID NO: 29204 - protein, 43 aa, Artificial Sequence; identical to SEQ ID NO: 7929
  GFR-binding peptide
  MOD_RES (5), (6), (40), (42): Xaa is C or S
  MOD_RES (20), (21), (22), (23), (24): Xaa is A or G
  MOD_RES (25), (26), (27), (28): Xaa is A or G or is absent

SEQ ID NO: 29205 - protein, 39 aa, Artificial Sequence; identical to SEQ ID NO: 7931
  GFR-binding peptide
  MOD_RES (5), (6), (39): Xaa is C or S
  MOD_RES (20), (21), (22), (23), (24): Xaa is A or G
  MOD_RES (25), (26), (27), (28): Xaa is A or G or is absent

SEQ ID NO: 29206 - protein, 36 aa, Artificial Sequence
  GFR-binding peptide
  MOD_RES (3), (4), (36): Xaa is C or S
KAXXVPTKLSPISILYIDKGVVTYYKQYEGMAVSEX

SEQ ID NO: 29207 - protein, 38 aa, Artificial Sequence; identical to SEQ ID NO: 7934
  GFR-binding peptide
  MOD_RES (6), (7), (38): Xaa is C or S

SEQ ID NO: 29208 - protein, 44 aa, Artificial Sequence; identical to SEQ ID NO: 7936
  GFR-binding peptide
  MOD_RES (5), (6), (41), (43): Xaa is C or S
  MOD_RES (20), (21), (22), (23), (24): Xaa is A or G
  MOD_RES (25), (26), (27), (28): Xaa is A or G or is absent

SEQ ID NO: 29209 - protein, 33 aa, Artificial Sequence
  GFR-binding peptide
  MOD_RES (1), (2): Xaa is C or S
XXAPTKLEPISVLYLDSSNNVIKFKYENMVVKA

SEQ ID NO: 29210 - protein, 41 aa, Artificial Sequence
  GFR-binding peptide
  MOD_RES (6), (7), (41): Xaa is C or S
  MOD_RES (21), (22), (23), (24), (25): Xaa is A or G
  MOD_RES (26), (27), (28), (29): Xaa is A or G or is absent
AAPASXXVPARLEPISILYLXXXXXXXXXKFKYEDMVVEAX

SEQ ID NO: 29211 - protein, 34 aa, Artificial Sequence; identical to SEQ ID NO: 7937
  GFR-binding peptide
  MOD_RES (2), (3): Xaa is C or S

SEQ ID NO: 29212 - protein, 38 aa, Artificial Sequence
  GFR-binding peptide
  MOD_RES (1), (2), (36), (38): Xaa is C or S
  MOD_RES (16), (17), (18), (19), (20): Xaa is A or G
  MOD_RES (21), (22), (23), (24): Xaa is A or G or is absent
XXAPTKLSPISVLYIXXXXXXXXXYKQYENMVVKAXGX

SEQ ID NO: 29213 - protein, 31 aa, Artificial Sequence
  GFR-binding peptide
  MOD_RES (31), (31): Xaa is C or S
VSQDLEPISILYLIGKTPKIKFKYEMIVKSX

SEQ ID NO: 29214 - protein, 36 aa, Artificial Sequence; identical to SEQ ID NO: 7939
  GFR-binding peptide
  MOD_RES (5), (6): Xaa is C or S

SEQ ID NO: 29215 - protein, 33 aa, Artificial Sequence
  GFR-binding peptide
  MOD_RES (31), (33): Xaa is C or S
VPQDLEPISILYLVGRTPKVKFKYEMVVKSXKX

SEQ ID NO: 29216 - protein, 41 aa, Artificial Sequence; identical to SEQ ID NO: 7941
  GFR-binding peptide
  MOD_RES (4), (5), (39), (41): Xaa is C or S
  MOD_RES (19), (20), (21), (22), (23): Xaa is A or G
  MOD_RES (24), (25), (26), (27): Xaa is A or G or is absent

SEQ ID NO: 29217 - protein, 37 aa, Artificial Sequence; identical to SEQ ID NO: 7942
  GFR-binding peptide
  MOD_RES (3), (4), (36): Xaa is C or S

SEQ ID NO: 29218 - protein, 42 aa, Artificial Sequence; identical to SEQ ID NO: 7943
  GFR-binding peptide
  MOD_RES (6), (7), (40), (42): Xaa is C or S
  MOD_RES (21), (22), (23), (24), (25): Xaa is A or G
  MOD_RES (26), (27), (28), (29): Xaa is A or G or is absent

SEQ ID NO: 29219 - protein, 37 aa, Artificial Sequence
  GFR-binding peptide
  MOD_RES (2), (3), (37): Xaa is C or S
  MOD_RES (17), (18), (19), (20), (21): Xaa is A or G
  MOD_RES (22), (23), (24), (25): Xaa is A or G or is absent
AXXVPTELEPISMLYLXXXXXXXXXKFKYEDMVVEGX

SEQ ID NO: 29220 - protein, 38 aa, Artificial Sequence
  GFR-binding peptide
  MOD_RES (4), (5), (38): Xaa is C or S
  MOD_RES (19), (20), (21), (22), (23): Xaa is A or G
  MOD_RES (24), (25), (26), (27): Xaa is A or G or is absent
ASPXXVSQDLEPISILYLXXXXXXXXXKFKYEMIVKSX

SEQ ID NO: 29221 - protein, 43 aa, Artificial Sequence
  GFR-binding peptide
  MOD_RES (6), (7), (41), (43): Xaa is C or S
  MOD_RES (21), (22), (23), (24), (25): Xaa is A or G
  MOD_RES (26), (27), (28), (29): Xaa is A or G or is absent
AAPASXXVPARLSPISILYIXXXXXXXXXYKQYEDMVVEAXGX

SEQ ID NO: 29222 - protein, 36 aa, Artificial Sequence
  GFR-binding peptide
  MOD_RES (1), (35): Xaa is C or S
  MOD_RES (15), (16), (17), (18), (19): Xaa is A or G
  MOD_RES (20), (21), (22), (23): Xaa is A or G or is absent
XVPTELSPISMLYIXXXXXXXXXYKQYEEMVVEGXG

SEQ ID NO: 29223 - protein, 35 aa, Artificial Sequence; identical to SEQ ID NO: 7946
  GFR-binding peptide
  MOD_RES (2), (3), (35): Xaa is C or S

SEQ ID NO: 29224 - protein, 34 aa, Artificial Sequence
  GFR-binding peptide
  MOD_RES (32), (34): Xaa is C or S
VPTELSPISMLYIDENEKVVYKQYEDMVVEGXGX

SEQ ID NO: 29225 - protein, 41 aa, Artificial Sequence; identical to SEQ ID NO: 7948
  GFR-binding peptide
  MOD_RES (6), (7), (38), (40): Xaa is C or S

SEQ ID NO: 29226 - protein, 32 aa, Artificial Sequence; identical to SEQ ID NO: 7949
  GFR-binding peptide
  MOD_RES (14), (15), (16), (17), (18): Xaa is A or G
  MOD_RES (19), (20), (21), (22): Xaa is A or G or is absent

SEQ ID NO: 29227 - protein, 38 aa, Artificial Sequence
  GFR-binding peptide
  MOD_RES (5), (6): Xaa is C or S
  MOD_RES (20), (21), (22), (23), (24): Xaa is A or G
  MOD_RES (25), (26), (27), (28): Xaa is A or G or is absent
APASXXVPARLSPISILYKXXXXXXXXXLKYHYDMVVE

SEQ ID NO: 29228 - protein, 44 aa, Artificial Sequence
  GFR-binding peptide
  MOD_RES (6), (7), (41), (43): Xaa is C or S
  MOD_RES (21), (22), (23), (24), (25): Xaa is A or G
  MOD_RES (26), (27), (28), (29): Xaa is A or G or is absent
KIPKAXXVPTELEPISMLYLXXXXXXXXXKFKYEDMVVEGXGXR

SEQ ID NO: 29229 - protein, 37 aa, Artificial Sequence
  GFR-binding peptide
  MOD_RES (2), (3), (34), (36): Xaa is C or S
PXXVPQDLEPISILYLVGRTPKVKFKYEMVVKSXKXS

SEQ ID NO: 29230 - protein, 36 aa, Artificial Sequence
  GFR-binding peptide
  MOD_RES (4), (5): Xaa is C or S
PASXXVPARLEPISILYLDAANNVVKFKYEDMVVEA

SEQ ID NO: 29231 - protein, 34 aa, Artificial Sequence; identical to SEQ ID NO: 7951
  GFR-binding peptide
  MOD_RES (3), (4): Xaa is C or S

SEQ ID NO: 29232 - protein, 33 aa, Artificial Sequence
  GFR-binding peptide
  MOD_RES (31), (33): Xaa is C or S
VSQDLEPISILYLIGKTPKIKFKYEMIVKSXKX

SEQ ID NO: 29233 - protein, 37 aa, Artificial Sequence; identical to SEQ ID NO: 7952
  GFR-binding peptide
  MOD_RES (1), (35), (37): Xaa is C or S
  MOD_RES (15), (16), (17), (18), (19): Xaa is A or G
  MOD_RES (20), (21), (22), (23): Xaa is A or G or is absent

SEQ ID NO: 29234 - protein, 38 aa, Artificial Sequence; identical to SEQ ID NO: 7954
  GFR-binding peptide
  MOD_RES (2), (3), (37): Xaa is C or S
  MOD_RES (17), (18), (19), (20), (21): Xaa is A or G
  MOD_RES (22), (23), (24), (25): Xaa is A or G or is absent

SEQ ID NO: 29235 - protein, 40 aa, Artificial Sequence
  GFR-binding peptide
  MOD_RES (4), (5), (37), (39): Xaa is C or S
SKAXXVPTKLSPISILYIDKGVVTYYKQYEGMAVSEXGXR

SEQ ID NO: 29236 - protein, 33 aa, Artificial Sequence
  GFR-binding peptide
  MOD_RES (2), (2): Xaa is C or S
TXAPTKLEPISVLYLDDSSNVIKFKYENMVVRS

SEQ ID NO: 29237 - protein, 32 aa, Artificial Sequence
  GFR-binding peptide
  MOD_RES (1), (32): Xaa is C or S
XVSQDLEPISILYLIGKTPKIKFKYEMIVKSX

SEQ ID NO: 29238 - protein, 37 aa, Artificial Sequence
  GFR-binding peptide
  MOD_RES (3), (4): Xaa is C or S
  MOD_RES (18), (19), (20), (21), (22): Xaa is A or G
  MOD_RES (23), (24), (25), (26): Xaa is A or G or is absent
ASXXVPARLEPISILYLXXXXXXXXXKFKYEDMVVEA

SEQ ID NO: 29239 - protein, 33 aa, Artificial Sequence; identical to SEQ ID NO: 7958
  GFR-binding peptide
  MOD_RES (1), (1): Xaa is C or S
  MOD_RES (15), (16), (17), (18), (19): Xaa is A or G
  MOD_RES (20), (21), (22), (23): Xaa is A or G or is absent

SEQ ID NO: 29240 - protein, 37 aa, Artificial Sequence
  GFR-binding peptide
  MOD_RES (3), (4), (36): Xaa is C or S
KAXXVPTELSPISMLYIDENEKVVYKQYEDMVVEGXG

SEQ ID NO: 29241 - protein, 33 aa, Artificial Sequence
  GFR-binding peptide
  MOD_RES (1), (32): Xaa is C or S
XVPQDLEPISILYLVGRTPKVKFKYEMVVKSXK

SEQ ID NO: 29242 - protein, 36 aa, Artificial Sequence; identical to SEQ ID NO: 7960
  GFR-binding peptide
  MOD_RES (1), (2), (35): Xaa is C or S
  MOD_RES (16), (17), (18), (19), (20): Xaa is A or G
  MOD_RES (21), (22), (23), (24): Xaa is A or G or is absent

SEQ ID NO: 29243 - protein, 39 aa, Artificial Sequence
  GFR-binding peptide
  MOD_RES (6), (38): Xaa is C or S
VTKPTXAPTKLSPISVLYIDDSSNVIYKQYENMVVRSXG

SEQ ID NO: 29244 - protein, 37 aa, Artificial Sequence; identical to SEQ ID NO: 7962
  GFR-binding peptide
  MOD_RES (2), (3), (37): Xaa is C or S
  MOD_RES (17), (18), (19), (20), (21): Xaa is A or G
  MOD_RES (22), (23), (24), (25): Xaa is A or G or is absent

SEQ ID NO: 29245 - protein, 36 aa, Artificial Sequence
  GFR-binding peptide
  MOD_RES (1), (2), (36): Xaa is C or S
  MOD_RES (16), (17), (18), (19), (20): Xaa is A or G
  MOD_RES (21), (22), (23), (24): Xaa is A or G or is absent
XXVPTKLEPISILYLXXXXXXXXXKFKYEGMAVSEX

SEQ ID NO: 29246 - protein, 30 aa, Artificial Sequence; identical to SEQ ID NO: 7964
  GFR-binding peptide

SEQ ID NO: 29247 - protein, 32 aa, Artificial Sequence; identical to SEQ ID NO: 7966
  GFR-binding peptide
  MOD_RES (1), (32): Xaa is C or S

SEQ ID NO: 29248 - protein, 31 aa, Artificial Sequence; identical to SEQ ID NO: 7967
  GFR-binding peptide
  MOD_RES (31), (31): Xaa is C or S

SEQ ID NO: 29249 - protein, 37 aa, Artificial Sequence; identical to SEQ ID NO: 7969
  GFR-binding peptide
  MOD_RES (1), (2), (36): Xaa is C or S
  MOD_RES (16), (17), (18), (19), (20): Xaa is A or G
  MOD_RES (21), (22), (23), (24): Xaa is A or G or is absent

SEQ ID NO: 29250 - protein, 36 aa, Artificial Sequence
  GFR-binding peptide
  MOD_RES (34), (36): Xaa is C or S
  MOD_RES (14), (15), (16), (17), (18): Xaa is A or G
  MOD_RES (19), (20), (21), (22): Xaa is A or G or is absent
VPTKLSPISILYKXXXXXXXXXLKYHYGMAVSEXGX

SEQ ID NO: 29251 - protein, 36 aa, Artificial Sequence; identical to SEQ ID NO: 7970
  GFR-binding peptide
  MOD_RES (1), (2), (33), (35): Xaa is C or S

SEQ ID NO: 29252 - protein, 34 aa, Artificial Sequence
  GFR-binding peptide
  MOD_RES (1), (2): Xaa is C or S
  MOD_RES (16), (17), (18), (19), (20): Xaa is A or G
  MOD_RES (21), (22), (23), (24): Xaa is A or G or is absent
XXVPARLSPISILYIXXXXXXXXXYKQYEDMVVE

SEQ ID NO: 29253 - protein, 39 aa, Artificial Sequence
  GFR-binding peptide
  MOD_RES (6), (7): Xaa is C or S
  MOD_RES (21), (22), (23), (24), (25): Xaa is A or G
  MOD_RES (26), (27), (28), (29): Xaa is A or G or is absent
AAPASXXVPARLSPISILYKXXXXXXXXXLKYHYDMVVE

SEQ ID NO: 29254 - protein, 40 aa, Artificial Sequence; identical to SEQ ID NO: 7972
  GFR-binding peptide
  MOD_RES (6), (7), (38), (40): Xaa is C or S

SEQ ID NO: 29255 - protein, 38 aa, Artificial Sequence; identical to SEQ ID NO: 7973
  GFR-binding peptide
  MOD_RES (4), (5), (38): Xaa is C or S
  MOD_RES (19), (20), (21), (22), (23): Xaa is A or G
  MOD_RES (24), (25), (26), (27): Xaa is A or G or is absent

SEQ ID NO: 29256 - protein, 37 aa, Artificial Sequence
  GFR-binding peptide
  MOD_RES (34), (36): Xaa is C or S
  MOD_RES (14), (15), (16), (17), (18): Xaa is A or G
  MOD_RES (19), (20), (21), (22): Xaa is A or G or is absent
VPTKLEPISILYLXXXXXXXXXKFKYEGMAVSEXGXR

SEQ ID NO: 29257 - protein, 38 aa, Artificial Sequence
  GFR-binding peptide
  MOD_RES (1), (35), (37): Xaa is C or S
  MOD_RES (15), (16), (17), (18), (19): Xaa is A or G
  MOD_RES (20), (21), (22), (23): Xaa is A or G or is absent
XVPTKLNAISILYFXXXXXXXXXLKKYRGMAVSEXGXR

SEQ ID NO: 29258 - protein, 37 aa, Artificial Sequence; identical to SEQ ID NO: 7974
  GFR-binding peptide
  MOD_RES (2), (3), (34), (36): Xaa is C or S

SEQ ID NO: 29259 - protein, 35 aa, Artificial Sequence
  GFR-binding peptide
  MOD_RES (4), (5): Xaa is C or S
PKPXXAPTKLSPISVLYIDDSSNVIYKQYENMVVR

SEQ ID NO: 29260 - protein, 39 aa, Artificial Sequence
  GFR-binding peptide
  MOD_RES (5), (6), (39): Xaa is C or S
  MOD_RES (20), (21), (22), (23), (24): Xaa is A or G
  MOD_RES (25), (26), (27), (28): Xaa is A or G or is absent
SAAPXXVPQALEPISILYLXXXXXXXXXKFKYEMIVRSX

SEQ ID NO: 29261 - protein, 40 aa, Artificial Sequence
  GFR-binding peptide
  MOD_RES (6), (7): Xaa is C or S
  MOD_RES (21), (22), (23), (24), (25): Xaa is A or G
  MOD_RES (26), (27), (28), (29): Xaa is A or G or is absent
AVPKAXXAPTKLEPISVLYLXXXXXXXXXKFKYENMVVKA

SEQ ID NO: 29262 - protein, 35 aa, Artificial Sequence; identical to SEQ ID NO: 7976
  GFR-binding peptide
  MOD_RES (1), (2), (33), (35): Xaa is C or S

SEQ ID NO: 29263 - protein, 42 aa, Artificial Sequence; identical to SEQ ID NO: 7977
  GFR-binding peptide
  MOD_RES (5), (6), (39), (41): Xaa is C or S
  MOD_RES (20), (21), (22), (23), (24): Xaa is A or G
  MOD_RES (25), (26), (27), (28): Xaa is A or G or is absent

SEQ ID NO: 29264 - protein, 38 aa, Artificial Sequence; identical to SEQ ID NO: 7979
  GFR-binding peptide
  MOD_RES (5), (6), (38): Xaa is C or S

SEQ ID NO: 29265 - protein, 41 aa, Artificial Sequence
  GFR-binding peptide
  MOD_RES (4), (38), (40): Xaa is C or S
  MOD_RES (18), (19), (20), (21), (22): Xaa is A or G
  MOD_RES (23), (24), (25), (26): Xaa is A or G or is absent
KPTXAPTKLEPISVLYLXXXXXXXXXKFKYENMVVRSXGXH

SEQ ID NO: 29266 - protein, 37 aa, Artificial Sequence; identical to SEQ ID NO: 7989
  GFR-binding peptide
  MOD_RES (2), (3), (36): Xaa is C or S
  MOD_RES (17), (18), (19), (20), (21): Xaa is A or G
  MOD_RES (22), (23), (24), (25): Xaa is A or G or is absent

SEQ ID NO: 29267 - protein, 38 aa, Artificial Sequence; identical to SEQ ID NO: 7992
  GFR-binding peptide
  MOD_RES (6), (38): Xaa is C or S

SEQ ID NO: 29268 - protein, 37 aa, Artificial Sequence
  GFR-binding peptide
  MOD_RES (3), (4), (35), (37): Xaa is C or S
SPXXVSQDLSPISILYIIGKTPKIYKQYEMIVKSXKX

SEQ ID NO: 29269 - protein, 35 aa, Artificial Sequence
  GFR-binding peptide
  MOD_RES (1), (33), (35): Xaa is C or S
XVPARLNAISILYFDAANNVVLKKYRDMVVEAXGX

SEQ ID NO: 29270 - protein, 35 aa, Artificial Sequence; identical to SEQ ID NO: 7994
  GFR-binding peptide
  MOD_RES (1), (32), (34): Xaa is C or S

SEQ ID NO: 29271 - protein, 34 aa, Artificial Sequence
  GFR-binding peptide
  MOD_RES (1), (2), (34): Xaa is C or S
XXVPARLNAISILYFDAANNVVLKKYRDMVVEAX

SEQ ID NO: 29272 - protein, 35 aa, Artificial Sequence; identical to SEQ ID NO: 7995
  GFR-binding peptide
  MOD_RES (1), (33), (35): Xaa is C or S

SEQ ID NO: 29273 - protein, 39 aa, Artificial Sequence
  GFR-binding peptide
  MOD_RES (2), (3), (37), (39): Xaa is C or S
  MOD_RES (17), (18), (19), (20), (21): Xaa is A or G
  MOD_RES (22), (23), (24), (25): Xaa is A or G or is absent
AXXVPTKLNAISILYFXXXXXXXXXLKKYRGMAVSEXGX

SEQ ID NO: 29274 - protein, 33 aa, Artificial Sequence
  GFR-binding peptide
  MOD_RES (14), (15), (16), (17), (18): Xaa is A or G
  MOD_RES (19), (20), (21), (22): Xaa is A or G or is absent
VPARLEPISILYLXXXXXXXXXKFKYEDMVVEA

SEQ ID NO: 29275 - protein, 38 aa, Artificial Sequence
  GFR-binding peptide
  MOD_RES (7), (7): Xaa is C or S
HVTKPTXAPTKLSPISVLYIDDSSNVIYKQYENMVVRS

SEQ ID NO: 29276 - protein, 37 aa, Artificial Sequence
  GFR-binding peptide
  MOD_RES (2), (3), (37): Xaa is C or S
  MOD_RES (17), (18), (19), (20), (21): Xaa is A or G
  MOD_RES (22), (23), (24), (25): Xaa is A or G or is absent
AXXAPTKLSPISVLYIXXXXXXXXXYKQYENMVVKAX

SEQ ID NO: 29277 - protein, 41 aa, Artificial Sequence; identical to SEQ ID NO: 7999
  GFR-binding peptide
  MOD_RES (5), (6), (38), (40): Xaa is C or S

SEQ ID NO: 29278 - protein, 33 aa, Artificial Sequence
  GFR-binding peptide
  MOD_RES (1), (2), (33): Xaa is C or S
XXVPQDLSPISILYIVGRTPKVYKQYEMVVKSX

SEQ ID NO: 29279 - protein, 32 aa, Artificial Sequence
  GFR-binding peptide
  MOD_RES (14), (15), (16), (17), (18): Xaa is A or G
  MOD_RES (19), (20), (21), (22): Xaa is A or G or is absent
VPARLNAISILYFXXXXXXXXXLKKYRDMVVE

SEQ ID NO: 29280 - protein, 39 aa, Artificial Sequence; identical to SEQ ID NO: 8000
  GFR-binding peptide
  MOD_RES (5), (6): Xaa is C or S
  MOD_RES (20), (21), (22), (23), (24): Xaa is A or G
  MOD_RES (25), (26), (27), (28): Xaa is A or G or is absent

SEQ ID NO: 29281 - protein, 39 aa, Artificial Sequence
  GFR-binding peptide
  MOD_RES (5), (6): Xaa is C or S
  MOD_RES (20), (21), (22), (23), (24): Xaa is A or G
  MOD_RES (25), (26), (27), (28): Xaa is A or G or is absent
ASKAXXVPTKLSPISILYIXXXXXXXXXYKQYEGMAVSE

SEQ ID NO: 29282 - protein, 43 aa, Artificial Sequence
  GFR-binding peptide
  MOD_RES (6), (7), (40), (42): Xaa is C or S
  MOD_RES (21), (22), (23), (24), (25): Xaa is A or G
  MOD_RES (26), (27), (28), (29): Xaa is A or G or is absent
ASASPXXVPQDLSPISILYIXXXXXXXXXYKQYEMVVKSXKXS

SEQ ID NO: 29283 - protein, 40 aa, Artificial Sequence
  GFR-binding peptide
  MOD_RES (2), (3), (37), (39): Xaa is C or S
  MOD_RES (17), (18), (19), (20), (21): Xaa is A or G
  MOD_RES (22), (23), (24), (25): Xaa is A or G or is absent
SXXVPARLEPISILYLXXXXXXXXXKFKYEDMVVEAXGXR

SEQ ID NO: 29284 - protein, 39 aa, Artificial Sequence; identical to SEQ ID NO: 8004
  GFR-binding peptide
  MOD_RES (7), (7): Xaa is C or S
  MOD_RES (21), (22), (23), (24), (25): Xaa is A or G
  MOD_RES (26), (27), (28), (29): Xaa is A or G or is absent

SEQ ID NO: 29285 - protein, 34 aa, Artificial Sequence; identical to SEQ ID NO: 8006
  GFR-binding peptide
  MOD_RES (1), (32), (34): Xaa is C or S

SEQ ID NO: 29286 - protein, 37 aa, Artificial Sequence
  GFR-binding peptide
  MOD_RES (4), (5): Xaa is C or S
  MOD_RES (19), (20), (21), (22), (23): Xaa is A or G
  MOD_RES (24), (25), (26), (27): Xaa is A or G or is absent
PKAXXVPTELSPISMLYIXXXXXXXXXYKQYEDMVVE

SEQ ID NO: 29287 - protein, 35 aa, Artificial Sequence
  GFR-binding peptide
  MOD_RES (2), (3), (34): Xaa is C or S
PXXVSQDLSPISILYIIGKTPKIYKQYEMIVKSXK

SEQ ID NO: 29288 - protein, 33 aa, Artificial Sequence
  GFR-binding peptide
  MOD_RES (14), (15), (16), (17), (18): Xaa is A or G
  MOD_RES (19), (20), (21), (22): Xaa is A or G or is absent
VPTELSPISMLYIXXXXXXXXXYKQYEDMVVEG

SEQ ID NO: 29289 - protein, 40 aa, Artificial Sequence
  GFR-binding peptide
  MOD_RES (2), (3), (37), (39): Xaa is C or S
  MOD_RES (17), (18), (19), (20), (21): Xaa is A or G
  MOD_RES (22), (23), (24), (25): Xaa is A or G or is absent
SXXVPARLNAISILYFXXXXXXXXXLKKYRDMVVEAXGXR

SEQ ID NO: 29290 - protein, 42 aa, Artificial Sequence; identical to SEQ ID NO: 8016
  GFR-binding peptide
  MOD_RES (5), (6), (39), (41): Xaa is C or S

SEQ ID NO: 29291 - protein, 38 aa, Artificial Sequence
  GFR-binding peptide
  MOD_RES (4), (5), (37): Xaa is C or S
PKAXXAPTKLEPISVLYLDSSNNVIKFKYENMVVKAXG

SEQ ID NO: 29292 - protein, 36 aa, Artificial Sequence; identical to SEQ ID NO: 8018
  GFR-binding peptide
  MOD_RES (2), (36): Xaa is C or S
  MOD_RES (16), (17), (18), (19), (20): Xaa is A or G
  MOD_RES (21), (22), (23), (24): Xaa is A or G or is absent

SEQ ID NO: 29293 - protein, 34 aa, Artificial Sequence; identical to SEQ ID NO: 8019
  GFR-binding peptide
  MOD_RES (34), (34): Xaa is C or S
  MOD_RES (14), (15), (16), (17), (18): Xaa is A or G
  MOD_RES (19), (20), (21), (22): Xaa is A or G or is absent

SEQ ID NO: 29294 - protein, 38 aa, Artificial Sequence
  GFR-binding peptide
  MOD_RES (6), (7): Xaa is C or S
YVPKPXXAPTKLSPISVLYIDDSSNVIYKQYENMVVRS

SEQ ID NO: 29295 - protein, 33 aa, Artificial Sequence; identical to SEQ ID NO: 8023
  GFR-binding peptide
  MOD_RES (3), (3): Xaa is C or S

SEQ ID NO: 29296 - protein, 44 aa, Artificial Sequence; identical to SEQ ID NO: 8024
  GFR-binding peptide
  MOD_RES (6), (7), (41), (43): Xaa is C or S
  MOD_RES (21), (22), (23), (24), (25): Xaa is A or G
  MOD_RES (26), (27), (28), (29): Xaa is A or G or is absent

SEQ ID NO: 29297 - protein, 38 aa, Artificial Sequence
  GFR-binding peptide
  MOD_RES (6), (7): Xaa is C or S
KASKAXXVPTKLNAISILYFDKGVVTYLKKYRGMAVSE

SEQ ID NO: 29298 - protein, 41 aa, Artificial Sequence
  GFR-binding peptide
  MOD_RES (6), (7), (39), (41): Xaa is C or S
SIPKAXXVPTELSPISMLYIDEYDKVVYKQYEEMVVEGXGX

SEQ ID NO: 29299 - protein, 32 aa, Artificial Sequence
  GFR-binding peptide
  MOD_RES (32), (32): Xaa is C or S
APTQLSPISVLYIDDSSNVIYKQYENMVVRAX

SEQ ID NO: 29300 - protein, 39 aa, Artificial Sequence
  GFR-binding peptide
  MOD_RES (6), (7), (39): Xaa is C or S
KIPKAXXVPTELEPISMLYLDENEKVVKFKYEDMVVEGX

SEQ ID NO: 29301 - protein, 42 aa, Artificial Sequence
  GFR-binding peptide
  MOD_RES (6), (7), (39), (41): Xaa is C or S
KIPKAXXVPTELSPISMLYIDENEKVVYKQYEDMVVEGXGXR

SEQ ID NO: 29302 - protein, 43 aa, Artificial Sequence; identical to SEQ ID NO: 8030
  GFR-binding peptide
  MOD_RES (6), (7), (41), (43): Xaa is C or S
  MOD_RES (21), (22), (23), (24), (25): Xaa is A or G
  MOD_RES (26), (27), (28), (29): Xaa is A or G or is absent

SEQ ID NO: 29303 - protein, 35 aa, Artificial Sequence
  GFR-binding peptide
  MOD_RES (4), (4): Xaa is C or S
KPTXAPTKLSPISVLYIDDSSNVIYKQYENMVVRS

SEQ ID NO: 29304 - protein, 38 aa, Artificial Sequence
  GFR-binding peptide
  MOD_RES (5), (6), (37): Xaa is C or S
SASPXXVPQDLSPISILYIVGRTPKVYKQYEMVVKSXK

SEQ ID NO: 29305 - protein, 40 aa, Artificial Sequence; identical to SEQ ID NO: 8032
  GFR-binding peptide
  MOD_RES (5), (6), (39): Xaa is C or S
  MOD_RES (20), (21), (22), (23), (24): Xaa is A or G
  MOD_RES (25), (26), (27), (28): Xaa is A or G or is absent

SEQ ID NO: 29306 - protein, 44 aa, Artificial Sequence
  GFR-binding peptide
  MOD_RES (6), (7), (41), (43): Xaa is C or S
  MOD_RES (21), (22), (23), (24), (25): Xaa is A or G
  MOD_RES (26), (27), (28), (29): Xaa is A or G or is absent
AVPKAXXAPTKLEPISVLYLXXXXXXXXXKFKYENMVVKAXGXH

SEQ ID NO: 29307 - protein, 37 aa, Artificial Sequence
  GFR-binding peptide
  MOD_RES (4), (5): Xaa is C or S
  MOD_RES (19), (20), (21), (22), (23): Xaa is A or G
  MOD_RES (24), (25), (26), (27): Xaa is A or G or is absent
ASPXXVPQDLEPISILYLXXXXXXXXXKFKYEMVVKS

SEQ ID NO: 29308 - protein, 35 aa, Artificial Sequence
  GFR-binding peptide
  MOD_RES (4), (5): Xaa is C or S
ASPXXVSQDLEPISILYLIGKTPKIKFKYEMIVKS

SEQ ID NO: 29309 - protein, 37 aa, Artificial Sequence; identical to SEQ ID NO: 8034
  GFR-binding peptide
  MOD_RES (3), (4): Xaa is C or S
  MOD_RES (18), (19), (20), (21), (22): Xaa is A or G
  MOD_RES (23), (24), (25), (26): Xaa is A or G or is absent

SEQ ID NO: 29310 - protein, 41 aa, Artificial Sequence; identical to SEQ ID NO: 8035
  GFR-binding peptide
  MOD_RES (4), (5), (40): Xaa is C or S
  MOD_RES (19), (20), (21), (22), (23): Xaa is A or G
  MOD_RES (24), (25), (26), (27): Xaa is A or G or is absent

SEQ ID NO: 29311 - protein, 36 aa, Artificial Sequence
  GFR-binding peptide
  MOD_RES (4), (5): Xaa is C or S
SKAXXVPTKLSPISILYIDKGVVTYYKQYEGMAVSE

SEQ ID NO: 29312 - protein, 38 aa, Artificial Sequence; identical to SEQ ID NO: 8036
  GFR-binding peptide
  MOD_RES (5), (6): Xaa is C or S
  MOD_RES (20), (21), (22), (23), (24): Xaa is A or G
  MOD_RES (25), (26), (27), (28): Xaa is A or G or is absent

SEQ ID NO: 29313 - protein, 33 aa, Artificial Sequence; identical to SEQ ID NO: 8037
  GFR-binding peptide
  MOD_RES (1), (32): Xaa is C or S

SEQ ID NO: 29314 - protein, 39 aa, Artificial Sequence; identical to SEQ ID NO: 8038
  GFR-binding peptide
  MOD_RES (1), (2), (36), (38): Xaa is C or S
  MOD_RES (16), (17), (18), (19), (20): Xaa is A or G
  MOD_RES (21), (22), (23), (24): Xaa is A or G or is absent

SEQ ID NO: 29315 - protein, 43 aa, Artificial Sequence
  GFR-binding peptide
  MOD_RES (5), (6), (40), (42): Xaa is C or S
  MOD_RES (20), (21), (22), (23), (24): Xaa is A or G
  MOD_RES (25), (26), (27), (28): Xaa is A or G or is absent
ASKAXXVPTKLEPISILYLXXXXXXXXXKFKYEGMAVSEXGXR

SEQ ID NO: 29316 - protein, 38 aa, Artificial Sequence
  GFR-binding peptide
  MOD_RES (4), (5), (36), (38): Xaa is C or S
ASPXXVPQDLSPISILYIVGRTPKVYKQYEMVVKSXKX

SEQ ID NO: 29317 - protein, 37 aa, Artificial Sequence
  GFR-binding peptide
  MOD_RES (1), (2), (35), (37): Xaa is C or S
  MOD_RES (16), (17), (18), (19), (20): Xaa is A or G
  MOD_RES (21), (22), (23), (24): Xaa is A or G or is absent
XXVSQDLEPISILYLXXXXXXXXXKFKYEMIVKSXKX

SEQ ID NO: 29318 - protein, 33 aa, Artificial Sequence; identical to SEQ ID NO: 8039
  GFR-binding peptide
  MOD_RES (1), (32): Xaa is C or S

SEQ ID NO: 29319 - protein, 37 aa, Artificial Sequence; identical to SEQ ID NO: 8040
  GFR-binding peptide
  MOD_RES (1), (2), (36): Xaa is C or S
  MOD_RES (16), (17), (18), (19), (20): Xaa is A or G
  MOD_RES (21), (22), (23), (24): Xaa is A or G or is absent

SEQ ID NO: 29320 - protein, 33 aa, Artificial Sequence
  GFR-binding peptide
  MOD_RES (32), (32): Xaa is C or S
VPTELSPISMLYIDEYDKVVYKQYEEMVVEGXG

SEQ ID NO: 29321 - protein, 33 aa, Artificial Sequence
  GFR-binding peptide
  MOD_RES (2), (3): Xaa is C or S
AXXVPTELEPISMLYLDENEKVVKFKYEDMVVE

SEQ ID NO: 29322 - protein, 34 aa, Artificial Sequence
  GFR-binding peptide
  MOD_RES (3), (4): Xaa is C or S
SPXXVPQDLSPISILYIVGRTPKVYKQYEMVVKS

SEQ ID NO: 29323 - protein, 40 aa, Artificial Sequence; identical to SEQ ID NO: 8042
  GFR-binding peptide
  MOD_RES (7), (39): Xaa is C or S

SEQ ID NO: 29324 - protein, 36 aa, Artificial Sequence; identical to SEQ ID NO: 8043
  GFR-binding peptide
  MOD_RES (2), (3): Xaa is C or S
  MOD_RES (17), (18), (19), (20), (21): Xaa is A or G
  MOD_RES (22), (23), (24), (25): Xaa is A or G or is absent

SEQ ID NO: 29325 - protein, 40 aa, Artificial Sequence; identical to SEQ ID NO: 8045
  GFR-binding peptide
  MOD_RES (4), (5), (37), (39): Xaa is C or S

SEQ ID NO: 29326 - protein, 32 aa, Artificial Sequence; identical to SEQ ID NO: 8048
  GFR-binding peptide
  MOD_RES (1), (2): Xaa is C or S

SEQ ID NO: 29327 - protein, 41 aa, Artificial Sequence; identical to SEQ ID NO: 8051
  GFR-binding peptide
  MOD_RES (6), (7), (41): Xaa is C or S
  MOD_RES (21), (22), (23), (24), (25): Xaa is A or G
  MOD_RES (26), (27), (28), (29): Xaa is A or G or is absent

SEQ ID NO: 29328 - protein, 32 aa, Artificial Sequence; identical to SEQ ID NO: 8053
  GFR-binding peptide
  MOD_RES (32), (32): Xaa is C or S

SEQ ID NO: 29329 - protein, 34 aa, Artificial Sequence
  GFR-binding peptide
  MOD_RES (1), (1): Xaa is C or S
  MOD_RES (15), (16), (17), (18), (19): Xaa is A or G
  MOD_RES (20), (21), (22), (23): Xaa is A or G or is absent
XAPTKLSPISVLYIXXXXXXXXXYKQYENMVVRS

SEQ ID NO: 29330 - protein, 39 aa, Artificial Sequence
  GFR-binding peptide
  MOD_RES (1), (2), (36), (38): Xaa is C or S
  MOD_RES (16), (17), (18), (19), (20): Xaa is A or G
  MOD_RES (21), (22), (23), (24): Xaa is A or G or is absent
XXVPTELEPISMLYLXXXXXXXXXKFKYEEMVVEGXGXR

SEQ ID NO: 29331 - protein, 38 aa, Artificial Sequence; identical to SEQ ID NO: 8055
  GFR-binding peptide
  MOD_RES (3), (4), (36), (38): Xaa is C or S

SEQ ID NO: 29332 - protein, 42 aa, Artificial Sequence
  GFR-binding peptide
  MOD_RES (4), (5), (39), (41): Xaa is C or S
  MOD_RES (19), (20), (21), (22), (23): Xaa is A or G
  MOD_RES (24), (25), (26), (27): Xaa is A or G or is absent
PKAXXVPTELEPISMLYLXXXXXXXXXKFKYEDMVVEGXGXR

SEQ ID NO: 29333 - protein, 39 aa, Artificial Sequence; identical to SEQ ID NO: 8056
  GFR-binding peptide
  MOD_RES (4), (5): Xaa is C or S
  MOD_RES (19), (20), (21), (22), (23): Xaa is A or G
  MOD_RES (24), (25), (26), (27): Xaa is A or G or is absent

SEQ ID NO: 29334 - protein, 32 aa, Artificial Sequence
  GFR-binding peptide
  MOD_RES (14), (15), (16), (17), (18): Xaa is A or G
  MOD_RES (19), (20), (21), (22): Xaa is A or G or is absent
APTQLSPISVLYIXXXXXXXXXYKQYENMVVR

SEQ ID NO: 29335 - protein, 39 aa, Artificial Sequence
  GFR-binding peptide
  MOD_RES (5), (6), (38): Xaa is C or S
VPKPXXAPTQLEPISVLYLDDSSNVIKFKYENMVVRAXG

SEQ ID NO: 29336 - protein, 41 aa, Artificial Sequence; identical to SEQ ID NO: 8057
  GFR-binding peptide
  MOD_RES (7), (41): Xaa is C or S
  MOD_RES (21), (22), (23), (24), (25): Xaa is A or G
  MOD_RES (26), (27), (28), (29): Xaa is A or G or is absent

SEQ ID NO: 29337 - protein, 38 aa, Artificial Sequence
  GFR-binding peptide
  MOD_RES (3), (4), (38): Xaa is C or S
  MOD_RES (18), (19), (20), (21), (22): Xaa is A or G
  MOD_RES (23), (24), (25), (26): Xaa is A or G or is absent
KAXXVPTKLSPISILYKXXXXXXXXXLKYHYGMAVSEX

SEQ ID NO: 29338 - protein, 38 aa, Artificial Sequence
  GFR-binding peptide
  MOD_RES (2), (3), (35), (37): Xaa is C or S
PXXAPTQLSPISVLYIDDSSNVIYKQYENMVVRAXGXH

SEQ ID NO: 29339 - protein, 36 aa, Artificial Sequence; identical to SEQ ID NO: 8059
  GFR-binding peptide
  MOD_RES (1), (35): Xaa is C or S
  MOD_RES (15), (16), (17), (18), (19): Xaa is A or G
  MOD_RES (20), (21), (22), (23): Xaa is A or G or is absent

SEQ ID NO: 29340 - protein, 32 aa, Artificial Sequence
  GFR-binding peptide
  MOD_RES (1), (2): Xaa is C or S
XXAPTQLEPISVLYLDDSSNVIKFKYENMVVR

SEQ ID NO: 29341 - protein, 39 aa, Artificial Sequence
  GFR-binding peptide
  MOD_RES (4), (5), (36), (38): Xaa is C or S
AAPXXVPQALSPISILYIVGRKPKVYKQYEMIVRSXKXS

SEQ ID NO: 29342 - protein, 38 aa, Artificial Sequence; identical to SEQ ID NO: 8060
  GFR-binding peptide
  MOD_RES (4), (38): Xaa is C or S
  MOD_RES (18), (19), (20), (21), (22): Xaa is A or G
  MOD_RES (23), (24), (25), (26): Xaa is A or G or is absent

SEQ ID NO: 29343 - protein, 39 aa, Artificial Sequence
  GFR-binding peptide
  MOD_RES (5), (6): Xaa is C or S
  MOD_RES (20), (21), (22), (23), (24): Xaa is A or G
  MOD_RES (25), (26), (27), (28): Xaa is A or G or is absent
VPKPXXAPTQLEPISVLYLXXXXXXXXXKFKYENMVVRA

SEQ ID NO: 29344 - protein, 40 aa, Artificial Sequence
  GFR-binding peptide
  MOD_RES (6), (7), (40): Xaa is C or S
KVGKAXXVPTKLSPISVLYIDDMGVPTYKQYEEGMSVAEX

SEQ ID NO: 29345 - protein, 39 aa, Artificial Sequence
  GFR-binding peptide
  MOD_RES (3), (4), (38): Xaa is C or S
  MOD_RES (18), (19), (20), (21), (22): Xaa is A or G
  MOD_RES (23), (24), (25), (26): Xaa is A or G or is absent
KAXXVPTELSPISMLYIXXXXXXXXXYKQYEDMVVEGXG

SEQ ID NO: 29346 - protein, 38 aa, Artificial Sequence; identical to SEQ ID NO: 8063
  GFR-binding peptide
  MOD_RES (4), (5), (37): Xaa is C or S

SEQ ID NO: 29347 - protein, 37 aa, Artificial Sequence
  GFR-binding peptide
  MOD_RES (4), (5), (37): Xaa is C or S
SKAXXVPTKLSPISILYKDKGVVTYLKYHYGMAVSEX

SEQ ID NO: 29348 - protein, 37 aa, Artificial Sequence; identical to SEQ ID NO: 8064
  GFR-binding peptide
  MOD_RES (6), (7): Xaa is C or S

SEQ ID NO: 29349 - protein, 33 aa, Artificial Sequence; identical to SEQ ID NO: 8065
  GFR-binding peptide
  MOD_RES (2), (3): Xaa is C or S

SEQ ID NO: 29350 - protein, 38 aa, Artificial Sequence
  GFR-binding peptide
  MOD_RES (5), (6), (37): Xaa is C or S
SAAPXXVPQALEPISILYLVGRKPKVKFKYEMIVRSXK

SEQ ID NO: 29351 - protein, 38 aa, Artificial Sequence; identical to SEQ ID NO: 8067
  GFR-binding peptide
  MOD_RES (2), (3), (36), (38): Xaa is C or S
  MOD_RES (17), (18), (19), (20), (21): Xaa is A or G
  MOD_RES (22), (23), (24), (25): Xaa is A or G or is absent

SEQ ID NO: 29352 - protein, 37 aa, Artificial Sequence
  GFR-binding peptide
  MOD_RES (6), (7): Xaa is C or S
YVPKPXXAPTKLSPISVLYIDDSSNVIYKQYENMVVR

SEQ ID NO: 29353 - protein, 38 aa, Artificial Sequence
  GFR-binding peptide
  MOD_RES (5), (6): Xaa is C or S
  MOD_RES (20), (21), (22), (23), (24): Xaa is A or G
  MOD_RES (25), (26), (27), (28): Xaa is A or G or is absent
ASKAXXVPTKLEPISILYLXXXXXXXXXKFKYEGMAVS

SEQ ID NO: 29354 - protein, 37 aa, Artificial Sequence; identical to SEQ ID NO: 8068
  GFR-binding peptide
  MOD_RES (2), (3), (34), (36): Xaa is C or S

SEQ ID NO: 29355 - protein, 35 aa, Artificial Sequence; identical to SEQ ID NO: 8069
  GFR-binding peptide
  MOD_RES (1), (2): Xaa is C or S
  MOD_RES (16), (17), (18), (19), (20): Xaa is A or G
  MOD_RES (21), (22), (23), (24): Xaa is A or G or is absent

SEQ ID NO: 29356 - protein, 39 aa, Artificial Sequence
  GFR-binding peptide
  MOD_RES (5), (6): Xaa is C or S
  MOD_RES (20), (21), (22), (23), (24): Xaa is A or G
  MOD_RES (25), (26), (27), (28): Xaa is A or G or is absent
IPKAXXVPTELEPISMLYLXXXXXXXXXKFKYEDMVVEG

SEQ ID NO: 29357 - protein, 38 aa, Artificial Sequence
  GFR-binding peptide
  MOD_RES (4), (5): Xaa is C or S
  MOD_RES (19), (20), (21), (22), (23): Xaa is A or G
  MOD_RES (24), (25), (26), (27): Xaa is A or G or is absent
PKPXXAPTQLSPISVLYIXXXXXXXXXYKQYENMVVRA

SEQ ID NO: 29358 - protein, 37 aa, Artificial Sequence
  GFR-binding peptide
  MOD_RES (3), (4): Xaa is C or S
  MOD_RES (18), (19), (20), (21), (22): Xaa is A or G
  MOD_RES (23), (24), (25), (26): Xaa is A or G or is absent
KPXXAPTQLEPISVLYLXXXXXXXXXKFKYENMVVRA

SEQ ID NO: 29359 - protein, 35 aa, Artificial Sequence
  GFR-binding peptide
  MOD_RES (1), (35): Xaa is C or S
  MOD_RES (15), (16), (17), (18), (19): Xaa is A or G
  MOD_RES (20), (21), (22), (23): Xaa is A or G or is absent
XVPTELEPISMLYLXXXXXXXXXKFKYEDMVVEGX

SEQ ID NO: 29360 - protein, 33 aa, Artificial Sequence; identical to SEQ ID NO: 8073
  GFR-binding peptide
  MOD_RES (33), (33): Xaa is C or S
  MOD_RES (14), (15), (16), (17), (18): Xaa is A or G
  MOD_RES (19), (20), (21), (22): Xaa is A or G or is absent

SEQ ID NO: 29361 - protein, 36 aa, Artificial Sequence
  GFR-binding peptide
  MOD_RES (3), (4), (36): Xaa is C or S
KAXXVPTELEPISMLYLDEYDKVVKFKYEEMVVEGX

SEQ ID NO: 29362 - protein, 34 aa, Artificial Sequence; identical to SEQ ID NO: 8076
  GFR-binding peptide
  MOD_RES (1), (34): Xaa is C or S
  MOD_RES (15), (16), (17), (18), (19): Xaa is A or G
  MOD_RES (20), (21), (22), (23): Xaa is A or G or is absent

SEQ ID NO: 29363 - protein, 36 aa, Artificial Sequence; identical to SEQ ID NO: 8077
  GFR-binding peptide
  MOD_RES (4), (5): Xaa is C or S

SEQ ID NO: 29364 - protein, 36 aa, Artificial Sequence; identical to SEQ ID NO: 8080
  GFR-binding peptide
  MOD_RES (2), (3), (35): Xaa is C or S

SEQ ID NO: 29365 - protein, 36 aa, Artificial Sequence; identical to SEQ ID NO: 8082
  GFR-binding peptide
  MOD_RES (4), (5), (36): Xaa is C or S

SEQ ID NO: 29366 - protein, 38 aa, Artificial Sequence
  GFR-binding peptide
  MOD_RES (4), (5), (37): Xaa is C or S
PKPXXAPTKLEPISVLYLDDSSNVIKFKYENMVVRSXG

SEQ ID NO: 29367 - protein, 31 aa, Artificial Sequence
  GFR-binding peptide
VPARLSPISILYKDAANNVVLKYHYDMVVEA

SEQ ID NO: 29368 - protein, 40 aa, Artificial Sequence; identical to SEQ ID NO: 8085
  GFR-binding peptide
  MOD_RES (3), (4), (37), (39): Xaa is C or S
  MOD_RES (18), (19), (20), (21), (22): Xaa is A or G
  MOD_RES (23), (24), (25), (26): Xaa is A or G or is absent

SEQ ID NO: 29369 - protein, 31 aa, Artificial Sequence
  GFR-binding peptide
  MOD_RES (1), (1): Xaa is C or S
XVPTELEPISMLYLDENEKVVKFKYEDMVVE

SEQ ID NO: 29370 - protein, 33 aa, Artificial Sequence; identical to SEQ ID NO: 8088
  GFR-binding peptide
  MOD_RES (1), (1): Xaa is C or S
  MOD_RES (15), (16), (17), (18), (19): Xaa is A or G
  MOD_RES (20), (21), (22), (23): Xaa is A or G or is absent

SEQ ID NO: 29371 - protein, 34 aa, Artificial Sequence; identical to SEQ ID NO: 8089
  GFR-binding peptide
  MOD_RES (2), (3), (34): Xaa is C or S

SEQ ID NO: 29372 - protein, 37 aa, Artificial Sequence; identical to SEQ ID NO: 8091
  GFR-binding peptide
  MOD_RES (1), (2), (34), (36): Xaa is C or S

SEQ ID NO: 29373 - protein, 40 aa, Artificial Sequence
  GFR-binding peptide
  MOD_RES (5), (6), (37), (39): Xaa is C or S
SASPXXVPQDLSPISILYIVGRTPKVYKQYEMVVKSXKXS

SEQ ID NO: 29374 - protein, 37 aa, Artificial Sequence
  GFR-binding peptide
  MOD_RES (5), (6): Xaa is C or S
APASXXVPARLSPISILYKDAANNVVLKYHYDMVVEA

SEQ ID NO: 29375 - protein, 37 aa, Artificial Sequence; identical to SEQ ID NO: 8094
  GFR-binding peptide
  MOD_RES (34), (36): Xaa is C or S
  MOD_RES (14), (15), (16), (17), (18): Xaa is A or G
  MOD_RES (19), (20), (21), (22): Xaa is A or G or is absent

SEQ ID NO: 29376 - protein, 39 aa, Artificial Sequence
  GFR-binding peptide
  MOD_RES (6), (7): Xaa is C or S
  MOD_RES (21), (22), (23), (24), (25): Xaa is A or G
  MOD_RES (26), (27), (28), (29): Xaa is A or G or is absent
ASAAPXXVPQALSPISILYIXXXXXXXXXYKQYEMIVRS

SEQ ID NO: 29377 - protein, 42 aa, Artificial Sequence; identical to SEQ ID NO: 8096
  GFR-binding peptide
  MOD_RES (4), (5), (39), (41): Xaa is C or S
  MOD_RES (19), (20), (21), (22), (23): Xaa is A or G
  MOD_RES (24), (25), (26), (27): Xaa is A or G or is absent

SEQ ID NO: 29378 - protein, 42 aa, Artificial Sequence; identical to SEQ ID NO: 8097
  GFR-binding peptide
  MOD_RES (6), (7), (41): Xaa is C or S
  MOD_RES (21), (22), (23), (24), (25): Xaa is A or G
  MOD_RES (26), (27), (28), (29): Xaa is A or G or is absent

SEQ ID NO: 29379 - protein, 35 aa, Artificial Sequence; identical to SEQ ID NO: 8098
  GFR-binding peptide
  MOD_RES (4), (5): Xaa is C or S

SEQ ID NO: 29380 - protein, 32 aa, Artificial Sequence; identical to SEQ ID NO: 8099
  GFR-binding peptide
  MOD_RES (1), (1): Xaa is C or S

SEQ ID NO: 29381 - protein, 40 aa, Artificial Sequence; identical to SEQ ID NO: 8100
  GFR-binding peptide
  MOD_RES (5), (6), (38), (40): Xaa is C or S

SEQ ID NO: 29382 - protein, 31 aa, Artificial Sequence
  GFR-binding peptide
VPTELEPISMLYLDENEKVVKFKYEDMVVEG

SEQ ID NO: 29383 - protein, 36 aa, Artificial Sequence
  GFR-binding peptide
  MOD_RES (2), (3), (35): Xaa is C or S
AXXVPTKLNAISILYFDKGVVTYLKKYRGMAVSEXG

SEQ ID NO: 29384 - protein, 38 aa, Artificial Sequence
  GFR-binding peptide
  MOD_RES (6), (7): Xaa is C or S
TVPKPXXAPTQLEPISVLYLDDSSNVIKFKYENMVVRA

SEQ ID NO: 29385 - protein, 41 aa, Artificial Sequence
  GFR-binding peptide
  MOD_RES (5), (6), (40): Xaa is C or S
  MOD_RES (20), (21), (22), (23), (24): Xaa is A or G
  MOD_RES (25), (26), (27), (28): Xaa is A or G or is absent
IPKAXXVPTELEPISMLYLXXXXXXXXXKFKYEDMVVEGXG

SEQ ID NO: 29386 - protein, 38 aa, Artificial Sequence
  GFR-binding peptide
  MOD_RES (3), (4), (38): Xaa is C or S
  MOD_RES (18), (19), (20), (21), (22): Xaa is A or G
  MOD_RES (23), (24), (25), (26): Xaa is A or G or is absent
KAXXVPTKLSPISILYIXXXXXXXXXYKQYEGMAVSEX

SEQ ID NO: 29387 - protein, 38 aa, Artificial Sequence
  GFR-binding peptide
  MOD_RES (3), (4), (36), (38): Xaa is C or S
KAXXVPTKLNAISILYFDKGVVTYLKKYRGMAVSEXGX

SEQ ID NO: 29388 - protein, 37 aa, Artificial Sequence
  GFR-binding peptide
  MOD_RES (2), (3), (35), (37): Xaa is C or S
AXXAPTKLSPISVLYIDSSNNVIYKQYENMVVKAXGX

SEQ ID NO: 29389 - protein, 40 aa, Artificial Sequence
  GFR-binding peptide
  MOD_RES (3), (4), (38), (40): Xaa is C or S
  MOD_RES (18), (19), (20), (21), (22): Xaa is A or G
  MOD_RES (23), (24), (25), (26): Xaa is A or G or is absent
KPXXAPTKLEPISVLYLXXXXXXXXXKFKYENMVVRSXGX

SEQ ID NO: 29390 - protein, 42 aa, Artificial Sequence
  GFR-binding peptide
  MOD_RES (6), (7), (41): Xaa is C or S
  MOD_RES (21), (22), (23), (24), (25): Xaa is A or G
  MOD_RES (26), (27), (28), (29): Xaa is A or G or is absent
AAPASXXVPARLSPISILYIXXXXXXXXXYKQYEDMVVEAXG

SEQ ID NO: 29391 - protein, 40 aa, Artificial Sequence
  GFR-binding peptide
  MOD_RES (5), (6), (38), (40): Xaa is C or S
IPKAXXVPTELSPISMLYIDENEKVVYKQYEDMVVEGXGX

SEQ ID NO: 29392 - protein, 42 aa, Artificial Sequence
  GFR-binding peptide
  MOD_RES (6), (7), (39), (41): Xaa is C or S
AAPASXXVPARLNAISILYFDAANNVVLKKYRDMVVEAXGXR

SEQ ID NO: 29393 - protein, 31 aa, Artificial Sequence
  GFR-binding peptide
  MOD_RES (1), (1): Xaa is C or S
XAPTKLSPISVLYIDDSSNVIYKQYENMVVR

SEQ ID NO: 29394 - protein, 35 aa, Artificial Sequence
  GFR-binding peptide
  MOD_RES (1), (2): Xaa is C or S
  MOD_RES (16), (17), (18), (19), (20): Xaa is A or G
  MOD_RES (21), (22), (23), (24): Xaa is A or G or is absent
XXVPTKLEPISILYLXXXXXXXXXKFKYEGMAVSE

SEQ ID NO: 29395 - protein, 39 aa, Artificial Sequence
  GFR-binding peptide
  MOD_RES (3), (4), (38): Xaa is C or S
  MOD_RES (18), (19), (20), (21), (22): Xaa is A or G
  MOD_RES (23), (24), (25), (26): Xaa is A or G or is absent
KAXXVPTKLSPISILYIXXXXXXXXXYKQYEGMAVSEXG

SEQ ID NO: 29396 - protein, 41 aa, Artificial Sequence
  GFR-binding peptide
  MOD_RES (3), (4), (38), (40): Xaa is C or S
  MOD_RES (18), (19), (20), (21), (22): Xaa is A or G
  MOD_RES (23), (24), (25), (26): Xaa is A or G or is absent
KPXXAPTQLEPISVLYLXXXXXXXXXKFKYENMVVRAXGXH

SEQ ID NO: 29397 - protein, 35 aa, Artificial Sequence; identical to SEQ ID NO: 8109
  GFR-binding peptide
  MOD_RES (1), (1): Xaa is C or S
  MOD_RES (15), (16), (17), (18), (19): Xaa is A or G
  MOD_RES (20), (21), (22), (23): Xaa is A or G or is absent

SEQ ID NO: 29398 - protein, 35 aa, Artificial Sequence
  GFR-binding peptide
  MOD_RES (1), (35): Xaa is C or S
  MOD_RES (15), (16), (17), (18), (19): Xaa is A or G
  MOD_RES (20), (21), (22), (23): Xaa is A or G or is absent
XVPARLSPISILYKXXXXXXXXXLKYHYDMVVEAX

SEQ ID NO: 29399 - protein, 33 aa, Artificial Sequence
  GFR-binding peptide
  MOD_RES (1), (1): Xaa is C or S
  MOD_RES (15), (16), (17), (18), (19): Xaa is A or G
  MOD_RES (20), (21), (22), (23): Xaa is A or G or is absent
XVPTELSPISMLYIXXXXXXXXXYKQYEEMVVE

SEQ ID NO: 29400 - protein, 35 aa, Artificial Sequence
  GFR-binding peptide
  MOD_RES (35), (35): Xaa is C or S
  MOD_RES (14), (15), (16), (17), (18): Xaa is A or G
  MOD_RES (19), (20), (21), (22): Xaa is A or G or is absent
VPTKLEPISVLYLXXXXXXXXXKFKYEEGMSVAEX

SEQ ID NO: 29401 - protein, 36 aa, Artificial Sequence
  GFR-binding peptide
  MOD_RES (2), (3), (34), (36): Xaa is C or S
PXXVPQDLEPISILYLVGRTPKVKFKYEMVVKSXKX

SEQ ID NO: 29402 - protein, 40 aa, Artificial Sequence
  GFR-binding peptide
  MOD_RES (6), (7), (38), (40): Xaa is C or S
ASAAPXXVPQALEPISILYLVGRKPKVKFKYEMIVRSXKX

SEQ ID NO: 29403 - protein, 41 aa, Artificial Sequence
  GFR-binding peptide
  MOD_RES (3), (4), (39), (41): Xaa is C or S
  MOD_RES (18), (19), (20), (21), (22): Xaa is A or G
  MOD_RES (23), (24), (25), (26): Xaa is A or G or is absent
KAXXVPTKLSPISVLYIXXXXXXXXXYKQYEEGMSVAEXGX

SEQ ID NO: 29404 - protein, 36 aa, Artificial Sequence
  GFR-binding peptide
  MOD_RES (34), (36): Xaa is C or S
  MOD_RES (14), (15), (16), (17), (18): Xaa is A or G
  MOD_RES (19), (20), (21), (22): Xaa is A or G or is absent
APTQLEPISVLYLXXXXXXXXXKFKYENMVVRAXGX

SEQ ID NO: 29405 - protein, 30 aa, Artificial Sequence
  GFR-binding peptide
VPARLNAISILYFDAANNVVLKKYRDMVVE

SEQ ID NO: 29406 - protein, 41 aa, Artificial Sequence
  GFR-binding peptide
  MOD_RES (6), (7), (40): Xaa is C or S
  MOD_RES (21), (22), (23), (24), (25): Xaa is A or G
  MOD_RES (26), (27), (28), (29): Xaa is A or G or is absent
ASASPXXVPQDLSPISILYIXXXXXXXXXYKQYEMVVKSXK

SEQ ID NO: 29407 - protein, 36 aa, Artificial Sequence; identical to SEQ ID NO: 8121
  GFR-binding peptide
  MOD_RES (33), (35): Xaa is C or S
  MOD_RES (14), (15), (16), (17), (18): Xaa is A or G
  MOD_RES (19), (20), (21), (22): Xaa is A or G or is absent

SEQ ID NO: 29408 - protein, 36 aa, Artificial Sequence
  GFR-binding peptide
  MOD_RES (1), (2), (34), (36): Xaa is C or S
XXVPTKLSPISILYIDKGVVTYYKQYEGMAVSEXGX

SEQ ID NO: 29409 - protein, 42 aa, Artificial Sequence; identical to SEQ ID NO: 8123
  GFR-binding peptide
  MOD_RES (4), (5), (39), (41): Xaa is C or S
  MOD_RES (19), (20), (21), (22), (23): Xaa is A or G
  MOD_RES (24), (25), (26), (27): Xaa is A or G or is absent

SEQ ID NO: 29410 - protein, 40 aa, Artificial Sequence
  GFR-binding peptide
  MOD_RES (4), (5), (38), (40): Xaa is C or S
GKAXXVPTKLEPISVLYLDDMGVPTKFKYEEGMSVAEXGX

SEQ ID NO: 29411 - protein, 38 aa, Artificial Sequence
  GFR-binding peptide
  MOD_RES (3), (4), (36), (38): Xaa is C or S
ASXXVPARLEPISILYLDAANNVVKFKYEDMVVEAXGX

SEQ ID NO: 29412 - protein, 37 aa, Artificial Sequence
  GFR-binding peptide
  MOD_RES (1), (2), (36): Xaa is C or S
  MOD_RES (16), (17), (18), (19), (20): Xaa is A or G
  MOD_RES (21), (22), (23), (24): Xaa is A or G or is absent
XXVPARLEPISILYLXXXXXXXXXKFKYEDMVVEAXG

SEQ ID NO: 29413 - protein, 35 aa, Artificial Sequence
  GFR-binding peptide
  MOD_RES (2), (3): Xaa is C or S
  MOD_RES (17), (18), (19), (20), (21): Xaa is A or G
  MOD_RES (22), (23), (24), (25): Xaa is A or G or is absent
SXXVPARLSPISILYIXXXXXXXXXYKQYEDMVVE

SEQ ID NO: 29414 - protein, 33 aa, Artificial Sequence; identical to SEQ ID NO: 8128
  GFR-binding peptide
  MOD_RES (1), (2): Xaa is C or S

SEQ ID NO: 29415 - protein, 40 aa, Artificial Sequence; identical to SEQ ID NO: 8131
  GFR-binding peptide
  MOD_RES (6), (7): Xaa is C or S
  MOD_RES (21), (22), (23), (24), (25): Xaa is A or G
  MOD_RES (26), (27), (28), (29): Xaa is A or G or is absent

SEQ ID NO: 29416 - protein, 35 aa, Artificial Sequence
  GFR-binding peptide
  MOD_RES (3), (3): Xaa is C or S
  MOD_RES (17), (18), (19), (20), (21): Xaa is A or G
  MOD_RES (22), (23), (24), (25): Xaa is A or G or is absent
PTXAPTKLSPISVLYIXXXXXXXXXYKQYENMVVR

SEQ ID NO: 29417 - protein, 36 aa, Artificial Sequence
  GFR-binding peptide
  MOD_RES (34), (36): Xaa is C or S
  MOD_RES (14), (15), (16), (17), (18): Xaa is A or G
  MOD_RES (19), (20), (21), (22): Xaa is A or G or is absent
APTQLSPISVLYIXXXXXXXXXYKQYENMVVRAXGX

SEQ ID NO: 29418 - protein, 33 aa, Artificial Sequence; identical to SEQ ID NO: 8134
  GFR-binding peptide
  MOD_RES (1), (33): Xaa is C or S

SEQ ID NO: 29419 - protein, 33 aa, Artificial Sequence
  GFR-binding peptide
  MOD_RES (1), (33): Xaa is C or S
XVPTELSPISMLYIDEYDKVVYKQYEEMVVEGX

SEQ ID NO: 29420 - protein, 34 aa, Artificial Sequence; identical to SEQ ID NO: 8137
  GFR-binding peptide
  MOD_RES (32), (34): Xaa is C or S

SEQ ID NO: 29421 - protein, 34 aa, Artificial Sequence
  GFR-binding peptide
  MOD_RES (31), (33): Xaa is C or S
VPQDLSPISILYIVGRTPKVYKQYEMVVKSXKXS

SEQ ID NO: 29422 - protein, 39 aa, Artificial Sequence
  GFR-binding peptide
  MOD_RES (5), (6): Xaa is C or S
  MOD_RES (20), (21), (22), (23), (24): Xaa is A or G
  MOD_RES (25), (26), (27), (28): Xaa is A or G or is absent
APASXXVPARLSPISILYKXXXXXXXXXLKYHYDMVVEA

SEQ ID NO: 29423 - protein, 35 aa, Artificial Sequence; identical to SEQ ID NO: 8138
  GFR-binding peptide
  MOD_RES (35), (35): Xaa is C or S
  MOD_RES (14), (15), (16), (17), (18): Xaa is A or G
  MOD_RES (19), (20), (21), (22): Xaa is A or G or is absent

SEQ ID NO: 29424 - protein, 39 aa, Artificial Sequence
  GFR-binding peptide
  MOD_RES (2), (3), (36), (38): Xaa is C or S
  MOD_RES (17), (18), (19), (20), (21): Xaa is A or G
  MOD_RES (22), (23), (24), (25): Xaa is A or G or is absent
PXXVPQALEPISILYLXXXXXXXXXKFKYEMIVRSXKXS

SEQ ID NO: 29425 - protein, 43 aa, Artificial Sequence; identical to SEQ ID NO: 8140
  GFR-binding peptide
  MOD_RES (6), (7), (42): Xaa is C or S
  MOD_RES (21), (22), (23), (24), (25): Xaa is A or G
  MOD_RES (26), (27), (28), (29): Xaa is A or G or is absent

SEQ ID NO: 29426 - protein, 34 aa, Artificial Sequence
  GFR-binding peptide
  MOD_RES (2), (3): Xaa is C or S
AXXVPTELSPISMLYIDEYDKVVYKQYEEMVVEG

SEQ ID NO: 29427 - protein, 42 aa, Artificial Sequence
  GFR-binding peptide
  MOD_RES (5), (6), (41): Xaa is C or S
  MOD_RES (20), (21), (22), (23), (24): Xaa is A or G
  MOD_RES (25), (26), (27), (28): Xaa is A or G or is absent
VGKAXXVPTKLEPISVLYLXXXXXXXXXKFKYEEGMSVAEXG

SEQ ID NO: 29428 - protein, 35 aa, Artificial Sequence
  GFR-binding peptide
  MOD_RES (2), (3), (34): Xaa is C or S
PXXVPQALEPISILYLVGRKPKVKFKYEMIVRSXK

SEQ ID NO: 29429 - protein, 34 aa, Artificial Sequence; identical to SEQ ID NO: 8142
  GFR-binding peptide
  MOD_RES (1), (33): Xaa is C or S

SEQ ID NO: 29430 - protein, 40 aa, Artificial Sequence
  GFR-binding peptide
  MOD_RES (4), (5), (39): Xaa is C or S
  MOD_RES (19), (20), (21), (22), (23): Xaa is A or G
  MOD_RES (24), (25), (26), (27): Xaa is A or G or is absent
PKPXXAPTKLSPISVLYIXXXXXXXXXYKQYENMVVRSXG

SEQ ID NO: 29431 - protein, 38 aa, Artificial Sequence
  GFR-binding peptide
  MOD_RES (5), (37): Xaa is C or S
TKPTXAPTKLEPISVLYLDDSSNVIKFKYENMVVRSXG

SEQ ID NO: 29432 - protein, 33 aa, Artificial Sequence; identical to SEQ ID NO: 8146
  GFR-binding peptide
  MOD_RES (1), (2), (33): Xaa is C or S

SEQ ID NO: 29433 - protein, 41 aa, Artificial Sequence
  GFR-binding peptide
  MOD_RES (5), (6), (38), (40): Xaa is C or S
ASKAXXVPTKLNAISILYFDKGVVTYLKKYRGMAVSEXGXR

SEQ ID NO: 29434 - protein, 35 aa, Artificial Sequence; identical to SEQ ID NO: 8147
  GFR-binding peptide
  MOD_RES (1), (2), (33), (35): Xaa is C or S

SEQ ID NO: 29435 - protein, 35 aa, Artificial Sequence
  GFR-binding peptide
  MOD_RES (34), (34): Xaa is C or S
  MOD_RES (14), (15), (16), (17), (18): Xaa is A or G
  MOD_RES (19), (20), (21), (22): Xaa is A or G or is absent
VPTELEPISMLYLXXXXXXXXXKFKYEEMVVEGXG

SEQ ID NO: 29436 - protein, 31 aa, Artificial Sequence
  GFR-binding peptide
  MOD_RES (1), (1): Xaa is C or S
XVPQALSPISILYIVGRKPKVYKQYEMIVRS

SEQ ID NO: 29437 - protein, 35 aa, Artificial Sequence; identical to SEQ ID NO: 8148
  GFR-binding peptide
  MOD_RES (4), (5): Xaa is C or S

SEQ ID NO: 29438 - protein, 37 aa, Artificial Sequence
  GFR-binding peptide
  MOD_RES (1), (34), (36): Xaa is C or S
  MOD_RES (15), (16), (17), (18), (19): Xaa is A or G
  MOD_RES (20), (21), (22), (23): Xaa is A or G or is absent
XVPQALEPISILYLXXXXXXXXXKFKYEMIVRSXKXS

SEQ ID NO: 29439 - protein, 34 aa, Artificial Sequence
  GFR-binding peptide
  MOD_RES (1), (2), (34): Xaa is C or S
XXVPTELSPISMLYIDENEKVVYKQYEDMVVEGX

SEQ ID NO: 29440 - protein, 40 aa, Artificial Sequence
  GFR-binding peptide
  MOD_RES (5), (6), (40): Xaa is C or S
  MOD_RES (20), (21), (22), (23), (24): Xaa is A or G
  MOD_RES (25), (26), (27), (28): Xaa is A or G or is absent
VPKPXXAPTQLSPISVLYIXXXXXXXXXYKQYENMVVRAX

SEQ ID NO: 29441 - protein, 33 aa, Artificial Sequence; identical to SEQ ID NO: 8150
  GFR-binding peptide
  MOD_RES (2), (3): Xaa is C or S

SEQ ID NO: 29442 - protein, 36 aa, Artificial Sequence; identical to SEQ ID NO: 8151
  GFR-binding peptide
  MOD_RES (1), (2), (35): Xaa is C or S
  MOD_RES (16), (17), (18), (19), (20): Xaa is A or G
  MOD_RES (21), (22), (23), (24): Xaa is A or G or is absent

SEQ ID NO: 29443 - protein, 38 aa, Artificial Sequence
  GFR-binding peptide
  MOD_RES (1), (2), (36), (38): Xaa is C or S
  MOD_RES (16), (17), (18), (19), (20): Xaa is A or G
  MOD_RES (21), (22), (23), (24): Xaa is A or G or is absent
XXVPTKLSPISILYIXXXXXXXXXYKQYEGMAVSEXGX

SEQ ID NO: 29444 - protein, 34 aa, Artificial Sequence
  GFR-binding peptide
  MOD_RES (2), (3): Xaa is C or S
AXXVPTELSPISMLYIDENEKVVYKQYEDMVVEG

SEQ ID NO: 29445 - protein, 39 aa, Artificial Sequence
  GFR-binding peptide
  MOD_RES (6), (7): Xaa is C or S
  MOD_RES (21), (22), (23), (24), (25): Xaa is A or G
  MOD_RES (26), (27), (28), (29): Xaa is A or G or is absent
ASASPXXVSQDLEPISILYLXXXXXXXXXKFKYEMIVKS

SEQ ID NO: 29446 - protein, 37 aa, Artificial Sequence
  GFR-binding peptide
  MOD_RES (6), (7): Xaa is C or S
KASKAXXVPTKLSPISILYIDKGVVTYYKQYEGMAVS

SEQ ID NO: 29447 - protein, 34 aa, Artificial Sequence; identical to SEQ ID NO: 8156
  GFR-binding peptide
  MOD_RES (1), (34): Xaa is C or S
  MOD_RES (15), (16), (17), (18), (19): Xaa is A or G
  MOD_RES (20), (21), (22), (23): Xaa is A or G or is absent

SEQ ID NO: 29448 - protein, 38 aa, Artificial Sequence
  GFR-binding peptide
  MOD_RES (1), (35), (37): Xaa is C or S
  MOD_RES (15), (16), (17), (18), (19): Xaa is A or G
  MOD_RES (20), (21), (22), (23): Xaa is A or G or is absent
XVPTKLEPISILYLXXXXXXXXXKFKYEGMAVSEXGXR

SEQ ID NO: 29449 - protein, 41 aa, Artificial Sequence; identical to SEQ ID NO: 8157
  GFR-binding peptide
  MOD_RES (4), (5), (39), (41): Xaa is C or S
  MOD_RES (19), (20), (21), (22), (23): Xaa is A or G
  MOD_RES (24), (25), (26), (27): Xaa is A or G or is absent

SEQ ID NO: 29450 - protein, 36 aa, Artificial Sequence; identical to SEQ ID NO: 8158
  GFR-binding peptide
  MOD_RES (33), (35): Xaa is C or S

SEQ ID NO: 29451 - protein, 34 aa, Artificial Sequence
  GFR-binding peptide
  MOD_RES (3), (4): Xaa is C or S
KAXXAPTKLEPISVLYLDSSNNVIKFKYENMVVK

SEQ ID NO: 29452 - protein, 38 aa, Artificial Sequence
  GFR-binding peptide
  MOD_RES (3), (4), (35), (37): Xaa is C or S
SPXXVSQDLEPISILYLIGKTPKIKFKYEMIVKSXKXS

SEQ ID NO: 29453 - protein, 38 aa, Artificial Sequence; identical to SEQ ID NO: 8161
  GFR-binding peptide
  MOD_RES (5), (6), (37): Xaa is C or S

SEQ ID NO: 29454 - protein, 36 aa, Artificial Sequence; identical to SEQ ID NO: 8162
  GFR-binding peptide
  MOD_RES (2), (3), (36): Xaa is C or S
  MOD_RES (17), (18), (19), (20), (21): Xaa is A or G
  MOD_RES (22), (23), (24), (25): Xaa is A or G or is absent

SEQ ID NO: 29455 - protein, 39 aa, Artificial Sequence
  GFR-binding peptide
  MOD_RES (6), (6): Xaa is C or S
  MOD_RES (20), (21), (22), (23), (24): Xaa is A or G
  MOD_RES (25), (26), (27), (28): Xaa is A or G or is absent
VTKPTXAPTKLSPISVLYIXXXXXXXXXYKQYENMVVRS

SEQ ID NO: 29456 - protein, 35 aa, Artificial Sequence
  GFR-binding peptide
  MOD_RES (1), (34): Xaa is C or S
XVPTKLSPISVLYIDDMGVPTYKQYEEGMSVAEXG

SEQ ID NO: 29457 - protein, 34 aa, Artificial Sequence
  GFR-binding peptide
  MOD_RES (1), (1): Xaa is C or S
  MOD_RES (15), (16), (17), (18), (19): Xaa is A or G
  MOD_RES (20), (21), (22), (23): Xaa is A or G or is absent
XAPTKLSPISVLYIXXXXXXXXXYKQYENMVVKA

SEQ ID NO: 29458 - protein, 44 aa, Artificial Sequence
  GFR-binding peptide
  MOD_RES (6), (7), (41), (43): Xaa is C or S
  MOD_RES (21), (22), (23), (24), (25): Xaa is A or G
  MOD_RES (26), (27), (28), (29): Xaa is A or G or is absent
KASKAXXVPTKLEPISILYLXXXXXXXXXKFKYEGMAVSEXGXR

SEQ ID NO: 29459 - protein, 36 aa, Artificial Sequence; identical to SEQ ID NO: 8163
  GFR-binding peptide
  MOD_RES (3), (4): Xaa is C or S
  MOD_RES (18), (19), (20), (21), (22): Xaa is A or G
  MOD_RES (23), (24), (25), (26): Xaa is A or G or is absent

SEQ ID NO: 29460 - protein, 34 aa, Artificial Sequence; identical to SEQ ID NO: 8165
  GFR-binding peptide
  MOD_RES (33), (33): Xaa is C or S
  MOD_RES (14), (15), (16), (17), (18): Xaa is A or G
  MOD_RES (19), (20), (21), (22): Xaa is A or G or is absent

SEQ ID NO: 29461 - protein, 43 aa, Artificial Sequence
  GFR-binding peptide
  MOD_RES (6), (7), (40), (42): Xaa is C or S
KVGKAXXVPTKLEPISVLYLDDMGVPTKFKYEEGMSVAEXGXR

SEQ ID NO: 29462 - protein, 40 aa, Artificial Sequence
  GFR-binding peptide
  MOD_RES (6), (7), (39): Xaa is C or S
YVPKPXXAPTKLSPISVLYIDDSSNVIYKQYENMVVRSXG

SEQ ID NO: 29463 - protein, 35 aa, Artificial Sequence; identical to SEQ ID NO: 8167
  GFR-binding peptide
  MOD_RES (1), (2), (34): Xaa is C or S

SEQ ID NO: 29464 - protein, 40 aa, Artificial Sequence
  GFR-binding peptide
  MOD_RES (6), (7), (39): Xaa is C or S
KASKAXXVPTKLSPISILYIDKGVVTYYKQYEGMAVSEXG

SEQ ID NO: 29465 - protein, 33 aa, Artificial Sequence; identical to SEQ ID NO: 8168
  GFR-binding peptide
  MOD_RES (1), (2), (33): Xaa is C or S

SEQ ID NO: 29466 - protein, 36 aa, Artificial Sequence
  GFR-binding peptide
  MOD_RES (2), (3): Xaa is C or S
  MOD_RES (17), (18), (19), (20), (21): Xaa is A or G
  MOD_RES (22), (23), (24), (25): Xaa is A or G or is absent
AXXVPTELEPISMLYLXXXXXXXXXKFKYEDMVVEG

SEQ ID NO: 29467 - protein, 38 aa, Artificial Sequence; identical to SEQ ID NO: 8170
  GFR-binding peptide
  MOD_RES (2), (3), (36), (38): Xaa is C or S

SEQ ID NO: 29468 - protein, 34 aa, Artificial Sequence
  GFR-binding peptide
  MOD_RES (1), (2), (34): Xaa is C or S
XXVPTELSPISMLYIDEYDKVVYKQYEEMVVEGX

SEQ ID NO: 29469 - protein, 36 aa, Artificial Sequence; identical to SEQ ID NO: 8172
  GFR-binding peptide
  MOD_RES (4), (5): Xaa is C or S

SEQ ID NO: 29470 - protein, 33 aa, Artificial Sequence
  GFR-binding peptide
  MOD_RES (1), (1): Xaa is C or S
  MOD_RES (15), (16), (17), (18), (19): Xaa is A or G
  MOD_RES (20), (21), (22), (23): Xaa is A or G or is absent
XVPQALSPISILYIXXXXXXXXXYKQYEMIVRS

SEQ ID NO: 29471 - protein, 38 aa, Artificial Sequence
  GFR-binding peptide
  MOD_RES (5), (6): Xaa is C or S
  MOD_RES (20), (21), (22), (23), (24): Xaa is A or G
  MOD_RES (25), (26), (27), (28): Xaa is A or G or is absent
SASPXXVSQDLSPISILYIXXXXXXXXXYKQYEMIVKS

SEQ ID NO: 29472 - protein, 35 aa, Artificial Sequence
  GFR-binding peptide
  MOD_RES (32), (34): Xaa is C or S
APTKLSPISVLYIDDSSNVIYKQYENMVVRSXGXH

SEQ ID NO: 29473 - protein, 42 aa, Artificial Sequence
  GFR-binding peptide
  MOD_RES (6), (7), (41): Xaa is C or S
  MOD_RES (21), (22), (23), (24), (25): Xaa is A or G
  MOD_RES (26), (27), (28), (29): Xaa is A or G or is absent
AAPASXXVPARLNAISILYFXXXXXXXXXLKKYRDMVVEAXG

SEQ ID NO: 29474 - protein, 41 aa, Artificial Sequence
  GFR-binding peptide
  MOD_RES (3), (4), (38), (40): Xaa is C or S
  MOD_RES (18), (19), (20), (21), (22): Xaa is A or G
  MOD_RES (23), (24), (25), (26): Xaa is A or G or is absent
ASXXVPARLNAISILYFXXXXXXXXXLKKYRDMVVEAXGXR

SEQ ID NO: 29475 - protein, 44 aa, Artificial Sequence
  GFR-binding peptide
  MOD_RES (6), (7), (41), (43): Xaa is C or S
  MOD_RES (21), (22), (23), (24), (25): Xaa is A or G
  MOD_RES (26), (27), (28), (29): Xaa is A or G or is absent
KASKAXXVPTKLNAISILYFXXXXXXXXXLKKYRGMAVSEXGXR

SEQ ID NO: 29476 - protein, 40 aa, Artificial Sequence
  GFR-binding peptide
  MOD_RES (3), (4), (37), (39): Xaa is C or S
  MOD_RES (18), (19), (20), (21), (22): Xaa is A or G
  MOD_RES (23), (24), (25), (26): Xaa is A or G or is absent
APXXVPQALSPISILYIXXXXXXXXXYKQYEMIVRSXKXS

SEQ ID NO: 29477 - protein, 40 aa, Artificial Sequence
  GFR-binding peptide
  MOD_RES (5), (6), (38), (40): Xaa is C or S
ASKAXXVPTKLSPISILYKDKGVVTYLKYHYGMAVSEXGX

SEQ ID NO: 29478 - protein, 35 aa, Artificial Sequence
  GFR-binding peptide
  MOD_RES (1), (33), (35): Xaa is C or S
XVPTELSPISMLYIDENEKVVYKQYEDMVVEGXGX

SEQ ID NO: 29479 - protein, 41 aa, Artificial Sequence; identical to SEQ ID NO: 8181
  GFR-binding peptide
  MOD_RES (3), (4), (39), (41): Xaa is C or S
  MOD_RES (18), (19), (20), (21), (22): Xaa is A or G
  MOD_RES (23), (24), (25), (26): Xaa is A or G or is absent

SEQ ID NO: 29480 - protein, 44 aa, Artificial Sequence
  GFR-binding peptide
  MOD_RES (6), (7), (41), (43): Xaa is C or S
  MOD_RES (21), (22), (23), (24), (25): Xaa is A or G
  MOD_RES (26), (27), (28), (29): Xaa is A or G or is absent
YVPKPXXAPTKLSPISVLYIXXXXXXXXXYKQYENMVVRSXGXH

SEQ ID NO: 29481 - protein, 35 aa, Artificial Sequence; identical to SEQ ID NO: 8183
  GFR-binding peptide
  MOD_RES (2), (3): Xaa is C or S
  MOD_RES (17), (18), (19), (20), (21): Xaa is A or G
  MOD_RES (22), (23), (24), (25): Xaa is A or G or is absent

SEQ ID NO: 29482 - protein, 41 aa, Artificial Sequence
  GFR-binding peptide
  MOD_RES (3), (4), (38), (40): Xaa is C or S
  MOD_RES (18), (19), (20), (21), (22): Xaa is A or G
  MOD_RES (23), (24), (25), (26): Xaa is A or G or is absent
ASXXVPARLEPISILYLXXXXXXXXXKFKYEDMVVEAXGXR

SEQ ID NO: 29483 - protein, 35 aa, Artificial Sequence
  GFR-binding peptide
  MOD_RES (33), (35): Xaa is C or S
  MOD_RES (14), (15), (16), (17), (18): Xaa is A or G
  MOD_RES (19), (20), (21), (22): Xaa is A or G or is absent
VSQDLEPISILYLXXXXXXXXXKFKYEMIVKSXKX

SEQ ID NO: 29484 - protein, 36 aa, Artificial Sequence
  GFR-binding peptide
  MOD_RES (2), (3), (36): Xaa is C or S
  MOD_RES (17), (18), (19), (20), (21): Xaa is A or G
  MOD_RES (22), (23), (24), (25): Xaa is A or G or is absent
PXXVPQDLEPISILYLXXXXXXXXXKFKYEMVVKSX

SEQ ID NO: 29485 - protein, 39 aa, Artificial Sequence
  GFR-binding peptide
  MOD_RES (4), (5), (39): Xaa is C or S
  MOD_RES (19), (20), (21), (22), (23): Xaa is A or G
  MOD_RES (24), (25), (26), (27): Xaa is A or G or is absent
PKAXXVPTELEPISMLYLXXXXXXXXXKFKYEEMVVEGX

SEQ ID NO: 29486 - protein, 41 aa, Artificial Sequence
  GFR-binding peptide
  MOD_RES (6), (7), (39), (41): Xaa is C or S
KASKAXXVPTKLSPISILYIDKGVVTYYKQYEGMAVSEXGX

SEQ ID NO: 29487 - protein, 32 aa, Artificial Sequence; identical to SEQ ID NO: 8185
  GFR-binding peptide
  MOD_RES (14), (15), (16), (17), (18): Xaa is A or G
  MOD_RES (19), (20), (21), (22): Xaa is A or G or is absent

SEQ ID NO: 29488 - protein, 41 aa, Artificial Sequence
  GFR-binding peptide
  MOD_RES (6), (40): Xaa is C or S
  MOD_RES (20), (21), (22), (23), (24): Xaa is A or G
  MOD_RES (25), (26), (27), (28): Xaa is A or G or is absent
VTKPTXAPTKLSPISVLYIXXXXXXXXXYKQYENMVVRSXG

SEQ ID NO: 29489 - protein, 43 aa, Artificial Sequence; identical to SEQ ID NO: 8186
  GFR-binding peptide
  MOD_RES (6), (7), (40), (42): Xaa is C or S
  MOD_RES (21), (22), (23), (24), (25): Xaa is A or G
  MOD_RES (26), (27), (28), (29): Xaa is A or G or is absent

SEQ ID NO: 29490 - protein, 39 aa, Artificial Sequence
  GFR-binding peptide
  MOD_RES (3), (4), (37), (39): Xaa is C or S
  MOD_RES (18), (19), (20), (21), (22): Xaa is A or G
  MOD_RES (23), (24), (25), (26): Xaa is A or G or is absent
APXXVPQALEPISILYLXXXXXXXXXKFKYEMIVRSXKX

SEQ ID NO: 29491 - protein, 38 aa, Artificial Sequence
  GFR-binding peptide
  MOD_RES (2), (3), (36), (38): Xaa is C or S
  MOD_RES (17), (18), (19), (20), (21): Xaa is A or G
  MOD_RES (22), (23), (24), (25): Xaa is A or G or is absent
PXXVPQALSPISILYIXXXXXXXXXYKQYEMIVRSXKX

SEQ ID NO: 29492 - protein, 35 aa, Artificial Sequence
  GFR-binding peptide
  MOD_RES (4), (5): Xaa is C or S
AAPXXVPQALEPISILYLVGRKPKVKFKYEMIVRS

SEQ ID NO: 29493 - protein, 38 aa, Artificial Sequence
  GFR-binding peptide
  MOD_RES (4), (5): Xaa is C or S
  MOD_RES (19), (20), (21), (22), (23): Xaa is A or G
  MOD_RES (24), (25), (26), (27): Xaa is A or G or is absent
PKAXXVPTELSPISMLYIXXXXXXXXXYKQYEEMVVEG

SEQ ID NO: 29494 - protein, 36 aa, Artificial Sequence; identical to SEQ ID NO: 8191
  GFR-binding peptide
  MOD_RES (33), (35): Xaa is C or S
  MOD_RES (14), (15), (16), (17), (18): Xaa is A or G
  MOD_RES (19), (20), (21), (22): Xaa is A or G or is absent

SEQ ID NO: 29495 - protein, 31 aa, Artificial Sequence
  GFR-binding peptide
  MOD_RES (1), (1): Xaa is C or S
XVSQDLEPISILYLIGKTPKIKFKYEMIVKS

SEQ ID NO: 29496 - protein, 32 aa, Artificial Sequence
  GFR-binding peptide
  MOD_RES (14), (15), (16), (17), (18): Xaa is A or G
  MOD_RES (19), (20), (21), (22): Xaa is A or G or is absent
VPTELEPISMLYLXXXXXXXXXKFKYEEMVVE

SEQ ID NO: 29497 - protein, 34 aa, Artificial Sequence
  GFR-binding peptide
  MOD_RES (4), (4): Xaa is C or S
KPTXAPTKLSPISVLYIDDSSNVIYKQYENMVVR

SEQ ID NO: 29498 - protein, 36 aa, Artificial Sequence
  GFR-binding peptide
  MOD_RES (3), (4): Xaa is C or S
  MOD_RES (18), (19), (20), (21), (22): Xaa is A or G
  MOD_RES (23), (24), (25), (26): Xaa is A or G or is absent
SPXXVPQDLEPISILYLXXXXXXXXXKFKYEMVVKS

SEQ ID NO: 29499 - protein, 33 aa, Artificial Sequence
  GFR-binding peptide
  MOD_RES (1), (2): Xaa is C or S
XXVPARLEPISILYLDAANNVVKFKYEDMVVEA

SEQ ID NO: 29500 - protein, 37 aa, Artificial Sequence
  GFR-binding peptide
  MOD_RES (5), (6): Xaa is C or S
ASKAXXVPTKLSPISILYKDKGVVTYLKYHYGMAVSE

SEQ ID NO: 29501 - protein, 34 aa, Artificial Sequence; identical to SEQ ID NO: 8193
  GFR-binding peptide
  MOD_RES (1), (32), (34): Xaa is C or S

SEQ ID NO: 29502 - protein, 37 aa, Artificial Sequence
  GFR-binding peptide
  MOD_RES (1), (2), (34), (36): Xaa is C or S
XXAPTKLEPISVLYLDDSSNVIKFKYENMVVRSXGXH

SEQ ID NO: 29503 - protein, 35 aa, Artificial Sequence
  GFR-binding peptide
  MOD_RES (1), (2): Xaa is C or S
  MOD_RES (16), (17), (18), (19), (20): Xaa is A or G
  MOD_RES (21), (22), (23), (24): Xaa is A or G or is absent
XXAPTQLSPISVLYIXXXXXXXXXYKQYENMVVRA

SEQ ID NO: 29504 - protein, 38 aa, Artificial Sequence
  GFR-binding peptide
  MOD_RES (6), (7): Xaa is C or S
AAPASXXVPARLNAISILYFDAANNVVLKKYRDMVVEA

SEQ ID NO: 29505 - protein, 41 aa, Artificial Sequence
  GFR-binding peptide
  MOD_RES (4), (5), (38), (40): Xaa is C or S
  MOD_RES (19), (20), (21), (22), (23): Xaa is A or G
  MOD_RES (24), (25), (26), (27): Xaa is A or G or is absent
ASPXXVSQDLEPISILYLXXXXXXXXXKFKYEMIVKSXKXS

SEQ ID NO: 29506 - protein, 35 aa, Artificial Sequence; identical to SEQ ID NO: 8196
  GFR-binding peptide
  MOD_RES (2), (3), (35): Xaa is C or S

SEQ ID NO: 29507 - protein, 39 aa, Artificial Sequence
  GFR-binding peptide
  MOD_RES (6), (7), (38): Xaa is C or S
ASASPXXVSQDLSPISILYIIGKTPKIYKQYEMIVKSXK

SEQ ID NO: 29508 - protein, 41 aa, Artificial Sequence
  GFR-binding peptide
  MOD_RES (6), (38), (40): Xaa is C or S
VTKPTXAPTKLSPISVLYIDDSSNVIYKQYENMVVRSXGXH

SEQ ID NO: 29509 - protein, 39 aa, Artificial Sequence
  GFR-binding peptide
  MOD_RES (3), (4), (37), (39): Xaa is C or S
  MOD_RES (18), (19), (20), (21), (22): Xaa is A or G
  MOD_RES (23), (24), (25), (26): Xaa is A or G or is absent
SPXXVSQDLEPISILYLXXXXXXXXXKFKYEMIVKSXKX

SEQ ID NO: 29510 - protein, 35 aa, Artificial Sequence
  GFR-binding peptide
  MOD_RES (1), (2), (35): Xaa is C or S
  MOD_RES (16), (17), (18), (19), (20): Xaa is A or G
  MOD_RES (21), (22), (23), (24): Xaa is A or G or is absent
XXVSQDLEPISILYLXXXXXXXXXKFKYEMIVKSX

SEQ ID NO: 29511 - protein, 38 aa, Artificial Sequence; identical to SEQ ID NO: 8199
  GFR-binding peptide
  MOD_RES (3), (4), (37): Xaa is C or S
  MOD_RES (18), (19), (20), (21), (22): Xaa is A or G
  MOD_RES (23), (24), (25), (26): Xaa is A or G or is absent

SEQ ID NO: 29512 - protein, 39 aa, Artificial Sequence
  GFR-binding peptide
  MOD_RES (6), (7), (39): Xaa is C or S
AVPKAXXAPTKLEPISVLYLDSSNNVIKFKYENMVVKAX

SEQ ID NO: 29513 - protein, 34 aa, Artificial Sequence
  GFR-binding peptide
  MOD_RES (32), (34): Xaa is C or S
APTKLSPISVLYIDDSSNVIYKQYENMVVRSXGX

SEQ ID NO: 29514 - protein, 40 aa, Artificial Sequence; identical to SEQ ID NO: 8203
  GFR-binding peptide
  MOD_RES (1), (2), (37), (39): Xaa is C or S
  MOD_RES (16), (17), (18), (19), (20): Xaa is A or G
  MOD_RES (21), (22), (23), (24): Xaa is A or G or is absent

SEQ ID NO: 29515 - protein, 42 aa, Artificial Sequence
  GFR-binding peptide
  MOD_RES (4), (5), (39), (41): Xaa is C or S
  MOD_RES (19), (20), (21), (22), (23): Xaa is A or G
  MOD_RES (24), (25), (26), (27): Xaa is A or G or is absent
PKAXXVPTELEPISMLYLXXXXXXXXXKFKYEEMVVEGXGXR

SEQ ID NO: 29516 - protein, 38 aa, Artificial Sequence
  GFR-binding peptide
  MOD_RES (4), (5), (37): Xaa is C or S
PKAXXVPTELEPISMLYLDENEKVVKFKYEDMVVEGXG

SEQ ID NO: 29517 - protein, 39 aa, Artificial Sequence; identical to SEQ ID NO: 8204
  GFR-binding peptide
  MOD_RES (5), (6), (39): Xaa is C or S
  MOD_RES (20), (21), (22), (23), (24): Xaa is A or G
  MOD_RES (25), (26), (27), (28): Xaa is A or G or is absent

SEQ ID NO: 29518 - protein, 32 aa, Artificial Sequence
  GFR-binding peptide
  MOD_RES (1), (2): Xaa is C or S
XXVPTKLNAISILYFDKGVVTYLKKYRGMAVS

SEQ ID NO: 29519 - protein, 36 aa, Artificial Sequence; identical to SEQ ID NO: 8205
  GFR-binding peptide
  MOD_RES (3), (4): Xaa is C or S
  MOD_RES (18), (19), (20), (21), (22): Xaa is A or G
  MOD_RES (23), (24), (25), (26): Xaa is A or G or is absent

SEQ ID NO: 29520 - protein, 33 aa, Artificial Sequence
  GFR-binding peptide
  MOD_RES (31), (33): Xaa is C or S
VSQDLSPISILYIIGKTPKIYKQYEMIVKSXKX

SEQ ID NO: 29521 - protein, 40 aa, Artificial Sequence
  GFR-binding peptide
  MOD_RES (5), (6), (40): Xaa is C or S
  MOD_RES (20), (21), (22), (23), (24): Xaa is A or G
  MOD_RES (25), (26), (27), (28): Xaa is A or G or is absent
VPKAXXAPTKLEPISVLYLXXXXXXXXXKFKYENMVVKAX

SEQ ID NO: 29522 - protein, 38 aa, Artificial Sequence; identical to SEQ ID NO: 8206
  GFR-binding peptide
  MOD_RES (1), (35), (37): Xaa is C or S
  MOD_RES (15), (16), (17), (18), (19): Xaa is A or G
  MOD_RES (20), (21), (22), (23): Xaa is A or G or is absent

SEQ ID NO: 29523 - protein, 34 aa, Artificial Sequence
  GFR-binding peptide
  MOD_RES (1), (2): Xaa is C or S
  MOD_RES (16), (17), (18), (19), (20): Xaa is A or G
  MOD_RES (21), (22), (23), (24): Xaa is A or G or is absent
XXVPTKLEPISILYLXXXXXXXXXKFKYEGMAVS

SEQ ID NO: 29524 - protein, 39 aa, Artificial Sequence
  GFR-binding peptide
  MOD_RES (5), (6): Xaa is C or S
  MOD_RES (20), (21), (22), (23), (24): Xaa is A or G
  MOD_RES (25), (26), (27), (28): Xaa is A or G or is absent
VPKPXXAPTKLEPISVLYLXXXXXXXXXKFKYENMVVRS

SEQ ID NO: 29525 - protein, 34 aa, Artificial Sequence
  GFR-binding peptide
  MOD_RES (1), (32), (34): Xaa is C or S
XVPQDLSPISILYIVGRTPKVYKQYEMVVKSXKX

SEQ ID NO: 29526 - protein, 42 aa, Artificial Sequence
  GFR-binding peptide
  MOD_RES (4), (5), (39), (41): Xaa is C or S
  MOD_RES (19), (20), (21), (22), (23): Xaa is A or G
  MOD_RES (24), (25), (26), (27): Xaa is A or G or is absent
SKAXXVPTKLEPISILYLXXXXXXXXXKFKYEGMAVSEXGXR

SEQ ID NO: 29527 - protein, 40 aa, Artificial Sequence; identical to SEQ ID NO: 8211
  GFR-binding peptide
  MOD_RES (5), (6), (39): Xaa is C or S
  MOD_RES (20), (21), (22), (23), (24): Xaa is A or G
  MOD_RES (25), (26), (27), (28): Xaa is A or G or is absent

SEQ ID NO: 29528 - protein, 39 aa, Artificial Sequence; identical to SEQ ID NO: 8212
  GFR-binding peptide
  MOD_RES (5), (6), (39): Xaa is C or S
  MOD_RES (20), (21), (22), (23), (24): Xaa is A or G
  MOD_RES (25), (26), (27), (28): Xaa is A or G or is absent

SEQ ID NO: 29529 - protein, 39 aa, Artificial Sequence; identical to SEQ ID NO: 8213
  GFR-binding peptide
  MOD_RES (6), (7): Xaa is C or S
  MOD_RES (21), (22), (23), (24), (25): Xaa is A or G
  MOD_RES (26), (27), (28), (29): Xaa is A or G or is absent

SEQ ID NO: 29530 - protein, 37 aa, Artificial Sequence; identical to SEQ ID NO: 8214
  GFR-binding peptide
  MOD_RES (4), (5), (36): Xaa is C or S

SEQ ID NO: 29531 - protein, 40 aa, Artificial Sequence
  GFR-binding peptide
  MOD_RES (5), (6), (37), (39): Xaa is C or S
SASPXXVSQDLEPISILYLIGKTPKIKFKYEMIVKSXKXS

SEQ ID NO: 29532 - protein, 40 aa, Artificial Sequence
  GFR-binding peptide
  MOD_RES (5), (6), (39): Xaa is C or S
  MOD_RES (20), (21), (22), (23), (24): Xaa is A or G
  MOD_RES (25), (26), (27), (28): Xaa is A or G or is absent
SASPXXVPQDLSPISILYIXXXXXXXXXYKQYEMVVKSXK

SEQ ID NO: 29533 - protein, 39 aa, Artificial Sequence
  GFR-binding peptide
  MOD_RES (3), (4), (36), (38): Xaa is C or S
KAXXAPTKLSPISVLYIDSSNNVIYKQYENMVVKAXGXH

SEQ ID NO: 29534 - protein, 41 aa, Artificial Sequence
  GFR-binding peptide
  MOD_RES (4), (5), (38), (40): Xaa is C or S
  MOD_RES (19), (20), (21), (22), (23): Xaa is A or G
  MOD_RES (24), (25), (26), (27): Xaa is A or G or is absent
AAPXXVPQALSPISILYIXXXXXXXXXYKQYEMIVRSXKXS

SEQ ID NO: 29535 - protein, 40 aa, Artificial Sequence
  GFR-binding peptide
  MOD_RES (4), (5), (39): Xaa is C or S
  MOD_RES (19), (20), (21), (22), (23): Xaa is A or G
  MOD_RES (24), (25), (26), (27): Xaa is A or G or is absent
PASXXVPARLNAISILYFXXXXXXXXXLKKYRDMVVEAXG

SEQ ID NO: 29536 - protein, 35 aa, Artificial Sequence
  GFR-binding peptide
  MOD_RES (3), (4): Xaa is C or S
KPXXAPTQLSPISVLYIDDSSNVIYKQYENMVVRA

SEQ ID NO: 29537 - protein, 35 aa, Artificial Sequence; identical to SEQ ID NO: 8219
  GFR-binding peptide
  MOD_RES (2), (3), (35): Xaa is C or S

SEQ ID NO: 29538 - protein, 41 aa, Artificial Sequence
  GFR-binding peptide
  MOD_RES (5), (6), (39), (41): Xaa is C or S
  MOD_RES (20), (21), (22), (23), (24): Xaa is A or G
  MOD_RES (25), (26), (27), (28): Xaa is A or G or is absent
SASPXXVPQDLEPISILYLXXXXXXXXXKFKYEMVVKSXKX

SEQ ID NO: 29539 - protein, 38 aa, Artificial Sequence
  GFR-binding peptide
  MOD_RES (2), (3), (37): Xaa is C or S
  MOD_RES (17), (18), (19), (20), (21): Xaa is A or G
  MOD_RES (22), (23), (24), (25): Xaa is A or G or is absent
AXXVPTKLNAISILYFXXXXXXXXXLKKYRGMAVSEXG

SEQ ID NO: 29540 - protein, 41 aa, Artificial Sequence; identical to SEQ ID NO: 8221
  GFR-binding peptide
  MOD_RES (6), (7), (39), (41): Xaa is C or S

SEQ ID NO: 29541 - protein, 40 aa, Artificial Sequence
  GFR-binding peptide
  MOD_RES (5), (6), (39): Xaa is C or S
  MOD_RES (20), (21), (22), (23), (24): Xaa is A or G
  MOD_RES (25), (26), (27), (28): Xaa is A or G or is absent
SAAPXXVPQALEPISILYLXXXXXXXXXKFKYEMIVRSXK

SEQ ID NO: 29542 - protein, 36 aa, Artificial Sequence
  GFR-binding peptide
  MOD_RES (2), (3): Xaa is C or S
  MOD_RES (17), (18), (19), (20), (21): Xaa is A or G
  MOD_RES (22), (23), (24), (25): Xaa is A or G or is absent
SXXVPARLSPISILYKXXXXXXXXXLKYHYDMVVEA

SEQ ID NO: 29543 - protein, 42 aa, Artificial Sequence; identical to SEQ ID NO: 8224
  GFR-binding peptide
  MOD_RES (6), (7), (40), (42): Xaa is C or S
  MOD_RES (21), (22), (23), (24), (25): Xaa is A or G
  MOD_RES (26), (27), (28), (29): Xaa is A or G or is absent

SEQ ID NO: 29544 - protein, 41 aa, Artificial Sequence
  GFR-binding peptide
  MOD_RES (6), (7), (41): Xaa is C or S
  MOD_RES (21), (22), (23), (24), (25): Xaa is A or G
  MOD_RES (26), (27), (28), (29): Xaa is A or G or is absent
TVPKPXXAPTQLSPISVLYIXXXXXXXXXYKQYENMVVRAX

SEQ ID NO: 29545 - protein, 34 aa, Artificial Sequence
  GFR-binding peptide
  MOD_RES (2), (3): Xaa is C or S
PXXAPTKLEPISVLYLDDSSNVIKFKYENMVVRS

SEQ ID NO: 29546 - protein, 37 aa, Artificial Sequence
  GFR-binding peptide
  MOD_RES (34), (36): Xaa is C or S
  MOD_RES (14), (15), (16), (17), (18): Xaa is A or G
  MOD_RES (19), (20), (21), (22): Xaa is A or G or is absent
VPTELSPISMLYIXXXXXXXXXYKQYEEMVVEGXGXR

SEQ ID NO: 29547 - protein, 37 aa, Artificial Sequence; identical to SEQ ID NO: 8227
  GFR-binding peptide
  MOD_RES (3), (4), (36): Xaa is C or S

SEQ ID NO: 29548 - protein, 37 aa, Artificial Sequence
  GFR-binding peptide
  MOD_RES (1), (2), (36): Xaa is C or S
  MOD_RES (16), (17), (18), (19), (20): Xaa is A or G
  MOD_RES (21), (22), (23), (24): Xaa is A or G or is absent
XXVPTELSPISMLYIXXXXXXXXXYKQYEEMVVEGXG

SEQ ID NO: 29549 - protein, 39 aa, Artificial Sequence; identical to SEQ ID NO: 8228
  GFR-binding peptide
  MOD_RES (5), (6): Xaa is C or S
  MOD_RES (20), (21), (22), (23), (24): Xaa is A or G
  MOD_RES (25), (26), (27), (28): Xaa is A or G or is absent

SEQ ID NO: 29550 - protein, 38 aa, Artificial Sequence
  GFR-binding peptide
  MOD_RES (6), (7), (38): Xaa is C or S
ASASPXXVPQDLEPISILYLVGRTPKVKFKYEMVVKSX

SEQ ID NO: 29551 - protein, 34 aa, Artificial Sequence; identical to SEQ ID NO: 8229
  GFR-binding peptide
  MOD_RES (33), (33): Xaa is C or S
  MOD_RES (14), (15), (16), (17), (18): Xaa is A or G
  MOD_RES (19), (20), (21), (22): Xaa is A or G or is absent

SEQ ID NO: 29552 - protein, 37 aa, Artificial Sequence
  GFR-binding peptide
  MOD_RES (5), (6): Xaa is C or S
ASKAXXVPTKLSPISILYIDKGVVTYYKQYEGMAVSE

SEQ ID NO: 29553 - protein, 40 aa, Artificial Sequence
  GFR-binding peptide
  MOD_RES (4), (5), (37), (39): Xaa is C or S
PKAXXVPTELEPISMLYLDENEKVVKFKYEDMVVEGXGXR

SEQ ID NO: 29554 - protein, 39 aa, Artificial Sequence
  GFR-binding peptide
  MOD_RES (5), (6), (39): Xaa is C or S
  MOD_RES (20), (21), (22), (23), (24): Xaa is A or G
  MOD_RES (25), (26), (27), (28): Xaa is A or G or is absent
SAAPXXVPQALSPISILYIXXXXXXXXXYKQYEMIVRSX

SEQ ID NO: 29555 - protein, 38 aa, Artificial Sequence
  GFR-binding peptide
  MOD_RES (1), (2), (36), (38): Xaa is C or S
  MOD_RES (16), (17), (18), (19), (20): Xaa is A or G
  MOD_RES (21), (22), (23), (24): Xaa is A or G or is absent
XXAPTKLSPISVLYIXXXXXXXXXYKQYENMVVRSXGX

SEQ ID NO: 29556 - protein, 35 aa, Artificial Sequence
  GFR-binding peptide
  MOD_RES (2), (3), (34): Xaa is C or S
PXXVPQDLSPISILYIVGRTPKVYKQYEMVVKSXK

SEQ ID NO: 29557 - protein, 41 aa, Artificial Sequence
  GFR-binding peptide
  MOD_RES (7), (41): Xaa is C or S
  MOD_RES (21), (22), (23), (24), (25): Xaa is A or G
  MOD_RES (26), (27), (28), (29): Xaa is A or G or is absent
HVTKPTXAPTKLSPISVLYIXXXXXXXXXYKQYENMVVRSX

SEQ ID NO: 29558 - protein, 35 aa, Artificial Sequence; identical to SEQ ID NO: 8240
  GFR-binding peptide
  MOD_RES (1), (2): Xaa is C or S
  MOD_RES (16), (17), (18), (19), (20): Xaa is A or G
  MOD_RES (21), (22), (23), (24): Xaa is A or G or is absent

SEQ ID NO: 29559 - protein, 41 aa, Artificial Sequence
  GFR-binding peptide
  MOD_RES (4), (5), (39), (41): Xaa is C or S
  MOD_RES (19), (20), (21), (22), (23): Xaa is A or G
  MOD_RES (24), (25), (26), (27): Xaa is A or G or is absent
PKAXXAPTKLEPISVLYLXXXXXXXXXKFKYENMVVKAXGX

SEQ ID NO: 29560 - protein, 38 aa, Artificial Sequence
  GFR-binding peptide
  MOD_RES (1), (35), (37): Xaa is C or S
  MOD_RES (15), (16), (17), (18), (19): Xaa is A or G
  MOD_RES (20), (21), (22), (23): Xaa is A or G or is absent
XVPTELSPISMLYIXXXXXXXXXYKQYEEMVVEGXGXR

SEQ ID NO: 29561 - protein, 37 aa, Artificial Sequence
  GFR-binding peptide
  MOD_RES (1), (34), (36): Xaa is C or S
  MOD_RES (15), (16), (17), (18), (19): Xaa is A or G
  MOD_RES (20), (21), (22), (23): Xaa is A or G or is absent
XVPQALSPISILYIXXXXXXXXXYKQYEMIVRSXKXS

SEQ ID NO: 29562 - protein, 35 aa, Artificial Sequence
  GFR-binding peptide
  MOD_RES (1), (2), (34): Xaa is C or S
XXAPTQLSPISVLYIDDSSNVIYKQYENMVVRAXG

SEQ ID NO: 29563 - protein, 39 aa, Artificial Sequence; identical to SEQ ID NO: 8241
  GFR-binding peptide
  MOD_RES (3), (4), (38): Xaa is C or S
  MOD_RES (18), (19), (20), (21), (22): Xaa is A or G
  MOD_RES (23), (24), (25), (26): Xaa is A or G or is absent

SEQ ID NO: 29564 - protein, 34 aa, Artificial Sequence
  GFR-binding peptide
  MOD_RES (1), (2), (34): Xaa is C or S
XXAPTKLSPISVLYIDSSNNVIYKQYENMVVKAX

SEQ ID NO: 29565 - protein, 36 aa, Artificial Sequence
  GFR-binding peptide
  MOD_RES (34), (36): Xaa is C or S
  MOD_RES (14), (15), (16), (17), (18): Xaa is A or G
  MOD_RES (19), (20), (21), (22): Xaa is A or G or is absent
APTKLEPISVLYLXXXXXXXXXKFKYENMVVKAXGX

SEQ ID NO: 29566 - protein, 36 aa, Artificial Sequence
  GFR-binding peptide
  MOD_RES (1), (35): Xaa is C or S
  MOD_RES (15), (16), (17), (18), (19): Xaa is A or G
  MOD_RES (20), (21), (22), (23): Xaa is A or G or is absent
XAPTKLSPISVLYIXXXXXXXXXYKQYENMVVKAXG

SEQ ID NO: 29567 - protein, 35 aa, Artificial Sequence; identical to SEQ ID NO: 8249
  GFR-binding peptide
  MOD_RES (2), (3): Xaa is C or S
  MOD_RES (17), (18), (19), (20), (21): Xaa is A or G
  MOD_RES (22), (23), (24), (25): Xaa is A or G or is absent

SEQ ID NO: 29568 - protein, 38 aa, Artificial Sequence
  GFR-binding peptide
  MOD_RES (4), (38): Xaa is C or S
  MOD_RES (18), (19), (20), (21), (22): Xaa is A or G
  MOD_RES (23), (24), (25), (26): Xaa is A or G or is absent
KPTXAPTKLSPISVLYIXXXXXXXXXYKQYENMVVRSX

SEQ ID NO: 29569 - protein, 37 aa, Artificial Sequence; identical to SEQ ID NO: 8253
  GFR-binding peptide
  MOD_RES (1), (35), (37): Xaa is C or S
  MOD_RES (15), (16), (17), (18), (19): Xaa is A or G
  MOD_RES (20), (21), (22), (23): Xaa is A or G or is absent

SEQ ID NO: 29570 - protein, 36 aa, Artificial Sequence
  GFR-binding peptide
  MOD_RES (1), (35): Xaa is C or S
  MOD_RES (15), (16), (17), (18), (19): Xaa is A or G
  MOD_RES (20), (21), (22), (23): Xaa is A or G or is absent
XVPTELEPISMLYLXXXXXXXXXKFKYEDMVVEGXG

SEQ ID NO: 29571 - protein, 34 aa, Artificial Sequence
  GFR-binding peptide
  MOD_RES (1), (1): Xaa is C or S
  MOD_RES (15), (16), (17), (18), (19): Xaa is A or G
  MOD_RES (20), (21), (22), (23): Xaa is A or G or is absent
XAPTQLSPISVLYIXXXXXXXXXYKQYENMVVRA

SEQ ID NO: 29572 - protein, 36 aa, Artificial Sequence
  GFR-binding peptide
  MOD_RES (5), (6): Xaa is C or S
VPKPXXAPTQLEPISVLYLDDSSNVIKFKYENMVVR

SEQ ID NO: 29573 - protein, 38 aa, Artificial Sequence; identical to SEQ ID NO: 8254
  GFR-binding peptide
  MOD_RES (2), (3), (35), (37): Xaa is C or S

SEQ ID NO: 29574 - protein, 39 aa, Artificial Sequence
  GFR-binding peptide
  MOD_RES (6), (7): Xaa is C or S
  MOD_RES (21), (22), (23), (24), (25): Xaa is A or G
  MOD_RES (26), (27), (28), (29): Xaa is A or G or is absent
AVPKAXXAPTKLSPISVLYIXXXXXXXXXYKQYENMVVK

SEQ ID NO: 29575 - protein, 36 aa, Artificial Sequence
  GFR-binding peptide
  MOD_RES (4), (36): Xaa is C or S
KPTXAPTKLEPISVLYLDDSSNVIKFKYENMVVRSX

SEQ ID NO: 29576 - protein, 35 aa, Artificial Sequence
  GFR-binding peptide
  MOD_RES (1), (1): Xaa is C or S
  MOD_RES (15), (16), (17), (18), (19): Xaa is A or G
  MOD_RES (20), (21), (22), (23): Xaa is A or G or is absent
XVPTKLEPISVLYLXXXXXXXXXKFKYEEGMSVAE

SEQ ID NO: 29577 - protein, 39 aa, Artificial Sequence
  GFR-binding peptide
  MOD_RES (2), (3), (36), (38): Xaa is C or S
  MOD_RES (17), (18), (19), (20), (21): Xaa is A or G
  MOD_RES (22), (23), (24), (25): Xaa is A or G or is absent
PXXVPQDLEPISILYLXXXXXXXXXKFKYEMVVKSXKXS

SEQ ID NO: 29578 - protein, 41 aa, Artificial Sequence
  GFR-binding peptide
  MOD_RES (5), (39), (41): Xaa is C or S
  MOD_RES (19), (20), (21), (22), (23): Xaa is A or G
  MOD_RES (24), (25), (26), (27): Xaa is A or G or is absent
TKPTXAPTKLEPISVLYLXXXXXXXXXKFKYENMVVRSXGX

SEQ ID NO: 29579 - protein, 38 aa, Artificial Sequence
  GFR-binding peptide
  MOD_RES (5), (6), (38): Xaa is C or S
APASXXVPARLEPISILYLDAANNVVKFKYEDMVVEAX

SEQ ID NO: 29580 - protein, 39 aa, Artificial Sequence; identical to SEQ ID NO: 8258
  GFR-binding peptide
  MOD_RES (4), (5), (39): Xaa is C or S
  MOD_RES (19), (20), (21), (22), (23): Xaa is A or G
  MOD_RES (24), (25), (26), (27): Xaa is A or G or is absent

SEQ ID NO: 29581 - protein, 39 aa, Artificial Sequence
  GFR-binding peptide
  MOD_RES (6), (7): Xaa is C or S
  MOD_RES (21), (22), (23), (24), (25): Xaa is A or G
  MOD_RES (26), (27), (28), (29): Xaa is A or G or is absent
KIPKAXXVPTELSPISMLYIXXXXXXXXXYKQYEDMVVE

SEQ ID NO: 29582 - protein, 38 aa, Artificial Sequence
  GFR-binding peptide
  MOD_RES (3), (4), (36), (38): Xaa is C or S
KAXXAPTKLEPISVLYLDSSNNVIKFKYENMVVKAXGX

SEQ ID NO: 29583 - protein, 36 aa, Artificial Sequence
  GFR-binding peptide
  MOD_RES (3), (4), (35): Xaa is C or S
SPXXVPQDLSPISILYIVGRTPKVYKQYEMVVKSXK

SEQ ID NO: 29584 - protein, 35 aa, Artificial Sequence; identical to SEQ ID NO: 8261
  GFR-binding peptide
  MOD_RES (32), (34): Xaa is C or S

SEQ ID NO: 29585 - protein, 34 aa, Artificial Sequence; identical to SEQ ID NO: 8262
  GFR-binding peptide
  MOD_RES (1), (2), (33): Xaa is C or S

SEQ ID NO: 29586 - protein, 34 aa, Artificial Sequence; identical to SEQ ID NO: 8263
  GFR-binding peptide
  MOD_RES (2), (3): Xaa is C or S

SEQ ID NO: 29587 - protein, 34 aa, Artificial Sequence; identical to SEQ ID NO: 8264
  GFR-binding peptide
  MOD_RES (1), (33): Xaa is C or S

SEQ ID NO: 29588 - protein, 37 aa, Artificial Sequence
  GFR-binding peptide
  MOD_RES (1), (2), (34), (36): Xaa is C or S
XXVPARLNAISILYFDAANNVVLKKYRDMVVEAXGXR

SEQ ID NO: 29589 - protein, 38 aa, Artificial Sequence
  GFR-binding peptide
  MOD_RES (2), (3), (35), (37): Xaa is C or S
AXXAPTKLEPISVLYLDSSNNVIKFKYENMVVKAXGXH

SEQ ID NO: 29590 - protein, 34 aa, Artificial Sequence
  GFR-binding peptide
  MOD_RES (2), (3): Xaa is C or S
AXXAPTKLSPISVLYIDSSNNVIYKQYENMVVKA

SEQ ID NO: 29591 - protein, 36 aa, Artificial Sequence
  GFR-binding peptide
  MOD_RES (4), (5), (36): Xaa is C or S
ASPXXVSQDLSPISILYIIGKTPKIYKQYEMIVKSX

SEQ ID NO: 29592 - protein, 38 aa, Artificial Sequence
  GFR-binding peptide
  MOD_RES (1), (2), (36), (38): Xaa is C or S
  MOD_RES (16), (17), (18), (19), (20): Xaa is A or G
  MOD_RES (21), (22), (23), (24): Xaa is A or G or is absent
XXVPTKLEPISILYLXXXXXXXXXKFKYEGMAVSEXGX

SEQ ID NO: 29593 - protein, 33 aa, Artificial Sequence
  GFR-binding peptide
  MOD_RES (14), (15), (16), (17), (18): Xaa is A or G
  MOD_RES (19), (20), (21), (22): Xaa is A or G or is absent
VPARLSPISILYKXXXXXXXXXLKYHYDMVVEA

SEQ ID NO: 29594 - protein, 37 aa, Artificial Sequence
  GFR-binding peptide
  MOD_RES (1), (2), (34), (36): Xaa is C or S
XXAPTKLSPISVLYIDDSSNVIYKQYENMVVRSXGXH

SEQ ID NO: 29595 - protein, 39 aa, Artificial Sequence
  GFR-binding peptide
  MOD_RES (4), (5), (37), (39): Xaa is C or S
PASXXVPARLNAISILYFDAANNVVLKKYRDMVVEAXGX

SEQ ID NO: 29596 - protein, 34 aa, Artificial Sequence; identical to SEQ ID NO: 8274
  GFR-binding peptide
  MOD_RES (3), (4): Xaa is C or S

SEQ ID NO: 29597 - protein, 40 aa, Artificial Sequence; identical to SEQ ID NO: 8275
  GFR-binding peptide
  MOD_RES (6), (7): Xaa is C or S
  MOD_RES (21), (22), (23), (24), (25): Xaa is A or G
  MOD_RES (26), (27), (28), (29): Xaa is A or G or is absent

SEQ ID NO: 29598 - protein, 36 aa, Artificial Sequence
  GFR-binding peptide
  MOD_RES (2), (3): Xaa is C or S
  MOD_RES (17), (18), (19), (20), (21): Xaa is A or G
  MOD_RES (22), (23), (24), (25): Xaa is A or G or is absent
AXXVPTKLSPISILYIXXXXXXXXXYKQYEGMAVSE

SEQ ID NO: 29599 - protein, 36 aa, Artificial Sequence
  GFR-binding peptide
  MOD_RES (1), (2), (36): Xaa is C or S
  MOD_RES (16), (17), (18), (19), (20): Xaa is A or G
  MOD_RES (21), (22), (23), (24): Xaa is A or G or is absent
XXVPARLSPISILYIXXXXXXXXXYKQYEDMVVEAX

SEQ ID NO: 29600 - protein, 35 aa, Artificial Sequence; identical to SEQ ID NO: 8278
  GFR-binding peptide
  MOD_RES (34), (34): Xaa is C or S
  MOD_RES (14), (15), (16), (17), (18): Xaa is A or G
  MOD_RES (19), (20), (21), (22): Xaa is A or G or is absent

SEQ ID NO: 29601 - protein, 37 aa, Artificial Sequence
  GFR-binding peptide
  MOD_RES (4), (5): Xaa is C or S
GKAXXVPTKLSPISVLYIDDMGVPTYKQYEEGMSVAE

SEQ ID NO: 29602 - protein, 42 aa, Artificial Sequence
  GFR-binding peptide
  MOD_RES (5), (6), (40), (42): Xaa is C or S
  MOD_RES (20), (21), (22), (23), (24): Xaa is A or G
  MOD_RES (25), (26), (27), (28): Xaa is A or G or is absent
VPKAXXAPTKLSPISVLYIXXXXXXXXXYKQYENMVVKAXGX

SEQ ID NO: 29603 - protein, 41 aa, Artificial Sequence
  GFR-binding peptide
  MOD_RES (6), (7), (41): Xaa is C or S
  MOD_RES (21), (22), (23), (24), (25): Xaa is A or G
  MOD_RES (26), (27), (28), (29): Xaa is A or G or is absent
AVPKAXXAPTKLEPISVLYLXXXXXXXXXKFKYENMVVKAX

SEQ ID NO: 29604 - protein, 37 aa, Artificial Sequence; identical to SEQ ID NO: 8282
  GFR-binding peptide
  MOD_RES (2), (3), (37): Xaa is C or S
  MOD_RES (17), (18), (19), (20), (21): Xaa is A or G
  MOD_RES (22), (23), (24), (25): Xaa is A or G or is absent

SEQ ID NO: 29605 - protein, 40 aa, Artificial Sequence
  GFR-binding peptide
  MOD_RES (5), (6), (40): Xaa is C or S
  MOD_RES (20), (21), (22), (23), (24): Xaa is A or G
  MOD_RES (25), (26), (27), (28): Xaa is A or G or is absent
VPKAXXAPTKLSPISVLYIXXXXXXXXXYKQYENMVVKAX

SEQ ID NO: 29606 - protein, 38 aa, Artificial Sequence; identical to SEQ ID NO: 8286
  GFR-binding peptide
  MOD_RES (2), (3), (36), (38): Xaa is C or S
  MOD_RES (17), (18), (19), (20), (21): Xaa is A or G
  MOD_RES (22), (23), (24), (25): Xaa is A or G or is absent

SEQ ID NO: 29607 - protein, 39 aa, Artificial Sequence
  GFR-binding peptide
  MOD_RES (4), (5), (39): Xaa is C or S
  MOD_RES (19), (20), (21), (22), (23): Xaa is A or G
  MOD_RES (24), (25), (26), (27): Xaa is A or G or is absent
PKPXXAPTKLEPISVLYLXXXXXXXXXKFKYENMVVRSX

SEQ ID NO: 29608 - protein, 39 aa, Artificial Sequence; identical to SEQ ID NO: 8290
  GFR-binding peptide
  MOD_RES (4), (5), (37), (39): Xaa is C or S

SEQ ID NO: 29609 - protein, 34 aa, Artificial Sequence
  GFR-binding peptide
  MOD_RES (1), (2): Xaa is C or S
  MOD_RES (16), (17), (18), (19), (20): Xaa is A or G
  MOD_RES (21), (22), (23), (24): Xaa is A or G or is absent
XXAPTQLSPISVLYIXXXXXXXXXYKQYENMVVR

SEQ ID NO: 29610 - protein, 37 aa, Artificial Sequence; identical to SEQ ID NO: 8292
  GFR-binding peptide
  MOD_RES (34), (36): Xaa is C or S
  MOD_RES (14), (15), (16), (17), (18): Xaa is A or G
  MOD_RES (19), (20), (21), (22): Xaa is A or G or is absent

SEQ ID NO: 29611 - protein, 36 aa, Artificial Sequence
  GFR-binding peptide
  MOD_RES (3), (4): Xaa is C or S
  MOD_RES (18), (19), (20), (21), (22): Xaa is A or G
  MOD_RES (23), (24), (25), (26): Xaa is A or G or is absent
KAXXAPTKLEPISVLYLXXXXXXXXXKFKYENMVVK

SEQ ID NO: 29612 - protein, 33 aa, Artificial Sequence
  GFR-binding peptide
  MOD_RES (31), (33): Xaa is C or S
VPQDLSPISILYIVGRTPKVYKQYEMVVKSXKX

SEQ ID NO: 29613 - protein, 41 aa, Artificial Sequence; identical to SEQ ID NO: 8295
  GFR-binding peptide
  MOD_RES (6), (7), (39), (41): Xaa is C or S

SEQ ID NO: 29614 - protein, 36 aa, Artificial Sequence
  GFR-binding peptide
  MOD_RES (5), (6): Xaa is C or S
ASKAXXVPTKLSPISILYKDKGVVTYLKYHYGMAVS

SEQ ID NO: 29615 - protein, 38 aa, Artificial Sequence; identical to SEQ ID NO: 8299
  GFR-binding peptide
  MOD_RES (6), (7): Xaa is C or S

SEQ ID NO: 29616 - protein, 38 aa, Artificial Sequence
  GFR-binding peptide
  MOD_RES (5), (6), (38): Xaa is C or S
VPKPXXAPTQLEPISVLYLDDSSNVIKFKYENMVVRAX

SEQ ID NO: 29617 - protein, 37 aa, Artificial Sequence
  GFR-binding peptide
  MOD_RES (5), (6): Xaa is C or S
IPKAXXVPTELEPISMLYLDEYDKVVKFKYEEMVVEG

SEQ ID NO: 29618 - protein, 42 aa, Artificial Sequence
  GFR-binding peptide
  MOD_RES (4), (5), (39), (41): Xaa is C or S
  MOD_RES (19), (20), (21), (22), (23): Xaa is A or G
  MOD_RES (24), (25), (26), (27): Xaa is A or G or is absent
SKAXXVPTKLNAISILYFXXXXXXXXXLKKYRGMAVSEXGXR

SEQ ID NO: 29619 - protein, 41 aa, Artificial Sequence
  GFR-binding peptide
  MOD_RES (5), (6), (38), (40): Xaa is C or S
IPKAXXVPTELEPISMLYLDENEKVVKFKYEDMVVEGXGXR

SEQ ID NO: 29620 - protein, 34 aa, Artificial Sequence
  GFR-binding peptide
  MOD_RES (1), (1): Xaa is C or S
  MOD_RES (15), (16), (17), (18), (19): Xaa is A or G
  MOD_RES (20), (21), (22), (23): Xaa is A or G or is absent
XVPARLNAISILYFXXXXXXXXXLKKYRDMVVEA

SEQ ID NO: 29621 - protein, 35 aa, Artificial Sequence
  GFR-binding peptide
  MOD_RES (3), (4), (35): Xaa is C or S
SPXXVSQDLSPISILYIIGKTPKIYKQYEMIVKSX

SEQ ID NO: 29622 - protein, 43 aa, Artificial Sequence
  GFR-binding peptide
  MOD_RES (6), (7), (40), (42): Xaa is C or S
KVGKAXXVPTKLSPISVLYIDDMGVPTYKQYEEGMSVAEXGXR

SEQ ID NO: 29623 - protein, 38 aa, Artificial Sequence
  GFR-binding peptide
  MOD_RES (35), (37): Xaa is C or S
  MOD_RES (14), (15), (16), (17), (18): Xaa is A or G
  MOD_RES (19), (20), (21), (22): Xaa is A or G or is absent
VPTKLSPISVLYIXXXXXXXXXYKQYEEGMSVAEXGXR

SEQ ID NO: 29624 - protein, 39 aa, Artificial Sequence
  GFR-binding peptide
  MOD_RES (2), (3), (37), (39): Xaa is C or S
  MOD_RES (17), (18), (19), (20), (21): Xaa is A or G
  MOD_RES (22), (23), (24), (25): Xaa is A or G or is absent
AXXAPTKLSPISVLYIXXXXXXXXXYKQYENMVVKAXGX

SEQ ID NO: 29625 - protein, 36 aa, Artificial Sequence
  GFR-binding peptide
  MOD_RES (1), (2), (36): Xaa is C or S
  MOD_RES (16), (17), (18), (19), (20): Xaa is A or G
  MOD_RES (21), (22), (23), (24): Xaa is A or G or is absent
XXVPARLSPISILYKXXXXXXXXXLKYHYDMVVEAX

SEQ ID NO: 29626 - protein, 35 aa, Artificial Sequence; identical to SEQ ID NO: 8308
  GFR-binding peptide
  MOD_RES (1), (34): Xaa is C or S
  MOD_RES (15), (16), (17), (18), (19): Xaa is A or G
  MOD_RES (20), (21), (22), (23): Xaa is A or G or is absent

SEQ ID NO: 29627 - protein, 43 aa, Artificial Sequence
  GFR-binding peptide
  MOD_RES (6), (40), (42): Xaa is C or S
  MOD_RES (20), (21), (22), (23), (24): Xaa is A or G
  MOD_RES (25), (26), (27), (28): Xaa is A or G or is absent
VTKPTXAPTKLSPISVLYIXXXXXXXXXYKQYENMVVRSXGXH

SEQ ID NO: 29628 - protein, 32 aa, Artificial Sequence
  GFR-binding peptide
  MOD_RES (32), (32): Xaa is C or S
VPARLEPISILYLDAANNVVKFKYEDMVVEAX

SEQ ID NO: 29629 - protein, 37 aa, Artificial Sequence; identical to SEQ ID NO: 8309
  GFR-binding peptide
  MOD_RES (2), (3), (37): Xaa is C or S
  MOD_RES (17), (18), (19), (20), (21): Xaa is A or G
  MOD_RES (22), (23), (24), (25): Xaa is A or G or is absent

SEQ ID NO: 29630 - protein, 41 aa, Artificial Sequence
  GFR-binding peptide
  MOD_RES (5), (6), (40): Xaa is C or S
  MOD_RES (20), (21), (22), (23), (24): Xaa is A or G
  MOD_RES (25), (26), (27), (28): Xaa is A or G or is absent
APASXXVPARLSPISILYIXXXXXXXXXYKQYEDMVVEAXG

SEQ ID NO: 29631 - protein, 39 aa, Artificial Sequence
  GFR-binding peptide
  MOD_RES (5), (6), (38): Xaa is C or S
IPKAXXVPTELSPISMLYIDENEKVVYKQYEDMVVEGXG

SEQ ID NO: 29632 - protein, 40 aa, Artificial Sequence
  GFR-binding peptide
  MOD_RES (4), (5), (38), (40): Xaa is C or S
  MOD_RES (19), (20), (21), (22), (23): Xaa is A or G
  MOD_RES (24), (25), (26), (27): Xaa is A or G or is absent
AAPXXVPQALEPISILYLXXXXXXXXXKFKYEMIVRSXKX

SEQ ID NO: 29633 - protein, 37 aa, Artificial Sequence; identical to SEQ ID NO: 8314
  GFR-binding peptide
  MOD_RES (2), (3), (37): Xaa is C or S
  MOD_RES (17), (18), (19), (20), (21): Xaa is A or G
  MOD_RES (22), (23), (24), (25): Xaa is A or G or is absent

SEQ ID NO: 29634 - protein, 33 aa, Artificial Sequence
  GFR-binding peptide
  MOD_RES (14), (15), (16), (17), (18): Xaa is A or G
  MOD_RES (19), (20), (21), (22): Xaa is A or G or is absent
VPTKLSPISILYKXXXXXXXXXLKYHYGMAVSE

SEQ ID NO: 29635 - protein, 38 aa, Artificial Sequence
  GFR-binding peptide
  MOD_RES (2), (3), (37): Xaa is C or S
  MOD_RES (17), (18), (19), (20), (21): Xaa is A or G
  MOD_RES (22), (23), (24), (25): Xaa is A or G or is absent
PXXAPTQLEPISVLYLXXXXXXXXXKFKYENMVVRAXG

SEQ ID NO: 29636 - protein, 36 aa, Artificial Sequence; identical to SEQ ID NO: 8317
  GFR-binding peptide
  MOD_RES (3), (4): Xaa is C or S
  MOD_RES (18), (19), (20), (21), (22): Xaa is A or G
  MOD_RES (23), (24), (25), (26): Xaa is A or G or is absent

SEQ ID NO: 29637 - protein, 40 aa, Artificial Sequence
  GFR-binding peptide
  MOD_RES (6), (7), (40): Xaa is C or S
  MOD_RES (21), (22), (23), (24), (25): Xaa is A or G
  MOD_RES (26), (27), (28), (29): Xaa is A or G or is absent
ASASPXXVSQDLEPISILYLXXXXXXXXXKFKYEMIVKSX

SEQ ID NO: 29638 - protein, 41 aa, Artificial Sequence
  GFR-binding peptide
  MOD_RES (6), (7), (40): Xaa is C or S
  MOD_RES (21), (22), (23), (24), (25): Xaa is A or G
  MOD_RES (26), (27), (28), (29): Xaa is A or G or is absent
ASASPXXVSQDLSPISILYIXXXXXXXXXYKQYEMIVKSXK

SEQ ID NO: 29639 - protein, 40 aa, Artificial Sequence
  GFR-binding peptide
  MOD_RES (6), (7), (39): Xaa is C or S
AAPASXXVPARLSPISILYKDAANNVVLKYHYDMVVEAXG

SEQ ID NO: 29640 - protein, 37 aa, Artificial Sequence
  GFR-binding peptide
  MOD_RES (1), (34), (36): Xaa is C or S
  MOD_RES (15), (16), (17), (18), (19): Xaa is A or G
  MOD_RES (20), (21), (22), (23): Xaa is A or G or is absent
XVPQDLSPISILYIXXXXXXXXXYKQYEMVVKSXKXS

SEQ ID NO: 29641 - protein, 34 aa, Artificial Sequence; identical to SEQ ID NO: 8320
  GFR-binding peptide
  MOD_RES (1), (32), (34): Xaa is C or S

SEQ ID NO: 29642 - protein, 38 aa, Artificial Sequence; identical to SEQ ID NO: 8321
  GFR-binding peptide
  MOD_RES (3), (4), (38): Xaa is C or S
  MOD_RES (18), (19), (20), (21), (22): Xaa is A or G
  MOD_RES (23), (24), (25), (26): Xaa is A or G or is absent

SEQ ID NO: 29643 - protein, 37 aa, Artificial Sequence
  GFR-binding peptide
  MOD_RES (3), (4): Xaa is C or S
  MOD_RES (18), (19), (20), (21), (22): Xaa is A or G
  MOD_RES (23), (24), (25), (26): Xaa is A or G or is absent
KAXXVPTELSPISMLYIXXXXXXXXXYKQYEDMVVEG

SEQ ID NO: 29644 - protein, 36 aa, Artificial Sequence; identical to SEQ ID NO: 8325
  GFR-binding peptide
  MOD_RES (1), (2), (33), (35): Xaa is C or S

SEQ ID NO: 29645 - protein, 34 aa, Artificial Sequence; identical to SEQ ID NO: 8327
  GFR-binding peptide
  MOD_RES (3), (4): Xaa is C or S

SEQ ID NO: 29646 - protein, 40 aa, Artificial Sequence
  GFR-binding peptide
  MOD_RES (3), (4), (37), (39): Xaa is C or S
  MOD_RES (18), (19), (20), (21), (22): Xaa is A or G
  MOD_RES (23), (24), (25), (26): Xaa is A or G or is absent
SPXXVSQDLSPISILYIXXXXXXXXXYKQYEMIVKSXKXS

SEQ ID NO: 29647 - protein, 37 aa, Artificial Sequence
  GFR-binding peptide
  MOD_RES (2), (3), (37): Xaa is C or S
  MOD_RES (17), (18), (19), (20), (21): Xaa is A or G
  MOD_RES (22), (23), (24), (25): Xaa is A or G or is absent
PXXAPTQLSPISVLYIXXXXXXXXXYKQYENMVVRAX

SEQ ID NO: 29648 - protein, 34 aa, Artificial Sequence
  GFR-binding peptide
  MOD_RES (31), (33): Xaa is C or S
VSQDLEPISILYLIGKTPKIKFKYEMIVKSXKXS

SEQ ID NO: 29649 - protein, 35 aa, Artificial Sequence
  GFR-binding peptide
  MOD_RES (1), (2), (34): Xaa is C or S
XXAPTKLEPISVLYLDDSSNVIKFKYENMVVRSXG

SEQ ID NO: 29650 - protein, 37 aa, Artificial Sequence
  GFR-binding peptide
  MOD_RES (3), (4), (37): Xaa is C or S
  MOD_RES (18), (19), (20), (21), (22): Xaa is A or G
  MOD_RES (23), (24), (25), (26): Xaa is A or G or is absent
SPXXVPQDLSPISILYIXXXXXXXXXYKQYEMVVKSX

SEQ ID NO: 29651 - protein, 43 aa, Artificial Sequence; identical to SEQ ID NO: 8332
  GFR-binding peptide
  MOD_RES (7), (41), (43): Xaa is C or S
  MOD_RES (21), (22), (23), (24), (25): Xaa is A or G
  MOD_RES (26), (27), (28), (29): Xaa is A or G or is absent

SEQ ID NO: 29652 - protein, 37 aa, Artificial Sequence
  GFR-binding peptide
  MOD_RES (34), (36): Xaa is C or S
  MOD_RES (14), (15), (16), (17), (18): Xaa is A or G
  MOD_RES (19), (20), (21), (22): Xaa is A or G or is absent
VPTKLNAISILYFXXXXXXXXXLKKYRGMAVSEXGXR

SEQ ID NO: 29653 - protein, 36 aa, Artificial Sequence
  GFR-binding peptide
  MOD_RES (1), (33), (35): Xaa is C or S
XAPTKLEPISVLYLDDSSNVIKFKYENMVVRSXGXH

SEQ ID NO: 29654 - protein, 35 aa, Artificial Sequence
  GFR-binding peptide
  MOD_RES (34), (34): Xaa is C or S
  MOD_RES (14), (15), (16), (17), (18): Xaa is A or G
  MOD_RES (19), (20), (21), (22): Xaa is A or G or is absent
APTKLSPISVLYIXXXXXXXXXYKQYENMVVKAXG

SEQ ID NO: 29655 - protein, 40 aa, Artificial Sequence; identical to SEQ ID NO: 8335
  GFR-binding peptide
  MOD_RES (5), (6), (40): Xaa is C or S
  MOD_RES (20), (21), (22), (23), (24): Xaa is A or G
  MOD_RES (25), (26), (27), (28): Xaa is A or G or is absent

SEQ ID NO: 29656 - protein, 33 aa, Artificial Sequence; identical to SEQ ID NO: 8336
  GFR-binding peptide
  MOD_RES (1), (33): Xaa is C or S

SEQ ID NO: 29657 - protein, 37 aa, Artificial Sequence
  GFR-binding peptide
  MOD_RES (1), (35), (37): Xaa is C or S
  MOD_RES (15), (16), (17), (18), (19): Xaa is A or G
  MOD_RES (20), (21), (22), (23): Xaa is A or G or is absent
XVPTKLSPISILYKXXXXXXXXXLKYHYGMAVSEXGX

SEQ ID NO: 29658 - protein, 31 aa, Artificial Sequence
  GFR-binding peptide
  MOD_RES (1), (1): Xaa is C or S
XVPTELSPISMLYIDEYDKVVYKQYEEMVVE

SEQ ID NO: 29659 - protein, 34 aa, Artificial Sequence
  GFR-binding peptide
  MOD_RES (1), (34): Xaa is C or S
  MOD_RES (15), (16), (17), (18), (19): Xaa is A or G
  MOD_RES (20), (21), (22), (23): Xaa is A or G or is absent
XVPQALEPISILYLXXXXXXXXXKFKYEMIVRSX

SEQ ID NO: 29660 - protein, 41 aa, Artificial Sequence; identical to SEQ ID NO: 8340
  GFR-binding peptide
  MOD_RES (3), (4), (38), (40): Xaa is C or S
  MOD_RES (18), (19), (20), (21), (22): Xaa is A or G
  MOD_RES (23), (24), (25), (26): Xaa is A or G or is absent

SEQ ID NO: 29661 - protein, 33 aa, Artificial Sequence; identical to SEQ ID NO: 8344
  GFR-binding peptide
  MOD_RES (31), (33): Xaa is C or S

SEQ ID NO: 29662 - protein, 39 aa, Artificial Sequence; identical to SEQ ID NO: 8347
  GFR-binding peptide
  MOD_RES (5), (6), (39): Xaa is C or S
  MOD_RES (20), (21), (22), (23), (24): Xaa is A or G
  MOD_RES (25), (26), (27), (28): Xaa is A or G or is absent

SEQ ID NO: 29663 - protein, 39 aa, Artificial Sequence
  GFR-binding peptide
  MOD_RES (2), (3), (37), (39): Xaa is C or S
  MOD_RES (17), (18), (19), (20), (21): Xaa is A or G
  MOD_RES (22), (23), (24), (25): Xaa is A or G or is absent
SXXVPARLSPISILYKXXXXXXXXXLKYHYDMVVEAXGX

SEQ ID NO: 29664 - protein, 42 aa, Artificial Sequence; identical to SEQ ID NO: 8349
  GFR-binding peptide
  MOD_RES (5), (6), (40), (42): Xaa is C or S
  MOD_RES (20), (21), (22), (23), (24): Xaa is A or G
  MOD_RES (25), (26), (27), (28): Xaa is A or G or is absent

SEQ ID NO: 29665 - protein, 41 aa, Artificial Sequence
  GFR-binding peptide
  MOD_RES (5), (6), (40): Xaa is C or S
  MOD_RES (20), (21), (22), (23), (24): Xaa is A or G
  MOD_RES (25), (26), (27), (28): Xaa is A or G or is absent
APASXXVPARLNAISILYFXXXXXXXXXLKKYRDMVVEAXG

SEQ ID NO: 29666 - protein, 34 aa, Artificial Sequence
  GFR-binding peptide
  MOD_RES (1), (2): Xaa is C or S
  MOD_RES (16), (17), (18), (19), (20): Xaa is A or G
  MOD_RES (21), (22), (23), (24): Xaa is A or G or is absent
XXVPARLNAISILYFXXXXXXXXXLKKYRDMVVE

SEQ ID NO: 29667 - protein, 37 aa, Artificial Sequence
  GFR-binding peptide
  MOD_RES (5), (6), (37): Xaa is C or S
SASPXXVSQDLEPISILYLIGKTPKIKFKYEMIVKSX

SEQ ID NO: 29668 - protein, 35 aa, Artificial Sequence; identical to SEQ ID NO: 8352
  GFR-binding peptide
  MOD_RES (3), (4): Xaa is C or S

SEQ ID NO: 29669 - protein, 39 aa, Artificial Sequence
  GFR-binding peptide
  MOD_RES (4), (5), (39): Xaa is C or S
  MOD_RES (19), (20), (21), (22), (23): Xaa is A or G
  MOD_RES (24), (25), (26), (27): Xaa is A or G or is absent
PKAXXVPTELSPISMLYIXXXXXXXXXYKQYEDMVVEGX

SEQ ID NO: 29670 - protein, 38 aa, Artificial Sequence; identical to SEQ ID NO: 8353
  GFR-binding peptide
  MOD_RES (6), (6): Xaa is C or S
  MOD_RES (20), (21), (22), (23), (24): Xaa is A or G
  MOD_RES (25), (26), (27), (28): Xaa is A or G or is absent

SEQ ID NO: 29671 - protein, 35 aa, Artificial Sequence
  GFR-binding peptide
  MOD_RES (2), (3): Xaa is C or S
  MOD_RES (17), (18), (19), (20), (21): Xaa is A or G
  MOD_RES (22), (23), (24), (25): Xaa is A or G or is absent
PXXAPTQLEPISVLYLXXXXXXXXXKFKYENMVVR

SEQ ID NO: 29672 - protein, 39 aa, Artificial Sequence
  GFR-binding peptide
  MOD_RES (3), (4), (38): Xaa is C or S
  MOD_RES (18), (19), (20), (21), (22): Xaa is A or G
  MOD_RES (23), (24), (25), (26): Xaa is A or G or is absent
KAXXAPTKLEPISVLYLXXXXXXXXXKFKYENMVVKAXG

SEQ ID NO: 29673 - protein, 41 aa, Artificial Sequence; identical to SEQ ID NO: 8355
  GFR-binding peptide
  MOD_RES (5), (6), (38), (40): Xaa is C or S

SEQ ID NO: 29674 - protein, 33 aa, Artificial Sequence; identical to SEQ ID NO: 8356
  GFR-binding peptide
  MOD_RES (32), (32): Xaa is C or S

SEQ ID NO: 29675 - protein, 36 aa, Artificial Sequence
  GFR-binding peptide
  MOD_RES (1), (33), (35): Xaa is C or S
XAPTKLSPISVLYIDDSSNVIYKQYENMVVRSXGXH

SEQ ID NO: 29676 - protein, 38 aa, Artificial Sequence; identical to SEQ ID NO: 8357
  GFR-binding peptide
  MOD_RES (4), (5), (36), (38): Xaa is C or S

SEQ ID NO: 29677 - protein, 39 aa, Artificial Sequence; identical to SEQ ID NO: 8359
  GFR-binding peptide
  MOD_RES (4), (5), (38): Xaa is C or S
  MOD_RES (19), (20), (21), (22), (23): Xaa is A or G
  MOD_RES (24), (25), (26), (27): Xaa is A or G or is absent

SEQ ID NO: 29678 - protein, 34 aa, Artificial Sequence
  GFR-binding peptide
  MOD_RES (3), (4): Xaa is C or S
ASXXVPARLNAISILYFDAANNVVLKKYRDMVVE

SEQ ID NO: 29679 - protein, 40 aa, Artificial Sequence; identical to SEQ ID NO: 8360
  GFR-binding peptide
  MOD_RES (5), (6), (38), (40): Xaa is C or S

SEQ ID NO: 29680 - protein, 33 aa, Artificial Sequence
  GFR-binding peptide
  MOD_RES (1), (32): Xaa is C or S
XVSQDLEPISILYLIGKTPKIKFKYEMIVKSXK

SEQ ID NO: 29681 - protein, 37 aa, Artificial Sequence
  GFR-binding peptide
  MOD_RES (4), (5): Xaa is C or S
GKAXXVPTKLEPISVLYLDDMGVPTKFKYEEGMSVAE

SEQ ID NO: 29682 - protein, 33 aa, Artificial Sequence
  GFR-binding peptide
  MOD_RES (1), (33): Xaa is C or S
XVPARLNAISILYFDAANNVVLKKYRDMVVEAX

SEQ ID NO: 29683 - protein, 41 aa, Artificial Sequence
  GFR-binding peptide
  MOD_RES (6), (7), (39), (41): Xaa is C or S
SIPKAXXVPTELEPISMLYLDEYDKVVKFKYEEMVVEGXGX

SEQ ID NO: 29684 - protein, 38 aa, Artificial Sequence; identical to SEQ ID NO: 8365
  GFR-binding peptide
  MOD_RES (4), (5), (36), (38): Xaa is C or S

SEQ ID NO: 29685 - protein, 37 aa, Artificial Sequence; identical to SEQ ID NO: 8367
  GFR-binding peptide
  MOD_RES (6), (6): Xaa is C or S

SEQ ID NO: 29686 - protein, 37 aa, Artificial Sequence
  GFR-binding peptide
  MOD_RES (3), (4): Xaa is C or S
  MOD_RES (18), (19), (20), (21), (22): Xaa is A or G
  MOD_RES (23), (24), (25), (26): Xaa is A or G or is absent
KAXXVPTKLSPISILYKXXXXXXXXXLKYHYGMAVSE

SEQ ID NO: 29687 - protein, 35 aa, Artificial Sequence; identical to SEQ ID NO: 8368
  GFR-binding peptide
  MOD_RES (2), (3): Xaa is C or S
  MOD_RES (17), (18), (19), (20), (21): Xaa is A or G
  MOD_RES (22), (23), (24), (25): Xaa is A or G or is absent

SEQ ID NO: 29688 - protein, 31 aa, Artificial Sequence
  GFR-binding peptide
  MOD_RES (1), (1): Xaa is C or S
XAPTKLSPISVLYIDSSNNVIYKQYENMVVK

SEQ ID NO: 29689 - protein, 37 aa, Artificial Sequence; identical to SEQ ID NO: 8370
  GFR-binding peptide
  MOD_RES (3), (35), (37): Xaa is C or S

SEQ ID NO: 29690 - protein, 31 aa, Artificial Sequence; identical to SEQ ID NO: 8371
  GFR-binding peptide
  MOD_RES (31), (31): Xaa is C or S

SEQ ID NO: 29691 - protein, 38 aa, Artificial Sequence
  GFR-binding peptide
  MOD_RES (1), (2), (36), (38): Xaa is C or S
  MOD_RES (16), (17), (18), (19), (20): Xaa is A or G
  MOD_RES (21), (22), (23), (24): Xaa is A or G or is absent
XXAPTQLEPISVLYLXXXXXXXXXKFKYENMVVRAXGX

SEQ ID NO: 29692 - protein, 33 aa, Artificial Sequence
  GFR-binding peptide
  MOD_RES (1), (33): Xaa is C or S
XAPTKLSPISVLYIDSSNNVIYKQYENMVVKAX

SEQ ID NO: 29693 - protein, 36 aa, Artificial Sequence
  GFR-binding peptide
  MOD_RES (1), (2), (36): Xaa is C or S
  MOD_RES (16), (17), (18), (19), (20): Xaa is A or G
  MOD_RES (21), (22), (23), (24): Xaa is A or G or is absent
XXVPTKLNAISILYFXXXXXXXXXLKKYRGMAVSEX

SEQ ID NO: 29694 - protein, 37 aa, Artificial Sequence
  GFR-binding peptide
  MOD_RES (3), (4): Xaa is C or S
  MOD_RES (18), (19), (20), (21), (22): Xaa is A or G
  MOD_RES (23), (24), (25), (26): Xaa is A or G or is absent
KPXXAPTKLEPISVLYLXXXXXXXXXKFKYENMVVRS

SEQ ID NO: 29695 - protein, 38 aa, Artificial Sequence
  GFR-binding peptide
  MOD_RES (5), (6): Xaa is C or S
  MOD_RES (20), (21), (22), (23), (24): Xaa is A or G
  MOD_RES (25), (26), (27), (28): Xaa is A or G or is absent
ASKAXXVPTKLSPISILYKXXXXXXXXXLKYHYGMAVS

SEQ ID NO: 29696 - protein, 41 aa, Artificial Sequence
  GFR-binding peptide
  MOD_RES (5), (6), (40): Xaa is C or S
  MOD_RES (20), (21), (22), (23), (24): Xaa is A or G
  MOD_RES (25), (26), (27), (28): Xaa is A or G or is absent
VPKPXXAPTKLEPISVLYLXXXXXXXXXKFKYENMVVRSXG

SEQ ID NO: 29697 - protein, 41 aa, Artificial Sequence
  GFR-binding peptide
  MOD_RES (5), (6), (39), (41): Xaa is C or S
VGKAXXVPTKLSPISVLYIDDMGVPTYKQYEEGMSVAEXGX

SEQ ID NO: 29698 - protein, 34 aa, Artificial Sequence; identical to SEQ ID NO: 8374
  GFR-binding peptide
  MOD_RES (1), (1): Xaa is C or S
  MOD_RES (15), (16), (17), (18), (19): Xaa is A or G
  MOD_RES (20), (21), (22), (23): Xaa is A or G or is absent

SEQ ID NO: 29699 - protein, 39 aa, Artificial Sequence; identical to SEQ ID NO: 8375
  GFR-binding peptide
  MOD_RES (2), (3), (38): Xaa is C or S
  MOD_RES (17), (18), (19), (20), (21): Xaa is A or G
  MOD_RES (22), (23), (24), (25): Xaa is A or G or is absent

SEQ ID NO: 29700 - protein, 43 aa, Artificial Sequence; identical to SEQ ID NO: 8377
  GFR-binding peptide
  MOD_RES (6), (40), (42): Xaa is C or S
  MOD_RES (20), (21), (22), (23), (24): Xaa is A or G
  MOD_RES (25), (26), (27), (28): Xaa is A or G or is absent

SEQ ID NO: 29701 - protein, 31 aa, Artificial Sequence; identical to SEQ ID NO: 8378
  GFR-binding peptide

SEQ ID NO: 29702 - protein, 38 aa, Artificial Sequence; identical to SEQ ID NO: 8380
  GFR-binding peptide
  MOD_RES (2), (3), (37): Xaa is C or S
  MOD_RES (17), (18), (19), (20), (21): Xaa is A or G
  MOD_RES (22), (23), (24), (25): Xaa is A or G or is absent

SEQ ID NO: 29703 - protein, 40 aa, Artificial Sequence; identical to SEQ ID NO: 8381
  GFR-binding peptide
  MOD_RES (6), (7): Xaa is C or S
  MOD_RES (21), (22), (23), (24), (25): Xaa is A or G
  MOD_RES (26), (27), (28), (29): Xaa is A or G or is absent

SEQ ID NO: 29704 - protein, 38 aa, Artificial Sequence; identical to SEQ ID NO: 8383
  GFR-binding peptide
  MOD_RES (5), (6): Xaa is C or S
  MOD_RES (20), (21), (22), (23), (24): Xaa is A or G
  MOD_RES (25), (26), (27), (28): Xaa is A or G or is absent

SEQ ID NO: 29705 - protein, 41 aa, Artificial Sequence
  GFR-binding peptide
  MOD_RES (3), (4), (38), (40): Xaa is C or S
  MOD_RES (18), (19), (20), (21), (22): Xaa is A or G
  MOD_RES (23), (24), (25), (26): Xaa is A or G or is absent
KPXXAPTKLSPISVLYIXXXXXXXXXYKQYENMVVRSXGXH

SEQ ID NO: 29706 - protein, 34 aa, Artificial Sequence
  GFR-binding peptide
  MOD_RES (1), (2), (33): Xaa is C or S
XXVSQDLEPISILYLIGKTPKIKFKYEMIVKSXK

SEQ ID NO: 29707 - protein, 37 aa, Artificial Sequence; identical to SEQ ID NO: 8386
  GFR-binding peptide
  MOD_RES (1), (2), (36): Xaa is C or S
  MOD_RES (16), (17), (18), (19), (20): Xaa is A or G
  MOD_RES (21), (22), (23), (24): Xaa is A or G or is absent

SEQ ID NO: 29708 - protein, 39 aa, Artificial Sequence
  GFR-binding peptide
  MOD_RES (5), (6), (39): Xaa is C or S
VGKAXXVPTKLEPISVLYLDDMGVPTKFKYEEGMSVAEX

SEQ ID NO: 29709 - protein, 36 aa, Artificial Sequence
  GFR-binding peptide
  MOD_RES (3), (4), (36): Xaa is C or S
KPXXAPTQLEPISVLYLDDSSNVIKFKYENMVVRAX

SEQ ID NO: 29710 - protein, 36 aa, Artificial Sequence
  GFR-binding peptide
  MOD_RES (3), (4), (36): Xaa is C or S
KAXXVPTELSPISMLYIDENEKVVYKQYEDMVVEGX

SEQ ID NO: 29711 - protein, 37 aa, Artificial Sequence
  GFR-binding peptide
  MOD_RES (2), (3), (35), (37): Xaa is C or S
PXXAPTQLEPISVLYLDDSSNVIKFKYENMVVRAXGX

SEQ ID NO: 29712 - protein, 38 aa, Artificial Sequence
  GFR-binding peptide
  MOD_RES (4), (5), (37): Xaa is C or S
SKAXXVPTKLSPISILYIDKGVVTYYKQYEGMAVSEXG

SEQ ID NO: 29713 - protein, 37 aa, Artificial Sequence
  GFR-binding peptide
  MOD_RES (6), (6): Xaa is C or S
VTKPTXAPTKLSPISVLYIDDSSNVIYKQYENMVVRS

SEQ ID NO: 29714 - protein, 36 aa, Artificial Sequence; identical to SEQ ID NO: 8397
  GFR-binding peptide
  MOD_RES (3), (4), (35): Xaa is C or S

SEQ ID NO: 29715 - protein, 32 aa, Artificial Sequence; identical to SEQ ID NO: 8400
  GFR-binding peptide
  MOD_RES (1), (32): Xaa is C or S

SEQ ID NO: 29716 - protein, 36 aa, Artificial Sequence
  GFR-binding peptide
  MOD_RES (1), (2), (35): Xaa is C or S
XXVPTKLSPISVLYIDDMGVPTYKQYEEGMSVAEXG

SEQ ID NO: 29717 - protein, 36 aa, Artificial Sequence; identical to SEQ ID NO: 8401
  GFR-binding peptide
  MOD_RES (1), (2), (35): Xaa is C or S
  MOD_RES (16), (17), (18), (19), (20): Xaa is A or G
  MOD_RES (21), (22), (23), (24): Xaa is A or G or is absent

SEQ ID NO: 29718 - protein, 43 aa, Artificial Sequence
  GFR-binding peptide
  MOD_RES (6), (7), (40), (42): Xaa is C or S
  MOD_RES (21), (22), (23), (24), (25): Xaa is A or G
  MOD_RES (26), (27), (28), (29): Xaa is A or G or is absent
ASASPXXVPQDLEPISILYLXXXXXXXXXKFKYEMVVKSXKXS

SEQ ID NO: 29719 - protein, 40 aa, Artificial Sequence
  GFR-binding peptide
  MOD_RES (5), (6), (39): Xaa is C or S
  MOD_RES (20), (21), (22), (23), (24): Xaa is A or G
  MOD_RES (25), (26), (27), (28): Xaa is A or G or is absent
SASPXXVSQDLSPISILYIXXXXXXXXXYKQYEMIVKSXK

SEQ ID NO: 29720 - protein, 41 aa, Artificial Sequence
  GFR-binding peptide
  MOD_RES (6), (7), (40): Xaa is C or S
  MOD_RES (21), (22), (23), (24), (25): Xaa is A or G
  MOD_RES (26), (27), (28), (29): Xaa is A or G or is absent
ASASPXXVSQDLEPISILYLXXXXXXXXXKFKYEMIVKSXK

SEQ ID NO: 29721 - protein, 32 aa, Artificial Sequence
  GFR-binding peptide
  MOD_RES (32), (32): Xaa is C or S
VPTELSPISMLYIDENEKVVYKQYEDMVVEGX

SEQ ID NO: 29722 - protein, 36 aa, Artificial Sequence; identical to SEQ ID NO: 8403
  GFR-binding peptide
  MOD_RES (1), (35): Xaa is C or S
  MOD_RES (15), (16), (17), (18), (19): Xaa is A or G
  MOD_RES (20), (21), (22), (23): Xaa is A or G or is absent

SEQ ID NO: 29723 - protein, 40 aa, Artificial Sequence
  GFR-binding peptide
  MOD_RES (4), (5), (38), (40): Xaa is C or S
  MOD_RES (19), (20), (21), (22), (23): Xaa is A or G
  MOD_RES (24), (25), (26), (27): Xaa is A or G or is absent
ASPXXVSQDLEPISILYLXXXXXXXXXKFKYEMIVKSXKX

SEQ ID NO: 29724 - protein, 40 aa, Artificial Sequence
  GFR-binding peptide
  MOD_RES (2), (3), (37), (39): Xaa is C or S
  MOD_RES (17), (18), (19), (20), (21): Xaa is A or G
  MOD_RES (22), (23), (24), (25): Xaa is A or G or is absent
AXXAPTKLSPISVLYIXXXXXXXXXYKQYENMVVKAXGXH

SEQ ID NO: 29725 - protein, 35 aa, Artificial Sequence
  GFR-binding peptide
  MOD_RES (1), (35): Xaa is C or S
  MOD_RES (15), (16), (17), (18), (19): Xaa is A or G
  MOD_RES (20), (21), (22), (23): Xaa is A or G or is absent
XVPTELEPISMLYLXXXXXXXXXKFKYEEMVVEGX

SEQ ID NO: 29726 - protein, 38 aa, Artificial Sequence
  GFR-binding peptide
  MOD_RES (2), (3), (37): Xaa is C or S
  MOD_RES (17), (18), (19), (20), (21): Xaa is A or G
  MOD_RES (22), (23), (24), (25): Xaa is A or G or is absent
AXXAPTKLEPISVLYLXXXXXXXXXKFKYENMVVKAXG

SEQ ID NO: 29727 - protein, 41 aa, Artificial Sequence; identical to SEQ ID NO: 8406
  GFR-binding peptide
  MOD_RES (5), (6), (40): Xaa is C or S
  MOD_RES (20), (21), (22), (23), (24): Xaa is A or G
  MOD_RES (25), (26), (27), (28): Xaa is A or G or is absent

SEQ ID NO: 29728 - protein, 39 aa, Artificial Sequence; identical to SEQ ID NO: 8410
  GFR-binding peptide
  MOD_RES (6), (7), (39): Xaa is C or S

SEQ ID NO: 29729 - protein, 34 aa, Artificial Sequence; identical to SEQ ID NO: 8411
  GFR-binding peptide
  MOD_RES (1), (2), (33): Xaa is C or S

SEQ ID NO: 29730 - protein, 39 aa, Artificial Sequence
  GFR-binding peptide
  MOD_RES (3), (4), (38): Xaa is C or S
  MOD_RES (18), (19), (20), (21), (22): Xaa is A or G
  MOD_RES (23), (24), (25), (26): Xaa is A or G or is absent
KPXXAPTKLEPISVLYLXXXXXXXXXKFKYENMVVRSXG

SEQ ID NO: 29731 - protein, 36 aa, Artificial Sequence; identical to SEQ ID NO: 8417
  GFR-binding peptide
  MOD_RES (1), (2), (36): Xaa is C or S
  MOD_RES (16), (17), (18), (19), (20): Xaa is A or G
  MOD_RES (21), (22), (23), (24): Xaa is A or G or is absent

SEQ ID NO: 29732 - protein, 36 aa, Artificial Sequence
  GFR-binding peptide
  MOD_RES (1), (33), (35): Xaa is C or S
XVPTELSPISMLYIDEYDKVVYKQYEEMVVEGXGXR

SEQ ID NO: 29733 - protein, 38 aa, Artificial Sequence; identical to SEQ ID NO: 8420
  GFR-binding peptide
  MOD_RES (3), (4), (35), (37): Xaa is C or S

SEQ ID NO: 29734 - protein, 37 aa, Artificial Sequence
  GFR-binding peptide
  MOD_RES (5), (37): Xaa is C or S
TKPTXAPTKLSPISVLYIDDSSNVIYKQYENMVVRSX

SEQ ID NO: 29735 - protein, 34 aa, Artificial Sequence; identical to SEQ ID NO: 8421
  GFR-binding peptide
  MOD_RES (1), (2), (34): Xaa is C or S

SEQ ID NO: 29736 - protein, 42 aa, Artificial Sequence
  GFR-binding peptide
  MOD_RES (6), (7), (40), (42): Xaa is C or S
  MOD_RES (21), (22), (23), (24), (25): Xaa is A or G
  MOD_RES (26), (27), (28), (29): Xaa is A or G or is absent
ASASPXXVPQDLEPISILYLXXXXXXXXXKFKYEMVVKSXKX

SEQ ID NO: 29737 - protein, 37 aa, Artificial Sequence
  GFR-binding peptide
  MOD_RES (5), (6): Xaa is C or S
VPKPXXAPTKLEPISVLYLDDSSNVIKFKYENMVVRS

SEQ ID NO: 29738 - protein, 38 aa, Artificial Sequence; identical to SEQ ID NO: 8425
  GFR-binding peptide
  MOD_RES (1), (2), (37): Xaa is C or S
  MOD_RES (16), (17), (18), (19), (20): Xaa is A or G
  MOD_RES (21), (22), (23), (24): Xaa is A or G or is absent

SEQ ID NO: 29739 - protein, 35 aa, Artificial Sequence
  GFR-binding peptide
  MOD_RES (32), (34): Xaa is C or S
VPTKLNAISILYFDKGVVTYLKKYRGMAVSEXGXR

SEQ ID NO: 29740 - protein, 32 aa, Artificial Sequence
  GFR-binding peptide
  MOD_RES (1), (2): Xaa is C or S
XXVPARLNAISILYFDAANNVVLKKYRDMVVE

SEQ ID NO: 29741 - protein, 36 aa, Artificial Sequence; identical to SEQ ID NO: 8428
  GFR-binding peptide
  MOD_RES (1), (2), (34), (36): Xaa is C or S

SEQ ID NO: 29742 - protein, 39 aa, Artificial Sequence
  GFR-binding peptide
  MOD_RES (4), (5), (37), (39): Xaa is C or S
PKAXXAPTKLSPISVLYIDSSNNVIYKQYENMVVKAXGX

SEQ ID NO: 29743 - protein, 41 aa, Artificial Sequence; identical to SEQ ID NO: 8429
  GFR-binding peptide
  MOD_RES (4), (5), (39), (41): Xaa is C or S
  MOD_RES (19), (20), (21), (22), (23): Xaa is A or G
  MOD_RES (24), (25), (26), (27): Xaa is A or G or is absent

SEQ ID NO: 29744 - protein, 37 aa, Artificial Sequence
  GFR-binding peptide
  MOD_RES (6), (7): Xaa is C or S
AAPASXXVPARLNAISILYFDAANNVVLKKYRDMVVE

SEQ ID NO: 29745 - protein, 41 aa, Artificial Sequence
  GFR-binding peptide
  MOD_RES (5), (6), (39), (41): Xaa is C or S
  MOD_RES (20), (21), (22), (23), (24): Xaa is A or G
  MOD_RES (25), (26), (27), (28): Xaa is A or G or is absent
SASPXXVSQDLSPISILYIXXXXXXXXXYKQYEMIVKSXKX

SEQ ID NO: 29746 - protein, 37 aa, Artificial Sequence; identical to SEQ ID NO: 8432
  GFR-binding peptide
  MOD_RES (5), (6), (37): Xaa is C or S

SEQ ID NO: 29747 - protein, 33 aa, Artificial Sequence; identical to SEQ ID NO: 8433
  GFR-binding peptide
  MOD_RES (1), (1): Xaa is C or S
  MOD_RES (15), (16), (17), (18), (19): Xaa is A or G
  MOD_RES (20), (21), (22), (23): Xaa is A or G or is absent

SEQ ID NO: 29748 - protein, 37 aa, Artificial Sequence
  GFR-binding peptide
  MOD_RES (2), (3), (35), (37): Xaa is C or S
AXXVPTKLNAISILYFDKGVVTYLKKYRGMAVSEXGX

SEQ ID NO: 29749 - protein, 33 aa, Artificial Sequence
  GFR-binding peptide
  MOD_RES (3), (3): Xaa is C or S
PTXAPTKLEPISVLYLDDSSNVIKFKYENMVVR

SEQ ID NO: 29750 - protein, 39 aa, Artificial Sequence
  GFR-binding peptide
  MOD_RES (2), (3), (37), (39): Xaa is C or S
  MOD_RES (17), (18), (19), (20), (21): Xaa is A or G
  MOD_RES (22), (23), (24), (25): Xaa is A or G or is absent
AXXAPTKLEPISVLYLXXXXXXXXXKFKYENMVVKAXGX

SEQ ID NO: 29751 - protein, 36 aa, Artificial Sequence
  GFR-binding peptide
  MOD_RES (1), (35): Xaa is C or S
  MOD_RES (15), (16), (17), (18), (19): Xaa is A or G
  MOD_RES (20), (21), (22), (23): Xaa is A or G or is absent
XVPARLNAISILYFXXXXXXXXXLKKYRDMVVEAXG

SEQ ID NO: 29752 - protein, 34 aa, Artificial Sequence
  GFR-binding peptide
  MOD_RES (32), (34): Xaa is C or S
VPTELEPISMLYLDENEKVVKFKYEDMVVEGXGX

SEQ ID NO: 29753 - protein, 38 aa, Artificial Sequence; identical to SEQ ID NO: 8442
  GFR-binding peptide
  MOD_RES (1), (2), (35), (37): Xaa is C or S
  MOD_RES (16), (17), (18), (19), (20): Xaa is A or G
  MOD_RES (21), (22), (23), (24): Xaa is A or G or is absent

SEQ ID NO: 29754 - protein, 40 aa, Artificial Sequence
  GFR-binding peptide
  MOD_RES (4), (5), (39): Xaa is C or S
  MOD_RES (19), (20), (21), (22), (23): Xaa is A or G
  MOD_RES (24), (25), (26), (27): Xaa is A or G or is absent
PASXXVPARLSPISILYIXXXXXXXXXYKQYEDMVVEAXG

SEQ ID NO: 29755 - protein, 33 aa, Artificial Sequence
  GFR-binding peptide
  MOD_RES (1), (2): Xaa is C or S
XXVPTKLNAISILYFDKGVVTYLKKYRGMAVSE

SEQ ID NO: 29756 - protein, 33 aa, Artificial Sequence; identical to SEQ ID NO: 8443
  GFR-binding peptide
  MOD_RES (2), (3): Xaa is C or S

SEQ ID NO: 29757 - protein, 32 aa, Artificial Sequence; identical to SEQ ID NO: 8444
  GFR-binding peptide
  MOD_RES (1), (2): Xaa is C or S

SEQ ID NO: 29758 - protein, 37 aa, Artificial Sequence
  GFR-binding peptide
  MOD_RES (1), (35), (37): Xaa is C or S
  MOD_RES (15), (16), (17), (18), (19): Xaa is A or G
  MOD_RES (20), (21), (22), (23): Xaa is A or G or is absent
XVPTELEPISMLYLXXXXXXXXXKFKYEEMVVEGXGX

SEQ ID NO: 29759 - protein, 34 aa, Artificial Sequence; identical to SEQ ID NO: 8446
  GFR-binding peptide
  MOD_RES (1), (1): Xaa is C or S
  MOD_RES (15), (16), (17), (18), (19): Xaa is A or G
  MOD_RES (20), (21), (22), (23): Xaa is A or G or is absent

SEQ ID NO: 29760 - protein, 41 aa, Artificial Sequence; identical to SEQ ID NO: 8447
  GFR-binding peptide
  MOD_RES (5), (6), (40): Xaa is C or S
  MOD_RES (20), (21), (22), (23), (24): Xaa is A or G
  MOD_RES (25), (26), (27), (28): Xaa is A or G or is absent

SEQ ID NO: 29761 - protein, 40 aa, Artificial Sequence; identical to SEQ ID NO: 8451
  GFR-binding peptide
  MOD_RES (6), (7), (38), (40): Xaa is C or S

SEQ ID NO: 29762 - protein, 41 aa, Artificial Sequence
  GFR-binding peptide
  MOD_RES (5), (6), (40): Xaa is C or S
  MOD_RES (20), (21), (22), (23), (24): Xaa is A or G
  MOD_RES (25), (26), (27), (28): Xaa is A or G or is absent
VPKAXXAPTKLEPISVLYLXXXXXXXXXKFKYENMVVKAXG

SEQ ID NO: 29763 - protein, 36 aa, Artificial Sequence
  GFR-binding peptide
  MOD_RES (1), (2), (33), (35): Xaa is C or S
XXVPQALSPISILYIVGRKPKVYKQYEMIVRSXKXS

SEQ ID NO: 29764 - protein, 35 aa, Artificial Sequence
  GFR-binding peptide
  MOD_RES (1), (32), (34): Xaa is C or S
XVSQDLEPISILYLIGKTPKIKFKYEMIVKSXKXS

SEQ ID NO: 29765 - protein, 41 aa, Artificial Sequence
  GFR-binding peptide
  MOD_RES (5), (6), (40): Xaa is C or S
  MOD_RES (20), (21), (22), (23), (24): Xaa is A or G
  MOD_RES (25), (26), (27), (28): Xaa is A or G or is absent
IPKAXXVPTELEPISMLYLXXXXXXXXXKFKYEEMVVEGXG

SEQ ID NO: 29766 - protein, 43 aa, Artificial Sequence
  GFR-binding peptide
  MOD_RES (6), (7), (41), (43): Xaa is C or S
  MOD_RES (21), (22), (23), (24), (25): Xaa is A or G
  MOD_RES (26), (27), (28), (29): Xaa is A or G or is absent
AVPKAXXAPTKLSPISVLYIXXXXXXXXXYKQYENMVVKAXGX

SEQ ID NO: 29767 - protein, 39 aa, Artificial Sequence
  GFR-binding peptide
  MOD_RES (1), (2), (36), (38): Xaa is C or S
  MOD_RES (16), (17), (18), (19), (20): Xaa is A or G
  MOD_RES (21), (22), (23), (24): Xaa is A or G or is absent
XXVPTKLNAISILYFXXXXXXXXXLKKYRGMAVSEXGXR

SEQ ID NO: 29768 - protein, 34 aa, Artificial Sequence; identical to SEQ ID NO: 8456
  GFR-binding peptide
  MOD_RES (1), (2): Xaa is C or S
  MOD_RES (16), (17), (18), (19), (20): Xaa is A or G
  MOD_RES (21), (22), (23), (24): Xaa is A or G or is absent

SEQ ID NO: 29769 - protein, 38 aa, Artificial Sequence
  GFR-binding peptide
  MOD_RES (2), (3), (35), (37): Xaa is C or S
PXXAPTQLEPISVLYLDDSSNVIKFKYENMVVRAXGXH

SEQ ID NO: 29770 - protein, 32 aa, Artificial Sequence
  GFR-binding peptide
  MOD_RES (14), (15), (16), (17), (18): Xaa is A or G
  MOD_RES (19), (20), (21), (22): Xaa is A or G or is absent
VPARLEPISILYLXXXXXXXXXKFKYEDMVVE

SEQ ID NO: 29771 - protein, 38 aa, Artificial Sequence
  GFR-binding peptide
  MOD_RES (3), (4), (36), (38): Xaa is C or S
KAXXAPTKLSPISVLYIDSSNNVIYKQYENMVVKAXGX

SEQ ID NO: 29772 - protein, 39 aa, Artificial Sequence; identical to SEQ ID NO: 8457
  GFR-binding peptide
  MOD_RES (2), (3), (37), (39): Xaa is C or S
  MOD_RES (17), (18), (19), (20), (21): Xaa is A or G
  MOD_RES (22), (23), (24), (25): Xaa is A or G or is absent

SEQ ID NO: 29773 - protein, 37 aa, Artificial Sequence; identical to SEQ ID NO: 8458
  GFR-binding peptide
  MOD_RES (6), (7): Xaa is C or S

SEQ ID NO: 29774 - protein, 39 aa, Artificial Sequence
  GFR-binding peptide
  MOD_RES (6), (7), (38): Xaa is C or S
ASAAPXXVPQALEPISILYLVGRKPKVKFKYEMIVRSXK

SEQ ID NO: 29775 - protein, 33 aa, Artificial Sequence
  GFR-binding peptide
  MOD_RES (2), (3): Xaa is C or S
AXXVPTELEPISMLYLDEYDKVVKFKYEEMVVE

SEQ ID NO: 29776 - protein, 33 aa, Artificial Sequence; identical to SEQ ID NO: 8460
  GFR-binding peptide
  MOD_RES (2), (3): Xaa is C or S

SEQ ID NO: 29777 - protein, 35 aa, Artificial Sequence
  GFR-binding peptide
  MOD_RES (1), (2): Xaa is C or S
  MOD_RES (16), (17), (18), (19), (20): Xaa is A or G
  MOD_RES (21), (22), (23), (24): Xaa is A or G or is absent
XXAPTKLSPISVLYIXXXXXXXXXYKQYENMVVKA

SEQ ID NO: 29778 - protein, 36 aa, Artificial Sequence; identical to SEQ ID NO: 8461
  GFR-binding peptide
  MOD_RES (33), (35): Xaa is C or S
  MOD_RES (14), (15), (16), (17), (18): Xaa is A or G
  MOD_RES (19), (20), (21), (22): Xaa is A or G or is absent

SEQ ID NO: 29779 - protein, 37 aa, Artificial Sequence; identical to SEQ ID NO: 8462
  GFR-binding peptide
  MOD_RES (2), (3), (35), (37): Xaa is C or S

SEQ ID NO: 29780 - protein, 38 aa, Artificial Sequence
  GFR-binding peptide
  MOD_RES (1), (2), (36), (38): Xaa is C or S
  MOD_RES (16), (17), (18), (19), (20): Xaa is A or G
  MOD_RES (21), (22), (23), (24): Xaa is A or G or is absent
XXAPTQLSPISVLYIXXXXXXXXXYKQYENMVVRAXGX

SEQ ID NO: 29781 - protein, 36 aa, Artificial Sequence
  GFR-binding peptide
  MOD_RES (1), (33), (35): Xaa is C or S
XVPTKLNAISILYFDKGVVTYLKKYRGMAVSEXGXR

SEQ ID NO: 29782 - protein, 38 aa, Artificial Sequence
  GFR-binding peptide
  MOD_RES (5), (6): Xaa is C or S
  MOD_RES (20), (21), (22), (23), (24): Xaa is A or G
  MOD_RES (25), (26), (27), (28): Xaa is A or G or is absent
APASXXVPARLNAISILYFXXXXXXXXXLKKYRDMVVE

SEQ ID NO: 29783 - protein, 43 aa, Artificial Sequence
  GFR-binding peptide
  MOD_RES (4), (5), (40), (42): Xaa is C or S
  MOD_RES (19), (20), (21), (22), (23): Xaa is A or G
  MOD_RES (24), (25), (26), (27): Xaa is A or G or is absent
GKAXXVPTKLEPISVLYLXXXXXXXXXKFKYEEGMSVAEXGXR

SEQ ID NO: 29784 - protein, 34 aa, Artificial Sequence; identical to SEQ ID NO: 8464
  GFR-binding peptide
  MOD_RES (3), (4): Xaa is C or S

SEQ ID NO: 29785 - protein, 37 aa, Artificial Sequence; identical to SEQ ID NO: 8465
  GFR-binding peptide
  MOD_RES (1), (35), (37): Xaa is C or S
  MOD_RES (15), (16), (17), (18), (19): Xaa is A or G
  MOD_RES (20), (21), (22), (23): Xaa is A or G or is absent

SEQ ID NO: 29786 - protein, 38 aa, Artificial Sequence
  GFR-binding peptide
  MOD_RES (6), (7): Xaa is C or S
SIPKAXXVPTELEPISMLYLDEYDKVVKFKYEEMVVEG

SEQ ID NO: 29787 - protein, 35 aa, Artificial Sequence
  GFR-binding peptide
  MOD_RES (1), (2): Xaa is C or S
  MOD_RES (16), (17), (18), (19), (20): Xaa is A or G
  MOD_RES (21), (22), (23), (24): Xaa is A or G or is absent
XXAPTKLSPISVLYIXXXXXXXXXYKQYENMVVRS

SEQ ID NO: 29788 - protein, 42 aa, Artificial Sequence
  GFR-binding peptide
  MOD_RES (4), (5), (39), (41): Xaa is C or S
  MOD_RES (19), (20), (21), (22), (23): Xaa is A or G
  MOD_RES (24), (25), (26), (27): Xaa is A or G or is absent
SKAXXVPTKLSPISILYIXXXXXXXXXYKQYEGMAVSEXGXR

SEQ ID NO: 29789 - protein, 37 aa, Artificial Sequence; identical to SEQ ID NO: 8467
  GFR-binding peptide
  MOD_RES (3), (4): Xaa is C or S
  MOD_RES (18), (19), (20), (21), (22): Xaa is A or G
  MOD_RES (23), (24), (25), (26): Xaa is A or G or is absent

SEQ ID NO: 29790 - protein, 38 aa, Artificial Sequence
  GFR-binding peptide
  MOD_RES (4), (5), (37): Xaa is C or S
PKPXXAPTQLEPISVLYLDDSSNVIKFKYENMVVRAXG

SEQ ID NO: 29791 - protein, 38 aa, Artificial Sequence; identical to SEQ ID NO: 8470
  GFR-binding peptide
  MOD_RES (6), (7): Xaa is C or S

SEQ ID NO: 29792 - protein, 40 aa, Artificial Sequence
  GFR-binding peptide
  MOD_RES (5), (6), (39): Xaa is C or S
  MOD_RES (20), (21), (22), (23), (24): Xaa is A or G
  MOD_RES (25), (26), (27), (28): Xaa is A or G or is absent
SASPXXVSQDLEPISILYLXXXXXXXXXKFKYEMIVKSXK

SEQ ID NO: 29793 - protein, 39 aa, Artificial Sequence; identical to SEQ ID NO: 8471
  GFR-binding peptide
  MOD_RES (4), (38): Xaa is C or S
  MOD_RES (18), (19), (20), (21), (22): Xaa is A or G
  MOD_RES (23), (24), (25), (26): Xaa is A or G or is absent

SEQ ID NO: 29794 - protein, 33 aa, Artificial Sequence
  GFR-binding peptide
  MOD_RES (32), (32): Xaa is C or S
APTQLEPISVLYLDDSSNVIKFKYENMVVRAXG

SEQ ID NO: 29795 - protein, 36 aa, Artificial Sequence
  GFR-binding peptide
  MOD_RES (2), (3), (36): Xaa is C or S
AXXVPTKLSPISVLYIDDMGVPTYKQYEEGMSVAEX

SEQ ID NO: 29796 - protein, 38 aa, Artificial Sequence
  GFR-binding peptide
  MOD_RES (5), (6), (38): Xaa is C or S
VPKPXXAPTKLSPISVLYIDDSSNVIYKQYENMVVRSX

SEQ ID NO: 29797 - protein, 37 aa, Artificial Sequence; identical to SEQ ID NO: 8475
  GFR-binding peptide
  MOD_RES (3), (4): Xaa is C or S
  MOD_RES (18), (19), (20), (21), (22): Xaa is A or G
  MOD_RES (23), (24), (25), (26): Xaa is A or G or is absent

SEQ ID NO: 29798 - protein, 33 aa, Artificial Sequence; identical to SEQ ID NO: 8478
  GFR-binding peptide
  MOD_RES (31), (33): Xaa is C or S

SEQ ID NO: 29799 - protein, 41 aa, Artificial Sequence
  GFR-binding peptide
  MOD_RES (3), (4), (38), (40): Xaa is C or S
  MOD_RES (18), (19), (20), (21), (22): Xaa is A or G
  MOD_RES (23), (24), (25), (26): Xaa is A or G or is absent
KAXXAPTKLEPISVLYLXXXXXXXXXKFKYENMVVKAXGXH

SEQ ID NO: 29800 - protein, 40 aa, Artificial Sequence; identical to SEQ ID NO: 8480
  GFR-binding peptide
  MOD_RES (5), (6), (37), (39): Xaa is C or S

SEQ ID NO: 29801 - protein, 40 aa, Artificial Sequence
  GFR-binding peptide
  MOD_RES (3), (37), (39): Xaa is C or S
  MOD_RES (17), (18), (19), (20), (21): Xaa is A or G
  MOD_RES (22), (23), (24), (25): Xaa is A or G or is absent
PTXAPTKLEPISVLYLXXXXXXXXXKFKYENMVVRSXGXH

SEQ ID NO: 29802 - protein, 35 aa, Artificial Sequence
  GFR-binding peptide
  MOD_RES (2), (3): Xaa is C or S
  MOD_RES (17), (18), (19), (20), (21): Xaa is A or G
  MOD_RES (22), (23), (24), (25): Xaa is A or G or is absent
PXXAPTKLEPISVLYLXXXXXXXXXKFKYENMVVR

SEQ ID NO: 29803 - protein, 35 aa, Artificial Sequence; identical to SEQ ID NO: 8482
  GFR-binding peptide
  MOD_RES (4), (4): Xaa is C or S

SEQ ID NO: 29804 - protein, 33 aa, Artificial Sequence
  GFR-binding peptide
  MOD_RES (1), (2): Xaa is C or S
XXAPTQLSPISVLYIDDSSNVIYKQYENMVVRA

SEQ ID NO: 29805 - protein, 34 aa, Artificial Sequence
  GFR-binding peptide
  MOD_RES (32), (34): Xaa is C or S
VPARLEPISILYLDAANNVVKFKYEDMVVEAXGX

SEQ ID NO: 29806 - protein, 32 aa, Artificial Sequence
  GFR-binding peptide
  MOD_RES (1), (1): Xaa is C or S
XVPTELEPISMLYLDEYDKVVKFKYEEMVVEG

SEQ ID NO: 29807 - protein, 36 aa, Artificial Sequence; identical to SEQ ID NO: 8489
  GFR-binding peptide
  MOD_RES (3), (3): Xaa is C or S
  MOD_RES (17), (18), (19), (20), (21): Xaa is A or G
  MOD_RES (22), (23), (24), (25): Xaa is A or G or is absent

SEQ ID NO: 29808 - protein, 35 aa, Artificial Sequence; identical to SEQ ID NO: 8490
  GFR-binding peptide
  MOD_RES (1), (35): Xaa is C or S
  MOD_RES (15), (16), (17), (18), (19): Xaa is A or G
  MOD_RES (20), (21), (22), (23): Xaa is A or G or is absent

SEQ ID NO: 29809 - protein, 35 aa, Artificial Sequence; identical to SEQ ID NO: 8491
  GFR-binding peptide
  MOD_RES (1), (2), (35): Xaa is C or S
  MOD_RES (16), (17), (18), (19), (20): Xaa is A or G
  MOD_RES (21), (22), (23), (24): Xaa is A or G or is absent

SEQ ID NO: 29810 - protein, 42 aa, Artificial Sequence; identical to SEQ ID NO: 8493
  GFR-binding peptide
  MOD_RES (6), (7), (39), (41): Xaa is C or S

SEQ ID NO: 29811 - protein, 42 aa, Artificial Sequence
  GFR-binding peptide
  MOD_RES (6), (7), (41): Xaa is C or S
  MOD_RES (21), (22), (23), (24), (25): Xaa is A or G
  MOD_RES (26), (27), (28), (29): Xaa is A or G or is absent
AVPKAXXAPTKLEPISVLYLXXXXXXXXXKFKYENMVVKAXG

SEQ ID NO: 29812 - protein, 38 aa, Artificial Sequence
  GFR-binding peptide
  MOD_RES (4), (5): Xaa is C or S
  MOD_RES (19), (20), (21), (22), (23): Xaa is A or G
  MOD_RES (24), (25), (26), (27): Xaa is A or G or is absent
PASXXVPARLSPISILYIXXXXXXXXXYKQYEDMVVEA

SEQ ID NO: 29813 - protein, 42 aa, Artificial Sequence
  GFR-binding peptide
  MOD_RES (5), (39), (41): Xaa is C or S
  MOD_RES (19), (20), (21), (22), (23): Xaa is A or G
  MOD_RES (24), (25), (26), (27): Xaa is A or G or is absent
TKPTXAPTKLSPISVLYIXXXXXXXXXYKQYENMVVRSXGXH

SEQ ID NO: 29814 - protein, 38 aa, Artificial Sequence
  GFR-binding peptide
  MOD_RES (1), (35), (37): Xaa is C or S
  MOD_RES (15), (16), (17), (18), (19): Xaa is A or G
  MOD_RES (20), (21), (22), (23): Xaa is A or G or is absent
XVPTELEPISMLYLXXXXXXXXXKFKYEEMVVEGXGXR

SEQ ID NO: 29815 - protein, 39 aa, Artificial Sequence
  GFR-binding peptide
  MOD_RES (6), (7): Xaa is C or S
  MOD_RES (21), (22), (23), (24), (25): Xaa is A or G
  MOD_RES (26), (27), (28), (29): Xaa is A or G or is absent
ASASPXXVPQDLSPISILYIXXXXXXXXXYKQYEMVVKS

SEQ ID NO: 29816 - protein, 40 aa, Artificial Sequence
  GFR-binding peptide
  MOD_RES (4), (5), (38), (40): Xaa is C or S
GKAXXVPTKLSPISVLYIDDMGVPTYKQYEEGMSVAEXGX

SEQ ID NO: 29817 - protein, 33 aa, Artificial Sequence; identical to SEQ ID NO: 8501
  GFR-binding peptide
  MOD_RES (1), (1): Xaa is C or S
  MOD_RES (15), (16), (17), (18), (19): Xaa is A or G
  MOD_RES (20), (21), (22), (23): Xaa is A or G or is absent

SEQ ID NO: 29818 - protein, 38 aa, Artificial Sequence
  GFR-binding peptide
  MOD_RES (4), (5), (36), (38): Xaa is C or S
ASPXXVSQDLSPISILYIIGKTPKIYKQYEMIVKSXKX

SEQ ID NO: 29819 - protein, 33 aa, Artificial Sequence; identical to SEQ ID NO: 8503
  GFR-binding peptide
  MOD_RES (31), (33): Xaa is C or S

SEQ ID NO: 29820 - protein, 34 aa, Artificial Sequence
  GFR-binding peptide
  MOD_RES (1), (34): Xaa is C or S
  MOD_RES (15), (16), (17), (18), (19): Xaa is A or G
  MOD_RES (20), (21), (22), (23): Xaa is A or G or is absent
XVSQDLEPISILYLXXXXXXXXXKFKYEMIVKSX

SEQ ID NO: 29821 - protein, 36 aa, Artificial Sequence
  GFR-binding peptide
  MOD_RES (2), (3): Xaa is C or S
  MOD_RES (17), (18), (19), (20), (21): Xaa is A or G
  MOD_RES (22), (23), (24), (25): Xaa is A or G or is absent
PXXAPTKLSPISVLYIXXXXXXXXXYKQYENMVVRS

SEQ ID NO: 29822 - protein, 40 aa, Artificial Sequence; identical to SEQ ID NO: 8506
  GFR-binding peptide
  MOD_RES (1), (2), (37), (39): Xaa is C or S
  MOD_RES (16), (17), (18), (19), (20): Xaa is A or G
  MOD_RES (21), (22), (23), (24): Xaa is A or G or is absent

SEQ ID NO: 29823 - protein, 39 aa, Artificial Sequence; identical to SEQ ID NO: 8507
  GFR-binding peptide
  MOD_RES (2), (3), (37), (39): Xaa is C or S
  MOD_RES (17), (18), (19), (20), (21): Xaa is A or G
  MOD_RES (22), (23), (24), (25): Xaa is A or G or is absent

SEQ ID NO: 29824 - protein, 34 aa, Artificial Sequence
  GFR-binding peptide
  MOD_RES (31), (33): Xaa is C or S
VSQDLSPISILYIIGKTPKIYKQYEMIVKSXKXS

SEQ ID NO: 29825 - protein, 41 aa, Artificial Sequence; identical to SEQ ID NO: 8508
  GFR-binding peptide
  MOD_RES (5), (6), (39), (41): Xaa is C or S
  MOD_RES (20), (21), (22), (23), (24): Xaa is A or G
  MOD_RES (25), (26), (27), (28): Xaa is A or G or is absent

SEQ ID NO: 29826 - protein, 41 aa, Artificial Sequence; identical to SEQ ID NO: 8510
  GFR-binding peptide
  MOD_RES (5), (6), (40): Xaa is C or S
  MOD_RES (20), (21), (22), (23), (24): Xaa is A or G
  MOD_RES (25), (26), (27), (28): Xaa is A or G or is absent

SEQ ID NO: 29827 - protein, 39 aa, Artificial Sequence; identical to SEQ ID NO: 8511
  GFR-binding peptide
  MOD_RES (4), (5), (36), (38): Xaa is C or S

SEQ ID NO: 29828 - protein, 39 aa, Artificial Sequence
  GFR-binding peptide
  MOD_RES (3), (4), (38): Xaa is C or S
  MOD_RES (18), (19), (20), (21), (22): Xaa is A or G
  MOD_RES (23), (24), (25), (26): Xaa is A or G or is absent
KAXXVPTKLNAISILYFXXXXXXXXXLKKYRGMAVSEXG

SEQ ID NO: 29829 - protein, 37 aa, Artificial Sequence; identical to SEQ ID NO: 8513
  GFR-binding peptide
  MOD_RES (2), (3), (35), (37): Xaa is C or S

SEQ ID NO: 29830 - protein, 37 aa, Artificial Sequence
  GFR-binding peptide
  MOD_RES (3), (4), (37): Xaa is C or S
  MOD_RES (18), (19), (20), (21), (22): Xaa is A or G
  MOD_RES (23), (24), (25), (26): Xaa is A or G or is absent
SPXXVPQDLEPISILYLXXXXXXXXXKFKYEMVVKSX

SEQ ID NO: 29831 - protein, 39 aa, Artificial Sequence
  GFR-binding peptide
  MOD_RES (3), (4), (38): Xaa is C or S
  MOD_RES (18), (19), (20), (21), (22): Xaa is A or G
  MOD_RES (23), (24), (25), (26): Xaa is A or G or is absent
ASXXVPARLSPISILYIXXXXXXXXXYKQYEDMVVEAXG

SEQ ID NO: 29832 - protein, 37 aa, Artificial Sequence
  GFR-binding peptide
  MOD_RES (2), (3): Xaa is C or S
  MOD_RES (17), (18), (19), (20), (21): Xaa is A or G
  MOD_RES (22), (23), (24), (25): Xaa is A or G or is absent
AXXVPTKLSPISVLYIXXXXXXXXXYKQYEEGMSVAE

SEQ ID NO: 29833 - protein, 36 aa, Artificial Sequence
  GFR-binding peptide
  MOD_RES (1), (34), (36): Xaa is C or S
  MOD_RES (15), (16), (17), (18), (19): Xaa is A or G
  MOD_RES (20), (21), (22), (23): Xaa is A or G or is absent
XVPQDLSPISILYIXXXXXXXXXYKQYEMVVKSXKX

SEQ ID NO: 29834 - protein, 41 aa, Artificial Sequence
  GFR-binding peptide
  MOD_RES (6), (7), (41): Xaa is C or S
  MOD_RES (21), (22), (23), (24), (25): Xaa is A or G
  MOD_RES (26), (27), (28), (29): Xaa is A or G or is absent
AAPASXXVPARLSPISILYIXXXXXXXXXYKQYEDMVVEAX

SEQ ID NO: 29835 - protein, 40 aa, Artificial Sequence
  GFR-binding peptide
  MOD_RES (4), (5), (39): Xaa is C or S
  MOD_RES (19), (20), (21), (22), (23): Xaa is A or G
  MOD_RES (24), (25), (26), (27): Xaa is A or G or is absent
PKAXXVPTELEPISMLYLXXXXXXXXXKFKYEEMVVEGXG

SEQ ID NO: 29836 - protein, 33 aa, Artificial Sequence; identical to SEQ ID NO: 8516
  GFR-binding peptide
  MOD_RES (14), (15), (16), (17), (18): Xaa is A or G
  MOD_RES (19), (20), (21), (22): Xaa is A or G or is absent

SEQ ID NO: 29837 - protein, 37 aa, Artificial Sequence
  GFR-binding peptide
  MOD_RES (34), (36): Xaa is C or S
  MOD_RES (14), (15), (16), (17), (18): Xaa is A or G
  MOD_RES (19), (20), (21), (22): Xaa is A or G or is absent
VPARLEPISILYLXXXXXXXXXKFKYEDMVVEAXGXR

SEQ ID NO: 29838 - protein, 41 aa, Artificial Sequence
  GFR-binding peptide
  MOD_RES (6), (7), (39), (41): Xaa is C or S
AAPASXXVPARLEPISILYLDAANNVVKFKYEDMVVEAXGX

SEQ ID NO: 29839 - protein, 40 aa, Artificial Sequence; identical to SEQ ID NO: 8520
  GFR-binding peptide
  MOD_RES (3), (37), (39): Xaa is C or S
  MOD_RES (17), (18), (19), (20), (21): Xaa is A or G
  MOD_RES (22), (23), (24), (25): Xaa is A or G or is absent

SEQ ID NO: 29840 - protein, 37 aa, Artificial Sequence; identical to SEQ ID NO: 8521
  GFR-binding peptide
  MOD_RES (4), (5), (37): Xaa is C or S

SEQ ID NO: 29841 - protein, 40 aa, Artificial Sequence; identical to SEQ ID NO: 8523
  GFR-binding peptide
  MOD_RES (4), (5), (40): Xaa is C or S
  MOD_RES (19), (20), (21), (22), (23): Xaa is A or G
  MOD_RES (24), (25), (26), (27): Xaa is A or G or is absent

SEQ ID NO: 29842 - protein, 37 aa, Artificial Sequence; identical to SEQ ID NO: 8524
  GFR-binding peptide
  MOD_RES (5), (6): Xaa is C or S

SEQ ID NO: 29843 - protein, 39 aa, Artificial Sequence; identical to SEQ ID NO: 8525
  GFR-binding peptide
  MOD_RES (4), (5), (38): Xaa is C or S

SEQ ID NO: 29844 - protein, 33 aa, Artificial Sequence; identical to SEQ ID NO: 8526
  GFR-binding peptide
  MOD_RES (1), (2), (33): Xaa is C or S

SEQ ID NO: 29845 - protein, 37 aa, Artificial Sequence; identical to SEQ ID NO: 8527
  GFR-binding peptide
  MOD_RES (6), (7): Xaa is C or S

SEQ ID NO: 29846 - protein, 35 aa, Artificial Sequence; identical to SEQ ID NO: 8532
  GFR-binding peptide
  MOD_RES (1), (2), (33), (35): Xaa is C or S

SEQ ID NO: 29847 - protein, 40 aa, Artificial Sequence
  GFR-binding peptide
  MOD_RES (5), (6), (40): Xaa is C or S
  MOD_RES (20), (21), (22), (23), (24): Xaa is A or G
  MOD_RES (25), (26), (27), (28): Xaa is A or G or is absent
VPKPXXAPTQLEPISVLYLXXXXXXXXXKFKYENMVVRAX

SEQ ID NO: 29848 - protein, 38 aa, Artificial Sequence; identical to SEQ ID NO: 8534
  GFR-binding peptide
  MOD_RES (1), (2), (35), (37): Xaa is C or S
  MOD_RES (16), (17), (18), (19), (20): Xaa is A or G
  MOD_RES (21), (22), (23), (24): Xaa is A or G or is absent

SEQ ID NO: 29849 - protein, 38 aa, Artificial Sequence
  GFR-binding peptide
  MOD_RES (5), (6), (38): Xaa is C or S
VPKPXXAPTKLEPISVLYLDDSSNVIKFKYENMVVRSX

SEQ ID NO: 29850 - protein, 34 aa, Artificial Sequence
  GFR-binding peptide
  MOD_RES (32), (34): Xaa is C or S
APTKLEPISVLYLDDSSNVIKFKYENMVVRSXGX

SEQ ID NO: 29851 - protein, 32 aa, Artificial Sequence
  GFR-binding peptide
  MOD_RES (1), (2): Xaa is C or S
XXAPTQLSPISVLYIDDSSNVIYKQYENMVVR

SEQ ID NO: 29852 - protein, 32 aa, Artificial Sequence
  GFR-binding peptide
  MOD_RES (1), (1): Xaa is C or S
XAPTQLSPISVLYIDDSSNVIYKQYENMVVRA

SEQ ID NO: 29853 - protein, 38 aa, Artificial Sequence
  GFR-binding peptide
  MOD_RES (3), (37): Xaa is C or S
  MOD_RES (17), (18), (19), (20), (21): Xaa is A or G
  MOD_RES (22), (23), (24), (25): Xaa is A or G or is absent
PTXAPTKLEPISVLYLXXXXXXXXXKFKYENMVVRSXG

SEQ ID NO: 29854 - protein, 39 aa, Artificial Sequence
  GFR-binding peptide
  MOD_RES (5), (6), (38): Xaa is C or S
IPKAXXVPTELSPISMLYIDEYDKVVYKQYEEMVVEGXG

SEQ ID NO: 29855 - protein, 38 aa, Artificial Sequence; identical to SEQ ID NO: 8542
  GFR-binding peptide
  MOD_RES (2), (3), (35), (37): Xaa is C or S

SEQ ID NO: 29856 - protein, 36 aa, Artificial Sequence; identical to SEQ ID NO: 8544
  GFR-binding peptide
  MOD_RES (3), (4): Xaa is C or S
  MOD_RES (18), (19), (20), (21), (22): Xaa is A or G
  MOD_RES (23), (24), (25), (26): Xaa is A or G or is absent

SEQ ID NO: 29857 - protein, 31 aa, Artificial Sequence
  GFR-binding peptide
VPTELSPISMLYIDEYDKVVYKQYEEMVVEG

SEQ ID NO: 29858 - protein, 35 aa, Artificial Sequence
  GFR-binding peptide
  MOD_RES (32), (34): Xaa is C or S
APTKLEPISVLYLDSSNNVIKFKYENMVVKAXGXH

SEQ ID NO: 29859 - protein, 41 aa, Artificial Sequence
  GFR-binding peptide
  MOD_RES (4), (5), (39), (41): Xaa is C or S
  MOD_RES (19), (20), (21), (22), (23): Xaa is A or G
  MOD_RES (24), (25), (26), (27): Xaa is A or G or is absent
SKAXXVPTKLEPISILYLXXXXXXXXXKFKYEGMAVSEXGX

SEQ ID NO: 29860 - protein, 36 aa, Artificial Sequence
  GFR-binding peptide
  MOD_RES (34), (36): Xaa is C or S
  MOD_RES (14), (15), (16), (17), (18): Xaa is A or G
  MOD_RES (19), (20), (21), (22): Xaa is A or G or is absent
VPTKLEPISILYLXXXXXXXXXKFKYEGMAVSEXGX

SEQ ID NO: 29861 - protein, 36 aa, Artificial Sequence
  GFR-binding peptide
  MOD_RES (34), (36): Xaa is C or S
  MOD_RES (14), (15), (16), (17), (18): Xaa is A or G
  MOD_RES (19), (20), (21), (22): Xaa is A or G or is absent
VPARLNAISILYFXXXXXXXXXLKKYRDMVVEAXGX

SEQ ID NO: 29862 - protein, 32 aa, Artificial Sequence; identical to SEQ ID NO: 8549
  GFR-binding peptide
  MOD_RES (1), (1): Xaa is C or S

SEQ ID NO: 29863 - protein, 40 aa, Artificial Sequence
  GFR-binding peptide
  MOD_RES (2), (3), (37), (39): Xaa is C or S
  MOD_RES (17), (18), (19), (20), (21): Xaa is A or G
  MOD_RES (22), (23), (24), (25): Xaa is A or G or is absent
AXXVPTELEPISMLYLXXXXXXXXXKFKYEEMVVEGXGXR

SEQ ID NO: 29864 - protein, 38 aa, Artificial Sequence
  GFR-binding peptide
  MOD_RES (5), (6), (38): Xaa is C or S
APASXXVPARLNAISILYFDAANNVVLKKYRDMVVEAX

SEQ ID NO: 29865 - protein, 36 aa, Artificial Sequence; identical to SEQ ID NO: 8552
  GFR-binding peptide
  MOD_RES (4), (4): Xaa is C or S
  MOD_RES (18), (19), (20), (21), (22): Xaa is A or G
  MOD_RES (23), (24), (25), (26): Xaa is A or G or is absent

SEQ ID NO: 29866 - protein, 35 aa, Artificial Sequence
  GFR-binding peptide
  MOD_RES (1), (2): Xaa is C or S
  MOD_RES (16), (17), (18), (19), (20): Xaa is A or G
  MOD_RES (21), (22), (23), (24): Xaa is A or G or is absent
XXVPARLEPISILYLXXXXXXXXXKFKYEDMVVEA

SEQ ID NO: 29867 - protein, 36 aa, Artificial Sequence; identical to SEQ ID NO: 8555
  GFR-binding peptide
  MOD_RES (3), (4): Xaa is C or S
  MOD_RES (18), (19), (20), (21), (22): Xaa is A or G
  MOD_RES (23), (24), (25), (26): Xaa is A or G or is absent

SEQ ID NO: 29868 - protein, 41 aa, Artificial Sequence; identical to SEQ ID NO: 8556
  GFR-binding peptide
  MOD_RES (6), (7), (41): Xaa is C or S
  MOD_RES (21), (22), (23), (24), (25): Xaa is A or G
  MOD_RES (26), (27), (28), (29): Xaa is A or G or is absent

SEQ ID NO: 29869 - protein, 32 aa, Artificial Sequence; identical to SEQ ID NO: 8558
  GFR-binding peptide
  MOD_RES (1), (1): Xaa is C or S

SEQ ID NO: 29870 - protein, 37 aa, Artificial Sequence
  GFR-binding peptide
  MOD_RES (3), (4), (36): Xaa is C or S
KAXXVPTKLSPISILYIDKGVVTYYKQYEGMAVSEXG

SEQ ID NO: 29871 - protein, 39 aa, Artificial Sequence; identical to SEQ ID NO: 8562
  GFR-binding peptide
  MOD_RES (4), (5), (39): Xaa is C or S
  MOD_RES (19), (20), (21), (22), (23): Xaa is A or G
  MOD_RES (24), (25), (26), (27): Xaa is A or G or is absent

SEQ ID NO: 29872 - protein, 37 aa, Artificial Sequence; identical to SEQ ID NO: 8563
  GFR-binding peptide
  MOD_RES (34), (36): Xaa is C or S
  MOD_RES (14), (15), (16), (17), (18): Xaa is A or G
  MOD_RES (19), (20), (21), (22): Xaa is A or G or is absent

SEQ ID NO: 29873 - protein, 36 aa, Artificial Sequence
  GFR-binding peptide
  MOD_RES (2), (34), (36): Xaa is C or S
TXAPTKLEPISVLYLDDSSNVIKFKYENMVVRSXGX

SEQ ID NO: 29874 - protein, 36 aa, Artificial Sequence; identical to SEQ ID NO: 8565
  GFR-binding peptide
  MOD_RES (1), (34), (36): Xaa is C or S

SEQ ID NO: 29875 - protein, 40 aa, Artificial Sequence
  GFR-binding peptide
  MOD_RES (5), (6), (40): Xaa is C or S
  MOD_RES (20), (21), (22), (23), (24): Xaa is A or G
  MOD_RES (25), (26), (27), (28): Xaa is A or G or is absent
ASKAXXVPTKLSPISILYKXXXXXXXXXLKYHYGMAVSEX

SEQ ID NO: 29876 - protein, 40 aa, Artificial Sequence; identical to SEQ ID NO: 8566
  GFR-binding peptide
  MOD_RES (6), (7), (39): Xaa is C or S

SEQ ID NO: 29877 - protein, 38 aa, Artificial Sequence
  GFR-binding peptide
  MOD_RES (1), (2), (36), (38): Xaa is C or S
  MOD_RES (16), (17), (18), (19), (20): Xaa is A or G
  MOD_RES (21), (22), (23), (24): Xaa is A or G or is absent
XXVPTELSPISMLYIXXXXXXXXXYKQYEEMVVEGXGX

SEQ ID NO: 29878 - protein, 39 aa, Artificial Sequence
  GFR-binding peptide
  MOD_RES (6), (7): Xaa is C or S
  MOD_RES (21), (22), (23), (24), (25): Xaa is A or G
  MOD_RES (26), (27), (28), (29): Xaa is A or G or is absent
YVPKPXXAPTKLEPISVLYLXXXXXXXXXKFKYENMVVR

SEQ ID NO: 29879 - protein, 30 aa, Artificial Sequence
  GFR-binding peptide
APTQLEPISVLYLDDSSNVIKFKYENMVVR

SEQ ID NO: 29880 - protein, 31 aa, Artificial Sequence
  GFR-binding peptide
VPTELEPISMLYLDEYDKVVKFKYEEMVVEG

SEQ ID NO: 29881 - protein, 37 aa, Artificial Sequence
  GFR-binding peptide
  MOD_RES (2), (3), (37): Xaa is C or S
  MOD_RES (17), (18), (19), (20), (21): Xaa is A or G
  MOD_RES (22), (23), (24), (25): Xaa is A or G or is absent
AXXAPTKLEPISVLYLXXXXXXXXXKFKYENMVVKAX

SEQ ID NO: 29882 - protein, 35 aa, Artificial Sequence
  GFR-binding peptide
  MOD_RES (32), (34): Xaa is C or S
APTQLEPISVLYLDDSSNVIKFKYENMVVRAXGXH

SEQ ID NO: 29883 - protein, 41 aa, Artificial Sequence
  GFR-binding peptide
  MOD_RES (5), (6), (38), (40): Xaa is C or S
APASXXVPARLNAISILYFDAANNVVLKKYRDMVVEAXGXR

SEQ ID NO: 29884 - protein, 34 aa, Artificial Sequence; identical to SEQ ID NO: 8568
  GFR-binding peptide
  MOD_RES (3), (4): Xaa is C or S

SEQ ID NO: 29885 - protein, 31 aa, Artificial Sequence
  GFR-binding peptide
  MOD_RES (1), (1): Xaa is C or S
XVPTKLSPISILYIDKGVVTYYKQYEGMAVS

SEQ ID NO: 29886 - protein, 33 aa, Artificial Sequence
  GFR-binding peptide
  MOD_RES (1), (1): Xaa is C or S
  MOD_RES (15), (16), (17), (18), (19): Xaa is A or G
  MOD_RES (20), (21), (22), (23): Xaa is A or G or is absent
XAPTQLEPISVLYLXXXXXXXXXKFKYENMVVR

SEQ ID NO: 29887 - protein, 35 aa, Artificial Sequence
  GFR-binding peptide
  MOD_RES (1), (2), (33), (35): Xaa is C or S
XXVPQDLSPISILYIVGRTPKVYKQYEMVVKSXKX

SEQ ID NO: 29888 - protein, 36 aa, Artificial Sequence
  GFR-binding peptide
  MOD_RES (3), (4), (35): Xaa is C or S
APXXVPQALEPISILYLVGRKPKVKFKYEMIVRSXK

SEQ ID NO: 29889 - protein, 44 aa, Artificial Sequence
  GFR-binding peptide
  MOD_RES (6), (7), (41), (43): Xaa is C or S
  MOD_RES (21), (22), (23), (24), (25): Xaa is A or G
  MOD_RES (26), (27), (28), (29): Xaa is A or G or is absent
SIPKAXXVPTELEPISMLYLXXXXXXXXXKFKYEEMVVEGXGXR

SEQ ID NO: 29890 - protein, 39 aa, Artificial Sequence
  GFR-binding peptide
  MOD_RES (6), (7), (39): Xaa is C or S
SIPKAXXVPTELSPISMLYIDEYDKVVYKQYEEMVVEGX

SEQ ID NO: 29891 - protein, 35 aa, Artificial Sequence; identical to SEQ ID NO: 8570
  GFR-binding peptide
  MOD_RES (33), (35): Xaa is C or S
  MOD_RES (14), (15), (16), (17), (18): Xaa is A or G
  MOD_RES (19), (20), (21), (22): Xaa is A or G or is absent

SEQ ID NO: 29892 - protein, 38 aa, Artificial Sequence
  GFR-binding peptide
  MOD_RES (2), (3), (37): Xaa is C or S
  MOD_RES (17), (18), (19), (20), (21): Xaa is A or G
  MOD_RES (22), (23), (24), (25): Xaa is A or G or is absent
SXXVPARLSPISILYKXXXXXXXXXLKYHYDMVVEAXG

SEQ ID NO: 29893 - protein, 41 aa, Artificial Sequence; identical to SEQ ID NO: 8571
  GFR-binding peptide
  MOD_RES (6), (7), (39), (41): Xaa is C or S

SEQ ID NO: 29894 - protein, 36 aa, Artificial Sequence; identical to SEQ ID NO: 8572
  GFR-binding peptide
  MOD_RES (5), (6): Xaa is C or S

SEQ ID NO: 29895 - protein, 40 aa, Artificial Sequence; identical to SEQ ID NO: 8573
  GFR-binding peptide
  MOD_RES (4), (5), (37), (39): Xaa is C or S

SEQ ID NO: 29896 - protein, 37 aa, Artificial Sequence
  GFR-binding peptide
  MOD_RES (2), (36): Xaa is C or S
  MOD_RES (16), (17), (18), (19), (20): Xaa is A or G
  MOD_RES (21), (22), (23), (24): Xaa is A or G or is absent
TXAPTKLSPISVLYIXXXXXXXXXYKQYENMVVRSXG

SEQ ID NO: 29897 - protein, 39 aa, Artificial Sequence
  GFR-binding peptide
  MOD_RES (3), (37), (39): Xaa is C or S
  MOD_RES (17), (18), (19), (20), (21): Xaa is A or G
  MOD_RES (22), (23), (24), (25): Xaa is A or G or is absent
PTXAPTKLEPISVLYLXXXXXXXXXKFKYENMVVRSXGX

SEQ ID NO: 29898 - protein, 39 aa, Artificial Sequence; identical to SEQ ID NO: 8580
  GFR-binding peptide
  MOD_RES (3), (4), (36), (38): Xaa is C or S

SEQ ID NO: 29899 - protein, 41 aa, Artificial Sequence
  GFR-binding peptide
  MOD_RES (4), (5), (39), (41): Xaa is C or S
  MOD_RES (19), (20), (21), (22), (23): Xaa is A or G
  MOD_RES (24), (25), (26), (27): Xaa is A or G or is absent
PKAXXAPTKLSPISVLYIXXXXXXXXXYKQYENMVVKAXGX

SEQ ID NO: 29900 - protein, 35 aa, Artificial Sequence
  GFR-binding peptide
  MOD_RES (2), (3): Xaa is C or S
  MOD_RES (17), (18), (19), (20), (21): Xaa is A or G
  MOD_RES (22), (23), (24), (25): Xaa is A or G or is absent
PXXVPQDLSPISILYIXXXXXXXXXYKQYEMVVKS

SEQ ID NO: 29901 - protein, 35 aa, Artificial Sequence
  GFR-binding peptide
  MOD_RES (32), (34): Xaa is C or S
VPTELSPISMLYIDEYDKVVYKQYEEMVVEGXGXR

SEQ ID NO: 29902 - protein, 33 aa, Artificial Sequence
  GFR-binding peptide
  MOD_RES (1), (1): Xaa is C or S
XVPTKLSPISVLYIDDMGVPTYKQYEEGMSVAE

SEQ ID NO: 29903 - protein, 34 aa, Artificial Sequence
  GFR-binding peptide
  MOD_RES (1), (1): Xaa is C or S
  MOD_RES (15), (16), (17), (18), (19): Xaa is A or G
  MOD_RES (20), (21), (22), (23): Xaa is A or G or is absent
XVPTKLSPISILYKXXXXXXXXXLKYHYGMAVSE

SEQ ID NO: 29904 - protein, 34 aa, Artificial Sequence; identical to SEQ ID NO: 8582
  GFR-binding peptide
  MOD_RES (2), (3): Xaa is C or S

SEQ ID NO: 29905 - protein, 37 aa, Artificial Sequence; identical to SEQ ID NO: 8584
  GFR-binding peptide
  MOD_RES (1), (35), (37): Xaa is C or S
  MOD_RES (15), (16), (17), (18), (19): Xaa is A or G
  MOD_RES (20), (21), (22), (23): Xaa is A or G or is absent

SEQ ID NO: 29906 - protein, 39 aa, Artificial Sequence
  GFR-binding peptide
  MOD_RES (2), (36), (38): Xaa is C or S
  MOD_RES (16), (17), (18), (19), (20): Xaa is A or G
  MOD_RES (21), (22), (23), (24): Xaa is A or G or is absent
TXAPTKLEPISVLYLXXXXXXXXXKFKYENMVVRSXGXH

SEQ ID NO: 29907 - protein, 33 aa, Artificial Sequence
  GFR-binding peptide
  MOD_RES (1), (2): Xaa is C or S
XXAPTQLEPISVLYLDDSSNVIKFKYENMVVRA

SEQ ID NO: 29908 - protein, 33 aa, Artificial Sequence
  GFR-binding peptide
  MOD_RES (2), (3): Xaa is C or S
PXXAPTQLSPISVLYIDDSSNVIYKQYENMVVR

SEQ ID NO: 29909 - protein, 38 aa, Artificial Sequence
  GFR-binding peptide
  MOD_RES (6), (7): Xaa is C or S
AVPKAXXAPTKLEPISVLYLDSSNNVIKFKYENMVVKA

SEQ ID NO: 29910 - protein, 34 aa, Artificial Sequence
  GFR-binding peptide
  MOD_RES (1), (34): Xaa is C or S
  MOD_RES (15), (16), (17), (18), (19): Xaa is A or G
  MOD_RES (20), (21), (22), (23): Xaa is A or G or is absent
XVSQDLSPISILYIXXXXXXXXXYKQYEMIVKSX

SEQ ID NO: 29911 - protein, 34 aa, Artificial Sequence
  GFR-binding peptide
  MOD_RES (34), (34): Xaa is C or S
  MOD_RES (14), (15), (16), (17), (18): Xaa is A or G
  MOD_RES (19), (20), (21), (22): Xaa is A or G or is absent
VPARLEPISILYLXXXXXXXXXKFKYEDMVVEAX

SEQ ID NO: 29912 - protein, 36 aa, Artificial Sequence
  GFR-binding peptide
  MOD_RES (5), (6): Xaa is C or S
SASPXXVSQDLEPISILYLIGKTPKIKFKYEMIVKS

SEQ ID NO: 29913 - protein, 31 aa, Artificial Sequence; identical to SEQ ID NO: 8589
  GFR-binding peptide
  MOD_RES (1), (1): Xaa is C or S

SEQ ID NO: 29914 - protein, 37 aa, Artificial Sequence; identical to SEQ ID NO: 8590
  GFR-binding peptide
  MOD_RES (3), (4), (35), (37): Xaa is C or S

SEQ ID NO: 29915 - protein, 38 aa, Artificial Sequence
  GFR-binding peptide
  MOD_RES (1), (2), (36), (38): Xaa is C or S
  MOD_RES (16), (17), (18), (19), (20): Xaa is A or G
  MOD_RES (21), (22), (23), (24): Xaa is A or G or is absent
XXVPARLEPISILYLXXXXXXXXXKFKYEDMVVEAXGX

SEQ ID NO: 29916 - protein, 41 aa, Artificial Sequence
  GFR-binding peptide
  MOD_RES (3), (4), (38), (40): Xaa is C or S
  MOD_RES (18), (19), (20), (21), (22): Xaa is A or G
  MOD_RES (23), (24), (25), (26): Xaa is A or G or is absent
KPXXAPTKLEPISVLYLXXXXXXXXXKFKYENMVVRSXGXH

SEQ ID NO: 29917 - protein, 35 aa, Artificial Sequence
  GFR-binding peptide
  MOD_RES (1), (2): Xaa is C or S
  MOD_RES (16), (17), (18), (19), (20): Xaa is A or G
  MOD_RES (21), (22), (23), (24): Xaa is A or G or is absent
XXVPTELSPISMLYIXXXXXXXXXYKQYEDMVVEG

SEQ ID NO: 29918 - protein, 41 aa, Artificial Sequence
  GFR-binding peptide
  MOD_RES (4), (5), (39), (41): Xaa is C or S
  MOD_RES (19), (20), (21), (22), (23): Xaa is A or G
  MOD_RES (24), (25), (26), (27): Xaa is A or G or is absent
PASXXVPARLSPISILYKXXXXXXXXXLKYHYDMVVEAXGX

SEQ ID NO: 29919 - protein, 39 aa, Artificial Sequence; identical to SEQ ID NO: 8592
  GFR-binding peptide
  MOD_RES (2), (3), (36), (38): Xaa is C or S
  MOD_RES (17), (18), (19), (20), (21): Xaa is A or G
  MOD_RES (22), (23), (24), (25): Xaa is A or G or is absent

SEQ ID NO: 29920 - protein, 35 aa, Artificial Sequence; identical to SEQ ID NO: 8594
  GFR-binding peptide
  MOD_RES (1), (34): Xaa is C or S
  MOD_RES (15), (16), (17), (18), (19): Xaa is A or G
  MOD_RES (20), (21), (22), (23): Xaa is A or G or is absent

SEQ ID NO: 29921 - protein, 35 aa, Artificial Sequence
  GFR-binding peptide
  MOD_RES (1), (2), (35): Xaa is C or S
  MOD_RES (16), (17), (18), (19), (20): Xaa is A or G
  MOD_RES (21), (22), (23), (24): Xaa is A or G or is absent
XXVPQALSPISILYIXXXXXXXXXYKQYEMIVRSX

SEQ ID NO: 29922 - protein, 37 aa, Artificial Sequence
  GFR-binding peptide
  MOD_RES (4), (5), (37): Xaa is C or S
PASXXVPARLNAISILYFDAANNVVLKKYRDMVVEAX

SEQ ID NO: 29923 - protein, 41 aa, Artificial Sequence
  GFR-binding peptide
  MOD_RES (6), (7), (41): Xaa is C or S
  MOD_RES (21), (22), (23), (24), (25): Xaa is A or G
  MOD_RES (26), (27), (28), (29): Xaa is A or G or is absent
AVPKAXXAPTKLSPISVLYIXXXXXXXXXYKQYENMVVKAX

SEQ ID NO: 29924 - protein, 34 aa, Artificial Sequence; identical to SEQ ID NO: 8595
  GFR-binding peptide
  MOD_RES (2), (3): Xaa is C or S

SEQ ID NO: 29925 - protein, 34 aa, Artificial Sequence; identical to SEQ ID NO: 8596
  GFR-binding peptide
  MOD_RES (32), (34): Xaa is C or S

SEQ ID NO: 29926 - protein, 38 aa, Artificial Sequence; identical to SEQ ID NO: 8598
  GFR-binding peptide
  MOD_RES (7), (7): Xaa is C or S

SEQ ID NO: 29927 - protein, 42 aa, Artificial Sequence; identical to SEQ ID NO: 8599
  GFR-binding peptide
  MOD_RES (6), (7), (41): Xaa is C or S
  MOD_RES (21), (22), (23), (24), (25): Xaa is A or G
  MOD_RES (26), (27), (28), (29): Xaa is A or G or is absent

SEQ ID NO: 29928 - protein, 35 aa, Artificial Sequence
  GFR-binding peptide
  MOD_RES (5), (5): Xaa is C or S
TKPTXAPTKLEPISVLYLDDSSNVIKFKYENMVVR

SEQ ID NO: 29929 - protein, 37 aa, Artificial Sequence
  GFR-binding peptide
  MOD_RES (3), (4), (36): Xaa is C or S
KAXXVPTELEPISMLYLDENEKVVKFKYEDMVVEGXG

SEQ ID NO: 29930 - protein, 33 aa, Artificial Sequence
  GFR-binding peptide
  MOD_RES (1), (2): Xaa is C or S
XXAPTKLSPISVLYIDDSSNVIYKQYENMVVRS

SEQ ID NO: 29931 - protein, 36 aa, Artificial Sequence
  GFR-binding peptide
  MOD_RES (3), (3): Xaa is C or S
  MOD_RES (17), (18), (19), (20), (21): Xaa is A or G
  MOD_RES (22), (23), (24), (25): Xaa is A or G or is absent
PTXAPTKLEPISVLYLXXXXXXXXXKFKYENMVVRS

SEQ ID NO: 29932 - protein, 35 aa, Artificial Sequence
  GFR-binding peptide
  MOD_RES (1), (35): Xaa is C or S
  MOD_RES (15), (16), (17), (18), (19): Xaa is A or G
  MOD_RES (20), (21), (22), (23): Xaa is A or G or is absent
XVPTKLNAISILYFXXXXXXXXXLKKYRGMAVSEX

SEQ ID NO: 29933 - protein, 38 aa, Artificial Sequence; identical to SEQ ID NO: 8602
  GFR-binding peptide
  MOD_RES (1), (35), (37): Xaa is C or S
  MOD_RES (15), (16), (17), (18), (19): Xaa is A or G
  MOD_RES (20), (21), (22), (23): Xaa is A or G or is absent

SEQ ID NO: 29934 - protein, 40 aa, Artificial Sequence; identical to SEQ ID NO: 8603
  GFR-binding peptide
  MOD_RES (4), (5), (39): Xaa is C or S
  MOD_RES (19), (20), (21), (22), (23): Xaa is A or G
  MOD_RES (24), (25), (26), (27): Xaa is A or G or is absent

SEQ ID NO: 29935 - protein, 36 aa, Artificial Sequence
  GFR-binding peptide
  MOD_RES (1), (35): Xaa is C or S
  MOD_RES (15), (16), (17), (18), (19): Xaa is A or G
  MOD_RES (20), (21), (22), (23): Xaa is A or G or is absent
XVPTKLSPISILYKXXXXXXXXXLKYHYGMAVSEXG

SEQ ID NO: 29936 - protein, 32 aa, Artificial Sequence
  GFR-binding peptide
  MOD_RES (32), (32): Xaa is C or S
VPTELEPISMLYLDENEKVVKFKYEDMVVEGX

SEQ ID NO: 29937 - protein, 41 aa, Artificial Sequence
  GFR-binding peptide
  MOD_RES (3), (4), (38), (40): Xaa is C or S
  MOD_RES (18), (19), (20), (21), (22): Xaa is A or G
  MOD_RES (23), (24), (25), (26): Xaa is A or G or is absent
KAXXVPTKLSPISILYKXXXXXXXXXLKYHYGMAVSEXGXR

SEQ ID NO: 29938 - protein, 33 aa, Artificial Sequence
  GFR-binding peptide
  MOD_RES (33), (33): Xaa is C or S
  MOD_RES (14), (15), (16), (17), (18): Xaa is A or G
  MOD_RES (19), (20), (21), (22): Xaa is A or G or is absent
VPQDLEPISILYLXXXXXXXXXKFKYEMVVKSX

SEQ ID NO: 29939 - protein, 44 aa, Artificial Sequence
  GFR-binding peptide
  MOD_RES (6), (7), (41), (43): Xaa is C or S
  MOD_RES (21), (22), (23), (24), (25): Xaa is A or G
  MOD_RES (26), (27), (28), (29): Xaa is A or G or is absent
AAPASXXVPARLNAISILYFXXXXXXXXXLKKYRDMVVEAXGXR

SEQ ID NO: 29940 - protein, 37 aa, Artificial Sequence
  GFR-binding peptide
  MOD_RES (2), (3), (36): Xaa is C or S
  MOD_RES (17), (18), (19), (20), (21): Xaa is A or G
  MOD_RES (22), (23), (24), (25): Xaa is A or G or is absent
PXXVPQALEPISILYLXXXXXXXXXKFKYEMIVRSXK

SEQ ID NO: 29941 - protein, 39 aa, Artificial Sequence
  GFR-binding peptide
  MOD_RES (3), (4), (38): Xaa is C or S
  MOD_RES (18), (19), (20), (21), (22): Xaa is A or G
  MOD_RES (23), (24), (25), (26): Xaa is A or G or is absent
KPXXAPTQLEPISVLYLXXXXXXXXXKFKYENMVVRAXG

SEQ ID NO: 29942 - protein, 35 aa, Artificial Sequence
  GFR-binding peptide
  MOD_RES (1), (2): Xaa is C or S
  MOD_RES (16), (17), (18), (19), (20): Xaa is A or G
  MOD_RES (21), (22), (23), (24): Xaa is A or G or is absent
XXVPTKLSPISILYKXXXXXXXXXLKYHYGMAVSE

SEQ ID NO: 29943 - protein, 39 aa, Artificial Sequence; identical to SEQ ID NO: 8610
  GFR-binding peptide
  MOD_RES (6), (7), (38): Xaa is C or S

SEQ ID NO: 29944 - protein, 41 aa, Artificial Sequence; identical to SEQ ID NO: 8611
  GFR-binding peptide
  MOD_RES (6), (7), (38), (40): Xaa is C or S

SEQ ID NO: 29945 - protein, 38 aa, Artificial Sequence; identical to SEQ ID NO: 8613
  GFR-binding peptide
  MOD_RES (3), (4), (37): Xaa is C or S
  MOD_RES (18), (19), (20), (21), (22): Xaa is A or G
  MOD_RES (23), (24), (25), (26): Xaa is A or G or is absent

SEQ ID NO: 29946 - protein, 33 aa, Artificial Sequence
  GFR-binding peptide
  MOD_RES (1), (1): Xaa is C or S
  MOD_RES (15), (16), (17), (18), (19): Xaa is A or G
  MOD_RES (20), (21), (22), (23): Xaa is A or G or is absent
XVPARLSPISILYIXXXXXXXXXYKQYEDMVVE

SEQ ID NO: 29947 - protein, 43 aa, Artificial Sequence
  GFR-binding peptide
  MOD_RES (6), (40), (42): Xaa is C or S
  MOD_RES (20), (21), (22), (23), (24): Xaa is A or G
  MOD_RES (25), (26), (27), (28): Xaa is A or G or is absent
VTKPTXAPTKLEPISVLYLXXXXXXXXXKFKYENMVVRSXGXH

SEQ ID NO: 29948 - protein, 35 aa, Artificial Sequence
  GFR-binding peptide
  MOD_RES (4), (5): Xaa is C or S
ASPXXVSQDLSPISILYIIGKTPKIYKQYEMIVKS

SEQ ID NO: 29949 - protein, 39 aa, Artificial Sequence; identical to SEQ ID NO: 8615
  GFR-binding peptide
  MOD_RES (1), (2), (36), (38): Xaa is C or S
  MOD_RES (16), (17), (18), (19), (20): Xaa is A or G
  MOD_RES (21), (22), (23), (24): Xaa is A or G or is absent

SEQ ID NO: 29950 - protein, 38 aa, Artificial Sequence; identical to SEQ ID NO: 8616
  GFR-binding peptide
  MOD_RES (2), (36), (38): Xaa is C or S
  MOD_RES (16), (17), (18), (19), (20): Xaa is A or G
  MOD_RES (21), (22), (23), (24): Xaa is A or G or is absent

SEQ ID NO: 29951 - protein, 38 aa, Artificial Sequence
  GFR-binding peptide
  MOD_RES (5), (6), (38): Xaa is C or S
IPKAXXVPTELEPISMLYLDENEKVVKFKYEDMVVEGX

SEQ ID NO: 29952 - protein, 35 aa, Artificial Sequence; identical to SEQ ID NO: 8618
  GFR-binding peptide
  MOD_RES (1), (35): Xaa is C or S
  MOD_RES (15), (16), (17), (18), (19): Xaa is A or G
  MOD_RES (20), (21), (22), (23): Xaa is A or G or is absent

SEQ ID NO: 29953 - protein, 36 aa, Artificial Sequence; identical to SEQ ID NO: 8619
  GFR-binding peptide
  MOD_RES (5), (6): Xaa is C or S

SEQ ID NO: 29954 - protein, 37 aa, Artificial Sequence
  GFR-binding peptide
  MOD_RES (4), (5): Xaa is C or S
  MOD_RES (19), (20), (21), (22), (23): Xaa is A or G
  MOD_RES (24), (25), (26), (27): Xaa is A or G or is absent
SKAXXVPTKLNAISILYFXXXXXXXXXLKKYRGMAVS

SEQ ID NO: 29955 - protein, 32 aa, Artificial Sequence
  GFR-binding peptide
  MOD_RES (1), (1): Xaa is C or S
XVPARLEPISILYLDAANNVVKFKYEDMVVEA

SEQ ID NO: 29956 - protein, 38 aa, Artificial Sequence; identical to SEQ ID NO: 8621
  GFR-binding peptide
  MOD_RES (5), (6): Xaa is C or S
  MOD_RES (20), (21), (22), (23), (24): Xaa is A or G
  MOD_RES (25), (26), (27), (28): Xaa is A or G or is absent

SEQ ID NO: 29957 - protein, 40 aa, Artificial Sequence; identical to SEQ ID NO: 8622
  GFR-binding peptide
  MOD_RES (5), (6), (40): Xaa is C or S
  MOD_RES (20), (21), (22), (23), (24): Xaa is A or G
  MOD_RES (25), (26), (27), (28): Xaa is A or G or is absent

SEQ ID NO: 29958 - protein, 35 aa, Artificial Sequence
  GFR-binding peptide
  MOD_RES (1), (35): Xaa is C or S
  MOD_RES (15), (16), (17), (18), (19): Xaa is A or G
  MOD_RES (20), (21), (22), (23): Xaa is A or G or is absent
XVPARLEPISILYLXXXXXXXXXKFKYEDMVVEAX

SEQ ID NO: 29959 - protein, 42 aa, Artificial Sequence
  GFR-binding peptide
  MOD_RES (5), (6), (39), (41): Xaa is C or S
  MOD_RES (20), (21), (22), (23), (24): Xaa is A or G
  MOD_RES (25), (26), (27), (28): Xaa is A or G or is absent
SASPXXVPQDLSPISILYIXXXXXXXXXYKQYEMVVKSXKXS

SEQ ID NO: 29960 - protein, 36 aa, Artificial Sequence
  GFR-binding peptide
  MOD_RES (3), (4), (36): Xaa is C or S
KAXXVPTELEPISMLYLDENEKVVKFKYEDMVVEGX

SEQ ID NO: 29961 - protein, 38 aa, Artificial Sequence
  GFR-binding peptide
  MOD_RES (1), (35), (37): Xaa is C or S
  MOD_RES (15), (16), (17), (18), (19): Xaa is A or G
  MOD_RES (20), (21), (22), (23): Xaa is A or G or is absent
XVPARLNAISILYFXXXXXXXXXLKKYRDMVVEAXGXR

SEQ ID NO: 29962 - protein, 40 aa, Artificial Sequence
  GFR-binding peptide
  MOD_RES (6), (7): Xaa is C or S
  MOD_RES (21), (22), (23), (24), (25): Xaa is A or G
  MOD_RES (26), (27), (28), (29): Xaa is A or G or is absent
KIPKAXXVPTELSPISMLYIXXXXXXXXXYKQYEDMVVEG

SEQ ID NO: 29963 - protein, 32 aa, Artificial Sequence
  GFR-binding peptide
  MOD_RES (32), (32): Xaa is C or S
VPTELEPISMLYLDEYDKVVKFKYEEMVVEGX

SEQ ID NO: 29964 - protein, 38 aa, Artificial Sequence; identical to SEQ ID NO: 8628
  GFR-binding peptide
  MOD_RES (1), (36), (38): Xaa is C or S
  MOD_RES (15), (16), (17), (18), (19): Xaa is A or G
  MOD_RES (20), (21), (22), (23): Xaa is A or G or is absent

SEQ ID NO: 29965 - protein, 37 aa, Artificial Sequence
  GFR-binding peptide
  MOD_RES (1), (35), (37): Xaa is C or S
  MOD_RES (15), (16), (17), (18), (19): Xaa is A or G
  MOD_RES (20), (21), (22), (23): Xaa is A or G or is absent
XVPTELSPISMLYIXXXXXXXXXYKQYEEMVVEGXGX

SEQ ID NO: 29966 - protein, 36 aa, Artificial Sequence; identical to SEQ ID NO: 8629
  GFR-binding peptide
  MOD_RES (34), (36): Xaa is C or S
  MOD_RES (14), (15), (16), (17), (18): Xaa is A or G
  MOD_RES (19), (20), (21), (22): Xaa is A or G or is absent

SEQ ID NO: 29967 - protein, 38 aa, Artificial Sequence; identical to SEQ ID NO: 8630
  GFR-binding peptide
  MOD_RES (1), (2), (36), (38): Xaa is C or S
  MOD_RES (16), (17), (18), (19), (20): Xaa is A or G
  MOD_RES (21), (22), (23), (24): Xaa is A or G or is absent

SEQ ID NO: 29968 - protein, 37 aa, Artificial Sequence; identical to SEQ ID NO: 8631
  GFR-binding peptide
  MOD_RES (1), (34), (36): Xaa is C or S
  MOD_RES (15), (16), (17), (18), (19): Xaa is A or G
  MOD_RES (20), (21), (22), (23): Xaa is A or G or is absent

SEQ ID NO: 29969 - protein, 36 aa, Artificial Sequence
  GFR-binding peptide
  MOD_RES (3), (4), (36): Xaa is C or S
KPXXAPTKLEPISVLYLDDSSNVIKFKYENMVVRSX

SEQ ID NO: 29970 - protein, 40 aa, Artificial Sequence; identical to SEQ ID NO: 8635
  GFR-binding peptide
  MOD_RES (4), (5), (39): Xaa is C or S
  MOD_RES (19), (20), (21), (22), (23): Xaa is A or G
  MOD_RES (24), (25), (26), (27): Xaa is A or G or is absent

SEQ ID NO: 29971 - protein, 35 aa, Artificial Sequence; identical to SEQ ID NO: 8637
  GFR-binding peptide
  MOD_RES (2), (3), (35): Xaa is C or S

SEQ ID NO: 29972 - protein, 41 aa, Artificial Sequence; identical to SEQ ID NO: 8638
  GFR-binding peptide
  MOD_RES (6), (7): Xaa is C or S
  MOD_RES (21), (22), (23), (24), (25): Xaa is A or G
  MOD_RES (26), (27), (28), (29): Xaa is A or G or is absent

SEQ ID NO: 29973 - protein, 32 aa, Artificial Sequence
  GFR-binding peptide
  MOD_RES (31), (31): Xaa is C or S
VSQDLEPISILYLIGKTPKIKFKYEMIVKSXK

SEQ ID NO: 29974 - protein, 36 aa, Artificial Sequence
  GFR-binding peptide
  MOD_RES (3), (4), (36): Xaa is C or S
KAXXVPTKLSPISILYKDKGVVTYLKYHYGMAVSEX

SEQ ID NO: 29975 - protein, 34 aa, Artificial Sequence
  GFR-binding peptide
  MOD_RES (32), (34): Xaa is C or S
VPTKLSPISILYKDKGVVTYLKYHYGMAVSEXGX

SEQ ID NO: 29976 - protein, 33 aa, Artificial Sequence
  GFR-binding peptide
  MOD_RES (1), (2), (33): Xaa is C or S
XXVPQDLEPISILYLVGRTPKVKFKYEMVVKSX

SEQ ID NO: 29977 - protein, 33 aa, Artificial Sequence
  GFR-binding peptide
  MOD_RES (1), (32): Xaa is C or S
XVPQALEPISILYLVGRKPKVKFKYEMIVRSXK

SEQ ID NO: 29978 - protein, 35 aa, Artificial Sequence
  GFR-binding peptide
  MOD_RES (4), (5): Xaa is C or S
PKPXXAPTKLEPISVLYLDDSSNVIKFKYENMVVR

SEQ ID NO: 29979 - protein, 37 aa, Artificial Sequence
  GFR-binding peptide
  MOD_RES (1), (34), (36): Xaa is C or S
  MOD_RES (15), (16), (17), (18), (19): Xaa is A or G
  MOD_RES (20), (21), (22), (23): Xaa is A or G or is absent
XVPQDLEPISILYLXXXXXXXXXKFKYEMVVKSXKXS

SEQ ID NO: 29980 - protein, 44 aa, Artificial Sequence
  GFR-binding peptide
  MOD_RES (6), (7), (41), (43): Xaa is C or S
  MOD_RES (21), (22), (23), (24), (25): Xaa is A or G
  MOD_RES (26), (27), (28), (29): Xaa is A or G or is absent
AAPASXXVPARLSPISILYIXXXXXXXXXYKQYEDMVVEAXGXR

SEQ ID NO: 29981 - protein, 35 aa, Artificial Sequence
  GFR-binding peptide
  MOD_RES (2), (3): Xaa is C or S
  MOD_RES (17), (18), (19), (20), (21): Xaa is A or G
  MOD_RES (22), (23), (24), (25): Xaa is A or G or is absent
PXXVPQALSPISILYIXXXXXXXXXYKQYEMIVRS

SEQ ID NO: 29982 - protein, 38 aa, Artificial Sequence; identical to SEQ ID NO: 8644
  GFR-binding peptide
  MOD_RES (4), (36), (38): Xaa is C or S

SEQ ID NO: 29983 - protein, 39 aa, Artificial Sequence
  GFR-binding peptide
  MOD_RES (6), (7), (39): Xaa is C or S
TVPKPXXAPTQLEPISVLYLDDSSNVIKFKYENMVVRAX

SEQ ID NO: 29984 - protein, 40 aa, Artificial Sequence
  GFR-binding peptide
  MOD_RES (3), (4), (38), (40): Xaa is C or S
  MOD_RES (18), (19), (20), (21), (22): Xaa is A or G
  MOD_RES (23), (24), (25), (26): Xaa is A or G or is absent
KPXXAPTKLSPISVLYIXXXXXXXXXYKQYENMVVRSXGX

SEQ ID NO: 29985 - protein, 39 aa, Artificial Sequence
  GFR-binding peptide
  MOD_RES (2), (3), (36), (38): Xaa is C or S
AXXVPTKLEPISVLYLDDMGVPTKFKYEEGMSVAEXGXR

SEQ ID NO: 29986 - protein, 37 aa, Artificial Sequence
  GFR-binding peptide
  MOD_RES (3), (4): Xaa is C or S
  MOD_RES (18), (19), (20), (21), (22): Xaa is A or G
  MOD_RES (23), (24), (25), (26): Xaa is A or G or is absent
KAXXVPTELEPISMLYLXXXXXXXXXKFKYEEMVVEG

SEQ ID NO: 29987 - protein, 43 aa, Artificial Sequence
  GFR-binding peptide
  MOD_RES (6), (7), (42): Xaa is C or S
  MOD_RES (21), (22), (23), (24), (25): Xaa is A or G
  MOD_RES (26), (27), (28), (29): Xaa is A or G or is absent
KVGKAXXVPTKLEPISVLYLXXXXXXXXXKFKYEEGMSVAEXG

SEQ ID NO: 29988 - protein, 34 aa, Artificial Sequence
  GFR-binding peptide
  MOD_RES (1), (2), (34): Xaa is C or S
XXAPTKLSPISVLYIDDSSNVIYKQYENMVVRSX

SEQ ID NO: 29989 - protein, 34 aa, Artificial Sequence
  GFR-binding peptide
  MOD_RES (3), (4): Xaa is C or S
APXXVPQALSPISILYIVGRKPKVYKQYEMIVRS

SEQ ID NO: 29990 - protein, 37 aa, Artificial Sequence; identical to SEQ ID NO: 8647
  GFR-binding peptide
  MOD_RES (3), (4), (36): Xaa is C or S

SEQ ID NO: 29991 - protein, 36 aa, Artificial Sequence; identical to SEQ ID NO: 8648
  GFR-binding peptide
  MOD_RES (2), (3), (35): Xaa is C or S

SEQ ID NO: 29992 - protein, 34 aa, Artificial Sequence; identical to SEQ ID NO: 8650
  GFR-binding peptide
  MOD_RES (31), (33): Xaa is C or S

SEQ ID NO: 29993 - protein, 36 aa, Artificial Sequence; identical to SEQ ID NO: 8653
  GFR-binding peptide
  MOD_RES (3), (4): Xaa is C or S
  MOD_RES (18), (19), (20), (21), (22): Xaa is A or G
  MOD_RES (23), (24), (25), (26): Xaa is A or G or is absent

SEQ ID NO: 29994 - protein, 32 aa, Artificial Sequence; identical to SEQ ID NO: 8655
  GFR-binding peptide
  MOD_RES (14), (15), (16), (17), (18): Xaa is A or G
  MOD_RES (19), (20), (21), (22): Xaa is A or G or is absent

SEQ ID NO: 29995 - protein, 38 aa, Artificial Sequence; identical to SEQ ID NO: 8656
  GFR-binding peptide
  MOD_RES (4), (5): Xaa is C or S
  MOD_RES (19), (20), (21), (22), (23): Xaa is A or G
  MOD_RES (24), (25), (26), (27): Xaa is A or G or is absent

SEQ ID NO: 29996 - protein, 33 aa, Artificial Sequence
  GFR-binding peptide
  MOD_RES (2), (3): Xaa is C or S
AXXVPTELSPISMLYIDEYDKVVYKQYEEMVVE

SEQ ID NO: 29997 - protein, 39 aa, Artificial Sequence
  GFR-binding peptide
  MOD_RES (3), (4), (38): Xaa is C or S
  MOD_RES (18), (19), (20), (21), (22): Xaa is A or G
  MOD_RES (23), (24), (25), (26): Xaa is A or G or is absent
KAXXVPTELSPISMLYIXXXXXXXXXYKQYEEMVVEGXG

SEQ ID NO: 29998 - protein, 40 aa, Artificial Sequence
  GFR-binding peptide
  MOD_RES (3), (4), (37), (39): Xaa is C or S
  MOD_RES (18), (19), (20), (21), (22): Xaa is A or G
  MOD_RES (23), (24), (25), (26): Xaa is A or G or is absent
SPXXVSQDLEPISILYLXXXXXXXXXKFKYEMIVKSXKXS

SEQ ID NO: 29999 - protein, 39 aa, Artificial Sequence
  GFR-binding peptide
  MOD_RES (4), (5), (38): Xaa is C or S
  MOD_RES (19), (20), (21), (22), (23): Xaa is A or G
  MOD_RES (24), (25), (26), (27): Xaa is A or G or is absent
ASPXXVPQDLEPISILYLXXXXXXXXXKFKYEMVVKSXK

SEQ ID NO: 30000 - protein, 37 aa, Artificial Sequence
  GFR-binding peptide
  MOD_RES (2), (3), (35), (37): Xaa is C or S
AXXVPTELSPISMLYIDEYDKVVYKQYEEMVVEGXGX

SEQ ID NO: 30001 - protein, 36 aa, Artificial Sequence; identical to SEQ ID NO: 8664
  GFR-binding peptide
  MOD_RES (1), (33), (35): Xaa is C or S

SEQ ID NO: 30002 - protein, 35 aa, Artificial Sequence; identical to SEQ ID NO: 8666
  GFR-binding peptide
  MOD_RES (34), (34): Xaa is C or S
  MOD_RES (14), (15), (16), (17), (18): Xaa is A or G
  MOD_RES (19), (20), (21), (22): Xaa is A or G or is absent

SEQ ID NO: 30003 - protein, 37 aa, Artificial Sequence
  GFR-binding peptide
  MOD_RES (3), (4), (36): Xaa is C or S
KPXXAPTQLEPISVLYLDDSSNVIKFKYENMVVRAXG

SEQ ID NO: 30004 - protein, 32 aa, Artificial Sequence; identical to SEQ ID NO: 8668
  GFR-binding peptide
  MOD_RES (14), (15), (16), (17), (18): Xaa is A or G
  MOD_RES (19), (20), (21), (22): Xaa is A or G or is absent

SEQ ID NO: 30005 - protein, 36 aa, Artificial Sequence
  GFR-binding peptide
  MOD_RES (2), (3): Xaa is C or S
  MOD_RES (17), (18), (19), (20), (21): Xaa is A or G
  MOD_RES (22), (23), (24), (25): Xaa is A or G or is absent
AXXVPTKLNAISILYFXXXXXXXXXLKKYRGMAVSE

SEQ ID NO: 30006 - protein, 43 aa, Artificial Sequence; identical to SEQ ID NO: 8670
  GFR-binding peptide
  MOD_RES (6), (7), (41), (43): Xaa is C or S
  MOD_RES (21), (22), (23), (24), (25): Xaa is A or G
  MOD_RES (26), (27), (28), (29): Xaa is A or G or is absent

SEQ ID NO: 30007 - protein, 37 aa, Artificial Sequence
  GFR-binding peptide
  MOD_RES (2), (3), (34), (36): Xaa is C or S
PXXVPQALSPISILYIVGRKPKVYKQYEMIVRSXKXS

SEQ ID NO: 30008 - protein, 40 aa, Artificial Sequence
  GFR-binding peptide
  MOD_RES (4), (5), (39): Xaa is C or S
  MOD_RES (19), (20), (21), (22), (23): Xaa is A or G
  MOD_RES (24), (25), (26), (27): Xaa is A or G or is absent
PKPXXAPTQLEPISVLYLXXXXXXXXXKFKYENMVVRAXG

SEQ ID NO: 30009 - protein, 40 aa, Artificial Sequence; identical to SEQ ID NO: 8671
  GFR-binding peptide
  MOD_RES (7), (7): Xaa is C or S
  MOD_RES (21), (22), (23), (24), (25): Xaa is A or G
  MOD_RES (26), (27), (28), (29): Xaa is A or G or is absent

SEQ ID NO: 30010 - protein, 35 aa, Artificial Sequence
  GFR-binding peptide
  MOD_RES (2), (3): Xaa is C or S
  MOD_RES (17), (18), (19), (20), (21): Xaa is A or G
  MOD_RES (22), (23), (24), (25): Xaa is A or G or is absent
AXXVPTELEPISMLYLXXXXXXXXXKFKYEDMVVE

SEQ ID NO: 30011 - protein, 34 aa, Artificial Sequence
  GFR-binding peptide
  MOD_RES (34), (34): Xaa is C or S
  MOD_RES (14), (15), (16), (17), (18): Xaa is A or G
  MOD_RES (19), (20), (21), (22): Xaa is A or G or is absent
VPTELEPISMLYLXXXXXXXXXKFKYEDMVVEGX

SEQ ID NO: 30012 - protein, 38 aa, Artificial Sequence; identical to SEQ ID NO: 8674
  GFR-binding peptide
  MOD_RES (3), (4), (35), (37): Xaa is C or S

SEQ ID NO: 30013 - protein, 43 aa, Artificial Sequence
  GFR-binding peptide
  MOD_RES (5), (6), (40), (42): Xaa is C or S
  MOD_RES (20), (21), (22), (23), (24): Xaa is A or G
  MOD_RES (25), (26), (27), (28): Xaa is A or G or is absent
VPKAXXAPTKLSPISVLYIXXXXXXXXXYKQYENMVVKAXGXH

SEQ ID NO: 30014 - protein, 39 aa, Artificial Sequence; identical to SEQ ID NO: 8676
  GFR-binding peptide
  MOD_RES (3), (4), (38): Xaa is C or S
  MOD_RES (18), (19), (20), (21), (22): Xaa is A or G
  MOD_RES (23), (24), (25), (26): Xaa is A or G or is absent

SEQ ID NO: 30015 - protein, 38 aa, Artificial Sequence
  GFR-binding peptide
  MOD_RES (4), (5): Xaa is C or S
  MOD_RES (19), (20), (21), (22), (23): Xaa is A or G
  MOD_RES (24), (25), (26), (27): Xaa is A or G or is absent
PASXXVPARLNAISILYFXXXXXXXXXLKKYRDMVVEA

SEQ ID NO: 30016 - protein, 36 aa, Artificial Sequence; identical to SEQ ID NO: 8677
  GFR-binding peptide
  MOD_RES (1), (2): Xaa is C or S
  MOD_RES (16), (17), (18), (19), (20): Xaa is A or G
  MOD_RES (21), (22), (23), (24): Xaa is A or G or is absent

SEQ ID NO: 30017 - protein, 36 aa, Artificial Sequence
  GFR-binding peptide
  MOD_RES (4), (5): Xaa is C or S
PKAXXAPTKLSPISVLYIDSSNNVIYKQYENMVVKA

SEQ ID NO: 30018 - protein, 32 aa, Artificial Sequence
  GFR-binding peptide
  MOD_RES (14), (15), (16), (17), (18): Xaa is A or G
  MOD_RES (19), (20), (21), (22): Xaa is A or G or is absent
VPQALEPISILYLXXXXXXXXXKFKYEMIVRS

SEQ ID NO: 30019 - protein, 42 aa, Artificial Sequence
  GFR-binding peptide
  MOD_RES (5), (6), (39), (41): Xaa is C or S
  MOD_RES (20), (21), (22), (23), (24): Xaa is A or G
  MOD_RES (25), (26), (27), (28): Xaa is A or G or is absent
SASPXXVPQDLEPISILYLXXXXXXXXXKFKYEMVVKSXKXS

SEQ ID NO: 30020 - protein, 42 aa, Artificial Sequence
  GFR-binding peptide
  MOD_RES (6), (7), (42): Xaa is C or S
  MOD_RES (21), (22), (23), (24), (25): Xaa is A or G
  MOD_RES (26), (27), (28), (29): Xaa is A or G or is absent
KVGKAXXVPTKLEPISVLYLXXXXXXXXXKFKYEEGMSVAEX

SEQ ID NO: 30021 - protein, 38 aa, Artificial Sequence
  GFR-binding peptide
  MOD_RES (3), (4), (38): Xaa is C or S
  MOD_RES (18), (19), (20), (21), (22): Xaa is A or G
  MOD_RES (23), (24), (25), (26): Xaa is A or G or is absent
KPXXAPTQLEPISVLYLXXXXXXXXXKFKYENMVVRAX

SEQ ID NO: 30022 - protein, 34 aa, Artificial Sequence
  GFR-binding peptide
  MOD_RES (1), (2): Xaa is C or S
  MOD_RES (16), (17), (18), (19), (20): Xaa is A or G
  MOD_RES (21), (22), (23), (24): Xaa is A or G or is absent
XXVPTKLSPISILYKXXXXXXXXXLKYHYGMAVS

SEQ ID NO: 30023 - protein, 38 aa, Artificial Sequence; identical to SEQ ID NO: 8680
  GFR-binding peptide
  MOD_RES (5), (6), (37): Xaa is C or S

SEQ ID NO: 30024 - protein, 43 aa, Artificial Sequence; identical to SEQ ID NO: 8683
  GFR-binding peptide
  MOD_RES (6), (7), (41), (43): Xaa is C or S
  MOD_RES (21), (22), (23), (24), (25): Xaa is A or G
  MOD_RES (26), (27), (28), (29): Xaa is A or G or is absent

SEQ ID NO: 30025 - protein, 32 aa, Artificial Sequence
  GFR-binding peptide
  MOD_RES (1), (1): Xaa is C or S
XVPTKLSPISILYIDKGVVTYYKQYEGMAVSE

SEQ ID NO: 30026 - protein, 41 aa, Artificial Sequence
  GFR-binding peptide
  MOD_RES (5), (39), (41): Xaa is C or S
  MOD_RES (19), (20), (21), (22), (23): Xaa is A or G
  MOD_RES (24), (25), (26), (27): Xaa is A or G or is absent
TKPTXAPTKLSPISVLYIXXXXXXXXXYKQYENMVVRSXGX

SEQ ID NO: 30027 - protein, 33 aa, Artificial Sequence
  GFR-binding peptide
  MOD_RES (1), (33): Xaa is C or S
XVPTKLNAISILYFDKGVVTYLKKYRGMAVSEX

SEQ ID NO: 30028 - protein, 35 aa, Artificial Sequence; identical to SEQ ID NO: 8688
  GFR-binding peptide
  MOD_RES (1), (2), (34): Xaa is C or S

SEQ ID NO: 30029 - protein, 34 aa, Artificial Sequence
  GFR-binding peptide
  MOD_RES (1), (1): Xaa is C or S
  MOD_RES (15), (16), (17), (18), (19): Xaa is A or G
  MOD_RES (20), (21), (22), (23): Xaa is A or G or is absent
XVPARLEPISILYLXXXXXXXXXKFKYEDMVVEA

SEQ ID NO: 30030 - protein, 31 aa, Artificial Sequence; identical to SEQ ID NO: 8690
  GFR-binding peptide
  MOD_RES (1), (1): Xaa is C or S

SEQ ID NO: 30031 - protein, 39 aa, Artificial Sequence; identical to SEQ ID NO: 8691
  GFR-binding peptide
  MOD_RES (4), (5), (37), (39): Xaa is C or S

SEQ ID NO: 30032 - protein, 37 aa, Artificial Sequence; identical to SEQ ID NO: 8693
  GFR-binding peptide
  MOD_RES (3), (4), (35), (37): Xaa is C or S

SEQ ID NO: 30033 - protein, 32 aa, Artificial Sequence
  GFR-binding peptide
  MOD_RES (32), (32): Xaa is C or S
APTKLSPISVLYIDDSSNVIYKQYENMVVRSX

SEQ ID NO: 30034 - protein, 36 aa, Artificial Sequence
  GFR-binding peptide
  MOD_RES (3), (4): Xaa is C or S
  MOD_RES (18), (19), (20), (21), (22): Xaa is A or G
  MOD_RES (23), (24), (25), (26): Xaa is A or G or is absent
ASXXVPARLNAISILYFXXXXXXXXXLKKYRDMVVE

SEQ ID NO: 30035 - protein, 36 aa, Artificial Sequence
  GFR-binding peptide
  MOD_RES (3), (35): Xaa is C or S
PTXAPTKLEPISVLYLDDSSNVIKFKYENMVVRSXG

SEQ ID NO: 30036 - protein, 41 aa, Artificial Sequence
  GFR-binding peptide
  MOD_RES (6), (7), (39), (41): Xaa is C or S
TVPKPXXAPTQLSPISVLYIDDSSNVIYKQYENMVVRAXGX

SEQ ID NO: 30037 - protein, 37 aa, Artificial Sequence; identical to SEQ ID NO: 8698
  GFR-binding peptide
  MOD_RES (5), (6), (37): Xaa is C or S

SEQ ID NO: 30038 - protein, 39 aa, Artificial Sequence
  GFR-binding peptide
  MOD_RES (7), (39): Xaa is C or S
HVTKPTXAPTKLEPISVLYLDDSSNVIKFKYENMVVRSX

SEQ ID NO: 30039 - protein, 37 aa, Artificial Sequence; identical to SEQ ID NO: 8700
  GFR-binding peptide
  MOD_RES (6), (7): Xaa is C or S

SEQ ID NO: 30040 - protein, 39 aa, Artificial Sequence; identical to SEQ ID NO: 8702
  GFR-binding peptide
  MOD_RES (4), (5), (39): Xaa is C or S
  MOD_RES (19), (20), (21), (22), (23): Xaa is A or G
  MOD_RES (24), (25), (26), (27): Xaa is A or G or is absent

SEQ ID NO: 30041 - protein, 37 aa, Artificial Sequence
  GFR-binding peptide
  MOD_RES (1), (2), (36): Xaa is C or S
  MOD_RES (16), (17), (18), (19), (20): Xaa is A or G
  MOD_RES (21), (22), (23), (24): Xaa is A or G or is absent
XXAPTQLEPISVLYLXXXXXXXXXKFKYENMVVRAXG

SEQ ID NO: 30042 - protein, 43 aa, Artificial Sequence
  GFR-binding peptide
  MOD_RES (5), (6), (40), (42): Xaa is C or S
  MOD_RES (20), (21), (22), (23), (24): Xaa is A or G
  MOD_RES (25), (26), (27), (28): Xaa is A or G or is absent
ASKAXXVPTKLNAISILYFXXXXXXXXXLKKYRGMAVSEXGXR

SEQ ID NO: 30043 - protein, 37 aa, Artificial Sequence
  GFR-binding peptide
  MOD_RES (1), (2), (36): Xaa is C or S
  MOD_RES (16), (17), (18), (19), (20): Xaa is A or G
  MOD_RES (21), (22), (23), (24): Xaa is A or G or is absent
XXAPTKLEPISVLYLXXXXXXXXXKFKYENMVVKAXG

SEQ ID NO: 30044 - protein, 40 aa, Artificial Sequence
  GFR-binding peptide
  MOD_RES (4), (5), (37), (39): Xaa is C or S
SKAXXVPTKLNAISILYFDKGVVTYLKKYRGMAVSEXGXR

SEQ ID NO: 30045 - protein, 40 aa, Artificial Sequence; identical to SEQ ID NO: 8707
  GFR-binding peptide
  MOD_RES (4), (5), (39): Xaa is C or S
  MOD_RES (19), (20), (21), (22), (23): Xaa is A or G
  MOD_RES (24), (25), (26), (27): Xaa is A or G or is absent

SEQ ID NO: 30046 - protein, 34 aa, Artificial Sequence
  GFR-binding peptide
  MOD_RES (1), (33): Xaa is C or S
XVPTKLSPISILYIDKGVVTYYKQYEGMAVSEXG

SEQ ID NO: 30047 - protein, 34 aa, Artificial Sequence
  GFR-binding peptide
  MOD_RES (34), (34): Xaa is C or S
  MOD_RES (14), (15), (16), (17), (18): Xaa is A or G
  MOD_RES (19), (20), (21), (22): Xaa is A or G or is absent
VPARLSPISILYKXXXXXXXXXLKYHYDMVVEAX

SEQ ID NO: 30048 - protein, 38 aa, Artificial Sequence
  GFR-binding peptide
  MOD_RES (4), (5): Xaa is C or S
  MOD_RES (19), (20), (21), (22), (23): Xaa is A or G
  MOD_RES (24), (25), (26), (27): Xaa is A or G or is absent
PKPXXAPTKLSPISVLYIXXXXXXXXXYKQYENMVVRS

SEQ ID NO: 30049 - protein, 36 aa, Artificial Sequence; identical to SEQ ID NO: 8711
  GFR-binding peptide
  MOD_RES (1), (2), (35): Xaa is C or S
  MOD_RES (16), (17), (18), (19), (20): Xaa is A or G
  MOD_RES (21), (22), (23), (24): Xaa is A or G or is absent

SEQ ID NO: 30050 - protein, 32 aa, Artificial Sequence
  GFR-binding peptide
  MOD_RES (1), (1): Xaa is C or S
XVPTELEPISMLYLDENEKVVKFKYEDMVVEG

SEQ ID NO: 30051 - protein, 39 aa, Artificial Sequence
  GFR-binding peptide
  MOD_RES (4), (5), (37), (39): Xaa is C or S
PKPXXAPTQLSPISVLYIDDSSNVIYKQYENMVVRAXGX

SEQ ID NO: 30052 - protein, 33 aa, Artificial Sequence; identical to SEQ ID NO: 8712
  GFR-binding peptide
  MOD_RES (2), (2): Xaa is C or S

SEQ ID NO: 30053 - protein, 33 aa, Artificial Sequence; identical to SEQ ID NO: 8713
  GFR-binding peptide
  MOD_RES (2), (3): Xaa is C or S

SEQ ID NO: 30054 - protein, 38 aa, Artificial Sequence
  GFR-binding peptide
  MOD_RES (5), (5): Xaa is C or S
  MOD_RES (19), (20), (21), (22), (23): Xaa is A or G
  MOD_RES (24), (25), (26), (27): Xaa is A or G or is absent
TKPTXAPTKLSPISVLYIXXXXXXXXXYKQYENMVVRS

SEQ ID NO: 30055 - protein, 36 aa, Artificial Sequence
  GFR-binding peptide
  MOD_RES (1), (33), (35): Xaa is C or S
XAPTKLSPISVLYIDSSNNVIYKQYENMVVKAXGXH

SEQ ID NO: 30056 - protein, 41 aa, Artificial Sequence; identical to SEQ ID NO: 8719
  GFR-binding peptide
  MOD_RES (3), (4), (38), (40): Xaa is C or S
  MOD_RES (18), (19), (20), (21), (22): Xaa is A or G
  MOD_RES (23), (24), (25), (26): Xaa is A or G or is absent

SEQ ID NO: 30057 - protein, 34 aa, Artificial Sequence
  GFR-binding peptide
  MOD_RES (1), (33): Xaa is C or S
XAPTKLSPISVLYIDDSSNVIYKQYENMVVRSXG

SEQ ID NO: 30058 - protein, 34 aa, Artificial Sequence
  GFR-binding peptide
  MOD_RES (1), (33): Xaa is C or S
XVPARLSPISILYKDAANNVVLKYHYDMVVEAXG

SEQ ID NO: 30059 - protein, 30 aa, Artificial Sequence
  GFR-binding peptide
VPTELSPISMLYIDENEKVVYKQYEDMVVE

SEQ ID NO: 30060 - protein, 37 aa, Artificial Sequence; identical to SEQ ID NO: 8721
  GFR-binding peptide
  MOD_RES (6), (7): Xaa is C or S

SEQ ID NO: 30061 - protein, 35 aa, Artificial Sequence; identical to SEQ ID NO: 8722
  GFR-binding peptide
  MOD_RES (1), (33), (35): Xaa is C or S

SEQ ID NO: 30062 - protein, 36 aa, Artificial Sequence
  GFR-binding peptide
  MOD_RES (1), (33), (35): Xaa is C or S
XAPTKLEPISVLYLDSSNNVIKFKYENMVVKAXGXH

SEQ ID NO: 30063 - protein, 38 aa, Artificial Sequence; identical to SEQ ID NO: 8724
  GFR-binding peptide
  MOD_RES (1), (2), (35), (37): Xaa is C or S

SEQ ID NO: 30064 - protein, 32 aa, Artificial Sequence
  GFR-binding peptide
  MOD_RES (2), (2): Xaa is C or S
TXAPTKLSPISVLYIDDSSNVIYKQYENMVVR

SEQ ID NO: 30065 - protein, 39 aa, Artificial Sequence; identical to SEQ ID NO: 8727
  GFR-binding peptide
  MOD_RES (2), (3), (37), (39): Xaa is C or S
  MOD_RES (17), (18), (19), (20), (21): Xaa is A or G
  MOD_RES (22), (23), (24), (25): Xaa is A or G or is absent

SEQ ID NO: 30066 - protein, 37 aa, Artificial Sequence; identical to SEQ ID NO: 8728
  GFR-binding peptide
  MOD_RES (5), (6): Xaa is C or S

SEQ ID NO: 30067 - protein, 42 aa, Artificial Sequence
  GFR-binding peptide
  MOD_RES (6), (7), (41): Xaa is C or S
  MOD_RES (21), (22), (23), (24), (25): Xaa is A or G
  MOD_RES (26), (27), (28), (29): Xaa is A or G or is absent
TVPKPXXAPTQLEPISVLYLXXXXXXXXXKFKYENMVVRAXG

SEQ ID NO: 30068 - protein, 39 aa, Artificial Sequence
  GFR-binding peptide
  MOD_RES (4), (5), (37), (39): Xaa is C or S
SKAXXVPTKLSPISILYKDKGVVTYLKYHYGMAVSEXGX

SEQ ID NO: 30069 - protein, 37 aa, Artificial Sequence
  GFR-binding peptide
  MOD_RES (2), (3), (37): Xaa is C or S
  MOD_RES (17), (18), (19), (20), (21): Xaa is A or G
  MOD_RES (22), (23), (24), (25): Xaa is A or G or is absent
AXXVPTKLSPISILYKXXXXXXXXXLKYHYGMAVSEX

SEQ ID NO: 30070 - protein, 42 aa, Artificial Sequence
  GFR-binding peptide
  MOD_RES (5), (6), (40), (42): Xaa is C or S
  MOD_RES (20), (21), (22), (23), (24): Xaa is A or G
  MOD_RES (25), (26), (27), (28): Xaa is A or G or is absent
APASXXVPARLNAISILYFXXXXXXXXXLKKYRDMVVEAXGX

SEQ ID NO: 30071 - protein, 39 aa, Artificial Sequence; identical to SEQ ID NO: 8731
  GFR-binding peptide
  MOD_RES (5), (6): Xaa is C or S
  MOD_RES (20), (21), (22), (23), (24): Xaa is A or G
  MOD_RES (25), (26), (27), (28): Xaa is A or G or is absent

SEQ ID NO: 30072 - protein, 38 aa, Artificial Sequence
  GFR-binding peptide
  MOD_RES (3), (4), (38): Xaa is C or S
  MOD_RES (18), (19), (20), (21), (22): Xaa is A or G
  MOD_RES (23), (24), (25), (26): Xaa is A or G or is absent
KAXXAPTKLSPISVLYIXXXXXXXXXYKQYENMVVKAX

SEQ ID NO: 30073 - protein, 40 aa, Artificial Sequence
  GFR-binding peptide
  MOD_RES (5), (6), (38), (40): Xaa is C or S
IPKAXXVPTELEPISMLYLDENEKVVKFKYEDMVVEGXGX

SEQ ID NO: 30074 - protein, 39 aa, Artificial Sequence
  GFR-binding peptide
  MOD_RES (2), (3), (36), (38): Xaa is C or S
  MOD_RES (17), (18), (19), (20), (21): Xaa is A or G
  MOD_RES (22), (23), (24), (25): Xaa is A or G or is absent
PXXVSQDLSPISILYIXXXXXXXXXYKQYEMIVKSXKXS

SEQ ID NO: 30075 - protein, 34 aa, Artificial Sequence
  GFR-binding peptide
  MOD_RES (3), (4): Xaa is C or S
KAXXVPTELEPISMLYLDEYDKVVKFKYEEMVVE

SEQ ID NO: 30076 - protein, 41 aa, Artificial Sequence; identical to SEQ ID NO: 8735
  GFR-binding peptide
  MOD_RES (4), (5), (38), (40): Xaa is C or S
  MOD_RES (19), (20), (21), (22), (23): Xaa is A or G
  MOD_RES (24), (25), (26), (27): Xaa is A or G or is absent

SEQ ID NO: 30077 - protein, 39 aa, Artificial Sequence; identical to SEQ ID NO: 8736
  GFR-binding peptide
  MOD_RES (1), (2), (36), (38): Xaa is C or S
  MOD_RES (16), (17), (18), (19), (20): Xaa is A or G
  MOD_RES (21), (22), (23), (24): Xaa is A or G or is absent

SEQ ID NO: 30078 - protein, 41 aa, Artificial Sequence
  GFR-binding peptide
  MOD_RES (4), (5), (38), (40): Xaa is C or S
  MOD_RES (19), (20), (21), (22), (23): Xaa is A or G
  MOD_RES (24), (25), (26), (27): Xaa is A or G or is absent
AAPXXVPQALEPISILYLXXXXXXXXXKFKYEMIVRSXKXS

SEQ ID NO: 30079 - protein, 36 aa, Artificial Sequence
  GFR-binding peptide
  MOD_RES (4), (5): Xaa is C or S
PASXXVPARLSPISILYKDAANNVVLKYHYDMVVEA

SEQ ID NO: 30080 - protein, 32 aa, Artificial Sequence
  GFR-binding peptide
VPTKLEPISVLYLDDMGVPTKFKYEEGMSVAE

SEQ ID NO: 30081 - protein, 38 aa, Artificial Sequence
  GFR-binding peptide
  MOD_RES (1), (2), (35), (37): Xaa is C or S
  MOD_RES (16), (17), (18), (19), (20): Xaa is A or G
  MOD_RES (21), (22), (23), (24): Xaa is A or G or is absent
XXVPQDLSPISILYIXXXXXXXXXYKQYEMVVKSXKXS

SEQ ID NO: 30082 - protein, 35 aa, Artificial Sequence
  GFR-binding peptide
  MOD_RES (2), (2): Xaa is C or S
  MOD_RES (16), (17), (18), (19), (20): Xaa is A or G
  MOD_RES (21), (22), (23), (24): Xaa is A or G or is absent
TXAPTKLEPISVLYLXXXXXXXXXKFKYENMVVRS

SEQ ID NO: 30083 - protein, 40 aa, Artificial Sequence
  GFR-binding peptide
  MOD_RES (4), (5), (38), (40): Xaa is C or S
  MOD_RES (19), (20), (21), (22), (23): Xaa is A or G
  MOD_RES (24), (25), (26), (27): Xaa is A or G or is absent
ASPXXVPQDLSPISILYIXXXXXXXXXYKQYEMVVKSXKX

SEQ ID NO: 30084 - protein, 33 aa, Artificial Sequence
  GFR-binding peptide
  MOD_RES (1), (1): Xaa is C or S
  MOD_RES (15), (16), (17), (18), (19): Xaa is A or G
  MOD_RES (20), (21), (22), (23): Xaa is A or G or is absent
XVPTKLSPISILYIXXXXXXXXXYKQYEGMAVS

SEQ ID NO: 30085 - protein, 35 aa, Artificial Sequence
  GFR-binding peptide
  MOD_RES (33), (35): Xaa is C or S
  MOD_RES (14), (15), (16), (17), (18): Xaa is A or G
  MOD_RES (19), (20), (21), (22): Xaa is A or G or is absent
VPQDLSPISILYIXXXXXXXXXYKQYEMVVKSXKX

SEQ ID NO: 30086 - protein, 39 aa, Artificial Sequence; identical to SEQ ID NO: 8742
  GFR-binding peptide
  MOD_RES (3), (4), (38): Xaa is C or S
  MOD_RES (18), (19), (20), (21), (22): Xaa is A or G
  MOD_RES (23), (24), (25), (26): Xaa is A or G or is absent

SEQ ID NO: 30087 - protein, 36 aa, Artificial Sequence
  GFR-binding peptide
  MOD_RES (2), (36): Xaa is C or S
  MOD_RES (16), (17), (18), (19), (20): Xaa is A or G
  MOD_RES (21), (22), (23), (24): Xaa is A or G or is absent
TXAPTKLSPISVLYIXXXXXXXXXYKQYENMVVRSX

SEQ ID NO: 30088 - protein, 33 aa, Artificial Sequence
  GFR-binding peptide
  MOD_RES (32), (32): Xaa is C or S
VPARLEPISILYLDAANNVVKFKYEDMVVEAXG

SEQ ID NO: 30089 - protein, 41 aa, Artificial Sequence
  GFR-binding peptide
  MOD_RES (4), (5), (38), (40): Xaa is C or S
  MOD_RES (19), (20), (21), (22), (23): Xaa is A or G
  MOD_RES (24), (25), (26), (27): Xaa is A or G or is absent
ASPXXVSQDLSPISILYIXXXXXXXXXYKQYEMIVKSXKXS

SEQ ID NO: 30090 - protein, 34 aa, Artificial Sequence
  GFR-binding peptide
  MOD_RES (1), (33): Xaa is C or S
XAPTQLSPISVLYIDDSSNVIYKQYENMVVRAXG

SEQ ID NO: 30091 - protein, 36 aa, Artificial Sequence; identical to SEQ ID NO: 8744
  GFR-binding peptide
  MOD_RES (5), (6): Xaa is C or S

SEQ ID NO: 30092 - protein, 43 aa, Artificial Sequence
  GFR-binding peptide
  MOD_RES (6), (7), (41), (43): Xaa is C or S
  MOD_RES (21), (22), (23), (24), (25): Xaa is A or G
  MOD_RES (26), (27), (28), (29): Xaa is A or G or is absent
AVPKAXXAPTKLEPISVLYLXXXXXXXXXKFKYENMVVKAXGX

SEQ ID NO: 30093 - protein, 35 aa, Artificial Sequence
  GFR-binding peptide
  MOD_RES (3), (35): Xaa is C or S
PTXAPTKLEPISVLYLDDSSNVIKFKYENMVVRSX

SEQ ID NO: 30094 - protein, 42 aa, Artificial Sequence
  GFR-binding peptide
  MOD_RES (6), (7), (41): Xaa is C or S
  MOD_RES (21), (22), (23), (24), (25): Xaa is A or G
  MOD_RES (26), (27), (28), (29): Xaa is A or G or is absent
TVPKPXXAPTQLSPISVLYIXXXXXXXXXYKQYENMVVRAXG

SEQ ID NO: 30095 - protein, 40 aa, Artificial Sequence
  GFR-binding peptide
  MOD_RES (5), (6), (40): Xaa is C or S
  MOD_RES (20), (21), (22), (23), (24): Xaa is A or G
  MOD_RES (25), (26), (27), (28): Xaa is A or G or is absent
APASXXVPARLSPISILYIXXXXXXXXXYKQYEDMVVEAX

SEQ ID NO: 30096 - protein, 38 aa, Artificial Sequence
  GFR-binding peptide
  MOD_RES (4), (5): Xaa is C or S
  MOD_RES (19), (20), (21), (22), (23): Xaa is A or G
  MOD_RES (24), (25), (26), (27): Xaa is A or G or is absent
PKAXXAPTKLSPISVLYIXXXXXXXXXYKQYENMVVKA

SEQ ID NO: 30097 - protein, 36 aa, Artificial Sequence; identical to SEQ ID NO: 8749
  GFR-binding peptide
  MOD_RES (5), (6): Xaa is C or S

SEQ ID NO: 30098 - protein, 34 aa, Artificial Sequence
  GFR-binding peptide
  MOD_RES (1), (33): Xaa is C or S
XVPTELEPISMLYLDENEKVVKFKYEDMVVEGXG

SEQ ID NO: 30099 - protein, 42 aa, Artificial Sequence
  GFR-binding peptide
  MOD_RES (6), (7), (39), (41): Xaa is C or S
YVPKPXXAPTKLSPISVLYIDDSSNVIYKQYENMVVRSXGXH

SEQ ID NO: 30100 - protein, 39 aa, Artificial Sequence
  GFR-binding peptide
  MOD_RES (5), (6), (39): Xaa is C or S
  MOD_RES (20), (21), (22), (23), (24): Xaa is A or G
  MOD_RES (25), (26), (27), (28): Xaa is A or G or is absent
SASPXXVPQDLEPISILYLXXXXXXXXXKFKYEMVVKSX

SEQ ID NO: 30101 - protein, 33 aa, Artificial Sequence
  GFR-binding peptide
  MOD_RES (2), (3): Xaa is C or S
AXXAPTKLSPISVLYIDSSNNVIYKQYENMVVK

SEQ ID NO: 30102 - protein, 36 aa, Artificial Sequence; identical to SEQ ID NO: 8752
  GFR-binding peptide
  MOD_RES (3), (4), (36): Xaa is C or S

SEQ ID NO: 30103 - protein, 37 aa, Artificial Sequence
  GFR-binding peptide
  MOD_RES (2), (3), (36): Xaa is C or S
AXXVPTKLEPISVLYLDDMGVPTKFKYEEGMSVAEXG

SEQ ID NO: 30104 - protein, 41 aa, Artificial Sequence; identical to SEQ ID NO: 8753
  GFR-binding peptide
  MOD_RES (5), (6), (41): Xaa is C or S
  MOD_RES (20), (21), (22), (23), (24): Xaa is A or G
  MOD_RES (25), (26), (27), (28): Xaa is A or G or is absent

SEQ ID NO: 30105 - protein, 35 aa, Artificial Sequence; identical to SEQ ID NO: 8755
  GFR-binding peptide
  MOD_RES (5), (5): Xaa is C or S

SEQ ID NO: 30106 - protein, 35 aa, Artificial Sequence
  GFR-binding peptide
  MOD_RES (4), (5): Xaa is C or S
PKAXXVPTELSPISMLYIDEYDKVVYKQYEEMVVE

SEQ ID NO: 30107 - protein, 35 aa, Artificial Sequence
  GFR-binding peptide
  MOD_RES (3), (4): Xaa is C or S
KAXXVPTKLNAISILYFDKGVVTYLKKYRGMAVSE

SEQ ID NO: 30108 - protein, 34 aa, Artificial Sequence
  GFR-binding peptide
  MOD_RES (1), (2): Xaa is C or S
  MOD_RES (16), (17), (18), (19), (20): Xaa is A or G
  MOD_RES (21), (22), (23), (24): Xaa is A or G or is absent
XXVPARLSPISILYKXXXXXXXXXLKYHYDMVVE

SEQ ID NO: 30109 - protein, 39 aa, Artificial Sequence
  GFR-binding peptide
  MOD_RES (1), (2), (36), (38): Xaa is C or S
  MOD_RES (16), (17), (18), (19), (20): Xaa is A or G
  MOD_RES (21), (22), (23), (24): Xaa is A or G or is absent
XXAPTKLSPISVLYIXXXXXXXXXYKQYENMVVKAXGXH

SEQ ID NO: 30110 - protein, 36 aa, Artificial Sequence; identical to SEQ ID NO: 8759
  GFR-binding peptide
  MOD_RES (2), (3), (35): Xaa is C or S

SEQ ID NO: 30111 - protein, 37 aa, Artificial Sequence
  GFR-binding peptide
  MOD_RES (35), (37): Xaa is C or S
  MOD_RES (14), (15), (16), (17), (18): Xaa is A or G
  MOD_RES (19), (20), (21), (22): Xaa is A or G or is absent
VPTKLEPISVLYLXXXXXXXXXKFKYEEGMSVAEXGX

SEQ ID NO: 30112 - protein, 37 aa, Artificial Sequence
  GFR-binding peptide
  MOD_RES (1), (2), (36): Xaa is C or S
  MOD_RES (16), (17), (18), (19), (20): Xaa is A or G
  MOD_RES (21), (22), (23), (24): Xaa is A or G or is absent
XXVPTELSPISMLYIXXXXXXXXXYKQYEDMVVEGXG

SEQ ID NO: 30113 - protein, 35 aa, Artificial Sequence
  GFR-binding peptide
  MOD_RES (34), (34): Xaa is C or S
  MOD_RES (14), (15), (16), (17), (18): Xaa is A or G
  MOD_RES (19), (20), (21), (22): Xaa is A or G or is absent
VPARLSPISILYIXXXXXXXXXYKQYEDMVVEAXG

SEQ ID NO: 30114 - protein, 35 aa, Artificial Sequence
  GFR-binding peptide
  MOD_RES (32), (34): Xaa is C or S
APTKLSPISVLYIDSSNNVIYKQYENMVVKAXGXH

SEQ ID NO: 30115 - protein, 38 aa, Artificial Sequence
  GFR-binding peptide
  MOD_RES (4), (5), (38): Xaa is C or S
GKAXXVPTKLEPISVLYLDDMGVPTKFKYEEGMSVAEX

SEQ ID NO: 30116 - protein, 38 aa, Artificial Sequence; identical to SEQ ID NO: 8763
  GFR-binding peptide
  MOD_RES (6), (7): Xaa is C or S

SEQ ID NO: 30117 - protein, 37 aa, Artificial Sequence; identical to SEQ ID NO: 8765
  GFR-binding peptide
  MOD_RES (6), (7): Xaa is C or S

SEQ ID NO: 30118 - protein, 33 aa, Artificial Sequence
  GFR-binding peptide
  MOD_RES (1), (2): Xaa is C or S
XXVPTKLSPISILYIDKGVVTYYKQYEGMAVSE

SEQ ID NO: 30119 - protein, 34 aa, Artificial Sequence
  GFR-binding peptide
  MOD_RES (1), (2), (34): Xaa is C or S
XXVPTKLNAISILYFDKGVVTYLKKYRGMAVSEX

SEQ ID NO: 30120 - protein, 38 aa, Artificial Sequence; identical to SEQ ID NO: 8766
  GFR-binding peptide
  MOD_RES (3), (37): Xaa is C or S
  MOD_RES (17), (18), (19), (20), (21): Xaa is A or G
  MOD_RES (22), (23), (24), (25): Xaa is A or G or is absent

SEQ ID NO: 30121 - protein, 35 aa, Artificial Sequence; identical to SEQ ID NO: 8767
  GFR-binding peptide
  MOD_RES (1), (33), (35): Xaa is C or S

SEQ ID NO: 30122 - protein, 35 aa, Artificial Sequence
  GFR-binding peptide
  MOD_RES (2), (3), (34): Xaa is C or S
PXXVSQDLEPISILYLIGKTPKIKFKYEMIVKSXK

SEQ ID NO: 30123 - protein, 41 aa, Artificial Sequence; identical to SEQ ID NO: 8771
  GFR-binding peptide
  MOD_RES (5), (6), (40): Xaa is C or S
  MOD_RES (20), (21), (22), (23), (24): Xaa is A or G
  MOD_RES (25), (26), (27), (28): Xaa is A or G or is absent

SEQ ID NO: 30124 - protein, 42 aa, Artificial Sequence
  GFR-binding peptide
  MOD_RES (5), (6), (39), (41): Xaa is C or S
  MOD_RES (20), (21), (22), (23), (24): Xaa is A or G
  MOD_RES (25), (26), (27), (28): Xaa is A or G or is absent
SASPXXVSQDLEPISILYLXXXXXXXXXKFKYEMIVKSXKXS

SEQ ID NO: 30125 - protein, 38 aa, Artificial Sequence; identical to SEQ ID NO: 8775
  GFR-binding peptide
  MOD_RES (5), (6): Xaa is C or S
  MOD_RES (20), (21), (22), (23), (24): Xaa is A or G
  MOD_RES (25), (26), (27), (28): Xaa is A or G or is absent

SEQ ID NO: 30126 - protein, 36 aa, Artificial Sequence
  GFR-binding peptide
  MOD_RES (1), (35): Xaa is C or S
  MOD_RES (15), (16), (17), (18), (19): Xaa is A or G
  MOD_RES (20), (21), (22), (23): Xaa is A or G or is absent
XVPTKLEPISILYLXXXXXXXXXKFKYEGMAVSEXG

SEQ ID NO: 30127 - protein, 38 aa, Artificial Sequence
  GFR-binding peptide
  MOD_RES (5), (6), (38): Xaa is C or S
ASKAXXVPTKLSPISILYIDKGVVTYYKQYEGMAVSEX

SEQ ID NO: 30128 - protein, 36 aa, Artificial Sequence; identical to SEQ ID NO: 8778
  GFR-binding peptide
  MOD_RES (4), (5), (36): Xaa is C or S

SEQ ID NO: 30129 - protein, 38 aa, Artificial Sequence
  GFR-binding peptide
  MOD_RES (5), (6), (37): Xaa is C or S
SAAPXXVPQALSPISILYIVGRKPKVYKQYEMIVRSXK

SEQ ID NO: 30130 - protein, 37 aa, Artificial Sequence; identical to SEQ ID NO: 8781
  GFR-binding peptide
  MOD_RES (1), (2), (34), (36): Xaa is C or S

SEQ ID NO: 30131 - protein, 31 aa, Artificial Sequence
  GFR-binding peptide
  MOD_RES (1), (1): Xaa is C or S
XVPTELEPISMLYLDEYDKVVKFKYEEMVVE

SEQ ID NO: 30132 - protein, 38 aa, Artificial Sequence; identical to SEQ ID NO: 8782
  GFR-binding peptide
  MOD_RES (3), (4), (38): Xaa is C or S
  MOD_RES (18), (19), (20), (21), (22): Xaa is A or G
  MOD_RES (23), (24), (25), (26): Xaa is A or G or is absent

SEQ ID NO: 30133 - protein, 41 aa, Artificial Sequence
  GFR-binding peptide
  MOD_RES (6), (7), (41): Xaa is C or S
  MOD_RES (21), (22), (23), (24), (25): Xaa is A or G
  MOD_RES (26), (27), (28), (29): Xaa is A or G or is absent
KASKAXXVPTKLSPISILYIXXXXXXXXXYKQYEGMAVSEX

SEQ ID NO: 30134 - protein, 39 aa, Artificial Sequence
  GFR-binding peptide
  MOD_RES (6), (7): Xaa is C or S
  MOD_RES (21), (22), (23), (24), (25): Xaa is A or G
  MOD_RES (26), (27), (28), (29): Xaa is A or G or is absent
KASKAXXVPTKLSPISILYKXXXXXXXXXLKYHYGMAVS

SEQ ID NO: 30135 - protein, 38 aa, Artificial Sequence; identical to SEQ ID NO: 8783
  GFR-binding peptide
  MOD_RES (5), (6): Xaa is C or S
  MOD_RES (20), (21), (22), (23), (24): Xaa is A or G
  MOD_RES (25), (26), (27), (28): Xaa is A or G or is absent

SEQ ID NO: 30136 - protein, 30 aa, Artificial Sequence; identical to SEQ ID NO: 8785
  GFR-binding peptide

SEQ ID NO: 30137 - protein, 33 aa, Artificial Sequence
  GFR-binding peptide
  MOD_RES (2), (3): Xaa is C or S
PXXAPTKLEPISVLYLDDSSNVIKFKYENMVVR

SEQ ID NO: 30138 - protein, 39 aa, Artificial Sequence
  GFR-binding peptide
  MOD_RES (4), (5), (37), (39): Xaa is C or S
PKAXXVPTELEPISMLYLDENEKVVKFKYEDMVVEGXGX

SEQ ID NO: 30139 - protein, 36 aa, Artificial Sequence
  GFR-binding peptide
  MOD_RES (2), (3), (35): Xaa is C or S
SXXVPARLNAISILYFDAANNVVLKKYRDMVVEAXG

SEQ ID NO: 30140 - protein, 35 aa, Artificial Sequence
  GFR-binding peptide
  MOD_RES (1), (2), (35): Xaa is C or S
XXVPTKLSPISVLYIDDMGVPTYKQYEEGMSVAEX

SEQ ID NO: 30141 - protein, 34 aa, Artificial Sequence
  GFR-binding peptide
  MOD_RES (3), (4): Xaa is C or S
KPXXAPTQLEPISVLYLDDSSNVIKFKYENMVVR

SEQ ID NO: 30142 - protein, 34 aa, Artificial Sequence; identical to SEQ ID NO: 8790
  GFR-binding peptide
  MOD_RES (1), (33): Xaa is C or S

SEQ ID NO: 30143 - protein, 35 aa, Artificial Sequence; identical to SEQ ID NO: 8792
  GFR-binding peptide
  MOD_RES (33), (35): Xaa is C or S

SEQ ID NO: 30144 - protein, 31 aa, Artificial Sequence
  GFR-binding peptide
  MOD_RES (1), (1): Xaa is C or S
XAPTKLEPISVLYLDDSSNVIKFKYENMVVR

SEQ ID NO: 30145 - protein, 38 aa, Artificial Sequence
  GFR-binding peptide
  MOD_RES (2), (3), (37): Xaa is C or S
  MOD_RES (17), (18), (19), (20), (21): Xaa is A or G
  MOD_RES (22), (23), (24), (25): Xaa is A or G or is absent
SXXVPARLEPISILYLXXXXXXXXXKFKYEDMVVEAXG

SEQ ID NO: 30146 - protein, 32 aa, Artificial Sequence; identical to SEQ ID NO: 8795
  GFR-binding peptide
  MOD_RES (1), (2): Xaa is C or S

SEQ ID NO: 30147 - protein, 36 aa, Artificial Sequence
  GFR-binding peptide
  MOD_RES (4), (4): Xaa is C or S
  MOD_RES (18), (19), (20), (21), (22): Xaa is A or G
  MOD_RES (23), (24), (25), (26): Xaa is A or G or is absent
KPTXAPTKLEPISVLYLXXXXXXXXXKFKYENMVVR

SEQ ID NO: 30148 - protein, 33 aa, Artificial Sequence; identical to SEQ ID NO: 8797
  GFR-binding peptide
  MOD_RES (31), (33): Xaa is C or S

SEQ ID NO: 30149 - protein, 41 aa, Artificial Sequence; identical to SEQ ID NO: 8798
  GFR-binding peptide
  MOD_RES (5), (6), (38), (40): Xaa is C or S

SEQ ID NO: 30150 - protein, 34 aa, Artificial Sequence
  GFR-binding peptide
  MOD_RES (3), (4): Xaa is C or S
SPXXVSQDLSPISILYIIGKTPKIYKQYEMIVKS

SEQ ID NO: 30151 - protein, 40 aa, Artificial Sequence
  GFR-binding peptide
  MOD_RES (6), (7): Xaa is C or S
  MOD_RES (21), (22), (23), (24), (25): Xaa is A or G
  MOD_RES (26), (27), (28), (29): Xaa is A or G or is absent
TVPKPXXAPTQLEPISVLYLXXXXXXXXXKFKYENMVVRA

SEQ ID NO: 30152 - protein, 36 aa, Artificial Sequence; identical to SEQ ID NO: 8800
  GFR-binding peptide
  MOD_RES (3), (4): Xaa is C or S
  MOD_RES (18), (19), (20), (21), (22): Xaa is A or G
  MOD_RES (23), (24), (25), (26): Xaa is A or G or is absent

SEQ ID NO: 30153 - protein, 39 aa, Artificial Sequence
  GFR-binding peptide
  MOD_RES (3), (4), (36), (38): Xaa is C or S
ASXXVPARLNAISILYFDAANNVVLKKYRDMVVEAXGXR

SEQ ID NO: 30154 - protein, 34 aa, Artificial Sequence; identical to SEQ ID NO: 8802
  GFR-binding peptide
  MOD_RES (1), (2): Xaa is C or S
  MOD_RES (16), (17), (18), (19), (20): Xaa is A or G
  MOD_RES (21), (22), (23), (24): Xaa is A or G or is absent

SEQ ID NO: 30155 - protein, 36 aa, Artificial Sequence
  GFR-binding peptide
  MOD_RES (1), (2), (36): Xaa is C or S
  MOD_RES (16), (17), (18), (19), (20): Xaa is A or G
  MOD_RES (21), (22), (23), (24): Xaa is A or G or is absent
XXVPTELEPISMLYLXXXXXXXXXKFKYEDMVVEGX

SEQ ID NO: 30156 - protein, 36 aa, Artificial Sequence
  GFR-binding peptide
  MOD_RES (3), (4): Xaa is C or S
  MOD_RES (18), (19), (20), (21), (22): Xaa is A or G
  MOD_RES (23), (24), (25), (26): Xaa is A or G or is absent
APXXVPQALEPISILYLXXXXXXXXXKFKYEMIVRS

SEQ ID NO: 30157 - protein, 40 aa, Artificial Sequence
  GFR-binding peptide
  MOD_RES (6), (7): Xaa is C or S
  MOD_RES (21), (22), (23), (24), (25): Xaa is A or G
  MOD_RES (26), (27), (28), (29): Xaa is A or G or is absent
SIPKAXXVPTELSPISMLYIXXXXXXXXXYKQYEEMVVEG

SEQ ID NO: 30158 - protein, 37 aa, Artificial Sequence
  GFR-binding peptide
  MOD_RES (34), (36): Xaa is C or S
  MOD_RES (14), (15), (16), (17), (18): Xaa is A or G
  MOD_RES (19), (20), (21), (22): Xaa is A or G or is absent
VPTELSPISMLYIXXXXXXXXXYKQYEDMVVEGXGXR

SEQ ID NO: 30159 - protein, 37 aa, Artificial Sequence; identical to SEQ ID NO: 8806
  GFR-binding peptide
  MOD_RES (3), (4): Xaa is C or S
  MOD_RES (18), (19), (20), (21), (22): Xaa is A or G
  MOD_RES (23), (24), (25), (26): Xaa is A or G or is absent

SEQ ID NO: 30160 - protein, 39 aa, Artificial Sequence
  GFR-binding peptide
  MOD_RES (6), (7), (39): Xaa is C or S
TVPKPXXAPTQLSPISVLYIDDSSNVIYKQYENMVVRAX

SEQ ID NO: 30161 - protein, 44 aa, Artificial Sequence; identical to SEQ ID NO: 8808
  GFR-binding peptide
  MOD_RES (6), (7), (41), (43): Xaa is C or S
  MOD_RES (21), (22), (23), (24), (25): Xaa is A or G
  MOD_RES (26), (27), (28), (29): Xaa is A or G or is absent

SEQ ID NO: 30162 - protein, 42 aa, Artificial Sequence; identical to SEQ ID NO: 8809
  GFR-binding peptide
  MOD_RES (5), (6), (39), (41): Xaa is C or S
  MOD_RES (20), (21), (22), (23), (24): Xaa is A or G
  MOD_RES (25), (26), (27), (28): Xaa is A or G or is absent

SEQ ID NO: 30163 - protein, 39 aa, Artificial Sequence
  GFR-binding peptide
  MOD_RES (6), (7): Xaa is C or S
  MOD_RES (21), (22), (23), (24), (25): Xaa is A or G
  MOD_RES (26), (27), (28), (29): Xaa is A or G or is absent
AAPASXXVPARLSPISILYIXXXXXXXXXYKQYEDMVVE

SEQ ID NO: 30164 - protein, 33 aa, Artificial Sequence; identical to SEQ ID NO: 8812
  GFR-binding peptide
  MOD_RES (33), (33): Xaa is C or S
  MOD_RES (14), (15), (16), (17), (18): Xaa is A or G
  MOD_RES (19), (20), (21), (22): Xaa is A or G or is absent

SEQ ID NO: 30165 - protein, 37 aa, Artificial Sequence
  GFR-binding peptide
  MOD_RES (6), (7): Xaa is C or S
KIPKAXXVPTELEPISMLYLDENEKVVKFKYEDMVVE

SEQ ID NO: 30166 - protein, 40 aa, Artificial Sequence
  GFR-binding peptide
  MOD_RES (2), (3), (37), (39): Xaa is C or S
  MOD_RES (17), (18), (19), (20), (21): Xaa is A or G
  MOD_RES (22), (23), (24), (25): Xaa is A or G or is absent
AXXVPTKLNAISILYFXXXXXXXXXLKKYRGMAVSEXGXR

SEQ ID NO: 30167 - protein, 36 aa, Artificial Sequence
  GFR-binding peptide
  MOD_RES (3), (4), (36): Xaa is C or S
KPXXAPTKLSPISVLYIDDSSNVIYKQYENMVVRSX

SEQ ID NO: 30168 - protein, 38 aa, Artificial Sequence; identical to SEQ ID NO: 8816
  GFR-binding peptide
  MOD_RES (4), (5), (37): Xaa is C or S

SEQ ID NO: 30169 - protein, 36 aa, Artificial Sequence
  GFR-binding peptide
  MOD_RES (1), (2), (35): Xaa is C or S
  MOD_RES (16), (17), (18), (19), (20): Xaa is A or G
  MOD_RES (21), (22), (23), (24): Xaa is A or G or is absent
XXVPQDLSPISILYIXXXXXXXXXYKQYEMVVKSXK

SEQ ID NO: 30170 - protein, 33 aa, Artificial Sequence; identical to SEQ ID NO: 8817
  GFR-binding peptide
  MOD_RES (14), (15), (16), (17), (18): Xaa is A or G
  MOD_RES (19), (20), (21), (22): Xaa is A or G or is absent

SEQ ID NO: 30171 - protein, 32 aa, Artificial Sequence; identical to SEQ ID NO: 8818
  GFR-binding peptide
  MOD_RES (32), (32): Xaa is C or S

SEQ ID NO: 30172 - protein, 39 aa, Artificial Sequence
  GFR-binding peptide
  MOD_RES (6), (7), (39): Xaa is C or S
KASKAXXVPTKLSPISILYKDKGVVTYLKYHYGMAVSEX

SEQ ID NO: 30173 - protein, 41 aa, Artificial Sequence
  GFR-binding peptide
  MOD_RES (7), (39), (41): Xaa is C or S
HVTKPTXAPTKLSPISVLYIDDSSNVIYKQYENMVVRSXGX

SEQ ID NO: 30174 - protein, 38 aa, Artificial Sequence
  GFR-binding peptide
  MOD_RES (3), (4), (36), (38): Xaa is C or S
KAXXVPTELEPISMLYLDEYDKVVKFKYEEMVVEGXGX

SEQ ID NO: 30175 - protein, 39 aa, Artificial Sequence
  GFR-binding peptide
  MOD_RES (3), (4), (37), (39): Xaa is C or S
  MOD_RES (18), (19), (20), (21), (22): Xaa is A or G
  MOD_RES (23), (24), (25), (26): Xaa is A or G or is absent
SPXXVPQDLSPISILYIXXXXXXXXXYKQYEMVVKSXKX

SEQ ID NO: 30176 - protein, 32 aa, Artificial Sequence; identical to SEQ ID NO: 8821
  GFR-binding peptide
  MOD_RES (1), (32): Xaa is C or S

SEQ ID NO: 30177 - protein, 41 aa, Artificial Sequence
  GFR-binding peptide
  MOD_RES (3), (4), (38), (40): Xaa is C or S
  MOD_RES (18), (19), (20), (21), (22): Xaa is A or G
  MOD_RES (23), (24), (25), (26): Xaa is A or G or is absent
ASXXVPARLSPISILYKXXXXXXXXXLKYHYDMVVEAXGXR

SEQ ID NO: 30178 - protein, 33 aa, Artificial Sequence
  GFR-binding peptide
  MOD_RES (14), (15), (16), (17), (18): Xaa is A or G
  MOD_RES (19), (20), (21), (22): Xaa is A or G or is absent
VPTELEPISMLYLXXXXXXXXXKFKYEEMVVEG

SEQ ID NO: 30179 - protein, 39 aa, Artificial Sequence
  GFR-binding peptide
  MOD_RES (2), (3), (36), (38): Xaa is C or S
  MOD_RES (17), (18), (19), (20), (21): Xaa is A or G
  MOD_RES (22), (23), (24), (25): Xaa is A or G or is absent
PXXVPQDLSPISILYIXXXXXXXXXYKQYEMVVKSXKXS

SEQ ID NO: 30180 - protein, 39 aa, Artificial Sequence; identical to SEQ ID NO: 8823
  GFR-binding peptide
  MOD_RES (6), (7), (39): Xaa is C or S

SEQ ID NO: 30181 - protein, 36 aa, Artificial Sequence
  GFR-binding peptide
  MOD_RES (1), (2): Xaa is C or S
  MOD_RES (16), (17), (18), (19), (20): Xaa is A or G
  MOD_RES (21), (22), (23), (24): Xaa is A or G or is absent
XXVPTKLSPISVLYIXXXXXXXXXYKQYEEGMSVAE

SEQ ID NO: 30182 - protein, 36 aa, Artificial Sequence
  GFR-binding peptide
  MOD_RES (1), (33), (35): Xaa is C or S
XAPTQLEPISVLYLDDSSNVIKFKYENMVVRAXGXH

SEQ ID NO: 30183 - protein, 36 aa, Artificial Sequence; identical to SEQ ID NO: 8824
  GFR-binding peptide
  MOD_RES (1), (2), (33), (35): Xaa is C or S

SEQ ID NO: 30184 - protein, 37 aa, Artificial Sequence
  GFR-binding peptide
  MOD_RES (4), (5): Xaa is C or S
  MOD_RES (19), (20), (21), (22), (23): Xaa is A or G
  MOD_RES (24), (25), (26), (27): Xaa is A or G or is absent
AAPXXVPQALEPISILYLXXXXXXXXXKFKYEMIVRS

SEQ ID NO: 30185 - protein, 34 aa, Artificial Sequence
  GFR-binding peptide
  MOD_RES (31), (33): Xaa is C or S
VPQDLEPISILYLVGRTPKVKFKYEMVVKSXKXS

SEQ ID NO: 30186 - protein, 34 aa, Artificial Sequence
  GFR-binding peptide
  MOD_RES (1), (2): Xaa is C or S
  MOD_RES (16), (17), (18), (19), (20): Xaa is A or G
  MOD_RES (21), (22), (23), (24): Xaa is A or G or is absent
XXVPTELEPISMLYLXXXXXXXXXKFKYEDMVVE

SEQ ID NO: 30187 - protein, 44 aa, Artificial Sequence
  GFR-binding peptide
  MOD_RES (6), (7), (41), (43): Xaa is C or S
  MOD_RES (21), (22), (23), (24), (25): Xaa is A or G
  MOD_RES (26), (27), (28), (29): Xaa is A or G or is absent
KASKAXXVPTKLSPISILYKXXXXXXXXXLKYHYGMAVSEXGXR

SEQ ID NO: 30188 - protein, 37 aa, Artificial Sequence
  GFR-binding peptide
  MOD_RES (34), (36): Xaa is C or S
  MOD_RES (14), (15), (16), (17), (18): Xaa is A or G
  MOD_RES (19), (20), (21), (22): Xaa is A or G or is absent
APTKLEPISVLYLXXXXXXXXXKFKYENMVVRSXGXH

SEQ ID NO: 30189 - protein, 36 aa, Artificial Sequence; identical to SEQ ID NO: 8830
  GFR-binding peptide
  MOD_RES (2), (3), (35): Xaa is C or S

SEQ ID NO: 30190 - protein, 38 aa, Artificial Sequence
  GFR-binding peptide
  MOD_RES (3), (4), (35), (37): Xaa is C or S
SPXXVPQDLSPISILYIVGRTPKVYKQYEMVVKSXKXS

SEQ ID NO: 30191 - protein, 40 aa, Artificial Sequence
  GFR-binding peptide
  MOD_RES (6), (7): Xaa is C or S
  MOD_RES (21), (22), (23), (24), (25): Xaa is A or G
  MOD_RES (26), (27), (28), (29): Xaa is A or G or is absent
KASKAXXVPTKLSPISILYIXXXXXXXXXYKQYEGMAVSE

SEQ ID NO: 30192 - protein, 35 aa, Artificial Sequence; identical to SEQ ID NO: 8833
  GFR-binding peptide
  MOD_RES (1), (33), (35): Xaa is C or S

SEQ ID NO: 30193 - protein, 39 aa, Artificial Sequence
  GFR-binding peptide
  MOD_RES (6), (7), (39): Xaa is C or S
AAPASXXVPARLSPISILYKDAANNVVLKYHYDMVVEAX

SEQ ID NO: 30194 - protein, 35 aa, Artificial Sequence; identical to SEQ ID NO: 8835
  GFR-binding peptide
  MOD_RES (32), (34): Xaa is C or S

SEQ ID NO: 30195 - protein, 36 aa, Artificial Sequence
  GFR-binding peptide
  MOD_RES (1), (2), (34), (36): Xaa is C or S
XXVPTKLNAISILYFDKGVVTYLKKYRGMAVSEXGX

SEQ ID NO: 30196 - protein, 41 aa, Artificial Sequence; identical to SEQ ID NO: 8836
  GFR-binding peptide
  MOD_RES (6), (38), (40): Xaa is C or S

SEQ ID NO: 30197 - protein, 39 aa, Artificial Sequence
  GFR-binding peptide
  MOD_RES (5), (6), (38): Xaa is C or S
VPKAXXAPTKLEPISVLYLDSSNNVIKFKYENMVVKAXG

SEQ ID NO: 30198 - protein, 37 aa, Artificial Sequence
  GFR-binding peptide
  MOD_RES (3), (4), (36): Xaa is C or S
KPXXAPTKLEPISVLYLDDSSNVIKFKYENMVVRSXG

SEQ ID NO: 30199 - protein, 38 aa, Artificial Sequence
  GFR-binding peptide
  MOD_RES (2), (3), (37): Xaa is C or S
  MOD_RES (17), (18), (19), (20), (21): Xaa is A or G
  MOD_RES (22), (23), (24), (25): Xaa is A or G or is absent
AXXVPTELSPISMLYIXXXXXXXXXYKQYEDMVVEGXG

SEQ ID NO: 30200 - protein, 42 aa, Artificial Sequence
  GFR-binding peptide
  MOD_RES (6), (7), (39), (41): Xaa is C or S
YVPKPXXAPTKLEPISVLYLDDSSNVIKFKYENMVVRSXGXH

SEQ ID NO: 30201 - protein, 38 aa, Artificial Sequence
  GFR-binding peptide
  MOD_RES (1), (35), (37): Xaa is C or S
  MOD_RES (15), (16), (17), (18), (19): Xaa is A or G
  MOD_RES (20), (21), (22), (23): Xaa is A or G or is absent
XVPTKLSPISILYKXXXXXXXXXLKYHYGMAVSEXGXR

SEQ ID NO: 30202 - protein, 37 aa, Artificial Sequence; identical to SEQ ID NO: 8842
  GFR-binding peptide
  MOD_RES (3), (4): Xaa is C or S
  MOD_RES (18), (19), (20), (21), (22): Xaa is A or G
  MOD_RES (23), (24), (25), (26): Xaa is A or G or is absent

SEQ ID NO: 30203 - protein, 36 aa, Artificial Sequence
  GFR-binding peptide
  MOD_RES (1), (34), (36): Xaa is C or S
  MOD_RES (15), (16), (17), (18), (19): Xaa is A or G
  MOD_RES (20), (21), (22), (23): Xaa is A or G or is absent
XVSQDLEPISILYLXXXXXXXXXKFKYEMIVKSXKX

SEQ ID NO: 30204 - protein, 34 aa, Artificial Sequence
  GFR-binding peptide
  MOD_RES (1), (2): Xaa is C or S
  MOD_RES (16), (17), (18), (19), (20): Xaa is A or G
  MOD_RES (21), (22), (23), (24): Xaa is A or G or is absent
XXAPTKLSPISVLYIXXXXXXXXXYKQYENMVVK

SEQ ID NO: 30205 - protein, 36 aa, Artificial Sequence; identical to SEQ ID NO: 8843
  GFR-binding peptide
  MOD_RES (1), (2), (36): Xaa is C or S
  MOD_RES (16), (17), (18), (19), (20): Xaa is A or G
  MOD_RES (21), (22), (23), (24): Xaa is A or G or is absent

SEQ ID NO: 30206 - protein, 32 aa, Artificial Sequence; identical to SEQ ID NO: 8845
  GFR-binding peptide
  MOD_RES (1), (2): Xaa is C or S

SEQ ID NO: 30207 - protein, 35 aa, Artificial Sequence; identical to SEQ ID NO: 8848
  GFR-binding peptide
  MOD_RES (1), (2), (34): Xaa is C or S

SEQ ID NO: 30208 - protein, 34 aa, Artificial Sequence
  GFR-binding peptide
  MOD_RES (1), (2): Xaa is C or S
  MOD_RES (16), (17), (18), (19), (20): Xaa is A or G
  MOD_RES (21), (22), (23), (24): Xaa is A or G or is absent
XXAPTKLSPISVLYIXXXXXXXXXYKQYENMVVR

SEQ ID NO: 30209 - protein, 34 aa, Artificial Sequence; identical to SEQ ID NO: 8849
  GFR-binding peptide
  MOD_RES (1), (32), (34): Xaa is C or S

SEQ ID NO: 30210 - protein, 38 aa, Artificial Sequence
  GFR-binding peptide
  MOD_RES (2), (3), (38): Xaa is C or S
  MOD_RES (17), (18), (19), (20), (21): Xaa is A or G
  MOD_RES (22), (23), (24), (25): Xaa is A or G or is absent
AXXVPTKLEPISVLYLXXXXXXXXXKFKYEEGMSVAEX

SEQ ID NO: 30211 - protein, 34 aa, Artificial Sequence; identical to SEQ ID NO: 8851
  GFR-binding peptide
  MOD_RES (1), (2): Xaa is C or S
  MOD_RES (16), (17), (18), (19), (20): Xaa is A or G
  MOD_RES (21), (22), (23), (24): Xaa is A or G or is absent

SEQ ID NO: 30212 - protein, 38 aa, Artificial Sequence
  GFR-binding peptide
  MOD_RES (1), (35), (37): Xaa is C or S
  MOD_RES (15), (16), (17), (18), (19): Xaa is A or G
  MOD_RES (20), (21), (22), (23): Xaa is A or G or is absent
XVPTELEPISMLYLXXXXXXXXXKFKYEDMVVEGXGXR

SEQ ID NO: 30213 - protein, 37 aa, Artificial Sequence
  GFR-binding peptide
  MOD_RES (1), (2), (37): Xaa is C or S
  MOD_RES (16), (17), (18), (19), (20): Xaa is A or G
  MOD_RES (21), (22), (23), (24): Xaa is A or G or is absent
XXVPTKLSPISVLYIXXXXXXXXXYKQYEEGMSVAEX

SEQ ID NO: 30214 - protein, 35 aa, Artificial Sequence
  GFR-binding peptide
  MOD_RES (4), (5): Xaa is C or S
SKAXXVPTKLSPISILYIDKGVVTYYKQYEGMAVS

SEQ ID NO: 30215 - protein, 41 aa, Artificial Sequence
  GFR-binding peptide
  MOD_RES (5), (6), (40): Xaa is C or S
  MOD_RES (20), (21), (22), (23), (24): Xaa is A or G
  MOD_RES (25), (26), (27), (28): Xaa is A or G or is absent
VPKPXXAPTQLEPISVLYLXXXXXXXXXKFKYENMVVRAXG

SEQ ID NO: 30216 - protein, 37 aa, Artificial Sequence; identical to SEQ ID NO: 8853
  GFR-binding peptide
  MOD_RES (4), (5): Xaa is C or S
  MOD_RES (19), (20), (21), (22), (23): Xaa is A or G
  MOD_RES (24), (25), (26), (27): Xaa is A or G or is absent

SEQ ID NO: 30217 - protein, 33 aa, Artificial Sequence; identical to SEQ ID NO: 8854
  GFR-binding peptide
  MOD_RES (14), (15), (16), (17), (18): Xaa is A or G
  MOD_RES (19), (20), (21), (22): Xaa is A or G or is absent

SEQ ID NO: 30218 - protein, 37 aa, Artificial Sequence
  GFR-binding peptide
  MOD_RES (1), (35), (37): Xaa is C or S
  MOD_RES (15), (16), (17), (18), (19): Xaa is A or G
  MOD_RES (20), (21), (22), (23): Xaa is A or G or is absent
XAPTKLSPISVLYIXXXXXXXXXYKQYENMVVRSXGX

SEQ ID NO: 30219 - protein, 39 aa, Artificial Sequence
  GFR-binding peptide
  MOD_RES (1), (36), (38): Xaa is C or S
  MOD_RES (15), (16), (17), (18), (19): Xaa is A or G
  MOD_RES (20), (21), (22), (23): Xaa is A or G or is absent
XVPTKLSPISVLYIXXXXXXXXXYKQYEEGMSVAEXGXR

SEQ ID NO: 30220 - protein, 38 aa, Artificial Sequence
  GFR-binding peptide
  MOD_RES (6), (7): Xaa is C or S
AAPASXXVPARLEPISILYLDAANNVVKFKYEDMVVEA

SEQ ID NO: 30221 - protein, 38 aa, Artificial Sequence; identical to SEQ ID NO: 8856
  GFR-binding peptide
  MOD_RES (6), (7), (38): Xaa is C or S

SEQ ID NO: 30222 - protein, 42 aa, Artificial Sequence
  GFR-binding peptide
  MOD_RES (5), (6), (40), (42): Xaa is C or S
  MOD_RES (20), (21), (22), (23), (24): Xaa is A or G
  MOD_RES (25), (26), (27), (28): Xaa is A or G or is absent
IPKAXXVPTELSPISMLYIXXXXXXXXXYKQYEEMVVEGXGX

SEQ ID NO: 30223 - protein, 36 aa, Artificial Sequence; identical to SEQ ID NO: 8858
  GFR-binding peptide
  MOD_RES (3), (4), (35): Xaa is C or S

SEQ ID NO: 30224 - protein, 38 aa, Artificial Sequence; identical to SEQ ID NO: 8859
  GFR-binding peptide
  MOD_RES (3), (4), (38): Xaa is C or S
  MOD_RES (18), (19), (20), (21), (22): Xaa is A or G
  MOD_RES (23), (24), (25), (26): Xaa is A or G or is absent

SEQ ID NO: 30225 - protein, 37 aa, Artificial Sequence; identical to SEQ ID NO: 8860
  GFR-binding peptide
  MOD_RES (5), (6), (37): Xaa is C or S

SEQ ID NO: 30226 - protein, 33 aa, Artificial Sequence
  GFR-binding peptide
  MOD_RES (1), (1): Xaa is C or S
  MOD_RES (15), (16), (17), (18), (19): Xaa is A or G
  MOD_RES (20), (21), (22), (23): Xaa is A or G or is absent
XVPQDLEPISILYLXXXXXXXXXKFKYEMVVKS

SEQ ID NO: 30227 - protein, 44 aa, Artificial Sequence; identical to SEQ ID NO: 8862
  GFR-binding peptide
  MOD_RES (6), (7), (41), (43): Xaa is C or S
  MOD_RES (21), (22), (23), (24), (25): Xaa is A or G
  MOD_RES (26), (27), (28), (29): Xaa is A or G or is absent

SEQ ID NO: 30228 - protein, 36 aa, Artificial Sequence
  GFR-binding peptide
  MOD_RES (2), (3), (34), (36): Xaa is C or S
PXXVPQALSPISILYIVGRKPKVYKQYEMIVRSXKX

SEQ ID NO: 30229 - protein, 42 aa, Artificial Sequence; identical to SEQ ID NO: 8867
  GFR-binding peptide
  MOD_RES (4), (5), (39), (41): Xaa is C or S
  MOD_RES (19), (20), (21), (22), (23): Xaa is A or G
  MOD_RES (24), (25), (26), (27): Xaa is A or G or is absent

SEQ ID NO: 30230 - protein, 35 aa, Artificial Sequence; identical to SEQ ID NO: 8868
  GFR-binding peptide
  MOD_RES (3), (4), (35): Xaa is C or S

SEQ ID NO: 30231 - protein, 39 aa, Artificial Sequence; identical to SEQ ID NO: 8870
  GFR-binding peptide
  MOD_RES (2), (3), (37), (39): Xaa is C or S
  MOD_RES (17), (18), (19), (20), (21): Xaa is A or G
  MOD_RES (22), (23), (24), (25): Xaa is A or G or is absent

SEQ ID NO: 30232 - protein, 40 aa, Artificial Sequence
  GFR-binding peptide
  MOD_RES (4), (5), (37), (39): Xaa is C or S
PKPXXAPTKLEPISVLYLDDSSNVIKFKYENMVVRSXGXH

SEQ ID NO: 30233 - protein, 36 aa, Artificial Sequence; identical to SEQ ID NO: 8871
  GFR-binding peptide
  MOD_RES (4), (5): Xaa is C or S

SEQ ID NO: 30234 - protein, 34 aa, Artificial Sequence
  GFR-binding peptide
  MOD_RES (1), (33): Xaa is C or S
XVPTKLNAISILYFDKGVVTYLKKYRGMAVSEXG

SEQ ID NO: 30235 - protein, 33 aa, Artificial Sequence
  GFR-binding peptide
  MOD_RES (2), (3): Xaa is C or S
SXXVPARLEPISILYLDAANNVVKFKYEDMVVE

SEQ ID NO: 30236 - protein, 41 aa, Artificial Sequence; identical to SEQ ID NO: 8872
  GFR-binding peptide
  MOD_RES (7), (39), (41): Xaa is C or S

SEQ ID NO: 30237 - protein, 38 aa, Artificial Sequence; identical to SEQ ID NO: 8873
  GFR-binding peptide
  MOD_RES (5), (6), (38): Xaa is C or S

SEQ ID NO: 30238 - protein, 36 aa, Artificial Sequence; identical to SEQ ID NO: 8874
  GFR-binding peptide
  MOD_RES (3), (4): Xaa is C or S

SEQ ID NO: 30239 - protein, 37 aa, Artificial Sequence
  GFR-binding peptide
  MOD_RES (3), (4), (37): Xaa is C or S
KAXXVPTKLEPISVLYLDDMGVPTKFKYEEGMSVAEX

SEQ ID NO: 30240 - protein, 41 aa, Artificial Sequence
  GFR-binding peptide
  MOD_RES (6), (7): Xaa is C or S
  MOD_RES (21), (22), (23), (24), (25): Xaa is A or G
  MOD_RES (26), (27), (28), (29): Xaa is A or G or is absent
KVGKAXXVPTKLEPISVLYLXXXXXXXXXKFKYEEGMSVAE

SEQ ID NO: 30241 - protein, 37 aa, Artificial Sequence
  GFR-binding peptide
  MOD_RES (1), (2), (35), (37): Xaa is C or S
  MOD_RES (16), (17), (18), (19), (20): Xaa is A or G
  MOD_RES (21), (22), (23), (24): Xaa is A or G or is absent
XXVPQALSPISILYIXXXXXXXXXYKQYEMIVRSXKX

SEQ ID NO: 30242 - protein, 31 aa, Artificial Sequence; identical to SEQ ID NO: 8880
  GFR-binding peptide
  MOD_RES (31), (31): Xaa is C or S

SEQ ID NO: 30243 - protein, 39 aa, Artificial Sequence
  GFR-binding peptide
  MOD_RES (6), (7), (39): Xaa is C or S
KIPKAXXVPTELSPISMLYIDENEKVVYKQYEDMVVEGX

SEQ ID NO: 30244 - protein, 40 aa, Artificial Sequence; identical to SEQ ID NO: 8885
  GFR-binding peptide
  MOD_RES (6), (7): Xaa is C or S
  MOD_RES (21), (22), (23), (24), (25): Xaa is A or G
  MOD_RES (26), (27), (28), (29): Xaa is A or G or is absent

SEQ ID NO: 30245 - protein, 41 aa, Artificial Sequence
  GFR-binding peptide
  MOD_RES (5), (6), (40): Xaa is C or S
  MOD_RES (20), (21), (22), (23), (24): Xaa is A or G
  MOD_RES (25), (26), (27), (28): Xaa is A or G or is absent
ASKAXXVPTKLSPISILYIXXXXXXXXXYKQYEGMAVSEXG

SEQ ID NO: 30246 - protein, 35 aa, Artificial Sequence; identical to SEQ ID NO: 8887
  GFR-binding peptide
  MOD_RES (2), (2): Xaa is C or S
  MOD_RES (16), (17), (18), (19), (20): Xaa is A or G
  MOD_RES (21), (22), (23), (24): Xaa is A or G or is absent

SEQ ID NO: 30247 - protein, 33 aa, Artificial Sequence
  GFR-binding peptide
  MOD_RES (1), (1): Xaa is C or S
  MOD_RES (15), (16), (17), (18), (19): Xaa is A or G
  MOD_RES (20), (21), (22), (23): Xaa is A or G or is absent
XAPTKLEPISVLYLXXXXXXXXXKFKYENMVVR

SEQ ID NO: 30248 - protein, 31 aa, Artificial Sequence
  GFR-binding peptide
  MOD_RES (1), (1): Xaa is C or S
XVSQDLSPISILYIIGKTPKIYKQYEMIVKS

SEQ ID NO: 30249 - protein, 33 aa, Artificial Sequence
  GFR-binding peptide
  MOD_RES (1), (1): Xaa is C or S
  MOD_RES (15), (16), (17), (18), (19): Xaa is A or G
  MOD_RES (20), (21), (22), (23): Xaa is A or G or is absent
XAPTKLEPISVLYLXXXXXXXXXKFKYENMVVK

SEQ ID NO: 30250 - protein, 33 aa, Artificial Sequence
  GFR-binding peptide
  MOD_RES (14), (15), (16), (17), (18): Xaa is A or G
  MOD_RES (19), (20), (21), (22): Xaa is A or G or is absent
APTKLSPISVLYIXXXXXXXXXYKQYENMVVKA

SEQ ID NO: 30251 - protein, 37 aa, Artificial Sequence; identical to SEQ ID NO: 8889
  GFR-binding peptide
  MOD_RES (1), (2), (35), (37): Xaa is C or S
  MOD_RES (16), (17), (18), (19), (20): Xaa is A or G
  MOD_RES (21), (22), (23), (24): Xaa is A or G or is absent

SEQ ID NO: 30252 - protein, 36 aa, Artificial Sequence
  GFR-binding peptide
  MOD_RES (3), (4), (36): Xaa is C or S
ASXXVPARLSPISILYKDAANNVVLKYHYDMVVEAX

SEQ ID NO: 30253 - protein, 36 aa, Artificial Sequence
  GFR-binding peptide
  MOD_RES (5), (6): Xaa is C or S
VPKAXXAPTKLSPISVLYIDSSNNVIYKQYENMVVK

SEQ ID NO: 30254 - protein, 35 aa, Artificial Sequence; identical to SEQ ID NO: 8891
  GFR-binding peptide
  MOD_RES (1), (2), (34): Xaa is C or S

SEQ ID NO: 30255 - protein, 42 aa, Artificial Sequence
  GFR-binding peptide
  MOD_RES (6), (40), (42): Xaa is C or S
  MOD_RES (20), (21), (22), (23), (24): Xaa is A or G
  MOD_RES (25), (26), (27), (28): Xaa is A or G or is absent
VTKPTXAPTKLEPISVLYLXXXXXXXXXKFKYENMVVRSXGX

SEQ ID NO: 30256 - protein, 37 aa, Artificial Sequence; identical to SEQ ID NO: 8893
  GFR-binding peptide
  MOD_RES (2), (3), (36): Xaa is C or S
  MOD_RES (17), (18), (19), (20), (21): Xaa is A or G
  MOD_RES (22), (23), (24), (25): Xaa is A or G or is absent

SEQ ID NO: 30257 - protein, 36 aa, Artificial Sequence
  GFR-binding peptide
  MOD_RES (5), (6): Xaa is C or S
ASKAXXVPTKLNAISILYFDKGVVTYLKKYRGMAVS

SEQ ID NO: 30258 - protein, 35 aa, Artificial Sequence
  GFR-binding peptide
  MOD_RES (1), (34): Xaa is C or S
  MOD_RES (15), (16), (17), (18), (19): Xaa is A or G
  MOD_RES (20), (21), (22), (23): Xaa is A or G or is absent
XVPQDLSPISILYIXXXXXXXXXYKQYEMVVKSXK

SEQ ID NO: 30259 - protein, 37 aa, Artificial Sequence; identical to SEQ ID NO: 8895
  GFR-binding peptide
  MOD_RES (6), (7): Xaa is C or S

SEQ ID NO: 30260 - protein, 36 aa, Artificial Sequence
  GFR-binding peptide
  MOD_RES (1), (2), (34), (36): Xaa is C or S
XXAPTKLSPISVLYIDSSNNVIYKQYENMVVKAXGX

SEQ ID NO: 30261 - protein, 42 aa, Artificial Sequence; identical to SEQ ID NO: 8896
  GFR-binding peptide
  MOD_RES (5), (6), (41): Xaa is C or S
  MOD_RES (20), (21), (22), (23), (24): Xaa is A or G
  MOD_RES (25), (26), (27), (28): Xaa is A or G or is absent

SEQ ID NO: 30262 - protein, 36 aa, Artificial Sequence
  GFR-binding peptide
  MOD_RES (2), (3), (35): Xaa is C or S
AXXVPTELEPISMLYLDENEKVVKFKYEDMVVEGXG

SEQ ID NO: 30263 - protein, 41 aa, Artificial Sequence; identical to SEQ ID NO: 8899
  GFR-binding peptide
  MOD_RES (5), (6), (41): Xaa is C or S
  MOD_RES (20), (21), (22), (23), (24): Xaa is A or G
  MOD_RES (25), (26), (27), (28): Xaa is A or G or is absent

SEQ ID NO: 30264 - protein, 35 aa, Artificial Sequence
  GFR-binding peptide
  MOD_RES (1), (2), (34): Xaa is C or S
XXVPARLNAISILYFDAANNVVLKKYRDMVVEAXG

SEQ ID NO: 30265 - protein, 39 aa, Artificial Sequence
  GFR-binding peptide
  MOD_RES (4), (5), (37), (39): Xaa is C or S
PKAXXVPTELEPISMLYLDEYDKVVKFKYEEMVVEGXGX

SEQ ID NO: 30266 - protein, 33 aa, Artificial Sequence
  GFR-binding peptide
  MOD_RES (1), (1): Xaa is C or S
  MOD_RES (15), (16), (17), (18), (19): Xaa is A or G
  MOD_RES (20), (21), (22), (23): Xaa is A or G or is absent
XVPQDLSPISILYIXXXXXXXXXYKQYEMVVKS

SEQ ID NO: 30267 - protein, 37 aa, Artificial Sequence
  GFR-binding peptide
  MOD_RES (1), (2), (36): Xaa is C or S
  MOD_RES (16), (17), (18), (19), (20): Xaa is A or G
  MOD_RES (21), (22), (23), (24): Xaa is A or G or is absent
XXAPTKLEPISVLYLXXXXXXXXXKFKYENMVVRSXG

SEQ ID NO: 30268 - protein, 34 aa, Artificial Sequence; identical to SEQ ID NO: 8903
  GFR-binding peptide
  MOD_RES (34), (34): Xaa is C or S
  MOD_RES (14), (15), (16), (17), (18): Xaa is A or G
  MOD_RES (19), (20), (21), (22): Xaa is A or G or is absent

SEQ ID NO: 30269 - protein, 35 aa, Artificial Sequence
  GFR-binding peptide
  MOD_RES (1), (2), (34): Xaa is C or S
XXAPTKLEPISVLYLDSSNNVIKFKYENMVVKAXG

SEQ ID NO: 30270 - protein, 35 aa, Artificial Sequence
  GFR-binding peptide
  MOD_RES (1), (2), (34): Xaa is C or S
XXVPARLEPISILYLDAANNVVKFKYEDMVVEAXG

SEQ ID NO: 30271 - protein, 41 aa, Artificial Sequence
  GFR-binding peptide
  MOD_RES (3), (4), (38), (40): Xaa is C or S
  MOD_RES (18), (19), (20), (21), (22): Xaa is A or G
  MOD_RES (23), (24), (25), (26): Xaa is A or G or is absent
KAXXVPTELSPISMLYIXXXXXXXXXYKQYEEMVVEGXGXR

SEQ ID NO: 30272 - protein, 35 aa, Artificial Sequence; identical to SEQ ID NO: 8907
  GFR-binding peptide
  MOD_RES (1), (32), (34): Xaa is C or S

SEQ ID NO: 30273 - protein, 35 aa, Artificial Sequence
  GFR-binding peptide
  MOD_RES (1), (2), (34): Xaa is C or S
XXAPTKLSPISVLYIDDSSNVIYKQYENMVVRSXG

SEQ ID NO: 30274 - protein, 39 aa, Artificial Sequence
  GFR-binding peptide
  MOD_RES (5), (6), (38): Xaa is C or S
VPKPXXAPTQLSPISVLYIDDSSNVIYKQYENMVVRAXG

SEQ ID NO: 30275 - protein, 36 aa, Artificial Sequence
  GFR-binding peptide
  MOD_RES (5), (6): Xaa is C or S
SAAPXXVPQALEPISILYLVGRKPKVKFKYEMIVRS

SEQ ID NO: 30276 - protein, 31 aa, Artificial Sequence
  GFR-binding peptide
  MOD_RES (1), (1): Xaa is C or S
XAPTKLEPISVLYLDSSNNVIKFKYENMVVK

SEQ ID NO: 30277 - protein, 35 aa, Artificial Sequence
  GFR-binding peptide
  MOD_RES (1), (33), (35): Xaa is C or S
XVPARLSPISILYKDAANNVVLKYHYDMVVEAXGX

SEQ ID NO: 30278 - protein, 32 aa, Artificial Sequence
  GFR-binding peptide
VPTKLSPISVLYIDDMGVPTYKQYEEGMSVAE

SEQ ID NO: 30279 - protein, 42 aa, Artificial Sequence
  GFR-binding peptide
  MOD_RES (5), (6), (40), (42): Xaa is C or S
  MOD_RES (20), (21), (22), (23), (24): Xaa is A or G
  MOD_RES (25), (26), (27), (28): Xaa is A or G or is absent
IPKAXXVPTELSPISMLYIXXXXXXXXXYKQYEDMVVEGXGX

SEQ ID NO: 30280 - protein, 42 aa, Artificial Sequence
  GFR-binding peptide
  MOD_RES (3), (4), (39), (41): Xaa is C or S
  MOD_RES (18), (19), (20), (21), (22): Xaa is A or G
  MOD_RES (23), (24), (25), (26): Xaa is A or G or is absent
KAXXVPTKLSPISVLYIXXXXXXXXXYKQYEEGMSVAEXGXR

SEQ ID NO: 30281 - protein, 36 aa, Artificial Sequence
  GFR-binding peptide
  MOD_RES (1), (33), (35): Xaa is C or S
XVPTELEPISMLYLDEYDKVVKFKYEEMVVEGXGXR

SEQ ID NO: 30282 - protein, 43 aa, Artificial Sequence
  GFR-binding peptide
  MOD_RES (6), (7), (41), (43): Xaa is C or S
  MOD_RES (21), (22), (23), (24), (25): Xaa is A or G
  MOD_RES (26), (27), (28), (29): Xaa is A or G or is absent
AAPASXXVPARLNAISILYFXXXXXXXXXLKKYRDMVVEAXGX

SEQ ID NO: 30283 - protein, 34 aa, Artificial Sequence
  GFR-binding peptide
  MOD_RES (1), (2): Xaa is C or S
  MOD_RES (16), (17), (18), (19), (20): Xaa is A or G
  MOD_RES (21), (22), (23), (24): Xaa is A or G or is absent
XXVPQDLSPISILYIXXXXXXXXXYKQYEMVVKS

SEQ ID NO: 30284 - protein, 34 aa, Artificial Sequence; identical to SEQ ID NO: 8911
  GFR-binding peptide
  MOD_RES (1), (32), (34): Xaa is C or S

SEQ ID NO: 30285 - protein, 36 aa, Artificial Sequence
  GFR-binding peptide
  MOD_RES (3), (4): Xaa is C or S
  MOD_RES (18), (19), (20), (21), (22): Xaa is A or G
  MOD_RES (23), (24), (25), (26): Xaa is A or G or is absent
KAXXVPTKLSPISILYKXXXXXXXXXLKYHYGMAVS

SEQ ID NO: 30286 - protein, 41 aa, Artificial Sequence; identical to SEQ ID NO: 8913
  GFR-binding peptide
  MOD_RES (6), (7), (40): Xaa is C or S
  MOD_RES (21), (22), (23), (24), (25): Xaa is A or G
  MOD_RES (26), (27), (28), (29): Xaa is A or G or is absent

SEQ ID NO: 30287 - protein, 38 aa, Artificial Sequence; identical to SEQ ID NO: 8914
  GFR-binding peptide
  MOD_RES (5), (6): Xaa is C or S
  MOD_RES (20), (21), (22), (23), (24): Xaa is A or G
  MOD_RES (25), (26), (27), (28): Xaa is A or G or is absent

SEQ ID NO: 30288 - protein, 32 aa, Artificial Sequence
  GFR-binding peptide
  MOD_RES (1), (2): Xaa is C or S
XXVPTKLSPISILYIDKGVVTYYKQYEGMAVS

SEQ ID NO: 30289 - protein, 34 aa, Artificial Sequence
  GFR-binding peptide
  MOD_RES (2), (3): Xaa is C or S
AXXVPTKLNAISILYFDKGVVTYLKKYRGMAVSE

SEQ ID NO: 30290 - protein, 39 aa, Artificial Sequence
  GFR-binding peptide
  MOD_RES (5), (6): Xaa is C or S
  MOD_RES (20), (21), (22), (23), (24): Xaa is A or G
  MOD_RES (25), (26), (27), (28): Xaa is A or G or is absent
IPKAXXVPTELEPISMLYLXXXXXXXXXKFKYEEMVVEG

SEQ ID NO: 30291 - protein, 36 aa, Artificial Sequence
  GFR-binding peptide
  MOD_RES (2), (3), (35): Xaa is C or S
AXXVPTKLSPISILYIDKGVVTYYKQYEGMAVSEXG

SEQ ID NO: 30292 - protein, 41 aa, Artificial Sequence
  GFR-binding peptide
  MOD_RES (5), (6), (40): Xaa is C or S
  MOD_RES (20), (21), (22), (23), (24): Xaa is A or G
  MOD_RES (25), (26), (27), (28): Xaa is A or G or is absent
IPKAXXVPTELSPISMLYIXXXXXXXXXYKQYEEMVVEGXG

SEQ ID NO: 30293 - protein, 39 aa, Artificial Sequence
  GFR-binding peptide
  MOD_RES (1), (2), (36), (38): Xaa is C or S
  MOD_RES (16), (17), (18), (19), (20): Xaa is A or G
  MOD_RES (21), (22), (23), (24): Xaa is A or G or is absent
XXVPTELSPISMLYIXXXXXXXXXYKQYEDMVVEGXGXR

SEQ ID NO: 30294 - protein, 39 aa, Artificial Sequence; identical to SEQ ID NO: 8919
  GFR-binding peptide
  MOD_RES (2), (3), (36), (38): Xaa is C or S

SEQ ID NO: 30295 - protein, 35 aa, Artificial Sequence
  GFR-binding peptide
  MOD_RES (4), (5): Xaa is C or S
AAPXXVPQALSPISILYIVGRKPKVYKQYEMIVRS

SEQ ID NO: 30296 - protein, 38 aa, Artificial Sequence; identical to SEQ ID NO: 8920
  GFR-binding peptide
  MOD_RES (3), (4), (36), (38): Xaa is C or S

SEQ ID NO: 30297 - protein, 45 aa, Artificial Sequence; identical to SEQ ID NO: 8922
  GFR-binding peptide
  MOD_RES (6), (7), (42), (44): Xaa is C or S
  MOD_RES (21), (22), (23), (24), (25): Xaa is A or G
  MOD_RES (26), (27), (28), (29): Xaa is A or G or is absent

SEQ ID NO: 30298 - protein, 37 aa, Artificial Sequence; identical to SEQ ID NO: 8923
  GFR-binding peptide
  MOD_RES (3), (4), (37): Xaa is C or S

SEQ ID NO: 30299 - protein, 36 aa, Artificial Sequence; identical to SEQ ID NO: 8924
  GFR-binding peptide
  MOD_RES (1), (33), (35): Xaa is C or S

SEQ ID NO: 30300 - protein, 33 aa, Artificial Sequence; identical to SEQ ID NO: 8925
  GFR-binding peptide
  MOD_RES (1), (1): Xaa is C or S
  MOD_RES (15), (16), (17), (18), (19): Xaa is A or G
  MOD_RES (20), (21), (22), (23): Xaa is A or G or is absent

SEQ ID NO: 30301 - protein, 40 aa, Artificial Sequence; identical to SEQ ID NO: 8926
  GFR-binding peptide
  MOD_RES (5), (6), (38), (40): Xaa is C or S

SEQ ID NO: 30302 - protein, 34 aa, Artificial Sequence
  GFR-binding peptide
  MOD_RES (1), (2): Xaa is C or S
  MOD_RES (16), (17), (18), (19), (20): Xaa is A or G
  MOD_RES (21), (22), (23), (24): Xaa is A or G or is absent
XXAPTKLEPISVLYLXXXXXXXXXKFKYENMVVR

SEQ ID NO: 30303 - protein, 39 aa, Artificial Sequence
  GFR-binding peptide
  MOD_RES (6), (7): Xaa is C or S
  MOD_RES (21), (22), (23), (24), (25): Xaa is A or G
  MOD_RES (26), (27), (28), (29): Xaa is A or G or is absent
YVPKPXXAPTKLSPISVLYIXXXXXXXXXYKQYENMVVR

SEQ ID NO: 30304 - protein, 35 aa, Artificial Sequence
  GFR-binding peptide
  MOD_RES (3), (35): Xaa is C or S
PTXAPTKLSPISVLYIDDSSNVIYKQYENMVVRSX

SEQ ID NO: 30305 - protein, 39 aa, Artificial Sequence
  GFR-binding peptide
  MOD_RES (6), (7), (39): Xaa is C or S
YVPKPXXAPTKLEPISVLYLDDSSNVIKFKYENMVVRSX

SEQ ID NO: 30306 - protein, 41 aa, Artificial Sequence
  GFR-binding peptide
  MOD_RES (7), (39), (41): Xaa is C or S
HVTKPTXAPTKLEPISVLYLDDSSNVIKFKYENMVVRSXGX

SEQ ID NO: 30307 - protein, 35 aa, Artificial Sequence
  GFR-binding peptide
  MOD_RES (1), (35): Xaa is C or S
  MOD_RES (15), (16), (17), (18), (19): Xaa is A or G
  MOD_RES (20), (21), (22), (23): Xaa is A or G or is absent
XVPTELSPISMLYIXXXXXXXXXYKQYEEMVVEGX

SEQ ID NO: 30308 - protein, 32 aa, Artificial Sequence; identical to SEQ ID NO: 8933
  GFR-binding peptide
  MOD_RES (14), (15), (16), (17), (18): Xaa is A or G
  MOD_RES (19), (20), (21), (22): Xaa is A or G or is absent

SEQ ID NO: 30309 - protein, 41 aa, Artificial Sequence
  GFR-binding peptide
  MOD_RES (4), (5), (39), (41): Xaa is C or S
  MOD_RES (19), (20), (21), (22), (23): Xaa is A or G
  MOD_RES (24), (25), (26), (27): Xaa is A or G or is absent
PKAXXVPTELSPISMLYIXXXXXXXXXYKQYEDMVVEGXGX

SEQ ID NO: 30310 - protein, 32 aa, Artificial Sequence; identical to SEQ ID NO: 8934
  GFR-binding peptide
  MOD_RES (31), (31): Xaa is C or S

SEQ ID NO: 30311 - protein, 39 aa, Artificial Sequence; identical to SEQ ID NO: 8935
  GFR-binding peptide
  MOD_RES (3), (4), (37), (39): Xaa is C or S
  MOD_RES (18), (19), (20), (21), (22): Xaa is A or G
  MOD_RES (23), (24), (25), (26): Xaa is A or G or is absent

SEQ ID NO: 30312 - protein, 40 aa, Artificial Sequence; identical to SEQ ID NO: 8938
  GFR-binding peptide
  MOD_RES (6), (7): Xaa is C or S
  MOD_RES (21), (22), (23), (24), (25): Xaa is A or G
  MOD_RES (26), (27), (28), (29): Xaa is A or G or is absent

SEQ ID NO: 30313 - protein, 37 aa, Artificial Sequence; identical to SEQ ID NO: 8939
  GFR-binding peptide
  MOD_RES (2), (3): Xaa is C or S
  MOD_RES (17), (18), (19), (20), (21): Xaa is A or G
  MOD_RES (22), (23), (24), (25): Xaa is A or G or is absent

SEQ ID NO: 30314 - protein, 40 aa, Artificial Sequence
  GFR-binding peptide
  MOD_RES (6), (7): Xaa is C or S
  MOD_RES (21), (22), (23), (24), (25): Xaa is A or G
  MOD_RES (26), (27), (28), (29): Xaa is A or G or is absent
YVPKPXXAPTKLSPISVLYIXXXXXXXXXYKQYENMVVRS

SEQ ID NO: 30315 - protein, 35 aa, Artificial Sequence
  GFR-binding peptide
  MOD_RES (34), (34): Xaa is C or S
  MOD_RES (14), (15), (16), (17), (18): Xaa is A or G
  MOD_RES (19), (20), (21), (22): Xaa is A or G or is absent
VPTKLEPISILYLXXXXXXXXXKFKYEGMAVSEXG

SEQ ID NO: 30316 - protein, 37 aa, Artificial Sequence
  GFR-binding peptide
  MOD_RES (5), (6), (37): Xaa is C or S
SASPXXVPQDLEPISILYLVGRTPKVKFKYEMVVKSX

SEQ ID NO: 30317 - protein, 39 aa, Artificial Sequence
  GFR-binding peptide
  MOD_RES (3), (4), (39): Xaa is C or S
  MOD_RES (18), (19), (20), (21), (22): Xaa is A or G
  MOD_RES (23), (24), (25), (26): Xaa is A or G or is absent
KAXXVPTKLSPISVLYIXXXXXXXXXYKQYEEGMSVAEX

SEQ ID NO: 30318 - protein, 34 aa, Artificial Sequence
  GFR-binding peptide
  MOD_RES (2), (3): Xaa is C or S
AXXVPTELEPISMLYLDENEKVVKFKYEDMVVEG

SEQ ID NO: 30319 - protein, 38 aa, Artificial Sequence
  GFR-binding peptide
  MOD_RES (5), (6): Xaa is C or S
  MOD_RES (20), (21), (22), (23), (24): Xaa is A or G
  MOD_RES (25), (26), (27), (28): Xaa is A or G or is absent
IPKAXXVPTELSPISMLYIXXXXXXXXXYKQYEDMVVE

SEQ ID NO: 30320 - protein, 37 aa, Artificial Sequence
  GFR-binding peptide
  MOD_RES (2), (3), (35), (37): Xaa is C or S
PXXAPTKLEPISVLYLDDSSNVIKFKYENMVVRSXGX

SEQ ID NO: 30321 - protein, 43 aa, Artificial Sequence
  GFR-binding peptide
  MOD_RES (5), (6), (41), (43): Xaa is C or S
  MOD_RES (20), (21), (22), (23), (24): Xaa is A or G
  MOD_RES (25), (26), (27), (28): Xaa is A or G or is absent
VGKAXXVPTKLSPISVLYIXXXXXXXXXYKQYEEGMSVAEXGX

SEQ ID NO: 30322 - protein, 41 aa, Artificial Sequence
  GFR-binding peptide
  MOD_RES (5), (6), (41): Xaa is C or S
  MOD_RES (20), (21), (22), (23), (24): Xaa is A or G
  MOD_RES (25), (26), (27), (28): Xaa is A or G or is absent
VGKAXXVPTKLEPISVLYLXXXXXXXXXKFKYEEGMSVAEX

SEQ ID NO: 30323 - protein, 38 aa, Artificial Sequence; identical to SEQ ID NO: 8948
  GFR-binding peptide
  MOD_RES (3), (4), (38): Xaa is C or S
  MOD_RES (18), (19), (20), (21), (22): Xaa is A or G
  MOD_RES (23), (24), (25), (26): Xaa is A or G or is absent

SEQ ID NO: 30324 - protein, 33 aa, Artificial Sequence
  GFR-binding peptide
  MOD_RES (1), (33): Xaa is C or S
XAPTQLSPISVLYIDDSSNVIYKQYENMVVRAX

SEQ ID NO: 30325 - protein, 34 aa, Artificial Sequence
  GFR-binding peptide
  MOD_RES (3), (4): Xaa is C or S
KAXXAPTKLSPISVLYIDSSNNVIYKQYENMVVK

SEQ ID NO: 30326 - protein, 39 aa, Artificial Sequence; identical to SEQ ID NO: 8952
  GFR-binding peptide
  MOD_RES (5), (6), (38): Xaa is C or S

SEQ ID NO: 30327 - protein, 38 aa, Artificial Sequence
  GFR-binding peptide
  MOD_RES (2), (3), (36), (38): Xaa is C or S
  MOD_RES (17), (18), (19), (20), (21): Xaa is A or G
  MOD_RES (22), (23), (24), (25): Xaa is A or G or is absent
PXXVPQDLEPISILYLXXXXXXXXXKFKYEMVVKSXKX

SEQ ID NO: 30328 - protein, 34 aa, Artificial Sequence
  GFR-binding peptide
  MOD_RES (2), (2): Xaa is C or S
  MOD_RES (16), (17), (18), (19), (20): Xaa is A or G
  MOD_RES (21), (22), (23), (24): Xaa is A or G or is absent
TXAPTKLSPISVLYIXXXXXXXXXYKQYENMVVR

SEQ ID NO: 30329 - protein, 35 aa, Artificial Sequence; identical to SEQ ID NO: 8957
  GFR-binding peptide
  MOD_RES (1), (33), (35): Xaa is C or S

SEQ ID NO: 30330 - protein, 34 aa, Artificial Sequence
  GFR-binding peptide
  MOD_RES (2), (3): Xaa is C or S
SXXVPARLEPISILYLDAANNVVKFKYEDMVVEA

SEQ ID NO: 30331 - protein, 39 aa, Artificial Sequence
  GFR-binding peptide
  MOD_RES (5), (6), (37), (39): Xaa is C or S
SASPXXVSQDLEPISILYLIGKTPKIKFKYEMIVKSXKX

SEQ ID NO: 30332 - protein, 33 aa, Artificial Sequence; identical to SEQ ID NO: 8958
  GFR-binding peptide
  MOD_RES (2), (3): Xaa is C or S

SEQ ID NO: 30333 - protein, 40 aa, Artificial Sequence; identical to SEQ ID NO: 8959
  GFR-binding peptide
  MOD_RES (3), (4), (37), (39): Xaa is C or S
  MOD_RES (18), (19), (20), (21), (22): Xaa is A or G
  MOD_RES (23), (24), (25), (26): Xaa is A or G or is absent

SEQ ID NO: 30334 - protein, 32 aa, Artificial Sequence; identical to SEQ ID NO: 8962
  GFR-binding peptide
  MOD_RES (1), (2): Xaa is C or S

SEQ ID NO: 30335 - protein, 35 aa, Artificial Sequence; identical to SEQ ID NO: 8963
  GFR-binding peptide
  MOD_RES (1), (2): Xaa is C or S
  MOD_RES (16), (17), (18), (19), (20): Xaa is A or G
  MOD_RES (21), (22), (23), (24): Xaa is A or G or is absent

SEQ ID NO: 30336 - protein, 40 aa, Artificial Sequence
  GFR-binding peptide
  MOD_RES (3), (4), (38), (40): Xaa is C or S
  MOD_RES (18), (19), (20), (21), (22): Xaa is A or G
  MOD_RES (23), (24), (25), (26): Xaa is A or G or is absent
KPXXAPTQLEPISVLYLXXXXXXXXXKFKYENMVVRAXGX

SEQ ID NO: 30337 - protein, 42 aa, Artificial Sequence
  GFR-binding peptide
  MOD_RES (6), (40), (42): Xaa is C or S
  MOD_RES (20), (21), (22), (23), (24): Xaa is A or G
  MOD_RES (25), (26), (27), (28): Xaa is A or G or is absent
VTKPTXAPTKLSPISVLYIXXXXXXXXXYKQYENMVVRSXGX

SEQ ID NO: 30338 - protein, 36 aa, Artificial Sequence
  GFR-binding peptide
  MOD_RES (3), (4), (36): Xaa is C or S
ASXXVPARLNAISILYFDAANNVVLKKYRDMVVEAX

SEQ ID NO: 30339 - protein, 37 aa, Artificial Sequence; identical to SEQ ID NO: 8965
  GFR-binding peptide
  MOD_RES (5), (6): Xaa is C or S

SEQ ID NO: 30340 - protein, 35 aa, Artificial Sequence
  GFR-binding peptide
  MOD_RES (34), (34): Xaa is C or S
  MOD_RES (14), (15), (16), (17), (18): Xaa is A or G
  MOD_RES (19), (20), (21), (22): Xaa is A or G or is absent
APTKLEPISVLYLXXXXXXXXXKFKYENMVVRSXG

SEQ ID NO: 30341 - protein, 35 aa, Artificial Sequence
  GFR-binding peptide
  MOD_RES (1), (32), (34): Xaa is C or S
XVPQALSPISILYIVGRKPKVYKQYEMIVRSXKXS

SEQ ID NO: 30342 - protein, 40 aa, Artificial Sequence; identical to SEQ ID NO: 8966
  GFR-binding peptide
  MOD_RES (3), (4), (38), (40): Xaa is C or S
  MOD_RES (18), (19), (20), (21), (22): Xaa is A or G
  MOD_RES (23), (24), (25), (26): Xaa is A or G or is absent

SEQ ID NO: 30343 - protein, 35 aa, Artificial Sequence; identical to SEQ ID NO: 8968
  GFR-binding peptide
  MOD_RES (32), (34): Xaa is C or S

SEQ ID NO: 30344 - protein, 39 aa, Artificial Sequence; identical to SEQ ID NO: 8969
  GFR-binding peptide
  MOD_RES (2), (3), (36), (38): Xaa is C or S
  MOD_RES (17), (18), (19), (20), (21): Xaa is A or G
  MOD_RES (22), (23), (24), (25): Xaa is A or G or is absent

SEQ ID NO: 30345 - protein, 36 aa, Artificial Sequence; identical to SEQ ID NO: 8971
  GFR-binding peptide
  MOD_RES (5), (6): Xaa is C or S

SEQ ID NO: 30346 - protein, 41 aa, Artificial Sequence; identical to SEQ ID NO: 8972
  GFR-binding peptide
  MOD_RES (4), (5), (38), (40): Xaa is C or S
  MOD_RES (19), (20), (21), (22), (23): Xaa is A or G
  MOD_RES (24), (25), (26), (27): Xaa is A or G or is absent

SEQ ID NO: 30347 - protein, 33 aa, Artificial Sequence; identical to SEQ ID NO: 8974
  GFR-binding peptide
  MOD_RES (1), (2): Xaa is C or S

SEQ ID NO: 30348 - protein, 31 aa, Artificial Sequence; identical to SEQ ID NO: 8975
  GFR-binding peptide
  MOD_RES (1), (1): Xaa is C or S

SEQ ID NO: 30349 - protein, 32 aa, Artificial Sequence
  GFR-binding peptide
  MOD_RES (32), (32): Xaa is C or S
APTQLEPISVLYLDDSSNVIKFKYENMVVRAX

SEQ ID NO: 30350 - protein, 35 aa, Artificial Sequence
  GFR-binding peptide
  MOD_RES (1), (33), (35): Xaa is C or S
XVPARLEPISILYLDAANNVVKFKYEDMVVEAXGX

SEQ ID NO: 30351 - protein, 44 aa, Artificial Sequence; identical to SEQ ID NO: 8976
  GFR-binding peptide
  MOD_RES (5), (6), (41), (43): Xaa is C or S
  MOD_RES (20), (21), (22), (23), (24): Xaa is A or G
  MOD_RES (25), (26), (27), (28): Xaa is A or G or is absent

SEQ ID NO: 30352 - protein, 39 aa, Artificial Sequence; identical to SEQ ID NO: 8977
  GFR-binding peptide
  MOD_RES (3), (4), (36), (38): Xaa is C or S

SEQ ID NO: 30353 - protein, 34 aa, Artificial Sequence
  GFR-binding peptide
  MOD_RES (3), (4): Xaa is C or S
APXXVPQALEPISILYLVGRKPKVKFKYEMIVRS

SEQ ID NO: 30354 - protein, 44 aa, Artificial Sequence; identical to SEQ ID NO: 8978
  GFR-binding peptide
  MOD_RES (6), (7), (41), (43): Xaa is C or S
  MOD_RES (21), (22), (23), (24), (25): Xaa is A or G
  MOD_RES (26), (27), (28), (29): Xaa is A or G or is absent

SEQ ID NO: 30355 - protein, 38 aa, Artificial Sequence; identical to SEQ ID NO: 8980
  GFR-binding peptide
  MOD_RES (5), (6), (38): Xaa is C or S

SEQ ID NO: 30356 - protein, 32 aa, Artificial Sequence; identical to SEQ ID NO: 8981
  GFR-binding peptide
  MOD_RES (31), (31): Xaa is C or S

SEQ ID NO: 30357 - protein, 36 aa, Artificial Sequence
  GFR-binding peptide
  MOD_RES (1), (2), (33), (35): Xaa is C or S
XXVPQALEPISILYLVGRKPKVKFKYEMIVRSXKXS

SEQ ID NO: 30358 - protein, 38 aa, Artificial Sequence; identical to SEQ ID NO: 8983
  GFR-binding peptide
  MOD_RES (5), (6), (37): Xaa is C or S

SEQ ID NO: 30359 - protein, 36 aa, Artificial Sequence
  GFR-binding peptide
  MOD_RES (34), (36): Xaa is C or S
  MOD_RES (14), (15), (16), (17), (18): Xaa is A or G
  MOD_RES (19), (20), (21), (22): Xaa is A or G or is absent
VPARLEPISILYLXXXXXXXXXKFKYEDMVVEAXGX

SEQ ID NO: 30360 - protein, 42 aa, Artificial Sequence; identical to SEQ ID NO: 8984
  GFR-binding peptide
  MOD_RES (4), (5), (39), (41): Xaa is C or S
  MOD_RES (19), (20), (21), (22), (23): Xaa is A or G
  MOD_RES (24), (25), (26), (27): Xaa is A or G or is absent

SEQ ID NO: 30361 - protein, 34 aa, Artificial Sequence
  GFR-binding peptide
  MOD_RES (1), (2): Xaa is C or S
XXVPTKLEPISVLYLDDMGVPTKFKYEEGMSVAE

SEQ ID NO: 30362 - protein, 39 aa, Artificial Sequence
  GFR-binding peptide
  MOD_RES (3), (4), (38): Xaa is C or S
  MOD_RES (18), (19), (20), (21), (22): Xaa is A or G
  MOD_RES (23), (24), (25), (26): Xaa is A or G or is absent
ASXXVPARLEPISILYLXXXXXXXXXKFKYEDMVVEAXG

SEQ ID NO: 30363 - protein, 39 aa, Artificial Sequence
  GFR-binding peptide
  MOD_RES (3), (4), (36), (38): Xaa is C or S
KAXXVPTELSPISMLYIDEYDKVVYKQYEEMVVEGXGXR

SEQ ID NO: 30364 - protein, 38 aa, Artificial Sequence
  GFR-binding peptide
  MOD_RES (4), (36), (38): Xaa is C or S
KPTXAPTKLSPISVLYIDDSSNVIYKQYENMVVRSXGX

SEQ ID NO: 30365 - protein, 31 aa, Artificial Sequence
  GFR-binding peptide
VPTKLSPISILYIDKGVVTYYKQYEGMAVSE

SEQ ID NO: 30366 - protein, 35 aa, Artificial Sequence
  GFR-binding peptide
  MOD_RES (34), (34): Xaa is C or S
  MOD_RES (14), (15), (16), (17), (18): Xaa is A or G
  MOD_RES (19), (20), (21), (22): Xaa is A or G or is absent
VPTKLNAISILYFXXXXXXXXXLKKYRGMAVSEXG

SEQ ID NO: 30367 - protein, 39 aa, Artificial Sequence; identical to SEQ ID NO: 8990
  GFR-binding peptide
  MOD_RES (1), (36), (38): Xaa is C or S
  MOD_RES (15), (16), (17), (18), (19): Xaa is A or G
  MOD_RES (20), (21), (22), (23): Xaa is A or G or is absent

SEQ ID NO: 30368 - protein, 33 aa, Artificial Sequence; identical to SEQ ID NO: 8992
  GFR-binding peptide
  MOD_RES (1), (33): Xaa is C or S

SEQ ID NO: 30369 - protein, 33 aa, Artificial Sequence
  GFR-binding peptide
  MOD_RES (14), (15), (16), (17), (18): Xaa is A or G
  MOD_RES (19), (20), (21), (22): Xaa is A or G or is absent
APTKLSPISVLYIXXXXXXXXXYKQYENMVVRS

SEQ ID NO: 30370 - protein, 40 aa, Artificial Sequence
  GFR-binding peptide
  MOD_RES (5), (6), (40): Xaa is C or S
  MOD_RES (20), (21), (22), (23), (24): Xaa is A or G
  MOD_RES (25), (26), (27), (28): Xaa is A or G or is absent
IPKAXXVPTELSPISMLYIXXXXXXXXXYKQYEEMVVEGX

SEQ ID NO: 30371 - protein, 33 aa, Artificial Sequence; identical to SEQ ID NO: 8997
  GFR-binding peptide
  MOD_RES (1), (33): Xaa is C or S

SEQ ID NO: 30372 - protein, 38 aa, Artificial Sequence
  GFR-binding peptide
  MOD_RES (6), (7): Xaa is C or S
TVPKPXXAPTQLSPISVLYIDDSSNVIYKQYENMVVRA

SEQ ID NO: 30373 - protein, 41 aa, Artificial Sequence; identical to SEQ ID NO: 8998
  GFR-binding peptide
  MOD_RES (4), (5), (39), (41): Xaa is C or S
  MOD_RES (19), (20), (21), (22), (23): Xaa is A or G
  MOD_RES (24), (25), (26), (27): Xaa is A or G or is absent

SEQ ID NO: 30374 - protein, 35 aa, Artificial Sequence
  GFR-binding peptide
  MOD_RES (4), (5): Xaa is C or S
PKAXXVPTELEPISMLYLDENEKVVKFKYEDMVVE

SEQ ID NO: 30375 - protein, 36 aa, Artificial Sequence
  GFR-binding peptide
  MOD_RES (34), (36): Xaa is C or S
  MOD_RES (14), (15), (16), (17), (18): Xaa is A or G
  MOD_RES (19), (20), (21), (22): Xaa is A or G or is absent
VPTELEPISMLYLXXXXXXXXXKFKYEEMVVEGXGX

SEQ ID NO: 30376 - protein, 32 aa, Artificial Sequence
  GFR-binding peptide
  MOD_RES (1), (32): Xaa is C or S
XVPQALEPISILYLVGRKPKVKFKYEMIVRSX

SEQ ID NO: 30377 - protein, 36 aa, Artificial Sequence; identical to SEQ ID NO: 9001
  GFR-binding peptide
  MOD_RES (2), (3): Xaa is C or S
  MOD_RES (17), (18), (19), (20), (21): Xaa is A or G
  MOD_RES (22), (23), (24), (25): Xaa is A or G or is absent

SEQ ID NO: 30378 - protein, 39 aa, Artificial Sequence
  GFR-binding peptide
  MOD_RES (2), (3), (38): Xaa is C or S
  MOD_RES (17), (18), (19), (20), (21): Xaa is A or G
  MOD_RES (22), (23), (24), (25): Xaa is A or G or is absent
AXXVPTKLEPISVLYLXXXXXXXXXKFKYEEGMSVAEXG

SEQ ID NO: 30379 - protein, 31 aa, Artificial Sequence
  GFR-binding peptide
APTKLEPISVLYLDDSSNVIKFKYENMVVRS

SEQ ID NO: 30380 - protein, 37 aa, Artificial Sequence
  GFR-binding peptide
  MOD_RES (4), (5), (37): Xaa is C or S
PKPXXAPTKLSPISVLYIDDSSNVIYKQYENMVVRSX

SEQ ID NO: 30381 - protein, 36 aa, Artificial Sequence
  GFR-binding peptide
  MOD_RES (2), (3): Xaa is C or S
  MOD_RES (17), (18), (19), (20), (21): Xaa is A or G
  MOD_RES (22), (23), (24), (25): Xaa is A or G or is absent
AXXVPTELSPISMLYIXXXXXXXXXYKQYEEMVVEG

SEQ ID NO: 30382 - protein, 34 aa, Artificial Sequence
  GFR-binding peptide
  MOD_RES (1), (1): Xaa is C or S
  MOD_RES (15), (16), (17), (18), (19): Xaa is A or G
  MOD_RES (20), (21), (22), (23): Xaa is A or G or is absent
XVPTELSPISMLYIXXXXXXXXXYKQYEDMVVEG

SEQ ID NO: 30383 - protein, 31 aa, Artificial Sequence; identical to SEQ ID NO: 9003
  GFR-binding peptide
  MOD_RES (1), (1): Xaa is C or S

SEQ ID NO: 30384 - protein, 42 aa, Artificial Sequence
  GFR-binding peptide
  MOD_RES (6), (7), (41): Xaa is C or S
  MOD_RES (21), (22), (23), (24), (25): Xaa is A or G
  MOD_RES (26), (27), (28), (29): Xaa is A or G or is absent
KASKAXXVPTKLSPISILYIXXXXXXXXXYKQYEGMAVSEXG

SEQ ID NO: 30385 - protein, 38 aa, Artificial Sequence; identical to SEQ ID NO: 9005
  GFR-binding peptide
  MOD_RES (3), (4), (36), (38): Xaa is C or S

SEQ ID NO: 30386 - protein, 38 aa, Artificial Sequence
  GFR-binding peptide
  MOD_RES (4), (5), (37): Xaa is C or S
PKAXXAPTKLSPISVLYIDSSNNVIYKQYENMVVKAXG

SEQ ID NO: 30387 - protein, 40 aa, Artificial Sequence
  GFR-binding peptide
  MOD_RES (6), (7), (39): Xaa is C or S
KASKAXXVPTKLSPISILYKDKGVVTYLKYHYGMAVSEXG

SEQ ID NO: 30388 - protein, 39 aa, Artificial Sequence; identical to SEQ ID NO: 9008
  GFR-binding peptide
  MOD_RES (4), (36), (38): Xaa is C or S

SEQ ID NO: 30389 - protein, 32 aa, Artificial Sequence; identical to SEQ ID NO: 9010
  GFR-binding peptide
  MOD_RES (1), (2): Xaa is C or S

SEQ ID NO: 30390 - protein, 39 aa, Artificial Sequence
  GFR-binding peptide
  MOD_RES (4), (5), (39): Xaa is C or S
  MOD_RES (19), (20), (21), (22), (23): Xaa is A or G
  MOD_RES (24), (25), (26), (27): Xaa is A or G or is absent
PKAXXVPTELEPISMLYLXXXXXXXXXKFKYEDMVVEGX

SEQ ID NO: 30391 - protein, 33 aa, Artificial Sequence
  GFR-binding peptide
  MOD_RES (14), (15), (16), (17), (18): Xaa is A or G
  MOD_RES (19), (20), (21), (22): Xaa is A or G or is absent
VPTELSPISMLYIXXXXXXXXXYKQYEEMVVEG

SEQ ID NO: 30392 - protein, 37 aa, Artificial Sequence
  GFR-binding peptide
  MOD_RES (3), (4), (36): Xaa is C or S
KAXXVPTKLSPISILYKDKGVVTYLKYHYGMAVSEXG

SEQ ID NO: 30393 - protein, 33 aa, Artificial Sequence; identical to SEQ ID NO: 9011
  GFR-binding peptide
  MOD_RES (1), (2): Xaa is C or S

SEQ ID NO: 30394 - protein, 32 aa, Artificial Sequence; identical to SEQ ID NO: 9012
  GFR-binding peptide
  MOD_RES (1), (2): Xaa is C or S

SEQ ID NO: 30395 - protein, 39 aa, Artificial Sequence; identical to SEQ ID NO: 9013
  GFR-binding peptide
  MOD_RES (4), (5), (37), (39): Xaa is C or S

SEQ ID NO: 30396 - protein, 32 aa, Artificial Sequence
  GFR-binding peptide
  MOD_RES (1), (2): Xaa is C or S
XXVPARLSPISILYKDAANNVVLKYHYDMVVE

SEQ ID NO: 30397 - protein, 44 aa, Artificial Sequence; identical to SEQ ID NO: 9014
  GFR-binding peptide
  MOD_RES (6), (7), (41), (43): Xaa is C or S
  MOD_RES (21), (22), (23), (24), (25): Xaa is A or G
  MOD_RES (26), (27), (28), (29): Xaa is A or G or is absent

SEQ ID NO: 30398 - protein, 33 aa, Artificial Sequence
  GFR-binding peptide
  MOD_RES (1), (33): Xaa is C or S
XVPTKLSPISILYIDKGVVTYYKQYEGMAVSEX

SEQ ID NO: 30399 - protein, 33 aa, Artificial Sequence; identical to SEQ ID NO: 9016
  GFR-binding peptide
  MOD_RES (2), (3): Xaa is C or S

SEQ ID NO: 30400 - protein, 40 aa, Artificial Sequence; identical to SEQ ID NO: 9020
  GFR-binding peptide
  MOD_RES (5), (6), (40): Xaa is C or S
  MOD_RES (20), (21), (22), (23), (24): Xaa is A or G
  MOD_RES (25), (26), (27), (28): Xaa is A or G or is absent

SEQ ID NO: 30401 - protein, 42 aa, Artificial Sequence
  GFR-binding peptide
  MOD_RES (6), (7), (40), (42): Xaa is C or S
  MOD_RES (21), (22), (23), (24), (25): Xaa is A or G
  MOD_RES (26), (27), (28), (29): Xaa is A or G or is absent
ASASPXXVPQDLSPISILYIXXXXXXXXXYKQYEMVVKSXKX

SEQ ID NO: 30402 - protein, 40 aa, Artificial Sequence
  GFR-binding peptide
  MOD_RES (7), (7): Xaa is C or S
  MOD_RES (21), (22), (23), (24), (25): Xaa is A or G
  MOD_RES (26), (27), (28), (29): Xaa is A or G or is absent
HVTKPTXAPTKLEPISVLYLXXXXXXXXXKFKYENMVVRS

SEQ ID NO: 30403 - protein, 36 aa, Artificial Sequence; identical to SEQ ID NO: 9023
  GFR-binding peptide
  MOD_RES (3), (4): Xaa is C or S
  MOD_RES (18), (19), (20), (21), (22): Xaa is A or G
  MOD_RES (23), (24), (25), (26): Xaa is A or G or is absent

SEQ ID NO: 30404 - protein, 35 aa, Artificial Sequence; identical to SEQ ID NO: 9024
  GFR-binding peptide
  MOD_RES (3), (4): Xaa is C or S

SEQ ID NO: 30405 - protein, 41 aa, Artificial Sequence
  GFR-binding peptide
  MOD_RES (4), (5), (39), (41): Xaa is C or S
  MOD_RES (19), (20), (21), (22), (23): Xaa is A or G
  MOD_RES (24), (25), (26), (27): Xaa is A or G or is absent
PKAXXVPTELEPISMLYLXXXXXXXXXKFKYEDMVVEGXGX

SEQ ID NO: 30406 - protein, 35 aa, Artificial Sequence; identical to SEQ ID NO: 9025
  GFR-binding peptide
  MOD_RES (4), (5): Xaa is C or S

SEQ ID NO: 30407 - protein, 40 aa, Artificial Sequence
  GFR-binding peptide
  MOD_RES (3), (4), (38), (40): Xaa is C or S
  MOD_RES (18), (19), (20), (21), (22): Xaa is A or G
  MOD_RES (23), (24), (25), (26): Xaa is A or G or is absent
KAXXVPTKLSPISILYKXXXXXXXXXLKYHYGMAVSEXGX

SEQ ID NO: 30408 - protein, 32 aa, Artificial Sequence
  GFR-binding peptide
  MOD_RES (14), (15), (16), (17), (18): Xaa is A or G
  MOD_RES (19), (20), (21), (22): Xaa is A or G or is absent
VSQDLEPISILYLXXXXXXXXXKFKYEMIVKS

SEQ ID NO: 30409 - protein, 38 aa, Artificial Sequence
  GFR-binding peptide
  MOD_RES (4), (5), (36), (38): Xaa is C or S
AAPXXVPQALEPISILYLVGRKPKVKFKYEMIVRSXKX

SEQ ID NO: 30410 - protein, 37 aa, Artificial Sequence
  GFR-binding peptide
  MOD_RES (6), (7): Xaa is C or S
AAPASXXVPARLSPISILYKDAANNVVLKYHYDMVVE

SEQ ID NO: 30411 - protein, 37 aa, Artificial Sequence
  GFR-binding peptide
  MOD_RES (2), (3), (37): Xaa is C or S
  MOD_RES (17), (18), (19), (20), (21): Xaa is A or G
  MOD_RES (22), (23), (24), (25): Xaa is A or G or is absent
SXXVPARLSPISILYKXXXXXXXXXLKYHYDMVVEAX

SEQ ID NO: 30412 - protein, 41 aa, Artificial Sequence; identical to SEQ ID NO: 9027
  GFR-binding peptide
  MOD_RES (6), (7), (41): Xaa is C or S
  MOD_RES (21), (22), (23), (24), (25): Xaa is A or G
  MOD_RES (26), (27), (28), (29): Xaa is A or G or is absent

SEQ ID NO: 30413 - protein, 38 aa, Artificial Sequence
  GFR-binding peptide
  MOD_RES (2), (3), (36), (38): Xaa is C or S
  MOD_RES (17), (18), (19), (20), (21): Xaa is A or G
  MOD_RES (22), (23), (24), (25): Xaa is A or G or is absent
PXXVSQDLSPISILYIXXXXXXXXXYKQYEMIVKSXKX

SEQ ID NO: 30414 - protein, 39 aa, Artificial Sequence
  GFR-binding peptide
  MOD_RES (4), (5), (38): Xaa is C or S
  MOD_RES (19), (20), (21), (22), (23): Xaa is A or G
  MOD_RES (24), (25), (26), (27): Xaa is A or G or is absent
ASPXXVPQDLSPISILYIXXXXXXXXXYKQYEMVVKSXK

SEQ ID NO: 30415 - protein, 37 aa, Artificial Sequence
  GFR-binding peptide
  MOD_RES (1), (2), (36): Xaa is C or S
  MOD_RES (16), (17), (18), (19), (20): Xaa is A or G
  MOD_RES (21), (22), (23), (24): Xaa is A or G or is absent
XXVPTKLNAISILYFXXXXXXXXXLKKYRGMAVSEXG

SEQ ID NO: 30416 - protein, 35 aa, Artificial Sequence; identical to SEQ ID NO: 9031
  GFR-binding peptide
  MOD_RES (2), (3): Xaa is C or S

SEQ ID NO: 30417 - protein, 33 aa, Artificial Sequence; identical to SEQ ID NO: 9032
  GFR-binding peptide
  MOD_RES (1), (33): Xaa is C or S

SEQ ID NO: 30418 - protein, 40 aa, Artificial Sequence; identical to SEQ ID NO: 9033
  GFR-binding peptide
  MOD_RES (6), (7): Xaa is C or S
  MOD_RES (21), (22), (23), (24), (25): Xaa is A or G
  MOD_RES (26), (27), (28), (29): Xaa is A or G or is absent

SEQ ID NO: 30419 - protein, 39 aa, Artificial Sequence
  GFR-binding peptide
  MOD_RES (5), (6), (38): Xaa is C or S
ASKAXXVPTKLSPISILYIDKGVVTYYKQYEGMAVSEXG

SEQ ID NO: 30420 - protein, 33 aa, Artificial Sequence
  GFR-binding peptide
  MOD_RES (1), (33): Xaa is C or S
XAPTKLEPISVLYLDSSNNVIKFKYENMVVKAX

SEQ ID NO: 30421 - protein, 42 aa, Artificial Sequence
  GFR-binding peptide
  MOD_RES (6), (7), (41): Xaa is C or S
  MOD_RES (21), (22), (23), (24), (25): Xaa is A or G
  MOD_RES (26), (27), (28), (29): Xaa is A or G or is absent
SIPKAXXVPTELEPISMLYLXXXXXXXXXKFKYEEMVVEGXG

SEQ ID NO: 30422 - protein, 40 aa, Artificial Sequence
  GFR-binding peptide
  MOD_RES (6), (7), (40): Xaa is C or S
  MOD_RES (21), (22), (23), (24), (25): Xaa is A or G
  MOD_RES (26), (27), (28), (29): Xaa is A or G or is absent
ASAAPXXVPQALEPISILYLXXXXXXXXXKFKYEMIVRSX

SEQ ID NO: 30423 - protein, 36 aa, Artificial Sequence; identical to SEQ ID NO: 9037
  GFR-binding peptide
  MOD_RES (34), (36): Xaa is C or S
  MOD_RES (14), (15), (16), (17), (18): Xaa is A or G
  MOD_RES (19), (20), (21), (22): Xaa is A or G or is absent

SEQ ID NO: 30424 - protein, 36 aa, Artificial Sequence; identical to SEQ ID NO: 9038
  GFR-binding peptide
  MOD_RES (1), (34), (36): Xaa is C or S
  MOD_RES (15), (16), (17), (18), (19): Xaa is A or G
  MOD_RES (20), (21), (22), (23): Xaa is A or G or is absent

SEQ ID NO: 30425 - protein, 36 aa, Artificial Sequence; identical to SEQ ID NO: 9040
  GFR-binding peptide
  MOD_RES (33), (35): Xaa is C or S
  MOD_RES (14), (15), (16), (17), (18): Xaa is A or G
  MOD_RES (19), (20), (21), (22): Xaa is A or G or is absent

SEQ ID NO: 30426 - protein, 36 aa, Artificial Sequence
  GFR-binding peptide
  MOD_RES (3), (4): Xaa is C or S
  MOD_RES (18), (19), (20), (21), (22): Xaa is A or G
  MOD_RES (23), (24), (25), (26): Xaa is A or G or is absent
SPXXVSQDLSPISILYIXXXXXXXXXYKQYEMIVKS

SEQ ID NO: 30427 - protein, 35 aa, Artificial Sequence
  GFR-binding peptide
  MOD_RES (4), (5): Xaa is C or S
SKAXXVPTKLNAISILYFDKGVVTYLKKYRGMAVS

SEQ ID NO: 30428 - protein, 39 aa, Artificial Sequence; identical to SEQ ID NO: 9041
  GFR-binding peptide
  MOD_RES (3), (4), (37), (39): Xaa is C or S
  MOD_RES (18), (19), (20), (21), (22): Xaa is A or G
  MOD_RES (23), (24), (25), (26): Xaa is A or G or is absent

SEQ ID NO: 30429 - protein, 43 aa, Artificial Sequence
  GFR-binding peptide
  MOD_RES (5), (6), (40), (42): Xaa is C or S
  MOD_RES (20), (21), (22), (23), (24): Xaa is A or G
  MOD_RES (25), (26), (27), (28): Xaa is A or G or is absent
VPKPXXAPTKLEPISVLYLXXXXXXXXXKFKYENMVVRSXGXH

SEQ ID NO: 30430 - protein, 34 aa, Artificial Sequence; identical to SEQ ID NO: 9045
  GFR-binding peptide
  MOD_RES (34), (34): Xaa is C or S
  MOD_RES (14), (15), (16), (17), (18): Xaa is A or G
  MOD_RES (19), (20), (21), (22): Xaa is A or G or is absent

SEQ ID NO: 30431 - protein, 34 aa, Artificial Sequence
  GFR-binding peptide
  MOD_RES (34), (34): Xaa is C or S
  MOD_RES (14), (15), (16), (17), (18): Xaa is A or G
  MOD_RES (19), (20), (21), (22): Xaa is A or G or is absent
APTQLSPISVLYIXXXXXXXXXYKQYENMVVRAX

SEQ ID NO: 30432 - protein, 34 aa, Artificial Sequence
  GFR-binding peptide
  MOD_RES (34), (34): Xaa is C or S
  MOD_RES (14), (15), (16), (17), (18): Xaa is A or G
  MOD_RES (19), (20), (21), (22): Xaa is A or G or is absent
APTKLEPISVLYLXXXXXXXXXKFKYENMVVRSX

SEQ ID NO: 30433 - protein, 35 aa, Artificial Sequence; identical to SEQ ID NO: 9048
  GFR-binding peptide
  MOD_RES (1), (34): Xaa is C or S
  MOD_RES (15), (16), (17), (18), (19): Xaa is A or G
  MOD_RES (20), (21), (22), (23): Xaa is A or G or is absent

SEQ ID NO: 30434 - protein, 43 aa, Artificial Sequence; identical to SEQ ID NO: 9053
  GFR-binding peptide
  MOD_RES (5), (6), (40), (42): Xaa is C or S
  MOD_RES (20), (21), (22), (23), (24): Xaa is A or G
  MOD_RES (25), (26), (27), (28): Xaa is A or G or is absent

SEQ ID NO: 30435 - protein, 42 aa, Artificial Sequence; identical to SEQ ID NO: 9056
  GFR-binding peptide
  MOD_RES (6), (7), (41): Xaa is C or S
  MOD_RES (21), (22), (23), (24), (25): Xaa is A or G
  MOD_RES (26), (27), (28), (29): Xaa is A or G or is absent

SEQ ID NO: 30436 - protein, 39 aa, Artificial Sequence
  GFR-binding peptide
  MOD_RES (3), (4), (36), (38): Xaa is C or S
KAXXAPTKLEPISVLYLDSSNNVIKFKYENMVVKAXGXH

SEQ ID NO: 30437 - protein, 40 aa, Artificial Sequence; identical to SEQ ID NO: 9060
  GFR-binding peptide
  MOD_RES (5), (6), (40): Xaa is C or S
  MOD_RES (20), (21), (22), (23), (24): Xaa is A or G
  MOD_RES (25), (26), (27), (28): Xaa is A or G or is absent

SEQ ID NO: 30438 - protein, 33 aa, Artificial Sequence
  GFR-binding peptide
  MOD_RES (32), (32): Xaa is C or S
VPTKLNAISILYFDKGVVTYLKKYRGMAVSEXG

SEQ ID NO: 30439 - protein, 39 aa, Artificial Sequence
  GFR-binding peptide
  MOD_RES (5), (37), (39): Xaa is C or S
TKPTXAPTKLSPISVLYIDDSSNVIYKQYENMVVRSXGX

SEQ ID NO: 30440 - protein, 40 aa, Artificial Sequence
  GFR-binding peptide
  MOD_RES (3), (4), (38), (40): Xaa is C or S
  MOD_RES (18), (19), (20), (21), (22): Xaa is A or G
  MOD_RES (23), (24), (25), (26): Xaa is A or G or is absent
KAXXAPTKLEPISVLYLXXXXXXXXXKFKYENMVVKAXGX

SEQ ID NO: 30441 - protein, 37 aa, Artificial Sequence; identical to SEQ ID NO: 9063
  GFR-binding peptide
  MOD_RES (2), (3), (34), (36): Xaa is C or S

SEQ ID NO: 30442 - protein, 37 aa, Artificial Sequence
  GFR-binding peptide
  MOD_RES (1), (2), (34), (36): Xaa is C or S
XXVPTELEPISMLYLDEYDKVVKFKYEEMVVEGXGXR

SEQ ID NO: 30443 - protein, 37 aa, Artificial Sequence
  GFR-binding peptide
  MOD_RES (3), (4), (37): Xaa is C or S
  MOD_RES (18), (19), (20), (21), (22): Xaa is A or G
  MOD_RES (23), (24), (25), (26): Xaa is A or G or is absent
APXXVPQALSPISILYIXXXXXXXXXYKQYEMIVRSX

SEQ ID NO: 30444 - protein, 44 aa, Artificial Sequence
  GFR-binding peptide
  MOD_RES (6), (7), (41), (43): Xaa is C or S
  MOD_RES (21), (22), (23), (24), (25): Xaa is A or G
  MOD_RES (26), (27), (28), (29): Xaa is A or G or is absent
TVPKPXXAPTQLEPISVLYLXXXXXXXXXKFKYENMVVRAXGXH

SEQ ID NO: 30445 - protein, 36 aa, Artificial Sequence
  GFR-binding peptide
  MOD_RES (1), (2), (34), (36): Xaa is C or S
XXVPTELSPISMLYIDEYDKVVYKQYEEMVVEGXGX

SEQ ID NO: 30446 - protein, 36 aa, Artificial Sequence
  GFR-binding peptide
  MOD_RES (1), (34), (36): Xaa is C or S
  MOD_RES (15), (16), (17), (18), (19): Xaa is A or G
  MOD_RES (20), (21), (22), (23): Xaa is A or G or is absent
XVPQALSPISILYIXXXXXXXXXYKQYEMIVRSXKX

SEQ ID NO: 30447 - protein, 35 aa, Artificial Sequence; identical to SEQ ID NO: 9068
  GFR-binding peptide
  MOD_RES (3), (4): Xaa is C or S

SEQ ID NO: 30448 - protein, 39 aa, Artificial Sequence; identical to SEQ ID NO: 9070
  GFR-binding peptide
  MOD_RES (3), (4), (37), (39): Xaa is C or S
  MOD_RES (18), (19), (20), (21), (22): Xaa is A or G
  MOD_RES (23), (24), (25), (26): Xaa is A or G or is absent

SEQ ID NO: 30449 - protein, 38 aa, Artificial Sequence; identical to SEQ ID NO: 9071
  GFR-binding peptide
  MOD_RES (3), (4), (37): Xaa is C or S
  MOD_RES (18), (19), (20), (21), (22): Xaa is A or G
  MOD_RES (23), (24), (25), (26): Xaa is A or G or is absent

SEQ ID NO: 30450 - protein, 35 aa, Artificial Sequence; identical to SEQ ID NO: 9072
  GFR-binding peptide
  MOD_RES (1), (35): Xaa is C or S
  MOD_RES (15), (16), (17), (18), (19): Xaa is A or G
  MOD_RES (20), (21), (22), (23): Xaa is A or G or is absent

SEQ ID NO: 30451 - protein, 34 aa, Artificial Sequence
  GFR-binding peptide
  MOD_RES (1), (2), (33): Xaa is C or S
XXVPQALEPISILYLVGRKPKVKFKYEMIVRSXK

SEQ ID NO: 30452 - protein, 35 aa, Artificial Sequence
  GFR-binding peptide
  MOD_RES (1), (33), (35): Xaa is C or S
XAPTKLSPISVLYIDDSSNVIYKQYENMVVRSXGX

SEQ ID NO: 30453 - protein, 39 aa, Artificial Sequence; identical to SEQ ID NO: 9073
  GFR-binding peptide
  MOD_RES (4), (5), (36), (38): Xaa is C or S

SEQ ID NO: 30454 - protein, 40 aa, Artificial Sequence
  GFR-binding peptide
  MOD_RES (2), (3), (37), (39): Xaa is C or S
  MOD_RES (17), (18), (19), (20), (21): Xaa is A or G
  MOD_RES (22), (23), (24), (25): Xaa is A or G or is absent
SXXVPARLSPISILYKXXXXXXXXXLKYHYDMVVEAXGXR

SEQ ID NO: 30455 - protein, 38 aa, Artificial Sequence; identical to SEQ ID NO: 9074
  GFR-binding peptide
  MOD_RES (2), (3), (37): Xaa is C or S
  MOD_RES (17), (18), (19), (20), (21): Xaa is A or G
  MOD_RES (22), (23), (24), (25): Xaa is A or G or is absent

SEQ ID NO: 30456 - protein, 42 aa, Artificial Sequence
  GFR-binding peptide
  MOD_RES (6), (7), (41): Xaa is C or S
  MOD_RES (21), (22), (23), (24), (25): Xaa is A or G
  MOD_RES (26), (27), (28), (29): Xaa is A or G or is absent
KASKAXXVPTKLNAISILYFXXXXXXXXXLKKYRGMAVSEXG

SEQ ID NO: 30457 - protein, 35 aa, Artificial Sequence
  GFR-binding peptide
  MOD_RES (2), (3): Xaa is C or S
  MOD_RES (17), (18), (19), (20), (21): Xaa is A or G
  MOD_RES (22), (23), (24), (25): Xaa is A or G or is absent
AXXVPTKLSPISILYKXXXXXXXXXLKYHYGMAVS

SEQ ID NO: 30458 - protein, 36 aa, Artificial Sequence; identical to SEQ ID NO: 9076
  GFR-binding peptide
  MOD_RES (1), (34), (36): Xaa is C or S
  MOD_RES (15), (16), (17), (18), (19): Xaa is A or G
  MOD_RES (20), (21), (22), (23): Xaa is A or G or is absent

SEQ ID NO: 30459 - protein, 37 aa, Artificial Sequence
  GFR-binding peptide
  MOD_RES (34), (36): Xaa is C or S
  MOD_RES (14), (15), (16), (17), (18): Xaa is A or G
  MOD_RES (19), (20), (21), (22): Xaa is A or G or is absent
VPTKLSPISILYIXXXXXXXXXYKQYEGMAVSEXGXR

SEQ ID NO: 30460 - protein, 35 aa, Artificial Sequence
  GFR-binding peptide
  MOD_RES (1), (2): Xaa is C or S
  MOD_RES (16), (17), (18), (19), (20): Xaa is A or G
  MOD_RES (21), (22), (23), (24): Xaa is A or G or is absent
XXVPTELEPISMLYLXXXXXXXXXKFKYEEMVVEG

SEQ ID NO: 30461 - protein, 35 aa, Artificial Sequence
  GFR-binding peptide
  MOD_RES (1), (32), (34): Xaa is C or S
XVPQDLEPISILYLVGRTPKVKFKYEMVVKSXKXS

SEQ ID NO: 30462 - protein, 31 aa, Artificial Sequence; identical to SEQ ID NO: 9080
  GFR-binding peptide
  MOD_RES (1), (1): Xaa is C or S

SEQ ID NO: 30463 - protein, 32 aa, Artificial Sequence
  GFR-binding peptide
  MOD_RES (14), (15), (16), (17), (18): Xaa is A or G
  MOD_RES (19), (20), (21), (22): Xaa is A or G or is absent
VPTELSPISMLYIXXXXXXXXXYKQYEDMVVE

SEQ ID NO: 30464 - protein, 39 aa, Artificial Sequence; identical to SEQ ID NO: 9088
  GFR-binding peptide
  MOD_RES (4), (5), (37), (39): Xaa is C or S

SEQ ID NO: 30465 - protein, 40 aa, Artificial Sequence
  GFR-binding peptide
  MOD_RES (5), (6), (39): Xaa is C or S
VGKAXXVPTKLEPISVLYLDDMGVPTKFKYEEGMSVAEXG

SEQ ID NO: 30466 - protein, 43 aa, Artificial Sequence
  GFR-binding peptide
  MOD_RES (6), (7), (41), (43): Xaa is C or S
  MOD_RES (21), (22), (23), (24), (25): Xaa is A or G
  MOD_RES (26), (27), (28), (29): Xaa is A or G or is absent
KASKAXXVPTKLNAISILYFXXXXXXXXXLKKYRGMAVSEXGX

SEQ ID NO: 30467 - protein, 33 aa, Artificial Sequence; identical to SEQ ID NO: 9091
  GFR-binding peptide
  MOD_RES (1), (1): Xaa is C or S
  MOD_RES (15), (16), (17), (18), (19): Xaa is A or G
  MOD_RES (20), (21), (22), (23): Xaa is A or G or is absent

SEQ ID NO: 30468 - protein, 37 aa, Artificial Sequence
  GFR-binding peptide
  MOD_RES (4), (5), (36): Xaa is C or S
ASPXXVSQDLSPISILYIIGKTPKIYKQYEMIVKSXK

SEQ ID NO: 30469 - protein, 33 aa, Artificial Sequence; identical to SEQ ID NO: 9094
  GFR-binding peptide
  MOD_RES (1), (1): Xaa is C or S
  MOD_RES (15), (16), (17), (18), (19): Xaa is A or G
  MOD_RES (20), (21), (22), (23): Xaa is A or G or is absent

SEQ ID NO: 30470 - protein, 33 aa, Artificial Sequence
  GFR-binding peptide
  MOD_RES (1), (1): Xaa is C or S
  MOD_RES (15), (16), (17), (18), (19): Xaa is A or G
  MOD_RES (20), (21), (22), (23): Xaa is A or G or is absent
XVPTELSPISMLYIXXXXXXXXXYKQYEDMVVE

SEQ ID NO: 30471 - protein, 39 aa, Artificial Sequence
  GFR-binding peptide
  MOD_RES (6), (7), (39): Xaa is C or S
KASKAXXVPTKLSPISILYIDKGVVTYYKQYEGMAVSEX

SEQ ID NO: 30472 - protein, 41 aa, Artificial Sequence
  GFR-binding peptide
  MOD_RES (4), (5), (39), (41): Xaa is C or S
  MOD_RES (19), (20), (21), (22), (23): Xaa is A or G
  MOD_RES (24), (25), (26), (27): Xaa is A or G or is absent
PKAXXVPTELEPISMLYLXXXXXXXXXKFKYEEMVVEGXGX

SEQ ID NO: 30473 - protein, 40 aa, Artificial Sequence; identical to SEQ ID NO: 9102
  GFR-binding peptide
  MOD_RES (6), (7), (40): Xaa is C or S
  MOD_RES (21), (22), (23), (24), (25): Xaa is A or G
  MOD_RES (26), (27), (28), (29): Xaa is A or G or is absent

SEQ ID NO: 30474 - protein, 35 aa, Artificial Sequence; identical to SEQ ID NO: 9104
  GFR-binding peptide
  MOD_RES (33), (35): Xaa is C or S
  MOD_RES (14), (15), (16), (17), (18): Xaa is A or G
  MOD_RES (19), (20), (21), (22): Xaa is A or G or is absent

SEQ ID NO: 30475 - protein, 34 aa, Artificial Sequence; identical to SEQ ID NO: 9105
  GFR-binding peptide
  MOD_RES (1), (33): Xaa is C or S

SEQ ID NO: 30476 - protein, 33 aa, Artificial Sequence
  GFR-binding peptide
  MOD_RES (3), (3): Xaa is C or S
PTXAPTKLSPISVLYIDDSSNVIYKQYENMVVR

SEQ ID NO: 30477 - protein, 39 aa, Artificial Sequence
  GFR-binding peptide
  MOD_RES (6), (7): Xaa is C or S
  MOD_RES (21), (22), (23), (24), (25): Xaa is A or G
  MOD_RES (26), (27), (28), (29): Xaa is A or G or is absent
SIPKAXXVPTELEPISMLYLXXXXXXXXXKFKYEEMVVE

SEQ ID NO: 30478 - protein, 33 aa, Artificial Sequence; identical to SEQ ID NO: 9107
  GFR-binding peptide
  MOD_RES (14), (15), (16), (17), (18): Xaa is A or G
  MOD_RES (19), (20), (21), (22): Xaa is A or G or is absent

SEQ ID NO: 30479 - protein, 43 aa, Artificial Sequence
  GFR-binding peptide
  MOD_RES (6), (7), (41), (43): Xaa is C or S
  MOD_RES (21), (22), (23), (24), (25): Xaa is A or G
  MOD_RES (26), (27), (28), (29): Xaa is A or G or is absent
SIPKAXXVPTELSPISMLYIXXXXXXXXXYKQYEEMVVEGXGX

SEQ ID NO: 30480 - protein, 39 aa, Artificial Sequence
  GFR-binding peptide
  MOD_RES (5), (6), (38): Xaa is C or S
IPKAXXVPTELEPISMLYLDEYDKVVKFKYEEMVVEGXG

SEQ ID NO: 30481 - protein, 31 aa, Artificial Sequence; identical to SEQ ID NO: 9111
  GFR-binding peptide
  MOD_RES (31), (31): Xaa is C or S

SEQ ID NO: 30482 - protein, 37 aa, Artificial Sequence
  GFR-binding peptide
  MOD_RES (2), (34), (36): Xaa is C or S
TXAPTKLEPISVLYLDDSSNVIKFKYENMVVRSXGXH

SEQ ID NO: 30483 - protein, 36 aa, Artificial Sequence
  GFR-binding peptide
  MOD_RES (1), (35): Xaa is C or S
  MOD_RES (15), (16), (17), (18), (19): Xaa is A or G
  MOD_RES (20), (21), (22), (23): Xaa is A or G or is absent
XAPTQLEPISVLYLXXXXXXXXXKFKYENMVVRAXG

SEQ ID NO: 30484 - protein, 39 aa, Artificial Sequence
  GFR-binding peptide
  MOD_RES (3), (4), (36), (38): Xaa is C or S
KAXXVPTELSPISMLYIDENEKVVYKQYEDMVVEGXGXR

SEQ ID NO: 30485 - protein, 38 aa, Artificial Sequence
  GFR-binding peptide
  MOD_RES (2), (3), (35), (37): Xaa is C or S
AXXAPTKLSPISVLYIDSSNNVIYKQYENMVVKAXGXH

SEQ ID NO: 30486 - protein, 35 aa, Artificial Sequence
  GFR-binding peptide
  MOD_RES (3), (4): Xaa is C or S
KPXXAPTQLEPISVLYLDDSSNVIKFKYENMVVRA

SEQ ID NO: 30487 - protein, 36 aa, Artificial Sequence
  GFR-binding peptide
  MOD_RES (4), (4): Xaa is C or S
  MOD_RES (18), (19), (20), (21), (22): Xaa is A or G
  MOD_RES (23), (24), (25), (26): Xaa is A or G or is absent
KPTXAPTKLSPISVLYIXXXXXXXXXYKQYENMVVR

SEQ ID NO: 30488 - protein, 33 aa, Artificial Sequence
  GFR-binding peptide
  MOD_RES (33), (33): Xaa is C or S
  MOD_RES (14), (15), (16), (17), (18): Xaa is A or G
  MOD_RES (19), (20), (21), (22): Xaa is A or G or is absent
VSQDLSPISILYIXXXXXXXXXYKQYEMIVKSX

SEQ ID NO: 30489 - protein, 34 aa, Artificial Sequence
  GFR-binding peptide
  MOD_RES (1), (2), (34): Xaa is C or S
XXAPTKLEPISVLYLDSSNNVIKFKYENMVVKAX

SEQ ID NO: 30490 - protein, 43 aa, Artificial Sequence; identical to SEQ ID NO: 9120
  GFR-binding peptide
  MOD_RES (6), (7), (40), (42): Xaa is C or S
  MOD_RES (21), (22), (23), (24), (25): Xaa is A or G
  MOD_RES (26), (27), (28), (29): Xaa is A or G or is absent

SEQ ID NO: 30491 - protein, 41 aa, Artificial Sequence; identical to SEQ ID NO: 9121
  GFR-binding peptide
  MOD_RES (6), (7), (40): Xaa is C or S
  MOD_RES (21), (22), (23), (24), (25): Xaa is A or G
  MOD_RES (26), (27), (28), (29): Xaa is A or G or is absent

SEQ ID NO: 30492 - protein, 31 aa, Artificial Sequence; identical to SEQ ID NO: 9122
  GFR-binding peptide
  MOD_RES (1), (1): Xaa is C or S

SEQ ID NO: 30493 - protein, 36 aa, Artificial Sequence
  GFR-binding peptide
  MOD_RES (1), (2), (36): Xaa is C or S
  MOD_RES (16), (17), (18), (19), (20): Xaa is A or G
  MOD_RES (21), (22), (23), (24): Xaa is A or G or is absent
XXVPARLEPISILYLXXXXXXXXXKFKYEDMVVEAX

SEQ ID NO: 30494 - protein, 37 aa, Artificial Sequence
  GFR-binding peptide
  MOD_RES (6), (6): Xaa is C or S
VTKPTXAPTKLEPISVLYLDDSSNVIKFKYENMVVRS

SEQ ID NO: 30495 - protein, 39 aa, Artificial Sequence; identical to SEQ ID NO: 9125
  GFR-binding peptide
  MOD_RES (3), (4), (39): Xaa is C or S
  MOD_RES (18), (19), (20), (21), (22): Xaa is A or G
  MOD_RES (23), (24), (25), (26): Xaa is A or G or is absent

SEQ ID NO: 30496 - protein, 34 aa, Artificial Sequence
  GFR-binding peptide
  MOD_RES (1), (2): Xaa is C or S
  MOD_RES (16), (17), (18), (19), (20): Xaa is A or G
  MOD_RES (21), (22), (23), (24): Xaa is A or G or is absent
XXVPTKLNAISILYFXXXXXXXXXLKKYRGMAVS

SEQ ID NO: 30497 - protein, 34 aa, Artificial Sequence
  GFR-binding peptide
  MOD_RES (34), (34): Xaa is C or S
  MOD_RES (14), (15), (16), (17), (18): Xaa is A or G
  MOD_RES (19), (20), (21), (22): Xaa is A or G or is absent
APTKLSPISVLYIXXXXXXXXXYKQYENMVVKAX

SEQ ID NO: 30498 - protein, 35 aa, Artificial Sequence
  GFR-binding peptide
  MOD_RES (3), (4): Xaa is C or S
KAXXAPTKLEPISVLYLDSSNNVIKFKYENMVVKA

SEQ ID NO: 30499 - protein, 44 aa, Artificial Sequence; identical to SEQ ID NO: 9131
  GFR-binding peptide
  MOD_RES (6), (7), (41), (43): Xaa is C or S
  MOD_RES (21), (22), (23), (24), (25): Xaa is A or G
  MOD_RES (26), (27), (28), (29): Xaa is A or G or is absent

SEQ ID NO: 30500 - protein, 39 aa, Artificial Sequence
  GFR-binding peptide
  MOD_RES (2), (3), (37), (39): Xaa is C or S
  MOD_RES (17), (18), (19), (20), (21): Xaa is A or G
  MOD_RES (22), (23), (24), (25): Xaa is A or G or is absent
SXXVPARLEPISILYLXXXXXXXXXKFKYEDMVVEAXGX

SEQ ID NO: 30501 - protein, 40 aa, Artificial Sequence
  GFR-binding peptide
  MOD_RES (4), (5), (39): Xaa is C or S
  MOD_RES (19), (20), (21), (22), (23): Xaa is A or G
  MOD_RES (24), (25), (26), (27): Xaa is A or G or is absent
PKAXXVPTELEPISMLYLXXXXXXXXXKFKYEDMVVEGXG

SEQ ID NO: 30502 - protein, 34 aa, Artificial Sequence; identical to SEQ ID NO: 9137
  GFR-binding peptide
  MOD_RES (1), (33): Xaa is C or S

SEQ ID NO: 30503 - protein, 39 aa, Artificial Sequence; identical to SEQ ID NO: 9138
  GFR-binding peptide
  MOD_RES (4), (5), (38): Xaa is C or S
  MOD_RES (19), (20), (21), (22), (23): Xaa is A or G
  MOD_RES (24), (25), (26), (27): Xaa is A or G or is absent

SEQ ID NO: 30504 - protein, 36 aa, Artificial Sequence
  GFR-binding peptide
  MOD_RES (5), (6): Xaa is C or S
IPKAXXVPTELEPISMLYLDEYDKVVKFKYEEMVVE

SEQ ID NO: 30505 - protein, 36 aa, Artificial Sequence
  GFR-binding peptide
  MOD_RES (34), (36): Xaa is C or S
  MOD_RES (14), (15), (16), (17), (18): Xaa is A or G
  MOD_RES (19), (20), (21), (22): Xaa is A or G or is absent
VPTELSPISMLYIXXXXXXXXXYKQYEEMVVEGXGX

SEQ ID NO: 30506 - protein, 36 aa, Artificial Sequence; identical to SEQ ID NO: 9143
  GFR-binding peptide
  MOD_RES (5), (6): Xaa is C or S

SEQ ID NO: 30507 - protein, 38 aa, Artificial Sequence
  GFR-binding peptide
  MOD_RES (5), (6), (38): Xaa is C or S
ASKAXXVPTKLNAISILYFDKGVVTYLKKYRGMAVSEX

SEQ ID NO: 30508 - protein, 37 aa, Artificial Sequence
  GFR-binding peptide
  MOD_RES (4), (5), (37): Xaa is C or S
PKAXXVPTELSPISMLYIDEYDKVVYKQYEEMVVEGX

SEQ ID NO: 30509 - protein, 34 aa, Artificial Sequence; identical to SEQ ID NO: 9147
  GFR-binding peptide
  MOD_RES (32), (34): Xaa is C or S

SEQ ID NO: 30510 - protein, 34 aa, Artificial Sequence
  GFR-binding peptide
  MOD_RES (32), (34): Xaa is C or S
VPTKLNAISILYFDKGVVTYLKKYRGMAVSEXGX

SEQ ID NO: 30511 - protein, 41 aa, Artificial Sequence
  GFR-binding peptide
  MOD_RES (4), (5), (39), (41): Xaa is C or S
  MOD_RES (19), (20), (21), (22), (23): Xaa is A or G
  MOD_RES (24), (25), (26), (27): Xaa is A or G or is absent
PKAXXVPTELSPISMLYIXXXXXXXXXYKQYEEMVVEGXGX

SEQ ID NO: 30512 - protein, 35 aa, Artificial Sequence
  GFR-binding peptide
  MOD_RES (3), (4), (35): Xaa is C or S
APXXVPQALSPISILYIVGRKPKVYKQYEMIVRSX

SEQ ID NO: 30513 - protein, 39 aa, Artificial Sequence; identical to SEQ ID NO: 9155
  GFR-binding peptide
  MOD_RES (4), (5), (39): Xaa is C or S
  MOD_RES (19), (20), (21), (22), (23): Xaa is A or G
  MOD_RES (24), (25), (26), (27): Xaa is A or G or is absent

SEQ ID NO: 30514 - protein, 44 aa, Artificial Sequence
  GFR-binding peptide
  MOD_RES (5), (6), (41), (43): Xaa is C or S
  MOD_RES (20), (21), (22), (23), (24): Xaa is A or G
  MOD_RES (25), (26), (27), (28): Xaa is A or G or is absent
VGKAXXVPTKLSPISVLYIXXXXXXXXXYKQYEEGMSVAEXGXR

SEQ ID NO: 30515 - protein, 34 aa, Artificial Sequence
  GFR-binding peptide
  MOD_RES (1), (33): Xaa is C or S
XAPTKLEPISVLYLDDSSNVIKFKYENMVVRSXG

SEQ ID NO: 30516 - protein, 40 aa, Artificial Sequence; identical to SEQ ID NO: 9156
  GFR-binding peptide
  MOD_RES (2), (3), (38), (40): Xaa is C or S
  MOD_RES (17), (18), (19), (20), (21): Xaa is A or G
  MOD_RES (22), (23), (24), (25): Xaa is A or G or is absent

SEQ ID NO: 30517 - protein, 35 aa, Artificial Sequence; identical to SEQ ID NO: 9157
  GFR-binding peptide
  MOD_RES (34), (34): Xaa is C or S
  MOD_RES (14), (15), (16), (17), (18): Xaa is A or G
  MOD_RES (19), (20), (21), (22): Xaa is A or G or is absent

SEQ ID NO: 30518 - protein, 37 aa, Artificial Sequence; identical to SEQ ID NO: 9158
  GFR-binding peptide
  MOD_RES (4), (5), (37): Xaa is C or S

SEQ ID NO: 30519 - protein, 34 aa, Artificial Sequence
  GFR-binding peptide
  MOD_RES (2), (3), (34): Xaa is C or S
PXXVPQDLEPISILYLVGRTPKVKFKYEMVVKSX

SEQ ID NO: 30520 - protein, 38 aa, Artificial Sequence
  GFR-binding peptide
  MOD_RES (1), (2), (35), (37): Xaa is C or S
  MOD_RES (16), (17), (18), (19), (20): Xaa is A or G
  MOD_RES (21), (22), (23), (24): Xaa is A or G or is absent
XXVPQDLEPISILYLXXXXXXXXXKFKYEMVVKSXKXS

SEQ ID NO: 30521 - protein, 40 aa, Artificial Sequence; identical to SEQ ID NO: 9161
  GFR-binding peptide
  MOD_RES (4), (5), (38), (40): Xaa is C or S
  MOD_RES (19), (20), (21), (22), (23): Xaa is A or G
  MOD_RES (24), (25), (26), (27): Xaa is A or G or is absent

SEQ ID NO: 30522 - protein, 36 aa, Artificial Sequence
  GFR-binding peptide
  MOD_RES (1), (35): Xaa is C or S
  MOD_RES (15), (16), (17), (18), (19): Xaa is A or G
  MOD_RES (20), (21), (22), (23): Xaa is A or G or is absent
XVPARLSPISILYIXXXXXXXXXYKQYEDMVVEAXG

SEQ ID NO: 30523 - protein, 37 aa, Artificial Sequence
  GFR-binding peptide
  MOD_RES (4), (4): Xaa is C or S
  MOD_RES (18), (19), (20), (21), (22): Xaa is A or G
  MOD_RES (23), (24), (25), (26): Xaa is A or G or is absent
KPTXAPTKLEPISVLYLXXXXXXXXXKFKYENMVVRS

SEQ ID NO: 30524 - protein, 42 aa, Artificial Sequence
  GFR-binding peptide
  MOD_RES (4), (5), (39), (41): Xaa is C or S
  MOD_RES (19), (20), (21), (22), (23): Xaa is A or G
  MOD_RES (24), (25), (26), (27): Xaa is A or G or is absent
PKAXXVPTELSPISMLYIXXXXXXXXXYKQYEDMVVEGXGXR

SEQ ID NO: 30525 - protein, 41 aa, Artificial Sequence; identical to SEQ ID NO: 9163
  GFR-binding peptide
  MOD_RES (6), (7), (41): Xaa is C or S
  MOD_RES (21), (22), (23), (24), (25): Xaa is A or G
  MOD_RES (26), (27), (28), (29): Xaa is A or G or is absent

SEQ ID NO: 30526 - protein, 36 aa, Artificial Sequence
  GFR-binding peptide
  MOD_RES (3), (4), (36): Xaa is C or S
KAXXVPTKLNAISILYFDKGVVTYLKKYRGMAVSEX

SEQ ID NO: 30527 - protein, 38 aa, Artificial Sequence
  GFR-binding peptide
  MOD_RES (3), (4): Xaa is C or S
  MOD_RES (18), (19), (20), (21), (22): Xaa is A or G
  MOD_RES (23), (24), (25), (26): Xaa is A or G or is absent
KAXXVPTKLEPISVLYLXXXXXXXXXKFKYEEGMSVAE

SEQ ID NO: 30528 - protein, 34 aa, Artificial Sequence; identical to SEQ ID NO: 9164
  GFR-binding peptide
  MOD_RES (2), (3): Xaa is C or S

SEQ ID NO: 30529 - protein, 38 aa, Artificial Sequence
  GFR-binding peptide
  MOD_RES (4), (38): Xaa is C or S
  MOD_RES (18), (19), (20), (21), (22): Xaa is A or G
  MOD_RES (23), (24), (25), (26): Xaa is A or G or is absent
KPTXAPTKLEPISVLYLXXXXXXXXXKFKYENMVVRSX

SEQ ID NO: 30530 - protein, 35 aa, Artificial Sequence; identical to SEQ ID NO: 9166
  GFR-binding peptide
  MOD_RES (32), (34): Xaa is C or S

SEQ ID NO: 30531 - protein, 33 aa, Artificial Sequence
  GFR-binding peptide
  MOD_RES (2), (3): Xaa is C or S
AXXVPTKLSPISILYKDKGVVTYLKYHYGMAVS

SEQ ID NO: 30532 - protein, 42 aa, Artificial Sequence; identical to SEQ ID NO: 9170
  GFR-binding peptide
  MOD_RES (6), (7), (41): Xaa is C or S
  MOD_RES (21), (22), (23), (24), (25): Xaa is A or G
  MOD_RES (26), (27), (28), (29): Xaa is A or G or is absent

SEQ ID NO: 30533 - protein, 36 aa, Artificial Sequence
  GFR-binding peptide
  MOD_RES (1), (2), (34), (36): Xaa is C or S
XXVPTELSPISMLYIDENEKVVYKQYEDMVVEGXGX

SEQ ID NO: 30534 - protein, 33 aa, Artificial Sequence
  GFR-binding peptide
  MOD_RES (1), (33): Xaa is C or S
XVPARLEPISILYLDAANNVVKFKYEDMVVEAX

SEQ ID NO: 30535 - protein, 32 aa, Artificial Sequence; identical to SEQ ID NO: 9171
  GFR-binding peptide
  MOD_RES (1), (2): Xaa is C or S

SEQ ID NO: 30536 - protein, 33 aa, Artificial Sequence
  GFR-binding peptide
  MOD_RES (33), (33): Xaa is C or S
  MOD_RES (14), (15), (16), (17), (18): Xaa is A or G
  MOD_RES (19), (20), (21), (22): Xaa is A or G or is absent
VPQDLSPISILYIXXXXXXXXXYKQYEMVVKSX

SEQ ID NO: 30537 - protein, 43 aa, Artificial Sequence
  GFR-binding peptide
  MOD_RES (5), (6), (40), (42): Xaa is C or S
  MOD_RES (20), (21), (22), (23), (24): Xaa is A or G
  MOD_RES (25), (26), (27), (28): Xaa is A or G or is absent
IPKAXXVPTELEPISMLYLXXXXXXXXXKFKYEEMVVEGXGXR

SEQ ID NO: 30538 - protein, 38 aa, Artificial Sequence
  GFR-binding peptide
  MOD_RES (5), (6), (38): Xaa is C or S
VPKPXXAPTQLSPISVLYIDDSSNVIYKQYENMVVRAX

SEQ ID NO: 30539 - protein, 32 aa, Artificial Sequence
  GFR-binding peptide
  MOD_RES (14), (15), (16), (17), (18): Xaa is A or G
  MOD_RES (19), (20), (21), (22): Xaa is A or G or is absent
APTKLEPISVLYLXXXXXXXXXKFKYENMVVR

SEQ ID NO: 30540 - protein, 39 aa, Artificial Sequence; identical to SEQ ID NO: 9174
  GFR-binding peptide
  MOD_RES (3), (4), (37), (39): Xaa is C or S

SEQ ID NO: 30541 - protein, 38 aa, Artificial Sequence
  GFR-binding peptide
  MOD_RES (3), (4), (37): Xaa is C or S
KAXXVPTKLEPISVLYLDDMGVPTKFKYEEGMSVAEXG

SEQ ID NO: 30542 - protein, 32 aa, Artificial Sequence
  GFR-binding peptide
  MOD_RES (14), (15), (16), (17), (18): Xaa is A or G
  MOD_RES (19), (20), (21), (22): Xaa is A or G or is absent
APTKLEPISVLYLXXXXXXXXXKFKYENMVVK

SEQ ID NO: 30543 - protein, 34 aa, Artificial Sequence
  GFR-binding peptide
  MOD_RES (1), (2), (34): Xaa is C or S
XXVPTKLSPISILYIDKGVVTYYKQYEGMAVSEX

SEQ ID NO: 30544 - protein, 31 aa, Artificial Sequence
  GFR-binding peptide
  MOD_RES (1), (1): Xaa is C or S
XVPQALEPISILYLVGRKPKVKFKYEMIVRS

SEQ ID NO: 30545 - protein, 36 aa, Artificial Sequence
  GFR-binding peptide
  MOD_RES (2), (3), (34), (36): Xaa is C or S
PXXVPQALEPISILYLVGRKPKVKFKYEMIVRSXKX

SEQ ID NO: 30546 - protein, 38 aa, Artificial Sequence
  GFR-binding peptide
  MOD_RES (2), (3), (37): Xaa is C or S
  MOD_RES (17), (18), (19), (20), (21): Xaa is A or G
  MOD_RES (22), (23), (24), (25): Xaa is A or G or is absent
PXXAPTQLSPISVLYIXXXXXXXXXYKQYENMVVRAXG

SEQ ID NO: 30547 - protein, 42 aa, Artificial Sequence
  GFR-binding peptide
  MOD_RES (7), (41): Xaa is C or S
  MOD_RES (21), (22), (23), (24), (25): Xaa is A or G
  MOD_RES (26), (27), (28), (29): Xaa is A or G or is absent
HVTKPTXAPTKLEPISVLYLXXXXXXXXXKFKYENMVVRSXG

SEQ ID NO: 30548 - protein, 31 aa, Artificial Sequence
  GFR-binding peptide
  MOD_RES (31), (31): Xaa is C or S
VPQALEPISILYLVGRKPKVKFKYEMIVRSX

SEQ ID NO: 30549 - protein, 32 aa, Artificial Sequence; identical to SEQ ID NO: 9180
  GFR-binding peptide
  MOD_RES (1), (2): Xaa is C or S

SEQ ID NO: 30550 - protein, 33 aa, Artificial Sequence
  GFR-binding peptide
  MOD_RES (1), (2), (33): Xaa is C or S
XXVPQALEPISILYLVGRKPKVKFKYEMIVRSX

SEQ ID NO: 30551 - protein, 37 aa, Artificial Sequence
  GFR-binding peptide
  MOD_RES (4), (5): Xaa is C or S
  MOD_RES (19), (20), (21), (22), (23): Xaa is A or G
  MOD_RES (24), (25), (26), (27): Xaa is A or G or is absent
SKAXXVPTKLSPISILYIXXXXXXXXXYKQYEGMAVS

SEQ ID NO: 30552 - protein, 39 aa, Artificial Sequence
  GFR-binding peptide
  MOD_RES (6), (7): Xaa is C or S
  MOD_RES (21), (22), (23), (24), (25): Xaa is A or G
  MOD_RES (26), (27), (28), (29): Xaa is A or G or is absent
KASKAXXVPTKLNAISILYFXXXXXXXXXLKKYRGMAVS

SEQ ID NO: 30553 - protein, 38 aa, Artificial Sequence
  GFR-binding peptide
  MOD_RES (5), (6): Xaa is C or S
  MOD_RES (20), (21), (22), (23), (24): Xaa is A or G
  MOD_RES (25), (26), (27), (28): Xaa is A or G or is absent
VPKPXXAPTKLEPISVLYLXXXXXXXXXKFKYENMVVR

SEQ ID NO: 30554 - protein, 41 aa, Artificial Sequence
  GFR-binding peptide
  MOD_RES (4), (5), (40): Xaa is C or S
  MOD_RES (19), (20), (21), (22), (23): Xaa is A or G
  MOD_RES (24), (25), (26), (27): Xaa is A or G or is absent
GKAXXVPTKLSPISVLYIXXXXXXXXXYKQYEEGMSVAEXG

SEQ ID NO: 30555 - protein, 32 aa, Artificial Sequence; identical to SEQ ID NO: 9185
  GFR-binding peptide
  MOD_RES (1), (32): Xaa is C or S

SEQ ID NO: 30556 - protein, 43 aa, Artificial Sequence
  GFR-binding peptide
  MOD_RES (6), (7), (40), (42): Xaa is C or S
  MOD_RES (21), (22), (23), (24), (25): Xaa is A or G
  MOD_RES (26), (27), (28), (29): Xaa is A or G or is absent
ASASPXXVSQDLEPISILYLXXXXXXXXXKFKYEMIVKSXKXS

SEQ ID NO: 30557 - protein, 41 aa, Artificial Sequence
  GFR-binding peptide
  MOD_RES (4), (5), (38), (40): Xaa is C or S
  MOD_RES (19), (20), (21), (22), (23): Xaa is A or G
  MOD_RES (24), (25), (26), (27): Xaa is A or G or is absent
ASPXXVPQDLEPISILYLXXXXXXXXXKFKYEMVVKSXKXS

SEQ ID NO: 30558 - protein, 38 aa, Artificial Sequence
  GFR-binding peptide
  MOD_RES (4), (5): Xaa is C or S
  MOD_RES (19), (20), (21), (22), (23): Xaa is A or G
  MOD_RES (24), (25), (26), (27): Xaa is A or G or is absent
PKPXXAPTKLEPISVLYLXXXXXXXXXKFKYENMVVRS

SEQ ID NO: 30559 - protein, 35 aa, Artificial Sequence
  GFR-binding peptide
  MOD_RES (2), (3): Xaa is C or S
  MOD_RES (17), (18), (19), (20), (21): Xaa is A or G
  MOD_RES (22), (23), (24), (25): Xaa is A or G or is absent
PXXVSQDLEPISILYLXXXXXXXXXKFKYEMIVKS

SEQ ID NO: 30560 - protein, 35 aa, Artificial Sequence; identical to SEQ ID NO: 9191
  GFR-binding peptide
  MOD_RES (34), (34): Xaa is C or S
  MOD_RES (14), (15), (16), (17), (18): Xaa is A or G
  MOD_RES (19), (20), (21), (22): Xaa is A or G or is absent

SEQ ID NO: 30561 - protein, 39 aa, Artificial Sequence
  GFR-binding peptide
  MOD_RES (6), (7): Xaa is C or S
  MOD_RES (21), (22), (23), (24), (25): Xaa is A or G
  MOD_RES (26), (27), (28), (29): Xaa is A or G or is absent
KASKAXXVPTKLEPISILYLXXXXXXXXXKFKYEGMAVS

SEQ ID NO: 30562 - protein, 35 aa, Artificial Sequence; identical to SEQ ID NO: 9193
  GFR-binding peptide
  MOD_RES (4), (5): Xaa is C or S

SEQ ID NO: 30563 - protein, 39 aa, Artificial Sequence
  GFR-binding peptide
  MOD_RES (3), (4), (36), (38): Xaa is C or S
KAXXVPTELEPISMLYLDENEKVVKFKYEDMVVEGXGXR

SEQ ID NO: 30564 - protein, 43 aa, Artificial Sequence
  GFR-binding peptide
  MOD_RES (5), (6), (40), (42): Xaa is C or S
  MOD_RES (20), (21), (22), (23), (24): Xaa is A or G
  MOD_RES (25), (26), (27), (28): Xaa is A or G or is absent
VPKPXXAPTQLSPISVLYIXXXXXXXXXYKQYENMVVRAXGXH

SEQ ID NO: 30565 - protein, 34 aa, Artificial Sequence
  GFR-binding peptide
  MOD_RES (1), (32), (34): Xaa is C or S
XVSQDLSPISILYIIGKTPKIYKQYEMIVKSXKX

SEQ ID NO: 30566 - protein, 34 aa, Artificial Sequence
  GFR-binding peptide
  MOD_RES (32), (34): Xaa is C or S
APTKLEPISVLYLDSSNNVIKFKYENMVVKAXGX

SEQ ID NO: 30567 - protein, 40 aa, Artificial Sequence; identical to SEQ ID NO: 9195
  GFR-binding peptide
  MOD_RES (3), (4), (38), (40): Xaa is C or S
  MOD_RES (18), (19), (20), (21), (22): Xaa is A or G
  MOD_RES (23), (24), (25), (26): Xaa is A or G or is absent

SEQ ID NO: 30568 - protein, 35 aa, Artificial Sequence; identical to SEQ ID NO: 9196
  GFR-binding peptide
  MOD_RES (2), (3): Xaa is C or S
  MOD_RES (17), (18), (19), (20), (21): Xaa is A or G
  MOD_RES (22), (23), (24), (25): Xaa is A or G or is absent

SEQ ID NO: 30569 - protein, 38 aa, Artificial Sequence
  GFR-binding peptide
  MOD_RES (5), (6): Xaa is C or S
  MOD_RES (20), (21), (22), (23), (24): Xaa is A or G
  MOD_RES (25), (26), (27), (28): Xaa is A or G or is absent
IPKAXXVPTELEPISMLYLXXXXXXXXXKFKYEDMVVE

SEQ ID NO: 30570 - protein, 39 aa, Artificial Sequence; identical to SEQ ID NO: 9200
  GFR-binding peptide
  MOD_RES (6), (7): Xaa is C or S
  MOD_RES (21), (22), (23), (24), (25): Xaa is A or G
  MOD_RES (26), (27), (28), (29): Xaa is A or G or is absent

SEQ ID NO: 30571 - protein, 41 aa, Artificial Sequence
  GFR-binding peptide
  MOD_RES (5), (6), (38), (40): Xaa is C or S
IPKAXXVPTELSPISMLYIDEYDKVVYKQYEEMVVEGXGXR

SEQ ID NO: 30572 - protein, 40 aa, Artificial Sequence
  GFR-binding peptide
  MOD_RES (5), (6), (39): Xaa is C or S
  MOD_RES (20), (21), (22), (23), (24): Xaa is A or G
  MOD_RES (25), (26), (27), (28): Xaa is A or G or is absent
SASPXXVPQDLEPISILYLXXXXXXXXXKFKYEMVVKSXK

SEQ ID NO: 30573 - protein, 34 aa, Artificial Sequence; identical to SEQ ID NO: 9202
  GFR-binding peptide
  MOD_RES (31), (33): Xaa is C or S

SEQ ID NO: 30574 - protein, 41 aa, Artificial Sequence; identical to SEQ ID NO: 9203
  GFR-binding peptide
  MOD_RES (4), (38), (40): Xaa is C or S
  MOD_RES (18), (19), (20), (21), (22): Xaa is A or G
  MOD_RES (23), (24), (25), (26): Xaa is A or G or is absent

SEQ ID NO: 30575 - protein, 36 aa, Artificial Sequence
  GFR-binding peptide
  MOD_RES (4), (5): Xaa is C or S
PASXXVPARLNAISILYFDAANNVVLKKYRDMVVEA

SEQ ID NO: 30576 - protein, 37 aa, Artificial Sequence
  GFR-binding peptide
  MOD_RES (34), (36): Xaa is C or S
  MOD_RES (14), (15), (16), (17), (18): Xaa is A or G
  MOD_RES (19), (20), (21), (22): Xaa is A or G or is absent
VPARLNAISILYFXXXXXXXXXLKKYRDMVVEAXGXR

SEQ ID NO: 30577 - protein, 40 aa, Artificial Sequence
  GFR-binding peptide
  MOD_RES (4), (5), (37), (39): Xaa is C or S
PKAXXVPTELSPISMLYIDENEKVVYKQYEDMVVEGXGXR

SEQ ID NO: 30578 - protein, 32 aa, Artificial Sequence
  GFR-binding peptide
  MOD_RES (1), (1): Xaa is C or S
XVPARLNAISILYFDAANNVVLKKYRDMVVEA

SEQ ID NO: 30579 - protein, 37 aa, Artificial Sequence; identical to SEQ ID NO: 9205
  GFR-binding peptide
  MOD_RES (2), (3), (35), (37): Xaa is C or S

SEQ ID NO: 30580 - protein, 33 aa, Artificial Sequence
  GFR-binding peptide
  MOD_RES (14), (15), (16), (17), (18): Xaa is A or G
  MOD_RES (19), (20), (21), (22): Xaa is A or G or is absent
APTQLSPISVLYIXXXXXXXXXYKQYENMVVRA

SEQ ID NO: 30581 - protein, 36 aa, Artificial Sequence
  GFR-binding peptide
  MOD_RES (3), (4), (35): Xaa is C or S
SPXXVSQDLEPISILYLIGKTPKIKFKYEMIVKSXK

SEQ ID NO: 30582 - protein, 37 aa, Artificial Sequence
  GFR-binding peptide
  MOD_RES (4), (5), (37): Xaa is C or S
PASXXVPARLEPISILYLDAANNVVKFKYEDMVVEAX

SEQ ID NO: 30583 - protein, 38 aa, Artificial Sequence
  GFR-binding peptide
  MOD_RES (5), (6), (38): Xaa is C or S
ASKAXXVPTKLSPISILYKDKGVVTYLKYHYGMAVSEX

SEQ ID NO: 30584 - protein, 35 aa, Artificial Sequence; identical to SEQ ID NO: 9208
  GFR-binding peptide
  MOD_RES (1), (35): Xaa is C or S
  MOD_RES (15), (16), (17), (18), (19): Xaa is A or G
  MOD_RES (20), (21), (22), (23): Xaa is A or G or is absent

SEQ ID NO: 30585 - protein, 37 aa, Artificial Sequence; identical to SEQ ID NO: 9209
  GFR-binding peptide
  MOD_RES (35), (37): Xaa is C or S
  MOD_RES (14), (15), (16), (17), (18): Xaa is A or G
  MOD_RES (19), (20), (21), (22): Xaa is A or G or is absent

SEQ ID NO: 30586 - protein, 42 aa, Artificial Sequence; identical to SEQ ID NO: 9210
  GFR-binding peptide
  MOD_RES (3), (4), (39), (41): Xaa is C or S
  MOD_RES (18), (19), (20), (21), (22): Xaa is A or G
  MOD_RES (23), (24), (25), (26): Xaa is A or G or is absent

SEQ ID NO: 30587 - protein, 40 aa, Artificial Sequence; identical to SEQ ID NO: 9212
  GFR-binding peptide
  MOD_RES (5), (6), (38), (40): Xaa is C or S

SEQ ID NO: 30588 - protein, 36 aa, Artificial Sequence; identical to SEQ ID NO: 9213
  GFR-binding peptide
  MOD_RES (1), (35): Xaa is C or S
  MOD_RES (15), (16), (17), (18), (19): Xaa is A or G
  MOD_RES (20), (21), (22), (23): Xaa is A or G or is absent

SEQ ID NO: 30589 - protein, 38 aa, Artificial Sequence; identical to SEQ ID NO: 9216
  GFR-binding peptide
  MOD_RES (2), (3), (38): Xaa is C or S
  MOD_RES (17), (18), (19), (20), (21): Xaa is A or G
  MOD_RES (22), (23), (24), (25): Xaa is A or G or is absent

SEQ ID NO: 30590 - protein, 33 aa, Artificial Sequence
  GFR-binding peptide
  MOD_RES (33), (33): Xaa is C or S
VPTKLSPISVLYIDDMGVPTYKQYEEGMSVAEX

SEQ ID NO: 30591 - protein, 39 aa, Artificial Sequence; identical to SEQ ID NO: 9219
  GFR-binding peptide
  MOD_RES (2), (3), (37), (39): Xaa is C or S
  MOD_RES (17), (18), (19), (20), (21): Xaa is A or G
  MOD_RES (22), (23), (24), (25): Xaa is A or G or is absent

SEQ ID NO: 30592 - protein, 36 aa, Artificial Sequence
  GFR-binding peptide
  MOD_RES (1), (36): Xaa is C or S
  MOD_RES (15), (16), (17), (18), (19): Xaa is A or G
  MOD_RES (20), (21), (22), (23): Xaa is A or G or is absent
XVPTKLSPISVLYIXXXXXXXXXYKQYEEGMSVAEX

SEQ ID NO: 30593 - protein, 33 aa, Artificial Sequence; identical to SEQ ID NO: 9221
  GFR-binding peptide
  MOD_RES (14), (15), (16), (17), (18): Xaa is A or G
  MOD_RES (19), (20), (21), (22): Xaa is A or G or is absent

SEQ ID NO: 30594 - protein, 36 aa, Artificial Sequence; identical to SEQ ID NO: 9223
  GFR-binding peptide
  MOD_RES (2), (3): Xaa is C or S
  MOD_RES (17), (18), (19), (20), (21): Xaa is A or G
  MOD_RES (22), (23), (24), (25): Xaa is A or G or is absent

SEQ ID NO: 30595 - protein, 36 aa, Artificial Sequence; identical to SEQ ID NO: 9224
  GFR-binding peptide
  MOD_RES (1), (2): Xaa is C or S
  MOD_RES (16), (17), (18), (19), (20): Xaa is A or G
  MOD_RES (21), (22), (23), (24): Xaa is A or G or is absent

SEQ ID NO: 30596 - protein, 42 aa, Artificial Sequence; identical to SEQ ID NO: 9225
  GFR-binding peptide
  MOD_RES (5), (6), (40), (42): Xaa is C or S
  MOD_RES (20), (21), (22), (23), (24): Xaa is A or G
  MOD_RES (25), (26), (27), (28): Xaa is A or G or is absent

SEQ ID NO: 30597 - protein, 33 aa, Artificial Sequence
  GFR-binding peptide
  MOD_RES (14), (15), (16), (17), (18): Xaa is A or G
  MOD_RES (19), (20), (21), (22): Xaa is A or G or is absent
APTQLEPISVLYLXXXXXXXXXKFKYENMVVRA

SEQ ID NO: 30598 - protein, 34 aa, Artificial Sequence; identical to SEQ ID NO: 9227
  GFR-binding peptide
  MOD_RES (1), (2): Xaa is C or S
  MOD_RES (16), (17), (18), (19), (20): Xaa is A or G
  MOD_RES (21), (22), (23), (24): Xaa is A or G or is absent

SEQ ID NO: 30599 - protein, 38 aa, Artificial Sequence; identical to SEQ ID NO: 9228
  GFR-binding peptide
  MOD_RES (1), (2), (36), (38): Xaa is C or S
  MOD_RES (16), (17), (18), (19), (20): Xaa is A or G
  MOD_RES (21), (22), (23), (24): Xaa is A or G or is absent

SEQ ID NO: 30600 - protein, 34 aa, Artificial Sequence; identical to SEQ ID NO: 9229
  GFR-binding peptide
  MOD_RES (2), (3), (34): Xaa is C or S

SEQ ID NO: 30601 - protein, 40 aa, Artificial Sequence; identical to SEQ ID NO: 9230
  GFR-binding peptide
  MOD_RES (5), (6), (39): Xaa is C or S
  MOD_RES (20), (21), (22), (23), (24): Xaa is A or G
  MOD_RES (25), (26), (27), (28): Xaa is A or G or is absent

SEQ ID NO: 30602 - protein, 39 aa, Artificial Sequence; identical to SEQ ID NO: 9231
  GFR-binding peptide
  MOD_RES (1), (2), (36), (38): Xaa is C or S
  MOD_RES (16), (17), (18), (19), (20): Xaa is A or G
  MOD_RES (21), (22), (23), (24): Xaa is A or G or is absent

SEQ ID NO: 30603 - protein, 35 aa, Artificial Sequence
  GFR-binding peptide
  MOD_RES (3), (4): Xaa is C or S
KPXXAPTKLSPISVLYIDDSSNVIYKQYENMVVRS

SEQ ID NO: 30604 - protein, 35 aa, Artificial Sequence
  GFR-binding peptide
  MOD_RES (2), (3): Xaa is C or S
AXXVPTKLSPISVLYIDDMGVPTYKQYEEGMSVAE

SEQ ID NO: 30605 - protein, 37 aa, Artificial Sequence
  GFR-binding peptide
  MOD_RES (2), (3), (35), (37): Xaa is C or S
AXXVPTELEPISMLYLDEYDKVVKFKYEEMVVEGXGX

SEQ ID NO: 30606 - protein, 37 aa, Artificial Sequence; identical to SEQ ID NO: 9235
  GFR-binding peptide
  MOD_RES (2), (3), (36): Xaa is C or S
  MOD_RES (17), (18), (19), (20), (21): Xaa is A or G
  MOD_RES (22), (23), (24), (25): Xaa is A or G or is absent

SEQ ID NO: 30607 - protein, 37 aa, Artificial Sequence; identical to SEQ ID NO: 9238
  GFR-binding peptide
  MOD_RES (1), (2), (35), (37): Xaa is C or S
  MOD_RES (16), (17), (18), (19), (20): Xaa is A or G
  MOD_RES (21), (22), (23), (24): Xaa is A or G or is absent

SEQ ID NO: 30608 - protein, 33 aa, Artificial Sequence; identical to SEQ ID NO: 9239
  GFR-binding peptide
  MOD_RES (1), (33): Xaa is C or S

SEQ ID NO: 30609 - protein, 41 aa, Artificial Sequence; identical to SEQ ID NO: 9240
  GFR-binding peptide
  MOD_RES (5), (6), (39), (41): Xaa is C or S
  MOD_RES (20), (21), (22), (23), (24): Xaa is A or G
  MOD_RES (25), (26), (27), (28): Xaa is A or G or is absent

SEQ ID NO: 30610 - protein, 39 aa, Artificial Sequence; identical to SEQ ID NO: 9242
  GFR-binding peptide
  MOD_RES (2), (3), (37), (39): Xaa is C or S
  MOD_RES (17), (18), (19), (20), (21): Xaa is A or G
  MOD_RES (22), (23), (24), (25): Xaa is A or G or is absent

SEQ ID NO: 30611 - protein, 41 aa, Artificial Sequence
  GFR-binding peptide
  MOD_RES (5), (6), (39), (41): Xaa is C or S
VGKAXXVPTKLEPISVLYLDDMGVPTKFKYEEGMSVAEXGX

SEQ ID NO: 30612 - protein, 39 aa, Artificial Sequence
  GFR-binding peptide
  MOD_RES (4), (5), (39): Xaa is C or S
  MOD_RES (19), (20), (21), (22), (23): Xaa is A or G
  MOD_RES (24), (25), (26), (27): Xaa is A or G or is absent
PKPXXAPTKLSPISVLYIXXXXXXXXXYKQYENMVVRSX

SEQ ID NO: 30613 - protein, 42 aa, Artificial Sequence
  GFR-binding peptide
  MOD_RES (7), (39), (41): Xaa is C or S
HVTKPTXAPTKLEPISVLYLDDSSNVIKFKYENMVVRSXGXH

SEQ ID NO: 30614 - protein, 42 aa, Artificial Sequence
  GFR-binding peptide
  MOD_RES (7), (39), (41): Xaa is C or S
HVTKPTXAPTKLSPISVLYIDDSSNVIYKQYENMVVRSXGXH

SEQ ID NO: 30615 - protein, 40 aa, Artificial Sequence
  GFR-binding peptide
  MOD_RES (3), (4), (38), (40): Xaa is C or S
  MOD_RES (18), (19), (20), (21), (22): Xaa is A or G
  MOD_RES (23), (24), (25), (26): Xaa is A or G or is absent
KPXXAPTQLSPISVLYIXXXXXXXXXYKQYENMVVRAXGX

SEQ ID NO: 30616 - protein, 37 aa, Artificial Sequence; identical to SEQ ID NO: 9244
  GFR-binding peptide
  MOD_RES (3), (4), (37): Xaa is C or S
  MOD_RES (18), (19), (20), (21), (22): Xaa is A or G
  MOD_RES (23), (24), (25), (26): Xaa is A or G or is absent

SEQ ID NO: 30617 - protein, 41 aa, Artificial Sequence; identical to SEQ ID NO: 9245
  GFR-binding peptide
  MOD_RES (3), (4), (39), (41): Xaa is C or S
  MOD_RES (18), (19), (20), (21), (22): Xaa is A or G
  MOD_RES (23), (24), (25), (26): Xaa is A or G or is absent

SEQ ID NO: 30618 - protein, 33 aa, Artificial Sequence; identical to SEQ ID NO: 9247
  GFR-binding peptide
  MOD_RES (1), (1): Xaa is C or S
  MOD_RES (15), (16), (17), (18), (19): Xaa is A or G
  MOD_RES (20), (21), (22), (23): Xaa is A or G or is absent

SEQ ID NO: 30619 - protein, 39 aa, Artificial Sequence; identical to SEQ ID NO: 9248
  GFR-binding peptide
  MOD_RES (3), (4), (36), (38): Xaa is C or S

SEQ ID NO: 30620 - protein, 40 aa, Artificial Sequence
  GFR-binding peptide
  MOD_RES (5), (6), (37), (39): Xaa is C or S
SASPXXVSQDLSPISILYIIGKTPKIYKQYEMIVKSXKXS

SEQ ID NO: 30621 - protein, 43 aa, Artificial Sequence; identical to SEQ ID NO: 9250
  GFR-binding peptide
  MOD_RES (6), (7), (41), (43): Xaa is C or S
  MOD_RES (21), (22), (23), (24), (25): Xaa is A or G
  MOD_RES (26), (27), (28), (29): Xaa is A or G or is absent

SEQ ID NO: 30622 - protein, 42 aa, Artificial Sequence
  GFR-binding peptide
  MOD_RES (6), (7), (41): Xaa is C or S
  MOD_RES (21), (22), (23), (24), (25): Xaa is A or G
  MOD_RES (26), (27), (28), (29): Xaa is A or G or is absent
YVPKPXXAPTKLEPISVLYLXXXXXXXXXKFKYENMVVRSXG

SEQ ID NO: 30623 - protein, 38 aa, Artificial Sequence
  GFR-binding peptide
  MOD_RES (6), (38): Xaa is C or S
VTKPTXAPTKLSPISVLYIDDSSNVIYKQYENMVVRSX

SEQ ID NO: 30624 - protein, 30 aa, Artificial Sequence
  GFR-binding peptide
APTKLSPISVLYIDDSSNVIYKQYENMVVR

SEQ ID NO: 30625 - protein, 36 aa, Artificial Sequence; identical to SEQ ID NO: 9253
  GFR-binding peptide
  MOD_RES (1), (34), (36): Xaa is C or S
  MOD_RES (15), (16), (17), (18), (19): Xaa is A or G
  MOD_RES (20), (21), (22), (23): Xaa is A or G or is absent

SEQ ID NO: 30626 - protein, 39 aa, Artificial Sequence
  GFR-binding peptide
  MOD_RES (4), (5), (36), (38): Xaa is C or S
ASPXXVPQDLEPISILYLVGRTPKVKFKYEMVVKSXKXS

SEQ ID NO: 30627 - protein, 38 aa, Artificial Sequence; identical to SEQ ID NO: 9255
  GFR-binding peptide
  MOD_RES (5), (6), (37): Xaa is C or S

SEQ ID NO: 30628 - protein, 41 aa, Artificial Sequence
  GFR-binding peptide
  MOD_RES (6), (7), (41): Xaa is C or S
  MOD_RES (21), (22), (23), (24), (25): Xaa is A or G
  MOD_RES (26), (27), (28), (29): Xaa is A or G or is absent
AAPASXXVPARLNAISILYFXXXXXXXXXLKKYRDMVVEAX

SEQ ID NO: 30629 - protein, 38 aa, Artificial Sequence
  GFR-binding peptide
  MOD_RES (5), (6): Xaa is C or S
VGKAXXVPTKLEPISVLYLDDMGVPTKFKYEEGMSVAE

SEQ ID NO: 30630 - protein, 40 aa, Artificial Sequence
  GFR-binding peptide
  MOD_RES (6), (7), (39): Xaa is C or S
YVPKPXXAPTKLEPISVLYLDDSSNVIKFKYENMVVRSXG

SEQ ID NO: 30631 - protein, 36 aa, Artificial Sequence; identical to SEQ ID NO: 9257
  GFR-binding peptide
  MOD_RES (1), (33), (35): Xaa is C or S

SEQ ID NO: 30632 - protein, 31 aa, Artificial Sequence
  GFR-binding peptide
VPARLEPISILYLDAANNVVKFKYEDMVVEA

SEQ ID NO: 30633 - protein, 37 aa, Artificial Sequence; identical to SEQ ID NO: 9258
  GFR-binding peptide
  MOD_RES (4), (5), (36): Xaa is C or S

SEQ ID NO: 30634 - protein, 41 aa, Artificial Sequence; identical to SEQ ID NO: 9260
  GFR-binding peptide
  MOD_RES (6), (7), (41): Xaa is C or S
  MOD_RES (21), (22), (23), (24), (25): Xaa is A or G
  MOD_RES (26), (27), (28), (29): Xaa is A or G or is absent

SEQ ID NO: 30635 - protein, 34 aa, Artificial Sequence; identical to SEQ ID NO: 9261
  GFR-binding peptide
  MOD_RES (3), (4): Xaa is C or S

SEQ ID NO: 30636 - protein, 34 aa, Artificial Sequence
  GFR-binding peptide
  MOD_RES (32), (34): Xaa is C or S
APTKLSPISVLYIDSSNNVIYKQYENMVVKAXGX

SEQ ID NO: 30637 - protein, 35 aa, Artificial Sequence
  GFR-binding peptide
  MOD_RES (1), (35): Xaa is C or S
  MOD_RES (15), (16), (17), (18), (19): Xaa is A or G
  MOD_RES (20), (21), (22), (23): Xaa is A or G or is absent
XAPTKLSPISVLYIXXXXXXXXXYKQYENMVVKAX

SEQ ID NO: 30638 - protein, 44 aa, Artificial Sequence
  GFR-binding peptide
  MOD_RES (6), (7), (41), (43): Xaa is C or S
  MOD_RES (21), (22), (23), (24), (25): Xaa is A or G
  MOD_RES (26), (27), (28), (29): Xaa is A or G or is absent
YVPKPXXAPTKLEPISVLYLXXXXXXXXXKFKYENMVVRSXGXH

SEQ ID NO: 30639 - protein, 37 aa, Artificial Sequence; identical to SEQ ID NO: 9265
  GFR-binding peptide
  MOD_RES (4), (5): Xaa is C or S
  MOD_RES (19), (20), (21), (22), (23): Xaa is A or G
  MOD_RES (24), (25), (26), (27): Xaa is A or G or is absent

SEQ ID NO: 30640 - protein, 36 aa, Artificial Sequence
  GFR-binding peptide
  MOD_RES (33), (35): Xaa is C or S
  MOD_RES (14), (15), (16), (17), (18): Xaa is A or G
  MOD_RES (19), (20), (21), (22): Xaa is A or G or is absent
VPQDLEPISILYLXXXXXXXXXKFKYEMVVKSXKXS

SEQ ID NO: 30641 - protein, 32 aa, Artificial Sequence
  GFR-binding peptide
  MOD_RES (14), (15), (16), (17), (18): Xaa is A or G
  MOD_RES (19), (20), (21), (22): Xaa is A or G or is absent
VPQDLSPISILYIXXXXXXXXXYKQYEMVVKS

SEQ ID NO: 30642 - protein, 41 aa, Artificial Sequence; identical to SEQ ID NO: 9268
  GFR-binding peptide
  MOD_RES (6), (7), (40): Xaa is C or S
  MOD_RES (21), (22), (23), (24), (25): Xaa is A or G
  MOD_RES (26), (27), (28), (29): Xaa is A or G or is absent

SEQ ID NO: 30643 - protein, 33 aa, Artificial Sequence
  GFR-binding peptide
  MOD_RES (32), (32): Xaa is C or S
VPTELSPISMLYIDENEKVVYKQYEDMVVEGXG

SEQ ID NO: 30644 - protein, 32 aa, Artificial Sequence
  GFR-binding peptide
  MOD_RES (14), (15), (16), (17), (18): Xaa is A or G
  MOD_RES (19), (20), (21), (22): Xaa is A or G or is absent
VPTKLNAISILYFXXXXXXXXXLKKYRGMAVS

SEQ ID NO: 30645 - protein, 34 aa, Artificial Sequence
  GFR-binding peptide
  MOD_RES (1), (2), (34): Xaa is C or S
XXVPTELEPISMLYLDENEKVVKFKYEDMVVEGX

SEQ ID NO: 30646 - protein, 36 aa, Artificial Sequence
  GFR-binding peptide
  MOD_RES (4), (5), (36): Xaa is C or S
AAPXXVPQALEPISILYLVGRKPKVKFKYEMIVRSX

SEQ ID NO: 30647 - protein, 34 aa, Artificial Sequence
  GFR-binding peptide
  MOD_RES (3), (4): Xaa is C or S
KPXXAPTQLSPISVLYIDDSSNVIYKQYENMVVR

SEQ ID NO: 30648 - protein, 34 aa, Artificial Sequence
  GFR-binding peptide
  MOD_RES (1), (2): Xaa is C or S
  MOD_RES (16), (17), (18), (19), (20): Xaa is A or G
  MOD_RES (21), (22), (23), (24): Xaa is A or G or is absent
XXVPARLEPISILYLXXXXXXXXXKFKYEDMVVE

SEQ ID NO: 30649 - protein, 36 aa, Artificial Sequence
  GFR-binding peptide
  MOD_RES (3), (4), (36): Xaa is C or S
KAXXVPTELSPISMLYIDEYDKVVYKQYEEMVVEGX

SEQ ID NO: 30650 - protein, 41 aa, Artificial Sequence; identical to SEQ ID NO: 9269
  GFR-binding peptide
  MOD_RES (5), (6), (39), (41): Xaa is C or S
  MOD_RES (20), (21), (22), (23), (24): Xaa is A or G
  MOD_RES (25), (26), (27), (28): Xaa is A or G or is absent

SEQ ID NO: 30651 - protein, 39 aa, Artificial Sequence
  GFR-binding peptide
  MOD_RES (2), (3), (37), (39): Xaa is C or S
  MOD_RES (17), (18), (19), (20), (21): Xaa is A or G
  MOD_RES (22), (23), (24), (25): Xaa is A or G or is absent
AXXVPTKLSPISILYKXXXXXXXXXLKYHYGMAVSEXGX

SEQ ID NO: 30652 - protein, 33 aa, Artificial Sequence
  GFR-binding peptide
  MOD_RES (1), (1): Xaa is C or S
  MOD_RES (15), (16), (17), (18), (19): Xaa is A or G
  MOD_RES (20), (21), (22), (23): Xaa is A or G or is absent
XVPTKLNAISILYFXXXXXXXXXLKKYRGMAVS

SEQ ID NO: 30653 - protein, 40 aa, Artificial Sequence; identical to SEQ ID NO: 9274
  GFR-binding peptide
  MOD_RES (2), (3), (37), (39): Xaa is C or S
  MOD_RES (17), (18), (19), (20), (21): Xaa is A or G
  MOD_RES (22), (23), (24), (25): Xaa is A or G or is absent

SEQ ID NO: 30654 - protein, 38 aa, Artificial Sequence
  GFR-binding peptide
  MOD_RES (3), (4), (38): Xaa is C or S
  MOD_RES (18), (19), (20), (21), (22): Xaa is A or G
  MOD_RES (23), (24), (25), (26): Xaa is A or G or is absent
KAXXVPTKLEPISILYLXXXXXXXXXKFKYEGMAVSEX

SEQ ID NO: 30655 - protein, 34 aa, Artificial Sequence
  GFR-binding peptide
  MOD_RES (1), (2): Xaa is C or S
  MOD_RES (16), (17), (18), (19), (20): Xaa is A or G
  MOD_RES (21), (22), (23), (24): Xaa is A or G or is absent
XXAPTKLEPISVLYLXXXXXXXXXKFKYENMVVK

SEQ ID NO: 30656 - protein, 41 aa, Artificial Sequence; identical to SEQ ID NO: 9276
  GFR-binding peptide
  MOD_RES (6), (7), (38), (40): Xaa is C or S

SEQ ID NO: 30657 - protein, 35 aa, Artificial Sequence; identical to SEQ ID NO: 9277
  GFR-binding peptide
  MOD_RES (2), (3): Xaa is C or S
  MOD_RES (17), (18), (19), (20), (21): Xaa is A or G
  MOD_RES (22), (23), (24), (25): Xaa is A or G or is absent

SEQ ID NO: 30658 - protein, 38 aa, Artificial Sequence
  GFR-binding peptide
  MOD_RES (6), (7), (38): Xaa is C or S
ASAAPXXVPQALEPISILYLVGRKPKVKFKYEMIVRSX

SEQ ID NO: 30659 - protein, 36 aa, Artificial Sequence
  GFR-binding peptide
  MOD_RES (34), (36): Xaa is C or S
  MOD_RES (14), (15), (16), (17), (18): Xaa is A or G
  MOD_RES (19), (20), (21), (22): Xaa is A or G or is absent
APTKLSPISVLYIXXXXXXXXXYKQYENMVVRSXGX

SEQ ID NO: 30660 - protein, 39 aa, Artificial Sequence; identical to SEQ ID NO: 9279
  GFR-binding peptide
  MOD_RES (4), (5), (36), (38): Xaa is C or S

SEQ ID NO: 30661 - protein, 36 aa, Artificial Sequence
  GFR-binding peptide
  MOD_RES (1), (33), (35): Xaa is C or S
XVPTELEPISMLYLDENEKVVKFKYEDMVVEGXGXR

SEQ ID NO: 30662 - protein, 34 aa, Artificial Sequence
  GFR-binding peptide
  MOD_RES (2), (3): Xaa is C or S
AXXAPTKLEPISVLYLDSSNNVIKFKYENMVVKA

SEQ ID NO: 30663 - protein, 34 aa, Artificial Sequence; identical to SEQ ID NO: 9283
  GFR-binding peptide
  MOD_RES (34), (34): Xaa is C or S
  MOD_RES (14), (15), (16), (17), (18): Xaa is A or G
  MOD_RES (19), (20), (21), (22): Xaa is A or G or is absent

SEQ ID NO: 30664 - protein, 40 aa, Artificial Sequence
  GFR-binding peptide
  MOD_RES (2), (3), (37), (39): Xaa is C or S
  MOD_RES (17), (18), (19), (20), (21): Xaa is A or G
  MOD_RES (22), (23), (24), (25): Xaa is A or G or is absent
AXXVPTELSPISMLYIXXXXXXXXXYKQYEDMVVEGXGXR

SEQ ID NO: 30665 - protein, 36 aa, Artificial Sequence
  GFR-binding peptide
  MOD_RES (34), (36): Xaa is C or S
  MOD_RES (14), (15), (16), (17), (18): Xaa is A or G
  MOD_RES (19), (20), (21), (22): Xaa is A or G or is absent
VPARLSPISILYIXXXXXXXXXYKQYEDMVVEAXGX

SEQ ID NO: 30666 - protein, 37 aa, Artificial Sequence; identical to SEQ ID NO: 9285
  GFR-binding peptide
  MOD_RES (4), (5): Xaa is C or S
  MOD_RES (19), (20), (21), (22), (23): Xaa is A or G
  MOD_RES (24), (25), (26), (27): Xaa is A or G or is absent

SEQ ID NO: 30667 - protein, 40 aa, Artificial Sequence
  GFR-binding peptide
  MOD_RES (6), (7), (38), (40): Xaa is C or S
ASASPXXVSQDLEPISILYLIGKTPKIKFKYEMIVKSXKX

SEQ ID NO: 30668 - protein, 36 aa, Artificial Sequence
  GFR-binding peptide
  MOD_RES (3), (4): Xaa is C or S
  MOD_RES (18), (19), (20), (21), (22): Xaa is A or G
  MOD_RES (23), (24), (25), (26): Xaa is A or G or is absent
KAXXVPTKLEPISILYLXXXXXXXXXKFKYEGMAVS

SEQ ID NO: 30669 - protein, 42 aa, Artificial Sequence
  GFR-binding peptide
  MOD_RES (5), (39), (41): Xaa is C or S
  MOD_RES (19), (20), (21), (22), (23): Xaa is A or G
  MOD_RES (24), (25), (26), (27): Xaa is A or G or is absent
TKPTXAPTKLEPISVLYLXXXXXXXXXKFKYENMVVRSXGXH

SEQ ID NO: 30670 - protein, 41 aa, Artificial Sequence
  GFR-binding peptide
  MOD_RES (3), (4), (39), (41): Xaa is C or S
  MOD_RES (18), (19), (20), (21), (22): Xaa is A or G
  MOD_RES (23), (24), (25), (26): Xaa is A or G or is absent
KAXXVPTKLEPISVLYLXXXXXXXXXKFKYEEGMSVAEXGX

SEQ ID NO: 30671 - protein, 37 aa, Artificial Sequence
  GFR-binding peptide
  MOD_RES (1), (35), (37): Xaa is C or S
  MOD_RES (15), (16), (17), (18), (19): Xaa is A or G
  MOD_RES (20), (21), (22), (23): Xaa is A or G or is absent
XVPARLSPISILYKXXXXXXXXXLKYHYDMVVEAXGX

SEQ ID NO: 30672 - protein, 41 aa, Artificial Sequence
  GFR-binding peptide
  MOD_RES (6), (7), (39), (41): Xaa is C or S
AVPKAXXAPTKLSPISVLYIDSSNNVIYKQYENMVVKAXGX

SEQ ID NO: 30673 - protein, 40 aa, Artificial Sequence; identical to SEQ ID NO: 9287
  GFR-binding peptide
  MOD_RES (5), (6), (38), (40): Xaa is C or S

SEQ ID NO: 30674 - protein, 38 aa, Artificial Sequence
  GFR-binding peptide
  MOD_RES (3), (4), (38): Xaa is C or S
  MOD_RES (18), (19), (20), (21), (22): Xaa is A or G
  MOD_RES (23), (24), (25), (26): Xaa is A or G or is absent
KPXXAPTKLEPISVLYLXXXXXXXXXKFKYENMVVRSX

SEQ ID NO: 30675 - protein, 42 aa, Artificial Sequence
  GFR-binding peptide
  MOD_RES (5), (6), (40), (42): Xaa is C or S
  MOD_RES (20), (21), (22), (23), (24): Xaa is A or G
  MOD_RES (25), (26), (27), (28): Xaa is A or G or is absent
ASKAXXVPTKLSPISILYKXXXXXXXXXLKYHYGMAVSEXGX

SEQ ID NO: 30676 - protein, 35 aa, Artificial Sequence
  GFR-binding peptide
  MOD_RES (2), (34): Xaa is C or S
TXAPTKLEPISVLYLDDSSNVIKFKYENMVVRSXG

SEQ ID NO: 30677 - protein, 40 aa, Artificial Sequence
  GFR-binding peptide
  MOD_RES (4), (5), (39): Xaa is C or S
  MOD_RES (19), (20), (21), (22), (23): Xaa is A or G
  MOD_RES (24), (25), (26), (27): Xaa is A or G or is absent
PKAXXAPTKLEPISVLYLXXXXXXXXXKFKYENMVVKAXG

SEQ ID NO: 30678 - protein, 34 aa, Artificial Sequence; identical to SEQ ID NO: 9289
  GFR-binding peptide
  MOD_RES (3), (4): Xaa is C or S

SEQ ID NO: 30679 - protein, 36 aa, Artificial Sequence
  GFR-binding peptide
  MOD_RES (4), (5), (36): Xaa is C or S
ASPXXVPQDLSPISILYIVGRTPKVYKQYEMVVKSX

SEQ ID NO: 30680 - protein, 39 aa, Artificial Sequence; identical to SEQ ID NO: 9292
  GFR-binding peptide
  MOD_RES (6), (7): Xaa is C or S
  MOD_RES (21), (22), (23), (24), (25): Xaa is A or G
  MOD_RES (26), (27), (28), (29): Xaa is A or G or is absent

SEQ ID NO: 30681 - protein, 34 aa, Artificial Sequence; identical to SEQ ID NO: 9293
  GFR-binding peptide
  MOD_RES (1), (2): Xaa is C or S
  MOD_RES (16), (17), (18), (19), (20): Xaa is A or G
  MOD_RES (21), (22), (23), (24): Xaa is A or G or is absent

SEQ ID NO: 30682 - protein, 44 aa, Artificial Sequence; identical to SEQ ID NO: 9294
  GFR-binding peptide
  MOD_RES (6), (7), (41), (43): Xaa is C or S
  MOD_RES (21), (22), (23), (24), (25): Xaa is A or G
  MOD_RES (26), (27), (28), (29): Xaa is A or G or is absent

SEQ ID NO: 30683 - protein, 42 aa, Artificial Sequence
  GFR-binding peptide
  MOD_RES (5), (6), (40), (42): Xaa is C or S
  MOD_RES (20), (21), (22), (23), (24): Xaa is A or G
  MOD_RES (25), (26), (27), (28): Xaa is A or G or is absent
IPKAXXVPTELEPISMLYLXXXXXXXXXKFKYEDMVVEGXGX

SEQ ID NO: 30684 - protein, 35 aa, Artificial Sequence
  GFR-binding peptide
  MOD_RES (3), (4), (35): Xaa is C or S
SPXXVSQDLEPISILYLIGKTPKIKFKYEMIVKSX

SEQ ID NO: 30685 - protein, 31 aa, Artificial Sequence
  GFR-binding peptide
  MOD_RES (1), (1): Xaa is C or S
XVPARLNAISILYFDAANNVVLKKYRDMVVE

SEQ ID NO: 30686 - protein, 39 aa, Artificial Sequence; identical to SEQ ID NO: 9298
  GFR-binding peptide
  MOD_RES (1), (2), (37), (39): Xaa is C or S
  MOD_RES (16), (17), (18), (19), (20): Xaa is A or G
  MOD_RES (21), (22), (23), (24): Xaa is A or G or is absent

SEQ ID NO: 30687 - protein, 40 aa, Artificial Sequence
  GFR-binding peptide
  MOD_RES (5), (6), (40): Xaa is C or S
  MOD_RES (20), (21), (22), (23), (24): Xaa is A or G
  MOD_RES (25), (26), (27), (28): Xaa is A or G or is absent
APASXXVPARLNAISILYFXXXXXXXXXLKKYRDMVVEAX

SEQ ID NO: 30688 - protein, 36 aa, Artificial Sequence; identical to SEQ ID NO: 9300
  GFR-binding peptide
  MOD_RES (5), (6): Xaa is C or S

SEQ ID NO: 30689 - protein, 42 aa, Artificial Sequence; identical to SEQ ID NO: 9302
  GFR-binding peptide
  MOD_RES (6), (7), (40), (42): Xaa is C or S
  MOD_RES (21), (22), (23), (24), (25): Xaa is A or G
  MOD_RES (26), (27), (28), (29): Xaa is A or G or is absent

SEQ ID NO: 30690 - protein, 33 aa, Artificial Sequence
  GFR-binding peptide
  MOD_RES (2), (3): Xaa is C or S
PXXVSQDLEPISILYLIGKTPKIKFKYEMIVKS

SEQ ID NO: 30691 - protein, 40 aa, Artificial Sequence
  GFR-binding peptide
  MOD_RES (5), (6), (38), (40): Xaa is C or S
APASXXVPARLNAISILYFDAANNVVLKKYRDMVVEAXGX

SEQ ID NO: 30692 - protein, 42 aa, Artificial Sequence
  GFR-binding peptide
  MOD_RES (5), (6), (41): Xaa is C or S
  MOD_RES (20), (21), (22), (23), (24): Xaa is A or G
  MOD_RES (25), (26), (27), (28): Xaa is A or G or is absent
VGKAXXVPTKLSPISVLYIXXXXXXXXXYKQYEEGMSVAEXG

SEQ ID NO: 30693 - protein, 37 aa, Artificial Sequence
  GFR-binding peptide
  MOD_RES (2), (3), (37): Xaa is C or S
  MOD_RES (17), (18), (19), (20), (21): Xaa is A or G
  MOD_RES (22), (23), (24), (25): Xaa is A or G or is absent
PXXAPTQLEPISVLYLXXXXXXXXXKFKYENMVVRAX

SEQ ID NO: 30694 - protein, 43 aa, Artificial Sequence; identical to SEQ ID NO: 9303
  GFR-binding peptide
  MOD_RES (6), (7), (40), (42): Xaa is C or S
  MOD_RES (21), (22), (23), (24), (25): Xaa is A or G
  MOD_RES (26), (27), (28), (29): Xaa is A or G or is absent

SEQ ID NO: 30695 - protein, 33 aa, Artificial Sequence; identical to SEQ ID NO: 9304
  GFR-binding peptide
  MOD_RES (31), (33): Xaa is C or S

SEQ ID NO: 30696 - protein, 39 aa, Artificial Sequence
  GFR-binding peptide
  MOD_RES (3), (4), (36), (38): Xaa is C or S
KAXXVPTKLNAISILYFDKGVVTYLKKYRGMAVSEXGXR

SEQ ID NO: 30697 - protein, 35 aa, Artificial Sequence
  GFR-binding peptide
  MOD_RES (1), (33), (35): Xaa is C or S
XVPTKLSPISILYKDKGVVTYLKYHYGMAVSEXGX

SEQ ID NO: 30698 - protein, 30 aa, Artificial Sequence
  GFR-binding peptide
VPTELEPISMLYLDENEKVVKFKYEDMVVE

SEQ ID NO: 30699 - protein, 36 aa, Artificial Sequence
  GFR-binding peptide
  MOD_RES (3), (4), (36): Xaa is C or S
ASXXVPARLEPISILYLDAANNVVKFKYEDMVVEAX

SEQ ID NO: 30700 - protein, 41 aa, Artificial Sequence; identical to SEQ ID NO: 9306
  GFR-binding peptide
  MOD_RES (5), (6), (38), (40): Xaa is C or S

SEQ ID NO: 30701 - protein, 38 aa, Artificial Sequence
  GFR-binding peptide
  MOD_RES (6), (7): Xaa is C or S
SIPKAXXVPTELSPISMLYIDEYDKVVYKQYEEMVVEG

SEQ ID NO: 30702 - protein, 38 aa, Artificial Sequence
  GFR-binding peptide
  MOD_RES (3), (4), (36), (38): Xaa is C or S
ASXXVPARLNAISILYFDAANNVVLKKYRDMVVEAXGX

SEQ ID NO: 30703 - protein, 37 aa, Artificial Sequence
  GFR-binding peptide
  MOD_RES (2), (3), (35), (37): Xaa is C or S
AXXVPTELEPISMLYLDENEKVVKFKYEDMVVEGXGX

SEQ ID NO: 30704 - protein, 41 aa, Artificial Sequence; identical to SEQ ID NO: 9310
  GFR-binding peptide
  MOD_RES (3), (4), (38), (40): Xaa is C or S
  MOD_RES (18), (19), (20), (21), (22): Xaa is A or G
  MOD_RES (23), (24), (25), (26): Xaa is A or G or is absent

SEQ ID NO: 30705 - protein, 35 aa, Artificial Sequence; identical to SEQ ID NO: 9311
  GFR-binding peptide
  MOD_RES (1), (35): Xaa is C or S
  MOD_RES (15), (16), (17), (18), (19): Xaa is A or G
  MOD_RES (20), (21), (22), (23): Xaa is A or G or is absent

SEQ ID NO: 30706 - protein, 39 aa, Artificial Sequence; identical to SEQ ID NO: 9314
  GFR-binding peptide
  MOD_RES (2), (3), (36), (38): Xaa is C or S
  MOD_RES (17), (18), (19), (20), (21): Xaa is A or G
  MOD_RES (22), (23), (24), (25): Xaa is A or G or is absent

SEQ ID NO: 30707 - protein, 39 aa, Artificial Sequence
  GFR-binding peptide
  MOD_RES (2), (3), (37), (39): Xaa is C or S
  MOD_RES (17), (18), (19), (20), (21): Xaa is A or G
  MOD_RES (22), (23), (24), (25): Xaa is A or G or is absent
PXXAPTKLSPISVLYIXXXXXXXXXYKQYENMVVRSXGX

SEQ ID NO: 30708 - protein, 36 aa, Artificial Sequence; identical to SEQ ID NO: 9316
  GFR-binding peptide
  MOD_RES (3), (4): Xaa is C or S
  MOD_RES (18), (19), (20), (21), (22): Xaa is A or G
  MOD_RES (23), (24), (25), (26): Xaa is A or G or is absent

SEQ ID NO: 30709 - protein, 39 aa, Artificial Sequence
  GFR-binding peptide
  MOD_RES (4), (5), (39): Xaa is C or S
  MOD_RES (19), (20), (21), (22), (23): Xaa is A or G
  MOD_RES (24), (25), (26), (27): Xaa is A or G or is absent
PASXXVPARLEPISILYLXXXXXXXXXKFKYEDMVVEAX

SEQ ID NO: 30710 - protein, 31 aa, Artificial Sequence
  GFR-binding peptide
APTQLSPISVLYIDDSSNVIYKQYENMVVRA

SEQ ID NO: 30711 - protein, 37 aa, Artificial Sequence; identical to SEQ ID NO: 9317
  GFR-binding peptide
  MOD_RES (3), (4), (37): Xaa is C or S
  MOD_RES (18), (19), (20), (21), (22): Xaa is A or G
  MOD_RES (23), (24), (25), (26): Xaa is A or G or is absent

SEQ ID NO: 30712 - protein, 40 aa, Artificial Sequence
  GFR-binding peptide
  MOD_RES (6), (7): Xaa is C or S
  MOD_RES (21), (22), (23), (24), (25): Xaa is A or G
  MOD_RES (26), (27), (28), (29): Xaa is A or G or is absent
KIPKAXXVPTELEPISMLYLXXXXXXXXXKFKYEDMVVEG

SEQ ID NO: 30713 - protein, 35 aa, Artificial Sequence; identical to SEQ ID NO: 9324
  GFR-binding peptide
  MOD_RES (1), (33), (35): Xaa is C or S

SEQ ID NO: 30714 - protein, 39 aa, Artificial Sequence; identical to SEQ ID NO: 9325
  GFR-binding peptide
  MOD_RES (5), (6): Xaa is C or S
  MOD_RES (20), (21), (22), (23), (24): Xaa is A or G
  MOD_RES (25), (26), (27), (28): Xaa is A or G or is absent

SEQ ID NO: 30715 - protein, 37 aa, Artificial Sequence
  GFR-binding peptide
  MOD_RES (5), (6): Xaa is C or S
IPKAXXVPTELEPISMLYLDENEKVVKFKYEDMVVEG

SEQ ID NO: 30716 - protein, 40 aa, Artificial Sequence; identical to SEQ ID NO: 9326
  GFR-binding peptide
  MOD_RES (4), (5), (39): Xaa is C or S
  MOD_RES (19), (20), (21), (22), (23): Xaa is A or G
  MOD_RES (24), (25), (26), (27): Xaa is A or G or is absent

SEQ ID NO: 30717 - protein, 37 aa, Artificial Sequence; identical to SEQ ID NO: 9327
  GFR-binding peptide
  MOD_RES (1), (2), (35), (37): Xaa is C or S
  MOD_RES (16), (17), (18), (19), (20): Xaa is A or G
  MOD_RES (21), (22), (23), (24): Xaa is A or G or is absent

SEQ ID NO: 30718 - protein, 41 aa, Artificial Sequence
  GFR-binding peptide
  MOD_RES (4), (5), (39), (41): Xaa is C or S
  MOD_RES (19), (20), (21), (22), (23): Xaa is A or G
  MOD_RES (24), (25), (26), (27): Xaa is A or G or is absent
SKAXXVPTKLSPISILYIXXXXXXXXXYKQYEGMAVSEXGX

SEQ ID NO: 30719 - protein, 37 aa, Artificial Sequence; identical to SEQ ID NO: 9328
  GFR-binding peptide
  MOD_RES (3), (4), (36): Xaa is C or S

SEQ ID NO: 30720 - protein, 36 aa, Artificial Sequence; identical to SEQ ID NO: 9330
  GFR-binding peptide
  MOD_RES (34), (36): Xaa is C or S
  MOD_RES (14), (15), (16), (17), (18): Xaa is A or G
  MOD_RES (19), (20), (21), (22): Xaa is A or G or is absent

SEQ ID NO: 30721 - protein, 35 aa, Artificial Sequence; identical to SEQ ID NO: 9332
  GFR-binding peptide
  MOD_RES (3), (4), (35): Xaa is C or S

SEQ ID NO: 30722 - protein, 34 aa, Artificial Sequence
  GFR-binding peptide
  MOD_RES (1), (2), (34): Xaa is C or S
XXAPTQLSPISVLYIDDSSNVIYKQYENMVVRAX

SEQ ID NO: 30723 - protein, 37 aa, Artificial Sequence
  GFR-binding peptide
  MOD_RES (34), (36): Xaa is C or S
  MOD_RES (14), (15), (16), (17), (18): Xaa is A or G
  MOD_RES (19), (20), (21), (22): Xaa is A or G or is absent
VPTELEPISMLYLXXXXXXXXXKFKYEEMVVEGXGXR

SEQ ID NO: 30724 - protein, 35 aa, Artificial Sequence; identical to SEQ ID NO: 9335
  GFR-binding peptide
  MOD_RES (2), (3), (34): Xaa is C or S

SEQ ID NO: 30725 - protein, 34 aa, Artificial Sequence
  GFR-binding peptide
  MOD_RES (1), (1): Xaa is C or S
  MOD_RES (15), (16), (17), (18), (19): Xaa is A or G
  MOD_RES (20), (21), (22), (23): Xaa is A or G or is absent
XVPTKLEPISILYLXXXXXXXXXKFKYEGMAVSE

SEQ ID NO: 30726 - protein, 35 aa, Artificial Sequence
  GFR-binding peptide
  MOD_RES (34), (34): Xaa is C or S
  MOD_RES (14), (15), (16), (17), (18): Xaa is A or G
  MOD_RES (19), (20), (21), (22): Xaa is A or G or is absent
APTQLSPISVLYIXXXXXXXXXYKQYENMVVRAXG

SEQ ID NO: 30727 - protein, 31 aa, Artificial Sequence
  GFR-binding peptide
APTKLEPISVLYLDSSNNVIKFKYENMVVKA

SEQ ID NO: 30728 - protein, 38 aa, Artificial Sequence
  GFR-binding peptide
  MOD_RES (4), (5), (37): Xaa is C or S
PKAXXVPTELEPISMLYLDEYDKVVKFKYEEMVVEGXG

SEQ ID NO: 30729 - protein, 38 aa, Artificial Sequence; identical to SEQ ID NO: 9340
  GFR-binding peptide
  MOD_RES (1), (2), (36), (38): Xaa is C or S
  MOD_RES (16), (17), (18), (19), (20): Xaa is A or G
  MOD_RES (21), (22), (23), (24): Xaa is A or G or is absent

SEQ ID NO: 30730 - protein, 38 aa, Artificial Sequence
  GFR-binding peptide
  MOD_RES (5), (6): Xaa is C or S
  MOD_RES (20), (21), (22), (23), (24): Xaa is A or G
  MOD_RES (25), (26), (27), (28): Xaa is A or G or is absent
VPKPXXAPTQLSPISVLYIXXXXXXXXXYKQYENMVVR

SEQ ID NO: 30731 - protein, 31 aa, Artificial Sequence; identical to SEQ ID NO: 9343
  GFR-binding peptide

SEQ ID NO: 30732 - protein, 39 aa, Artificial Sequence; identical to SEQ ID NO: 9344
  GFR-binding peptide
  MOD_RES (3), (4), (38): Xaa is C or S
  MOD_RES (18), (19), (20), (21), (22): Xaa is A or G
  MOD_RES (23), (24), (25), (26): Xaa is A or G or is absent

SEQ ID NO: 30733 - protein, 41 aa, Artificial Sequence
  GFR-binding peptide
  MOD_RES (6), (7), (41): Xaa is C or S
  MOD_RES (21), (22), (23), (24), (25): Xaa is A or G
  MOD_RES (26), (27), (28), (29): Xaa is A or G or is absent
KASKAXXVPTKLNAISILYFXXXXXXXXXLKKYRGMAVSEX

SEQ ID NO: 30734 - protein, 40 aa, Artificial Sequence
  GFR-binding peptide
  MOD_RES (6), (7): Xaa is C or S
  MOD_RES (21), (22), (23), (24), (25): Xaa is A or G
  MOD_RES (26), (27), (28), (29): Xaa is A or G or is absent
YVPKPXXAPTKLEPISVLYLXXXXXXXXXKFKYENMVVRS

SEQ ID NO: 30735 - protein, 35 aa, Artificial Sequence
  GFR-binding peptide
  MOD_RES (32), (34): Xaa is C or S
VPARLNAISILYFDAANNVVLKKYRDMVVEAXGXR

SEQ ID NO: 30736 - protein, 41 aa, Artificial Sequence; identical to SEQ ID NO: 9348
  GFR-binding peptide
  MOD_RES (4), (5), (38), (40): Xaa is C or S
  MOD_RES (19), (20), (21), (22), (23): Xaa is A or G
  MOD_RES (24), (25), (26), (27): Xaa is A or G or is absent

SEQ ID NO: 30737 - protein, 38 aa, Artificial Sequence; identical to SEQ ID NO: 9349
  GFR-binding peptide
  MOD_RES (3), (4), (35), (37): Xaa is C or S

SEQ ID NO: 30738 - protein, 38 aa, Artificial Sequence
  GFR-binding peptide
  MOD_RES (1), (35), (37): Xaa is C or S
  MOD_RES (15), (16), (17), (18), (19): Xaa is A or G
  MOD_RES (20), (21), (22), (23): Xaa is A or G or is absent
XVPARLEPISILYLXXXXXXXXXKFKYEDMVVEAXGXR

SEQ ID NO: 30739 - protein, 34 aa, Artificial Sequence
  GFR-binding peptide
  MOD_RES (1), (33): Xaa is C or S
XAPTQLEPISVLYLDDSSNVIKFKYENMVVRAXG

SEQ ID NO: 30740 - protein, 37 aa, Artificial Sequence
  GFR-binding peptide
  MOD_RES (1), (2), (35), (37): Xaa is C or S
  MOD_RES (16), (17), (18), (19), (20): Xaa is A or G
  MOD_RES (21), (22), (23), (24): Xaa is A or G or is absent
XXVPQDLSPISILYIXXXXXXXXXYKQYEMVVKSXKX

SEQ ID NO: 30741 - protein, 38 aa, Artificial Sequence
  GFR-binding peptide
  MOD_RES (1), (2), (36), (38): Xaa is C or S
  MOD_RES (16), (17), (18), (19), (20): Xaa is A or G
  MOD_RES (21), (22), (23), (24): Xaa is A or G or is absent
XXVPTELEPISMLYLXXXXXXXXXKFKYEEMVVEGXGX

SEQ ID NO: 30742 - protein, 37 aa, Artificial Sequence
  GFR-binding peptide
  MOD_RES (6), (7): Xaa is C or S
AVPKAXXAPTKLEPISVLYLDSSNNVIKFKYENMVVK

SEQ ID NO: 30743 - protein, 39 aa, Artificial Sequence; identical to SEQ ID NO: 9352
  GFR-binding peptide
  MOD_RES (5), (6), (38): Xaa is C or S

SEQ ID NO: 30744 - protein, 36 aa, Artificial Sequence; identical to SEQ ID NO: 9353
  GFR-binding peptide
  MOD_RES (33), (35): Xaa is C or S
  MOD_RES (14), (15), (16), (17), (18): Xaa is A or G
  MOD_RES (19), (20), (21), (22): Xaa is A or G or is absent

SEQ ID NO: 30745 - protein, 37 aa, Artificial Sequence; identical to SEQ ID NO: 9355
  GFR-binding peptide
  MOD_RES (4), (5), (37): Xaa is C or S

SEQ ID NO: 30746 - protein, 37 aa, Artificial Sequence
  GFR-binding peptide
  MOD_RES (1), (34), (36): Xaa is C or S
XVPTKLEPISVLYLDDMGVPTKFKYEEGMSVAEXGXR

SEQ ID NO: 30747 - protein, 36 aa, Artificial Sequence; identical to SEQ ID NO: 9356
  GFR-binding peptide
  MOD_RES (1), (2), (34), (36): Xaa is C or S

SEQ ID NO: 30748 - protein, 41 aa, Artificial Sequence; identical to SEQ ID NO: 9357
  GFR-binding peptide
  MOD_RES (2), (3), (38), (40): Xaa is C or S
  MOD_RES (17), (18), (19), (20), (21): Xaa is A or G
  MOD_RES (22), (23), (24), (25): Xaa is A or G or is absent

SEQ ID NO: 30749 - protein, 38 aa, Artificial Sequence
  GFR-binding peptide
  MOD_RES (6), (7), (38): Xaa is C or S
ASASPXXVSQDLEPISILYLIGKTPKIKFKYEMIVKSX

SEQ ID NO: 30750 - protein, 31 aa, Artificial Sequence
  GFR-binding peptide
  MOD_RES (1), (1): Xaa is C or S
XVPQDLSPISILYIVGRTPKVYKQYEMVVKS

SEQ ID NO: 30751 - protein, 36 aa, Artificial Sequence
  GFR-binding peptide
  MOD_RES (33), (35): Xaa is C or S
VPTKLSPISVLYIDDMGVPTYKQYEEGMSVAEXGXR

SEQ ID NO: 30752 - protein, 35 aa, Artificial Sequence; identical to SEQ ID NO: 9359
  GFR-binding peptide
  MOD_RES (4), (5): Xaa is C or S

SEQ ID NO: 30753 - protein, 38 aa, Artificial Sequence; identical to SEQ ID NO: 9361
  GFR-binding peptide
  MOD_RES (3), (4), (38): Xaa is C or S
  MOD_RES (18), (19), (20), (21), (22): Xaa is A or G
  MOD_RES (23), (24), (25), (26): Xaa is A or G or is absent

SEQ ID NO: 30754 - protein, 44 aa, Artificial Sequence
  GFR-binding peptide
  MOD_RES (6), (7), (41), (43): Xaa is C or S
  MOD_RES (21), (22), (23), (24), (25): Xaa is A or G
  MOD_RES (26), (27), (28), (29): Xaa is A or G or is absent
AAPASXXVPARLEPISILYLXXXXXXXXXKFKYEDMVVEAXGXR

SEQ ID NO: 30755 - protein, 36 aa, Artificial Sequence
  GFR-binding peptide
  MOD_RES (4), (5): Xaa is C or S
SKAXXVPTKLSPISILYKDKGVVTYLKYHYGMAVSE

SEQ ID NO: 30756 - protein, 37 aa, Artificial Sequence
  GFR-binding peptide
  MOD_RES (2), (3), (37): Xaa is C or S
  MOD_RES (17), (18), (19), (20), (21): Xaa is A or G
  MOD_RES (22), (23), (24), (25): Xaa is A or G or is absent
SXXVPARLNAISILYFXXXXXXXXXLKKYRDMVVEAX

SEQ ID NO: 30757 - protein, 32 aa, Artificial Sequence
  GFR-binding peptide
  MOD_RES (2), (2): Xaa is C or S
TXAPTKLEPISVLYLDDSSNVIKFKYENMVVR

SEQ ID NO: 30758 - protein, 39 aa, Artificial Sequence
  GFR-binding peptide
  MOD_RES (1), (2), (36), (38): Xaa is C or S
  MOD_RES (16), (17), (18), (19), (20): Xaa is A or G
  MOD_RES (21), (22), (23), (24): Xaa is A or G or is absent
XXVPTKLEPISILYLXXXXXXXXXKFKYEGMAVSEXGXR

SEQ ID NO: 30759 - protein, 31 aa, Artificial Sequence; identical to SEQ ID NO: 9367
  GFR-binding peptide
  MOD_RES (1), (1): Xaa is C or S

SEQ ID NO: 30760 - protein, 35 aa, Artificial Sequence; identical to SEQ ID NO: 9368
  GFR-binding peptide
  MOD_RES (1), (2): Xaa is C or S
  MOD_RES (16), (17), (18), (19), (20): Xaa is A or G
  MOD_RES (21), (22), (23), (24): Xaa is A or G or is absent

SEQ ID NO: 30761 - protein, 36 aa, Artificial Sequence
  GFR-binding peptide
  MOD_RES (2), (3), (36): Xaa is C or S
  MOD_RES (17), (18), (19), (20), (21): Xaa is A or G
  MOD_RES (22), (23), (24), (25): Xaa is A or G or is absent
PXXVPQDLSPISILYIXXXXXXXXXYKQYEMVVKSX

SEQ ID NO: 30762 - protein, 40 aa, Artificial Sequence
  GFR-binding peptide
  MOD_RES (3), (4), (38), (40): Xaa is C or S
  MOD_RES (18), (19), (20), (21), (22): Xaa is A or G
  MOD_RES (23), (24), (25), (26): Xaa is A or G or is absent
KAXXVPTKLNAISILYFXXXXXXXXXLKKYRGMAVSEXGX

SEQ ID NO: 30763 - protein, 34 aa, Artificial Sequence
  GFR-binding peptide
  MOD_RES (2), (34): Xaa is C or S
TXAPTKLSPISVLYIDDSSNVIYKQYENMVVRSX

SEQ ID NO: 30764 - protein, 34 aa, Artificial Sequence; identical to SEQ ID NO: 9369
  GFR-binding peptide
  MOD_RES (1), (2), (34): Xaa is C or S

SEQ ID NO: 30765 - protein, 39 aa, Artificial Sequence; identical to SEQ ID NO: 9370
  GFR-binding peptide
  MOD_RES (6), (7): Xaa is C or S
  MOD_RES (21), (22), (23), (24), (25): Xaa is A or G
  MOD_RES (26), (27), (28), (29): Xaa is A or G or is absent

SEQ ID NO: 30766 - protein, 31 aa, Artificial Sequence
  GFR-binding peptide
  MOD_RES (1), (1): Xaa is C or S
XVPARLSPISILYKDAANNVVLKYHYDMVVE

SEQ ID NO: 30767 - protein, 41 aa, Artificial Sequence; identical to SEQ ID NO: 9371
  GFR-binding peptide
  MOD_RES (6), (7), (39), (41): Xaa is C or S

SEQ ID NO: 30768 - protein, 39 aa, Artificial Sequence; identical to SEQ ID NO: 9373
  GFR-binding peptide
  MOD_RES (4), (5), (36), (38): Xaa is C or S

SEQ ID NO: 30769 - protein, 36 aa, Artificial Sequence
  GFR-binding peptide
  MOD_RES (1), (2), (35): Xaa is C or S
  MOD_RES (16), (17), (18), (19), (20): Xaa is A or G
  MOD_RES (21), (22), (23), (24): Xaa is A or G or is absent
XXVPQDLEPISILYLXXXXXXXXXKFKYEMVVKSXK

SEQ ID NO: 30770 - protein, 39 aa, Artificial Sequence
  GFR-binding peptide
  MOD_RES (1), (36), (38): Xaa is C or S
  MOD_RES (15), (16), (17), (18), (19): Xaa is A or G
  MOD_RES (20), (21), (22), (23): Xaa is A or G or is absent
XVPTKLEPISVLYLXXXXXXXXXKFKYEEGMSVAEXGXR

SEQ ID NO: 30771 - protein, 40 aa, Artificial Sequence
  GFR-binding peptide
  MOD_RES (3), (4), (38), (40): Xaa is C or S
  MOD_RES (18), (19), (20), (21), (22): Xaa is A or G
  MOD_RES (23), (24), (25), (26): Xaa is A or G or is absent
ASXXVPARLSPISILYIXXXXXXXXXYKQYEDMVVEAXGX

SEQ ID NO: 30772 - protein, 42 aa, Artificial Sequence; identical to SEQ ID NO: 9374
  GFR-binding peptide
  MOD_RES (4), (5), (39), (41): Xaa is C or S
  MOD_RES (19), (20), (21), (22), (23): Xaa is A or G
  MOD_RES (24), (25), (26), (27): Xaa is A or G or is absent

SEQ ID NO: 30773 - protein, 33 aa, Artificial Sequence; identical to SEQ ID NO: 9375
  GFR-binding peptide
  MOD_RES (32), (32): Xaa is C or S

SEQ ID NO: 30774 - protein, 37 aa, Artificial Sequence
  GFR-binding peptide
  MOD_RES (5), (6): Xaa is C or S
VPKAXXAPTKLSPISVLYIDSSNNVIYKQYENMVVKA

SEQ ID NO: 30775 - protein, 39 aa, Artificial Sequence
  GFR-binding peptide
  MOD_RES (3), (4), (36), (38): Xaa is C or S
KAXXVPTELEPISMLYLDEYDKVVKFKYEEMVVEGXGXR

SEQ ID NO: 30776 - protein, 36 aa, Artificial Sequence
  GFR-binding peptide
  MOD_RES (3), (4): Xaa is C or S
  MOD_RES (18), (19), (20), (21), (22): Xaa is A or G
  MOD_RES (23), (24), (25), (26): Xaa is A or G or is absent
KAXXVPTELSPISMLYIXXXXXXXXXYKQYEEMVVE

SEQ ID NO: 30777 - protein, 35 aa, Artificial Sequence
  GFR-binding peptide
  MOD_RES (33), (35): Xaa is C or S
  MOD_RES (14), (15), (16), (17), (18): Xaa is A or G
  MOD_RES (19), (20), (21), (22): Xaa is A or G or is absent
VPQALEPISILYLXXXXXXXXXKFKYEMIVRSXKX

SEQ ID NO: 30778 - protein, 40 aa, Artificial Sequence
  GFR-binding peptide
  MOD_RES (6), (7): Xaa is C or S
  MOD_RES (21), (22), (23), (24), (25): Xaa is A or G
  MOD_RES (26), (27), (28), (29): Xaa is A or G or is absent
TVPKPXXAPTQLSPISVLYIXXXXXXXXXYKQYENMVVRA

SEQ ID NO: 30779 - protein, 38 aa, Artificial Sequence
  GFR-binding peptide
  MOD_RES (1), (35), (37): Xaa is C or S
  MOD_RES (15), (16), (17), (18), (19): Xaa is A or G
  MOD_RES (20), (21), (22), (23): Xaa is A or G or is absent
XAPTKLEPISVLYLXXXXXXXXXKFKYENMVVRSXGXH

SEQ ID NO: 30780 - protein, 38 aa, Artificial Sequence
  GFR-binding peptide
  MOD_RES (1), (35), (37): Xaa is C or S
  MOD_RES (15), (16), (17), (18), (19): Xaa is A or G
  MOD_RES (20), (21), (22), (23): Xaa is A or G or is absent
XAPTKLSPISVLYIXXXXXXXXXYKQYENMVVKAXGXH

SEQ ID NO: 30781 - protein, 36 aa, Artificial Sequence
  GFR-binding peptide
  MOD_RES (2), (3), (36): Xaa is C or S
AXXVPTKLEPISVLYLDDMGVPTKFKYEEGMSVAEX

SEQ ID NO: 30782 - protein, 32 aa, Artificial Sequence; identical to SEQ ID NO: 9383
  GFR-binding peptide
  MOD_RES (14), (15), (16), (17), (18): Xaa is A or G
  MOD_RES (19), (20), (21), (22): Xaa is A or G or is absent

SEQ ID NO: 30783 - protein, 37 aa, Artificial Sequence; identical to SEQ ID NO: 9386
  GFR-binding peptide
  MOD_RES (2), (3), (35), (37): Xaa is C or S

SEQ ID NO: 30784 - protein, 42 aa, Artificial Sequence
  GFR-binding peptide
  MOD_RES (5), (6), (39), (41): Xaa is C or S
  MOD_RES (20), (21), (22), (23), (24): Xaa is A or G
  MOD_RES (25), (26), (27), (28): Xaa is A or G or is absent
SAAPXXVPQALEPISILYLXXXXXXXXXKFKYEMIVRSXKXS

SEQ ID NO: 30785 - protein, 39 aa, Artificial Sequence; identical to SEQ ID NO: 9387
  GFR-binding peptide
  MOD_RES (4), (5), (39): Xaa is C or S
  MOD_RES (19), (20), (21), (22), (23): Xaa is A or G
  MOD_RES (24), (25), (26), (27): Xaa is A or G or is absent

SEQ ID NO: 30786 - protein, 37 aa, Artificial Sequence
  GFR-binding peptide
  MOD_RES (5), (6): Xaa is C or S
APASXXVPARLEPISILYLDAANNVVKFKYEDMVVEA

SEQ ID NO: 30787 - protein, 38 aa, Artificial Sequence; identical to SEQ ID NO: 9390
  GFR-binding peptide
  MOD_RES (1), (2), (35), (37): Xaa is C or S
  MOD_RES (16), (17), (18), (19), (20): Xaa is A or G
  MOD_RES (21), (22), (23), (24): Xaa is A or G or is absent

SEQ ID NO: 30788 - protein, 34 aa, Artificial Sequence; identical to SEQ ID NO: 9391
  GFR-binding peptide
  MOD_RES (3), (4): Xaa is C or S

SEQ ID NO: 30789 - protein, 34 aa, Artificial Sequence; identical to SEQ ID NO: 9392
  GFR-binding peptide
  MOD_RES (1), (1): Xaa is C or S
  MOD_RES (15), (16), (17), (18), (19): Xaa is A or G
  MOD_RES (20), (21), (22), (23): Xaa is A or G or is absent

SEQ ID NO: 30790 - protein, 33 aa, Artificial Sequence
  GFR-binding peptide
  MOD_RES (14), (15), (16), (17), (18): Xaa is A or G
  MOD_RES (19), (20), (21), (22): Xaa is A or G or is absent
VPTELEPISMLYLXXXXXXXXXKFKYEDMVVEG

SEQ ID NO: 30791 - protein, 36 aa, Artificial Sequence
  GFR-binding peptide
  MOD_RES (1), (2): Xaa is C or S
  MOD_RES (16), (17), (18), (19), (20): Xaa is A or G
  MOD_RES (21), (22), (23), (24): Xaa is A or G or is absent
XXVPTKLEPISVLYLXXXXXXXXXKFKYEEGMSVAE

SEQ ID NO: 30792 - protein, 39 aa, Artificial Sequence
  GFR-binding peptide
  MOD_RES (5), (6): Xaa is C or S
  MOD_RES (20), (21), (22), (23), (24): Xaa is A or G
  MOD_RES (25), (26), (27), (28): Xaa is A or G or is absent
VPKPXXAPTQLSPISVLYIXXXXXXXXXYKQYENMVVRA

SEQ ID NO: 30793 - protein, 37 aa, Artificial Sequence; identical to SEQ ID NO: 9394
  GFR-binding peptide
  MOD_RES (35), (37): Xaa is C or S
  MOD_RES (14), (15), (16), (17), (18): Xaa is A or G
  MOD_RES (19), (20), (21), (22): Xaa is A or G or is absent

SEQ ID NO: 30794 - protein, 38 aa, Artificial Sequence; identical to SEQ ID NO: 9395
  GFR-binding peptide
  MOD_RES (3), (4), (38): Xaa is C or S
  MOD_RES (18), (19), (20), (21), (22): Xaa is A or G
  MOD_RES (23), (24), (25), (26): Xaa is A or G or is absent

SEQ ID NO: 30795 - protein, 42 aa, Artificial Sequence; identical to SEQ ID NO: 9396
  GFR-binding peptide
  MOD_RES (5), (6), (40), (42): Xaa is C or S
  MOD_RES (20), (21), (22), (23), (24): Xaa is A or G
  MOD_RES (25), (26), (27), (28): Xaa is A or G or is absent

SEQ ID NO: 30796 - protein, 36 aa, Artificial Sequence
  GFR-binding peptide
  MOD_RES (1), (2), (36): Xaa is C or S
  MOD_RES (16), (17), (18), (19), (20): Xaa is A or G
  MOD_RES (21), (22), (23), (24): Xaa is A or G or is absent
XXVPTELEPISMLYLXXXXXXXXXKFKYEEMVVEGX

SEQ ID NO: 30797 - protein, 35 aa, Artificial Sequence
  GFR-binding peptide
  MOD_RES (2), (3): Xaa is C or S
  MOD_RES (17), (18), (19), (20), (21): Xaa is A or G
  MOD_RES (22), (23), (24), (25): Xaa is A or G or is absent
AXXVPTELSPISMLYIXXXXXXXXXYKQYEEMVVE

SEQ ID NO: 30798 - protein, 43 aa, Artificial Sequence
  GFR-binding peptide
  MOD_RES (6), (7), (41), (43): Xaa is C or S
  MOD_RES (21), (22), (23), (24), (25): Xaa is A or G
  MOD_RES (26), (27), (28), (29): Xaa is A or G or is absent
TVPKPXXAPTQLEPISVLYLXXXXXXXXXKFKYENMVVRAXGX

SEQ ID NO: 30799 - protein, 33 aa, Artificial Sequence
  GFR-binding peptide
  MOD_RES (32), (32): Xaa is C or S
APTQLSPISVLYIDDSSNVIYKQYENMVVRAXG

SEQ ID NO: 30800 - protein, 37 aa, Artificial Sequence
  GFR-binding peptide
  MOD_RES (1), (2), (34), (36): Xaa is C or S
XXVPTELSPISMLYIDEYDKVVYKQYEEMVVEGXGXR

SEQ ID NO: 30801 - protein, 40 aa, Artificial Sequence
  GFR-binding peptide
  MOD_RES (6), (7), (39): Xaa is C or S
AVPKAXXAPTKLSPISVLYIDSSNNVIYKQYENMVVKAXG

SEQ ID NO: 30802 - protein, 39 aa, Artificial Sequence
  GFR-binding peptide
  MOD_RES (6), (7): Xaa is C or S
  MOD_RES (21), (22), (23), (24), (25): Xaa is A or G
  MOD_RES (26), (27), (28), (29): Xaa is A or G or is absent
ASAAPXXVPQALEPISILYLXXXXXXXXXKFKYEMIVRS

SEQ ID NO: 30803 - protein, 34 aa, Artificial Sequence
  GFR-binding peptide
  MOD_RES (1), (2), (34): Xaa is C or S
XXAPTQLEPISVLYLDDSSNVIKFKYENMVVRAX

SEQ ID NO: 30804 - protein, 39 aa, Artificial Sequence
  GFR-binding peptide
  MOD_RES (5), (6), (38): Xaa is C or S
APASXXVPARLNAISILYFDAANNVVLKKYRDMVVEAXG

SEQ ID NO: 30805 - protein, 35 aa, Artificial Sequence
  GFR-binding peptide
  MOD_RES (2), (3), (35): Xaa is C or S
AXXAPTKLEPISVLYLDSSNNVIKFKYENMVVKAX

SEQ ID NO: 30806 - protein, 37 aa, Artificial Sequence
  GFR-binding peptide
  MOD_RES (1), (2), (36): Xaa is C or S
  MOD_RES (16), (17), (18), (19), (20): Xaa is A or G
  MOD_RES (21), (22), (23), (24): Xaa is A or G or is absent
XXVPTKLSPISILYIXXXXXXXXXYKQYEGMAVSEXG

SEQ ID NO: 30807 - protein, 42 aa, Artificial Sequence
  GFR-binding peptide
  MOD_RES (6), (7), (39), (41): Xaa is C or S
KIPKAXXVPTELEPISMLYLDENEKVVKFKYEDMVVEGXGXR

SEQ ID NO: 30808 - protein, 30 aa, Artificial Sequence
  GFR-binding peptide
VPTELEPISMLYLDEYDKVVKFKYEEMVVE

SEQ ID NO: 30809 - protein, 36 aa, Artificial Sequence
  GFR-binding peptide
  MOD_RES (3), (4), (35): Xaa is C or S
SPXXVPQDLEPISILYLVGRTPKVKFKYEMVVKSXK

SEQ ID NO: 30810 - protein, 39 aa, Artificial Sequence
  GFR-binding peptide
  MOD_RES (3), (4), (37), (39): Xaa is C or S
  MOD_RES (18), (19), (20), (21), (22): Xaa is A or G
  MOD_RES (23), (24), (25), (26): Xaa is A or G or is absent
SPXXVSQDLSPISILYIXXXXXXXXXYKQYEMIVKSXKX

SEQ ID NO: 30811 - protein, 36 aa, Artificial Sequence; identical to SEQ ID NO: 9403
  GFR-binding peptide
  MOD_RES (4), (5), (36): Xaa is C or S

SEQ ID NO: 30812 - protein, 34 aa, Artificial Sequence; identical to SEQ ID NO: 9404
  GFR-binding peptide
  MOD_RES (1), (2), (34): Xaa is C or S

SEQ ID NO: 30813 - protein, 41 aa, Artificial Sequence
  GFR-binding peptide
  MOD_RES (3), (4), (38), (40): Xaa is C or S
  MOD_RES (18), (19), (20), (21), (22): Xaa is A or G
  MOD_RES (23), (24), (25), (26): Xaa is A or G or is absent
KAXXVPTKLSPISILYIXXXXXXXXXYKQYEGMAVSEXGXR

SEQ ID NO: 30814 - protein, 37 aa, Artificial Sequence; identical to SEQ ID NO: 9406
  GFR-binding peptide
  MOD_RES (4), (5), (36): Xaa is C or S

SEQ ID NO: 30815 - protein, 36 aa, Artificial Sequence; identical to SEQ ID NO: 9409
  GFR-binding peptide
  MOD_RES (1), (2), (35): Xaa is C or S

SEQ ID NO: 30816 - protein, 36 aa, Artificial Sequence
  GFR-binding peptide
  MOD_RES (34), (36): Xaa is C or S
  MOD_RES (14), (15), (16), (17), (18): Xaa is A or G
  MOD_RES (19), (20), (21), (22): Xaa is A or G or is absent
VPTKLSPISILYIXXXXXXXXXYKQYEGMAVSEXGX

SEQ ID NO: 30817 - protein, 35 aa, Artificial Sequence
  GFR-binding peptide
  MOD_RES (34), (34): Xaa is C or S
  MOD_RES (14), (15), (16), (17), (18): Xaa is A or G
  MOD_RES (19), (20), (21), (22): Xaa is A or G or is absent
VPTELSPISMLYIXXXXXXXXXYKQYEDMVVEGXG

SEQ ID NO: 30818 - protein, 36 aa, Artificial Sequence
  GFR-binding peptide
  MOD_RES (2), (3), (36): Xaa is C or S
  MOD_RES (17), (18), (19), (20), (21): Xaa is A or G
  MOD_RES (22), (23), (24), (25): Xaa is A or G or is absent
PXXVPQALEPISILYLXXXXXXXXXKFKYEMIVRSX

SEQ ID NO: 30819 - protein, 37 aa, Artificial Sequence
  GFR-binding peptide
  MOD_RES (1), (2), (35), (37): Xaa is C or S
  MOD_RES (16), (17), (18), (19), (20): Xaa is A or G
  MOD_RES (21), (22), (23), (24): Xaa is A or G or is absent
XXVSQDLSPISILYIXXXXXXXXXYKQYEMIVKSXKX

SEQ ID NO: 30820 - protein, 35 aa, Artificial Sequence; identical to SEQ ID NO: 9414
  GFR-binding peptide
  MOD_RES (2), (3), (34): Xaa is C or S

SEQ ID NO: 30821 - protein, 36 aa, Artificial Sequence; identical to SEQ ID NO: 9415
  GFR-binding peptide
  MOD_RES (1), (35): Xaa is C or S
  MOD_RES (15), (16), (17), (18), (19): Xaa is A or G
  MOD_RES (20), (21), (22), (23): Xaa is A or G or is absent

SEQ ID NO: 30822 - protein, 32 aa, Artificial Sequence; identical to SEQ ID NO: 9416
  GFR-binding peptide
  MOD_RES (1), (32): Xaa is C or S

SEQ ID NO: 30823 - protein, 36 aa, Artificial Sequence
  GFR-binding peptide
  MOD_RES (1), (2), (34), (36): Xaa is C or S
XXVPTELEPISMLYLDEYDKVVKFKYEEMVVEGXGX

SEQ ID NO: 30824 - protein, 38 aa, Artificial Sequence
  GFR-binding peptide
  MOD_RES (3), (4), (36), (38): Xaa is C or S
KAXXVPTELSPISMLYIDEYDKVVYKQYEEMVVEGXGX

SEQ ID NO: 30825 - protein, 37 aa, Artificial Sequence
  GFR-binding peptide
  MOD_RES (7), (7): Xaa is C or S
HVTKPTXAPTKLSPISVLYIDDSSNVIYKQYENMVVR

SEQ ID NO: 30826 - protein, 36 aa, Artificial Sequence; identical to SEQ ID NO: 9420
  GFR-binding peptide
  MOD_RES (2), (3): Xaa is C or S
  MOD_RES (17), (18), (19), (20), (21): Xaa is A or G
  MOD_RES (22), (23), (24), (25): Xaa is A or G or is absent

SEQ ID NO: 30827 - protein, 34 aa, Artificial Sequence
  GFR-binding peptide
  MOD_RES (33), (33): Xaa is C or S
VPTKLEPISVLYLDDMGVPTKFKYEEGMSVAEXG

SEQ ID NO: 30828 - protein, 35 aa, Artificial Sequence
  GFR-binding peptide
  MOD_RES (2), (3), (35): Xaa is C or S
AXXAPTKLSPISVLYIDSSNNVIYKQYENMVVKAX

SEQ ID NO: 30829 - protein, 33 aa, Artificial Sequence
  GFR-binding peptide
  MOD_RES (33), (33): Xaa is C or S
  MOD_RES (14), (15), (16), (17), (18): Xaa is A or G
  MOD_RES (19), (20), (21), (22): Xaa is A or G or is absent
VSQDLEPISILYLXXXXXXXXXKFKYEMIVKSX

SEQ ID NO: 30830 - protein, 38 aa, Artificial Sequence
  GFR-binding peptide
  MOD_RES (3), (4), (35), (37): Xaa is C or S
APXXVPQALEPISILYLVGRKPKVKFKYEMIVRSXKXS

SEQ ID NO: 30831 - protein, 35 aa, Artificial Sequence
  GFR-binding peptide
  MOD_RES (2), (3), (35): Xaa is C or S
AXXVPTKLSPISILYIDKGVVTYYKQYEGMAVSEX

SEQ ID NO: 30832 - protein, 35 aa, Artificial Sequence
  GFR-binding peptide
  MOD_RES (4), (5): Xaa is C or S
ASPXXVPQDLEPISILYLVGRTPKVKFKYEMVVKS

SEQ ID NO: 30833 - protein, 34 aa, Artificial Sequence; identical to SEQ ID NO: 9427
  GFR-binding peptide
  MOD_RES (1), (2): Xaa is C or S
  MOD_RES (16), (17), (18), (19), (20): Xaa is A or G
  MOD_RES (21), (22), (23), (24): Xaa is A or G or is absent

SEQ ID NO: 30834 - protein, 37 aa, Artificial Sequence
  GFR-binding peptide
  MOD_RES (3), (4): Xaa is C or S
  MOD_RES (18), (19), (20), (21), (22): Xaa is A or G
  MOD_RES (23), (24), (25), (26): Xaa is A or G or is absent
KAXXAPTKLEPISVLYLXXXXXXXXXKFKYENMVVKA

SEQ ID NO: 30835 - protein, 42 aa, Artificial Sequence
  GFR-binding peptide
  MOD_RES (4), (5), (39), (41): Xaa is C or S
  MOD_RES (19), (20), (21), (22), (23): Xaa is A or G
  MOD_RES (24), (25), (26), (27): Xaa is A or G or is absent
PASXXVPARLSPISILYKXXXXXXXXXLKYHYDMVVEAXGXR

SEQ ID NO: 30836 - protein, 41 aa, Artificial Sequence
  GFR-binding peptide
  MOD_RES (4), (5), (39), (41): Xaa is C or S
  MOD_RES (19), (20), (21), (22), (23): Xaa is A or G
  MOD_RES (24), (25), (26), (27): Xaa is A or G or is absent
PKPXXAPTQLSPISVLYIXXXXXXXXXYKQYENMVVRAXGX

SEQ ID NO: 30837 - protein, 32 aa, Artificial Sequence
  GFR-binding peptide
  MOD_RES (32), (32): Xaa is C or S
APTKLSPISVLYIDSSNNVIYKQYENMVVKAX

SEQ ID NO: 30838 - protein, 34 aa, Artificial Sequence
  GFR-binding peptide
  MOD_RES (3), (4): Xaa is C or S
KAXXVPTELEPISMLYLDENEKVVKFKYEDMVVE

SEQ ID NO: 30839 - protein, 32 aa, Artificial Sequence
  GFR-binding peptide
  MOD_RES (1), (1): Xaa is C or S
XAPTKLSPISVLYIDSSNNVIYKQYENMVVKA

SEQ ID NO: 30840 - protein, 43 aa, Artificial Sequence
  GFR-binding peptide
  MOD_RES (6), (7), (41), (43): Xaa is C or S
  MOD_RES (21), (22), (23), (24), (25): Xaa is A or G
  MOD_RES (26), (27), (28), (29): Xaa is A or G or is absent
AAPASXXVPARLSPISILYKXXXXXXXXXLKYHYDMVVEAXGX

SEQ ID NO: 30841 - protein, 37 aa, Artificial Sequence
  GFR-binding peptide
  MOD_RES (1), (35), (37): Xaa is C or S
  MOD_RES (15), (16), (17), (18), (19): Xaa is A or G
  MOD_RES (20), (21), (22), (23): Xaa is A or G or is absent
XVPTELSPISMLYIXXXXXXXXXYKQYEDMVVEGXGX

SEQ ID NO: 30842 - protein, 38 aa, Artificial Sequence; identical to SEQ ID NO: 9438
  GFR-binding peptide
  MOD_RES (2), (3), (36), (38): Xaa is C or S
  MOD_RES (17), (18), (19), (20), (21): Xaa is A or G
  MOD_RES (22), (23), (24), (25): Xaa is A or G or is absent

SEQ ID NO: 30843 - protein, 37 aa, Artificial Sequence; identical to SEQ ID NO: 9439
  GFR-binding peptide
  MOD_RES (4), (4): Xaa is C or S
  MOD_RES (18), (19), (20), (21), (22): Xaa is A or G
  MOD_RES (23), (24), (25), (26): Xaa is A or G or is absent

SEQ ID NO: 30844 - protein, 40 aa, Artificial Sequence
  GFR-binding peptide
  MOD_RES (3), (4), (38), (40): Xaa is C or S
  MOD_RES (18), (19), (20), (21), (22): Xaa is A or G
  MOD_RES (23), (24), (25), (26): Xaa is A or G or is absent
ASXXVPARLEPISILYLXXXXXXXXXKFKYEDMVVEAXGX

SEQ ID NO: 30845 - protein, 30 aa, Artificial Sequence; identical to SEQ ID NO: 9444
  GFR-binding peptide

SEQ ID NO: 30846 - protein, 37 aa, Artificial Sequence
  GFR-binding peptide
  MOD_RES (3), (4), (35), (37): Xaa is C or S
SPXXVPQDLSPISILYIVGRTPKVYKQYEMVVKSXKX

SEQ ID NO: 30847 - protein, 38 aa, Artificial Sequence
  GFR-binding peptide
  MOD_RES (5), (6): Xaa is C or S
  MOD_RES (20), (21), (22), (23), (24): Xaa is A or G
  MOD_RES (25), (26), (27), (28): Xaa is A or G or is absent
VPKAXXAPTKLSPISVLYIXXXXXXXXXYKQYENMVVK

SEQ ID NO: 30848 - protein, 38 aa, Artificial Sequence; identical to SEQ ID NO: 9447
  GFR-binding peptide
  MOD_RES (6), (7): Xaa is C or S

SEQ ID NO: 30849 - protein, 31 aa, Artificial Sequence; identical to SEQ ID NO: 9449
  GFR-binding peptide

SEQ ID NO: 30850 - protein, 34 aa, Artificial Sequence
  GFR-binding peptide
  MOD_RES (34), (34): Xaa is C or S
  MOD_RES (14), (15), (16), (17), (18): Xaa is A or G
  MOD_RES (19), (20), (21), (22): Xaa is A or G or is absent
VPTELSPISMLYIXXXXXXXXXYKQYEEMVVEGX

SEQ ID NO: 30851 - protein, 36 aa, Artificial Sequence
  GFR-binding peptide
  MOD_RES (4), (5): Xaa is C or S
PKAXXVPTELSPISMLYIDENEKVVYKQYEDMVVEG

SEQ ID NO: 30852 - protein, 40 aa, Artificial Sequence; identical to SEQ ID NO: 9455
  GFR-binding peptide
  MOD_RES (4), (5), (37), (39): Xaa is C or S

SEQ ID NO: 30853 - protein, 38 aa, Artificial Sequence; identical to SEQ ID NO: 9456
  GFR-binding peptide
  MOD_RES (5), (6): Xaa is C or S
  MOD_RES (20), (21), (22), (23), (24): Xaa is A or G
  MOD_RES (25), (26), (27), (28): Xaa is A or G or is absent

SEQ ID NO: 30854 - protein, 40 aa, Artificial Sequence; identical to SEQ ID NO: 9457
  GFR-binding peptide
  MOD_RES (6), (40): Xaa is C or S
  MOD_RES (20), (21), (22), (23), (24): Xaa is A or G
  MOD_RES (25), (26), (27), (28): Xaa is A or G or is absent

SEQ ID NO: 30855 - protein, 35 aa, Artificial Sequence
  GFR-binding peptide
  MOD_RES (1), (35): Xaa is C or S
  MOD_RES (15), (16), (17), (18), (19): Xaa is A or G
  MOD_RES (20), (21), (22), (23): Xaa is A or G or is absent
XAPTKLEPISVLYLXXXXXXXXXKFKYENMVVRSX

SEQ ID NO: 30856 - protein, 38 aa, Artificial Sequence; identical to SEQ ID NO: 9459
  GFR-binding peptide
  MOD_RES (2), (3), (35), (37): Xaa is C or S

SEQ ID NO: 30857 - protein, 36 aa, Artificial Sequence; identical to SEQ ID NO: 9460
  GFR-binding peptide
  MOD_RES (35), (35): Xaa is C or S
  MOD_RES (14), (15), (16), (17), (18): Xaa is A or G
  MOD_RES (19), (20), (21), (22): Xaa is A or G or is absent

SEQ ID NO: 30858 - protein, 36 aa, Artificial Sequence; identical to SEQ ID NO: 9462
  GFR-binding peptide
  MOD_RES (3), (4): Xaa is C or S
  MOD_RES (18), (19), (20), (21), (22): Xaa is A or G
  MOD_RES (23), (24), (25), (26): Xaa is A or G or is absent

SEQ ID NO: 30859 - protein, 38 aa, Artificial Sequence
  GFR-binding peptide
  MOD_RES (2), (3), (37): Xaa is C or S
  MOD_RES (17), (18), (19), (20), (21): Xaa is A or G
  MOD_RES (22), (23), (24), (25): Xaa is A or G or is absent
AXXVPTKLSPISILYIXXXXXXXXXYKQYEGMAVSEXG

SEQ ID NO: 30860 - protein, 35 aa, Artificial Sequence
  GFR-binding peptide
  MOD_RES (3), (4): Xaa is C or S
ASXXVPARLSPISILYKDAANNVVLKYHYDMVVEA

SEQ ID NO: 30861 - protein, 39 aa, Artificial Sequence
  GFR-binding peptide
  MOD_RES (4), (5), (37), (39): Xaa is C or S
PKAXXVPTELSPISMLYIDEYDKVVYKQYEEMVVEGXGX

SEQ ID NO: 30862 - protein, 41 aa, Artificial Sequence
  GFR-binding peptide
  MOD_RES (6), (7), (39), (41): Xaa is C or S
AAPASXXVPARLNAISILYFDAANNVVLKKYRDMVVEAXGX

SEQ ID NO: 30863 - protein, 39 aa, Artificial Sequence; identical to SEQ ID NO: 9464
  GFR-binding peptide
  MOD_RES (7), (39): Xaa is C or S

SEQ ID NO: 30864 - protein, 39 aa, Artificial Sequence; identical to SEQ ID NO: 9465
  GFR-binding peptide
  MOD_RES (3), (4), (36), (38): Xaa is C or S

SEQ ID NO: 30865 - protein, 43 aa, Artificial Sequence
  GFR-binding peptide
  MOD_RES (7), (41), (43): Xaa is C or S
  MOD_RES (21), (22), (23), (24), (25): Xaa is A or G
  MOD_RES (26), (27), (28), (29): Xaa is A or G or is absent
HVTKPTXAPTKLEPISVLYLXXXXXXXXXKFKYENMVVRSXGX

SEQ ID NO: 30866 - protein, 38 aa, Artificial Sequence
  GFR-binding peptide
  MOD_RES (1), (2), (36), (38): Xaa is C or S
  MOD_RES (16), (17), (18), (19), (20): Xaa is A or G
  MOD_RES (21), (22), (23), (24): Xaa is A or G or is absent
XXAPTKLEPISVLYLXXXXXXXXXKFKYENMVVRSXGX

SEQ ID NO: 30867 - protein, 36 aa, Artificial Sequence; identical to SEQ ID NO: 9468
  GFR-binding peptide
  MOD_RES (3), (4), (35): Xaa is C or S

SEQ ID NO: 30868 - protein, 37 aa, Artificial Sequence
  GFR-binding peptide
  MOD_RES (4), (4): Xaa is C or S
  MOD_RES (18), (19), (20), (21), (22): Xaa is A or G
  MOD_RES (23), (24), (25), (26): Xaa is A or G or is absent
KPTXAPTKLSPISVLYIXXXXXXXXXYKQYENMVVRS

SEQ ID NO: 30869 - protein, 36 aa, Artificial Sequence
  GFR-binding peptide
  MOD_RES (1), (2), (34), (36): Xaa is C or S
XXAPTQLEPISVLYLDDSSNVIKFKYENMVVRAXGX

SEQ ID NO: 30870 - protein, 36 aa, Artificial Sequence; identical to SEQ ID NO: 9470
  GFR-binding peptide
  MOD_RES (1), (2), (34), (36): Xaa is C or S

SEQ ID NO: 30871 - protein, 40 aa, Artificial Sequence; identical to SEQ ID NO: 9471
  GFR-binding peptide
  MOD_RES (4), (5), (40): Xaa is C or S
  MOD_RES (19), (20), (21), (22), (23): Xaa is A or G
  MOD_RES (24), (25), (26), (27): Xaa is A or G or is absent

SEQ ID NO: 30872 - protein, 40 aa, Artificial Sequence
  GFR-binding peptide
  MOD_RES (6), (7): Xaa is C or S
  MOD_RES (21), (22), (23), (24), (25): Xaa is A or G
  MOD_RES (26), (27), (28), (29): Xaa is A or G or is absent
SIPKAXXVPTELEPISMLYLXXXXXXXXXKFKYEEMVVEG

SEQ ID NO: 30873 - protein, 35 aa, Artificial Sequence; identical to SEQ ID NO: 9474
  GFR-binding peptide
  MOD_RES (2), (3), (34): Xaa is C or S

SEQ ID NO: 30874 - protein, 39 aa, Artificial Sequence; identical to SEQ ID NO: 9475
  GFR-binding peptide
  MOD_RES (5), (6), (38): Xaa is C or S

SEQ ID NO: 30875 - protein, 34 aa, Artificial Sequence; identical to SEQ ID NO: 9477
  GFR-binding peptide
  MOD_RES (1), (1): Xaa is C or S
  MOD_RES (15), (16), (17), (18), (19): Xaa is A or G
  MOD_RES (20), (21), (22), (23): Xaa is A or G or is absent

SEQ ID NO: 30876 - protein, 42 aa, Artificial Sequence
  GFR-binding peptide
  MOD_RES (4), (5), (39), (41): Xaa is C or S
  MOD_RES (19), (20), (21), (22), (23): Xaa is A or G
  MOD_RES (24), (25), (26), (27): Xaa is A or G or is absent
SKAXXVPTKLSPISILYKXXXXXXXXXLKYHYGMAVSEXGXR

SEQ ID NO: 30877 - protein, 42 aa, Artificial Sequence
  GFR-binding peptide
  MOD_RES (5), (6), (40), (42): Xaa is C or S
  MOD_RES (20), (21), (22), (23), (24): Xaa is A or G
  MOD_RES (25), (26), (27), (28): Xaa is A or G or is absent
VPKAXXAPTKLEPISVLYLXXXXXXXXXKFKYENMVVKAXGX

SEQ ID NO: 30878 - protein, 38 aa, Artificial Sequence; identical to SEQ ID NO: 9478
  GFR-binding peptide
  MOD_RES (5), (6): Xaa is C or S
  MOD_RES (20), (21), (22), (23), (24): Xaa is A or G
  MOD_RES (25), (26), (27), (28): Xaa is A or G or is absent

SEQ ID NO: 30879 - protein, 35 aa, Artificial Sequence
  GFR-binding peptide
  MOD_RES (1), (35): Xaa is C or S
  MOD_RES (15), (16), (17), (18), (19): Xaa is A or G
  MOD_RES (20), (21), (22), (23): Xaa is A or G or is absent
XAPTQLSPISVLYIXXXXXXXXXYKQYENMVVRAX

SEQ ID NO: 30880 - protein, 37 aa, Artificial Sequence; identical to SEQ ID NO: 9479
  GFR-binding peptide
  MOD_RES (5), (6): Xaa is C or S

SEQ ID NO: 30881 - protein, 38 aa, Artificial Sequence; identical to SEQ ID NO: 9480
  GFR-binding peptide
  MOD_RES (5), (6): Xaa is C or S
  MOD_RES (20), (21), (22), (23), (24): Xaa is A or G
  MOD_RES (25), (26), (27), (28): Xaa is A or G or is absent

SEQ ID NO: 30882 - protein, 39 aa, Artificial Sequence; identical to SEQ ID NO: 9482
  GFR-binding peptide
  MOD_RES (6), (7), (38): Xaa is C or S

SEQ ID NO: 30883 - protein, 39 aa, Artificial Sequence
  GFR-binding peptide
  MOD_RES (3), (4), (37), (39): Xaa is C or S
  MOD_RES (18), (19), (20), (21), (22): Xaa is A or G
  MOD_RES (23), (24), (25), (26): Xaa is A or G or is absent
APXXVPQALSPISILYIXXXXXXXXXYKQYEMIVRSXKX

SEQ ID NO: 30884 - protein, 38 aa, Artificial Sequence
  GFR-binding peptide
  MOD_RES (1), (2), (36), (38): Xaa is C or S
  MOD_RES (16), (17), (18), (19), (20): Xaa is A or G
  MOD_RES (21), (22), (23), (24): Xaa is A or G or is absent
XXVPARLSPISILYIXXXXXXXXXYKQYEDMVVEAXGX

SEQ ID NO: 30885 - protein, 37 aa, Artificial Sequence
  GFR-binding peptide
  MOD_RES (5), (6): Xaa is C or S
ASKAXXVPTKLNAISILYFDKGVVTYLKKYRGMAVSE

SEQ ID NO: 30886 - protein, 35 aa, Artificial Sequence; identical to SEQ ID NO: 9484
  GFR-binding peptide
  MOD_RES (1), (2), (34): Xaa is C or S

SEQ ID NO: 30887 - protein, 35 aa, Artificial Sequence
  GFR-binding peptide
  MOD_RES (1), (2), (33), (35): Xaa is C or S
XXVPQDLEPISILYLVGRTPKVKFKYEMVVKSXKX

SEQ ID NO: 30888 - protein, 41 aa, Artificial Sequence; identical to SEQ ID NO: 9485
  GFR-binding peptide
  MOD_RES (3), (4), (38), (40): Xaa is C or S
  MOD_RES (18), (19), (20), (21), (22): Xaa is A or G
  MOD_RES (23), (24), (25), (26): Xaa is A or G or is absent

SEQ ID NO: 30889 - protein, 37 aa, Artificial Sequence; identical to SEQ ID NO: 9486
  GFR-binding peptide
  MOD_RES (6), (7): Xaa is C or S

SEQ ID NO: 30890 - protein, 36 aa, Artificial Sequence; identical to SEQ ID NO: 9491
  GFR-binding peptide
  MOD_RES (1), (2), (35): Xaa is C or S
  MOD_RES (16), (17), (18), (19), (20): Xaa is A or G
  MOD_RES (21), (22), (23), (24): Xaa is A or G or is absent

SEQ ID NO: 30891 - protein, 37 aa, Artificial Sequence
  GFR-binding peptide
  MOD_RES (4), (5): Xaa is C or S
  MOD_RES (19), (20), (21), (22), (23): Xaa is A or G
  MOD_RES (24), (25), (26), (27): Xaa is A or G or is absent
PASXXVPARLNAISILYFXXXXXXXXXLKKYRDMVVE

SEQ ID NO: 30892 - protein, 40 aa, Artificial Sequence; identical to SEQ ID NO: 9492
  GFR-binding peptide
  MOD_RES (2), (3), (37), (39): Xaa is C or S
  MOD_RES (17), (18), (19), (20), (21): Xaa is A or G
  MOD_RES (22), (23), (24), (25): Xaa is A or G or is absent

SEQ ID NO: 30893 - protein, 40 aa, Artificial Sequence
  GFR-binding peptide
  MOD_RES (5), (6), (40): Xaa is C or S
  MOD_RES (20), (21), (22), (23), (24): Xaa is A or G
  MOD_RES (25), (26), (27), (28): Xaa is A or G or is absent
VPKPXXAPTKLEPISVLYLXXXXXXXXXKFKYENMVVRSX

SEQ ID NO: 30894 - protein, 37 aa, Artificial Sequence
  GFR-binding peptide
  MOD_RES (1), (36): Xaa is C or S
  MOD_RES (15), (16), (17), (18), (19): Xaa is A or G
  MOD_RES (20), (21), (22), (23): Xaa is A or G or is absent
XVPTKLEPISVLYLXXXXXXXXXKFKYEEGMSVAEXG

SEQ ID NO: 30895 - protein, 33 aa, Artificial Sequence
  GFR-binding peptide
  MOD_RES (2), (3): Xaa is C or S
SXXVPARLSPISILYKDAANNVVLKYHYDMVVE

SEQ ID NO: 30896 - protein, 40 aa, Artificial Sequence; identical to SEQ ID NO: 9494
  GFR-binding peptide
  MOD_RES (6), (7), (39): Xaa is C or S

SEQ ID NO: 30897 - protein, 32 aa, Artificial Sequence; identical to SEQ ID NO: 9495
  GFR-binding peptide
  MOD_RES (1), (2): Xaa is C or S

SEQ ID NO: 30898 - protein, 30 aa, Artificial Sequence
  GFR-binding peptide
APTKLSPISVLYIDSSNNVIYKQYENMVVK

SEQ ID NO: 30899 - protein, 35 aa, Artificial Sequence
  GFR-binding peptide
  MOD_RES (1), (35): Xaa is C or S
  MOD_RES (15), (16), (17), (18), (19): Xaa is A or G
  MOD_RES (20), (21), (22), (23): Xaa is A or G or is absent
XVPTKLEPISILYLXXXXXXXXXKFKYEGMAVSEX

SEQ ID NO: 30900 - protein, 35 aa, Artificial Sequence
  GFR-binding peptide
  MOD_RES (2), (3): Xaa is C or S
  MOD_RES (17), (18), (19), (20), (21): Xaa is A or G
  MOD_RES (22), (23), (24), (25): Xaa is A or G or is absent
AXXVPTKLSPISILYIXXXXXXXXXYKQYEGMAVS

SEQ ID NO: 30901 - protein, 39 aa, Artificial Sequence; identical to SEQ ID NO: 9498
  GFR-binding peptide
  MOD_RES (1), (2), (37), (39): Xaa is C or S
  MOD_RES (16), (17), (18), (19), (20): Xaa is A or G
  MOD_RES (21), (22), (23), (24): Xaa is A or G or is absent

SEQ ID NO: 30902 - protein, 32 aa, Artificial Sequence
  GFR-binding peptide
  MOD_RES (1), (1): Xaa is C or S
XVPTKLSPISILYKDKGVVTYLKYHYGMAVSE

SEQ ID NO: 30903 - protein, 34 aa, Artificial Sequence; identical to SEQ ID NO: 9499
  GFR-binding peptide
  MOD_RES (34), (34): Xaa is C or S
  MOD_RES (14), (15), (16), (17), (18): Xaa is A or G
  MOD_RES (19), (20), (21), (22): Xaa is A or G or is absent

SEQ ID NO: 30904 - protein, 37 aa, Artificial Sequence
  GFR-binding peptide
  MOD_RES (6), (7): Xaa is C or S
TVPKPXXAPTQLSPISVLYIDDSSNVIYKQYENMVVR

SEQ ID NO: 30905 - protein, 43 aa, Artificial Sequence; identical to SEQ ID NO: 9503
  GFR-binding peptide
  MOD_RES (6), (7), (40), (42): Xaa is C or S
  MOD_RES (21), (22), (23), (24), (25): Xaa is A or G
  MOD_RES (26), (27), (28), (29): Xaa is A or G or is absent

SEQ ID NO: 30906 - protein, 41 aa, Artificial Sequence; identical to SEQ ID NO: 9504
  GFR-binding peptide
  MOD_RES (6), (7), (38), (40): Xaa is C or S

SEQ ID NO: 30907 - protein, 35 aa, Artificial Sequence; identical to SEQ ID NO: 9506
  GFR-binding peptide
  MOD_RES (1), (2), (34): Xaa is C or S

SEQ ID NO: 30908 - protein, 36 aa, Artificial Sequence; identical to SEQ ID NO: 9507
  GFR-binding peptide
  MOD_RES (1), (33), (35): Xaa is C or S

SEQ ID NO: 30909 - protein, 42 aa, Artificial Sequence; identical to SEQ ID NO: 9508
  GFR-binding peptide
  MOD_RES (7), (41): Xaa is C or S
  MOD_RES (21), (22), (23), (24), (25): Xaa is A or G
  MOD_RES (26), (27), (28), (29): Xaa is A or G or is absent

SEQ ID NO: 30910 - protein, 41 aa, Artificial Sequence
  GFR-binding peptide
  MOD_RES (6), (7), (40): Xaa is C or S
  MOD_RES (21), (22), (23), (24), (25): Xaa is A or G
  MOD_RES (26), (27), (28), (29): Xaa is A or G or is absent
ASASPXXVPQDLEPISILYLXXXXXXXXXKFKYEMVVKSXK

SEQ ID NO: 30911 - protein, 39 aa, Artificial Sequence
  GFR-binding peptide
  MOD_RES (6), (7): Xaa is C or S
  MOD_RES (21), (22), (23), (24), (25): Xaa is A or G
  MOD_RES (26), (27), (28), (29): Xaa is A or G or is absent
TVPKPXXAPTQLSPISVLYIXXXXXXXXXYKQYENMVVR

SEQ ID NO: 30912 - protein, 36 aa, Artificial Sequence
  GFR-binding peptide
  MOD_RES (1), (2), (36): Xaa is C or S
  MOD_RES (16), (17), (18), (19), (20): Xaa is A or G
  MOD_RES (21), (22), (23), (24): Xaa is A or G or is absent
XXAPTKLEPISVLYLXXXXXXXXXKFKYENMVVKAX

SEQ ID NO: 30913 - protein, 44 aa, Artificial Sequence; identical to SEQ ID NO: 9516
  GFR-binding peptide
  MOD_RES (6), (7), (41), (43): Xaa is C or S
  MOD_RES (21), (22), (23), (24), (25): Xaa is A or G
  MOD_RES (26), (27), (28), (29): Xaa is A or G or is absent

SEQ ID NO: 30914 - protein, 38 aa, Artificial Sequence
  GFR-binding peptide
  MOD_RES (6), (38): Xaa is C or S
VTKPTXAPTKLEPISVLYLDDSSNVIKFKYENMVVRSX

SEQ ID NO: 30915 - protein, 34 aa, Artificial Sequence; identical to SEQ ID NO: 9518
  GFR-binding peptide
  MOD_RES (33), (33): Xaa is C or S
  MOD_RES (14), (15), (16), (17), (18): Xaa is A or G
  MOD_RES (19), (20), (21), (22): Xaa is A or G or is absent

SEQ ID NO: 30916 - protein, 31 aa, Artificial Sequence; identical to SEQ ID NO: 9519
  GFR-binding peptide

SEQ ID NO: 30917 - protein, 32 aa, Artificial Sequence
  GFR-binding peptide
  MOD_RES (1), (2): Xaa is C or S
XXVPTELEPISMLYLDENEKVVKFKYEDMVVE

SEQ ID NO: 30918 - protein, 40 aa, Artificial Sequence; identical to SEQ ID NO: 9521
  GFR-binding peptide
  MOD_RES (3), (4), (39): Xaa is C or S
  MOD_RES (18), (19), (20), (21), (22): Xaa is A or G
  MOD_RES (23), (24), (25), (26): Xaa is A or G or is absent

SEQ ID NO: 30919 - protein, 42 aa, Artificial Sequence; identical to SEQ ID NO: 9522
  GFR-binding peptide
  MOD_RES (4), (5), (39), (41): Xaa is C or S
  MOD_RES (19), (20), (21), (22), (23): Xaa is A or G
  MOD_RES (24), (25), (26), (27): Xaa is A or G or is absent

SEQ ID NO: 30920 - protein, 34 aa, Artificial Sequence
  GFR-binding peptide
  MOD_RES (1), (2), (34): Xaa is C or S
XXVPARLEPISILYLDAANNVVKFKYEDMVVEAX

SEQ ID NO: 30921 - protein, 39 aa, Artificial Sequence; identical to SEQ ID NO: 9525
  GFR-binding peptide
  MOD_RES (2), (3), (36), (38): Xaa is C or S
  MOD_RES (17), (18), (19), (20), (21): Xaa is A or G
  MOD_RES (22), (23), (24), (25): Xaa is A or G or is absent

SEQ ID NO: 30922 - protein, 37 aa, Artificial Sequence
  GFR-binding peptide
  MOD_RES (1), (2), (34), (36): Xaa is C or S
XXVPTKLNAISILYFDKGVVTYLKKYRGMAVSEXGXR

SEQ ID NO: 30923 - protein, 36 aa, Artificial Sequence; identical to SEQ ID NO: 9528
  GFR-binding peptide
  MOD_RES (3), (4), (35): Xaa is C or S

SEQ ID NO: 30924 - protein, 36 aa, Artificial Sequence
  GFR-binding peptide
  MOD_RES (6), (6): Xaa is C or S
VTKPTXAPTKLEPISVLYLDDSSNVIKFKYENMVVR

SEQ ID NO: 30925 - protein, 40 aa, Artificial Sequence; identical to SEQ ID NO: 9532
  GFR-binding peptide
  MOD_RES (2), (3), (37), (39): Xaa is C or S
  MOD_RES (17), (18), (19), (20), (21): Xaa is A or G
  MOD_RES (22), (23), (24), (25): Xaa is A or G or is absent

SEQ ID NO: 30926 - protein, 36 aa, Artificial Sequence; identical to SEQ ID NO: 9533
  GFR-binding peptide
  MOD_RES (2), (3): Xaa is C or S
  MOD_RES (17), (18), (19), (20), (21): Xaa is A or G
  MOD_RES (22), (23), (24), (25): Xaa is A or G or is absent

SEQ ID NO: 30927 - protein, 30 aa, Artificial Sequence; identical to SEQ ID NO: 9534
  GFR-binding peptide

SEQ ID NO: 30928 - protein, 33 aa, Artificial Sequence
  GFR-binding peptide
  MOD_RES (1), (33): Xaa is C or S
XVPTELSPISMLYIDENEKVVYKQYEDMVVEGX

SEQ ID NO: 30929 - protein, 33 aa, Artificial Sequence
  GFR-binding peptide
  MOD_RES (2), (3): Xaa is C or S
PXXVPQALSPISILYIVGRKPKVYKQYEMIVRS

SEQ ID NO: 30930 - protein, 39 aa, Artificial Sequence
  GFR-binding peptide
  MOD_RES (5), (6), (38): Xaa is C or S
IPKAXXVPTELEPISMLYLDENEKVVKFKYEDMVVEGXG

SEQ ID NO: 30931 - protein, 38 aa, Artificial Sequence
  GFR-binding peptide
  MOD_RES (4), (5), (38): Xaa is C or S
GKAXXVPTKLSPISVLYIDDMGVPTYKQYEEGMSVAEX

SEQ ID NO: 30932 - protein, 38 aa, Artificial Sequence; identical to SEQ ID NO: 9536
  GFR-binding peptide
  MOD_RES (6), (7): Xaa is C or S

SEQ ID NO: 30933 - protein, 42 aa, Artificial Sequence
  GFR-binding peptide
  MOD_RES (6), (7), (41): Xaa is C or S
  MOD_RES (21), (22), (23), (24), (25): Xaa is A or G
  MOD_RES (26), (27), (28), (29): Xaa is A or G or is absent
KIPKAXXVPTELSPISMLYIXXXXXXXXXYKQYEDMVVEGXG

SEQ ID NO: 30934 - protein, 40 aa, Artificial Sequence; identical to SEQ ID NO: 9538
  GFR-binding peptide
  MOD_RES (5), (6), (37), (39): Xaa is C or S

SEQ ID NO: 30935 - protein, 38 aa, Artificial Sequence
  GFR-binding peptide
  MOD_RES (1), (36), (38): Xaa is C or S
  MOD_RES (15), (16), (17), (18), (19): Xaa is A or G
  MOD_RES (20), (21), (22), (23): Xaa is A or G or is absent
XVPTKLEPISVLYLXXXXXXXXXKFKYEEGMSVAEXGX

SEQ ID NO: 30936 - protein, 41 aa, Artificial Sequence
  GFR-binding peptide
  MOD_RES (6), (7), (39), (41): Xaa is C or S
KIPKAXXVPTELEPISMLYLDENEKVVKFKYEDMVVEGXGX

SEQ ID NO: 30937 - protein, 35 aa, Artificial Sequence
  GFR-binding peptide
  MOD_RES (1), (2), (34): Xaa is C or S
XXVPTKLNAISILYFDKGVVTYLKKYRGMAVSEXG

SEQ ID NO: 30938 - protein, 34 aa, Artificial Sequence; identical to SEQ ID NO: 9545
  GFR-binding peptide
  MOD_RES (1), (33): Xaa is C or S

SEQ ID NO: 30939 - protein, 39 aa, Artificial Sequence; identical to SEQ ID NO: 9546
  GFR-binding peptide
  MOD_RES (6), (7), (38): Xaa is C or S

SEQ ID NO: 30940 - protein, 37 aa, Artificial Sequence; identical to SEQ ID NO: 9548
  GFR-binding peptide
  MOD_RES (1), (2), (35), (37): Xaa is C or S

SEQ ID NO: 30941 - protein, 37 aa, Artificial Sequence
  GFR-binding peptide
  MOD_RES (1), (35), (37): Xaa is C or S
  MOD_RES (15), (16), (17), (18), (19): Xaa is A or G
  MOD_RES (20), (21), (22), (23): Xaa is A or G or is absent
XAPTKLEPISVLYLXXXXXXXXXKFKYENMVVKAXGX

SEQ ID NO: 30942 - protein, 37 aa, Artificial Sequence
  GFR-binding peptide
  MOD_RES (1), (2), (34), (36): Xaa is C or S
XXAPTKLEPISVLYLDSSNNVIKFKYENMVVKAXGXH

SEQ ID NO: 30943 - protein, 36 aa, Artificial Sequence
  GFR-binding peptide
  MOD_RES (2), (3): Xaa is C or S
  MOD_RES (17), (18), (19), (20), (21): Xaa is A or G
  MOD_RES (22), (23), (24), (25): Xaa is A or G or is absent
AXXVPTELSPISMLYIXXXXXXXXXYKQYEDMVVEG

SEQ ID NO: 30944 - protein, 33 aa, Artificial Sequence
  GFR-binding peptide
  MOD_RES (32), (32): Xaa is C or S
APTKLSPISVLYIDDSSNVIYKQYENMVVRSXG

SEQ ID NO: 30945 - protein, 32 aa, Artificial Sequence
  GFR-binding peptide
  MOD_RES (1), (32): Xaa is C or S
XVSQDLSPISILYIIGKTPKIYKQYEMIVKSX

SEQ ID NO: 30946 - protein, 43 aa, Artificial Sequence
  GFR-binding peptide
  MOD_RES (6), (7), (41), (43): Xaa is C or S
  MOD_RES (21), (22), (23), (24), (25): Xaa is A or G
  MOD_RES (26), (27), (28), (29): Xaa is A or G or is absent
KIPKAXXVPTELSPISMLYIXXXXXXXXXYKQYEDMVVEGXGX

SEQ ID NO: 30947 - protein, 37 aa, Artificial Sequence; identical to SEQ ID NO: 9551
  GFR-binding peptide
  MOD_RES (1), (36): Xaa is C or S
  MOD_RES (15), (16), (17), (18), (19): Xaa is A or G
  MOD_RES (20), (21), (22), (23): Xaa is A or G or is absent

SEQ ID NO: 30948 - protein, 34 aa, Artificial Sequence
  GFR-binding peptide
  MOD_RES (33), (33): Xaa is C or S
  MOD_RES (14), (15), (16), (17), (18): Xaa is A or G
  MOD_RES (19), (20), (21), (22): Xaa is A or G or is absent
VSQDLEPISILYLXXXXXXXXXKFKYEMIVKSXK

SEQ ID NO: 30949 - protein, 40 aa, Artificial Sequence; identical to SEQ ID NO: 9553
  GFR-binding peptide
  MOD_RES (6), (7), (40): Xaa is C or S

SEQ ID NO: 30950 - protein, 37 aa, Artificial Sequence; identical to SEQ ID NO: 9555
  GFR-binding peptide
  MOD_RES (1), (2), (37): Xaa is C or S
  MOD_RES (16), (17), (18), (19), (20): Xaa is A or G
  MOD_RES (21), (22), (23), (24): Xaa is A or G or is absent

SEQ ID NO: 30951 - protein, 32 aa, Artificial Sequence; identical to SEQ ID NO: 9556
  GFR-binding peptide
  MOD_RES (1), (1): Xaa is C or S

SEQ ID NO: 30952 - protein, 39 aa, Artificial Sequence; identical to SEQ ID NO: 9557
  GFR-binding peptide
  MOD_RES (6), (7): Xaa is C or S
  MOD_RES (21), (22), (23), (24), (25): Xaa is A or G
  MOD_RES (26), (27), (28), (29): Xaa is A or G or is absent

SEQ ID NO: 30953 - protein, 34 aa, Artificial Sequence
  GFR-binding peptide
  MOD_RES (1), (33): Xaa is C or S
XVPTELSPISMLYIDENEKVVYKQYEDMVVEGXG

SEQ ID NO: 30954 - protein, 34 aa, Artificial Sequence; identical to SEQ ID NO: 9559
  GFR-binding peptide
  MOD_RES (1), (32), (34): Xaa is C or S

SEQ ID NO: 30955 - protein, 36 aa, Artificial Sequence
  GFR-binding peptide
  MOD_RES (4), (5): Xaa is C or S
PKPXXAPTQLEPISVLYLDDSSNVIKFKYENMVVRA

SEQ ID NO: 30956 - protein, 36 aa, Artificial Sequence
  GFR-binding peptide
  MOD_RES (2), (3): Xaa is C or S
  MOD_RES (17), (18), (19), (20), (21): Xaa is A or G
  MOD_RES (22), (23), (24), (25): Xaa is A or G or is absent
PXXAPTQLSPISVLYIXXXXXXXXXYKQYENMVVRA

SEQ ID NO: 30957 - protein, 40 aa, Artificial Sequence; identical to SEQ ID NO: 9562
  GFR-binding peptide
  MOD_RES (5), (6), (39): Xaa is C or S
  MOD_RES (20), (21), (22), (23), (24): Xaa is A or G
  MOD_RES (25), (26), (27), (28): Xaa is A or G or is absent

SEQ ID NO: 30958 - protein, 36 aa, Artificial Sequence; identical to SEQ ID NO: 9564
  GFR-binding peptide
  MOD_RES (1), (33), (35): Xaa is C or S

SEQ ID NO: 30959 - protein, 39 aa, Artificial Sequence
  GFR-binding peptide
  MOD_RES (4), (5), (36), (38): Xaa is C or S
ASPXXVSQDLSPISILYIIGKTPKIYKQYEMIVKSXKXS

SEQ ID NO: 30960 - protein, 37 aa, Artificial Sequence
  GFR-binding peptide
  MOD_RES (1), (35), (37): Xaa is C or S
  MOD_RES (15), (16), (17), (18), (19): Xaa is A or G
  MOD_RES (20), (21), (22), (23): Xaa is A or G or is absent
XVPTELEPISMLYLXXXXXXXXXKFKYEDMVVEGXGX

SEQ ID NO: 30961 - protein, 37 aa, Artificial Sequence; identical to SEQ ID NO: 9568
  GFR-binding peptide
  MOD_RES (2), (3), (37): Xaa is C or S
  MOD_RES (17), (18), (19), (20), (21): Xaa is A or G
  MOD_RES (22), (23), (24), (25): Xaa is A or G or is absent

SEQ ID NO: 30962 - protein, 36 aa, Artificial Sequence; identical to SEQ ID NO: 9569
  GFR-binding peptide
  MOD_RES (1), (35): Xaa is C or S
  MOD_RES (15), (16), (17), (18), (19): Xaa is A or G
  MOD_RES (20), (21), (22), (23): Xaa is A or G or is absent

SEQ ID NO: 30963 - protein, 33 aa, Artificial Sequence; identical to SEQ ID NO: 9570
  GFR-binding peptide
  MOD_RES (14), (15), (16), (17), (18): Xaa is A or G
  MOD_RES (19), (20), (21), (22): Xaa is A or G or is absent

SEQ ID NO: 30964 - protein, 39 aa, Artificial Sequence
  GFR-binding peptide
  MOD_RES (4), (5), (37), (39): Xaa is C or S
PKPXXAPTKLEPISVLYLDDSSNVIKFKYENMVVRSXGX

SEQ ID NO: 30965 - protein, 38 aa, Artificial Sequence
  GFR-binding peptide
  MOD_RES (5), (6), (38): Xaa is C or S
VPKAXXAPTKLEPISVLYLDSSNNVIKFKYENMVVKAX

SEQ ID NO: 30966 - protein, 41 aa, Artificial Sequence
  GFR-binding peptide
  MOD_RES (4), (5), (39), (41): Xaa is C or S
  MOD_RES (19), (20), (21), (22), (23): Xaa is A or G
  MOD_RES (24), (25), (26), (27): Xaa is A or G or is absent
PKPXXAPTQLEPISVLYLXXXXXXXXXKFKYENMVVRAXGX

SEQ ID NO: 30967 - protein, 36 aa, Artificial Sequence
  GFR-binding peptide
  MOD_RES (1), (2), (36): Xaa is C or S
  MOD_RES (16), (17), (18), (19), (20): Xaa is A or G
  MOD_RES (21), (22), (23), (24): Xaa is A or G or is absent
XXVPTELSPISMLYIXXXXXXXXXYKQYEDMVVEGX

SEQ ID NO: 30968 - protein, 37 aa, Artificial Sequence
  GFR-binding peptide
  MOD_RES (4), (5): Xaa is C or S
  MOD_RES (19), (20), (21), (22), (23): Xaa is A or G
  MOD_RES (24), (25), (26), (27): Xaa is A or G or is absent
PKPXXAPTKLSPISVLYIXXXXXXXXXYKQYENMVVR

SEQ ID NO: 30969 - protein, 33 aa, Artificial Sequence; identical to SEQ ID NO: 9572
  GFR-binding peptide
  MOD_RES (1), (1): Xaa is C or S
  MOD_RES (15), (16), (17), (18), (19): Xaa is A or G
  MOD_RES (20), (21), (22), (23): Xaa is A or G or is absent

SEQ ID NO: 30970 - protein, 41 aa, Artificial Sequence
  GFR-binding peptide
  MOD_RES (6), (7), (41): Xaa is C or S
  MOD_RES (21), (22), (23), (24), (25): Xaa is A or G
  MOD_RES (26), (27), (28), (29): Xaa is A or G or is absent
AAPASXXVPARLSPISILYKXXXXXXXXXLKYHYDMVVEAX

SEQ ID NO: 30971 - protein, 38 aa, Artificial Sequence
  GFR-binding peptide
  MOD_RES (3), (4), (38): Xaa is C or S
  MOD_RES (18), (19), (20), (21), (22): Xaa is A or G
  MOD_RES (23), (24), (25), (26): Xaa is A or G or is absent
ASXXVPARLNAISILYFXXXXXXXXXLKKYRDMVVEAX

SEQ ID NO: 30972 - protein, 38 aa, Artificial Sequence; identical to SEQ ID NO: 9577
  GFR-binding peptide
  MOD_RES (4), (5), (37): Xaa is C or S

SEQ ID NO: 30973 - protein, 42 aa, Artificial Sequence
  GFR-binding peptide
  MOD_RES (6), (7), (40), (42): Xaa is C or S
  MOD_RES (21), (22), (23), (24), (25): Xaa is A or G
  MOD_RES (26), (27), (28), (29): Xaa is A or G or is absent
ASAAPXXVPQALSPISILYIXXXXXXXXXYKQYEMIVRSXKX

SEQ ID NO: 30974 - protein, 38 aa, Artificial Sequence; identical to SEQ ID NO: 9578
  GFR-binding peptide
  MOD_RES (4), (5), (38): Xaa is C or S
  MOD_RES (19), (20), (21), (22), (23): Xaa is A or G
  MOD_RES (24), (25), (26), (27): Xaa is A or G or is absent

SEQ ID NO: 30975 - protein, 34 aa, Artificial Sequence; identical to SEQ ID NO: 9579
  GFR-binding peptide
  MOD_RES (3), (4): Xaa is C or S

SEQ ID NO: 30976 - protein, 41 aa, Artificial Sequence; identical to SEQ ID NO: 9580
  GFR-binding peptide
  MOD_RES (6), (7), (41): Xaa is C or S
  MOD_RES (21), (22), (23), (24), (25): Xaa is A or G
  MOD_RES (26), (27), (28), (29): Xaa is A or G or is absent

SEQ ID NO: 30977 - protein, 37 aa, Artificial Sequence; identical to SEQ ID NO: 9581
  GFR-binding peptide
  MOD_RES (4), (5): Xaa is C or S
  MOD_RES (19), (20), (21), (22), (23): Xaa is A or G
  MOD_RES (24), (25), (26), (27): Xaa is A or G or is absent

SEQ ID NO: 30978 - protein, 39 aa, Artificial Sequence
  GFR-binding peptide
  MOD_RES (4), (36), (38): Xaa is C or S
KPTXAPTKLEPISVLYLDDSSNVIKFKYENMVVRSXGXH

SEQ ID NO: 30979 - protein, 38 aa, Artificial Sequence; identical to SEQ ID NO: 9583
  GFR-binding peptide
  MOD_RES (6), (7): Xaa is C or S

SEQ ID NO: 30980 - protein, 32 aa, Artificial Sequence; identical to SEQ ID NO: 9584
  GFR-binding peptide
  MOD_RES (31), (31): Xaa is C or S

SEQ ID NO: 30981 - protein, 39 aa, Artificial Sequence; identical to SEQ ID NO: 9585
  GFR-binding peptide
  MOD_RES (5), (6), (39): Xaa is C or S

SEQ ID NO: 30982 - protein, 39 aa, Artificial Sequence
  GFR-binding peptide
  MOD_RES (5), (39): Xaa is C or S
  MOD_RES (19), (20), (21), (22), (23): Xaa is A or G
  MOD_RES (24), (25), (26), (27): Xaa is A or G or is absent
TKPTXAPTKLEPISVLYLXXXXXXXXXKFKYENMVVRSX

SEQ ID NO: 30983 - protein, 40 aa, Artificial Sequence
  GFR-binding peptide
  MOD_RES (2), (3), (37), (39): Xaa is C or S
  MOD_RES (17), (18), (19), (20), (21): Xaa is A or G
  MOD_RES (22), (23), (24), (25): Xaa is A or G or is absent
AXXAPTKLEPISVLYLXXXXXXXXXKFKYENMVVKAXGXH

SEQ ID NO: 30984 - protein, 30 aa, Artificial Sequence; identical to SEQ ID NO: 9588
  GFR-binding peptide

SEQ ID NO: 30985 - protein, 37 aa, Artificial Sequence; identical to SEQ ID NO: 9590
  GFR-binding peptide
  MOD_RES (2), (3), (35), (37): Xaa is C or S

SEQ ID NO: 30986 - protein, 36 aa, Artificial Sequence; identical to SEQ ID NO: 9592
  GFR-binding peptide
  MOD_RES (1), (35): Xaa is C or S
  MOD_RES (15), (16), (17), (18), (19): Xaa is A or G
  MOD_RES (20), (21), (22), (23): Xaa is A or G or is absent

SEQ ID NO: 30987 - protein, 40 aa, Artificial Sequence; identical to SEQ ID NO: 9593
  GFR-binding peptide
  MOD_RES (5), (6), (40): Xaa is C or S
  MOD_RES (20), (21), (22), (23), (24): Xaa is A or G
  MOD_RES (25), (26), (27), (28): Xaa is A or G or is absent

SEQ ID NO: 30988 - protein, 34 aa, Artificial Sequence
  GFR-binding peptide
  MOD_RES (1), (1): Xaa is C or S
  MOD_RES (15), (16), (17), (18), (19): Xaa is A or G
  MOD_RES (20), (21), (22), (23): Xaa is A or G or is absent
XVPTELSPISMLYIXXXXXXXXXYKQYEEMVVEG

SEQ ID NO: 30989 - protein, 32 aa, Artificial Sequence; identical to SEQ ID NO: 9595
  GFR-binding peptide
  MOD_RES (14), (15), (16), (17), (18): Xaa is A or G
  MOD_RES (19), (20), (21), (22): Xaa is A or G or is absent

SEQ ID NO: 30990 - protein, 35 aa, Artificial Sequence
  GFR-binding peptide
  MOD_RES (3), (3): Xaa is C or S
  MOD_RES (17), (18), (19), (20), (21): Xaa is A or G
  MOD_RES (22), (23), (24), (25): Xaa is A or G or is absent
PTXAPTKLEPISVLYLXXXXXXXXXKFKYENMVVR

SEQ ID NO: 30991 - protein, 42 aa, Artificial Sequence; identical to SEQ ID NO: 9598
  GFR-binding peptide
  MOD_RES (6), (7), (40), (42): Xaa is C or S
  MOD_RES (21), (22), (23), (24), (25): Xaa is A or G
  MOD_RES (26), (27), (28), (29): Xaa is A or G or is absent

SEQ ID NO: 30992 - protein, 37 aa, Artificial Sequence
  GFR-binding peptide
  MOD_RES (2), (3), (35), (37): Xaa is C or S
SXXVPARLNAISILYFDAANNVVLKKYRDMVVEAXGX

SEQ ID NO: 30993 - protein, 40 aa, Artificial Sequence
  GFR-binding peptide
  MOD_RES (3), (4), (38), (40): Xaa is C or S
  MOD_RES (18), (19), (20), (21), (22): Xaa is A or G
  MOD_RES (23), (24), (25), (26): Xaa is A or G or is absent
KAXXVPTELSPISMLYIXXXXXXXXXYKQYEDMVVEGXGX

SEQ ID NO: 30994 - protein, 34 aa, Artificial Sequence
  GFR-binding peptide
  MOD_RES (1), (34): Xaa is C or S
XVPTKLSPISVLYIDDMGVPTYKQYEEGMSVAEX

SEQ ID NO: 30995 - protein, 37 aa, Artificial Sequence; identical to SEQ ID NO: 9602
  GFR-binding peptide
  MOD_RES (4), (5), (37): Xaa is C or S

SEQ ID NO: 30996 - protein, 33 aa, Artificial Sequence; identical to SEQ ID NO: 9603
  GFR-binding peptide
  MOD_RES (1), (2): Xaa is C or S

SEQ ID NO: 30997 - protein, 39 aa, Artificial Sequence; identical to SEQ ID NO: 9604
  GFR-binding peptide
  MOD_RES (4), (5), (37), (39): Xaa is C or S

SEQ ID NO: 30998 - protein, 33 aa, Artificial Sequence
  GFR-binding peptide
  MOD_RES (32), (32): Xaa is C or S
VPARLNAISILYFDAANNVVLKKYRDMVVEAXG

SEQ ID NO: 30999 - protein, 33 aa, Artificial Sequence
  GFR-binding peptide
  MOD_RES (2), (3): Xaa is C or S
AXXVPTELSPISMLYIDENEKVVYKQYEDMVVE

SEQ ID NO: 31000 - protein, 35 aa, Artificial Sequence; identical to SEQ ID NO: 9606
  GFR-binding peptide
  MOD_RES (2), (3): Xaa is C or S
  MOD_RES (17), (18), (19), (20), (21): Xaa is A or G
  MOD_RES (22), (23), (24), (25): Xaa is A or G or is absent

SEQ ID NO: 31001 - protein, 36 aa, Artificial Sequence; identical to SEQ ID NO: 9607
  GFR-binding peptide
  MOD_RES (3), (4), (36): Xaa is C or S

SEQ ID NO: 31002 - protein, 35 aa, Artificial Sequence
  GFR-binding peptide
  MOD_RES (33), (35): Xaa is C or S
VPTKLEPISVLYLDDMGVPTKFKYEEGMSVAEXGX

SEQ ID NO: 31003 - protein, 32 aa, Artificial Sequence
  GFR-binding peptide
  MOD_RES (32), (32): Xaa is C or S
VPTKLSPISILYIDKGVVTYYKQYEGMAVSEX

SEQ ID NO: 31004 - protein, 38 aa, Artificial Sequence
  GFR-binding peptide
  MOD_RES (5), (6), (38): Xaa is C or S
VPKAXXAPTKLSPISVLYIDSSNNVIYKQYENMVVKAX

SEQ ID NO: 31005 - protein, 35 aa, Artificial Sequence
  GFR-binding peptide
  MOD_RES (1), (34): Xaa is C or S
  MOD_RES (15), (16), (17), (18), (19): Xaa is A or G
  MOD_RES (20), (21), (22), (23): Xaa is A or G or is absent
XVPQALSPISILYIXXXXXXXXXYKQYEMIVRSXK

SEQ ID NO: 31006 - protein, 36 aa, Artificial Sequence
  GFR-binding peptide
  MOD_RES (2), (3), (36): Xaa is C or S
  MOD_RES (17), (18), (19), (20), (21): Xaa is A or G
  MOD_RES (22), (23), (24), (25): Xaa is A or G or is absent
PXXVPQALSPISILYIXXXXXXXXXYKQYEMIVRSX

SEQ ID NO: 31007 - protein, 34 aa, Artificial Sequence
  GFR-binding peptide
  MOD_RES (1), (2): Xaa is C or S
  MOD_RES (16), (17), (18), (19), (20): Xaa is A or G
  MOD_RES (21), (22), (23), (24): Xaa is A or G or is absent
XXVSQDLEPISILYLXXXXXXXXXKFKYEMIVKS

SEQ ID NO: 31008 - protein, 41 aa, Artificial Sequence; identical to SEQ ID NO: 9610
  GFR-binding peptide
  MOD_RES (5), (6), (40): Xaa is C or S
  MOD_RES (20), (21), (22), (23), (24): Xaa is A or G
  MOD_RES (25), (26), (27), (28): Xaa is A or G or is absent

SEQ ID NO: 31009 - protein, 38 aa, Artificial Sequence
  GFR-binding peptide
  MOD_RES (2), (3), (37): Xaa is C or S
  MOD_RES (17), (18), (19), (20), (21): Xaa is A or G
  MOD_RES (22), (23), (24), (25): Xaa is A or G or is absent
PXXAPTKLEPISVLYLXXXXXXXXXKFKYENMVVRSXG

SEQ ID NO: 31010 - protein, 39 aa, Artificial Sequence; identical to SEQ ID NO: 9613
  GFR-binding peptide
  MOD_RES (5), (6), (39): Xaa is C or S
  MOD_RES (20), (21), (22), (23), (24): Xaa is A or G
  MOD_RES (25), (26), (27), (28): Xaa is A or G or is absent

SEQ ID NO: 31011 - protein, 40 aa, Artificial Sequence
  GFR-binding peptide
  MOD_RES (3), (4), (38), (40): Xaa is C or S
  MOD_RES (18), (19), (20), (21), (22): Xaa is A or G
  MOD_RES (23), (24), (25), (26): Xaa is A or G or is absent
KAXXAPTKLSPISVLYIXXXXXXXXXYKQYENMVVKAXGX

SEQ ID NO: 31012 - protein, 39 aa, Artificial Sequence
  GFR-binding peptide
  MOD_RES (5), (6), (37), (39): Xaa is C or S
SAAPXXVPQALEPISILYLVGRKPKVKFKYEMIVRSXKX

SEQ ID NO: 31013 - protein, 33 aa, Artificial Sequence
  GFR-binding peptide
  MOD_RES (2), (2): Xaa is C or S
TXAPTKLSPISVLYIDDSSNVIYKQYENMVVRS

SEQ ID NO: 31014 - protein, 42 aa, Artificial Sequence; identical to SEQ ID NO: 9614
  GFR-binding peptide
  MOD_RES (6), (7), (41): Xaa is C or S
  MOD_RES (21), (22), (23), (24), (25): Xaa is A or G
  MOD_RES (26), (27), (28), (29): Xaa is A or G or is absent

SEQ ID NO: 31015 - protein, 33 aa, Artificial Sequence
  GFR-binding peptide
  MOD_RES (1), (1): Xaa is C or S
  MOD_RES (15), (16), (17), (18), (19): Xaa is A or G
  MOD_RES (20), (21), (22), (23): Xaa is A or G or is absent
XAPTQLSPISVLYIXXXXXXXXXYKQYENMVVR

SEQ ID NO: 31016 - protein, 32 aa, Artificial Sequence
  GFR-binding peptide
  MOD_RES (32), (32): Xaa is C or S
APTKLEPISVLYLDSSNNVIKFKYENMVVKAX

SEQ ID NO: 31017 - protein, 38 aa, Artificial Sequence
  GFR-binding peptide
  MOD_RES (1), (35), (37): Xaa is C or S
  MOD_RES (15), (16), (17), (18), (19): Xaa is A or G
  MOD_RES (20), (21), (22), (23): Xaa is A or G or is absent
XVPTKLSPISILYIXXXXXXXXXYKQYEGMAVSEXGXR

SEQ ID NO: 31018 - protein, 39 aa, Artificial Sequence
  GFR-binding peptide
  MOD_RES (4), (5), (37), (39): Xaa is C or S
PKPXXAPTQLEPISVLYLDDSSNVIKFKYENMVVRAXGX

SEQ ID NO: 31019 - protein, 35 aa, Artificial Sequence
  GFR-binding peptide
  MOD_RES (4), (5): Xaa is C or S
SKAXXVPTKLSPISILYKDKGVVTYLKYHYGMAVS

SEQ ID NO: 31020 - protein, 37 aa, Artificial Sequence
  GFR-binding peptide
  MOD_RES (3), (4), (36): Xaa is C or S
KAXXAPTKLEPISVLYLDSSNNVIKFKYENMVVKAXG

SEQ ID NO: 31021 - protein, 38 aa, Artificial Sequence
  GFR-binding peptide
  MOD_RES (3), (4), (36), (38): Xaa is C or S
KPXXAPTQLEPISVLYLDDSSNVIKFKYENMVVRAXGX

SEQ ID NO: 31022 - protein, 35 aa, Artificial Sequence; identical to SEQ ID NO: 9621
  GFR-binding peptide
  MOD_RES (1), (2): Xaa is C or S
  MOD_RES (16), (17), (18), (19), (20): Xaa is A or G
  MOD_RES (21), (22), (23), (24): Xaa is A or G or is absent

SEQ ID NO: 31023 - protein, 40 aa, Artificial Sequence; identical to SEQ ID NO: 9622
  GFR-binding peptide
  MOD_RES (4), (5), (38), (40): Xaa is C or S
  MOD_RES (19), (20), (21), (22), (23): Xaa is A or G
  MOD_RES (24), (25), (26), (27): Xaa is A or G or is absent

SEQ ID NO: 31024 - protein, 40 aa, Artificial Sequence
  GFR-binding peptide
  MOD_RES (6), (7), (39): Xaa is C or S
SIPKAXXVPTELEPISMLYLDEYDKVVKFKYEEMVVEGXG

SEQ ID NO: 31025 - protein, 36 aa, Artificial Sequence
  GFR-binding peptide
  MOD_RES (2), (3), (34), (36): Xaa is C or S
PXXVSQDLEPISILYLIGKTPKIKFKYEMIVKSXKX

SEQ ID NO: 31026 - protein, 36 aa, Artificial Sequence; identical to SEQ ID NO: 9625
  GFR-binding peptide
  MOD_RES (1), (2), (33), (35): Xaa is C or S

SEQ ID NO: 31027 - protein, 34 aa, Artificial Sequence
  GFR-binding peptide
  MOD_RES (1), (1): Xaa is C or S
  MOD_RES (15), (16), (17), (18), (19): Xaa is A or G
  MOD_RES (20), (21), (22), (23): Xaa is A or G or is absent
XAPTQLEPISVLYLXXXXXXXXXKFKYENMVVRA

SEQ ID NO: 31028 - protein, 36 aa, Artificial Sequence
  GFR-binding peptide
  MOD_RES (2), (3), (35): Xaa is C or S
PXXAPTQLEPISVLYLDDSSNVIKFKYENMVVRAXG

SEQ ID NO: 31029 - protein, 39 aa, Artificial Sequence; identical to SEQ ID NO: 9626
  GFR-binding peptide
  MOD_RES (4), (5), (39): Xaa is C or S
  MOD_RES (19), (20), (21), (22), (23): Xaa is A or G
  MOD_RES (24), (25), (26), (27): Xaa is A or G or is absent

SEQ ID NO: 31030 - protein, 33 aa, Artificial Sequence
  GFR-binding peptide
  MOD_RES (1), (2): Xaa is C or S
XXAPTKLSPISVLYIDSSNNVIYKQYENMVVKA

SEQ ID NO: 31031 - protein, 39 aa, Artificial Sequence
  GFR-binding peptide
  MOD_RES (1), (2), (36), (38): Xaa is C or S
  MOD_RES (16), (17), (18), (19), (20): Xaa is A or G
  MOD_RES (21), (22), (23), (24): Xaa is A or G or is absent
XXAPTKLEPISVLYLXXXXXXXXXKFKYENMVVKAXGXH

SEQ ID NO: 31032 - protein, 36 aa, Artificial Sequence
  GFR-binding peptide
  MOD_RES (3), (4), (35): Xaa is C or S
SPXXVSQDLSPISILYIIGKTPKIYKQYEMIVKSXK

SEQ ID NO: 31033 - protein, 37 aa, Artificial Sequence
  GFR-binding peptide
  MOD_RES (34), (36): Xaa is C or S
  MOD_RES (14), (15), (16), (17), (18): Xaa is A or G
  MOD_RES (19), (20), (21), (22): Xaa is A or G or is absent
APTQLEPISVLYLXXXXXXXXXKFKYENMVVRAXGXH

SEQ ID NO: 31034 - protein, 37 aa, Artificial Sequence
  GFR-binding peptide
  MOD_RES (1), (2), (36): Xaa is C or S
  MOD_RES (16), (17), (18), (19), (20): Xaa is A or G
  MOD_RES (21), (22), (23), (24): Xaa is A or G or is absent
XXVPARLSPISILYKXXXXXXXXXLKYHYDMVVEAXG

SEQ ID NO: 31035 - protein, 35 aa, Artificial Sequence
  GFR-binding peptide
  MOD_RES (1), (34): Xaa is C or S
XVPTKLEPISVLYLDDMGVPTKFKYEEGMSVAEXG

SEQ ID NO: 31036 - protein, 35 aa, Artificial Sequence
  GFR-binding peptide
  MOD_RES (1), (32), (34): Xaa is C or S
XVSQDLSPISILYIIGKTPKIYKQYEMIVKSXKXS

SEQ ID NO: 31037 - protein, 36 aa, Artificial Sequence; identical to SEQ ID NO: 9632
  GFR-binding peptide
  MOD_RES (4), (5): Xaa is C or S

SEQ ID NO: 31038 - protein, 43 aa, Artificial Sequence
  GFR-binding peptide
  MOD_RES (7), (41), (43): Xaa is C or S
  MOD_RES (21), (22), (23), (24), (25): Xaa is A or G
  MOD_RES (26), (27), (28), (29): Xaa is A or G or is absent
HVTKPTXAPTKLSPISVLYIXXXXXXXXXYKQYENMVVRSXGX

SEQ ID NO: 31039 - protein, 39 aa, Artificial Sequence; identical to SEQ ID NO: 9633
  GFR-binding peptide
  MOD_RES (3), (37), (39): Xaa is C or S
  MOD_RES (17), (18), (19), (20), (21): Xaa is A or G
  MOD_RES (22), (23), (24), (25): Xaa is A or G or is absent

SEQ ID NO: 31040 - protein, 36 aa, Artificial Sequence
  GFR-binding peptide
  MOD_RES (4), (5): Xaa is C or S
PKAXXVPTELEPISMLYLDEYDKVVKFKYEEMVVEG

SEQ ID NO: 31041 - protein, 33 aa, Artificial Sequence; identical to SEQ ID NO: 9634
  GFR-binding peptide
  MOD_RES (32), (32): Xaa is C or S

SEQ ID NO: 31042 - protein, 37 aa, Artificial Sequence
  GFR-binding peptide
  MOD_RES (4), (36): Xaa is C or S
KPTXAPTKLSPISVLYIDDSSNVIYKQYENMVVRSXG

SEQ ID NO: 31043 - protein, 32 aa, Artificial Sequence
  GFR-binding peptide
  MOD_RES (1), (2): Xaa is C or S
XXVSQDLSPISILYIIGKTPKIYKQYEMIVKS

SEQ ID NO: 31044 - protein, 36 aa, Artificial Sequence
  GFR-binding peptide
  MOD_RES (3), (4): Xaa is C or S
  MOD_RES (18), (19), (20), (21), (22): Xaa is A or G
  MOD_RES (23), (24), (25), (26): Xaa is A or G or is absent
KPXXAPTKLEPISVLYLXXXXXXXXXKFKYENMVVR

SEQ ID NO: 31045 - protein, 36 aa, Artificial Sequence
  GFR-binding peptide
  MOD_RES (2), (3), (35): Xaa is C or S
PXXAPTKLEPISVLYLDDSSNVIKFKYENMVVRSXG

SEQ ID NO: 31046 - protein, 36 aa, Artificial Sequence
  GFR-binding peptide
  MOD_RES (2), (3), (35): Xaa is C or S
AXXVPTELSPISMLYIDEYDKVVYKQYEEMVVEGXG

SEQ ID NO: 31047 - protein, 42 aa, Artificial Sequence; identical to SEQ ID NO: 9642
  GFR-binding peptide
  MOD_RES (4), (5), (40), (42): Xaa is C or S
  MOD_RES (19), (20), (21), (22), (23): Xaa is A or G
  MOD_RES (24), (25), (26), (27): Xaa is A or G or is absent

SEQ ID NO: 31048 - protein, 34 aa, Artificial Sequence; identical to SEQ ID NO: 9643
  GFR-binding peptide
  MOD_RES (1), (1): Xaa is C or S
  MOD_RES (15), (16), (17), (18), (19): Xaa is A or G
  MOD_RES (20), (21), (22), (23): Xaa is A or G or is absent

SEQ ID NO: 31049 - protein, 37 aa, Artificial Sequence; identical to SEQ ID NO: 9645
  GFR-binding peptide
  MOD_RES (34), (36): Xaa is C or S
  MOD_RES (14), (15), (16), (17), (18): Xaa is A or G
  MOD_RES (19), (20), (21), (22): Xaa is A or G or is absent

SEQ ID NO: 31050 - protein, 39 aa, Artificial Sequence; identical to SEQ ID NO: 9646
  GFR-binding peptide
  MOD_RES (2), (3), (37), (39): Xaa is C or S
  MOD_RES (17), (18), (19), (20), (21): Xaa is A or G
  MOD_RES (22), (23), (24), (25): Xaa is A or G or is absent

SEQ ID NO: 31051 - protein, 41 aa, Artificial Sequence; identical to SEQ ID NO: 9647
  GFR-binding peptide
  MOD_RES (5), (6), (38), (40): Xaa is C or S

SEQ ID NO: 31052 - protein, 41 aa, Artificial Sequence
  GFR-binding peptide
  MOD_RES (6), (7): Xaa is C or S
  MOD_RES (21), (22), (23), (24), (25): Xaa is A or G
  MOD_RES (26), (27), (28), (29): Xaa is A or G or is absent
KVGKAXXVPTKLSPISVLYIXXXXXXXXXYKQYEEGMSVAE

SEQ ID NO: 31053 - protein, 35 aa, Artificial Sequence
  GFR-binding peptide
  MOD_RES (1), (35): Xaa is C or S
  MOD_RES (15), (16), (17), (18), (19): Xaa is A or G
  MOD_RES (20), (21), (22), (23): Xaa is A or G or is absent
XVPARLSPISILYIXXXXXXXXXYKQYEDMVVEAX

SEQ ID NO: 31054 - protein, 32 aa, Artificial Sequence; identical to SEQ ID NO: 9650
  GFR-binding peptide
  MOD_RES (31), (31): Xaa is C or S

SEQ ID NO: 31055 - protein, 42 aa, Artificial Sequence; identical to SEQ ID NO: 9652
  GFR-binding peptide
  MOD_RES (6), (7), (40), (42): Xaa is C or S
  MOD_RES (21), (22), (23), (24), (25): Xaa is A or G
  MOD_RES (26), (27), (28), (29): Xaa is A or G or is absent

SEQ ID NO: 31056 - protein, 36 aa, Artificial Sequence
  GFR-binding peptide
  MOD_RES (35), (35): Xaa is C or S
  MOD_RES (14), (15), (16), (17), (18): Xaa is A or G
  MOD_RES (19), (20), (21), (22): Xaa is A or G or is absent
VPTKLSPISVLYIXXXXXXXXXYKQYEEGMSVAEXG

SEQ ID NO: 31057 - protein, 36 aa, Artificial Sequence
  GFR-binding peptide
  MOD_RES (4), (36): Xaa is C or S
KPTXAPTKLSPISVLYIDDSSNVIYKQYENMVVRSX

SEQ ID NO: 31058 - protein, 39 aa, Artificial Sequence
  GFR-binding peptide
  MOD_RES (4), (5), (37), (39): Xaa is C or S
PKAXXVPTELSPISMLYIDENEKVVYKQYEDMVVEGXGX

SEQ ID NO: 31059 - protein, 41 aa, Artificial Sequence; identical to SEQ ID NO: 9655
  GFR-binding peptide
  MOD_RES (6), (7), (41): Xaa is C or S
  MOD_RES (21), (22), (23), (24), (25): Xaa is A or G
  MOD_RES (26), (27), (28), (29): Xaa is A or G or is absent

SEQ ID NO: 31060 - protein, 39 aa, Artificial Sequence
  GFR-binding peptide
  MOD_RES (6), (7), (39): Xaa is C or S
AVPKAXXAPTKLSPISVLYIDSSNNVIYKQYENMVVKAX

SEQ ID NO: 31061 - protein, 33 aa, Artificial Sequence
  GFR-binding peptide
  MOD_RES (1), (2): Xaa is C or S
XXVPARLNAISILYFDAANNVVLKKYRDMVVEA

SEQ ID NO: 31062 - protein, 35 aa, Artificial Sequence
  GFR-binding peptide
  MOD_RES (1), (2): Xaa is C or S
  MOD_RES (16), (17), (18), (19), (20): Xaa is A or G
  MOD_RES (21), (22), (23), (24): Xaa is A or G or is absent
XXAPTQLEPISVLYLXXXXXXXXXKFKYENMVVRA

SEQ ID NO: 31063 - protein, 35 aa, Artificial Sequence; identical to SEQ ID NO: 9660
  GFR-binding peptide
  MOD_RES (4), (5): Xaa is C or S

SEQ ID NO: 31064 - protein, 39 aa, Artificial Sequence
  GFR-binding peptide
  MOD_RES (5), (6), (38): Xaa is C or S
ASKAXXVPTKLSPISILYKDKGVVTYLKYHYGMAVSEXG

SEQ ID NO: 31065 - protein, 36 aa, Artificial Sequence; identical to SEQ ID NO: 9661
  GFR-binding peptide
  MOD_RES (3), (4), (36): Xaa is C or S

SEQ ID NO: 31066 - protein, 42 aa, Artificial Sequence
  GFR-binding peptide
  MOD_RES (6), (7), (40), (42): Xaa is C or S
  MOD_RES (21), (22), (23), (24), (25): Xaa is A or G
  MOD_RES (26), (27), (28), (29): Xaa is A or G or is absent
ASASPXXVSQDLSPISILYIXXXXXXXXXYKQYEMIVKSXKX

SEQ ID NO: 31067 - protein, 43 aa, Artificial Sequence; identical to SEQ ID NO: 9662
  GFR-binding peptide
  MOD_RES (5), (6), (40), (42): Xaa is C or S
  MOD_RES (20), (21), (22), (23), (24): Xaa is A or G
  MOD_RES (25), (26), (27), (28): Xaa is A or G or is absent

SEQ ID NO: 31068 - protein, 38 aa, Artificial Sequence
  GFR-binding peptide
  MOD_RES (6), (6): Xaa is C or S
  MOD_RES (20), (21), (22), (23), (24): Xaa is A or G
  MOD_RES (25), (26), (27), (28): Xaa is A or G or is absent
VTKPTXAPTKLEPISVLYLXXXXXXXXXKFKYENMVVR

SEQ ID NO: 31069 - protein, 37 aa, Artificial Sequence
  GFR-binding peptide
  MOD_RES (1), (2), (34), (36): Xaa is C or S
XXVPTKLSPISILYKDKGVVTYLKYHYGMAVSEXGXR

SEQ ID NO: 31070 - protein, 37 aa, Artificial Sequence; identical to SEQ ID NO: 9664
  GFR-binding peptide
  MOD_RES (2), (3), (37): Xaa is C or S
  MOD_RES (17), (18), (19), (20), (21): Xaa is A or G
  MOD_RES (22), (23), (24), (25): Xaa is A or G or is absent

SEQ ID NO: 31071 - protein, 40 aa, Artificial Sequence
  GFR-binding peptide
  MOD_RES (7), (39): Xaa is C or S
HVTKPTXAPTKLEPISVLYLDDSSNVIKFKYENMVVRSXG

SEQ ID NO: 31072 - protein, 35 aa, Artificial Sequence
  GFR-binding peptide
  MOD_RES (2), (2): Xaa is C or S
  MOD_RES (16), (17), (18), (19), (20): Xaa is A or G
  MOD_RES (21), (22), (23), (24): Xaa is A or G or is absent
TXAPTKLSPISVLYIXXXXXXXXXYKQYENMVVRS

SEQ ID NO: 31073 - protein, 35 aa, Artificial Sequence
  GFR-binding peptide
  MOD_RES (33), (35): Xaa is C or S
VPTKLSPISVLYIDDMGVPTYKQYEEGMSVAEXGX

SEQ ID NO: 31074 - protein, 38 aa, Artificial Sequence
  GFR-binding peptide
  MOD_RES (5), (6): Xaa is C or S
  MOD_RES (20), (21), (22), (23), (24): Xaa is A or G
  MOD_RES (25), (26), (27), (28): Xaa is A or G or is absent
SAAPXXVPQALEPISILYLXXXXXXXXXKFKYEMIVRS

SEQ ID NO: 31075 - protein, 35 aa, Artificial Sequence; identical to SEQ ID NO: 9666
  GFR-binding peptide
  MOD_RES (2), (3), (34): Xaa is C or S

SEQ ID NO: 31076 - protein, 34 aa, Artificial Sequence
  GFR-binding peptide
  MOD_RES (34), (34): Xaa is C or S
  MOD_RES (14), (15), (16), (17), (18): Xaa is A or G
  MOD_RES (19), (20), (21), (22): Xaa is A or G or is absent
VPARLSPISILYIXXXXXXXXXYKQYEDMVVEAX

SEQ ID NO: 31077 - protein, 39 aa, Artificial Sequence
  GFR-binding peptide
  MOD_RES (6), (7), (39): Xaa is C or S
YVPKPXXAPTKLSPISVLYIDDSSNVIYKQYENMVVRSX

SEQ ID NO: 31078 - protein, 39 aa, Artificial Sequence
  GFR-binding peptide
  MOD_RES (2), (3), (37), (39): Xaa is C or S
  MOD_RES (17), (18), (19), (20), (21): Xaa is A or G
  MOD_RES (22), (23), (24), (25): Xaa is A or G or is absent
SXXVPARLSPISILYIXXXXXXXXXYKQYEDMVVEAXGX

SEQ ID NO: 31079 - protein, 36 aa, Artificial Sequence
  GFR-binding peptide
  MOD_RES (2), (3), (35): Xaa is C or S
AXXAPTKLSPISVLYIDSSNNVIYKQYENMVVKAXG

SEQ ID NO: 31080 - protein, 38 aa, Artificial Sequence; identical to SEQ ID NO: 9671
  GFR-binding peptide
  MOD_RES (3), (4), (36), (38): Xaa is C or S

SEQ ID NO: 31081 - protein, 31 aa, Artificial Sequence
  GFR-binding peptide
  MOD_RES (1), (1): Xaa is C or S
XVPARLEPISILYLDAANNVVKFKYEDMVVE

SEQ ID NO: 31082 - protein, 36 aa, Artificial Sequence
  GFR-binding peptide
  MOD_RES (2), (3): Xaa is C or S
  MOD_RES (17), (18), (19), (20), (21): Xaa is A or G
  MOD_RES (22), (23), (24), (25): Xaa is A or G or is absent
SXXVPARLEPISILYLXXXXXXXXXKFKYEDMVVEA

SEQ ID NO: 31083 - protein, 33 aa, Artificial Sequence; identical to SEQ ID NO: 9674
  GFR-binding peptide
  MOD_RES (1), (2), (33): Xaa is C or S

SEQ ID NO: 31084 - protein, 36 aa, Artificial Sequence; identical to SEQ ID NO: 9678
  GFR-binding peptide
  MOD_RES (1), (35): Xaa is C or S
  MOD_RES (15), (16), (17), (18), (19): Xaa is A or G
  MOD_RES (20), (21), (22), (23): Xaa is A or G or is absent

SEQ ID NO: 31085 - protein, 40 aa, Artificial Sequence
  GFR-binding peptide
  MOD_RES (6), (7), (40): Xaa is C or S
  MOD_RES (21), (22), (23), (24), (25): Xaa is A or G
  MOD_RES (26), (27), (28), (29): Xaa is A or G or is absent
ASASPXXVSQDLSPISILYIXXXXXXXXXYKQYEMIVKSX

SEQ ID NO: 31086 - protein, 34 aa, Artificial Sequence
  GFR-binding peptide
  MOD_RES (1), (34): Xaa is C or S
  MOD_RES (15), (16), (17), (18), (19): Xaa is A or G
  MOD_RES (20), (21), (22), (23): Xaa is A or G or is absent
XVPQDLSPISILYIXXXXXXXXXYKQYEMVVKSX

SEQ ID NO: 31087 - protein, 36 aa, Artificial Sequence; identical to SEQ ID NO: 9682
  GFR-binding peptide
  MOD_RES (1), (2), (34), (36): Xaa is C or S

SEQ ID NO: 31088 - protein, 41 aa, Artificial Sequence
  GFR-binding peptide
  MOD_RES (6), (7), (41): Xaa is C or S
  MOD_RES (21), (22), (23), (24), (25): Xaa is A or G
  MOD_RES (26), (27), (28), (29): Xaa is A or G or is absent
KASKAXXVPTKLSPISILYKXXXXXXXXXLKYHYGMAVSEX

SEQ ID NO: 31089 - protein, 36 aa, Artificial Sequence; identical to SEQ ID NO: 9683
  GFR-binding peptide
  MOD_RES (5), (6): Xaa is C or S

SEQ ID NO: 31090 - protein, 38 aa, Artificial Sequence; identical to SEQ ID NO: 9685
  GFR-binding peptide
  MOD_RES (3), (4), (38): Xaa is C or S
  MOD_RES (18), (19), (20), (21), (22): Xaa is A or G
  MOD_RES (23), (24), (25), (26): Xaa is A or G or is absent

SEQ ID NO: 31091 - protein, 40 aa, Artificial Sequence
  GFR-binding peptide
  MOD_RES (5), (6), (38), (40): Xaa is C or S
VPKPXXAPTQLEPISVLYLDDSSNVIKFKYENMVVRAXGX

SEQ ID NO: 31092 - protein, 34 aa, Artificial Sequence
  GFR-binding peptide
  MOD_RES (1), (2): Xaa is C or S
  MOD_RES (16), (17), (18), (19), (20): Xaa is A or G
  MOD_RES (21), (22), (23), (24): Xaa is A or G or is absent
XXVPTELEPISMLYLXXXXXXXXXKFKYEEMVVE

SEQ ID NO: 31093 - protein, 35 aa, Artificial Sequence
  GFR-binding peptide
  MOD_RES (1), (33), (35): Xaa is C or S
XAPTQLSPISVLYIDDSSNVIYKQYENMVVRAXGX

SEQ ID NO: 31094 - protein, 41 aa, Artificial Sequence; identical to SEQ ID NO: 9689
  GFR-binding peptide
  MOD_RES (6), (7), (40): Xaa is C or S
  MOD_RES (21), (22), (23), (24), (25): Xaa is A or G
  MOD_RES (26), (27), (28), (29): Xaa is A or G or is absent

SEQ ID NO: 31095 - protein, 34 aa, Artificial Sequence
  GFR-binding peptide
  MOD_RES (1), (1): Xaa is C or S
  MOD_RES (15), (16), (17), (18), (19): Xaa is A or G
  MOD_RES (20), (21), (22), (23): Xaa is A or G or is absent
XVPTELEPISMLYLXXXXXXXXXKFKYEDMVVEG

SEQ ID NO: 31096 - protein, 37 aa, Artificial Sequence; identical to SEQ ID NO: 9690
  GFR-binding peptide
  MOD_RES (4), (5): Xaa is C or S
  MOD_RES (19), (20), (21), (22), (23): Xaa is A or G
  MOD_RES (24), (25), (26), (27): Xaa is A or G or is absent

SEQ ID NO: 31097 - protein, 40 aa, Artificial Sequence
  GFR-binding peptide
  MOD_RES (2), (3), (37), (39): Xaa is C or S
  MOD_RES (17), (18), (19), (20), (21): Xaa is A or G
  MOD_RES (22), (23), (24), (25): Xaa is A or G or is absent
AXXVPTKLEPISILYLXXXXXXXXXKFKYEGMAVSEXGXR

SEQ ID NO: 31098 - protein, 42 aa, Artificial Sequence; identical to SEQ ID NO: 9692
  GFR-binding peptide
  MOD_RES (6), (7), (40), (42): Xaa is C or S

SEQ ID NO: 31099 - protein, 41 aa, Artificial Sequence
  GFR-binding peptide
  MOD_RES (3), (4), (38), (40): Xaa is C or S
  MOD_RES (18), (19), (20), (21), (22): Xaa is A or G
  MOD_RES (23), (24), (25), (26): Xaa is A or G or is absent
KAXXAPTKLSPISVLYIXXXXXXXXXYKQYENMVVKAXGXH

SEQ ID NO: 31100 - protein, 40 aa, Artificial Sequence
  GFR-binding peptide
  MOD_RES (4), (5), (40): Xaa is C or S
  MOD_RES (19), (20), (21), (22), (23): Xaa is A or G
  MOD_RES (24), (25), (26), (27): Xaa is A or G or is absent
GKAXXVPTKLEPISVLYLXXXXXXXXXKFKYEEGMSVAEX

SEQ ID NO: 31101 - protein, 30 aa, Artificial Sequence; identical to SEQ ID NO: 9695
  GFR-binding peptide

SEQ ID NO: 31102 - protein, 40 aa, Artificial Sequence; identical to SEQ ID NO: 9696
  GFR-binding peptide
  MOD_RES (6), (7): Xaa is C or S
  MOD_RES (21), (22), (23), (24), (25): Xaa is A or G
  MOD_RES (26), (27), (28), (29): Xaa is A or G or is absent

SEQ ID NO: 31103 - protein, 34 aa, Artificial Sequence; identical to SEQ ID NO: 9698
  GFR-binding peptide
  MOD_RES (14), (15), (16), (17), (18): Xaa is A or G
  MOD_RES (19), (20), (21), (22): Xaa is A or G or is absent

SEQ ID NO: 31104 - protein, 32 aa, Artificial Sequence
  GFR-binding peptide
  MOD_RES (1), (2): Xaa is C or S
XXVPARLEPISILYLDAANNVVKFKYEDMVVE

SEQ ID NO: 31105 - protein, 35 aa, Artificial Sequence
  GFR-binding peptide
  MOD_RES (32), (34): Xaa is C or S
VPTKLSPISILYIDKGVVTYYKQYEGMAVSEXGXR

SEQ ID NO: 31106 - protein, 44 aa, Artificial Sequence; identical to SEQ ID NO: 9699
  GFR-binding peptide
  MOD_RES (6), (7), (41), (43): Xaa is C or S
  MOD_RES (21), (22), (23), (24), (25): Xaa is A or G
  MOD_RES (26), (27), (28), (29): Xaa is A or G or is absent

SEQ ID NO: 31107 - protein, 35 aa, Artificial Sequence; identical to SEQ ID NO: 9700
  GFR-binding peptide
  MOD_RES (2), (3): Xaa is C or S
  MOD_RES (17), (18), (19), (20), (21): Xaa is A or G
  MOD_RES (22), (23), (24), (25): Xaa is A or G or is absent

SEQ ID NO: 31108 - protein, 39 aa, Artificial Sequence; identical to SEQ ID NO: 9701
  GFR-binding peptide
  MOD_RES (5), (6): Xaa is C or S
  MOD_RES (20), (21), (22), (23), (24): Xaa is A or G
  MOD_RES (25), (26), (27), (28): Xaa is A or G or is absent

SEQ ID NO: 31109 - protein, 39 aa, Artificial Sequence
  GFR-binding peptide
  MOD_RES (2), (3), (37), (39): Xaa is C or S
  MOD_RES (17), (18), (19), (20), (21): Xaa is A or G
  MOD_RES (22), (23), (24), (25): Xaa is A or G or is absent
PXXAPTKLEPISVLYLXXXXXXXXXKFKYENMVVRSXGX

SEQ ID NO: 31110 - protein, 37 aa, Artificial Sequence; identical to SEQ ID NO: 9702
  GFR-binding peptide
  MOD_RES (4), (5): Xaa is C or S
  MOD_RES (19), (20), (21), (22), (23): Xaa is A or G
  MOD_RES (24), (25), (26), (27): Xaa is A or G or is absent

SEQ ID NO: 31111 - protein, 38 aa, Artificial Sequence
  GFR-binding peptide
  MOD_RES (2), (3), (36), (38): Xaa is C or S
  MOD_RES (17), (18), (19), (20), (21): Xaa is A or G
  MOD_RES (22), (23), (24), (25): Xaa is A or G or is absent
PXXVPQALEPISILYLXXXXXXXXXKFKYEMIVRSXKX

SEQ ID NO: 31112 - protein, 33 aa, Artificial Sequence
  GFR-binding peptide
  MOD_RES (14), (15), (16), (17), (18): Xaa is A or G
  MOD_RES (19), (20), (21), (22): Xaa is A or G or is absent
VPTKLEPISILYLXXXXXXXXXKFKYEGMAVSE

SEQ ID NO: 31113 - protein, 36 aa, Artificial Sequence
  GFR-binding peptide
  MOD_RES (3), (4): Xaa is C or S
  MOD_RES (18), (19), (20), (21), (22): Xaa is A or G
  MOD_RES (23), (24), (25), (26): Xaa is A or G or is absent
KAXXVPTELEPISMLYLXXXXXXXXXKFKYEDMVVE

SEQ ID NO: 31114 - protein, 38 aa, Artificial Sequence
  GFR-binding peptide
  MOD_RES (2), (3), (35), (37): Xaa is C or S
AXXVPTKLNAISILYFDKGVVTYLKKYRGMAVSEXGXR

SEQ ID NO: 31115 - protein, 37 aa, Artificial Sequence
  GFR-binding peptide
  MOD_RES (2), (3), (34), (36): Xaa is C or S
PXXVPQALEPISILYLVGRKPKVKFKYEMIVRSXKXS

SEQ ID NO: 31116 - protein, 39 aa, Artificial Sequence
  GFR-binding peptide
  MOD_RES (3), (4), (36), (38): Xaa is C or S
ASXXVPARLEPISILYLDAANNVVKFKYEDMVVEAXGXR

SEQ ID NO: 31117 - protein, 38 aa, Artificial Sequence; identical to SEQ ID NO: 9704
  GFR-binding peptide
  MOD_RES (2), (3), (38): Xaa is C or S
  MOD_RES (17), (18), (19), (20), (21): Xaa is A or G
  MOD_RES (22), (23), (24), (25): Xaa is A or G or is absent

SEQ ID NO: 31118 - protein, 34 aa, Artificial Sequence
  GFR-binding peptide
  MOD_RES (1), (2): Xaa is C or S
  MOD_RES (16), (17), (18), (19), (20): Xaa is A or G
  MOD_RES (21), (22), (23), (24): Xaa is A or G or is absent
XXVPQALEPISILYLXXXXXXXXXKFKYEMIVRS

SEQ ID NO: 31119 - protein, 35 aa, Artificial Sequence
  GFR-binding peptide
  MOD_RES (34), (34): Xaa is C or S
  MOD_RES (14), (15), (16), (17), (18): Xaa is A or G
  MOD_RES (19), (20), (21), (22): Xaa is A or G or is absent
VPTKLSPISILYKXXXXXXXXXLKYHYGMAVSEXG

SEQ ID NO: 31120 - protein, 37 aa, Artificial Sequence; identical to SEQ ID NO: 9705
  GFR-binding peptide
  MOD_RES (4), (36): Xaa is C or S

SEQ ID NO: 31121 - protein, 33 aa, Artificial Sequence; identical to SEQ ID NO: 9706
  GFR-binding peptide
  MOD_RES (31), (33): Xaa is C or S

SEQ ID NO: 31122 - protein, 39 aa, Artificial Sequence
  GFR-binding peptide
  MOD_RES (6), (7), (39): Xaa is C or S
AAPASXXVPARLEPISILYLDAANNVVKFKYEDMVVEAX

SEQ ID NO: 31123 - protein, 39 aa, Artificial Sequence; identical to SEQ ID NO: 9708
  GFR-binding peptide
  MOD_RES (6), (7): Xaa is C or S
  MOD_RES (21), (22), (23), (24), (25): Xaa is A or G
  MOD_RES (26), (27), (28), (29): Xaa is A or G or is absent

SEQ ID NO: 31124 - protein, 40 aa, Artificial Sequence; identical to SEQ ID NO: 9709
  GFR-binding peptide
  MOD_RES (5), (6), (39): Xaa is C or S
  MOD_RES (20), (21), (22), (23), (24): Xaa is A or G
  MOD_RES (25), (26), (27), (28): Xaa is A or G or is absent

SEQ ID NO: 31125 - protein, 31 aa, Artificial Sequence
  GFR-binding peptide
  MOD_RES (31), (31): Xaa is C or S
VPQDLSPISILYIVGRTPKVYKQYEMVVKSX

SEQ ID NO: 31126 - protein, 45 aa, Artificial Sequence
  GFR-binding peptide
  MOD_RES (6), (7), (42), (44): Xaa is C or S
  MOD_RES (21), (22), (23), (24), (25): Xaa is A or G
  MOD_RES (26), (27), (28), (29): Xaa is A or G or is absent
KVGKAXXVPTKLEPISVLYLXXXXXXXXXKFKYEEGMSVAEXGXR

SEQ ID NO: 31127 - protein, 32 aa, Artificial Sequence
  GFR-binding peptide
  MOD_RES (1), (2): Xaa is C or S
XXVPQDLSPISILYIVGRTPKVYKQYEMVVKS

SEQ ID NO: 31128 - protein, 42 aa, Artificial Sequence; identical to SEQ ID NO: 9715
  GFR-binding peptide
  MOD_RES (6), (7), (41): Xaa is C or S
  MOD_RES (21), (22), (23), (24), (25): Xaa is A or G
  MOD_RES (26), (27), (28), (29): Xaa is A or G or is absent

SEQ ID NO: 31129 - protein, 35 aa, Artificial Sequence
  GFR-binding peptide
  MOD_RES (1), (2): Xaa is C or S
  MOD_RES (16), (17), (18), (19), (20): Xaa is A or G
  MOD_RES (21), (22), (23), (24): Xaa is A or G or is absent
XXVPTELSPISMLYIXXXXXXXXXYKQYEEMVVEG

SEQ ID NO: 31130 - protein, 43 aa, Artificial Sequence
  GFR-binding peptide
  MOD_RES (6), (7), (40), (42): Xaa is C or S
  MOD_RES (21), (22), (23), (24), (25): Xaa is A or G
  MOD_RES (26), (27), (28), (29): Xaa is A or G or is absent
ASASPXXVSQDLSPISILYIXXXXXXXXXYKQYEMIVKSXKXS

SEQ ID NO: 31131 - protein, 34 aa, Artificial Sequence; identical to SEQ ID NO: 9718
  GFR-binding peptide
  MOD_RES (2), (3): Xaa is C or S

SEQ ID NO: 31132 - protein, 34 aa, Artificial Sequence; identical to SEQ ID NO: 9719
  GFR-binding peptide
  MOD_RES (1), (2): Xaa is C or S
  MOD_RES (16), (17), (18), (19), (20): Xaa is A or G
  MOD_RES (21), (22), (23), (24): Xaa is A or G or is absent

SEQ ID NO: 31133 - protein, 39 aa, Artificial Sequence
  GFR-binding peptide
  MOD_RES (4), (36), (38): Xaa is C or S
KPTXAPTKLSPISVLYIDDSSNVIYKQYENMVVRSXGXH

SEQ ID NO: 31134 - protein, 33 aa, Artificial Sequence
  GFR-binding peptide
  MOD_RES (2), (3): Xaa is C or S
SXXVPARLNAISILYFDAANNVVLKKYRDMVVE

SEQ ID NO: 31135 - protein, 37 aa, Artificial Sequence; identical to SEQ ID NO: 9721
  GFR-binding peptide
  MOD_RES (4), (5), (37): Xaa is C or S

SEQ ID NO: 31136 - protein, 37 aa, Artificial Sequence; identical to SEQ ID NO: 9722
  GFR-binding peptide
  MOD_RES (1), (2), (36): Xaa is C or S
  MOD_RES (16), (17), (18), (19), (20): Xaa is A or G
  MOD_RES (21), (22), (23), (24): Xaa is A or G or is absent

SEQ ID NO: 31137 - protein, 38 aa, Artificial Sequence
  GFR-binding peptide
  MOD_RES (3), (4): Xaa is C or S
  MOD_RES (18), (19), (20), (21), (22): Xaa is A or G
  MOD_RES (23), (24), (25), (26): Xaa is A or G or is absent
KAXXVPTKLSPISVLYIXXXXXXXXXYKQYEEGMSVAE

SEQ ID NO: 31138 - protein, 38 aa, Artificial Sequence; identical to SEQ ID NO: 9723
  GFR-binding peptide
  MOD_RES (3), (4), (36), (38): Xaa is C or S

SEQ ID NO: 31139 - protein, 34 aa, Artificial Sequence
  GFR-binding peptide
  MOD_RES (33), (33): Xaa is C or S
  MOD_RES (14), (15), (16), (17), (18): Xaa is A or G
  MOD_RES (19), (20), (21), (22): Xaa is A or G or is absent
VPQALSPISILYIXXXXXXXXXYKQYEMIVRSXK

SEQ ID NO: 31140 - protein, 34 aa, Artificial Sequence; identical to SEQ ID NO: 9724
  GFR-binding peptide
  MOD_RES (1), (2): Xaa is C or S
  MOD_RES (16), (17), (18), (19), (20): Xaa is A or G
  MOD_RES (21), (22), (23), (24): Xaa is A or G or is absent

SEQ ID NO: 31141 - protein, 38 aa, Artificial Sequence; identical to SEQ ID NO: 9725
  GFR-binding peptide
  MOD_RES (5), (37): Xaa is C or S

SEQ ID NO: 31142 - protein, 39 aa, Artificial Sequence
  GFR-binding peptide
  MOD_RES (6), (6): Xaa is C or S
  MOD_RES (20), (21), (22), (23), (24): Xaa is A or G
  MOD_RES (25), (26), (27), (28): Xaa is A or G or is absent
VTKPTXAPTKLEPISVLYLXXXXXXXXXKFKYENMVVRS

SEQ ID NO: 31143 - protein, 44 aa, Artificial Sequence; identical to SEQ ID NO: 9727
  GFR-binding peptide
  MOD_RES (7), (41), (43): Xaa is C or S
  MOD_RES (21), (22), (23), (24), (25): Xaa is A or G
  MOD_RES (26), (27), (28), (29): Xaa is A or G or is absent

SEQ ID NO: 31144 - protein, 31 aa, Artificial Sequence
  GFR-binding peptide
  MOD_RES (31), (31): Xaa is C or S
VSQDLSPISILYIIGKTPKIYKQYEMIVKSX

SEQ ID NO: 31145 - protein, 40 aa, Artificial Sequence; identical to SEQ ID NO: 9731
  GFR-binding peptide
  MOD_RES (6), (7), (39): Xaa is C or S

SEQ ID NO: 31146 - protein, 33 aa, Artificial Sequence; identical to SEQ ID NO: 9732
  GFR-binding peptide
  MOD_RES (14), (15), (16), (17), (18): Xaa is A or G
  MOD_RES (19), (20), (21), (22): Xaa is A or G or is absent

SEQ ID NO: 31147 - protein, 36 aa, Artificial Sequence
  GFR-binding peptide
  MOD_RES (2), (3): Xaa is C or S
  MOD_RES (17), (18), (19), (20), (21): Xaa is A or G
  MOD_RES (22), (23), (24), (25): Xaa is A or G or is absent
AXXVPTKLSPISILYKXXXXXXXXXLKYHYGMAVSE

SEQ ID NO: 31148 - protein, 36 aa, Artificial Sequence
  GFR-binding peptide
  MOD_RES (1), (2), (34), (36): Xaa is C or S
XXAPTKLEPISVLYLDDSSNVIKFKYENMVVRSXGX

SEQ ID NO: 31149 - protein, 41 aa, Artificial Sequence
  GFR-binding peptide
  MOD_RES (6), (7), (40): Xaa is C or S
KVGKAXXVPTKLEPISVLYLDDMGVPTKFKYEEGMSVAEXG

SEQ ID NO: 31150 - protein, 38 aa, Artificial Sequence
  GFR-binding peptide
  MOD_RES (3), (4), (38): Xaa is C or S
  MOD_RES (18), (19), (20), (21), (22): Xaa is A or G
  MOD_RES (23), (24), (25), (26): Xaa is A or G or is absent
KPXXAPTQLSPISVLYIXXXXXXXXXYKQYENMVVRAX

SEQ ID NO: 31151 - protein, 40 aa, Artificial Sequence
  GFR-binding peptide
  MOD_RES (3), (4), (37), (39): Xaa is C or S
KAXXVPTKLEPISVLYLDDMGVPTKFKYEEGMSVAEXGXR

SEQ ID NO: 31152 - protein, 39 aa, Artificial Sequence
  GFR-binding peptide
  MOD_RES (4), (5), (38): Xaa is C or S
GKAXXVPTKLSPISVLYIDDMGVPTYKQYEEGMSVAEXG

SEQ ID NO: 31153 - protein, 35 aa, Artificial Sequence
  GFR-binding peptide
  MOD_RES (1), (34): Xaa is C or S
  MOD_RES (15), (16), (17), (18), (19): Xaa is A or G
  MOD_RES (20), (21), (22), (23): Xaa is A or G or is absent
XVSQDLEPISILYLXXXXXXXXXKFKYEMIVKSXK

SEQ ID NO: 31154 - protein, 35 aa, Artificial Sequence
  GFR-binding peptide
  MOD_RES (1), (2), (35): Xaa is C or S
  MOD_RES (16), (17), (18), (19), (20): Xaa is A or G
  MOD_RES (21), (22), (23), (24): Xaa is A or G or is absent
XXVSQDLSPISILYIXXXXXXXXXYKQYEMIVKSX

SEQ ID NO: 31155 - protein, 40 aa, Artificial Sequence; identical to SEQ ID NO: 9741
  GFR-binding peptide
  MOD_RES (4), (5), (38), (40): Xaa is C or S
  MOD_RES (19), (20), (21), (22), (23): Xaa is A or G
  MOD_RES (24), (25), (26), (27): Xaa is A or G or is absent

SEQ ID NO: 31156 - protein, 37 aa, Artificial Sequence
  GFR-binding peptide
  MOD_RES (6), (7): Xaa is C or S
AAPASXXVPARLEPISILYLDAANNVVKFKYEDMVVE

SEQ ID NO: 31157 - protein, 37 aa, Artificial Sequence; identical to SEQ ID NO: 9743
  GFR-binding peptide
  MOD_RES (4), (5), (36): Xaa is C or S

SEQ ID NO: 31158 - protein, 42 aa, Artificial Sequence
  GFR-binding peptide
  MOD_RES (4), (5), (39), (41): Xaa is C or S
  MOD_RES (19), (20), (21), (22), (23): Xaa is A or G
  MOD_RES (24), (25), (26), (27): Xaa is A or G or is absent
PKAXXAPTKLEPISVLYLXXXXXXXXXKFKYENMVVKAXGXH

SEQ ID NO: 31159 - protein, 34 aa, Artificial Sequence; identical to SEQ ID NO: 9747
  GFR-binding peptide
  MOD_RES (1), (2): Xaa is C or S
  MOD_RES (16), (17), (18), (19), (20): Xaa is A or G
  MOD_RES (21), (22), (23), (24): Xaa is A or G or is absent

SEQ ID NO: 31160 - protein, 41 aa, Artificial Sequence
  GFR-binding peptide
  MOD_RES (6), (7), (39), (41): Xaa is C or S
YVPKPXXAPTKLEPISVLYLDDSSNVIKFKYENMVVRSXGX

SEQ ID NO: 31161 - protein, 36 aa, Artificial Sequence
  GFR-binding peptide
  MOD_RES (34), (36): Xaa is C or S
  MOD_RES (14), (15), (16), (17), (18): Xaa is A or G
  MOD_RES (19), (20), (21), (22): Xaa is A or G or is absent
APTKLEPISVLYLXXXXXXXXXKFKYENMVVRSXGX

SEQ ID NO: 31162 - protein, 38 aa, Artificial Sequence
  GFR-binding peptide
  MOD_RES (2), (3), (35), (37): Xaa is C or S
AXXVPTELSPISMLYIDEYDKVVYKQYEEMVVEGXGXR

SEQ ID NO: 31163 - protein, 37 aa, Artificial Sequence; identical to SEQ ID NO: 9749
  GFR-binding peptide
  MOD_RES (3), (4), (37): Xaa is C or S
  MOD_RES (18), (19), (20), (21), (22): Xaa is A or G
  MOD_RES (23), (24), (25), (26): Xaa is A or G or is absent

SEQ ID NO: 31164 - protein, 37 aa, Artificial Sequence
  GFR-binding peptide
  MOD_RES (4), (5): Xaa is C or S
  MOD_RES (19), (20), (21), (22), (23): Xaa is A or G
  MOD_RES (24), (25), (26), (27): Xaa is A or G or is absent
ASPXXVPQDLSPISILYIXXXXXXXXXYKQYEMVVKS

SEQ ID NO: 31165 - protein, 40 aa, Artificial Sequence
  GFR-binding peptide
  MOD_RES (5), (6), (40): Xaa is C or S
  MOD_RES (20), (21), (22), (23), (24): Xaa is A or G
  MOD_RES (25), (26), (27), (28): Xaa is A or G or is absent
APASXXVPARLSPISILYKXXXXXXXXXLKYHYDMVVEAX

SEQ ID NO: 31166 - protein, 38 aa, Artificial Sequence
  GFR-binding peptide
  MOD_RES (3), (4), (36), (38): Xaa is C or S
KAXXVPTELSPISMLYIDENEKVVYKQYEDMVVEGXGX

SEQ ID NO: 31167 - protein, 39 aa, Artificial Sequence
  GFR-binding peptide
  MOD_RES (7), (7): Xaa is C or S
  MOD_RES (21), (22), (23), (24), (25): Xaa is A or G
  MOD_RES (26), (27), (28), (29): Xaa is A or G or is absent
HVTKPTXAPTKLEPISVLYLXXXXXXXXXKFKYENMVVR

SEQ ID NO: 31168 - protein, 42 aa, Artificial Sequence
  GFR-binding peptide
  MOD_RES (5), (6), (40), (42): Xaa is C or S
  MOD_RES (20), (21), (22), (23), (24): Xaa is A or G
  MOD_RES (25), (26), (27), (28): Xaa is A or G or is absent
VPKPXXAPTQLSPISVLYIXXXXXXXXXYKQYENMVVRAXGX

SEQ ID NO: 31169 - protein, 36 aa, Artificial Sequence; identical to SEQ ID NO: 9751
  GFR-binding peptide
  MOD_RES (34), (36): Xaa is C or S
  MOD_RES (14), (15), (16), (17), (18): Xaa is A or G
  MOD_RES (19), (20), (21), (22): Xaa is A or G or is absent

SEQ ID NO: 31170 - protein, 40 aa, Artificial Sequence
  GFR-binding peptide
  MOD_RES (4), (5), (37), (39): Xaa is C or S
PASXXVPARLNAISILYFDAANNVVLKKYRDMVVEAXGXR

SEQ ID NO: 31171 - protein, 33 aa, Artificial Sequence
  GFR-binding peptide
  MOD_RES (1), (2): Xaa is C or S
XXVPTKLSPISILYKDKGVVTYLKYHYGMAVSE

SEQ ID NO: 31172 - protein, 38 aa, Artificial Sequence
  GFR-binding peptide
  MOD_RES (2), (3), (35), (37): Xaa is C or S
AXXVPTELEPISMLYLDEYDKVVKFKYEEMVVEGXGXR

SEQ ID NO: 31173 - protein, 38 aa, Artificial Sequence; identical to SEQ ID NO: 9756
  GFR-binding peptide
  MOD_RES (1), (35), (37): Xaa is C or S
  MOD_RES (15), (16), (17), (18), (19): Xaa is A or G
  MOD_RES (20), (21), (22), (23): Xaa is A or G or is absent

SEQ ID NO: 31174 - protein, 37 aa, Artificial Sequence
  GFR-binding peptide
  MOD_RES (1), (2), (34), (36): Xaa is C or S
XXAPTKLSPISVLYIDSSNNVIYKQYENMVVKAXGXH

SEQ ID NO: 31175 - protein, 38 aa, Artificial Sequence
  GFR-binding peptide
  MOD_RES (1), (2), (35), (37): Xaa is C or S
XXVPTKLSPISVLYIDDMGVPTYKQYEEGMSVAEXGXR

SEQ ID NO: 31176 - protein, 37 aa, Artificial Sequence; identical to SEQ ID NO: 9757
  GFR-binding peptide
  MOD_RES (1), (34), (36): Xaa is C or S
  MOD_RES (15), (16), (17), (18), (19): Xaa is A or G
  MOD_RES (20), (21), (22), (23): Xaa is A or G or is absent

SEQ ID NO: 31177 - protein, 36 aa, Artificial Sequence
  GFR-binding peptide
  MOD_RES (4), (5): Xaa is C or S
PKPXXAPTKLSPISVLYIDDSSNVIYKQYENMVVRS

SEQ ID NO: 31178 - protein, 39 aa, Artificial Sequence
  GFR-binding peptide
  MOD_RES (1), (2), (36), (38): Xaa is C or S
  MOD_RES (16), (17), (18), (19), (20): Xaa is A or G
  MOD_RES (21), (22), (23), (24): Xaa is A or G or is absent
XXVPARLNAISILYFXXXXXXXXXLKKYRDMVVEAXGXR

SEQ ID NO: 31179 - protein, 34 aa, Artificial Sequence
  GFR-binding peptide
  MOD_RES (32), (34): Xaa is C or S
VPARLNAISILYFDAANNVVLKKYRDMVVEAXGX

SEQ ID NO: 31180 - protein, 34 aa, Artificial Sequence
  GFR-binding peptide
  MOD_RES (3), (4): Xaa is C or S
KPXXAPTKLSPISVLYIDDSSNVIYKQYENMVVR

SEQ ID NO: 31181 - protein, 30 aa, Artificial Sequence
  GFR-binding peptide
APTQLSPISVLYIDDSSNVIYKQYENMVVR

SEQ ID NO: 31182 - protein, 40 aa, Artificial Sequence
  GFR-binding peptide
  MOD_RES (6), (7), (39): Xaa is C or S
TVPKPXXAPTQLEPISVLYLDDSSNVIKFKYENMVVRAXG

SEQ ID NO: 31183 - protein, 36 aa, Artificial Sequence; identical to SEQ ID NO: 9760
  GFR-binding peptide
  MOD_RES (6), (6): Xaa is C or S

SEQ ID NO: 31184 - protein, 42 aa, Artificial Sequence
  GFR-binding peptide
  MOD_RES (5), (6), (39), (41): Xaa is C or S
  MOD_RES (20), (21), (22), (23), (24): Xaa is A or G
  MOD_RES (25), (26), (27), (28): Xaa is A or G or is absent
SAAPXXVPQALSPISILYIXXXXXXXXXYKQYEMIVRSXKXS

SEQ ID NO: 31185 - protein, 34 aa, Artificial Sequence
  GFR-binding peptide
  MOD_RES (3), (3): Xaa is C or S
PTXAPTKLEPISVLYLDDSSNVIKFKYENMVVRS

SEQ ID NO: 31186 - protein, 38 aa, Artificial Sequence
  GFR-binding peptide
  MOD_RES (5), (37): Xaa is C or S
TKPTXAPTKLSPISVLYIDDSSNVIYKQYENMVVRSXG

SEQ ID NO: 31187 - protein, 36 aa, Artificial Sequence; identical to SEQ ID NO: 9768
  GFR-binding peptide
  MOD_RES (2), (3), (35): Xaa is C or S

SEQ ID NO: 31188 - protein, 35 aa, Artificial Sequence; identical to SEQ ID NO: 9770
  GFR-binding peptide
  MOD_RES (1), (32), (34): Xaa is C or S

SEQ ID NO: 31189 - protein, 36 aa, Artificial Sequence; identical to SEQ ID NO: 9771
  GFR-binding peptide
  MOD_RES (2), (3), (36): Xaa is C or S
  MOD_RES (17), (18), (19), (20), (21): Xaa is A or G
  MOD_RES (22), (23), (24), (25): Xaa is A or G or is absent

SEQ ID NO: 31190 - protein, 36 aa, Artificial Sequence; identical to SEQ ID NO: 9772
  GFR-binding peptide
  MOD_RES (1), (2), (36): Xaa is C or S
  MOD_RES (16), (17), (18), (19), (20): Xaa is A or G
  MOD_RES (21), (22), (23), (24): Xaa is A or G or is absent

SEQ ID NO: 31191 - protein, 39 aa, Artificial Sequence; identical to SEQ ID NO: 9773
  GFR-binding peptide
  MOD_RES (3), (4), (36), (38): Xaa is C or S

SEQ ID NO: 31192 - protein, 38 aa, Artificial Sequence
  GFR-binding peptide
  MOD_RES (3), (4), (37): Xaa is C or S
  MOD_RES (18), (19), (20), (21), (22): Xaa is A or G
  MOD_RES (23), (24), (25), (26): Xaa is A or G or is absent
SPXXVPQDLSPISILYIXXXXXXXXXYKQYEMVVKSXK

SEQ ID NO: 31193 - protein, 36 aa, Artificial Sequence
  GFR-binding peptide
  MOD_RES (1), (35): Xaa is C or S
  MOD_RES (15), (16), (17), (18), (19): Xaa is A or G
  MOD_RES (20), (21), (22), (23): Xaa is A or G or is absent
XVPTELEPISMLYLXXXXXXXXXKFKYEEMVVEGXG

SEQ ID NO: 31194 - protein, 40 aa, Artificial Sequence
  GFR-binding peptide
  MOD_RES (5), (6), (37), (39): Xaa is C or S
SASPXXVPQDLEPISILYLVGRTPKVKFKYEMVVKSXKXS

SEQ ID NO: 31195 - protein, 37 aa, Artificial Sequence
  GFR-binding peptide
  MOD_RES (6), (7): Xaa is C or S
ASASPXXVSQDLSPISILYIIGKTPKIYKQYEMIVKS

SEQ ID NO: 31196 - protein, 37 aa, Artificial Sequence
  GFR-binding peptide
  MOD_RES (3), (4), (36): Xaa is C or S
KAXXVPTELEPISMLYLDEYDKVVKFKYEEMVVEGXG

SEQ ID NO: 31197 - protein, 33 aa, Artificial Sequence; identical to SEQ ID NO: 9775
  GFR-binding peptide
  MOD_RES (2), (3): Xaa is C or S

SEQ ID NO: 31198 - protein, 34 aa, Artificial Sequence
  GFR-binding peptide
  MOD_RES (1), (34): Xaa is C or S
  MOD_RES (15), (16), (17), (18), (19): Xaa is A or G
  MOD_RES (20), (21), (22), (23): Xaa is A or G or is absent
XVPQALSPISILYIXXXXXXXXXYKQYEMIVRSX

SEQ ID NO: 31199 - protein, 39 aa, Artificial Sequence
  GFR-binding peptide
  MOD_RES (1), (33), (34): Xaa is C or S
XSEVVMDPIKGYVVNNASDFYLINIPSLRTPVXXTPPTS

SEQ ID NO: 31200 - protein, 35 aa, Artificial Sequence
  GFR-binding peptide
  MOD_RES (31), (32): Xaa is C or S
DVVMGPIKGYIIQQKDNFYLMNIPSMKTPTXXPGA

SEQ ID NO: 31201 - protein, 43 aa, Artificial Sequence
  GFR-binding peptide
  MOD_RES (1), (3), (37), (38): Xaa is C or S
  MOD_RES (15), (16), (17), (18), (19): Xaa is A or G
  MOD_RES (20), (21), (22), (23): Xaa is A or G or is absent
XGXRDVVMGPIKGYXXXXXXXXXFYLMNIPSMKTPTXXPGASG

SEQ ID NO: 31202 - protein, 40 aa, Artificial Sequence
  GFR-binding peptide
  MOD_RES (34), (35): Xaa is C or S
  MOD_RES (12), (13), (14), (15), (16): Xaa is A or G
  MOD_RES (17), (18), (19), (20): Xaa is A or G or is absent
ARVVMNPIKGYXXXXXXXXXFYLVNIPSLQTPAXXPKPVT

SEQ ID NO: 31203 - protein, 37 aa, Artificial Sequence
  GFR-binding peptide
  MOD_RES (32), (33): Xaa is C or S
GEVVMDPIKGYVVKENEDFYLMNIPSLETPVXXAKPI

SEQ ID NO: 31204 - protein, 40 aa, Artificial Sequence
  GFR-binding peptide
  MOD_RES (1), (3), (37), (38): Xaa is C or S
  MOD_RES (15), (16), (17), (18), (19): Xaa is A or G
  MOD_RES (20), (21), (22), (23): Xaa is A or G or is absent
XGXAEVVMDPIKGYXXXXXXXXXFYLINIPSLRAPVXXSA

SEQ ID NO: 31205 - protein, 32 aa, Artificial Sequence
  GFR-binding peptide
  MOD_RES (2), (2): Xaa is C or S
GXEEVIMPIKGYLLVRGNDFYLMNIPSTKVPA

SEQ ID NO: 31206 - protein, 35 aa, Artificial Sequence
  GFR-binding peptide
  MOD_RES (32), (33): Xaa is C or S
SEVVMDPIKGYVVNNASDFYLINIPSLRTPVXXTP

SEQ ID NO: 31207 - protein, 42 aa, Artificial Sequence
  GFR-binding peptide
  MOD_RES (1), (3), (37), (38): Xaa is C or S
  MOD_RES (15), (16), (17), (18), (19): Xaa is A or G
  MOD_RES (20), (21), (22), (23): Xaa is A or G or is absent
XGXSEVVMDPIKGYXXXXXXXXXFYLINIPSLRTPVXXTPPT

SEQ ID NO: 31208 - protein, 39 aa, Artificial Sequence
  GFR-binding peptide
  MOD_RES (2), (4), (36), (37): Xaa is C or S
RXGXESVAMGPIKGYYTVVGKDFYLINIPSLKTPVXXAK

SEQ ID NO: 31209 - protein, 40 aa, Artificial Sequence
  GFR-binding peptide
  MOD_RES (1), (3), (35), (36): Xaa is C or S
XGXRDVVMGPIKGYIIQQKDNFYLMNIPSMKTPTXXPGAS

SEQ ID NO: 31210 - protein, 41 aa, Artificial Sequence
  GFR-binding peptide
  MOD_RES (1), (3), (37), (38): Xaa is C or S
  MOD_RES (15), (16), (17), (18), (19): Xaa is A or G
  MOD_RES (20), (21), (22), (23): Xaa is A or G or is absent
XGXSRVVMNPIKGYXXXXXXXXXFYLVNIPSLKTPAXXPKP

SEQ ID NO: 31211 - protein, 35 aa, Artificial Sequence
  GFR-binding peptide
  MOD_RES (1), (33), (34): Xaa is C or S
XGEVVMDPIKGYVVKENEDFYLMNIPSLETPVXXA

SEQ ID NO: 31212 - protein, 33 aa, Artificial Sequence
  GFR-binding peptide
  MOD_RES (1), (33): Xaa is C or S
XRDVVMGPIKGYIIQQKDNFYLMNIPSMKTPTX

SEQ ID NO: 31213 - protein, 35 aa, Artificial Sequence
  GFR-binding peptide
  MOD_RES (34), (35): Xaa is C or S
  MOD_RES (12), (13), (14), (15), (16): Xaa is A or G
  MOD_RES (17), (18), (19), (20): Xaa is A or G or is absent
ESVAMGPIKGYXXXXXXXXXFYLINIPSLKTPVXX

SEQ ID NO: 31214 - protein, 40 aa, Artificial Sequence
  GFR-binding peptide
  MOD_RES (1), (3), (35), (36): Xaa is C or S
XGXESVAMGPIKGYYTVVGKDFYLINIPSLKTPVXXAKSA

SEQ ID NO: 31215 - protein, 37 aa, Artificial Sequence
  GFR-binding peptide
  MOD_RES (2), (34): Xaa is C or S
GXSRVVMNPIKGYIVNSSDDFYLVNIPSLKTPAXTPK

SEQ ID NO: 31216 - protein, 40 aa, Artificial Sequence
  GFR-binding peptide
  MOD_RES (34), (34): Xaa is C or S
  MOD_RES (12), (13), (14), (15), (16): Xaa is A or G
  MOD_RES (17), (18), (19), (20): Xaa is A or G or is absent
SRVVMNPIKGYXXXXXXXXXFYLVNIPSLKTPAXTPKTVH

SEQ ID NO: 31217 - protein, 37 aa, Artificial Sequence
  GFR-binding peptide
  MOD_RES (34), (35): Xaa is C or S
  MOD_RES (12), (13), (14), (15), (16): Xaa is A or G
  MOD_RES (17), (18), (19), (20): Xaa is A or G or is absent
RDVVMGPIKGYXXXXXXXXXFYLMNIPSMKTPTXXPG

SEQ ID NO: 31218 - protein, 34 aa, Artificial Sequence
  GFR-binding peptide
  MOD_RES (2), (34): Xaa is C or S
GXSRVVMNPIKGYIVNSSDDFYLVNIPSLKTPAX

SEQ ID NO: 31219 - protein, 41 aa, Artificial Sequence
  GFR-binding peptide
  MOD_RES (1), (3), (37), (38): Xaa is C or S
  MOD_RES (15), (16), (17), (18), (19): Xaa is A or G
  MOD_RES (20), (21), (22), (23): Xaa is A or G or is absent
XGXESVAMGPIKGYXXXXXXXXXFYLINIPSLKTPVXXAKS

SEQ ID NO: 31220 - protein, 40 aa, Artificial Sequence
  GFR-binding peptide
  MOD_RES (1), (35), (36): Xaa is C or S
  MOD_RES (13), (14), (15), (16), (17): Xaa is A or G
  MOD_RES (18), (19), (20), (21): Xaa is A or G or is absent
XESVAMGPIKGYXXXXXXXXXFYLINIPSLKTPVXXAKSA

SEQ ID NO: 31221 - protein, 35 aa, Artificial Sequence
  GFR-binding peptide
  MOD_RES (32), (33): Xaa is C or S
GEVVMDPIKGYVVKENEDFYLMNIPSLETPVXXAK

SEQ ID NO: 31222 - protein, 38 aa, Artificial Sequence
  GFR-binding peptide
  MOD_RES (2), (34), (35): Xaa is C or S
GXRDVVMGPIKGYIIQQKDNFYLMNIPSMKTPTXXPGA

SEQ ID NO: 31223 - protein, 36 aa, Artificial Sequence
  GFR-binding peptide
  MOD_RES (31), (32): Xaa is C or S
EVVMDPIKGYVVNNASDFYLINIPSLRTPVXXTPPT

SEQ ID NO: 31224 - protein, 39 aa, Artificial Sequence
  GFR-binding peptide
  MOD_RES (2), (4), (38), (39): Xaa is C or S
  MOD_RES (16), (17), (18), (19), (20): Xaa is A or G
  MOD_RES (21), (22), (23), (24): Xaa is A or G or is absent
RXGXAEVVMDPIKGYXXXXXXXXXFYLINIPSLRAPVXX

SEQ ID NO: 31225 - protein, 35 aa, Artificial Sequence
  GFR-binding peptide
  MOD_RES (33), (34): Xaa is C or S
  MOD_RES (11), (12), (13), (14), (15): Xaa is A or G
  MOD_RES (16), (17), (18), (19): Xaa is A or G or is absent
EVVMDPIKGYXXXXXXXXXFYLMNIPSLETPVXXA

SEQ ID NO: 31226 - protein, 39 aa, Artificial Sequence
  GFR-binding peptide
  MOD_RES (2), (4), (37), (38): Xaa is C or S
RXGXEAVSMGEPIKGYTPVGMDDFYLVNIPSLKTPVXXA

SEQ ID NO: 31227 - protein, 39 aa, Artificial Sequence
  GFR-binding peptide
  MOD_RES (1), (3), (37): Xaa is C or S
  MOD_RES (15), (16), (17), (18), (19): Xaa is A or G
  MOD_RES (20), (21), (22), (23): Xaa is A or G or is absent
XGXSRVVMNPIKGYXXXXXXXXXFYLVNIPSLKTPAXTP

SEQ ID NO: 31228 - protein, 36 aa, Artificial Sequence
  GFR-binding peptide
  MOD_RES (32), (33): Xaa is C or S
SEVVMDPIKGYVVNNASDFYLINIPSLRTPVXXTPP

SEQ ID NO: 31229 - protein, 37 aa, Artificial Sequence
  GFR-binding peptide
  MOD_RES (33), (34): Xaa is C or S
  MOD_RES (11), (12), (13), (14), (15): Xaa is A or G
  MOD_RES (16), (17), (18), (19): Xaa is A or G or is absent
RVVMNPIKGYXXXXXXXXXFYLVNIPSLQTPAXXPKP

SEQ ID NO: 31230 - protein, 36 aa, Artificial Sequence
  GFR-binding peptide
  MOD_RES (2), (34), (35): Xaa is C or S
GXAEVVMDPIKGYVVNNAADFYLINIPSLRAPVXXS

SEQ ID NO: 31231 - protein, 42 aa, Artificial Sequence
  GFR-binding peptide
  MOD_RES (2), (4), (37), (38): Xaa is C or S
RXGXEAVSMGEPIKGYTPVGMDDFYLVNIPSLKTPVXXAKGV

SEQ ID NO: 31232 - protein, 33 aa, Artificial Sequence
  GFR-binding peptide
  MOD_RES (32), (33): Xaa is C or S
ESVAMGPIKGYYTVVGKDFYLINIPSLKTPVXX

SEQ ID NO: 31233 - protein, 35 aa, Artificial Sequence
  GFR-binding peptide
  MOD_RES (1), (3), (35): Xaa is C or S
XGXGEVVMEPIKGYVVKDYEDFYLMNIPSLETPVX

SEQ ID NO: 31234 - protein, 39 aa, Artificial Sequence
  GFR-binding peptide
  MOD_RES (2), (4), (36), (37): Xaa is C or S
RXGXAEVVMDPIKGYVVNNAADFYLINIPSLRAPVXXSA

SEQ ID NO: 31235 - protein, 35 aa, Artificial Sequence
  GFR-binding peptide
  MOD_RES (1), (34), (35): Xaa is C or S
XEAVSMGEPIKGYTPVGMDDFYLVNIPSLKTPVXX

SEQ ID NO: 31236 - protein, 38 aa, Artificial Sequence
  GFR-binding peptide
  MOD_RES (2), (33), (34): Xaa is C or S
GXEEVIMPIKGYLLVRGNDFYLMNIPSTKVPAXXTSPV

SEQ ID NO: 31237 - protein, 43 aa, Artificial Sequence
  GFR-binding peptide
  MOD_RES (2), (4), (38), (39): Xaa is C or S
  MOD_RES (16), (17), (18), (19), (20): Xaa is A or G
  MOD_RES (21), (22), (23), (24): Xaa is A or G or is absent
RXGXESVAMGPIKGYXXXXXXXXXFYLINIPSLKTPVXXAKSA

SEQ ID NO: 31238 - protein, 43 aa, Artificial Sequence
  GFR-binding peptide
  MOD_RES (1), (3), (37), (38): Xaa is C or S
  MOD_RES (15), (16), (17), (18), (19): Xaa is A or G
  MOD_RES (20), (21), (22), (23): Xaa is A or G or is absent
XGXAKVVMNPIKGYXXXXXXXXXFYLVNIPSLKTPAXXAKPVA

SEQ ID NO: 31239 - protein, 36 aa, Artificial Sequence
  GFR-binding peptide
  MOD_RES (1), (3): Xaa is C or S
  MOD_RES (15), (16), (17), (18), (19): Xaa is A or G
  MOD_RES (20), (21), (22), (23): Xaa is A or G or is absent
XGXESVAMGPIKGYXXXXXXXXXFYLINIPSLKTPV

SEQ ID NO: 31240 - protein, 40 aa, Artificial Sequence
  GFR-binding peptide
  MOD_RES (1), (3), (37): Xaa is C or S
  MOD_RES (15), (16), (17), (18), (19): Xaa is A or G
  MOD_RES (20), (21), (22), (23): Xaa is A or G or is absent
XGXSRVVMNPIKGYXXXXXXXXXFYLVNIPSLKTPAXTPK

SEQ ID NO: 31241 - protein, 44 aa, Artificial Sequence
  GFR-binding peptide
  MOD_RES (2), (4), (38), (39): Xaa is C or S
  MOD_RES (16), (17), (18), (19), (20): Xaa is A or G
  MOD_RES (21), (22), (23), (24): Xaa is A or G or is absent
HXGXAKVVMNPIKGYXXXXXXXXXFYLVNIPSLKTPAXXAKPVA

SEQ ID NO: 31242 - protein, 44 aa, Artificial Sequence
  GFR-binding peptide
  MOD_RES (2), (4), (38), (39): Xaa is C or S
  MOD_RES (16), (17), (18), (19), (20): Xaa is A or G
  MOD_RES (21), (22), (23), (24): Xaa is A or G or is absent
SXGXRDVVMGPIKGYXXXXXXXXXFYLMNIPSMKTPTXXPGASG

SEQ ID NO: 31243 - protein, 39 aa, Artificial Sequence
  GFR-binding peptide
  MOD_RES (1), (33), (34): Xaa is C or S
XGEVVMDPIKGYVVKENEDFYLMNIPSLETPVXXAKPIK

SEQ ID NO: 31244 - protein, 43 aa, Artificial Sequence
  GFR-binding peptide
  MOD_RES (1), (3), (37), (38): Xaa is C or S
  MOD_RES (15), (16), (17), (18), (19): Xaa is A or G
  MOD_RES (20), (21), (22), (23): Xaa is A or G or is absent
XGXESVAMGPIKGYXXXXXXXXXFYLINIPSLKTPVXXAKSAK

SEQ ID NO: 31245 - protein, 34 aa, Artificial Sequence
  GFR-binding peptide
  MOD_RES (32), (33): Xaa is C or S
ARVVMNPIKGYIVNSSDDFYLVNIPSLQTPAXXP

SEQ ID NO: 31246 - protein, 37 aa, Artificial Sequence
  GFR-binding peptide
  MOD_RES (2), (4), (36): Xaa is C or S
HXGXSRVVMNPIKGYIVNSSDDFYLVNIPSLKTPAXT

SEQ ID NO: 31247 - protein, 35 aa, Artificial Sequence
  GFR-binding peptide
  MOD_RES (1), (1): Xaa is C or S
  MOD_RES (14), (15), (16), (17), (18): Xaa is A or G
  MOD_RES (19), (20), (21), (22): Xaa is A or G or is absent
XEAVSMGEPIKGYXXXXXXXXXFYLVNIPSLKTPV

SEQ ID NO: 31248 - protein, 39 aa, Artificial Sequence
  GFR-binding peptide
  MOD_RES (2), (4), (36), (37): Xaa is C or S
HXGXAKVVMNPIKGYIVNNSSDFYLVNIPSLKTPAXXAK

SEQ ID NO: 31249 - protein, 37 aa, Artificial Sequence
  GFR-binding peptide
  MOD_RES (2), (35), (36): Xaa is C or S
GXEAVSMGEPIKGYTPVGMDDFYLVNIPSLKTPVXXA

SEQ ID NO: 31250 - protein, 42 aa, Artificial Sequence
  GFR-binding peptide
  MOD_RES (2), (4), (38), (39): Xaa is C or S
  MOD_RES (16), (17), (18), (19), (20): Xaa is A or G
  MOD_RES (21), (22), (23), (24): Xaa is A or G or is absent
HXGXAKVVMNPIKGYXXXXXXXXXFYLVNIPSLKTPAXXAKP

SEQ ID NO: 31251 - protein, 34 aa, Artificial Sequence
  GFR-binding peptide
  MOD_RES (1), (3), (34): Xaa is C or S
XGXEEVIMPIKGYLLVRGNDFYLMNIPSTKVPAX

SEQ ID NO: 31252 - protein, 42 aa, Artificial Sequence
  GFR-binding peptide
  MOD_RES (2), (4), (38), (39): Xaa is C or S
  MOD_RES (16), (17), (18), (19), (20): Xaa is A or G
  MOD_RES (21), (22), (23), (24): Xaa is A or G or is absent
RXGXSEVVMDPIKGYXXXXXXXXXFYLINIPSLRTPVXXTPP

SEQ ID NO: 31253 - protein, 36 aa, Artificial Sequence
  GFR-binding peptide
  MOD_RES (2), (4), (36): Xaa is C or S
RXGXGEVVMDPIKGYVVKENEDFYLMNIPSLETPVX

SEQ ID NO: 31254 - protein, 37 aa, Artificial Sequence
  GFR-binding peptide
  MOD_RES (31), (32): Xaa is C or S
SVAMGPIKGYYTVVGKDFYLINIPSLKTPVXXAKSAK

SEQ ID NO: 31255 - protein, 40 aa, Artificial Sequence
  GFR-binding peptide
  MOD_RES (1), (3), (37), (38): Xaa is C or S
  MOD_RES (15), (16), (17), (18), (19): Xaa is A or G
  MOD_RES (20), (21), (22), (23): Xaa is A or G or is absent
XGXRDVVMGPIKGYXXXXXXXXXFYLMNIPSMKTPTXXPG

SEQ ID NO: 31256 - protein, 40 aa, Artificial Sequence
  GFR-binding peptide
  MOD_RES (2), (34), (35): Xaa is C or S
GXARVVMNPIKGYIVNSSDDFYLVNIPSLQTPAXXPKPVT

SEQ ID NO: 31257 - protein, 40 aa, Artificial Sequence
  GFR-binding peptide
  MOD_RES (2), (36), (37): Xaa is C or S
  MOD_RES (14), (15), (16), (17), (18): Xaa is A or G
  MOD_RES (19), (20), (21), (22): Xaa is A or G or is absent
GXSEVVMDPIKGYXXXXXXXXXFYLINIPSLRTPVXXTPP

SEQ ID NO: 31258 - protein, 35 aa, Artificial Sequence
  GFR-binding peptide
  MOD_RES (34), (35): Xaa is C or S
  MOD_RES (12), (13), (14), (15), (16): Xaa is A or G
  MOD_RES (17), (18), (19), (20): Xaa is A or G or is absent
SRVVMNPIKGYXXXXXXXXXFYLVNIPSLKTPAXX

SEQ ID NO: 31259 - protein, 39 aa, Artificial Sequence
  GFR-binding peptide
  MOD_RES (34), (35): Xaa is C or S
  MOD_RES (12), (13), (14), (15), (16): Xaa is A or G
  MOD_RES (17), (18), (19), (20): Xaa is A or G or is absent
GEVVMDPIKGYXXXXXXXXXFYLMNIPSLETPVXXAKPI

SEQ ID NO: 31260 - protein, 35 aa, Artificial Sequence
  GFR-binding peptide
  MOD_RES (1), (3), (35): Xaa is C or S
XGXESVAMGPIKGYYTVVGKDFYLINIPSLKTPVX

SEQ ID NO: 31261 - protein, 35 aa, Artificial Sequence
  GFR-binding peptide
  MOD_RES (2), (2): Xaa is C or S
  MOD_RES (14), (15), (16), (17), (18): Xaa is A or G
  MOD_RES (19), (20), (21), (22): Xaa is A or G or is absent
GXARVVMNPIKGYXXXXXXXXXFYLVNIPSLQTPA

SEQ ID NO: 31262 - protein, 36 aa, Artificial Sequence
  GFR-binding peptide
  MOD_RES (31), (32): Xaa is C or S
EVVMEPIKGYVVKDYEDFYLMNIPSLETPVXXAKPI

SEQ ID NO: 31263 - protein, 38 aa, Artificial Sequence
  GFR-binding peptide
  MOD_RES (1), (3), (35), (36): Xaa is C or S
XGXGEVVMEPIKGYVVKDYEDFYLMNIPSLETPVXXAK

SEQ ID NO: 31264 - protein, 36 aa, Artificial Sequence
  GFR-binding peptide
  MOD_RES (1), (33), (34): Xaa is C or S
XRDVVMGPIKGYIIQQKDNFYLMNIPSMKTPTXXPG

SEQ ID NO: 31265 - protein, 42 aa, Artificial Sequence
  GFR-binding peptide
  MOD_RES (2), (4), (38), (39): Xaa is C or S
  MOD_RES (16), (17), (18), (19), (20): Xaa is A or G
  MOD_RES (21), (22), (23), (24): Xaa is A or G or is absent
RXGXGEVVMDPIKGYXXXXXXXXXFYLMNIPSLETPVXXAKP

SEQ ID NO: 31266 - protein, 41 aa, Artificial Sequence
  GFR-binding peptide
  MOD_RES (1), (3), (38), (39): Xaa is C or S
  MOD_RES (16), (17), (18), (19), (20): Xaa is A or G
  MOD_RES (21), (22), (23), (24): Xaa is A or G or is absent
XGXEAVSMGEPIKGYXXXXXXXXXFYLVNIPSLKTPVXXAK

SEQ ID NO: 31267 - protein, 36 aa, Artificial Sequence
  GFR-binding peptide
  MOD_RES (32), (33): Xaa is C or S
RDVVMGPIKGYIIQQKDNFYLMNIPSMKTPTXXPGA

SEQ ID NO: 31268 - protein, 39 aa, Artificial Sequence
  GFR-binding peptide
  MOD_RES (2), (35), (36): Xaa is C or S
  MOD_RES (13), (14), (15), (16), (17): Xaa is A or G
  MOD_RES (18), (19), (20), (21): Xaa is A or G or is absent
GXEEVIMPIKGYXXXXXXXXXFYLMNIPSTKVPAXXTSP

SEQ ID NO: 31269 - protein, 39 aa, Artificial Sequence
  GFR-binding peptide
  MOD_RES (2), (34): Xaa is C or S
GXSRVVMNPIKGYIVNSSDDFYLVNIPSLKTPAXTPKTV

SEQ ID NO: 31270 - protein, 42 aa, Artificial Sequence
  GFR-binding peptide
  MOD_RES (2), (37), (38): Xaa is C or S
  MOD_RES (15), (16), (17), (18), (19): Xaa is A or G
  MOD_RES (20), (21), (22), (23): Xaa is A or G or is absent
GXEAVSMGEPIKGYXXXXXXXXXFYLVNIPSLKTPVXXAKGV

SEQ ID NO: 31271 - protein, 40 aa, Artificial Sequence
  GFR-binding peptide
  MOD_RES (2), (34), (35): Xaa is C or S
GXSEVVMDPIKGYVVNNASDFYLINIPSLRTPVXXTPPTS

SEQ ID NO: 31272 - protein, 38 aa, Artificial Sequence
  GFR-binding peptide
  MOD_RES (1), (35), (36): Xaa is C or S
  MOD_RES (13), (14), (15), (16), (17): Xaa is A or G
  MOD_RES (18), (19), (20), (21): Xaa is A or G or is absent
XSRVVMNPIKGYXXXXXXXXXFYLVNIPSLKTPAXXPK

SEQ ID NO: 31273 - protein, 34 aa, Artificial Sequence
  GFR-binding peptide
  MOD_RES (13), (14), (15), (16), (17): Xaa is A or G
  MOD_RES (18), (19), (20), (21): Xaa is A or G or is absent
EAVSMGEPIKGYXXXXXXXXXFYLVNIPSLKTPV

SEQ ID NO: 31274 - protein, 32 aa, Artificial Sequence
  GFR-binding peptide
  MOD_RES (32), (32): Xaa is C or S
GEVVMDPIKGYVVKENEDFYLMNIPSLETPVX

SEQ ID NO: 31275 - protein, 37 aa, Artificial Sequence
  GFR-binding peptide
  MOD_RES (2), (34), (35): Xaa is C or S
GXGEVVMEPIKGYVVKDYEDFYLMNIPSLETPVXXAK

SEQ ID NO: 31276 - protein, 36 aa, Artificial Sequence
  GFR-binding peptide
  MOD_RES (33), (34): Xaa is C or S
  MOD_RES (11), (12), (13), (14), (15): Xaa is A or G
  MOD_RES (16), (17), (18), (19): Xaa is A or G or is absent
DVVMGPIKGYXXXXXXXXXFYLMNIPSMKTPTXXPG

SEQ ID NO: 31277 - protein, 41 aa, Artificial Sequence
  GFR-binding peptide
  MOD_RES (1), (3), (37), (38): Xaa is C or S
  MOD_RES (15), (16), (17), (18), (19): Xaa is A or G
  MOD_RES (20), (21), (22), (23): Xaa is A or G or is absent
XGXAKVVMNPIKGYXXXXXXXXXFYLVNIPSLKTPAXXAKP

SEQ ID NO: 31278 - protein, 40 aa, Artificial Sequence
  GFR-binding peptide
  MOD_RES (1), (3), (35), (36): Xaa is C or S
XGXSRVVMNPIKGYIVNSSDDFYLVNIPSLKTPAXXPKPV

SEQ ID NO: 31279 - protein, 36 aa, Artificial Sequence
  GFR-binding peptide
  MOD_RES (1), (3): Xaa is C or S
  MOD_RES (15), (16), (17), (18), (19): Xaa is A or G
  MOD_RES (20), (21), (22), (23): Xaa is A or G or is absent
XGXAKVVMNPIKGYXXXXXXXXXFYLVNIPSLKTPA

SEQ ID NO: 31280 - protein, 34 aa, Artificial Sequence
  GFR-binding peptide
  MOD_RES (2), (34): Xaa is C or S
GXSEVVMDPIKGYVVNNASDFYLINIPSLRTPVX

SEQ ID NO: 31281 - protein, 37 aa, Artificial Sequence
  GFR-binding peptide
  MOD_RES (32), (33): Xaa is C or S
AEVVMDPIKGYVVNNAADFYLINIPSLRAPVXXSAPA

SEQ ID NO: 31282 - protein, 35 aa, Artificial Sequence
  GFR-binding peptide
  MOD_RES (2), (4): Xaa is C or S
RXGXGEVVMDPIKGYVVKENEDFYLMNIPSLETPV

SEQ ID NO: 31283 - protein, 41 aa, Artificial Sequence
  GFR-binding peptide
  MOD_RES (2), (4), (36), (37): Xaa is C or S
RXGXGEVVMEPIKGYVVKDYEDFYLMNIPSLETPVXXAKPI

SEQ ID NO: 31284 - protein, 34 aa, Artificial Sequence
  GFR-binding peptide
  MOD_RES (31), (32): Xaa is C or S
EVVMDPIKGYVVKENEDFYLMNIPSLETPVXXAK

SEQ ID NO: 31285 - protein, 41 aa, Artificial Sequence
  GFR-binding peptide
  MOD_RES (1), (3), (35): Xaa is C or S
XGXSRVVMNPIKGYIVNSSDDFYLVNIPSLKTPAXTPKTVH

SEQ ID NO: 31286 - protein, 40 aa, Artificial Sequence
  GFR-binding peptide
  MOD_RES (2), (4), (36), (37): Xaa is C or S
SXGXRDVVMGPIKGYIIQQKDNFYLMNIPSMKTPTXXPGA

SEQ ID NO: 31287 - protein, 35 aa, Artificial Sequence
  GFR-binding peptide
  MOD_RES (31), (32): Xaa is C or S
RVVMNPIKGYIVNSSDDFYLVNIPSLKTPAXXPKP

SEQ ID NO: 31288 - protein, 41 aa, Artificial Sequence
  GFR-binding peptide
  MOD_RES (1), (3), (35), (36): Xaa is C or S
XGXSRVVMNPIKGYIVNSSDDFYLVNIPSLKTPAXXPKPVH

SEQ ID NO: 31289 - protein, 38 aa, Artificial Sequence
  GFR-binding peptide
  MOD_RES (2), (36), (37): Xaa is C or S
  MOD_RES (14), (15), (16), (17), (18): Xaa is A or G
  MOD_RES (19), (20), (21), (22): Xaa is A or G or is absent
GXGEVVMEPIKGYXXXXXXXXXFYLMNIPSLETPVXXA

SEQ ID NO: 31290 - protein, 38 aa, Artificial Sequence
  GFR-binding peptide
  MOD_RES (1), (3), (37), (38): Xaa is C or S
  MOD_RES (15), (16), (17), (18), (19): Xaa is A or G
  MOD_RES (20), (21), (22), (23): Xaa is A or G or is absent
XGXARVVMNPIKGYXXXXXXXXXFYLVNIPSLQTPAXX

SEQ ID NO: 31291 - protein, 38 aa, Artificial Sequence
  GFR-binding peptide
  MOD_RES (1), (33), (34): Xaa is C or S
XGEVVMEPIKGYVVKDYEDFYLMNIPSLETPVXXAKPI

SEQ ID NO: 31292 - protein, 37 aa, Artificial Sequence
  GFR-binding peptide
  MOD_RES (1), (34), (35): Xaa is C or S
  MOD_RES (12), (13), (14), (15), (16): Xaa is A or G
  MOD_RES (17), (18), (19), (20): Xaa is A or G or is absent
XEEVIMPIKGYXXXXXXXXXFYLMNIPSTKVPAXXTS

SEQ ID NO: 31293 - protein, 35 aa, Artificial Sequence
  GFR-binding peptide
  MOD_RES (31), (32): Xaa is C or S
EVVMEPIKGYVVKDYEDFYLMNIPSLETPVXXAKP

SEQ ID NO: 31294 - protein, 41 aa, Artificial Sequence
  GFR-binding peptide
  MOD_RES (2), (4), (38): Xaa is C or S
  MOD_RES (16), (17), (18), (19), (20): Xaa is A or G
  MOD_RES (21), (22), (23), (24): Xaa is A or G or is absent
HXGXSRVVMNPIKGYXXXXXXXXXFYLVNIPSLKTPAXTPK

SEQ ID NO: 31295 - protein, 39 aa, Artificial Sequence
  GFR-binding peptide
  MOD_RES (33), (34): Xaa is C or S
EAVSMGEPIKGYTPVGMDDFYLVNIPSLKTPVXXAKGVK

SEQ ID NO: 31296 - protein, 31 aa, Artificial Sequence
  GFR-binding peptide
AEVVMDPIKGYVVNNAADFYLINIPSLRAPV

SEQ ID NO: 31297 - protein, 32 aa, Artificial Sequence
  GFR-binding peptide
  MOD_RES (11), (12), (13), (14), (15): Xaa is A or G
  MOD_RES (16), (17), (18), (19): Xaa is A or G or is absent
KVVMNPIKGYXXXXXXXXXFYLVNIPSLKTPA

SEQ ID NO: 31298 - protein, 43 aa, Artificial Sequence
  GFR-binding peptide
  MOD_RES (2), (4), (38), (39): Xaa is C or S
  MOD_RES (16), (17), (18), (19), (20): Xaa is A or G
  MOD_RES (21), (22), (23), (24): Xaa is A or G or is absent
RXGXGEVVMDPIKGYXXXXXXXXXFYLMNIPSLETPVXXAKPI

SEQ ID NO: 31299 - protein, 42 aa, Artificial Sequence
  GFR-binding peptide
  MOD_RES (2), (36), (37): Xaa is C or S
  MOD_RES (14), (15), (16), (17), (18): Xaa is A or G
  MOD_RES (19), (20), (21), (22): Xaa is A or G or is absent
GXGEVVMDPIKGYXXXXXXXXXFYLMNIPSLETPVXXAKPIK

SEQ ID NO: 31300 - protein, 38 aa, Artificial Sequence
  GFR-binding peptide
  MOD_RES (1), (3), (35), (36): Xaa is C or S
XGXRDVVMGPIKGYIIQQKDNFYLMNIPSMKTPTXXPG

SEQ ID NO: 31301 - protein, 32 aa, Artificial Sequence
  GFR-binding peptide
  MOD_RES (11), (12), (13), (14), (15): Xaa is A or G
  MOD_RES (16), (17), (18), (19): Xaa is A or G or is absent
EEVIMPIKGYXXXXXXXXXFYLMNIPSTKVPA

SEQ ID NO: 31302 - protein, 38 aa, Artificial Sequence
  GFR-binding peptide
  MOD_RES (1), (3), (35), (36): Xaa is C or S
XGXGEVVMDPIKGYVVKENEDFYLMNIPSLETPVXXAK

SEQ ID NO: 31303 - protein, 33 aa, Artificial Sequence
  GFR-binding peptide
  MOD_RES (33), (33): Xaa is C or S
  MOD_RES (11), (12), (13), (14), (15): Xaa is A or G
  MOD_RES (16), (17), (18), (19): Xaa is A or G or is absent
EVVMDPIKGYXXXXXXXXXFYLINIPSLRAPVX

SEQ ID NO: 31304 - protein, 39 aa, Artificial Sequence
  GFR-binding peptide
  MOD_RES (2), (4), (38), (39): Xaa is C or S
  MOD_RES (16), (17), (18), (19), (20): Xaa is A or G
  MOD_RES (21), (22), (23), (24): Xaa is A or G or is absent
SXGXRDVVMGPIKGYXXXXXXXXXFYLMNIPSMKTPTXX

SEQ ID NO: 31305 - protein, 34 aa, Artificial Sequence
  GFR-binding peptide
  MOD_RES (2), (34): Xaa is C or S
GXGEVVMDPIKGYVVKENEDFYLMNIPSLETPVX

SEQ ID NO: 31306 - protein, 35 aa, Artificial Sequence
  GFR-binding peptide
  MOD_RES (2), (34), (35): Xaa is C or S
GXARVVMNPIKGYIVNSSDDFYLVNIPSLQTPAXX

SEQ ID NO: 31307 - protein, 31 aa, Artificial Sequence
  GFR-binding peptide
GEVVMEPIKGYVVKDYEDFYLMNIPSLETPV

SEQ ID NO: 31308 - protein, 38 aa, Artificial Sequence
  GFR-binding peptide
  MOD_RES (2), (4), (36), (37): Xaa is C or S
RXGXESVAMGPIKGYYTVVGKDFYLINIPSLKTPVXXA

SEQ ID NO: 31309 - protein, 40 aa, Artificial Sequence
  GFR-binding peptide
  MOD_RES (2), (4), (36), (37): Xaa is C or S
RXGXGEVVMDPIKGYVVKENEDFYLMNIPSLETPVXXAKP

SEQ ID NO: 31310 - protein, 37 aa, Artificial Sequence
  GFR-binding peptide
  MOD_RES (2), (4): Xaa is C or S
  MOD_RES (16), (17), (18), (19), (20): Xaa is A or G
  MOD_RES (21), (22), (23), (24): Xaa is A or G or is absent
RXGXESVAMGPIKGYXXXXXXXXXFYLINIPSLKTPV

SEQ ID NO: 31311 - protein, 40 aa, Artificial Sequence
  GFR-binding peptide
  MOD_RES (2), (34), (35): Xaa is C or S
GXAKVVMNPIKGYIVNNSSDFYLVNIPSLKTPAXXAKPVA

SEQ ID NO: 31312 - protein, 36 aa, Artificial Sequence
  GFR-binding peptide
  MOD_RES (2), (34), (35): Xaa is C or S
GXAKVVMNPIKGYIVNNSSDFYLVNIPSLKTPAXXA

SEQ ID NO: 31313 - protein, 34 aa, Artificial Sequence
  GFR-binding peptide
  MOD_RES (1), (3): Xaa is C or S
XGXSEVVMDPIKGYVVNNASDFYLINIPSLRTPV

SEQ ID NO: 31314 - protein, 37 aa, Artificial Sequence
  GFR-binding peptide
  MOD_RES (31), (32): Xaa is C or S
RVVMNPIKGYIVNSSDDFYLVNIPSLKTPAXXPKPVY

SEQ ID NO: 31315 - protein, 39 aa, Artificial Sequence
  GFR-binding peptide
  MOD_RES (2), (34), (35): Xaa is C or S
GXGEVVMEPIKGYVVKDYEDFYLMNIPSLETPVXXAKPI

SEQ ID NO: 31316 - protein, 32 aa, Artificial Sequence
  GFR-binding peptide
  MOD_RES (32), (32): Xaa is C or S
SRVVMNPIKGYIVNSSDDFYLVNIPSLKTPAX

SEQ ID NO: 31317 - protein, 35 aa, Artificial Sequence
  GFR-binding peptide
  MOD_RES (1), (3), (35): Xaa is C or S
XGXAKVVMNPIKGYIVNNSSDFYLVNIPSLKTPAX

SEQ ID NO: 31318 - protein, 36 aa, Artificial Sequence
  GFR-binding peptide
  MOD_RES (32), (33): Xaa is C or S
GEVVMDPIKGYVVKENEDFYLMNIPSLETPVXXAKP

SEQ ID NO: 31319 - protein, 40 aa, Artificial Sequence
  GFR-binding peptide
  MOD_RES (2), (36), (37): Xaa is C or S
  MOD_RES (14), (15), (16), (17), (18): Xaa is A or G
  MOD_RES (19), (20), (21), (22): Xaa is A or G or is absent
GXAEVVMDPIKGYXXXXXXXXXFYLINIPSLRAPVXXSAP

SEQ ID NO: 31320 - protein, 35 aa, Artificial Sequence
  GFR-binding peptide
  MOD_RES (1), (32), (33): Xaa is C or S
XEEVIMPIKGYLLVRGNDFYLMNIPSTKVPAXXTS

SEQ ID NO: 31321 - protein, 36 aa, Artificial Sequence
  GFR-binding peptide
  MOD_RES (31), (31): Xaa is C or S
RVVMNPIKGYIVNSSDDFYLVNIPSLKTPAXTPKTV

SEQ ID NO: 31322 - protein, 39 aa, Artificial Sequence
  GFR-binding peptide
  MOD_RES (1), (33), (34): Xaa is C or S
XSRVVMNPIKGYIVNSSDDFYLVNIPSLKTPAXXPKPVH

SEQ ID NO: 31323 - protein, 40 aa, Artificial Sequence
  GFR-binding peptide
  MOD_RES (1), (3), (34), (35): Xaa is C or S
XGXEEVIMPIKGYLLVRGNDFYLMNIPSTKVPAXXTSPVR

SEQ ID NO: 31324 - protein, 38 aa, Artificial Sequence
  GFR-binding peptide
  MOD_RES (2), (34), (35): Xaa is C or S
GXSRVVMNPIKGYIVNSSDDFYLVNIPSLKTPAXXPKP

SEQ ID NO: 31325 - protein, 36 aa, Artificial Sequence
  GFR-binding peptide
  MOD_RES (1), (33), (34): Xaa is C or S
XARVVMNPIKGYIVNSSDDFYLVNIPSLQTPAXXPK

SEQ ID NO: 31326 - protein, 36 aa, Artificial Sequence
  GFR-binding peptide
  MOD_RES (34), (35): Xaa is C or S
  MOD_RES (12), (13), (14), (15), (16): Xaa is A or G
  MOD_RES (17), (18), (19), (20): Xaa is A or G or is absent
SRVVMNPIKGYXXXXXXXXXFYLVNIPSLKTPAXXP

SEQ ID NO: 31327 - protein, 36 aa, Artificial Sequence
  GFR-binding peptide
  MOD_RES (2), (33), (34): Xaa is C or S
GXEEVIMPIKGYLLVRGNDFYLMNIPSTKVPAXXTS

SEQ ID NO: 31328 - protein, 40 aa, Artificial Sequence
  GFR-binding peptide
  MOD_RES (34), (35): Xaa is C or S
  MOD_RES (12), (13), (14), (15), (16): Xaa is A or G
  MOD_RES (17), (18), (19), (20): Xaa is A or G or is absent
AKVVMNPIKGYXXXXXXXXXFYLVNIPSLKTPAXXAKPVA

SEQ ID NO: 31329 - protein, 32 aa, Artificial Sequence
  GFR-binding peptide
  MOD_RES (31), (32): Xaa is C or S
EVVMDPIKGYVVKENEDFYLMNIPSLETPVXX

SEQ ID NO: 31330 - protein, 35 aa, Artificial Sequence
  GFR-binding peptide
  MOD_RES (1), (35): Xaa is C or S
  MOD_RES (13), (14), (15), (16), (17): Xaa is A or G
  MOD_RES (18), (19), (20), (21): Xaa is A or G or is absent
XARVVMNPIKGYXXXXXXXXXFYLVNIPSLQTPAX

SEQ ID NO: 31331 - protein, 44 aa, Artificial Sequence
  GFR-binding peptide
  MOD_RES (2), (4), (38), (39): Xaa is C or S
  MOD_RES (16), (17), (18), (19), (20): Xaa is A or G
  MOD_RES (21), (22), (23), (24): Xaa is A or G or is absent
HXGXSRVVMNPIKGYXXXXXXXXXFYLVNIPSLKTPAXXPKPVY

SEQ ID NO: 31332 - protein, 39 aa, Artificial Sequence
  GFR-binding peptide
  MOD_RES (33), (34): Xaa is C or S
  MOD_RES (11), (12), (13), (14), (15): Xaa is A or G
  MOD_RES (16), (17), (18), (19): Xaa is A or G or is absent
EEVIMPIKGYXXXXXXXXXFYLMNIPSTKVPAXXTSPVR

SEQ ID NO: 31333 - protein, 34 aa, Artificial Sequence
  GFR-binding peptide
  MOD_RES (1), (1): Xaa is C or S
  MOD_RES (13), (14), (15), (16), (17): Xaa is A or G
  MOD_RES (18), (19), (20), (21): Xaa is A or G or is absent
XGEVVMEPIKGYXXXXXXXXXFYLMNIPSLETPV

SEQ ID NO: 31334 - protein, 38 aa, Artificial Sequence
  GFR-binding peptide
  MOD_RES (33), (34): Xaa is C or S
  MOD_RES (11), (12), (13), (14), (15): Xaa is A or G
  MOD_RES (16), (17), (18), (19): Xaa is A or G or is absent
DVVMGPIKGYXXXXXXXXXFYLMNIPSMKTPTXXPGAS

SEQ ID NO: 31335 - protein, 38 aa, Artificial Sequence
  GFR-binding peptide
  MOD_RES (34), (35): Xaa is C or S
  MOD_RES (12), (13), (14), (15), (16): Xaa is A or G
  MOD_RES (17), (18), (19), (20): Xaa is A or G or is absent
SEVVMDPIKGYXXXXXXXXXFYLINIPSLRTPVXXTPP

SEQ ID NO: 31336 - protein, 36 aa, Artificial Sequence
  GFR-binding peptide
  MOD_RES (2), (4): Xaa is C or S
  MOD_RES (15), (16), (17), (18), (19): Xaa is A or G
  MOD_RES (20), (21), (22), (23): Xaa is A or G or is absent
LXGXEEVIMPIKGYXXXXXXXXXFYLMNIPSTKVPA

SEQ ID NO: 31337 - protein, 33 aa, Artificial Sequence
  GFR-binding peptide
  MOD_RES (32), (33): Xaa is C or S
SRVVMNPIKGYIVNSSDDFYLVNIPSLKTPAXX

SEQ ID NO: 31338 - protein, 35 aa, Artificial Sequence
  GFR-binding peptide
  MOD_RES (1), (3), (35): Xaa is C or S
XGXAEVVMDPIKGYVVNNAADFYLINIPSLRAPVX

SEQ ID NO: 31339 - protein, 37 aa, Artificial Sequence
  GFR-binding peptide
  MOD_RES (2), (34), (35): Xaa is C or S
GXARVVMNPIKGYIVNSSDDFYLVNIPSLQTPAXXPK

SEQ ID NO: 31340 - protein, 37 aa, Artificial Sequence
  GFR-binding peptide
  MOD_RES (32), (33): Xaa is C or S
RDVVMGPIKGYIIQQKDNFYLMNIPSMKTPTXXPGAS

SEQ ID NO: 31341 - protein, 37 aa, Artificial Sequence
  GFR-binding peptide
  MOD_RES (1), (36), (37): Xaa is C or S
  MOD_RES (14), (15), (16), (17), (18): Xaa is A or G
  MOD_RES (19), (20), (21), (22): Xaa is A or G or is absent
XEAVSMGEPIKGYXXXXXXXXXFYLVNIPSLKTPVXX

SEQ ID NO: 31342 - protein, 33 aa, Artificial Sequence
  GFR-binding peptide
  MOD_RES (33), (33): Xaa is C or S
  MOD_RES (11), (12), (13), (14), (15): Xaa is A or G
  MOD_RES (16), (17), (18), (19): Xaa is A or G or is absent
EVVMDPIKGYXXXXXXXXXFYLINIPSLRTPVX

SEQ ID NO: 31343 - protein, 39 aa, Artificial Sequence
  GFR-binding peptide
  MOD_RES (1), (3), (34), (35): Xaa is C or S
XGXEEVIMPIKGYLLVRGNDFYLMNIPSTKVPAXXTSPV

SEQ ID NO: 31344 - protein, 34 aa, Artificial Sequence
  GFR-binding peptide
  MOD_RES (31), (32): Xaa is C or S
KVVMNPIKGYIVNNSSDFYLVNIPSLKTPAXXAK

SEQ ID NO: 31345 - protein, 37 aa, Artificial Sequence
  GFR-binding peptide
  MOD_RES (1), (3), (37): Xaa is C or S
  MOD_RES (15), (16), (17), (18), (19): Xaa is A or G
  MOD_RES (20), (21), (22), (23): Xaa is A or G or is absent
XGXAEVVMDPIKGYXXXXXXXXXFYLINIPSLRAPVX

SEQ ID NO: 31346 - protein, 42 aa, Artificial Sequence
  GFR-binding peptide
  MOD_RES (2), (4), (36), (37): Xaa is C or S
HXGXSRVVMNPIKGYIVNSSDDFYLVNIPSLKTPAXXPKPVY

SEQ ID NO: 31347 - protein, 35 aa, Artificial Sequence
  GFR-binding peptide
  MOD_RES (35), (35): Xaa is C or S
  MOD_RES (13), (14), (15), (16), (17): Xaa is A or G
  MOD_RES (18), (19), (20), (21): Xaa is A or G or is absent
EAVSMGEPIKGYXXXXXXXXXFYLVNIPSLKTPVX

SEQ ID NO: 31348 - protein, 36 aa, Artificial Sequence
  GFR-binding peptide
  MOD_RES (2), (34), (35): Xaa is C or S
GXSEVVMDPIKGYVVNNASDFYLINIPSLRTPVXXT

SEQ ID NO: 31349 - protein, 38 aa, Artificial Sequence
  GFR-binding peptide
  MOD_RES (32), (33): Xaa is C or S
GEVVMEPIKGYVVKDYEDFYLMNIPSLETPVXXAKPIS

SEQ ID NO: 31350 - protein, 38 aa, Artificial Sequence
  GFR-binding peptide
  MOD_RES (1), (3), (37), (38): Xaa is C or S
  MOD_RES (15), (16), (17), (18), (19): Xaa is A or G
  MOD_RES (20), (21), (22), (23): Xaa is A or G or is absent
XGXGEVVMEPIKGYXXXXXXXXXFYLMNIPSLETPVXX

SEQ ID NO: 31351 - protein, 36 aa, Artificial Sequence
  GFR-binding peptide
  MOD_RES (1), (35), (36): Xaa is C or S
  MOD_RES (13), (14), (15), (16), (17): Xaa is A or G
  MOD_RES (18), (19), (20), (21): Xaa is A or G or is absent
XARVVMNPIKGYXXXXXXXXXFYLVNIPSLQTPAXX

SEQ ID NO: 31352 - protein, 36 aa, Artificial Sequence
  GFR-binding peptide
  MOD_RES (31), (32): Xaa is C or S
KVVMNPIKGYIVNNSSDFYLVNIPSLKTPAXXAKPV

SEQ ID NO: 31353 - protein, 43 aa, Artificial Sequence
  GFR-binding peptide
  MOD_RES (1), (3), (37), (38): Xaa is C or S
  MOD_RES (15), (16), (17), (18), (19): Xaa is A or G
  MOD_RES (20), (21), (22), (23): Xaa is A or G or is absent
XGXARVVMNPIKGYXXXXXXXXXFYLVNIPSLQTPAXXPKPVT

SEQ ID NO: 31354 - protein, 37 aa, Artificial Sequence
  GFR-binding peptide
  MOD_RES (33), (34): Xaa is C or S
  MOD_RES (11), (12), (13), (14), (15): Xaa is A or G
  MOD_RES (16), (17), (18), (19): Xaa is A or G or is absent
KVVMNPIKGYXXXXXXXXXFYLVNIPSLKTPAXXAKP

SEQ ID NO: 31355 - protein, 35 aa, Artificial Sequence
  GFR-binding peptide
  MOD_RES (34), (35): Xaa is C or S
  MOD_RES (12), (13), (14), (15), (16): Xaa is A or G
  MOD_RES (17), (18), (19), (20): Xaa is A or G or is absent
AKVVMNPIKGYXXXXXXXXXFYLVNIPSLKTPAXX

SEQ ID NO: 31356 - protein, 31 aa, Artificial Sequence
  GFR-binding peptide
AKVVMNPIKGYIVNNSSDFYLVNIPSLKTPA

SEQ ID NO: 31357 - protein, 41 aa, Artificial Sequence
  GFR-binding peptide
  MOD_RES (2), (4), (38), (39): Xaa is C or S
  MOD_RES (16), (17), (18), (19), (20): Xaa is A or G
  MOD_RES (21), (22), (23), (24): Xaa is A or G or is absent
RXGXGEVVMEPIKGYXXXXXXXXXFYLMNIPSLETPVXXAK

SEQ ID NO: 31358 - protein, 40 aa, Artificial Sequence
  GFR-binding peptide
  MOD_RES (1), (3), (35), (36): Xaa is C or S
XGXARVVMNPIKGYIVNSSDDFYLVNIPSLQTPAXXPKPV

SEQ ID NO: 31359 - protein, 37 aa, Artificial Sequence
  GFR-binding peptide
  MOD_RES (1), (33), (34): Xaa is C or S
XSRVVMNPIKGYIVNSSDDFYLVNIPSLKTPAXXPKP

SEQ ID NO: 31360 - protein, 37 aa, Artificial Sequence
  GFR-binding peptide
  MOD_RES (31), (32): Xaa is C or S
EVVMDPIKGYVVNNAADFYLINIPSLRAPVXXSAPAA

SEQ ID NO: 31361 - protein, 34 aa, Artificial Sequence
  GFR-binding peptide
  MOD_RES (1), (32), (33): Xaa is C or S
XEEVIMPIKGYLLVRGNDFYLMNIPSTKVPAXXT

SEQ ID NO: 31362 - protein, 36 aa, Artificial Sequence
  GFR-binding peptide
  MOD_RES (34), (35): Xaa is C or S
  MOD_RES (12), (13), (14), (15), (16): Xaa is A or G
  MOD_RES (17), (18), (19), (20): Xaa is A or G or is absent
SEVVMDPIKGYXXXXXXXXXFYLINIPSLRTPVXXT

SEQ ID NO: 31363 - protein, 31 aa, Artificial Sequence
  GFR-binding peptide
  MOD_RES (31), (31): Xaa is C or S
RVVMNPIKGYIVNSSDDFYLVNIPSLKTPAX

SEQ ID NO: 31364 - protein, 41 aa, Artificial Sequence
  GFR-binding peptide
  MOD_RES (2), (35), (36): Xaa is C or S
GXEAVSMGEPIKGYTPVGMDDFYLVNIPSLKTPVXXAKGVK

SEQ ID NO: 31365 - protein, 37 aa, Artificial Sequence
  GFR-binding peptide
  MOD_RES (35), (36): Xaa is C or S
  MOD_RES (13), (14), (15), (16), (17): Xaa is A or G
  MOD_RES (18), (19), (20), (21): Xaa is A or G or is absent
EAVSMGEPIKGYXXXXXXXXXFYLVNIPSLKTPVXXA

SEQ ID NO: 31366 - protein, 37 aa, Artificial Sequence
  GFR-binding peptide
  MOD_RES (2), (36), (37): Xaa is C or S
  MOD_RES (14), (15), (16), (17), (18): Xaa is A or G
  MOD_RES (19), (20), (21), (22): Xaa is A or G or is absent
GXSRVVMNPIKGYXXXXXXXXXFYLVNIPSLKTPAXX

SEQ ID NO: 31367 - protein, 32 aa, Artificial Sequence
  GFR-binding peptide
  MOD_RES (31), (32): Xaa is C or S
EVVMDPIKGYVVNNASDFYLINIPSLRTPVXX

SEQ ID NO: 31368 - protein, 34 aa, Artificial Sequence
  GFR-binding peptide
  MOD_RES (33), (34): Xaa is C or S
  MOD_RES (11), (12), (13), (14), (15): Xaa is A or G
  MOD_RES (16), (17), (18), (19): Xaa is A or G or is absent
EVVMDPIKGYXXXXXXXXXFYLINIPSLRAPVXX

SEQ ID NO: 31369 - protein, 38 aa, Artificial Sequence
  GFR-binding peptide
  MOD_RES (1), (3), (36), (37): Xaa is C or S
XGXEAVSMGEPIKGYTPVGMDDFYLVNIPSLKTPVXXA

SEQ ID NO: 31370 - protein, 36 aa, Artificial Sequence
  GFR-binding peptide
  MOD_RES (2), (34), (35): Xaa is C or S
GXSRVVMNPIKGYIVNSSDDFYLVNIPSLKTPAXXP

SEQ ID NO: 31371 - protein, 34 aa, Artificial Sequence
  GFR-binding peptide
  MOD_RES (31), (32): Xaa is C or S
SVAMGPIKGYYTVVGKDFYLINIPSLKTPVXXAK

SEQ ID NO: 31372 - protein, 43 aa, Artificial Sequence
  GFR-binding peptide
  MOD_RES (2), (4), (38), (39): Xaa is C or S
  MOD_RES (16), (17), (18), (19), (20): Xaa is A or G
  MOD_RES (21), (22), (23), (24): Xaa is A or G or is absent
RXGXSEVVMDPIKGYXXXXXXXXXFYLINIPSLRTPVXXTPPT

SEQ ID NO: 31373 - protein, 32 aa, Artificial Sequence
  GFR-binding peptide
  MOD_RES (31), (32): Xaa is C or S
EVVMDPIKGYVVNNAADFYLINIPSLRAPVXX

SEQ ID NO: 31374 - protein, 41 aa, Artificial Sequence
  GFR-binding peptide
  MOD_RES (1), (3), (35), (36): Xaa is C or S
XGXRDVVMGPIKGYIIQQKDNFYLMNIPSMKTPTXXPGASG

SEQ ID NO: 31375 - protein, 36 aa, Artificial Sequence
  GFR-binding peptide
  MOD_RES (1), (3), (35), (36): Xaa is C or S
XGXSEVVMDPIKGYVVNNASDFYLINIPSLRTPVXX

SEQ ID NO: 31376 - protein, 37 aa, Artificial Sequence
  GFR-binding peptide
  MOD_RES (34), (34): Xaa is C or S
  MOD_RES (12), (13), (14), (15), (16): Xaa is A or G
  MOD_RES (17), (18), (19), (20): Xaa is A or G or is absent
SRVVMNPIKGYXXXXXXXXXFYLVNIPSLKTPAXTPK

SEQ ID NO: 31377 - protein, 38 aa, Artificial Sequence
  GFR-binding peptide
  MOD_RES (1), (33), (34): Xaa is C or S
XESVAMGPIKGYYTVVGKDFYLINIPSLKTPVXXAKSA

SEQ ID NO: 31378 - protein, 38 aa, Artificial Sequence
  GFR-binding peptide
  MOD_RES (1), (35), (36): Xaa is C or S
  MOD_RES (13), (14), (15), (16), (17): Xaa is A or G
  MOD_RES (18), (19), (20), (21): Xaa is A or G or is absent
XGEVVMDPIKGYXXXXXXXXXFYLMNIPSLETPVXXAK

SEQ ID NO: 31379 - protein, 37 aa, Artificial Sequence
  GFR-binding peptide
  MOD_RES (1), (3), (35), (36): Xaa is C or S
XGXARVVMNPIKGYIVNSSDDFYLVNIPSLQTPAXXP

SEQ ID NO: 31380 - protein, 38 aa, Artificial Sequence
  GFR-binding peptide
  MOD_RES (33), (34): Xaa is C or S
  MOD_RES (11), (12), (13), (14), (15): Xaa is A or G
  MOD_RES (16), (17), (18), (19): Xaa is A or G or is absent
RVVMNPIKGYXXXXXXXXXFYLVNIPSLQTPAXXPKPV

SEQ ID NO: 31381 - protein, 35 aa, Artificial Sequence
  GFR-binding peptide
  MOD_RES (34), (35): Xaa is C or S
  MOD_RES (12), (13), (14), (15), (16): Xaa is A or G
  MOD_RES (17), (18), (19), (20): Xaa is A or G or is absent
GEVVMDPIKGYXXXXXXXXXFYLMNIPSLETPVXX

SEQ ID NO: 31382 - protein, 33 aa, Artificial Sequence
  GFR-binding peptide
  MOD_RES (12), (13), (14), (15), (16): Xaa is A or G
  MOD_RES (17), (18), (19), (20): Xaa is A or G or is absent
AEVVMDPIKGYXXXXXXXXXFYLINIPSLRAPV

SEQ ID NO: 31383 - protein, 34 aa, Artificial Sequence
  GFR-binding peptide
  MOD_RES (31), (32): Xaa is C or S
EVVMDPIKGYVVNNASDFYLINIPSLRTPVXXTP

SEQ ID NO: 31384 - protein, 36 aa, Artificial Sequence
  GFR-binding peptide
  MOD_RES (33), (34): Xaa is C or S
  MOD_RES (11), (12), (13), (14), (15): Xaa is A or G
  MOD_RES (16), (17), (18), (19): Xaa is A or G or is absent
EVVMDPIKGYXXXXXXXXXFYLINIPSLRAPVXXSA

SEQ ID NO: 31385 - protein, 40 aa, Artificial Sequence
  GFR-binding peptide
  MOD_RES (2), (4), (36): Xaa is C or S
HXGXSRVVMNPIKGYIVNSSDDFYLVNIPSLKTPAXTPKT

SEQ ID NO: 31386 - protein, 37 aa, Artificial Sequence
  GFR-binding peptide
  MOD_RES (2), (4), (36), (37): Xaa is C or S
SXGXRDVVMGPIKGYIIQQKDNFYLMNIPSMKTPTXX

SEQ ID NO: 31387 - protein, 39 aa, Artificial Sequence
  GFR-binding peptide
  MOD_RES (1), (3), (35), (36): Xaa is C or S
XGXAKVVMNPIKGYIVNNSSDFYLVNIPSLKTPAXXAKP

SEQ ID NO: 31388 - protein, 42 aa, Artificial Sequence
  GFR-binding peptide
  MOD_RES (1), (3), (38), (39): Xaa is C or S
  MOD_RES (16), (17), (18), (19), (20): Xaa is A or G
  MOD_RES (21), (22), (23), (24): Xaa is A or G or is absent
XGXEAVSMGEPIKGYXXXXXXXXXFYLVNIPSLKTPVXXAKG

SEQ ID NO: 31389 - protein, 39 aa, Artificial Sequence
  GFR-binding peptide
  MOD_RES (34), (35): Xaa is C or S
  MOD_RES (12), (13), (14), (15), (16): Xaa is A or G
  MOD_RES (17), (18), (19), (20): Xaa is A or G or is absent
GEVVMEPIKGYXXXXXXXXXFYLMNIPSLETPVXXAKPI

SEQ ID NO: 31390 - protein, 34 aa, Artificial Sequence
  GFR-binding peptide
  MOD_RES (33), (34): Xaa is C or S
  MOD_RES (11), (12), (13), (14), (15): Xaa is A or G
  MOD_RES (16), (17), (18), (19): Xaa is A or G or is absent
EVVMDPIKGYXXXXXXXXXFYLINIPSLRTPVXX

SEQ ID NO: 31391 - protein, 37 aa, Artificial Sequence
  GFR-binding peptide
  MOD_RES (34), (35): Xaa is C or S
  MOD_RES (12), (13), (14), (15), (16): Xaa is A or G
  MOD_RES (17), (18), (19), (20): Xaa is A or G or is absent
GEVVMEPIKGYXXXXXXXXXFYLMNIPSLETPVXXAK

SEQ ID NO: 31392 - protein, 34 aa, Artificial Sequence
  GFR-binding peptide
  MOD_RES (32), (33): Xaa is C or S
GEVVMEPIKGYVVKDYEDFYLMNIPSLETPVXXA

SEQ ID NO: 31393 - protein, 38 aa, Artificial Sequence
  GFR-binding peptide
  MOD_RES (2), (4), (36), (37): Xaa is C or S
RXGXSEVVMDPIKGYVVNNASDFYLINIPSLRTPVXXT

SEQ ID NO: 31394 - protein, 33 aa, Artificial Sequence
  GFR-binding peptide
  MOD_RES (31), (32): Xaa is C or S
RVVMNPIKGYIVNSSDDFYLVNIPSLKTPAXXP

SEQ ID NO: 31395 - protein, 38 aa, Artificial Sequence
  GFR-binding peptide
  MOD_RES (2), (4), (38): Xaa is C or S
  MOD_RES (16), (17), (18), (19), (20): Xaa is A or G
  MOD_RES (21), (22), (23), (24): Xaa is A or G or is absent
RXGXESVAMGPIKGYXXXXXXXXXFYLINIPSLKTPVX

SEQ ID NO: 31396 - protein, 33 aa, Artificial Sequence
  GFR-binding peptide
  MOD_RES (2), (2): Xaa is C or S
GXAKVVMNPIKGYIVNNSSDFYLVNIPSLKTPA

SEQ ID NO: 31397 - protein, 37 aa, Artificial Sequence
  GFR-binding peptide
  MOD_RES (1), (35), (36): Xaa is C or S
  MOD_RES (13), (14), (15), (16), (17): Xaa is A or G
  MOD_RES (18), (19), (20), (21): Xaa is A or G or is absent
XSRVVMNPIKGYXXXXXXXXXFYLVNIPSLKTPAXXP

SEQ ID NO: 31398 - protein, 39 aa, Artificial Sequence
  GFR-binding peptide
  MOD_RES (2), (4), (38), (39): Xaa is C or S
  MOD_RES (16), (17), (18), (19), (20): Xaa is A or G
  MOD_RES (21), (22), (23), (24): Xaa is A or G or is absent
RXGXGEVVMEPIKGYXXXXXXXXXFYLMNIPSLETPVXX

SEQ ID NO: 31399 - protein, 41 aa, Artificial Sequence
  GFR-binding peptide
  MOD_RES (2), (4), (38), (39): Xaa is C or S
  MOD_RES (16), (17), (18), (19), (20): Xaa is A or G
  MOD_RES (21), (22), (23), (24): Xaa is A or G or is absent
RXGXAEVVMDPIKGYXXXXXXXXXFYLINIPSLRAPVXXSA

SEQ ID NO: 31400 - protein, 40 aa, Artificial Sequence
  GFR-binding peptide
  MOD_RES (1), (3), (38), (39): Xaa is C or S
  MOD_RES (16), (17), (18), (19), (20): Xaa is A or G
  MOD_RES (21), (22), (23), (24): Xaa is A or G or is absent
XGXEAVSMGEPIKGYXXXXXXXXXFYLVNIPSLKTPVXXA

SEQ ID NO: 31401 - protein, 39 aa, Artificial Sequence
  GFR-binding peptide
  MOD_RES (1), (3), (35), (36): Xaa is C or S
XGXGEVVMDPIKGYVVKENEDFYLMNIPSLETPVXXAKP

SEQ ID NO: 31402 - protein, 33 aa, Artificial Sequence
  GFR-binding peptide
  MOD_RES (2), (2): Xaa is C or S
GXAEVVMDPIKGYVVNNAADFYLINIPSLRAPV

SEQ ID NO: 31403 - protein, 35 aa, Artificial Sequence
  GFR-binding peptide
  MOD_RES (2), (2): Xaa is C or S
  MOD_RES (14), (15), (16), (17), (18): Xaa is A or G
  MOD_RES (19), (20), (21), (22): Xaa is A or G or is absent
GXESVAMGPIKGYXXXXXXXXXFYLINIPSLKTPV

SEQ ID NO: 31404 - protein, 33 aa, Artificial Sequence
  GFR-binding peptide
  MOD_RES (2), (2): Xaa is C or S
GXSRVVMNPIKGYIVNSSDDFYLVNIPSLKTPA

SEQ ID NO: 31405 - protein, 39 aa, Artificial Sequence
  GFR-binding peptide
  MOD_RES (1), (3), (37), (38): Xaa is C or S
  MOD_RES (15), (16), (17), (18), (19): Xaa is A or G
  MOD_RES (20), (21), (22), (23): Xaa is A or G or is absent
XGXSEVVMDPIKGYXXXXXXXXXFYLINIPSLRTPVXXT

SEQ ID NO: 31406 - protein, 37 aa, Artificial Sequence
  GFR-binding peptide
  MOD_RES (1), (35), (36): Xaa is C or S
  MOD_RES (13), (14), (15), (16), (17): Xaa is A or G
  MOD_RES (18), (19), (20), (21): Xaa is A or G or is absent
XGEVVMDPIKGYXXXXXXXXXFYLMNIPSLETPVXXA

SEQ ID NO: 31407 - protein, 33 aa, Artificial Sequence
  GFR-binding peptide
  MOD_RES (1), (33): Xaa is C or S
XESVAMGPIKGYYTVVGKDFYLINIPSLKTPVX

SEQ ID NO: 31408 - protein, 36 aa, Artificial Sequence
  GFR-binding peptide
  MOD_RES (1), (35), (36): Xaa is C or S
  MOD_RES (13), (14), (15), (16), (17): Xaa is A or G
  MOD_RES (18), (19), (20), (21): Xaa is A or G or is absent
XGEVVMDPIKGYXXXXXXXXXFYLMNIPSLETPVXX

SEQ ID NO: 31409 - protein, 35 aa, Artificial Sequence
  GFR-binding peptide
  MOD_RES (33), (34): Xaa is C or S
EAVSMGEPIKGYTPVGMDDFYLVNIPSLKTPVXXA

SEQ ID NO: 31410 - protein, 42 aa, Artificial Sequence
  GFR-binding peptide
  MOD_RES (1), (36), (37): Xaa is C or S
  MOD_RES (14), (15), (16), (17), (18): Xaa is A or G
  MOD_RES (19), (20), (21), (22): Xaa is A or G or is absent
XEAVSMGEPIKGYXXXXXXXXXFYLVNIPSLKTPVXXAKGVK

SEQ ID NO: 31411 - protein, 39 aa, Artificial Sequence
  GFR-binding peptide
  MOD_RES (1), (3), (35), (36): Xaa is C or S
XGXSEVVMDPIKGYVVNNASDFYLINIPSLRTPVXXTPP

SEQ ID NO: 31412 - protein, 33 aa, Artificial Sequence
  GFR-binding peptide
  MOD_RES (12), (13), (14), (15), (16): Xaa is A or G
  MOD_RES (17), (18), (19), (20): Xaa is A or G or is absent
RDVVMGPIKGYXXXXXXXXXFYLMNIPSMKTPT

SEQ ID NO: 31413 - protein, 38 aa, Artificial Sequence
  GFR-binding peptide
  MOD_RES (33), (34): Xaa is C or S
  MOD_RES (11), (12), (13), (14), (15): Xaa is A or G
  MOD_RES (16), (17), (18), (19): Xaa is A or G or is absent
EVVMDPIKGYXXXXXXXXXFYLINIPSLRAPVXXSAPA

SEQ ID NO: 31414 - protein, 37 aa, Artificial Sequence
  GFR-binding peptide
  MOD_RES (2), (36), (37): Xaa is C or S
  MOD_RES (14), (15), (16), (17), (18): Xaa is A or G
  MOD_RES (19), (20), (21), (22): Xaa is A or G or is absent
GXGEVVMDPIKGYXXXXXXXXXFYLMNIPSLETPVXX

SEQ ID NO: 31415 - protein, 38 aa, Artificial Sequence
  GFR-binding peptide
  MOD_RES (34), (35): Xaa is C or S
  MOD_RES (12), (13), (14), (15), (16): Xaa is A or G
  MOD_RES (17), (18), (19), (20): Xaa is A or G or is absent
SRVVMNPIKGYXXXXXXXXXFYLVNIPSLKTPAXXPKP

SEQ ID NO: 31416 - protein, 33 aa, Artificial Sequence
  GFR-binding peptide
  MOD_RES (2), (2): Xaa is C or S
GXSEVVMDPIKGYVVNNASDFYLINIPSLRTPV

SEQ ID NO: 31417 - protein, 35 aa, Artificial Sequence
  GFR-binding peptide
  MOD_RES (32), (33): Xaa is C or S
AEVVMDPIKGYVVNNAADFYLINIPSLRAPVXXSA

SEQ ID NO: 31418 - protein, 35 aa, Artificial Sequence
  GFR-binding peptide
  MOD_RES (1), (3), (34), (35): Xaa is C or S
XGXEEVIMPIKGYLLVRGNDFYLMNIPSTKVPAXX

SEQ ID NO: 31419 - protein, 42 aa, Artificial Sequence
  GFR-binding peptide
  MOD_RES (2), (4), (36), (37): Xaa is C or S
RXGXESVAMGPIKGYYTVVGKDFYLINIPSLKTPVXXAKSAK

SEQ ID NO: 31420 - protein, 35 aa, Artificial Sequence
  GFR-binding peptide
  MOD_RES (33), (34): Xaa is C or S
  MOD_RES (11), (12), (13), (14), (15): Xaa is A or G
  MOD_RES (16), (17), (18), (19): Xaa is A or G or is absent
EEVIMPIKGYXXXXXXXXXFYLMNIPSTKVPAXXT

SEQ ID NO: 31421 - protein, 39 aa, Artificial Sequence
  GFR-binding peptide
  MOD_RES (1), (3), (37), (38): Xaa is C or S
  MOD_RES (15), (16), (17), (18), (19): Xaa is A or G
  MOD_RES (20), (21), (22), (23): Xaa is A or G or is absent
XGXAKVVMNPIKGYXXXXXXXXXFYLVNIPSLKTPAXXA

SEQ ID NO: 31422 - protein, 33 aa, Artificial Sequence
  GFR-binding peptide
  MOD_RES (32), (33): Xaa is C or S
GEVVMDPIKGYVVKENEDFYLMNIPSLETPVXX

SEQ ID NO: 31423 - protein, 38 aa, Artificial Sequence
  GFR-binding peptide
  MOD_RES (34), (35): Xaa is C or S
  MOD_RES (12), (13), (14), (15), (16): Xaa is A or G
  MOD_RES (17), (18), (19), (20): Xaa is A or G or is absent
GEVVMDPIKGYXXXXXXXXXFYLMNIPSLETPVXXAKP

SEQ ID NO: 31424 - protein, 35 aa, Artificial Sequence
  GFR-binding peptide
  MOD_RES (1), (3), (35): Xaa is C or S
XGXGEVVMDPIKGYVVKENEDFYLMNIPSLETPVX

SEQ ID NO: 31425 - protein, 40 aa, Artificial Sequence
  GFR-binding peptide
  MOD_RES (2), (4), (36), (37): Xaa is C or S
HXGXARVVMNPIKGYIVNSSDDFYLVNIPSLQTPAXXPKP

SEQ ID NO: 31426 - protein, 41 aa, Artificial Sequence
  GFR-binding peptide
  MOD_RES (1), (3), (35), (36): Xaa is C or S
XGXESVAMGPIKGYYTVVGKDFYLINIPSLKTPVXXAKSAK

SEQ ID NO: 31427 - protein, 32 aa, Artificial Sequence
  GFR-binding peptide
  MOD_RES (31), (32): Xaa is C or S
RVVMNPIKGYIVNSSDDFYLVNIPSLKTPAXX

SEQ ID NO: 31428 - protein, 43 aa, Artificial Sequence
  GFR-binding peptide
  MOD_RES (1), (3), (37), (38): Xaa is C or S
  MOD_RES (15), (16), (17), (18), (19): Xaa is A or G
  MOD_RES (20), (21), (22), (23): Xaa is A or G or is absent
XGXSEVVMDPIKGYXXXXXXXXXFYLINIPSLRTPVXXTPPTS

SEQ ID NO: 31429 - protein, 38 aa, Artificial Sequence
  GFR-binding peptide
  MOD_RES (1), (3), (35), (36): Xaa is C or S
XGXESVAMGPIKGYYTVVGKDFYLINIPSLKTPVXXAK

SEQ ID NO: 31430 - protein, 38 aa, Artificial Sequence
  GFR-binding peptide
  MOD_RES (32), (33): Xaa is C or S
AEVVMDPIKGYVVNNAADFYLINIPSLRAPVXXSAPAA

SEQ ID NO: 31431 - protein, 44 aa, Artificial Sequence
  GFR-binding peptide
  MOD_RES (2), (4), (38), (39): Xaa is C or S
  MOD_RES (16), (17), (18), (19), (20): Xaa is A or G
  MOD_RES (21), (22), (23), (24): Xaa is A or G or is absent
RXGXSEVVMDPIKGYXXXXXXXXXFYLINIPSLRTPVXXTPPTS

SEQ ID NO: 31432 - protein, 41 aa, Artificial Sequence
  GFR-binding peptide
  MOD_RES (2), (4), (36), (37): Xaa is C or S
RXGXSEVVMDPIKGYVVNNASDFYLINIPSLRTPVXXTPPT

SEQ ID NO: 31433 - protein, 36 aa, Artificial Sequence
  GFR-binding peptide
  MOD_RES (2), (4): Xaa is C or S
RXGXEAVSMGEPIKGYTPVGMDDFYLVNIPSLKTPV

SEQ ID NO: 31434 - protein, 41 aa, Artificial Sequence
  GFR-binding peptide
  MOD_RES (1), (3), (35), (36): Xaa is C or S
XGXARVVMNPIKGYIVNSSDDFYLVNIPSLQTPAXXPKPVT

SEQ ID NO: 31435 - protein, 33 aa, Artificial Sequence
  GFR-binding peptide
  MOD_RES (33), (33): Xaa is C or S
  MOD_RES (11), (12), (13), (14), (15): Xaa is A or G
  MOD_RES (16), (17), (18), (19): Xaa is A or G or is absent
RVVMNPIKGYXXXXXXXXXFYLVNIPSLQTPAX

SEQ ID NO: 31436 - protein, 35 aa, Artificial Sequence
  GFR-binding peptide
  MOD_RES (2), (33), (34): Xaa is C or S
GXEEVIMPIKGYLLVRGNDFYLMNIPSTKVPAXXT

SEQ ID NO: 31437 - protein, 34 aa, Artificial Sequence
  GFR-binding peptide
  MOD_RES (1), (33), (34): Xaa is C or S
XSEVVMDPIKGYVVNNASDFYLINIPSLRTPVXX

SEQ ID NO: 31438 - protein, 35 aa, Artificial Sequence
  GFR-binding peptide
  MOD_RES (32), (33): Xaa is C or S
ESVAMGPIKGYYTVVGKDFYLINIPSLKTPVXXAK

SEQ ID NO: 31439 - protein, 43 aa, Artificial Sequence
  GFR-binding peptide
  MOD_RES (2), (37), (38): Xaa is C or S
  MOD_RES (15), (16), (17), (18), (19): Xaa is A or G
  MOD_RES (20), (21), (22), (23): Xaa is A or G or is absent
GXEAVSMGEPIKGYXXXXXXXXXFYLVNIPSLKTPVXXAKGVK

SEQ ID NO: 31440 - protein, 43 aa, Artificial Sequence
  GFR-binding peptide
  MOD_RES (2), (4), (38), (39): Xaa is C or S
  MOD_RES (16), (17), (18), (19), (20): Xaa is A or G
  MOD_RES (21), (22), (23), (24): Xaa is A or G or is absent
HXGXARVVMNPIKGYXXXXXXXXXFYLVNIPSLQTPAXXPKPV

SEQ ID NO: 31441 - protein, 40 aa, Artificial Sequence
  GFR-binding peptide
  MOD_RES (1), (3), (35), (36): Xaa is C or S
XGXSEVVMDPIKGYVVNNASDFYLINIPSLRTPVXXTPPT

SEQ ID NO: 31442 - protein, 36 aa, Artificial Sequence
  GFR-binding peptide
  MOD_RES (1), (3): Xaa is C or S
  MOD_RES (15), (16), (17), (18), (19): Xaa is A or G
  MOD_RES (20), (21), (22), (23): Xaa is A or G or is absent
XGXRDVVMGPIKGYXXXXXXXXXFYLMNIPSMKTPT

SEQ ID NO: 31443 - protein, 33 aa, Artificial Sequence
  GFR-binding peptide
  MOD_RES (33), (33): Xaa is C or S
EAVSMGEPIKGYTPVGMDDFYLVNIPSLKTPVX

SEQ ID NO: 31444 - protein, 38 aa, Artificial Sequence
  GFR-binding peptide
  MOD_RES (33), (33): Xaa is C or S
  MOD_RES (11), (12), (13), (14), (15): Xaa is A or G
  MOD_RES (16), (17), (18), (19): Xaa is A or G or is absent
RVVMNPIKGYXXXXXXXXXFYLVNIPSLKTPAXTPKTV

SEQ ID NO: 31445 - protein, 44 aa, Artificial Sequence
  GFR-binding peptide
  MOD_RES (1), (3), (38), (39): Xaa is C or S
  MOD_RES (16), (17), (18), (19), (20): Xaa is A or G
  MOD_RES (21), (22), (23), (24): Xaa is A or G or is absent
XGXEAVSMGEPIKGYXXXXXXXXXFYLVNIPSLKTPVXXAKGVK

SEQ ID NO: 31446 - protein, 38 aa, Artificial Sequence
  GFR-binding peptide
  MOD_RES (2), (34), (35): Xaa is C or S
GXESVAMGPIKGYYTVVGKDFYLINIPSLKTPVXXAKS

SEQ ID NO: 31447 - protein, 39 aa, Artificial Sequence
  GFR-binding peptide
  MOD_RES (35), (36): Xaa is C or S
  MOD_RES (13), (14), (15), (16), (17): Xaa is A or G
  MOD_RES (18), (19), (20), (21): Xaa is A or G or is absent
EAVSMGEPIKGYXXXXXXXXXFYLVNIPSLKTPVXXAKG

SEQ ID NO: 31448 - protein, 41 aa, Artificial Sequence
  GFR-binding peptide
  MOD_RES (1), (35), (36): Xaa is C or S
  MOD_RES (13), (14), (15), (16), (17): Xaa is A or G
  MOD_RES (18), (19), (20), (21): Xaa is A or G or is absent
XSRVVMNPIKGYXXXXXXXXXFYLVNIPSLKTPAXXPKPVY

SEQ ID NO: 31449 - protein, 41 aa, Artificial Sequence
  GFR-binding peptide
  MOD_RES (1), (35), (36): Xaa is C or S
  MOD_RES (13), (14), (15), (16), (17): Xaa is A or G
  MOD_RES (18), (19), (20), (21): Xaa is A or G or is absent
XAEVVMDPIKGYXXXXXXXXXFYLINIPSLRAPVXXSAPAA

SEQ ID NO: 31450 - protein, 33 aa, Artificial Sequence
  GFR-binding peptide
  MOD_RES (1), (33): Xaa is C or S
XARVVMNPIKGYIVNSSDDFYLVNIPSLQTPAX

SEQ ID NO: 31451 - protein, 34 aa, Artificial Sequence
  GFR-binding peptide
  MOD_RES (1), (1): Xaa is C or S
  MOD_RES (13), (14), (15), (16), (17): Xaa is A or G
  MOD_RES (18), (19), (20), (21): Xaa is A or G or is absent
XAKVVMNPIKGYXXXXXXXXXFYLVNIPSLKTPA

SEQ ID NO: 31452 - protein, 33 aa, Artificial Sequence
  GFR-binding peptide
  MOD_RES (1), (1): Xaa is C or S
  MOD_RES (12), (13), (14), (15), (16): Xaa is A or G
  MOD_RES (17), (18), (19), (20): Xaa is A or G or is absent
XEEVIMPIKGYXXXXXXXXXFYLMNIPSTKVPA

SEQ ID NO: 31453 - protein, 35 aa, Artificial Sequence
  GFR-binding peptide
  MOD_RES (2), (4): Xaa is C or S
RXGXSEVVMDPIKGYVVNNASDFYLINIPSLRTPV

SEQ ID NO: 31454 - protein, 39 aa, Artificial Sequence
  GFR-binding peptide
  MOD_RES (1), (3), (36), (37): Xaa is C or S
XGXEAVSMGEPIKGYTPVGMDDFYLVNIPSLKTPVXXAK

SEQ ID NO: 31455 - protein, 34 aa, Artificial Sequence
  GFR-binding peptide
  MOD_RES (32), (33): Xaa is C or S
AKVVMNPIKGYIVNNSSDFYLVNIPSLKTPAXXA

SEQ ID NO: 31456 - protein, 32 aa, Artificial Sequence
  GFR-binding peptide
  MOD_RES (32), (32): Xaa is C or S
ARVVMNPIKGYIVNSSDDFYLVNIPSLQTPAX

SEQ ID NO: 31457 - protein, 39 aa, Artificial Sequence
  GFR-binding peptide
  MOD_RES (1), (3), (35), (36): Xaa is C or S
XGXGEVVMEPIKGYVVKDYEDFYLMNIPSLETPVXXAKP

SEQ ID NO: 31458 - protein, 38 aa, Artificial Sequence
  GFR-binding peptide
  MOD_RES (33), (34): Xaa is C or S
  MOD_RES (11), (12), (13), (14), (15): Xaa is A or G
  MOD_RES (16), (17), (18), (19): Xaa is A or G or is absent
SVAMGPIKGYXXXXXXXXXFYLINIPSLKTPVXXAKSA

SEQ ID NO: 31459 - protein, 42 aa, Artificial Sequence
  GFR-binding peptide
  MOD_RES (1), (3), (37), (38): Xaa is C or S
  MOD_RES (15), (16), (17), (18), (19): Xaa is A or G
  MOD_RES (20), (21), (22), (23): Xaa is A or G or is absent
XGXGEVVMEPIKGYXXXXXXXXXFYLMNIPSLETPVXXAKPI

SEQ ID NO: 31460 - protein, 36 aa, Artificial Sequence
  GFR-binding peptide
  MOD_RES (1), (33), (34): Xaa is C or S
XSEVVMDPIKGYVVNNASDFYLINIPSLRTPVXXTP

SEQ ID NO: 31461 - protein, 41 aa, Artificial Sequence
  GFR-binding peptide
  MOD_RES (2), (36), (37): Xaa is C or S
  MOD_RES (14), (15), (16), (17), (18): Xaa is A or G
  MOD_RES (19), (20), (21), (22): Xaa is A or G or is absent
GXRDVVMGPIKGYXXXXXXXXXFYLMNIPSMKTPTXXPGAS

SEQ ID NO: 31462 - protein, 41 aa, Artificial Sequence
  GFR-binding peptide
  MOD_RES (1), (36), (37): Xaa is C or S
  MOD_RES (14), (15), (16), (17), (18): Xaa is A or G
  MOD_RES (19), (20), (21), (22): Xaa is A or G or is absent
XEAVSMGEPIKGYXXXXXXXXXFYLVNIPSLKTPVXXAKGV

SEQ ID NO: 31463 - protein, 34 aa, Artificial Sequence
  GFR-binding peptide
  MOD_RES (33), (34): Xaa is C or S
  MOD_RES (11), (12), (13), (14), (15): Xaa is A or G
  MOD_RES (16), (17), (18), (19): Xaa is A or G or is absent
SVAMGPIKGYXXXXXXXXXFYLINIPSLKTPVXX

SEQ ID NO: 31464 - protein, 36 aa, Artificial Sequence
  GFR-binding peptide
  MOD_RES (2), (36): Xaa is C or S
  MOD_RES (14), (15), (16), (17), (18): Xaa is A or G
  MOD_RES (19), (20), (21), (22): Xaa is A or G or is absent
GXRDVVMGPIKGYXXXXXXXXXFYLMNIPSMKTPTX

SEQ ID NO: 31465 - protein, 37 aa, Artificial Sequence
  GFR-binding peptide
  MOD_RES (33), (34): Xaa is C or S
  MOD_RES (11), (12), (13), (14), (15): Xaa is A or G
  MOD_RES (16), (17), (18), (19): Xaa is A or G or is absent
DVVMGPIKGYXXXXXXXXXFYLMNIPSMKTPTXXPGA

SEQ ID NO: 31466 - protein, 32 aa, Artificial Sequence
  GFR-binding peptide
  MOD_RES (31), (32): Xaa is C or S
SVAMGPIKGYYTVVGKDFYLINIPSLKTPVXX

SEQ ID NO: 31467 - protein, 38 aa, Artificial Sequence
  GFR-binding peptide
  MOD_RES (2), (4), (36), (37): Xaa is C or S
HXGXAKVVMNPIKGYIVNNSSDFYLVNIPSLKTPAXXA

SEQ ID NO: 31468 - protein, 37 aa, Artificial Sequence
  GFR-binding peptide
  MOD_RES (2), (36), (37): Xaa is C or S
  MOD_RES (14), (15), (16), (17), (18): Xaa is A or G
  MOD_RES (19), (20), (21), (22): Xaa is A or G or is absent
GXAKVVMNPIKGYXXXXXXXXXFYLVNIPSLKTPAXX

SEQ ID NO: 31469 - protein, 36 aa, Artificial Sequence
  GFR-binding peptide
  MOD_RES (32), (33): Xaa is C or S
AEVVMDPIKGYVVNNAADFYLINIPSLRAPVXXSAP

SEQ ID NO: 31470 - protein, 31 aa, Artificial Sequence
  GFR-binding peptide
  MOD_RES (1), (1): Xaa is C or S
XEEVIMPIKGYLLVRGNDFYLMNIPSTKVPA

SEQ ID NO: 31471 - protein, 34 aa, Artificial Sequence
  GFR-binding peptide
  MOD_RES (2), (4): Xaa is C or S
LXGXEEVIMPIKGYLLVRGNDFYLMNIPSTKVPA

SEQ ID NO: 31472 - protein, 40 aa, Artificial Sequence
  GFR-binding peptide
  MOD_RES (1), (3), (37), (38): Xaa is C or S
  MOD_RES (15), (16), (17), (18), (19): Xaa is A or G
  MOD_RES (20), (21), (22), (23): Xaa is A or G or is absent
XGXGEVVMDPIKGYXXXXXXXXXFYLMNIPSLETPVXXAK

SEQ ID NO: 31473 - protein, 39 aa, Artificial Sequence
  GFR-binding peptide
  MOD_RES (1), (33), (34): Xaa is C or S
XAKVVMNPIKGYIVNNSSDFYLVNIPSLKTPAXXAKPVA

SEQ ID NO: 31474 - protein, 39 aa, Artificial Sequence
  GFR-binding peptide
  MOD_RES (1), (3), (35), (36): Xaa is C or S
XGXRDVVMGPIKGYIIQQKDNFYLMNIPSMKTPTXXPGA

SEQ ID NO: 31475 - protein, 35 aa, Artificial Sequence
  GFR-binding peptide
  MOD_RES (33), (34): Xaa is C or S
  MOD_RES (11), (12), (13), (14), (15): Xaa is A or G
  MOD_RES (16), (17), (18), (19): Xaa is A or G or is absent
EVVMEPIKGYXXXXXXXXXFYLMNIPSLETPVXXA

SEQ ID NO: 31476 - protein, 42 aa, Artificial Sequence
  GFR-binding peptide
  MOD_RES (2), (4), (36), (37): Xaa is C or S
RXGXSEVVMDPIKGYVVNNASDFYLINIPSLRTPVXXTPPTS

SEQ ID NO: 31477 - protein, 41 aa, Artificial Sequence
  GFR-binding peptide
  MOD_RES (2), (4), (36), (37): Xaa is C or S
RXGXESVAMGPIKGYYTVVGKDFYLINIPSLKTPVXXAKSA

SEQ ID NO: 31478 - protein, 30 aa, Artificial Sequence
  GFR-binding peptide
DVVMGPIKGYIIQQKDNFYLMNIPSMKTPT

SEQ ID NO: 31479 - protein, 39 aa, Artificial Sequence
  GFR-binding peptide
  MOD_RES (2), (4), (38), (39): Xaa is C or S
  MOD_RES (16), (17), (18), (19), (20): Xaa is A or G
  MOD_RES (21), (22), (23), (24): Xaa is A or G or is absent
RXGXSEVVMDPIKGYXXXXXXXXXFYLINIPSLRTPVXX

SEQ ID NO: 31480 - protein, 42 aa, Artificial Sequence
  GFR-binding peptide
  MOD_RES (2), (36), (37): Xaa is C or S
  MOD_RES (14), (15), (16), (17), (18): Xaa is A or G
  MOD_RES (19), (20), (21), (22): Xaa is A or G or is absent
GXRDVVMGPIKGYXXXXXXXXXFYLMNIPSMKTPTXXPGASG

SEQ ID NO: 31481 - protein, 37 aa, Artificial Sequence
  GFR-binding peptide
  MOD_RES (2), (36), (37): Xaa is C or S
  MOD_RES (14), (15), (16), (17), (18): Xaa is A or G
  MOD_RES (19), (20), (21), (22): Xaa is A or G or is absent
GXARVVMNPIKGYXXXXXXXXXFYLVNIPSLQTPAXX

SEQ ID NO: 31482 - protein, 39 aa, Artificial Sequence
  GFR-binding peptide
  MOD_RES (2), (36), (37): Xaa is C or S
  MOD_RES (14), (15), (16), (17), (18): Xaa is A or G
  MOD_RES (19), (20), (21), (22): Xaa is A or G or is absent
GXAEVVMDPIKGYXXXXXXXXXFYLINIPSLRAPVXXSA

SEQ ID NO: 31483 - protein, 37 aa, Artificial Sequence
  GFR-binding peptide
  MOD_RES (1), (33), (34): Xaa is C or S
XGEVVMDPIKGYVVKENEDFYLMNIPSLETPVXXAKP

SEQ ID NO: 31484 - protein, 41 aa, Artificial Sequence
  GFR-binding peptide
  MOD_RES (2), (4), (36), (37): Xaa is C or S
HXGXSRVVMNPIKGYIVNSSDDFYLVNIPSLKTPAXXPKPV

SEQ ID NO: 31485 - protein, 39 aa, Artificial Sequence
  GFR-binding peptide
  MOD_RES (34), (35): Xaa is C or S
  MOD_RES (12), (13), (14), (15), (16): Xaa is A or G
  MOD_RES (17), (18), (19), (20): Xaa is A or G or is absent
SEVVMDPIKGYXXXXXXXXXFYLINIPSLRTPVXXTPPT

SEQ ID NO: 31486 - protein, 36 aa, Artificial Sequence
  GFR-binding peptide
  MOD_RES (1), (3): Xaa is C or S
  MOD_RES (15), (16), (17), (18), (19): Xaa is A or G
  MOD_RES (20), (21), (22), (23): Xaa is A or G or is absent
XGXSRVVMNPIKGYXXXXXXXXXFYLVNIPSLKTPA

SEQ ID NO: 31487 - protein, 37 aa, Artificial Sequence
  GFR-binding peptide
  MOD_RES (1), (3), (35), (36): Xaa is C or S
XGXGEVVMDPIKGYVVKENEDFYLMNIPSLETPVXXA

SEQ ID NO: 31488 - protein, 33 aa, Artificial Sequence
  GFR-binding peptide
  MOD_RES (2), (33): Xaa is C or S
GXEEVIMPIKGYLLVRGNDFYLMNIPSTKVPAX

SEQ ID NO: 31489 - protein, 36 aa, Artificial Sequence
  GFR-binding peptide
  MOD_RES (2), (35), (36): Xaa is C or S
  MOD_RES (13), (14), (15), (16), (17): Xaa is A or G
  MOD_RES (18), (19), (20), (21): Xaa is A or G or is absent
GXEEVIMPIKGYXXXXXXXXXFYLMNIPSTKVPAXX

SEQ ID NO: 31490 - protein, 34 aa, Artificial Sequence
  GFR-binding peptide
  MOD_RES (1), (1): Xaa is C or S
  MOD_RES (13), (14), (15), (16), (17): Xaa is A or G
  MOD_RES (18), (19), (20), (21): Xaa is A or G or is absent
XSEVVMDPIKGYXXXXXXXXXFYLINIPSLRTPV

SEQ ID NO: 31491 - protein, 35 aa, Artificial Sequence
  GFR-binding peptide
  MOD_RES (2), (34), (35): Xaa is C or S
GXAKVVMNPIKGYIVNNSSDFYLVNIPSLKTPAXX

SEQ ID NO: 31492 - protein, 41 aa, Artificial Sequence
  GFR-binding peptide
  MOD_RES (2), (4), (38), (39): Xaa is C or S
  MOD_RES (16), (17), (18), (19), (20): Xaa is A or G
  MOD_RES (21), (22), (23), (24): Xaa is A or G or is absent
HXGXARVVMNPIKGYXXXXXXXXXFYLVNIPSLQTPAXXPK

SEQ ID NO: 31493 - protein, 43 aa, Artificial Sequence
  GFR-binding peptide
  MOD_RES (1), (3), (37), (38): Xaa is C or S
  MOD_RES (15), (16), (17), (18), (19): Xaa is A or G
  MOD_RES (20), (21), (22), (23): Xaa is A or G or is absent
XGXAEVVMDPIKGYXXXXXXXXXFYLINIPSLRAPVXXSAPAA

SEQ ID NO: 31494 - protein, 36 aa, Artificial Sequence
  GFR-binding peptide
  MOD_RES (1), (33): Xaa is C or S
XSRVVMNPIKGYIVNSSDDFYLVNIPSLKTPAXTPK

SEQ ID NO: 31495 - protein, 35 aa, Artificial Sequence
  GFR-binding peptide
  MOD_RES (33), (34): Xaa is C or S
  MOD_RES (11), (12), (13), (14), (15): Xaa is A or G
  MOD_RES (16), (17), (18), (19): Xaa is A or G or is absent
RVVMNPIKGYXXXXXXXXXFYLVNIPSLKTPAXXP

SEQ ID NO: 31496 - protein, 36 aa, Artificial Sequence
  GFR-binding peptide
  MOD_RES (2), (36): Xaa is C or S
  MOD_RES (14), (15), (16), (17), (18): Xaa is A or G
  MOD_RES (19), (20), (21), (22): Xaa is A or G or is absent
GXSEVVMDPIKGYXXXXXXXXXFYLINIPSLRTPVX

SEQ ID NO: 31497 - protein, 35 aa, Artificial Sequence
  GFR-binding peptide
  MOD_RES (1), (34), (35): Xaa is C or S
  MOD_RES (12), (13), (14), (15), (16): Xaa is A or G
  MOD_RES (17), (18), (19), (20): Xaa is A or G or is absent
XEEVIMPIKGYXXXXXXXXXFYLMNIPSTKVPAXX

SEQ ID NO: 31498 - protein, 32 aa, Artificial Sequence
  GFR-binding peptide
  MOD_RES (11), (12), (13), (14), (15): Xaa is A or G
  MOD_RES (16), (17), (18), (19): Xaa is A or G or is absent
EVVMDPIKGYXXXXXXXXXFYLINIPSLRTPV

SEQ ID NO: 31499 - protein, 32 aa, Artificial Sequence
  GFR-binding peptide
  MOD_RES (31), (32): Xaa is C or S
EEVIMPIKGYLLVRGNDFYLMNIPSTKVPAXX

SEQ ID NO: 31500 - protein, 40 aa, Artificial Sequence
  GFR-binding peptide
  MOD_RES (1), (36), (37): Xaa is C or S
  MOD_RES (14), (15), (16), (17), (18): Xaa is A or G
  MOD_RES (19), (20), (21), (22): Xaa is A or G or is absent
XEAVSMGEPIKGYXXXXXXXXXFYLVNIPSLKTPVXXAKG

SEQ ID NO: 31501 - protein, 32 aa, Artificial Sequence
  GFR-binding peptide
  MOD_RES (11), (12), (13), (14), (15): Xaa is A or G
  MOD_RES (16), (17), (18), (19): Xaa is A or G or is absent
EVVMDPIKGYXXXXXXXXXFYLINIPSLRAPV

SEQ ID NO: 31502 - protein, 36 aa, Artificial Sequence
  GFR-binding peptide
  MOD_RES (2), (4), (36): Xaa is C or S
RXGXGEVVMEPIKGYVVKDYEDFYLMNIPSLETPVX

SEQ ID NO: 31503 - protein, 35 aa, Artificial Sequence
  GFR-binding peptide
  MOD_RES (32), (33): Xaa is C or S
RDVVMGPIKGYIIQQKDNFYLMNIPSMKTPTXXPG

SEQ ID NO: 31504 - protein, 38 aa, Artificial Sequence
  GFR-binding peptide
  MOD_RES (34), (35): Xaa is C or S
  MOD_RES (12), (13), (14), (15), (16): Xaa is A or G
  MOD_RES (17), (18), (19), (20): Xaa is A or G or is absent
RDVVMGPIKGYXXXXXXXXXFYLMNIPSMKTPTXXPGA

SEQ ID NO: 31505 - protein, 42 aa, Artificial Sequence
  GFR-binding peptide
  MOD_RES (1), (3), (37), (38): Xaa is C or S
  MOD_RES (15), (16), (17), (18), (19): Xaa is A or G
  MOD_RES (20), (21), (22), (23): Xaa is A or G or is absent
XGXESVAMGPIKGYXXXXXXXXXFYLINIPSLKTPVXXAKSA

SEQ ID NO: 31506 - protein, 39 aa, Artificial Sequence
  GFR-binding peptide
  MOD_RES (1), (34), (35): Xaa is C or S
  MOD_RES (12), (13), (14), (15), (16): Xaa is A or G
  MOD_RES (17), (18), (19), (20): Xaa is A or G or is absent
XEEVIMPIKGYXXXXXXXXXFYLMNIPSTKVPAXXTSPV

SEQ ID NO: 31507 - protein, 43 aa, Artificial Sequence
  GFR-binding peptide
  MOD_RES (1), (3), (37), (38): Xaa is C or S
  MOD_RES (15), (16), (17), (18), (19): Xaa is A or G
  MOD_RES (20), (21), (22), (23): Xaa is A or G or is absent
XGXGEVVMEPIKGYXXXXXXXXXFYLMNIPSLETPVXXAKPIS

SEQ ID NO: 31508 - protein, 43 aa, Artificial Sequence
  GFR-binding peptide
  MOD_RES (2), (4), (38), (39): Xaa is C or S
  MOD_RES (16), (17), (18), (19), (20): Xaa is A or G
  MOD_RES (21), (22), (23), (24): Xaa is A or G or is absent
RXGXAEVVMDPIKGYXXXXXXXXXFYLINIPSLRAPVXXSAPA

SEQ ID NO: 31509 - protein, 42 aa, Artificial Sequence
  GFR-binding peptide
  MOD_RES (2), (4), (36), (37): Xaa is C or S
RXGXAEVVMDPIKGYVVNNAADFYLINIPSLRAPVXXSAPAA

SEQ ID NO: 31510 - protein, 35 aa, Artificial Sequence
  GFR-binding peptide
  MOD_RES (34), (35): Xaa is C or S
  MOD_RES (12), (13), (14), (15), (16): Xaa is A or G
  MOD_RES (17), (18), (19), (20): Xaa is A or G or is absent
SEVVMDPIKGYXXXXXXXXXFYLINIPSLRTPVXX

SEQ ID NO: 31511 - protein, 37 aa, Artificial Sequence
  GFR-binding peptide
  MOD_RES (1), (3), (37): Xaa is C or S
  MOD_RES (15), (16), (17), (18), (19): Xaa is A or G
  MOD_RES (20), (21), (22), (23): Xaa is A or G or is absent
XGXSRVVMNPIKGYXXXXXXXXXFYLVNIPSLKTPAX

SEQ ID NO: 31512 - protein, 33 aa, Artificial Sequence
  GFR-binding peptide
  MOD_RES (33), (33): Xaa is C or S
  MOD_RES (11), (12), (13), (14), (15): Xaa is A or G
  MOD_RES (16), (17), (18), (19): Xaa is A or G or is absent
EEVIMPIKGYXXXXXXXXXFYLMNIPSTKVPAX

SEQ ID NO: 31513 - protein, 37 aa, Artificial Sequence
  GFR-binding peptide
  MOD_RES (31), (32): Xaa is C or S
RVVMNPIKGYIVNSSDDFYLVNIPSLKTPAXXPKPVH

SEQ ID NO: 31514 - protein, 41 aa, Artificial Sequence
  GFR-binding peptide
  MOD_RES (2), (36): Xaa is C or S
  MOD_RES (14), (15), (16), (17), (18): Xaa is A or G
  MOD_RES (19), (20), (21), (22): Xaa is A or G or is absent
GXSRVVMNPIKGYXXXXXXXXXFYLVNIPSLKTPAXTPKTV

SEQ ID NO: 31515 - protein, 37 aa, Artificial Sequence
  GFR-binding peptide
  MOD_RES (2), (4), (37): Xaa is C or S
RXGXEAVSMGEPIKGYTPVGMDDFYLVNIPSLKTPVX

SEQ ID NO: 31516 - protein, 40 aa, Artificial Sequence
  GFR-binding peptide
  MOD_RES (1), (3), (37), (38): Xaa is C or S
  MOD_RES (15), (16), (17), (18), (19): Xaa is A or G
  MOD_RES (20), (21), (22), (23): Xaa is A or G or is absent
XGXSRVVMNPIKGYXXXXXXXXXFYLVNIPSLKTPAXXPK

SEQ ID NO: 31517 - protein, 38 aa, Artificial Sequence
  GFR-binding peptide
  MOD_RES (2), (34), (35): Xaa is C or S
GXARVVMNPIKGYIVNSSDDFYLVNIPSLQTPAXXPKP

SEQ ID NO: 31518 - protein, 33 aa, Artificial Sequence
  GFR-binding peptide
  MOD_RES (31), (32): Xaa is C or S
EVVMDPIKGYVVKENEDFYLMNIPSLETPVXXA

SEQ ID NO: 31519 - protein, 36 aa, Artificial Sequence
  GFR-binding peptide
  MOD_RES (33), (34): Xaa is C or S
  MOD_RES (11), (12), (13), (14), (15): Xaa is A or G
  MOD_RES (16), (17), (18), (19): Xaa is A or G or is absent
EVVMDPIKGYXXXXXXXXXFYLINIPSLRTPVXXTP

SEQ ID NO: 31520 - protein, 39 aa, Artificial Sequence
  GFR-binding peptide
  MOD_RES (2), (36), (37): Xaa is C or S
  MOD_RES (14), (15), (16), (17), (18): Xaa is A or G
  MOD_RES (19), (20), (21), (22): Xaa is A or G or is absent
GXGEVVMEPIKGYXXXXXXXXXFYLMNIPSLETPVXXAK

SEQ ID NO: 31521 - protein, 38 aa, Artificial Sequence
  GFR-binding peptide
  MOD_RES (1), (35): Xaa is C or S
  MOD_RES (13), (14), (15), (16), (17): Xaa is A or G
  MOD_RES (18), (19), (20), (21): Xaa is A or G or is absent
XSRVVMNPIKGYXXXXXXXXXFYLVNIPSLKTPAXTPK

SEQ ID NO: 31522 - protein, 38 aa, Artificial Sequence
  GFR-binding peptide
  MOD_RES (2), (4), (36): Xaa is C or S
HXGXSRVVMNPIKGYIVNSSDDFYLVNIPSLKTPAXTP

SEQ ID NO: 31523 - protein, 42 aa, Artificial Sequence
  GFR-binding peptide
  MOD_RES (2), (36), (37): Xaa is C or S
  MOD_RES (14), (15), (16), (17), (18): Xaa is A or G
  MOD_RES (19), (20), (21), (22): Xaa is A or G or is absent
GXSRVVMNPIKGYXXXXXXXXXFYLVNIPSLKTPAXXPKPVH

SEQ ID NO: 31524 - protein, 41 aa, Artificial Sequence
  GFR-binding peptide
  MOD_RES (1), (3), (37): Xaa is C or S
  MOD_RES (15), (16), (17), (18), (19): Xaa is A or G
  MOD_RES (20), (21), (22), (23): Xaa is A or G or is absent
XGXSRVVMNPIKGYXXXXXXXXXFYLVNIPSLKTPAXTPKT

SEQ ID NO: 31525 - protein, 40 aa, Artificial Sequence
  GFR-binding peptide
  MOD_RES (2), (34), (35): Xaa is C or S
GXGEVVMDPIKGYVVKENEDFYLMNIPSLETPVXXAKPIK

SEQ ID NO: 31526 - protein, 37 aa, Artificial Sequence
  GFR-binding peptide
  MOD_RES (2), (4), (35), (36): Xaa is C or S
LXGXEEVIMPIKGYLLVRGNDFYLMNIPSTKVPAXXT

SEQ ID NO: 31527 - protein, 39 aa, Artificial Sequence
  GFR-binding peptide
  MOD_RES (2), (4), (36), (37): Xaa is C or S
RXGXGEVVMEPIKGYVVKDYEDFYLMNIPSLETPVXXAK

SEQ ID NO: 31528 - protein, 40 aa, Artificial Sequence
  GFR-binding peptide
  MOD_RES (2), (4), (39), (40): Xaa is C or S
  MOD_RES (17), (18), (19), (20), (21): Xaa is A or G
  MOD_RES (22), (23), (24), (25): Xaa is A or G or is absent
RXGXEAVSMGEPIKGYXXXXXXXXXFYLVNIPSLKTPVXX

SEQ ID NO: 31529 - protein, 43 aa, Artificial Sequence
  GFR-binding peptide
  MOD_RES (2), (4), (38): Xaa is C or S
  MOD_RES (16), (17), (18), (19), (20): Xaa is A or G
  MOD_RES (21), (22), (23), (24): Xaa is A or G or is absent
HXGXSRVVMNPIKGYXXXXXXXXXFYLVNIPSLKTPAXTPKTV

SEQ ID NO: 31530 - protein, 33 aa, Artificial Sequence
  GFR-binding peptide
  MOD_RES (1), (33): Xaa is C or S
XAKVVMNPIKGYIVNNSSDFYLVNIPSLKTPAX

SEQ ID NO: 31531 - protein, 39 aa, Artificial Sequence
  GFR-binding peptide
  MOD_RES (1), (33), (34): Xaa is C or S
XRDVVMGPIKGYIIQQKDNFYLMNIPSMKTPTXXPGASG

SEQ ID NO: 31532 - protein, 33 aa, Artificial Sequence
  GFR-binding peptide
  MOD_RES (33), (33): Xaa is C or S
  MOD_RES (11), (12), (13), (14), (15): Xaa is A or G
  MOD_RES (16), (17), (18), (19): Xaa is A or G or is absent
KVVMNPIKGYXXXXXXXXXFYLVNIPSLKTPAX

SEQ ID NO: 31533 - protein, 41 aa, Artificial Sequence
  GFR-binding peptide
  MOD_RES (2), (4), (36), (37): Xaa is C or S
SXGXRDVVMGPIKGYIIQQKDNFYLMNIPSMKTPTXXPGAS

SEQ ID NO: 31534 - protein, 36 aa, Artificial Sequence
  GFR-binding peptide
  MOD_RES (2), (34), (35): Xaa is C or S
GXGEVVMDPIKGYVVKENEDFYLMNIPSLETPVXXA

SEQ ID NO: 31535 - protein, 38 aa, Artificial Sequence
  GFR-binding peptide
  MOD_RES (2), (36): Xaa is C or S
  MOD_RES (14), (15), (16), (17), (18): Xaa is A or G
  MOD_RES (19), (20), (21), (22): Xaa is A or G or is absent
GXSRVVMNPIKGYXXXXXXXXXFYLVNIPSLKTPAXTP

SEQ ID NO: 31536 - protein, 37 aa, Artificial Sequence
  GFR-binding peptide
  MOD_RES (33), (34): Xaa is C or S
EAVSMGEPIKGYTPVGMDDFYLVNIPSLKTPVXXAKG

SEQ ID NO: 31537 - protein, 33 aa, Artificial Sequence
  GFR-binding peptide
  MOD_RES (33), (33): Xaa is C or S
  MOD_RES (11), (12), (13), (14), (15): Xaa is A or G
  MOD_RES (16), (17), (18), (19): Xaa is A or G or is absent
RVVMNPIKGYXXXXXXXXXFYLVNIPSLKTPAX

SEQ ID NO: 31538 - protein, 34 aa, Artificial Sequence
  GFR-binding peptide
  MOD_RES (34), (34): Xaa is C or S
  MOD_RES (12), (13), (14), (15), (16): Xaa is A or G
  MOD_RES (17), (18), (19), (20): Xaa is A or G or is absent
AKVVMNPIKGYXXXXXXXXXFYLVNIPSLKTPAX

SEQ ID NO: 31539 - protein, 38 aa, Artificial Sequence
  GFR-binding peptide
  MOD_RES (2), (36), (37): Xaa is C or S
  MOD_RES (14), (15), (16), (17), (18): Xaa is A or G
  MOD_RES (19), (20), (21), (22): Xaa is A or G or is absent
GXGEVVMDPIKGYXXXXXXXXXFYLMNIPSLETPVXXA

SEQ ID NO: 31540 - protein, 41 aa, Artificial Sequence
  GFR-binding peptide
  MOD_RES (2), (36), (37): Xaa is C or S
  MOD_RES (14), (15), (16), (17), (18): Xaa is A or G
  MOD_RES (19), (20), (21), (22): Xaa is A or G or is absent
GXGEVVMDPIKGYXXXXXXXXXFYLMNIPSLETPVXXAKPI

SEQ ID NO: 31541 - protein, 37 aa, Artificial Sequence
  GFR-binding peptide
  MOD_RES (34), (35): Xaa is C or S
  MOD_RES (12), (13), (14), (15), (16): Xaa is A or G
  MOD_RES (17), (18), (19), (20): Xaa is A or G or is absent
GEVVMDPIKGYXXXXXXXXXFYLMNIPSLETPVXXAK

SEQ ID NO: 31542 - protein, 37 aa, Artificial Sequence
  GFR-binding peptide
  MOD_RES (1), (35), (36): Xaa is C or S
  MOD_RES (13), (14), (15), (16), (17): Xaa is A or G
  MOD_RES (18), (19), (20), (21): Xaa is A or G or is absent
XGEVVMEPIKGYXXXXXXXXXFYLMNIPSLETPVXXA

SEQ ID NO: 31543 - protein, 38 aa, Artificial Sequence
  GFR-binding peptide
  MOD_RES (1), (33), (34): Xaa is C or S
XAEVVMDPIKGYVVNNAADFYLINIPSLRAPVXXSAPA

SEQ ID NO: 31544 - protein, 38 aa, Artificial Sequence
  GFR-binding peptide
  MOD_RES (2), (4), (38): Xaa is C or S
  MOD_RES (16), (17), (18), (19), (20): Xaa is A or G
  MOD_RES (21), (22), (23), (24): Xaa is A or G or is absent
HXGXAKVVMNPIKGYXXXXXXXXXFYLVNIPSLKTPAX

SEQ ID NO: 31545 - protein, 42 aa, Artificial Sequence
  GFR-binding peptide
  MOD_RES (1), (3), (37), (38): Xaa is C or S
  MOD_RES (15), (16), (17), (18), (19): Xaa is A or G
  MOD_RES (20), (21), (22), (23): Xaa is A or G or is absent
XGXARVVMNPIKGYXXXXXXXXXFYLVNIPSLQTPAXXPKPV

SEQ ID NO: 31546 - protein, 36 aa, Artificial Sequence
  GFR-binding peptide
  MOD_RES (2), (36): Xaa is C or S
  MOD_RES (14), (15), (16), (17), (18): Xaa is A or G
  MOD_RES (19), (20), (21), (22): Xaa is A or G or is absent
GXAKVVMNPIKGYXXXXXXXXXFYLVNIPSLKTPAX

SEQ ID NO: 31547 - protein, 30 aa, Artificial Sequence
  GFR-binding peptide
RVVMNPIKGYIVNSSDDFYLVNIPSLQTPA

SEQ ID NO: 31548 - protein, 36 aa, Artificial Sequence
  GFR-binding peptide
  MOD_RES (2), (4), (35), (36): Xaa is C or S
LXGXEEVIMPIKGYLLVRGNDFYLMNIPSTKVPAXX

SEQ ID NO: 31549 - protein, 37 aa, Artificial Sequence
  GFR-binding peptide
  MOD_RES (1), (34), (35): Xaa is C or S
XEAVSMGEPIKGYTPVGMDDFYLVNIPSLKTPVXXAK

SEQ ID NO: 31550 - protein, 38 aa, Artificial Sequence
  GFR-binding peptide
  MOD_RES (2), (4), (36), (37): Xaa is C or S
HXGXSRVVMNPIKGYIVNSSDDFYLVNIPSLKTPAXXP

SEQ ID NO: 31551 - protein, 33 aa, Artificial Sequence
  GFR-binding peptide
  MOD_RES (1), (33): Xaa is C or S
XGEVVMEPIKGYVVKDYEDFYLMNIPSLETPVX

SEQ ID NO: 31552 - protein, 37 aa, Artificial Sequence
  GFR-binding peptide
  MOD_RES (33), (33): Xaa is C or S
  MOD_RES (11), (12), (13), (14), (15): Xaa is A or G
  MOD_RES (16), (17), (18), (19): Xaa is A or G or is absent
RVVMNPIKGYXXXXXXXXXFYLVNIPSLKTPAXTPKT

SEQ ID NO: 31553 - protein, 35 aa, Artificial Sequence
  GFR-binding peptide
  MOD_RES (1), (33), (34): Xaa is C or S
XSRVVMNPIKGYIVNSSDDFYLVNIPSLKTPAXXP

SEQ ID NO: 31554 - protein, 43 aa, Artificial Sequence
  GFR-binding peptide
  MOD_RES (1), (3), (38), (39): Xaa is C or S
  MOD_RES (16), (17), (18), (19), (20): Xaa is A or G
  MOD_RES (21), (22), (23), (24): Xaa is A or G or is absent
XGXEAVSMGEPIKGYXXXXXXXXXFYLVNIPSLKTPVXXAKGV

SEQ ID NO: 31555 - protein, 34 aa, Artificial Sequence
  GFR-binding peptide
  MOD_RES (34), (34): Xaa is C or S
  MOD_RES (12), (13), (14), (15), (16): Xaa is A or G
  MOD_RES (17), (18), (19), (20): Xaa is A or G or is absent
GEVVMDPIKGYXXXXXXXXXFYLMNIPSLETPVX

SEQ ID NO: 31556 - protein, 37 aa, Artificial Sequence
  GFR-binding peptide
  MOD_RES (32), (33): Xaa is C or S
AKVVMNPIKGYIVNNSSDFYLVNIPSLKTPAXXAKPV

SEQ ID NO: 31557 - protein, 39 aa, Artificial Sequence
  GFR-binding peptide
  MOD_RES (1), (3), (38), (39): Xaa is C or S
  MOD_RES (16), (17), (18), (19), (20): Xaa is A or G
  MOD_RES (21), (22), (23), (24): Xaa is A or G or is absent
XGXEAVSMGEPIKGYXXXXXXXXXFYLVNIPSLKTPVXX

SEQ ID NO: 31558 - protein, 35 aa, Artificial Sequence
  GFR-binding peptide
  MOD_RES (2), (35): Xaa is C or S
GXEAVSMGEPIKGYTPVGMDDFYLVNIPSLKTPVX

SEQ ID NO: 31559 - protein, 38 aa, Artificial Sequence
  GFR-binding peptide
  MOD_RES (2), (36), (37): Xaa is C or S
  MOD_RES (14), (15), (16), (17), (18): Xaa is A or G
  MOD_RES (19), (20), (21), (22): Xaa is A or G or is absent
GXSEVVMDPIKGYXXXXXXXXXFYLINIPSLRTPVXXT

SEQ ID NO: 31560 - protein, 43 aa, Artificial Sequence
  GFR-binding peptide
  MOD_RES (2), (4), (37), (38): Xaa is C or S
RXGXEAVSMGEPIKGYTPVGMDDFYLVNIPSLKTPVXXAKGVK

SEQ ID NO: 31561 - protein, 36 aa, Artificial Sequence
  GFR-binding peptide
  MOD_RES (1), (34), (35): Xaa is C or S
XEAVSMGEPIKGYTPVGMDDFYLVNIPSLKTPVXXA

SEQ ID NO: 31562 - protein, 35 aa, Artificial Sequence
  GFR-binding peptide
  MOD_RES (2), (4): Xaa is C or S
SXGXRDVVMGPIKGYIIQQKDNFYLMNIPSMKTPT

SEQ ID NO: 31563 - protein, 41 aa, Artificial Sequence
  GFR-binding peptide
  MOD_RES (35), (36): Xaa is C or S
  MOD_RES (13), (14), (15), (16), (17): Xaa is A or G
  MOD_RES (18), (19), (20), (21): Xaa is A or G or is absent
EAVSMGEPIKGYXXXXXXXXXFYLVNIPSLKTPVXXAKGVK

SEQ ID NO: 31564 - protein, 39 aa, Artificial Sequence
  GFR-binding peptide
  MOD_RES (2), (4), (38), (39): Xaa is C or S
  MOD_RES (16), (17), (18), (19), (20): Xaa is A or G
  MOD_RES (21), (22), (23), (24): Xaa is A or G or is absent
HXGXARVVMNPIKGYXXXXXXXXXFYLVNIPSLQTPAXX

SEQ ID NO: 31565 - protein, 39 aa, Artificial Sequence
  GFR-binding peptide
  MOD_RES (1), (3), (37), (38): Xaa is C or S
  MOD_RES (15), (16), (17), (18), (19): Xaa is A or G
  MOD_RES (20), (21), (22), (23): Xaa is A or G or is absent
XGXRDVVMGPIKGYXXXXXXXXXFYLMNIPSMKTPTXXP

SEQ ID NO: 31566 - protein, 33 aa, Artificial Sequence
  GFR-binding peptide
  MOD_RES (31), (32): Xaa is C or S
EVVMEPIKGYVVKDYEDFYLMNIPSLETPVXXA

SEQ ID NO: 31567 - protein, 34 aa, Artificial Sequence
  GFR-binding peptide
  MOD_RES (2), (34): Xaa is C or S
GXARVVMNPIKGYIVNSSDDFYLVNIPSLQTPAX

SEQ ID NO: 31568 - protein, 36 aa, Artificial Sequence
  GFR-binding peptide
  MOD_RES (1), (33), (34): Xaa is C or S
XGEVVMEPIKGYVVKDYEDFYLMNIPSLETPVXXAK

SEQ ID NO: 31569 - protein, 38 aa, Artificial Sequence
  GFR-binding peptide
  MOD_RES (34), (35): Xaa is C or S
  MOD_RES (12), (13), (14), (15), (16): Xaa is A or G
  MOD_RES (17), (18), (19), (20): Xaa is A or G or is absent
GEVVMEPIKGYXXXXXXXXXFYLMNIPSLETPVXXAKP

SEQ ID NO: 31570 - protein, 41 aa, Artificial Sequence
  GFR-binding peptide
  MOD_RES (1), (3), (36), (37): Xaa is C or S
XGXEAVSMGEPIKGYTPVGMDDFYLVNIPSLKTPVXXAKGV

SEQ ID NO: 31571 - protein, 40 aa, Artificial Sequence
  GFR-binding peptide
  MOD_RES (2), (4), (36), (37): Xaa is C or S
RXGXGEVVMEPIKGYVVKDYEDFYLMNIPSLETPVXXAKP

SEQ ID NO: 31572 - protein, 35 aa, Artificial Sequence
  GFR-binding peptide
  MOD_RES (2), (34), (35): Xaa is C or S
GXAEVVMDPIKGYVVNNAADFYLINIPSLRAPVXX

SEQ ID NO: 31573 - protein, 41 aa, Artificial Sequence
  GFR-binding peptide
  MOD_RES (2), (36), (37): Xaa is C or S
  MOD_RES (14), (15), (16), (17), (18): Xaa is A or G
  MOD_RES (19), (20), (21), (22): Xaa is A or G or is absent
GXARVVMNPIKGYXXXXXXXXXFYLVNIPSLQTPAXXPKPV

SEQ ID NO: 31574 - protein, 38 aa, Artificial Sequence
  GFR-binding peptide
  MOD_RES (1), (3), (35), (36): Xaa is C or S
XGXAEVVMDPIKGYVVNNAADFYLINIPSLRAPVXXSA

SEQ ID NO: 31575 - protein, 34 aa, Artificial Sequence
  GFR-binding peptide
  MOD_RES (33), (34): Xaa is C or S
  MOD_RES (11), (12), (13), (14), (15): Xaa is A or G
  MOD_RES (16), (17), (18), (19): Xaa is A or G or is absent
DVVMGPIKGYXXXXXXXXXFYLMNIPSMKTPTXX

SEQ ID NO: 31576 - protein, 40 aa, Artificial Sequence
  GFR-binding peptide
  MOD_RES (34), (35): Xaa is C or S
  MOD_RES (12), (13), (14), (15), (16): Xaa is A or G
  MOD_RES (17), (18), (19), (20): Xaa is A or G or is absent
AEVVMDPIKGYXXXXXXXXXFYLINIPSLRAPVXXSAPAA

SEQ ID NO: 31577 - protein, 40 aa, Artificial Sequence
  GFR-binding peptide
  MOD_RES (1), (3), (37), (38): Xaa is C or S
  MOD_RES (15), (16), (17), (18), (19): Xaa is A or G
  MOD_RES (20), (21), (22), (23): Xaa is A or G or is absent
XGXAKVVMNPIKGYXXXXXXXXXFYLVNIPSLKTPAXXAK

SEQ ID NO: 31578 - protein, 40 aa, Artificial Sequence
  GFR-binding peptide
  MOD_RES (2), (35), (36): Xaa is C or S
GXEAVSMGEPIKGYTPVGMDDFYLVNIPSLKTPVXXAKGV

SEQ ID NO: 31579 - protein, 36 aa, Artificial Sequence
  GFR-binding peptide
  MOD_RES (33), (34): Xaa is C or S
EAVSMGEPIKGYTPVGMDDFYLVNIPSLKTPVXXAK

SEQ ID NO: 31580 - protein, 39 aa, Artificial Sequence
  GFR-binding peptide
  MOD_RES (2), (4), (38), (39): Xaa is C or S
  MOD_RES (16), (17), (18), (19), (20): Xaa is A or G
  MOD_RES (21), (22), (23), (24): Xaa is A or G or is absent
RXGXGEVVMDPIKGYXXXXXXXXXFYLMNIPSLETPVXX

SEQ ID NO: 31581 - protein, 39 aa, Artificial Sequence
  GFR-binding peptide
  MOD_RES (1), (3), (35): Xaa is C or S
XGXSRVVMNPIKGYIVNSSDDFYLVNIPSLKTPAXTPKT

SEQ ID NO: 31582 - protein, 38 aa, Artificial Sequence
  GFR-binding peptide
  MOD_RES (34), (35): Xaa is C or S
  MOD_RES (12), (13), (14), (15), (16): Xaa is A or G
  MOD_RES (17), (18), (19), (20): Xaa is A or G or is absent
ARVVMNPIKGYXXXXXXXXXFYLVNIPSLQTPAXXPKP

SEQ ID NO: 31583 - protein, 36 aa, Artificial Sequence
  GFR-binding peptide
  MOD_RES (34), (35): Xaa is C or S
  MOD_RES (12), (13), (14), (15), (16): Xaa is A or G
  MOD_RES (17), (18), (19), (20): Xaa is A or G or is absent
ESVAMGPIKGYXXXXXXXXXFYLINIPSLKTPVXXA

SEQ ID NO: 31584 - protein, 34 aa, Artificial Sequence
  GFR-binding peptide
  MOD_RES (33), (34): Xaa is C or S
  MOD_RES (11), (12), (13), (14), (15): Xaa is A or G
  MOD_RES (16), (17), (18), (19): Xaa is A or G or is absent
EEVIMPIKGYXXXXXXXXXFYLMNIPSTKVPAXX

SEQ ID NO: 31585 - protein, 33 aa, Artificial Sequence
  GFR-binding peptide
  MOD_RES (31), (32): Xaa is C or S
EVVMDPIKGYVVNNAADFYLINIPSLRAPVXXS

SEQ ID NO: 31586 - protein, 38 aa, Artificial Sequence
  GFR-binding peptide
  MOD_RES (1), (3), (38): Xaa is C or S
  MOD_RES (16), (17), (18), (19), (20): Xaa is A or G
  MOD_RES (21), (22), (23), (24): Xaa is A or G or is absent
XGXEAVSMGEPIKGYXXXXXXXXXFYLVNIPSLKTPVX

SEQ ID NO: 31587 - protein, 35 aa, Artificial Sequence
  GFR-binding peptide
  MOD_RES (2), (2): Xaa is C or S
  MOD_RES (14), (15), (16), (17), (18): Xaa is A or G
  MOD_RES (19), (20), (21), (22): Xaa is A or G or is absent
GXGEVVMEPIKGYXXXXXXXXXFYLMNIPSLETPV

SEQ ID NO: 31588 - protein, 32 aa, Artificial Sequence
  GFR-binding peptide
  MOD_RES (32), (32): Xaa is C or S
GEVVMEPIKGYVVKDYEDFYLMNIPSLETPVX

SEQ ID NO: 31589 - protein, 34 aa, Artificial Sequence
  GFR-binding peptide
  MOD_RES (2), (34): Xaa is C or S
GXESVAMGPIKGYYTVVGKDFYLINIPSLKTPVX

SEQ ID NO: 31590 - protein, 40 aa, Artificial Sequence
  GFR-binding peptide
  MOD_RES (2), (4), (37), (38): Xaa is C or S
  MOD_RES (15), (16), (17), (18), (19): Xaa is A or G
  MOD_RES (20), (21), (22), (23): Xaa is A or G or is absent
LXGXEEVIMPIKGYXXXXXXXXXFYLMNIPSTKVPAXXTS

SEQ ID NO: 31591 - protein, 37 aa, Artificial Sequence
  GFR-binding peptide
  MOD_RES (2), (36), (37): Xaa is C or S
  MOD_RES (14), (15), (16), (17), (18): Xaa is A or G
  MOD_RES (19), (20), (21), (22): Xaa is A or G or is absent
GXAEVVMDPIKGYXXXXXXXXXFYLINIPSLRAPVXX

SEQ ID NO: 31592 - protein, 35 aa, Artificial Sequence
  GFR-binding peptide
  MOD_RES (34), (35): Xaa is C or S
  MOD_RES (12), (13), (14), (15), (16): Xaa is A or G
  MOD_RES (17), (18), (19), (20): Xaa is A or G or is absent
ARVVMNPIKGYXXXXXXXXXFYLVNIPSLQTPAXX

SEQ ID NO: 31593 - protein, 34 aa, Artificial Sequence
  GFR-binding peptide
  MOD_RES (1), (33), (34): Xaa is C or S
XGEVVMDPIKGYVVKENEDFYLMNIPSLETPVXX

SEQ ID NO: 31594 - protein, 38 aa, Artificial Sequence
  GFR-binding peptide
  MOD_RES (32), (33): Xaa is C or S
ARVVMNPIKGYIVNSSDDFYLVNIPSLQTPAXXPKPVT

SEQ ID NO: 31595 - protein, 38 aa, Artificial Sequence
  GFR-binding peptide
  MOD_RES (1), (3), (37), (38): Xaa is C or S
  MOD_RES (15), (16), (17), (18), (19): Xaa is A or G
  MOD_RES (20), (21), (22), (23): Xaa is A or G or is absent
XGXRDVVMGPIKGYXXXXXXXXXFYLMNIPSMKTPTXX

SEQ ID NO: 31596 - protein, 34 aa, Artificial Sequence
  GFR-binding peptide
  MOD_RES (33), (34): Xaa is C or S
  MOD_RES (11), (12), (13), (14), (15): Xaa is A or G
  MOD_RES (16), (17), (18), (19): Xaa is A or G or is absent
RVVMNPIKGYXXXXXXXXXFYLVNIPSLKTPAXX

SEQ ID NO: 31597 - protein, 34 aa, Artificial Sequence
  GFR-binding peptide
  MOD_RES (33), (34): Xaa is C or S
  MOD_RES (11), (12), (13), (14), (15): Xaa is A or G
  MOD_RES (16), (17), (18), (19): Xaa is A or G or is absent
KVVMNPIKGYXXXXXXXXXFYLVNIPSLKTPAXX

SEQ ID NO: 31598 - protein, 36 aa, Artificial Sequence
  GFR-binding peptide
  MOD_RES (2), (2): Xaa is C or S
  MOD_RES (15), (16), (17), (18), (19): Xaa is A or G
  MOD_RES (20), (21), (22), (23): Xaa is A or G or is absent
GXEAVSMGEPIKGYXXXXXXXXXFYLVNIPSLKTPV

SEQ ID NO: 31599 - protein, 38 aa, Artificial Sequence
  GFR-binding peptide
  MOD_RES (2), (34), (35): Xaa is C or S
GXGEVVMEPIKGYVVKDYEDFYLMNIPSLETPVXXAKP

SEQ ID NO: 31600 - protein, 36 aa, Artificial Sequence
  GFR-binding peptide
  MOD_RES (2), (36): Xaa is C or S
  MOD_RES (14), (15), (16), (17), (18): Xaa is A or G
  MOD_RES (19), (20), (21), (22): Xaa is A or G or is absent
GXGEVVMEPIKGYXXXXXXXXXFYLMNIPSLETPVX

SEQ ID NO: 31601 - protein, 43 aa, Artificial Sequence
  GFR-binding peptide
  MOD_RES (1), (3), (37): Xaa is C or S
  MOD_RES (15), (16), (17), (18), (19): Xaa is A or G
  MOD_RES (20), (21), (22), (23): Xaa is A or G or is absent
XGXSRVVMNPIKGYXXXXXXXXXFYLVNIPSLKTPAXTPKTVH

SEQ ID NO: 31602 - protein, 36 aa, Artificial Sequence
  GFR-binding peptide
  MOD_RES (35), (36): Xaa is C or S
  MOD_RES (13), (14), (15), (16), (17): Xaa is A or G
  MOD_RES (18), (19), (20), (21): Xaa is A or G or is absent
EAVSMGEPIKGYXXXXXXXXXFYLVNIPSLKTPVXX

SEQ ID NO: 31603 - protein, 32 aa, Artificial Sequence
  GFR-binding peptide
  MOD_RES (1), (1): Xaa is C or S
XGEVVMDPIKGYVVKENEDFYLMNIPSLETPV

SEQ ID NO: 31604 - protein, 40 aa, Artificial Sequence
  GFR-binding peptide
  MOD_RES (2), (4), (38), (39): Xaa is C or S
  MOD_RES (16), (17), (18), (19), (20): Xaa is A or G
  MOD_RES (21), (22), (23), (24): Xaa is A or G or is absent
RXGXSEVVMDPIKGYXXXXXXXXXFYLINIPSLRTPVXXT

SEQ ID NO: 31605 - protein, 39 aa, Artificial Sequence
  GFR-binding peptide
  MOD_RES (33), (34): Xaa is C or S
  MOD_RES (11), (12), (13), (14), (15): Xaa is A or G
  MOD_RES (16), (17), (18), (19): Xaa is A or G or is absent
DVVMGPIKGYXXXXXXXXXFYLMNIPSMKTPTXXPGASG

SEQ ID NO: 31606 - protein, 39 aa, Artificial Sequence
  GFR-binding peptide
  MOD_RES (1), (35), (36): Xaa is C or S
  MOD_RES (13), (14), (15), (16), (17): Xaa is A or G
  MOD_RES (18), (19), (20), (21): Xaa is A or G or is absent
XSRVVMNPIKGYXXXXXXXXXFYLVNIPSLKTPAXXPKP

SEQ ID NO: 31607 - protein, 38 aa, Artificial Sequence
  GFR-binding peptide
  MOD_RES (34), (35): Xaa is C or S
  MOD_RES (12), (13), (14), (15), (16): Xaa is A or G
  MOD_RES (17), (18), (19), (20): Xaa is A or G or is absent
AEVVMDPIKGYXXXXXXXXXFYLINIPSLRAPVXXSAP

SEQ ID NO: 31608 - protein, 38 aa, Artificial Sequence
  GFR-binding peptide
  MOD_RES (2), (4), (35), (36): Xaa is C or S
LXGXEEVIMPIKGYLLVRGNDFYLMNIPSTKVPAXXTS

SEQ ID NO: 31609 - protein, 36 aa, Artificial Sequence
  GFR-binding peptide
  MOD_RES (33), (34): Xaa is C or S
  MOD_RES (11), (12), (13), (14), (15): Xaa is A or G
  MOD_RES (16), (17), (18), (19): Xaa is A or G or is absent
SVAMGPIKGYXXXXXXXXXFYLINIPSLKTPVXXAK

SEQ ID NO: 31610 - protein, 34 aa, Artificial Sequence
  GFR-binding peptide
  MOD_RES (1), (3): Xaa is C or S
XGXAKVVMNPIKGYIVNNSSDFYLVNIPSLKTPA

SEQ ID NO: 31611 - protein, 39 aa, Artificial Sequence
  GFR-binding peptide
  MOD_RES (1), (35), (36): Xaa is C or S
  MOD_RES (13), (14), (15), (16), (17): Xaa is A or G
  MOD_RES (18), (19), (20), (21): Xaa is A or G or is absent
XGEVVMDPIKGYXXXXXXXXXFYLMNIPSLETPVXXAKP

SEQ ID NO: 31612 - protein, 40 aa, Artificial Sequence
  GFR-binding peptide
  MOD_RES (1), (3), (35), (36): Xaa is C or S
XGXGEVVMDPIKGYVVKENEDFYLMNIPSLETPVXXAKPI

SEQ ID NO: 31613 - protein, 34 aa, Artificial Sequence
  GFR-binding peptide
  MOD_RES (1), (33), (34): Xaa is C or S
XGEVVMEPIKGYVVKDYEDFYLMNIPSLETPVXX

SEQ ID NO: 31614 - protein, 33 aa, Artificial Sequence
  GFR-binding peptide
  MOD_RES (12), (13), (14), (15), (16): Xaa is A or G
  MOD_RES (17), (18), (19), (20): Xaa is A or G or is absent
ARVVMNPIKGYXXXXXXXXXFYLVNIPSLQTPA

SEQ ID NO: 31615 - protein, 40 aa, Artificial Sequence
  GFR-binding peptide
  MOD_RES (2), (4), (38), (39): Xaa is C or S
  MOD_RES (16), (17), (18), (19), (20): Xaa is A or G
  MOD_RES (21), (22), (23), (24): Xaa is A or G or is absent
HXGXARVVMNPIKGYXXXXXXXXXFYLVNIPSLQTPAXXP

SEQ ID NO: 31616 - protein, 36 aa, Artificial Sequence
  GFR-binding peptide
  MOD_RES (1), (3): Xaa is C or S
  MOD_RES (15), (16), (17), (18), (19): Xaa is A or G
  MOD_RES (20), (21), (22), (23): Xaa is A or G or is absent
XGXSEVVMDPIKGYXXXXXXXXXFYLINIPSLRTPV

SEQ ID NO: 31617 - protein, 33 aa, Artificial Sequence
  GFR-binding peptide
  MOD_RES (2), (2): Xaa is C or S
GXRDVVMGPIKGYIIQQKDNFYLMNIPSMKTPT

SEQ ID NO: 31618 - protein, 39 aa, Artificial Sequence
  GFR-binding peptide
  MOD_RES (1), (35), (36): Xaa is C or S
  MOD_RES (13), (14), (15), (16), (17): Xaa is A or G
  MOD_RES (18), (19), (20), (21): Xaa is A or G or is absent
XSEVVMDPIKGYXXXXXXXXXFYLINIPSLRTPVXXTPP

SEQ ID NO: 31619 - protein, 37 aa, Artificial Sequence
  GFR-binding peptide
  MOD_RES (2), (4), (36), (37): Xaa is C or S
RXGXGEVVMEPIKGYVVKDYEDFYLMNIPSLETPVXX

SEQ ID NO: 31620 - protein, 39 aa, Artificial Sequence
  GFR-binding peptide
  MOD_RES (34), (35): Xaa is C or S
  MOD_RES (12), (13), (14), (15), (16): Xaa is A or G
  MOD_RES (17), (18), (19), (20): Xaa is A or G or is absent
AEVVMDPIKGYXXXXXXXXXFYLINIPSLRAPVXXSAPA

SEQ ID NO: 31621 - protein, 37 aa, Artificial Sequence
  GFR-binding peptide
  MOD_RES (2), (4), (36), (37): Xaa is C or S
RXGXSEVVMDPIKGYVVNNASDFYLINIPSLRTPVXX

SEQ ID NO: 31622 - protein, 37 aa, Artificial Sequence
  GFR-binding peptide
  MOD_RES (2), (34), (35): Xaa is C or S
GXESVAMGPIKGYYTVVGKDFYLINIPSLKTPVXXAK

SEQ ID NO: 31623 - protein, 36 aa, Artificial Sequence
  GFR-binding peptide
  MOD_RES (34), (35): Xaa is C or S
  MOD_RES (12), (13), (14), (15), (16): Xaa is A or G
  MOD_RES (17), (18), (19), (20): Xaa is A or G or is absent
AKVVMNPIKGYXXXXXXXXXFYLVNIPSLKTPAXXA

SEQ ID NO: 31624 - protein, 38 aa, Artificial Sequence
  GFR-binding peptide
  MOD_RES (1), (3), (35), (36): Xaa is C or S
XGXAKVVMNPIKGYIVNNSSDFYLVNIPSLKTPAXXAK

SEQ ID NO: 31625 - protein, 36 aa, Artificial Sequence
  GFR-binding peptide
  MOD_RES (32), (33): Xaa is C or S
SRVVMNPIKGYIVNSSDDFYLVNIPSLKTPAXXPKP

SEQ ID NO: 31626 - protein, 38 aa, Artificial Sequence
  GFR-binding peptide
  MOD_RES (1), (36), (37): Xaa is C or S
  MOD_RES (14), (15), (16), (17), (18): Xaa is A or G
  MOD_RES (19), (20), (21), (22): Xaa is A or G or is absent
XEAVSMGEPIKGYXXXXXXXXXFYLVNIPSLKTPVXXA

SEQ ID NO: 31627 - protein, 35 aa, Artificial Sequence
  GFR-binding peptide
  MOD_RES (2), (34), (35): Xaa is C or S
GXSRVVMNPIKGYIVNSSDDFYLVNIPSLKTPAXX

SEQ ID NO: 31628 - protein, 41 aa, Artificial Sequence
  GFR-binding peptide
  MOD_RES (2), (4), (38), (39): Xaa is C or S
  MOD_RES (16), (17), (18), (19), (20): Xaa is A or G
  MOD_RES (21), (22), (23), (24): Xaa is A or G or is absent
HXGXSRVVMNPIKGYXXXXXXXXXFYLVNIPSLKTPAXXPK

SEQ ID NO: 31629 - protein, 42 aa, Artificial Sequence
  GFR-binding peptide
  MOD_RES (2), (4), (38): Xaa is C or S
  MOD_RES (16), (17), (18), (19), (20): Xaa is A or G
  MOD_RES (21), (22), (23), (24): Xaa is A or G or is absent
HXGXSRVVMNPIKGYXXXXXXXXXFYLVNIPSLKTPAXTPKT

SEQ ID NO: 31630 - protein, 38 aa, Artificial Sequence
  GFR-binding peptide
  MOD_RES (1), (3), (35), (36): Xaa is C or S
XGXSEVVMDPIKGYVVNNASDFYLINIPSLRTPVXXTP

SEQ ID NO: 31631 - protein, 38 aa, Artificial Sequence
  GFR-binding peptide
  MOD_RES (32), (32): Xaa is C or S
SRVVMNPIKGYIVNSSDDFYLVNIPSLKTPAXTPKTVH

SEQ ID NO: 31632 - protein, 37 aa, Artificial Sequence
  GFR-binding peptide
  MOD_RES (1), (3), (37): Xaa is C or S
  MOD_RES (15), (16), (17), (18), (19): Xaa is A or G
  MOD_RES (20), (21), (22), (23): Xaa is A or G or is absent
XGXARVVMNPIKGYXXXXXXXXXFYLVNIPSLQTPAX

SEQ ID NO: 31633 - protein, 34 aa, Artificial Sequence
  GFR-binding peptide
  MOD_RES (1), (3): Xaa is C or S
XGXSRVVMNPIKGYIVNSSDDFYLVNIPSLKTPA

SEQ ID NO: 31634 - protein, 40 aa, Artificial Sequence
  GFR-binding peptide
  MOD_RES (1), (3), (35), (36): Xaa is C or S
XGXGEVVMEPIKGYVVKDYEDFYLMNIPSLETPVXXAKPI

SEQ ID NO: 31635 - protein, 42 aa, Artificial Sequence
  GFR-binding peptide
  MOD_RES (2), (36), (37): Xaa is C or S
  MOD_RES (14), (15), (16), (17), (18): Xaa is A or G
  MOD_RES (19), (20), (21), (22): Xaa is A or G or is absent
GXARVVMNPIKGYXXXXXXXXXFYLVNIPSLQTPAXXPKPVT

SEQ ID NO: 31636 - protein, 40 aa, Artificial Sequence
  GFR-binding peptide
  MOD_RES (34), (35): Xaa is C or S
  MOD_RES (12), (13), (14), (15), (16): Xaa is A or G
  MOD_RES (17), (18), (19), (20): Xaa is A or G or is absent
SRVVMNPIKGYXXXXXXXXXFYLVNIPSLKTPAXXPKPVY

SEQ ID NO: 31637 - protein, 33 aa, Artificial Sequence
  GFR-binding peptide
  MOD_RES (1), (3): Xaa is C or S
XGXEEVIMPIKGYLLVRGNDFYLMNIPSTKVPA

SEQ ID NO: 31638 - protein, 35 aa, Artificial Sequence
  GFR-binding peptide
  MOD_RES (1), (35): Xaa is C or S
  MOD_RES (13), (14), (15), (16), (17): Xaa is A or G
  MOD_RES (18), (19), (20), (21): Xaa is A or G or is absent
XGEVVMDPIKGYXXXXXXXXXFYLMNIPSLETPVX

SEQ ID NO: 31639 - protein, 37 aa, Artificial Sequence
  GFR-binding peptide
  MOD_RES (31), (32): Xaa is C or S
EVVMEPIKGYVVKDYEDFYLMNIPSLETPVXXAKPIS

SEQ ID NO: 31640 - protein, 37 aa, Artificial Sequence
  GFR-binding peptide
  MOD_RES (32), (33): Xaa is C or S
SRVVMNPIKGYIVNSSDDFYLVNIPSLKTPAXXPKPV

SEQ ID NO: 31641 - protein, 43 aa, Artificial Sequence
  GFR-binding peptide
  MOD_RES (2), (4), (38), (39): Xaa is C or S
  MOD_RES (16), (17), (18), (19), (20): Xaa is A or G
  MOD_RES (21), (22), (23), (24): Xaa is A or G or is absent
HXGXSRVVMNPIKGYXXXXXXXXXFYLVNIPSLKTPAXXPKPV

SEQ ID NO: 31642 - protein, 37 aa, Artificial Sequence
  GFR-binding peptide
  MOD_RES (1), (3), (37): Xaa is C or S
  MOD_RES (15), (16), (17), (18), (19): Xaa is A or G
  MOD_RES (20), (21), (22), (23): Xaa is A or G or is absent
XGXGEVVMDPIKGYXXXXXXXXXFYLMNIPSLETPVX

SEQ ID NO: 31643 - protein, 36 aa, Artificial Sequence
  GFR-binding peptide
  MOD_RES (1), (3), (35), (36): Xaa is C or S
XGXARVVMNPIKGYIVNSSDDFYLVNIPSLQTPAXX

SEQ ID NO: 31644 - protein, 39 aa, Artificial Sequence
  GFR-binding peptide
  MOD_RES (2), (4), (39): Xaa is C or S
  MOD_RES (17), (18), (19), (20), (21): Xaa is A or G
  MOD_RES (22), (23), (24), (25): Xaa is A or G or is absent
RXGXEAVSMGEPIKGYXXXXXXXXXFYLVNIPSLKTPVX

SEQ ID NO: 31645 - protein, 33 aa, Artificial Sequence
  GFR-binding peptide
  MOD_RES (33), (33): Xaa is C or S
  MOD_RES (11), (12), (13), (14), (15): Xaa is A or G
  MOD_RES (16), (17), (18), (19): Xaa is A or G or is absent
SVAMGPIKGYXXXXXXXXXFYLINIPSLKTPVX

SEQ ID NO: 31646 - protein, 40 aa, Artificial Sequence
  GFR-binding peptide
  MOD_RES (1), (3), (36), (37): Xaa is C or S
XGXEAVSMGEPIKGYTPVGMDDFYLVNIPSLKTPVXXAKG

SEQ ID NO: 31647 - protein, 34 aa, Artificial Sequence
  GFR-binding peptide
  MOD_RES (1), (3): Xaa is C or S
XGXRDVVMGPIKGYIIQQKDNFYLMNIPSMKTPT

SEQ ID NO: 31648 - protein, 37 aa, Artificial Sequence
  GFR-binding peptide
  MOD_RES (31), (32): Xaa is C or S
EVVMDPIKGYVVNNASDFYLINIPSLRTPVXXTPPTS

SEQ ID NO: 31649 - protein, 35 aa, Artificial Sequence
  GFR-binding peptide
  MOD_RES (2), (2): Xaa is C or S
  MOD_RES (14), (15), (16), (17), (18): Xaa is A or G
  MOD_RES (19), (20), (21), (22): Xaa is A or G or is absent
GXRDVVMGPIKGYXXXXXXXXXFYLMNIPSMKTPT

SEQ ID NO: 31650 - protein, 36 aa, Artificial Sequence
  GFR-binding peptide
  MOD_RES (1), (33), (34): Xaa is C or S
XAEVVMDPIKGYVVNNAADFYLINIPSLRAPVXXSA

SEQ ID NO: 31651 - protein, 37 aa, Artificial Sequence
  GFR-binding peptide
  MOD_RES (1), (3), (37): Xaa is C or S
  MOD_RES (15), (16), (17), (18), (19): Xaa is A or G
  MOD_RES (20), (21), (22), (23): Xaa is A or G or is absent
XGXESVAMGPIKGYXXXXXXXXXFYLINIPSLKTPVX

SEQ ID NO: 31652 - protein, 39 aa, Artificial Sequence
  GFR-binding peptide
  MOD_RES (2), (36), (37): Xaa is C or S
  MOD_RES (14), (15), (16), (17), (18): Xaa is A or G
  MOD_RES (19), (20), (21), (22): Xaa is A or G or is absent
GXRDVVMGPIKGYXXXXXXXXXFYLMNIPSMKTPTXXPG

SEQ ID NO: 31653 - protein, 38 aa, Artificial Sequence
  GFR-binding peptide
  MOD_RES (2), (4), (38): Xaa is C or S
  MOD_RES (16), (17), (18), (19), (20): Xaa is A or G
  MOD_RES (21), (22), (23), (24): Xaa is A or G or is absent
RXGXGEVVMEPIKGYXXXXXXXXXFYLMNIPSLETPVX

SEQ ID NO: 31654 - protein, 40 aa, Artificial Sequence
  GFR-binding peptide
  MOD_RES (2), (36), (37): Xaa is C or S
  MOD_RES (14), (15), (16), (17), (18): Xaa is A or G
  MOD_RES (19), (20), (21), (22): Xaa is A or G or is absent
GXARVVMNPIKGYXXXXXXXXXFYLVNIPSLQTPAXXPKP

SEQ ID NO: 31655 - protein, 36 aa, Artificial Sequence
  GFR-binding peptide
  MOD_RES (1), (3), (35): Xaa is C or S
XGXSRVVMNPIKGYIVNSSDDFYLVNIPSLKTPAXT

SEQ ID NO: 31656 - protein, 34 aa, Artificial Sequence
  GFR-binding peptide
  MOD_RES (34), (34): Xaa is C or S
  MOD_RES (12), (13), (14), (15), (16): Xaa is A or G
  MOD_RES (17), (18), (19), (20): Xaa is A or G or is absent
SRVVMNPIKGYXXXXXXXXXFYLVNIPSLKTPAX

SEQ ID NO: 31657 - protein, 36 aa, Artificial Sequence
  GFR-binding peptide
  MOD_RES (2), (4), (36): Xaa is C or S
RXGXSEVVMDPIKGYVVNNASDFYLINIPSLRTPVX

SEQ ID NO: 31658 - protein, 41 aa, Artificial Sequence
  GFR-binding peptide
  MOD_RES (1), (3), (37), (38): Xaa is C or S
  MOD_RES (15), (16), (17), (18), (19): Xaa is A or G
  MOD_RES (20), (21), (22), (23): Xaa is A or G or is absent
XGXSEVVMDPIKGYXXXXXXXXXFYLINIPSLRTPVXXTPP

SEQ ID NO: 31659 - protein, 37 aa, Artificial Sequence
  GFR-binding peptide
  MOD_RES (1), (35), (36): Xaa is C or S
  MOD_RES (13), (14), (15), (16), (17): Xaa is A or G
  MOD_RES (18), (19), (20), (21): Xaa is A or G or is absent
XAKVVMNPIKGYXXXXXXXXXFYLVNIPSLKTPAXXA

SEQ ID NO: 31660 - protein, 37 aa, Artificial Sequence
  GFR-binding peptide
  MOD_RES (1), (3), (35): Xaa is C or S
XGXSRVVMNPIKGYIVNSSDDFYLVNIPSLKTPAXTP

SEQ ID NO: 31661 - protein, 39 aa, Artificial Sequence
  GFR-binding peptide
  MOD_RES (34), (35): Xaa is C or S
  MOD_RES (12), (13), (14), (15), (16): Xaa is A or G
  MOD_RES (17), (18), (19), (20): Xaa is A or G or is absent
ARVVMNPIKGYXXXXXXXXXFYLVNIPSLQTPAXXPKPV

SEQ ID NO: 31662 - protein, 37 aa, Artificial Sequence
  GFR-binding peptide
  MOD_RES (1), (33), (34): Xaa is C or S
XAEVVMDPIKGYVVNNAADFYLINIPSLRAPVXXSAP

SEQ ID NO: 31663 - protein, 37 aa, Artificial Sequence
  GFR-binding peptide
  MOD_RES (1), (3), (37): Xaa is C or S
  MOD_RES (15), (16), (17), (18), (19): Xaa is A or G
  MOD_RES (20), (21), (22), (23): Xaa is A or G or is absent
XGXGEVVMEPIKGYXXXXXXXXXFYLMNIPSLETPVX

SEQ ID NO: 31664 - protein, 39 aa, Artificial Sequence
  GFR-binding peptide
  MOD_RES (1), (34), (35): Xaa is C or S
XEAVSMGEPIKGYTPVGMDDFYLVNIPSLKTPVXXAKGV

SEQ ID NO: 31665 - protein, 37 aa, Artificial Sequence
  GFR-binding peptide
  MOD_RES (33), (34): Xaa is C or S
  MOD_RES (11), (12), (13), (14), (15): Xaa is A or G
  MOD_RES (16), (17), (18), (19): Xaa is A or G or is absent
EVVMEPIKGYXXXXXXXXXFYLMNIPSLETPVXXAKP

SEQ ID NO: 31666 - protein, 32 aa, Artificial Sequence
  GFR-binding peptide
  MOD_RES (1), (1): Xaa is C or S
XRDVVMGPIKGYIIQQKDNFYLMNIPSMKTPT

SEQ ID NO: 31667 - protein, 35 aa, Artificial Sequence
  GFR-binding peptide
  MOD_RES (1), (35): Xaa is C or S
  MOD_RES (13), (14), (15), (16), (17): Xaa is A or G
  MOD_RES (18), (19), (20), (21): Xaa is A or G or is absent
XSRVVMNPIKGYXXXXXXXXXFYLVNIPSLKTPAX

SEQ ID NO: 31668 - protein, 34 aa, Artificial Sequence
  GFR-binding peptide
  MOD_RES (1), (1): Xaa is C or S
  MOD_RES (13), (14), (15), (16), (17): Xaa is A or G
  MOD_RES (18), (19), (20), (21): Xaa is A or G or is absent
XESVAMGPIKGYXXXXXXXXXFYLINIPSLKTPV

SEQ ID NO: 31669 - protein, 38 aa, Artificial Sequence
  GFR-binding peptide
  MOD_RES (2), (4), (36), (37): Xaa is C or S
RXGXAEVVMDPIKGYVVNNAADFYLINIPSLRAPVXXS

SEQ ID NO: 31670 - protein, 42 aa, Artificial Sequence
  GFR-binding peptide
  MOD_RES (2), (4), (36), (37): Xaa is C or S
SXGXRDVVMGPIKGYIIQQKDNFYLMNIPSMKTPTXXPGASG

SEQ ID NO: 31671 - protein, 38 aa, Artificial Sequence
  GFR-binding peptide
  MOD_RES (33), (34): Xaa is C or S
  MOD_RES (11), (12), (13), (14), (15): Xaa is A or G
  MOD_RES (16), (17), (18), (19): Xaa is A or G or is absent
EVVMEPIKGYXXXXXXXXXFYLMNIPSLETPVXXAKPI

SEQ ID NO: 31672 - protein, 32 aa, Artificial Sequence
  GFR-binding peptide
  MOD_RES (11), (12), (13), (14), (15): Xaa is A or G
  MOD_RES (16), (17), (18), (19): Xaa is A or G or is absent
RVVMNPIKGYXXXXXXXXXFYLVNIPSLKTPA

SEQ ID NO: 31673 - protein, 36 aa, Artificial Sequence
  GFR-binding peptide
  MOD_RES (33), (34): Xaa is C or S
  MOD_RES (11), (12), (13), (14), (15): Xaa is A or G
  MOD_RES (16), (17), (18), (19): Xaa is A or G or is absent
KVVMNPIKGYXXXXXXXXXFYLVNIPSLKTPAXXAK

SEQ ID NO: 31674 - protein, 44 aa, Artificial Sequence
  GFR-binding peptide
  MOD_RES (2), (4), (38), (39): Xaa is C or S
  MOD_RES (16), (17), (18), (19), (20): Xaa is A or G
  MOD_RES (21), (22), (23), (24): Xaa is A or G or is absent
HXGXSRVVMNPIKGYXXXXXXXXXFYLVNIPSLKTPAXXPKPVH

SEQ ID NO: 31675 - protein, 37 aa, Artificial Sequence
  GFR-binding peptide
  MOD_RES (1), (3), (35), (36): Xaa is C or S
XGXRDVVMGPIKGYIIQQKDNFYLMNIPSMKTPTXXP

SEQ ID NO: 31676 - protein, 32 aa, Artificial Sequence
  GFR-binding peptide
  MOD_RES (32), (32): Xaa is C or S
ESVAMGPIKGYYTVVGKDFYLINIPSLKTPVX

SEQ ID NO: 31677 - protein, 40 aa, Artificial Sequence
  GFR-binding peptide
  MOD_RES (2), (4), (38), (39): Xaa is C or S
  MOD_RES (16), (17), (18), (19), (20): Xaa is A or G
  MOD_RES (21), (22), (23), (24): Xaa is A or G or is absent
RXGXGEVVMDPIKGYXXXXXXXXXFYLMNIPSLETPVXXA

SEQ ID NO: 31678 - protein, 38 aa, Artificial Sequence
  GFR-binding peptide
  MOD_RES (33), (34): Xaa is C or S
EAVSMGEPIKGYTPVGMDDFYLVNIPSLKTPVXXAKGV

SEQ ID NO: 31679 - protein, 43 aa, Artificial Sequence
  GFR-binding peptide
  MOD_RES (1), (3), (37), (38): Xaa is C or S
  MOD_RES (15), (16), (17), (18), (19): Xaa is A or G
  MOD_RES (20), (21), (22), (23): Xaa is A or G or is absent
XGXSRVVMNPIKGYXXXXXXXXXFYLVNIPSLKTPAXXPKPVH

SEQ ID NO: 31680 - protein, 32 aa, Artificial Sequence
  GFR-binding peptide
  MOD_RES (31), (31): Xaa is C or S
RVVMNPIKGYIVNSSDDFYLVNIPSLKTPAXT

SEQ ID NO: 31681 - protein, 37 aa, Artificial Sequence
  GFR-binding peptide
  MOD_RES (33), (34): Xaa is C or S
  MOD_RES (11), (12), (13), (14), (15): Xaa is A or G
  MOD_RES (16), (17), (18), (19): Xaa is A or G or is absent
RVVMNPIKGYXXXXXXXXXFYLVNIPSLKTPAXXPKP

SEQ ID NO: 31682 - protein, 37 aa, Artificial Sequence
  GFR-binding peptide
  MOD_RES (2), (4), (36), (37): Xaa is C or S
RXGXGEVVMDPIKGYVVKENEDFYLMNIPSLETPVXX

SEQ ID NO: 31683 - protein, 37 aa, Artificial Sequence
  GFR-binding peptide
  MOD_RES (1), (3), (35), (36): Xaa is C or S
XGXSRVVMNPIKGYIVNSSDDFYLVNIPSLKTPAXXP

SEQ ID NO: 31684 - protein, 37 aa, Artificial Sequence
  GFR-binding peptide
  MOD_RES (1), (3), (35), (36): Xaa is C or S
XGXSEVVMDPIKGYVVNNASDFYLINIPSLRTPVXXT

SEQ ID NO: 31685 - protein, 41 aa, Artificial Sequence
  GFR-binding peptide
  MOD_RES (2), (4), (36), (37): Xaa is C or S
HXGXAKVVMNPIKGYIVNNSSDFYLVNIPSLKTPAXXAKPV

SEQ ID NO: 31686 - protein, 39 aa, Artificial Sequence
  GFR-binding peptide
  MOD_RES (2), (4), (38), (39): Xaa is C or S
  MOD_RES (16), (17), (18), (19), (20): Xaa is A or G
  MOD_RES (21), (22), (23), (24): Xaa is A or G or is absent
HXGXSRVVMNPIKGYXXXXXXXXXFYLVNIPSLKTPAXX

SEQ ID NO: 31687 - protein, 35 aa, Artificial Sequence
  GFR-binding peptide
  MOD_RES (2), (34): Xaa is C or S
GXSRVVMNPIKGYIVNSSDDFYLVNIPSLKTPAXT

SEQ ID NO: 31688 - protein, 34 aa, Artificial Sequence
  GFR-binding peptide
  MOD_RES (2), (34): Xaa is C or S
GXAEVVMDPIKGYVVNNAADFYLINIPSLRAPVX

SEQ ID NO: 31689 - protein, 35 aa, Artificial Sequence
  GFR-binding peptide
  MOD_RES (31), (32): Xaa is C or S
EVVMDPIKGYVVNNASDFYLINIPSLRTPVXXTPP

SEQ ID NO: 31690 - protein, 34 aa, Artificial Sequence
  GFR-binding peptide
  MOD_RES (1), (33), (34): Xaa is C or S
XAKVVMNPIKGYIVNNSSDFYLVNIPSLKTPAXX

SEQ ID NO: 31691 - protein, 40 aa, Artificial Sequence
  GFR-binding peptide
  MOD_RES (2), (34), (35): Xaa is C or S
GXSRVVMNPIKGYIVNSSDDFYLVNIPSLKTPAXXPKPVY

SEQ ID NO: 31692 - protein, 36 aa, Artificial Sequence
  GFR-binding peptide
  MOD_RES (34), (34): Xaa is C or S
  MOD_RES (12), (13), (14), (15), (16): Xaa is A or G
  MOD_RES (17), (18), (19), (20): Xaa is A or G or is absent
SRVVMNPIKGYXXXXXXXXXFYLVNIPSLKTPAXTP

SEQ ID NO: 31693 - protein, 39 aa, Artificial Sequence
  GFR-binding peptide
  MOD_RES (2), (34), (35): Xaa is C or S
GXESVAMGPIKGYYTVVGKDFYLINIPSLKTPVXXAKSA

SEQ ID NO: 31694 - protein, 37 aa, Artificial Sequence
  GFR-binding peptide
  MOD_RES (2), (4): Xaa is C or S
  MOD_RES (16), (17), (18), (19), (20): Xaa is A or G
  MOD_RES (21), (22), (23), (24): Xaa is A or G or is absent
HXGXAKVVMNPIKGYXXXXXXXXXFYLVNIPSLKTPA

SEQ ID NO: 31695 - protein, 38 aa, Artificial Sequence
  GFR-binding peptide
  MOD_RES (2), (34), (35): Xaa is C or S
GXAKVVMNPIKGYIVNNSSDFYLVNIPSLKTPAXXAKP

SEQ ID NO: 31696 - protein, 32 aa, Artificial Sequence
  GFR-binding peptide
  MOD_RES (1), (1): Xaa is C or S
XAEVVMDPIKGYVVNNAADFYLINIPSLRAPV

SEQ ID NO: 31697 - protein, 39 aa, Artificial Sequence
  GFR-binding peptide
  MOD_RES (2), (37), (38): Xaa is C or S
  MOD_RES (15), (16), (17), (18), (19): Xaa is A or G
  MOD_RES (20), (21), (22), (23): Xaa is A or G or is absent
GXEAVSMGEPIKGYXXXXXXXXXFYLVNIPSLKTPVXXA

SEQ ID NO: 31698 - protein, 37 aa, Artificial Sequence
  GFR-binding peptide
  MOD_RES (2), (34), (35): Xaa is C or S
GXRDVVMGPIKGYIIQQKDNFYLMNIPSMKTPTXXPG

SEQ ID NO: 31699 - protein, 35 aa, Artificial Sequence
  GFR-binding peptide
  MOD_RES (31), (32): Xaa is C or S
KVVMNPIKGYIVNNSSDFYLVNIPSLKTPAXXAKP

SEQ ID NO: 31700 - protein, 34 aa, Artificial Sequence
  GFR-binding peptide
  MOD_RES (2), (2): Xaa is C or S
  MOD_RES (13), (14), (15), (16), (17): Xaa is A or G
  MOD_RES (18), (19), (20), (21): Xaa is A or G or is absent
GXEEVIMPIKGYXXXXXXXXXFYLMNIPSTKVPA

SEQ ID NO: 31701 - protein, 34 aa, Artificial Sequence
  GFR-binding peptide
  MOD_RES (31), (32): Xaa is C or S
RVVMNPIKGYIVNSSDDFYLVNIPSLKTPAXXPK

SEQ ID NO: 31702 - protein, 39 aa, Artificial Sequence
  GFR-binding peptide
  MOD_RES (1), (35), (36): Xaa is C or S
  MOD_RES (13), (14), (15), (16), (17): Xaa is A or G
  MOD_RES (18), (19), (20), (21): Xaa is A or G or is absent
XRDVVMGPIKGYXXXXXXXXXFYLMNIPSMKTPTXXPGA

SEQ ID NO: 31703 - protein, 41 aa, Artificial Sequence
  GFR-binding peptide
  MOD_RES (1), (3), (35), (36): Xaa is C or S
XGXGEVVMDPIKGYVVKENEDFYLMNIPSLETPVXXAKPIK

SEQ ID NO: 31704 - protein, 37 aa, Artificial Sequence
  GFR-binding peptide
  MOD_RES (2), (36): Xaa is C or S
  MOD_RES (14), (15), (16), (17), (18): Xaa is A or G
  MOD_RES (19), (20), (21), (22): Xaa is A or G or is absent
GXSRVVMNPIKGYXXXXXXXXXFYLVNIPSLKTPAXT

SEQ ID NO: 31705 - protein, 35 aa, Artificial Sequence
  GFR-binding peptide
  MOD_RES (31), (32): Xaa is C or S
SVAMGPIKGYYTVVGKDFYLINIPSLKTPVXXAKS

SEQ ID NO: 31706 - protein, 36 aa, Artificial Sequence
  GFR-binding peptide
  MOD_RES (33), (34): Xaa is C or S
  MOD_RES (11), (12), (13), (14), (15): Xaa is A or G
  MOD_RES (16), (17), (18), (19): Xaa is A or G or is absent
EEVIMPIKGYXXXXXXXXXFYLMNIPSTKVPAXXTS

SEQ ID NO: 31707 - protein, 39 aa, Artificial Sequence
  GFR-binding peptide
  MOD_RES (1), (3), (37), (38): Xaa is C or S
  MOD_RES (15), (16), (17), (18), (19): Xaa is A or G
  MOD_RES (20), (21), (22), (23): Xaa is A or G or is absent
XGXGEVVMEPIKGYXXXXXXXXXFYLMNIPSLETPVXXA

SEQ ID NO: 31708 - protein, 38 aa, Artificial Sequence
  GFR-binding peptide
  MOD_RES (2), (34), (35): Xaa is C or S
GXAEVVMDPIKGYVVNNAADFYLINIPSLRAPVXXSAP

SEQ ID NO: 31709 - protein, 39 aa, Artificial Sequence
  GFR-binding peptide
  MOD_RES (1), (3), (35), (36): Xaa is C or S
XGXAEVVMDPIKGYVVNNAADFYLINIPSLRAPVXXSAP

SEQ ID NO: 31710 - protein, 35 aa, Artificial Sequence
  GFR-binding peptide
  MOD_RES (2), (2): Xaa is C or S
  MOD_RES (14), (15), (16), (17), (18): Xaa is A or G
  MOD_RES (19), (20), (21), (22): Xaa is A or G or is absent
GXSEVVMDPIKGYXXXXXXXXXFYLINIPSLRTPV

SEQ ID NO: 31711 - protein, 40 aa, Artificial Sequence
  GFR-binding peptide
  MOD_RES (1), (35), (36): Xaa is C or S
  MOD_RES (13), (14), (15), (16), (17): Xaa is A or G
  MOD_RES (18), (19), (20), (21): Xaa is A or G or is absent
XSRVVMNPIKGYXXXXXXXXXFYLVNIPSLKTPAXXPKPV

SEQ ID NO: 31712 - protein, 37 aa, Artificial Sequence
  GFR-binding peptide
  MOD_RES (1), (35): Xaa is C or S
  MOD_RES (13), (14), (15), (16), (17): Xaa is A or G
  MOD_RES (18), (19), (20), (21): Xaa is A or G or is absent
XSRVVMNPIKGYXXXXXXXXXFYLVNIPSLKTPAXTP

SEQ ID NO: 31713 - protein, 35 aa, Artificial Sequence
  GFR-binding peptide
  MOD_RES (2), (2): Xaa is C or S
  MOD_RES (14), (15), (16), (17), (18): Xaa is A or G
  MOD_RES (19), (20), (21), (22): Xaa is A or G or is absent
GXSRVVMNPIKGYXXXXXXXXXFYLVNIPSLKTPA

SEQ ID NO: 31714 - protein, 38 aa, Artificial Sequence
  GFR-binding peptide
  MOD_RES (33), (34): Xaa is C or S
  MOD_RES (11), (12), (13), (14), (15): Xaa is A or G
  MOD_RES (16), (17), (18), (19): Xaa is A or G or is absent
EVVMDPIKGYXXXXXXXXXFYLMNIPSLETPVXXAKPI

SEQ ID NO: 31715 - protein, 32 aa, Artificial Sequence
  GFR-binding peptide
  MOD_RES (32), (32): Xaa is C or S
AKVVMNPIKGYIVNNSSDFYLVNIPSLKTPAX

SEQ ID NO: 31716 - protein, 38 aa, Artificial Sequence
  GFR-binding peptide
  MOD_RES (32), (33): Xaa is C or S
AKVVMNPIKGYIVNNSSDFYLVNIPSLKTPAXXAKPVA

SEQ ID NO: 31717 - protein, 34 aa, Artificial Sequence
  GFR-binding peptide
  MOD_RES (2), (2): Xaa is C or S
GXEAVSMGEPIKGYTPVGMDDFYLVNIPSLKTPV

SEQ ID NO: 31718 - protein, 40 aa, Artificial Sequence
  GFR-binding peptide
  MOD_RES (1), (3), (35): Xaa is C or S
XGXSRVVMNPIKGYIVNSSDDFYLVNIPSLKTPAXTPKTV

SEQ ID NO: 31719 - protein, 37 aa, Artificial Sequence
  GFR-binding peptide
  MOD_RES (32), (33): Xaa is C or S
ARVVMNPIKGYIVNSSDDFYLVNIPSLQTPAXXPKPV

SEQ ID NO: 31720 - protein, 37 aa, Artificial Sequence
  GFR-binding peptide
  MOD_RES (31), (32): Xaa is C or S
KVVMNPIKGYIVNNSSDFYLVNIPSLKTPAXXAKPVA

SEQ ID NO: 31721 - protein, 35 aa, Artificial Sequence
  GFR-binding peptide
  MOD_RES (32), (33): Xaa is C or S
GEVVMEPIKGYVVKDYEDFYLMNIPSLETPVXXAK

SEQ ID NO: 31722 - protein, 40 aa, Artificial Sequence
  GFR-binding peptide
  MOD_RES (2), (4), (38), (39): Xaa is C or S
  MOD_RES (16), (17), (18), (19), (20): Xaa is A or G
  MOD_RES (21), (22), (23), (24): Xaa is A or G or is absent
RXGXAEVVMDPIKGYXXXXXXXXXFYLINIPSLRAPVXXS

SEQ ID NO: 31723 - protein, 36 aa, Artificial Sequence
  GFR-binding peptide
  MOD_RES (31), (32): Xaa is C or S
RVVMNPIKGYIVNSSDDFYLVNIPSLQTPAXXPKPV

SEQ ID NO: 31724 - protein, 39 aa, Artificial Sequence
  GFR-binding peptide
  MOD_RES (2), (4), (36), (37): Xaa is C or S
SXGXRDVVMGPIKGYIIQQKDNFYLMNIPSMKTPTXXPG

SEQ ID NO: 31725 - protein, 37 aa, Artificial Sequence
  GFR-binding peptide
  MOD_RES (1), (33), (34): Xaa is C or S
XRDVVMGPIKGYIIQQKDNFYLMNIPSMKTPTXXPGA

SEQ ID NO: 31726 - protein, 39 aa, Artificial Sequence
  GFR-binding peptide
  MOD_RES (2), (36), (37): Xaa is C or S
  MOD_RES (14), (15), (16), (17), (18): Xaa is A or G
  MOD_RES (19), (20), (21), (22): Xaa is A or G or is absent
GXSEVVMDPIKGYXXXXXXXXXFYLINIPSLRTPVXXTP

SEQ ID NO: 31727 - protein, 32 aa, Artificial Sequence
  GFR-binding peptide
  MOD_RES (11), (12), (13), (14), (15): Xaa is A or G
  MOD_RES (16), (17), (18), (19): Xaa is A or G or is absent
SVAMGPIKGYXXXXXXXXXFYLINIPSLKTPV

SEQ ID NO: 31728 - protein, 40 aa, Artificial Sequence
  GFR-binding peptide
  MOD_RES (2), (4), (38), (39): Xaa is C or S
  MOD_RES (16), (17), (18), (19), (20): Xaa is A or G
  MOD_RES (21), (22), (23), (24): Xaa is A or G or is absent
HXGXSRVVMNPIKGYXXXXXXXXXFYLVNIPSLKTPAXXP

SEQ ID NO: 31729 - protein, 40 aa, Artificial Sequence
  GFR-binding peptide
  MOD_RES (2), (36), (37): Xaa is C or S
  MOD_RES (14), (15), (16), (17), (18): Xaa is A or G
  MOD_RES (19), (20), (21), (22): Xaa is A or G or is absent
GXGEVVMEPIKGYXXXXXXXXXFYLMNIPSLETPVXXAKP

SEQ ID NO: 31730 - protein, 42 aa, Artificial Sequence
  GFR-binding peptide
  MOD_RES (2), (4), (38), (39): Xaa is C or S
  MOD_RES (16), (17), (18), (19), (20): Xaa is A or G
  MOD_RES (21), (22), (23), (24): Xaa is A or G or is absent
RXGXESVAMGPIKGYXXXXXXXXXFYLINIPSLKTPVXXAKS

SEQ ID NO: 31731 - protein, 42 aa, Artificial Sequence
  GFR-binding peptide
  MOD_RES (2), (4), (36): Xaa is C or S
HXGXSRVVMNPIKGYIVNSSDDFYLVNIPSLKTPAXTPKTVH

SEQ ID NO: 31732 - protein, 38 aa, Artificial Sequence
  GFR-binding peptide
  MOD_RES (2), (4), (38): Xaa is C or S
  MOD_RES (16), (17), (18), (19), (20): Xaa is A or G
  MOD_RES (21), (22), (23), (24): Xaa is A or G or is absent
RXGXSEVVMDPIKGYXXXXXXXXXFYLINIPSLRTPVX

SEQ ID NO: 31733 - protein, 33 aa, Artificial Sequence
  GFR-binding peptide
  MOD_RES (1), (32), (33): Xaa is C or S
XEEVIMPIKGYLLVRGNDFYLMNIPSTKVPAXX

SEQ ID NO: 31734 - protein, 36 aa, Artificial Sequence
  GFR-binding peptide
  MOD_RES (1), (35), (36): Xaa is C or S
  MOD_RES (13), (14), (15), (16), (17): Xaa is A or G
  MOD_RES (18), (19), (20), (21): Xaa is A or G or is absent
XAKVVMNPIKGYXXXXXXXXXFYLVNIPSLKTPAXX

SEQ ID NO: 31735 - protein, 42 aa, Artificial Sequence
  GFR-binding peptide
  MOD_RES (2), (4), (38), (39): Xaa is C or S
  MOD_RES (16), (17), (18), (19), (20): Xaa is A or G
  MOD_RES (21), (22), (23), (24): Xaa is A or G or is absent
HXGXSRVVMNPIKGYXXXXXXXXXFYLVNIPSLKTPAXXPKP

SEQ ID NO: 31736 - protein, 39 aa, Artificial Sequence
  GFR-binding peptide
  MOD_RES (1), (35): Xaa is C or S
  MOD_RES (13), (14), (15), (16), (17): Xaa is A or G
  MOD_RES (18), (19), (20), (21): Xaa is A or G or is absent
XSRVVMNPIKGYXXXXXXXXXFYLVNIPSLKTPAXTPKT

SEQ ID NO: 31737 - protein, 35 aa, Artificial Sequence
  GFR-binding peptide
  MOD_RES (2), (4): Xaa is C or S
RXGXAEVVMDPIKGYVVNNAADFYLINIPSLRAPV

SEQ ID NO: 31738 - protein, 41 aa, Artificial Sequence
  GFR-binding peptide
  MOD_RES (2), (4), (37), (38): Xaa is C or S
RXGXEAVSMGEPIKGYTPVGMDDFYLVNIPSLKTPVXXAKG

SEQ ID NO: 31739 - protein, 32 aa, Artificial Sequence
  GFR-binding peptide
  MOD_RES (1), (1): Xaa is C or S
XARVVMNPIKGYIVNSSDDFYLVNIPSLQTPA

SEQ ID NO: 31740 - protein, 41 aa, Artificial Sequence
  GFR-binding peptide
  MOD_RES (2), (4), (36), (37): Xaa is C or S
RXGXGEVVMDPIKGYVVKENEDFYLMNIPSLETPVXXAKPI

SEQ ID NO: 31741 - protein, 39 aa, Artificial Sequence
  GFR-binding peptide
  MOD_RES (2), (4), (35), (36): Xaa is C or S
LXGXEEVIMPIKGYLLVRGNDFYLMNIPSTKVPAXXTSP

SEQ ID NO: 31742 - protein, 34 aa, Artificial Sequence
  GFR-binding peptide
  MOD_RES (1), (1): Xaa is C or S
  MOD_RES (13), (14), (15), (16), (17): Xaa is A or G
  MOD_RES (18), (19), (20), (21): Xaa is A or G or is absent
XGEVVMDPIKGYXXXXXXXXXFYLMNIPSLETPV

SEQ ID NO: 31743 - protein, 38 aa, Artificial Sequence
  GFR-binding peptide
  MOD_RES (1), (33), (34): Xaa is C or S
XARVVMNPIKGYIVNSSDDFYLVNIPSLQTPAXXPKPV

SEQ ID NO: 31744 - protein, 38 aa, Artificial Sequence
  GFR-binding peptide
  MOD_RES (2), (36), (37): Xaa is C or S
  MOD_RES (14), (15), (16), (17), (18): Xaa is A or G
  MOD_RES (19), (20), (21), (22): Xaa is A or G or is absent
GXRDVVMGPIKGYXXXXXXXXXFYLMNIPSMKTPTXXP

SEQ ID NO: 31745 - protein, 39 aa, Artificial Sequence
  GFR-binding peptide
  MOD_RES (1), (3), (37), (38): Xaa is C or S
  MOD_RES (15), (16), (17), (18), (19): Xaa is A or G
  MOD_RES (20), (21), (22), (23): Xaa is A or G or is absent
XGXESVAMGPIKGYXXXXXXXXXFYLINIPSLKTPVXXA

SEQ ID NO: 31746 - protein, 35 aa, Artificial Sequence
  GFR-binding peptide
  MOD_RES (31), (32): Xaa is C or S
EEVIMPIKGYLLVRGNDFYLMNIPSTKVPAXXTSP

SEQ ID NO: 31747 - protein, 42 aa, Artificial Sequence
  GFR-binding peptide
  MOD_RES (2), (4), (38), (39): Xaa is C or S
  MOD_RES (16), (17), (18), (19), (20): Xaa is A or G
  MOD_RES (21), (22), (23), (24): Xaa is A or G or is absent
SXGXRDVVMGPIKGYXXXXXXXXXFYLMNIPSMKTPTXXPGA

SEQ ID NO: 31748 - protein, 42 aa, Artificial Sequence
  GFR-binding peptide
  MOD_RES (2), (4), (39), (40): Xaa is C or S
  MOD_RES (17), (18), (19), (20), (21): Xaa is A or G
  MOD_RES (22), (23), (24), (25): Xaa is A or G or is absent
RXGXEAVSMGEPIKGYXXXXXXXXXFYLVNIPSLKTPVXXAK

SEQ ID NO: 31749 - protein, 36 aa, Artificial Sequence
  GFR-binding peptide
  MOD_RES (34), (35): Xaa is C or S
  MOD_RES (12), (13), (14), (15), (16): Xaa is A or G
  MOD_RES (17), (18), (19), (20): Xaa is A or G or is absent
RDVVMGPIKGYXXXXXXXXXFYLMNIPSMKTPTXXP

SEQ ID NO: 31750 - protein, 37 aa, Artificial Sequence
  GFR-binding peptide
  MOD_RES (34), (35): Xaa is C or S
  MOD_RES (12), (13), (14), (15), (16): Xaa is A or G
  MOD_RES (17), (18), (19), (20): Xaa is A or G or is absent
ARVVMNPIKGYXXXXXXXXXFYLVNIPSLQTPAXXPK

SEQ ID NO: 31751 - protein, 35 aa, Artificial Sequence
  GFR-binding peptide
  MOD_RES (1), (33), (34): Xaa is C or S
XAEVVMDPIKGYVVNNAADFYLINIPSLRAPVXXS

SEQ ID NO: 31752 - protein, 38 aa, Artificial Sequence
  GFR-binding peptide
  MOD_RES (2), (36), (37): Xaa is C or S
  MOD_RES (14), (15), (16), (17), (18): Xaa is A or G
  MOD_RES (19), (20), (21), (22): Xaa is A or G or is absent
GXSRVVMNPIKGYXXXXXXXXXFYLVNIPSLKTPAXXP

SEQ ID NO: 31753 - protein, 38 aa, Artificial Sequence
  GFR-binding peptide
  MOD_RES (32), (33): Xaa is C or S
RDVVMGPIKGYIIQQKDNFYLMNIPSMKTPTXXPGASG

SEQ ID NO: 31754 - protein, 34 aa, Artificial Sequence
  GFR-binding peptide
  MOD_RES (1), (1): Xaa is C or S
  MOD_RES (13), (14), (15), (16), (17): Xaa is A or G
  MOD_RES (18), (19), (20), (21): Xaa is A or G or is absent
XSRVVMNPIKGYXXXXXXXXXFYLVNIPSLKTPA

SEQ ID NO: 31755 - protein, 35 aa, Artificial Sequence
  GFR-binding peptide
  MOD_RES (1), (33), (34): Xaa is C or S
XESVAMGPIKGYYTVVGKDFYLINIPSLKTPVXXA

SEQ ID NO: 31756 - protein, 43 aa, Artificial Sequence
  GFR-binding peptide
  MOD_RES (1), (3), (37), (38): Xaa is C or S
  MOD_RES (15), (16), (17), (18), (19): Xaa is A or G
  MOD_RES (20), (21), (22), (23): Xaa is A or G or is absent
XGXSRVVMNPIKGYXXXXXXXXXFYLVNIPSLKTPAXXPKPVY

SEQ ID NO: 31757 - protein, 41 aa, Artificial Sequence
  GFR-binding peptide
  MOD_RES (1), (3), (37), (38): Xaa is C or S
  MOD_RES (15), (16), (17), (18), (19): Xaa is A or G
  MOD_RES (20), (21), (22), (23): Xaa is A or G or is absent
XGXARVVMNPIKGYXXXXXXXXXFYLVNIPSLQTPAXXPKP

SEQ ID NO: 31758 - protein, 35 aa, Artificial Sequence
  GFR-binding peptide
  MOD_RES (2), (35): Xaa is C or S
  MOD_RES (13), (14), (15), (16), (17): Xaa is A or G
  MOD_RES (18), (19), (20), (21): Xaa is A or G or is absent
GXEEVIMPIKGYXXXXXXXXXFYLMNIPSTKVPAX

SEQ ID NO: 31759 - protein, 37 aa, Artificial Sequence
  GFR-binding peptide
  MOD_RES (1), (33), (34): Xaa is C or S
XARVVMNPIKGYIVNSSDDFYLVNIPSLQTPAXXPKP

SEQ ID NO: 31760 - protein, 39 aa, Artificial Sequence
  GFR-binding peptide
  MOD_RES (1), (3), (37), (38): Xaa is C or S
  MOD_RES (15), (16), (17), (18), (19): Xaa is A or G
  MOD_RES (20), (21), (22), (23): Xaa is A or G or is absent
XGXGEVVMDPIKGYXXXXXXXXXFYLMNIPSLETPVXXA

SEQ ID NO: 31761 - protein, 41 aa, Artificial Sequence
  GFR-binding peptide
  MOD_RES (1), (3), (37), (38): Xaa is C or S
  MOD_RES (15), (16), (17), (18), (19): Xaa is A or G
  MOD_RES (20), (21), (22), (23): Xaa is A or G or is absent
XGXRDVVMGPIKGYXXXXXXXXXFYLMNIPSMKTPTXXPGA

SEQ ID NO: 31762 - protein, 34 aa, Artificial Sequence
  GFR-binding peptide
  MOD_RES (33), (34): Xaa is C or S
EAVSMGEPIKGYTPVGMDDFYLVNIPSLKTPVXX

SEQ ID NO: 31763 - protein, 35 aa, Artificial Sequence
  GFR-binding peptide
  MOD_RES (1), (35): Xaa is C or S
  MOD_RES (13), (14), (15), (16), (17): Xaa is A or G
  MOD_RES (18), (19), (20), (21): Xaa is A or G or is absent
XESVAMGPIKGYXXXXXXXXXFYLINIPSLKTPVX

SEQ ID NO: 31764 - protein, 35 aa, Artificial Sequence
  GFR-binding peptide
  MOD_RES (1), (33), (34): Xaa is C or S
XARVVMNPIKGYIVNSSDDFYLVNIPSLQTPAXXP

SEQ ID NO: 31765 - protein, 39 aa, Artificial Sequence
  GFR-binding peptide
  MOD_RES (2), (4), (38): Xaa is C or S
  MOD_RES (16), (17), (18), (19), (20): Xaa is A or G
  MOD_RES (21), (22), (23), (24): Xaa is A or G or is absent
HXGXSRVVMNPIKGYXXXXXXXXXFYLVNIPSLKTPAXT

SEQ ID NO: 31766 - protein, 40 aa, Artificial Sequence
  GFR-binding peptide
  MOD_RES (2), (4), (36), (37): Xaa is C or S
RXGXAEVVMDPIKGYVVNNAADFYLINIPSLRAPVXXSAP

SEQ ID NO: 31767 - protein, 36 aa, Artificial Sequence
  GFR-binding peptide
  MOD_RES (1), (3), (35), (36): Xaa is C or S
XGXAEVVMDPIKGYVVNNAADFYLINIPSLRAPVXX

SEQ ID NO: 31768 - protein, 40 aa, Artificial Sequence
  GFR-binding peptide
  MOD_RES (2), (4), (36), (37): Xaa is C or S
HXGXAKVVMNPIKGYIVNNSSDFYLVNIPSLKTPAXXAKP

SEQ ID NO: 31769 - protein, 37 aa, Artificial Sequence
  GFR-binding peptide
  MOD_RES (1), (33): Xaa is C or S
XSRVVMNPIKGYIVNSSDDFYLVNIPSLKTPAXTPKT

SEQ ID NO: 31770 - protein, 41 aa, Artificial Sequence
  GFR-binding peptide
  MOD_RES (2), (4), (36), (37): Xaa is C or S
RXGXAEVVMDPIKGYVVNNAADFYLINIPSLRAPVXXSAPA

SEQ ID NO: 31771 - protein, 42 aa, Artificial Sequence
  GFR-binding peptide
  MOD_RES (1), (3), (37), (38): Xaa is C or S
  MOD_RES (15), (16), (17), (18), (19): Xaa is A or G
  MOD_RES (20), (21), (22), (23): Xaa is A or G or is absent
XGXAEVVMDPIKGYXXXXXXXXXFYLINIPSLRAPVXXSAPA

SEQ ID NO: 31772 - protein, 35 aa, Artificial Sequence
  GFR-binding peptide
  MOD_RES (1), (35): Xaa is C or S
  MOD_RES (13), (14), (15), (16), (17): Xaa is A or G
  MOD_RES (18), (19), (20), (21): Xaa is A or G or is absent
XGEVVMEPIKGYXXXXXXXXXFYLMNIPSLETPVX

SEQ ID NO: 31773 - protein, 36 aa, Artificial Sequence
  GFR-binding peptide
  MOD_RES (2), (34), (35): Xaa is C or S
GXGEVVMEPIKGYVVKDYEDFYLMNIPSLETPVXXA

SEQ ID NO: 31774 - protein, 37 aa, Artificial Sequence
  GFR-binding peptide
  MOD_RES (2), (4): Xaa is C or S
  MOD_RES (16), (17), (18), (19), (20): Xaa is A or G
  MOD_RES (21), (22), (23), (24): Xaa is A or G or is absent
RXGXSEVVMDPIKGYXXXXXXXXXFYLINIPSLRTPV

SEQ ID NO: 31775 - protein, 32 aa, Artificial Sequence
  GFR-binding peptide
EAVSMGEPIKGYTPVGMDDFYLVNIPSLKTPV

SEQ ID NO: 31776 - protein, 38 aa, Artificial Sequence
  GFR-binding peptide
  MOD_RES (1), (3), (36), (37): Xaa is C or S
  MOD_RES (14), (15), (16), (17), (18): Xaa is A or G
  MOD_RES (19), (20), (21), (22): Xaa is A or G or is absent
XGXEEVIMPIKGYXXXXXXXXXFYLMNIPSTKVPAXXT

SEQ ID NO: 31777 - protein, 38 aa, Artificial Sequence
  GFR-binding peptide
  MOD_RES (1), (35), (36): Xaa is C or S
  MOD_RES (13), (14), (15), (16), (17): Xaa is A or G
  MOD_RES (18), (19), (20), (21): Xaa is A or G or is absent
XSEVVMDPIKGYXXXXXXXXXFYLINIPSLRTPVXXTP

SEQ ID NO: 31778 - protein, 40 aa, Artificial Sequence
  GFR-binding peptide
  MOD_RES (1), (3), (36), (37): Xaa is C or S
  MOD_RES (14), (15), (16), (17), (18): Xaa is A or G
  MOD_RES (19), (20), (21), (22): Xaa is A or G or is absent
XGXEEVIMPIKGYXXXXXXXXXFYLMNIPSTKVPAXXTSP

SEQ ID NO: 31779 - protein, 35 aa, Artificial Sequence
  GFR-binding peptide
  MOD_RES (2), (34), (35): Xaa is C or S
GXESVAMGPIKGYYTVVGKDFYLINIPSLKTPVXX

SEQ ID NO: 31780 - protein, 36 aa, Artificial Sequence
  GFR-binding peptide
  MOD_RES (31), (32): Xaa is C or S
EVVMDPIKGYVVKENEDFYLMNIPSLETPVXXAKPI

SEQ ID NO: 31781 - protein, 40 aa, Artificial Sequence
  GFR-binding peptide
  MOD_RES (2), (34): Xaa is C or S
GXSRVVMNPIKGYIVNSSDDFYLVNIPSLKTPAXTPKTVH

SEQ ID NO: 31782 - protein, 39 aa, Artificial Sequence
  GFR-binding peptide
  MOD_RES (2), (4), (36), (37): Xaa is C or S
RXGXGEVVMDPIKGYVVKENEDFYLMNIPSLETPVXXAK

SEQ ID NO: 31783 - protein, 35 aa, Artificial Sequence
  GFR-binding peptide
  MOD_RES (1), (3): Xaa is C or S
XGXEAVSMGEPIKGYTPVGMDDFYLVNIPSLKTPV

SEQ ID NO: 31784 - protein, 36 aa, Artificial Sequence
  GFR-binding peptide
  MOD_RES (31), (32): Xaa is C or S
RVVMNPIKGYIVNSSDDFYLVNIPSLKTPAXXPKPV

SEQ ID NO: 31785 - protein, 37 aa, Artificial Sequence
  GFR-binding peptide
  MOD_RES (1), (3), (34), (35): Xaa is C or S
XGXEEVIMPIKGYLLVRGNDFYLMNIPSTKVPAXXTS

SEQ ID NO: 31786 - protein, 41 aa, Artificial Sequence
  GFR-binding peptide
  MOD_RES (1), (3), (35), (36): Xaa is C or S
XGXSEVVMDPIKGYVVNNASDFYLINIPSLRTPVXXTPPTS

SEQ ID NO: 31787 - protein, 36 aa, Artificial Sequence
  GFR-binding peptide
  MOD_RES (34), (35): Xaa is C or S
  MOD_RES (12), (13), (14), (15), (16): Xaa is A or G
  MOD_RES (17), (18), (19), (20): Xaa is A or G or is absent
AEVVMDPIKGYXXXXXXXXXFYLINIPSLRAPVXXS

SEQ ID NO: 31788 - protein, 36 aa, Artificial Sequence
  GFR-binding peptide
  MOD_RES (33), (34): Xaa is C or S
  MOD_RES (11), (12), (13), (14), (15): Xaa is A or G
  MOD_RES (16), (17), (18), (19): Xaa is A or G or is absent
RVVMNPIKGYXXXXXXXXXFYLVNIPSLQTPAXXPK

SEQ ID NO: 31789 - protein, 36 aa, Artificial Sequence
  GFR-binding peptide
  MOD_RES (2), (36): Xaa is C or S
  MOD_RES (14), (15), (16), (17), (18): Xaa is A or G
  MOD_RES (19), (20), (21), (22): Xaa is A or G or is absent
GXESVAMGPIKGYXXXXXXXXXFYLINIPSLKTPVX

SEQ ID NO: 31790 - protein, 32 aa, Artificial Sequence
  GFR-binding peptide
  MOD_RES (11), (12), (13), (14), (15): Xaa is A or G
  MOD_RES (16), (17), (18), (19): Xaa is A or G or is absent
RVVMNPIKGYXXXXXXXXXFYLVNIPSLQTPA

SEQ ID NO: 31791 - protein, 40 aa, Artificial Sequence
  GFR-binding peptide
  MOD_RES (1), (35), (36): Xaa is C or S
  MOD_RES (13), (14), (15), (16), (17): Xaa is A or G
  MOD_RES (18), (19), (20), (21): Xaa is A or G or is absent
XSEVVMDPIKGYXXXXXXXXXFYLINIPSLRTPVXXTPPT

SEQ ID NO: 31792 - protein, 39 aa, Artificial Sequence
  GFR-binding peptide
  MOD_RES (2), (34), (35): Xaa is C or S
GXSEVVMDPIKGYVVNNASDFYLINIPSLRTPVXXTPPT

SEQ ID NO: 31793 - protein, 35 aa, Artificial Sequence
  GFR-binding peptide
  MOD_RES (1), (3): Xaa is C or S
  MOD_RES (14), (15), (16), (17), (18): Xaa is A or G
  MOD_RES (19), (20), (21), (22): Xaa is A or G or is absent
XGXEEVIMPIKGYXXXXXXXXXFYLMNIPSTKVPA

SEQ ID NO: 31794 - protein, 36 aa, Artificial Sequence
  GFR-binding peptide
  MOD_RES (31), (32): Xaa is C or S
EEVIMPIKGYLLVRGNDFYLMNIPSTKVPAXXTSPV

SEQ ID NO: 31795 - protein, 37 aa, Artificial Sequence
  GFR-binding peptide
  MOD_RES (1), (3), (35), (36): Xaa is C or S
XGXAKVVMNPIKGYIVNNSSDFYLVNIPSLKTPAXXA

SEQ ID NO: 31796 - protein, 40 aa, Artificial Sequence
  GFR-binding peptide
  MOD_RES (1), (3), (37), (38): Xaa is C or S
  MOD_RES (15), (16), (17), (18), (19): Xaa is A or G
  MOD_RES (20), (21), (22), (23): Xaa is A or G or is absent
XGXGEVVMEPIKGYXXXXXXXXXFYLMNIPSLETPVXXAK

SEQ ID NO: 31797 - protein, 37 aa, Artificial Sequence
  GFR-binding peptide
  MOD_RES (2), (4), (37): Xaa is C or S
  MOD_RES (15), (16), (17), (18), (19): Xaa is A or G
  MOD_RES (20), (21), (22), (23): Xaa is A or G or is absent
LXGXEEVIMPIKGYXXXXXXXXXFYLMNIPSTKVPAX

SEQ ID NO: 31798 - protein, 41 aa, Artificial Sequence
  GFR-binding peptide
  MOD_RES (2), (4), (36): Xaa is C or S
HXGXSRVVMNPIKGYIVNSSDDFYLVNIPSLKTPAXTPKTV

SEQ ID NO: 31799 - protein, 37 aa, Artificial Sequence
  GFR-binding peptide
  MOD_RES (2), (4): Xaa is C or S
  MOD_RES (16), (17), (18), (19), (20): Xaa is A or G
  MOD_RES (21), (22), (23), (24): Xaa is A or G or is absent
HXGXSRVVMNPIKGYXXXXXXXXXFYLVNIPSLKTPA

SEQ ID NO: 31800 - protein, 35 aa, Artificial Sequence
  GFR-binding peptide
  MOD_RES (34), (35): Xaa is C or S
  MOD_RES (12), (13), (14), (15), (16): Xaa is A or G
  MOD_RES (17), (18), (19), (20): Xaa is A or G or is absent
RDVVMGPIKGYXXXXXXXXXFYLMNIPSMKTPTXX

SEQ ID NO: 31801 - protein, 45 aa, Artificial Sequence
  GFR-binding peptide
  MOD_RES (2), (4), (39), (40): Xaa is C or S
  MOD_RES (17), (18), (19), (20), (21): Xaa is A or G
  MOD_RES (22), (23), (24), (25): Xaa is A or G or is absent
RXGXEAVSMGEPIKGYXXXXXXXXXFYLVNIPSLKTPVXXAKGVK

SEQ ID NO: 31802 - protein, 33 aa, Artificial Sequence
  GFR-binding peptide
  MOD_RES (32), (33): Xaa is C or S
AKVVMNPIKGYIVNNSSDFYLVNIPSLKTPAXX

SEQ ID NO: 31803 - protein, 36 aa, Artificial Sequence
  GFR-binding peptide
  MOD_RES (2), (4), (36): Xaa is C or S
HXGXSRVVMNPIKGYIVNSSDDFYLVNIPSLKTPAX

SEQ ID NO: 31804 - protein, 39 aa, Artificial Sequence
  GFR-binding peptide
  MOD_RES (33), (34): Xaa is C or S
  MOD_RES (11), (12), (13), (14), (15): Xaa is A or G
  MOD_RES (16), (17), (18), (19): Xaa is A or G or is absent
EVVMEPIKGYXXXXXXXXXFYLMNIPSLETPVXXAKPIS

SEQ ID NO: 31805 - protein, 32 aa, Artificial Sequence
  GFR-binding peptide
  MOD_RES (1), (1): Xaa is C or S
XSEVVMDPIKGYVVNNASDFYLINIPSLRTPV

SEQ ID NO: 31806 - protein, 35 aa, Artificial Sequence
  GFR-binding peptide
  MOD_RES (33), (34): Xaa is C or S
  MOD_RES (11), (12), (13), (14), (15): Xaa is A or G
  MOD_RES (16), (17), (18), (19): Xaa is A or G or is absent
KVVMNPIKGYXXXXXXXXXFYLVNIPSLKTPAXXA

SEQ ID NO: 31807 - protein, 39 aa, Artificial Sequence
  GFR-binding peptide
  MOD_RES (1), (35), (36): Xaa is C or S
  MOD_RES (13), (14), (15), (16), (17): Xaa is A or G
  MOD_RES (18), (19), (20), (21): Xaa is A or G or is absent
XARVVMNPIKGYXXXXXXXXXFYLVNIPSLQTPAXXPKP

SEQ ID NO: 31808 - protein, 38 aa, Artificial Sequence
  GFR-binding peptide
  MOD_RES (33), (34): Xaa is C or S
  MOD_RES (11), (12), (13), (14), (15): Xaa is A or G
  MOD_RES (16), (17), (18), (19): Xaa is A or G or is absent
RVVMNPIKGYXXXXXXXXXFYLVNIPSLKTPAXXPKPV

SEQ ID NO: 31809 - protein, 32 aa, Artificial Sequence
  GFR-binding peptide
  MOD_RES (11), (12), (13), (14), (15): Xaa is A or G
  MOD_RES (16), (17), (18), (19): Xaa is A or G or is absent
EVVMEPIKGYXXXXXXXXXFYLMNIPSLETPV

SEQ ID NO: 31810 - protein, 36 aa, Artificial Sequence
  GFR-binding peptide
  MOD_RES (2), (4), (36): Xaa is C or S
HXGXAKVVMNPIKGYIVNNSSDFYLVNIPSLKTPAX

SEQ ID NO: 31811 - protein, 31 aa, Artificial Sequence
  GFR-binding peptide
  MOD_RES (31), (31): Xaa is C or S
EEVIMPIKGYLLVRGNDFYLMNIPSTKVPAX

SEQ ID NO: 31812 - protein, 41 aa, Artificial Sequence
  GFR-binding peptide
  MOD_RES (2), (36), (37): Xaa is C or S
  MOD_RES (14), (15), (16), (17), (18): Xaa is A or G
  MOD_RES (19), (20), (21), (22): Xaa is A or G or is absent
GXESVAMGPIKGYXXXXXXXXXFYLINIPSLKTPVXXAKSA

SEQ ID NO: 31813 - protein, 34 aa, Artificial Sequence
  GFR-binding peptide
  MOD_RES (32), (33): Xaa is C or S
ESVAMGPIKGYYTVVGKDFYLINIPSLKTPVXXA

SEQ ID NO: 31814 - protein, 34 aa, Artificial Sequence
  GFR-binding peptide
  MOD_RES (1), (3): Xaa is C or S
XGXGEVVMDPIKGYVVKENEDFYLMNIPSLETPV

SEQ ID NO: 31815 - protein, 34 aa, Artificial Sequence
  GFR-binding peptide
  MOD_RES (32), (33): Xaa is C or S
SEVVMDPIKGYVVNNASDFYLINIPSLRTPVXXT

SEQ ID NO: 31816 - protein, 32 aa, Artificial Sequence
  GFR-binding peptide
  MOD_RES (32), (32): Xaa is C or S
RDVVMGPIKGYIIQQKDNFYLMNIPSMKTPTX

SEQ ID NO: 31817 - protein, 41 aa, Artificial Sequence
  GFR-binding peptide
  MOD_RES (2), (4), (38), (39): Xaa is C or S
  MOD_RES (16), (17), (18), (19), (20): Xaa is A or G
  MOD_RES (21), (22), (23), (24): Xaa is A or G or is absent
HXGXAKVVMNPIKGYXXXXXXXXXFYLVNIPSLKTPAXXAK

SEQ ID NO: 31818 - protein, 40 aa, Artificial Sequence
  GFR-binding peptide
  MOD_RES (2), (34), (35): Xaa is C or S
GXGEVVMEPIKGYVVKDYEDFYLMNIPSLETPVXXAKPIS

SEQ ID NO: 31819 - protein, 40 aa, Artificial Sequence
  GFR-binding peptide
  MOD_RES (2), (4), (38): Xaa is C or S
  MOD_RES (16), (17), (18), (19), (20): Xaa is A or G
  MOD_RES (21), (22), (23), (24): Xaa is A or G or is absent
HXGXSRVVMNPIKGYXXXXXXXXXFYLVNIPSLKTPAXTP

SEQ ID NO: 31820 - protein, 33 aa, Artificial Sequence
  GFR-binding peptide
  MOD_RES (12), (13), (14), (15), (16): Xaa is A or G
  MOD_RES (17), (18), (19), (20): Xaa is A or G or is absent
GEVVMDPIKGYXXXXXXXXXFYLMNIPSLETPV

SEQ ID NO: 31821 - protein, 40 aa, Artificial Sequence
  GFR-binding peptide
  MOD_RES (2), (34), (35): Xaa is C or S
GXESVAMGPIKGYYTVVGKDFYLINIPSLKTPVXXAKSAK

SEQ ID NO: 31822 - protein, 33 aa, Artificial Sequence
  GFR-binding peptide
  MOD_RES (12), (13), (14), (15), (16): Xaa is A or G
  MOD_RES (17), (18), (19), (20): Xaa is A or G or is absent
AKVVMNPIKGYXXXXXXXXXFYLVNIPSLKTPA

SEQ ID NO: 31823 - protein, 38 aa, Artificial Sequence
  GFR-binding peptide
  MOD_RES (32), (33): Xaa is C or S
ESVAMGPIKGYYTVVGKDFYLINIPSLKTPVXXAKSAK

SEQ ID NO: 31824 - protein, 36 aa, Artificial Sequence
  GFR-binding peptide
  MOD_RES (34), (35): Xaa is C or S
  MOD_RES (12), (13), (14), (15), (16): Xaa is A or G
  MOD_RES (17), (18), (19), (20): Xaa is A or G or is absent
GEVVMEPIKGYXXXXXXXXXFYLMNIPSLETPVXXA

SEQ ID NO: 31825 - protein, 36 aa, Artificial Sequence
  GFR-binding peptide
  MOD_RES (1), (3): Xaa is C or S
  MOD_RES (15), (16), (17), (18), (19): Xaa is A or G
  MOD_RES (20), (21), (22), (23): Xaa is A or G or is absent
XGXGEVVMDPIKGYXXXXXXXXXFYLMNIPSLETPV

SEQ ID NO: 31826 - protein, 37 aa, Artificial Sequence
  GFR-binding peptide
  MOD_RES (2), (4): Xaa is C or S
  MOD_RES (16), (17), (18), (19), (20): Xaa is A or G
  MOD_RES (21), (22), (23), (24): Xaa is A or G or is absent
RXGXGEVVMEPIKGYXXXXXXXXXFYLMNIPSLETPV

SEQ ID NO: 31827 - protein, 42 aa, Artificial Sequence
  GFR-binding peptide
  MOD_RES (2), (36), (37): Xaa is C or S
  MOD_RES (14), (15), (16), (17), (18): Xaa is A or G
  MOD_RES (19), (20), (21), (22): Xaa is A or G or is absent
GXSRVVMNPIKGYXXXXXXXXXFYLVNIPSLKTPAXXPKPVY

SEQ ID NO: 31828 - protein, 38 aa, Artificial Sequence
  GFR-binding peptide
  MOD_RES (1), (35), (36): Xaa is C or S
  MOD_RES (13), (14), (15), (16), (17): Xaa is A or G
  MOD_RES (18), (19), (20), (21): Xaa is A or G or is absent
XGEVVMEPIKGYXXXXXXXXXFYLMNIPSLETPVXXAK

SEQ ID NO: 31829 - protein, 38 aa, Artificial Sequence
  GFR-binding peptide
  MOD_RES (2), (36), (37): Xaa is C or S
  MOD_RES (14), (15), (16), (17), (18): Xaa is A or G
  MOD_RES (19), (20), (21), (22): Xaa is A or G or is absent
GXAEVVMDPIKGYXXXXXXXXXFYLINIPSLRAPVXXS

SEQ ID NO: 31830 - protein, 34 aa, Artificial Sequence
  GFR-binding peptide
  MOD_RES (1), (33): Xaa is C or S
XSRVVMNPIKGYIVNSSDDFYLVNIPSLKTPAXT

SEQ ID NO: 31831 - protein, 38 aa, Artificial Sequence
  GFR-binding peptide
  MOD_RES (1), (35), (36): Xaa is C or S
  MOD_RES (13), (14), (15), (16), (17): Xaa is A or G
  MOD_RES (18), (19), (20), (21): Xaa is A or G or is absent
XESVAMGPIKGYXXXXXXXXXFYLINIPSLKTPVXXAK

SEQ ID NO: 31832 - protein, 33 aa, Artificial Sequence
  GFR-binding peptide
  MOD_RES (12), (13), (14), (15), (16): Xaa is A or G
  MOD_RES (17), (18), (19), (20): Xaa is A or G or is absent
SRVVMNPIKGYXXXXXXXXXFYLVNIPSLKTPA

SEQ ID NO: 31833 - protein, 43 aa, Artificial Sequence
  GFR-binding peptide
  MOD_RES (2), (4), (39), (40): Xaa is C or S
  MOD_RES (17), (18), (19), (20), (21): Xaa is A or G
  MOD_RES (22), (23), (24), (25): Xaa is A or G or is absent
RXGXEAVSMGEPIKGYXXXXXXXXXFYLVNIPSLKTPVXXAKG

SEQ ID NO: 31834 - protein, 40 aa, Artificial Sequence
  GFR-binding peptide
  MOD_RES (1), (3), (35), (36): Xaa is C or S
XGXAEVVMDPIKGYVVNNAADFYLINIPSLRAPVXXSAPA

SEQ ID NO: 31835 - protein, 36 aa, Artificial Sequence
  GFR-binding peptide
  MOD_RES (1), (3), (35), (36): Xaa is C or S
XGXESVAMGPIKGYYTVVGKDFYLINIPSLKTPVXX

SEQ ID NO: 31836 - protein, 36 aa, Artificial Sequence
  GFR-binding peptide
  MOD_RES (1), (3): Xaa is C or S
  MOD_RES (15), (16), (17), (18), (19): Xaa is A or G
  MOD_RES (20), (21), (22), (23): Xaa is A or G or is absent
XGXAEVVMDPIKGYXXXXXXXXXFYLINIPSLRAPV

SEQ ID NO: 31837 - protein, 30 aa, Artificial Sequence
  GFR-binding peptide
EVVMDPIKGYVVNNASDFYLINIPSLRTPV

SEQ ID NO: 31838 - protein, 35 aa, Artificial Sequence
  GFR-binding peptide
  MOD_RES (2), (34), (35): Xaa is C or S
GXGEVVMDPIKGYVVKENEDFYLMNIPSLETPVXX

SEQ ID NO: 31839 - protein, 38 aa, Artificial Sequence
  GFR-binding peptide
  MOD_RES (35), (36): Xaa is C or S
  MOD_RES (13), (14), (15), (16), (17): Xaa is A or G
  MOD_RES (18), (19), (20), (21): Xaa is A or G or is absent
EAVSMGEPIKGYXXXXXXXXXFYLVNIPSLKTPVXXAK

SEQ ID NO: 31840 - protein, 34 aa, Artificial Sequence
  GFR-binding peptide
  MOD_RES (1), (3): Xaa is C or S
XGXAEVVMDPIKGYVVNNAADFYLINIPSLRAPV

SEQ ID NO: 31841 - protein, 33 aa, Artificial Sequence
  GFR-binding peptide
  MOD_RES (2), (2): Xaa is C or S
GXGEVVMEPIKGYVVKDYEDFYLMNIPSLETPV

SEQ ID NO: 31842 - protein, 34 aa, Artificial Sequence
  GFR-binding peptide
  MOD_RES (31), (32): Xaa is C or S
EEVIMPIKGYLLVRGNDFYLMNIPSTKVPAXXTS

SEQ ID NO: 31843 - protein, 40 aa, Artificial Sequence
  GFR-binding peptide
  MOD_RES (1), (35), (36): Xaa is C or S
  MOD_RES (13), (14), (15), (16), (17): Xaa is A or G
  MOD_RES (18), (19), (20), (21): Xaa is A or G or is absent
XGEVVMEPIKGYXXXXXXXXXFYLMNIPSLETPVXXAKPI

SEQ ID NO: 31844 - protein, 33 aa, Artificial Sequence
  GFR-binding peptide
  MOD_RES (12), (13), (14), (15), (16): Xaa is A or G
  MOD_RES (17), (18), (19), (20): Xaa is A or G or is absent
ESVAMGPIKGYXXXXXXXXXFYLINIPSLKTPV

SEQ ID NO: 31845 - protein, 37 aa, Artificial Sequence
  GFR-binding peptide
  MOD_RES (2), (4), (36), (37): Xaa is C or S
HXGXSRVVMNPIKGYIVNSSDDFYLVNIPSLKTPAXX

SEQ ID NO: 31846 - protein, 41 aa, Artificial Sequence
  GFR-binding peptide
  MOD_RES (1), (3), (35), (36): Xaa is C or S
XGXAEVVMDPIKGYVVNNAADFYLINIPSLRAPVXXSAPAA

SEQ ID NO: 31847 - protein, 41 aa, Artificial Sequence
  GFR-binding peptide
  MOD_RES (1), (3), (35), (36): Xaa is C or S
XGXAKVVMNPIKGYIVNNSSDFYLVNIPSLKTPAXXAKPVA

SEQ ID NO: 31848 - protein, 35 aa, Artificial Sequence
  GFR-binding peptide
  MOD_RES (33), (33): Xaa is C or S
  MOD_RES (11), (12), (13), (14), (15): Xaa is A or G
  MOD_RES (16), (17), (18), (19): Xaa is A or G or is absent
RVVMNPIKGYXXXXXXXXXFYLVNIPSLKTPAXTP

SEQ ID NO: 31849 - protein, 38 aa, Artificial Sequence
  GFR-binding peptide
  MOD_RES (2), (34), (35): Xaa is C or S
GXGEVVMDPIKGYVVKENEDFYLMNIPSLETPVXXAKP

SEQ ID NO: 31850 - protein, 37 aa, Artificial Sequence
  GFR-binding peptide
  MOD_RES (1), (35), (36): Xaa is C or S
  MOD_RES (13), (14), (15), (16), (17): Xaa is A or G
  MOD_RES (18), (19), (20), (21): Xaa is A or G or is absent
XAEVVMDPIKGYXXXXXXXXXFYLINIPSLRAPVXXS

SEQ ID NO: 31851 - protein, 40 aa, Artificial Sequence
  GFR-binding peptide
  MOD_RES (2), (4), (38), (39): Xaa is C or S
  MOD_RES (16), (17), (18), (19), (20): Xaa is A or G
  MOD_RES (21), (22), (23), (24): Xaa is A or G or is absent
SXGXRDVVMGPIKGYXXXXXXXXXFYLMNIPSMKTPTXXP

SEQ ID NO: 31852 - protein, 40 aa, Artificial Sequence
  GFR-binding peptide
  MOD_RES (2), (4), (35), (36): Xaa is C or S
LXGXEEVIMPIKGYLLVRGNDFYLMNIPSTKVPAXXTSPV

SEQ ID NO: 31853 - protein, 41 aa, Artificial Sequence
  GFR-binding peptide
  MOD_RES (1), (3), (37), (38): Xaa is C or S
  MOD_RES (15), (16), (17), (18), (19): Xaa is A or G
  MOD_RES (20), (21), (22), (23): Xaa is A or G or is absent
XGXGEVVMDPIKGYXXXXXXXXXFYLMNIPSLETPVXXAKP

SEQ ID NO: 31854 - protein, 39 aa, Artificial Sequence
  GFR-binding peptide
  MOD_RES (2), (34), (35): Xaa is C or S
GXRDVVMGPIKGYIIQQKDNFYLMNIPSMKTPTXXPGAS

SEQ ID NO: 31855 - protein, 35 aa, Artificial Sequence
  GFR-binding peptide
  MOD_RES (2), (34), (35): Xaa is C or S
GXSEVVMDPIKGYVVNNASDFYLINIPSLRTPVXX

SEQ ID NO: 31856 - protein, 31 aa, Artificial Sequence
  GFR-binding peptide
SEVVMDPIKGYVVNNASDFYLINIPSLRTPV

SEQ ID NO: 31857 - protein, 35 aa, Artificial Sequence
  GFR-binding peptide
  MOD_RES (31), (32): Xaa is C or S
EVVMDPIKGYVVKENEDFYLMNIPSLETPVXXAKP

SEQ ID NO: 31858 - protein, 37 aa, Artificial Sequence
  GFR-binding peptide
  MOD_RES (2), (4), (36), (37): Xaa is C or S
RXGXAEVVMDPIKGYVVNNAADFYLINIPSLRAPVXX

SEQ ID NO: 31859 - protein, 41 aa, Artificial Sequence
  GFR-binding peptide
  MOD_RES (2), (36), (37): Xaa is C or S
  MOD_RES (14), (15), (16), (17), (18): Xaa is A or G
  MOD_RES (19), (20), (21), (22): Xaa is A or G or is absent
GXAKVVMNPIKGYXXXXXXXXXFYLVNIPSLKTPAXXAKPV

SEQ ID NO: 31860 - protein, 36 aa, Artificial Sequence
  GFR-binding peptide
  MOD_RES (1), (3), (35), (36): Xaa is C or S
XGXGEVVMEPIKGYVVKDYEDFYLMNIPSLETPVXX

SEQ ID NO: 31861 - protein, 33 aa, Artificial Sequence
  GFR-binding peptide
  MOD_RES (31), (32): Xaa is C or S
KVVMNPIKGYIVNNSSDFYLVNIPSLKTPAXXA

SEQ ID NO: 31862 - protein, 43 aa, Artificial Sequence
  GFR-binding peptide
  MOD_RES (2), (4), (37), (38): Xaa is C or S
  MOD_RES (15), (16), (17), (18), (19): Xaa is A or G
  MOD_RES (20), (21), (22), (23): Xaa is A or G or is absent
LXGXEEVIMPIKGYXXXXXXXXXFYLMNIPSTKVPAXXTSPVR

SEQ ID NO: 31863 - protein, 34 aa, Artificial Sequence
  GFR-binding peptide
  MOD_RES (1), (33), (34): Xaa is C or S
XRDVVMGPIKGYIIQQKDNFYLMNIPSMKTPTXX

SEQ ID NO: 31864 - protein, 36 aa, Artificial Sequence
  GFR-binding peptide
  MOD_RES (1), (3), (36): Xaa is C or S
XGXEAVSMGEPIKGYTPVGMDDFYLVNIPSLKTPVX

SEQ ID NO: 31865 - protein, 31 aa, Artificial Sequence
  GFR-binding peptide
  MOD_RES (31), (31): Xaa is C or S
EVVMDPIKGYVVNNASDFYLINIPSLRTPVX

SEQ ID NO: 31866 - protein, 37 aa, Artificial Sequence
  GFR-binding peptide
  MOD_RES (33), (34): Xaa is C or S
  MOD_RES (11), (12), (13), (14), (15): Xaa is A or G
  MOD_RES (16), (17), (18), (19): Xaa is A or G or is absent
EVVMDPIKGYXXXXXXXXXFYLMNIPSLETPVXXAKP

SEQ ID NO: 31867 - protein, 41 aa, Artificial Sequence
  GFR-binding peptide
  MOD_RES (2), (4), (38), (39): Xaa is C or S
  MOD_RES (16), (17), (18), (19), (20): Xaa is A or G
  MOD_RES (21), (22), (23), (24): Xaa is A or G or is absent
SXGXRDVVMGPIKGYXXXXXXXXXFYLMNIPSMKTPTXXPG

SEQ ID NO: 31868 - protein, 33 aa, Artificial Sequence
  GFR-binding peptide
  MOD_RES (31), (32): Xaa is C or S
SVAMGPIKGYYTVVGKDFYLINIPSLKTPVXXA

SEQ ID NO: 31869 - protein, 36 aa, Artificial Sequence
  GFR-binding peptide
  MOD_RES (2), (4), (36): Xaa is C or S
RXGXESVAMGPIKGYYTVVGKDFYLINIPSLKTPVX

SEQ ID NO: 31870 - protein, 36 aa, Artificial Sequence
  GFR-binding peptide
  MOD_RES (1), (3), (36): Xaa is C or S
  MOD_RES (14), (15), (16), (17), (18): Xaa is A or G
  MOD_RES (19), (20), (21), (22): Xaa is A or G or is absent
XGXEEVIMPIKGYXXXXXXXXXFYLMNIPSTKVPAX

SEQ ID NO: 31871 - protein, 32 aa, Artificial Sequence
  GFR-binding peptide
  MOD_RES (11), (12), (13), (14), (15): Xaa is A or G
  MOD_RES (16), (17), (18), (19): Xaa is A or G or is absent
EVVMDPIKGYXXXXXXXXXFYLMNIPSLETPV

SEQ ID NO: 31872 - protein, 38 aa, Artificial Sequence
  GFR-binding peptide
  MOD_RES (2), (4), (38): Xaa is C or S
  MOD_RES (16), (17), (18), (19), (20): Xaa is A or G
  MOD_RES (21), (22), (23), (24): Xaa is A or G or is absent
SXGXRDVVMGPIKGYXXXXXXXXXFYLMNIPSMKTPTX

SEQ ID NO: 31873 - protein, 44 aa, Artificial Sequence
  GFR-binding peptide
  MOD_RES (2), (4), (38), (39): Xaa is C or S
  MOD_RES (16), (17), (18), (19), (20): Xaa is A or G
  MOD_RES (21), (22), (23), (24): Xaa is A or G or is absent
RXGXAEVVMDPIKGYXXXXXXXXXFYLINIPSLRAPVXXSAPAA

SEQ ID NO: 31874 - protein, 41 aa, Artificial Sequence
  GFR-binding peptide
  MOD_RES (1), (35), (36): Xaa is C or S
  MOD_RES (13), (14), (15), (16), (17): Xaa is A or G
  MOD_RES (18), (19), (20), (21): Xaa is A or G or is absent
XESVAMGPIKGYXXXXXXXXXFYLINIPSLKTPVXXAKSAK

SEQ ID NO: 31875 - protein, 34 aa, Artificial Sequence
  GFR-binding peptide
  MOD_RES (34), (34): Xaa is C or S
  MOD_RES (12), (13), (14), (15), (16): Xaa is A or G
  MOD_RES (17), (18), (19), (20): Xaa is A or G or is absent
ARVVMNPIKGYXXXXXXXXXFYLVNIPSLQTPAX

SEQ ID NO: 31876 - protein, 36 aa, Artificial Sequence
  GFR-binding peptide
  MOD_RES (1), (33), (34): Xaa is C or S
XGEVVMDPIKGYVVKENEDFYLMNIPSLETPVXXAK

SEQ ID NO: 31877 - protein, 37 aa, Artificial Sequence
  GFR-binding peptide
  MOD_RES (2), (35), (36): Xaa is C or S
  MOD_RES (13), (14), (15), (16), (17): Xaa is A or G
  MOD_RES (18), (19), (20), (21): Xaa is A or G or is absent
GXEEVIMPIKGYXXXXXXXXXFYLMNIPSTKVPAXXT

SEQ ID NO: 31878 - protein, 35 aa, Artificial Sequence
  GFR-binding peptide
  MOD_RES (31), (31): Xaa is C or S
RVVMNPIKGYIVNSSDDFYLVNIPSLKTPAXTPKT

SEQ ID NO: 31879 - protein, 35 aa, Artificial Sequence
  GFR-binding peptide
  MOD_RES (33), (34): Xaa is C or S
  MOD_RES (11), (12), (13), (14), (15): Xaa is A or G
  MOD_RES (16), (17), (18), (19): Xaa is A or G or is absent
RVVMNPIKGYXXXXXXXXXFYLVNIPSLQTPAXXP

SEQ ID NO: 31880 - protein, 39 aa, Artificial Sequence
  GFR-binding peptide
  MOD_RES (34), (35): Xaa is C or S
  MOD_RES (12), (13), (14), (15), (16): Xaa is A or G
  MOD_RES (17), (18), (19), (20): Xaa is A or G or is absent
RDVVMGPIKGYXXXXXXXXXFYLMNIPSMKTPTXXPGAS

SEQ ID NO: 31881 - protein, 35 aa, Artificial Sequence
  GFR-binding peptide
  MOD_RES (2), (4): Xaa is C or S
HXGXARVVMNPIKGYIVNSSDDFYLVNIPSLQTPA

SEQ ID NO: 31882 - protein, 38 aa, Artificial Sequence
  GFR-binding peptide
  MOD_RES (2), (4), (38): Xaa is C or S
  MOD_RES (16), (17), (18), (19), (20): Xaa is A or G
  MOD_RES (21), (22), (23), (24): Xaa is A or G or is absent
RXGXAEVVMDPIKGYXXXXXXXXXFYLINIPSLRAPVX

SEQ ID NO: 31883 - protein, 34 aa, Artificial Sequence
  GFR-binding peptide
  MOD_RES (32), (33): Xaa is C or S
RDVVMGPIKGYIIQQKDNFYLMNIPSMKTPTXXP

SEQ ID NO: 31884 - protein, 36 aa, Artificial Sequence
  GFR-binding peptide
  MOD_RES (1), (35), (36): Xaa is C or S
  MOD_RES (13), (14), (15), (16), (17): Xaa is A or G
  MOD_RES (18), (19), (20), (21): Xaa is A or G or is absent
XGEVVMEPIKGYXXXXXXXXXFYLMNIPSLETPVXX

SEQ ID NO: 31885 - protein, 35 aa, Artificial Sequence
  GFR-binding peptide
  MOD_RES (1), (33), (34): Xaa is C or S
XSEVVMDPIKGYVVNNASDFYLINIPSLRTPVXXT

SEQ ID NO: 31886 - protein, 35 aa, Artificial Sequence
  GFR-binding peptide
  MOD_RES (2), (4): Xaa is C or S
RXGXESVAMGPIKGYYTVVGKDFYLINIPSLKTPV

SEQ ID NO: 31887 - protein, 39 aa, Artificial Sequence
  GFR-binding peptide
  MOD_RES (1), (3), (37), (38): Xaa is C or S
  MOD_RES (15), (16), (17), (18), (19): Xaa is A or G
  MOD_RES (20), (21), (22), (23): Xaa is A or G or is absent
XGXAEVVMDPIKGYXXXXXXXXXFYLINIPSLRAPVXXS

SEQ ID NO: 31888 - protein, 39 aa, Artificial Sequence
  GFR-binding peptide
  MOD_RES (2), (36): Xaa is C or S
  MOD_RES (14), (15), (16), (17), (18): Xaa is A or G
  MOD_RES (19), (20), (21), (22): Xaa is A or G or is absent
GXSRVVMNPIKGYXXXXXXXXXFYLVNIPSLKTPAXTPK

SEQ ID NO: 31889 - protein, 40 aa, Artificial Sequence
  GFR-binding peptide
  MOD_RES (1), (3), (35), (36): Xaa is C or S
XGXAKVVMNPIKGYIVNNSSDFYLVNIPSLKTPAXXAKPV

SEQ ID NO: 31890 - protein, 33 aa, Artificial Sequence
  GFR-binding peptide
  MOD_RES (1), (33): Xaa is C or S
XGEVVMDPIKGYVVKENEDFYLMNIPSLETPVX

SEQ ID NO: 31891 - protein, 40 aa, Artificial Sequence
  GFR-binding peptide
  MOD_RES (1), (35), (36): Xaa is C or S
  MOD_RES (13), (14), (15), (16), (17): Xaa is A or G
  MOD_RES (18), (19), (20), (21): Xaa is A or G or is absent
XRDVVMGPIKGYXXXXXXXXXFYLMNIPSMKTPTXXPGAS

SEQ ID NO: 31892 - protein, 38 aa, Artificial Sequence
  GFR-binding peptide
  MOD_RES (2), (4): Xaa is C or S
  MOD_RES (17), (18), (19), (20), (21): Xaa is A or G
  MOD_RES (22), (23), (24), (25): Xaa is A or G or is absent
RXGXEAVSMGEPIKGYXXXXXXXXXFYLVNIPSLKTPV

SEQ ID NO: 31893 - protein, 37 aa, Artificial Sequence
  GFR-binding peptide
  MOD_RES (1), (3), (35), (36): Xaa is C or S
XGXESVAMGPIKGYYTVVGKDFYLINIPSLKTPVXXA

SEQ ID NO: 31894 - protein, 38 aa, Artificial Sequence
  GFR-binding peptide
  MOD_RES (32), (33): Xaa is C or S
GEVVMDPIKGYVVKENEDFYLMNIPSLETPVXXAKPIK

SEQ ID NO: 31895 - protein, 36 aa, Artificial Sequence
  GFR-binding peptide
  MOD_RES (2), (4), (36): Xaa is C or S
HXGXARVVMNPIKGYIVNSSDDFYLVNIPSLQTPAX

SEQ ID NO: 31896 - protein, 39 aa, Artificial Sequence
  GFR-binding peptide
  MOD_RES (2), (36), (37): Xaa is C or S
  MOD_RES (14), (15), (16), (17), (18): Xaa is A or G
  MOD_RES (19), (20), (21), (22): Xaa is A or G or is absent
GXARVVMNPIKGYXXXXXXXXXFYLVNIPSLQTPAXXPK

SEQ ID NO: 31897 - protein, 38 aa, Artificial Sequence
  GFR-binding peptide
  MOD_RES (2), (4), (36), (37): Xaa is C or S
RXGXGEVVMDPIKGYVVKENEDFYLMNIPSLETPVXXA

SEQ ID NO: 31898 - protein, 42 aa, Artificial Sequence
  GFR-binding peptide
  MOD_RES (2), (4), (38), (39): Xaa is C or S
  MOD_RES (16), (17), (18), (19), (20): Xaa is A or G
  MOD_RES (21), (22), (23), (24): Xaa is A or G or is absent
HXGXARVVMNPIKGYXXXXXXXXXFYLVNIPSLQTPAXXPKP

SEQ ID NO: 31899 - protein, 38 aa, Artificial Sequence
  GFR-binding peptide
  MOD_RES (1), (33), (34): Xaa is C or S
XRDVVMGPIKGYIIQQKDNFYLMNIPSMKTPTXXPGAS

SEQ ID NO: 31900 - protein, 40 aa, Artificial Sequence
  GFR-binding peptide
  MOD_RES (1), (3), (37), (38): Xaa is C or S
  MOD_RES (15), (16), (17), (18), (19): Xaa is A or G
  MOD_RES (20), (21), (22), (23): Xaa is A or G or is absent
XGXSEVVMDPIKGYXXXXXXXXXFYLINIPSLRTPVXXTP

SEQ ID NO: 31901 - protein, 36 aa, Artificial Sequence
  GFR-binding peptide
  MOD_RES (1), (36): Xaa is C or S
  MOD_RES (14), (15), (16), (17), (18): Xaa is A or G
  MOD_RES (19), (20), (21), (22): Xaa is A or G or is absent
XEAVSMGEPIKGYXXXXXXXXXFYLVNIPSLKTPVX

SEQ ID NO: 31902 - protein, 33 aa, Artificial Sequence
  GFR-binding peptide
  MOD_RES (32), (33): Xaa is C or S
GEVVMEPIKGYVVKDYEDFYLMNIPSLETPVXX

SEQ ID NO: 31903 - protein, 42 aa, Artificial Sequence
  GFR-binding peptide
  MOD_RES (2), (4), (37), (38): Xaa is C or S
  MOD_RES (15), (16), (17), (18), (19): Xaa is A or G
  MOD_RES (20), (21), (22), (23): Xaa is A or G or is absent
LXGXEEVIMPIKGYXXXXXXXXXFYLMNIPSTKVPAXXTSPV

SEQ ID NO: 31904 - protein, 38 aa, Artificial Sequence
  GFR-binding peptide
  MOD_RES (2), (4), (38): Xaa is C or S
  MOD_RES (16), (17), (18), (19), (20): Xaa is A or G
  MOD_RES (21), (22), (23), (24): Xaa is A or G or is absent
HXGXSRVVMNPIKGYXXXXXXXXXFYLVNIPSLKTPAX

SEQ ID NO: 31905 - protein, 37 aa, Artificial Sequence
  GFR-binding peptide
  MOD_RES (2), (4): Xaa is C or S
  MOD_RES (16), (17), (18), (19), (20): Xaa is A or G
  MOD_RES (21), (22), (23), (24): Xaa is A or G or is absent
SXGXRDVVMGPIKGYXXXXXXXXXFYLMNIPSMKTPT

SEQ ID NO: 31906 - protein, 37 aa, Artificial Sequence
  GFR-binding peptide
  MOD_RES (1), (3), (35), (36): Xaa is C or S
XGXGEVVMEPIKGYVVKDYEDFYLMNIPSLETPVXXA

SEQ ID NO: 31907 - protein, 36 aa, Artificial Sequence
  GFR-binding peptide
  MOD_RES (2), (34), (35): Xaa is C or S
GXRDVVMGPIKGYIIQQKDNFYLMNIPSMKTPTXXP

SEQ ID NO: 31908 - protein, 35 aa, Artificial Sequence
  GFR-binding peptide
  MOD_RES (32), (33): Xaa is C or S
AKVVMNPIKGYIVNNSSDFYLVNIPSLKTPAXXAK

SEQ ID NO: 31909 - protein, 34 aa, Artificial Sequence
  GFR-binding peptide
  MOD_RES (1), (3): Xaa is C or S
XGXESVAMGPIKGYYTVVGKDFYLINIPSLKTPV

SEQ ID NO: 31910 - protein, 37 aa, Artificial Sequence
  GFR-binding peptide
  MOD_RES (1), (3), (37): Xaa is C or S
  MOD_RES (15), (16), (17), (18), (19): Xaa is A or G
  MOD_RES (20), (21), (22), (23): Xaa is A or G or is absent
XGXSEVVMDPIKGYXXXXXXXXXFYLINIPSLRTPVX

SEQ ID NO: 31911 - protein, 37 aa, Artificial Sequence
  GFR-binding peptide
  MOD_RES (1), (3), (37): Xaa is C or S
  MOD_RES (15), (16), (17), (18), (19): Xaa is A or G
  MOD_RES (20), (21), (22), (23): Xaa is A or G or is absent
XGXAKVVMNPIKGYXXXXXXXXXFYLVNIPSLKTPAX

SEQ ID NO: 31912 - protein, 35 aa, Artificial Sequence
  GFR-binding peptide
  MOD_RES (31), (32): Xaa is C or S
RVVMNPIKGYIVNSSDDFYLVNIPSLQTPAXXPKP

SEQ ID NO: 31913 - protein, 34 aa, Artificial Sequence
  GFR-binding peptide
  MOD_RES (1), (3): Xaa is C or S
XGXGEVVMEPIKGYVVKDYEDFYLMNIPSLETPV

SEQ ID NO: 31914 - protein, 32 aa, Artificial Sequence
  GFR-binding peptide
  MOD_RES (32), (32): Xaa is C or S
SEVVMDPIKGYVVNNASDFYLINIPSLRTPVX

SEQ ID NO: 31915 - protein, 31 aa, Artificial Sequence
  GFR-binding peptide
  MOD_RES (31), (31): Xaa is C or S
SVAMGPIKGYYTVVGKDFYLINIPSLKTPVX

SEQ ID NO: 31916 - protein, 35 aa, Artificial Sequence
  GFR-binding peptide
  MOD_RES (2), (2): Xaa is C or S
  MOD_RES (14), (15), (16), (17), (18): Xaa is A or G
  MOD_RES (19), (20), (21), (22): Xaa is A or G or is absent
GXAEVVMDPIKGYXXXXXXXXXFYLINIPSLRAPV

SEQ ID NO: 31917 - protein, 37 aa, Artificial Sequence
  GFR-binding peptide
  MOD_RES (1), (35), (36): Xaa is C or S
  MOD_RES (13), (14), (15), (16), (17): Xaa is A or G
  MOD_RES (18), (19), (20), (21): Xaa is A or G or is absent
XESVAMGPIKGYXXXXXXXXXFYLINIPSLKTPVXXA

SEQ ID NO: 31918 - protein, 40 aa, Artificial Sequence
  GFR-binding peptide
  MOD_RES (2), (36): Xaa is C or S
  MOD_RES (14), (15), (16), (17), (18): Xaa is A or G
  MOD_RES (19), (20), (21), (22): Xaa is A or G or is absent
GXSRVVMNPIKGYXXXXXXXXXFYLVNIPSLKTPAXTPKT

SEQ ID NO: 31919 - protein, 37 aa, Artificial Sequence
  GFR-binding peptide
  MOD_RES (33), (34): Xaa is C or S
  MOD_RES (11), (12), (13), (14), (15): Xaa is A or G
  MOD_RES (16), (17), (18), (19): Xaa is A or G or is absent
EVVMDPIKGYXXXXXXXXXFYLINIPSLRAPVXXSAP

SEQ ID NO: 31920 - protein, 36 aa, Artificial Sequence
  GFR-binding peptide
  MOD_RES (32), (33): Xaa is C or S
AKVVMNPIKGYIVNNSSDFYLVNIPSLKTPAXXAKP

SEQ ID NO: 31921 - protein, 37 aa, Artificial Sequence
  GFR-binding peptide
  MOD_RES (32), (33): Xaa is C or S
SEVVMDPIKGYVVNNASDFYLINIPSLRTPVXXTPPT

SEQ ID NO: 31922 - protein, 36 aa, Artificial Sequence
  GFR-binding peptide
  MOD_RES (31), (32): Xaa is C or S
SVAMGPIKGYYTVVGKDFYLINIPSLKTPVXXAKSA

SEQ ID NO: 31923 - protein, 34 aa, Artificial Sequence
  GFR-binding peptide
  MOD_RES (32), (33): Xaa is C or S
AEVVMDPIKGYVVNNAADFYLINIPSLRAPVXXS

SEQ ID NO: 31924 - protein, 32 aa, Artificial Sequence
  GFR-binding peptide
  MOD_RES (1), (1): Xaa is C or S
XGEVVMEPIKGYVVKDYEDFYLMNIPSLETPV

SEQ ID NO: 31925 - protein, 36 aa, Artificial Sequence
  GFR-binding peptide
  MOD_RES (1), (35), (36): Xaa is C or S
  MOD_RES (13), (14), (15), (16), (17): Xaa is A or G
  MOD_RES (18), (19), (20), (21): Xaa is A or G or is absent
XSRVVMNPIKGYXXXXXXXXXFYLVNIPSLKTPAXX

SEQ ID NO: 31926 - protein, 40 aa, Artificial Sequence
  GFR-binding peptide
  MOD_RES (1), (34), (35): Xaa is C or S
  MOD_RES (12), (13), (14), (15), (16): Xaa is A or G
  MOD_RES (17), (18), (19), (20): Xaa is A or G or is absent
XEEVIMPIKGYXXXXXXXXXFYLMNIPSTKVPAXXTSPVR

SEQ ID NO: 31927 - protein, 40 aa, Artificial Sequence
  GFR-binding peptide
  MOD_RES (2), (4), (36), (37): Xaa is C or S
RXGXSEVVMDPIKGYVVNNASDFYLINIPSLRTPVXXTPP

SEQ ID NO: 31928 - protein, 39 aa, Artificial Sequence
  GFR-binding peptide
  MOD_RES (2), (36), (37): Xaa is C or S
  MOD_RES (14), (15), (16), (17), (18): Xaa is A or G
  MOD_RES (19), (20), (21), (22): Xaa is A or G or is absent
GXSRVVMNPIKGYXXXXXXXXXFYLVNIPSLKTPAXXPK

SEQ ID NO: 31929 - protein, 38 aa, Artificial Sequence
  GFR-binding peptide
  MOD_RES (1), (33), (34): Xaa is C or S
XSEVVMDPIKGYVVNNASDFYLINIPSLRTPVXXTPPT

SEQ ID NO: 31930 - protein, 38 aa, Artificial Sequence
  GFR-binding peptide
  MOD_RES (34), (35): Xaa is C or S
  MOD_RES (12), (13), (14), (15), (16): Xaa is A or G
  MOD_RES (17), (18), (19), (20): Xaa is A or G or is absent
ESVAMGPIKGYXXXXXXXXXFYLINIPSLKTPVXXAKS

SEQ ID NO: 31931 - protein, 41 aa, Artificial Sequence
  GFR-binding peptide
  MOD_RES (2), (36), (37): Xaa is C or S
  MOD_RES (14), (15), (16), (17), (18): Xaa is A or G
  MOD_RES (19), (20), (21), (22): Xaa is A or G or is absent
GXSEVVMDPIKGYXXXXXXXXXFYLINIPSLRTPVXXTPPT

SEQ ID NO: 31932 - protein, 36 aa, Artificial Sequence
  GFR-binding peptide
  MOD_RES (1), (3), (34), (35): Xaa is C or S
XGXEEVIMPIKGYLLVRGNDFYLMNIPSTKVPAXXT

SEQ ID NO: 31933 - protein, 36 aa, Artificial Sequence
  GFR-binding peptide
  MOD_RES (1), (3), (35), (36): Xaa is C or S
XGXAKVVMNPIKGYIVNNSSDFYLVNIPSLKTPAXX

SEQ ID NO: 31934 - protein, 33 aa, Artificial Sequence
  GFR-binding peptide
  MOD_RES (31), (32): Xaa is C or S
EVVMDPIKGYVVNNASDFYLINIPSLRTPVXXT

SEQ ID NO: 31935 - protein, 39 aa, Artificial Sequence
  GFR-binding peptide
  MOD_RES (34), (34): Xaa is C or S
  MOD_RES (12), (13), (14), (15), (16): Xaa is A or G
  MOD_RES (17), (18), (19), (20): Xaa is A or G or is absent
SRVVMNPIKGYXXXXXXXXXFYLVNIPSLKTPAXTPKTV

SEQ ID NO: 31936 - protein, 34 aa, Artificial Sequence
  GFR-binding peptide
  MOD_RES (32), (33): Xaa is C or S
GEVVMDPIKGYVVKENEDFYLMNIPSLETPVXXA

SEQ ID NO: 31937 - protein, 38 aa, Artificial Sequence
  GFR-binding peptide
  MOD_RES (2), (34): Xaa is C or S
GXSRVVMNPIKGYIVNSSDDFYLVNIPSLKTPAXTPKT

SEQ ID NO: 31938 - protein, 35 aa, Artificial Sequence
  GFR-binding peptide
  MOD_RES (2), (4): Xaa is C or S
HXGXSRVVMNPIKGYIVNSSDDFYLVNIPSLKTPA

SEQ ID NO: 31939 - protein, 41 aa, Artificial Sequence
  GFR-binding peptide
  MOD_RES (2), (4), (38), (39): Xaa is C or S
  MOD_RES (16), (17), (18), (19), (20): Xaa is A or G
  MOD_RES (21), (22), (23), (24): Xaa is A or G or is absent
RXGXSEVVMDPIKGYXXXXXXXXXFYLINIPSLRTPVXXTP

SEQ ID NO: 31940 - protein, 30 aa, Artificial Sequence
  GFR-binding peptide
KVVMNPIKGYIVNNSSDFYLVNIPSLKTPA

SEQ ID NO: 31941 - protein, 38 aa, Artificial Sequence
  GFR-binding peptide
  MOD_RES (1), (33): Xaa is C or S
XSRVVMNPIKGYIVNSSDDFYLVNIPSLKTPAXTPKTV

SEQ ID NO: 31942 - protein, 41 aa, Artificial Sequence
  GFR-binding peptide
  MOD_RES (1), (3), (35), (36): Xaa is C or S
XGXGEVVMEPIKGYVVKDYEDFYLMNIPSLETPVXXAKPIS

SEQ ID NO: 31943 - protein, 42 aa, Artificial Sequence
  GFR-binding peptide
  MOD_RES (1), (3), (37): Xaa is C or S
  MOD_RES (15), (16), (17), (18), (19): Xaa is A or G
  MOD_RES (20), (21), (22), (23): Xaa is A or G or is absent
XGXSRVVMNPIKGYXXXXXXXXXFYLVNIPSLKTPAXTPKTV

SEQ ID NO: 31944 - protein, 36 aa, Artificial Sequence
  GFR-binding peptide
  MOD_RES (32), (32): Xaa is C or S
SRVVMNPIKGYIVNSSDDFYLVNIPSLKTPAXTPKT

SEQ ID NO: 31945 - protein, 36 aa, Artificial Sequence
  GFR-binding peptide
  MOD_RES (2), (36): Xaa is C or S
  MOD_RES (14), (15), (16), (17), (18): Xaa is A or G
  MOD_RES (19), (20), (21), (22): Xaa is A or G or is absent
GXARVVMNPIKGYXXXXXXXXXFYLVNIPSLQTPAX

SEQ ID NO: 31946 - protein, 35 aa, Artificial Sequence
  GFR-binding peptide
  MOD_RES (1), (35): Xaa is C or S
  MOD_RES (13), (14), (15), (16), (17): Xaa is A or G
  MOD_RES (18), (19), (20), (21): Xaa is A or G or is absent
XSEVVMDPIKGYXXXXXXXXXFYLINIPSLRTPVX

SEQ ID NO: 31947 - protein, 37 aa, Artificial Sequence
  GFR-binding peptide
  MOD_RES (34), (35): Xaa is C or S
  MOD_RES (12), (13), (14), (15), (16): Xaa is A or G
  MOD_RES (17), (18), (19), (20): Xaa is A or G or is absent
ESVAMGPIKGYXXXXXXXXXFYLINIPSLKTPVXXAK

SEQ ID NO: 31948 - protein, 34 aa, Artificial Sequence
  GFR-binding peptide
  MOD_RES (1), (33), (34): Xaa is C or S
XAEVVMDPIKGYVVNNAADFYLINIPSLRAPVXX

SEQ ID NO: 31949 - protein, 40 aa, Artificial Sequence
  GFR-binding peptide
  MOD_RES (1), (34), (35): Xaa is C or S
XEAVSMGEPIKGYTPVGMDDFYLVNIPSLKTPVXXAKGVK

SEQ ID NO: 31950 - protein, 39 aa, Artificial Sequence
  GFR-binding peptide
  MOD_RES (1), (3), (35), (36): Xaa is C or S
XGXESVAMGPIKGYYTVVGKDFYLINIPSLKTPVXXAKS

SEQ ID NO: 31951 - protein, 34 aa, Artificial Sequence
  GFR-binding peptide
  MOD_RES (2), (33), (34): Xaa is C or S
GXEEVIMPIKGYLLVRGNDFYLMNIPSTKVPAXX

SEQ ID NO: 31952 - protein, 39 aa, Artificial Sequence
  GFR-binding peptide
  MOD_RES (2), (35), (36): Xaa is C or S
GXEAVSMGEPIKGYTPVGMDDFYLVNIPSLKTPVXXAKG

SEQ ID NO: 31953 - protein, 38 aa, Artificial Sequence
  GFR-binding peptide
  MOD_RES (1), (35), (36): Xaa is C or S
  MOD_RES (13), (14), (15), (16), (17): Xaa is A or G
  MOD_RES (18), (19), (20), (21): Xaa is A or G or is absent
XRDVVMGPIKGYXXXXXXXXXFYLMNIPSMKTPTXXPG

SEQ ID NO: 31954 - protein, 41 aa, Artificial Sequence
  GFR-binding peptide
  MOD_RES (2), (4), (38), (39): Xaa is C or S
  MOD_RES (16), (17), (18), (19), (20): Xaa is A or G
  MOD_RES (21), (22), (23), (24): Xaa is A or G or is absent
RXGXGEVVMDPIKGYXXXXXXXXXFYLMNIPSLETPVXXAK

SEQ ID NO: 31955 - protein, 35 aa, Artificial Sequence
  GFR-binding peptide
  MOD_RES (32), (33): Xaa is C or S
ARVVMNPIKGYIVNSSDDFYLVNIPSLQTPAXXPK

SEQ ID NO: 31956 - protein, 39 aa, Artificial Sequence
  GFR-binding peptide
  MOD_RES (34), (35): Xaa is C or S
  MOD_RES (12), (13), (14), (15), (16): Xaa is A or G
  MOD_RES (17), (18), (19), (20): Xaa is A or G or is absent
SRVVMNPIKGYXXXXXXXXXFYLVNIPSLKTPAXXPKPV

SEQ ID NO: 31957 - protein, 39 aa, Artificial Sequence
  GFR-binding peptide
  MOD_RES (2), (36), (37): Xaa is C or S
  MOD_RES (14), (15), (16), (17), (18): Xaa is A or G
  MOD_RES (19), (20), (21), (22): Xaa is A or G or is absent
GXESVAMGPIKGYXXXXXXXXXFYLINIPSLKTPVXXAK

SEQ ID NO: 31958 - protein, 32 aa, Artificial Sequence
  GFR-binding peptide
  MOD_RES (1), (1): Xaa is C or S
XAKVVMNPIKGYIVNNSSDFYLVNIPSLKTPA

SEQ ID NO: 31959 - protein, 39 aa, Artificial Sequence
  GFR-binding peptide
  MOD_RES (1), (33), (34): Xaa is C or S
XGEVVMEPIKGYVVKDYEDFYLMNIPSLETPVXXAKPIS

SEQ ID NO: 31960 - protein, 39 aa, Artificial Sequence
  GFR-binding peptide
  MOD_RES (34), (35): Xaa is C or S
  MOD_RES (12), (13), (14), (15), (16): Xaa is A or G
  MOD_RES (17), (18), (19), (20): Xaa is A or G or is absent
ESVAMGPIKGYXXXXXXXXXFYLINIPSLKTPVXXAKSA

SEQ ID NO: 31961 - protein, 42 aa, Artificial Sequence
  GFR-binding peptide
  MOD_RES (2), (4), (38), (39): Xaa is C or S
  MOD_RES (16), (17), (18), (19), (20): Xaa is A or G
  MOD_RES (21), (22), (23), (24): Xaa is A or G or is absent
RXGXGEVVMEPIKGYXXXXXXXXXFYLMNIPSLETPVXXAKP

SEQ ID NO: 31962 - protein, 37 aa, Artificial Sequence
  GFR-binding peptide
  MOD_RES (33), (34): Xaa is C or S
  MOD_RES (11), (12), (13), (14), (15): Xaa is A or G
  MOD_RES (16), (17), (18), (19): Xaa is A or G or is absent
SVAMGPIKGYXXXXXXXXXFYLINIPSLKTPVXXAKS

SEQ ID NO: 31963 - protein, 40 aa, Artificial Sequence
  GFR-binding peptide
  MOD_RES (1), (3), (37), (38): Xaa is C or S
  MOD_RES (15), (16), (17), (18), (19): Xaa is A or G
  MOD_RES (20), (21), (22), (23): Xaa is A or G or is absent
XGXARVVMNPIKGYXXXXXXXXXFYLVNIPSLQTPAXXPK

SEQ ID NO: 31964 - protein, 33 aa, Artificial Sequence
  GFR-binding peptide
  MOD_RES (1), (33): Xaa is C or S
XSEVVMDPIKGYVVNNASDFYLINIPSLRTPVX

SEQ ID NO: 31965 - protein, 39 aa, Artificial Sequence
  GFR-binding peptide
  MOD_RES (33), (34): Xaa is C or S
  MOD_RES (11), (12), (13), (14), (15): Xaa is A or G
  MOD_RES (16), (17), (18), (19): Xaa is A or G or is absent
EVVMDPIKGYXXXXXXXXXFYLINIPSLRAPVXXSAPAA

SEQ ID NO: 31966 - protein, 37 aa, Artificial Sequence
  GFR-binding peptide
  MOD_RES (2), (34), (35): Xaa is C or S
GXGEVVMDPIKGYVVKENEDFYLMNIPSLETPVXXAK

SEQ ID NO: 31967 - protein, 31 aa, Artificial Sequence
  GFR-binding peptide
ESVAMGPIKGYYTVVGKDFYLINIPSLKTPV

SEQ ID NO: 31968 - protein, 34 aa, Artificial Sequence
  GFR-binding peptide
  MOD_RES (33), (33): Xaa is C or S
  MOD_RES (11), (12), (13), (14), (15): Xaa is A or G
  MOD_RES (16), (17), (18), (19): Xaa is A or G or is absent
RVVMNPIKGYXXXXXXXXXFYLVNIPSLKTPAXT

SEQ ID NO: 31969 - protein, 34 aa, Artificial Sequence
  GFR-binding peptide
  MOD_RES (1), (3): Xaa is C or S
XGXARVVMNPIKGYIVNSSDDFYLVNIPSLQTPA

SEQ ID NO: 31970 - protein, 38 aa, Artificial Sequence
  GFR-binding peptide
  MOD_RES (1), (33), (34): Xaa is C or S
XSRVVMNPIKGYIVNSSDDFYLVNIPSLKTPAXXPKPV

SEQ ID NO: 31971 - protein, 37 aa, Artificial Sequence
  GFR-binding peptide
  MOD_RES (2), (4), (36), (37): Xaa is C or S
RXGXESVAMGPIKGYYTVVGKDFYLINIPSLKTPVXX

SEQ ID NO: 31972 - protein, 37 aa, Artificial Sequence
  GFR-binding peptide
  MOD_RES (2), (4): Xaa is C or S
  MOD_RES (16), (17), (18), (19), (20): Xaa is A or G
  MOD_RES (21), (22), (23), (24): Xaa is A or G or is absent
RXGXAEVVMDPIKGYXXXXXXXXXFYLINIPSLRAPV

SEQ ID NO: 31973 - protein, 36 aa, Artificial Sequence
  GFR-binding peptide
  MOD_RES (2), (36): Xaa is C or S
  MOD_RES (14), (15), (16), (17), (18): Xaa is A or G
  MOD_RES (19), (20), (21), (22): Xaa is A or G or is absent
GXGEVVMDPIKGYXXXXXXXXXFYLMNIPSLETPVX

SEQ ID NO: 31974 - protein, 38 aa, Artificial Sequence
  GFR-binding peptide
  MOD_RES (1), (3), (37), (38): Xaa is C or S
  MOD_RES (15), (16), (17), (18), (19): Xaa is A or G
  MOD_RES (20), (21), (22), (23): Xaa is A or G or is absent
XGXAKVVMNPIKGYXXXXXXXXXFYLVNIPSLKTPAXX

SEQ ID NO: 31975 - protein, 33 aa, Artificial Sequence
  GFR-binding peptide
  MOD_RES (12), (13), (14), (15), (16): Xaa is A or G
  MOD_RES (17), (18), (19), (20): Xaa is A or G or is absent
GEVVMEPIKGYXXXXXXXXXFYLMNIPSLETPV

SEQ ID NO: 31976 - protein, 41 aa, Artificial Sequence
  GFR-binding peptide
  MOD_RES (1), (3), (35), (36): Xaa is C or S
XGXSRVVMNPIKGYIVNSSDDFYLVNIPSLKTPAXXPKPVY

SEQ ID NO: 31977 - protein, 39 aa, Artificial Sequence
  GFR-binding peptide
  MOD_RES (33), (34): Xaa is C or S
  MOD_RES (11), (12), (13), (14), (15): Xaa is A or G
  MOD_RES (16), (17), (18), (19): Xaa is A or G or is absent
RVVMNPIKGYXXXXXXXXXFYLVNIPSLKTPAXXPKPVY

SEQ ID NO: 31978 - protein, 41 aa, Artificial Sequence
  GFR-binding peptide
  MOD_RES (2), (36), (37): Xaa is C or S
  MOD_RES (14), (15), (16), (17), (18): Xaa is A or G
  MOD_RES (19), (20), (21), (22): Xaa is A or G or is absent
GXGEVVMEPIKGYXXXXXXXXXFYLMNIPSLETPVXXAKPI

SEQ ID NO: 31979 - protein, 37 aa, Artificial Sequence
  GFR-binding peptide
  MOD_RES (2), (33), (34): Xaa is C or S
GXEEVIMPIKGYLLVRGNDFYLMNIPSTKVPAXXTSP

SEQ ID NO: 31980 - protein, 36 aa, Artificial Sequence
  GFR-binding peptide
  MOD_RES (1), (3), (35), (36): Xaa is C or S
XGXSRVVMNPIKGYIVNSSDDFYLVNIPSLKTPAXX

SEQ ID NO: 31981 - protein, 37 aa, Artificial Sequence
  GFR-binding peptide
  MOD_RES (1), (32), (33): Xaa is C or S
XEEVIMPIKGYLLVRGNDFYLMNIPSTKVPAXXTSPV

SEQ ID NO: 31982 - protein, 37 aa, Artificial Sequence
  GFR-binding peptide
  MOD_RES (34), (35): Xaa is C or S
  MOD_RES (12), (13), (14), (15), (16): Xaa is A or G
  MOD_RES (17), (18), (19), (20): Xaa is A or G or is absent
SRVVMNPIKGYXXXXXXXXXFYLVNIPSLKTPAXXPK

SEQ ID NO: 31983 - protein, 37 aa, Artificial Sequence
  GFR-binding peptide
  MOD_RES (1), (3), (35), (36): Xaa is C or S
XGXAEVVMDPIKGYVVNNAADFYLINIPSLRAPVXXS

SEQ ID NO: 31984 - protein, 37 aa, Artificial Sequence
  GFR-binding peptide
  MOD_RES (2), (36), (37): Xaa is C or S
  MOD_RES (14), (15), (16), (17), (18): Xaa is A or G
  MOD_RES (19), (20), (21), (22): Xaa is A or G or is absent
GXRDVVMGPIKGYXXXXXXXXXFYLMNIPSMKTPTXX

SEQ ID NO: 31985 - protein, 38 aa, Artificial Sequence
  GFR-binding peptide
  MOD_RES (2), (35), (36): Xaa is C or S
  MOD_RES (13), (14), (15), (16), (17): Xaa is A or G
  MOD_RES (18), (19), (20), (21): Xaa is A or G or is absent
GXEEVIMPIKGYXXXXXXXXXFYLMNIPSTKVPAXXTS

SEQ ID NO: 31986 - protein, 32 aa, Artificial Sequence
  GFR-binding peptide
  MOD_RES (1), (1): Xaa is C or S
XSRVVMNPIKGYIVNSSDDFYLVNIPSLKTPA

SEQ ID NO: 31987 - protein, 40 aa, Artificial Sequence
  GFR-binding peptide
  MOD_RES (34), (35): Xaa is C or S
  MOD_RES (12), (13), (14), (15), (16): Xaa is A or G
  MOD_RES (17), (18), (19), (20): Xaa is A or G or is absent
GEVVMDPIKGYXXXXXXXXXFYLMNIPSLETPVXXAKPIK

SEQ ID NO: 31988 - protein, 38 aa, Artificial Sequence
  GFR-binding peptide
  MOD_RES (32), (33): Xaa is C or S
SRVVMNPIKGYIVNSSDDFYLVNIPSLKTPAXXPKPVH

SEQ ID NO: 31989 - protein, 34 aa, Artificial Sequence
  GFR-binding peptide
  MOD_RES (1), (33), (34): Xaa is C or S
XESVAMGPIKGYYTVVGKDFYLINIPSLKTPVXX

SEQ ID NO: 31990 - protein, 35 aa, Artificial Sequence
  GFR-binding peptide
  MOD_RES (1), (33), (34): Xaa is C or S
XRDVVMGPIKGYIIQQKDNFYLMNIPSMKTPTXXP

SEQ ID NO: 31991 - protein, 42 aa, Artificial Sequence
  GFR-binding peptide
  MOD_RES (2), (4), (36), (37): Xaa is C or S
HXGXARVVMNPIKGYIVNSSDDFYLVNIPSLQTPAXXPKPVT

SEQ ID NO: 31992 - protein, 35 aa, Artificial Sequence
  GFR-binding peptide
  MOD_RES (2), (4): Xaa is C or S
RXGXGEVVMEPIKGYVVKDYEDFYLMNIPSLETPV

SEQ ID NO: 31993 - protein, 36 aa, Artificial Sequence
  GFR-binding peptide
  MOD_RES (1), (3), (35), (36): Xaa is C or S
XGXRDVVMGPIKGYIIQQKDNFYLMNIPSMKTPTXX

SEQ ID NO: 31994 - protein, 32 aa, Artificial Sequence
  GFR-binding peptide
  MOD_RES (1), (32): Xaa is C or S
XEEVIMPIKGYLLVRGNDFYLMNIPSTKVPAX

SEQ ID NO: 31995 - protein, 34 aa, Artificial Sequence
  GFR-binding peptide
  MOD_RES (32), (32): Xaa is C or S
SRVVMNPIKGYIVNSSDDFYLVNIPSLKTPAXTP

SEQ ID NO: 31996 - protein, 37 aa, Artificial Sequence
  GFR-binding peptide
  MOD_RES (2), (34), (35): Xaa is C or S
GXAKVVMNPIKGYIVNNSSDFYLVNIPSLKTPAXXAK

SEQ ID NO: 31997 - protein, 37 aa, Artificial Sequence
  GFR-binding peptide
  MOD_RES (31), (32): Xaa is C or S
RVVMNPIKGYIVNSSDDFYLVNIPSLQTPAXXPKPVT

SEQ ID NO: 31998 - protein, 40 aa, Artificial Sequence
  GFR-binding peptide
  MOD_RES (1), (3), (37), (38): Xaa is C or S
  MOD_RES (15), (16), (17), (18), (19): Xaa is A or G
  MOD_RES (20), (21), (22), (23): Xaa is A or G or is absent
XGXESVAMGPIKGYXXXXXXXXXFYLINIPSLKTPVXXAK

SEQ ID NO: 31999 - protein, 34 aa, Artificial Sequence
  GFR-binding peptide
  MOD_RES (34), (34): Xaa is C or S
  MOD_RES (12), (13), (14), (15), (16): Xaa is A or G
  MOD_RES (17), (18), (19), (20): Xaa is A or G or is absent
SEVVMDPIKGYXXXXXXXXXFYLINIPSLRTPVX

SEQ ID NO: 32000 - protein, 32 aa, Artificial Sequence
  GFR-binding peptide
  MOD_RES (31), (32): Xaa is C or S
RVVMNPIKGYIVNSSDDFYLVNIPSLQTPAXX

SEQ ID NO: 32001 - protein, 36 aa, Artificial Sequence
  GFR-binding peptide
  MOD_RES (32), (33): Xaa is C or S
ARVVMNPIKGYIVNSSDDFYLVNIPSLQTPAXXPKP

SEQ ID NO: 32002 - protein, 37 aa, Artificial Sequence
  GFR-binding peptide
  MOD_RES (1), (35), (36): Xaa is C or S
  MOD_RES (13), (14), (15), (16), (17): Xaa is A or G
  MOD_RES (18), (19), (20), (21): Xaa is A or G or is absent
XARVVMNPIKGYXXXXXXXXXFYLVNIPSLQTPAXXP

SEQ ID NO: 32003 - protein, 44 aa, Artificial Sequence
  GFR-binding peptide
  MOD_RES (2), (4), (38): Xaa is C or S
  MOD_RES (16), (17), (18), (19), (20): Xaa is A or G
  MOD_RES (21), (22), (23), (24): Xaa is A or G or is absent
HXGXSRVVMNPIKGYXXXXXXXXXFYLVNIPSLKTPAXTPKTVH

SEQ ID NO: 32004 - protein, 33 aa, Artificial Sequence
  GFR-binding peptide
  MOD_RES (32), (32): Xaa is C or S
SRVVMNPIKGYIVNSSDDFYLVNIPSLKTPAXT

SEQ ID NO: 32005 - protein, 36 aa, Artificial Sequence
  GFR-binding peptide
  MOD_RES (1), (35), (36): Xaa is C or S
  MOD_RES (13), (14), (15), (16), (17): Xaa is A or G
  MOD_RES (18), (19), (20), (21): Xaa is A or G or is absent
XRDVVMGPIKGYXXXXXXXXXFYLMNIPSMKTPTXX

SEQ ID NO: 32006 - protein, 44 aa, Artificial Sequence
  GFR-binding peptide
  MOD_RES (2), (4), (38), (39): Xaa is C or S
  MOD_RES (16), (17), (18), (19), (20): Xaa is A or G
  MOD_RES (21), (22), (23), (24): Xaa is A or G or is absent
RXGXGEVVMEPIKGYXXXXXXXXXFYLMNIPSLETPVXXAKPIS

SEQ ID NO: 32007 - protein, 38 aa, Artificial Sequence
  GFR-binding peptide
  MOD_RES (1), (3), (37), (38): Xaa is C or S
  MOD_RES (15), (16), (17), (18), (19): Xaa is A or G
  MOD_RES (20), (21), (22), (23): Xaa is A or G or is absent
XGXSEVVMDPIKGYXXXXXXXXXFYLINIPSLRTPVXX

SEQ ID NO: 32008 - protein, 38 aa, Artificial Sequence
  GFR-binding peptide
  MOD_RES (32), (33): Xaa is C or S
SRVVMNPIKGYIVNSSDDFYLVNIPSLKTPAXXPKPVY

SEQ ID NO: 32009 - protein, 36 aa, Artificial Sequence
  GFR-binding peptide
  MOD_RES (2), (34), (35): Xaa is C or S
GXARVVMNPIKGYIVNSSDDFYLVNIPSLQTPAXXP

SEQ ID NO: 32010 - protein, 38 aa, Artificial Sequence
  GFR-binding peptide
  MOD_RES (2), (36), (37): Xaa is C or S
  MOD_RES (14), (15), (16), (17), (18): Xaa is A or G
  MOD_RES (19), (20), (21), (22): Xaa is A or G or is absent
GXAKVVMNPIKGYXXXXXXXXXFYLVNIPSLKTPAXXA

SEQ ID NO: 32011 - protein, 41 aa, Artificial Sequence
  GFR-binding peptide
  MOD_RES (1), (35), (36): Xaa is C or S
  MOD_RES (13), (14), (15), (16), (17): Xaa is A or G
  MOD_RES (18), (19), (20), (21): Xaa is A or G or is absent
XRDVVMGPIKGYXXXXXXXXXFYLMNIPSMKTPTXXPGASG

SEQ ID NO: 32012 - protein, 35 aa, Artificial Sequence
  GFR-binding peptide
  MOD_RES (1), (35): Xaa is C or S
  MOD_RES (13), (14), (15), (16), (17): Xaa is A or G
  MOD_RES (18), (19), (20), (21): Xaa is A or G or is absent
XAKVVMNPIKGYXXXXXXXXXFYLVNIPSLKTPAX

SEQ ID NO: 32013 - protein, 31 aa, Artificial Sequence
  GFR-binding peptide
  MOD_RES (31), (31): Xaa is C or S
RVVMNPIKGYIVNSSDDFYLVNIPSLQTPAX

SEQ ID NO: 32014 - protein, 35 aa, Artificial Sequence
  GFR-binding peptide
  MOD_RES (31), (32): Xaa is C or S
EVVMDPIKGYVVNNAADFYLINIPSLRAPVXXSAP

SEQ ID NO: 32015 - protein, 43 aa, Artificial Sequence
  GFR-binding peptide
  MOD_RES (1), (3), (37), (38): Xaa is C or S
  MOD_RES (15), (16), (17), (18), (19): Xaa is A or G
  MOD_RES (20), (21), (22), (23): Xaa is A or G or is absent
XGXGEVVMDPIKGYXXXXXXXXXFYLMNIPSLETPVXXAKPIK

SEQ ID NO: 32016 - protein, 37 aa, Artificial Sequence
  GFR-binding peptide
  MOD_RES (34), (35): Xaa is C or S
  MOD_RES (12), (13), (14), (15), (16): Xaa is A or G
  MOD_RES (17), (18), (19), (20): Xaa is A or G or is absent
AEVVMDPIKGYXXXXXXXXXFYLINIPSLRAPVXXSA

SEQ ID NO: 32017 - protein, 33 aa, Artificial Sequence
  GFR-binding peptide
  MOD_RES (31), (32): Xaa is C or S
RVVMNPIKGYIVNSSDDFYLVNIPSLQTPAXXP

SEQ ID NO: 32018 - protein, 42 aa, Artificial Sequence
  GFR-binding peptide
  MOD_RES (1), (3), (37), (38): Xaa is C or S
  MOD_RES (15), (16), (17), (18), (19): Xaa is A or G
  MOD_RES (20), (21), (22), (23): Xaa is A or G or is absent
XGXGEVVMDPIKGYXXXXXXXXXFYLMNIPSLETPVXXAKPI

SEQ ID NO: 32019 - protein, 38 aa, Artificial Sequence
  GFR-binding peptide
  MOD_RES (2), (37), (38): Xaa is C or S
  MOD_RES (15), (16), (17), (18), (19): Xaa is A or G
  MOD_RES (20), (21), (22), (23): Xaa is A or G or is absent
GXEAVSMGEPIKGYXXXXXXXXXFYLVNIPSLKTPVXX

SEQ ID NO: 32020 - protein, 35 aa, Artificial Sequence
  GFR-binding peptide
  MOD_RES (1), (33), (34): Xaa is C or S
XAKVVMNPIKGYIVNNSSDFYLVNIPSLKTPAXXA

SEQ ID NO: 32021 - protein, 39 aa, Artificial Sequence
  GFR-binding peptide
  MOD_RES (1), (35), (36): Xaa is C or S
  MOD_RES (13), (14), (15), (16), (17): Xaa is A or G
  MOD_RES (18), (19), (20), (21): Xaa is A or G or is absent
XAEVVMDPIKGYXXXXXXXXXFYLINIPSLRAPVXXSAP

SEQ ID NO: 32022 - protein, 33 aa, Artificial Sequence
  GFR-binding peptide
  MOD_RES (32), (33): Xaa is C or S
AEVVMDPIKGYVVNNAADFYLINIPSLRAPVXX

SEQ ID NO: 32023 - protein, 34 aa, Artificial Sequence
  GFR-binding peptide
  MOD_RES (1), (33), (34): Xaa is C or S
XARVVMNPIKGYIVNSSDDFYLVNIPSLQTPAXX

SEQ ID NO: 32024 - protein, 39 aa, Artificial Sequence
  GFR-binding peptide
  MOD_RES (2), (4), (36), (37): Xaa is C or S
HXGXARVVMNPIKGYIVNSSDDFYLVNIPSLQTPAXXPK

SEQ ID NO: 32025 - protein, 36 aa, Artificial Sequence
  GFR-binding peptide
  MOD_RES (2), (34), (35): Xaa is C or S
GXESVAMGPIKGYYTVVGKDFYLINIPSLKTPVXXA

SEQ ID NO: 32026 - protein, 41 aa, Artificial Sequence
  GFR-binding peptide
  MOD_RES (2), (36), (37): Xaa is C or S
  MOD_RES (14), (15), (16), (17), (18): Xaa is A or G
  MOD_RES (19), (20), (21), (22): Xaa is A or G or is absent
GXAEVVMDPIKGYXXXXXXXXXFYLINIPSLRAPVXXSAPA

SEQ ID NO: 32027 - protein, 39 aa, Artificial Sequence
  GFR-binding peptide
  MOD_RES (33), (34): Xaa is C or S
  MOD_RES (11), (12), (13), (14), (15): Xaa is A or G
  MOD_RES (16), (17), (18), (19): Xaa is A or G or is absent
SVAMGPIKGYXXXXXXXXXFYLINIPSLKTPVXXAKSAK

SEQ ID NO: 32028 - protein, 39 aa, Artificial Sequence
  GFR-binding peptide
  MOD_RES (2), (34), (35): Xaa is C or S
GXAEVVMDPIKGYVVNNAADFYLINIPSLRAPVXXSAPA

SEQ ID NO: 32029 - protein, 36 aa, Artificial Sequence
  GFR-binding peptide
  MOD_RES (1), (35), (36): Xaa is C or S
  MOD_RES (13), (14), (15), (16), (17): Xaa is A or G
  MOD_RES (18), (19), (20), (21): Xaa is A or G or is absent
XESVAMGPIKGYXXXXXXXXXFYLINIPSLKTPVXX

SEQ ID NO: 32030 - protein, 37 aa, Artificial Sequence
  GFR-binding peptide
  MOD_RES (2), (34), (35): Xaa is C or S
GXSEVVMDPIKGYVVNNASDFYLINIPSLRTPVXXTP

SEQ ID NO: 32031 - protein, 36 aa, Artificial Sequence
  GFR-binding peptide
  MOD_RES (2), (36): Xaa is C or S
  MOD_RES (14), (15), (16), (17), (18): Xaa is A or G
  MOD_RES (19), (20), (21), (22): Xaa is A or G or is absent
GXSRVVMNPIKGYXXXXXXXXXFYLVNIPSLKTPAX

SEQ ID NO: 32032 - protein, 36 aa, Artificial Sequence
  GFR-binding peptide
  MOD_RES (1), (3), (35), (36): Xaa is C or S
XGXGEVVMDPIKGYVVKENEDFYLMNIPSLETPVXX

SEQ ID NO: 32033 - protein, 37 aa, Artificial Sequence
  GFR-binding peptide
  MOD_RES (34), (35): Xaa is C or S
  MOD_RES (12), (13), (14), (15), (16): Xaa is A or G
  MOD_RES (17), (18), (19), (20): Xaa is A or G or is absent
SEVVMDPIKGYXXXXXXXXXFYLINIPSLRTPVXXTP

SEQ ID NO: 32034 - protein, 36 aa, Artificial Sequence
  GFR-binding peptide
  MOD_RES (2), (4), (36): Xaa is C or S
RXGXAEVVMDPIKGYVVNNAADFYLINIPSLRAPVX

SEQ ID NO: 32035 - protein, 37 aa, Artificial Sequence
  GFR-binding peptide
  MOD_RES (32), (33): Xaa is C or S
GEVVMEPIKGYVVKDYEDFYLMNIPSLETPVXXAKPI

SEQ ID NO: 32036 - protein, 37 aa, Artificial Sequence
  GFR-binding peptide
  MOD_RES (2), (34), (35): Xaa is C or S
GXAEVVMDPIKGYVVNNAADFYLINIPSLRAPVXXSA

SEQ ID NO: 32037 - protein, 41 aa, Artificial Sequence
  GFR-binding peptide
  MOD_RES (1), (35): Xaa is C or S
  MOD_RES (13), (14), (15), (16), (17): Xaa is A or G
  MOD_RES (18), (19), (20), (21): Xaa is A or G or is absent
XSRVVMNPIKGYXXXXXXXXXFYLVNIPSLKTPAXTPKTVH

SEQ ID NO: 32038 - protein, 39 aa, Artificial Sequence
  GFR-binding peptide
  MOD_RES (2), (4), (36), (37): Xaa is C or S
HXGXSRVVMNPIKGYIVNSSDDFYLVNIPSLKTPAXXPK

SEQ ID NO: 32039 - protein, 39 aa, Artificial Sequence
  GFR-binding peptide
  MOD_RES (1), (33), (34): Xaa is C or S
XAEVVMDPIKGYVVNNAADFYLINIPSLRAPVXXSAPAA

SEQ ID NO: 32040 - protein, 42 aa, Artificial Sequence
  GFR-binding peptide
  MOD_RES (1), (3), (36), (37): Xaa is C or S
XGXEAVSMGEPIKGYTPVGMDDFYLVNIPSLKTPVXXAKGVK

SEQ ID NO: 32041 - protein, 39 aa, Artificial Sequence
  GFR-binding peptide
  MOD_RES (1), (3), (35), (36): Xaa is C or S
XGXSRVVMNPIKGYIVNSSDDFYLVNIPSLKTPAXXPKP

SEQ ID NO: 32042 - protein, 35 aa, Artificial Sequence
  GFR-binding peptide
  MOD_RES (34), (35): Xaa is C or S
  MOD_RES (12), (13), (14), (15), (16): Xaa is A or G
  MOD_RES (17), (18), (19), (20): Xaa is A or G or is absent
GEVVMEPIKGYXXXXXXXXXFYLMNIPSLETPVXX

SEQ ID NO: 32043 - protein, 40 aa, Artificial Sequence
  GFR-binding peptide
  MOD_RES (2), (34), (35): Xaa is C or S
GXAEVVMDPIKGYVVNNAADFYLINIPSLRAPVXXSAPAA

SEQ ID NO: 32044 - protein, 35 aa, Artificial Sequence
  GFR-binding peptide
  MOD_RES (1), (3), (35): Xaa is C or S
XGXRDVVMGPIKGYIIQQKDNFYLMNIPSMKTPTX

SEQ ID NO: 32045 - protein, 38 aa, Artificial Sequence
  GFR-binding peptide
  MOD_RES (1), (35), (36): Xaa is C or S
  MOD_RES (13), (14), (15), (16), (17): Xaa is A or G
  MOD_RES (18), (19), (20), (21): Xaa is A or G or is absent
XAEVVMDPIKGYXXXXXXXXXFYLINIPSLRAPVXXSA

SEQ ID NO: 32046 - protein, 43 aa, Artificial Sequence
  GFR-binding peptide
  MOD_RES (2), (4), (38), (39): Xaa is C or S
  MOD_RES (16), (17), (18), (19), (20): Xaa is A or G
  MOD_RES (21), (22), (23), (24): Xaa is A or G or is absent
RXGXGEVVMEPIKGYXXXXXXXXXFYLMNIPSLETPVXXAKPI

SEQ ID NO: 32047 - protein, 41 aa, Artificial Sequence
  GFR-binding peptide
  MOD_RES (1), (35), (36): Xaa is C or S
  MOD_RES (13), (14), (15), (16), (17): Xaa is A or G
  MOD_RES (18), (19), (20), (21): Xaa is A or G or is absent
XGEVVMDPIKGYXXXXXXXXXFYLMNIPSLETPVXXAKPIK

SEQ ID NO: 32048 - protein, 39 aa, Artificial Sequence
  GFR-binding peptide
  MOD_RES (2), (34), (35): Xaa is C or S
GXAKVVMNPIKGYIVNNSSDFYLVNIPSLKTPAXXAKPV

SEQ ID NO: 32049 - protein, 37 aa, Artificial Sequence
  GFR-binding peptide
  MOD_RES (2), (36), (37): Xaa is C or S
  MOD_RES (14), (15), (16), (17), (18): Xaa is A or G
  MOD_RES (19), (20), (21), (22): Xaa is A or G or is absent
GXSEVVMDPIKGYXXXXXXXXXFYLINIPSLRTPVXX

SEQ ID NO: 32050 - protein, 34 aa, Artificial Sequence
  GFR-binding peptide
  MOD_RES (1), (34): Xaa is C or S
  MOD_RES (12), (13), (14), (15), (16): Xaa is A or G
  MOD_RES (17), (18), (19), (20): Xaa is A or G or is absent
XEEVIMPIKGYXXXXXXXXXFYLMNIPSTKVPAX

SEQ ID NO: 32051 - protein, 37 aa, Artificial Sequence
  GFR-binding peptide
  MOD_RES (1), (33), (34): Xaa is C or S
XAKVVMNPIKGYIVNNSSDFYLVNIPSLKTPAXXAKP

SEQ ID NO: 32052 - protein, 34 aa, Artificial Sequence
  GFR-binding peptide
  MOD_RES (1), (33), (34): Xaa is C or S
XSRVVMNPIKGYIVNSSDDFYLVNIPSLKTPAXX

SEQ ID NO: 32053 - protein, 38 aa, Artificial Sequence
  GFR-binding peptide
  MOD_RES (2), (35), (36): Xaa is C or S
GXEAVSMGEPIKGYTPVGMDDFYLVNIPSLKTPVXXAK

SEQ ID NO: 32054 - protein, 40 aa, Artificial Sequence
  GFR-binding peptide
  MOD_RES (1), (35), (36): Xaa is C or S
  MOD_RES (13), (14), (15), (16), (17): Xaa is A or G
  MOD_RES (18), (19), (20), (21): Xaa is A or G or is absent
XAKVVMNPIKGYXXXXXXXXXFYLVNIPSLKTPAXXAKPV

SEQ ID NO: 32055 - protein, 39 aa, Artificial Sequence
  GFR-binding peptide
  MOD_RES (33), (33): Xaa is C or S
  MOD_RES (11), (12), (13), (14), (15): Xaa is A or G
  MOD_RES (16), (17), (18), (19): Xaa is A or G or is absent
RVVMNPIKGYXXXXXXXXXFYLVNIPSLKTPAXTPKTVH

SEQ ID NO: 32056 - protein, 39 aa, Artificial Sequence
  GFR-binding peptide
  MOD_RES (1), (35), (36): Xaa is C or S
  MOD_RES (13), (14), (15), (16), (17): Xaa is A or G
  MOD_RES (18), (19), (20), (21): Xaa is A or G or is absent
XGEVVMEPIKGYXXXXXXXXXFYLMNIPSLETPVXXAKP

SEQ ID NO: 32057 - protein, 36 aa, Artificial Sequence
  GFR-binding peptide
  MOD_RES (1), (35), (36): Xaa is C or S
  MOD_RES (13), (14), (15), (16), (17): Xaa is A or G
  MOD_RES (18), (19), (20), (21): Xaa is A or G or is absent
XAEVVMDPIKGYXXXXXXXXXFYLINIPSLRAPVXX

SEQ ID NO: 32058 - protein, 38 aa, Artificial Sequence
  GFR-binding peptide
  MOD_RES (1), (3), (35), (36): Xaa is C or S
XGXSRVVMNPIKGYIVNSSDDFYLVNIPSLKTPAXXPK

SEQ ID NO: 32059 - protein, 37 aa, Artificial Sequence
  GFR-binding peptide
  MOD_RES (2), (36), (37): Xaa is C or S
  MOD_RES (14), (15), (16), (17), (18): Xaa is A or G
  MOD_RES (19), (20), (21), (22): Xaa is A or G or is absent
GXGEVVMEPIKGYXXXXXXXXXFYLMNIPSLETPVXX

SEQ ID NO: 32060 - protein, 38 aa, Artificial Sequence
  GFR-binding peptide
  MOD_RES (34), (34): Xaa is C or S
  MOD_RES (12), (13), (14), (15), (16): Xaa is A or G
  MOD_RES (17), (18), (19), (20): Xaa is A or G or is absent
SRVVMNPIKGYXXXXXXXXXFYLVNIPSLKTPAXTPKT

SEQ ID NO: 32061 - protein, 43 aa, Artificial Sequence
  GFR-binding peptide
  MOD_RES (2), (4), (38), (39): Xaa is C or S
  MOD_RES (16), (17), (18), (19), (20): Xaa is A or G
  MOD_RES (21), (22), (23), (24): Xaa is A or G or is absent
SXGXRDVVMGPIKGYXXXXXXXXXFYLMNIPSMKTPTXXPGAS

SEQ ID NO: 32062 - protein, 34 aa, Artificial Sequence
  GFR-binding peptide
  MOD_RES (31), (32): Xaa is C or S
DVVMGPIKGYIIQQKDNFYLMNIPSMKTPTXXPG

SEQ ID NO: 32063 - protein, 31 aa, Artificial Sequence
  GFR-binding peptide
GEVVMDPIKGYVVKENEDFYLMNIPSLETPV

SEQ ID NO: 32064 - protein, 38 aa, Artificial Sequence
  GFR-binding peptide
  MOD_RES (1), (35), (36): Xaa is C or S
  MOD_RES (13), (14), (15), (16), (17): Xaa is A or G
  MOD_RES (18), (19), (20), (21): Xaa is A or G or is absent
XARVVMNPIKGYXXXXXXXXXFYLVNIPSLQTPAXXPK

SEQ ID NO: 32065 - protein, 33 aa, Artificial Sequence
  GFR-binding peptide
  MOD_RES (33), (33): Xaa is C or S
  MOD_RES (11), (12), (13), (14), (15): Xaa is A or G
  MOD_RES (16), (17), (18), (19): Xaa is A or G or is absent
EVVMEPIKGYXXXXXXXXXFYLMNIPSLETPVX

SEQ ID NO: 32066 - protein, 37 aa, Artificial Sequence
  GFR-binding peptide
  MOD_RES (34), (35): Xaa is C or S
  MOD_RES (12), (13), (14), (15), (16): Xaa is A or G
  MOD_RES (17), (18), (19), (20): Xaa is A or G or is absent
AKVVMNPIKGYXXXXXXXXXFYLVNIPSLKTPAXXAK

SEQ ID NO: 32067 - protein, 37 aa, Artificial Sequence
  GFR-binding peptide
  MOD_RES (1), (35), (36): Xaa is C or S
  MOD_RES (13), (14), (15), (16), (17): Xaa is A or G
  MOD_RES (18), (19), (20), (21): Xaa is A or G or is absent
XSEVVMDPIKGYXXXXXXXXXFYLINIPSLRTPVXXT

SEQ ID NO: 32068 - protein, 34 aa, Artificial Sequence
  GFR-binding peptide
  MOD_RES (2), (34): Xaa is C or S
GXRDVVMGPIKGYIIQQKDNFYLMNIPSMKTPTX

SEQ ID NO: 32069 - protein, 33 aa, Artificial Sequence
  GFR-binding peptide
  MOD_RES (1), (33): Xaa is C or S
XAEVVMDPIKGYVVNNAADFYLINIPSLRAPVX

SEQ ID NO: 32070 - protein, 35 aa, Artificial Sequence
  GFR-binding peptide
  MOD_RES (32), (32): Xaa is C or S
SRVVMNPIKGYIVNSSDDFYLVNIPSLKTPAXTPK

SEQ ID NO: 32071 - protein, 40 aa, Artificial Sequence
  GFR-binding peptide
  MOD_RES (2), (4), (36), (37): Xaa is C or S
HXGXSRVVMNPIKGYIVNSSDDFYLVNIPSLKTPAXXPKP

SEQ ID NO: 32072 - protein, 42 aa, Artificial Sequence
  GFR-binding peptide
  MOD_RES (1), (3), (36), (37): Xaa is C or S
  MOD_RES (14), (15), (16), (17), (18): Xaa is A or G
  MOD_RES (19), (20), (21), (22): Xaa is A or G or is absent
XGXEEVIMPIKGYXXXXXXXXXFYLMNIPSTKVPAXXTSPVR

SEQ ID NO: 32073 - protein, 41 aa, Artificial Sequence
  GFR-binding peptide
  MOD_RES (1), (3), (37), (38): Xaa is C or S
  MOD_RES (15), (16), (17), (18), (19): Xaa is A or G
  MOD_RES (20), (21), (22), (23): Xaa is A or G or is absent
XGXAEVVMDPIKGYXXXXXXXXXFYLINIPSLRAPVXXSAP

SEQ ID NO: 32074 - protein, 40 aa, Artificial Sequence
  GFR-binding peptide
  MOD_RES (35), (36): Xaa is C or S
  MOD_RES (13), (14), (15), (16), (17): Xaa is A or G
  MOD_RES (18), (19), (20), (21): Xaa is A or G or is absent
EAVSMGEPIKGYXXXXXXXXXFYLVNIPSLKTPVXXAKGV

SEQ ID NO: 32075 - protein, 37 aa, Artificial Sequence
  GFR-binding peptide
  MOD_RES (33), (34): Xaa is C or S
  MOD_RES (11), (12), (13), (14), (15): Xaa is A or G
  MOD_RES (16), (17), (18), (19): Xaa is A or G or is absent
EVVMDPIKGYXXXXXXXXXFYLINIPSLRTPVXXTPP

SEQ ID NO: 32076 - protein, 35 aa, Artificial Sequence
  GFR-binding peptide
  MOD_RES (1), (35): Xaa is C or S
  MOD_RES (13), (14), (15), (16), (17): Xaa is A or G
  MOD_RES (18), (19), (20), (21): Xaa is A or G or is absent
XAEVVMDPIKGYXXXXXXXXXFYLINIPSLRAPVX

SEQ ID NO: 32077 - protein, 36 aa, Artificial Sequence
  GFR-binding peptide
  MOD_RES (32), (33): Xaa is C or S
ESVAMGPIKGYYTVVGKDFYLINIPSLKTPVXXAKS

SEQ ID NO: 32078 - protein, 41 aa, Artificial Sequence
  GFR-binding peptide
  MOD_RES (2), (4), (39), (40): Xaa is C or S
  MOD_RES (17), (18), (19), (20), (21): Xaa is A or G
  MOD_RES (22), (23), (24), (25): Xaa is A or G or is absent
RXGXEAVSMGEPIKGYXXXXXXXXXFYLVNIPSLKTPVXXA

SEQ ID NO: 32079 - protein, 44 aa, Artificial Sequence
  GFR-binding peptide
  MOD_RES (2), (4), (38), (39): Xaa is C or S
  MOD_RES (16), (17), (18), (19), (20): Xaa is A or G
  MOD_RES (21), (22), (23), (24): Xaa is A or G or is absent
RXGXESVAMGPIKGYXXXXXXXXXFYLINIPSLKTPVXXAKSAK

SEQ ID NO: 32080 - protein, 41 aa, Artificial Sequence
  GFR-binding peptide
  MOD_RES (1), (3), (37), (38): Xaa is C or S
  MOD_RES (15), (16), (17), (18), (19): Xaa is A or G
  MOD_RES (20), (21), (22), (23): Xaa is A or G or is absent
XGXGEVVMEPIKGYXXXXXXXXXFYLMNIPSLETPVXXAKP

SEQ ID NO: 32081 - protein, 39 aa, Artificial Sequence
  GFR-binding peptide
  MOD_RES (1), (3), (37), (38): Xaa is C or S
  MOD_RES (15), (16), (17), (18), (19): Xaa is A or G
  MOD_RES (20), (21), (22), (23): Xaa is A or G or is absent
XGXSRVVMNPIKGYXXXXXXXXXFYLVNIPSLKTPAXXP

SEQ ID NO: 32082 - protein, 36 aa, Artificial Sequence
  GFR-binding peptide
  MOD_RES (2), (4), (36): Xaa is C or S
SXGXRDVVMGPIKGYIIQQKDNFYLMNIPSMKTPTX

SEQ ID NO: 32083 - protein, 42 aa, Artificial Sequence
  GFR-binding peptide
  MOD_RES (2), (4), (36), (37): Xaa is C or S
HXGXSRVVMNPIKGYIVNSSDDFYLVNIPSLKTPAXXPKPVH

SEQ ID NO: 32084 - protein, 42 aa, Artificial Sequence
  GFR-binding peptide
  MOD_RES (2), (36): Xaa is C or S
  MOD_RES (14), (15), (16), (17), (18): Xaa is A or G
  MOD_RES (19), (20), (21), (22): Xaa is A or G or is absent
GXSRVVMNPIKGYXXXXXXXXXFYLVNIPSLKTPAXTPKTVH

SEQ ID NO: 32085 - protein, 35 aa, Artificial Sequence
  GFR-binding peptide
  MOD_RES (1), (3), (35): Xaa is C or S
XGXSRVVMNPIKGYIVNSSDDFYLVNIPSLKTPAX

SEQ ID NO: 32086 - protein, 36 aa, Artificial Sequence
  GFR-binding peptide
  MOD_RES (2), (35), (36): Xaa is C or S
GXEAVSMGEPIKGYTPVGMDDFYLVNIPSLKTPVXX

SEQ ID NO: 32087 - protein, 36 aa, Artificial Sequence
  GFR-binding peptide
  MOD_RES (1), (34), (35): Xaa is C or S
  MOD_RES (12), (13), (14), (15), (16): Xaa is A or G
  MOD_RES (17), (18), (19), (20): Xaa is A or G or is absent
XEEVIMPIKGYXXXXXXXXXFYLMNIPSTKVPAXXT

SEQ ID NO: 32088 - protein, 36 aa, Artificial Sequence
  GFR-binding peptide
  MOD_RES (2), (36): Xaa is C or S
  MOD_RES (14), (15), (16), (17), (18): Xaa is A or G
  MOD_RES (19), (20), (21), (22): Xaa is A or G or is absent
GXAEVVMDPIKGYXXXXXXXXXFYLINIPSLRAPVX

SEQ ID NO: 32089 - protein, 40 aa, Artificial Sequence
  GFR-binding peptide
  MOD_RES (2), (4), (38), (39): Xaa is C or S
  MOD_RES (16), (17), (18), (19), (20): Xaa is A or G
  MOD_RES (21), (22), (23), (24): Xaa is A or G or is absent
RXGXGEVVMEPIKGYXXXXXXXXXFYLMNIPSLETPVXXA

SEQ ID NO: 32090 - protein, 35 aa, Artificial Sequence
  GFR-binding peptide
  MOD_RES (33), (34): Xaa is C or S
  MOD_RES (11), (12), (13), (14), (15): Xaa is A or G
  MOD_RES (16), (17), (18), (19): Xaa is A or G or is absent
DVVMGPIKGYXXXXXXXXXFYLMNIPSMKTPTXXP

SEQ ID NO: 32091 - protein, 40 aa, Artificial Sequence
  GFR-binding peptide
  MOD_RES (2), (36), (37): Xaa is C or S
  MOD_RES (14), (15), (16), (17), (18): Xaa is A or G
  MOD_RES (19), (20), (21), (22): Xaa is A or G or is absent
GXAKVVMNPIKGYXXXXXXXXXFYLVNIPSLKTPAXXAKP

SEQ ID NO: 32092 - protein, 39 aa, Artificial Sequence
  GFR-binding peptide
  MOD_RES (2), (36), (37): Xaa is C or S
  MOD_RES (14), (15), (16), (17), (18): Xaa is A or G
  MOD_RES (19), (20), (21), (22): Xaa is A or G or is absent
GXAKVVMNPIKGYXXXXXXXXXFYLVNIPSLKTPAXXAK

SEQ ID NO: 32093 - protein, 37 aa, Artificial Sequence
  GFR-binding peptide
  MOD_RES (1), (33), (34): Xaa is C or S
XGEVVMEPIKGYVVKDYEDFYLMNIPSLETPVXXAKP

SEQ ID NO: 32094 - protein, 37 aa, Artificial Sequence
  GFR-binding peptide
  MOD_RES (1), (33), (34): Xaa is C or S
XESVAMGPIKGYYTVVGKDFYLINIPSLKTPVXXAKS

SEQ ID NO: 32095 - protein, 34 aa, Artificial Sequence
  GFR-binding peptide
  MOD_RES (1), (1): Xaa is C or S
  MOD_RES (13), (14), (15), (16), (17): Xaa is A or G
  MOD_RES (18), (19), (20), (21): Xaa is A or G or is absent
XRDVVMGPIKGYXXXXXXXXXFYLMNIPSMKTPT

SEQ ID NO: 32096 - protein, 40 aa, Artificial Sequence
  GFR-binding peptide
  MOD_RES (34), (35): Xaa is C or S
  MOD_RES (12), (13), (14), (15), (16): Xaa is A or G
  MOD_RES (17), (18), (19), (20): Xaa is A or G or is absent
GEVVMEPIKGYXXXXXXXXXFYLMNIPSLETPVXXAKPIS

SEQ ID NO: 32097 - protein, 32 aa, Artificial Sequence
  GFR-binding peptide
  MOD_RES (1), (1): Xaa is C or S
XESVAMGPIKGYYTVVGKDFYLINIPSLKTPV

SEQ ID NO: 32098 - protein, 33 aa, Artificial Sequence
  GFR-binding peptide
  MOD_RES (2), (2): Xaa is C or S
GXARVVMNPIKGYIVNSSDDFYLVNIPSLQTPA

SEQ ID NO: 32099 - protein, 40 aa, Artificial Sequence
  GFR-binding peptide
  MOD_RES (1), (35): Xaa is C or S
  MOD_RES (13), (14), (15), (16), (17): Xaa is A or G
  MOD_RES (18), (19), (20), (21): Xaa is A or G or is absent
XSRVVMNPIKGYXXXXXXXXXFYLVNIPSLKTPAXTPKTV

SEQ ID NO: 32100 - protein, 37 aa, Artificial Sequence
  GFR-binding peptide
  MOD_RES (2), (4): Xaa is C or S
  MOD_RES (16), (17), (18), (19), (20): Xaa is A or G
  MOD_RES (21), (22), (23), (24): Xaa is A or G or is absent
HXGXARVVMNPIKGYXXXXXXXXXFYLVNIPSLQTPA

SEQ ID NO: 32101 - protein, 42 aa, Artificial Sequence
  GFR-binding peptide
  MOD_RES (2), (36), (37): Xaa is C or S
  MOD_RES (14), (15), (16), (17), (18): Xaa is A or G
  MOD_RES (19), (20), (21), (22): Xaa is A or G or is absent
GXGEVVMEPIKGYXXXXXXXXXFYLMNIPSLETPVXXAKPIS

SEQ ID NO: 32102 - protein, 31 aa, Artificial Sequence
  GFR-binding peptide
  MOD_RES (31), (31): Xaa is C or S
EVVMEPIKGYVVKDYEDFYLMNIPSLETPVX

SEQ ID NO: 32103 - protein, 39 aa, Artificial Sequence
  GFR-binding peptide
  MOD_RES (2), (4), (38), (39): Xaa is C or S
  MOD_RES (16), (17), (18), (19), (20): Xaa is A or G
  MOD_RES (21), (22), (23), (24): Xaa is A or G or is absent
HXGXAKVVMNPIKGYXXXXXXXXXFYLVNIPSLKTPAXX

SEQ ID NO: 32104 - protein, 44 aa, Artificial Sequence
  GFR-binding peptide
  MOD_RES (2), (4), (38), (39): Xaa is C or S
  MOD_RES (16), (17), (18), (19), (20): Xaa is A or G
  MOD_RES (21), (22), (23), (24): Xaa is A or G or is absent
HXGXARVVMNPIKGYXXXXXXXXXFYLVNIPSLQTPAXXPKPVT

SEQ ID NO: 32105 - protein, 36 aa, Artificial Sequence
  GFR-binding peptide
  MOD_RES (1), (35): Xaa is C or S
  MOD_RES (13), (14), (15), (16), (17): Xaa is A or G
  MOD_RES (18), (19), (20), (21): Xaa is A or G or is absent
XSRVVMNPIKGYXXXXXXXXXFYLVNIPSLKTPAXT

SEQ ID NO: 32106 - protein, 37 aa, Artificial Sequence
  GFR-binding peptide
  MOD_RES (2), (4): Xaa is C or S
  MOD_RES (16), (17), (18), (19), (20): Xaa is A or G
  MOD_RES (21), (22), (23), (24): Xaa is A or G or is absent
RXGXGEVVMDPIKGYXXXXXXXXXFYLMNIPSLETPV

SEQ ID NO: 32107 - protein, 39 aa, Artificial Sequence
  GFR-binding peptide
  MOD_RES (2), (34), (35): Xaa is C or S
GXGEVVMDPIKGYVVKENEDFYLMNIPSLETPVXXAKPI

SEQ ID NO: 32108 - protein, 37 aa, Artificial Sequence
  GFR-binding peptide
  MOD_RES (1), (3), (37): Xaa is C or S
  MOD_RES (15), (16), (17), (18), (19): Xaa is A or G
  MOD_RES (20), (21), (22), (23): Xaa is A or G or is absent
XGXRDVVMGPIKGYXXXXXXXXXFYLMNIPSMKTPTX

SEQ ID NO: 32109 - protein, 44 aa, Artificial Sequence
  GFR-binding peptide
  MOD_RES (2), (4), (38), (39): Xaa is C or S
  MOD_RES (16), (17), (18), (19), (20): Xaa is A or G
  MOD_RES (21), (22), (23), (24): Xaa is A or G or is absent
RXGXGEVVMDPIKGYXXXXXXXXXFYLMNIPSLETPVXXAKPIK

SEQ ID NO: 32110 - protein, 33 aa, Artificial Sequence
  GFR-binding peptide
  MOD_RES (2), (2): Xaa is C or S
GXESVAMGPIKGYYTVVGKDFYLINIPSLKTPV

SEQ ID NO: 32111 - protein, 37 aa, Artificial Sequence
  GFR-binding peptide
  MOD_RES (1), (3): Xaa is C or S
  MOD_RES (16), (17), (18), (19), (20): Xaa is A or G
  MOD_RES (21), (22), (23), (24): Xaa is A or G or is absent
XGXEAVSMGEPIKGYXXXXXXXXXFYLVNIPSLKTPV

SEQ ID NO: 32112 - protein, 37 aa, Artificial Sequence
  GFR-binding peptide
  MOD_RES (33), (34): Xaa is C or S
  MOD_RES (11), (12), (13), (14), (15): Xaa is A or G
  MOD_RES (16), (17), (18), (19): Xaa is A or G or is absent
EEVIMPIKGYXXXXXXXXXFYLMNIPSTKVPAXXTSP

SEQ ID NO: 32113 - protein, 40 aa, Artificial Sequence
  GFR-binding peptide
  MOD_RES (34), (35): Xaa is C or S
  MOD_RES (12), (13), (14), (15), (16): Xaa is A or G
  MOD_RES (17), (18), (19), (20): Xaa is A or G or is absent
RDVVMGPIKGYXXXXXXXXXFYLMNIPSMKTPTXXPGASG

SEQ ID NO: 32114 - protein, 38 aa, Artificial Sequence
  GFR-binding peptide
  MOD_RES (1), (3), (37): Xaa is C or S
  MOD_RES (15), (16), (17), (18), (19): Xaa is A or G
  MOD_RES (20), (21), (22), (23): Xaa is A or G or is absent
XGXSRVVMNPIKGYXXXXXXXXXFYLVNIPSLKTPAXT

SEQ ID NO: 32115 - protein, 35 aa, Artificial Sequence
  GFR-binding peptide
  MOD_RES (32), (33): Xaa is C or S
SRVVMNPIKGYIVNSSDDFYLVNIPSLKTPAXXPK

SEQ ID NO: 32116 - protein, 38 aa, Artificial Sequence
  GFR-binding peptide
  MOD_RES (1), (3), (35): Xaa is C or S
XGXSRVVMNPIKGYIVNSSDDFYLVNIPSLKTPAXTPK

SEQ ID NO: 32117 - protein, 33 aa, Artificial Sequence
  GFR-binding peptide
  MOD_RES (32), (33): Xaa is C or S
SEVVMDPIKGYVVNNASDFYLINIPSLRTPVXX

SEQ ID NO: 32118 - protein, 38 aa, Artificial Sequence
  GFR-binding peptide
  MOD_RES (32), (33): Xaa is C or S
SEVVMDPIKGYVVNNASDFYLINIPSLRTPVXXTPPTS

SEQ ID NO: 32119 - protein, 40 aa, Artificial Sequence
  GFR-binding peptide
  MOD_RES (1), (35), (36): Xaa is C or S
  MOD_RES (13), (14), (15), (16), (17): Xaa is A or G
  MOD_RES (18), (19), (20), (21): Xaa is A or G or is absent
XAEVVMDPIKGYXXXXXXXXXFYLINIPSLRAPVXXSAPA

SEQ ID NO: 32120 - protein, 39 aa, Artificial Sequence
  GFR-binding peptide
  MOD_RES (1), (3), (35), (36): Xaa is C or S
XGXARVVMNPIKGYIVNSSDDFYLVNIPSLQTPAXXPKP

SEQ ID NO: 32121 - protein, 31 aa, Artificial Sequence
  GFR-binding peptide
  MOD_RES (31), (31): Xaa is C or S
EVVMDPIKGYVVNNAADFYLINIPSLRAPVX

SEQ ID NO: 32122 - protein, 39 aa, Artificial Sequence
  GFR-binding peptide
  MOD_RES (2), (4), (37), (38): Xaa is C or S
  MOD_RES (15), (16), (17), (18), (19): Xaa is A or G
  MOD_RES (20), (21), (22), (23): Xaa is A or G or is absent
LXGXEEVIMPIKGYXXXXXXXXXFYLMNIPSTKVPAXXT

SEQ ID NO: 32123 - protein, 38 aa, Artificial Sequence
  GFR-binding peptide
  MOD_RES (34), (35): Xaa is C or S
  MOD_RES (12), (13), (14), (15), (16): Xaa is A or G
  MOD_RES (17), (18), (19), (20): Xaa is A or G or is absent
AKVVMNPIKGYXXXXXXXXXFYLVNIPSLKTPAXXAKP

SEQ ID NO: 32124 - protein, 38 aa, Artificial Sequence
  GFR-binding peptide
  MOD_RES (1), (33), (34): Xaa is C or S
XAKVVMNPIKGYIVNNSSDFYLVNIPSLKTPAXXAKPV

SEQ ID NO: 32125 - protein, 37 aa, Artificial Sequence
  GFR-binding peptide
  MOD_RES (31), (32): Xaa is C or S
DVVMGPIKGYIIQQKDNFYLMNIPSMKTPTXXPGASG

SEQ ID NO: 32126 - protein, 34 aa, Artificial Sequence
  GFR-binding peptide
  MOD_RES (1), (1): Xaa is C or S
  MOD_RES (13), (14), (15), (16), (17): Xaa is A or G
  MOD_RES (18), (19), (20), (21): Xaa is A or G or is absent
XAEVVMDPIKGYXXXXXXXXXFYLINIPSLRAPV

SEQ ID NO: 32127 - protein, 38 aa, Artificial Sequence
  GFR-binding peptide
  MOD_RES (33), (34): Xaa is C or S
  MOD_RES (11), (12), (13), (14), (15): Xaa is A or G
  MOD_RES (16), (17), (18), (19): Xaa is A or G or is absent
EVVMDPIKGYXXXXXXXXXFYLINIPSLRTPVXXTPPT

SEQ ID NO: 32128 - protein, 38 aa, Artificial Sequence
  GFR-binding peptide
  MOD_RES (2), (4), (37), (38): Xaa is C or S
RXGXEAVSMGEPIKGYTPVGMDDFYLVNIPSLKTPVXX

SEQ ID NO: 32129 - protein, 37 aa, Artificial Sequence
  GFR-binding peptide
  MOD_RES (2), (34), (35): Xaa is C or S
GXSRVVMNPIKGYIVNSSDDFYLVNIPSLKTPAXXPK

SEQ ID NO: 32130 - protein, 40 aa, Artificial Sequence
  GFR-binding peptide
  MOD_RES (2), (36), (37): Xaa is C or S
  MOD_RES (14), (15), (16), (17), (18): Xaa is A or G
  MOD_RES (19), (20), (21), (22): Xaa is A or G or is absent
GXRDVVMGPIKGYXXXXXXXXXFYLMNIPSMKTPTXXPGA

SEQ ID NO: 32131 - protein, 30 aa, Artificial Sequence
  GFR-binding peptide
EVVMDPIKGYVVNNAADFYLINIPSLRAPV

SEQ ID NO: 32132 - protein, 41 aa, Artificial Sequence
  GFR-binding peptide
  MOD_RES (1), (3), (36), (37): Xaa is C or S
  MOD_RES (14), (15), (16), (17), (18): Xaa is A or G
  MOD_RES (19), (20), (21), (22): Xaa is A or G or is absent
XGXEEVIMPIKGYXXXXXXXXXFYLMNIPSTKVPAXXTSPV

SEQ ID NO: 32133 - protein, 31 aa, Artificial Sequence
  GFR-binding peptide
  MOD_RES (31), (31): Xaa is C or S
EVVMDPIKGYVVKENEDFYLMNIPSLETPVX

SEQ ID NO: 32134 - protein, 35 aa, Artificial Sequence
  GFR-binding peptide
  MOD_RES (33), (34): Xaa is C or S
  MOD_RES (11), (12), (13), (14), (15): Xaa is A or G
  MOD_RES (16), (17), (18), (19): Xaa is A or G or is absent
EVVMDPIKGYXXXXXXXXXFYLINIPSLRAPVXXS

SEQ ID NO: 32135 - protein, 38 aa, Artificial Sequence
  GFR-binding peptide
  MOD_RES (1), (3), (37), (38): Xaa is C or S
  MOD_RES (15), (16), (17), (18), (19): Xaa is A or G
  MOD_RES (20), (21), (22), (23): Xaa is A or G or is absent
XGXSRVVMNPIKGYXXXXXXXXXFYLVNIPSLKTPAXX

SEQ ID NO: 32136 - protein, 39 aa, Artificial Sequence
  GFR-binding peptide
  MOD_RES (2), (33), (34): Xaa is C or S
GXEEVIMPIKGYLLVRGNDFYLMNIPSTKVPAXXTSPVR

SEQ ID NO: 32137 - protein, 35 aa, Artificial Sequence
  GFR-binding peptide
  MOD_RES (1), (3), (35): Xaa is C or S
XGXSEVVMDPIKGYVVNNASDFYLINIPSLRTPVX

SEQ ID NO: 32138 - protein, 37 aa, Artificial Sequence
  GFR-binding peptide
  MOD_RES (1), (35), (36): Xaa is C or S
  MOD_RES (13), (14), (15), (16), (17): Xaa is A or G
  MOD_RES (18), (19), (20), (21): Xaa is A or G or is absent
XRDVVMGPIKGYXXXXXXXXXFYLMNIPSMKTPTXXP

SEQ ID NO: 32139 - protein, 33 aa, Artificial Sequence
  GFR-binding peptide
  MOD_RES (33), (33): Xaa is C or S
  MOD_RES (11), (12), (13), (14), (15): Xaa is A or G
  MOD_RES (16), (17), (18), (19): Xaa is A or G or is absent
EVVMDPIKGYXXXXXXXXXFYLMNIPSLETPVX

SEQ ID NO: 32140 - protein, 34 aa, Artificial Sequence
  GFR-binding peptide
  MOD_RES (31), (32): Xaa is C or S
EVVMDPIKGYVVNNAADFYLINIPSLRAPVXXSA

SEQ ID NO: 32141 - protein, 34 aa, Artificial Sequence
  GFR-binding peptide
  MOD_RES (31), (31): Xaa is C or S
RVVMNPIKGYIVNSSDDFYLVNIPSLKTPAXTPK

SEQ ID NO: 32142 - protein, 40 aa, Artificial Sequence
  GFR-binding peptide
  MOD_RES (34), (35): Xaa is C or S
  MOD_RES (12), (13), (14), (15), (16): Xaa is A or G
  MOD_RES (17), (18), (19), (20): Xaa is A or G or is absent
SEVVMDPIKGYXXXXXXXXXFYLINIPSLRTPVXXTPPTS

SEQ ID NO: 32143 - protein, 38 aa, Artificial Sequence
  GFR-binding peptide
  MOD_RES (2), (4), (38): Xaa is C or S
  MOD_RES (16), (17), (18), (19), (20): Xaa is A or G
  MOD_RES (21), (22), (23), (24): Xaa is A or G or is absent
HXGXARVVMNPIKGYXXXXXXXXXFYLVNIPSLQTPAX

SEQ ID NO: 32144 - protein, 35 aa, Artificial Sequence
  GFR-binding peptide
  MOD_RES (34), (34): Xaa is C or S
  MOD_RES (12), (13), (14), (15), (16): Xaa is A or G
  MOD_RES (17), (18), (19), (20): Xaa is A or G or is absent
SRVVMNPIKGYXXXXXXXXXFYLVNIPSLKTPAXT

SEQ ID NO: 32145 - protein, 36 aa, Artificial Sequence
  GFR-binding peptide
  MOD_RES (1), (33), (34): Xaa is C or S
XAKVVMNPIKGYIVNNSSDFYLVNIPSLKTPAXXAK

SEQ ID NO: 32146 - protein, 35 aa, Artificial Sequence
  GFR-binding peptide
  MOD_RES (33), (34): Xaa is C or S
  MOD_RES (11), (12), (13), (14), (15): Xaa is A or G
  MOD_RES (16), (17), (18), (19): Xaa is A or G or is absent
SVAMGPIKGYXXXXXXXXXFYLINIPSLKTPVXXA

SEQ ID NO: 32147 - protein, 32 aa, Artificial Sequence
  GFR-binding peptide
  MOD_RES (11), (12), (13), (14), (15): Xaa is A or G
  MOD_RES (16), (17), (18), (19): Xaa is A or G or is absent
DVVMGPIKGYXXXXXXXXXFYLMNIPSMKTPT

SEQ ID NO: 32148 - protein, 36 aa, Artificial Sequence
  GFR-binding peptide
  MOD_RES (32), (33): Xaa is C or S
GEVVMEPIKGYVVKDYEDFYLMNIPSLETPVXXAKP

SEQ ID NO: 32149 - protein, 36 aa, Artificial Sequence
  GFR-binding peptide
  MOD_RES (1), (33), (34): Xaa is C or S
XSRVVMNPIKGYIVNSSDDFYLVNIPSLKTPAXXPK

SEQ ID NO: 32150 - protein, 36 aa, Artificial Sequence
  GFR-binding peptide
  MOD_RES (34), (35): Xaa is C or S
  MOD_RES (12), (13), (14), (15), (16): Xaa is A or G
  MOD_RES (17), (18), (19), (20): Xaa is A or G or is absent
ARVVMNPIKGYXXXXXXXXXFYLVNIPSLQTPAXXP

SEQ ID NO: 32151 - protein, 40 aa, Artificial Sequence
  GFR-binding peptide
  MOD_RES (34), (35): Xaa is C or S
  MOD_RES (12), (13), (14), (15), (16): Xaa is A or G
  MOD_RES (17), (18), (19), (20): Xaa is A or G or is absent
SRVVMNPIKGYXXXXXXXXXFYLVNIPSLKTPAXXPKPVH

SEQ ID NO: 32152 - protein, 37 aa, Artificial Sequence
  GFR-binding peptide
  MOD_RES (31), (31): Xaa is C or S
RVVMNPIKGYIVNSSDDFYLVNIPSLKTPAXTPKTVH

SEQ ID NO: 32153 - protein, 38 aa, Artificial Sequence
  GFR-binding peptide
  MOD_RES (1), (33), (34): Xaa is C or S
XGEVVMDPIKGYVVKENEDFYLMNIPSLETPVXXAKPI

SEQ ID NO: 32154 - protein, 41 aa, Artificial Sequence
  GFR-binding peptide
  MOD_RES (1), (35), (36): Xaa is C or S
  MOD_RES (13), (14), (15), (16), (17): Xaa is A or G
  MOD_RES (18), (19), (20), (21): Xaa is A or G or is absent
XSRVVMNPIKGYXXXXXXXXXFYLVNIPSLKTPAXXPKPVH

SEQ ID NO: 32155 - protein, 42 aa, Artificial Sequence
  GFR-binding peptide
  MOD_RES (1), (3), (37), (38): Xaa is C or S
  MOD_RES (15), (16), (17), (18), (19): Xaa is A or G
  MOD_RES (20), (21), (22), (23): Xaa is A or G or is absent
XGXAKVVMNPIKGYXXXXXXXXXFYLVNIPSLKTPAXXAKPV

SEQ ID NO: 32156 - protein, 34 aa, Artificial Sequence
  GFR-binding peptide
  MOD_RES (33), (34): Xaa is C or S
  MOD_RES (11), (12), (13), (14), (15): Xaa is A or G
  MOD_RES (16), (17), (18), (19): Xaa is A or G or is absent
EVVMDPIKGYXXXXXXXXXFYLMNIPSLETPVXX

SEQ ID NO: 32157 - protein, 39 aa, Artificial Sequence
  GFR-binding peptide
  MOD_RES (33), (34): Xaa is C or S
  MOD_RES (11), (12), (13), (14), (15): Xaa is A or G
  MOD_RES (16), (17), (18), (19): Xaa is A or G or is absent
RVVMNPIKGYXXXXXXXXXFYLVNIPSLQTPAXXPKPVT

SEQ ID NO: 32158 - protein, 38 aa, Artificial Sequence
  GFR-binding peptide
  MOD_RES (2), (4), (36), (37): Xaa is C or S
HXGXARVVMNPIKGYIVNSSDDFYLVNIPSLQTPAXXP

SEQ ID NO: 32159 - protein, 41 aa, Artificial Sequence
  GFR-binding peptide
  MOD_RES (2), (37), (38): Xaa is C or S
  MOD_RES (15), (16), (17), (18), (19): Xaa is A or G
  MOD_RES (20), (21), (22), (23): Xaa is A or G or is absent
GXEAVSMGEPIKGYXXXXXXXXXFYLVNIPSLKTPVXXAKG

SEQ ID NO: 32160 - protein, 41 aa, Artificial Sequence
  GFR-binding peptide
  MOD_RES (2), (4), (36), (37): Xaa is C or S
HXGXARVVMNPIKGYIVNSSDDFYLVNIPSLQTPAXXPKPV

SEQ ID NO: 32161 - protein, 39 aa, Artificial Sequence
  GFR-binding peptide
  MOD_RES (1), (35), (36): Xaa is C or S
  MOD_RES (13), (14), (15), (16), (17): Xaa is A or G
  MOD_RES (18), (19), (20), (21): Xaa is A or G or is absent
XAKVVMNPIKGYXXXXXXXXXFYLVNIPSLKTPAXXAKP

SEQ ID NO: 32162 - protein, 41 aa, Artificial Sequence
  GFR-binding peptide
  MOD_RES (1), (35), (36): Xaa is C or S
  MOD_RES (13), (14), (15), (16), (17): Xaa is A or G
  MOD_RES (18), (19), (20), (21): Xaa is A or G or is absent
XARVVMNPIKGYXXXXXXXXXFYLVNIPSLQTPAXXPKPVT

SEQ ID NO: 32163 - protein, 35 aa, Artificial Sequence
  GFR-binding peptide
  MOD_RES (2), (34), (35): Xaa is C or S
GXGEVVMEPIKGYVVKDYEDFYLMNIPSLETPVXX

SEQ ID NO: 32164 - protein, 33 aa, Artificial Sequence
  GFR-binding peptide
  MOD_RES (1), (1): Xaa is C or S
XEAVSMGEPIKGYTPVGMDDFYLVNIPSLKTPV

SEQ ID NO: 32165 - protein, 40 aa, Artificial Sequence
  GFR-binding peptide
  MOD_RES (2), (4), (38), (39): Xaa is C or S
  MOD_RES (16), (17), (18), (19), (20): Xaa is A or G
  MOD_RES (21), (22), (23), (24): Xaa is A or G or is absent
RXGXESVAMGPIKGYXXXXXXXXXFYLINIPSLKTPVXXA

SEQ ID NO: 32166 - protein, 36 aa, Artificial Sequence
  GFR-binding peptide
  MOD_RES (31), (32): Xaa is C or S
DVVMGPIKGYIIQQKDNFYLMNIPSMKTPTXXPGAS

SEQ ID NO: 32167 - protein, 34 aa, Artificial Sequence
  GFR-binding peptide
  MOD_RES (1), (34): Xaa is C or S
XEAVSMGEPIKGYTPVGMDDFYLVNIPSLKTPVX

SEQ ID NO: 32168 - protein, 39 aa, Artificial Sequence
  GFR-binding peptide
  MOD_RES (1), (33), (34): Xaa is C or S
XESVAMGPIKGYYTVVGKDFYLINIPSLKTPVXXAKSAK

SEQ ID NO: 32169 - protein, 33 aa, Artificial Sequence
  GFR-binding peptide
  MOD_RES (2), (2): Xaa is C or S
GXGEVVMDPIKGYVVKENEDFYLMNIPSLETPV

SEQ ID NO: 32170 - protein, 34 aa, Artificial Sequence
  GFR-binding peptide
  MOD_RES (2), (34): Xaa is C or S
GXGEVVMEPIKGYVVKDYEDFYLMNIPSLETPVX

SEQ ID NO: 32171 - protein, 38 aa, Artificial Sequence
  GFR-binding peptide
  MOD_RES (1), (34), (35): Xaa is C or S
  MOD_RES (12), (13), (14), (15), (16): Xaa is A or G
  MOD_RES (17), (18), (19), (20): Xaa is A or G or is absent
XEEVIMPIKGYXXXXXXXXXFYLMNIPSTKVPAXXTSP

SEQ ID NO: 32172 - protein, 41 aa, Artificial Sequence
  GFR-binding peptide
  MOD_RES (1), (35), (36): Xaa is C or S
  MOD_RES (13), (14), (15), (16), (17): Xaa is A or G
  MOD_RES (18), (19), (20), (21): Xaa is A or G or is absent
XGEVVMEPIKGYXXXXXXXXXFYLMNIPSLETPVXXAKPIS

SEQ ID NO: 32173 - protein, 35 aa, Artificial Sequence
  GFR-binding peptide
  MOD_RES (2), (34), (35): Xaa is C or S
GXRDVVMGPIKGYIIQQKDNFYLMNIPSMKTPTXX

SEQ ID NO: 32174 - protein, 41 aa, Artificial Sequence
  GFR-binding peptide
  MOD_RES (2), (4), (38), (39): Xaa is C or S
  MOD_RES (16), (17), (18), (19), (20): Xaa is A or G
  MOD_RES (21), (22), (23), (24): Xaa is A or G or is absent
RXGXESVAMGPIKGYXXXXXXXXXFYLINIPSLKTPVXXAK

SEQ ID NO: 32175 - protein, 39 aa, Artificial Sequence
  GFR-binding peptide
  MOD_RES (33), (34): Xaa is C or S
  MOD_RES (11), (12), (13), (14), (15): Xaa is A or G
  MOD_RES (16), (17), (18), (19): Xaa is A or G or is absent
RVVMNPIKGYXXXXXXXXXFYLVNIPSLKTPAXXPKPVH

SEQ ID NO: 32176 - protein, 37 aa, Artificial Sequence
  GFR-binding peptide
  MOD_RES (1), (33), (34): Xaa is C or S
XSEVVMDPIKGYVVNNASDFYLINIPSLRTPVXXTPP

SEQ ID NO: 32177 - protein, 40 aa, Artificial Sequence
  GFR-binding peptide
  MOD_RES (2), (34), (35): Xaa is C or S
GXSRVVMNPIKGYIVNSSDDFYLVNIPSLKTPAXXPKPVH

SEQ ID NO: 32178 - protein, 34 aa, Artificial Sequence
  GFR-binding peptide
  MOD_RES (32), (33): Xaa is C or S
SRVVMNPIKGYIVNSSDDFYLVNIPSLKTPAXXP

SEQ ID NO: 32179 - protein, 40 aa, Artificial Sequence
  GFR-binding peptide
  MOD_RES (2), (36), (37): Xaa is C or S
  MOD_RES (14), (15), (16), (17), (18): Xaa is A or G
  MOD_RES (19), (20), (21), (22): Xaa is A or G or is absent
GXGEVVMDPIKGYXXXXXXXXXFYLMNIPSLETPVXXAKP

SEQ ID NO: 32180 - protein, 37 aa, Artificial Sequence
  GFR-binding peptide
  MOD_RES (32), (32): Xaa is C or S
SRVVMNPIKGYIVNSSDDFYLVNIPSLKTPAXTPKTV

SEQ ID NO: 32181 - protein, 36 aa, Artificial Sequence
  GFR-binding peptide
  MOD_RES (33), (33): Xaa is C or S
  MOD_RES (11), (12), (13), (14), (15): Xaa is A or G
  MOD_RES (16), (17), (18), (19): Xaa is A or G or is absent
RVVMNPIKGYXXXXXXXXXFYLVNIPSLKTPAXTPK

SEQ ID NO: 32182 - protein, 40 aa, Artificial Sequence
  GFR-binding peptide
  MOD_RES (2), (36), (37): Xaa is C or S
  MOD_RES (14), (15), (16), (17), (18): Xaa is A or G
  MOD_RES (19), (20), (21), (22): Xaa is A or G or is absent
GXESVAMGPIKGYXXXXXXXXXFYLINIPSLKTPVXXAKS

SEQ ID NO: 32183 - protein, 40 aa, Artificial Sequence
  GFR-binding peptide
  MOD_RES (1), (35), (36): Xaa is C or S
  MOD_RES (13), (14), (15), (16), (17): Xaa is A or G
  MOD_RES (18), (19), (20), (21): Xaa is A or G or is absent
XARVVMNPIKGYXXXXXXXXXFYLVNIPSLQTPAXXPKPV

SEQ ID NO: 32184 - protein, 38 aa, Artificial Sequence
  GFR-binding peptide
  MOD_RES (2), (34), (35): Xaa is C or S
GXSEVVMDPIKGYVVNNASDFYLINIPSLRTPVXXTPP

SEQ ID NO: 32185 - protein, 31 aa, Artificial Sequence
  GFR-binding peptide
ARVVMNPIKGYIVNSSDDFYLVNIPSLQTPA

SEQ ID NO: 32186 - protein, 39 aa, Artificial Sequence
  GFR-binding peptide
  MOD_RES (1), (33), (34): Xaa is C or S
XSRVVMNPIKGYIVNSSDDFYLVNIPSLKTPAXXPKPVY

SEQ ID NO: 32187 - protein, 38 aa, Artificial Sequence
  GFR-binding peptide
  MOD_RES (2), (4), (38): Xaa is C or S
  MOD_RES (16), (17), (18), (19), (20): Xaa is A or G
  MOD_RES (21), (22), (23), (24): Xaa is A or G or is absent
RXGXGEVVMDPIKGYXXXXXXXXXFYLMNIPSLETPVX

SEQ ID NO: 32188 - protein, 39 aa, Artificial Sequence
  GFR-binding peptide
  MOD_RES (2), (4), (36), (37): Xaa is C or S
RXGXSEVVMDPIKGYVVNNASDFYLINIPSLRTPVXXTP

SEQ ID NO: 32189 - protein, 37 aa, Artificial Sequence
  GFR-binding peptide
  MOD_RES (2), (37): Xaa is C or S
  MOD_RES (15), (16), (17), (18), (19): Xaa is A or G
  MOD_RES (20), (21), (22), (23): Xaa is A or G or is absent
GXEAVSMGEPIKGYXXXXXXXXXFYLVNIPSLKTPVX

SEQ ID NO: 32190 - protein, 41 aa, Artificial Sequence
  GFR-binding peptide
  MOD_RES (2), (36), (37): Xaa is C or S
  MOD_RES (14), (15), (16), (17), (18): Xaa is A or G
  MOD_RES (19), (20), (21), (22): Xaa is A or G or is absent
GXSRVVMNPIKGYXXXXXXXXXFYLVNIPSLKTPAXXPKPV

SEQ ID NO: 32191 - protein, 42 aa, Artificial Sequence
  GFR-binding peptide
  MOD_RES (1), (3), (37), (38): Xaa is C or S
  MOD_RES (15), (16), (17), (18), (19): Xaa is A or G
  MOD_RES (20), (21), (22), (23): Xaa is A or G or is absent
XGXRDVVMGPIKGYXXXXXXXXXFYLMNIPSMKTPTXXPGAS

SEQ ID NO: 32192 - protein, 31 aa, Artificial Sequence
  GFR-binding peptide
  MOD_RES (31), (31): Xaa is C or S
DVVMGPIKGYIIQQKDNFYLMNIPSMKTPTX

SEQ ID NO: 32193 - protein, 36 aa, Artificial Sequence
  GFR-binding peptide
  MOD_RES (33), (34): Xaa is C or S
  MOD_RES (11), (12), (13), (14), (15): Xaa is A or G
  MOD_RES (16), (17), (18), (19): Xaa is A or G or is absent
RVVMNPIKGYXXXXXXXXXFYLVNIPSLKTPAXXPK

SEQ ID NO: 32194 - protein, 41 aa, Artificial Sequence
  GFR-binding peptide
  MOD_RES (1), (35), (36): Xaa is C or S
  MOD_RES (13), (14), (15), (16), (17): Xaa is A or G
  MOD_RES (18), (19), (20), (21): Xaa is A or G or is absent
XSEVVMDPIKGYXXXXXXXXXFYLINIPSLRTPVXXTPPTS

SEQ ID NO: 32195 - protein, 39 aa, Artificial Sequence
  GFR-binding peptide
  MOD_RES (2), (4), (38), (39): Xaa is C or S
  MOD_RES (16), (17), (18), (19), (20): Xaa is A or G
  MOD_RES (21), (22), (23), (24): Xaa is A or G or is absent
RXGXESVAMGPIKGYXXXXXXXXXFYLINIPSLKTPVXX

SEQ ID NO: 32196 - protein, 41 aa, Artificial Sequence
  GFR-binding peptide
  MOD_RES (1), (35), (36): Xaa is C or S
  MOD_RES (13), (14), (15), (16), (17): Xaa is A or G
  MOD_RES (18), (19), (20), (21): Xaa is A or G or is absent
XAKVVMNPIKGYXXXXXXXXXFYLVNIPSLKTPAXXAKPVA

SEQ ID NO: 32197 - protein, 33 aa, Artificial Sequence
  GFR-binding peptide
  MOD_RES (31), (32): Xaa is C or S
DVVMGPIKGYIIQQKDNFYLMNIPSMKTPTXXP

SEQ ID NO: 32198 - protein, 30 aa, Artificial Sequence
  GFR-binding peptide
RVVMNPIKGYIVNSSDDFYLVNIPSLKTPA

SEQ ID NO: 32199 - protein, 33 aa, Artificial Sequence
  GFR-binding peptide
  MOD_RES (33), (33): Xaa is C or S
  MOD_RES (11), (12), (13), (14), (15): Xaa is A or G
  MOD_RES (16), (17), (18), (19): Xaa is A or G or is absent
DVVMGPIKGYXXXXXXXXXFYLMNIPSMKTPTX

SEQ ID NO: 32200 - protein, 34 aa, Artificial Sequence
  GFR-binding peptide
  MOD_RES (1), (1): Xaa is C or S
  MOD_RES (13), (14), (15), (16), (17): Xaa is A or G
  MOD_RES (18), (19), (20), (21): Xaa is A or G or is absent
XARVVMNPIKGYXXXXXXXXXFYLVNIPSLQTPA

SEQ ID NO: 32201 - protein, 42 aa, Artificial Sequence
  GFR-binding peptide
  MOD_RES (2), (36), (37): Xaa is C or S
  MOD_RES (14), (15), (16), (17), (18): Xaa is A or G
  MOD_RES (19), (20), (21), (22): Xaa is A or G or is absent
GXSEVVMDPIKGYXXXXXXXXXFYLINIPSLRTPVXXTPPTS

SEQ ID NO: 32202 - protein, 40 aa, Artificial Sequence
  GFR-binding peptide
  MOD_RES (2), (37), (38): Xaa is C or S
  MOD_RES (15), (16), (17), (18), (19): Xaa is A or G
  MOD_RES (20), (21), (22), (23): Xaa is A or G or is absent
GXEAVSMGEPIKGYXXXXXXXXXFYLVNIPSLKTPVXXAK

SEQ ID NO: 32203 - protein, 36 aa, Artificial Sequence
  GFR-binding peptide
  MOD_RES (31), (32): Xaa is C or S
EVVMDPIKGYVVNNAADFYLINIPSLRAPVXXSAPA

SEQ ID NO: 32204 - protein, 32 aa, Artificial Sequence
  GFR-binding peptide
  MOD_RES (31), (32): Xaa is C or S
EVVMEPIKGYVVKDYEDFYLMNIPSLETPVXX

SEQ ID NO: 32205 - protein, 36 aa, Artificial Sequence
  GFR-binding peptide
  MOD_RES (1), (32), (33): Xaa is C or S
XEEVIMPIKGYLLVRGNDFYLMNIPSTKVPAXXTSP

SEQ ID NO: 32206 - protein, 35 aa, Artificial Sequence
  GFR-binding peptide
  MOD_RES (1), (33), (34): Xaa is C or S
XGEVVMEPIKGYVVKDYEDFYLMNIPSLETPVXXA

SEQ ID NO: 32207 - protein, 36 aa, Artificial Sequence
  GFR-binding peptide
  MOD_RES (33), (34): Xaa is C or S
  MOD_RES (11), (12), (13), (14), (15): Xaa is A or G
  MOD_RES (16), (17), (18), (19): Xaa is A or G or is absent
EVVMEPIKGYXXXXXXXXXFYLMNIPSLETPVXXAK

SEQ ID NO: 32208 - protein, 31 aa, Artificial Sequence
  GFR-binding peptide
  MOD_RES (31), (31): Xaa is C or S
KVVMNPIKGYIVNNSSDFYLVNIPSLKTPAX

SEQ ID NO: 32209 - protein, 38 aa, Artificial Sequence
  GFR-binding peptide
  MOD_RES (1), (3), (37), (38): Xaa is C or S
  MOD_RES (15), (16), (17), (18), (19): Xaa is A or G
  MOD_RES (20), (21), (22), (23): Xaa is A or G or is absent
XGXESVAMGPIKGYXXXXXXXXXFYLINIPSLKTPVXX

SEQ ID NO: 32210 - protein, 33 aa, Artificial Sequence
  GFR-binding peptide
  MOD_RES (32), (33): Xaa is C or S
RDVVMGPIKGYIIQQKDNFYLMNIPSMKTPTXX

SEQ ID NO: 32211 - protein, 33 aa, Artificial Sequence
  GFR-binding peptide
  MOD_RES (1), (33): Xaa is C or S
XSRVVMNPIKGYIVNSSDDFYLVNIPSLKTPAX

SEQ ID NO: 32212 - protein, 34 aa, Artificial Sequence
  GFR-binding peptide
  MOD_RES (34), (34): Xaa is C or S
  MOD_RES (12), (13), (14), (15), (16): Xaa is A or G
  MOD_RES (17), (18), (19), (20): Xaa is A or G or is absent
ESVAMGPIKGYXXXXXXXXXFYLINIPSLKTPVX

SEQ ID NO: 32213 - protein, 40 aa, Artificial Sequence
  GFR-binding peptide
  MOD_RES (2), (4), (38), (39): Xaa is C or S
  MOD_RES (16), (17), (18), (19), (20): Xaa is A or G
  MOD_RES (21), (22), (23), (24): Xaa is A or G or is absent
HXGXAKVVMNPIKGYXXXXXXXXXFYLVNIPSLKTPAXXA

SEQ ID NO: 32214 - protein, 40 aa, Artificial Sequence
  GFR-binding peptide
  MOD_RES (2), (4), (36), (37): Xaa is C or S
RXGXESVAMGPIKGYYTVVGKDFYLINIPSLKTPVXXAKS

SEQ ID NO: 32215 - protein, 34 aa, Artificial Sequence
  GFR-binding peptide
  MOD_RES (31), (32): Xaa is C or S
RVVMNPIKGYIVNSSDDFYLVNIPSLQTPAXXPK

SEQ ID NO: 32216 - protein, 42 aa, Artificial Sequence
  GFR-binding peptide
  MOD_RES (2), (36), (37): Xaa is C or S
  MOD_RES (14), (15), (16), (17), (18): Xaa is A or G
  MOD_RES (19), (20), (21), (22): Xaa is A or G or is absent
GXESVAMGPIKGYXXXXXXXXXFYLINIPSLKTPVXXAKSAK

SEQ ID NO: 32217 - protein, 38 aa, Artificial Sequence
  GFR-binding peptide
  MOD_RES (1), (3), (37), (38): Xaa is C or S
  MOD_RES (15), (16), (17), (18), (19): Xaa is A or G
  MOD_RES (20), (21), (22), (23): Xaa is A or G or is absent
XGXGEVVMDPIKGYXXXXXXXXXFYLMNIPSLETPVXX

SEQ ID NO: 32218 - protein, 36 aa, Artificial Sequence
  GFR-binding peptide
  MOD_RES (1), (33), (34): Xaa is C or S
XESVAMGPIKGYYTVVGKDFYLINIPSLKTPVXXAK

SEQ ID NO: 32219 - protein, 39 aa, Artificial Sequence
  GFR-binding peptide
  MOD_RES (1), (3), (37), (38): Xaa is C or S
  MOD_RES (15), (16), (17), (18), (19): Xaa is A or G
  MOD_RES (20), (21), (22), (23): Xaa is A or G or is absent
XGXARVVMNPIKGYXXXXXXXXXFYLVNIPSLQTPAXXP

SEQ ID NO: 32220 - protein, 35 aa, Artificial Sequence
  GFR-binding peptide
  MOD_RES (2), (4): Xaa is C or S
HXGXAKVVMNPIKGYIVNNSSDFYLVNIPSLKTPA

SEQ ID NO: 32221 - protein, 38 aa, Artificial Sequence
  GFR-binding peptide
  MOD_RES (1), (3), (35), (36): Xaa is C or S
XGXARVVMNPIKGYIVNSSDDFYLVNIPSLQTPAXXPK

SEQ ID NO: 32222 - protein, 37 aa, Artificial Sequence
  GFR-binding peptide
  MOD_RES (31), (32): Xaa is C or S
EVVMDPIKGYVVKENEDFYLMNIPSLETPVXXAKPIK

SEQ ID NO: 32223 - protein, 38 aa, Artificial Sequence
  GFR-binding peptide
  MOD_RES (2), (4), (36), (37): Xaa is C or S
RXGXGEVVMEPIKGYVVKDYEDFYLMNIPSLETPVXXA

SEQ ID NO: 32224 - protein, 39 aa, Artificial Sequence
  GFR-binding peptide
  MOD_RES (33), (34): Xaa is C or S
  MOD_RES (11), (12), (13), (14), (15): Xaa is A or G
  MOD_RES (16), (17), (18), (19): Xaa is A or G or is absent
EVVMDPIKGYXXXXXXXXXFYLINIPSLRTPVXXTPPTS

SEQ ID NO: 32225 - protein, 38 aa, Artificial Sequence
  GFR-binding peptide
  MOD_RES (2), (4), (36), (37): Xaa is C or S
SXGXRDVVMGPIKGYIIQQKDNFYLMNIPSMKTPTXXP

SEQ ID NO: 32226 - protein, 39 aa, Artificial Sequence
  GFR-binding peptide
  MOD_RES (2), (4), (36): Xaa is C or S
HXGXSRVVMNPIKGYIVNSSDDFYLVNIPSLKTPAXTPK

SEQ ID NO: 32227 - protein, 40 aa, Artificial Sequence
  GFR-binding peptide
  MOD_RES (2), (36), (37): Xaa is C or S
  MOD_RES (14), (15), (16), (17), (18): Xaa is A or G
  MOD_RES (19), (20), (21), (22): Xaa is A or G or is absent
GXSRVVMNPIKGYXXXXXXXXXFYLVNIPSLKTPAXXPKP

SEQ ID NO: 32228 - protein, 38 aa, Artificial Sequence
  GFR-binding peptide
  MOD_RES (33), (34): Xaa is C or S
  MOD_RES (11), (12), (13), (14), (15): Xaa is A or G
  MOD_RES (16), (17), (18), (19): Xaa is A or G or is absent
EEVIMPIKGYXXXXXXXXXFYLMNIPSTKVPAXXTSPV

SEQ ID NO: 32229 - protein, 35 aa, Artificial Sequence
  GFR-binding peptide
  MOD_RES (2), (2): Xaa is C or S
  MOD_RES (14), (15), (16), (17), (18): Xaa is A or G
  MOD_RES (19), (20), (21), (22): Xaa is A or G or is absent
GXAKVVMNPIKGYXXXXXXXXXFYLVNIPSLKTPA

SEQ ID NO: 32230 - protein, 41 aa, Artificial Sequence
  GFR-binding peptide
  MOD_RES (2), (35), (36): Xaa is C or S
  MOD_RES (13), (14), (15), (16), (17): Xaa is A or G
  MOD_RES (18), (19), (20), (21): Xaa is A or G or is absent
GXEEVIMPIKGYXXXXXXXXXFYLMNIPSTKVPAXXTSPVR

SEQ ID NO: 32231 - protein, 43 aa, Artificial Sequence
  GFR-binding peptide
  MOD_RES (2), (4), (38), (39): Xaa is C or S
  MOD_RES (16), (17), (18), (19), (20): Xaa is A or G
  MOD_RES (21), (22), (23), (24): Xaa is A or G or is absent
HXGXAKVVMNPIKGYXXXXXXXXXFYLVNIPSLKTPAXXAKPV

SEQ ID NO: 32232 - protein, 34 aa, Artificial Sequence
  GFR-binding peptide
  MOD_RES (33), (34): Xaa is C or S
  MOD_RES (11), (12), (13), (14), (15): Xaa is A or G
  MOD_RES (16), (17), (18), (19): Xaa is A or G or is absent
EVVMEPIKGYXXXXXXXXXFYLMNIPSLETPVXX

SEQ ID NO: 32233 - protein, 42 aa, Artificial Sequence
  GFR-binding peptide
  MOD_RES (2), (36), (37): Xaa is C or S
  MOD_RES (14), (15), (16), (17), (18): Xaa is A or G
  MOD_RES (19), (20), (21), (22): Xaa is A or G or is absent
GXAEVVMDPIKGYXXXXXXXXXFYLINIPSLRAPVXXSAPAA

SEQ ID NO: 32234 - protein, 39 aa, Artificial Sequence
  GFR-binding peptide
  MOD_RES (2), (34), (35): Xaa is C or S
GXSRVVMNPIKGYIVNSSDDFYLVNIPSLKTPAXXPKPV

SEQ ID NO: 32235 - protein, 39 aa, Artificial Sequence
  GFR-binding peptide
  MOD_RES (34), (35): Xaa is C or S
  MOD_RES (12), (13), (14), (15), (16): Xaa is A or G
  MOD_RES (17), (18), (19), (20): Xaa is A or G or is absent
AKVVMNPIKGYXXXXXXXXXFYLVNIPSLKTPAXXAKPV

SEQ ID NO: 32236 - protein, 39 aa, Artificial Sequence
  GFR-binding peptide
  MOD_RES (1), (33), (34): Xaa is C or S
XARVVMNPIKGYIVNSSDDFYLVNIPSLQTPAXXPKPVT

SEQ ID NO: 32237 - protein, 38 aa, Artificial Sequence
  GFR-binding peptide
  MOD_RES (1), (35), (36): Xaa is C or S
  MOD_RES (13), (14), (15), (16), (17): Xaa is A or G
  MOD_RES (18), (19), (20), (21): Xaa is A or G or is absent
XAKVVMNPIKGYXXXXXXXXXFYLVNIPSLKTPAXXAK

SEQ ID NO: 32238 - protein, 40 aa, Artificial Sequence
  GFR-binding peptide
  MOD_RES (1), (35), (36): Xaa is C or S
  MOD_RES (13), (14), (15), (16), (17): Xaa is A or G
  MOD_RES (18), (19), (20), (21): Xaa is A or G or is absent
XGEVVMDPIKGYXXXXXXXXXFYLMNIPSLETPVXXAKPI

SEQ ID NO: 32239 - protein, 40 aa, Artificial Sequence
  GFR-binding peptide
  MOD_RES (2), (4), (37), (38): Xaa is C or S
RXGXEAVSMGEPIKGYTPVGMDDFYLVNIPSLKTPVXXAK

SEQ ID NO: 32240 - protein, 36 aa, Artificial Sequence
  GFR-binding peptide
  MOD_RES (1), (35), (36): Xaa is C or S
  MOD_RES (13), (14), (15), (16), (17): Xaa is A or G
  MOD_RES (18), (19), (20), (21): Xaa is A or G or is absent
XSEVVMDPIKGYXXXXXXXXXFYLINIPSLRTPVXX

SEQ ID NO: 32241 - protein, 38 aa, Artificial Sequence
  GFR-binding peptide
  MOD_RES (1), (3), (37), (38): Xaa is C or S
  MOD_RES (15), (16), (17), (18), (19): Xaa is A or G
  MOD_RES (20), (21), (22), (23): Xaa is A or G or is absent
XGXAEVVMDPIKGYXXXXXXXXXFYLINIPSLRAPVXX

SEQ ID NO: 32242 - protein, 37 aa, Artificial Sequence
  GFR-binding peptide
  MOD_RES (32), (33): Xaa is C or S
ESVAMGPIKGYYTVVGKDFYLINIPSLKTPVXXAKSA

SEQ ID NO: 32243 - protein, 40 aa, Artificial Sequence
  GFR-binding peptide
  MOD_RES (2), (35), (36): Xaa is C or S
  MOD_RES (13), (14), (15), (16), (17): Xaa is A or G
  MOD_RES (18), (19), (20), (21): Xaa is A or G or is absent
GXEEVIMPIKGYXXXXXXXXXFYLMNIPSTKVPAXXTSPV

SEQ ID NO: 32244 - protein, 37 aa, Artificial Sequence
  GFR-binding peptide
  MOD_RES (31), (32): Xaa is C or S
EEVIMPIKGYLLVRGNDFYLMNIPSTKVPAXXTSPVR

SEQ ID NO: 32245 - protein, 35 aa, Artificial Sequence
  GFR-binding peptide
  MOD_RES (1), (35): Xaa is C or S
  MOD_RES (13), (14), (15), (16), (17): Xaa is A or G
  MOD_RES (18), (19), (20), (21): Xaa is A or G or is absent
XRDVVMGPIKGYXXXXXXXXXFYLMNIPSMKTPTX

SEQ ID NO: 32246 - protein, 42 aa, Artificial Sequence
  GFR-binding peptide
  MOD_RES (2), (4), (38), (39): Xaa is C or S
  MOD_RES (16), (17), (18), (19), (20): Xaa is A or G
  MOD_RES (21), (22), (23), (24): Xaa is A or G or is absent
RXGXAEVVMDPIKGYXXXXXXXXXFYLINIPSLRAPVXXSAP

SEQ ID NO: 32247 - protein, 36 aa, Artificial Sequence
  GFR-binding peptide
  MOD_RES (34), (35): Xaa is C or S
  MOD_RES (12), (13), (14), (15), (16): Xaa is A or G
  MOD_RES (17), (18), (19), (20): Xaa is A or G or is absent
GEVVMDPIKGYXXXXXXXXXFYLMNIPSLETPVXXA

SEQ ID NO: 32248 - protein, 34 aa, Artificial Sequence
  GFR-binding peptide
  MOD_RES (31), (32): Xaa is C or S
EVVMEPIKGYVVKDYEDFYLMNIPSLETPVXXAK

SEQ ID NO: 32249 - protein, 31 aa, Artificial Sequence
  GFR-binding peptide
RDVVMGPIKGYIIQQKDNFYLMNIPSMKTPT

SEQ ID NO: 32250 - protein, 33 aa, Artificial Sequence
  GFR-binding peptide
  MOD_RES (32), (33): Xaa is C or S
ARVVMNPIKGYIVNSSDDFYLVNIPSLQTPAXX

SEQ ID NO: 32251 - protein, 37 aa, Artificial Sequence
  GFR-binding peptide
  MOD_RES (2), (4), (36), (37): Xaa is C or S
HXGXAKVVMNPIKGYIVNNSSDFYLVNIPSLKTPAXX

SEQ ID NO: 32252 - protein, 32 aa, Artificial Sequence
  GFR-binding peptide
  MOD_RES (31), (32): Xaa is C or S
KVVMNPIKGYIVNNSSDFYLVNIPSLKTPAXX

SEQ ID NO: 32253 - protein, 35 aa, Artificial Sequence
  GFR-binding peptide
  MOD_RES (2), (4), (35): Xaa is C or S
LXGXEEVIMPIKGYLLVRGNDFYLMNIPSTKVPAX

SEQ ID NO: 32254 - protein, 34 aa, Artificial Sequence
  GFR-binding peptide
  MOD_RES (34), (34): Xaa is C or S
  MOD_RES (12), (13), (14), (15), (16): Xaa is A or G
  MOD_RES (17), (18), (19), (20): Xaa is A or G or is absent
AEVVMDPIKGYXXXXXXXXXFYLINIPSLRAPVX

SEQ ID NO: 32255 - protein, 38 aa, Artificial Sequence
  GFR-binding peptide
  MOD_RES (1), (34), (35): Xaa is C or S
XEAVSMGEPIKGYTPVGMDDFYLVNIPSLKTPVXXAKG

SEQ ID NO: 32256 - protein, 33 aa, Artificial Sequence
  GFR-binding peptide
  MOD_RES (31), (31): Xaa is C or S
RVVMNPIKGYIVNSSDDFYLVNIPSLKTPAXTP

SEQ ID NO: 32257 - protein, 38 aa, Artificial Sequence
  GFR-binding peptide
  MOD_RES (2), (36), (37): Xaa is C or S
  MOD_RES (14), (15), (16), (17), (18): Xaa is A or G
  MOD_RES (19), (20), (21), (22): Xaa is A or G or is absent
GXARVVMNPIKGYXXXXXXXXXFYLVNIPSLQTPAXXP

SEQ ID NO: 32258 - protein, 44 aa, Artificial Sequence
  GFR-binding peptide
  MOD_RES (2), (4), (39), (40): Xaa is C or S
  MOD_RES (17), (18), (19), (20), (21): Xaa is A or G
  MOD_RES (22), (23), (24), (25): Xaa is A or G or is absent
RXGXEAVSMGEPIKGYXXXXXXXXXFYLVNIPSLKTPVXXAKGV

SEQ ID NO: 32259 - protein, 35 aa, Artificial Sequence
  GFR-binding peptide
  MOD_RES (1), (3), (35): Xaa is C or S
XGXARVVMNPIKGYIVNSSDDFYLVNIPSLQTPAX

SEQ ID NO: 32260 - protein, 39 aa, Artificial Sequence
  GFR-binding peptide
  MOD_RES (2), (34), (35): Xaa is C or S
GXARVVMNPIKGYIVNSSDDFYLVNIPSLQTPAXXPKPV

SEQ ID NO: 32261 - protein, 42 aa, Artificial Sequence
  GFR-binding peptide
  MOD_RES (2), (4), (36), (37): Xaa is C or S
HXGXAKVVMNPIKGYIVNNSSDFYLVNIPSLKTPAXXAKPVA

SEQ ID NO: 32262 - protein, 42 aa, Artificial Sequence
  GFR-binding peptide
  MOD_RES (2), (36), (37): Xaa is C or S
  MOD_RES (14), (15), (16), (17), (18): Xaa is A or G
  MOD_RES (19), (20), (21), (22): Xaa is A or G or is absent
GXAKVVMNPIKGYXXXXXXXXXFYLVNIPSLKTPAXXAKPVA

SEQ ID NO: 32263 - protein, 32 aa, Artificial Sequence
  GFR-binding peptide
  MOD_RES (31), (32): Xaa is C or S
DVVMGPIKGYIIQQKDNFYLMNIPSMKTPTXX

SEQ ID NO: 32264 - protein, 39 aa, Artificial Sequence
  GFR-binding peptide
  MOD_RES (1), (36), (37): Xaa is C or S
  MOD_RES (14), (15), (16), (17), (18): Xaa is A or G
  MOD_RES (19), (20), (21), (22): Xaa is A or G or is absent
XEAVSMGEPIKGYXXXXXXXXXFYLVNIPSLKTPVXXAK

SEQ ID NO: 32265 - protein, 36 aa, Artificial Sequence
  GFR-binding peptide
  MOD_RES (1), (3): Xaa is C or S
  MOD_RES (15), (16), (17), (18), (19): Xaa is A or G
  MOD_RES (20), (21), (22), (23): Xaa is A or G or is absent
XGXARVVMNPIKGYXXXXXXXXXFYLVNIPSLQTPA

SEQ ID NO: 32266 - protein, 35 aa, Artificial Sequence
  GFR-binding peptide
  MOD_RES (1), (33): Xaa is C or S
XSRVVMNPIKGYIVNSSDDFYLVNIPSLKTPAXTP

SEQ ID NO: 32267 - protein, 34 aa, Artificial Sequence
  GFR-binding peptide
  MOD_RES (34), (34): Xaa is C or S
  MOD_RES (12), (13), (14), (15), (16): Xaa is A or G
  MOD_RES (17), (18), (19), (20): Xaa is A or G or is absent
RDVVMGPIKGYXXXXXXXXXFYLMNIPSMKTPTX

SEQ ID NO: 32268 - protein, 38 aa, Artificial Sequence
  GFR-binding peptide
  MOD_RES (2), (36), (37): Xaa is C or S
  MOD_RES (14), (15), (16), (17), (18): Xaa is A or G
  MOD_RES (19), (20), (21), (22): Xaa is A or G or is absent
GXESVAMGPIKGYXXXXXXXXXFYLINIPSLKTPVXXA

SEQ ID NO: 32269 - protein, 34 aa, Artificial Sequence
  GFR-binding peptide
  MOD_RES (34), (34): Xaa is C or S
  MOD_RES (12), (13), (14), (15), (16): Xaa is A or G
  MOD_RES (17), (18), (19), (20): Xaa is A or G or is absent
GEVVMEPIKGYXXXXXXXXXFYLMNIPSLETPVX

SEQ ID NO: 32270 - protein, 40 aa, Artificial Sequence
  GFR-binding peptide
  MOD_RES (2), (34), (35): Xaa is C or S
GXRDVVMGPIKGYIIQQKDNFYLMNIPSMKTPTXXPGASG

SEQ ID NO: 32271 - protein, 40 aa, Artificial Sequence
  GFR-binding peptide
  MOD_RES (34), (35): Xaa is C or S
  MOD_RES (12), (13), (14), (15), (16): Xaa is A or G
  MOD_RES (17), (18), (19), (20): Xaa is A or G or is absent
ESVAMGPIKGYXXXXXXXXXFYLINIPSLKTPVXXAKSAK

SEQ ID NO: 32272 - protein, 39 aa, Artificial Sequence
  GFR-binding peptide
  MOD_RES (1), (35), (36): Xaa is C or S
  MOD_RES (13), (14), (15), (16), (17): Xaa is A or G
  MOD_RES (18), (19), (20), (21): Xaa is A or G or is absent
XESVAMGPIKGYXXXXXXXXXFYLINIPSLKTPVXXAKS

SEQ ID NO: 32273 - protein, 41 aa, Artificial Sequence
  GFR-binding peptide
  MOD_RES (2), (4), (37), (38): Xaa is C or S
  MOD_RES (15), (16), (17), (18), (19): Xaa is A or G
  MOD_RES (20), (21), (22), (23): Xaa is A or G or is absent
LXGXEEVIMPIKGYXXXXXXXXXFYLMNIPSTKVPAXXTSP

SEQ ID NO: 32274 - protein, 35 aa, Artificial Sequence
  GFR-binding peptide
  MOD_RES (33), (34): Xaa is C or S
  MOD_RES (11), (12), (13), (14), (15): Xaa is A or G
  MOD_RES (16), (17), (18), (19): Xaa is A or G or is absent
EVVMDPIKGYXXXXXXXXXFYLINIPSLRTPVXXT

SEQ ID NO: 32275 - protein, 31 aa, Artificial Sequence
  GFR-binding peptide
SRVVMNPIKGYIVNSSDDFYLVNIPSLKTPA

SEQ ID NO: 32276 - protein, 39 aa, Artificial Sequence
  GFR-binding peptide
  MOD_RES (33), (34): Xaa is C or S
  MOD_RES (11), (12), (13), (14), (15): Xaa is A or G
  MOD_RES (16), (17), (18), (19): Xaa is A or G or is absent
EVVMDPIKGYXXXXXXXXXFYLMNIPSLETPVXXAKPIK

SEQ ID NO: 32277 - protein, 42 aa, Artificial Sequence
  GFR-binding peptide
  MOD_RES (1), (3), (37), (38): Xaa is C or S
  MOD_RES (15), (16), (17), (18), (19): Xaa is A or G
  MOD_RES (20), (21), (22), (23): Xaa is A or G or is absent
XGXSRVVMNPIKGYXXXXXXXXXFYLVNIPSLKTPAXXPKPV

SEQ ID NO: 32278 - protein, 34 aa, Artificial Sequence
  GFR-binding peptide
  MOD_RES (33), (34): Xaa is C or S
  MOD_RES (11), (12), (13), (14), (15): Xaa is A or G
  MOD_RES (16), (17), (18), (19): Xaa is A or G or is absent
RVVMNPIKGYXXXXXXXXXFYLVNIPSLQTPAXX

SEQ ID NO: 32279 - protein, 36 aa, Artificial Sequence
  GFR-binding peptide
  MOD_RES (1), (3): Xaa is C or S
  MOD_RES (15), (16), (17), (18), (19): Xaa is A or G
  MOD_RES (20), (21), (22), (23): Xaa is A or G or is absent
XGXGEVVMEPIKGYXXXXXXXXXFYLMNIPSLETPV

SEQ ID NO: 32280 - protein, 39 aa, Artificial Sequence
  GFR-binding peptide
  MOD_RES (1), (3), (36), (37): Xaa is C or S
  MOD_RES (14), (15), (16), (17), (18): Xaa is A or G
  MOD_RES (19), (20), (21), (22): Xaa is A or G or is absent
XGXEEVIMPIKGYXXXXXXXXXFYLMNIPSTKVPAXXTS

SEQ ID NO: 32281 - protein, 38 aa, Artificial Sequence
  GFR-binding peptide
  MOD_RES (1), (3), (34), (35): Xaa is C or S
XGXEEVIMPIKGYLLVRGNDFYLMNIPSTKVPAXXTSP

SEQ ID NO: 32282 - protein, 37 aa, Artificial Sequence
  GFR-binding peptide
  MOD_RES (2), (36), (37): Xaa is C or S
  MOD_RES (14), (15), (16), (17), (18): Xaa is A or G
  MOD_RES (19), (20), (21), (22): Xaa is A or G or is absent
GXESVAMGPIKGYXXXXXXXXXFYLINIPSLKTPVXX

SEQ ID NO: 32283 - protein, 36 aa, Artificial Sequence
  GFR-binding peptide
  MOD_RES (33), (34): Xaa is C or S
  MOD_RES (11), (12), (13), (14), (15): Xaa is A or G
  MOD_RES (16), (17), (18), (19): Xaa is A or G or is absent
EVVMDPIKGYXXXXXXXXXFYLMNIPSLETPVXXAK

SEQ ID NO: 32284 - protein, 37 aa, Artificial Sequence
  GFR-binding peptide
  MOD_RES (2), (4), (36), (37): Xaa is C or S
HXGXARVVMNPIKGYIVNSSDDFYLVNIPSLQTPAXX

SEQ ID NO: 32285 - protein, 38 aa, Artificial Sequence
  GFR-binding peptide
  MOD_RES (1), (32), (33): Xaa is C or S
XEEVIMPIKGYLLVRGNDFYLMNIPSTKVPAXXTSPVR

SEQ ID NO: 32286 - protein, 34 aa, Artificial Sequence
  GFR-binding peptide
  MOD_RES (2), (34): Xaa is C or S
GXAKVVMNPIKGYIVNNSSDFYLVNIPSLKTPAX

SEQ ID NO: 32287 - protein, 39 aa, Artificial Sequence
  GFR-binding peptide
  MOD_RES (33), (34): Xaa is C or S
  MOD_RES (11), (12), (13), (14), (15): Xaa is A or G
  MOD_RES (16), (17), (18), (19): Xaa is A or G or is absent
KVVMNPIKGYXXXXXXXXXFYLVNIPSLKTPAXXAKPVA

SEQ ID NO: 32288 - protein, 39 aa, Artificial Sequence
  GFR-binding peptide
  MOD_RES (2), (36), (37): Xaa is C or S
  MOD_RES (14), (15), (16), (17), (18): Xaa is A or G
  MOD_RES (19), (20), (21), (22): Xaa is A or G or is absent
GXGEVVMDPIKGYXXXXXXXXXFYLMNIPSLETPVXXAK

SEQ ID NO: 32289 - protein, 30 aa, Artificial Sequence
  GFR-binding peptide
SVAMGPIKGYYTVVGKDFYLINIPSLKTPV

SEQ ID NO: 32290 - protein, 35 aa, Artificial Sequence
  GFR-binding peptide
  MOD_RES (2), (2): Xaa is C or S
  MOD_RES (14), (15), (16), (17), (18): Xaa is A or G
  MOD_RES (19), (20), (21), (22): Xaa is A or G or is absent
GXGEVVMDPIKGYXXXXXXXXXFYLMNIPSLETPV

SEQ ID NO: 32291 - protein, 39 aa, Artificial Sequence
  GFR-binding peptide
  MOD_RES (1), (33): Xaa is C or S
XSRVVMNPIKGYIVNSSDDFYLVNIPSLKTPAXTPKTVH

SEQ ID NO: 32292 - protein, 32 aa, Artificial Sequence
  GFR-binding peptide
  MOD_RES (32), (32): Xaa is C or S
AEVVMDPIKGYVVNNAADFYLINIPSLRAPVX

SEQ ID NO: 32293 - protein, 36 aa, Artificial Sequence
  GFR-binding peptide
  MOD_RES (2), (34): Xaa is C or S
GXSRVVMNPIKGYIVNSSDDFYLVNIPSLKTPAXTP

SEQ ID NO: 32294 - protein, 33 aa, Artificial Sequence
  GFR-binding peptide
  MOD_RES (12), (13), (14), (15), (16): Xaa is A or G
  MOD_RES (17), (18), (19), (20): Xaa is A or G or is absent
SEVVMDPIKGYXXXXXXXXXFYLINIPSLRTPV

SEQ ID NO: 32295 - protein, 33 aa, Artificial Sequence
  GFR-binding peptide
  MOD_RES (31), (32): Xaa is C or S
EEVIMPIKGYLLVRGNDFYLMNIPSTKVPAXXT

SEQ ID NO: 32296 - protein, 37 aa, Artificial Sequence
  GFR-binding peptide
  MOD_RES (1), (3), (36), (37): Xaa is C or S
XGXEAVSMGEPIKGYTPVGMDDFYLVNIPSLKTPVXX

SEQ ID NO: 32297 - protein, 38 aa, Artificial Sequence
  GFR-binding peptide
  MOD_RES (2), (4), (37), (38): Xaa is C or S
  MOD_RES (15), (16), (17), (18), (19): Xaa is A or G
  MOD_RES (20), (21), (22), (23): Xaa is A or G or is absent
LXGXEEVIMPIKGYXXXXXXXXXFYLMNIPSTKVPAXX

SEQ ID NO: 32298 - protein, 35 aa, Artificial Sequence
  GFR-binding peptide
  MOD_RES (34), (35): Xaa is C or S
  MOD_RES (12), (13), (14), (15), (16): Xaa is A or G
  MOD_RES (17), (18), (19), (20): Xaa is A or G or is absent
AEVVMDPIKGYXXXXXXXXXFYLINIPSLRAPVXX

SEQ ID NO: 32299 - protein, 38 aa, Artificial Sequence
  GFR-binding peptide
  MOD_RES (33), (34): Xaa is C or S
  MOD_RES (11), (12), (13), (14), (15): Xaa is A or G
  MOD_RES (16), (17), (18), (19): Xaa is A or G or is absent
KVVMNPIKGYXXXXXXXXXFYLVNIPSLKTPAXXAKPV

SEQ ID NO: 32300 - protein, 37 aa, Artificial Sequence
  GFR-binding peptide
  MOD_RES (1), (3), (36), (37): Xaa is C or S
  MOD_RES (14), (15), (16), (17), (18): Xaa is A or G
  MOD_RES (19), (20), (21), (22): Xaa is A or G or is absent
XGXEEVIMPIKGYXXXXXXXXXFYLMNIPSTKVPAXX

SEQ ID NO: 32301 - protein, 39 aa, Artificial Sequence
  GFR-binding peptide
  MOD_RES (6), (7), (39): Xaa is C or S
STPPTXXVPTRLSPINILYFDSANNVVYGKIPDMVVESX

SEQ ID NO: 32302 - protein, 43 aa, Artificial Sequence
  GFR-binding peptide
  MOD_RES (6), (7), (41), (43): Xaa is C or S
  MOD_RES (21), (22), (23), (24), (25): Xaa is A or G
  MOD_RES (26), (27), (28), (29): Xaa is A or G or is absent
GSAGPXXTPTKMSPINMLYFXXXXXXXXXYGKIPGMVVDRXGX

SEQ ID NO: 32303 - protein, 40 aa, Artificial Sequence
  GFR-binding peptide
  MOD_RES (6), (7): Xaa is C or S
  MOD_RES (21), (22), (23), (24), (25): Xaa is A or G
  MOD_RES (26), (27), (28), (29): Xaa is A or G or is absent
TVPKPXXAPTQLSPINVLYFXXXXXXXXXYGKIPNMVVRA

SEQ ID NO: 32304 - protein, 37 aa, Artificial Sequence
  GFR-binding peptide
  MOD_RES (5), (6): Xaa is C or S
IPKAXXVPTELSPINMLYFDENEKVVYGKIPDMVVEG

SEQ ID NO: 32305 - protein, 40 aa, Artificial Sequence
  GFR-binding peptide
  MOD_RES (3), (4), (38), (40): Xaa is C or S
  MOD_RES (18), (19), (20), (21), (22): Xaa is A or G
  MOD_RES (23), (24), (25), (26): Xaa is A or G or is absent
ASXXVPARLSPINILYFXXXXXXXXXYGKIPDMVVEAXGX

SEQ ID NO: 32306 - protein, 32 aa, Artificial Sequence
  GFR-binding peptide
  MOD_RES (31), (31): Xaa is C or S
APVKTSPINMLYFDNGRVLLYGKIPMIVEEXG

SEQ ID NO: 32307 - protein, 35 aa, Artificial Sequence
  GFR-binding peptide
  MOD_RES (3), (4): Xaa is C or S
PTXXVPTRLSPINILYFDSANNVVYGKIPDMVVES

SEQ ID NO: 32308 - protein, 42 aa, Artificial Sequence
  GFR-binding peptide
  MOD_RES (5), (6), (40), (42): Xaa is C or S
  MOD_RES (20), (21), (22), (23), (24): Xaa is A or G
  MOD_RES (25), (26), (27), (28): Xaa is A or G or is absent
TPPTXXVPTRLSPINILYFXXXXXXXXXYGKIPDMVVESXGX

SEQ ID NO: 32309 - protein, 39 aa, Artificial Sequence
  GFR-binding peptide
  MOD_RES (3), (4), (36), (38): Xaa is C or S
KAXXVPTKLSPINILYFDKGVVTYYGKIPGMAVSEXGXR

SEQ ID NO: 32310 - protein, 41 aa, Artificial Sequence
  GFR-binding peptide
  MOD_RES (4), (5), (39), (41): Xaa is C or S
  MOD_RES (19), (20), (21), (22), (23): Xaa is A or G
  MOD_RES (24), (25), (26), (27): Xaa is A or G or is absent
PKPXXAPTKLSPINVLYFXXXXXXXXXYGKIPNMVVRSXGX

SEQ ID NO: 32311 - protein, 35 aa, Artificial Sequence
  GFR-binding peptide
  MOD_RES (2), (3), (35): Xaa is C or S
AXXVPTELSPINMLYFDENEKVVYGKIPDMVVEGX

SEQ ID NO: 32312 - protein, 35 aa, Artificial Sequence
  GFR-binding peptide
  MOD_RES (1), (2): Xaa is C or S
  MOD_RES (16), (17), (18), (19), (20): Xaa is A or G
  MOD_RES (21), (22), (23), (24): Xaa is A or G or is absent
XXVPTKLSPINILYFXXXXXXXXXYGKIPGMAVSE

SEQ ID NO: 32313 - protein, 40 aa, Artificial Sequence
  GFR-binding peptide
  MOD_RES (5), (6), (38), (40): Xaa is C or S
ASKAXXVPTKLSPINILYFDKGVVTYYGKIPGMAVSEXGX

SEQ ID NO: 32314 - protein, 37 aa, Artificial Sequence
  GFR-binding peptide
  MOD_RES (4), (36): Xaa is C or S
KPTXAPTKLSPINVLYFDDSSNVIYGKIPNMVVRSXG

SEQ ID NO: 32315 - protein, 40 aa, Artificial Sequence
  GFR-binding peptide
  MOD_RES (7), (7): Xaa is C or S
  MOD_RES (21), (22), (23), (24), (25): Xaa is A or G
  MOD_RES (26), (27), (28), (29): Xaa is A or G or is absent
HVTKPTXAPTKLSPINVLYFXXXXXXXXXYGKIPNMVVRS

SEQ ID NO: 32316 - protein, 37 aa, Artificial Sequence
  GFR-binding peptide
  MOD_RES (3), (4): Xaa is C or S
  MOD_RES (18), (19), (20), (21), (22): Xaa is A or G
  MOD_RES (23), (24), (25), (26): Xaa is A or G or is absent
GPXXTPTKMSPINMLYFXXXXXXXXXYGKIPGMVVDR

SEQ ID NO: 32317 - protein, 34 aa, Artificial Sequence
  GFR-binding peptide
  MOD_RES (1), (33): Xaa is C or S
XAPTKLSPINVLYFDDSSNVIYGKIPNMVVRSXG

SEQ ID NO: 32318 - protein, 41 aa, Artificial Sequence
  GFR-binding peptide
  MOD_RES (4), (5), (39), (41): Xaa is C or S
  MOD_RES (19), (20), (21), (22), (23): Xaa is A or G
  MOD_RES (24), (25), (26), (27): Xaa is A or G or is absent
SKAXXVPTKLSPINILYFXXXXXXXXXYGKIPGMAVSEXGX

SEQ ID NO: 32319 - protein, 40 aa, Artificial Sequence
  GFR-binding peptide
  MOD_RES (5), (6), (40): Xaa is C or S
  MOD_RES (20), (21), (22), (23), (24): Xaa is A or G
  MOD_RES (25), (26), (27), (28): Xaa is A or G or is absent
ASKAXXVPTKLSPINILYFXXXXXXXXXYGKIPGMAVSEX

SEQ ID NO: 32320 - protein, 35 aa, Artificial Sequence
  GFR-binding peptide
  MOD_RES (3), (4): Xaa is C or S
KAXXVPTELSPINMLYFDENEKVVYGKIPDMVVEG

SEQ ID NO: 32321 - protein, 36 aa, Artificial Sequence
  GFR-binding peptide
  MOD_RES (5), (6): Xaa is C or S
TPPTXXVPTRLSPINILYFDSANNVVYGKIPDMVVE

SEQ ID NO: 32322 - protein, 39 aa, Artificial Sequence
  GFR-binding peptide
  MOD_RES (1), (2), (36), (38): Xaa is C or S
  MOD_RES (16), (17), (18), (19), (20): Xaa is A or G
  MOD_RES (21), (22), (23), (24): Xaa is A or G or is absent
XXVPARLSPINILYFXXXXXXXXXYGKIPDMVVEAXGXR

SEQ ID NO: 32323 - protein, 35 aa, Artificial Sequence
  GFR-binding peptide
  MOD_RES (2), (3): Xaa is C or S
  MOD_RES (17), (18), (19), (20), (21): Xaa is A or G
  MOD_RES (22), (23), (24), (25): Xaa is A or G or is absent
AXXVPTELSPINMLYFXXXXXXXXXYGKIPDMVVE

SEQ ID NO: 32324 - protein, 39 aa, Artificial Sequence
  GFR-binding peptide
  MOD_RES (2), (3), (36), (38): Xaa is C or S
AXXVPTKLSPINVLYFDDMGVPTYGKIPEGMSVAEXGXR

SEQ ID NO: 32325 - protein, 39 aa, Artificial Sequence
  GFR-binding peptide
  MOD_RES (3), (37), (39): Xaa is C or S
  MOD_RES (17), (18), (19), (20), (21): Xaa is A or G
  MOD_RES (22), (23), (24), (25): Xaa is A or G or is absent
PTXAPTKLSPINVLYFXXXXXXXXXYGKIPNMVVRSXGX

SEQ ID NO: 32326 - protein, 36 aa, Artificial Sequence
  GFR-binding peptide
  MOD_RES (4), (5): Xaa is C or S
PPTXXVPTRLSPINILYFDSANNVVYGKIPDMVVES

SEQ ID NO: 32327 - protein, 37 aa, Artificial Sequence
  GFR-binding peptide
  MOD_RES (4), (5): Xaa is C or S
  MOD_RES (19), (20), (21), (22), (23): Xaa is A or G
  MOD_RES (24), (25), (26), (27): Xaa is A or G or is absent
PKPXXAPTQLSPINVLYFXXXXXXXXXYGKIPNMVVR

SEQ ID NO: 32328 - protein, 36 aa, Artificial Sequence
  GFR-binding peptide
  MOD_RES (2), (3), (35): Xaa is C or S
SXXVPARLSPINILYFDAANNVVYGKIPDMVVEAXG

SEQ ID NO: 32329 - protein, 42 aa, Artificial Sequence
  GFR-binding peptide
  MOD_RES (5), (6), (39), (41): Xaa is C or S
VGKAXXVPTKLSPINVLYFDDMGVPTYGKIPEGMSVAEXGXR

SEQ ID NO: 32330 - protein, 33 aa, Artificial Sequence
  GFR-binding peptide
  MOD_RES (1), (2): Xaa is C or S
XXVPTKLSPINILYFDKGVVTYYGKIPGMAVSE

SEQ ID NO: 32331 - protein, 35 aa, Artificial Sequence
  GFR-binding peptide
  MOD_RES (1), (33), (35): Xaa is C or S
XVPTELSPINMLYFDEYDKVVYGKIPEMVVEGXGX

SEQ ID NO: 32332 - protein, 39 aa, Artificial Sequence
  GFR-binding peptide
  MOD_RES (3), (4), (36), (38): Xaa is C or S
ASXXVPARLSPINILYFDAANNVVYGKIPDMVVEAXGXR

SEQ ID NO: 32333 - protein, 35 aa, Artificial Sequence
  GFR-binding peptide
  MOD_RES (1), (2), (35): Xaa is C or S
XXVPTKLSPINVLYFDDMGVPTYGKIPEGMSVAEX

SEQ ID NO: 32334 - protein, 38 aa, Artificial Sequence
  GFR-binding peptide
  MOD_RES (5), (6), (37): Xaa is C or S
VPSTXXAPVKTSPINMLYFDNGRVLLYGKIPMIVEEXG

SEQ ID NO: 32335 - protein, 43 aa, Artificial Sequence
  GFR-binding peptide
  MOD_RES (5), (6), (40), (42): Xaa is C or S
  MOD_RES (20), (21), (22), (23), (24): Xaa is A or G
  MOD_RES (25), (26), (27), (28): Xaa is A or G or is absent
ASKAXXVPTKLSPINILYFXXXXXXXXXYGKIPGMAVSEXGXR

SEQ ID NO: 32336 - protein, 43 aa, Artificial Sequence
  GFR-binding peptide
  MOD_RES (6), (7), (41), (43): Xaa is C or S
  MOD_RES (21), (22), (23), (24), (25): Xaa is A or G
  MOD_RES (26), (27), (28), (29): Xaa is A or G or is absent
AVPKAXXAPTKLSPINVLYFXXXXXXXXXYGKIPNMVVKAXGX

SEQ ID NO: 32337 - protein, 36 aa, Artificial Sequence
  GFR-binding peptide
  MOD_RES (34), (36): Xaa is C or S
  MOD_RES (14), (15), (16), (17), (18): Xaa is A or G
  MOD_RES (19), (20), (21), (22): Xaa is A or G or is absent
VPTKLSPINILYFXXXXXXXXXYGKIPGMAVSEXGX

SEQ ID NO: 32338 - protein, 40 aa, Artificial Sequence
  GFR-binding peptide
  MOD_RES (4), (38), (40): Xaa is C or S
  MOD_RES (18), (19), (20), (21), (22): Xaa is A or G
  MOD_RES (23), (24), (25), (26): Xaa is A or G or is absent
KPTXAPTKLSPINVLYFXXXXXXXXXYGKIPNMVVRSXGX

SEQ ID NO: 32339 - protein, 44 aa, Artificial Sequence
  GFR-binding peptide
  MOD_RES (6), (7), (41), (43): Xaa is C or S
  MOD_RES (21), (22), (23), (24), (25): Xaa is A or G
  MOD_RES (26), (27), (28), (29): Xaa is A or G or is absent
AVPKAXXAPTKLSPINVLYFXXXXXXXXXYGKIPNMVVKAXGXH

SEQ ID NO: 32340 - protein, 44 aa, Artificial Sequence
  GFR-binding peptide
  MOD_RES (6), (7), (41), (43): Xaa is C or S
  MOD_RES (21), (22), (23), (24), (25): Xaa is A or G
  MOD_RES (26), (27), (28), (29): Xaa is A or G or is absent
GSAGPXXTPTKMSPINMLYFXXXXXXXXXYGKIPGMVVDRXGXS

SEQ ID NO: 32341 - protein, 39 aa, Artificial Sequence
  GFR-binding peptide
  MOD_RES (6), (7), (39): Xaa is C or S
KIPKAXXVPTELSPINMLYFDENEKVVYGKIPDMVVEGX

SEQ ID NO: 32342 - protein, 43 aa, Artificial Sequence
  GFR-binding peptide
  MOD_RES (6), (7), (41), (43): Xaa is C or S
  MOD_RES (21), (22), (23), (24), (25): Xaa is A or G
  MOD_RES (26), (27), (28), (29): Xaa is A or G or is absent
KASKAXXVPTKLSPINILYFXXXXXXXXXYGKIPGMAVSEXGX

SEQ ID NO: 32343 - protein, 34 aa, Artificial Sequence
  GFR-binding peptide
  MOD_RES (2), (3): Xaa is C or S
PXXAPTQLSPINVLYFDDSSNVIYGKIPNMVVRA

SEQ ID NO: 32344 - protein, 37 aa, Artificial Sequence
  GFR-binding peptide
  MOD_RES (2), (34), (36): Xaa is C or S
TXAPTKLSPINVLYFDDSSNVIYGKIPNMVVRSXGXH

SEQ ID NO: 32345 - protein, 35 aa, Artificial Sequence
  GFR-binding peptide
  MOD_RES (35), (35): Xaa is C or S
  MOD_RES (14), (15), (16), (17), (18): Xaa is A or G
  MOD_RES (19), (20), (21), (22): Xaa is A or G or is absent
VPTKLSPINVLYFXXXXXXXXXYGKIPEGMSVAEX

SEQ ID NO: 32346 - protein, 39 aa, Artificial Sequence
  GFR-binding peptide
  MOD_RES (3), (4), (36), (38): Xaa is C or S
KAXXAPTKLSPINVLYFDSSNNVIYGKIPNMVVKAXGXH

SEQ ID NO: 32347 - protein, 37 aa, Artificial Sequence
  GFR-binding peptide
  MOD_RES (2), (3), (36): Xaa is C or S
AXXVPTKLSPINVLYFDDMGVPTYGKIPEGMSVAEXG

SEQ ID NO: 32348 - protein, 42 aa, Artificial Sequence
  GFR-binding peptide
  MOD_RES (4), (5), (39), (41): Xaa is C or S
  MOD_RES (19), (20), (21), (22), (23): Xaa is A or G
  MOD_RES (24), (25), (26), (27): Xaa is A or G or is absent
PKAXXAPTKLSPINVLYFXXXXXXXXXYGKIPNMVVKAXGXH

SEQ ID NO: 32349 - protein, 34 aa, Artificial Sequence
  GFR-binding peptide
  MOD_RES (1), (32), (34): Xaa is C or S
XAPVKTSPINMLYFDNGRVLLYGKIPMIVEEXGX

SEQ ID NO: 32350 - protein, 42 aa, Artificial Sequence
  GFR-binding peptide
  MOD_RES (4), (5), (39), (41): Xaa is C or S
  MOD_RES (19), (20), (21), (22), (23): Xaa is A or G
  MOD_RES (24), (25), (26), (27): Xaa is A or G or is absent
PPTXXVPTRLSPINILYFXXXXXXXXXYGKIPDMVVESXGXR

SEQ ID NO: 32351 - protein, 36 aa, Artificial Sequence
  GFR-binding peptide
  MOD_RES (1), (33), (35): Xaa is C or S
XVPTELSPINMLYFDENEKVVYGKIPDMVVEGXGXR

SEQ ID NO: 32352 - protein, 37 aa, Artificial Sequence
  GFR-binding peptide
  MOD_RES (6), (7): Xaa is C or S
KASKAXXVPTKLSPINILYFDKGVVTYYGKIPGMAVS

SEQ ID NO: 32353 - protein, 40 aa, Artificial Sequence
  GFR-binding peptide
  MOD_RES (3), (4), (38), (40): Xaa is C or S
  MOD_RES (18), (19), (20), (21), (22): Xaa is A or G
  MOD_RES (23), (24), (25), (26): Xaa is A or G or is absent
GPXXTPTKMSPINMLYFXXXXXXXXXYGKIPGMVVDRXGX

SEQ ID NO: 32354 - protein, 40 aa, Artificial Sequence
  GFR-binding peptide
  MOD_RES (6), (7), (39): Xaa is C or S
TVPKPXXAPTQLSPINVLYFDDSSNVIYGKIPNMVVRAXG

SEQ ID NO: 32355 - protein, 40 aa, Artificial Sequence
  GFR-binding peptide
  MOD_RES (4), (5), (39): Xaa is C or S
  MOD_RES (19), (20), (21), (22), (23): Xaa is A or G
  MOD_RES (24), (25), (26), (27): Xaa is A or G or is absent
PPTXXVPTRLSPINILYFXXXXXXXXXYGKIPDMVVESXG

SEQ ID NO: 32356 - protein, 35 aa, Artificial Sequence
  GFR-binding peptide
  MOD_RES (1), (2): Xaa is C or S
  MOD_RES (16), (17), (18), (19), (20): Xaa is A or G
  MOD_RES (21), (22), (23), (24): Xaa is A or G or is absent
XXAPTKLSPINVLYFXXXXXXXXXYGKIPNMVVRS

SEQ ID NO: 32357 - protein, 39 aa, Artificial Sequence
  GFR-binding peptide
  MOD_RES (5), (6): Xaa is C or S
  MOD_RES (20), (21), (22), (23), (24): Xaa is A or G
  MOD_RES (25), (26), (27), (28): Xaa is A or G or is absent
IPKAXXVPTELSPINMLYFXXXXXXXXXYGKIPDMVVEG

SEQ ID NO: 32358 - protein, 35 aa, Artificial Sequence
  GFR-binding peptide
  MOD_RES (1), (33), (35): Xaa is C or S
XVPTKLSPINILYFDKGVVTYYGKIPGMAVSEXGX

SEQ ID NO: 32359 - protein, 35 aa, Artificial Sequence
  GFR-binding peptide
  MOD_RES (34), (34): Xaa is C or S
  MOD_RES (14), (15), (16), (17), (18): Xaa is A or G
  MOD_RES (19), (20), (21), (22): Xaa is A or G or is absent
APTQLSPINVLYFXXXXXXXXXYGKIPNMVVRAXG

SEQ ID NO: 32360 - protein, 36 aa, Artificial Sequence
  GFR-binding peptide
  MOD_RES (5), (6): Xaa is C or S
IPKAXXVPTELSPINMLYFDEYDKVVYGKIPEMVVE

SEQ ID NO: 32361 - protein, 38 aa, Artificial Sequence
  GFR-binding peptide
  MOD_RES (3), (4), (36), (38): Xaa is C or S
KAXXVPTELSPINMLYFDEYDKVVYGKIPEMVVEGXGX

SEQ ID NO: 32362 - protein, 42 aa, Artificial Sequence
  GFR-binding peptide
  MOD_RES (4), (5), (39), (41): Xaa is C or S
  MOD_RES (19), (20), (21), (22), (23): Xaa is A or G
  MOD_RES (24), (25), (26), (27): Xaa is A or G or is absent
PKAXXVPTELSPINMLYFXXXXXXXXXYGKIPDMVVEGXGXR

SEQ ID NO: 32363 - protein, 41 aa, Artificial Sequence
  GFR-binding peptide
  MOD_RES (3), (4), (39), (41): Xaa is C or S
  MOD_RES (18), (19), (20), (21), (22): Xaa is A or G
  MOD_RES (23), (24), (25), (26): Xaa is A or G or is absent
KAXXVPTKLSPINVLYFXXXXXXXXXYGKIPEGMSVAEXGX

SEQ ID NO: 32364 - protein, 39 aa, Artificial Sequence
  GFR-binding peptide
  MOD_RES (4), (5), (38): Xaa is C or S
  MOD_RES (19), (20), (21), (22), (23): Xaa is A or G
  MOD_RES (24), (25), (26), (27): Xaa is A or G or is absent
PSTXXAPVKTSPINMLYFXXXXXXXXXYGKIPMIVEEXG

SEQ ID NO: 32365 - protein, 39 aa, Artificial Sequence
  GFR-binding peptide
  MOD_RES (6), (38): Xaa is C or S
VTKPTXAPTKLSPINVLYFDDSSNVIYGKIPNMVVRSXG

SEQ ID NO: 32366 - protein, 42 aa, Artificial Sequence
  GFR-binding peptide
  MOD_RES (5), (6), (41): Xaa is C or S
  MOD_RES (20), (21), (22), (23), (24): Xaa is A or G
  MOD_RES (25), (26), (27), (28): Xaa is A or G or is absent
VGKAXXVPTKLSPINVLYFXXXXXXXXXYGKIPEGMSVAEXG

SEQ ID NO: 32367 - protein, 40 aa, Artificial Sequence
  GFR-binding peptide
  MOD_RES (6), (7), (39): Xaa is C or S
STPPTXXVPTRLSPINILYFDSANNVVYGKIPDMVVESXG

SEQ ID NO: 32368 - protein, 38 aa, Artificial Sequence
  GFR-binding peptide
  MOD_RES (3), (4), (38): Xaa is C or S
  MOD_RES (18), (19), (20), (21), (22): Xaa is A or G
  MOD_RES (23), (24), (25), (26): Xaa is A or G or is absent
KPXXAPTKLSPINVLYFXXXXXXXXXYGKIPNMVVRSX

SEQ ID NO: 32369 - protein, 34 aa, Artificial Sequence
  GFR-binding peptide
  MOD_RES (14), (15), (16), (17), (18): Xaa is A or G
  MOD_RES (19), (20), (21), (22): Xaa is A or G or is absent
VPTKLSPINVLYFXXXXXXXXXYGKIPEGMSVAE

SEQ ID NO: 32370 - protein, 32 aa, Artificial Sequence
  GFR-binding peptide
  MOD_RES (1), (1): Xaa is C or S
XVPTELSPINMLYFDENEKVVYGKIPDMVVEG

SEQ ID NO: 32371 - protein, 37 aa, Artificial Sequence
  GFR-binding peptide
  MOD_RES (3), (4), (36): Xaa is C or S
KAXXVPTELSPINMLYFDEYDKVVYGKIPEMVVEGXG

SEQ ID NO: 32372 - protein, 36 aa, Artificial Sequence
  GFR-binding peptide
  MOD_RES (3), (4): Xaa is C or S
  MOD_RES (18), (19), (20), (21), (22): Xaa is A or G
  MOD_RES (23), (24), (25), (26): Xaa is A or G or is absent
GPXXTPTKMSPINMLYFXXXXXXXXXYGKIPGMVVD

SEQ ID NO: 32373 - protein, 41 aa, Artificial Sequence
  GFR-binding peptide
  MOD_RES (4), (5), (39), (41): Xaa is C or S
  MOD_RES (19), (20), (21), (22), (23): Xaa is A or G
  MOD_RES (24), (25), (26), (27): Xaa is A or G or is absent
PKAXXAPTKLSPINVLYFXXXXXXXXXYGKIPNMVVKAXGX

SEQ ID NO: 32374 - protein, 40 aa, Artificial Sequence
  GFR-binding peptide
  MOD_RES (5), (6), (38), (40): Xaa is C or S
VPKPXXAPTKLSPINVLYFDDSSNVIYGKIPNMVVRSXGX

SEQ ID NO: 32375 - protein, 36 aa, Artificial Sequence
  GFR-binding peptide
  MOD_RES (34), (36): Xaa is C or S
  MOD_RES (14), (15), (16), (17), (18): Xaa is A or G
  MOD_RES (19), (20), (21), (22): Xaa is A or G or is absent
APTKLSPINVLYFXXXXXXXXXYGKIPNMVVKAXGX

SEQ ID NO: 32376 - protein, 34 aa, Artificial Sequence
  GFR-binding peptide
  MOD_RES (1), (33): Xaa is C or S
XVPTRLSPINILYFDSANNVVYGKIPDMVVESXG

SEQ ID NO: 32377 - protein, 37 aa, Artificial Sequence
  GFR-binding peptide
  MOD_RES (5), (6): Xaa is C or S
APASXXVPARLSPINILYFDAANNVVYGKIPDMVVEA

SEQ ID NO: 32378 - protein, 35 aa, Artificial Sequence
  GFR-binding peptide
  MOD_RES (32), (34): Xaa is C or S
VPTELSPINMLYFDENEKVVYGKIPDMVVEGXGXR

SEQ ID NO: 32379 - protein, 41 aa, Artificial Sequence
  GFR-binding peptide
  MOD_RES (5), (6), (38), (40): Xaa is C or S
IPKAXXVPTELSPINMLYFDEYDKVVYGKIPEMVVEGXGXR

SEQ ID NO: 32380 - protein, 34 aa, Artificial Sequence
  GFR-binding peptide
  MOD_RES (3), (4): Xaa is C or S
KAXXVPTELSPINMLYFDENEKVVYGKIPDMVVE

SEQ ID NO: 32381 - protein, 41 aa, Artificial Sequence
  GFR-binding peptide
  MOD_RES (7), (39), (41): Xaa is C or S
HVTKPTXAPTKLSPINVLYFDDSSNVIYGKIPNMVVRSXGX

SEQ ID NO: 32382 - protein, 35 aa, Artificial Sequence
  GFR-binding peptide
  MOD_RES (4), (5): Xaa is C or S
PKPXXAPTKLSPINVLYFDDSSNVIYGKIPNMVVR

SEQ ID NO: 32383 - protein, 41 aa, Artificial Sequence
  GFR-binding peptide
  MOD_RES (6), (7), (39), (41): Xaa is C or S
HVPKPXXAPTKLSPINVLYFDDSSNVIYGKIPNMVVRSXGX

SEQ ID NO: 32384 - protein, 38 aa, Artificial Sequence
  GFR-binding peptide
  MOD_RES (2), (3), (37): Xaa is C or S
  MOD_RES (17), (18), (19), (20), (21): Xaa is A or G
  MOD_RES (22), (23), (24), (25): Xaa is A or G or is absent
AXXVPTELSPINMLYFXXXXXXXXXYGKIPEMVVEGXG

SEQ ID NO: 32385 - protein, 38 aa, Artificial Sequence
  GFR-binding peptide
  MOD_RES (1), (2), (36), (38): Xaa is C or S
  MOD_RES (16), (17), (18), (19), (20): Xaa is A or G
  MOD_RES (21), (22), (23), (24): Xaa is A or G or is absent
XXAPTQLSPINVLYFXXXXXXXXXYGKIPNMVVRAXGX

SEQ ID NO: 32386 - protein, 38 aa, Artificial Sequence
  GFR-binding peptide
  MOD_RES (5), (6), (38): Xaa is C or S
IPKAXXVPTELSPINMLYFDEYDKVVYGKIPEMVVEGX

SEQ ID NO: 32387 - protein, 37 aa, Artificial Sequence
  GFR-binding peptide
  MOD_RES (3), (4), (37): Xaa is C or S
  MOD_RES (18), (19), (20), (21), (22): Xaa is A or G
  MOD_RES (23), (24), (25), (26): Xaa is A or G or is absent
STXXAPVKTSPINMLYFXXXXXXXXXYGKIPMIVEEX

SEQ ID NO: 32388 - protein, 35 aa, Artificial Sequence
  GFR-binding peptide
  MOD_RES (4), (5): Xaa is C or S
PKAXXVPTELSPINMLYFDEYDKVVYGKIPEMVVE

SEQ ID NO: 32389 - protein, 41 aa, Artificial Sequence
  GFR-binding peptide
  MOD_RES (4), (38), (40): Xaa is C or S
  MOD_RES (18), (19), (20), (21), (22): Xaa is A or G
  MOD_RES (23), (24), (25), (26): Xaa is A or G or is absent
KPTXAPTKLSPINVLYFXXXXXXXXXYGKIPNMVVRSXGXH

SEQ ID NO: 32390 - protein, 39 aa, Artificial Sequence
  GFR-binding peptide
  MOD_RES (6), (7): Xaa is C or S
KVGKAXXVPTKLSPINVLYFDDMGVPTYGKIPEGMSVAE

SEQ ID NO: 32391 - protein, 31 aa, Artificial Sequence
  GFR-binding peptide
VPARLSPINILYFDAANNVVYGKIPDMVVEA

SEQ ID NO: 32392 - protein, 32 aa, Artificial Sequence
  GFR-binding peptide
  MOD_RES (14), (15), (16), (17), (18): Xaa is A or G
  MOD_RES (19), (20), (21), (22): Xaa is A or G or is absent
APTKLSPINVLYFXXXXXXXXXYGKIPNMVVK

SEQ ID NO: 32393 - protein, 43 aa, Artificial Sequence
  GFR-binding peptide
  MOD_RES (5), (6), (40), (42): Xaa is C or S
  MOD_RES (20), (21), (22), (23), (24): Xaa is A or G
  MOD_RES (25), (26), (27), (28): Xaa is A or G or is absent
IPKAXXVPTELSPINMLYFXXXXXXXXXYGKIPDMVVEGXGXR

SEQ ID NO: 32394 - protein, 42 aa, Artificial Sequence
  GFR-binding peptide
  MOD_RES (6), (7), (41): Xaa is C or S
  MOD_RES (21), (22), (23), (24), (25): Xaa is A or G
  MOD_RES (26), (27), (28), (29): Xaa is A or G or is absent
KIPKAXXVPTELSPINMLYFXXXXXXXXXYGKIPDMVVEGXG

SEQ ID NO: 32395 - protein, 32 aa, Artificial Sequence
  GFR-binding peptide
  MOD_RES (14), (15), (16), (17), (18): Xaa is A or G
  MOD_RES (19), (20), (21), (22): Xaa is A or G or is absent
APVKTSPINMLYFXXXXXXXXXYGKIPMIVEE

SEQ ID NO: 32396 - protein, 38 aa, Artificial Sequence
  GFR-binding peptide
  MOD_RES (3), (4), (36), (38): Xaa is C or S
KAXXVPTELSPINMLYFDENEKVVYGKIPDMVVEGXGX

SEQ ID NO: 32397 - protein, 33 aa, Artificial Sequence
  GFR-binding peptide
  MOD_RES (1), (1): Xaa is C or S
  MOD_RES (15), (16), (17), (18), (19): Xaa is A or G
  MOD_RES (20), (21), (22), (23): Xaa is A or G or is absent
XVPARLSPINILYFXXXXXXXXXYGKIPDMVVE

SEQ ID NO: 32398 - protein, 39 aa, Artificial Sequence
  GFR-binding peptide
  MOD_RES (1), (2), (36), (38): Xaa is C or S
  MOD_RES (16), (17), (18), (19), (20): Xaa is A or G
  MOD_RES (21), (22), (23), (24): Xaa is A or G or is absent
XXTPTKMSPINMLYFXXXXXXXXXYGKIPGMVVDRXGXS

SEQ ID NO: 32399 - protein, 34 aa, Artificial Sequence
  GFR-binding peptide
  MOD_RES (1), (33): Xaa is C or S
XVPTELSPINMLYFDENEKVVYGKIPDMVVEGXG

SEQ ID NO: 32400 - protein, 35 aa, Artificial Sequence
  GFR-binding peptide
  MOD_RES (1), (2), (34): Xaa is C or S
XXAPTQLSPINVLYFDDSSNVIYGKIPNMVVRAXG

SEQ ID NO: 32401 - protein, 31 aa, Artificial Sequence
  GFR-binding peptide
VPTELSPINMLYFDEYDKVVYGKIPEMVVEG

SEQ ID NO: 32402 - protein, 38 aa, Artificial Sequence
  GFR-binding peptide
  MOD_RES (2), (3), (35), (37): Xaa is C or S
AXXVPTKLSPINILYFDKGVVTYYGKIPGMAVSEXGXR

SEQ ID NO: 32403 - protein, 40 aa, Artificial Sequence
  GFR-binding peptide
  MOD_RES (4), (5), (37), (39): Xaa is C or S
PKAXXVPTELSPINMLYFDENEKVVYGKIPDMVVEGXGXR

SEQ ID NO: 32404 - protein, 37 aa, Artificial Sequence
  GFR-binding peptide
  MOD_RES (34), (36): Xaa is C or S
  MOD_RES (14), (15), (16), (17), (18): Xaa is A or G
  MOD_RES (19), (20), (21), (22): Xaa is A or G or is absent
VPTKLSPINILYFXXXXXXXXXYGKIPGMAVSEXGXR

SEQ ID NO: 32405 - protein, 40 aa, Artificial Sequence
  GFR-binding peptide
  MOD_RES (6), (7), (39): Xaa is C or S
AVPKAXXAPTKLSPINVLYFDSSNNVIYGKIPNMVVKAXG

SEQ ID NO: 32406 - protein, 36 aa, Artificial Sequence
  GFR-binding peptide
  MOD_RES (2), (3), (35): Xaa is C or S
AXXAPTKLSPINVLYFDSSNNVIYGKIPNMVVKAXG

SEQ ID NO: 32407 - protein, 34 aa, Artificial Sequence
  GFR-binding peptide
  MOD_RES (32), (34): Xaa is C or S
VPTRLSPINILYFDSANNVVYGKIPDMVVESXGX

SEQ ID NO: 32408 - protein, 37 aa, Artificial Sequence
  GFR-binding peptide
  MOD_RES (6), (7): Xaa is C or S
YVPKPXXAPTKLSPINVLYFDDSSNVIYGKIPNMVVR

SEQ ID NO: 32409 - protein, 39 aa, Artificial Sequence
  GFR-binding peptide
  MOD_RES (5), (6), (38): Xaa is C or S
IPKAXXVPTELSPINMLYFDEYDKVVYGKIPEMVVEGXG

SEQ ID NO: 32410 - protein, 32 aa, Artificial Sequence
  GFR-binding peptide
  MOD_RES (1), (1): Xaa is C or S
XAPTKLSPINVLYFDDSSNVIYGKIPNMVVRS

SEQ ID NO: 32411 - protein, 35 aa, Artificial Sequence
  GFR-binding peptide
  MOD_RES (1), (33), (35): Xaa is C or S
XAPTKLSPINVLYFDSSNNVIYGKIPNMVVKAXGX

SEQ ID NO: 32412 - protein, 36 aa, Artificial Sequence
  GFR-binding peptide
  MOD_RES (4), (5): Xaa is C or S
PKAXXVPTELSPINMLYFDENEKVVYGKIPDMVVEG

SEQ ID NO: 32413 - protein, 40 aa, Artificial Sequence
  GFR-binding peptide
  MOD_RES (4), (5), (39): Xaa is C or S
  MOD_RES (19), (20), (21), (22), (23): Xaa is A or G
  MOD_RES (24), (25), (26), (27): Xaa is A or G or is absent
PASXXVPARLSPINILYFXXXXXXXXXYGKIPDMVVEAXG

SEQ ID NO: 32414 - protein, 35 aa, Artificial Sequence
  GFR-binding peptide
  MOD_RES (3), (4), (35): Xaa is C or S
STXXAPVKTSPINMLYFDNGRVLLYGKIPMIVEEX

SEQ ID NO: 32415 - protein, 36 aa, Artificial Sequence
  GFR-binding peptide
  MOD_RES (6), (6): Xaa is C or S
VTKPTXAPTKLSPINVLYFDDSSNVIYGKIPNMVVR

SEQ ID NO: 32416 - protein, 39 aa, Artificial Sequence
  GFR-binding peptide
  MOD_RES (6), (7), (39): Xaa is C or S
HVPKPXXAPTKLSPINVLYFDDSSNVIYGKIPNMVVRSX

SEQ ID NO: 32417 - protein, 40 aa, Artificial Sequence
  GFR-binding peptide
  MOD_RES (6), (7), (38), (40): Xaa is C or S
RVPSTXXAPVKTSPINMLYFDNGRVLLYGKIPMIVEEXGX

SEQ ID NO: 32418 - protein, 38 aa, Artificial Sequence
  GFR-binding peptide
  MOD_RES (4), (5), (37): Xaa is C or S
PKPXXAPTKLSPINVLYFDDSSNVIYGKIPNMVVRSXG

SEQ ID NO: 32419 - protein, 36 aa, Artificial Sequence
  GFR-binding peptide
  MOD_RES (3), (4), (36): Xaa is C or S
KPXXAPTQLSPINVLYFDDSSNVIYGKIPNMVVRAX

SEQ ID NO: 32420 - protein, 36 aa, Artificial Sequence
  GFR-binding peptide
  MOD_RES (2), (3): Xaa is C or S
  MOD_RES (17), (18), (19), (20), (21): Xaa is A or G
  MOD_RES (22), (23), (24), (25): Xaa is A or G or is absent
PXXAPTKLSPINVLYFXXXXXXXXXYGKIPNMVVRS

SEQ ID NO: 32421 - protein, 36 aa, Artificial Sequence
  GFR-binding peptide
  MOD_RES (3), (4), (35): Xaa is C or S
STXXAPVKTSPINMLYFDNGRVLLYGKIPMIVEEXG

SEQ ID NO: 32422 - protein, 40 aa, Artificial Sequence
  GFR-binding peptide
  MOD_RES (6), (7): Xaa is C or S
  MOD_RES (21), (22), (23), (24), (25): Xaa is A or G
  MOD_RES (26), (27), (28), (29): Xaa is A or G or is absent
AVPKAXXAPTKLSPINVLYFXXXXXXXXXYGKIPNMVVKA

SEQ ID NO: 32423 - protein, 32 aa, Artificial Sequence
  GFR-binding peptide
  MOD_RES (1), (2): Xaa is C or S
XXVPTELSPINMLYFDENEKVVYGKIPDMVVE

SEQ ID NO: 32424 - protein, 35 aa, Artificial Sequence
  GFR-binding peptide
  MOD_RES (1), (35): Xaa is C or S
  MOD_RES (15), (16), (17), (18), (19): Xaa is A or G
  MOD_RES (20), (21), (22), (23): Xaa is A or G or is absent
XAPTQLSPINVLYFXXXXXXXXXYGKIPNMVVRAX

SEQ ID NO: 32425 - protein, 44 aa, Artificial Sequence
  GFR-binding peptide
  MOD_RES (6), (7), (41), (43): Xaa is C or S
  MOD_RES (21), (22), (23), (24), (25): Xaa is A or G
  MOD_RES (26), (27), (28), (29): Xaa is A or G or is absent
YVPKPXXAPTKLSPINVLYFXXXXXXXXXYGKIPNMVVRSXGXH

SEQ ID NO: 32426 - protein, 39 aa, Artificial Sequence
  GFR-binding peptide
  MOD_RES (6), (7): Xaa is C or S
  MOD_RES (21), (22), (23), (24), (25): Xaa is A or G
  MOD_RES (26), (27), (28), (29): Xaa is A or G or is absent
RVPSTXXAPVKTSPINMLYFXXXXXXXXXYGKIPMIVEE

SEQ ID NO: 32427 - protein, 34 aa, Artificial Sequence
  GFR-binding peptide
  MOD_RES (34), (34): Xaa is C or S
  MOD_RES (14), (15), (16), (17), (18): Xaa is A or G
  MOD_RES (19), (20), (21), (22): Xaa is A or G or is absent
VPTELSPINMLYFXXXXXXXXXYGKIPEMVVEGX

SEQ ID NO: 32428 - protein, 38 aa, Artificial Sequence
  GFR-binding peptide
  MOD_RES (5), (6): Xaa is C or S
  MOD_RES (20), (21), (22), (23), (24): Xaa is A or G
  MOD_RES (25), (26), (27), (28): Xaa is A or G or is absent
SAGPXXTPTKMSPINMLYFXXXXXXXXXYGKIPGMVVD

SEQ ID NO: 32429 - protein, 38 aa, Artificial Sequence
  GFR-binding peptide
  MOD_RES (4), (5): Xaa is C or S
  MOD_RES (19), (20), (21), (22), (23): Xaa is A or G
  MOD_RES (24), (25), (26), (27): Xaa is A or G or is absent
PPTXXVPTRLSPINILYFXXXXXXXXXYGKIPDMVVES

SEQ ID NO: 32430 - protein, 36 aa, Artificial Sequence
  GFR-binding peptide
  MOD_RES (33), (35): Xaa is C or S
  MOD_RES (14), (15), (16), (17), (18): Xaa is A or G
  MOD_RES (19), (20), (21), (22): Xaa is A or G or is absent
APVKTSPINMLYFXXXXXXXXXYGKIPMIVEEXGXL

SEQ ID NO: 32431 - protein, 33 aa, Artificial Sequence
  GFR-binding peptide
  MOD_RES (1), (2): Xaa is C or S
XXAPTKLSPINVLYFDDSSNVIYGKIPNMVVRS

SEQ ID NO: 32432 - protein, 35 aa, Artificial Sequence
  GFR-binding peptide
  MOD_RES (1), (33), (35): Xaa is C or S
XVPARLSPINILYFDAANNVVYGKIPDMVVEAXGX

SEQ ID NO: 32433 - protein, 37 aa, Artificial Sequence
  GFR-binding peptide
  MOD_RES (3), (4), (36): Xaa is C or S
KPXXAPTQLSPINVLYFDDSSNVIYGKIPNMVVRAXG

SEQ ID NO: 32434 - protein, 37 aa, Artificial Sequence
  GFR-binding peptide
  MOD_RES (1), (2), (37): Xaa is C or S
  MOD_RES (16), (17), (18), (19), (20): Xaa is A or G
  MOD_RES (21), (22), (23), (24): Xaa is A or G or is absent
XXVPTKLSPINVLYFXXXXXXXXXYGKIPEGMSVAEX

SEQ ID NO: 32435 - protein, 33 aa, Artificial Sequence
  GFR-binding peptide
  MOD_RES (1), (1): Xaa is C or S
  MOD_RES (15), (16), (17), (18), (19): Xaa is A or G
  MOD_RES (20), (21), (22), (23): Xaa is A or G or is absent
XVPTRLSPINILYFXXXXXXXXXYGKIPDMVVE

SEQ ID NO: 32436 - protein, 39 aa, Artificial Sequence
  GFR-binding peptide
  MOD_RES (5), (6), (37), (39): Xaa is C or S
VPSTXXAPVKTSPINMLYFDNGRVLLYGKIPMIVEEXGX

SEQ ID NO: 32437 - protein, 34 aa, Artificial Sequence
  GFR-binding peptide
  MOD_RES (3), (4): Xaa is C or S
KAXXAPTKLSPINVLYFDSSNNVIYGKIPNMVVK

SEQ ID NO: 32438 - protein, 37 aa, Artificial Sequence
  GFR-binding peptide
  MOD_RES (1), (35), (37): Xaa is C or S
  MOD_RES (15), (16), (17), (18), (19): Xaa is A or G
  MOD_RES (20), (21), (22), (23): Xaa is A or G or is absent
XVPARLSPINILYFXXXXXXXXXYGKIPDMVVEAXGX

SEQ ID NO: 32439 - protein, 42 aa, Artificial Sequence
  GFR-binding peptide
  MOD_RES (6), (7), (39), (41): Xaa is C or S
YVPKPXXAPTKLSPINVLYFDDSSNVIYGKIPNMVVRSXGXH

SEQ ID NO: 32440 - protein, 35 aa, Artificial Sequence
  GFR-binding peptide
  MOD_RES (1), (1): Xaa is C or S
  MOD_RES (15), (16), (17), (18), (19): Xaa is A or G
  MOD_RES (20), (21), (22), (23): Xaa is A or G or is absent
XVPTKLSPINVLYFXXXXXXXXXYGKIPEGMSVAE

SEQ ID NO: 32441 - protein, 36 aa, Artificial Sequence
  GFR-binding peptide
  MOD_RES (2), (3), (35): Xaa is C or S
TXXVPTRLSPINILYFDSANNVVYGKIPDMVVESXG

SEQ ID NO: 32442 - protein, 38 aa, Artificial Sequence
  GFR-binding peptide
  MOD_RES (6), (7): Xaa is C or S
SIPKAXXVPTELSPINMLYFDEYDKVVYGKIPEMVVEG

SEQ ID NO: 32443 - protein, 38 aa, Artificial Sequence
  GFR-binding peptide
  MOD_RES (1), (2), (36), (38): Xaa is C or S
  MOD_RES (16), (17), (18), (19), (20): Xaa is A or G
  MOD_RES (21), (22), (23), (24): Xaa is A or G or is absent
XXVPTELSPINMLYFXXXXXXXXXYGKIPEMVVEGXGX

SEQ ID NO: 32444 - protein, 36 aa, Artificial Sequence
  GFR-binding peptide
  MOD_RES (1), (2), (36): Xaa is C or S
  MOD_RES (16), (17), (18), (19), (20): Xaa is A or G
  MOD_RES (21), (22), (23), (24): Xaa is A or G or is absent
XXAPTQLSPINVLYFXXXXXXXXXYGKIPNMVVRAX

SEQ ID NO: 32445 - protein, 36 aa, Artificial Sequence
  GFR-binding peptide
  MOD_RES (5), (6): Xaa is C or S
VPKAXXAPTKLSPINVLYFDSSNNVIYGKIPNMVVK

SEQ ID NO: 32446 - protein, 43 aa, Artificial Sequence
  GFR-binding peptide
  MOD_RES (6), (7), (41), (43): Xaa is C or S
  MOD_RES (21), (22), (23), (24), (25): Xaa is A or G
  MOD_RES (26), (27), (28), (29): Xaa is A or G or is absent
TVPKPXXAPTQLSPINVLYFXXXXXXXXXYGKIPNMVVRAXGX

SEQ ID NO: 32447 - protein, 37 aa, Artificial Sequence
  GFR-binding peptide
  MOD_RES (4), (5): Xaa is C or S
  MOD_RES (19), (20), (21), (22), (23): Xaa is A or G
  MOD_RES (24), (25), (26), (27): Xaa is A or G or is absent
PKAXXAPTKLSPINVLYFXXXXXXXXXYGKIPNMVVK

SEQ ID NO: 32448 - protein, 35 aa, Artificial Sequence
  GFR-binding peptide
  MOD_RES (1), (2): Xaa is C or S
  MOD_RES (16), (17), (18), (19), (20): Xaa is A or G
  MOD_RES (21), (22), (23), (24): Xaa is A or G or is absent
XXAPTKLSPINVLYFXXXXXXXXXYGKIPNMVVKA

SEQ ID NO: 32449 - protein, 31 aa, Artificial Sequence
  GFR-binding peptide
APTKLSPINVLYFDSSNNVIYGKIPNMVVKA

SEQ ID NO: 32450 - protein, 41 aa, Artificial Sequence
  GFR-binding peptide
  MOD_RES (3), (4), (38), (40): Xaa is C or S
  MOD_RES (18), (19), (20), (21), (22): Xaa is A or G
  MOD_RES (23), (24), (25), (26): Xaa is A or G or is absent
KAXXVPTELSPINMLYFXXXXXXXXXYGKIPEMVVEGXGXR

SEQ ID NO: 32451 - protein, 40 aa, Artificial Sequence
  GFR-binding peptide
  MOD_RES (5), (6), (38), (40): Xaa is C or S
VPKPXXAPTQLSPINVLYFDDSSNVIYGKIPNMVVRAXGX

SEQ ID NO: 32452 - protein, 37 aa, Artificial Sequence
  GFR-binding peptide
  MOD_RES (4), (5), (37): Xaa is C or S
PKPXXAPTKLSPINVLYFDDSSNVIYGKIPNMVVRSX

SEQ ID NO: 32453 - protein, 37 aa, Artificial Sequence
  GFR-binding peptide
  MOD_RES (6), (7): Xaa is C or S
AAPASXXVPARLSPINILYFDAANNVVYGKIPDMVVE

SEQ ID NO: 32454 - protein, 34 aa, Artificial Sequence
  GFR-binding peptide
  MOD_RES (2), (3), (34): Xaa is C or S
TXXAPVKTSPINMLYFDNGRVLLYGKIPMIVEEX
